United States Patent Application Publication US 2005/0228172 A9 - sequence listing, part 128

SEQ ID NO: 599507 - DNA, 617 bp, Homo sapiens
tctaattaaaaaaatgcaaaagatcttaatagatgtttgtcaaaaagtgatacaaaaatggctaactggaacataaaaatatgttctacattactaatcactaaggaaatgaaaatccaaaccacaatgaggtaccgcctcactcccatttagaatggctataataaaaataaataaataaataaaacaagtactaatgaggatataaaatgagggaatgtatacattgttggtggaattgtaaattagtatggccactatagaaaatactatggaggtttctgaaagaaattaaaaatagatgtattacatgatccagcaattttactgctgcatgtatatacaaaagaaaggatatcactgtgtcaaaaagatatttgcatttccatgttagttacagaactagttataatagcttatatatggaatcaattcaaatgtacagcaacagataaatggataaggaaaatgtactatatakgcacagtgaaatactattcagctataagaaaggataaaattctgtcagttaaaagagcatggatgaaccttgagcataccatgttaagtaaaataagccacatagagaaacacaaatactttatgaccttattatc

SEQ ID NO: 599508 - DNA, 544 bp, Homo sapiens
ctaacactccaaaagacattcagatattcttgcagctgaggacttgactgctctgtagagggatggcagagcagcagccaccagctttaagagctttaagctcctcctcttatagggaaaggccacccccacacaamccccctaacttcataggctctggctgttaggtgcacctgggggactgtcttcctcccatctcattagctctccaagacagttcagctcaatctaaaacctaccctaagatggcggtatgtagactctcctccattctcccagcgcagtgtgacttctggagagtgctcccccatcatcttacctcaaatgatgtgaaaagagctggttcccgtgtagttagatgttcagtgacctaacaggcccagcatgcgcaggcctggccccacagcctggcacctctctcctacctggccttcacttcggccttttctcttctgtcaccaatgtcaggtgatggtcaccagtgccacactctcatgagcttggtaagtagcaggggtgtaaaccccaacagatttcctgtgac

SEQ ID NO: 599509 - DNA, 544 bp, Homo sapiens
ctaacactccaaaagacattcagatattcttgcagctgaggacttgactgctctgtagagggatggcagagcagcagccaccagctttaagagctttaagctcctcctcttatagggaaaggccacccccacacaaaccccctaacttcataggctctggctgttaggtgcacctgggggactgtcttcctcccatctcattagctctccaagacagttcagctcaatctaaaacctaccctaagatggcggtatgtagactctcctccattctcccagcgcagtgtgacttctggagagtgctcccccatcrtcttacctcaaatgatgtgaaaagagctggttcccgtgtagttagatgttcagtgacctaacaggcccagcatgcgcaggcctggccccacagcctggcacctctctcctacctggccttcacttcggccttttctcttctgtcaccaatgtcaggtgatggtcaccagtgccacactctcatgagcttggtaagtagcaggggtgtaaaccccaacagatttcctgtgac

SEQ ID NO: 599510 - DNA, 544 bp, Homo sapiens
ctaacactccaaaagacattcagatattcttgcagctgaggacttgactgctctgtagagggatggcagagcagcagccaccagctttaagagctttaagctcctcctcttatagggaaaggccacccccacacaaaccccctaacttcataggctctggctgttaggtgcacctgggggactgtcttcctcccatctcattagctctccaagacagttcagctcaatctaaaacctaccctaagatggcggtatgtagactctcctccattctcccagcgcagtgtgacttctggagagtgctcccccatcatcttacctcaaatgatgtgaaaagagctggttcccgkgtagttagatgttcagtgacctaacaggcccagcatgcgcaggcctggccccacagcctggcacctctctcctacctggccttcacttcggccttttctcttctgtcaccaatgtcaggtgatggtcaccagtgccacactctcatgagcttggtaagtagcaggggtgtaaaccccaacagatttcctgtgac

SEQ ID NO: 599511 - DNA, 640 bp, Homo sapiens
acaagtgagtccctagggtctccttaacctccctcagctcctccacatgggtccctgagggaaagtgagcagcctcctaayccccttgatagggttccagtcctgcaggtctggactctctcattttatgctaccataggggatgacaatgcaaccccaggctccttttttgccatccctcaatgccaggccaggcccagagccatttgctgatacagcccaggggatgctcaaggcccacctcggcacagtcacctgtagtgtactgagatgagcaaggaggtgcaagtagacacaaatccccatggcttggcctcagctatgttccacaggcccagggcctcgcagatgagctcacagccctccttcaggaatcctgcagatcacaccctcagggagcagtgctcagatgagcaggcaggctccacatcccccaccccatgacgctctgttccactttgcaggcttctgcattggccagtccccactgctttctggtgagatgtccgagttgaagtgagtgttgaatgccacacagctgatggagctcactgccttgcacatgtcgtaaaacacctcctggttacaagggtcagctgtggacacacagcttgatgggaggtagccccactccaccatc

SEQ ID NO: 599512 - DNA, 640 bp, Homo sapiens
acaagtgagtccctagggtctccttaacctccctcagctcctccacatgggtccctgagggaaagtgagcagcctcctaatccccttgatagggttccagtcctgcaggtctggactctctcattttatgctaccataggggatgacaatgsaaccccaggctccttttttgccatccctcaatgccaggccaggcccagagccatttgctgatacagcccaggggatgctcaaggcccacctcggcacagtcacctgtagtgtactgagatgagcaaggaggtgcaagtagacacaaatccccatggcttggcctcagctatgttccacaggcccagggcctcgcagatgagctcacagccctccttcaggaatcctgcagatcacaccctcagggagcagtgctcagatgagcaggcaggctccacatcccccaccccatgacgctctgttccactttgcaggcttctgcattggccagtccccactgctttctggtgagatgtccgagttgaagtgagtgttgaatgccacacagctgatggagctcactgccttgcacatgtcgtaaaacacctcctggttacaagggtcagctgtggacacacagcttgatgggaggtagccccactccaccatc

SEQ ID NO: 599513 - DNA, 502 bp, Homo sapiens
gcgttcacactgaaagccaaagtcctcccagaatcttgtgagaacctaaatgatctgaatagtttgtcattgcttttggggatctgggaaaatctctgcacatttctggagaccgctgttatgccawttttaataaatctgttgtgcttcaattcagaagtgtgtgaagggagttgtggaggaattggcatttgggttagaaattccaggaacaccagagacagatgacacctgttttctgcttcataatgtcaagttttacgacggctaaaacctaattctacaagaaaattagactgaaaaactttataggcaaaaattatcttattaaataggaaaatctaagtattttattttaaaatttcctttttcttagtaggacctaatcatagaaatgtaaactctatatgccaacagcctctactgtaggatggtttattgtatgtactcattctactgatttcttacaaaaactttttccgtaagggaaattagaatattg

SEQ ID NO: 599514 - DNA, 502 bp, Homo sapiens
gcgttcacactgaaagccaaagtcctcccagaatcttgtgagaacctaaatgatctgaatagtttgtcattgcttttggggatctgggaaaatctctgcacatttctggagaccgctgttatgccaattttaataaatctgttgtgcttcaattcagaagtgtgtgargggagttgtggaggaattggcatttgggttagaaattccaggaacaccagagacagatgacacctgttttctgcttcataatgtcaagttttacgacggctaaaacctaattctacaagaaaattagactgaaaaactttataggcaaaaattatcttattaaataggaaaatctaagtattttattttaaaatttcctttttcttagtaggacctaatcatagaaatgtaaactctatatgccaacagcctctactgtaggatggtttattgtatgtactcattctactgatttcttacaaaaactttttccgtaagggaaattagaatattg

SEQ ID NO: 599515 - DNA, 502 bp, Homo sapiens
gcgttcacactgaaagccaaagtcctcccagaatcttgtgagaacctaaatgatctgaatagtttgtcattgcttttggggatctgggaaaatctctgcacatttctggagaccgctgttatgccaattttaataaatctgttgtgcttcaattcagaagtgtgtgaagggagttgtggaggaattggcatttgggttagaaattccaggaacaccagagacagatgacacctgttttctgcttcataatgtcaagttttacgacggctaaaacctaattctacaagaaaattagactgaaaaactttataggcaaaaattatcttattaaataggaaartctaagtattttattttaaaatttcctttttcttagtaggacctaatcatagaaatgtaaactctatatgccaacagcctctactgtaggatggtttattgtatgtactcattctactgatttcttacaaaaactttttccgtaagggaaattagaatattg

SEQ ID NO: 599516 - DNA, 502 bp, Homo sapiens
gcgttcacactgaaagccaaagtcctcccagaatcttgtgagaacctaaatgatctgaatagtttgtcattgcttttggggatctgggaaaatctctgcacatttctggagaccgctgttatgccaattttaataaatctgttgtgcttcaattcagaagtgtgtgaagggagttgtggaggaattggcatttgggttagaaattccaggaacaccagagacagatgacacctgttttctgcttcataatgtcaagttttacgacggctaaaacctaattctacaagaaaattagactgaaaaactttataggcaaaaattatcttattaaataggaaaatctaagtattttattttaaaatttcctttttcttagtaggacctaatcatagaaatgtaaactctatatgccaacagcctctactgtaggatggtttattgtatgtactcattytactgatttcttacaaaaactttttccgtaagggaaattagaatattg

SEQ ID NO: 599517 - DNA, 515 bp, Homo sapiens
tttgactaatagtacaatttatttccaatttttattttatatgtcaatgttttatactgtatttacaatatttatagttaccatatttagaaatgtaagacttttcaattaaaagctagattacagccttatcgttttgtgtaagaaaagcagcaatgcatcagtagcataatttaaaactttctctagtattacttaaatgcttattccttaaaactttctcatcacagctctttgtaataattataatgtgttttctctgaaatgttgttgccctaactgtatccaaataattcaaaattcatacttttcatagattcacaggaagagttaaaaattgtagttacctgggattctttttcatttggacactatgtttattcaggattttatggattaaagtttctcttaattatgttttataattwtatgtttctgtattttttagagtaggctgtctcacatcagttaattgtgtttttactttctacctatttattatgattttgaatttc

SEQ ID NO: 599518 - DNA, 451 bp, Homo sapiens
gaaaaaagttaattgtcttctttgtttttaccaccaggtgacatctgcattagaaattctgtttcctagatcaggaacataggagtatctgcatagacccccagccaatgaggaaacccgaggacagcttaaggccttgggattcacatctgagtagacgtacttggtccgcaactcacaactttttattccaccaaccgtgacctgggtatgaacatgacagacccaccagggttcctgtgtcttaaaacctgcccctgtgaggaaaagccccctcctttcctgctccccttgcaacacagggtaatggtaggcagggtcgggttgcccagattagatgacacaggtggcctggcatggacggacctgccctgggctacactgtgttacctgtgggtgcmtcttgtcgaatggccagtggtatcaaggatgtaggctgagccagtatgta

SEQ ID NO: 599519 - DNA, 537 bp, Homo sapiens
ctgggtatgaacatgacagacccaccagggttcctgtgtcttaaaacctgcccctgtgaggaaaagccccctcctttcctgctccccttgcaacacagggtaatggtaggcagggtcgggttgcccagattagatgacacaggtggcctggcatggacggacctgccctgggctacactgtgttacctgtgggtgcatcttgtcgaatggccagtggtatcaaggatgtaggctgagccagtatgtatactgtcagaaaaggctctcactttgagcctttctcaggcaacagcttgggaatataacatacaatgagaacacagtgccctctcaagcatctcccaagaagttagctagatacagggctgtctctagaatgtgggtgtctggttcccaaagttcyaaattctgttaggttttctcacaagggaagtctgttaacttcttcaaggttttatcccctgagcccttttcctccataaatctatgcaaagtccctgctgggctgctgattgctcaccctcctctcccatgtca

SEQ ID NO: 599520 - DNA, 598 bp, Homo sapiens
ggacttaattacctctgacctgctaaggccattacactggggattaaggttctggtatgtgaacatggtgggaaatcacatagtctwctgcaacttccaaagttatatttctaaaacagctattattttcctcttacttgctctgtcctgtgcgtcctctctcaatctctctgtctccctttctctctttttctctgcatatgtctgtctatctctttcatttttcatctctgtattgtaatcctcaagatgaggaagtgatctgcagtgtcctaagatgctctaggcacagacccacatgatagagaactgaggagatgcccaggccaatcgagaggaaggaactcgggctctcagttcacactgaatcgtgccagtttccatgaggcagatagaaggctgatctctcctcaaatccagcttcagttgaaatcacagccccagcctcgtaagagaccttgaggcagaggcacccaactaagctatatcgagattctggttcacaaaagttgtgagatagtatttgttgtcaacatgtgctaaaattcagggaaattttgtcagagaggggcaaatgactaatctcttctttcagtcc

SEQ ID NO: 599521 - DNA, 598 bp, Homo sapiens
ggacttaattacctctgacctgctaaggccattacactggggattaaggttctggtatgtgaacatggtgggaaatcacatagtctactgcaacttccaaagttatatttctaaaacagctattattttcctcttacttgctctgtcctgtgygtcctctctcaatctctctgtctccctttctctctttttctctgcatatgtctgtctatctctttcatttttcatctctgtattgtaatcctcaagatgaggaagtgatctgcagtgtcctaagatgctctaggcacagacccacatgatagagaactgaggagatgcccaggccaatcgagaggaaggaactcgggctctcagttcacactgaatcgtgccagtttccatgaggcagatagaaggctgatctctcctcaaatccagcttcagttgaaatcacagccccagcctcgtaagagaccttgaggcagaggcacccaactaagctatatcgagattctggttcacaaaagttgtgagatagtatttgttgtcaacatgtgctaaaattcagggaaattttgtcagagaggggcaaatgactaatctcttctttcagtcc

SEQ ID NO: 599522 - DNA, 597 bp, Homo sapiens
ccagctgctccagtaaagcccagcgagtcaagaaacacggggtctgccgccacctagaggcctccactagccctgaagtcccaggtggaagcatcacaaaacaggcacctgcactggggaattctcaaggcagtggctattcarggacccctgggaaagggagcagtatctgaagactccaagggccataaaagtaacctcggaaacctcccttgattcctattttcctcagcctctttgagtgtgctgtgcactcattaaacattttaacagcattcagagacattattttcttccacttctgaatgaggaactcaaggacagcccaaaaaactagtattttttctgggccccacactccagagcccagtgcattgtcacattctgctttattccaagtcctcatctgcccacatctctaggcctctctcttctctgaaggacctctagaacctgaaaagcctcttcccagagtctcaaagcacagtgagttaccaatgaagagccaaggggagcagacacttatgagtatctagaattcttggtattattccttttgagtacccctatttatgagagagaaaatgaaggttttct

SEQ ID NO: 599523 - DNA, 597 bp, Homo sapiens
ccagctgctccagtaaagcccagcgagtcaagaaacacggggtctgccgccacctagaggcctccactagccctgaagtcccaggtggaagcatcacaaaacaggcacctgcactggggaattctcaaggcagtggctattcagggacccctgggaaarggagcagtatctgaagactccaagggccataaaagtaacctcggaaacctcccttgattcctattttcctcagcctctttgagtgtgctgtgcactcattaaacattttaacagcattcagagacattattttcttccacttctgaatgaggaactcaaggacagcccaaaaaactagtattttttctgggccccacactccagagcccagtgcattgtcacattctgctttattccaagtcctcatctgcccacatctctaggcctctctcttctctgaaggacctctagaacctgaaaagcctcttcccagagtctcaaagcacagtgagttaccaatgaagagccaaggggagcagacacttatgagtatctagaattcttggtattattccttttgagtacccctatttatgagagagaaaatgaaggttttct

SEQ ID NO: 599524 - DNA, 402 bp, Homo sapiens
ttcagggacccctgggaaagggagcagtatctgaagactccaagggccataaaagtaacctcggaaacctcccttgattcctattttcctcagcctctttgagtgtgctgtgcactcattaaacattttaacagcattcagagacaktattttcttccacttctgaatgaggaactcaaggacagcccaaaaaactagtattttttctgggccccacactccagagcccagtgcattgtcacattctgctttattccaagtcctcatctgcccacatctctaggcctctctcttctctgaaggacctctagaacctgaaaagcctcttcccagagtctcaaagcacagtgagttaccaatgaagagccaaggggagcagacacttatgagtatctagaattc

SEQ ID NO: 599525 - DNA, 571 bp, Homo sapiens
tcatcgcatgctgtcagctcctggtcatgtagctgggggagtggatgcctctgcctcatggcaaagctgcctcttctatttcttcccgttttgtcacttctctggtttcctcttctctaacctcacctccatgatctccaccttagaagcctgtgtgtgtgtgtgtgtgtggtgtgtttgtgtgttcatggctgcacacctatgtgagaataaggaagggtagaaagcccaggtagaaagtagaccacagggttttccaggacttaggagcactcatttccaaagcaaacctgatgggtggggtgcatgcaaggccttggaagctggmtccctccctaatactctgtgctcttcccaatttctgggatatggaccagtctttgccttttttgggggcctcagtcttcctgttgtaaaatggataggtggtcacaaaactgcataaacacatgctcagtgaagacagggtgtcatgctcaataccagatagaatattgggatggggagagtttgagcagacttatgtgtccacggtagctcaggcctctgaacagggcaaatgcaggtgaac

SEQ ID NO: 599526 - DNA, 571 bp, Homo sapiens
tcatcgcatgctgtcagctcctggtcatgtagctgggggagtggatgcctctgcctcatggcaaagctgcctcttctatttcttcccgttttgtcacttctctggtttcctcttctctaacctcacctccatgatctccaccttagaagcctgtgtgtgtgtgtgtgtgtggtgtgtttgtgtgttcatggctgcacacctatgtgagaataaggaagggtagaaagcccaggtagaaagtagaccacagggttttccaggacttaggagcactcatttccaaagcaaacctgatgggtggggtgcatgcaaggccttggaagctggatccctycctaatactctgtgctcttcccaatttctgggatatggaccagtctttgccttttttgggggcctcagtcttcctgttgtaaaatggataggtggtcacaaaactgcataaacacatgctcagtgaagacagggtgtcatgctcaataccagatagaatattgggatggggagagtttgagcagacttatgtgtccacggtagctcaggcctctgaacagggcaaatgcaggtgaac

SEQ ID NO: 599527 - DNA, 571 bp, Homo sapiens
tcatcgcatgctgtcagctcctggtcatgtagctgggggagtggatgcctctgcctcatggcaaagctgcctcttctatttcttcccgttttgtcacttctctggtttcctcttctctaacctcacctccatgatctccaccttagaagcctgtgtgtgtgtgtgtgtgtggtgtgtttgtgtgttcatggctgcacacctatgtgagaataaggaagggtagaaagcccaggtagaaagtagaccacagggttttccaggacttaggagcactcatttccaaagcaaacctgatgggtggggtgcatgcaaggccttggaagctggatccctccctaatactctgtgctcttcccaatttctgggatatggaccagtctttgcyttttttgggggcctcagtcttcctgttgtaaaatggataggtggtcacaaaactgcataaacacatgctcagtgaagacagggtgtcatgctcaataccagatagaatattgggatggggagagtttgagcagacttatgtgtccacggtagctcaggcctctgaacagggcaaatgcaggtgaac

SEQ ID NO: 599528 - DNA, 603 bp, Homo sapiens
aaagctatctatggtagtaatgcaaaaataggcacaaagaaaactagaaaaactcgagagtccaactcagactcacacatttggacattttgtatattacaaaacaggcacagaagaggagtgaagacagtcttctcggtaaatagccttgagtcaaccagttatttatgtgagaaaaaacactcctatcttatattattaacaaattccaatgaaaagtggattttaaattttaaggtcaaagctgaaaacaatatttctagtagataacatagataaatatgtccatgactggcacaggcccagatttcttgggacacaaaatgcattaattctcaagacaaaaatatgacaaattggactttattasaattaaaaccttctcttcataaaaaaaaaccttcaggagagctgaaaggcaagaacaaagtggaaatcaacatttgtcatatattgatgtggcaaaagccttttatctagtttatttaactaaatcccatcaattaataaacaaagatgcaatacattgaacaaaattggcaaacatgtgactaggagttccacatacagaaccgaagggccaacaagtagatgaacatatcc

SEQ ID NO: 599529 - DNA, 603 bp, Homo sapiens
aaagctatctatggtagtaatgcaaaaataggcacaaagaaaactagaaaaactcgagagtccaactcagactcacacatttggacattttgtatattacaaaacaggcacagaagaggagtgaagacagtcttctcggtaaatagccttgagtcaaccagttatttatgtgagaaaaaacactcctatcttatattattaacaaattccaatgaaaagtggattttaaattttaaggtcaaagctgaaaacaatatttctagtagataacatagataaatatgtccatgactggcacaggcccagatttcttgggacacaaaatgcattaattctcaagacaaaaatatgacaaattggactttattacaattaaaaccttctcttcataaaaaaaaascttcaggagagctgaaaggcaagaacaaagtggaaatcaacatttgtcatatattgatgtggcaaaagccttttatctagtttatttaactaaatcccatcaattaataaacaaagatgcaatacattgaacaaaattggcaaacatgtgactaggagttccacatacagaaccgaagggccaacaagtagatgaacatatcc

SEQ ID NO: 599530 - DNA, 681 bp, Homo sapiens
aatatgtccatgactggcacaggcccagatttcttgggacacaaaatgcattaattctcaagacaaaaatatgacaaattggactttattacaattaaaaccttctcttcataaaaaaaaaccttcaggagagctgaaaggcaagaacaaagtggaaatcaacatttgtcatatattgatgtggcaaaagccttttatctagtttatttaactaaatcccatcaattaataaacaaagatgcaatacattgaacaaaattgrcaaacatgtgactaggagttccacatacagaaccgaagggccaacaagtagatgaacatatccacatccttatgcatcagaacaatgcatatgaaaactacaattgaataccactatgcaatcattcacatttttgaaaactgacaaaattaagtactagtgatgatgtcaagcaactggaactttcttataccattctgtgtgcaaactgttataacggcattcaaaacctcttgagtagtaactccttacatacacgatgtacataagcacactctaggacccagcaactctgctactaggtatatacacccaatagaaatgccagcatattttccaatgcagacaaatgctctaagcagcattatttggtacttttccaaactgaaaaaaactcaaatgtgcatcagtaataaaat

SEQ ID NO: 599531 - DNA, 634 bp, Homo sapiens
actctgctactaggtatatacacccaatagaaatgccagcatattttccaatgcagacaaatgctctaagcagcattatttggtacttttccaaactgaaaaaaactcaaatgtgcatcagtaataaaataactaaataaaacagctacatattcctttataaggggacattatacagatataaaattaattggagacatattaaaatatacaaaaatctaacaaatacaatttaattagatttaaaagtcctatccacagcaatcagccaatagaaaagaaaaaggcatacaaatagaaaaaaaaattgaattctctttctccatttgcattatgagtcactacgtagacaatgctaaagtctttccaaaactccttttggagaaaacttgaaaagcctcctgaaatggataagcaagtaaagttttaggacacaaaaccaatgtacaaaaaccagtagtatttctatgcatcaacaactttgaattcctgaacatcttctggttttattgcattttcaattttttccctccattaactatacattttttcttttttcagctaaactaatttattcttctgtrtaatttcaccttgttaataaaccccaggccaaaaagtgggaataaagtat

SEQ ID NO: 599532 - DNA, 542 bp, Homo sapiens
ttgggttattgcaacctccaccccctaggttcaagcgattctcatgcgtcagcctcccaagtagctgggactacaagcacacaccaccaattggctaatttttgtgtttttagtagatatgaggttttgccatggtgcccayagtggtcgcaaactcctcgtctcaagtgattcacccacctcggcctcccaaaatgctgggattacaggtttgagtcaatacacctgaccttattttttttttttaaattataggtaaatttaaattactcagaaatagtcagaattaaccgttggataccctgaatctttttcccatgcataagcctttctaatctttctattcaaatttaggatttgattcggttctagtgttttaaaacctgcttttttccttcaaagaaatgcagaccatctctcaggccaatggacatcacggattttctgatgcttagaggctgactggttgtttatctatgacctcccataatgtacttaagtaacaccctcttgatgatggggttaagttgttgaaattacct

SEQ ID NO: 599533 - DNA, 533 bp, Homo sapiens
acctccaccccctaggttcaagcgattctcatgcgtcagcctcccaagtagctgggactacaagcacacaccaccaattggctaatttttgtgtttttagtagatatgaggttttgccatggtgcccacagtggtcgcaaactcctcgtctcaagtgattcacccacctcggcctcccaaaatgctgggattacaggtttgagtcaatacacctgaccttawtttttttttttaaattataggtaaatttaaattactcagaaatagtcagaattaaccgttggataccctgaatctttttcccatgcataagcctttctaatctttctattcaaatttaggatttgattcggttctagtgttttaaaacctgcttttttccttcaaagaaatgcagaccatctctcaggccaatggacatcacggattttctgatgcttagaggctgactggttgtttatctatgacctcccataatgtacttaagtaacaccctcttgatgatggggttaagttgttgaaattaccttgtc

SEQ ID NO: 599534 - DNA, 536 bp, Homo sapiens
atttctcacaggatcctgattcctataagaaacacatcaattcctataattcggcatatttcctctcaatcatttttctacacattttaaattttgagttctaatgtataagtttggttatactttttaatgtgtgcctttcattaatttgtttaatgttatatcatctcataagcacttctcyatgtgataaaaaattctttgtacatcccatttttaatacatatatgtagctccaaagaaaaggcatatcttgtttactcttctaatcccgtagtattcgaaaactttgtttttccaattctttgagataataaactggttagggttagtattttggtccccatttaaattttctaagagttgcctttctacaagtggctaagtgactgttacaaggagaagagccctcctgaaggggtgtgccatggggttgaggcctccctgcaaagtgccttccttgtggcagatccccatgtgtctttctaaaatcagcacagtcagactgagagtgattggaattctgcagctgtgag

SEQ ID NO: 599535 - DNA, 553 bp, Homo sapiens
ggtactgagaaatagttggattttgattcattattttttctgaatattagtacttggagcttcactgytaataatgccaataggctacacaaattttctcttcagtaaaatggcaaaacagaaggcattcaatttttaaatataagatgcaattttattacttttttctatataaaagacacaaaatttagaccaataaaaacagaatttcttccatgaaatttcaagagctgagctgagctgggaagagctaacctgcttaatatcagagttttaaattaaagcaagaggcccacatcaaagaaatagttatgcctttttgtcttcctttctgtgattgtgttaaacaacaggcaacattagatcaagcaccgactcctcattgttccattttttcctcatggaaaagcaccaggaaagggtcagatggatcagcacaaacatggggcactgtctcactgccgaggtggcaccctcataaaaaacaggcccgcaattttgtggaaaagggggcaggagagcgtagaggagaatgtatgagcaagattaaaga

SEQ ID NO: 599536 - DNA, 638 bp, Homo sapiens
aaattttaaactcttttccacagaagtttttaaattacagacaataaaatagaaagtttataaaaaagaaaatggtactgagaaatagttggattttgattcattattttttctgaatattagtacttggagcttcactgctaataatgccaataggctacacarattttctcttcagtaaaatggcaaaacagaaggcattcaatttttaaatataagatgcaattttattacttttttctatataaaagacacaaaatttagaccaataaaaacagaatttcttccatgaaatttcaagagctgagctgagctgggaagagctaacctgcttaatatcagagttttaaattaaagcaagaggcccacatcaaagaaatagttatgcctttttgtcttcctttctgtgattgtgttaaacaacaggcaacattagatcaagcaccgactcctcattgttccattttttcctcatggaaaagcaccaggaaagggtcagatggatcagcacaaacatggggcactgtctcactgccgaggtggcaccctcataaaaaacaggcccgcaattttgtggaaaagggggcaggagagcgtagaggagaatgtatgagcaagattaaagagaattgaatatt

SEQ ID NO: 599537 - DNA, 545 bp, Homo sapiens
agaattgaatattaataggaatctataaaaattattatcaaagttccatttcttctccagaaacagggatctgaacaaaagtttctgaagaaggcctcaaccaaaaggccctcaggaaggtgcccctgaatctagatgcctggactgggaatgaaaatctacatgtgagcctcagtggccaagatttccggtattgtttatttcagccccttagagactgcaaagcgctgacatttacatgcttctcctamatgcacatgtcagcagcagtgtgataaccaatgctttcaaagatataatgtgggtatgagagtttctggcaaaaatttagataatcttatcttttcaacctcaaataacaatatatgctgagaaacttcaaaggcatgtacctccacaaataatttttcaggaaagaataaagaagcacagctgtagaataaaaattaggctggaagttgatgctacctgtgggaattgctaataatggaagcacaggttgttagaatttaaagtgtctgattggtgaatataatgtcacagca

SEQ ID NO: 599538 - DNA, 545 bp, Homo sapiens
agaattgaatattaataggaatctataaaaattattatcaaagttccatttcttctccagaaacagggatctgaacaaaagtttctgaagaaggcctcaaccaaaaggccctcaggaaggtgcccctgaatctagatgcctggactgggaatgaaaatctacatgtgagcctcagtggccaagatttccggtattgtttatttcagccccttagagactgcaaagcgctgacatttacatgcttctcctacatgcacatgtcagcagcagtgtrataaccaatgctttcaaagatataatgtgggtatgagagtttctggcaaaaatttagataatcttatcttttcaacctcaaataacaatatatgctgagaaacttcaaaggcatgtacctccacaaataatttttcaggaaagaataaagaagcacagctgtagaataaaaattaggctggaagttgatgctacctgtgggaattgctaataatggaagcacaggttgttagaatttaaagtgtctgattggtgaatataatgtcacagca

SEQ ID NO: 599539 - DNA, 545 bp, Homo sapiens
agaattgaatattaataggaatctataaaaattattatcaaagttccatttcttctccagaaacagggatctgaacaaaagtttctgaagaaggcctcaaccaaaaggccctcaggaaggtgcccctgaatctagatgcctggactgggaatgaaaatctacatgtgagcctcagtggccaagatttccggtattgtttatttcagccccttagagactgcaaagcgctgacatttacatgcttctcctacatgcacatgtcagcagcagtgtgayaaccaatgctttcaaagatataatgtgggtatgagagtttctggcaaaaatttagataatcttatcttttcaacctcaaataacaatatatgctgagaaacttcaaaggcatgtacctccacaaataatttttcaggaaagaataaagaagcacagctgtagaataaaaattaggctggaagttgatgctacctgtgggaattgctaataatggaagcacaggttgttagaatttaaagtgtctgattggtgaatataatgtcacagca

SEQ ID NO: 599540 - DNA, 546 bp, Homo sapiens
cttcgctccaggtagggtggcaggtgtctatccgaaggcaggctgacttcagaggttgtaaacacaagccacatatgcggaacaaaccaaacaacatctctaaaacacctgtgtgctaagattattattttctttctctaaagccaaaaaaaggtcaaacaaagaaaaaagaaaccgataatgaggtctggtcttgttctttatgtaaatagcatgtactttaaattcaacctagtagatcaccaggctaatgatatcaagatatctcaaagtaggtgaatcataaagaccaatggctacaggcatagaaagcaaggtatagagctgaatgagtaaaaatctatccagcccctattaggctatgctcagaatgcatggaccaataataattgctcagtagatttatatttttttctgtggaagaaagtatacacagcatactcctacaagactatgcattattgacaatgttaayatttcaccatatcattatttgtatttatagtcaatccgtgaggacaaagatctatattatccatgtaatag

SEQ ID NO: 599541 - DNA, 591 bp, Homo sapiens
ctcattttcctgaattgttaacagatagagcataagtacgtaatgttctttagctttctggggtgaagtcagatgctgtagcagaacacatctgccctaaactattgggttactttaaactattgctaagtgattgggatacaaaacaaggaaacttgcacatctatatgtgaaaactaatacgatatatgtataatgcaaatttaagcatttaatactttcaaactggttctttgtatcctgtgagctagaaaaataagtcaatctacttaggatttttgagtccttgtcaggaactatcaagagtctaagattttaccatatttgcaaggtaacttgtttcatggatacaggcaacagttacggataatggcaaaagtcacaagattcctgggtcagaaacaaggaactttcttatttatggcacagcaagcagcagaaacttcatgtttgcatcagtttttcttgcttcctcactsctgtggttatgcagaatggtctgggtagacttatgcagtgggtttgcatcacagtggaaaatatcaggtttcttaggaaatcccaattatttttatgggttgcaagaaaact

SEQ ID NO: 599542 - DNA, 548 bp, Homo sapiens
aatatgtaaggaattcaaacaactcaatagcacaaaaacaaatagcctaactttaaaaattgggcaaggaatctgaaaagaatacacacaaatagccaacagatatattcaacatcgctaatcatcaaggaaatgcaaattaaaaccacaatgagctatcacctcacacctattagggtggctattatcacaaaaataagaaatatcaagggttggtaaaggtgtagagaaatggaaacaattttacattgttagtgggtatgtaaattgttacaacagtactggaaaactgtatggacgttttctttaaaaattaaaaataggcctacartttgatccagcagtctcactactgggtatatatccaaatgaaatgaaatcagtctgttccaaagatatctagactcccacactcattatgacattgtttataataatcaatatatcaaaagaacctaagtgtctatcaacagatgaattgataaataacatgtggtatatgtacacaacgaaatagtatgcagtcttaaaaagaaggaaatcctatc

SEQ ID NO: 599543 - DNA, 406 bp, Homo sapiens
tctatgaacttgccaattagagaataaagattaagatttgcttttttcttgactccaaagttgtaatctaatacaatgtcttctttataaaaattaatatttattttctagagcagttttaagtttgcagaaaaatgaagaagatagtacagagttcatttttctccaagattactaacatattgcattagtatggtctatttgttacaattgaggaatcaatattgatacaattttaatcactaaagcccatagtttattttagggtttgctcattatattatgcagttatatgtattttaacaaacgcataatgccatatatctactcttgacatacatacagaatatcatagagaatagcttcactgtcytaaaaaccccctgcatcccatctgttcgtcctt

SEQ ID NO: 599544 - DNA, 526 bp, Homo sapiens
agttgctcgagattcattttatggcttatattatgggttgaattgggtcattcaaaaagataagttgaagtcctaacttcttgtatacctaaaaattcatgtgctgccttgatgtctttgagcctcatggggccccaaagttctaaccaagagctcccctgctctcaccagatataccccctacttagtgagaygggctccccactctgctagtgcccatcagctggtctacatgtactccactcggctatcaacctaacagtcttcagctgcctgccagcctgtaaaattatttaaagaaaccaatcacatggtcttacgggaaacacaggcaccccactccctggttactagaaagccttcctcccacaactcctactggttcgctctgctcccaaatgcaacctccatgtggccctgaatggtatgcagtgtttctctcactgagattatgagtgtcattaataaactgctgccaatcttacctgtccagtggagactgttatttgtctggccatcttgtatt

SEQ ID NO: 599545 - DNA, 613 bp, Homo sapiens
tggaacttttatatgctatttattgttacctctttttatgtttcttacattttctttttattcaactttggaagatacagattttttaatattatttttattctaataaagtcatggttgaaaattccacataaaaaagtgaattgaccttatatttctgaaattattaattgcttacaaaatagtattcattgacctatttatatttaagataaagaaatgcactcaatttaatttttccacatcttttattttcaaacttacagattttgttggtctaattttttataatattcagattttatttttctgtttctatgtgattcaatatcttatgtatttaacatttcaaataattatgcagattgatttgtaaaaatattttaaatcatttttagcctcagttttaatttctatatgaaattraaacagatggaatctaaaatatatttgcttcctgcaataatttgttttcaaaattgtgctctttgtctacctcctgagagttatgtttatttatctttgccataaatcttgtgtatgtgcatgttttctatctttgagtcattaattatctttttcacactctttgtctccaaaactttagacatta

SEQ ID NO: 599546 - DNA, 497 bp, Homo sapiens
attgatgagaaaagcatccagtaagacttaaaacaatctgattttgaaatcatcttctctctctgattccttttctatgctggattatgccattctgctttgctaaggacagtgtactggacaaagatacacgtgataatttctctaattttctgrcatgtggatagtatccttctacagaaattgtgcattccaggtcacattttttgtgtatgaagaaaatcactaacaaataaacacggagtccagagggccttaattttaaacacaaactaatcagatttccatttgtgttttctcataaagttattttgttaaattaaaatgccttattacttactcatagaaccaatgactatgggacatatcctgctggtcacaaaactgtaaccttactttgaggatgaaaaaggcaaaaccgggcagagaaattctcagcaggaatatttaacgtcaggctaagattcaagttgctttaataaaattaaagtttagtg

SEQ ID NO: 599547 - DNA, 386 bp, Homo sapiens
tcacctatcagaacctgagctgagtaaaattctccacctgttacagcctggatatacacttctcaaagactagcatgtatgtgccaagatgcttctgttcargttggcttgatacctgttggtaatgatcatgtctataaaacagcacacctttgtggctgagctctttcatttttaagattcttatacaaagtctggtcacaccgtcacaatctagtgattgtaagcctcaacaaatcacagcacaaatcaagtgcattttattgatgtcagtcactaggaacaccaccaaaatgcttgggcatatataatcttgcctttcgtgtattaattataatccaagaagtttgaatatacattttcccatcattatttaaaagtgttaa

SEQ ID NO: 599548 - DNA, 386 bp, Homo sapiens
tcacctatcagaacctgagctgagtaaaattctccacctgttacagcctggatatacacttctcaaagactagcatgtatgtgccaagatgcttctgttcaggttggcttgatacctgttggtaatgatcatgtctataaaacagcacacctttgtggctgagctctttcatttttaagattcttatacaaagtctggtcacaccgtcacaatctagtgattgtaagcctcaacaaatcacagcacaaatcaagtgcattttattgatgtcagtcactargaacaccaccaaaatgcttgggcatatataatcttgcctttcgtgtattaattataatccaagaagtttgaatatacattttcccatcattatttaaaagtgttaa

SEQ ID NO: 599549 - DNA, 617 bp, Homo sapiens
ttggttatttttatttgttcaatattcatttatttgttatgttttttcttttatcaattttagcattttatatttttccaataatgcatctcttctaaggtttcaaattcattgctgtttatattatctttgttaccatgatatatcaagattatcatatcatattatatcctatatactatacttattatcgtaattatataatagttatattttcttctaatctgtatattcattaaatatttaatctgttgtagtaaattctttcttgctactttgcatttacttttttgctcatcttacagcttaagttgcacaaatatttttctcagagtttcagctgtatatcagacttcttaaattactttcattttatggattatttcactaaatatttcctcttcaatgaagaattacttaatatwtatattttaacatgtggaactttttagctataaaatatttgtcttttaatttgttaatttctaatatcactgcattatggtaaatatatttttctttagtctacaattgaccattaaacaacacagtttcgaactgcataggtccacttatatgcagatgttttcaataaatatattggaataagttttgga

SEQ ID NO: 599550 - DNA, 636 bp, Homo sapiens
tcatttatttcattagttattttaaattttcttcagagattttattaagcataatattaaactgattttttatgaatcttcacatttgtcaaaaaatcgatttcacatacctaatgaaacttgtatttaaattataaaccattgaatgctgatttctcaacagttgaattgctgggtttattatattgaaacaatatttatgactgtgtttaaaacaaaatacaccattgaattatattagtactttattgcttatttacttgatgctagtatttacaattatctctaacttaaccaattttaatgtttaagagattatttttcagaaaaactgcatargtgctatttttcatgaactcttgcatatataagcatatctctgtaaatgaacgacactttgactgaacacagcgaaactggattagtatcatgttctttataaatattacagtgcattactttaattttgtttgatatttgaagtttagaagaaaagttaagggccaatttaatttttattcattgtaatcaattcattttttaacttagctatttgtaggctagttttattttttcttatgcttgttgttaatcgttttttttaagcaaacataccttggtatccattttattatt

SEQ ID NO: 599551 - DNA, 329 bp, Homo sapiens
aggaggtgctgccttcacacacacgcacaaaaatggagtaagcaggtcacactacctggaccactcctgcaccaagcgtttgtcccaaaaaattcagaaaaaaaataaaataatgaaattattagcaatatgttgagataaaaaygcacatgaaacatgtacttcaaagctgagcattatcagaagacaatgaaacataagacaaataaatataagtagtcttatttgtatatgggtttatgtctctaagctaaagtaaatcatacttttacttattgttcattatttccttttcacagccaaatcagaatgtaaatgatgcaattgaa

SEQ ID NO: 599552 - DNA, 644 bp, Homo sapiens
acactgttagtgggaatataaattggtacagccattatggtaaacagcatggacattcctcaaaaaattaaaaatagaactatcatgatttagcaatttcatctctggccttttaccagggtaactgcgcattgaggaaagggaaatgatcagacatttcacggactactggacactggctctgagctgatgttgattccaggggacccaaaacgtcattgtggtcctccagttaaagcagaggattatggaagtcaggtcattaatggagttttagctcaggtccaacttacagtgggtcstgtgggtcccgagactcatcctgtcatttccccagtgccagaatgcataattagcatggacatactgagcagctgaaagacccccacactggctccctgactggtagggtaaggatcattatggtgggaaaggctaaatggaagccatagtaaatagtaaatctatttaaaaaaatatatattttatacatatataataaaataaaacaatgtagaatccctggagggactgcgagattagtgccaccatcaacgacttgaaggatgcaggggtggtgattcccaccacatcctcattcaactctcccatttagcctgtgcagaagacagatggatcttggg

SEQ ID NO: 599553 - DNA, 575 bp, Homo sapiens
tctactgtaaaagtttaaccatgaccatttggaggcttaaatggaagcttcaaagccttggggaaccagaatttatttttgctctgccctcattgaagatgtcttaagaacacaaccaaatacgaggaagcaagatggagaaaaagaagcagcatgctcctttcctttaaagtggtgacttggaatctgtacacgttgcttccacatgtgtacccatgtccataacctagtcacagagacacaactaatagttacctgggaggctgcagtctttagctgtgcagccagtgaccaactaaaattcaaggtttcaattactatagtaagaatggagaatggatattgaaaaccaactccactgctatctcagtgacatcaaatttggaatgtttattagacatccaaatctgcctcatgcaccaccactaaactgaaatcatacagtacctgttttgtgattgaacttctccatttaaaatatgtctcatatttcataaygagaaacattttactgcatcctgacaccaaatgttgcattagagtttattttattaaaagcctataatgtattcgat

SEQ ID NO: 599554 - DNA, 621 bp, Homo sapiens
tggaatctgtacacgttgcttccacatgtgtacccatgtccataacctagtcacagagacacaactaatagttacctgggaggctgcagtctttagctgtgcagccagtgaccaactaaaattcaaggtttcaattactatagtaagaatggagaatggatattgaaaaccaactccactgctatctcagtgacatcaaatttggaatgtttattagacatccaaatctgcctcatgcaccaccactaaactgaaatcatacagtacctgttttgtgattgaacttctccatttaaaatatgtctcatatttcataacgagaaacattttactgcatcctgacaccaaatgttgcattagagtttattttattaaaagcctataatgtattcgatcagtcccttactcctagacatttctgctgcttccaatttttagtataagaataaagctctatgtattagataagactctgcacacattcttatttttttcatgtacgatgtgttctgaaaagctgtattatccagtcaataagtatatgaatttttaamtgtttggttatgtgttgataaattacttctcagaacaatataaacccacagtgatgcatgagatgcc

SEQ ID NO: 599555 - DNA, 621 bp, Homo sapiens
caaaattttaagttaaataattgctcacatatgttatgaaaatatcttcaaaatgagatatttgaatattaacaaataaaaatactataagaaaataaatatataatttgagacatacctacacttttatacatgatcctaattaaggtaaaaagaacaatttgataaattttttctctacaacattacttttagatcaataaatcaaaaccaacaaaaatattaaaagcaaataaaaatttgggaacatatgaagaacagttacaaaataaatgttgatatattcaatacagacacatatatttgaaaacaattttgaagaatgagaaaaagtcaacagaactatgggcaaaatgtggacagacaaagttcacsaacaaagttgccaatgattattaaacatataaaaatgttttcaatctgtgtaaccatcaatgaaaggcaaattaaatgatgatatattcaacttaattaccatatatcatcccagcttaaaaataataaaacccggagaatgagttttattattcttttccactatggtggaaatataaattgtcacagctttttatgggacaatttggcaattcatcaatttttgaacctctgtatgtattcatt

SEQ ID NO: 599556 - DNA, 583 bp, Homo sapiens
attatgctacaatgtattttcactgtacctgggccttccatcactggtgaattgttttctctgcttggagtccatggttgatggttgattttttttttctatattttatagaatgttcgtatcttttctggcacatagatggtacctatcaccagatttcagtggtaatacaggtttttcttcattataaccatcctttaccagttcagtggaaaatttaggagagcaatactgaaaagtattgactcaatatgttttaactacaagtttattttaagaatgtatccaaagtacaagacagtgttatgcttcatgcaaactaaaaaagatcataagaattcaaatataagaattatttattcatgtatgtaacatgacttcttaaattatattaaaatcatgtttaaaaaataatatacagttgtatayatggcatatatatttacatacacacacatgcatttaatcatagaatctgaaggaaagtacatcgaatttattttatataaaaacaattatagttaattttaattttcttctggatacttatttctattttctaaaattttttcatctaatatgt

SEQ ID NO: 599557 - DNA, 607 bp, Homo sapiens
cctcttgtttattctttggcaagtactttaaagacaacctcatgtgatttttctgttttgaatagtgctaccaagtagcagtagtaactgaagtttgaaactttttgtctctcctgagattcacagaataatgagatcattttctttatatactcctaaatcccatacctcttcaacatcctgaacaattttctcataggtcacaccattccacttttcagctatcatatatctataaggtaagcattattattattattatttacttkcagccaaaatctatctcatttttacccacctatgagacagaaagttatgatttttttttgtctttaggaaagacatatgatggtttgaaaacacagtgagaacaatgcttctgtctcttgaatctgggcgggctctctgatagcttcaaacaatagagtatgcagaattggcactctgactttcaaaactggtcataaagcccgtgaagcttctgcctttgtcactggagtgctcactattgaagcccagagcttccatattagaagcctggctaccctgaactcaccatgctggaggggccacatacagcccccatgcttgagagcacaactgaggc

SEQ ID NO: 599558 - DNA, 607 bp, Homo sapiens
cctcttgtttattctttggcaagtactttaaagacaacctcatgtgatttttctgttttgaatagtgctaccaagtagcagtagtaactgaagtttgaaactttttgtctctcctgagattcacagaataatgagatcattttctttatatactcctaaatcccatacctcttcaacatcctgaacaattttctcataggtcacaccattccacttttcagctatcatatatctataaggtaagcattattattattattatttactttcagccaaaatctatctcatttttacccacctatgagacagaaagttatgatttttttttgtctttaggraagacatatgatggtttgaaaacacagtgagaacaatgcttctgtctcttgaatctgggcgggctctctgatagcttcaaacaatagagtatgcagaattggcactctgactttcaaaactggtcataaagcccgtgaagcttctgcctttgtcactggagtgctcactattgaagcccagagcttccatattagaagcctggctaccctgaactcaccatgctggaggggccacatacagcccccatgcttgagagcacaactgaggc

SEQ ID NO: 599559 - DNA, 577 bp, Homo sapiens
acacctgtcaactccaccttttactctattaaatgttttattagttccaattcactatttcagcctgtagaaataattttaaattctgacacttttataaaatgtatttgacactttataatcttaatgttacttacacattaaaaaataatgccataaagttttctatatcattattttagtcgctctctgctcttcacaattagtcatggattctatrtgccatttatgtaagaaaaaaatgtttgaacacaaacataagcagtaattgaaccaatgtgtaagcagatacactgtaatgaaaatctgtgaatgaaacttcctcttacattgttttatttcttctttttagcaacatgatcagctaggcatttattatgaatagagaaactgaggctcatagagattcagtgaatgttgcaaggctgagtttaaacataaacgtgtctctctcccaaatctctaccatttcctttgtaccacagcaccagaaataggacactcagaagatagcagtaatgactatgcgtagaacctcagtcaataaatcaagactcacctaggataattgacttgt

SEQ ID NO: 599560 - DNA, 577 bp, Homo sapiens
acacctgtcaactccaccttttactctattaaatgttttattagttccaattcactatttcagcctgtagaaataattttaaattctgacacttttataaaatgtatttgacactttataatcttaatgttacttacacattaaaaaataatgccataaagttttctatatcattattttagtcgctctctgctcttcacaattagtcatggattctatgtgccatttatgtaagaaaaaaatgtttgaacacaaacataagcagtaattgaaccaatgtgtaagcagatacactgtaatgaaaatctgtgaatgaaacttcctcttacattgttttatttcttctttttagcaacatgatcagctaggcatttattatgaatagagaaactgaggctcatagagattcagtgaatgttgcaaggctgagtttaaacataaacgtgtctctctcccaaatctctaccatttcctttgtaccacagcaccagaaataggacactcagaagayagcagtaatgactatgcgtagaacctcagtcaataaatcaagactcacctaggataattgacttgt

SEQ ID NO: 599561 - DNA, 570 bp, Homo sapiens
tttgtcaccctactccctcctatcagacctgattgttttgcctcaccacttcacattactatggatcaaatataggtttatycttcttttttgtacctggtccagcatcattgccttgactgattgtccctaggtgccactgagtttgttctcatctgcctgatgagaactctcaatatactcctaagccacagatatcctgtttttggcaggtgtggattattctcacattgaaatataccctttaaaaaataagtctacctcagaatggtgaagctatccaaggatattggcaaattgtgcatgtggtaagctatctgacaaaatatgtgcaaatatgttgttttaaatacaaatatgaatgctcatgtatttgtctatttacttgtcaattatgcattgcaggatgattttaatgatgttgtatttttgttattattaaaatctgtttatttgcatgtgcctatgtcccgcaaatgctctgttcaacattcaaacatctattgactatccacaatgtgcaaagcaccgtgcttggtactattctttgtagctcatggcccaaaggac

SEQ ID NO: 599562 - DNA, 529 bp, Homo sapiens
tattctagaaaataaatacaaatcccttaaacactaaaaaagacaagaaaattgtcccagagtttatcaaaattatccatgtaaaatcactttgataaatgctattgttgactatcttgatttctaccaaattacttgtagccaaatcatttccagctaaatgatataatatttaataaacagcagtgggtaataaaaagcaaacaatgaagagtttagaaatgtatttcatggaactttacgaaagcrgattttttttttttttagacggaatcttgctctgtcacccaggctgcagtgcagtgcagtggagctatctcggctcactgcagcctctgcctccctggttcaagcaattatcctgtcttagcctcctgagtagctaggactaaaggtgcactgccacacctggctaatgctaattatttattaaattaaattaaattaattaattaattaattattttgagacggagtctcgctctgtctccaggctagagtgcagtgacgcagtcttggctcactgcaa

SEQ ID NO: 599563 - DNA, 501 bp, Homo sapiens
ttatccttctcaaaaattcttaacgttttagtcacataattttacttttgaatttgagaataatttgttttttggtaacgcctgctacatttgcagtaaaaaagttactaagtttgttttaatttaaactaccccctaaaactgccaattaatcattaatatatccatctgatacctattttactgcagtgaaaaagtattgatgatcttgtacaagagtgtagtctaccttcccctccctccatcacttttaattcagatcctattttctccctctctccaatctattattgtcattactgaagcctccttgctgagtcttgaaaaggctaaacaaagcacattaacatttcytgtgcttgggaactttgctccagattctcatgtgcctcactccccatttctttccttcatcagagagactttccccatcacccttctcacattgctcctaccccaccaggaccaattcactgagccctgcttccctctgtcttcctt

SEQ ID NO: 599564 - DNA, 572 bp, Homo sapiens
gtatgaggcactggcaccccttctctgaccaggccttatgcatctcttccatctggctgttaatctgtatcctttgtaatattctttataataaatcagtaaacataagtgttgtctggatttctgtgagctgtcctagtcaaattaattgaacccaaggaggggatctcaagaaccccagttcacaggggattgatcagaagcacaggtcataagctggggcttgtgattgccagctgatgtgggggctgtctggtgggactgagtgcctaacctgtgggatctgatgcgatctccaggtacatactgtcagaattgaattggatcacagggcacccagttggtrtccacaggcgaattccttggtgtttgggtaaaaaccttcataaatctggtgtcagaaatgtgctgtatgataagtgagtgtgagtagaaaaaacactttggtcggcttttccgatttctaagatatagataaactgataataacaaagtgaacaagatgagctatcttcagatgaggaatagaagaacatttctgaaagaaaacttacagtggagtggagaaataa

SEQ ID NO: 599565 - DNA, 572 bp, Homo sapiens
gtatgaggcactggcaccccttctctgaccaggccttatgcatctcttccatctggctgttaatctgtatcctttgtaatattctttataataaatcagtaaacataagtgttgtctggatttctgtgagctgtcctagtcaaattaattgaacccaaggaggggatctcaagaaccccagttcacaggggattgatcagaagcacaggtcataagctggggcttgtgattgccagctgatgtgggggctgtctggtgggactgagtgcctaacctgtgggatctgatgcgatctccaggtacatactgtcagaattgaattggatcacagggcacccagttggtatccacaggcgaattccttggtgtttgggtaaaaaccttcataaatctggtgtcagaartgtgctgtatgataagtgagtgtgagtagaaaaaacactttggtcggcttttccgatttctaagatatagataaactgataataacaaagtgaacaagatgagctatcttcagatgaggaatagaagaacatttctgaaagaaaacttacagtggagtggagaaataa

SEQ ID NO: 599566 - DNA, 607 bp, Homo sapiens
tttatggtgaccttagtagtttggacagaatatgttaactgatagctttgcacagtgctgctgaaaaataccctcagcacactctcatttagtgaagccactggtatattgtgtctgtcatttttgttttaaaattggctctctttattgaggcaaagttcttcattcttttatttctactggttattcatttatttatttgtgctgcatatcagacatgtaaaacacagttcttttttcttaatggaaggcacacaaaccagatggaaagaacaaaaatataaaggaaaaaaaactagttgtgaaattaagcacacattccagtataatgaaccatataattaatctaagaacaaaatgataaagtccctaattgtacatatattctactggttctttgttgatttggttactaactcaactgtttcatttaatactctgagttaatgagggatttcatattctaacaagatgaacattataggatttctgcctttagcccaaggttctcataagtctggatagtaaacacaagtaatgattrgaggtgtgtgtgtgtgtgtgtttgtgtgtgtgcatgtgtatggagatgtgtatgtatgtgcat

SEQ ID NO: 599567 - DNA, 572 bp, Homo sapiens
acatttctcatcagaagaaagttgggagctaagaataataaacacagtatttttaatatttaatctgtctttagctattaaatcaatctgaaaatttctaacaatcatggcattcaaaagagaggccctggttcaatgtaaaaacctatagccatcctcatgtagttgatcatgaaaggttcagagaatataatgtaaaaagaaaaaatgtggagtamaatttctcatctgatcatttgtactcccaattgtgtaagataaaggaatcctcccaccaatccattttgaatgatacatagtctctcatgtctgattatcttcatcctcatctcctgttgctctcctgctccttatataactaggaatccagtcagaaaattgctacttagttctctacagagtcataactttgaataagatatttcctttaccttgagtagatacttatttaaacttcaaatcatttattcctctttcaagatacagatcaagcaccaccttccctagaaattcttccttaacctatcaatttgaactttttttcttttgtcttaatttaaaaatacttccgt

SEQ ID NO: 599568 - DNA, 528 bp, Homo sapiens
ggaactgattaagagttggacaaaaccatgtcctagtgatactgtttcatttcttactacattaagcaaaacctacaagcagccctaagtttgtctttttccaaatttacataaaccaaaaacttccaaaagcctagttcctgaaacaaaaatttagttggagtgtttgtcagtagcaacccaaaggccctaattgatctgaacagagtttacttgagcctttaagtaccaaagcytaaggtcagggtcagatagttcaggaaaacgtaatgacaaccatatttttttttctattgcatttcttgtgaattagagtactgggaaacactctacagagggtgtctgatgataacattgaggcttccagagcagcatggcaggacagagagggcactggcacttcagaaggagaaagtgaagcatgggtgtcttggtccaaggtttctgagaccagagagaattggtgttaatctgagttttggcatttagcagctgtgtggcctcaaacgtgttactctccactgttaa

SEQ ID NO: 599569 - DNA, 635 bp, Homo sapiens
tagtgcttgggcttggacatccaaaactcagagagaaataggattagattaaaatggctctgatgctaaaatttaaaatttatgagaaaaaagaagcaaaagaggaacacatttaaactgaacaaaatgagtatcttcatatggtaaaagaggaaggagacccgcttgcaattagtttgaaagaaactggggagcattaaagagaaatggaaattggctctaaagaaatgaagagttgaaaaataaggactttcctggccttaagatttcaaaagctggcaaaacagagttcaggaaagaaccacatgccacatgatgcagggtttcttattagctcttcaargatacagtctccagtagtacgtagcagatcccagctggctatcttttgagaaggattttctaacaggaacaacttggagactaggagacaatcagcctcaaggcagaatccccagaccgaagcaattccacagtaggaggcagacatagaagcctccaagggagaaacatgacagcacagagctcagaaagcctgaggatatttctagggatgaaaaaacaacaaggacagtaaacagggattgtgggacatttaatatcatgacatttgcgtggagaattgcctgtaattt

SEQ ID NO: 599570 - DNA, 597 bp, Homo sapiens
aactctcttaataatgaaaatctaaaagaatttataaccagcagacctatactgaaagaatagctaagggaatttctctaaacagaacagatatataaaagaaaacatacygaaatgttaggaagatataaaataatatgcaaaaatatgaatgaatataatagacattcttctatgtgttttctaaattatgtttgatgcttgaggaaaaagtgtaggacatggtctgatgtggttctaagtaattgtagagggaaaatttaagacaattatatttgaacaagaaaggtaaaaaaatgtaaagggaggcaagttttctatacttcaattaaattggtaaatagcaacaccagcagactgtgataagttatttgcatataatgttatagctatagcaaacactataaatagatgttaaaagagatacactcaaaaacactataaataaatcaaaatgaagtttaaaaaattctaatgatgtgtgagaagacagagaaaaataaaaataccgggaacaaatagaaaggaaaatatgaaagtaatacttaagccctaatatatgtataattacagtaatataaatggtctaagtatgta

SEQ ID NO: 599571 - DNA, 597 bp, Homo sapiens
aactctcttaataatgaaaatctaaaagaatttataaccagcagacctatactgaaagaatagctaagggaatttctctaaacagaacagatatataaaagaaaacataccgaaatgttaggaagatataaaataatatgcaaaaatatgaatgaatataatagacattcttctatgtgttttctaaattatgtttgatgcttgaggaaaaagtgtaggacatggtctgatgtggttctaagtaattgtagagggaaaatttaagacaattatatttgaacaagaaaggtaaaaaaatgtaaagggargcaagttttctatacttcaattaaattggtaaatagcaacaccagcagactgtgataagttatttgcatataatgttatagctatagcaaacactataaatagatgttaaaagagatacactcaaaaacactataaataaatcaaaatgaagtttaaaaaattctaatgatgtgtgagaagacagagaaaaataaaaataccgggaacaaatagaaaggaaaatatgaaagtaatacttaagccctaatatatgtataattacagtaatataaatggtctaagtatgta

SEQ ID NO: 599572 - DNA, 597 bp, Homo sapiens
aactctcttaataatgaaaatctaaaagaatttataaccagcagacctatactgaaagaatagctaagggaatttctctaaacagaacagatatataaaagaaaacataccgaaatgttaggaagatataaaataatatgcaaaaatatgaatgaatataatagacattcttctatgtgttttctaaattatgtttgatgcttgaggaaaaagtgtaggacatggtctgatgtggttctaagtaattgtagagggaaaatttaagacaattatatttgaacaagaaaggtaaaaaaatgtaaagggaggcaagtyttctatacttcaattaaattggtaaatagcaacaccagcagactgtgataagttatttgcatataatgttatagctatagcaaacactataaatagatgttaaaagagatacactcaaaaacactataaataaatcaaaatgaagtttaaaaaattctaatgatgtgtgagaagacagagaaaaataaaaataccgggaacaaatagaaaggaaaatatgaaagtaatacttaagccctaatatatgtataattacagtaatataaatggtctaagtatgta

SEQ ID NO: 599573 - DNA, 597 bp, Homo sapiens
aactctcttaataatgaaaatctaaaagaatttataaccagcagacctatactgaaagaatagctaagggaatttctctaaacagaacagatatataaaagaaaacataccgaaatgttaggaagatataaaataatatgcaaaaatatgaatgaatataatagacattcttctatgtgttttctaaattatgtttgatgcttgaggaaaaagtgtaggacatggtctgatgtggttctaagtaattgtagagggaaaatttaagacaattatatttgaacaagaaaggtaaaaaaatgtaaagggaggcaagttttctatacttcaattaaattggtaaatagcaacaccagcagactgtgataagttatttgcatataatgttatagctatagcaaacactataaatagatgttaaaagagatacactcaaaaacactataaataaatcaaaatgaartttaaaaaattctaatgatgtgtgagaagacagagaaaaataaaaataccgggaacaaatagaaaggaaaatatgaaagtaatacttaagccctaatatatgtataattacagtaatataaatggtctaagtatgta

SEQ ID NO: 599574 - DNA, 533 bp, Homo sapiens
ccaccaatctcattactgagtatatccccaaagaaaacaaattgttctrccaagaagacacatgcactcatatgttcataacaacagtatccacagtggcaaagacatggaagcaacctaggtcctcatcaaaggtggactgcataaagaaaatatgctacaaataccctatggaataccatgctggcataaaaatgaatacaattatgtcttatgcagcaacatgtatacagctgaagatcataactctaaattaatacaggaacagaaaaccaaataccacatattctcacttataagtgggagctaaacattgcgtacacatgaacataaagatgggaacaatagacactgtggcttactagaaaagggagagaaaggggagatgtgggttgaaaaactacctatttggtactatgttcactacctgggtgacaggatccataccctaaacctcagcatcacacaatatgcccatgtaacaaacctgcatgtaagccctctgtatctaaaataaaagttgaaattatttt

SEQ ID NO: 599575 - DNA, 569 bp, Homo sapiens
ataatctcaaaagataaactataaataaaggtttgctaatatatttgaggcttgaaaatgactcaaactaatgtttgaaaaacttgtgcttaaaatagtgtaacatgtaatctgtataagataataaaaatttataaacagaatgagtctagcctctgtaaattagcccatgagaaaaatttttccctctaacttccagagtcagtatcatgaggacttagccatcgtccacagagttgttgattatagatccctgatgtagaatactcagaaactgaaatttctcaactaatatttaattttttttctctgcttgattcttgatgtgcctaccattttagtgaaccatgggttctctcaggccacatttcacatttccacctagacaaattagagaaacataatttggacrgatggatattatataccaccgatctcttttcaaaagtaaatcctcaagtgaccataaattaactatgctattatctggacaatttcaaaggctccttcttagaaccctgtagtggtatacaaatgtaagaattcatttaaaaattacattaagccag

SEQ ID NO: 599576 - DNA, 609 bp, Homo sapiens
ttttttaaaaaaatcactttattgagatatgattgacatataaaaagctgcacatatgtaacatatacattttgatgaatttgggacaattatataccgtgaaaccatcaccaacttcaaggccataaacatgtccatcatctctcaaagtttcctcttaccctttttattattgttgttgttgttgtttttcttttagtaaatttktcttagttgtcggcagaaaattaaaaacagaaggaatgctacacacacacacacacacacacacacacacacactaagaggtcattgtatataaaactagctaatgtaaatcaaccttgtacaaataacatgagatgggaaaaggggagccgccacaccccttcaaggcaggacatctcattagtatgcaaaggaataaacaatggattccaaaatcaaagtcaaaacagtaataaatcagagcgataaggtgaaaaatgatgggataagtagcagtagtggctattagcatgtacacctgctgataagacaaagcaatccaggaaggtgcttgggaaaaattccaatgctgagaccaagagcaaagatgttactttgaaatggtcaagggatgaagtagag

SEQ ID NO: 599577 - DNA, 609 bp, Homo sapiens
ttttttaaaaaaatcactttattgagatatgattgacatataaaaagctgcacatatgtaacatatacattttgatgaatttgggacaattatataccgtgaaaccatcaccaacttcaaggccataaacatgtccatcatctctcaaagtttcctcttaccctttttattattgttgttgttgttgtttttcttttagtaaatttttcttagttgtyggcagaaaattaaaaacagaaggaatgctacacacacacacacacacacacacacacacacactaagaggtcattgtatataaaactagctaatgtaaatcaaccttgtacaaataacatgagatgggaaaaggggagccgccacaccccttcaaggcaggacatctcattagtatgcaaaggaataaacaatggattccaaaatcaaagtcaaaacagtaataaatcagagcgataaggtgaaaaatgatgggataagtagcagtagtggctattagcatgtacacctgctgataagacaaagcaatccaggaaggtgcttgggaaaaattccaatgctgagaccaagagcaaagatgttactttgaaatggtcaagggatgaagtagag

SEQ ID NO: 599578 - DNA, 515 bp, Homo sapiens
aaatcattagactgatcctcagctgagcaaattattctataaaccataactcacaatrgggagtatgtgcaacagcccaactcctgcatttacacgctgagggtgcttagggttcagaggtgcatatatcgcctgatgaatgtctacctatgggtaagcaatgcacatggcatgtgtatgtgtgtgcgtatgtgtgtatttgtgtatgtactacatctacttacaaatattatacttatccctttactaaaagaaccattacatggctcattgaaaacaaagttgaatatcttaaacaacattttcaaattgctgacagcagatttctgctttcctagttgatatttaattttaaaagtaagacttcagagccttaagtatgcacttaagaagtctagcagtcagtcaataagagaattgctcacctaaataaatcagggtgagaagggaaaagtctcccttttatttttaatatgaaaattctgattctatttgagcttcacccatgttatggc

SEQ ID NO: 599579 - DNA, 613 bp, Homo sapiens
cacacccagctaatttatgatttttttgtagatttgggtttctccatatgttgtccaggctagtctcaaactcctggcctcaggtgatcctcctgtcttggcctcccaaagcattgggaattacaggtgtgagccactgcacccagcccctttgaagagatttttaaaaatgatacactatagtagctatctagaatttrgaatatggagagtgtccattggtgtaaaattttactggttgagagatttaacacatatgagaggctagtgtcaagaacagaaaaatgtgtggctataataaaataatgcctctcatctgaattatcatcattgactctcaaaatcagggaggagttattcttgagacttttatgcttaataattctccccttagaatcagtaaatagaagcatagattatattacatattatttcaagagctgatttcatcaacttttcaagattttaagaaatataactgggccattatggatgaattcttatctacaaaatttgaaagaacttcattgacagtgattctacaatcatctgtagataaattttcatttcatgtctgataaattttcatttcatgtctgcatttgaattaggg

SEQ ID NO: 599580 - DNA, 461 bp, Homo sapiens
gatttaacacatatgagaggctagtgtcaagaacagaaaaatgtgtggctataataaaataatgcctctcatctgaattatcatcattgactctcaaaatcagggaggagttattcttgagacttttatgcttaataattctccccttagaatcagtaaatagaagcatagattatattacatattatttcaagagctgatttcatcaacttttcaagattttaagaaatataactgggccattatggatgaattcttatctacaaaatttgaaagaacttcattgacagtgattctacaatcatctgtagataaattttcatttcatgtctgataaattttcatttcatgtctgcatttgaattagggggagaagaactgggaaacatctatattgcaatatttacaattgacartgttaattgttaacaatggagaatggagtctttattttaattttt

SEQ ID NO: 599581 - DNA, 546 bp, Homo sapiens
attaaactaataaagaaaaatggaatataaatgctatggtttgaatgccccctccaaaactcattttgagatttaattgccattgtaatagtatgaagaggtgggcctttaagaagtgattaggccatgatggcactgccttcatgaaggggttaatgctgctatcacaggtctgggttagttattgcaggagtggatttctgatttaaaaaaaaaaaaaaaagatgagttcagccaacttccctctctgtctcacayacactcacaatatgatgccatctgccttaggatgacccttcccagaagctggtgtcatgttcttggacttcccagcctccagaaccatgagccaaataagtttcttttcttcataaattacccagtctgtggtgttctgttataacagcagacacagactaagacaacaagcaaaagttaaatagcaaagtgatgatggaagatgaaggactctgaagaagagaaaaatcaatgggatgacagaacatttaggcagcttcaataacaagatgaaatgtgaataataga

SEQ ID NO: 599582 - DNA, 572 bp, Homo sapiens
aatcaattggctagacttgagccacatatctgctgctataggttgaggtttcaagcccagtcctactcaaaccaagtagattgagcagaatktttttgagagagtgaggtgaggggtgggagtaggcaataagaatggcttttcagtaaaacagacaaactatataagcccactattccttccaacccaccctttcttccccattcattatgagatgcgaaactgccaaaattcaggcatgataggattgggaaatgttaaagacagagattactgagccagggaactggtgtggcagacatttttcataaggtggcttactgctaagatcttcaacaaaggttcagctacaactttgattctgaattagcttgtccttttcctaatctcagtgaatctaatctttggaatcatcgtcccagaattttcccacagactttgcaataacatgctcggatttcttaaggcagttatgattttaagtattgtgttccacggccgcttgtcagaacacaaaagccaactgggagttcagaaagtaagaggcataaagattcccttctttgattttc

SEQ ID NO: 599583 - DNA, 296 bp, Homo sapiens
gtgggagtggtagtggcatatatattatttaaattttagatactctccattaaccaggagttttaaattcctccctcatgaacgctttactcatgataatatctagcactagaagtgatccatttgaagctcatcttcttcttgtgcccttttctacccrtacatagaagagccatggaaaggccaacaaggcaagaaaatgaaggctatgctgttggatgcccaggtcagctatttcactaaccatcatagcaccttttaaagaccaacttgataattgggtgcatacaaaatat

SEQ ID NO: 599584 - DNA, 534 bp, Homo sapiens
gggagtggtagtggcatatatattatttaaattttagatactctccattaaccaggagttttaaattcctccctcatgaacgctttactcatgataatatctagcactagaagtgatccatttgaagctcatcttcttcttgtgcccttttctacccatacatagaagagccatggaaaggccaacaaggcaagaaaatgaaggctatgctgttggatgcccaggtcagctatttcactaaccatcatagcaccttttaaagaccaacttgataattgggtgcatacaaaatattagtactactacyacatgcacatcagttacttagagtctcaaagggtataagatgttccatataacaggttttctgtatgattttttttccttagcttcttggcaaaagtagaaagatttgggttgtattcttaatttagccaatctggattttgttccatcttcctctatctggggaagcattgaataatgcctctgggtatagaatcttttgaaagactactttgtactttatgacca

SEQ ID NO: 599585 - DNA, 573 bp, Homo sapiens
gggttgggtatcaggtgaaatgccttcttcctccaattctcctctattttctcagttcccaccttcctccctgtgttggttttgtcttgtggtcttaagatgatcactgccacsaaaggctaagatgaagaaaaggagagagagagagatgcacagagatttctcttggatttcttttaagcgtgcagaattttctttctcaaatgctactggaagactaacttaccggccaaagttatcttaattcagaccacctctcaatcaattgcaagcagaaacattggataattggcttagactgaacagagcccatctcttgacggggaccttggcttaatcatctttgtaggtgactcagggctaaacactatggtttgcccatagtggatactcaactatttatttaatttattcatttatgcaaagtaatatcaaacacctatactgttacagttcttaacactagggatttatcagtgaaaaccaaaaagctcctattctcatggaacttgaaacctagtaagacaatatacaataaataaataaatcaggtgataagtacattattaaacc

SEQ ID NO: 599586 - DNA, 573 bp, Homo sapiens
gggttgggtatcaggtgaaatgccttcttcctccaattctcctctattttctcagttcccaccttcctccctgtgttggttttgtcttgtggtcttaagatgatcactgccaccaaaggctaagatgaagaaaaggagagagagagagatgcacagagatttctcttggatttcttttaagcrtgcagaattttctttctcaaatgctactggaagactaacttaccggccaaagttatcttaattcagaccacctctcaatcaattgcaagcagaaacattggataattggcttagactgaacagagcccatctcttgacggggaccttggcttaatcatctttgtaggtgactcagggctaaacactatggtttgcccatagtggatactcaactatttatttaatttattcatttatgcaaagtaatatcaaacacctatactgttacagttcttaacactagggatttatcagtgaaaaccaaaaagctcctattctcatggaacttgaaacctagtaagacaatatacaataaataaataaatcaggtgataagtacattattaaacc

SEQ ID NO: 599587 - DNA, 565 bp, Homo sapiens
ggttttctagtgtcctcctaagccagatatgagttgaacacctctcttgttctagggccacagctgatatataggagaccaccaagaaacacagaamaagatactatggaaccatgttcaaatcaccacacttctggtttcatgatcttattacttagacctatttggccatcacctacacttgtgaattcagagtcctgatggctttgtattttgtaattcctccttgataacctgttgttctctaagcgtttccttgtctgtggggactcctcatccaatgctggctcaactgactgataactggggaccactttctagttctcccagaactgatgttatgaccatactaggtgatctgctccttaatctgacagcagtcttgggaggtttgtagcatcataattgttttgaagaattggggaacctgagcccatgtgagtcaaatgacttgttcagtattatacagctacaaaatctcaggaacatgattcaatgccaagacctcttgagcaaatcaaatatgaaatactgccctgtttgtgaatgtttcttatcatgttca

SEQ ID NO: 599588 - DNA, 522 bp, Homo sapiens
cttggatgaccagcacgctgctcaaccaaaattaaaaaacaaaatatttagtatacttcagtatgatttagtacctacaaacatggtggtcataaatcaggagaatttccccaasaggaaagacataaatcttccagctcccttttagaaatcaaaacagctcatgctatggcccaaactgtcatgggatcatgaaattgtagtgctatgggaacctggaacagtgtgtgcacccatttctgtcctcttttaagaggtcccctttcaacaagtacagacacaggaaagacatgttagagatctccaaagaaggagtttttagcagtttatttggtttctttaatttacaaaatgcaattaaatattatatacatgttctcatgtacaggtcctcttccaacaattaacataaaactgtttttagtgactcttaggtgtacagctgctgacacaaatggaacttgaaccgcagagtgactgaaacaataaattatttcttgctcaaataacagtcaaggcaga

SEQ ID NO: 599589 - DNA, 522 bp, Homo sapiens
cttggatgaccagcacgctgctcaaccaaaattaaaaaacaaaatatttagtatacttcagtatgatttagtacctacaaacatggtggtcataaatcaggagaatttccccaacaggwaagacataaatcttccagctcccttttagaaatcaaaacagctcatgctatggcccaaactgtcatgggatcatgaaattgtagtgctatgggaacctggaacagtgtgtgcacccatttctgtcctcttttaagaggtcccctttcaacaagtacagacacaggaaagacatgttagagatctccaaagaaggagtttttagcagtttatttggtttctttaatttacaaaatgcaattaaatattatatacatgttctcatgtacaggtcctcttccaacaattaacataaaactgtttttagtgactcttaggtgtacagctgctgacacaaatggaacttgaaccgcagagtgactgaaacaataaattatttcttgctcaaataacagtcaaggcaga

SEQ ID NO: 599590 - DNA, 533 bp, Homo sapiens
tgcttcctggggctttcctctcctctcttctcattactcctgacctccgccactgcctgatgctagtggctrcagctacattcccatttttctctcatgacctcagccatgctggtataatctcaccgggtctgctcccacagctgctgcgtgaaggtgaggagagaattctcttcccactggctttattctttattgttaaagcacaaatgagagagccatgtgctttcagactcttccagcactcctttaattgtttctatctttcagctttttgtgctttcctcctcttcttggggttaatcacaaatgctgaagaggtgcattgggacagaattcaagggtcaaggccagggttacagctgtggccattatcagccctcttatttgagcctcccactagggtccaatggcctccaccttcccaccagacagggtgtccagggagtgcttatacggtttgcaggactcttccctgggagtagccataagctcaaagagccttttcaaaaagttctttgtcctctgacatg

SEQ ID NO: 599591 - DNA, 511 bp, Homo sapiens
gctttgaagacaataaagtggttaatttttataaatgtcacagtatgcttggaatttatattattctgcagtaggggtagttgagagaaggtgagagaaggggaatattttttgtgtgtctattagattaaacttattaattatacttttaaaacattttgtgagtttttttgtcttcttgatatatcttattttaccaagtaatttagttataatttctctttgtgttgttgatttttcttttatgtgttttgaagttgtgttaagggcaaacaagttgagaattgtgagcttcatgctcacttggatattatsaagatgtagtaatacattttagaatcaatatggcttaaaatgttgatattatccaaagcaatcttataaattcaatgcaacctctatcaaaataccaataagtttcttcacagaaatagaaaaaataatcctaaaatatatatggaactacaaaagaaccataatagccaaagccatcctgagcaacaagaacaaa

SEQ ID NO: 599592 - DNA, 553 bp, Homo sapiens
tttcataaaagaggtatgcattctgggctgcatagtggtagcagtgaagaacaggcaattctcaaaatagactctctggattctgggtttaaatcttgagtctgctatttcatagtcatataaattgagtaagttacctatttctaatatcaaaggctcagacccctaaacagtaaaagrggactgatagtggtgtcttcctcatagttattgtgagggtgaaatgacaaattccaaaatgtaaagtgtttatatctggaaagtctcagtaaatgtaggttgttacaaatcttgaaagataactagtttaccaggcaacagaagtgaggcatatcaaatggtccttccttagaatatataggaagaacatattttccactaatacatctaaggaaattaaagcagtaatacattttaataaaggcaaatatttccaaaggccctcttcccttttctgtctgttcacaaatagtttgaataggtgctaaatgcagactgctgcttgaatgggactattacaccaggttgttgacaacctggtgttatggactta

SEQ ID NO: 599593 - DNA, 497 bp, Homo sapiens
ataaactcagtgcatttacttttaaacatcagttatttttattttatcttawgtgtaattttagttttaggagaaatggtgtctttatgatatttaatctttctcttcacaaagattctatttgttccttttgttcaagtctcccttttgatccatagtatgattttaaattttttcttttatagattatagattctgtttgtcttgttttttccttaaatattttatggcttttttttgtaatttggatatgttttcttccatatcttgtaatttgttgtttttgctgtataggaaggtggtagatttggaattttttttttactcatccacatttctgtattatctcattgtttggaatacatcattctgttaagtctttggggttttccatgtgcacaatcataacatctaaaaataatggtgattctgccttgtgtttccccatctgaataatgtttacctatttttttcctgctttattactatggctagtg

SEQ ID NO: 599594 - DNA, 476 bp, Homo sapiens
ataagttagagatccaattttaccatatggcttatcaggggcattaatataaattattaaataaatccatcttttctctgctaatctactaatgccaactttttaatatatacttaattttaacatgtaccaggtctgtgtctacactctctattctattccattaatctgtccctctattagttggacatttattcttttaaatatatatatgtgtgtatgtgtgtgcatttgtaatatgatgtatctattagagctagttctcttaattccttttaattttgaaatttcttggttattcattcttgtttctttttccatatggataataaactcagtgcatttacttttaaacatcagttatttttattttatcttaagtgtaattttagttttaggagaaatggtgtctttatgatatttaatcttyctcttcacaaagattctatttgttccttttgttcaagtctcccttt

SEQ ID NO: 599595 - DNA, 497 bp, Homo sapiens
ataaactcagtgcatttacttttaaacatcagttatttttattttatcttaagtgtaattttagttttaggagaaatggtgtctttatgatatttaatctttctcttcacaaagattctatttgttccttttgttcaagtctcccttttgmtccatagtatgattttaaattttttcttttatagattatagattctgtttgtcttgttttttccttaaatattttatggcttttttttgtaatttggatatgttttcttccatatcttgtaatttgttgtttttgctgtataggaaggtggtagatttggaattttttttttactcatccacatttctgtattatctcattgtttggaatacatcattctgttaagtctttggggttttccatgtgcacaatcataacatctaaaaataatggtgattctgccttgtgtttccccatctgaataatgtttacctatttttttcctgctttattactatggctagtg

SEQ ID NO: 599596 - DNA, 563 bp, Homo sapiens
tcctttggctattgtctttattcagccttgattcctcttctttttactgtagtgaaagaccatttctcttatcctagaatagacattctaaagaatagccagcaaaatgtgagcaaaaaagaaaagagtgcatgctttgttccccattaactgaccgacaactaaccagagcattctctgttcccatgcaaaagatgtctacatcagaaatttagtgaacacacacacacacacacacacacacactagcacctacrtacatcagttaagttcatgtttcgagtcatttttaggtagttgctgcttggcatagtgcacggaactacactctctgttaggaacaacaaactgaggacaaaagataatctatttctatttcaaattagtgcagaactgagctcagtgcccatgtgccatggcgctccttgctttcatcatcttctttttttttttgcatcttctttttttcaggttagttccatgacttgactaaatgggggcttggctatcttgacagagtctcattccagccctgttcacatgctcggtggttgtggaaatac

SEQ ID NO: 599597 - DNA, 605 bp, Homo sapiens
ttaaatatcattttattataaagggcaatttcatgatcaaccttggttatctcagagtttccttgggaccttagtcactattccaaaaactttaaatcataaacccctgcccaagagaataattgagcttcttttatgaagataaaacctcaatcagaatattaacaaatgctccaattcaatgagtaattaatgtatttggacttttttaacctcaagaactaattttaatgaggtccactaataactgtgactagattaagccttagagaccagagattttcagtgtatatgtgtgtgtatctatctatatacacacataaatgcatatatgtctatatacacacataaatgcatatatgtctatatatacacacatatatttatctatatatatacacacatgtgkatatatacatatacatatatatatacacacacacacacagacattctcatcagtagttagtccaacagacaaaaagataatatcagatagctaaactcactaagattttaaaaatgcaattcaggatataatagttgtatcaatttttctccccgaaactactgcttaatgaagaattttgctttatgggtacaaa

SEQ ID NO: 599598 - DNA, 558 bp, Homo sapiens
tgtgtccttgttcttctgtttaaagtaacattttgtgtctatttgtgtatatgcatgtgtacacatttgtgtgagttcacaaatgattactctgatgaatgttaatttatatcaatctaaccaaaataaaattagagaaatcttattttgttttttcatttaaagttttaaattagaaaaatctaatttttttaaagttttatttttaatattaatatgaatatrtttgtgcattaacttatagatttgtgtttaattttgcttcagtgatttttgccacctaagggcctagaacaacattgtaggcactcaacatattcatgtaatataaattaattagtaggaaaaaatgaaggctacactttataaaaatatttttattttacaagttttggttttcctctaggaaactgaattagtataataatttgatgttttaatagctctatttatacctacaagtaacaaaagtttgtcttgacaacagaagtgcaaatacttttacaaatatgttacccctatgttttgttaagcacttaagtggctgataacattatt

SEQ ID NO: 599599 - DNA, 558 bp, Homo sapiens
tgtgtccttgttcttctgtttaaagtaacattttgtgtctatttgtgtatatgcatgtgtacacatttgtgtgagttcacaaatgattactctgatgaatgttaatttatatcaatctaaccaaaataaaattagagaaatcttattttgttttttcatttaaagttttaaattagaaaaatctaatttttttaaagttttatttttaatattaatatgaatatgtttgtgcattaacttatagatttgtgtttaattttgcttcagtgatttttgccacctaagggcctagaacaacattgtaggcactcaacatattcatgtaatataaattaattagtaggaaaaaatgaaggctacactttataaaaatatttttattttacaagttttggttttcctctaggaaactgaattagtataataatttgatgttttaatagctctatttatacctacaagtaacaaaagtttgtcttgacaacakaagtgcaaatacttttacaaatatgttacccctatgttttgttaagcacttaagtggctgataacattatt

SEQ ID NO: 599600 - DNA, 635 bp, Homo sapiens
ttttagtactttttcccagcatttccattcttctacataagttttgtaactagtccatgatagagtagcagagattgcatctacctatccatctggagcaataaagaatggtcaaaataaatagtagaatagtttcaagatgttagatatcagtaaaaaagatcaatcacccctgagtgatgagaaacataaaaggtgagccctataattgcccagctaaatgccttgagtttccaagctgtgatgcagaaaaaagaaactgaggcagaaccttatctccgagttaaggaratagagctgagagtccagggagagcagctagagttcacagaagaaaatcctgggaagggggaatctgcaaataaagggaactcccgagagctgcagaggaccctcctcaagtactcagttgagtaatcataagcacatgtctgaggaagctacccaaggctggcaaagaatacctgaaaagggttaaaataaccagtgcctaacctggcactgttattttcatacacacggggccaggattagtaactcttcccatcagcaagattggaaaaattcatgggtcatttggaagagtgctgagaaaggtcttgtctccgtagagaaaaataattatctctgtaatg

SEQ ID NO: 599601 - DNA, 547 bp, Homo sapiens
ggtgaaatctatcaaatatttaaggaagatacaacaccaattcttcatacattcttccagaaagttaaagaaatgaaatacttttcaacccattataggaggctacttttatcctaatatcacagctgtaaaaatacattacagaaaaaaacagatatcacttatgaacaaagatgcaaatattctaaacaaaattatagcacatcaaatccaatgatatacaaaattattatttttgttttcttttaaaaaactgttattttaggttcagtggtacatgtacaggtttgttatataggtaaacttgtgtctcagaggtttattgtacagattattttgtcacacaggtactaagcttattattacccaagagttatttyctctgctactctccctcctcccaccctccatcctcaagtaagctttagtgtctattgttccctcctttgtgtctatgtgtactcaatgtttagctcccatttgtaagtgagaacatgtggtatttggttttatgatcctatattagttcacctatggcctccagctc

SEQ ID NO: 599602 - DNA, 529 bp, Homo sapiens
gctagccagttatcccagcatcatttattgaatagagagagtactttccccattgttggtttctgtcagctttgttgaagatcagatggctgtaggtatgtagcattatttctgagctctctaacttgttccattagtctatgtgtctgtttttgtaccagtaccatgctgtttggtttactgtagtccctgcagtatagtttgaagtctggtagcaygatgcagcctgctttgttccttttgcttagaatcacctttgctattcaagctattttttggttccatatgaattttaaaatagtttttttctagttctgtaaagaacgtcattggtagtttgataggaatggaattgcatctatatattgctttgggcagtatggccattttaatgatattctttctatctatgagcatggaatgtttttccatttgggctatctctgatttctttgagcagtgttttgtagttctttttgtagagatctttcacctccctggttagctatattcctaggtattttattct

SEQ ID NO: 599603 - DNA, 529 bp, Homo sapiens
gctagccagttatcccagcatcatttattgaatagagagagtactttccccattgttggtttctgtcagctttgttgaagatcagatggctgtaggtatgtagcattatttctgagctctctaacttgttccattagtctatgtgtctgtttttgtaccagtaccatgctgtttggtttactgtagtccctgcagtatagtttgaagtctggtagcatgatgcagcctgctttgttccttttgcttagaatcacctttgctattcaagctattttttggttccatatgaattttaaaatagtttttttctagttctgtaaagaacgtcattggtagtttgataggaatggaattgcatctatatattgctttgggcrgtatggccattttaatgatattctttctatctatgagcatggaatgtttttccatttgggctatctctgatttctttgagcagtgttttgtagttctttttgtagagatctttcacctccctggttagctatattcctaggtattttattct

SEQ ID NO: 599604 - DNA, 572 bp, Homo sapiens
cctgaatgtgaatgcttagcagtaattgccccamactgaaaacaactcatatattttttaactggtgaacagacaaagacacgttgctgtatccatccaatgggatactaactactcagcaataaaaaagaacaaaatattgtttcacacaacactatgaatgaatttcaaattcatgctgcttagtaaaataactgaaaaccaaaatgttacatattgtataatgtaatttatatgacattctgaaaaaggcaaaactactgtgaaattactgagcagtggtgccaggaattgggtgttggaggagatgttgattttaaagaagctggagaacttctgggttggtgatgatagaactgttctatatcattgtggtggataaaactttatacatttatcaaacctatagggttgtcacacttgtttccaaatggctgcaccattttacattcccaccagcaccgtgcaagccttccatttttccacatcttcaccaagacttcttatctcacttcttttttgttaatgaagcatattgcaatttatcagttatcagtgcaatgtgttcagca

SEQ ID NO: 599605 - DNA, 572 bp, Homo sapiens
cctgaatgtgaatgcttagcagtaattgccccaaactgaaaacaactcatatattttttaactggtgaacagacaaagacacgttgctgtatccatccaatgggatactaactactcagcaataaaaaagaacaaaatattgtttcacacaacactatgaatgaatttcaaattcatgctgcttagtaaaataactgaaaaccaaaatgttacatattgtataatgtaatttatatgacattctgaaaaaggcaaaactactgtgaaattactgagcagtggtgccaggaattgggtgttggaggagatgttgattttaaagaagctggagaamttctgggttggtgatgatagaactgttctatatcattgtggtggataaaactttatacatttatcaaacctatagggttgtcacacttgtttccaaatggctgcaccattttacattcccaccagcaccgtgcaagccttccatttttccacatcttcaccaagacttcttatctcacttcttttttgttaatgaagcatattgcaatttatcagttatcagtgcaatgtgttcagca

SEQ ID NO: 599606 - DNA, 587 bp, Homo sapiens
tcctcttgaaggtaggttttacctcaaggcagtatttagaagctatattgtcagcttttaatagaataaatcaataaaccattcaaatcatttaatattctcagacttatcaatgcagaccaaaaggtgggaggaaaataacactgacaatgtttatgatcaacttttttcaccttaatataaacataaagtccgagacacatrgggggaagttctaatatggaggttctaatatgcacaggttatatgtctaatgttatgacatgttttttatcgtttaaatttaaatacatttttaaatgtcattatactcagacccataaagtagaagttcttaatttccaaacatatgggaatttcaagctatctattttattatattactattatcttttcatggagatgaggtctcactacgttacccaggctggtctcaaacccctgcgctcaagtgatcctcctgccttggcctcccaaagtgctgggattacaggcataagccaccacgcctaaaaagttgtctttttattaatgatttctggcactataccatatgtggtgtcaaacctctgaaatgtattaatttt

SEQ ID NO: 599607 - DNA, 587 bp, Homo sapiens
tcctcttgaaggtaggttttacctcaaggcagtatttagaagctatattgtcagcttttaatagaataaatcaataaaccattcaaatcatttaatattctcagacttatcaatgcagaccaaaaggtgggaggaaaataacactgacaatgtttatgatcaacttttttcaccttaatataaacataaagtccgagacacatagggggaagttctaatatggaggttctaatatgcacaggttatatgtctaatgttatgacatgttttttatcgtttaaatttaaatacatttttaaatgtyattatactcagacccataaagtagaagttcttaatttccaaacatatgggaatttcaagctatctattttattatattactattatcttttcatggagatgaggtctcactacgttacccaggctggtctcaaacccctgcgctcaagtgatcctcctgccttggcctcccaaagtgctgggattacaggcataagccaccacgcctaaaaagttgtctttttattaatgatttctggcactataccatatgtggtgtcaaacctctgaaatgtattaatttt

SEQ ID NO: 599608 - DNA, 577 bp, Homo sapiens
ccagctatgtggaactgtgagttaattaaaccttttttctttataaattacccagtctcaggcagttctttatggcagtgtgaaaacggactaatacagtttgtaaagtcaaaacttattttgacttatttcattttctccttattcatgtctgtatttatgaccttccttctatttccctctagcacaattttccttttacttgaagaacacccattggaatttattaattgtaggtcagcaatagtgaactcatttgtgtgtgtatgtgtgtttgtatttcatcttcacgcttaaagactaatacaagtgtgtttattttttcctcaacatatygaagatgatattgtgctgttgtcatttgacttttattgctgctgttaaattgtccactgttaatttggttggtgaacttttgcagatgtatttttctcctcctacttgcttttaacattttcactttggttctactgttttactatgatgtatttttctgtaaatttttttctatttgccctgagatctattgggattcttgaactgtgaattgattttttataattagtcctggaaagtt

SEQ ID NO: 599609 - DNA, 583 bp, Homo sapiens
tgggtttggcacataatattaatgatgcagtatcttatgcctagtttcataacattacaaggtagagttagccaacagccactaggactggattaaggatctgtggggtactggcacatgtagtaatttaccagctttcccttccattcccctgacataacagattatctttgaggaaaaaattattattcactgtgaaatcaaacacaactacaattcaagtgtaaaccacaaatcaaatatatgcttccatggaatgtccaatttgaacatgagagataaataaattagaatgtggagtttccttatggagtaaatataaacctttgacttttaatctggacttgaatattagaaagtggctactttaaataagtgtgattagtaaattaaggkgatattctttcgtcagtcctgatgggcaggttgcagataagagacccagatgatgatttctatctctttggtgtatgtttatctcctgagaggatgctgtcatataccaagtaggaatccttactctgcaagtgtttcttatctgtaagaacagcaatgctcttccttaattaggtgttttagcccc

SEQ ID NO: 599610 - DNA, 556 bp, Homo sapiens
cagtggagtcccagaagaatggttaccctataacccaatgggctactgatactgatatacccttcgtcataggggggaaaggagatgggggaatgtggtaacttgaagaatagtaaatgatttttaggggggaaataaatgsgcctaatgcttagacaatggttagtaaataattttctttaacaattgaataggacaaaaagcagacaatggtttgggacaaagtctgtctgagctctaggtgtgatgtatatttttcagtctcttcatctgtaataagctttaatcttctctggataatggaattccagggacggcaattatgttcctcttttggaggcgtagtttctaagtaggtaagggagctttatagaatagtttcatcctgtgcttttggagaggtagaagattgagagaaggcatatggggaaggtcagagagaccttggggcttcatgatgtcaaagggcaaatttcacggttatgttttctgagcaccaacaggacttatgtctcctagtcatttctggctctgattcttttcacctcctgcatac

SEQ ID NO: 599611 - DNA, 584 bp, Homo sapiens
gtggtctcactataagataatacactggtagtaatatgtaatatgtctcacacaaaataatagtatgaattacccagagcattgactgagttcttgacaaaggccatgtgtttcgttatctgttataaacaaacaacagtaacaacaataagtagtaaaattagagaaagaggtgtttaagggcccactcctgcaaaaggctataagaaataaaaaccaggtccaacaamgtgacctctatagaaatgacagaactggccatagttgtttgctttagacaacatacaaaatcatatatatgagtataaagtttttctgtcaattcatgcaaagaatcacagttcattcttccaaattcacaatggcaaggtcctgcagaaatccagggccacaactctctcacccaattcagtaacatctcagcaaaggtgatcttaaagcagaacctaacatgaaatatgtgtgtattgttgttgttgttttaaatcctctttggaacattatgacccataggcggaaatagaatttacagtaatgccaaggattaaaaggaatgagcctcttgtttagaaaattagctaatc

SEQ ID NO: 599612 - DNA, 355 bp, Homo sapiens
tagtatattttaatgtaaatttaaatttaatagtattcaatatacttaaacttgaatttctcttttataaatgaacaasttttagtagatttgagggtcattttcacatttaaaaaatatctgtgtagatactttgctcattttgaacatagccttttttccttcatattaaaaagttccctgcctgttaaaacatcagcacttcaagatatcttgtgaatattgtttctgaatttgccatttgtgtttaggccattacttgcaaatggtttgattatttttatgtagcaaaatgtgtcagtcttttattgcttctcatttttgaatgatagttcaaaagctttaccgtaaaact

SEQ ID NO: 599613 - DNA, 605 bp, Homo sapiens
aacacattcaattcatatattgggagaaagtgacatcttactgatgttgagacgtcctttccatttgtaatgtgtacttttctgtctttcaggtgtgttttataattttcttcaatgtttttcacattattttgttaagtttatgctttagcatttgtattgttgttgctgacaacatactagatttttattcttccattgtatcttctaaaactagttattattggtgtattagtccgttttcacactgctatgaagaactgcctgagactgagtaatttataaaggaaagaggtttaatagactcacagttctgcatggccagggaggcctcaggaaacttayagtcatggcgaaaggagaaacaagtaccctcttcacaaggtggtgagagagagagagagagagagagagaaagaaagagagagagagagatcagggtaaactgccacatttaaaccatcagatcttgtgagaagtccttcactatcacgagaacagcatgggagaaacctcccccatgatctaatcacctcccaccaggcactccctccaaatatagggattacaattcgagatgagatttgggtggggacacagagcca

SEQ ID NO: 599614 - DNA, 605 bp, Homo sapiens
aacacattcaattcatatattgggagaaagtgacatcttactgatgttgagacgtcctttccatttgtaatgtgtacttttctgtctttcaggtgtgttttataattttcttcaatgtttttcacattattttgttaagtttatgctttagcatttgtattgttgttgctgacaacatactagatttttattcttccattgtatcttctaaaactagttattattggtgtattagtccgttttcacactgctatgaagaactgcctgagactgagtaatttataaaggaaagaggtttaatagactcacagttctgcatggccagggaggcctcaggaaacttatagtcatggcgaaaggagaaacaagtaccctcttcacaaggtggtgagagagagagagagagagagagagaaagaaagagagagagagagatcagggtaaactgccacatttaaaccatcagatcttgtgagaagtccttcactatcacgagaacagcatgggagaaacctcccccatgatctaatcacctcccaccasgcactccctccaaatatagggattacaattcgagatgagatttgggtggggacacagagcca

SEQ ID NO: 599615 - DNA, 620 bp, Homo sapiens
gatcttgtttgttatttaagatcatgtatacacagagagagacttaggcagccaccattttcttaagccaacctcttttaacttgagttggaggcactggaccctctgagtagaatgtgcttttaaatgtggtgtttgctgtaaaaagtaaatgttcttactctgttgctgagttgacccttctaatgctgttctcctctggcacataatcaaacatttagaaaaaagtttcatgtgaatttttgcataatcatccttctatctcttaagtgtttctttttggaatgggacagacatttcctgatccaatttgtaaacgaagattatctgttggcttgagtaatgtctgcatctttctcccaagaagaaggtcttaggaagactcatattttcaattttaagaaatttcattttagcactctccttttctcctgataaaaacacagtgaatattaggactacaagaaatwtgaaaagcttgggcttatataaaattagcttgaatataatgttctgtgcaactcataacaaattatcatttgaaggtaaatcagtcctttgctcattgttcacactgccaaaacacctaagcataaatctatgtatttaataagaataat

SEQ ID NO: 599616 - DNA, 592 bp, Homo sapiens
ttaaatatattataaaatgtaggaaagattggaaaagtcctaaattacaaattaaatttcattgaaacatttaaataataacaacctagctaagtattttgtgtagtttttgtgccctgaagttaaatctctatccccttaaatattaaatacaggagaggccagttgtttctttaataaattagttatatttaagggttttcagaggccaaagtgaaggccaagggagaagacagcgtgcaactgaagcagcactacttgcaatttataggctaaatggatgaaccagaaggacatgctaatcaccaaataacatcatcaaatacaaaatataggaacatgattatcatgagcaacaactcagggaaaaatggacatcaggaacaagaaaattataaatgatatataaaaaacaaaaattatactttttcattcttacaatatatattacatatayagtatcaaaacatatgcaaatacacactatatactgtatgttcttttgagttgttttgtacaaatagactctataatcttaatttaatcatagtggacacatccatattatcacttaacatttcaactatgcatc

SEQ ID NO: 599617 - DNA, 608 bp, Homo sapiens
tatggactatgtgatctcttaagctctttaaaataatctattaagcaaataaaaaatgactatgtgatacatgacatttggaaaatagtctctggaagataaaccatagtgccctaatttataagctactcctagcaggtctttgaggctttgtgtcaatttggacacagaccagatcttggaccacaagagcaccatttggggtgacgtatcrgtaaattacttttcagtaccctagaggaccagaagagttaatgcagcttccaggaaaacagaacactgggcagtgtaacttaggtggtgggatggctggatcggatttgtcataagcatgtctcaattgtgactttagagctcaagctgtgacagtgcatcagggcttttcctctcttctcttccacccgctatgtttctaggggactgagcatcagtgcccctccctgcagagttgcagcactgggagattattatggtcttaaaagtgaaagcctataatttaaggtcgtaacaccatctttaaaatggagattgaaatacagtaatataaaatacataaggcgtcaacatgtagcaaacgtctcttcccattggatttttccatttacagg

SEQ ID NO: 599618 - DNA, 233 bp, Homo sapiens
aaaccacctgcacgatccagtcacttcccaccaggtcccacctccaacagtggggattgtaattcaacatgagatttgagtggggacacagatmcaaaccgcgtcactgccaatgagtgccgaggcctgagtcccatgctcaggtctgcatctgcatcttttcctgactctgggggctccctaccttccaataaagtcttttgtgggcccagctgccagaccctttcagtcac

SEQ ID NO: 599619 - DNA, 578 bp, Homo sapiens
aaataattcaccctgttgggaagccagacacctagtactgtctctaactcagcaactaactgtgtggtttcgggtgaatcacacagtcctgtgcgttggtctagatgttttctcaggtccctttgggcaagaatacagccagccctgcataccctcaggttctgcctgagtcgaccaacagaggattgaaagtactggggaaaaaaatataaaataacaatacaacaataaaaataatacaaataaaattatagtatgactacgcagacagcattccagctggggcaggaagtcactgcgtctgcaggactgagcgcctcgcacagagggaagtcatggaataaggtccyggctgcagcacttggaatcctgctgtgggagagataagagggacgtggctgaaatctcctgttccttggctggctgagatctcggccagccctcatggcctgcagggtgcctgtggtttgcccagcgtatccatgtgtatcctcctgctgaatctttgctgcaccctcatgagagtgaagaggctggggttaccgatctggtgctcagacatggaaaccaggacgtgc

SEQ ID NO: 599620 - DNA, 621 bp, Homo sapiens
aaaaaccaacacccttccatgattcctcagaaaactaggattagaagggaacttccttaacatawtaaagagcatttatgaaaaaccctcaggtaacaacatatcaaatggtgaaatactaaaagctttctccctaggattaggaacaagacaaggacactttctttcaccactgctatttaacactgtccaggaaacagtagccagtgcaattagacaagaaaaagaaataaaagccatccaaattggaaaggaagaggtaaaactatttctatccttagatgatattatcctatatatgaaaactcccaaagtattcacaagaaagctactagagctaataaatgaatttagcaaagttacagggtatgatataaacactcaaaaatcagttttttctatacattgccaatgaaccctcttaaaaggaaattaagaaaattctatttacagtggcatccaaaaaagaaaatgcctaggaataaacttaaccaaagaggtaaaatagttatagactgaaaactacaaaacatttctgaaagaaattatagaatacctaagtaagtagaaagacatcctatgtccacggattggaagacttaatattattaagatggcagt

SEQ ID NO: 599621 - DNA, 560 bp, Homo sapiens
agtggcagaataaggagaattggagaaccagtacagaagattcaaaacccagatagtagaagtcccagaaaggaatacaaaaggaaagaaattgccccaaaaaattttcaagaaaatttccaagaactgaaggaggaatttccagattgaaagggcmcaccaaacacctattgctatgatatagtccatggccaagtatggtcctgaaatttcagaatcctagggacaaaaagaaaaaaaatcctaattgttttcaaagagaaaaaaatcggtttaaggccaggcacagtggcttatgcctataatccaagcactttgggaggccgaggcaggcagatcacctgaggctgggagttcaagaccatcctggctaacatggtgaaaccccgtctctactaaaaatacaaaaattagctgggtgtggtggcgtgcgcctgtaatcccagctactggggaggctgaggcacaagaatcgcttgaatcccggaggtggaggttgcaatgagctgagatcacaccattgcactccagcctcgagcaacagagtgagaattgtacaa

SEQ ID NO: 599622 - DNA, 557 bp, Homo sapiens
aagttctgattagaatttcatgaaayttatgcactaatttgaggaaagtgatcatccttatagcatagaaacttcctgcctgaatattctattaatatgtctttaatgtattaaggcctcagtagacatagaagttctttatttatcattaaatgtattccaatatattttgttttgtcttcttgtgtgtgtagtaaaggtacttgatagggatattctttccactatattttctaactaattattgctggcttcttaatttcacaaatttatctttcatctagcaattttattgatccctcattttttctaaattactttaggtaattaacatgtgatgcctagacagaaaaaaatacaattatgtattatccctttttttcctcaccacattggccagaatttctggaacagtgtttaataacagagaagagagcagtcaaccttgtcttgtttctgatctcagtgggaatttccctagtggttaacattaagaatgaggttggctgttggtttgagataagtacatttatcataaaaaccaaataattgccaag

SEQ ID NO: 599623 - DNA, 611 bp, Homo sapiens
cctctttttctctccaatccacatgcttagacacctcttctctattattttggcttcataattctgttcccaactcaaactaacagaaaaagaatgaaaacaatgtgacataagccaagtaaccctatccaggcatagcagccaaataaacaaagcagmtattcctacgctttgtgcaaaaagccttcttcctattatgacagtgctagctgcagaccgcaatttagttacaactgtggtaagcaaaatgtgtgtccaaattgattaatcttatatccaacttatattaagaaaatgtatgctaaagagaaatgtttgaaatttgctaagaatttttaatattcatattcaaaactagaaggttagtatttttgtttttatattcataagtctgtaaaaattagtctatatttttattttctagaacatatcactgataggtttcagttttaaaatgagactagcttaataaagtaaaatgataaaaataccaaaatgttccaagttctaaagaaaattcaataggagttatctgttccttgaaatgtttaaagaagaatccataatactgttgggccttggcatccccttttgaaaataattctttaaat

SEQ ID NO: 599624 - DNA, 641 bp, Homo sapiens
gaaaaaagtttctggaggtagatggtggtgatggctgcacaacaatgtgaattttttatttgatatatattttaccatatttttaaaaactctattacaaaaaaaagaattggtctagcctagataatcttagtagccatgttttattgctattcaacttgtcactcatcaatttatataaactcaccagccttttaccacttagctgtctatactycacatcagttcttctctcagtgtttcttccagttcactgcaatttgagactcagaagtttttctttgagaagtcagtatgctgtatccattaaggaacattctgttcaggaaagacatctaagtattccaaattgataagggaggtaaagacaaaacagataagtgatttttaaaatattattggcttaaattacgaaagcaccacatgcttattttttttaaagtaaacaattcaagatgtacaggatataaagtgatagtcctctccctcactccccagggctatccattgttagtaattgggtatatatcctttcagagtatgagaatcatattttttcaaaaatgcaagcatgctaatctgaaaaaggttttaaatgttttaatgtcatcatcttcatcactaagatttgttgaggtttg

SEQ ID NO: 599625 - DNA, 592 bp, Homo sapiens
attaaactgaatatccagacctgaacttacatattcaccattttttctcacctgtaccattgcaagagagtaatgagtttaataagctgctgcgtggaataatactaccttttattttccctaaatttacttcacataaatttcaaaggataatctctcctcttaccactactagtgtcctgctactgatcacgaagtatatttattttacctggcctctaaattgtgtttwtctcttttagttctagactaaattttccattgttatgcctaggccctcttgccaccatgctgttaaattgttttttttagaacctctagtcttaaaacatggctctttttagcttatcctctggtacagccctcattctagaccatactaaaataccagacaatttcagatacatggaagtagcgcactaatctcaaatacacagaagcagtcttcttcccttcaacatttaaattcatattacttcataaataagaaaggaaaattaacatttaatgaatgagcgtattctacaggtgtcacagccctacaaaagtagacattgttagctttattttcaaatgaagaaacctagactca

SEQ ID NO: 599626 - DNA, 592 bp, Homo sapiens
attaaactgaatatccagacctgaacttacatattcaccattttttctcacctgtaccattgcaagagagtaatgagtttaataagctgctgcgtggaataatactaccttttattttccctaaatttacttcacataaatttcaaaggataatctctcctcttaccactactagtgtcctgctactgatcacgaagtatatttattttacctggcctctaaattgtgtttttctcttttagttctagactaaattttccattgttatgcctaggccctcttgccaccatgctgttaaattgttttttttagaacctctagtcttaaaacatggctctttttagcttatcctctggtacagccctcattctagaccatactaaaataccagacaatttcagatacatggaagtagcgcactaatctcaaatacacagaagcagtcttcttcccttcarcatttaaattcatattacttcataaataagaaaggaaaattaacatttaatgaatgagcgtattctacaggtgtcacagccctacaaaagtagacattgttagctttattttcaaatgaagaaacctagactca

SEQ ID NO: 599627 - DNA, 608 bp, Homo sapiens
aaaacttagtggagaagtttctggtcagtataattttataatttgcatttgtccctttgatttgtatcaacacttccttagtgtttgtgtactctaaaaataaatttagaagtgtgtttatttgaaagacacaaaatcttaattttttaagttagtatgtatttttaaagaatcactttaatatagcatctgttgtatcatttgtgcttttttttttccattaaggaataaatgctaaattacagttttgatccttactgaaggatcaggaaatcatagattgaatccttgactgaaatgtctttaaataagttaatctttaaaacttctgcggtgctttaagtgtcttraatcactgatgtttgtaacaattacaagtacattcctggagccagtttgtatctcataaatcacaatacctgcaaaatgacaatgtgggcaactcatatctatttatattatcaatggatggtaaatatatgttcatgtctatcagtgaatatcaggctaactggtttttatgtcagcagactgagaactatgagcagagaatacgtgaacaacaggaacagctgtcacttcaacagactattattgacaagctaaaa

SEQ ID NO: 599628 - DNA, 569 bp, Homo sapiens
aaaagtaacttactaagaaaaaggcaatatgatttttttctaacaggaaattataatctggttaaaccagtggttctcaaaatatggtccaggatccttaaaggtcccaagagcctttcaagggatccactgttgggagaggtaatctgccatggcccctgagcatcctggcacatttttgctgttcatgtcaggaatacaagaatctcactgttctttaccggagccttttcttaggcttgtgtttgcagagcaaatttgaaagactaggtaatgtctccctcttggacaaagagcaggcatgcttactgcctgctataaaatggtgggttccccaagctcaatatgcctctcctttaatgtaaccattgcatgtataagcatcatctgtgtctgtgttacctcctaggcaggaccaatgaaaataagatgttcttcgctactarctttactgtaaataataaagtcctttttctctgattcacttttctgttttcctccagtacccacccatgaaacagtaactaacttattagcttgtaagtagaataaaatgaaatcccagagcc

SEQ ID NO: 599629 - DNA, 593 bp, Homo sapiens
ttatttcctatattaagattcccctttgacttctgttcccttttaattttagcattaataatattattgattccattaaagtgactgcaggtctgataacttacttactttatataagtaatcttaagtctttttttttggtctgagactgagtctcgctgtgtcacccaggctggagtgcagtgcagtcgcatgatcttggctcactgcaacctctgyctcccgggttcaagagattctcctgcctcagcctcctaagcaactgggattacaggtgcatgccaccatacccagctaatttttgtattttttagtagagacagggtatcatcatgtgggccaggctgatctcaaattccagacctcaggtgatccgcccacctctgcctcccaaagtgctgggattacaggcttgagccaccatgcctggcctgtaaatgtatttctgtgactactgaaaaaataataattttgtttataaaagggaaatatttaaagaaacttaggacaagcatgaatattaaccagtaaagtcattctcaagctttagtatgcataagaatcaagtagagatcttgttacaattgtataca

SEQ ID NO: 599630 - DNA, 593 bp, Homo sapiens
ttatttcctatattaagattcccctttgacttctgttcccttttaattttagcattaataatattattgattccattaaagtgactgcaggtctgataacttacttactttatataagtaatcttaagtctttttttttggtctgagactgagtctcgctgtgtcacccaggctggagtgcagtgcagtcgcatgatcttggctcactgcaacctctgtctcccgggttcaagagattctcctgcctcagcctcctaagcaactgggattacaggtgcatgccaccayacccagctaatttttgtattttttagtagagacagggtatcatcatgtgggccaggctgatctcaaattccagacctcaggtgatccgcccacctctgcctcccaaagtgctgggattacaggcttgagccaccatgcctggcctgtaaatgtatttctgtgactactgaaaaaataataattttgtttataaaagggaaatatttaaagaaacttaggacaagcatgaatattaaccagtaaagtcattctcaagctttagtatgcataagaatcaagtagagatcttgttacaattgtataca

SEQ ID NO: 599631 - DNA, 589 bp, Homo sapiens
cagccgtgctaaggtaaggcaaaaaccaagccctagtccttctctcactttcaagtcttcttaagggaggaagagatttgatagattatccactaaatttcattgggacagtcactaggggctggatgggtggaagtcattttatataaggccaaatcaaagatttttaaaacaagttaaggataaagaaaagtaaaaggcggaagatgataaatgagaagtaacttggaatcacattaaatacagccatcmcagtaaaaaaaaaaaaaaaaaaaaaaatctattgagctcttgctgggattgaacagagatgaccagtttaataattcaatgggcctagaacaatggcccaaacttgtaatcctagcactttgggaggctgaggaaggaggatcacttgagttcaagagttcaagaccagcctggacaacatgtctgtacaaataatttaaaaagtagccgggcatggtggtgcatgcctgtggtcccagctactcagaaggctgaggcaggaggatcatgtgagcccaggaggtcaaggaagcagtgagctgtgactgtgcccctgcactccagcctgggtgacaca

SEQ ID NO: 599632 - DNA, 615 bp, Homo sapiens
ggatttttctctgtgatctcctctcctcctgcaaattagcccgaggtgggatctcagagacctggccctgcctccccaaacccattcccacaccgaggccagsctgggaagagggcaacagagctcatatctctgtggagaggaggctgggctcaatgcaggcctctgtgtcgttgttcatcttcacttcataggtcttgtcctgagacccctcctgctgacacaccatggttgtctggctctcccaggaaaagcacctacagtgttcaagatggagaaaatcatcaggaactgccaccctcccccactttgctcagcacacgtgcacacattactcatgcacacacacacatgtacatgcatgcacaaatatgtgcacatacacacatgtgaacatgcgtgcaatttctgtggcttcattctcctgtgatggccgatgaaaccatggagccacagaagtgttaagattagggagaaggtttcatgtgggagaaggacatctggtgttggatccaaggagatctgagtcctgaccccaagtcacttatcctctggcccaagtcacttagcccaccccattcctcagtttccctttctatgaaatttatattacat

SEQ ID NO: 599633 - DNA, 617 bp, Homo sapiens
agagggttttgctctcctgagcagagggcagtgagcctgagtccttgctgagtctaaatccctcctgatgtccacacccttccacactaagatgtgcctttcccactgggacacggtcttctggtcactgggtcatgtcttctttagctctgggccatgagctcttccttttcttatctgtgctcagctcagtgcctccctctgtcttacttcctgtagaccctgcatgcccggcacgctttatcctcagaccactgagggcatcagagaaagatcccagtccatcctctcagtgctgagagctgaatcagtgcccctggctttgagtatctcaggcagggtaagggcagttctctctcgtggaggcctgcagatcrccacctgccccgcagtgggaaggaaagatgagaggtgagagctccaggtagattaggaggcgagggagatagagtgggctttggagaggaacggggggatgaactggagatgcagagtgtcagcaggcaatagcatttctggggaccaccgggcacaggatgtgctggcctatcctcaacacaagcaatgctggtacctgagctgtccttaactttgagctgcaacacggaggacaaggc

SEQ ID NO: 599634 - DNA, 607 bp, Homo sapiens
atacccatatctatatctgtctacgtgctaccacaaactayggacactcctggcattgtatttttaagttgatgattatacagaatgtttaaaaacccctgggctacaccatgaagcagatttgatcagtggaagccatttgagctggtttcatgtccttttgccattttcccataattttatttgtttggctccttttttttttcagtacaaacatacatacacacaccaattacatttacatctacacctttatctgtatctgtctacctacatactaaaaaccataaatctactgataccttcaatcccaatctagtaccacagatcacagggatcattccagtttcttctctttctatacttgcaatttccttctcagatagtgaaaaacctggcttccaataaccttaaatatatttacctatttgatcaatcccagtgtatgtaacttatctcccatcttccctgccactccctccctgctctgactctgattcccattgcaagccactctcccataagatgccttccttaactggcttgggctctgacactccgcatcaggacacactccttcctcacattaacactgtcttcacccagt

SEQ ID NO: 599635 - DNA, 632 bp, Homo sapiens
gatcctggctgggtagggggaattgttcagggatggggaaggggcacttcttagctgtgtctcatcgagtacgggctcaataaataattgaattttgagagtggttcttattttatgagagaagaattgcttaattgtattaagacctatgataaatttatttctctctgatactttataaacaggcatcaatactttacaggggccacaggaaaacatgaaatgagtttgtgggaagtaagttagtttttctattgctgtgataatagattaccacaaacttagtggcttaaatgagcacgaatttattaacttagttttgtggttcacatgtctgaaatgagtctcacaggattagatccttgtatcartgctgagctgcattctagaagctttagagaagaattccattttttcattcatattccttgacctctttccagcaatggccagatgagcctcccgtcacatcacattgtctggtactgactcgtctgcctccatcttccacatttaaggaccttttaattaattacattgggtccatctggataatccaggataatttctctatgttaaagtcagttgattggcaaatgtaattcctcttcccatataattcaacatattca

SEQ ID NO: 599636 - DNA, 632 bp, Homo sapiens
gatcctggctgggtagggggaattgttcagggatggggaaggggcacttcttagctgtgtctcatcgagtacgggctcaataaataattgaattttgagagtggttcttattttatgagagaagaattgcttaattgtattaagacctatgataaatttatttctctctgatactttataaacaggcatcaatactttacaggggccacaggaaaacatgaaatgagtttgtgggaagtaagttagtttttctattgctgtgataatagattaccacaaacttagtggcttaaatgagcacgaatttattaacttagttttgtggttcacatgtctgaaatgagtctcacaggattagatccttgtatcaatgctgagctgcattctagaagctttagagaagaattccattttttcattcatattccttgacctctttccagcaatggccagatgagcctcccgtcacatcacattgtctggtactgactcgtctgcctccatcttccacatttaaggaccttttaattaattacattgggtccatctggataatccaggataatttctctatgttaaagtcagttgattggcaaatgwaattcctcttcccatataattcaacatattca

SEQ ID NO: 599637 - DNA, 451 bp, Homo sapiens
attgaggagaatgaaagaagagatgacaataaacaacaaatgtaaacaaaactgtggaattggaatgacaaatagaaaaataacagagtttgtgattgagcaaagccaaaatcagacatgaagaggggactgttgtgcaatttttgccagaacacctggaaaatttgtcctatttgaatatagcattttcatgtgcagaaatttacatgtatgtacattttagtgcatattctgcatcaaagtttgatcattcttcttcaactgaatcctgtgcatttcttgctayttgatcctaggtattttacattgttctcatgaataaggtcattgtctcatttctctctctctgtctctctctctgtctgtctccttcatttctttttcttatgctgttccctatgaagtgtatgtgttagggaaagtcactcaatcacattaagattttatctct

SEQ ID NO: 599638 - DNA, 174 bp, Homo sapiens
ggggtttggtgtacagattatttcgtcacctgggcactaagcatagtacctgacagttttagtttttttttcctgaacccctccctcctcccatcctkccactcaagtaggccacagtatctgttattcccctcaatgtgtccacatgttctcattacttagctcccacttata

SEQ ID NO: 599639 - DNA, 509 bp, Homo sapiens
tttatagtaggctaaatggtgaccctcaaaaagatatgcccatcccctaatctctagaacctgtaaatatgaccttatttggaaaaagggttttttttttttttttttttgagacatggcctcactctgtcactcaggctggaatgcaatagtgtgattatagctcactgcagccttgaactcctgggctcaagtgatcctcctgctttagcctcccaaattgstgggattacagatgtaaactatcatgcccagcctggaggaaggatttttgtagatgtagttaaattaaggatcttgaaataaaattatcctagattatctgagtgggccctaaatccagtgacaacggtccttataagagacacacagggaagaggagaaggccgtgtgatggcttaggcagaaagagtagtaggcaaaagccaaggaatgcatggagcccccaggagctgggagaggcaaggaaggattctcccctagtaacttcagagggagggcacccctaa

SEQ ID NO: 599640 - DNA, 511 bp, Homo sapiens
accctcaaaaagatatgcccatcccctaatctctagaacctgtaaatatgaccttatttggaaaaagggttttttttttttttttttttgagacatggcctcactctgtcactcaggctggaatgcaatagtgtgattatagctcactgcagccttgaactcctgggctcaagtgatcctcctgctttagcctcccaaattggtgggattacagatgtaaactatcatgcccagcctggaggaaggatttttgtagatgtagttaaattaaggatcttgaaataaaattatcctagattatctgagtgggccctaaatccagtgacaacggtccttataagagacacacagggaagaggagaaggccrtgtgatggcttaggcagaaagagtagtaggcaaaagccaaggaatgcatggagcccccaggagctgggagaggcaaggaaggattctcccctagtaacttcagagggagggcacccctaacgataccttcattttgtattttg

SEQ ID NO: 599641 - DNA, 613 bp, Homo sapiens
cttcttcttggtcctcaaagttctggcccatttctccttctttctataagaaattccctgatatttctagtagcaatctgggtagattctctcctgggcttctcccagttcttctgctcccatcccctctccatcatccacaactatatttgatattgamtgattcatagattactaacaccacttctactatcagttcattcgcatcacatgacaaacagtgattgcacacctactacatttcaaccctctggtcactccaggtgttttgttgtacgttacttctgtggttagccttttacctcctggcctagttatagagttgggcctaggtatgatattcagtttcttcttgggagagtagtaggagccttaccagtggtcttcctcatgttctctgctgcacgggacctcccaaagtctgataggatggagggcaagaatgggcacaaggaactataatcctttttcaattctgctccttagcactcttgcatctgctagctgggatcttacccagtgagatcaatctctttttctctatctccatttgtattcttatagtgggagatcaataaaatactgactgcataaataaattaataaatgaaaa

SEQ ID NO: 599642 - DNA, 613 bp, Homo sapiens
cttcttcttggtcctcaaagttctggcccatttctccttctttctataagaaattccctgatatttctagtagcaatctgggtagattctctcctgggcttctcccagttcttctgctcccatcccctctccatcatccacaactatatttgatattgactgattcatagattactaacaccacttctactatcagttcattcgcatcacatgacaaacagtgattgcacacctactacatttcaaccctctggtcactccaggtgttttgttgtaygttacttctgtggttagccttttacctcctggcctagttatagagttgggcctaggtatgatattcagtttcttcttgggagagtagtaggagccttaccagtggtcttcctcatgttctctgctgcacgggacctcccaaagtctgataggatggagggcaagaatgggcacaaggaactataatcctttttcaattctgctccttagcactcttgcatctgctagctgggatcttacccagtgagatcaatctctttttctctatctccatttgtattcttatagtgggagatcaataaaatactgactgcataaataaattaataaatgaaaa

SEQ ID NO: 599643 - DNA, 613 bp, Homo sapiens
cttcttcttggtcctcaaagttctggcccatttctccttctttctataagaaattccctgatatttctagtagcaatctgggtagattctctcctgggcttctcccagttcttctgctcccatcccctctccatcatccacaactatatttgatattgactgattcatagattactaacaccacttctactatcagttcattcgcatcacatgacaaacagtgattgcacacctactacatttcaaccctctggtcactccaggtgttttgttgtacgttacttctgtggttagccttttacctcctggcctagttatagagttgggcctaggtatgatattcagtttcttcttgggagagtagtaggagccttaccagtggtcttcctcaygttctctgctgcacgggacctcccaaagtctgataggatggagggcaagaatgggcacaaggaactataatcctttttcaattctgctccttagcactcttgcatctgctagctgggatcttacccagtgagatcaatctctttttctctatctccatttgtattcttatagtgggagatcaataaaatactgactgcataaataaattaataaatgaaaa

SEQ ID NO: 599644 - DNA, 613 bp, Homo sapiens
cttcttcttggtcctcaaagttctggcccatttctccttctttctataagaaattccctgatatttctagtagcaatctgggtagattctctcctgggcttctcccagttcttctgctcccatcccctctccatcatccacaactatatttgatattgactgattcatagattactaacaccacttctactatcagttcattcgcatcacatgacaaacagtgattgcacacctactacatttcaaccctctggtcactccaggtgttttgttgtacgttacttctgtggttagccttttacctcctggcctagttatagagttgggcctaggtatgatattcagtttcttcttgggagagtagtaggagccttaccagtggtcttcctcatgttctctgctgcacgggrcctcccaaagtctgataggatggagggcaagaatgggcacaaggaactataatcctttttcaattctgctccttagcactcttgcatctgctagctgggatcttacccagtgagatcaatctctttttctctatctccatttgtattcttatagtgggagatcaataaaatactgactgcataaataaattaataaatgaaaa

SEQ ID NO: 599645 - DNA, 576 bp, Homo sapiens
tgaagcaaaccaccatggcacaagtttacctatgcaacaaacctgcacatcgtgcacatgtaccccagaacttagaataaattttttttaaaaagagagacagattaacacgaaaaaaaaagatattctctattctcaattcagtgggccaccttatgacaccaattctgtgtgatccagcaatagatgtttccaaaatgagaacattatgtgttacacaagcccaamgatgcaagaaaccagaaaagggagcccaggaaattcaggaatatattctacttttccatgcaagaagataaatatagatgataaggatggggataaagagaagcctggaatagaacagaattcaaaatcacaactcaagcagcattttagattgaaccagaaggaatttagccctactacattttaagtttttaatcagacaggaaaatttaacgggaaatgtaatggcatgctacacctggcaacgctggccagtaaccaaacatcctggaagtatgtttatggaggttgctgtgtcttgaacaaagctgagagcatcttgccctttaatcagcataggcactaacc

SEQ ID NO: 599646 - DNA, 574 bp, Homo sapiens
  misc_feature 133: n = A,T,C or G
gttgctgtgtcttgaacaaagctgagagcatcttgccctttaatcagcataggcactaaccagagaaggcttcctacatgcaatttgcatagagtcaaatgggaaaactagtcccaccagcttcttaactgtngaaataccaggataattccaataatgtcttgcatttgtaacagaatttkacaagttttgtaatcgtttccaagcattatcgtatctgagcctcccaacatccgttggggtaggagtgatctcagttttattgaatatcttcaggactttatgctgatatgttttagggaagagatattggcttcattgtctcagttgatggcattttcacgccccaaaaaccaaaaacaaaaaccaagaaaaacagggagtccaaaaggaaagtttctggagtcctgataaaggcaggctttcaggacacctgaccttacttttcattattaccacctgaaacctacacaccctaaaatggtcatggtggggtccctatctgtaaaactccagtatcatagaggttataaacttagagatcaatattcttaaggacattaggataagaact

SEQ ID NO: 599647 - DNA, 574 bp, Homo sapiens
  misc_feature 133: n = A,T,C or G
gttgctgtgtcttgaacaaagctgagagcatcttgccctttaatcagcataggcactaaccagagaaggcttcctacatgcaatttgcatagagtcaaatgggaaaactagtcccaccagcttcttaactgtngaaataccaggataattccaataatgtcttgcatttgtaacagaattttacaagttttgtaatcgtttccaagcattatcgtatctgagcctcccaacatccgttggggtaggagtgatctcagttttrttgaatatcttcaggactttatgctgatatgttttagggaagagatattggcttcattgtctcagttgatggcattttcacgccccaaaaaccaaaaacaaaaaccaagaaaaacagggagtccaaaaggaaagtttctggagtcctgataaaggcaggctttcaggacacctgaccttacttttcattattaccacctgaaacctacacaccctaaaatggtcatggtggggtccctatctgtaaaactccagtatcatagaggttataaacttagagatcaatattcttaaggacattaggataagaact

SEQ ID NO: 599648 - DNA, 574 bp, Homo sapiens
  misc_feature 133: n = A,T,C or G
gttgctgtgtcttgaacaaagctgagagcatcttgccctttaatcagcataggcactaaccagagaaggcttcctacatgcaatttgcatagagtcaaatgggaaaactagtcccaccagcttcttaactgtngaaataccaggataattccaataatgtcttgcatttgtaacagaattttacaagttttgtaatcgtttccaagcattatcgtatctgagcctcccaacatccgttggggtaggagtgatctcagttttattgaatatcttcaggactttatgctgatatgttttagggaagagatattggcttcattgtctcagttgatggcattttcacgccccaaaaamcaaaaacaaaaaccaagaaaaacagggagtccaaaaggaaagtttctggagtcctgataaaggcaggctttcaggacacctgaccttacttttcattattaccacctgaaacctacacaccctaaaatggtcatggtggggtccctatctgtaaaactccagtatcatagaggttataaacttagagatcaatattcttaaggacattaggataagaact

SEQ ID NO: 599649 - DNA, 538 bp, Homo sapiens
tcacaggggaaaaaattgtaattacagtaatagggtcaaggaatgtataattctccctcttcatttcagtagctaatataccaatgacctttatgtgaaaatgggggaggaaggagtagraaaaaaaatcagaaaattggatacctgagagttattgcagacaaacagaaaaataaactcccatgtaaagtatagaattggctgattccatcttaaagccagatacctctggaataagacatataacaaaatatagctgtttcacttgaagagggccaaaacagctagactcatcactaaagaaagtacatcagaggagaaaccagccatgacatccaaaagtactttgctacaataacgtgtagctatagagtcatagaatattaggctataaacacctaaataagaagctcagcctaactcttctgtgtctccccagaagctagccatagatctgtaacacagcacattttcaaagcttgattaaaaaaaaacaggagaccccaggtggggtagaacactcatgagataagtaata

SEQ ID NO: 599650 - DNA, 613 bp, Homo sapiens
gtttggttctgtgtccccacccaaatttcacgttgaattgtaatccccatgtgttgaaagaggggcctggtgggaggtgattgaatcatgggggtgaacttctcccttgctgtttcatgatgaagttctcacgagatctggttgattaaaagtacgcagcacttccccctttgctctctctctcctgtcaccatatgaaaatgtacttgcttccccttcaccttctgccatgactgtaagtttcctgagccstcctcccccagccttgcctcctgtacatcctttaggggtttagtcaattaaacctcttttctttataagttatccagtctcgggtagttctttacagcagtgtgagaacggactaatgcacagggtctcactatgttgcccaggcttctaaattatggaatagatccctttttcctgctccctgttgagtctaatttcccatgtcaggaatgagagtttcctcagaaaaaagaagaatatatagaaataacagagacatttgggactttgctagcacaaacacaacctgaatcactctcctaaaaccgttcttgtggtcctgctttatccacagaccaaattgattgccactatcctaatt

SEQ ID NO: 599651 - DNA, 621 bp, Homo sapiens
ctttggtgaaatgtctcttcgtgtcttttgaccattttctcatgggatagtgttttaaaatgtattgagttttgagagtttttcatagattctatatataagtcctttgttatatggtttgaagatgttttcactcagtctgtagcatttctttttgtccctgtaataggatccttcacagagcaagagccctaaattattttgaagttcaccttaccagtttttccttctatgaattgtttttgtgtcatgtctcagaactaggtgttgaaatttctcctgttttcttctaaaagtttaatagctttccatgttaaatttaaatctgtgatccattgaaattaattttgatataagataggaattttaggttgaggttcaaattttgcacatgaaaatgccattgttcccatagcatttggtgaaggattctcgtttctctattgagttgcctttgcagctttgttggaaatcacttggccatgtttgtgtagatccacttctggacttygtgttctgttccactggtctgtatatccagcccttccccaaaacacacactgtcgtgactcctctaacatcagagtaggacttcaaactgtgtagcacaactcctcctac

SEQ ID NO: 599652 - DNA, 591 bp, Homo sapiens
atttctgggttttcttccccccaaggaagtcacttttctacacaaggaagtcactctggctctctctccatgtttgtctacacagtgcctgcccttccaggagtaggaaagtccctcatctagagctcaaccttgggccttaagagtgtgtggtggggggtgttcaagcatcccsccaacaatgtggagatgtggcagaaacccatttacctgttacattggtatttggctccacaaagaaatgttcattgctttgtcataaaaataaattaatgaattaagttaaaacaaaaagtggcttcacaaagaacccgcgcaagcatctgcccattggacttccttcaatgcaccatccctctcaccaggctgtggggaggacagggagctggggctgggaagggcagcaggaagaggaaggtgtgcttagggacaggcaaaggtgccccatccctgacaattgtaggacacttctttgccccatatatttccctacaacttcctaaaattgtagctgctggagaacctggactctggtgactgagggctgccctgtgagtgaggttagggctttcccatctgccttcacacagg

SEQ ID NO: 599653 - DNA, 591 bp, Homo sapiens
atttctgggttttcttccccccaaggaagtcacttttctacacaaggaagtcactctggctctctctccatgtttgtctacacagtgcctgcccttccaggagtaggaaagtccctcatctagagctcaaccttgggccttaagagtgtgtggtggggggtgttcaagcatcccgccaacaatgtggagatgtggcagaaacccatttacctgttacattggtatttggctccacaaagaaatgttcattgctttgtcataaaaataaattaatgaattaagttaaaacaaaaagtggcttcacaaagaacccgcgcaagcatctgcccattggacttccttcaatgcaccatccctctcaccaggctgtggggaggacagggagctggggctgggaagggcagcaggaagaggaaggtgtgcttagggacaggcaaaggtgccccatccctgacaattgtaggacacttctttgccccatatatttccctacaacttcctaaaattgtagctgctggagaaccyggactctggtgactgagggctgccctgtgagtgaggttagggctttcccatctgccttcacacagg

SEQ ID NO: 599654 - DNA, 616 bp, Homo sapiens
cttgtttgcctgccttcaccctccccagtcctctctgtgctggtatttgccccagagccaggtcttctttaaaaaccaaaattactccagcctctgtcagcaagtgtttgactcccctggggttttaaagaggtcttctcaggcccctgatttctgttccctgacacctgcctcatcagcaagagcacataagtagctgcctacaagcatcctataatcactcagtagatgaacagcagggctaatagggaccccagtgggcatccaagccttgattcaatgagacatagatttgacagattcccatcatgtacagatgcacctaatggaatgaaacttcatgccctttatttaccttaggtgcgtgtattgcaccctggtgagtcctactctactttagtctgttctattttattaaaaaatcaattyacaatccctactggttcagcctgccatccaagaagcactgttgcattccaaccccattttccagacaagaccatggactcactgatccatggttccaccccacacctctgaggatgacttcacacctgttcctggcacagtacagagacttgaagtacttatagatgtgcaggaatgctggttgtgc

SEQ ID NO: 599655 - DNA, 564 bp, Homo sapiens
gaacatgcttcccttttccttatctcattcatgtttttcttcttctcttttttggccttctgcttcgaccaatctttattttttatgaattttcttctcccttcattttctgtttttctctttcctttgttgctccagtaatttctgcctctgcttttctctaattttatctttaaatgaaatagtgtctgtattaatgtccacaggcacaaaatctggaaactgctttcctctcaattctggcatcttgggcattctcagcagggaaaaacctcgagcaagacttgcaaaatcaagattatttaatctgaaaatcaggttgcattcttactttgcataagcctggacataggacacaaaagctttcatgmccttttcaaacacagatttttctgccagggtcatggacttgagttttggcagaaggtcagctgtgtttttctagagtttcatctccgccagggggcatttttggttaattgcaaggaaattgatgtatgactcttccacgggcaggaggaacaccagagctctgcctctgtggccaatgagggctgtgcggct

SEQ ID NO: 599656 - DNA, 561 bp, Homo sapiens
tttgttgcctccttgtgggggtggtccttgtggctttcctggaggaggtgggggaccttgrggctggttgcctccttgtgggggtggtccttgtggctttcctggaggagatgggggaccttgaggtttgttgcctccttgtgggggtgctccttgtggatttcctggagaacaaagagagaagagaaagacagagtaaaagcccatacaagattccctgaatagttgcagtaaatttttatcagtttgggtaacaagctgagtggggaaacacacaaaaatgagaccaagacattaatttctttgcatttcagtgaagacatagaactctggagtggagcgccagggaagaacaaagcagttgagggcctctcattataaagaggagacagaatgaggatgctgcccatttgtctgtcatctcccagcaggcactcctggccagggggatgaggtaacccactcctgctgtcatctaagccaagcatctctgccgttcaatttggtggcctgctcatgatgcccagaatcaaggttgcatgaagagtgcctatattatta

SEQ ID NO: 599657 - DNA, 610 bp, Homo sapiens
gtgtaggatacaggtgtcttcatgcattctatcattaatatacatggggaggttaaaaaaaacgttggccatgaaaactaccaaggggttctagaaatgaacagaaagaatacacagttcttgaatgagacaccctatttcatgacttcaaaattttttccttgctctacccctttgttagaatgtttgatcagatttagttgggctttacatcttctaggaatttttttttatacagactcttgctctgtcacccaggctggagtgtggtgtcatgatcctggcttacaccatccttgaaatcstgtgctcaggggattcccccagcttcagcctcttaagttgtttgattacaggttcatgacacccaccatgcccatttatttatttatttatttttaatttttgaagagatggagcctcactttgttgctcaggctggtcttgaactcctggccacaagggatcctcccacctcactcttccaaagtcctgagataatgggcatgagtacccacattcagtccttcttctaggaaaaatttttaatcactcccacttataatgagtggccacaattatgtattccaataagatagtctggtaccca

SEQ ID NO: 599658 - DNA, 592 bp, Homo sapiens
cccaggtggcaacgatgtgacgtggggtgggggctttgggctttgggccatgtggtattggtcaactttgggagggcaggagtctgtaggctgagatcagccaggctgaccatcagtcatacctgtgtgatggaggcccagtacacgctctggacttaaygctccagtggcttcccaggttggcactaccccacgtgtactgtcacacattgatgctgggaaagtaatgtcattctcgttccgtggggaggggacagtgggaactgcaattagtactgttcccggcccctgccctgtgctcttcttcccttggctgattttttaatctagccattcactgtagtaaaccatagccacaactacaacagctttcagtgagttctgtgtctttctagcaaattattgaacctaaggtggttttgggaaccccccaaatatgcagcttgtgtcagaagtgaaggcagtcttgtggtctgttcccctgactttgctgttggccttaattttcccaatgactttaaaagttgaatttgagaccatgagtctttgcacttgaagataaaaatgactcttcttccaagaaaaacaagag

SEQ ID NO: 599659 - DNA, 592 bp, Homo sapiens
cccaggtggcaacgatgtgacgtggggtgggggctttgggctttgggccatgtggtattggtcaactttgggagggcaggagtctgtaggctgagatcagccaggctgaccatcagtcatacctgtgtgatggaggcccagtacacgctctggacttaatgctmcagtggcttcccaggttggcactaccccacgtgtactgtcacacattgatgctgggaaagtaatgtcattctcgttccgtggggaggggacagtgggaactgcaattagtactgttcccggcccctgccctgtgctcttcttcccttggctgattttttaatctagccattcactgtagtaaaccatagccacaactacaacagctttcagtgagttctgtgtctttctagcaaattattgaacctaaggtggttttgggaaccccccaaatatgcagcttgtgtcagaagtgaaggcagtcttgtggtctgttcccctgactttgctgttggccttaattttcccaatgactttaaaagttgaatttgagaccatgagtctttgcacttgaagataaaaatgactcttcttccaagaaaaacaagag

SEQ ID NO: 599660 - DNA, 573 bp, Homo sapiens
gactttaccagtaaaatctggaaaacaaatacaatcaaagcaatggctaccaagaggtggaaaagtccagtcaaaacaaargtggatgaggagagcacaaaggtcatggcaagagtttattggaaagctcaagtcattttgctggttgactttctggagaatgacaataactgcttattctgagaatattttgagaaagccaaagctttagtataggaatccttgggaaagcttcagcagagtccttcaccacgaccttgctcctgctcatttctcttatcaaacagggcatttatatgagagttctgatggaaaatcattaggcttccacattacaaccctaatttggttcctttggatgtatttgtgttttgtaatcttataacgtttgtaaaaggcatccatttttcttcagttaataatgtaaaaaatacatatcaataactgacatgttgaccaaaatgtatgacaaatggtcaataaatcttctccttttatataactcattaagaagtaggattgggaaatgcttgtaaactgagtaccaggtggtagaattgaaacaaacttccc

SEQ ID NO: 599661 - DNA, 537 bp, Homo sapiens
  misc_feature 83: n = A,T,C or G
gtggaatgagggcacaacaagtctcctgatcctaggcatgaaaactctgcagccccatctgtgttttcattctcctctcttcnccgtaattaccattatcacctcctaagccccaagcagagtcaccacatcttctcccccttctgttttaccttcatttaagttctgagctgagctcagggccagcaaggccactgacagcagaatcaacagcatcttgcaggaggctctggagtcactcccaactctgtgctgggaggaacgtggcaactccctttataaagaggagaagaacaatggcacctttgagctccacactgggtgggcctcaccacctcagagactggcttctgctttgctcactgcaggtcaggtgtwtcctttatttttctttgagactctagcccagagagatgagttggataggatatgttgttagtgtcttatttccaaaaggtacaactatgacttgaacaatggttttgaaggaactgtgtccaagccatcagcactgtgtcatcactgaactttagatat

SEQ ID NO: 599662 - DNA, 537 bp, Homo sapiens
  misc_feature 83: n = A,T,C or G
gtggaatgagggcacaacaagtctcctgatcctaggcatgaaaactctgcagccccatctgtgttttcattctcctctcttcnccgtaattaccattatcacctcctaagccccaagcagagtcaccacatcttctcccccttctgttttaccttcatttaagttctgagctgagctcagggccagcaaggccactgacagcagaatcaacagcatcttgcaggaggctctggagtcactcccaactctgtgctgggaggaacgtggcaactccctttataaagaggagaagaacaatggcacctttgagctccacactgggtgggcctcaccacctcagagactggcttctgctttgctcactgcaggtcaggtgtttccyttatttttctttgagactctagcccagagagatgagttggataggatatgttgttagtgtcttatttccaaaaggtacaactatgacttgaacaatggttttgaaggaactgtgtccaagccatcagcactgtgtcatcactgaactttagatat

SEQ ID NO: 599663 - DNA, 592 bp, Homo sapiens
cactgcacaggcaagagccaccatgggttcagcagcatggtagccctaggcctgaaaagtatacagatattaaagacattatgaaggtgaaattaaagggacttggtgactgattagatgtggggcaaagtgccctcaccatgacatatgctcaaaaaagttggctttctaggattttagctcttttaggaaatgaattctcagagtttaaaccactatcctaaaaataaaaagaaaagaggaaggaggggaggacaaaaagaattataactcttcagatttggccgaaagccttgcctggtagtcaatgaacaaggaagaaaacacaytgtggtacaccatgaagagatttcagtggatttaattgaagttttaggaccaatgtgttctcttggacttagcacacatcctcatgggcaattctgagactgattcccgtctttgtctcttagatattttaagctctaggttagactcttttaaaccatggtggagggacagcagggggagcaggattttgatcagctgatagataagaaatgcaaaaattataacaatgagatatcacctcacacctattgggatggccact

SEQ ID NO: 599664 - DNA, 552 bp, Homo sapiens
gcctaaatcaaccacacctacaaattgtttttaaaatttaaatgaaatgaagttaacatgttcaaaagaaacaaaagtctactcaggttaaagagtcataggcaaaccaacatactcaatctgaagttaccgtttctaggaataatgcaattaaaatggacttctgctaaatactacatggttgataaacaacagtgtcaagttaaatttacttataatctacaaatgtattagataactgctgccttttatttttgattagttatattctagcgaaattatgactaattgataaagttgtcctttcttccaaagtaaaaaatcgcatgacaatataggagatctatcaccatgaattaatttatsttcagaaaatctttcactgtttttcttttttgctgtcaatatttgacaaagtaagctttgagaaggaaaggaactaaggcattatttccaaaattatttgattatgaaaactagttattcaaaattaattttgaaattattaaaggatttataatttttagaagtctggatagtttcacaatcaaa

SEQ ID NO: 599665 - DNA, 630 bp, Homo sapiens
ccatcattttcagcaaaagaacacgggaacagaaaaccaaacaccgcatgttctcactgattagtgggagttgaacaatgagaagacatggacacagggagggtaacatcacacacgagggcctgtcagaggctgcggacaagtgagggatagcattaggaccaatacctagtgcatgcggggcttaaaacctagatgaccggttgatgggtgcagcaaaccaccatggcatatgtatacctatgtaacaaacctgcacgttctgcctgcacatgtatcccagaacttaaagtataataataaaaaataaaaagtcaaaacaaatataaaataaaaagttttaccatattacaaatttggctaaaaaaagtggtcatcatttatgtagcaaatatacaagkatctatatttttatgaatactgtaagttgaagaggtatttcactgttttggtgaaatttttagttttgggcaaaatttgacttgagttgagtcagtaaatgtgcttctgtgtatatatgaatattttgacgcttgaaatttacaattaactttccagtacaataaaacttcattatttttattggcttaatatacattaccctaaagggaaaaatgctattgaataatg

SEQ ID NO: 599666 - DNA, 628 bp, Homo sapiens
gaaccaatagacatgaaaatcagttcaaatgagagtttaattacagaaatttgtattctctatggcatacaattcattcacgtcgccaaaaacatgaataattctaattgttgtcagcatcagtgtattttacaagttatcttctacctctagagctgttaaattgctagtcaaaggcaaagtggcacacctctatggaatcaaataatctccagacaattcactgaacaaagcaagcctgcactcaaaagaaaacaggatttcattttgcccattttcaagtyattggcaatttttcctgacattaaaaaaaaatacgttaccttacttaaacatagtaactttctaaaaacacattgtgctgaaaaatcctctgaacaggaaactactttagacatctttattatatcaagacaacaatgtgcacttttttttttccagactctcctttgacttgtgacttttaaaaatttactctctagaggcccgattttaaaaaaagaaaacaattctactcttcattgtcacagtgaaacaaccatttgtcatcagcctgtgactgcaaaaatggtgggaaagcaataagaaaaaggctacaggaatgctttatttacatttattggttccc

SEQ ID NO: 599667 - DNA, 456 bp, Homo sapiens
tcagggtaatgctggcctcatagaataaaaaggaatccctcctcttagctttatgagagtttgagaactgctrtaaattattctttaacagtttgatagaattcaatcgaaatgccatttggtattgggcttttctttgttgggagccttcttatttctgattcagttttggtacttgttctgttaggttttctatttatttttggttagtcttgaaagattatatgtattatccattttctctacattttcaaatttgttggtgtatagttgttcataatagtttcaaataatcttttatatttctgtggtatcaattgtaatgtttactctttaacttctgattttgcttggttctctctctctctctctcttttttttagactagctgatggtttatgaatttgtttatgctttcaaaaagccaactttttgttctgttgatattttctattt

SEQ ID NO: 599668 - DNA, 628 bp, Homo sapiens
aagtaagtataaaatttataattaatgataataaagttggcacagaaatgcagaccaatattatacataaatattgatgaaaatattttaataaaatgttgataaacagaatcaatcataataatgagaaaataaaacatgaagtgggttcatatgaaaaatacaaagatatttcaataatgtgaaatattttaatatattatactaatatttctaaggagaaaagtatatcttccttttgcctgtaaaaaatattctcactttgttcaacacttattactcattaagatttttggaaagtaagaataagtggctacttccttaacattataaaatgtatgtatatatctcaatttaaartccagcattctacttattagaaaaacactagagcccttctcactatggttagggacaagacaaagatgccctaaatctccagttatatttaatattgtactacaggtattactcattatagttagtgggtataaaaaatgaagaaataagaattgaaataaatatttttttaaatttgaagatgatacaaatgaatatctggaaatacatagaggattaaaaaggctaaaacaataagataattcaacaggagaatagaatataccgt

SEQ ID NO: 599669 - DNA, 337 bp, Homo sapiens
ttacctttgatgtcacatgctttctctgtctcaattattttccaatttattgcctcatgcaaatcagccacatgccttgatacaggaaccagattgctgtgtttataactcctgtgcctgccctagcatgggtacagtaractcttaatgactcctttcttctagaatctgccatcgttagtaaatattttagacttattctttatgacttttcctaaatgttaatagctattttgccagcataatcatcactaattttatagaatatataaagtagagaaataaaaaaataaaattttatatcatccctatgttctgttattagtaaatgtttatt

SEQ ID NO: 599670 - DNA, 509 bp, Homo sapiens
aaaatactacagactggatggcttaagccacagaaattaattttttcaccattctagaggctagaagyccaagatcgaagcattatcagatttggtttcttctgagtgttctcagcttgcaaatgactaccttcttctctgtgtcatcatatgacctttatatatgagatcccctggtgtctctctgtgtgtccaaatttcctctaataaaaacattaattagatgggattagggcccaccctactagtttcattttgttacccacctcttcaaaggccctatctccaaatacggtcacattctgagatactggggaagtagggcttcaacatatgaattcctgaaagacataattcggcccataaaagttaagtagcgtaataactatgtataaaaacagaatctagtatgacaagacaattgattttatgttttttctaatctcttaaacttcataattatcaagtcaactttgtatttcatagtctaataagctatttggattcat

SEQ ID NO: 599671 - DNA, 509 bp, Homo sapiens
aaaatactacagactggatggcttaagccacagaaattaattttttcaccattctagaggctagaagcccaagatcgaagcattatcagatttggtttcttctgagtgttctcagcttgcaaatgactaccttcttctctgtgtcatcatatgacctttatatatgagatcccctggtgtctctctgtgtgtccaaatttcctctaataaaaacattaattagatgggattagggcccaccctactagtttcattttgttacccacctcttcaaaggccctatctccaaatacggtcacattctgagatactggggaagtagggcttcaacatatgaattcctgaaagacataattcggcccataaaagttaagtagcgtaataactatgtataaaaacagaatctagtatgacaagacaattgattttatgttttttctaatctcttaaacttcataattatcragtcaactttgtatttcatagtctaataagctatttggattcat

SEQ ID NO: 599672 - DNA, 638 bp, Homo sapiens
ggtttattttaggttccacggatgtcctactgacctttgtgtataagcctcttgccatggatttttactgctgtctcatttagattaaaaaccatttggggaagtttgtgtgttaacatttatagtcaccctactgtgctgttgaacacaagaacttattccttctctctaacagtatatgcataccaattaaccaacctctcttcatcgctccctccttgctacactttccagcctctgaaaactattattctactgtctacttccatgaaatcaactttttttagctctcacatatgaatgagaacatgtgatatttgtgtttctgtgcctgacttatttcacttaatgyaatttctattaattacacccatgttgttgtacatgccaagattttctttttattgcacatatacacacaatttttaaattcatccatttcactggtggatgctgaggttgattccattttttggctattgttaacatgctacaataaacatagaagtacagattttcattcgttttgatatatattcagcagtgagattgccagatcatatggtagttctaattttagttttttgaggaacctccatactgctttttatactggctgtactaatttaaatttccgc

SEQ ID NO: 599673 - DNA, 573 bp, Homo sapiens
tggtctggctcatgggtcctagggaagggaatgtaaatcttatataaatgaataaaacaggaaatgtcattgattcaaaataagccacaggtaattcactataatcaattttcaaaacactatattttgttattttagacacatacttggttgttttctggattggtgaaaatgtacaactataagatgaaaaaattatcaatattgtttggcctaagtctgtagttgcattgaggctttgttttagatgatggaattagaawtaaaatggatttttaattttgtaaaaaacattaggagcagattatctgtggcactggaattttggacagttttaaatctgtgaattccgtgagaatatataccttatcttatttatgtttattttctcaagacctaacgttgtaaatgaatattcaaattttaaaaaaatcaaaagccagtgagttttataggtctttattcttttaaagtgtgcattcacatttatagtactatcttttatttccctcatcactaagaaaaaaaagtgaagctttactcaaaatgtactgatttcttttctgtttgtta

SEQ ID NO: 599674 - DNA, 558 bp, Homo sapiens
aagggaatgtaaatcttatataaatgaataaaacaggaaatgtcattgattcaaaataagccacaggtaattcactataatcaattttcaaaacactatattttgttattttagacacatacttggttgttttctggattggtgaaaatgtacaactataagatgaaaaaattatcaatattgtttggcctaagtctgtagttgcattgaggctttgttttagatgatggaattagaattaaaatggatttttaattttgtaaaaaacattaggagcagattatctgtggcactggaattttggacagttttaaatctgtgaattccgtgagaatatataccttatcttatttatgtttattttctcaagacctaacgttgtaaatgaatattcaaattttaaaaaaatcaaaagccagtgagttttataggtctttattcttttaaagtgtgcattcacatttatagtactatcttttatttccctcatcactaagaaaaaaaagtgaagctttactcaaaatgtactgatttmttttctgtttgttacatattaat

SEQ ID NO: 599675 - DNA, 586 bp, Homo sapiens
agatatgaaaatatacttaatttatttgagagagagagataaaaaaagaaataaaaaaaggaaggaaggaaggaaatggagagagtaataagaggaaggaaacaaaaaggagatgaaacattgaaaacaaatagtaagatgataatcttaaacctatgtatttaactataaatgatctgcacacctaaattaaaaggcaaagatggtcaggtagaatgaaaagcaagacccaactgtatgctgcctacatacattaggtagtrtataatagatagcagttgtaggtaaatagtagtagcataatgctgactatgttgaatgcaaagaaaaaaaaagtaggtcaaaagtaaagaatgtgacaaaacatatgccatgctaacagtaatctaatgaaaactggtgtggctacattaatatcagacaaagtagatttaacagcaaataatatcaccagggtaaaggggtatttcataatgataaaaagatcaattacccaagagtacataaaaatgctaaacatttatgtctttatgaattataaaacacataaagcaaatataaatacataagacatagacttgcaaag

SEQ ID NO: 599676 - DNA, 522 bp, Homo sapiens
acacataactatttttaaaataaatctctagaaatttaattgctctaataaagagaataaagcaaatttaaataaatttttgatacatgttgacatagtgctctttaaaagacttgtgctaatttattcccatagcagcaagtggcactttaaatgactgctgaacgtttctctctcagctgtctccagagtaatagtgttgtggttcattaattaaacattcatgcatttgtgaattttagctgtgcactatataaagtttttaaattgctttaaacatatatctcctttcaaactgttactacttaggaatatyaagcagctaataaagtttagtatagtatttgtcttctaattgttttaaaaaagtagaattataatatgattgaaaaaactttcaacaataaaaaagaatacattttgaagaccatttatacattcaaattgatatggaagactgaaaaggaccatccaagtagccctgattggccaaagcaaatatttagagagagcaataaatgt

SEQ ID NO: 599677 - DNA, 632 bp, Homo sapiens
tccaacatgtcaagaatcattttgctaaaagttgctaatgccaattagcatatatcttcttcaactaggatttgttgcagaggtcaactacagttaatgttaaaaacattcagaaactagaaagtaaggtcatctgatcattattgtggatatattttttaaaggaaataaaagcataacatgtttctactagtgtcagatttcatagactaacaagatctcatttgtcaacaatatcctgctgttcaaagtttgttcttgacatcagcttgtttcactctctaaaagcacacattgcctccactaatgtagccaagtgactttctcrgtcaggcttgtctgtgacccatatacagttatttagcaaacatatggtcattgtcacacctagtgacctgccagcacaacaaataataatttacaattgaattggcaccaggagagctgagtgaatcccaggatgtcaaattgtctgaaaaaaagactctagcagacatcaaccagtgtggttcagtgtagaacagatttttttttcttttttttttgagaccgagtttaactcttgttgccagggctggagtgcaatggcgcaatcttggctcaaggcaacctctgcctccccggttgaaaca

SEQ ID NO: 599678 - DNA, 573 bp, Homo sapiens
tattttctaaaagaacgcagcaacccagtctgtcctatcatcacaccgtgagctcagaaagaaaatctgacacacgcagcagaaagtgcaaaatgttatttactaacctggtgcccctgtgaaagcagtgctccatatcaccttaaagaaagaatccttactatgaaaccaatctccaaggcagctgatagccaagaggtggcaaartcgactaccctgagaatccaaataaacgggcaaagccttcctgttcccaagcccagttttggctgactccctcaaggcaacttaagtcatagccaagcccacaaagcactttagcctataagctttagtaatgaacttgaaaccactccccatatgttaaagagacaccggactgctgtgagaaataaaacccacatacagaatgagctacagcttcaggctgcacttttgtacttgctgcccaagaaaaccataacacaaacttaaacaaagagaactctcactcccttctctcccctcagacactgcaataaagtgaatgattaattttaagcaaggggatacagtctgccctccattagggcc

SEQ ID NO: 599679 - DNA, 571 bp, Homo sapiens
gtggcacgtgcctgtaatgcgagctactcgggaggctgagggaggagaatcgcttgaaccagggagtcggagrttgccatgagctgagatcatgccagtgcactccagcctgggcatcggagcaagactccatctaaaaaaaaaaaaaaaaatagacactggatttcctagtacacaagaaatgtaaaatatctcattaataatttttgtgtggatcacattttgacatgacacagtattttggtaaattaggttaaataaactcattaaattattttcacctatttcattgtacttttgatgtggctactagaaaatttaaaattatatatgtggctcacttttgtaactcataccgtattcggtcggaatagagaacagaatagaggtaagacataaacataaattgttgagatctaggctctcttccaaccttatgacaagcatttaaattggagtaaacatttcaaaggatactttggcagtatcccacaacaataaaatctggatctgtacaggacttactgtagtattcctgtagtactctgtctgtacttcagagacagaatgc

SEQ ID NO: 599680 - DNA, 584 bp, Homo sapiens
gggagtgggttttctagtgtcagcaaacaagtagctctgcactattaaaggtggggtgtttttaaaggtttagccttcaattattcagaggcctggataactgagaatgcatggtttatcgtatgtatgtatgcatttgtatgaattgtatggttatgggggctgtatgcatctatattatatatgtgcagaactctagagttggtgcaattgtgatttgtccgctagtttagagaatggcatcacataaacacataaactgaaacagtaaagactttagtgtattttggagaggatgcaagagcatttggctctgcgagtttctcatgacaggagctgccttcctgctgccttgcagcacatggtttggagtctggtccaaatatacatccagctgtcccattacacacaggtgacctggatccaggtcactacctgcctccagcagcagcttgcamtggggcattcaatggacttgagggagcttctatgtcttcataaacctggagaagggttttctcaggaaaacaggaatttgggttgcacagaggatctcaagagaaggatgatgggaggcaggggtt

SEQ ID NO: 599681 - DNA, 584 bp, Homo sapiens
gggagtgggttttctagtgtcagcaaacaagtagctctgcactattaaaggtggggtgtttttaaaggtttagccttcaattattcagaggcctggataactgagaatgcatggtttatcgtatgtatgtatgcatttgtatgaattgtatggttatgggggctgtatgcatctatattatatatgtgcagaactctagagttggtgcaattgtgatttgtccgctagtttagagaatggcatcacataaacacataaactgaaacagtaaagactttagtgtattttggagaggatgcaagagcatttggctctgcgagtttctcatgacaggagctgccttcctgctgccttgcagcacatggtttggagtctggtccaaatatacatccagctgtcccattacacacaggtgacctggatccaggtcactacctgcctccagcagcagcttgcactggggcattcaatggacttgagggagcttctrtgtcttcataaacctggagaagggttttctcaggaaaacaggaatttgggttgcacagaggatctcaagagaaggatgatgggaggcaggggtt

SEQ ID NO: 599682 - DNA, 334 bp, Homo sapiens
tcctgggctggctactgtagataagggatggactcctgagctggttactgtagatatgggttggattcctggctggttactgtagctatgggttggattcctgtactggctactgcagatatgggttggattcctgggctggttactgtagatatgggttggattactgggctggtttctgtagatatgggctggattcctgggctggttactgtagatatgggctggttactgtagatataggctggattcctgggctrgctactgcagatatgagttggattcctgggctgtctactgtagataggggttggactcctgcactggttactgt

SEQ ID NO: 599683 - DNA, 334 bp, Homo sapiens
tcctgggctggctactgtagataagggatggactcctgagctggttactgtagatatgggttggattcctggctggttactgtagctatgggttggattcctgtactggctactgcagatatgggttggattcctgggctggttactgtagatatgggttggattactgggctggtttctgtagatatgggctggattcctgggctggttactgtagatatgggctggttactgtagatataggctggattcctgggctagytactgcagatatgagttggattcctgggctgtctactgtagataggggttggactcctgcactggttactgt

SEQ ID NO: 599684 - DNA, 334 bp, Homo sapiens
tcctgggctggctactgtagataagggatggactcctgagctggttactgtagatatgggttggattcctggctggttactgtagctatgggttggattcctgtactggctactgcagatatgggttggattcctgggctggttactgtagatatgggttggattactgggctggtttctgtagatatgggctggattcctgggctggttactgtagatatgggctggttactgtagatataggctggattcctgggctagctactgyagatatgagttggattcctgggctgtctactgtagataggggttggactcctgcactggttactgt

SEQ ID NO: 599685 - DNA, 595 bp, Homo sapiens
  misc_feature 1: n = A,T,C or G
natcctacacttgtggcattttttaaactataaagtagaaaaatgtgtcaagggctaagaggctataggaattcagagtaagaagaaatcatacaacagtaacacaacgagsttcgcatttgatatgtttcttctttttgctttgttctttttaacgaaaagcaacaggtgattttgtgaaagtcagaaaacaccagtatccttgtgatctcatcctagatttttctgtcaactggatccactctaattaataaagaatgcatttctgaccccattccaaatatgtgaaattagaagacatgattgcatatataataataaaagcataatctaaaggatattatcacactaggaatacagagttgtttcttcttgacctggagaaaatattaagagaaagtcaatgtatttacaaacaagatttaataatgttcacaaaaatagagtttgcccccaaatgagacattatgcattgctttgtttcaaaaagttaccaatttagtgcttaaaaaatccaacaggtaagcagcaggcctaatagagtctgtttctggaactctctgctagcaactgagcattctcagtccaggaagcc

SEQ ID NO: 599686 - DNA, 505 bp, Homo sapiens
ggctgtactgaggactaaaaagcttcaacatgtcaagtgctggggtatggcatagtaaacacccaagtaaatgtttgctctcacaagcccattcttagcacacatgcgcacaatggtttctgtgattgttataagcaaaagggatctcaatgggggaaattatccaacttttgtgtttagagattgaaaagtgaagcctcagagggatggttgggcttccccaaagaacattgagcaagttatgggcaaaactgggcccaggatgcacttttgaacccagggccagaattatgcagtgttgaagctctttcctggttctaatcttccaataatctagaaaccagtccacttcttgcagtgcagttagcccaagcagcattgmaagaggatcaagagtcatgacacaccagcatctctccaggccaagcactgggcagccctccacatgcattgacttgttttattttcccagcagccccgaatacagccctgtttatggataaga

SEQ ID NO: 599687 - DNA, 411 bp, Homo sapiens
tcattacacaaagatccaaaaattatgcgttatgcagaatcaggaacatttcactctgaataagaaaaacaatcaatgggtgccagcactgagatgacacagagtttgagaactacctgacaagtatttaaagcggccatcataaaagtgcttcaaggaacaattatgaacacaytcaaaacaatttttttagaaagtttccataaataagtagaaatcatcagcaaataaatgaaatatataaaaaataaccaaatggaaattttagaacttaaaaatacaataatgataatgaaaactcaggaatgggctcaacagcagaatgcagatgacagagaaaagaatcaattgaactggagcagagaaaaaaaagtaaaatcatctataaatgaatgagtgaatatgatgttg

SEQ ID NO: 599688 - DNA, 618 bp, Homo sapiens
cctattcagccatcttggaatacccctctttgtttctgtttaacgtttctctmctgcagataatttacatgggaaagacatgatcttgatgatataaggaagctatattttagaagggagaaggagagagagagagggatagctttaataagcaactgatattttactaaggttaagatatttcttgggcaggctccatgccctgggcctagaatagccattgactgttctccagtttgtaaaataattatatgttgtgacagtaaatgagggacagttggtatcatttgaccacattaaaattataaaaaaatgtatatgacccaacccactccttaaaaagttcaaaatggggtttgagatgttaaagttttattgtcattgttggtagatgtttgtataggacccaacccactccttaaaaagttcaaaatggggcttgaggtgttaaagttgtattgtcattgttggtagatacttcccaaaagcagaattcaaaaggaaatgagcaaagactgcaaatggttgagaaattaattgttgtttaacccacaagtaaaactattaataaaataaagattctagaagaaagggcttcctgaacttgaattaaggggg

SEQ ID NO: 599689 - DNA, 618 bp, Homo sapiens
cctattcagccatcttggaatacccctctttgtttctgtttaacgtttctctcctgcagataatttacatgggaaagacatgatcttgatgatataaggaagctatattttagaagggagaaggagagagagagagggatakctttaataagcaactgatattttactaaggttaagatatttcttgggcaggctccatgccctgggcctagaatagccattgactgttctccagtttgtaaaataattatatgttgtgacagtaaatgagggacagttggtatcatttgaccacattaaaattataaaaaaatgtatatgacccaacccactccttaaaaagttcaaaatggggtttgagatgttaaagttttattgtcattgttggtagatgtttgtataggacccaacccactccttaaaaagttcaaaatggggcttgaggtgttaaagttgtattgtcattgttggtagatacttcccaaaagcagaattcaaaaggaaatgagcaaagactgcaaatggttgagaaattaattgttgtttaacccacaagtaaaactattaataaaataaagattctagaagaaagggcttcctgaacttgaattaaggggg

SEQ ID NO: 599690 - DNA, 595 bp, Homo sapiens
ctgtttaacgtttctctcctgcagataatttacatgggaaagacatgatcttgatgatataaggaagctatattttagaagggagaaggagagagagagagggatagctttaataagcractgatattttactaaggttaagatatttcttgggcaggctccatgccctgggcctagaatagccattgactgttctccagtttgtaaaataattatatgttgtgacagtaaatgagggacagttggtatcatttgaccacattaaaattataaaaaaatgtatatgacccaacccactccttaaaaagttcaaaatggggtttgagatgttaaagttttattgtcattgttggtagatgtttgtataggacccaacccactccttaaaaagttcaaaatggggcttgaggtgttaaagttgtattgtcattgttggtagatacttcccaaaagcagaattcaaaaggaaatgagcaaagactgcaaatggttgagaaattaattgttgtttaacccacaagtaaaactattaataaaataaagattctagaagaaagggcttcctgaacttgaattaaggggggatccagtactg

SEQ ID NO: 599691 - DNA, 642 bp, Homo sapiens
atctggcaaaaaactgtctgttctcttgacctttgtattcatatatacctgatatggctcggctttgtgttcccacctatatctcatcttgaattgtaatccccataatccccataatgcccacatatcaagggagagaccaggtggaggtaattgaatcatgggggtgtttttccccatrctattctcatgatagtgagtgagttctcacgagatctgatggttttataaagggctcttcccccatcactcagcacttctccttcctgctgccttgtgaagaaggtgccttgcttcctctttgccttctgtcatgatattagtaagtttcctgaggtctcctcagccatgctgaactgtgagtcaattaagcctctttcctttataaaatacccggtctctggcagttctttatagtagtatgggaacggactaatacaatacatgacatagagttgacatttaatagctctttgttaaggagactacctgaatgaatgaacatcatacactgaattaatcatttgggcaaatatccaagcagagaataagaagagtctgggagcaggtgaagataaaggaagccattcaacatctgaaaggattgggggaagtcattcagggcatgatcataactagcag

SEQ ID NO: 599692 - DNA, 642 bp, Homo sapiens
atctggcaaaaaactgtctgttctcttgacctttgtattcatatatacctgatatggctcggctttgtgttcccacctatatctcatcttgaattgtaatccccataatccccataatgcccacatatcaagggagagaccaggtggaggtaattgaatcatgggggtgtttttccccatactattctcatgatagtgagtgagttctcacgagatctgatggttttataaagggctcttcccccatcactcagcacttctccttcctgctgccttgtgaagaaggtgccttgcttcctctttgccttctgtcatgatattagtaagtttcctgaggtctcctcagccatgctgaactgtgagtcaattaagcctctttcctttataaaatacccggtctctggcagttctttatagtagtatgggaacggactaatacaatacrtgacatagagttgacatttaatagctctttgttaaggagactacctgaatgaatgaacatcatacactgaattaatcatttgggcaaatatccaagcagagaataagaagagtctgggagcaggtgaagataaaggaagccattcaacatctgaaaggattgggggaagtcattcagggcatgatcataactagcag

SEQ ID NO: 599693 - DNA, 601 bp, Homo sapiens
acaaatactagctgtcattaggcagagtacaccctccattccactccctcctggttctctggataactctgaggtttcttcaaagttacccacttgtggccctgggggcattctggattgtaggtctggtttctaggaacctgctctcatttggagtttggttctttgcmagctcatcatgacatttctgaattggttgactggggaccactgttcctaagagagtccctaaagtgttatgaaaaggactgactgatgaagcatgctttcctttaaaaactctacttttaagtttatgttattagcactgtatttgaatttaatatacttatgctttgaaacctaaatgtttttatcttttactttgaaccttaatattaatctaattatcattttacattttctacctttttagattaaaccaaatcctatgtccttttacttaacttattggtttttcctgcattttcctctagaatacaaataaacaagataaaatgtatccttaacgtctttgaatttactgtcaggcatgactcacaaccggagaatctttaagatcattcattcatgtcttttcactgacagtggattcagttca

SEQ ID NO: 599694 - DNA, 488 bp, Homo sapiens
caaataaactttgaaattgttgtatttcataatttaagaggcagagggatgcactccagggcaaatgaaatgggtagaatctcagctcctgtaaataaatagtcactacagaaatgttagatgtccttgtaaagaagtcaaagatgcacyttcatcatgtaagctctcagagacaggactgagggcctccccaaagcgatctgtaaagaagatagcttttaaaattccttttggacttcttattttacataattttctattttctcctataatcacacctgtgaatagccactgcactccagcctgggcaacatggcaagaccccatctcaaaaaaaaaaaaaaaaaaaaaaactggtaattttgcatttgtccttgccccttgctcattaatgcctgctaactcacatccagcataaaaacctggactcagccctttgagagactcttgcttgaatctgatttgttctcttcttcaccttagcctac

SEQ ID NO: 599695 - DNA, 614 bp, Homo sapiens
atgaccctatgtatttcaataatagcaaatttgattacctacagcatagcacagaattaatttatataatgattctgaattcccctgtgactgatctcatgtttgttcaaaaatattacctcttcccagcatcctactcttagcaaaagtattttgtctctttcctcggcccttcctccatgagtggagactctctctcttgatttggggctcatccatgtacttgctttggctaatgcaatgtcagcagacacgatgcaagcagaggctagctctcctgcaccactaccttctccaggagaacagcctcccagatataactgctccctcctcaacatggcaccaagaatgaacacctgcaggtgggaacagagcccaaagaagcagggagcccacaccagctagatttatgtcttgaagcaatgctcccaaccacccccaacctagatcagctgatgccttgaccacctgcagacatatggaaataaactcttaatagttcattttacggagatttttgtggttcctggwcatatagtataattgtggccataaatatctaacacaccaacaaaaaggtaaagttgtcattctgtggtggaaataaggaaagg

SEQ ID NO: 599696 - DNA, 500 bp, Homo sapiens
catatcgtgaatggtcttttgagttatgttaaggatttttaaattttttcctggcatataatacctgtcaggtaatacatgaccaaaatgtaaatttcctattccttcttcttcactgggtcaatacaggcttgagttcaaccgtagctttgccgcttactctgagaaagcttcaatacctttatttgcaaaattagaatcatgacggtatctatttctaaggattaaattgggtgagaraagcttgtaaagtgcctaggactgtccctgacacatacaactagatatgattatctttggaatatgaaagaaatactcccgtgagctaatgtggtccaataagttttgaggggaagcggtagcatttagagtgaatcttaaagtaggacttaggaggaaagtcatttatgttcagggaacaagatgacaaaaacatagaggtaagaaaagccaagtgtccttagaggatagttatagtagaccagctggcttttagtggc

SEQ ID NO: 599697 - DNA, 500 bp, Homo sapiens
catatcgtgaatggtcttttgagttatgttaaggatttttaaattttttcctggcatataatacctgtcaggtaatacatgaccaaaatgtaaatttcctattccttcttcttcactgggtcaatacaggcttgagttcaaccgtagctttgccgcttactctgagaaagcttcaatacctttatttgcaaaattagaatcatgacggtatctatttctaaggattaaattgggtgagagaagcttgtaaagtgcctaggactgtccctgacacatacaactagatatgattatctttggaatatgaaagaaatactcccrtgagctaatgtggtccaataagttttgaggggaagcggtagcatttagagtgaatcttaaagtaggacttaggaggaaagtcatttatgttcagggaacaagatgacaaaaacatagaggtaagaaaagccaagtgtccttagaggatagttatagtagaccagctggcttttagtggc

SEQ ID NO: 599698 - DNA, 563 bp, Homo sapiens
tatttttggcaaatatatgctataaaaataactctcagatttaatattttatgtaaatcmtcctaagcaattgaggtcagacgagagcttcatggaataaatcgaataagaaacatagtggatccagtggcactagatctcagaggggggaaaaaaatcctgtaggtaagatttattcccaactctaacagtcagatcctttctttgccaccaaaggtgtcaataaatgccctcaagttctcatttaattctaaagagaagtggaggcatagcctcaaaatgaatcacagaagcaagccataattgaaggaagcagtctgtctctgtcgcagcagcaatgaagcaatctttagtgtatgaaaactggatagcctgcaactctaaagaatgccaaaaattttaacaattgaagaatacttaccagaaaaatgtataattacaatgcaggtgaaaattgtggcctaaaattttaccatacatttaaaaaataataaagaagtgacctctgcgaggaatatacaaaaaatattagtaaaaaatctaccaatgaatgtaattattta

SEQ ID NO: 599699 - DNA, 609 bp, Homo sapiens
tagttttagaaaacctctrcttctgaatcattctgtaaaattttcagatctttcatgttactaagacaaggtagcctgtcttgttggctcattaattaaataataaatacagacaaatttaatcaagtattatctagccagaaacttctggtagaaatgaaacatgggagagtaaaacaagtaatgtacaaaggcacttcttttcgtttgttctcaatggaattacccattaaatctttctttctctgtcttctctacttaataaaataaaggccgcagggaatcagaagcaagtaatcaaagtagcacacaatgcttctctctttcctaacagttcttcctttagtactttagagaagaaaagcctggggaatcagaggctgtcagcaggtgagagaaacagtccttttaactactttgatgtcaggctaaactgaaaccagggaaccagcacaaacacagaaagggtttgaaagatgagttagcagaaaagcttctaagcaaaacatatgtgtataattgtcatatacacttatgtaattaattaattgaaaaccaacaaaagaaaatgagaatgtcaacaattcttcttattttaggtttctctaa

SEQ ID NO: 599700 - DNA, 464 bp, Homo sapiens
caaaaacaaaaccgtttaatcagctgttaacagaaccatcatatatgtatgagtcctgcacctgcaggtaggaactctggaattcccaatgggcaattagaactctagtaaaaatctggtttgacagttaagtgttttactcctataacactttaggagtaaagaaaaaaatgagttgccatagatgttgggggagaagctgcctgttactgctktgtgtgtaagcgtgtgtctgtgtgtatgtgtgtgcatgcatgtgtatgtgtgtgtatgcgtgtgtgctcctgcacgtggcagtagaagcaacacctatattgaggacacaaacaagtggcaaggatagtgataccccaacacgaagatgaacgtacccagttttggcgaagttcgtccagtaggtcatgaccacggcgctgagcatgacgtcgttcttggaaaagttacaactgaagagctcggtggga

SEQ ID NO: 599701 - DNA, 638 bp, Homo sapiens
attcctcatttagcatctttctaggctgccattaccaatctgaatttttcctctgaagcaatttttaaaatcatatctcctctctgaaacattttttcttctctggatctaaactgttggaatggggatatactttcatccctacctyaagaaattcattcttcttactctccaactttaggtaacatgaataacatagttatatctaataatgtgggtgtctcttgcctacccatgtgcttttattgtcaactggtaagctcttagaaggtagggccataccttaactcagttaaattcaacctgatacagtgttgtaccaatcaattgatactatattcatcaactgatactatactgtataattcaatgtagttgccaataattagactaatgatgacagggaattggtacattaaaggcctggacttttaaaatctcagaatggcagggaatcacagacttaattcaatccaacttctcttataatatggaaatcatctctgcatgtcttgactactctcggtatagatactgtttaaactccttcagtaacagagaatccgctgttccctgaggaacctcacccaatagccatagagctcaattattaggaataatatgactagaaataataa

SEQ ID NO: 599702 - DNA, 597 bp, Homo sapiens
tcacatgattgcttggaatagagttgtccctgaggccacctgtcacctaagaggacttgtattcatttattcagtgtccatgtaatgaaagaataagacagacatactgtgaatataagaacacagagttcaaaagactattctgattgagcagaaggaagatactaaacaaatattagatgaacaaagcttgtgtgtatggctttggaagataagcctaggatcttaatcttgtttatataacacaactattaaaccttcctgcgtaaaatacattttaattgagacttagcatgaagatagaacaccaagtctgggcattctgaaaagtttagacgcagaggaataactggcaggcagtgatttaaagtggatacagatttttgccctggagttgcagatgcgtgtaggaatgaaaaggaagtaatgggtgtgataaccgatttaaacactaatcagtgagccccaaatatttamcatatactgggattctacaaagagatgccatgggtaaaatatgaattcaagtgttttaacctgtatagctggatacattcttgtgatattacacgggaaataagaaaagagacgagtttg

SEQ ID NO: 599703 - DNA, 489 bp, Homo sapiens
aactgccccaaatcatacatcagacatcaaatcgcacatacagtgttgattcagaatcaagttatcatttgtgttcaaacattacataaggcctcaatttcaaccatgttactgttgaaatattatagattaatttctacagaagtaataagaatatagatgaaaactcgcattatttaaacattttaaaaatgatacatgacaaccacgtgagccctcagttacacttgcaggtgcaattgttcacacattaattcaattcaatcgatggagtgctttatatgctgtgttttatgtcctcaaygaggtttgatggattggtgcatgtggaaaaagggaggcatagtgtatgctgtcatgaaacttacaaccaacagcctacgacagatatacaccacccagtaaatgctgagtacaagtacagagtgcctggagtgactgcattagactagaaaacctggaatgtagcaaatgaagggaagatggcat

SEQ ID NO: 599704 - DNA, 515 bp, Homo sapiens
tgcatgtggaaaaagggaggcatagtgtatgctgtcatgaaacttacaaccaacagcctacgacagatatacaccacccagtaaatgctgagtacaagtacagagtgcctggagtgactgcattagactagaaaacctggaatgtagcaaatgaagggaagatggcatgacaagagggaaaaacggcttakcaaatcagacgggtttgggacctgaaggccatgtgtaggaatgacctactataatacggtgatcagttgttctccctgaaaggcaataatcaatgcccggaaatcaattagaacacagttgcccaggagtaagtgagagacaatggttgatcatggcaggaagaatgcattttctagcactgtgttttccaaaatgctagccaataaccacatgtggctattgagcacataaaatgtggcttgttcaaaccgagatgtgttgtaagtgtaaaatgtactctgaatatcaaatatgtagtaaaaaatatgcaaactatattttgt

SEQ ID NO: 599705 - DNA, 606 bp, Homo sapiens
ggctagaaaagctaaaaagcccatttctttggcctattggcaactcggtggttcataaaggcaatagcataactatatttatttttgtccccttctccttcttttctgcctggaatatggtcatgacacctgaagacagagcagccactttgtaggcattaagcagtcagtataaagacaaaatccagtagtctaaggatggcaggataaagggctacaaagagcacgaacctggcaatgggcaagtttaagcgtctgtgtctgcactgaactccttagtttgggctacttggtatatgagaaaacatacatccctatcaagttattcttgagatttttctgatatttgcagctacgtgaacacatggtttcttcaacattgattaaccatgcacaaaatattcccagaaaattcartatttgtggttcagtttgtaagagattttattattttcatgcatatacctttcaagactaaatgagcaaagtgcagactattgacggaacgtatctcaaaatagtaagagctatttatgacaaacccacagccagcatcatactgaatgggcaaaagccggaagcattccctttgaaagccggcacaag

SEQ ID NO: 599706 - DNA, 469 bp, Homo sapiens
cattaatcctttaatcctagaacagtgtttctcaaccttagctacactctgggatcattcaagaaatattttaaaatactgatgtctgggtcctgcctccatagattctgattcaattggtctagatgtgatctgggcccggaatagctcaactgtctccccaggtgattcagatacgcaatcaaagctgagaaccaacagttcgatcgacgcttttcaaattttgacatgaataacaatcacttggagaccttgttaacccacagttttcttggccctactcccaaaaactctgatttagtaggcttggggtggggccaagamtttctagttctaacaagctttcaggtgatgccgagcatgatggcctgtgagtagcgttctgaaacttgaacatttggagtgtcagaaccccctggagagctggtcacaacaaagactgccgggctacaccccctagagttttcaa

SEQ ID NO: 599707 - DNA, 526 bp, Homo sapiens
tcttcccctaaataactccaaagccagtcctgtgtttctataaaaaaaaaaaaaaaaaaaaaaaaaaaaaaaaggtgaaaataacgtgatgaacatttttgaggaagtataaaaccaaaatrctccactgcatagctgtttctgcaggtattgtattgatatattacattattcagctttggagtctccacatccaatgttacatcatcactctaaattaaacatgtatagataaatgaaataaatgagatagcatatgaaaatctcatagcccagcccctgcactatttaaaatagaaataccaaagaattgtattcctcatctgaaagctatttagtggtggtgtttcaaataaaaattccatctactgctgttgcttccattgtatctttttctctgcggtactgaaagagaaagagacccagaaggggccttgtctgaagtgtccctcttttaagctgttgctgctttaagcacagggtggacaaatgtaataggagtttcataaaggtggaataaaccagc

SEQ ID NO: 599708 - DNA, 526 bp, Homo sapiens
tcttcccctaaataactccaaagccagtcctgtgtttctataaaaaaaaaaaaaaaaaaaaaaaaaaaaaaaaggtgaaaataacgtgatgaacatttttgaggaagtataaaaccaaaatactccactgcatagctgtttctgcaggtattgtattgatatattacattattcagctttggagtctccacatccaatgttacatcatcactctaaattaaacatgtatagataaatgaaataaatgagatagcatatgaaaatctcatagcccagcccctgcactatttaaaatagaaataccaaagaattgtattcctcatctgaaagctatttagtggtggtgtttcaaataaaaattccatctactgctgttgcttccattgtatctttttctctgcggtactgaaagagaaagagacccagaaggggccttgtctgaagtgtccctcwtttaagctgttgctgctttaagcacagggtggacaaatgtaataggagtttcataaaggtggaataaaccagc

SEQ ID NO: 599709 - DNA, 526 bp, Homo sapiens
tcttcccctaaataactccaaagccagtcctgtgtttctataaaaaaaaaaaaaaaaaaaaaaaaaaaaaaaaggtgaaaataacgtgatgaacatttttgaggaagtataaaaccaaaatactccactgcatagctgtttctgcaggtattgtattgatatattacattattcagctttggagtctccacatccaatgttacatcatcactctaaattaaacatgtatagataaatgaaataaatgagatagcatatgaaaatctcatagcccagcccctgcactatttaaaatagaaataccaaagaattgtattcctcatctgaaagctatttagtggtggtgtttcaaataaaaattccatctactgctgttgcttccattgtatctttttctctgcggtactgaaagagaaagagacccagaaggggccttgtctgaagtgtccctcttttaagctgttgctgctttaagcasagggtggacaaatgtaataggagtttcataaaggtggaataaaccagc

SEQ ID NO: 599710 - DNA, 554 bp, Homo sapiens
atcagtaattatcttggcaaactcttcaattatgcaatattgttacatagattacatatctaagtgaacactggagttttaacaatattgtgtgttcataaatgttttatttattattgccactaattcttattgccatttcaagaactatgtataagttgttctaaaaactattaaagtatagktgaccatggtcactactgcctactttggtaaaggccaaatatgtgaagactttttaatgtgttaacaaacgttgaaaaaaaattaacctgttaacaatcagtaggactcttgaaattatttcctaagagagtaaattttacaacttgcaaagcatgattaacctcttgtaattataaaccatctcttgtagttatgtagcatttgtggggtgagcaagaccattgtggttcctttttacatttcttaaaataattctccgtaacctcattgatatctccagtaaatttagataagcttttttttttaaaggagggttaaaatgacattttaaactaatttttcttgttagttatacagagttgaactat

SEQ ID NO: 599711 - DNA, 385 bp, Homo sapiens
agtgttatcttacatatatgccaaaatatcaccattatatggaacactagctgaaagaaaaattattcagtagtcttaattttctagctaacataaattctctccattttcatcatccatttagattaaagactttactgttagctgaatattcagagactttattctgatttttaaaatttatgaggttcataatgttaagacttcaagggtgagctgtttgtgtcatttataatgcgtgactagacagtaactagaaaatggattgttgactttacaagatttctccccaccacgyccccccaaacctgtgctgctgtgtatttggcctgaaatctttacttctagtcaatctttggacctaaagcctaccagcttttagcat

SEQ ID NO: 599712 - DNA, 609 bp, Homo sapiens
aatcctttccactatactacaattacccctactttacatctaaaaacacttcctagaaatgcgtaagataaaggtagtttttgttttattcctaaaatagattaatcatgtatatcagagatattacaagttgagaattagcagsatgaaattttgacagaaccaacaagatgcaaactgagatagttttataataacagtatgtcttttaataaattacagagtgaatagtttaccaaatgttgggttaaagcaaactttcagccacaagattgaatctgctgttttatccacagatatgtggtttttattgatcttatacttccattttattttaaaatgtacattttatgttaccatcctgggatcaaagtaacttgaaataataggaccttaggtaaataaatccttctgttgggataaggatgaacatgtccatcagagttgtctctttttcctttgctttttaacttgtgttaggcaagtgacagaatatgtttttgttgttctctgatcccagttttattctttgtcactttttttttctgccaaacagatgcagtatgtttcaacagaaagagtgctccaaatctttaatcattatgaaaa

SEQ ID NO: 599713 - DNA, 609 bp, Homo sapiens
aatcctttccactatactacaattacccctactttacatctaaaaacacttcctagaaatgcgtaagataaaggtagtttttgttttattcctaaaatagattaatcatgtatatcagagatattacaagttgagaattagcaggatgaaattttgacagaaccaacaagatgcaaactgagatagttttataataacagtatstcttttaataaattacagagtgaatagtttaccaaatgttgggttaaagcaaactttcagccacaagattgaatctgctgttttatccacagatatgtggtttttattgatcttatacttccattttattttaaaatgtacattttatgttaccatcctgggatcaaagtaacttgaaataataggaccttaggtaaataaatccttctgttgggataaggatgaacatgtccatcagagttgtctctttttcctttgctttttaacttgtgttaggcaagtgacagaatatgtttttgttgttctctgatcccagttttattctttgtcactttttttttctgccaaacagatgcagtatgtttcaacagaaagagtgctccaaatctttaatcattatgaaaa

SEQ ID NO: 599714 - DNA, 609 bp, Homo sapiens
aatcctttccactatactacaattacccctactttacatctaaaaacacttcctagaaatgcgtaagataaaggtagtttttgttttattcctaaaatagattaatcatgtatatcagagatattacaagttgagaattagcaggatgaaattttgacagaaccaacaagatgcaaactgagatagttttataataacagtatgtcttttaataaattacagagtgaatagtttaccaaatgttgggttaaagcaaactttcagccacaagattgaatctgctgttttatccacagatatgtggtttttattgatcttatacttccattttattttaaaatgtacattttatgttaccatcctgggatcaaastaacttgaaataataggaccttaggtaaataaatccttctgttgggataaggatgaacatgtccatcagagttgtctctttttcctttgctttttaacttgtgttaggcaagtgacagaatatgtttttgttgttctctgatcccagttttattctttgtcactttttttttctgccaaacagatgcagtatgtttcaacagaaagagtgctccaaatctttaatcattatgaaaa

SEQ ID NO: 599715 - DNA, 497 bp, Homo sapiens
aggtgtgaattacacagtttatttgagtgacaaggtagctaaagcagggataataaaagaagggagtgggttgatgtggacagasgaactatggctttaggaaatttggtagggactgaaacatattttgtgtaatttatgtgggtctaatagcttttgaaacttgtttacaagacctgtgtaagtggtactggcatattcatgcatgagaaaacatcaagggaaaacttaatagttcaaggaggtgacaaagaagagaggaaccaattattttcactagccgtcaaaagcaagaaaataatcagcttgagcccttcggggaaaagataggttaaatattaagtaacagtttgttattattccaagtgttttcttaaagttgctcccatactttcctgttttctctgagggaatttagtttttttgttggtttttttttttttttttttataactgtcattggtcagagcttgatttgatgccagtcaaattttttt

SEQ ID NO: 599716 - DNA, 497 bp, Homo sapiens
aggtgtgaattacacagtttatttgagtgacaaggtagctaaagcagggataataaaagaagggagtgggttgatgtggacagacgaactatggctttaggaaatttggtagggactgaaacatattttgtgtaatttatgtgggtctaatagcttttgaaacttgtttacaagacctgtgtaagtggtactggcatattcatgcatgagaaaacatcaagggaaaacttaatagttcaaggaggtgayaaagaagagaggaaccaattattttcactagccgtcaaaagcaagaaaataatcagcttgagcccttcggggaaaagataggttaaatattaagtaacagtttgttattattccaagtgttttcttaaagttgctcccatactttcctgttttctctgagggaatttagtttttttgttggtttttttttttttttttttataactgtcattggtcagagcttgatttgatgccagtcaaattttttt

SEQ ID NO: 599717 - DNA, 584 bp, Homo sapiens
tggactaacctatgaaatgtaaccacattgaattcctctgttaggtacaggtttggtgattccagggaatagagtatgactgaatgcacaggtaggggtgaagtgaacccggtcagaaaatttagagagcatcgagcagatcattaagcagctgtctttcaaatgtgcagaacacaactcatttgtaatctagggactatctgtattgattcttcccagggaagttacttatttttatacatatgtggtgtgttctgtccataataccattctacatggtaatgctcaactttattatttaaaaaaactgctaataatgargtttttctttgtatcacagaagcagcaggagcaagttttctttttccttcccagtttttttaagtactgccaaggaatgtgattttgtcagacttgtatttcctattaagccaatctgcatgactgttccttctactagctttacctgttcactcatttattaattcatcaaatatttgtagagtgactattgtgtgccacatactaatataggcacaaggataaccaaaaacagacaaacgctgtcctttcaaggagctcat

SEQ ID NO: 599718 - DNA, 552 bp, Homo sapiens
aatttatattcgtcaaattgcatgatttgacttattttagaaaagttattaacttctgaagagaatgcttcagaagcatttaaatgagtacaagttatcaccagtgatatayataaatttcatttcaaaatatacttctagaaactgtacttagttagctatagtatttgtacaaggattaattcctatttcattttgtaggaatttatttatgaatgtctatggcctgccagtgtaaagcagacttagagcatcatcttttacaataatctttttttttttaatcaaaggggagatattctggtaaaacaaaacaaaacaaaaacaatagtttattctgcatttttattaagtccctctgtaagtcatccctgaaatgggatatgtagagtcttatatttatttatttctcagaagcttattggaggtgatatgaaggattttaagaccctactaactaacaaaacaacaatttaaaattaattttcaaaataccttaacaaatcttattctccttattttcaaattctttaacaatgtttttcttattac

SEQ ID NO: 599719 - DNA, 623 bp, Homo sapiens
tctgtgctgctaaacaaacttctgtttttaatttgttttgctaagtaaacttagtcatgaggaaaatgttagtctatgtggatggtcgtgtaatattctccggtaacctttcccccattacaaataatcacattgacattgtgctcattatccactagtttgaacctatggggttcaatgaagaaatgcatttctatgtctacatgcttagcaaccagatcctggtctcagagataaaatgccaggaagaaatcactcgacgataaatccacgtctcagaatttgctctaagcctgagaggagatgacggagttatgaagtgctagatgttgaaactcttatgtgcagacttcttgagaatggagttaaaaaataaaaacagagaaaatcaaagtcaaagatataaaatgttgagaaatcaaacacctkacattagctatgagacatgtttatggcaaacactgatcctcgctttctcccaacaagctgttatctaattgttatttgttgtgtgatctatatccaccatttcaatcaaagcatgagcaagacttatttcaatagccatagcattgctcccagacaaacttattcattcctcctccattcattatatttagctc

SEQ ID NO: 599720 - DNA, 418 bp, Homo sapiens
tcttacagctgggatgctctccgaaggcattattattcctttttcttaagggaatgaagccagacataacacaagttataagttacgagttagaagccatgacttgaacacattcaaaagcatttccctggcatacatttctaatgtgtgaatcttttgggatccatttgtttctttatttctggcaatataattaagtttctaactctaagctcaayaattaaattgatagttcattagcattttagaagaaacacttcaaacaacaaatttagctttagaaaagaacaggtaaaatttgttacattgatcacattttctaaattaattattttaaatgtaattgaataacctatgtcctataaacataaacttgactatagagtcataatttttaaacactgagtctcttcataaa

SEQ ID NO: 599721 - DNA, 588 bp, Homo sapiens
tgatttcttgctttgtaggtcaaaatactttatttgctacttaaattttcaattccattcaacaactatttactgacttgttcttatatgccagaccctgtgttagaactgtgtacacaaattaatgtgatattgtccatgttcatatccatagtccaacccatcttagggagtttaagaagcacttcatcttaagactaaagctattattttaggtgtgtttataatatctaaatcaaaattctgaaatacaattattttgcaaaagacgacaaaagcatcattttactcaactgatcctgaagttttaaggcatatttgatttaaaaaatttaaaaaagaaagaattggggttgggaaagggkagtataaactgatgatataaaaatcactcaatttagactctagtaaggacacaagaattaccaaaacagttacttctcatttaatcattttggtttgtttaaactctttagttatttgggaaagaaatgtattgagtacctgctgtgtgttagatatggtgctaggtcctatatgtggatgtgtgatatgactgatccagttcttatcctaccgtaacttaca

SEQ ID NO: 599722 - DNA, 570 bp, Homo sapiens
taataaggctagtaatgatttcctggtagaaaaaaaatatgtaagtcttcaagagtatggataagctcagataaagtaggaatgggagagataggcaggggtggtgatgtttagagccactgtgaatgaattcatgtcccaacgaaaaaaacaacaggraacgttaggatcgctgattccgggaattgtacagacctttttccttgcgtaagctaagtagtttttagagttacaagggaaaagagatgtaagagactggaggaagaaacatttaagaatctgaaaggacttaagtccatctgggaaggaaaagggaaagggaggaatggcaaaggttagggcgaagtgtgttagggggagtagacaagtgagagagtcctttgtggttaaagaactagctaataaactaggtctgaaagttgttactctatccctggaagaacaaataagaattactgaaggcttttaggcagaaaatgaacacattcagatttttgttttttaaaaaattactctagcttttgtgtagaaatagattggagaggagcaagactgaaattccagagtcta

SEQ ID NO: 599723 - DNA, 570 bp, Homo sapiens
taataaggctagtaatgatttcctggtagaaaaaaaatatgtaagtcttcaagagtatggataagctcagataaagtaggaatgggagagataggcaggggtggtgatgtttagagccactgtgaatgaattcatgtcccaacgaaaaaaacaacagggaacgttaggatcgctgattccgggarttgtacagacctttttccttgcgtaagctaagtagtttttagagttacaagggaaaagagatgtaagagactggaggaagaaacatttaagaatctgaaaggacttaagtccatctgggaaggaaaagggaaagggaggaatggcaaaggttagggcgaagtgtgttagggggagtagacaagtgagagagtcctttgtggttaaagaactagctaataaactaggtctgaaagttgttactctatccctggaagaacaaataagaattactgaaggcttttaggcagaaaatgaacacattcagatttttgttttttaaaaaattactctagcttttgtgtagaaatagattggagaggagcaagactgaaattccagagtcta

SEQ ID NO: 599724 - DNA, 511 bp, Homo sapiens
cttccttacagggtgaataatggcaatccaatgtaaaggagggggggatatttattccaggaaaaacgaacaagagaagtagaaacaacacatacagtgcttgcaaagtgtataataggccttcaagaaatgagaattattatgctatgtcacagtctgatctcattagatactctcaatggcctcatgagaaggatgagaaaggaatacatttctcccattttacaggcgagggcacaaagagaacaaaaaatcaattatttgcttcaaattatacagstatttattggaaacacttgggctcaaaaatatcccgtttccaagtctttaccctttctaaaatgcacactgtccgtgaaacatgccaaattgattttatcatcactaagatgaacttatccatagatccttgtgcccccaaatctcactgtctcagttcttgggtgcctcaagtccaagttcccagggcatctgtctatgagtaggatattcacagtgagtaaaaaggtaa

SEQ ID NO: 599725 - DNA, 554 bp, Homo sapiens
gtctttaccctttctaaaatgcacactgtccgtgaaacatgccaaattgattttatcatcactaagatgaacttatccatagatccttgtgcccccaaatctcactgtctcagttcttgggtgcctcaagtccaagttcccagggcatctgtctatgagtaggatattcacagtgagtaaaaaggtaatgccataaaaatctaggtgtgggttagtagaatccaaataaacgatatagaacatcacaactcatattcaaatatgttaactaaagtaatgatttcctattacttagagtgagggtctcaaaatgttcctgaaatagatctcaaaatgtattccctctgtctagttgaaactttgtaatctttgaacagtaactctctattccctcactccacctcccaagcctctgttaaccatgattctactctacatctctatgaattcaacttttcttacattscacatttaagtgacatcatgtggtatttgtctttctgtgcctgggggaaaaatgttcatgtacctcagaagtaaacacattttaagca

SEQ ID NO: 599726 - DNA, 554 bp, Homo sapiens
gtctttaccctttctaaaatgcacactgtccgtgaaacatgccaaattgattttatcatcactaagatgaacttatccatagatccttgtgcccccaaatctcactgtctcagttcttgggtgcctcaagtccaagttcccagggcatctgtctatgagtaggatattcacagtgagtaaaaaggtaatgccataaaaatctaggtgtgggttagtagaatccaaataaacgatatagaacatcacaactcatattcaaatatgttaactaaagtaatgatttcctattacttagagtgagggtctcaaaatgttcctgaaatagatctcaaaatgtattccctctgtctagttgaaactttgtaatctttgaacagtaactctctattccctcactccacctcccaagcctctgttaaccatgattctactctacatctctatgaattcaacttttcttacattgcacatttaagtgayatcatgtggtatttgtctttctgtgcctgggggaaaaatgttcatgtacctcagaagtaaacacattttaagca

SEQ ID NO: 599727 - DNA, 403 bp, Homo sapiens
atttaagtgacatcatgtggtatttgtctttctgtgcctgggggaaaaatgttcatgtacctcagaagtaaacacattttaagcatgtaccctatataaatatatattcacagacatatgtaattttaaattacattgacactagttttgtagacacaacttacacatcacatacactataaaatatacaatcaaaatattaatttctagagaacaagataaataaaaagtattttttctcactaccccaactgtttagcacgcatattattgggcatgtacattccactttggtaacaactgacytagataatcaaattcaaggtcgttggagtgacaaaatccttcataacttcactggtgtgtgtgtgtaagcgtgtgtgtgtatatgtgtgtgtgctta

SEQ ID NO: 599728 - DNA, 479 bp, Homo sapiens
agaattccatgagataaatcttattgtaaatgaattatattaccatgggcttgctcattatttgtgaaagtgactttatctgcctggcttattattaaatatagtttatgaacaaggtggcacatttccttctgtttgatttttgtaaagaactctgtatcttgagcggttgggtgctgatatacgtgccacgatatgtaatattaaaaacyctttgctctccaatgacattcttatcatttgaagtcatttcttaatgtttctacattatttttaaaacactgctcttttgagattttaaaattgttatttatattgcaatattttatataaattaatttactccttaggaggaaactatatagtgaacaaagattttttatttaaccttttcaaaaataatatcttctatttgggaaaaaaaaaaatgctttacaaaagaggttccaaaacccagaggggcccacagtcattgtgtt

SEQ ID NO: 599729 - DNA, 599 bp, Homo sapiens
atgggaaattcacccgatacttttatttcctagggtgaaaaagaaattagagccaggtaatatctggtataaaaataggtaatatcatacaaaattcattaaagaaaatstgagtgcggaaattaccaaatcacagaatattagagctggaaaagacattgtacagatacagaaatttgaaaaaaaaaaaatacagagatgaagtgatcattctgctgtcctcacagaaatgcctgctacttctattgaattttcctctcatcttcctttaagcatttctggagtgcgtggtgtgtgtaatcataaagttttgtgttaaatgccaaaaaggaggaaatcataaaagagcggtgtaatttttctattatattttgatagtcctgccctctgcataattattttgtttctaatgtctccaacataatctcttaaacatttcttaaaatattttttttatcctaaatgcgagccgactaaggcaacttcttgacaaacacacgtcaaataacaccaacatcaaaatctaaccattcacatccatgaggtaaagaaaaccaaattaaccagtcattatttttcaatggctatgacttttataa

SEQ ID NO: 599730 - DNA, 560 bp, Homo sapiens
tgttgctggtccagcgaaagagtgatttagagaatggaaaggcaattaaataggcaatgcaaagacacaacgaggtagagggccaactgtattcaagtagcagcgggaaggtcatatggtgggtttagagggtgcatagggtgaccacaacatggcacttggagacgaatagattataataggttttggacatcatggtaatggtaaggaatgtagatattagaagaatcatcatcatcagaaatttgtaaataacggagggatgtgatcacacctgggctttagcttttagaaagaaaacaatagggcagaggatatgtctacacagaggattgtatcatactgatatttagaccacaaagatgagatttgattttctttcaacactgagggctaggtatcatgcttcatatttatggtctgtctcagctttcctcacctggccaattttaacaacctcctagggaaatcacagcctccagtcmacctcctctctccctcccataatggcaagtagatatctggaatcccgctattaaatagcatcaacatctgaattc

SEQ ID NO: 599731 - DNA, 590 bp, Homo sapiens
attgctagcctctgcagatcctctggttgaacccctttatttctgaagacctggcagccagggttcacggtccttctcttttgcccagttctcgctccaattctgcatgatttcaacattggcatgggggactcatgcatcattctagcctctcagttccttaacttgctatttcacctccatggaaattcacatccactctacctctgccacctactcaaatggctatatcctagatctaatcacctgaaactgttccaccttcaaaataatgttcatctatgattctctctgaccacaacttcttgaccttcagttcctttactacttcttcccctacctccctgaagagttagcattttcatccctctacctcctaattaccagtttccatatgcgttcacagcttctcctacccaacagggacttgtcagtatcattttaatcaatcttttgcccaaatcctcacttctcttgcccagctgtccctccctaccccaggacagaagcatctggctcccaagtgctaagygtgcctggggaaataccacacccctgcagattggagctaccgtgaaacactcagccgc

SEQ ID NO: 599732 - DNA, 357 bp, Homo sapiens
ttgttgagaggcagtacaagccaagcaggtgtctgtatttataatatgcacaatgttaggataactcaaactcataagggaaagattaatggctgactactatgaaaaccgcttctagccttgtgataccagcacctactatcttcctttttctcttatatgatgaaaagatttcaatgttggcttttcattctgatagaatgtgcaagccaaaatctaaataaagtccagtggcaatgatccccttaaacattatatctttcttctcgatatgctgatgttttcccttataaaaatctatrtaagtttcaagatttatatgacagacaaaccacacaaacaggaggtccctcacat

SEQ ID NO: 599733 - DNA, 569 bp, Homo sapiens
gaaatactaatacgggctataatatagataccattttaaaagattacgctatgtgaaagaagccagtcacaaaagactttatattgtattatttcatttacattaacagtccagaataagcaaatccatagagacagaaagtagatcagggattgtctactgctagggctgaaaagagtagttgcaggagaaacgaggagtgacttgaaaatggggatgggatttcttttggggggtgataaaaatgttctaawattgtgcgctgatggttgcacaactctgtaattaataaccagtgattactaatactggttaacctattaactaataatcagtgactaatacactgtaaatgggtaactcctatggtacgagaattatatctcaataaaggtcttataaaaaactaagttctagattcaaaattttatttcttatagcacaaaagatattaccccagtgaaaacaataaaatcttataatgctttctcctactatggaaaaatcaaggtttaacccatgtacataaaagaaaaatggtatgcacatgtcttcagaattatccgtgt

SEQ ID NO: 599734 - DNA, 478 bp, Homo sapiens
ttatttcttatagcacaaaagatattwccccagtgaaaacaataaaatcttataatgctttctcctactatggaaaaatcaaggtttaacccatgtacataaaagaaaaatggtatgcacatgtcttcagaattatccgtgtggacattaaatattttcagatgatgagttttaaaaagagtccaaaaataagcccagaaaatgcttaagtctgggttagcctaaacaacttggatggtttcagtctaatggaaaatgacatcacaaactaaacaggtatattaagggattttgggaaagaaaataatgtaagaaatgagaaaaacaagggagatacctgaaaatcaaccccaaaaacccatcaagtaacagaaaaactccaaaggatatttacccattcatttttatgacacatttatgtacccagtgctgtggagataaagatatatgtaggacactgtcccttacccttgaagag

SEQ ID NO: 599735 - DNA, 529 bp, Homo sapiens
ttgtttacttccaccatggwaacaaaccttactcgaaggcaaaaagactgggaatcatgctcactgctaaagctaaaaatacagatttttatctttgaaattatcgccttgatttaccaggaaattacaggaaaagaatcatatggatttacttatgacttgtagttacaacagacagactagcaccataaggtaactcagaatttggagacacaagaaaaggtcatattttaactattaagatagtaaaaaaataaaatgggtgagtttagccatctgcagaagccatccatgtacatatgtaataccaacaggaaaccatttctaactgggctgctcatgcccaattacaatcaagtacatcaggaggtccttggtcttcttcttacacaaactctcttcctaggaggtctctgtcctctccccaggcttccatctccgccacaaccatgaccccttcccgcaactcattactccttaatcaagacttctcttctaaggcttcagacctatctctccaacattctcc

SEQ ID NO: 599736 - DNA, 529 bp, Homo sapiens
ttgtttacttccaccatggaaacaaaccttactcgaaggcaaaaagactgggaatcatgctcactgctaaagctaaaaatacagatttttatctttgaaattatcgccttgatttacyaggaaattacaggaaaagaatcatatggatttacttatgacttgtagttacaacagacagactagcaccataaggtaactcagaatttggagacacaagaaaaggtcatattttaactattaagatagtaaaaaaataaaatgggtgagtttagccatctgcagaagccatccatgtacatatgtaataccaacaggaaaccatttctaactgggctgctcatgcccaattacaatcaagtacatcaggaggtccttggtcttcttcttacacaaactctcttcctaggaggtctctgtcctctccccaggcttccatctccgccacaaccatgaccccttcccgcaactcattactccttaatcaagacttctcttctaaggcttcagacctatctctccaacattctcc

SEQ ID NO: 599737 - DNA, 508 bp, Homo sapiens
tggtccaccagtctggaaaactcatccttcccccatctctcagactggaaaactcccattcagtcttcaactyttaaactctctttgtaaaggcctctctactccctctgatagaataaatcattcacctctgtgcccccagagcacttgtaacagtaggatataagtagttgtttctattttaacttttttaaaataaattttgagctccatgagggtaagaaccaaggcttattcatctttgtagtctcataattttaaaattacattaagcactcagtaactatctgcagaattgaacagaattacatcctcaggcctggaaagtagctaaagaaactcatgaccataatcaattctactgtagagggacaattggcaaatgaaggccaacaggaggatgagggtcttcatgaaaaatctaaaaaaaaaaaaaaaaaaaaaagggaaattggattgtaagaacataaactcttatccagcatgttctagggagatggcagctgta

SEQ ID NO: 599738 - DNA, 508 bp, Homo sapiens
tggtccaccagtctggaaaactcatccttcccccatctctcagactggaaaactcccattcagtcttcaactcttaaactctctttgtaaaggcctctctactccctctgatagaataaatcattcacctctgtgcccccagagcacttgtaacagyaggatataagtagttgtttctattttaacttttttaaaataaattttgagctccatgagggtaagaaccaaggcttattcatctttgtagtctcataattttaaaattacattaagcactcagtaactatctgcagaattgaacagaattacatcctcaggcctggaaagtagctaaagaaactcatgaccataatcaattctactgtagagggacaattggcaaatgaaggccaacaggaggatgagggtcttcatgaaaaatctaaaaaaaaaaaaaaaaaaaaaagggaaattggattgtaagaacataaactcttatccagcatgttctagggagatggcagctgta

SEQ ID NO: 599739 - DNA, 508 bp, Homo sapiens
tggtccaccagtctggaaaactcatccttcccccatctctcagactggaaaactcccattcagtcttcaactcttaaactctctttgtaaaggcctctctactccctctgatagaataaatcattcacctctgtgcccccagagcacttgtaacagtaggatataagtagttgtttctattttaacttttttaaaataaattttgagctccatgagggtaagaaccaaggcttattcatctttgtagtctcataattttaaaattacattaagcactcagtaactatctgcagaattgaacagaattacatcctcaggcctggaaagtagctaaagaaactcatgaccataatcaattytactgtagagggacaattggcaaatgaaggccaacaggaggatgagggtcttcatgaaaaatctaaaaaaaaaaaaaaaaaaaaaagggaaattggattgtaagaacataaactcttatccagcatgttctagggagatggcagctgta

SEQ ID NO: 599740 - DNA, 508 bp, Homo sapiens
tggtccaccagtctggaaaactcatccttcccccatctctcagactggaaaactcccattcagtcttcaactcttaaactctctttgtaaaggcctctctactccctctgatagaataaatcattcacctctgtgcccccagagcacttgtaacagtaggatataagtagttgtttctattttaacttttttaaaataaattttgagctccatgagggtaagaaccaaggcttattcatctttgtagtctcataattttaaaattacattaagcactcagtaactatctgcagaattgaacagaattacatcctcaggcctggaaagtagctaaagaaactcatgaccataatcaattctactgtagagggacaattggcaaatgaaggccaacaggaggatgagggtcttcatgaaaaatytaaaaaaaaaaaaaaaaaaaaaagggaaattggattgtaagaacataaactcttatccagcatgttctagggagatggcagctgta

SEQ ID NO: 599741 - DNA, 422 bp, Homo sapiens
gaattcatagtcattcagaatcctgcagtttctaacccaagagcatcctcaggagggaatacttaatggaatgtagaaagcctatcaaaagaggagagtgaacaaataactacaatatcccttcctcttgggcaagctgaggaaagaggtacaaggattttgatagcagtgtttttamctctcttgcaaattgctgatttataatgatattgatgtatctttaaaaagcttttagccccattgacttaactaggacttaactagttctcctaactagaactgctgaagaatcacacccctaacctcaggcccagcagaccctaaaattaaaccctcattttaacattctgaagctctctgcaaaccatagacatgaagctaagggctacgtgctgatagactgccttcaaatcttatggttt

SEQ ID NO: 599742 - DNA, 585 bp, Homo sapiens
gctacctgttactccccttaacaatacttttagcagcaatgtttttcctcctgcaatgtgacaatatcaccatgccatttggaagaaaacaaaaaggctgagtgattcctggtatactcccaaacagccacccaaacgaacagctggcagagaagacaccccctaaaacttggagcagattctcagcccctgcagcatctcatgtggttagaacttcagacttgatgaacgcctccccaacttgctccccctcctgaatcttttaatcctcctccagtctcttgtaatgttccagcccttaccagggaataagactgcaaactgtcttccgtcaacttctttccaaatcctagtctagagaaatyataatgatgcatgattgtccagtgggcatgtatagtttgtccatttctttatgtagtaaagcctgtagctttcatcttttttgccaatccactataaaaattaattttatatgtcatcctggtacacacacacacgcacacacgcatctatatctgtaaatctttttctgtctattcatgcttgtatgattgaaagaaaagtttcacaaaacattactta

SEQ ID NO: 599743 - DNA, 437 bp, Homo sapiens
agaattctggtagggttaacattttttcatcctttcatatctgatctattaattatccttgaagtttttatagtatcttttggattaaccttaggaaaaaaaaccatctgttctgaaaaccagtttaggcttggactttttsttttaattggaatagcacaaaaggtctcttccatttctctgctgacacagaaagcccttaggtaaaggcataaatccaaaagtcaacgataatgtaattcagagaggaccctggtttagcccagtgtccaagtagcgttgaaggacttggttgaaacactaaggagaatgtgtttgtttcttcttacattaaaaaagaaaaagatgcagttaccagtagctaagcttgcattagaaaatgtgccagaaattcatatttcttaatatactacagtaagataattacgacacactat

SEQ ID NO: 599744 - DNA, 565 bp, Homo sapiens
aagcttgcattagaaaatgtgccagaaattcatatttcttaatatactacagtaagataattacgacacactatagcaaataactagggaaatggaattcttccctgagagagaaaggtcttatttatgaaaccaatgtcatctaggtcaagtgtaatcataatcaaattgaaatgagttataaagacgtttaaattgtcaagaggaaacaaaacgatgamtactcaatttaataagcagatccaaagatttccatgtgaaacttcactatagttttggagagttaatctgttaatcttctagaaccctggcatagcccattattagaaaaatgctaaggtctgttttgaaatcttcactgcagatcaagataaattaatacttggattatttgtattataagaactatcttttggaacagaccagtctttcaattacatatttttttaataagcaaaaagcctaccatcagggaaaatacattagtagtgttttcccttgtaatagttgctatcctggaagtgtgtacaagtaatgaaagcctaagaccttggagcataagtac

SEQ ID NO: 599745 - DNA, 565 bp, Homo sapiens
aagcttgcattagaaaatgtgccagaaattcatatttcttaatatactacagtaagataattacgacacactatagcaaataactagggaaatggaattcttccctgagagagaaaggtcttatttatgaaaccaatgtcatctaggtcaagtgtaatcataatcaaattgaaatgagttataaagacgtttaaattgtcaagaggaaacaaaacgatgactactcaatttaataagcagatccaaagatttccatgtgaawcttcactatagttttggagagttaatctgttaatcttctagaaccctggcatagcccattattagaaaaatgctaaggtctgttttgaaatcttcactgcagatcaagataaattaatacttggattatttgtattataagaactatcttttggaacagaccagtctttcaattacatatttttttaataagcaaaaagcctaccatcagggaaaatacattagtagtgttttcccttgtaatagttgctatcctggaagtgtgtacaagtaatgaaagcctaagaccttggagcataagtac

SEQ ID NO: 599746 - DNA, 459 bp, Homo sapiens
aattggtcatttcccctttatccataacagagctgtctgattttcaataaatattttaataaagcatactttgaaataccaaaagtttgttataacaaccctacataatgtagttttaaaataggcactttgtttgctaatatagaaatcacaggccccaaaaaagagttttctagcattataaactctgagataaatcatctgctggtatctaasctcagtattattaatacacaccaatagtaataacaaagaaatactttcctcctagagcaaatgtataattgtttatgagctgaatatttagcttggagaggagagcaaagtgagtttagttcaaaatttagaaacccttgtatataatgattagtcaaatagcatggcataacctgataaacagtccgcacacctcattaaaattattcaaccaaactcagcatcatactttaaaacgaattc

SEQ ID NO: 599747 - DNA, 568 bp, Homo sapiens
cagcttgacagctaatttaacgtttaaaacaattttataacagagggcttatatgggtaaggcactcttctagacaaagtctgcaaagtgtttagccatttgtttggaatgggacgttcacaagtctgattctgcccagatgtaagataaggattggaatttaaaaacatacaagttacttctctggaaattcacgtgtcaacctataaatgaacacatataatcaactagtttttcattaactctttagagttaatgaaatgttcataacttcatctctagtgcaaaatttcctctttatttatagctcttaagataaatgttatttaaaaaaatagttttggtaacttcaactaatcatatgttttgamagtcaaattaagattcttctctaccctttatctaacagtaaacattttaggttctgagtgaaaatgatttgcatcctccatctgcctctttccatttctctggtgcccaacatcaacacacccccaatatccatgccctctaataatcatcatgaataaaatggatgccaaaatgaaccacagtagaaattaacctt

SEQ ID NO: 599748 - DNA, 453 bp, Homo sapiens
aagaggcactgctgtggggagtgccaccttcccctcccctgcccagacagttaggagctcattagggcagagtgggctttggagatactaaccactacttaccatttatatttacatataaaacatagatattgggacttttcaggaagatgaactatttcctcttccttctgctaagtgcaaataaatcccagcactttgggaggycaaggcaggaggagcatttgagcccaggagtttgacaccaacctgagcaacatggcaaaaccctatctctaccaaaaatacaaaaatgagcagggcgatgtggcatgtgcctggcatcccagctacttaggaggctgaagcaggaggatcgcttgaacctgagaagcagaggttgcagtcagctgagattgcaccactggactccagcctgggcaacagagcgagacccttaaaaaaaaaaaaaga

SEQ ID NO: 599749 - DNA, 488 bp, Homo sapiens
tgcaattgtttattgtaaactgaaactgtattctgcagtcttattaaactcacattttaattctagtagctcttttgtagaatttttggatttctctaggaagactgccatgtcatctgcaaatagcaataactttatttcttattttatgttctgtatgtcttttattgtttattctttacttattatgctgaccaagatcttcaatatgaggttaggtaaaaaaggtgagagaaaatattattttcatgttccttatctgaggggatgaaaatttaaccttttgtcattaaaggcgatgctaattggacatatttttgatgtaagagattttctttctgttcttaattgattacaatttttatcataaatgwggtaatgatttttctcaaatgcttttgctgcatttattataatggttgtatgctttttcttctttagtctgtgtgatggttaatattgagtgtcaacttgattggactgaagga

SEQ ID NO: 599750 - DNA, 616 bp, Homo sapiens
ctaaatcttttcccttgcctcccaactccttaaaatttgccctagactccaaatcagagagacaggtttgagctgcatctcctgtctccttgctgttggcctcgcaataaagcttgyctgttttcaaaagccagtgccatagcgttggcttctatgtgcatccaacaccaagcccacttgctcagcaacactaggaaacccagaaagggaaggaaactggcatgttgaaagacaaatgaggatatattgttatcatctgtaagattccatcactaaacaagccaaagctgggcaatttcctatcactaacgtagtgagccatgtgtgatgtcagagctgagatgctggagacaggaaggagagaagaaaaatctataaaggtggtgccccttgcagagagctgggctcaaacgccagggaggtttcactgaaggtggaagatttgagggatgaggcatttttggtgcaaagatgaccctgaagaagaccagagaaggaacttagtacaggaatcattaggagttgtaaaccaaaaataaaattctaagctccctcagccaattgaatggatccctcctctccgaccaggggattaaaaagaaacctgattatgtag

SEQ ID NO: 599751 - DNA, 567 bp, Homo sapiens
gtagggggtaagaggcagaggccagcagacttggaggtggagggttctgtgatagcttagcaactgctgttccagtttctatgcacagcttaggagccccatgtttggggagacaaggtctccagagaactgactggggagtggaggtgtctctgcaatccaagaggttccttcctccacagaagcagggcaaacacacatccaggggcacaggctgtrtttttgccagaaagaacgaggagaagcagcagcttgccacaccgggcccacggctccaggtctgcctccaagatggggatgtgtccagatccaccatatgccatggcttagaggagaggtggtgagagatccagaaactcccaatccttctatctttagctttatgatgcagcaggacccagggtgggactctgagtcattttcttggcacagactcgcagtgaattaaagacacctcactccaaattcaaacaagatgcagcaagaatgaaagagaaaaacaaatcctaaagctgtcaatgtcaccgtctctttgatggctccatcttgaagctgtcaaaggaattc

SEQ ID NO: 599752 - DNA, 606 bp, Homo sapiens
  misc_feature 1, 2, 3, 4, 5, 6, 7: n = A,T,C or G
nnnnnnnttgggggagggctggaagccctactcccagaaggagcatggtaatgagtccaacaggaggtagggggtaagaggcagaggccagcagacttggaggtggagggttctgtgatagcttagcaactgctgttccagtttctatgcacagcttaggagccccatgtttggggagacaaggtctccagagaactgactggggagtggaggtgtctctgcaatccaagaggttccttcctccacagaagcagggcaaacacacatccaggggcacaggctgtgtttttgccagaaagaacraggagaagcagcagcttgccacaccgggcccacggctccaggtctgcctccaagatggggatgtgtccagatccaccatatgccatggcttagaggagaggtggtgagagatccagaaactcccaatccttctatctttagctttatgatgcagcaggacccagggtgggactctgagtcattttcttggcacagactcgcagtgaattaaagacacctcactccaaattcaaacaagatgcagcaagaatgaaagagaaaaacaaatcctaaagctgtcaatgtcaccgtctctttgatggc

SEQ ID NO: 599753 - DNA, 580 bp, Homo sapiens
agaggctgaatgactttacattcccaccaacggtgtctaagggctcccttttctctgcattctcaccaacatctgttatattttgattttttttttttttttgtgagatggagtctcgctctttctccaggctggagtgcagtggtgcgatctcggctcactgcaacctctgccctctggactcaagcgattcccctgcctcagtctcccgagtagctgggactataggtgttcgccaccatgtctggctaaatttttttttttgtatttttagtagagaaggggtttcaccatrttggccaggctggtcttgaactcctgaccttgtgatccgcccgccttggcctcccaaagtgctgggattacaggtgtgagccactgcacccggccatattttgattttttttagtaatagccactctgactggcataagattatatctccctgtggtattgatttgctacattgactcacgtctctcttttcaccgatctttgatgtcctttctgtcctcactgttcatgtgacacgtgtctgccgtgtcacatcctgtcttatcttttatagtttaagagctta

SEQ ID NO: 599754 - DNA, 572 bp, Homo sapiens
tggctgggaggtggtgggttggacatacctggttacaccttcctccctttgaagttcaggtacaattgaccagcattaacattaaaacagagatctcaagactgacagagcagactctctgtaacattaagttaccaaattccaaccctatctgtcatatatcacatgacagatagcaggctctgagggaaatcaaagtattttaccccaaaatgtatttatttgacatgttttagaatggccctgcacagttgtctcttatgagggatatttgcattctgtagcaaattctctttctttactaggtcttttccagagagtccagaacattttaaaggtctggataggaaacatttgccatctattgcctcaaagcatagctacctatgagacttcatctacataataagaaccttggtctccacaaccccttatcttcagtcagacactcttttgtattaattccagatctttagataakaactgtttcaaccagttgccaatcaggaaatcttcgaatccacctatgatccccaggtccccactttgagttgtcctgcctttctggacca

SEQ ID NO: 599755 - DNA, 525 bp, Homo sapiens
aatatctcacaattattatatactgggtcaagtacagtatatgaggtttaccaagagaagtttggctaaaagtgtcaatatctcactagataaaaatctcaggcttcaaggggcagtgcgttgaaaagaaaagccttattaagatataattcagtctctactgaaaatacaaaaactagctgggcgtggtggtgccygcctataatcccagctacttgggaggctgagaggcaggagaattgtttgaacccaggaggcagagattgcagtgagccgagatcctgccactgcactccagcctggggacagagccagactctgtctaaagaaaaaaaaaagatataattcacataacatgcaattcattgcaatgcaattggcttttagtatatccacagagttatgcattcatcacatgaccaattttagaacattttcattaccctaaaattaaaccccacatcatttagctgttgatgcaggatttttctctgcccactttgccagactcgtggaagggatgcc

SEQ ID NO: 599756 - DNA, 556 bp, Homo sapiens
tgcactgtttgcctggaaaagctgcagacactcaacgccagcccatgaaagcagccaggagggaagctataccctgccaagccacaggggcagaacttcctgactatgggaacctacctcttgtgtcagcgtgacctggatgtgagatagggagtcaaaggtcatttttgagccttaagatttgactgccccactggattttagacytgcatggggctgtagcccctttgttttggccatttggaatggctatgtttatccaatgcctgtacccccattgtgtctaaaaagtaactaatttgcttttgattttacaggctcataggcagaagggacttaccttatctcagatgaaactttggactgtggacttttgagttaatgctgaaatgagttaagacctggggcactgttgggaagccatgattgtttgaaatgtgagggcatgagatttgggaggggctggggcagaatgatatgatttggctgtgtccccacccaaatctcatcttgaattctcatgtgttgtgggagggacctggtgggaggtaactga

SEQ ID NO: 599757 - DNA, 448 bp, Homo sapiens
ttaaaaacataaagcagaatacatatagaagcatataatcaatgtcacccaaaataaccaccttttgaggctaaaccatttaggtgcaagcacattgagaatcattctatcttctcaatgattttaaactttyataaagtctctttatctctagttgtacattttatcttaaagactaatttgtcagatatttttctggacataaaatctttcttcggtatggcttgcatggtctaattttttcaatcttcctctgtctctgtttgaagtgaatctcctataaatatacatttattttaatccaaagagatgcttatatttgttttcttagattcagtctccttatacgtaatgcaattcttaatatatttgggctgtcagcttactctgcttttgtttttcagtttgtcttgcctgttttgtcttttcttattccaaattagaaaat

SEQ ID NO: 599758 - DNA, 448 bp, Homo sapiens
ttaaaaacataaagcagaatacatatagaagcatataatcaatgtcacccaaaataaccaccttttgaggctaaaccatttaggtgcaagcacattgagaatcattctatcttctcaatgattttaaactttcataaagtctctttatctctagttgtacattttatcttaaagactaatttgtcagatatttttctggacayaaaatctttcttcggtatggcttgcatggtctaattttttcaatcttcctctgtctctgtttgaagtgaatctcctataaatatacatttattttaatccaaagagatgcttatatttgttttcttagattcagtctccttatacgtaatgcaattcttaatatatttgggctgtcagcttactctgcttttgtttttcagtttgtcttgcctgttttgtcttttcttattccaaattagaaaat

SEQ ID NO: 599759 - DNA, 448 bp, Homo sapiens
ttaaaaacataaagcagaatacatatagaagcatataatcaatgtcacccaaaataaccaccttttgaggctaaaccatttaggtgcaagcacattgagaatcattctatcttctcaatgattttaaactttcataaagtctctttatctctagttgtacattttatcttaaagactaatttgtcagatatttttctggacataaaatctttcttcggtatggcttgcatrgtctaattttttcaatcttcctctgtctctgtttgaagtgaatctcctataaatatacatttattttaatccaaagagatgcttatatttgttttcttagattcagtctccttatacgtaatgcaattcttaatatatttgggctgtcagcttactctgcttttgtttttcagtttgtcttgcctgttttgtcttttcttattccaaattagaaaat

SEQ ID NO: 599760 - DNA, 448 bp, Homo sapiens
ttaaaaacataaagcagaatacatatagaagcatataatcaatgtcacccaaaataaccaccttttgaggctaaaccatttaggtgcaagcacattgagaatcattctatcttctcaatgattttaaactttcataaagtctctttatctctagttgtacattttatcttaaagactaatttgtcagatatttttctggacataaaatctttcttcggtatggcttgcatggtctaattttttcaatcttcctctgtctctgtttgaagtgaatctcctataaatatacatttattttaatccaaagagatgcttatatttgttttsttagattcagtctccttatacgtaatgcaattcttaatatatttgggctgtcagcttactctgcttttgtttttcagtttgtcttgcctgttttgtcttttcttattccaaattagaaaat

SEQ ID NO: 599761 - DNA, 556 bp, Homo sapiens
tgcactgtttgcctggaaaagctgcagacactcaacgccagcccatgaaagcagccaggagggaagctataccctgccaagccacaggggcagaacttcctgactatgggaacctacctcttgtgtcagcgtgacctggatgtgagatagggagtcaaaggtcatttttgagccttaagatttgactgccccactggattttagacctgcatggggctgtagcccctttgttttggccatttggaatggctatgtttatccaatgcctgtacccccattgtgtctaaaaagtaactaatttgcttttgattttacaggctcataggcagaagggacttaccttatctcagatgaaactttggactgtggacttttgagttaatgctgaaatgagttaagacctggggcactgttgggaagccatgattgtttgaaatgtgagggcatgagatttgggaggggytggggcagaatgatatgatttggctgtgtccccacccaaatctcatcttgaattctcatgtgttgtgggagggacctggtgggaggtaactga

SEQ ID NO: 599762 - DNA, 615 bp, Homo sapiens
tctaaacaggcatttttgtcttgttcttgatttcatggggaaagcattcagactttgccagtaagaatgatgccaactactggcttttcagtagatgcctcttacagattgcaaggatcttccttgatgattagtttggttagaagtttatttatttatattttaatcaggaatgaatgctgaattttgccaaatgctttttaacatctagtgagattatcttatgactttgcattttaagtttgttaatatgaagtaaataattgatgaatatataaattttaaaccaactaggcaatcctaagatgagcaacactggatctggaggtattatgatttttttacactgttagattcagtttgctaaaattttatttagaattgttatgtttatgttcatgaaggatatcagtccttaggtttrttttcttgtaaagttttgtctggttttttgtattctggccatgttggcctcatagtttcttttttcaatgttttaaagtaaatttgtaaaattagtattgtgtctttcttaaatatttggtagaattcaacggttaaaccatttggaactggacttttctttaaagaactttttaaactaataatgcaaat

SEQ ID NO: 599763 - DNA, 556 bp, Homo sapiens
tgtgagggagagagggaaagagaggaaatagctttatttacctcttggaatatatgaaatgcagttataacaacttcattcatgtacttgtctaataattctaacgtctgtgtcagttctcttttgtttctgactgattggttttcctctttattatggtcatatttgtgtgcttatttccatgcctaataaatctgratcagatgccagacactgtacagtttacctagttgggtgagggttttctgtttttgttttttggcattactagaaataatcctggcttttgttctgggatgccattatattttatgaaaatggtttgtcagttttagaacttacttttacaacgttttcgttgcaacttgaacagtgctcattgtaggtctaatgattcgtcccttcttgagtgagatccattctgcactctgtgtaatactccatgaagcatgaggctttctgttcttgctggcgagaacaacaactacacttggccctgaatacggttatcacaaattatttcaaatatttctttcctctggcttcagggagttct

SEQ ID NO: 599764 - DNA, 556 bp, Homo sapiens
tgtgagggagagagggaaagagaggaaatagctttatttacctcttggaatatatgaaatgcagttataacaacttcattcatgtacttgtctaataattctaacgtctgtgtcagttctcttttgtttctgactgattggttttcctctttattatggtcatatttgtgtgcttatttccatgcctaataaatctggatcagatgccagacactgtacagtttacctagttgggtgagggttttctgtttttgttttttggcattactagaaataatcctggcttttgttctgggatgccattatattttatgaaaatggtttgtcagttttagaacttacttttacaacgttttcgttgcaacttgaacagtgctcattgtaggtctaatgattcgtcccttcttgagtgagatccattctgcactctgtgtaatactccatgaagcatgaggctttctgttcttgctggcgagaacaacaactacacttggccctgaatacrgttatcacaaattatttcaaatatttctttcctctggcttcagggagttct

SEQ ID NO: 599765 - DNA, 597 bp, Homo sapiens
tagaatagaaatcaagtccctctgggaggtgggaagaatgctagcaggatgagtccccatggtttcsttgccagagccatctagcctgaaatttgggcttatttcctatttccaataaggaactaagttggaaagcagaaattaaggcagagcacggcaggaggacccaattgtaagtggcccatagctcagcagtttctgaactttcttgctatcaaggcaatgcatgttcactgagaaaaacacatttctaaacagataatgaaatggaaaataacactcaagtaattatcaagatttacattcaagttttattttttcatttattagagacaagtggacattttctctttggggtaatttatagatgtgccatgtcagaaaatcagggttgtgtaccattgagggagagctacaggatgcggatggactcagaccaggggaccagcgcaacatcagctaaagtgtttggactgggcttgtgagcagcaggagacatgtcacatgcatgaggaaggtggggatgaggagagctgaactggtaaaatgttaattgtgtgtggaggtgtcaaggattgtgtgaagcaaaagtacagg

SEQ ID NO: 599766 - DNA, 528 bp, Homo sapiens
gggtctttacctagaaaggaagaatttagctgcattcaggatgattcaggattttttggtttggtgaaaattaataataatgataaatatataaactccagaaatctaagatattatttcactaactgaatacctttaaaaaatactaaaaataacaatctaatgttcaatagtaaaagttaaatatccatatttgaataaaggacaagaacagttgttaatagatattaccacaaacaaaaaagttcatttttatactatagaaaatrtatgtttaaacattaggtcaagaaggctagtattgaatttttaacagggcagttcatagattggtcttttttattgtcggacagtgccacctgcaggaacaactcaggttcttcacttcagagtgaaggttttcagcaatctaattttcttgtgttcagtttggttattttttaaggtaataggcaggtgagaagtctgttaggctatttcatgttgaaatcatattacatttgcaacacttattcaggtgacacgtaa

SEQ ID NO: 599767 - DNA, 593 bp, Homo sapiens
atgtaattataaatatatgtaaacttttccagacatttataaaggttatcttaatcttttgagaattagaaacttaaccatcaatcccactagtggatgtatattgaaaggaggtaaaatcagtatgtcaaagaaatatctgccctcccatgttcatttccacgtttttcacaatagccaagatatagaatcaacttatgtgtctatcagtaaatgaacatataaggaaaatgtggtatacatacacaatggatgtgatgtgatttttctcaatggagtattgtgtatatatacaatatgttgtgcatatattgtgtatatatatacaatatgttgtgtatatattgtgtatatatmtacaatatgttgtgtatatattgtgtatatatacacaatggggtaattctgtaatgaaattctgattcagccttaaaaaagaggaaatgtctgtaatgtgcaacaatatggatgaatctggagggcattttgctaagtgaaattagccaagcacaaaaggacaaatactgaatggtttcacttatgtatggaatctttaaaaagttgaactcatagaagtagagagtagagtggtc

SEQ ID NO: 599768 - DNA, 429 bp, Homo sapiens
ccattccaccactctatcaatccagctgcttcaggatgaaggggaacatggtaagaccagtgaattccatgagcatgatcccaatgctgcacttctttagccacaaagtgagtgccttggtcaaaggcaatgctgtgtgaaayaccatgatggtggataaagcattccatgagtccacagatggtagccttggcagaagcattgcatgcaggataggcaaacccatatctggagtaagtgtctattccagtgaggacaaacttctgccctttccatgatggaagaggtacaatataatcaatctaacaccaggtggctagctggtcaccccgaggaatggtgccacatcgagggctcagtgatggtctctgttgctggcaaattgggcactcagcagtggccgtagccaggtcagccttggtgagtgga

SEQ ID NO: 599769 - DNA, 578 bp, Homo sapiens
attaattttcgctggatttatttcccatcctctggcacgcaaatgtctcaccaataagtccagtgtgtttgctacttcttttcactggatccaatcagcataatatcatcaatgcaatggaccagtgtgatgtcttgtggaagcaaaaagcaatcaaggtctctccaaacgagattatgacacaaagctggagaagtgatatacccctaaggtaggagagtaaaggtatattgctgctaaaggcaaattgcttctagtgggccttatggacaggaatggaaaaaaaggcatttgccaagtcaatggctgcataccaattaccagaagatgtgttaatttgctcaagcaatgaaaccacatctggtacagcagctgcaactgaaatcaccacttggttaagcttacgataatccactgtcattctccaagatccatctgtcttctgcacaggycaaataagagagctgaatggggatgtggtgggaatcaccatccctgcatctttcaaggtgcattgatggtgacactaatctccacaatccctccagggatgggatactgtttttattcactatttt

SEQ ID NO: 599770 - DNA, 473 bp, Homo sapiens
taccattttgtatttgaggaaatggctaactacaaaatacaaccttggcctcacatgtttgaagctgtctccatccttcctcataactctcatatggctcctttgtttatctgcatctataaaaccccaagcctctccctgttctttgagatgctttaatgtttttcattaatgaatgttttccctattgcaattgcccaaataaaatcatccccttaattgtccagcattccttgtcacaaaccaaatcataatgctcaatgccactttaacacaaagttgatgggttaagtgagttaatacatgagtgtatagcacttcgaatggtgtcagacacctattatatgttcaacaatgtgttatccataatacctaaattatctataggtacataggtatatattatacatatattaattayatataattataataattatttttaattgttattaactcctaatcaggaaaga

SEQ ID NO: 599771 - DNA, 473 bp, Homo sapiens
taccattttgtatttgaggaaatggctaactacaaaatacaaccttggcctcacatgtttgaagctgtctccatccttcctcataactctcatatggctcctttgtttatctgcatctataaaaccccaagcctctccctgttctttgagatgctttaatgtttttcattaatgaatgttttccctattgcaattgcccaaataaaatcatccccttaattgtccagcattcctygtcacaaaccaaatcataatgctcaatgccactttaacacaaagttgatgggttaagtgagttaatacatgagtgtatagcacttcgaatggtgtcagacacctattatatgttcaacaatgtgttatccataatacctaaattatctataggtacataggtatatattatacatatattaattacatataattataataattatttttaattgttattaactcctaatcaggaaaga

SEQ ID NO: 599772 - DNA, 542 bp, Homo sapiens
tgtgtgtgtgtttttaaatatactcttgcattttagtagttaattgagatgggattcatgcatgagagatttactgaatttgtatctgattagccagggccactttatactctgtaattgtagatgtggtttttaaactgacaattgtaagtttgcatgtattctttttctcctaactctgtttagactttgtattcaggatagaaattaccttttctaagaagttttaccaagctgagtgtaaatctataatacctcagcagtaaaacaatcccagagggataattttgtgcaaccatttcaatcttgataccaattaaaatggtatgatctatctcaccgccatcacacaaaacaggtttctatgccatctcctcacytcttgcttagagaaaaccatcagattggttctattacactcagatttaagatcaaacatctttttttcagagctttatggattctaataacaatagaaagtactgaaataagcctattttcgtggctgcctttcaatcagtatgtaacacactttccatttt

SEQ ID NO: 599773 - DNA, 664 bp, Homo sapiens
atttttggtctttttcatatatcatcttaattagggtgatgtgatatcctattatggttgtatttgtatttccctgatgattagcaatattgagcattttaaaatgtatttgttggctatttacacgtcttctttttataaatgtttattcatgtccctttccaactttttaatacaaatatttgtattctggctgttgagttgagcttttgtgtattctggatattagtcccttgttagatgaatagtttgcaaatatattctcccactctacaagttatcccttgactttgtttactgtttcctttgctgtgcagaaactgttttgtttaatatagtcacatttttctattttcatttttgttgccttggttttgatgtcatagccataaaatcattgtctagaccaatgtgctgaagaatgttttctrttaatagtttcatagtttggagttttaggtttaagtctttaatcaattttgagtcctttttgtatatggtgagaaataatattttagtttaactcttctgaagatggacatccagctttcccagcaacatttattgaagacagtatcatttctccattgcatgtttttggtgccttggtaaaaaatcagttggctgtaaatatgtagacttatttctaggttatctattctgt

SEQ ID NO: 599774 - DNA, 423 bp, Homo sapiens
tttaagtaaattctacttttttctcagtagatgatatttaatagctttgttaggttataactgatataagtaacttgcacctagtccagtataaaatttgataatttttaatgtatacatatatgttgtaaacacacacacacacacacacacacacacacacacacacacaccaatattcattacatgagtgaaaaaggcatacaaattacaaaagtcttctcattagaagtcatgcraggaagaagacaatgaagtgacatttctattgtgctggagaaagaatgtagacaacaccagattctataccagacaataatatacttgttgaaggatggacatataccgcctgaaggaatccattgccagcagtcctaaactgcaggaaagattgaggaagaattttcaggcagaacgaatatg

SEQ ID NO: 599775 - DNA, 534 bp, Homo sapiens
agaacttgcatctttaggttgagcaaagaaagtggtttcttgagatggaatttactcctgtaaaggatgctgtaaacattatcaatatgacaacaaaaaatttagagtattacataaacttatttggtaaaaacagcagcaagtttcaagaggacagaccaattttgaaagaagttctactgtggataaaatgttatcaaaaaaacaacatcacatatttgttgtttttattttaaatcaaagtatgtttattgttttcttaaccataatgttatttcacacttaatcaactacagtatagtgtaaacataaatttttatattcagggaaaaaccaaagaaaaaaataaaatgagtccttattgtgatacttgctttattatggkgatctggaatcaaacttgccatatctccatggtatgcctttacttgaaagtctccaagagtgtagatctgaaatatttttaccacacacaaactaatagtaactatgtgaagtgatggatgttaattagcttgattgtggtaattgttt

SEQ ID NO: 599776 - DNA, 481 bp, Homo sapiens
taaaagtatactgtgctttgtagatccatcctttattttctctcctggttaagtaattatatttcaagttttttaaagctgccataactttttaacctttcccttattctccttcacataaaaaatgaaaacacattatacactcccagggcatatagatttttttccttattttattattgktgaaaaaggctaatgtatcaattcaaaaccaaaatatttccagagcaacaatccctttgcagattctgaggagtagcagagttttcatttgctttaatatacttagaaaattattaggatgaatgctgtcataattagagtaaaaattcattctgttgtaatgaactacaccaaattaagtaggaggtgggacttgactccagaggcagagacttaatgttggaccagactgaagattaccagaaacagggaagaggcaaaagcccctctccctaagacataatcaccagtaccatgt

SEQ ID NO: 599777 - DNA, 585 bp, Homo sapiens
taattttttttttttttgacacagagtctggctctgtcatccatgttatagtgcagtggtatgatctctgctcactgcaacctctgtctcctgggttcaagcaattctcttgactcagcctcccaagtagctgggactacaggcaagtgccactatgcccagctaatttttgtatattttgtagagatggcatttcacattgttgcccaggctggtcttgaactcctgagctcgggtgatccacctgtctcagcctcccaaagtgctgggattacagccatgaaccaccacacccagcctctaattcttactgacattaattttaattatgaaaaaaatactgcttcatcatctttccaaataaacgtaccaaaattttcycatttctacagcttttattacacttatatataaagctatctgatgtgaaaaaataatgcaaaccatatgcatagaagataatagcagtaataattgtctaaatgtgtggaaggatttcacaacattgcttctacgaccaacttctctagtagcaattcagaggaagagaatgatcactgatgttgttcaaggatttggatcact

SEQ ID NO: 599778 - DNA, 585 bp, Homo sapiens
taattttttttttttttgacacagagtctggctctgtcatccatgttatagtgcagtggtatgatctctgctcactgcaacctctgtctcctgggttcaagcaattctcttgactcagcctcccaagtagctgggactacaggcaagtgccactatgcccagctaatttttgtatattttgtagagatggcatttcacattgttgcccaggctggtcttgaactcctgagctcgggtgatccacctgtctcagcctcccaaagtgctgggattacagccatgaaccaccacacccagcctctaattcttactgacattaattttaattatgaaaaaaatactgcttcatcatctttccaaataaacgtaccaaaattttctcatttctacagcttttattacacttatatataaagctatctgatgtgaaaaaataatgcaaaccatatgcatagaagataatagcagtaataattgtctaaatgtgtggaaggatttcacaacattgcttctacraccaacttctctagtagcaattcagaggaagagaatgatcactgatgttgttcaaggatttggatcact

SEQ ID NO: 599779 - DNA, 510 bp, Homo sapiens
gaggaacttaatagcaagaaaacaatataaataatggtcaaaggacatgagtagacatttcccaaaagaagacatacaaagagccaacagatatgtgaaataatgctcaacatcagtaaaaatcagggaaattcaagtcaaaaccagaatgagatataacctcatatgtcttagaatggctattatcataaagtcattatcataaagccattatcataaagaggaaagataataagtattggtgagrttatggagaaaaggcaacccttgtaactgttggtaagaatgtaaatttgtatagccattatggaaaacaatatggaggtacctcaaaaaaatactaccatgtaattcagcactactactgagtatatatctgaagaatatgaagtcagcacgtcaaagagatatctgccctcctatgtctattgcaatattattcacaatagccaagatatggaatcaacctaagtgttcatcaatgaatggatacataaagtgtgttaatgt

SEQ ID NO: 599780 - DNA, 637 bp, Homo sapiens
aaactatgcagtttgttctttcctctaattttattattttttcccaaatatcttatgtgcattttaggaggtctacattggttttatagtgactttatgattgaaagttatttcccaggtcacatttattttttcaatctcatagtctcacttcaatcttcattctaaacttacattttataggttaacaactgttttccaggaaatgtcacataagtttttatgtaaagattgtatttttctagtgagacgatttaataattgtatttggtgaagctgacattttcaaaagtatgtatctatcatctttgaatttctcaaactttgtttctaactagatttctccagaataggtccatctgtctcatgtagagtttcaatacaattctattatattatatgtctttatattttctgtcagttaaactcttttaytaacttccaaactgaaaaaaaagaagtaaccatattttttctcatatgactatcacatcacattttcaatgcagttcaccaaattttgctcatttagagttttgcagtgctctcttaaatcactactgactagataactctgcaatttttacctggttttttagacttttcatgttttttcactgtactagtgagaaagata

SEQ ID NO: 599781 - DNA, 631 bp, Homo sapiens
ggttttggcatcaatgtaatgaacgtatttgagaggtatggtagataatatcttattaaaattttaaaatatttaaatatactaaacatagamaataatataattacatctacatgcctataatcatttaaataataatacattttaacaaattgaataataaatgccaaaattttattctattttaacaatgtcagacattcagcaatgatgtccaatatgatgctatacattactttatctttaaagaactgcagttactattaaaacctcactactgccatgaatggttttgtagttttctttatataagtatgtataatgtgttgaatattaaaatagttatatttttattggccaaccctttaaaaaaatcttcattttagtcttttattatattgatgaaaatttatttgtgcttttttaccttttaatagattagaagatttacattctactctactttttagtgaatacttttatgttttttctatgtatgcttgtcttaaagttttaactaaatcaatactttgataaattacctaaacaagaaaatgaggccatttataattggatcactctttcctttattatatattgcattttggatacatttttaaaaaattattct

SEQ ID NO: 599782 - DNA, 582 bp, Homo sapiens
catggaaagtgcttgttgaatagtacctggcacaaggaacacactcagtcgatgaccactgttactattcttagcagtaatgtagcctcagggacccccacagggaagcctattggtgaagagcttaggccctggagccagatgccctggatttgaagcctgggcctgccccttcttgggcaaggtactttcccttgcagactcagttttcccatctgcaaaatgggttcaataacagctcctacctcctggagctttaataaggacttaaagtattaacaggcatgcagtccttagagccacgcctggtttacatcaatgttcattcaacaatggctgctatgactactagttgtccatgccaggtgttctgggctcagttccttcctctacccttgcctcrccgagactcagaggaaaggcagtttccctggcagaatttccacttagatgaggttctataatcacacctctcctaccttcccacttaccctatttagtgtggagatggtgaggcattggggaactctgcttggagaggccagagactcctccctttctcacctgcatatgccacgtaaa

SEQ ID NO: 599783 - DNA, 541 bp, Homo sapiens
aaaaccaatgacatgagtcgggcctgtggtgttacaggtcatggacatggtggactcatctgcagttgcaaatcaaatgrgaagacggccaggggcaaggacagggccaggttccagctgtcaagtattctgggggtttctcctgggcccatcagcaactaaccttccccctcttggagcctcagtctcccctctgtaaagtagtaagcttggattcactaattgaagatgtggcccagtattaacattttatgaatttgggttgttctggcaagtccttatttgtaggggagagatttgaaatagccctaaaattctctagtctacgagacggtctccccaactttcaagttacccgccttttccaagtactatcaagaaacatcagttatgtactttagtatctatttttgttcagattcaagtttaaatacatttggacattttgtacttaagctatttcaacttcagggtcacagacaaccaggctttttggattccaccttaaataggtgactaagagaaagtgttttttgaaatg

SEQ ID NO: 599784 - DNA, 541 bp, Homo sapiens
aaaaccaatgacatgagtcgggcctgtggtgttacaggtcatggacatggtggactcatctgcagttgcaaatcaaatgggaagacggccaggggcaaggacagggccaggttccagctgtcaagtattctgggggtttctcctgggcccatcagcaactaaccttccccctcttggagcctcagtctcccctctgtaaagtagtaagcttggattcactaattgaagatgtggcccagtattaacattttatgaatttgggttgttctggcaagtccttatttgtaggggagagatttgaaatagccctaaaattctctagtctacgagacggtctccccaactttcaagttacccgccttttccwagtactatcaagaaacatcagttatgtactttagtatctatttttgttcagattcaagtttaaatacatttggacattttgtacttaagctatttcaacttcagggtcacagacaaccaggctttttggattccaccttaaataggtgactaagagaaagtgttttttgaaatg

SEQ ID NO: 599785 - DNA, 512 bp, Homo sapiens
acatatatatgtatgtgtgcacataaatatatcttcatgtttccttcactgaagaaaaattaacaccgtatatcagggcttactaaagtatagttatggaacatacaaaaaaccaggaatctttagttccccatgatagtaacctgataagaaaagttacatgttttaggcttttaatatcagtttccaaccaagctagtatgtctaaagcttgcccagataagagacagtatatatatatatatatatatatatwtttttttttttttttttttgcattgcaaatctaatgtcatggcccacttcttggaaggagccttgagttttgtttcacgtggggatgaagccttcagattcaacaacccatgaagaaacctcttattggtgctgatgtgtattgcatgggagaagggttcagaagttttgaccgttgccactcctgggccagtcctttcagaactgtagccaaggatatcctggcatgcattttgaaatagctcttgagagccact

SEQ ID NO: 599786 - DNA, 493 bp, Homo sapiens
tatactttatttttcctaagatagtgcacatacatataaacatattggaaatattaaatagccctagctctgctctgaactcctctatagccttttcaagaaaaccaattctatcaggtcaacctgatggatgacctcccccatgattgtcttcctccctctattctccacctagagaacataaacagggagcttcacatgatccttcccagttacagtaattttgcataggggaagattactggcttccaaacaaagcagtctcctttaacctgtctaaggatttatctagtgatgtcacaaatattcgtcaaagttcttgatctcctgaccatcctggcatttattgtaaagtcctcccaacttctacagaatacaacaggctatgacatatatgttcctaatttctggctaggyccttaattactggatcctcctgtcctttgcaattgctccaatgttgcctaaatttcctgccactgccgttgctgtt

SEQ ID NO: 599787 - DNA, 571 bp, Homo sapiens
caacttctacagaatacaacaggctatgacatatatgttcctaatttctggctaggcccttaattactggatcctcctgtcctttgcaattgctccaatgttgcctaaatttcctgccactgccrttgctgttgtttacgtaattatgccctcaatttacctctcagttctacatttattgtcttttcctcagtaactaatttggctagtctcttagagccatatgtctttgttttggcaggaagaccactgatggatttgagcagtaacagaccagcttccgctgcttcttgctagggtgttttgtgatggttgttcttccactcctgctcccatccatttttgcaaccctctcctcacccccaccagcatactgctatacctttagcattatccaggccctcatgacttctggattctgactagagttgaccaataggaggcactcataagagattggtaaatgtcctcaaaagttcaataagcgagaggttgaaaaatgtctttctctgattcctctgcctcagctctttggttctgcctgaaactacaaccctttaacactggaatt

SEQ ID NO: 599788 - DNA, 571 bp, Homo sapiens
caacttctacagaatacaacaggctatgacatatatgttcctaatttctggctaggcccttaattactggatcctcctgtcctttgcaattgctccaatgttgcctaaatttcctgccactgccgttgctgttgtttacgtaattatgccctcaatttacctctcagttctacatttattgtcttttcctcagtaactaatttggctagtctcttagagccatatgtctttgttttggcaggaagaccactgatggatttgagcagtaacagaccagcttccgctgcttcttgctagggtgttttgtgatggttgttcttccactcctgctcccatccatttttgcaaccctctcctcacccccaccagcatactgctatacctttagcattatccaggccctcatgacttctggattctgactagagttgaccaataggaggcactcataagagattggtaaatgtcctcaaaagttcaataagcgagaggttgaaaaatgtctttctctgattcctctgcctcagctctttggttctgcctgaarctacaaccctttaacactggaatt

SEQ ID NO: 599789 - DNA, 478 bp, Homo sapiens
ttagcattatccaggccctcatgacttctggattctgactagagttgaccaataggaggcactcataagagattggtaaatgtcctcaaaagttcaataagcgagaggttgaaaaatgtctttctctgattcctctgcctcagctctttggttctgcctgaaactacaaccctttaacactggaattcctcttaggatgctgacctcccatggctctgactctcagtaggtcctggtaaattattttcttcacatttcctccttgagtgataatagtttccttttgttttgttagttcctgrgtacttcatatctctttttgtttcccttaatcctgcccagacctctgtaaactgtcattttattaaattatcttcaagggtaccttctgtttcctgttgacattttgactaaaagtagtccacaaggcccttattgccataaacttctttattattttcacaaaacaaatacatta

SEQ ID NO: 599790 - DNA, 515 bp, Homo sapiens
aatatatctttcttctatttgtattcaatgaatcttcagagtacaatggatgtgctcacttttcccttttaaggtccactgtaaatctagtccttcctgagtagttattatttggcttgctaagagcagacccataactgcttgtggaaaatttattatggagattgcctgccaaacctagaccttttsacaaaaccatgcaaatgttcatgcttcaaaacaagccacatcctttatgtttctgattatttaagaataaacaggaatcctttactactttatagaaaaatgaggttaaaaaatcttatatgcattattccacaggagctttctgtaacttgattaaagcattcataaaaaggcaatgtctataattttctttttttaactgtttattcttttgttagatttttcctttttataaattaagactcattggtaagcattgtgctttttttctcatcttgggccctcaactttcttgagtgaaaatcgttgtcttctttgacataacc

SEQ ID NO: 599791 - DNA, 515 bp, Homo sapiens
aatatatctttcttctatttgtattcaatgaatcttcagagtacaatggatgtgctcacttttcccttttaaggtccactgtaaatctagtccttcctgagtagttattatttggcttgctaagagcagacccataactgcttgtggaaaatttattatggagattgcctgccaaacctagaccttttgacaaaaccatgcaaatgttcatgcttcaaaacaagccacatcctttatgtttctgattatttaagaataaacaggaatcctttactactttatagaaaaatgaggttaaaaaatcttatatgcattattccacaggagctttctgtaacttgattaaagcwttcataaaaaggcaatgtctataattttctttttttaactgtttattcttttgttagatttttcctttttataaattaagactcattggtaagcattgtgctttttttctcatcttgggccctcaactttcttgagtgaaaatcgttgtcttctttgacataacc

SEQ ID NO: 599792 - DNA, 595 bp, Homo sapiens
agaaggtatagtttactcagcgcttttaaccgtcttctatttgcaaagtccttgccattttggggaccaaaatgaataagtcttgcttgtaccctcaagaaactcacagattagtaaaagaagcagccaagtaaatgaatgtacattatggtgggcctctatgtagaggctccaatagaggcaagaacaggatactgcacaaatgtctaactatggcggcctagagagaggaaagtggttacgaagtttatgaataggagaaagaaaggcggttacaagacagaaaaaggtggttacaaagtttatggctaggagagaaagtaaaaaatgtttcaaaatggtgatgatgtttaattgacccctgaattctgaatagttttgggggaacataagaaggaaaaaaagaattctaaacttaaggaacagcatgcacagaaatgcaatggcgtgacagagcatgtcatgttctaggagctggacatagttctgttatattaaagcataaagtgastggaagagtggtaaataataaagcagaaagaaacgatgaaagattggtcaaaaagttcagataccataacaaagagtttggatc

SEQ ID NO: 599793 - DNA, 551 bp, Homo sapiens
ccatttgctaagaccattggaaaagcacagtgtttaggtggcagcatcccgattttcccagtacagtctgtcatggcttcccttggctaggaaagggaaatctcccaaccccttgcacttcccgggtgaggagatgccctgccctgctttggctcaccctccatgggctgcactcactttccaaccagtcccaatgagatgaatcakgtacctcagttagaaatgcagaaatcacctgtcttctgcgttgatcacactgggagctgtagaccagagcagttcctattcagccatcttggaatggaccccgacctatacttttggatgctacaagtgaacatcaaagaaaaatatcttgaggtcagaagtttgaaaccagcctggccaacataatgaaactccgtctctactaaaaatacaaaaattagccaggcatggcaaatgcctgtagtcccagctgcctgggaggctgaggcacaagaattgcttgaacctgggaggcagaggttgaagtgagtcaagatagtgctactgtactccagcctgggcgg

SEQ ID NO: 599794 - DNA, 551 bp, Homo sapiens
ccatttgctaagaccattggaaaagcacagtgtttaggtggcagcatcccgattttcccagtacagtctgtcatggcttcccttggctaggaaagggaaatctcccaaccccttgcacttcccgggtgaggagatgccctgccctgctttggctcaccctccatgggctgcactcactttccaaccagtcccaatgagatgaatcatgtacctcagttagaaatgcagaaatcacctgtcttctgcgttgatcacactgggagctgtagaccagagcagttcctattcagccatcttggaatggaccccgacctatacttttggatgctacaagtgaacatcaaagaaaaatatcttgaggtcagaagtttgaaaccagcctggccaacataatgaaactccgtctctactaaaaatacaaaaattagccaggcatggcaaatgcctgtagtcccagctgcytgggaggctgaggcacaagaattgcttgaacctgggaggcagaggttgaagtgagtcaagatagtgctactgtactccagcctgggcgg

SEQ ID NO: 599795 - DNA, 513 bp, Homo sapiens
tgaggtggctaccaagtgactcataagcgctggtgtctataggatgaatcamtttataccgtggggatgactcacatacaggtaggagggagcaggatggcattagatttcatcacactgctcagaatggtgcaaaatttaaaacttacaatttgtttatttctggaatttctcattaaatatttttggcttgcagttaaccatatatacatgggtattgtattgttttggttcctcgtgctgcactggactcaatgacactttattttgtaaagcagctgccatcagactttgaatttcttcaaagccctctttgaaaacatttgaaacaaaatatattaacccccaaatccagaaaattgataaatgaaatgagtcaatatctaatgaaatgtctacgaaaacacaaaattcacttttccttgattggtggtaaaattagcatttgtaaacaattttcacaattgaagaatatatgtataacgcatttttctctgtttataataatttctg

SEQ ID NO: 599796 - DNA, 534 bp, Homo sapiens
tataaaaagaggttgaattggytcacagttctgcaggctgtactagcatggttctaacatctgcttctggtgagggcctcaggaggcttacagtcatggtggaagggaagggaagccagcatatcacatggtgaagggaacaagagagagaagggagaggtcccagacttttaaacacccagatctaagtgagtgagaactcagttattaccaagggaatggtgcttagttattcatgaggaatctacctccctgatccaatcacctcccaccagacctcacctccaatattgggaatcatattgcaacatgagatttggaggggacacacatccaaaccacgctatccgtgtatacatagtatgttgtgaaaataaagtaaatgatactgcggaacacagattttcatggtgattttcctattctgttaactgtctatttatattaaatgattatgtagaaaatgatttggcttgtaaaaatattaagtattgtattagtccattttcacactactataaataactgcctgaa

SEQ ID NO: 599797 - DNA, 534 bp, Homo sapiens
tataaaaagaggttgaattggctcacagttctgcaggctgtactagcatggttctaacatctgcttctggtgagggcctcaggaggcttacagtcatggtggaagggaagggaagccagcatatcacatggtgaagggaacaagagagagaagggagaggtcccagacttttaaacamccagatctaagtgagtgagaactcagttattaccaagggaatggtgcttagttattcatgaggaatctacctccctgatccaatcacctcccaccagacctcacctccaatattgggaatcatattgcaacatgagatttggaggggacacacatccaaaccacgctatccgtgtatacatagtatgttgtgaaaataaagtaaatgatactgcggaacacagattttcatggtgattttcctattctgttaactgtctatttatattaaatgattatgtagaaaatgatttggcttgtaaaaatattaagtattgtattagtccattttcacactactataaataactgcctgaa

SEQ ID NO: 599798 - DNA, 498 bp, Homo sapiens
ggcttgagccaccgagcccagcctctattatttgtttcttatttacttcattccatttcttcttattattattattaaaatttcctttggttttaaactttatctgyttaaatttattttaaattaatttagacattttattggcccaaaccatggtaaaccttaatgaatgttccataagagcatgcaaagtatttgtattctgcacatgatgattgcagtgttacatagaaattaatttattcaagttgcttgacagcattgcttaactattttgttttgaaagaatttttgtcttttatccatatatttgtctacttgtttgtattttatattctgatttttattgtctactcattctggctcacttaccaagtatattagttttccaaggctctgtaaaaattatcacaaatttaatgtcttaaaagaacacttttttttttttgagatggagttttgttcttgttgcccaggctgaagtgcaatggtgtggtc

SEQ ID NO: 599799 - DNA, 571 bp, Homo sapiens
acaccagggcctacctttggctagatggtagaaggcgggagacgatcagaaaaaatagatattgagtactagacttagtaccggggtgaaaaatcatctgtacaacaaacccctgtgacatgcatttacctgtataacaaacctacacatgtatttgtaacctaaaataaaagtttaataaaaaggactttagaggctactggcgtggaacgaakatatgctgtatataggagggatataaatttggagggccaggagcaaaatgctatggtttgaatgtgttcccaatgttggaaacttaatccttaatgcacccctgctgaaaggtaggacctttaagaagttctgtcctcctgaatgagttaaggccattattgcaagagtgggttccttattaccagagtggcatcctcataaagggtgagttcaaccctcttctctctgcattggctctcttgtcctttcaccttccacaatggagtgatgccacaagaaggcccctctgctagatgcatgccccttgactttggactctccagcctccagaactgtagaaaataaattcctattt

SEQ ID NO: 599800 - DNA, 571 bp, Homo sapiens
acaccagggcctacctttggctagatggtagaaggcgggagacgatcagaaaaaatagatattgagtactagacttagtaccggggtgaaaaatcatctgtacaacaaacccctgtgacatgcatttacctgtataacaaacctacacatgtatttgtaacctaaaataaaagtttaataaaaaggactttagaggctactggcgtggaacgaagatatgctgtatataggagggatataaatttggagggccaggagcaaaatgctatggtttgaatgtgttcccaatgttggaaacttaatccttaatgcamccctgctgaaaggtaggacctttaagaagttctgtcctcctgaatgagttaaggccattattgcaagagtgggttccttattaccagagtggcatcctcataaagggtgagttcaaccctcttctctctgcattggctctcttgtcctttcaccttccacaatggagtgatgccacaagaaggcccctctgctagatgcatgccccttgactttggactctccagcctccagaactgtagaaaataaattcctattt

SEQ ID NO: 599801 - DNA, 577 bp, Homo sapiens
gtcaaggtaactcaattgggaaaaataaatagcctcttggaccaatagtaatagaactactgcatttctatgagcaataartaaataaataaagcttgatccttacttcacaggataggcaaatattaacttgaaatggaccataaactaaaatatagataaaaatagacaatttccaaaagaaaacatggtaggaaatctttatgaacttgggttaggcaaatctttcttagatcagacatattaaacacgaagtatgaaagataaaaatgctaaattggatttcatcagaattaagaacttttgtccttcaaaagacatccttcaaaaaaagaagagaagccactgaatgggagagaatatttgcaaaacatatatgataaaggacttgtacctagaatataaaaatacttaaaaatgaataagaagataaacaacccaatttaaaaatacagtcaagagccaacaaagcaaaaaagacatacacatggatatgagcaaatgagaatatgaacaacagtatcagtcattagtgaagctcaaaataaaaatgcaatggaatattataacacactta

SEQ ID NO: 599802 - DNA, 577 bp, Homo sapiens
gtcaaggtaactcaattgggaaaaataaatagcctcttggaccaatagtaatagaactactgcatttctatgagcaataagtaaataaataaagcttgatccttacttcacaggataggcaaatattaacttgaaatggaccataaactaaaatatagataaaaatagacaatttccaaaagaaaacatggtaggaaatctttatgaacttgggttaggcaaatctttcttagatcagacatattaaacaygaagtatgaaagataaaaatgctaaattggatttcatcagaattaagaacttttgtccttcaaaagacatccttcaaaaaaagaagagaagccactgaatgggagagaatatttgcaaaacatatatgataaaggacttgtacctagaatataaaaatacttaaaaatgaataagaagataaacaacccaatttaaaaatacagtcaagagccaacaaagcaaaaaagacatacacatggatatgagcaaatgagaatatgaacaacagtatcagtcattagtgaagctcaaaataaaaatgcaatggaatattataacacactta

SEQ ID NO: 599803 - DNA, 577 bp, Homo sapiens
gtcaaggtaactcaattgggaaaaataaatagcctcttggaccaatagtaatagaactactgcatttctatgagcaataagtaaataaataaagcttgatccttacttcacaggataggcaaatattaacttgaaatggaccataaactaaaatatagataaaaatagacaatttccaaaagaaaacatggtaggaaatctttatgaacttgggttaggcaaatctttcttagatcagacatattaaacacgaagtatgaaagataaaaatgctaaattggatttcatcagaattaagaacttttgtccttcaaaagacatccttcaaaaaaagaagagaagccactgaatgggagagaatatttgcaaaacatatatkataaaggacttgtacctagaatataaaaatacttaaaaatgaataagaagataaacaacccaatttaaaaatacagtcaagagccaacaaagcaaaaaagacatacacatggatatgagcaaatgagaatatgaacaacagtatcagtcattagtgaagctcaaaataaaaatgcaatggaatattataacacactta

SEQ ID NO: 599804 - DNA, 577 bp, Homo sapiens
gtcaaggtaactcaattgggaaaaataaatagcctcttggaccaatagtaatagaactactgcatttctatgagcaataagtaaataaataaagcttgatccttacttcacaggataggcaaatattaacttgaaatggaccataaactaaaatatagataaaaatagacaatttccaaaagaaaacatggtaggaaatctttatgaacttgggttaggcaaatctttcttagatcagacatattaaacacgaagtatgaaagataaaaatgctaaattggatttcatcagaattaagaacttttgtccttcaaaagacatccttcaaaaaaagaagagaagccactgaatgggagagaatatttgcaaaacatatatgataaaggacttgtacctagaatataaaaatacttaaaaatgaataagaagataaacaacccaatttaaaaatacagtcaagagcyaacaaagcaaaaaagacatacacatggatatgagcaaatgagaatatgaacaacagtatcagtcattagtgaagctcaaaataaaaatgcaatggaatattataacacactta

SEQ ID NO: 599805 - DNA, 573 bp, Homo sapiens
acttggttttaacaattcccagatttacagtgaatgagtaaaaattgtcacttcctgttttgcccaggaaccttaagaatgtggggggaatctaaagtcggccttgatccggcttcatagccttaagaggtgatatggtttggctctgtgtccccactcagatctcatctcaaattgtaatccccatgtgtagagggagggacctggtggaaggtgactggatcgtgggggtgctttccccatgctgttcctcataatagggagttctcatgagatctgatggttttaaagtttcacagttcccaccttctcgctctctctcctgcctcctgccaccatgtgaaatgtgccttgcttcccctttgccttctgccatgattgtaattttcctgaggcctccccagccatgcagaactgtgagtcaatttaacctcctttctttataaaatyatccagtctcaagtattctttatagcagtgtaaaaatggactgatgcaatagtattttttaatgagatagctatgtagacaaatcactattcttgcaaacaaaatttgataaaactaatttta

SEQ ID NO: 599806 - DNA, 391 bp, Homo sapiens
tactgtgggaagcagaattcctatatggcactcatgattcctgacccctagcatccacacccttgtgtgtcccctttccttttgagttgggagggatgtggaacttgcttctaaccaacagaatatggcaaggtttatggaacatcactccttgagtttgttacattatatggcaaaagtgaggggattttgcagatgtaattaacgctcctattgagtgrtccttgttatccaaaaggaagattgtcctaggtgggcctggcctaatcagaaaggccttttaaaggaaagtctagaagcaagtgactggagcacttctctctctctctctcttcgtgtgtgtgtgtgtgtgtgtgtgtgtgtattatgtgcatgcatgctggatttgaaa

SEQ ID NO: 599807 - DNA, 591 bp, Homo sapiens
aaataattcatgaattttttccaggaccagatataggcccagaattttaacggatattttctcacctaattgtttttattttcctccatgcagaaaaaggataggtgaagacttagtttaacaatgagtaagggcatgtgtggaatagggttattgcgaaggttgaaaaagctgtctgggtgcatgagtgatggagctaactagagccactgtggcaagcagaattccaratatagcttccttatgatctctttgctctggttataaaatcaaatatgaatcttggtactaccgtgaagggattttgcagatataattaaagtccaagtcagttaaccttaagatatggagattatttgaatgggcctggtttaatgagatgagcctttgaaaactagagagttttctgagctggtggcagaagaggaagtcacagatatctgaaagcatgagaaagtttcagcatgtcattactgactgtgcagatgaaaggggccacatgaagagaaatgcaggtgatctctaaaagctgagtcacttcaagcaaatagccagcaagaaagtgaggtttcagtcctataactgccacca

SEQ ID NO: 599808 - DNA, 591 bp, Homo sapiens
aaataattcatgaattttttccaggaccagatataggcccagaattttaacggatattttctcacctaattgtttttattttcctccatgcagaaaaaggataggtgaagacttagtttaacaatgagtaagggcatgtgtggaatagggttattgcgaaggttgaaaaagctgtctgggtgcatgagtgatggagctaactagagccactgtggcaagcagaattccagatatagcttccttatgatctctttrctctggttataaaatcaaatatgaatcttggtactaccgtgaagggattttgcagatataattaaagtccaagtcagttaaccttaagatatggagattatttgaatgggcctggtttaatgagatgagcctttgaaaactagagagttttctgagctggtggcagaagaggaagtcacagatatctgaaagcatgagaaagtttcagcatgtcattactgactgtgcagatgaaaggggccacatgaagagaaatgcaggtgatctctaaaagctgagtcacttcaagcaaatagccagcaagaaagtgaggtttcagtcctataactgccacca

SEQ ID NO: 599809 - DNA, 508 bp, Homo sapiens
tactataagcagatatagatccagtaggagatttatcctaagattcagaatcattagggttaatgagcttaggtcagtgaatcaggttgtcaaagtcaagataaaaagaactaacttattgcaaataatttggaggcactccttaccttaaaatagtgtttcattatttcatgtggatttattccctctaggtatagatttattctcacaagatggactgcaataaacaaatgaccaagaaagaaagatggaccaaataacttatagcagtggttcataaagtgtggtccatgaaccagcagtgtcagcatgtggaaacttactagaaatgcagtctcttttcamctcactagaccttgtgcaccaaaattatttcccttcttaagtatttaaaaacaaacattgtgagatggtctcataatagagtttgaataaaagaaatcaggttacttcctgaaactttggcacccttttaccaaattcatttagccactgcagtaaaatttca

SEQ ID NO: 599810 - DNA, 518 bp, Homo sapiens
  misc_feature 453: n = A,T,C or G
gcagcaacctggatgggattggagactattattttaagtgaagtaactcaggaatggaaaactagacatcatatgttctcacttrtaagtgggagctaaactatgaggatgcaaaggcataagaatgacacaatagaatctggggactcggggaaagggtgggaagaaggtgaggggtaaaagactacaaatcaggttcaatgtgataggttcacctaaatctcacaaatcaccactacagaacttactcatgtaaccaaatattacctattctccaaaaacctatagaaataaaaaaattttaaaaaagaaagataaaaaaatacagttctgccctaatcacttcattataaacttttgggactccaatatcacttactttagactttttactattgttccaaaggtcccttagtcttgctcaattttttaattaactttttttctgtcctntgagctgtggaatttctattgatctatattcaagtttactgactttttgtcagtaacgtgtatac

SEQ ID NO: 599811 - DNA, 454 bp, Homo sapiens
aaatgatatagttattgcagataaaattttccttattttgcagaacaggggattgaaattcaaggagtctaaatgactcagaaaataaaacatgttagaatcaatatactcacttgatttctgcagtagtctgagacacgtaagtttcagaaaacaaacaaacaaacaaamaaaaaacaacaaaaaaaacacaaacacctgaatagcttgttaacgtttgcagttctaggctctatctccaaataatctcatttaataagactaagcccaatattctatcttcaactaacctctcatggttatgaataatactcccctacatcttctgtgtatgccagatactattttcatttatttttctctcagctttgaaaaataggctacatttcatcttctggcatcttatgtatgaaaatactgtttctgaaagacagcttatcagagacatcatatt

SEQ ID NO: 599812 - DNA, 454 bp, Homo sapiens
aaatgatatagttattgcagataaaattttccttattttgcagaacaggggattgaaattcaaggagtctaaatgactcagaaaataaaacatgttagaatcaatatactcacttgatttctgcagtagtctgagacacgtaagtttcagaaaacaaacaaacaaacaaacaaaaaacaacaaaaaaaacacaaacacctgaatagcttgttaacgtttgcagttctaggctctatctccaaataatctcatttaataagactaagcccaatattctatcttcaactaacctctcatggttatgaataatactcccctacatcttctgtgtatgccagatactattttcatttatttttctcycagctttgaaaaataggctacatttcatcttctggcatcttatgtatgaaaatactgtttctgaaagacagcttatcagagacatcatatt

SEQ ID NO: 599813 - DNA, 454 bp, Homo sapiens
aaatgatatagttattgcagataaaattttccttattttgcagaacaggggattgaaattcaaggagtctaaatgactcagaaaataaaacatgttagaatcaatatactcacttgatttctgcagtagtctgagacacgtaagtttcagaaaacaaacaaacaaacaaacaaaaaacaacaaaaaaaacacaaacacctgaatagcttgttaacgtttgcagttctaggctctatctccaaataatctcatttaataagactaagcccaatattctatcttcaactaacctctcatggttatgaataatactcccctacatcttctgtgtatgccagatactattttcatttatttttctctcagctttgaaaaataggctacatttcrtcttctggcatcttatgtatgaaaatactgtttctgaaagacagcttatcagagacatcatatt

SEQ ID NO: 599814 - DNA, 550 bp, Homo sapiens
tatacaggtatatatgatgtgtttatatgataaaattccattcacaaatgcttttatgttactaatgtttctattatttacacataaacattttagaacagagttgaatatacaaagtaatggataccgtactctattggaaattaagtatactttcaaggataattttatttgatttctagcacatacattgttagaaattaaccccagccaaaatatggaacrctactgtatgctgagtatccctgcttcatgtctttctccccaccagtttctcctagatatgctgatttgaaataaaataaaatggtgaagttctctttcctatgctattgcctcaaaaaagatttgaaaaggaaagtaaaaatgatttaaaggttgtaccatttttatttctcactacagccctgagagctagaggaagttatgatgtaagtggaaggggcaagaccacacacatgcatggcaccatcccaggaaggttttgagacccagtggggagtgtcttcactatgcacctaaggaagctggagaccaggccccaaggtct

SEQ ID NO: 599815 - DNA, 550 bp, Homo sapiens
tatacaggtatatatgatgtgtttatatgataaaattccattcacaaatgcttttatgttactaatgtttctattatttacacataaacattttagaacagagttgaatatacaaagtaatggataccgtactctattggaaattaagtatactttcaaggataattttatttgatttctagcacatacattgttagaaattaaccccagccaaaatatggaacactactgtatgctgagtatccctgcttcatgtctttctccccaccagtttctcctagatatgctgatttgaaataaaataaaatggtgaagttctctttcctatgctattgcctcaaaaaagatttgaaaaggaaagtaaaaatgatttaaaggttgtaccrtttttatttctcactacagccctgagagctagaggaagttatgatgtaagtggaaggggcaagaccacacacatgcatggcaccatcccaggaaggttttgagacccagtggggagtgtcttcactatgcacctaaggaagctggagaccaggccccaaggtct

SEQ ID NO: 599816 - DNA, 508 bp, Homo sapiens
tatatgaaatgcatgaatcaataaatcaatractgaaaaaaccttcttcctcctgtggagagaagaactcttggatttagaagaggcagcctgggtcctaaataccctgcccccatccctggagtgcgcatatgtttccagagtcttctgttagcttgatccagatctgttggtgtcacttttggatactggaagggtcccaaggagattgcctacatcatttaaggctcgtcatggcagagtaatgaaatttgcatctattcacagaatagagttgtcatgtattaatatctgcttattagtaaccagtgctaagctgactgccatttcaaatgggtcctcccaatattttgaaccatttaatttttccccaacaatcattggatttatactggcagtctctgaagttgccagtctggctgtaagctcttttgatctaagtttcctgatttatctaccaggctctgggagacagtttttgctatcctgacaatcatcatgaacaaat

SEQ ID NO: 599817 - DNA, 599 bp, Homo sapiens
tgtgaccctctcaagtaacttcagtacggtttggctgctgctgtagacaccagatggtcaggaagcccatctcttttataaatggatacttaataaatgcacatgtattttattattacttttaacygccataaaatttttcttggacagaaagatttcagaaacatcctatgcaatattttcttattcaagctctacagaaaaaatatcatatcttgaattagattctttgaatgaaaggcaagtgtaaatagcaactcccatatattgaacatatattctctgttgggctccatgctagacatttcacatgctttatagcaagaaaaccttactatttagatgataacatcatattgattcattatatttttagccatactaatttaaatgaactatttctcttgtatatagcccataattctagagagaatattaaaaaactaggtaatattgctgttactgatggatttaactattccttgaagagaacaactaatgaatcacagagtgttctctctcatatataagactagtggtctacccccaaagggttaacccacttggatctgtttattcaatatcatcattgatgtttg

SEQ ID NO: 599818 - DNA, 599 bp, Homo sapiens
tgtgaccctctcaagtaacttcagtacggtttggctgctgctgtagacaccagatggtcaggaagcccatctcttttataaatggatacttaataaatgcacatgtattttattattacttttaaccgccataaaatttttcttggacagaaagatttcagaaacatcctatgcaatattttcttattcaagctctacagaaaaaatatcatatcttgaattagattctttgaatgaaaggcaagtgtaaatagcaactcccatatattgaacatatattctctgttgggctccatgctagacatttcacatgctttatagcaagaaaaccttactatttagaygataacatcatattgattcattatatttttagccatactaatttaaatgaactatttctcttgtatatagcccataattctagagagaatattaaaaaactaggtaatattgctgttactgatggatttaactattccttgaagagaacaactaatgaatcacagagtgttctctctcatatataagactagtggtctacccccaaagggttaacccacttggatctgtttattcaatatcatcattgatgtttg

SEQ ID NO: 599819 - DNA, 556 bp, Homo sapiens
tgacagatgatatctttaagagatgattaagttatgatagctttgccctcatgaattgattaatgctattcttttgggagtgggtttcttatgaccggaatgagtttttaataagagtgggttcagcccccttcacttccttcccatctctcatgtatgttctcttgctcttctgccttccrccattggaagccacagcaagaaggacctcacaagatgcagttccttcagccttggacttcccagcctccagaagtgtgaaaaatgaatctatgttctttaaaaatcacccagtgtgatgtattctcttatagcaacataaaatggactgcagcagaaagctggtagcaagaagtgggctatgagcaatatctataataaataccttaaaatgtggaagtggctctggagctgggtaatgggtagaggctggatgaatttggaggatcaggctagaaaaagccttgattgccatgaatatagagttaacggtgattctgatgatgggtcagaagaagagaaaaaacgtagggaaagcatgggaattcttagagat

SEQ ID NO: 599820 - DNA, 556 bp, Homo sapiens
tgacagatgatatctttaagagatgattaagttatgatagctttgccctcatgaattgattaatgctattcttttgggagtgggtttcttatgaccggaatgagtttttaataagagtgggttcagcccccttcacttccttcccatctctcatgtatgttctcttgctcttctgccttccaccattggaagccacagmaagaaggacctcacaagatgcagttccttcagccttggacttcccagcctccagaagtgtgaaaaatgaatctatgttctttaaaaatcacccagtgtgatgtattctcttatagcaacataaaatggactgcagcagaaagctggtagcaagaagtgggctatgagcaatatctataataaataccttaaaatgtggaagtggctctggagctgggtaatgggtagaggctggatgaatttggaggatcaggctagaaaaagccttgattgccatgaatatagagttaacggtgattctgatgatgggtcagaagaagagaaaaaacgtagggaaagcatgggaattcttagagat

SEQ ID NO: 599821 - DNA, 609 bp, Homo sapiens
tgtaggttctattcatcaagacaatgagagaatgtccctaaagtcatttcagagatcttcaaggcaagttagaatgttgagggaaaggtttccagaaaggctgaagactttaccattcactatcaactgtctgcttcccaaactccaggrtagtgctcctcagccactccagctagggcttaagccagctctggtacaactctagccactgctctaagggtaaaagtggtaacaccttggggacttccatgtggcgctaactctgtaggctcatggagtgcaagagcagtgttagcatggctttctccacctggattttaaagaatgtaggagacagcttcaagcttcaggcaaaaacttgtcacaggggagtagttgccacagatagtttccactagagcaatacacagaggaccgtgggtatagaaccaccacagagagccccacactactagggcaatgcccattaaaaactgaggaatcaggaacaccctacctgcagcctgggaaagctacagatatgagagtccaacccatgagagctgcttggtgggctgagcccagcaaaattataacagtgaggctgcttaagttttgggggtccaacac

SEQ ID NO: 599822 - DNA, 470 bp, Homo sapiens
  misc_feature 1, 2, 3, 4, 5, 6, 7, 8, 9, 10, 11, 12, 13, 14, 15, 16, 17,18: n = A,T,C or G
nnnnnnnnnnnnnnnnnnacaaccaaaccttcagtttcaggcctggcactgggctgcctgtctttggttttacttccttgttgttttttcttaaaacaggtaatgagtataaaataacataaaacaatataagagggtctctctcttccctcattccccccttttgagactctcactttttattagtgggagttttcactcttatttttcttacttatgtctttttgtkcaatagattaatagtgattcatatagtacacttgtgctgaagcattttggtgaactaaggtagcgatgaagctttttatcatttgaagaagtacaggtagtaaacaagggagcagtaagcaggtttttattattattataactcctattataagagttttaaatcttcctagtgctgggaaccaccttctaaacacggcttcagggttgaatccgtgctacacttgcacgggtacatgtgc

SEQ ID NO: 599823 - DNA, 620 bp, Homo sapiens
tgctaataataagatcttgtttcgtctaaattaacttacaattggtatagatggcttttttttttttttcttctctctgctggtctttccttgtctctgccarccacttatgctgctgttctcttaactaccgtggggggaaaggggtctaaaaccagctgtaactgtctatgtatggaacctggtctgggtgccttggcttacaggttaccttttgccataccttagaaaccaaagacctatctaggcttccttctgatggctaacctacctctaatgctggccagtctatttcacacaaacttctaagtgttcctggagtcatagtgactccatagtctccattaaatcctttcttgaaattctttaacatagttcccattggggtgtgcttactttgcatctgacctatgttttttcaagacaaaacaccacgctcacacaatacacacacaacacaacaaagaacaggtacaagggcacacacacacttttgcagttacaccaaaccaaaatcaaaaccaaaatcagagtatccagaaattcaagccaggtcaaaaaccgaaatcaaagtatccagcaactcaagtcaagtcaaaaccagaacaaaggtgccaata

SEQ ID NO: 599824 - DNA, 594 bp, Homo sapiens
tatgagttgatttttaactactgggtttaggccaggcaggcccaggcctggtttcaggcctggcgccgggctgcctgtctttggttttacttcctcgttgttttttgttaaaacaggtactgagtataaaacaatataaaagaatatatgagggtctctctcttccctcagaggaagcagcagaaaggctctgggggctcgctgggtcccctaacagcccattcctgcctggcaccacaggratccaacgggagaggagcaggggtaaaactacacagggacaaggaaatctctagctgaactttgaaacaatttgaatggggtgagaaacctcctggccagaacttggggcagggtgcaaatcctgtgtgcaaactccacaggtggaggaagaaccagggcctttttattctcagcggggaggcagatagccaggggcagtgtttcaagcccgtattgccctccgcctggaaatggtatgggggctcttacagggtacacagtgggattgagaccggcaggtcagtttgtgtgggagctgggtgaggtctgtgactgctggctttctcccactttccaggcaacctgtatgac

SEQ ID NO: 599825 - DNA, 449 bp, Homo sapiens
tgtccccctagagaaccctgaaaaatagaggttttggtaccaggagtggttctagagagaacagaatattaaggatggagttctgtagttgatttaggggtttctggagttggctgcttaatatgatcagacaccaaaatgctaaggactctacttctaatagtatagagaacactgacagtccctggcatgaactgttttagagagttaygcaaaataaatgcatttgacactcctgactcacctctcatgagaggcaaggagtttactgactctatacataatacctttgaccatatgtggagaactaagtaacaaaacaaagctggttggctgctcctaagttcactggacaaagtgatgaaagaaaatgatgaactcagggattctaactcccaggttcagaagcagagactgagcctcaaatcttctgagactgccctgagtca

SEQ ID NO: 599826 - DNA, 560 bp, Homo sapiens
ggactttgatttttttgttttgtttttagaaaaagaaagtaaaatgtattgtggtacacatccataacacaataaaccttgttggatgtacaattagtgttatttatcttgtttggctcctttgagtacctgatatattggctgcaatactcacactggagtcttcatatacgtatccacgcagattactatataaatatagatgtgctatgcaaaaagaacgtaaattttttaatgtcaactccaaatccctcttctccaggaaattagtaactattaatcagtgtggccaataaaaatcgtttccattctagccagtctaatttttctttttctagatcttgctgatgcaattctatgtaatcacggactcttaagccatacattccatattctctaaaccatggggtactctgctatcatagaagaatataaattcttgacttccaccatttccatgcctgtgttgtgttgtgttgtcttttagcttgtggaaaaattcagttaaacaggcactgggctttcagkttatctggtgatatgctctgtgacccaagata

SEQ ID NO: 599827 - DNA, 320 bp, Homo sapiens
aaattacatataggattaccatacatttatatttttaacccttccaaaattatacccaaatgacaattgagaaacgaaaatgttatcaacccataacatagagaatgaragaagaggcaatagtgagcggaattatttcgacaaatatttgagagcagaaaaaaatagatggaagagtgataactgacatatcagaatacagaaagttaaagcctgcattaattgcagaggataccaaaactaagctagttaatttatccaacaaaatccctagaagctcagcttttgaagtcaaccaacaaaactagtgagacggtaca

SEQ ID NO: 599828 - DNA, 578 bp, Homo sapiens
ttgagaaatccaggaaagtaaactaaaatgtaaaacaagatagaaaataacaaagacacaataacaaaattagagaattgcacccagctttccaacatctaataggagttccagaaaacctgaatattgatattattttaaaatagattaggtttccctgaagtgaaggaaataattttccagaaggaaagtgctccagaatgcctagcacaataaatgaaagaaaaccacaattggaaacatcataagaaatgttatcaagttaagagaagaatttgaaagcttacaagatatatacacagagagagagagagacagacagacagacataaacagacccttagaaaayaatgggcatccacaaaaaaagaatgagttcatgtcctttgcaggaacatggatgaagctgggagtcatcattctcagcatactaacacaggaacagaaaaccaaacaccgcctgttcttactcataagtgggagttgaacaatgagaacacatggacacagggaagggaacatcaccgacaccagtcaggggtttgggggaaaggggagggaaagcagtaggacaaata

SEQ ID NO: 599829 - DNA, 578 bp, Homo sapiens
ttgagaaatccaggaaagtaaactaaaatgtaaaacaagatagaaaataacaaagacacaataacaaaattagagaattgcacccagctttccaacatctaataggagttccagaaaacctgaatattgatattattttaaaatagattaggtttccctgaagtgaaggaaataattttccagaaggaaagtgctccagaatgcctagcacaataaatgaaagaaaaccacaattggaaacatcataagaaatgttatcaagttaagagaagaatttgaaagcttacaagatatatacacagagagagagagagacagacagacagacataaacagacccttagaaaacaatgggcatccacaaaaaaagaatgagttcatgtcctttgcaggaacatggatgaagctgggagycatcattctcagcatactaacacaggaacagaaaaccaaacaccgcctgttcttactcataagtgggagttgaacaatgagaacacatggacacagggaagggaacatcaccgacaccagtcaggggtttgggggaaaggggagggaaagcagtaggacaaata

SEQ ID NO: 599830 - DNA, 465 bp, Homo sapiens
cggaggtcctttgtgaacacacatgcaatgcacagtaaaaaattttgaaggtactctgtttttcttttttgttttgttttgttttgttttgtttttgacggagtctcactctgtcatcaggctggagtgcagtggtgcgatctcagcttactgcagcctccagctcccaggttcaagtgattctcctgcctcagcctcctgagtagctgagattacaagtgcgcaccaccatgcccagctaattttttgtatttttagtagagacagggtttcaccatgttggccaggatggtgttacaagtattatttaactttttattctcaaagtcctagccaattcaattagaaaacaaaatgaggtaatatatatatatacatacatatatatatayacacacatatatgtgtgtatatatatatatatagagagagagagagagagagagagaaacaaaaaaagagaaa

SEQ ID NO: 599831 - DNA, 465 bp, Homo sapiens
cggaggtcctttgtgaacacacatgcaatgcacagtaaaaaattttgaaggtactctgtttttcttttttgttttgttttgttttgttttgtttttgacggagtctcactctgtcatcaggctggagtgcagtggtgcgatctcagcttactgcagcctccagctcccaggttcaagtgattctcctgcctcagcctcctgagtagctgagattacaagtgcgcaccaccatgcccagctaattttttgtatttttagtagagacagggtttcaccatgttggccaggatggtgttacaagtattatttaactttttattctcaaagtcctagccaattcaattagaaaacaaaatgaggtaatatatatatatacatacatatatatatacacacacatatatgtgtgtatatatatatatakagagagagagagagagagagagagaaacaaaaaaagagaaa

SEQ ID NO: 599832 - DNA, 579 bp, Homo sapiens
gcatcgaaatgctttcaattggaaaaccttgataatatacaccatraataagactaacaactcagcactctcatataccgttaaagcacctttctagagaggagttcggcagtaactatcaaatcttaaatctcacaacaaatgatctagtaatgcgactgctaaaaattaaccctctgcattttctcatgacagtcagaataccaatctaaaaatatcatcacagccttgtttgcaatagaaaaaaaaaaataccatcaatagggcactggataaatctactttttgtataaataaaatcttagtgattactttaggattaaagtaatacacacacacacatacatgtattgagacaaacgtgaagaagacttctttttttgcattgtgtaattcacagttaggtgagttttattacctggtaaatgtaaaagtatattaaccagggttacctttatggtggactaatagtcattttaaaatttcctctttcttcattcatgtctattttattgcttgtggttagagaatttgttttgtataatttatctcatttagaattagcagatattctttaca

SEQ ID NO: 599833 - DNA, 576 bp, Homo sapiens
agtaagtgcatgtaggacttgtcttcacctatctcataaatacagtagccaaattatgggatgagccactaattacagtgtcttaaaagtgctattggaaaatttaatttcataagtcagggactagacttgttaatcagccagtgagtcaacagatttcatttgtcatagttaatatttgtaacatttcaaaaatagagaagacagtagaagcacttagcatgttggtcaccatttcctcctctcaagtgtttgtaagcattaattaaattcccagctcatacttttgcttcctgccacacaaccrtttttcctattaatgcagattgtgaaagatttggctaggcacttaacgggaaacagggagtgcatcaaaaatatacagttatattttccagatgaaactgggccttttggctccaactgagaggcccatctcagcatggtaatgcacccgatgaaacaaaaagccaacttcccaaagatttgaaaagccctatacctatacagaagtcttttggagaagtaaaaaaaaaaggagaattacatctaataatgattcacacaaagaaactt

SEQ ID NO: 599834 - DNA, 533 bp, Homo sapiens
ggaaaccaccaaggcttgggacatgcttcctctgaagcaatggcccgagctgtaccttggcccctttcagtcatggctggagctgaagcagctgggatgcagggaaccatgctgtaaggctgcacataacagcggggcctgggcccagtccatgaaaccatttttccctcctaggcctctgggcctgtgatgggaggggctgctgcaaaggtctctgacatgccatgcagacgttttccccattatcttggtgattaacattgggctccttacttatgcaaatttctgcagcaggcttgaatttcttcccagaaaatgggtttttcttttctatcacatccttaggctgcaaatttcccaaacttttatgctgtgcttcctcttgaatgctttgctgcttagaaatttcttctgccagatatgctaaatcatctctctcaagttcgaagttccacagatctctagagcaggggcaaaatgctgcccagtctctttgctaaagyatagcaagagtcacctttgctccggttccc

SEQ ID NO: 599835 - DNA, 617 bp, Homo sapiens
cattttctaacaaggatagatgcactttatctcatgctatttaaaatccttcagctatgcctcatgagattcctaattaccagctcccctttttatggtttaaagctaagaaaaagttatccagaaaaagcccacacagctagcaagatcatatctgttactgacagaggtcaaacaatcactggaaatctggatataaccctgccaattaaggaaaggagatttatacatgaatatcagtggggtttagataatgactaaatagccaaatcttaaagtctgttcagaaacaaaaaagaaaagaaaagcttatatgagatcttgtcacttaagaagaaagaaaaaatttgagatgaaatactattggtaatgtggagttaccaagaacacactattctcatcttccaaaccctttrttttatattattctacagttgaaccccagtgcaggataataggcagtgtgggctaatgcaaagagcccttgccttgaagtttgaaagtcctggggttgggttgcagcttcaccatatattaactttgtgaaataaattccttatctttcttgagcctcagtgtgttataacaaaagagagacggtaaaccatgccttacct

SEQ ID NO: 599836 - DNA, 645 bp, Homo sapiens
ttctttagaattattagattttatttttccctagagctcttaaactttagcttcaccaagtaacaggtcgactttcggaataacaactctttcctaggctgtatccctttccaggagacagaattcatgaaataacttggttccaggatgtttccaccccagaattctaaaccagtcacagaatcatatcttcttcggtcttgattagaatcaaacaatctatagacaaatgtaacagaatcaaaatagtatataatgtttctttccttctcttgctcaatacacttccctcttttcccccaaagagttcgttactcaaagatgtatgagtacagtcagccctccatatccatgggttctgcatccatgggttcaaccaactgccaatcaaaaatatccagaaaaaatattccacaaagttccaaaaaagcaaaacttgaatttgctgaacaccaagcactatgttgaatccatgcaaatraaatgtgttctacacacctttctaaagctatccagctagacagagcaatcaatggaacttgctacaaagctgtggccagttcagtaacatactccctcctttagtgccttttttctttcctttttaaattattttatttcattttatttttagacttgagggta

SEQ ID NO: 599837 - DNA, 619 bp, Homo sapiens
aaccatcagatcttgtgagaactcactcactaccacaagaacagcatgggggaaactgcccccacgattcaattacctcccacttggtccctcccacaacacgtggggattatggggattacaattcaagatgagatttgggtgggaacacaaccaaaccgtatcagtaagctagcaatatatgaatagtaatatacttagtttagtgtaacaaaaaaccatttaactcacactatggcccaaaataatatagcttccatttcatacacttttcaytggaaaatgtgttctgattttctaatttattcatttttatatatccagcttcatccttgccacagtataggtgcttaaaatatatttactgaatggttaagtttccaaatatgtgaaaagttatgacaaatcactaagaaaaagaaaatcatcttaataggtaaactgcacaagatatgaatataacatccagttcaaaagagaaaaatgtttattatatttttgtagaaatgtaaaacatgctaaatttaaaaaatttagaaagttaagacaataagttttctcccactgaattgacaaaggtttaaagagaatgaaaagaatcattgtgaggtgtaaagat

SEQ ID NO: 599838 - DNA, 620 bp, Homo sapiens
aagagaaaaatgtttattatatttttgtagaaatgtaaaacatgctaaatttaaaaaatttagaaagttaagacaataagttttctcccactgaattgacaaaggtttaaagagaatgaaaagaatcattgtgaggtgtaaagatatatagtacagttataaatagctttgggttatgcatgttggcatagtgtttctggaagactattaggaaaaatatttcataagctttattaagtatatgccatttgactcagcaattctacttctaggaattcattcttaaagagattatctgacaataggactaaactgtgtgtacaaggataatttatagcaatgaaatagtctgcctccagactgtctttagactcaagactacaacaataaatttgccagctagctagcctgccccatagatttgtcttgccaatccctacaatcacatgagctaattctttaaaatctctctctctctctctctctctctctctctctctcacacacacacacacacacacacacacacacacacacactcaccccatttgttctgtttctctgaaraaccttggctaatatggtacggagttgtcagccaggatggatccttctgggga

SEQ ID NO: 599839 - DNA, 602 bp, Homo sapiens
gctagatattatatgagagagaaaagaagtggaaagatcagtctgcctctaagaaatccatagcataggtgaggacaaacatctatcggttggacctataagaataatagccataagttatttggtgggctgctatctctgccaggcattgtactaggcattttgctcccataacctaatctaatcttcactacagcattgcaagttataaattgctattctcattttgaaatgaggaaaatgaggcttagacaaaataagttcttaggataaaataacttgttactgcttgattaaggatttgaatctgaaccaaagtcatctttttactaagctaactgcttaagaatagtgtcagaaagcttggcatccaaattaatctgagactcaaagaaacacacaaagaccattagaagttaatttttaaaaagctgtgtttgaagcaaaaggtcaatgaagaaacaatstgctgattagggccaccattataatactgaaaagtgataggaagaagcagaagccctcaagttttgttttgcgtttgtctttactatcaaatagagtgatcttcaaatcataggagggtgaaacaaacggtggtt

SEQ ID NO: 599840 - DNA, 417 bp, Homo sapiens
gactctgagctctaagtgtgttgtttctccacccsctgccccagttcctctggtagctagtacctctggtagctagtgagttgggactcagcctattttcaaagaacaaaggagcttgctgaatccttgtatgtggcttctgagaaatcagtgagaactgaggatgataatgtctgtctgattttgaaaaagatattgatggcaaatagcccttttaacaagaagtcacaaactggtggcttataggacagacacataaagctgttaagaatctgttgactagtacagaagaggttattgaatctgagtacttttagggacatgtatcttctagtttataagtttccacctccctctgttgtgttccccaattttatcccatgggtaattcttggttgtatctatggtttagaatcc

SEQ ID NO: 599841 - DNA, 617 bp, Homo sapiens
aaaaccaaacatcttatgctctcacttataagtaggagctaagttatgagaaaacaaagacataagaatgatacagtggactttggggacgcagggggaagtgtgggaggagagtgagggacaaaagactacacactgggtacagcatacactgccagggtgacgggtgcaccagtatctcagaaatcgccactaaataactttttcatgtaaccaaacactacttgttccttaaaaactgttgaaatgacaataaaatataaaaataataaaataaaataaataaatcaagaaatgaaatagctgtattaaaacttacttcaataaaaataatggtgggattgacaattttttgttcctacctccccttgccatastggggttgggcatgtgatcaaagctaatcatataatttctttcagaaatttgattgtaaaaatatgcaaaatatgaaatggctaattaaaaatggtgattaatttcatgtcagtattagaaagtgactatttaagggtttctgctgttgaaattcctagacttgtctttcttgaggttttgctactcagcttttcttcaattctgtgaaccatttactgtacttctagtaagtaccttac

SEQ ID NO: 599842 - DNA, 606 bp, Homo sapiens
agatagccacagaactttaatctcatgttattgattctgcaaacttgggggttttagaggctgaaataatctgtgccctgaagtttaggctgttttgttacctaaaacattatttttaagaactctgttttagttttgaattgagacaggagatttttttttaaagtgtcttataagaatatgcatatttttaaaaaagcatttagaatctccataagatttcatgacattcatctcacttttgctgctttaatgagtttgatraaagctaaaatgcacactgcagtagattttggaatataaccccatgatccattgaaccatccagatatagaaagagtgtatcaacgtccaggaatgtgagccttgcccctcattctaatgttgtccacttttgacaacattagaccactcactctttgatgcattcctcacccactgttcctcccttaggaaaattcccttctgacttgcaactttggctggactcactctctgtcaacatctgccactttaacattgaagaaaataaactccctccggggtgctctctccccgccttgcacagtgacctacacttccatcatttttaatgtggaaagtttt

SEQ ID NO: 599843 - DNA, 606 bp, Homo sapiens
agatagccacagaactttaatctcatgttattgattctgcaaacttgggggttttagaggctgaaataatctgtgccctgaagtttaggctgttttgttacctaaaacattatttttaagaactctgttttagttttgaattgagacaggagatttttttttaaagtgtcttataagaatatgcatatttttaaaaaagcatttagaatctccataagatttcatgacattcatctcacttttgctgctttaatgagtttgataaaagctaaaatgcacactgcagtagattttggaatataaccccatgatccattgaaccatccagatatagaaagagtgtatcaacgtccaggaatgtgagccttgcccctcaytctaatgttgtccacttttgacaacattagaccactcactctttgatgcattcctcacccactgttcctcccttaggaaaattcccttctgacttgcaactttggctggactcactctctgtcaacatctgccactttaacattgaagaaaataaactccctccggggtgctctctccccgccttgcacagtgacctacacttccatcatttttaatgtggaaagtttt

SEQ ID NO: 599844 - DNA, 561 bp, Homo sapiens
tggggaatagcagttgatacagtttggctgtgtgtccccacccagatcccatgtcaaattgtaattcccatgttggaggatgggcctcatgggaggtgaytgaatcatggggcagactttccccttgctgctcttgtgatagagtgcttatgagatctggttgtttgaaagtgtgtagcacttccccctttgctctttctcctgctggccatgtgaagatcatgcctgcttccccttccccttctgccatgatcgtaagtttcctgaggcctccccagccatgtctcctgtacagcctgtggaactctgagtcaattaaacctcttttctttataaattactcagtctcagatagttctttatagcagtgagagaacagactaatacagcatttaagggagataataaaaattcttgatctggataggttaccagtgtcatatgagtattagatttccaagtggagaaagtgtgaatagagaaaagggtaccattaggaggtatacctaatgctaaatgatgagttaatgggtgcagcacaccagcatggcacatgtatac

SEQ ID NO: 599845 - DNA, 551 bp, Homo sapiens
acaaatctaatgaaagtcagaaagaataatttcaggcttcacccaaggcaaaatctggagtttaaagaacatatttccaagaatcaggtggtctaagaaaaagaaaattttctaagaaaaaatcaagatactgtctattatacttcagttgagagaggtaaagcagctgttaggaagtgcatgttcagtgtttatcataataccaggacattttagtacagcaaataaaattgagatgctcatagccagtgcaagtttgagagacaagtggggttccgccatggatgtagatgacttcacatttccacatgcttcatgaaggagggatccatttgccttacgtcttcagaaagcagaactttcaaggccaaaggaaaaaaaagccraagttttatattctaataatatttaacgaaaaaaacctaaccttgtatgtaacagagatgatgagtatttattagatttattatgtgcttttagcatgattatttcttctcttgaatttagaaggaaatcaaatagttctgtggttgaatccacataaattagct

SEQ ID NO: 599846 - DNA, 612 bp, Homo sapiens
  misc_feature 415, 435: n = A,T,C or G
tatcccaagaaaatgaaattagtatgtcaaacaggtaacttgcacacccatgttcattgcttcattcacaataaccaagatatgaaatcaacctaagtgtccatcagtggatgaataaagaaaatgtggcatatacacacaatggaatactatttagccttagaaaaagaawttttgtcacttgcaatacatgaattaacctggaaggcattatgctcattgaaataagctaggaacagaaagacaaatattgcatgatctcacttaaatgtagaatctagaaaagtcggattcatggaagcaaagagtagaattgtggttaccaggggctgatgatggggtggagattggggagatgtgggttaaaggatacaaaaatttgtgaatacaaaattcagttagataggagtaatanactcaggagatctattgtanaacatggtgattatagttagtaacaatgtgttatatagttgaaaatcactgagagtagaccttaaatgcctctgtcacaaaaaaataagtatgtgagggaacagatatgttattatcttgacttagccatttcacaatgaattcgtatatgaaacatcatgttgtaccccataatca

SEQ ID NO: 599847 - DNA, 522 bp, Homo sapiens
ataatgcacccaagctccttgctaaagcataacaaaaatgactgctccacttcccaataagtttcttatttctatctgatatctcattagcctagttttcactgtccacatcactatcagcattttggtcacaaccattcaacaagtctctaggaagtttcaagctttctgtcatcttattgttttcttctaagctctccacactcttccaacctttgcccattacccagttccaacattgcttccacattttcaggtttctttatagcaatgcctaattcctcaattatctgtgttaggttgttctagcattgctataaagaaatatctgagactgggtaatttataatgcaaagaggtttaattggctcatgatttcctaagctgtgtagaaagtacagcagcttctgcttcggggaagcctcaaggatctttcactcatgctgaaaggcaaagttggaacagkcatcctacatggcaggagcaggaccaacagagagacgggggagatgctgcacactt

SEQ ID NO: 599848 - DNA, 417 bp, Homo sapiens
gcccccttgtcaaagactcagaactctttcagagtctttttctctttcagttgtatttaatgaccttctcgaaggcaggaaatgttagatttggcttcaaggctgcctttcatggcttgttcaggccctcagcacctgaacatccatttctctcctaacgtttctctactgtgaggtaaaggggattccctcaagctttctccttctcaagattttctgtragaaaggagacttgtttcttctaaacttgtatcctgatacattttaagaagtttatttcattatttccttcccactgaagtgaacagggaaggcaggttgtaactcttattgcataaccaaccaatgtttacaaactgcttctcactttaaattctcttcccaagcctggagaatatttattctcagggaagtgag

SEQ ID NO: 599849 - DNA, 565 bp, Homo sapiens
gcctggaagccatcattaagaattctttaccttcaattaggaagtcaacctataatcatcatgctttattcaaacctatgtatcactgattttcactatagaatgcaattccccacatarcgggaataatcagtcccaggcttcagatcacatgtaaagggaactgagtcatattccatgaggagcctctttcctgattctgtgaatactagttctttccatgtattgtaaaaggaattaccaaattatttacctggaacagtcttctatagaacttcgcagaagtgcagaacaaatcagtatgtttatgcaaacacacacacacacacacacacacacacacaaacagaacatgactgctatgattttattaagattcagttctccttagtttgaagttcagccccacactgaggatatttctcttagaattatggacctacagggccagagtcattttatacaagaaaaatgttcaaaataaacctgacaataataaataattaaccatcaatatcttatttttgtttggtaggtaaatattgtttgaatatgatggagtttg

SEQ ID NO: 599850 - DNA, 524 bp, Homo sapiens
acatgtaaagggaactgagtcatattccatgaggagcctctttcctgattctgtgaatactasttctttccatgtattgtaaaaggaattaccaaattatttacctggaacagtcttctatagaacttcgcagaagtgcagaacaaatcagtatgtttatgcaaacacacacacacacacacacacacacacacaaacagaacatgactgctatgattttattaagattcagttctccttagtttgaagttcagccccacactgaggatatttctcttagaattatggacctacagggccagagtcattttatacaagaaaaatgttcaaaataaacctgacaataataaataattaaccatcaatatcttatttttgtttggtaggtaaatattgtttgaatatgatggagtttgctctgctcaattgtaattaatttttctgttgactctccaggcttcttcttcacaatgagagcttcaaaacggaaaggcacttgcatgccagcatatttgcccagctgt

SEQ ID NO: 599851 - DNA, 594 bp, Homo sapiens
gtctaaatatcactctttccaaaatacttttctgagaaatgatcatgggatttttctcactgttttctgacaaagggaaatagcagcctataaagacaaattctgaaaagaagccaatcttttctcatcaaaagatacttaacttggtgtaggtgagtcacttgtaacaaatgttccacactgatgcaggatgttgatggtgggggaggttgtgcatgagtggggacaaggggtacacaggaactctttgtaatttccactcaattttgctgtaaacctagaactcctctaagaaattctaggcggggcatgatggctcacgcctgtaatcccagcattttgagaggccgagggrggcaaatcacttgaggttaagagtttgagacaagcctggccaacatggcaaaaccgcatctctactaaaaatacaaaaattagctgtatgtggtggtgcacacctgtgatccccgctactgaggaggctgaggcaggagaatcgcttcaacccagaaggtggagactgaagtgagccgagatcgtgctgctgcactctaacctgggtgacagagtgagactccatctcaaaaaagaaaa

SEQ ID NO: 599852 - DNA, 503 bp, Homo sapiens
aaaattttaactatggttctatttgcccattcttgcactgctatcaagaaatacctgacactgggtaatttattaaaaaaaaagagatttagttggctcgtggttttgcaggctgtacatgaagtgtagcggcttctgcttctggagaggcctcagaaaacttacactcatggcagaaggcaaagggaaagcaggtgcatcttatatggccagagcaggagcaaaagagagaagacagaggagctacacacttttaaacaaccagatctcatgagaatgctatcaytatatagtaataagggggaatggtaataaaccattcatgagaatttcactcccatatctaatcacctcccaccaggccccacctccagcaatgggacatttcaacatgagatttgggtgaggacacagatccaaaccatataattccactcctggaccctctcaaatatcatgtccttcttacatttcaaaatacaatcatgttttctcaaagtccc

SEQ ID NO: 599853 - DNA, 659 bp, Homo sapiens
aataatttcctttgacttcatgtctcatatcaaggccacactggtacaaggtgtgggctcccaaagccttgggcccttgtgtagttctggccctgcggctttgcagtgtttgtcacctgcctccagctgttctcatgggctagcattgagcatctgcagcatctccagatgcatgatgcaagctgccagtgattctaccattctggggtctggaggatgatggccctcttctcatagctccactaggtagtgccccagtggggacattgtgtaggggctccaacccatatttgccctttacactgccctagtagagcttcccmtgagagctgcatcccagcagcagacttctgcttggacatgcaggttttccatacattctctgaaatctagagagaggctccaagcttcacctcttgcactctgcttacccacaggtttaacaccacatggaagccacagaggcttacagtttgaactctctaaagcagtatcttgaactgtacttgggcctctttgagccaaggctggatctggagcagctgggacgcagggagcagtgtctcgaggatgtacaggaaggcagggccctgggcctggccctcaaaagcattattccctcctaggcctctgggtctgtgataggaggggctgccaca

SEQ ID NO: 599854 - DNA, 583 bp, Homo sapiens
gttccttgtgacaggagatttttaaaagcactttggaagagtatcttgcattatctaaatataacaatcgcatactttaaaatccagaatactcttgtacatgttcatcaggaaacatggacaagaaagctcatttgcaaatgaaaaatatggaagaatgtatttaaaaaaacatatttagaataatagttatctctgtaaaaagtgagtggagcatgtgattgtgtagcacgcacactgggtttcaaggctactggtaattttgtttttcttgagtgataaggtgagtacataggagaatgttttaatttagttagaaaactacacaatacacatatacattatgtgtgtgtatgtgttgaatacacatacacaaargatatttcagaagttctaaaaatggaatgatgtatgcctatggtacaggctgcatgcttatttcagacagctctcatctgttataaaatcataaatagtctttatatgtagcactcgcttaggtaaacgcttctgaatgttgatataaatcatttgatgagacatttatctcacttcaagagactaaattgaatacctggcctac

SEQ ID NO: 599855 - DNA, 524 bp, Homo sapiens
gacctgggtgtgggtgcaaggggctgtcacacgaccctccactgagctgtctaacacttaagccacccacagacagtgaaagtaaaagaggacactgtaacacattccctctgaggctctgggggtcatgggcaacccctagatgatgctgcaggttcrcacggagttctgctcttgttggttacccagaagcgctcatcctggcctctgcacctgcccacctgcatgttccccctcccgtgaggggttgagagctttgggctgagtaaaaagccaacccgcttgtgagtcctttgaagaggtcaaggaaactatcagatttcagtgtgattttcatccatttatttagttttatattgtgatactcagggtatattataatacaattataattatgttaataatattataaattatattcatatttacaataatataatcataattataaggtaatctaacctgttaaatgtttcacgtacacattgaaaaaatagttggctaaccacagcccatggccctat

SEQ ID NO: 599856 - DNA, 547 bp, Homo sapiens
aatgcaacctccatctccctggttaaagtgattctcctgcctcagcctcccaagtagccgggattacaggcattcgccaccacacctggctaattttgtatttttagtagagatggggtttctccatgttagtaaggctggttttgaagtcccgacctcaggtgattcccccgccttcacctcccaaagtactgggattacaagtgtgagccactgcacccacatcttcttttgagaagggtctgttctgtcttttcccactttttaatggtgttatttgtttcttgctgttgaatagtttaagttccttaaactattctgaatatcagacctttgtcagatacacagtttgcaaatattttctytcattctgtagattgtctgtttaatgtgtttagtttcttttattgtgcagaaggtctttagtgtaattaggtctcactcgtcattttgttgttgttgttacaattgcttttgaggacttagccataaatttatttccaaagccaatatccagaatggagtttcctagattttctcctggaga

SEQ ID NO: 599857 - DNA, 284 bp, Homo sapiens
gtacctgaggagattcacaactccttttgaaaaytcttcagaatcatcaaagaaccaaagatactttcaactccccgccaagaaaatgtttgttgtaacatgaaactggcttgggttcagttaaacattctttttaagttacctagagagtaagtcaaagtgtcacttgctctattctagtggtagaaatagctgtttgttacatttctaattttttttaattaaaatttaatgtcagctccaaatttctttttcaaattttgtttttatgattaccgtaagta

SEQ ID NO: 599858 - DNA, 357 bp, Homo sapiens
aacagtgggcatagaaaaagaggcagagctctttgtaagattgggtctttacacatacccagaaaaaaaaagtcaacttagataacaagatttcaattaaaattaacctttatattttgttctatatcttattttataggtatttttctacttattttgaaagatgaaaatccaacatacagttttatatgtcmaagacacacaatcaccgtgactaattcagacgctgctgctatcagaaaatgtgatgagttgcagaattcagtattgaattgcatctaccagtgcctcaaaatcagcattgcatgcagaggagcccattacaatgttaaattggtctcatacctagatgagcaa

SEQ ID NO: 599859 - DNA, 633 bp, Homo sapiens
tggcatagctttcgactgacaggttttcacagctgcagatcactaagcccatgtgctcctgggagaagctctacttgagcaaaaccctgaaagaaatggaaagaagctacaagttatacaacacgaaaaagaaaaaaaaatagatacattttctgatccaagcatttctttttttgtttttttgagacggagtctcactctgtcacccaggctggaggcagtggcacaatctgggctcactgcaacctccacctcccgggttcaaacagttctctgcctcagcctcccaaatacctaggattacaggcgcctgcaccacacccagctaatttttgtatttttagtagagatagggtttcactatcttggccaggctggtcttgaactcctgaccttgtgatccacctgccttggcctcccaaagtgctgggattacaggcrtgagccactacgccccccagctctgacccaagcatttctattgcatgtcatctccactgtccagatccttatcacattatagctatactttcagtgttttaatggaaaagtaacatataaaatgaatattgttataattttatgagatattttatcgtatccttttatttgaatattataccatacagaggt

SEQ ID NO: 599860 - DNA, 589 bp, Homo sapiens
ttttttgagaaacctccataccttttctataatgctggtattagtttacattcccaccaacaatgtataaaggttccaatatctgtaaatgyaaatcagccttttttttccttgtctttttgatggtacccattgtaattggggtgaggtaatatctcattgtggttttgatttgcatttctgtgatgattagcaatgttgatccttttttcatatacctgttggccatttgtatgttttcttttgagaaatgtccattcaggacttttgtttatgttctaattggattatttggttttgggctattaagttgtttgagtctctcatatattctggacatgaactgcttgtcagatgcatagtttgctcatattttctcccattctataggttgtctctttactgtttattcctttattgtgcaaaagctatttagtttgatataatcccacttgtctattttgccttagttgcttatgcttttgttttcttatcttaaaaaatccatgcccagaacaatgtaatgaagattttaccctatgttttcttttagtagttttatagtttcaaatcttacatttaagtcttt

SEQ ID NO: 599861 - DNA, 498 bp, Homo sapiens
tgcctatctatgaacacttatactgcttttatatcttggctattgtgaataatrccacaataaacatgggaagatagatatatttacaaggtgttgatttcaattttattcattatatgcccagaaaaagtgttgttggattatatggtggttctatttttaatttctttagaaacttccatactgttttccaaaatggctataccaatctacattctcaccaacagtgtacaagaattccctttctccacaatctcaccaacatttgttatcttattgacttttgggtattaataatagtcatctatttgcattttttgatttaatgatactgggtacattttcatatacctattggccatttttatatcttcttataagaaggtttttcaggtattttgatcattttatattgaattgtttttacactattgagttgtatgaattctttataaattttggacactcatccctttatcagatataatcataccttgt

SEQ ID NO: 599862 - DNA, 612 bp, Homo sapiens
ctatttgcattttttgatttaatgatactgggtacattttcatatacctattggccatttttatatcttcttataagaaggtttttcaggtattttgatcattttatattgaattgtttttacactattgagttgtatgaattctttataaattttggamactcatccctttatcagatataatcataccttgtattaatgaacttctctttattgtgcttcacagagagtattttgacaaaatccttacaaattgaaggatgtagcaacccttccttgagcaagtccattggcatggttttttttgtactgcatgtgctcacttcatgttgttgtgtcatgttttgataattcttgcaatatttcacacttctttctcacgtttgttatggtgatgtatgatcactgatatttgatgtttccattgtaattgtttgagggatcacaaactgtgccagtataagacaggaaacgtctttgataaatgttacctgtgttcaacatgtgttctgactgctgtactgactagctgcctcctcttctctctctgttcctcaggacaccttattccctgaaacacagtaatattgaaattaggcctatgaataacca

SEQ ID NO: 599863 - DNA, 482 bp, Homo sapiens
attattactcagccatgaggaagcattacatcctgtcatttgcaacaatttggatggaactagaggacattatgttaagtgaaataagccaggcacagtaagaaaaatattacatgttctcacttttatgtgagagctaaaaaattgatttcataaacatagagagtggaatgatagttactaaaggattggaaggatagtggagaggggggaaaaagagaagtttkttagtgggtataaaagtacagttacacagaaggaataagatctagtactcagtagcacaatatggtaaccacagtaacactaatttattgtgtatttcaaaattactagaaaagtggaattctaatcttgctaatacaaagaaataataaatattttaggtaatggatataccgattcccctgatttaaccatcacatattgtatgctggtatcaaaatatcacatgtactctacaaatatgtgcaactattatg

SEQ ID NO: 599864 - DNA, 538 bp, Homo sapiens
ttcagtaagtaagtctattctacctgccacaaatatctaccaatctgggcagagctatccatagcaggacctgagggctatagggaatatagccatgcactatgtatattcatagaataatgacatggaatagaatgctgatgtgttatatttgcaagaaagcttacagatcctctgattcaatgtttttgaactattttccccaaagcccacctcataggttgccactgatgaccaggtgaagagcaagtcagtgagatctccactcccttaacacttcaatcagaacaatccctccctaatttactttataaattaggcttccaaattgaattcttctgtaaaatgtctctgctactaaaasacaaaactgattcccaggaagcacaattgcttaagatcacaaagtaagatactagtaccactgcaaaaagaaacgagacctctcagaatttaaaaagaaccattagggtcatggttaccaaactttcgaacataaaagactaattaaattctcagcttgagtaagagagaataa

SEQ ID NO: 599865 - DNA, 631 bp, Homo sapiens
catattctaggagcttttctggcattaattcatttaatctgatactaacactgaggcaggtaattatccccaatttactactgagaaaaccaaggcacagtgggtgaagtaagttactcaaggatacacagctagtgagcagtagagctgtcattcaatgctaggcagtctgactccaaagctctccaactgaaatgtgctcttttgtctcctaatagtaggcactggttcgaagtttgatgaatgaatcagtgactaattaaatgaattaatgactacaagacaggctggaaaggaggcaaagagaaataacttgcataacctttagaaggattgatttgcaagtaaaaacctgaagtgctttcttgctcaaattatttttctgaagtggttatcaccaaaaagcagtgttttataatttttgtgggactttatttttgtaaaatcctggtctgacgaattgtaaatccaagttctagttctaagtacccccttactaatcatttggcatcaggaaaggcacttaatctctctgagttatagcttccttgtgtataattagaatkataacacctgtccgaggttttaatgaaataccatgggatcttacagactgtttttatatgacatg

SEQ ID NO: 599866 - DNA, 427 bp, Homo sapiens
ttttcagaaaagcttttagaactcagctccatcagcttgcagtgagccgagatcccgccactgcactccagcctgggcgacagagcgagactccgtctcaaaaaaaaaaaaaaaaaaamaaaaacaaaaacaaaacaaaaaaaaaacaaaaaacaaaacaaacaaaaaaaaactcagctccatcacttctttcttgggctgtatttgagccctggctcaatcacttactactcaaatggacttgagttagttattcaacttttctgagcctgtcttcccatccgtaaaaggaggacaagaagccctccttcactgggatatcatgaggctcaaacgttgaaattataaaacatataatttcagattatcaaaatatgaaggatttacagaacctatactttaaggtcatagactattattaaagaag

SEQ ID NO: 599867 - DNA, 375 bp, Homo sapiens
gagatagatatatcttttcaaaacctttttaaaamattttcttggcttgactgctacactctcttactgccagctttcaatattacacacacacaaacacagtttcagtgccttgagattaaagtcaatgaaaacatgcacattctattcttcttgagacattcctgccttgcattctttccttgaagcagttgggatgtcacagctggggggaaggagctgtaaaacctacttatgctggccaatcaggccttggctgacaggaggcccaccaatgagggactgccaggtattccgttccgctgcaacaaattcccccctattttttcagaaattaaaaccctccgagaccctcaagctgtacacaatgcacaa

SEQ ID NO: 599868 - DNA, 594 bp, Homo sapiens
tactattcagctagcctctgcttaacttccaacttcacctgggactgagagacttagaatccaggtgtctgattaagcaagcccagcactactatcatgtccaagattaagcaaactgttgacgggcaagtgctgtcaaccatcttcccagatgcacaayattcttgcaaaatacggcacagagatgactatcattaagatacaaagattgtaggcacctcttcgtattacatatgagacatttggccttattaatccatttagctagtggattaattcaaaaaatatttactaagcatctactatacactaagcacaactggttctaggtattagagatccattgcagaatgagagagacaaagccctattctaaaggagtacatgctctagagggaggaaggtgaataaacaaacaaaaataacaagttcatttcagcctgtgatcagtaagtttagaggaaaatagagtatgtatgacagaactctgggagagagggcaccacttagattgagtggtcagggaatgctttcttgagctgggacctgaaggatgagagcaattcagacgaaagtagaaaagtgcaaaggttc

SEQ ID NO: 599869 - DNA, 587 bp, Homo sapiens
tttaattcttaccgatgtgctgaaaccacatcaaaagtttcttagcgattagtttttattaatattgattctggaataatgccataaaagtagacgggcatatatctgtaacagttagggcaattgacatgaaatagcactaattatctaaaaatcagaacaaagctattttagacctatagttaaataatacattactgtaattccttcagaaaattaatcagtaaaacatcacccacaacattcagaaataacttgctctgacgtgcccttggcaatttattttaaaattatattcttctagtccttgcaagttctgaccaaaaacaataactatttgattagatatcagtggtactcaatatattaattcatactttcatagamtagaacaggacagaattcccattttgctttttacgtgacattctctcactggtggctcttttgcaggtgggaaagggtttaagtcccctctctcagttagtcttcccttgtggatcattctctgacctctcggttcctctcacctaagcaacttgttgttctcctggtctggatacgttgtaatattgatggcagtttca

SEQ ID NO: 599870 - DNA, 595 bp, Homo sapiens
cttaccttgtgggaggcacctttgtagacatcatctcccttgccacacactatgtacaggtgccattttaatttacagctttaattatcatttgtgagttgtgcttacagagcatacatttacttacaaaaaacagccaggcacggtggctcatgcctataatcccagcacattgggaggttgagtcagggagctcacatgaggtcaggagttcaagaccagcctggccaacatggtgaaaccccatctctaccaaaaatacaaaaattagccgggcgtggttgcaggcacctgtaatcccagctacttgggaggctgaggcacgagaaytgctttaatccaggaggcagaggttgcagtgagccgagatcctgccactacactccagtctgggcgacagagcgagactctgtctcaaaacaaaaacaaacaaacaaaaaacagtgatatatcttttctgatcatatacatctgcagtgttcactcacagtattttctcatgaagcacttaacagaaattcttcactcaattgcctcatctgcatttgcttaacccactaaaattaacagagtttcccacgtgcatcaccacctc

SEQ ID NO: 599871 - DNA, 595 bp, Homo sapiens
cttaccttgtgggaggcacctttgtagacatcatctcccttgccacacactatgtacaggtgccattttaatttacagctttaattatcatttgtgagttgtgcttacagagcatacatttacttacaaaaaacagccaggcacggtggctcatgcctataatcccagcacattgggaggttgagtcagggagctcacatgaggtcaggagttcaagaccagcctggccaacatggtgaaaccccatctctaccaaaaatacaaaaattagccgggcgtggttgcaggcacctgtaatcccagctacttgggaggctgaggcacgagaattgctttaatccaggaggcagaggttgcagtgagccgagatcctgccactacactccagtctgggcgacagagcgagactctgtctcaaaacaaaaacaaacaaacaaaaaacagtgatatatcttttctgatcatatacatctgcagtgttcactcacagtattttctcatgaagcacttaacagaaattcttcactcaatygcctcatctgcatttgcttaacccactaaaattaacagagtttcccacgtgcatcaccacctc

SEQ ID NO: 599872 - DNA, 382 bp, Homo sapiens
gatgccacgactaaactgagaatagttatactagagggcatccaaggaaatgtgagagtgtagtttaggtcagttacaggaagtggtatcttacactgcaaaaaggaagttttggaccactctcaaaagtagaaaacataagcaggcttaaaaaaagctttaamaattatctttgttgttgaatcataaggagttattgataaaagctgaatatgttcggactgcttcctcttctatgaggtgtaggtcaggaaagtgagtgatgttcccttcccgccatgtagctctgctatccttgtcacatgcaacctcttgatgaggctgccagcagaggctataaagttgagaatatcctctgaagacctgagcccccaaaccccaa

SEQ ID NO: 599873 - DNA, 586 bp, Homo sapiens
ggctggggagcatttcattggttcataacagtctctttgagatatcagacctctcaccaacaggcagctgctgacctaggaggaggcagtctccctttgaagacagcagcatgtaagactctgataatcatcaaaaagtagaaaatgaaacctgttttctcctgttagacactgccagagtgtctgggaagaggggattttgtgtctgtcagtcatgatcaagctttcttagatgcctggttgtgagaatgtcctagagaagagctactttcccaaagggccttatagctttcagaagggagyctgtaaaagtgagttactgctggaggagatggagatgtgttgaggggaatgtggcataggttcttgggaatcaaatctaatagcaggtgtcagtgatgcctgaggcagagtgccatcaaagggccactaaaaaatggttacaacgtcctaagtggcccctgggaaggagtgtcctgggccccacacctcctatgctgtaattgcagggcaaagtcactgctcacacacagcaggccctgcaggtacctttaccattcgctcagcttttgaacagtcactttct

SEQ ID NO: 599874 - DNA, 606 bp, Homo sapiens
ttgaaacagagagattttgctgcttatgtgagaaataactagagcagaaaaataataaaggatactttcattaactttaggaagctgaaggggaaaaaatcaataaagcagctctcttgactcaaagatgagctgaaataatacatgaataaatgagaatattacagtttttatgctactagatttctgattttctccagtttctccctttctcaccaactaggtccatccaaacttccccccacttacaactgtataccacctgcatcatcctttattatgaacaacagaatgtgaaggccagtgagggctacgtcgaagccctgctctggacagctgttgtccactggaaataacagggggtgctgagagttgagtggatggggaagcagaggagagaaagctttggcaaaagagaattcctggaagacaacacatgctgtgggtgaaaarggcactgggccaggggaatgaaaatctgggagttcttccccagtctgccaattactagctgtgtgatatagaaaactcacttagcctctttgagcctcaatttcctcatctatatggtaattacaataagatctacttcacaaaggctaccgt

SEQ ID NO: 599875 - DNA, 587 bp, Homo sapiens
aatttcttgagggggagataacttctatagtatgtaaataacctcatttgcttccccgtcacagaacttgcacagcaactttcagtacaaatcttaactttctaacagaaggaatatgacttttgtctaattcaaaggttgtaaagaggtacttttcataaggaagatgataaagaaaagagatttcatwtgagaaaggatcttgcatggtaaattattgtcctaaagtaaaatgactggttctttaaaaagagggatatttaggacaagtcagaaagtccaagcctgtcatagatgatctgtgtaaattgtgaaaaatttgtgaaagggaatttatgaaagaaatgttctgcaattttaaaggtttttagacctactaaataaatgctttatagactgccactttgacttttaactgtacaacttgactattttaaagctaggcatggcctggggacttacagagttagccattcccccaggtatgctggaaagagaccttatctgcacttctgtctagtgaatcgcttacttatcaggtttttcgcaaaagtaaaagttgtgaacagttagccatgtaacatgtt

SEQ ID NO: 599876 - DNA, 541 bp, Homo sapiens
ttcaaaggttgtaaagaggtacttttcataaggaagatgataaagaaaagagatttcatttgagaaaggatcttgcatggtaaattattgtcctaaagtaaaatgactggttctttaaaaagagggatatttaggacaagtcagaaagtccaagcctgtcatagatgatctgtgtaaattgtgaaaaatttgtgaaagggaatttatgaaagaaatgttctgcaattttaaaggtttttagacctactaaataaatgctttatagactgccactttgacttttaactgtacaacttgactattttaaagctaggcatggcctggggacttacagagttagccattcccccaggtatgctggaaagagaccttatmtgcacttctgtctagtgaatcgcttacttatcaggtttttcgcaaaagtaaaagttgtgaacagttagccatgtaacatgttcttgagactactggaaaagcagtcttacatgtaaggtacgcaaggaaagtagaatgtgcttttgttaaaagattgtaagaagta

SEQ ID NO: 599877 - DNA, 590 bp, Homo sapiens
cctcctgagtagctgaggccctagaggtgcactgccatgcctgctaatttttaaatctttttgtagagatagggtctccctatgttgcccaggctggtctcaaactcctggaccaaagttatcctcctgccttgtcttcctgaagtgctgggattacaggcatgaatcactatgcccrgccaaaatattacattttttcaaaggaatatttttgtttatttttaattttaaagatcacatgttgaatatgttaacaatgcataaactcagatactacagatactgaacatcccctttggcccctcttccaaccccacatccctctccaaaggtactcactcaactcaatttggagtgtattcttcaagacctttccccatatacttcttcatttctggaaatagttcattctgtgggacgttgtacttgtttgtctaaacttgcctttttcacttcataatatatcttagagctctttccatgtcctcatttacatatattatttatctttttatctgatgcatagtgttccattacaggaatgtatataatttaacttttccctgttgataaacattaagaatgttttc

SEQ ID NO: 599878 - DNA, 420 bp, Homo sapiens
ggagcagctcctctaggattctactgggcccatctccctgaggaaaatcttagaagaggaaggttagygggatgaactatatcccctatcactcacaaaaccatccagaatgagatttctcattgttagtagggcaggagggataaggcccagcagctcatcttgtcacctgctttcttgaatcatggtctatagcaactgtgtcagttgggtcctccaggaagcagatgctgagacacagtagggagtgtgagacatttattgggggtggggatgtatgggtagggatgacacctgtgaaagacaagggaaggaagcaggacagagtggggaaggctttagaccataatgcagatatgacatctgtgaaaagaaagaggggaagaaagtagaattgtgaaggaagaccatcaaactgca

SEQ ID NO: 599879 - DNA, 409 bp, Homo sapiens
tcagtgctcatattttgatgggaaggggaatttctttcatttttttgtttatattcactgttcatttatcacagcactgggctgtcatgataacagcttctaaaaacaagactccttgacattttaccacaaccttggaagactggggatttttatccacttttcactcagatgtatgattttatgtaatktcaaagaattttgagtgcattttttcagaaaaaaaactctgctaaccagacttatgatcaaactagaaacattttgacagagaccaccattagcagaaagttatatgaaaaataaaatgaaatgagaaatgatgaaatactgttttctttctttctctttcttttttttaaagctgagagagtccatggaaacaatagcttagtaaacctcttaccct

SEQ ID NO: 599880 - DNA, 465 bp, Homo sapiens
atggggagagatgggaatgggtaggcagtgcagagaggtgatgtcttagggataagtcagtacagtgtcttgagcccacctgcactacatgaaagccccctggaagaaaacatatgcagggacagcagcagcagcaagattaatgctatacacgggakgtacaaatgcaggacaaacatagcaagggaagagagacaagaaaagaagggcatgagtaaaaaggaaagagtttacacattttgcaatcagcacagcagagacctttcaggaaagtattaaataatgtagagagagtcactaattgtcctttaacatacacaagaaaatgactgacagtgaaccaggaaacagaaatgatgggattgagaaactgattacccaaaattgactaaagagcatttacttgatactaagaagggataaatggccagagtcagaatttcagggacagcatgcctctaattt

SEQ ID NO: 599881 - DNA, 609 bp, Homo sapiens
ccacctggattggttatacctcaaatccccagataatggggttataagggtggaaagaaccctagagatcatatagtacagcacttcctttttaaaataaggatctttgaccagagggatgacaacttaatcaatgtcacaaagcttgtagtctatctgggtctagaacatagtttcccaccttagatccagtcctgatttctgagctcaaatcctaacaagagttactatctctagtacccctacctatccacctagtggagaaaaaaatcaggcagagcatgaagaggagaactggaattacaaactagcacttgaatgaagattgcacatatttattgtgcccttgttttcccctttcttaacttagtgacgccttcaaataggattccttgctggaatgatgtctgataaataaaacaaagtttttgcatgtaggtggaatctatcaaagagttctttttactcttcatacaaattcatactaatttttttgtctcattgaatggagcctgtattgtcagctctatgccttacccaaatctcatatcgaatygtaatcttcacgatgttgaggaagggcctggtggaggtgattgaattgtgggg

SEQ ID NO: 599882 - DNA, 619 bp, Homo sapiens
cttcacattaaacacataggtgcttctgtatgtaaatgaaacctctgaataatgaaaaaaaaacatttttatgcttcctctctatattggtcctcttgaggacctagtctggaaagagatttccttaaccaactctctgcttttgctcctaccctgctctgcctttcagggccaattcttgctcctgaaagcaaccaaggataatttcaggttgttagaatgtaaatatttaagcattgtctgtctcagtaaaaatttccagctaaacaccgtgccacagccatagacctatgtagcattgtagagaaactttaagggaaaaataattagaatgttaaggataaagagacttgggtatctttaatggatctattattttatgacttgagtgtgactgtgactcaattgactagkgtctttggtatagcttctttcatagaggtaaattactgtagttaatacattttttcaggggtgaataaagatatcagtcagaagccacagctacttagaaattatggtttagcagtgatgtcaatgttttcagaatgtgcatctccaaaaacatcactgcaataattttggaagcatgaaatgaaagagacgtctaaaatcacaa

SEQ ID NO: 599883 - DNA, 583 bp, Homo sapiens
atagatccaaatagaagcataagcatataaatatagacgttatatagagtgaaagcaagcagatcagcaccatttcattattgcttgaagtctttgtaataaaaragttagaaatcagtaactgacattgaaattattgactgaatgacactgtcatatcagaaggctcagtgtgaggtaagaaaataacctttctttcaactttgaggagaaattagcaggaagatttattactgttaattatttgatttaggaaagtttttaggtgctgtgtagtgttgtgtttttaaaagtacagaaatgtcaccactcctaaaaatactgccatacaacaaaaaataaataagaaaagaatatctattccagtcttgcaaaaagatttggcaaatgtgacacctggatccctttcgtccacaggctgtgatttgcaactcttgcctatttctacatatagacaaatgagttggtttcgttctacagtattttctacaagcccctctgaagtctttaaggaaactcacctaaaggagatatctcaggctaaagtgaccattgttaagttattgtcatggggacacttgca

SEQ ID NO: 599884 - DNA, 583 bp, Homo sapiens
atagatccaaatagaagcataagcatataaatatagacgttatatagagtgaaagcaagcagatcagcaccatttcattattgcttgaagtctttgtaataaaagagttagaaatcagtaactgacattgaaattattgactgaatgacactgtcayatcagaaggctcagtgtgaggtaagaaaataacctttctttcaactttgaggagaaattagcaggaagatttattactgttaattatttgatttaggaaagtttttaggtgctgtgtagtgttgtgtttttaaaagtacagaaatgtcaccactcctaaaaatactgccatacaacaaaaaataaataagaaaagaatatctattccagtcttgcaaaaagatttggcaaatgtgacacctggatccctttcgtccacaggctgtgatttgcaactcttgcctatttctacatatagacaaatgagttggtttcgttctacagtattttctacaagcccctctgaagtctttaaggaaactcacctaaaggagatatctcaggctaaagtgaccattgttaagttattgtcatggggacacttgca

SEQ ID NO: 599885 - DNA, 573 bp, Homo sapiens
tgagactgataagtagttgcatattgtaacagtttttttcaacagcttgtattccaatctgagagccttaattagaggcctgcatgaaagctgcttattcttattgtacataattaacttgtaataacacattggtctccagtgttttttaaatttatataatacatttaaatttgcatgtcatttttatcacaattgcaaattgatatatatgtatttactacatattatatatgtatttatttttttatttatttatatctatttgataatctttttgtaatcatctctttgtaagtctggggaccatgaagcatagtttgaaaaccacaaatttggttcaaacaatttttaggaaataactatcttttctttttctgatcctctattaggtaagagacaatttaactttttggggataccgtatcttgtgggttttggtatatgtgaatcatttattcttctaaagctaaagctmctgaaggaaaaggactttgtttttatttttgttttggtttgtttcctccaggagcctaaaattccgtattgtacatagacagtccaggccatcta

SEQ ID NO: 599886 - DNA, 563 bp, Homo sapiens
tctatggtctgatggaaagaccattacatcttgagctgcattatctgcattcaagttctagctcttccatttttttactttgggcagttaacaaattctccaagcctatccatgttatgtaaaactttatttggrcttctttccaggtctgcacagtttgacccaatgtggatatttaataaagattaatttatgtcctttttctctgatccttaattctttcaccttctaatgggtatactattaatactttctctacttacctaccccacaggatttttgagacaatcaaataacacgtttgtgagaataatttataaactgtaaaacaccatacaaatgcatttctccttcttatgagtgttacgagtggatggggatgcttaactagaaattgaattgggacctcctaggaatttacattgaaactgtttcctaagagacattagaggcctcatgttgttgtctatttaaattgcctgacctaatctgtacaatgaagatatttaacaacaggtattaaatttgattgtctatttttctgtggtattttccagggagca

SEQ ID NO: 599887 - DNA, 624 bp, Homo sapiens
gaaacaaaatctctatataagtcccagaatgagtcctttaaaataaaagtagaacctttgagcctctgaaaagctgtcgcttgggccatccaaatattcatattgagtctcagataatgaaaagtcacaaaattagaagccattagagcatggtgttaagtggaattatggaaaaccatttgtaaaatgctgtggggtttggaaggacctgatttttttcacagacatttttgtaatagaaaacaaggtagtggaaatggcagcatatttgaatctatttgcatttccttatcaaaaaaaaaagtaaaataaaagggaagggtataaccttgcaaatgtatcttgatctgatattatttttgcaagttagacagatttggggacaccagtcagccagattcagggctagctatcaaatcagagctcactcttcaaatcccagcattaatmggaatgataaagagctacgtttcgattaatcctgccctggactttagacgaaagaaactgcagtttaattactgagtgaaattcacttcatctgatctgcctgtctttgctataatgtcataatataatcagcatcacccccacctgaaacagagctgtgaagtccaaggacct

SEQ ID NO: 599888 - DNA, 606 bp, Homo sapiens
tcagtgatgattttctctctaaacccctattctgaatatctgaattttattgcataataattccttctgggcattatcccaacaaatagatattaaatatgtcaggcacaggtcagtgtctccatacacatcattatttacccaatagcatctatcaaagaaaatcaaacatagatatacaattagtatatgccaaatgaatacatggtctgaattggaagtttctttccttgttctaaacactttttttccaaaaaagttactccaaatttagccctttatttctactgattttctaaacttccttttgaattattttgatgtctccctccttaatcctctccaaaaatcactcttataatgcctttacatttccacagtcatcatgctgctttcttacttggcatgtggatatggataaccaggctrctaatggattctatttcctctgttcaggtttattctgcaccagttacgtcaatggtagagtaatacttgcatgtctatagaacagaaattatagaacccaccctttttactttttgtggttgtcaggaaagcaaaagatattttatgcaaaaatattttatagggggcaaaaagctc

SEQ ID NO: 599889 - DNA, 477 bp, Homo sapiens
atattctattatggcagccctaggaaactaatacaataatgattatcaggaaatcatcatgtaaagactaaatcaagttcagaatatattgtttaagaaggttgaaaaatataagattcaytgcagaaaacgaatcaatatgcttttgcagaaataaagcattcagtgtttgagtggcacaaatatcgaaacaataaatgatttctttacatggaacatatggttttcaatttttcctaatccaatgagatgttgccatctttactaaaaagacaaactgaaatatactctacagaacacgtcaaagaaagagtccccaacctccaagaagcattttgactaagaaggaagataaatatcaacttatttttatttgtttgtttaaaatacacagcctaatatggatgaaacggttacaaagagaagttctgggtaaagaagaggttgtctacttagaagaaaactactaataaatgg

SEQ ID NO: 599890 - DNA, 579 bp, Homo sapiens
tagtgcaagaattaagctctaatctttaaaacaggtgctcttaaatgcttttgcatgaataagagactgtaccttgatttttcttcaaaaggattcaatagtgggatggaaatgtgtgtgtgtgtgtgtgtgtgtgtgtgtgtgtgtgtgtgtataagctaagctgttactgcaggtaggtcaatgaagaaatacttcatggaacaggaagttatagcgttatacaatgtgttccctggagaagtttaaaaaaacacacacaaaatagccctatgaagtttgtttgctctgttaaatagctttaaaattctacccctactaattgttcttaacattttatttcagccaattatcaatttaatctgggagaagaaagatctacttgactttytgacagccaagtcaatccaactagaaaattcaaaccctacaagaaaactgctttgcaacatttttaactgacaacagaaatccatgataacataatcacctttttctttctttcccaaactcattctctctaaagaaaataaacaatggtacaaagatacttggatgaaatgaaaaagtgaagagagc

SEQ ID NO: 599891 - DNA, 518 bp, Homo sapiens
aaaaaaatataaacatacatatatctgacttcaactatcttgttagttgatttgtgattacttaattagatttattaaataactaaaaactgacttacaaatttataagcatatattcaggtttctgttgtaattaragtaaaaaaaatagttaaaaatttacaatcttattgtccttatctttcctgtttttacttgggaaattatccttcttacttaaaaattttacttcctgtttttatctctgaaatatatagtctaatatgaaaatacacaagatggcagattgcaggggtgagctcatttcttccttaaggaaatgatataatagaaattataatctagtggatttacctgtactatatttctctcttaatattcaaagcaacccttccatcccaaataccagagccaaccttgaacagaattccaaagtgtggatgaaatttacctccagttcctcttccttatcccctctttgtccacgtttccttttgaccttttggcccttcctttga

SEQ ID NO: 599892 - DNA, 453 bp, Homo sapiens
aatcagaaatattctctatgaggtaatcttactacttttcactcattgatgattgatcacttgtttttcttcttttgcttacaaaatacaatttaagaggatacacacacacacacacacacacgaaaaaaaaagctagcactctgcaagcacagtaatcctgacttgttcctgcctgatatgaaagagttcacattgcagttaaggataatgtcatgttacgagggtaaaagccacactcatatggattttataaatcacgtatggaggacgactcataaggcagtccagtggatgtcaccaacaatttatggtgagaaagaatggaaggtgagaggaaacggatsaagactgatctcatttaccctgtggttgttgaagatgaaattctatatatgtgaagatgggtatttgacttgataaaatagatataaggaaaagtaataagtacta

SEQ ID NO: 599893 - DNA, 612 bp, Homo sapiens
tcttatttatctaatagttactgagcactggttgtgacattgtagcatttggacatcattacttggccaagtatatcaatgcagtgtgctttttggtttgtttgtttgtaaaacttagacaagagtcaaggtcaatgccctcaggctgttaactgtttagattctagaaagaaacttggagataaatagcttcaaaataaaatagagtgaaatagatactgttatagaagaataggcaaggcactgtggttaattcttttttttattttatcacatattttttaaaaaaacttttaagttatactttaagttctggggtacatgtgcagaatatacaggtttattacataggtatacacatgccatggtggtttgctgcacccatcaacccaacatctacattaggtatttgtcctaatgctatccctcccctagccgtagacccccagataggccctggtgtgtaatgttcccctcgctgtgttcatgtattctcattgttcagctcccatgtatgagtgagaacatgyggtgtttggttttctgttcctgtgttagtttgctgagaatgatggtttccagcttcatccatgtccctgcaagggacatgat

SEQ ID NO: 599894 - DNA, 531 bp, Homo sapiens
tttgggctatctggaaaatgatactattgagagcagctaagcatgtcttgatatgcaatttacagataagtttcacctatatggttttatttaatcctgacacaagacaaggtgggatgtggttctcaaacttctgtgtgtatggaaatcacttgggagtgagtttaaaattcagattccaagaatttctagctcatggaggttctaataaktcaagaaagggccattgacatctgaatttttgcctcagttgattttgagtcacgtgatgtttacccatattttgtgaaacttgagctgattaaggaagaattgttagtcccaatctacatatcagaaaatgatggctcaagcaggtaacatgtcacagtatttggcagaggctggactataaaccaagttttgaaattccaaaactcatactcttttaattacgctacagcgcttccaggaaagggaaaacagagaagccaatacaacaggatttaaatgtaaaggaaaggagagaacagttagatatgcatgtgagac

SEQ ID NO: 599895 - DNA, 587 bp, Homo sapiens
aataaataaatcagactttattttattttcaaaaaagtatacatttcttaacactcttatgccatatcctctacaaaattcctamatctggaatatagttgttgaaagagcatcttgatatttataattttctaagcatcattattacctaacacataaatgcctttagttattagtttataccctgataatagccactaaatcttttgtgtcatgttttttgattatccataattttcttaaaaagccaaaatgatgtcttacccaattctctaacttgttggctggaggttaggctgccataaatctgtagcataagaagaacagaagggtgggcagttggaaagtatagtatggacccatttcttttaaaacgtgttaatcattgcagcctgcaatcagatcacattgaggttcatatcagaataagttgattcaattcactggctctctttaagtctaataacacttgtgtttctagaagtaataaaattatatatgtaggcatattttttaaaagttattttgtttacagatgtgctctgtttatcatgaacctagcaatttgtgttttatcccatttatgc

SEQ ID NO: 599896 - DNA, 496 bp, Homo sapiens
cttaaaaagccaaaatgatgtcttacccaattctctaacttgttggctggaggttaggctgccataaatctgtagcataagaagaacagaagggtgggcagttggaaagtatagtatggacccatttcttttaaaacgtgttaatcattgcagcctgcaatcagatcacattgaggttcatatcagaataagttgattcaattcactggctctctttaagtctaataacacttgtgtttctagaagtaataaaattatatatgtaggcatattttttaaaagttattttgtttacagatgtgctctgtttatcatgaacctagcaatttgtgttttatcccatttatgcctagtgttccattattggaaygctaagcatggaggagttatttatatcctactgctcaaggtcatcgccatggtctgattgcagaaattcaaagaaattgcaacctcaggcatagatgggttaaggggcacgattacagtgtaggaa

SEQ ID NO: 599897 - DNA, 596 bp, Homo sapiens
atatcaggtgaaccactgttaacttgtaaaatttctactgaggcaaggaaatcaaatcatttcttgattgtagaaagtgtattataacactggtgctgttggatgccaactctagatagcactactaccgctactaagaactatacagtcttttggcttctcacagggaaatagacaaagggaaaagggaaataagtcaggaaaaacggatgagaaaggagatagattagagacttggatgtacagccatgatagataacccccagcgaaaatcagagaatgcaagggacaaaggaagcatgcggtccatttaggatagtgacaatagctaaaggattccatttgatcttaccagattggcacagctggaggaggcacgcaataaaactccgcccaataaataaacaaaggtaaacacccaaagctacaatattgctatcttawaaactcagagcgtgggaaaaattagacttattagaaagcttccatggcagtcagtcactaagaaatgtcagtgtgatgtctgttaagtaacatttattaacaagcgtgtttgtttgctttttctcatgttcaatgaattgttataataccgc

SEQ ID NO: 599898 - DNA, 549 bp, Homo sapiens
aaattagtagttaacagtacacttttatgaatgacactttctaaatttaagatgccatcatgccatcattctgttctatcagtgctttggaagattgtgtggatatggcaagttttcctttaataaataaagattattatgtcttctcgtttatctggtgacacttagctcattaaatctttgaaattattaattttaagaatgtatataaaatgcttagcaaaatgtattacacagtaagcactccacaaatggtttctattattattatgtataacatgtttatagctattaatgatatttaaaataccaataatagtgtaattactacaatgcctactagtaatgaataataaatattaattataattaattgttttctcaataaattttttattratgagtaataagaggataatggaatgtcataatacattctatactacagtaaaatcaactagtcaaaacatagcacaaaatacatttaatgtaaaataatttagttaaaatttgcataccatgtgattgtggaaaatgtctaaaaggtta

SEQ ID NO: 599899 - DNA, 507 bp, Homo sapiens
gcctcctgtgacttgtcctaccttttcctccaaaactaaaatctaattattcttaacaaacatatcctgtaggcctttttcccaccaagttttctgaagaattgtttttattataattatttagtgctttattaaagtgggcaattaaagcattttaaatgcctccatcatcaatctatatgtttatcttatgaggcattaacaccactttacttttatacagcactttgcagtttacagcttgaaacatgtataccccaaaaatagcacattgccttttcatcagaatagggatatctaatttaacaatagtcaccacatacagtgaagcagtgagaagactggccttcaaaccagtaatcttcattttctacrgaagtgcccaagcctggctttcctctttgcctttatgcagttggaccattgagttcaccagattgcaccccaaactccattattttgctttgagcaaggactgagagttagtgtagactagttagtaacttt

SEQ ID NO: 599900 - DNA, 605 bp, Homo sapiens
ttgagcattcctggaaagaaacttcatcattattaggagagaaccatggaaagtcaagctgtctctccctttcttctggtgaacatgaacatggaacccacattaccccagtgggtactggcagccatcctgtcatcataaaggaagctgaaccaaacataagcccatatatagtgaagggcatayatttaaaaaaaaacatgtagagaaacatatctagaactcttgttttttgtactaagtccaaatccacccaatttctgcatttacatttatgtaagctaataaaagttcttatttttaagcaattgtaaatttatattttgccatttgcagacaaacacaatctaattaatacatttttttaaactcccatcactccacctacaccagaaaattatcattgaattgcagtgttattttctacatctgttaagttttcatataagattatggtctttatattcatatcatttccgttacatcatgaattttattttggtgccttttagatgttcaaatgtagatgctaggagggctattgaacatataagactgaagttcagagagtgctctgggaatatatataaatttgtgaatcatct

SEQ ID NO: 599901 - DNA, 605 bp, Homo sapiens
ttgagcattcctggaaagaaacttcatcattattaggagagaaccatggaaagtcaagctgtctctccctttcttctggtgaacatgaacatggaacccacattaccccagtgggtactggcagccatcctgtcatcataaaggaagctgaaccaaacataagcccatatatagtgaagggcatacatttaaaaaaaaacatgtagagaaacatatctagaactcttgttttttgtactaagtccaaatccacccaatttctgcatttacatttatgtaagctaataaaagttcttatttttaagcaattgtaaatttatattttgccatttgcagacaaacacaatctaattaatacatttttttaaactcccatcactccacctacaccagaaaattatcattgaattgcagtgttattttctacatctgttaagttttcatataagattatggtctttatattcatatmatttccgttacatcatgaattttattttggtgccttttagatgttcaaatgtagatgctaggagggctattgaacatataagactgaagttcagagagtgctctgggaatatatataaatttgtgaatcatct

SEQ ID NO: 599902 - DNA, 605 bp, Homo sapiens
ttgagcattcctggaaagaaacttcatcattattaggagagaaccatggaaagtcaagctgtctctccctttcttctggtgaacatgaacatggaacccacattaccccagtgggtactggcagccatcctgtcatcataaaggaagctgaaccaaacataagcccatatatagtgaagggcatacatttaaaaaaaaacatgtagagaaacatatctagaactcttgttttttgtactaagtccaaatccacccaatttctgcatttacatttatgtaagctaataaaagttcttatttttaagcaattgtaaatttatattttgccatttgcagacaaacacaatctaattaatacatttttttaaactcccatcactccacctacaccagaaaattatcattgaattgcagtgttattttctacatctgttaagttttcatataagattatggtctttatattcatatcatttccgttacrtcatgaattttattttggtgccttttagatgttcaaatgtagatgctaggagggctattgaacatataagactgaagttcagagagtgctctgggaatatatataaatttgtgaatcatct

SEQ ID NO: 599903 - DNA, 555 bp, Homo sapiens
gagtgtgcaaatacctcctcaatatcctgctttaaattcttttgggtatatacccagaggtggaattgcattttttaaggaaccaccttaatgttttccatagcagctgcatcattttacatttccaccaatagtgtasaaaggttacaatttttccatatgtttgccaacactcgttattttcttagatggtagccatcctaatgggtgtgaggtggtatcttactgtggatttcatttgcatttctctaatgattaggttttgagcatattttcatatgcttgttagccatttgtatgtaatctctggagaaatagctattcaagtattttgttcatttttacattttgtttttgttctttgggtttgctgttgttgagttataggggctctttgtataatctggatagtaagtgcttatcaaatatatgatttgcaaatgtattttcccattccataggctgccttttcactctgttgattgtgtcatttgcttaaaatttctgccacaactgcagtcatgtattctttttcatgtttaatattgggtaggt

SEQ ID NO: 599904 - DNA, 547 bp, Homo sapiens
ttttaaaagtctgctgtatcatgtaaaaattcaaaataggatataaaaaataagattctcttaggtggtattaaaatctcctgttgctgcctacctttttaaaraagcagaatggcatttcagaaaggaaaccaaatctagaaagcaaaggatcacaaaacaggttaacaatagctagagttcatgattatttttctaaaagtagctacttgtattttagaaatacacaaagggtaatttaagaagctttttaaaaataataaaatatatgtccagcccacattgcagaccagatttaaactcagcgaagtgatctttcatacattatacagtggcaattaccatgtaaatagattttaaagaaagtaatatattatttaaaacctcagtgttatataaagcaagcatggagaaatgcttgatatctgttttattttcaaatcagcaacccctttacacacagaaaaggacaatgactgcactagataatgttaattatatttctcataataaagtacagtggcctctatgattatatatttttcca

SEQ ID NO: 599905 - DNA, 548 bp, Homo sapiens
taaggaaaaacagtggagattaaaagggtccagtgtcagacgagacaagtggattgtagttaacttgatggtcatgcctttgtcagtcttcagagtgcctgttataactctcttgtctatatttctatctcactccaatcttctcttgtgattttgcacagtttttacctcttctggaagaacacacttgaataatagacatgatcaggagatggtgtttgtatttgtactaccttgctacacaaacatacacccagccttgggacccccttttaactgatttgtttcacagaagactttattataaaattctgatcatatgtaagaatttttaaagtttttggtagttaatgttactgcttaaaggaaagcttacagtttccaaattcaggtaacacaagacaatcaaaaacttcaaatgagtcataaaagagaaaatacagtattgccaaaataaatctacaatagatatamatgcagctttgaaagatctaaataaaaacttttctacaaaagtgaaaaaagttcatatccaaagttgggaaagg

SEQ ID NO: 599906 - DNA, 615 bp, Homo sapiens
taaggaacagatacaaagacaatatttaatcatgcaataaaaatctatttaaaaagcctgtagtgcaagatcttagagtcagcaaacatgttctcaggatatttgacttgrttctttctcctttgtcccatcatagactgtgaggagtaaagaccataaactgagactcagaatttacatagatacataaagatatacctacataattagtattaacattactttgtgataccttttaaccttcaaattttctcagtccttaggctatgactgagaaagttgggccttaactactgattagccaaaagaccttttagtgagtatctgccctgcattcaccctaagcactatggggcataaagtataagccagagttaaatgcagtgaattaaacccaataaatttccattcattgcaacacaaatgcaaggagatatggtaaaatatccatgagagatccaaagacaaaccgagatattggccctggcttcaagaagtatttggtccaattgtgagaatgctatttggcataggttataagtgtcatagacttgaaaagagaaaactgtcactgagcccaaagaggattctgcaatatttcattaagtaaatgag

SEQ ID NO: 599907 - DNA, 615 bp, Homo sapiens
taaggaacagatacaaagacaatatttaatcatgcaataaaaatctatttaaaaagcctgtagtgcaagatcttagagtcagcaaacatgttctcaggatatttgacttgattctttctcctttgtcccatcatagactgtgaggagtaaagaccatraactgagactcagaatttacatagatacataaagatatacctacataattagtattaacattactttgtgataccttttaaccttcaaattttctcagtccttaggctatgactgagaaagttgggccttaactactgattagccaaaagaccttttagtgagtatctgccctgcattcaccctaagcactatggggcataaagtataagccagagttaaatgcagtgaattaaacccaataaatttccattcattgcaacacaaatgcaaggagatatggtaaaatatccatgagagatccaaagacaaaccgagatattggccctggcttcaagaagtatttggtccaattgtgagaatgctatttggcataggttataagtgtcatagacttgaaaagagaaaactgtcactgagcccaaagaggattctgcaatatttcattaagtaaatgag

SEQ ID NO: 599908 - DNA, 607 bp, Homo sapiens
catgtttgccaccagtgctgactcaatttgttcactgggaaggcatatcatgatatagtattaagtgtatgaaacaaattaggaagcatctctcttttctgctgtaagactgttagaatgccactggaattatttatttcttaaaggttgggaagaaatcacccatagattccactcacgcacttttctatgggggtcattcattgacatctcattgaatttcttctataattattgttctattctggatttaggactcttctttagttggttttgttcatttatattttcctagaaaaayttcctttttgggaagagaaattaatatttatggctatataattgctttttatgttttcttataatttttaaactcctctgtatatatggtgctatggtttgaatgtatgtatccctctaaaattcatgttggaacttaacccccaaggtaatggtattaagggttctgccctcttgaatgtgattggtgtccttataaaagggattgagaaagcaaatttgtcccttttgcccttccaccttccctcatgtgagaacaaggcaacaaggtaccaccttggaagaagagagcaagccttcaccagac

SEQ ID NO: 599909 - DNA, 394 bp, Homo sapiens
aactgggtaatgaggagaggaaaaactttcaatattgtttgtttgacaaaatgacactatactggtggtaaggtgaaggggatgatatttaaaattttctaccacaaagcataagtatgaggaaactctacatttttacagagtgttcacacaataataaaataattacatttcaaccatgaacattatgcaacaaatgactgtagtccctggtcctttgccatctaaaatgawctttccataacattcattattgtttattagtgtagtttcaattcacactagaaagaaaacaaaccttactttctggctctgttttgatccctggcaacacattttcatatggcatgttgttctgttttccaatttggttgatttgctggcctttcaggaa

SEQ ID NO: 599910 - DNA, 554 bp, Homo sapiens
ggacagaatgcatattgatttgcagattacataaatccaatatatttaaagacagaartggcttgtaaaatatcttgacagtgcttaaaatacaatcacaaatcaagatgacaaaattttaactgtacatgggaagaaaatccatcttgatatttgggacagagagtcaacattgtttcaacttcagtgtaaagcagtatggaagagcctccggaacagctacattcaaatacccatttttccatacaatgctgtttttgtgaacttgtgaacctaggtaagtgcttaacttcataagtagcacctatatgatggggaaaaaattcctgcttcatagggtttttagaatagaacaagtagtgtgcattgattgtagtaagcaatcattgatggtactgtaattattgctgtggcataaaaaaaaatctaaacacaaccacaagtattgagagtcaagttcaagggaggtgatatatggtaccccgaacacatgtagagaatcatgccccattctaaacaccacatttcaaaaggaatcctggagaccatccaga

SEQ ID NO: 599911 - DNA, 554 bp, Homo sapiens
ggacagaatgcatattgatttgcagattacataaatccaatatatttaaagacagaaatggcttgtaaaatatcttgacagtgcttaaaatacaatcacaaatcaagatgacaaaattttaactgtacatgggaagaaaatccatcttgatatttgggacagagagtcaacattgtttcaacttcagtgtaaagcagtatggaagrgcctccggaacagctacattcaaatacccatttttccatacaatgctgtttttgtgaacttgtgaacctaggtaagtgcttaacttcataagtagcacctatatgatggggaaaaaattcctgcttcatagggtttttagaatagaacaagtagtgtgcattgattgtagtaagcaatcattgatggtactgtaattattgctgtggcataaaaaaaaatctaaacacaaccacaagtattgagagtcaagttcaagggaggtgatatatggtaccccgaacacatgtagagaatcatgccccattctaaacaccacatttcaaaaggaatcctggagaccatccaga

SEQ ID NO: 599912 - DNA, 509 bp, Homo sapiens
gaggtgatatatggtaccccgaacacatgtagagaatcatgccccattctaaacaccacatttcaaaaggaatcctggagaccatccagagaaaaccatttttataaagaacttttgaggaaagtggatatttttgtcataagagaaaagcctaaagagacatgatagctgtctccaaatattttgaaatagtattttgtgaaggaagtgatatttttagtcagygatactccaggaaacagaagaaagaccaataatagttggaggttttaggaaagtaagttttgtgatgatctgaagactctatcaacaatgacatctctttaccaatggagcaggctgcttccacaagcacccatgctccccatctctgaaatatcagggaaattatgaatcaaattcactatatacctgggaagatatatttagatgggttatgccacttaaaacctctcattaaaccctgtaggtcatgtattatctttcttatccccatttgtcagatgaca

SEQ ID NO: 599913 - DNA, 579 bp, Homo sapiens
atgttcaccttttcgcttttttgtgggaagaatgtcagtcacacagtaagaagagcaaatggaaaatatgtatatataggtgcagccatatttggaaaatttcgtctgccacagtgaaccctctggacactcatttcacattcctcccacatgcaacatacattcacatctagtcaaaaaacatccaattacggtaacagagccgggatcaaggtccagaactgcatcatctaggtcaggtcaaggtgtggctgaagctcttcaggtgtggttgttcaagtacacaccttgatcttctagtacaatttctctcagtttgagaaactgtaaagtaaaaataagttatttgtcacttacacacccaacacaatgattgaacaatcataggwtaatcaaatcactatagacccttcagttcaaaaatgggggatactggaggcacacaggagtcactggtctataggcaattctgaaatccagccaggcacctgttgctagttctttgattatggatcagttttactgcctgggaatgattcttggctccactgtgtgggttcttcgttccgccatctgagt

SEQ ID NO: 599914 - DNA, 579 bp, Homo sapiens
atgttcaccttttcgcttttttgtgggaagaatgtcagtcacacagtaagaagagcaaatggaaaatatgtatatataggtgcagccatatttggaaaatttcgtctgccacagtgaaccctctggacactcatttcacattcctcccacatgcaacatacattcacatctagtcaaaaaacatccaattacggtaacagagccgggatcaaggtccagaactgcatcatctaggtcaggtcaaggtgtggctgaagctcttcaggtgtggttgttcaagtacacaccttgatcttctagtacaatttctctcagtttgagaaactgtaaagtaaaaataagttatttgtcacttacacacccaacacaatgattgaacaatcataggttaatcaaatcactatagacccttcagttcaaamatgggggatactggaggcacacaggagtcactggtctataggcaattctgaaatccagccaggcacctgttgctagttctttgattatggatcagttttactgcctgggaatgattcttggctccactgtgtgggttcttcgttccgccatctgagt

SEQ ID NO: 599915 - DNA, 576 bp, Homo sapiens
agaaatacatttattaattacctcaataaggcttaggagttctactagcagaaagttaattttgctgtgaaaragtttttattttttattattactctgccttcaattttttttactttgaaataatttcaagctatccaaaagctgtcacaacagtacaaataattattatctatccatctccttcacccaggttcaccaactgtgaagttttccacttatgctttcatgatctctctctctctctccccccaccacccccttatagtttttttctctctaaactgtttgtaagttataggaatcattcttcatttctcctaaatgtttcacatctcattgtgtgttttttatgaacaaaaatattctcttatataatcagtataattattcaaaatcaggatatttaacactgatactgtaggatcatctaaatggcattttaattcaaataacttcaattattccaataatatcctttaagcaactatttttttatatcgaatccaatctagaataagattttgcattcagttgtcatatttcttcagctcctttaatttgaaaagttcatga

SEQ ID NO: 599916 - DNA, 570 bp, Homo sapiens
gctttctcatctttaaaacgagaatggctttcctttcccagtgatctcagataagtactgtttatacaaaattatttttaatccatgaaattctatctctttgccttgaatttatttttttttttttgccccttaagaaatgtattttgtactggaaaataaattaaaatattattatgtcaatatattataatgtgatgacagagtaagtactaatatatttgtaggtactgaagcaaacttgatgcaaaatagaggcattgttattttcttcataaatatatttataaaattaaatggaaaaatgatcattgtcaagtgtttatttgctttaataggcttataaagtaatttgtcataaagctgacatttcattgctttagataagaggaaggtttagtgatcgttcagatgctacttttcacataaaaggggrttataaccgttgactttattgaatgaaagaagaaatcatatgacaaaggtattacaatattattttcaccaaagtaagagccaatttataacattaagtttaaataatttgagacttatggctgagattgaata

SEQ ID NO: 599917 - DNA, 514 bp, Homo sapiens
gatatctcacattactggcaatttggcactagctactgggaagacagttcttctcttcatggatccgcttgggtgtcatcatagcatggcagcttactttccctagagccagggatgcaaaaggccaaatcagaagctgcaacgacttttattaactagcagtgaaaccagcattatcaacttgtccatattctattagtcatatgtaacctgctctgattcagtataggcgggggayacacaaaggcctgaatatcgggaaatatggattattggggatcctcttgggggttgactaccacaaattaaaagtgacaaatataaaatgtgatcctccataccttctaacagattcagacatatctttggattatctgtgtcagttaatgtgctgtctccctccctacctcatttcctctggaccccatttactgactcataaacgtatcctgttttcttgttttctcaaatctactcaaacatctgatctgacaactaatattaatatgcatcc

SEQ ID NO: 599918 - DNA, 514 bp, Homo sapiens
gatatctcacattactggcaatttggcactagctactgggaagacagttcttctcttcatggatccgcttgggtgtcatcatagcatggcagcttactttccctagagccagggatgcaaaaggccaaatcagaagctgcaacgacttttattaactagcagtgaaaccagcattatcaacttgtccatattctattagtcatatgtaacctgctctgattcagtataggcgggggatacacaaaggcctgaatatcgggaaatatggattattggggatcctcttgggggttgactaccacaaattaaaagtgacaaatataaaatgtgatcctccataccttctaacagattcagacatatctttggattatctgtgtcagttaatgtgctgtctccctccctacctcatttcctctggaccccatttactgactcataaacgtatcctgttttcttgttttctcaaatctactcaaacatctgatctgamaactaatattaatatgcatcc

SEQ ID NO: 599919 - DNA, 394 bp, Homo sapiens
  misc_feature 301: n = A,T,C or G
catttgatatgtacctgaatcatgctatgctaatagttttrtatgtattagctcatttattcctaaccaaaatagtgtaaggtttcagttatcctattttgttggtgagaaaactgaaattcaggtaggtttagtaacaggacaaaatcacatggctctaaagggataaaacctgtatttctatttgatttcagagtctgattttttttaacctgtatcttagaatgtctttctaatacttaagtaaatatttatttggtagttgtaagtagagatggacatattttacatcctacatganaactatgcaaacttcactgatagaataccatgttgattcataggaatctgagataatttcccagattctatgtagagaagttatttaagatat

SEQ ID NO: 599920 - DNA, 611 bp, Homo sapiens
taaatactgcaaggctgaattaaaacaccaaattagacttctcagttaactttgtcggggagattgaactattgtggggatatagttctatgaactaatataagctagggttgtaaattttcatacacaatgggatttaattttcatagatattgggaaggtgatctttatttgcatttaaaatggtgtatggatgaattaagaaaataatatwtgaatgatgggcaggattattagaagcaatattccaagggtgattgcctttgcagatgatcattcagctgtccaggcatggaaaattgatgaccccctacttcttgtgtgtaataagggtcccacagtgcaatatatttataaatattttcctaactgccttatggatttaaaaaataacaaagcagtatctatcatactggaaggactgttttaacattattgcatgaagaagaggtttagaatgggattaatagcgcatcattctaaggttaaaaacaccatgacctccaacaattttataagcatattaatacatctgttcctgagccttgaactgtttcattgcaaaatgagaaagtagttgcatcatttctaagatagcagtagacgttaaa

SEQ ID NO: 599921 - DNA, 544 bp, Homo sapiens
taaccatattaacctgagtcatcacccatcctctgaaagtaatcggcggacatgtttggacagggtttggacttccagagcgactaaagttcacatttgagtctagattatttctttatttaccttatttctttattacattcattatgaggatgccaattccatagtcagggattccagaagcagggatctgggatgcttttgcttacggctgcctccaggaacccaaaatggtccctggkgcactgctggtacaagtaactattggttggatgaacacattttcagggatagggaaacccacattatctcaacataatacaattttgtggctggaaatatcacaattccaaccacatgtatttcaccctgaagtctgtacaaacagagattatggatgaaagtttcaacatcttgttctctaatggttgcatccttttttcccaaaaatacgttggagattttgtccaagtctgtggtgtccatagtggctgcagggctgcaaacaccacatctaccctacgggactaagagactcaaatcc

SEQ ID NO: 599922 - DNA, 576 bp, Homo sapiens
gcactccagcctgggtgacagaacaaggaccctgtctttaaataaataaataagtactatgtatatgctgactctccagccttgcctagtccccagaagccttgcaaccttccaaaacttgattgtttttctcctaaatttctcagataattgaggggaaaatagagctcagaatttgacaacagctgtccacatctcctggaatccctggcagaatgctggtgctgtctcttctctgggtttcacagggcgggcataaattataactttattaggttgagcacatatggcctttagccccaggagaccctccatggggctagtctgttggcagargcagcttctgcactttcattcaaattcacaatccataaggaaaaagaggccttcaaggctgcagcctgccttgggcttccgtggggcatctcctatcattgccaataatgctgtggtgaaacccaggccaaatattccaacatctttttgctgcttgtatgaacacgatgcatattgcagttcaaaactaggaaaaaagaagagcatattacaggcgaacacgaatgcatcagaatatgg

SEQ ID NO: 599923 - DNA, 576 bp, Homo sapiens
gcactccagcctgggtgacagaacaaggaccctgtctttaaataaataaataagtactatgtatatgctgactctccagccttgcctagtccccagaagccttgcaaccttccaaaacttgattgtttttctcctaaatttctcagataattgaggggaaaatagagctcagaatttgacaacagctgtccacatctcctggaatccctggcagaatgctggtgctgtctcttctctgggtttcacagggcgggcataaattataactttattaggttgagcacatatggcctttagccccaggagaccctccatggggctagtctgttggcagaggcagcttctgcactttcattcaaattcacaatccataargaaaaagaggccttcaaggctgcagcctgccttgggcttccgtggggcatctcctatcattgccaataatgctgtggtgaaacccaggccaaatattccaacatctttttgctgcttgtatgaacacgatgcatattgcagttcaaaactaggaaaaaagaagagcatattacaggcgaacacgaatgcatcagaatatgg

SEQ ID NO: 599924 - DNA, 619 bp, Homo sapiens
atatgtcacttttcttttcagaagcatatgccattttattttaaaaaaaaaaattgaatcacaccatgcatctgttttagtgttgtttttagtaagttcactatcagtgcttcytgagcatggtttctcgtatggggtactcactgacctgtcccatccatcttttcttcctataaagcctttactgctatacttgtctacttgcagaacctccacactttttatgagctcccatttttctctcttcttggtatttatcattacttattgtgactcttgcatattggatggtcaaaagagatccccagtggttacactacaacaagataaatgtaggtatacttttcttaattgttattagtgttacttattattttgttttattagacactactttcaaaggctttacagcactgggtatgtgttctacctttttctttcattttatcctccacaacagttctgtgatgaaagtactattattaacttcatagtttacacgacaaagcatggtttcataacttgtcaggatttcttagccattatttgataaaattagggatctaaattctgtcttctagctccaaacagatggttctttccatgctatttgctatta

SEQ ID NO: 599925 - DNA, 585 bp, Homo sapiens
tgttttctgttgaaagtaccatcatctgaccaaacctatccactgaaaagtgtacatttattctacatataatgaattagtatttgctcttatttcattccacttcatgaacttctcactttttagcagcttctaagaaatcacttgatgctttaatttctgtatatataagtgcttatgtacataaaaatgtaattctacatagatgcatgatgtattacttaatgcaccacttttaaacaaatggacccaaactatacatccaagtgttatttatgaatgtcatgttactactatttttgaagttctttaggaggaataacttctactgttctatatagcattgtaggatgcctgtagttaacgataatatatgatatcatttcaaatagctggaatgagaatattgaacatttccaacacaaagaaatgataaatgtttggggagctgggtatgtttgggaagctaatgrccttgatcttatcactatacattatttgtatggaaacatcactgtggaccccatgaatttgccaattaggaaaatcaaattaaaaaaaacaagataacatacgacataccaa

SEQ ID NO: 599926 - DNA, 585 bp, Homo sapiens
tgttttctgttgaaagtaccatcatctgaccaaacctatccactgaaaagtgtacatttattctacatataatgaattagtatttgctcttatttcattccacttcatgaacttctcactttttagcagcttctaagaaatcacttgatgctttaatttctgtatatataagtgcttatgtacataaaaatgtaattctacatagatgcatgatgtattacttaatgcaccacttttaaacaaatggacccaaactatacatccaagtgttatttatgaatgtcatgttactactatttttgaagttctttaggaggaataacttctactgttctatatagcattgtaggatgcctgtagttaacgataatatatgatatcatttcaaatagctggaatgagaatattgaacatttccaacacaaagaaatgataaatgtttggggagctgggtatgtttgggaagctaatgaccttgatcttatcactatacattatttgtatggaaacatcactrtggaccccatgaatttgccaattaggaaaatcaaattaaaaaaaacaagataacatacgacataccaa

SEQ ID NO: 599927 - DNA, 584 bp, Homo sapiens
aaatgttgaccaccacaggctcaaccatccttattcaatcttacctattcttcaggctatcatgtcttcaattcacttttctatgttattgattttccagtgtaactgtggtactggtatttttcattccttgttggaggtcaccttcgtttaagaattgaatagccaaagcagttttaagtacctttatcttttcatgaagaacacgatttttttttaaagtcgcaagatcagaattaatgtttgatctctaagctgcaagtcttcatgttatattaactataacagggtgctgatggaggatggagttatcattccgagagagaatcgtgtcctaaggaaaaagcycatgttttgctcttaaaaaagtaaattctttttctttctgtaagccttttaaatccaaaattagttagtttacactttggaagtgtttcaatagattcatactgattttcttgaaatttcaagctccatatgtgtcttgctaagcctttttcatcaaatagtctactccactatctgaaagaaaaagttttcatttgtggattctaagatttagactttacaatatcgtttttgtt

SEQ ID NO: 599928 - DNA, 499 bp, Homo sapiens
taatttgcttacataataattgtattattttaacatgcatatcttccctttttcaaaagccatttgaattcctttttttttttttttttttttttttctgagaaagggtctcactctgacgcttaggttggaatrcagtggtgtcatcatagctcactgcagcctccatctcctggtctcaagcgatcctctcacctcagccttctgagtacctgggactacaggcatgagccatcatgcccagctaatttttgtattttttgtagagatggggttttgctgtgttgcccaggttggtcttgaatgcctaggctcaagcaatccacccacttctgcctccccaaatgctggaattacaggcttgagccactatgcctggccgaattcttttttttttttctaggaactgtccatgcataccctttgcccgtttgctatctatcgcttgttgatcttttaataatcacctcctaggagccgctcctagaggaaggagttc

SEQ ID NO: 599929 - DNA, 526 bp, Homo sapiens
tgagcgttcactcctgtcacctcagtgaaaaactgcaacctgtcatgatgttttcttaccagaaggtagagrttcagttgctgggtgtgggttggagtaaaacatagaaaacttgagacacaaagggagctctatgtttgaggcaagatggcaaaatggcaagtaaaagtcaaaatgacgtccttccattttctctgtggttgctgtctttggcggttttttttgcaatcacagtatgatgagaaggaaggtacatctgtatcaaaccccatgcataagtacaagcaattgctcctatgatagagtagcctgttagggaagatttatttgataatcaaacaaaaacccgagcaagttctgcatgcccactggcaagaaaaacatttaaagagggctaaccagcacggtttccctttccctcccctttctgtcttacctgtccttaaaatgcatccaactgagatgtcaaatactttgcagaagctccttatccacaaagcaagaccaacacttacaaccaaattgc

SEQ ID NO: 599930 - DNA, 463 bp, Homo sapiens
ccactggcactggattccagtcttcctgtcctctacatttttaccccaaaataaccacaataaaaagattgtttcttagtttttgaggcagtgtgcttcacggatgtcaaagcaataaaacttgaggacaaaaagacagacatctagaaaagtaagatgagcgttcactcctgtcacctcagtgaaaaactgcaacctgtcatgatgttttcttaccagaaggtagagattcagttgctggstgtgggttggagtaaaacatagaaaacttgagacacaaagggagctctatgtttgaggcaagatggcaaaatggcaagtaaaagtcaaaatgacgtccttccattttctctgtggttgctgtctttggcggttttttttgcaatcacagtatgatgagaaggaaggtacatctgtatcaaaccccatgcataagtacaagcaattgctcctatgatagagt

SEQ ID NO: 599931 - DNA, 554 bp, Homo sapiens
ggctaaccagcacggtttccctttccctcccctttctgtcttacctgtccttaaaatgcatccaactgagatgtcaaatactttgcagaagctccttatccacaaagcaagaccaacacttacaaccaaattgcaaagaaacatattaggtttctagatggtctgatttagaaagcatatattgaaccacaaataatggattaatggattctccgcagtactcagccagatgaataatgatggcttgattcagcagtgggagttacttatgggtgccggctaatcagggccagaggagcaggtcctggctgccttttccttgtgcatgctcggaggtggccaagtatctttctagatgacaaatgggscgtgccagggagtgtaaaatgtacaggtttgcaatgttccgtgctatgttggctcttgttgaaaaaagctgcagaaggggcaggctgaacttatcctgcatcctcgtccttggaagctaaagctcagatcactctgtggtcataggctggcaggtgcaatgaagggtgaggagtttgtttctggga

SEQ ID NO: 599932 - DNA, 554 bp, Homo sapiens
ggctaaccagcacggtttccctttccctcccctttctgtcttacctgtccttaaaatgcatccaactgagatgtcaaatactttgcagaagctccttatccacaaagcaagaccaacacttacaaccaaattgcaaagaaacatattaggtttctagatggtctgatttagaaagcatatattgaaccacaaataatggattaatggattctccgcagtactcagccagatgaataatgatggcttgattcagcagtgggagttacttatgggtgccggctaatcagggccagaggagcaggtcctggctgccttttccttgtgcatgctcggaggtggccaagtatctttctagatgacaaatggggcgtgccagggagtgtaaaatgtacaggtttgcaatgttccgtgytatgttggctcttgttgaaaaaagctgcagaaggggcaggctgaacttatcctgcatcctcgtccttggaagctaaagctcagatcactctgtggtcataggctggcaggtgcaatgaagggtgaggagtttgtttctggga

SEQ ID NO: 599933 - DNA, 534 bp, Homo sapiens
tgtcttaatcctacagccccctcctggggaatctgtgccacagggaaatggaaatgacagtggggctgagtgatcatgtggttcaactctctgcctcttcctctaccaaccacctcctcctgctcttccatcaatctccacttttctacttttgtgcttttgttcctctccctccaggttctcccaggggtgcacacactcatttatttattcagcaggcacacaaatgatttaccctgagttcgcgggcaaagcaattatattcttaatcaaatcaagatgaactcaggaaatagactacataatttcttgttaagagtgagcatctctttgaaaaagaccataacatgtattcagtggtgtatgaccagtcggtcttgagatgactcaaacccgtttagctgttttctaaaagtcacagacartgcttttccaaatgattcaaattatcggggaaaaaatcttaaatcatctgaacatggaaatcaagtatactccaggatatcaagtatattccttaagatcggttggaat

SEQ ID NO: 599934 - DNA, 536 bp, Homo sapiens
tcacctcaagactgtttctcagaatgtatccctctagttaagcaatgcctgactatcagattcccttttagcctttgacattaaggcatttattctctactgggaaagccagatttcgctgaagtaaaagataccaatataaaaaagtatatattcaactctcaagtatccccctaagggaaaagtactacagggaacagagaagggagtgagtgatgagaagaaccgtgggtttcgtgcccatgctgtggttggcacaataatgtagaaaataaaatacaatttcaggaccctctaaatttatgatgtcaagragggagttaagccctggaaagtgagtcatgtagcatgcttgcaattctgcttcttagataatagcttaactctcttctttactactcttgttctgtaaatgactaggagagaccggagactaggccttccccttccaattactgatctttgttatagattaactgtctcctctatttattgtcctgtacctaactcagaccagatggtgtccaaaaccactt

SEQ ID NO: 599935 - DNA, 514 bp, Homo sapiens
ttttctattgcagttgtaaccagtgaccacacacttagcagcttaaagcaaatctcaagtattgtccgtcagttttatagataagaagtcagcctgggtagcatagtgagaacttgcctctaccgaaaaaaaaaaaaaaaaaaaaaaaaaaaaaaaaaaaaaaggccaggcatggtggtataagcctgtggtcctagctacttgggaggctgaggtggggggattgcttgagcccaggagatctaggctgcagtgagccataatcacaatattgcactccagcctgggaatgtctcactgtctcttaraaagaagaaggaaaaggaggagtcatctaggtggcaggtggctcaacaggttctctgaactaggtctcaccaaggccaaactcgaggtgatccctagattggagtcttatctggaggttctggggaaaatctgtttccaagctcagtgagatttttggcaaaatgcaggtctttgtgatgtagaatggaggtccccctttgctagc

SEQ ID NO: 599936 - DNA, 514 bp, Homo sapiens
ttttctattgcagttgtaaccagtgaccacacacttagcagcttaaagcaaatctcaagtattgtccgtcagttttatagataagaagtcagcctgggtagcatagtgagaacttgcctctaccgaaaaaaaaaaaaaaaaaaaaaaaaaaaaaaaaaaaaaaggccaggcatggtggtataagcctgtggtcctagctacttgggaggctgaggtggggggattgcttgagcccaggagatctaggctgcagtgagccataatcacaatattgcactccagcctgggaatgtctcactgtctcttagaaagaagaaggaaaaggaggagtcatctaggtggcaggtggctcaacaggttctctgaactaggtctcaccaaggccaaactcgaggtgatccctagattggagtcttatctggaggttctggggaaaatctgtttccaakctcagtgagatttttggcaaaatgcaggtctttgtgatgtagaatggaggtccccctttgctagc

SEQ ID NO: 599937 - DNA, 605 bp, Homo sapiens
tggtacatatacatcatgaagtactatgcagtcatataaaaagaacaaaattatgtcctttgcagcaacatggatgcagctgaaggccattatgctaagtgaactaatttcagaaacagaaaaacaaataccatgttgatatggtttggctgtgtctcmaaccaaatctcatcttgaattgtagctcccataatccccacatatcaatgggaaggaccctgtgggaggtaactgaattaatgggggtgggttttttcttgtgctgttctcatgactgtaagtctcatgagatctgtgcagttgccctgcagagatctcatgatcatgcagttcccctgcacactatctcttgcctgccgccatgtaagatgtgcctttgctcctcctttaccttccaccatgattgtgaggcctcccagccatgtggaactgtgagtccattaaacctctttttctttataaattacccagtctcaggtatttctttatatcagtatgcaaatggaccaatacacatgttctcatttataagtgggagctaaacaacagatacacatggacataaagattgggacaatagacactggggttttgaatggtgggag

SEQ ID NO: 599938 - DNA, 605 bp, Homo sapiens
tggtacatatacatcatgaagtactatgcagtcatataaaaagaacaaaattatgtcctttgcagcaacatggatgcagctgaaggccattatgctaagtgaactaatttcagaaacagaaaaacaaataccatgttgatatggtttggctgtgtctcaaaccaaatctcatcytgaattgtagctcccataatccccacatatcaatgggaaggaccctgtgggaggtaactgaattaatgggggtgggttttttcttgtgctgttctcatgactgtaagtctcatgagatctgtgcagttgccctgcagagatctcatgatcatgcagttcccctgcacactatctcttgcctgccgccatgtaagatgtgcctttgctcctcctttaccttccaccatgattgtgaggcctcccagccatgtggaactgtgagtccattaaacctctttttctttataaattacccagtctcaggtatttctttatatcagtatgcaaatggaccaatacacatgttctcatttataagtgggagctaaacaacagatacacatggacataaagattgggacaatagacactggggttttgaatggtgggag

SEQ ID NO: 599939 - DNA, 583 bp, Homo sapiens
ctttccctgtggaattggggtgtgacactgtgccaatacatggatgagctcttcatcccccttctgttgacctccacgtgttcagctctccagaagccctccacaccctgtccttgggatttttctggatgcttcaggatgtaggcatgattgattaaaacattggccattggtgatcaacttgatcttcagcccatcttccctctctggaggtaggggatgcagctaaaagtccctaccctctaatccggccttggtctttttggtgaccagtgctaccctgaacctmtcagacaaaagacacataaaagacagcacttaggagatcccaaggattttaggagttataagccagaaactgtgcatgaaaaccaatatatataaatgtcataacactacagccagatttgccctgggatatagattgtagactcttggtgtatagcatctaataatgtttggccaaaaatataatagttggccaggggacattaccatctaacactttatgtccttctctccccttaagtctccttaattttaacacttgatgtttataaagtaacattttcctactttacca

SEQ ID NO: 599940 - DNA, 614 bp, Homo sapiens
cagttggaatcccaatattaaaacagataaaagttgagcctttctggttgaggtgggacagaggggttctctgcctccttccccttcccctgaaactcctccatggaattcataagcacagtttcctctgtagaaggatgtttagattctttcacagagcctgcagggtccttgatgatcgtgcccctctgtgcctttccggcctcatctcatgccaaagtgaggcacttacatcttctcaaacataccataatgctcttctatcactattcctttgagttatgccttctaccgaagctgcccctccctcatatccctttcaccctctctctaaagaggagctcctccttattcatcttttgagccctctctgaaactgtgacctcctaggtgcagttagttgctctgtcttccttaggccagtaacagtttattcaagtctttatttgcatgctaaattaacwtgtaattctttacttccatgcttcttcccccttttagattgtaagctcattgaggaaaggaaccatttatattcatctcgttatttccacatatgtgcaggccgatatttgaataaggagaagttgctctcatgcagccttgcaaactgc

SEQ ID NO: 599941 - DNA, 569 bp, Homo sapiens
ctacaataaattcagctgggatccaaaaaaactttgtcataatttgagacaaaagtgtctaagtgtaagggactaattaaaatagagctgagcttttgttgtttaggttaagggcattcgattctgttcaggatgcttattcaagttccttttgccagtttccacaggaagytgctggaataggcttcttcatcccctctcacccctctgcacctgcttccattcccatattctttctttccaagagtgaaactgctgggtctcactgtaagaaaggattaagctctcagaggaggaagttttctttttagaacacttctgacatagtaaattcaaatccaagatccaggcttttctatctgaaaaggtggttttagtagaaaagtggaaggacatgtcttaactttaaagaaggaaaagcatgaaatccagttccacttaggaaattccttctttggcactagctagaggagaagattcatttgctttgaataccttcttcattctgagtcaaaaaactacctatcagaaacattcaggaatatagtcagtatggaatctggaaaatc

SEQ ID NO: 599942 - DNA, 609 bp, Homo sapiens
ggggcaaaaaggaactttttaggataatgaaaatatttttattatggtagtgattatacagatgtatatctttatcaagattcattcatctatacagttaaaatgtgtgcattttcttgtgtataaattgttccctagtgaggttgacttttaaagaggattagagaaaaaatgacattattttataatgtgagttcaaaggagtttttaaacctgtaattcaaataattagatgtaaaaggacatttaagggtataaagctgtataaagccatataaaggatatttaaaggtatgaagagaaatactagaacagctaaaaatcattataaaattaaatgttagtgatagaaggaagagacaataagraggtgggaggaggtgaacacatactaacttttgtattgcacatagtcaaaagccattaattgctatttaaagagaacaatatttaataattaattttataaaattaaatcactaaaataacttttaaaaggatgaaccactaaaataacaaaataaccccaaaaatcttcccaatcatcagaaaaatgcattcacagaatgaatgaaatacagataacacaaatcacacgtgtattagtca

SEQ ID NO: 599943 - DNA, 577 bp, Homo sapiens
cagctaaaaatcattataaaattaaatgttagtgatagaaggaagagacaataaggaggtgggaggaggtgaacacatactaacttttgtattgcacatagtcaaaagccattaattgctatttaaagagaacaatatttaataattaattttataaaattaaatcactaaaataacttttaaaaggatgaaccactaaaataacaaaataaccccaaaaatcttcccaatcatcagaaaaatgcattcacagaatgaatgaaatacagataacacaaatcacacgtgtattagtcagttttcacactgctataaagacaacctgagactgggtaacttatagagaaaagagatttaattgactcacagttccacatagcygggtaggcctcaggaaccttacaatcatggcggaaggggaaggggcatatctcaaatggcagcaggcaagagaagagtgtgtgtagtgaagggggaagaaccccttataaaatcatcagatctcgtgagaactcactatcacaagaacagcaaggagggaactgcccccatgatccaatcatctcccaccaggttc

SEQ ID NO: 599944 - DNA, 574 bp, Homo sapiens
aagaaaaactaatgtaaagacagaatttaatgtactaaaatgttaaattggtctaaaaaataagaggaattttctagataaaaataagaacctaatcaagaaaatgaaaaagcataaaaacacaaagtcatagagatgataaaaataatctgagggtaaactaaaaaattatatgaatcttatgttttaagtggcaaaaaaaaagcttttcctctaaaatctggaacaagacaaggatgcccactttcaccacttttattcaacatagtaccagaagtcttagggcaattaggtgacagaaagaaatacaggatatccaaactggaaaggaggaagtcaaactgactttgtttgtagataacataatcttatagaaaactctacagacatcaccaaaaatcttagaactaataaacaaattcagtaaagttacaggatataagatcaatgtacaaaaacctgtggcatttttatataccagtakcaaactatctgtaaaagaaatttaaaaagcaactccatttatattagctaaaaaactcccaggaataaatttaaccaaggaggtgaaaga

SEQ ID NO: 599945 - DNA, 557 bp, Homo sapiens
gctttggaaattttccttgattactctcccaaatatgttttccaagcttttagaattctcttcttccttaggaacatagattattcttaggtttggtcatttaacataatcccagacttcttagagtctttgttcatattttcttattcttttttctttgtctttgttggattgggttaattcgaagatgttgtattcaagctctgaatttctttcttctacttgttcagttctattgctgagactttccagagcattttgcattcctatgtgtccaatatttcctgaaattttaattattttttctttaagctatatatttccttgattatttctcccttcacttcttgtatcatttttttggatttccttgcattgggcttcacctttctctggtgcctccctgattagcctaataactaccctcctgaattctttttcagtaaatcagggatttcttcttggtttggrtccattgctggtgaactagtgtgattttttggggagtgctaaagagtactgttgggtcatattaccagagttggttttctggttcc

SEQ ID NO: 599946 - DNA, 625 bp, Homo sapiens
tttttggggagtgctaaagagtactgttgggtcatattaccagagttggttttctggttccttctcatttgggtaggctctgtttgagggaaggtctagggttgaaggctgttgttcagattcttttgtcctacagggtgttcccttgatgtagtactctcccccttttcctgtggatgtggcttcctgtgagccaaactgcagtgattattgtctctcttctgggtttagccacccagcaattctaaccaattctgggctggtactgggggttgtctgcacagacttctgtgatgacaactatctatgggtctctcagctgtggttaccagtgcctgttctggtggaggtggcaggggggtgcaatggactctgtaagggttcttagctttggtggtttaatgctctgtttttgtgctgcttggcatcctgctgggaggtggcactttccagagaatcagctgtggtagtatggggaggaaccagcrgagggtagggccctagaacccccaagattatatgccctttgtcttcagctaccagggtgggtagggaaggaccatcaggtggtggcagggttaggtgctatggctgctatgggggatgggggtgaggtgcccaggtc

SEQ ID NO: 599947 - DNA, 597 bp, Homo sapiens
  misc_feature 582: n = A,T,C or G
atacagttttccccagggagttgtgggttaacaattctgataccgctacacactgtggttgagcgattaagtgaatgatggcatatggtggcaatcatatggcatatggtttcttgctgttggagtggcagaggcaagagcaagcctagaggaccctgaggaggcatgactactacatgtaatgtgttaccttgactgggattctggaacagaaaaaggtcattaggaaaatattaargaaatctggataaagaattgacttcagttaataataaatgtatcaatgttggctcattaataagtgtaccatactgatgttagatattaataataagggggactgggtattaggtatatatgaactttgtatgatctttgtaattgtattgtaaatttaagctgttctagaataaaaggtttatctttaaaaattacaggaagtgaataatttaaactgaaatttaatcatgtatggcagtaaaataataaatgaaacaattttgaatgttaaaattaaaaaaccacaatgaagtatcaatataaccattagaataactaaaatgttttaatatgacaattagncgccgatggtgttgg

SEQ ID NO: 599948 - DNA, 615 bp, Homo sapiens
agagatcacatagtgagtgaggaagcaaaaagacacggggagggaggggtgcctcactctttttaacaagttcttgcaggaactaatagagtgaaaactcactcattactgtgagggtggcgcccagacattcatgacagatatgccaccatgacccagtaatctctcattaggttcaacttccaacattgggaatcaaattttaacatgagatttttgtagggtctgtgaaataaaatatttcaaacttaaaataattcatacttaaagctgttagtgtcacacgcatctgtgtgaagagaccaccaaacagcctttgtgttagcaacaaggctgtttatttcacctgggtgcaggcaggctgagtccgaaaaaggagtcagcaaagggtggtgggattatcactggttcttataggtttgggataggcgtacaaagtacattctcaagrgcggggagaatattacaaagtaccttcttaagggcaggggagaatatatgtatcagggtggggcaggaacaaatcacaatggtggaatgtcatcagttaaggctattttcagtgattttgtggatcttccgttgcttcaggccatctggatgtatacatgcagg

SEQ ID NO: 599949 - DNA, 565 bp, Homo sapiens
catttctactatagtatgtattgatagttaacctacatatacaaaagtttttttgggctcctcagtaagctccaagagtataaagaggttcagacaccaaaaaggaaaaagaagctgaatactactgcattaaggcatacatactctttttccttgagaaaaaaaggcacatgcacagttgtgtttttctgccactatttctgctagggtatctcagccactcattaattataacctttaacaaaagtaactaacttctattacatgaagtaaacagggaggggaaaataattgagaacttttggccctccacaagtgtttcagcaaacaggcaaagctcttcagacaaccttctacagtcacacaacccctttttatactttgtcaaagtggcaaaaatgaacacattcwttgacatggccgaaagatataacctcttctttggtatacacaaattaagagcaaaactttataaagataaaattatgcttggtaattatatgacctaggtatcgaatggtgattcattaattaactcaatttactatcatccccactgtcaggc

SEQ ID NO: 599950 - DNA, 490 bp, Homo sapiens
cagccacagctcaaggggccccaagtaccactccagggagtgcaagccataagytttgccagcttccatgtggttttaattctgcaagctcccagaatgcaagagtggtggaggcttaacagtttccacttagatttcagagggtatattggaaagtcttggtgcccagacagaagcctgctataggggcaaagttcccacagaaaggctctaccaaggcaatgctgagaagaaaggtggaattgttgcctctgcagagttcccatcagggtattgcctagtagagctgtgggagtaggaccaccactcttgagactccagcattaatagagccatcagcagcatgtaactccagcctggaaaaactgtaagcattcaactccaacccatgagagcatctacaaaggctgtgcccaggaaagccatgggggcagaactgcccaaggccttgtgaacctatcccttacaccagtgtgtccaggatgtaggt

SEQ ID NO: 599951 - DNA, 471 bp, Homo sapiens
tgctggtggttcccagtattctttggcttgtggccacatcactccaatctctgcttctgttgtcaaattgccttttcttctgcagtcaaatctcccactgcctcccacttataagagcccttgtggtataatgggcccatctggataatcaggacaatcttcccatctctagatccttaatttaattttgtctgcaatgtcccttttgccatataagggaacatattcacaggttcyggggattagggggtggatatctttgggagccattatttagcatactacagggtacacgattatccatatgatttatcggtggtgaggttaacctgaggttatcagtggtgaggttgattaaggtggtatctgctaggatttctccactgtaaagttgtatttggggtgatagattttttttcattgctaaaagtatgattttactcacagctaaataagtaataatgttgacat

SEQ ID NO: 599952 - DNA, 581 bp, Homo sapiens
caccaaatttgaccaaaacctgaatggagtgctgtggctctgcaagtgctggaaaggaaggggctcaacttcaccaaacactgacaatgtgccaagtccagtgctgggcacatgaagccgtggcagggaagattacttactgatcctcaagtcacatggggaagttgagtggcagagtataagtgtggagctgatctctctatgtcgatgtccattccactgcttakcattgcttcccaaatccaacctgtgtgaaaaattaagttcacagtacttagaagaaaactccactccctattctaggttttgtccagagacctgaactaatgatagagtcaaagaatgtatgcaaagagcattgaggcacctagtttaaggaattgttgagggcagaggctgaaatgcagcacaaagcgggtgagtcagaaagtcccttaggtcagttgttcgcaccctccttctcccctactcagagacacaattcacttgcaactggaagccctgagaagaatttcccacctagttctgtgtctgaggagagaaaataacttgctaaggaccaagttagagagaaaacccag

SEQ ID NO: 599953 - DNA, 558 bp, Homo sapiens
tggtctcaatctcctgacctcgtgatcctccagcttcggcctcccaaagtgtggggattacaggcatgagccatggtkcccggcctataagttttttatcaggaatgaccattacttttatcaaatgactctgcagcattgatttatagcaaaactatccaatagaactttccccaatgatggaagcacccattatctgtgtttgtaccgtaactactagtcacatgtggctactgagcacttaaaagtggctaataggaatgagaaatgaaattttttaaataacctaatttcaaccattcaaatttcaatggaaagagccacatatggctagtgtctaccattttggacacagctgtgaagtcagaggaactgtgagtcaattaagcctctttcctttacaaattacccagttctgggtatgttcagagcagatctagatgatcacataggtagtttctttaaatctattaatataaagatatgtatcttcataaatatgaaatgaaaccatgctaaaccatctttcatatctgaaacaaaacctacatggtaatg

SEQ ID NO: 599954 - DNA, 485 bp, Homo sapiens
ataaggaaagtgatagcatagactgttactacattttaaaaaaataaaatatttggcattgtattaagaaatggaaaatagttggtgaagaaaacaatgctagatcatgaaaagatgaaaacccatgctgtacagtgagaaatcatttggcatgagatcaagtaaacaaggcatatagcaattatcagaattatgtcctgaaaagaattgtggctacacctattggcacatggagcttactgaaatctaataggaaataagcaatccatgtctttaagtgatttgtacggcaaaagtaccaacaatttggactgaaaatgattataactattctatatttaagacaaccatagactccaatcttctattgacagaaaacrgactgataaagccaattgccccaataaaagccatagtccccaatattcattgcagatgtcactgaagacaataatcaaaaaaaggaagcatttcttagagataga

SEQ ID NO: 599955 - DNA, 556 bp, Homo sapiens
cctttcatcttgctgcaaaagacatgatttcatttttaaatggctgaatagtatttcattatatataatatatatatatccattatatatattatatatatacacacacccacatatataaaatatataatttaaaaaatccaatcattcattgatggacacttagattgattacatatctttgctattgtgaatagcgctgtgacaaacatatgaatgcaggtatctttatgatagcattatttttttcttttcctttgagtagataccagtagtgggattgctggatcaaatgatagttctatttttggktattttggttatttgagaacgctatataccgtttttcatgggggctgtactaatttacattcacactaaaagtgcataagcatcctttttttctgtgcccattcaccaagatctgttgttttttgacttttaaataatagccattctggctagggtaagatgatatctcattgtagttttaatttgtatttctctgatgattaataatattgagcattttaaaaatatgcttcttggccatttg

SEQ ID NO: 599956 - DNA, 556 bp, Homo sapiens
cctttcatcttgctgcaaaagacatgatttcatttttaaatggctgaatagtatttcattatatataatatatatatatccattatatatattatatatatacacacacccacatatataaaatatataatttaaaaaatccaatcattcattgatggacacttagattgattacatatctttgctattgtgaatagcgctgtgacaaacatatgaatgcaggtatctttatgatagcattatttttttcttttcctttgagtagataccagtagtgggattgctggatcaaatgatagttctatttttgggtattttggttatttgagaacgctatataccgtttttcatgggggctgtactaatttacattcacactaaaagtgcrtaagcatcctttttttctgtgcccattcaccaagatctgttgttttttgacttttaaataatagccattctggctagggtaagatgatatctcattgtagttttaatttgtatttctctgatgattaataatattgagcattttaaaaatatgcttcttggccatttg

SEQ ID NO: 599957 - DNA, 556 bp, Homo sapiens
cctttcatcttgctgcaaaagacatgatttcatttttaaatggctgaatagtatttcattatatataatatatatatatccattatatatattatatatatacacacacccacatatataaaatatataatttaaaaaatccaatcattcattgatggacacttagattgattacatatctttgctattgtgaatagcgctgtgacaaacatatgaatgcaggtatctttatgatagcattatttttttcttttcctttgagtagataccagtagtgggattgctggatcaaatgatagttctatttttgggtattttggttatttgagaacgctatataccgtttttcatgggggctgtactaatttacattcacactaaaagtgcataagcatcctttttttctgtgcccattcaccaagatctgttgttttttgacttttaaataatagccattctggctagggtaagatgatatctcattgtagttttaatttgtrtttctctgatgattaataatattgagcattttaaaaatatgcttcttggccatttg

SEQ ID NO: 599958 - DNA, 479 bp, Homo sapiens
cccccagccccatctgtgagccggctgtcagctccagccctccgcatgcacccctcttccttcccgtaatggcacctcagtgtattttggatgcatagtctgctcttgtgggtgccgtctggtgacacagcaggtcctaaggccccatgctyccctagaaaaggaacaaaggaacgtcagtcagctcttgcttggagaacgctgtgtaacaaacagcccctgggccctcagtgacaatgccttgctcacagggttgcagggtgacaagaggggctttgcttcttcatttggactttggttaggcccagctataatccactggcctctttctgtgggatgcaggcgttcattctccctcagtggctcaggaggctgagcagagccatataaacctaggagaagcccgtgcttgaagcctcatgttgtgtctgtcaaggaagtttcaaggctaggaccagcctccacggggcagagaagtc

SEQ ID NO: 599959 - DNA, 452 bp, Homo sapiens
tctcggtggcgggagccgccttcttgtgggacttgggggcacgtggcgcggggcggggacgcggacagacccctcccgcatcctaggaggcctgggagggtccgcgggracgcggggagggggcaccgcctggccgaggaccctcccccggtcctccccgccccttccccgtcccttccacgctcgccgagggcaggacttcggttccgcgagaccggaggcccctcgtcctcctcggaagccgcccgcggccggggaccccagtcccgcagaggagggcggcgctgcccccgcctcccgcttggagagcgccgcccgcaggtgcccacggaggggccgcggcatcccagcgccctcccaggaaggagccgagcggatcaccgccggctgcagcggaggtcggggcgccggggaggggcgcggctagggggcgaggtcgaagggcgggcacc

SEQ ID NO: 599960 - DNA, 604 bp, Homo sapiens
gcgcccttggcaatgcagccatttgtgcctgtcgcccacagcaccctggacatgtgatctggaaggccattctggtgcacgaagcatatgtctgttccccatgcttgagttgcaagcttacttgaagtcagttgtcttcattcccaaacctattgatgccagtggtaattttatcataattgtataaatgaattaaatattatttaaaccaacaaattgtgagtatgaaaagaaagtcattgtttctgtgaatctgtaaatgaatgctttggaaagactgtaaagaaagttgctaaaaaattaccactgtgctgaatacgggcaaagcaaccataaaaaactagggagaaaaaaaacatcttccttgcattcagagaaaactgatgcttaatttttctttccttctttctatagggtaattttccttgatttgtttytgtcatccttggttgatgtggtggatctgggggctgggttagtgtctgctttttctcttattgtctcttagtggcctcgggcagctgtgtactccaagaaggagaacagatctttccagacacagagagaggggtcactaattggtgtgtgagcagctgtgatttcc

SEQ ID NO: 599961 - DNA, 575 bp, Homo sapiens
tttgtttcctgttgtgtgaaaagatgtttaatatttgagaagcttttttaaaagtgattcctcattttaaactcagtttctcatctcgtggtctatttttttctgaactcttgaaaagcactggaggagcttatgagcttcctttctgaatagttccagccataagtaggaggaacaaatcaggaaaacatcctcrtatttccgtcttcttaaattgggagacccgtataagataaaagtgttggaaattgagtgttggagaagttggagtctgcttttcatagacattctcaataccattttggagacatctctgagatccaaaacatcttgtttgttcggttctactctttgtgggctccatccacaggggcaggggtttagggcaagtttaagagagccctggtcttcttttatcagaagagaaagcattcttcccagagtaaaaagaatgggaaagtctgatgattcaagtggagaccttaagatgtctcatttagttgctttgcattttctagcacttctgatgtcataagctctagagagacagagagaaagtctactgtcacaattcc

SEQ ID NO: 599962 - DNA, 588 bp, Homo sapiens
agagatctgattttatgataataacatagcagaattacccaaagccatttacaaatatatgttcaatagtaatactattgaacaaaatagtccctttttctagctgcatttttcttcacgtagattstgtctataggagctaaacatcagttattcactgcaggattaatttaatcaatgtaggtttaatcaacgtagagtgggcccgaatgtttaaagtcaaaaatactcttcagggagttccaaacgtggctatttatgtggatgaacgtgtccagaccctggtaccctttcccttcattttctgctgcatccacacaactttggaatttgcaaaagaacatttcttaaaggtttcctaggtgctctatgtctttcctgaccccgtatagttataatcaacctgagaattctgagtaggcataagcatttttcacaaaaccatagttaaagcaaaccacatctctaatcctgtttggaacagcaattgatgcattcagggctgcgcagtgtggcaaaatgatccctgtttaatagcccgactgcgtgttttgtttcctgttaggaatagcttaacttgcctccttg

SEQ ID NO: 599963 - DNA, 581 bp, Homo sapiens
aacatagcagaattacccaaagccatttacaaatatatgttcaatagtaatactattgaacaaaatagtccctttttctagctgcatttttcttcacgtagattgtgtctataggagctaaacatcagttattcactgcaggattaatttaatcaatgtaggtttaatcaacgtagagtgggcccgaatgtttaaagtcaaaaatactcttcagggagttccaaacgtggctatttatgtggatgaacgtgtccagaccctggtaccctttcccttcattttctgctgcatccacacaactttggaatttgcaaaagaacatttcttaaaggtttcctaggtgctctatgtctttcctgaccccgtatagttataatcaacctgagaattctgagtaggcataagcatttttcacaaaaccatagttaaagcaaaccacatctctaatcctgtttggaacagcaattgatgcattcagggctgcgcagtrtggcaaaatgatccctgtttaatagcccgactgcgtgttttgtttcctgttaggaatagcttaacttgcctccttgaacaaacacagcagg

SEQ ID NO: 599964 - DNA, 581 bp, Homo sapiens
aacatagcagaattacccaaagccatttacaaatatatgttcaatagtaatactattgaacaaaatagtccctttttctagctgcatttttcttcacgtagattgtgtctataggagctaaacatcagttattcactgcaggattaatttaatcaatgtaggtttaatcaacgtagagtgggcccgaatgtttaaagtcaaaaatactcttcagggagttccaaacgtggctatttatgtggatgaacgtgtccagaccctggtaccctttcccttcattttctgctgcatccacacaactttggaatttgcaaaagaacatttcttaaaggtttcctaggtgctctatgtctttcctgaccccgtatagttataatcaacctgagaattctgagtaggcataagcatttttcacaaaaccatagttaaagcaaaccacatctctaatcctgtttggaacagcaattgatgcattcagggctgcgcagtgtggcaaaatgatccctgtttaatagcccgactgcgtgttttgtttcctgttaggaayagcttaacttgcctccttgaacaaacacagcagg

SEQ ID NO: 599965 - DNA, 561 bp, Homo sapiens
aacattgctgcaatgaaactgccttttcttttgaatgttaaggaaacatctgagtaaaaacaatgaaatttttaaagttgttttcatctcagttgttcttacatcctcgaagatataaaaacacccttcttccttctacacagaagggaasgtagaggatcgaggaaagttatttcacaaagccctctgaattgggataccatgatattaatgtcagtatcaccagtatttagcctgggtggtcttgaaggggacatcacaggacactcaatgttctgtttccttgcttatagatacaattctgtaggtcatttttattgacacaaagttgatcttgaactcaatgagttgggttttcattttggggtctcttccgtatttcttggtagatttagaacacctgtatccatcacttgacacactggatgtttcctgaaatcaacaatgtatgaatctacactttatggccaaggccttggaagaggccagctaaagaacaagttaaaggacaactgccagtatcttaaagagataaagaattaagcaacccaggaaataaac

SEQ ID NO: 599966 - DNA, 237 bp, Homo sapiens
tatatttgaggtatttaaacaaggcaagrcatgctagtgtgtgacttggcttgtggtaatgtttgattacacttcaatgccatcacaaaaggacggaatacttcattaaaagttaaagtattcaaggctcacaacagcttccagggtaaataaatggtcagaattccagattgtttggaaggctcaatgtctttgataggacatgctttcttaattacctacatttgaatttttttg

SEQ ID NO: 599967 - DNA, 571 bp, Homo sapiens
tgttcctatcatggctagaaattgtcttttttctgttaaaatagagaaaggcacttaccttacaaaatattaagagatctatgcgacatggtttcagaacactttgggggtagtttgcgggaaattcagctctttgaagaaggagtttgaacrtaaacctcaggtatctaggctggagggtaagaggagttgagggagaggtgcaccatagattgaaggcatcctcccaaaggctgcaagtctccacctggtaatgtattagcatccctgcccccaactccccttcccatcccttccccagtattacctcagtgacacttgcaagaggcctttgccagaagaatgaggttcttgcaagtgtcagctttccttagatttactgtcttgctgcttgaccagcaaaggaatgtggtggttccattttggccttcatccatttgttaccatgggtaagttacttaacctctctaagcctacatgtttttatttacttaaggagaatgataaactaactttccactttggttttgaaagttacttctcttacctgttcctcgcacagagcctggca

SEQ ID NO: 599968 - DNA, 504 bp, Homo sapiens
gacacttgcaagaggcctttgccagaagaatgaggttcttgcaagtgtcagctttccttagatttactgtcttgctgcttgaccagcaaaggaatgtggtggttccattttggccttcatccatttgttaccatgggtaagttacttaacctctctaagcctacatgtttttatttacttaaggagaatgataaactaactttccactttkgttttgaaagttacttctcttacctgttcctcgcacagagcctggcatatggtagaccctcaaaatatagagttcttattacgacttggcttgacttgacccctggtgcttcatagcacatcaagagagcagtcatatctgaggggtggtctgggacctctgcccaatgttttgtgattctgactcaaacctaatgaataactgggagagggcaaaagagcccagcaggtatgggtgctccccccatttcattagaaactctgtggttgggccaggcatggtggctcacgcct

SEQ ID NO: 599969 - DNA, 504 bp, Homo sapiens
gacacttgcaagaggcctttgccagaagaatgaggttcttgcaagtgtcagctttccttagatttactgtcttgctgcttgaccagcaaaggaatgtggtggttccattttggccttcatccatttgttaccatgggtaagttacttaacctctctaagcctacatgtttttatttacttaaggagaatgataaactaactttccactttggttttgaaagttacttctcttacctgttcctcgcacagagcctggcatatggtagaccctcaaaatatagagttcttattacgacttggcttgacttgacccctggtgcttcatagcacatcaagagagcagtcatatctgaggggtggtctgggacctctgcccaatgttttgtgattctgactcaarcctaatgaataactgggagagggcaaaagagcccagcaggtatgggtgctccccccatttcattagaaactctgtggttgggccaggcatggtggctcacgcct

SEQ ID NO: 599970 - DNA, 530 bp, Homo sapiens
ggtccaaaatgtctggtcacactctagacctgtgctgtcccttatgggggccacagccactggtgggtcttgagcacctgcaatgtggcttgcctgaattgagatgtgccatgtaggatacacatcatatttcaaagattagcatgaaaagaatgtaaaatatcacattaataatgtctgcattgattatatattgaaacactgatattttggatatgctgggataataaaatatattcttaaatttaatttcacttgtttcttttgtattcttttagatgtggctcctagaaaatttgaaattacataggcagctcctgtttgtggctcacattatattcctactggacagtgttaagwctagacagattctgacatgattacctcggtattggtccaaatggctgcaaagaccaggtatcccagtcactcccaccctccaaccactctgcctcccatttcctgaagaacccacgcagcagagtgaacttagtacacctaaactgactggggttaagggtcctagttct

SEQ ID NO: 599971 - DNA, 485 bp, Homo sapiens
gaaatatgaagctcatgtcccgggaggaggcctgagcttggttactgtctgcacgtagatgaggttaccgaaggggtgagtgtaggcagaggacagcgagagcccaggactcaatcggggacatcccaccagggagagcccatgtgatgagatgggamcagcgcaggcaacctgtgaggaacaatacgtgaggcacaaaggagatgtgaggaagagatctgaggccctgataaaggtatttcaaaaagaaaaatacccaccgagcagagggacatgtttttgttttaattctcctaattcacttcatttctacctcagagtttcacacagacccatgggggtgattgaagggacatctagtgctctagctcaacgaagttccaaacttgagtggaccctttttcaaacataaaactccaattaaagatctattgatcaaaacaacacatttcactgtgaaatatgtaaagaccaaataggaaaca

SEQ ID NO: 599972 - DNA, 485 bp, Homo sapiens
gaaatatgaagctcatgtcccgggaggaggcctgagcttggttactgtctgcacgtagatgaggttaccgaaggggtgagtgtaggcagaggacagcgagagcccaggactcaatcggggacatcccaccagggagagcccatgtgatgagatgggaacagcgcaggcaacctgtgaggaacaatasgtgaggcacaaaggagatgtgaggaagagatctgaggccctgataaaggtatttcaaaaagaaaaatacccaccgagcagagggacatgtttttgttttaattctcctaattcacttcatttctacctcagagtttcacacagacccatgggggtgattgaagggacatctagtgctctagctcaacgaagttccaaacttgagtggaccctttttcaaacataaaactccaattaaagatctattgatcaaaacaacacatttcactgtgaaatatgtaaagaccaaataggaaaca

SEQ ID NO: 599973 - DNA, 634 bp, Homo sapiens
ttagtagaaacagggtttcatcatgttgtccaggctggtctcaaactcctgagctcaggcaagccacctgtcttggcctcccaaagtgctaggattacaggcgtgagccaccatgcctggccaggatgatgtattaagctgagtcctggaggatgagaaaaactgtggagactggtccaggctgaagaaacagtgtgtacaaaaaccctgaggcatggggatggtgaatatgctgggttctggaatctgttcatagatttaggccagattttcaaagaagggtaggtgacccaggttttgttgacaaattcctatttgaggctgcatgtcgtgaagtcgttgctggtactgccccgtttcctccactctgctctgaccattcctgtatgtgtagcatggctcatacctgacagcagctagrtgaaggctttctctggcttctgtagtcatctcttctcaggcatgcagcagacaagatgtgacgagaaattagcatccctcagccaaagactgcccttctcaggtggggtgtctctgagggttgtgttttacactggctcccagagttccctgatgggattatgccacagttgcccgtagtggtaacatgcctgcaccctgttggctgccctcc

SEQ ID NO: 599974 - DNA, 624 bp, Homo sapiens
ggcaacatggaatcaaaggggaggaggccctcactctgccacaggcccctctggccttcgccttgaccttgagacaaatgagcaccaagtcaggtcgaacaatctccttaaaggaatagggctatttataaacaagatactgttatgaactccctttgcctgtgaaggaacttcctccctaggggtgagctgcatgggggcaggggctgctgcatctcatcaatcagtatcagccattggtactggccaaatgggcgtgttttcaggccatatttattaagacacaggatgtgctgggctccttgctaaaccatgtttatacccatttgcttcttagtgcagcactgtaagctgagtgcccgtacctccatcttacggataaggaaaatgaggaaaatgaggcacagagacgtgcacacctagccccagaccacacagcatgtagaactgattagaatcagagtctgactccaggaccctggctttaagcacccttctcawtgggttcccttgatgaagcctgattcactggtagtgaattgggatcaagaacatgagggtgggagctcattctccctgggtgcttttccatgccctccaaggcttgcccaggcctggcacaga

SEQ ID NO: 599975 - DNA, 603 bp, Homo sapiens
gtttttaccttggcccattggtaaatatatattatgttcactgggccagagaaagaactaccaaagccatgtgttgcctgatattagttctctttgtgcacataagcacttctcaaagtcaagactggatccagtggctaacaatgagaactcacacaagctgagtgcttactccaaggcaggccaggtgctaagggatctatgcatgctcacagaaagccccctgagaactctagggttcaagtacaatcatcttcactctgcaaatgaggacactgagactgactccaaagcctgttttttgatctgatagtataatcaagtcaaatagtctggctgctctttccctaaaaacttaaagtactctgttaatggataatgaagggaatacaaggtaaaaataaaaatgaagtggtctccttgtagactagcaaagagctytgttctccactcaagcctgctgacacactgactaccataccacttcaggcttattttggtcctatgtgaaagggaggtctgttaatatgctgggattgctgattctctcaaactacattttgttccccagcccccaagtctggggtttggcaatcttcaagc

SEQ ID NO: 599976 - DNA, 534 bp, Homo sapiens
catgaattatcccatttccttaggcaaaatcctcaatctctctaaacctcagcttcctcatcaagtaaatggagataatagggcctatctgacacatgcaaaagctcgtaacacagggtctggtgtgcgttttacctgccccataatggcagctcttagtaccccagttattcttgctgkgctactcagatgacacctgccctactccaccgttaggaaggatgcttcagaagtgcatcatcaatttgcacagctcagcctttcctctcaagcttcttggttcttactctagtcgtttctaaatgatgtagtcataaagtcttttgagacaaggagaggtgatggcttcagtagacttttttttttctttttctcaagcatggcatgatgcttttaggcaggacaagctggacacacgacctacagcaggggccttgaccgcaaagagtgaagatgactctgaatgctcttctgctggtaagggaaacacatgcatggcccagtcttttcccttttcttttggagagtgtcaga

SEQ ID NO: 599977 - DNA, 635 bp, Homo sapiens
tttctgtttgtcattcttgggggcccggtatttctagttaagttactatacagatttctttgtggttcagcagtttgtcagctctctgcaggttctctcttgaagacatctgttgagtgcagtaatggcttcattgcagactcttgagttttcactaattttcttctgaaggattttaatgctgccttttgtagggaatatgaagaccctttcatctttttggagagtttcaagttctttggctcccatctcccctggtgaggttttccttggaggaccattctggccattattgactctctgggttctccatgtctataacctgccaaacaggctgtctgcctcacacagcaagtcccatgtctgtcccaggtggctgcagagccaggttgacaggaggctgaaaggaagtrtcagtaccttcctctactgtgtccccattggtacttctcttcctctgtccctttcctcccctaactttctcggcatagtgtttccttatatagacctacattggctccaagctcacaatctcagaggaattacatgacatgcataaattatgaaacatttttttgcaaattaagttttaattaaaactagcagcttagagcatccaactggaagcagtcaca

SEQ ID NO: 599978 - DNA, 559 bp, Homo sapiens
acctgccaaacaggctgtctgcctcacacagcaagtcccatgtctgtcccaggtggctgcagagccaggttgacaggaggctgaaaggaagtgtcagtaccttcctctactgtgtccccattggtacttctcttcctctgtccctttcctcccctaactttctcggcatagtgtttccttatatagacctacmttggctccaagctcacaatctcagaggaattacatgacatgcataaattatgaaacatttttttgcaaattaagttttaattaaaactagcagcttagagcatccaactggaagcagtcacaatgttgaaaagtgacactggtagggtgggagttcaggagaaggtctgagtggctttgcatcctgtttggatatttccaaaatgaatgctgcagaaaagagcttccttccatatcagaccctccttaatctacactgccgccttcgatgaatccctttatgtcgttagaccctggactgccatggggaccaatataattttcaagcaggaaatacaaatgcatccttattgtagttttatctgga

SEQ ID NO: 599979 - DNA, 559 bp, Homo sapiens
acctgccaaacaggctgtctgcctcacacagcaagtcccatgtctgtcccaggtggctgcagagccaggttgacaggaggctgaaaggaagtgtcagtaccttcctctactgtgtccccattggtacttctcttcctctgtccctttcctcccctaactttctcggcatagtgtttccttatatagacctacattggctccaagctcacaatctcagaggaattacatgacatgcataaattatgaaacatttttttgcaaattaagttttaattaaaacyagcagcttagagcatccaactggaagcagtcacaatgttgaaaagtgacactggtagggtgggagttcaggagaaggtctgagtggctttgcatcctgtttggatatttccaaaatgaatgctgcagaaaagagcttccttccatatcagaccctccttaatctacactgccgccttcgatgaatccctttatgtcgttagaccctggactgccatggggaccaatataattttcaagcaggaaatacaaatgcatccttattgtagttttatctgga

SEQ ID NO: 599980 - DNA, 565 bp, Homo sapiens
tgtgtgatttttaaaaagaaacacttaggaaagtatatgtgttgccaagaagggtctttctgttcatcttttccttgcttttaaacataccattggaagaaaaaaaaaattgaagtcccatccataccccaaactagagattgagaaatcactattaaattatgtatgtcctggtaagataatacccaatttcataaaagcaagaaaatttggaatacatagataccattttacccataagtctttccaacaaaattggaaggacttactgatatgcagcaaaaattagaatgaggacatgactagttttaaagtagtaaagtcagctatgtttgtttgcttttattgaccctgtttttatcttatcttaccccctgcagggttatctctctacctgtgttcctactctttcctcctcctcctcyttcaacatcaccataatagcaaggggttagctgaagccatgcaactgggagaggtcactcaattagggattatggagtgagcaacagggtgcccacatttaaagagctagagaaggaatgtggagtgaaggaagtagcag

SEQ ID NO: 599981 - DNA, 459 bp, Homo sapiens
atgcaatgattggctctcatgtgcaagaacccaaactcagcttctgttcacagctaaacttttatcttgaacttgtccagaaccaaaactatggatcaatgtataattaatagcgaaagcactatactcacgggtcatttttaagctatttatttaagcattaaatcagttatataattatatttaytgctgctgggttttcagccacaaaaactgatgagtcaagcaaagaggaattccttttccttaactacccagataattacagagaaagaagagtcagaccatattaagccatcttttgggtacaagtgtccaaacatactagataatcaacaaatacttacctactcccttagtatttagtagaaataatacacatcagcagggtcacagatcttctgattcctaaaggaatcacagctcctttcagactgcaatataacaaagagaaccagg

SEQ ID NO: 599982 - DNA, 579 bp, Homo sapiens
caagacaaacatccggcaagcagagaaggcgggatttgaacctggcaggagtctaaaacctgagtggcactcctcacaattgcgctaagccagggtgggcacattaggtgcaggacagtcctaagaactgaccggatccttgtgacagtgtttaaggaataagaagatagaaaactcgaccatgctattgagctgacactatgtcagctcattggcttgcggggaaaagggtatggaggaggaaggagcttttatcaaatggcaaagttattttgtctaaacttgggtttaagtagacttagagcagatgaagaagaaaagaggctaagtttctaaaacaggtatggctctcacattttaccrgcaaggatgaaaatgagagatttatgctagttgagctggtgacaaagtgcagagcgtgtggaaagaaggaaagctgcagcggaagcactgtgatgctggccccctgttctggaaggcgtgagaacccaggctgggctttcaaatggttctcctcaacatccctttggagagcaggatgcagtgagagatggaaacaacgccaactcaacagtggaa

SEQ ID NO: 599983 - DNA, 579 bp, Homo sapiens
caagacaaacatccggcaagcagagaaggcgggatttgaacctggcaggagtctaaaacctgagtggcactcctcacaattgcgctaagccagggtgggcacattaggtgcaggacagtcctaagaactgaccggatccttgtgacagtgtttaaggaataagaagatagaaaactcgaccatgctattgagctgacactatgtcagctcattggcttgcggggaaaagggtatggaggaggaaggagcttttatcaaatggcaaagttattttgtctaaacttgggtttaagtagacttagagcagatgaagaagaaaagaggctaagtttctaaaacaggtatggctctcacattttaccggcaaggatgaaaatgagagatttatgctagttgagctggtgacaaagtgcagagcgtgtggaaagaaggaaagctgcagcggaagcactgtgatgctggccccctgttctggaaggcrtgagaacccaggctgggctttcaaatggttctcctcaacatccctttggagagcaggatgcagtgagagatggaaacaacgccaactcaacagtggaa

SEQ ID NO: 599984 - DNA, 519 bp, Homo sapiens
gctcaacatacacaaatctataaatgtgatacatcaaattaacagaataaaggacaaaatccacatgatcatttcaacatatgcaggaaaacatttgtcaaaattcaacatcatttcatgataaaaactctcaataaatgtatagaagaaatgtatctcaacacaataaagttcagatataactaatctacagctaacattatactcaacagtaaaaagttgaaagtttttcctctaaaatmaggaaaaagacaaggatgcccaatcttgccacttctattcaacatagtactgtaagtcctagacttgcaattaggcaagagaaagaaataaaaggcatcaaaattgggaaggaagaggttaacttatccctgcttgcatttgacatcatcttatatctagaaaatcctgaagatgccaccaaaaaattgtcagaactaataaatgatttcagtagagtttcaggataccaaatcaatatacaaacaaaaagtagtgtctctacgttaacaataaact

SEQ ID NO: 599985 - DNA, 389 bp, Homo sapiens
gttacccagacaaggaaactaaggcagagtatggttggggtgataatccaagatcattaagttaataaatgggatttgaaccctgacactcaagttttgaatcttggaatcttaccaaccatgtggggattgcataccagtgtgatgtattcacacagctatgggatgcattgtaagagatacattttgcggattgcagtgagacttattaaagaaattcagaagmtttaccatcttacttggggaatgattttatcttcaggattgtcttttctattagattttgaattttaaggaaattaaggaattacaaaatccttcaactatgaagcctctatagaaaatagtcccataggagtgtttaagcatgatcactgttatcatatata

SEQ ID NO: 599986 - DNA, 588 bp, Homo sapiens
tctaacaaagatggcccttagtttccagctactacttcagttctattacgttattatttctggttataaagaagcacacttgaaaatatagctaacaaagtaaagttcatatgtaattccaccatctggagatagccaacttagctcttttgtgaaacattttcagtcattttttgaatgtatatatatgtaattatgtgtgtctacacaaatttggaccatagtgtatatccagttcattgtactattttttactcaattttgtacacagaacattgccccatgtcattaaaaattacttgaaactgtttatgacagctgtgtaatatccccttgtagctccttcacttcttgaggtggaccagggtgtggggctaggagatgatgggtcacagaaaaaatratcatgggcttttgtaccgcgataatacactgaagtaatctgatgtttatcgtttatttgaactaaatgatttctttcagcagacataagacttataatgaaaactgaagaaatgggggattatactttgagtggggtgaaatgtagggtgtgagacacaccaaagggaaagtctgtttcaaaaa

SEQ ID NO: 599987 - DNA, 599 bp, Homo sapiens
ttattctagccccaaaaaagaattcatatttatgcttggacctgattttttagttgctagcagtttcagagttgttttaaactatagaatatgtggttgtaatcatgctatatgcatacttttacatgctccaatttaattttaacatgacaacacaagtattaccctatggtattaaaaaaaaatcttcccaagcaccttttttgatgakccacagtttacttaatctttcttttttctaaaaaaaactttaaaagaaacaaacattttgcaaaggaatccaaatagaattaacaaagcattgcatagtaaggaaggttctagggccacttactaaactcattgagatgatttgtaatccaaatatcgattattaaatgagcatctactacattcgattgctgatattaaaaggacaccatgaaggacccaacaaaaaaggtgatgctgacaaaagaagtgatgctggagggatatgatcgagatgattgaaaggcacatgcatatgaacaacacgaggcagtgcactgcaatgggtaccaaatgccatgactgactaaggagatgagaaaggggaaagcatcccagccctccagaaa

SEQ ID NO: 599988 - DNA, 599 bp, Homo sapiens
ttattctagccccaaaaaagaattcatatttatgcttggacctgattttttagttgctagcagtttcagagttgttttaaactatagaatatgtggttgtaatcatgctatatgcatacttttacatgctccaatttaattttaacatgacaacacaagtattaccctatggtattaaaaaaaaatcttcccaagcaccttttttgatgatccacagtttacttaatctttcttttttctaaaaaaaactttaaaagaaacaaacattttgcaaaggaatccaaatagaattaacaaagcattgcatagtaaggaaggttctagggcmacttactaaactcattgagatgatttgtaatccaaatatcgattattaaatgagcatctactacattcgattgctgatattaaaaggacaccatgaaggacccaacaaaaaaggtgatgctgacaaaagaagtgatgctggagggatatgatcgagatgattgaaaggcacatgcatatgaacaacacgaggcagtgcactgcaatgggtaccaaatgccatgactgactaaggagatgagaaaggggaaagcatcccagccctccagaaa

SEQ ID NO: 599989 - DNA, 557 bp, Homo sapiens
cctctcctctgcccttggctcccctgggtacccacaggctctggggctccattattcctgctccagaaagtacattagcttcatggagaaaccacttggtccctctcagtggctccctgtgggttgctggtcatttgggacagacattagtggcaagattttgccagtccatctaggctgttcaatgaatgctaactatcatcagaagactttattagagagttcctggtttttgtttcattgtaagtctttctacatgaaaattataaaaagaaaacagatttaagagatttaytgtaaaaaaatattaaaaaatgaatgtaaatagaacccacaatcacacctttaattcataaatactacatcatagtatatatcttattatgaggactttaaaaaaacatatggtcttggaactaagagaaaacctggaatggtaccatattgctttaaatgaaaaatgctggccaggcacagtggctcatgattgtcctcccaataatttgcagcaatttgggaggctgaggtggaggatctcttgaacccaggagttcaag

SEQ ID NO: 599990 - DNA, 565 bp, Homo sapiens
ttctccaagatccgtattttgaaagcttccacccactacttttttttgccatacccacaatctggttcattagttcctcgattgcctctgtcacaaatcctgtgaagtcatgcacaacatctggacacaattttctctggcaggaatttattgtttggggcttgatcattttcacagctttctctataagacaatggcatcttcaatgatgtacaatccttctagacttgcatgatgttctctctgtcagggttctcttccttgcattgacactcctttccatagagtaccatataatgagccataaaggtccttatgacccctgatcwagaggctgaattaggacgttatgtttgggggcaatcagaccactttgactcctttggggatgaactcatgggatttggggaggccaagagcattatccaatatcaaaagaactttaaaaggcagcccttactggcaaggtacttcctgacttcagggacaaagcattgatgcaatcgattcagaaaaaggtttctcattgtccaggccttcttgctgtgcaaccaaaagaccagca

SEQ ID NO: 599991 - DNA, 500 bp, Homo sapiens
tctgctggtgttcactgcttaggtagtggaagactagargacaatgtgtatgcatgttttggtgctgagagttttccatgaacagatggcaaagcgataaactaaaaacatatgcactgcattgtaaacatttcctcctgagtgatttggcagactgacaattatcagacaagaaaagtgaggttgttcagagccataggaaaaatttaatccttgaaaacaaggaactaggcaggaagttatttgcatatttaactctcaaaacgaagaagtgagttcctccaactaagatgttattttttaactcaactgtgggagaccgatgatttgtatcagtttggggtttgatatcttcctttaattactccagagtcttctgcacaggtttctttaagaagtttgttaaataatttatttttaagttttatctcgtctcagaaaatacagagtgctttaataggggctgctttgggggactcccaaagtaggcctttcctgaa

SEQ ID NO: 599992 - DNA, 574 bp, Homo sapiens
acactgaggcaaaactctccatcagcaaaaagattacaacttgctgaaagactcagatgatcattagcattttttagcaatacagtattttaaaattaaggtgtggacattggtttgtgtagacataatgccattgcacacttaataggctaaagtatagtgtaaatgattttatatgcactaggaaaccaaaaaattcatgtgacttgytttattgccacatttgctttattgcaatgatctgaaatcaaacctgcagtgtcttcagggtatgcctgtagtttagagccctagatttattcattctacataactacaactttgtaatctttcacccaccttttcctatctgttcttttcttccctgccacctctagtaagcactgttctactccatttttgtgtatttgacttaaaaaaaaatccacatataaaagagatcgtgcagtatttttctttctgtgtctggcttatttttattaacttaacctgtcctccaatttcatctatgttattacaaatagcaggatctcctttttaaaacctgaataatatttgttttaaatatttattt

SEQ ID NO: 599993 - DNA, 574 bp, Homo sapiens
acactgaggcaaaactctccatcagcaaaaagattacaacttgctgaaagactcagatgatcattagcattttttagcaatacagtattttaaaattaaggtgtggacattggtttgtgtagacataatgccattgcacacttaataggctaaagtatagtgtaaatgattttatatgcactaggaaaccaaaaaattcatgtgacttgttttattgccacatttgctttattgcaatgatctgaaatcaaacctgcagtgtcttcarggtatgcctgtagtttagagccctagatttattcattctacataactacaactttgtaatctttcacccaccttttcctatctgttcttttcttccctgccacctctagtaagcactgttctactccatttttgtgtatttgacttaaaaaaaaatccacatataaaagagatcgtgcagtatttttctttctgtgtctggcttatttttattaacttaacctgtcctccaatttcatctatgttattacaaatagcaggatctcctttttaaaacctgaataatatttgttttaaatatttattt

SEQ ID NO: 599994 - DNA, 444 bp, Homo sapiens
ggaattcatgtgaaataaaagcattttcaaaataccagagactaagagcatttacactcacagaccctccctgaaagaaatactaaaggatacacttcagcaaaaataaaattgaaaacagaaagaaggataagagaataagaagcaatagtgaccaaaacatttataagcatgtgggtaaatgtaaataaacattaaattacttattataataattggctattttgagaagggtataaaaaacaaaactgaacataacagacaaaaatcacatgaaatattagtctggaggctgaagaataaagcttaaaactttctaagactcccttaagtcattccaaaagaaaacagagatgctgattaattttaaatattgtaaatttaagagtaaatatacattataaggaaaacmtgtataaaaataaaaatagaatatttaacttt

SEQ ID NO: 599995 - DNA, 428 bp, Homo sapiens
gatactagtgtttttcttattaaaaaacttatgaaattacctttcaatcatctatttaagaaattccagtacattctccaaatttataaaattatatataatatttcttatttacaagggctataggaattgattataaaggatcagtgaatcttaaaactagtttagtggtaaagttattcagctttcatcaatggtaacaraaatattataccttatctttagctcatgaacatggaagactcatgagacacagttctaatttatatatacacatttttaaaaagtcatgttgcttatgatgtgcaagtagaatattaactaatataatttatttgtgcttttcttatgtttttttttcttttctgttacccatagctattttttaaaaataaaatatgatttaggggtcacaggagttgttctaa

SEQ ID NO: 599996 - DNA, 530 bp, Homo sapiens
tcttcaatcctcaatttcctcctttgtgaaatagagacaaactgtttttctgtgcttayagttgtctgacattgtttagccatggacaaacttctgttcatgtttgaaggggggaaaaactaaaataaaacagcaagaatagcaaaaataccctagtcttttctttacagtaatatggggaaactaaagtatcttaaagtcgtgaaagtactttaaattcctaggatgagaggaagcatttaataaaaaataaagataggcgaaactatttttaaagtgcataattgcagtaaatgcagattcagacatactaattatcaaagtcaagaatattaagttattgagtggaatttaatggcactatttgaaagtcacgacatattgtttgatgtgctgggcctaatttatatgtaaatataggctctgtagtattgcctagacatttaagtactgtcttaatggtttattctgggaaactgatgtagatctctgcttgaacattgtacttaaactctgtaaaactattttag

SEQ ID NO: 599997 - DNA, 476 bp, Homo sapiens
tcacgaaaaaaacaaaaggtaacaaaagttggcgaggatgtggagaaaaggaagccatcatacactgatggcaggaatgttaattmggatagccattgtaaaatacggtatggaggttcctcaaaaacctaaaaataggattaccatatgatccagcaatctcgcttttggatatttacccaaaaggtttgaaatcagtatgtcaaagagctatctgcccttctgtatgtattgcaatgctattcactatagccaagttatggtataaacctaagtgtccatgaactgatgaatgggtaaagaaaacgtggtatatatacacaatggaatactagtcagcctttaaaaagaaaaaaatgttatcatttatgacaacatggatggaattggagaacattatgttaagtcaaataagccaggcacagaaggacaaatactataacatctcacttacatgtggaatctaaaacaatcaa

SEQ ID NO: 599998 - DNA, 505 bp, Homo sapiens
cactactacactcagcctggccacagagcaagactccatctcaaataaaagcaaaaaataaataaaaaagaatcactggggtgaagaatgaacgtagtggtaactggcaactgtggtaaagagcaaaggatggatgtaacccaatatgtgtttgtgtctccatatattcaaaagatgctcaataatggttcaaaagtagaatcccagaaataarcttttatagccaaccaggaggtttacaaatcatctagactgaatattttcaatcatttttcagcccatgaattctttgttaaagaaatggctctgaaagttgcttttttaccccaaccttaaatttatgtacatggagcaaaaccttatccacctctctgtcccatgtcaattgtgcgtgtgtgtatgtctctgtgtgtgtgtgtatatgcatgtaaaaggattcagtgagatgcctgttattttaggattacatatttcagggatcatgtacacatctgctttcataatt

SEQ ID NO: 599999 - DNA, 505 bp, Homo sapiens
cactactacactcagcctggccacagagcaagactccatctcaaataaaagcaaaaaataaataaaaaagaatcactggggtgaagaatgaacgtagtggtaactggcaactgtggtaaagagcaaaggatggatgtaacccaatatgtgtttgtgtctccatatattcaaaagatgctcaataatggttcaaaagtagaatcccagaaataagcttttatagccaaccaggaggtttacaaatcatctagactgaatattttcaatcatttttcagcccrtgaattctttgttaaagaaatggctctgaaagttgcttttttaccccaaccttaaatttatgtacatggagcaaaaccttatccacctctctgtcccatgtcaattgtgcgtgtgtgtatgtctctgtgtgtgtgtgtatatgcatgtaaaaggattcagtgagatgcctgttattttaggattacatatttcagggatcatgtacacatctgctttcataatt

SEQ ID NO: 600000 - DNA, 580 bp, Homo sapiens
tcttaataaggaattaatgccccccaacttgccttacaagtcatatattaaaaacaatgttggcctggcacagtggctcatgccygtaatctcaacactttgggaagccaagggaggaggatcacttgagcccaggagttggagaccagcctggataacaaagggagacccagtttctacaaaatatttaaaaattagccaggcatgatggtgcatgcctgtggtcctagctattcaggaaactgaggtgggaggatcacttgagcctggaagttcaagacagcagtgagctatgctcacaccactgcactccatcctgggcaacagagctggactctgtctcaaaaaacataacactaaaacatcaaaattaaaaaaaaaaaaacaatgaaagtagcctccacttacaaactaattactctttcttgaaaatattacactttttttcttctatatctctactcctagctctcaacacctttcttaagcccacatcataacctgtcttgcataactttgtgagtgcccaacgtttcactgtacaagattgtagagctgcatgcttcttaagaataaatcc

SEQ ID NO: 600001 - DNA, 578 bp, Homo sapiens
caagacaataaacactaatgagtgtggatgtatcatattgaaaacaggtggatgaagtaaaatgcaagatattgagacccccaggcttattttctcactcagctcccataacactgacaggcttctaccctctggcagtaggttggaagagtcttctctaggaatccaaccagcccargagaaaaagaaactaaagttatgagcatcagaaatttatccaaaagaatattctagccaaaccaccctcaagtgtatcacatatacacacacaaggttttcaataggctttctatgtcccattttagcatatgaacaggcaattaaggatataagatatacgaggaaaacttctattatgaaagacaaataccaaataaacaaaaagaaaaaagcaccttggaggaaacagagtgtgtagggggaaaaaagcttcaaaaaatctatcagtaataacttcagagagataaaggagaatattgcacttatggggaaaaaagaaaaggaagaagaaaaaccagatggagaatgggagagaaaacctaagaaaactggagaatcagtctaggaagttcaatata

SEQ ID NO: 600002 - DNA, 589 bp, Homo sapiens
tgtataaaaaaagaaaatagccaaaaaatacctgctctccaggccacaaggaagctaaagtgcttacattcactgactcaaactttcctccaacaggcttctcactgctacaccttcatcctctccttctgccttctttctagtttctgtcttgggttcatctggtttggttttagcatatctgtgttcttacctaaaccactccaactcttctttgtagaaaaatgtagcgctaaattgataaactaaatacttcacagggacctttaatgactgacatgaatctaaatttgcctactagagaactctctatgcatagagaaatgttccaaatccttatttctggccaaagacctgtgtattatttttactttcccagataattacctttawcattattggatttttcacatacagttagatgattttcacactgataatttgggaattacattgcccctaagttaacccttttctacctaaaattaaattttgctgctaccccaaaacatgaggaaattgaatgcccccaagggctttgtagttcaagtcataacacagtggtttaacacctatagaacccctctct

SEQ ID NO: 600003 - DNA, 453 bp, Homo sapiens
gaattctcagaaacttctctgtgaggtgtgcattcaactcacagagtagaacctttcttttgatagaggagttttgaaacactgttttagtagaatctgcaagtggatatttggagcgctttgaggcctatggaggaaaaggaaatatattcccacaaaaactagacagaagcattctcaaaaactactttgtgatgtgtgcattcaactcacagggttgaaaatttcttttgattgagcagctttgaaacaytatttttgtagaatctgcaagtggatgtttggaaaggtttgaggcctacggtggaaaaggaaacatcttcacataaaaactagacagaagcattctcagaaatttctttgtgatgtgtgcattcaaccacagagttgaacatttcttttgatagagcagttttgaaagacaccttttgtagaatctgcttgtggatattt

SEQ ID NO: 600004 - DNA, 609 bp, Homo sapiens
gagtctaccgcttggactgggaaactatcagaaggatgcagcccccttgagttgctctttgatccctaaagcagattatctgtcaacagcttttatgcaaagagcacccaaggaggattatagacgtgaatcactgaatgagacccagtgtctgctcccagcaccatctgttgatatgcagatcaccggtgatcattgatcaggacaaaccagctgcggctgctgtgaagttaactcctgagacttgagaggcygctctcacttctctatgggcgcacctggcccgaggccgtgaacttgggcaggccagcatcatacctacgtcacatattctagcaatgacaaacaaaactaaccaagctagcaaaaatgagcttgcttccacttgtttctttccccccaaaaaagcgggcgggggatggttgactgatgggttcgtacttgattgagctggtaacgtccctgattagttcacactccttaagagctgggttccatcattctctatcaattcccggcattaaaagttgatccactaatattctggtaactagtctcttctgtttgaaatcatcactcattggccattctaagttctactccagttga

SEQ ID NO: 600005 - DNA, 609 bp, Homo sapiens
gagtctaccgcttggactgggaaactatcagaaggatgcagcccccttgagttgctctttgatccctaaagcagattatctgtcaacagcttttatgcaaagagcacccaaggaggattatagacgtgaatcactgaatgagacccagtgtctgctcccagcaccatctgttgatatgcagatcaccggtgatcattgatcaggacaaaccagctgcggctgctgtgaagttaactcctgagacttgagaggctgctctcacttctctatgggcgcacctggcccgaggccgtgaacttgggcaggccagcatcatacctacgtcacatattctagcaatgacaaacaaaactaaccaagctagcaaaaatgagcttgcttccacttgtttctttccccccaaaaaagcgggcgggggatggttgactgatgggttcgtacttgattgagctggtaamgtccctgattagttcacactccttaagagctgggttccatcattctctatcaattcccggcattaaaagttgatccactaatattctggtaactagtctcttctgtttgaaatcatcactcattggccattctaagttctactccagttga

SEQ ID NO: 600006 - DNA, 609 bp, Homo sapiens
gagtctaccgcttggactgggaaactatcagaaggatgcagcccccttgagttgctctttgatccctaaagcagattatctgtcaacagcttttatgcaaagagcacccaaggaggattatagacgtgaatcactgaatgagacccagtgtctgctcccagcaccatctgttgatatgcagatcaccggtgatcattgatcaggacaaaccagctgcggctgctgtgaagttaactcctgagacttgagaggctgctctcacttctctatgggcgcacctggcccgaggccgtgaacttgggcaggccagcatcatacctacgtcacatattctagcaatgacaaacaaaactaaccaagctagcaaaaatgagcttgcttccacttgtttctttccccccaaaaaagcgggcgggggatggttgactgatgggttcgtacttgattgagctggtaacgtccctgattagttcacactccttaagagctgggttccatcattctctrtcaattcccggcattaaaagttgatccactaatattctggtaactagtctcttctgtttgaaatcatcactcattggccattctaagttctactccagttga

SEQ ID NO: 600007 - DNA, 566 bp, Homo sapiens
gggggttttccaccacacccagggttccctctttcggcttggagatccctccatctgtctctgtacagggggagcctcttccttctttcttgcctattaaattctccactccttaaaaccactccacatgtgtccgcgtcgttttattcaaactggcgcgagactaaggaccctggtgttcctccagtcatgggagccatatcgttacgtctaccacggggcagctccagtttgtcaggatacctttgacatttatggtctcaacagctgaagtccatgtcttcagctatctgggagtgacaatgaaggtgcatgatttgtcattgctcgccgttttacttctaaacgcttgtgccaaagccagtaaggtactagcgagtaagcctcccagttgtgacgtctcaacaccttgccaacctcccagttgtaacgtctcaacacctcgttgctgatctcatttagtgatactcasattagttctcacagtaaccctttgaaattgacataatccttcccagattcataatgaggggacttatgaaattatatgctacagtgatacctcc

SEQ ID NO: 600008 - DNA, 531 bp, Homo sapiens
catatggagacctgtggcttcctcgggccagcctcagtttgaaagcaagggtgagatctttgtcagacactcacgggacctgtgctgcccataaaggaaggggcccttctctcaggacagcacaagggaaaacacccacagccggaaaagaaggtgtgtctcagcatgacggaggctgtgtgcaaattattccttgtgccaatatcaggagtgtggatctgacaaacaaaaggccatgtcattggcttagtgtctctgtggagtctgtaatggtccttttacttacttgagtcctttctaagatggattttgttcattttccactaagattgcagaagctgcacgtggcrtggcagtttatgaattgggtcccctggcaaggctctgaaagacagctggagtgggggtgggctgtgtgtgtgaagccgctgcacagagctggagtcggctgtccacacaatcacgtctatgtgagagccggcagcctgcaaactgcttccctgcaaggggagacacatgccaggggagggc

SEQ ID NO: 600009 - DNA, 667 bp, Homo sapiens
tctgctttccagctgattatcttactacagacataaacagaaattcaacgtgatggtcagcgttgagcagagatgccacggtgttggtgggtactgcttttccgcctgaacgcgctcgcactccagtctgtcaaagggcagcaagcctccagtagttacagaaatggtaacattgccaagatctgcttcatcctttggctgttgaaygggtggcttatggcccctgagctcacgacaaggaaagagagaaagaaaagtgaaaaagagggcccccaccacctacctacctgctgctgttccagctcatcaaaaacaaaagtctaaaacagtggctggaaagtaccttgcatgatcccttcacagaaacaatagagaggagcagctgcacagggaccacgggacaccaggcagacattctcccattgcttctcctgcctttagcatccttttatcttgcttctcccataatccaagcatcagatcccatttccctctgaattctcctacttctcccagcactttataaaaccgagtcctgtccccagagccccaggtcagtgctcccggcacacccagcaggaaacagcagggtgggggccaggcagtgggtggaaggggcacaggagtgggagaaggcaggcctggggctgaatctcggtgcaaatgc

SEQ ID NO: 600010 - DNA, 603 bp, Homo sapiens
cctccaacaccacaattgcaagtggttttcaggtatgatgtaaggaatgtctacagctcttcctcctccaaatgactactctgggggctttgaaatatgtgtttgcctttctcagagagagctcctggaatcgttcccatagctagaactgctgtatgaagggggtgggatatgacaccttcggtgttcattccacagagtcttactcaagcatgttcgacgtagtgaccatcacaagaagtttcttagcaaggcccccagaaacttctgcaccatgttatatgtttcatctcagaaatggctggccttcacatctcrcgagaaggtagaggatatgtccatcttacctataactcatggtcacagagactttctctttgacttctgagtcctctgctcaactagactcaaacttgggcttccttcctttttcttgtagagtccaggttgagcaagaatcctgctaagtcagtttagtgataatcctccacgcttggtatctgaccaccctcaatatctcaccaccctgcctgccttcagcaagagttctgttgagtagatctagccagaattcattggccagaatcccttgatgtttcttct

SEQ ID NO: 600011 - DNA, 500 bp, Homo sapiens
gacaggtcttgcctgcagggacccacctgcgaaatgggagcccttccgaggctgtacactaggggaggtctcatagatggcctttagtcctgcttctcagaggggcagtggcagctcccagaggtggtggcactgagagaaggatagtgacaaaaacctcaagcttgggtgtcctgagccctggctggtcaccgtttgcaagtctgcagtgcagactgagaaaaccaaaccaaagcacaaaacattgctttaggtccactagattgaggaacatgtatttcaaaactctttgaatgtgaatgtatttccctaaatcacaartggggatttaatcaatattgaacaaaatgtctgcttgttctactagagttgagcaagtctcattagatctgatacaaatttttcacttaatattgcaaataggtaagtaatccacattgttcaaaaacataggcaacaagatgtctgtgtcccatcttgtctctcatctgtccagttgc

SEQ ID NO: 600012 - DNA, 636 bp, Homo sapiens
ttctccaaataatcccatcaaaaaatgggcaaaagtcatgagtagacaattctcaaaagatgatatacaaacagccaacaaacatatgaaaaaatgctcaatgtcactattagggaaatacaaatcaaaaccacaatgcaataccaccttactcctgcaagaatggttataattaaaaagtaaaaaaatgatatatgttkgttggatgtggtgaaaagagaacatttttacactgctggtgagaatgtaaaccagtacaaccactattgaaaacagtatggagattccttaaagaactaaaagtacaactaccatttgatccagtaataccactgctatgtatctacccaaaggaaaagaagtcattatataaaaaagacacttgcacatgcatgtttataacagcacaattcataattgcaaaaatatggaaccaacctaagtgcccatcagtcaatgagtggataaagaaaatgtggtatatatacaccatggaatactattcaaccataaaaaggaatgaaataatgtctttagcagcaacttggatgcaactggaggtcataattctaagtgaaataactcaggaatggaaaaccaaatatcgcatgttctcacttataagtgggagctaag

SEQ ID NO: 600013 - DNA, 636 bp, Homo sapiens
ttctccaaataatcccatcaaaaaatgggcaaaagtcatgagtagacaattctcaaaagatgatatacaaacagccaacaaacatatgaaaaaatgctcaatgtcactattagggaaatacaaatcaaaaccacaatgcaataccaccttactcctgcaagaatggttataattaaaaagtaaaaaaatgatatatgtttgttggatgtggtgaaaagagaacatttttacactgctggtgagaatgtaaaccagtacaaccactattgaaaacagtatggagattccttaaagaactaaaagtacaactaccatttgatccrgtaataccactgctatgtatctacccaaaggaaaagaagtcattatataaaaaagacacttgcacatgcatgtttataacagcacaattcataattgcaaaaatatggaaccaacctaagtgcccatcagtcaatgagtggataaagaaaatgtggtatatatacaccatggaatactattcaaccataaaaaggaatgaaataatgtctttagcagcaacttggatgcaactggaggtcataattctaagtgaaataactcaggaatggaaaaccaaatatcgcatgttctcacttataagtgggagctaag

SEQ ID NO: 600014 - DNA, 518 bp, Homo sapiens
aaaagtacaactaccatttgatccagtaataccactgctatgtatctacccaaaggaaaagaagtcattatataaaaaagacacttgcacatgcatgtttataacagcacaattcataattgcaaaaatatggaaccaacctaagtgcccatcagtcaatgagtggataaagaaaatgtggtatatatacaccatggaatactattcaaccataaaaaggaatgaaataatgtctttagcagcaacttggatgcaactggaggtcataattctaagtgaaataactcaggaatggaaaaccaaatatcrcatgttctcacttataagtgggagctaagctatgagaatgcaaaggcataagaatgatgtaatggactttggggactcatggcaaaagggtgggatgggggtgagggataaaagactacacattgggtacaatgtacactgcttgatgacaggtgcaccaggatctcagaaatcaccactaaagaacttatccacacaaccaaaaacca

SEQ ID NO: 600015 - DNA, 599 bp, Homo sapiens
ggggcaataagttattgcaacttttgaagcctattttttagatgtaagtaagctgtatttcagacaggttattgatgatacaatmggagataatgcaatttattcagctaagctttggaagaactatgacataaaacatgtagccagaaacattcaagcatcacgacagataggaagagcaagtaatatgcatggaggatggcagaaactcttactgtactggaaaataactttgcaggatttgaatcaaatgtaagtggaattatggaagagatcattgaccatgtgaatattgacactgacatcatttacaaagctctaggtatgcagcccaaggaccttagtgatggtgaatttattgacataaatgaagaaaaaagttgtgaaaaaaaggatgcagttgtcccagaggaagtgacaccagcaaaaacttcacattaaagaacccctggagctattttatgacattgaaagcacaaaggataagatgtcgaaagccaatctaaacttagaaagaagataacaattccctaaggcatagaaaagatgttcactcatattttgttatatctctagaagaagaagccaagcactattca

SEQ ID NO: 600016 - DNA, 596 bp, Homo sapiens
ttcttgacaaaaaaggtttaacgtgaatctattcatgaagaaaaacaatcagacaaatccaaaatgtggcatattgtacaagacaactggctgggatttttaggattgccaacatcatgaaggaccaaaatacaaaacaaaaaggcaaaacaatttctcttaatgcagagcaaaggaacatggcaaccaaacgtactgcttgaaacttgattagattttagatttcaaataatgttctaagggattcttttttggccattgagaaaacctgaaaatatggmaaatagtctaattagttgatttgttgaatcaatgttaaatttgttgggtagcattgtggttgtgtagagaatatcttacccttacccatgctgaaggatttagcggtgaagtgtcaggtgttagcaatttaccctcagctggtccagcagaaacaaaagagaaacctatatttctcagtgattaaataaagcaaatgtgccaaaccttaacaatttgagaaacttgataaagcgtacatagatattcataatactatttcaatgtttttgtactttgaaattttctattataaaaacttgaggaatagccataca

SEQ ID NO: 600017 - DNA, 335 bp, Homo sapiens
ggattaggctggatttctgcaggcatatcaaattgcaggttataatacaatgtttagataccgtaccttgctgctttcttaatgaaagcatctggcttacctctgcataaacctgtctgctctcgagtgccccraaccaccgtgtttacagaagactcttgactgctttacgtatttacaactctcagcttcagttctcacaatcaaattccagtcagccagcatctcttagctacatctcataaaaccacatagggtcagagctgggagggattttggaagctcagccacccaaccccttcattgcagggggaatgaaatggagacccccagag

SEQ ID NO: 600018 - DNA, 335 bp, Homo sapiens
ggattaggctggatttctgcaggcatatcaaattgcaggttataatacaatgtttagataccgtaccttgctgctttcttaatgaaagcatctggcttacctctgcataaacctgtctgctctcgagtgccccgaaccaccgtgtttacagaagactcttgactgctttacgtatttacaactctcagcttcagttctcacaatcaaattccagtcagccagcatctcttagctacatctcataaaaccacatagggtcagagctgggagggattttggaagctcagccacccaaccccttcattgcagggrgaatgaaatggagacccccagag

SEQ ID NO: 600019 - DNA, 594 bp, Homo sapiens
tagctgggactacagtagcacacccaccatgtccagctcatttcccaaaaattcctttttagtagagacaaggtctcactatgttgcccaggctggtctcgaactcctggcctcgagcaatcctcccaattcggcctcccaaagtgctgggactatagggtgagccaccatgcccagcctgcatataacttttgactcccccagaacttacctaccaataacctactgttgactggaagccttatggataacataaatagttgattaacacatattttatatcttatatgtaataatatcggattcttacaataaagtaagttagagaaaagaaaatgtaatcgagaaaattgtaaggaagagaaaatatatttactatccattaggtagaagtggatcattataaaggtcttcttcctccttgtcttcacattgagtaggctgaggaggagaaagaggagaggtttgttttgctgtttcagagrtggcagaggtagaagaagaaagtccacatgtaagtagacttgcacagttcaaacctgtgttgttcagcggtaatctgtatactcttgtggtataaatgaacacattaaa

SEQ ID NO: 600020 - DNA, 493 bp, Homo sapiens
atgtaataatatcggattcttacaataaagtaagttagagaaaagaaaatgtaatcgagaaaattgtaaggaagagaaaatatatttactatccattaggtagaagtggatcattataaaggtcttcttcctccttgtcttcacattgagtaggctgaggaggagaaagaggagaggtttgttttgctgtttcagaggtggcagaggtagaagaagaaagtccacatgtaagtagacttgcacagttcaaacctgtgttgttcagcggtaatctgtatactcttgtggtataaatgaacacattaaaggctgagaattcttataattaaaaaaaaatcctaaccaaaaaaaaaaagcaaaaacaaacaaacaaaaaacaccartaaaaggagtggggtgtggtaggtgccttaggattgacattactaaaaggttcgtcaaaatgttgccttccaaaattaaagaacagtctgtactataaaatacagaagtt

SEQ ID NO: 600021 - DNA, 523 bp, Homo sapiens
taaaaacactgattaaacaaattgattattaaaaaaaaaatcccatgctcgtagttcagaagaattaatatagttaaaatggccatattgcccaaagaactctacagattcaatgcaaactctatcaaaatatgaaggtcgttcttcacaaaattagaaaaaaattcctaaaattactacagaaccaaaagaaatctcaaatagtcaaagcaatcctgagcaaaaagaacaaagctggtggcatcacatyacctggcttcaaaaatatgacaaggctatagtaaccaaaacaacatgatattgctataaaatagacacatagatcaatggaacagaacagagacccagtaataaagccaactgatattcacagccaactgatcttcaacaaagctgagaagaatttacatcagagaaaggacactctctttaaaaaatggtgctgggaaatttgttttgtttttttatttttatttatttgttttgagatggagtctcactccgtcactcaggctggagcaca

SEQ ID NO: 600022 - DNA, 523 bp, Homo sapiens
taaaaacactgattaaacaaattgattattaaaaaaaaaatcccatgctcgtagttcagaagaattaatatagttaaaatggccatattgcccaaagaactctacagattcaatgcaaactctatcaaaatatgaaggtcgttcttcacaaaattagaaaaaaattcctaaaattactacagaaccaaaagaaatctcaaatagtcaaagcaatcctgagcaaaaagaacaaagctggtggcatcacattacctggcttcaaaaatatgacaaggcwatagtaaccaaaacaacatgatattgctataaaatagacacatagatcaatggaacagaacagagacccagtaataaagccaactgatattcacagccaactgatcttcaacaaagctgagaagaatttacatcagagaaaggacactctctttaaaaaatggtgctgggaaatttgttttgtttttttatttttatttatttgttttgagatggagtctcactccgtcactcaggctggagcaca

SEQ ID NO: 600023 - DNA, 583 bp, Homo sapiens
agtgggttaaaggatacaaacacacagtaaaatagaagaaataaattcaatgtgtactagcaaagaaaggtgtctagggttaacaaaagtgtactgtccttgggctgatgaatgccctaaatactctgacttgtccactatacattatatacatgtaacaaaatttctcatgtaccccataaatttggacaaatcaaagaaatttttaagagtactgcctaatatttataatccaaaaaaggcaaaattggaggaggaggargctgaaggcagaagaagtttatcccaatcaaaatattatctcttgctcatttctcagacctgactgatacccattgactggagacattactagattagtaagaggaaacaccttgcccatcatggcaaatatctcatgatagataccatgtgattcccagagggtcctacagccatcttctcatgtgactgtatatcagggaaagggaataaccagaattttccaggacaagtgaatgtaggctctaagttgacattgacacccagagacccacagcatgggaatggtccatgatatagtttggatttgtgccactcccca

SEQ ID NO: 600024 - DNA, 453 bp, Homo sapiens
gaccgaggctctgaacctggtgatttggaggatagtaacgcaatgaccaaggaaccaaggaggattcttcatgcatgttgagaaacagaatttttgacaagttcagtttaaggtgtgggtgagacactcgattgaaaagatttaactaccagccagaaatgtgagtatggttagaaagagagcccaggatcaggggatgggttttagactcctctggacagaaaaaaaggagaaattccaaaagaggaagacattcttagaagacagcacaaagggagtgattagaatgaggaagaaaatcaggagagcttacggctycaaagccaagggggacagcatttgctcaagggagtagtcggctagaagctgcagacaggtgagagagggtgagagactgagagagaaaactagatgttacaattaggaagacattgaagagagaagattcaacag

SEQ ID NO: 600025 - DNA, 605 bp, Homo sapiens
cctgtggacttattttatctgtcgtcctctctctccctgtttccaccactcatctcatgacatccacttgagtatctctttcttaggaactgttagagctcacttgtgaaagttcgctgtgaagtccacaayaaacaatccaatctgtttacatggggcttgagagttacagagcaacctcacatttcattttgtcccaacttcagcaaccgtgcacagtagcaatggctatagttaccatagctatctcttagttacaagaacaggaatgaaggccaagggaaaggggaagggcttgcccacggtcactcacacaggagtgggcgtaagcctgagtcttctgaattcaagtccatgatgcagcaatgctctttacaatcttgctgtgttgtcaataatttgtgaacttagtgttagccatagcgggatgagcagctgactgtgaatcagaggagaacactgtgtatctctggtcttggtcttgtcaactataaaatgagagtcagaaagggagtttaatggaagtgtggtgatacagttaacaattctgtgttatatacttaaatttgctaagacgatagatcataagtgctcttatcacacat

SEQ ID NO: 600026 - DNA, 374 bp, Homo sapiens
ctctctggacaggggaatagctttctggcttagacggttttggtatcagggaagcctttacgggaatatggctggatcattcattttgtgcaacaagggaaagagagatgaaggaaggatgaaagattagaggtagccacagtccgagtacctctgtgatcyggggtcttgccccgctccaaggagaatggcaagacacttcaggcacaaagcactgctgggaattttgagtctcagggttcaaaatgtggcttcttgggtaagcagcttgtgcccaggaatgggagctctaagaaaggaatatctttgctggagaggaccttactaaaaccaagagcgtcttgctgaggtttggtgtgagttttggacttgcc

SEQ ID NO: 600027 - DNA, 541 bp, Homo sapiens
tttgactttcctgtgagatgtgggacatattcttctacatccagaagggattatgactatggtaataacaatgccagtctcatagcgtcgtgacgaagattcgatacggtactgcatttaaagcactgaacacagcacttggcacagccaggcaggtctgtggtccataagtgataatgtwaaaaaggaaagagcaactgtatacaagaaagcaagctcttgtctacctgttcctggggccaaagactgcatagagttcgagggttttagagggattcgtctgcagtcctaaggtaatatgtgtagatcttcaataggaacacatgcttctcaaggcatataaagtgcagactgtctctttacctacaatattagacaattaatagagacttaaacagtagttgaaagtaacctcacaagtgttttcaaaaattagcctctggtttccagaaaattttaatttcttctacttcaaaaatatttgaaaatataattgacctccacaccgtaaaatgaaaacacagtttgcaaccatgatagt

SEQ ID NO: 600028 - DNA, 673 bp, Homo sapiens
agccaggcaggtctgtggtccataagtgataatgttaaaaaggaaagagcaactgtatacaagaaagcaagctcttgtctacctgttcctggggccaaagactgcatagagttcgagggttttagagggattcgtctgcagtcctaaggtartatgtgtagatcttcaataggaacacatgcttctcaaggcatataaagtgcagactgtctctttacctacaatattagacaattaatagagacttaaacagtagttgaaagtaacctcacaagtgttttcaaaaattagcctctggtttccagaaaattttaatttcttctacttcaaaaatatttgaaaatataattgacctccacaccgtaaaatgaaaacacagtttgcaaccatgatagtaactaagaagtaaccatgataggtagtaagggtgaagagagtattgttcagacatatgaacagtcatgtgtcacctaatgacagggatacgtcctgagaactctataattaggaatttcatcgttgtgctaacaccaagaggtatattaaaacaaaactatatggtacagcctactgcagacctataggctagatggtatagcctgttgctcctaggctacaaacctgtacagcatgttactgtactgaatattgtaagcaattatgacacagtaat

SEQ ID NO: 600029 - DNA, 673 bp, Homo sapiens
agccaggcaggtctgtggtccataagtgataatgttaaaaaggaaagagcaactgtatacaagaaagcaagctcttgtctacctgttcctggggccaaagactgcatagagttcgagggttttagagggattcgtctgcagtcctaaggtaatatgtgtagatcttcaataggaacacatgcttctcaaggcatataaagtgcagactgtctctttacctacaatattagacaattaatagagacttaaacagtagttgaaagtaacctcacaagtgttttcaaaaattagcctctggtttccagaaaattttaatttcttctacttcaaaaatatttgaaaatataattgacctccacaccgtaaaatgaaaacacagtttgcmaccatgatagtaactaagaagtaaccatgataggtagtaagggtgaagagagtattgttcagacatatgaacagtcatgtgtcacctaatgacagggatacgtcctgagaactctataattaggaatttcatcgttgtgctaacaccaagaggtatattaaaacaaaactatatggtacagcctactgcagacctataggctagatggtatagcctgttgctcctaggctacaaacctgtacagcatgttactgtactgaatattgtaagcaattatgacacagtaat

SEQ ID NO: 600030 - DNA, 673 bp, Homo sapiens
agccaggcaggtctgtggtccataagtgataatgttaaaaaggaaagagcaactgtatacaagaaagcaagctcttgtctacctgttcctggggccaaagactgcatagagttcgagggttttagagggattcgtctgcagtcctaaggtaatatgtgtagatcttcaataggaacacatgcttctcaaggcatataaagtgcagactgtctctttacctacaatattagacaattaatagagacttaaacagtagttgaaagtaacctcacaagtgttttcaaaaattagcctctggtttccagaaaattttaatttcttctacttcaaaaatatttgaaaatataattgacctccacaccgtaaaatgaaaacacagtttgcaaccatgatagtaactaagaagtaaccatgataggtagtaagggtgaagagagtattgttcagayatatgaacagtcatgtgtcacctaatgacagggatacgtcctgagaactctataattaggaatttcatcgttgtgctaacaccaagaggtatattaaaacaaaactatatggtacagcctactgcagacctataggctagatggtatagcctgttgctcctaggctacaaacctgtacagcatgttactgtactgaatattgtaagcaattatgacacagtaat

SEQ ID NO: 600031 - DNA, 565 bp, Homo sapiens
ttaatttcttctacttcaaaaatatttgaaaatataattgacctccacaccgtaaaatgaaaacacagtttgcaaccatgatagtaactaagaagtaaccatgataggtagtaagggtgaagagagtattgttcagacatatgaacagtcatgtgtcacctaatgacagggatacgtcctgagaactctataattaggaatttcatcgttgtgctaacaccaagaggtatattaaaacaaaactayatggtacagcctactgcagacctataggctagatggtatagcctgttgctcctaggctacaaacctgtacagcatgttactgtactgaatattgtaagcaattatgacacagtaatgttacaattaccattggtaatggtaattgctacaggcaattgtaacacaatggctttcagcttggccacatgacttgttttcaccaatggaatgttaccaaatacaaagtgaccaaaggcttaggacacacttatgggattcgccttctctcatcttcttgacaagtaccatcaagctgtcctgctggtcccatgagaatgat

SEQ ID NO: 600032 - DNA, 432 bp, Homo sapiens
  misc_feature 265: n = A,T,C or G
ttctaactctcaggtgagaacatttacaccwcaggaaatggcatatgctacaaacccaggctccccccctcatccctccaccccaagagctggttgttaaacatttatagcacaccactgattttgacagaaagccaaaggtgtccacaagaaataaaagagaggatggtgaggaagaggataggaagaaatcctggggaatgcgtctggacctatgcatagattgtggggaaatggaattttgcttgctgaatgcagtgtgganagtgttccaggcccaggctggtgagaatggctatttttagtttttagtactctagtgcaggaatttgccaacaattctttctgggccaaccttgccttgagagacagggcttgccttggggctgaggcaactggtttcccaggaagcataggtggagtgagggatgg

SEQ ID NO: 600033 - DNA, 394 bp, Homo sapiens
cttgagaaaaggtacagatcctaggtgggacagccagatttgccatttgaaacagggtccttgtattggacagaaaagttgagcctcaagtcctcaggccatctgcacagctatgtacaaggctagggcatgtccccttccttggctcctaccrcgtggtctggagttaagccaaagagggaagaggtattcctgcagacacagatgctgcagttaccggcagacttgttctgacctactggaggggaaggcctatgggttcagtcctgtctctaagcagtgtggttgataaagtcgaccagggattactgtgaggtgctttgtgggagtgttcagagttagctaggtatctcgctcagtcagcagtacacacgtatttatgtacggtttcata

SEQ ID NO: 600034 - DNA, 394 bp, Homo sapiens
cttgagaaaaggtacagatcctaggtgggacagccagatttgccatttgaaacagggtccttgtattggacagaaaagttgagcctcaagtcctcaggccatctgcacagctatgtacaaggctagggcatgtccccttccttggctcctaccgcgtggtctggagttaagccaaagagggaagaggtattcctgcagacacagatgctgcagttaccggcagacttgttctgacctactggaggggaaggcctatgggttcagtcctgtctctaagcagtgtggttgataaagtcgrccagggattactgtgaggtgctttgtgggagtgttcagagttagctaggtatctcgctcagtcagcagtacacacgtatttatgtacggtttcata

SEQ ID NO: 600035 - DNA, 600 bp, Homo sapiens
agtagttaacattttaaaaattatttattttctttttttttggagacaggctgtataagactctgttgctcaggctagagtgcaatggcatgatcatagctcactacagcctccaactcctgggctcaagcaatcctcccacctcagcatcccaagtagctgatactacaggtacatgccaccatgcctggttaatttttattttttatagagacagggtctcattatgctgtccaggctggtcttgaactctgggcctcaagtaatcctcctgtctcgacctctcaaagcgctgggagtagagagaggtgtgagtcacagtgtccagcctagttaacgcatttttggtactttccatatgtcaagtgttatrctgatattatataatttaattttcacaacagtcttataggtagtatagtattgttttccttttataggcgatgagacggaggcacagagaagttaagtaacttgctcaaggacaacagttagcagatgacagagacggagttcaaacccaggctgtgttcccggcactcctttagctactatactttactgcctgttgttttatgattcaaagacgtgaatccatga

SEQ ID NO: 600036 - DNA, 610 bp, Homo sapiens
tgatattctaattctatcattttacttatttattgggtagaattcttctcctaaagaagatttttcccttatcaactactgatcccatgatgtgtcattcctgcagaaaagccatgataaatccttgatacttttcctttatttgycagacttagaataatgagttgattctctagcatcctcaaaagacaacacatttttttttaagcatcattatcaactctggatttttcccttttactgtgcagcagagttttggtagatattattctcttcggtgtcccagttgtcccatctttggctagtgtgagccttttcaacttgccatgtccttttggtataccctcaatgagcccagttcactgctttgcgtttatgttcttttctggtccacagagatttttatctttttgttgagctcaactttatatatttgtttttctatctttagctatcattgcttagtttatggaacagagtggcaaatcaaagcaacaactcagtgcatcattttgattgaaaagtctaaaagaattgttgaaatgatcatctgtgtgcaagataccttaaagaaataaataaacattttggtgcatgatgaccttggata

SEQ ID NO: 600037 - DNA, 638 bp, Homo sapiens
tattttgagggagcatttggcagaatggaagtgtggtttattcattactaaattccccagtaagtatcaagtgagagccatatgctttgcaatcagatatgtgggggcagaaccatcatttgattgtgaaagcctcatctggaagaaggtccaagtccagagggcaggcctgaaaagcagggagtctataggtggaggctgtagagccaggcttcaggttttaaagagtttagagtctttggaccaaaactctatttagcaaagaggaaatgactttttccccaaaacttgtaggatatatgccaactactctgtgactaccataacatttctggaaatgaaagtcagggtgattcctgtgaaacatatattcttaagaactatatcttttttatttttaagttctggggtacatgtgcaggatgtggaggtttgttacataggtaaatatgtgtcatggtggtttgctgcacctaccaacccatcacctagatgttaagcccagcatgcatcagctatttttcctaacgctctcyctctctccactccactcccctaagatataggccccaggagaactatatcttaataaggtaactccaaataactaaataaattgatctaggaagtggagtatt

SEQ ID NO: 600038 - DNA, 573 bp, Homo sapiens
tctctatttgctaaaataaaacaaaaaacttagtaagactcagagtgacattggtttacacttttgtaaatttctttgatgtgcagcttaaaagaagcagctgaattctcatatctgtttcttcatccaacctgttgtggtatgctgctttggtttaagtaaatgaagaaaatctaaccccttacaggtatatagtcaggaaaagggggagtattttratagtcttttcagatatttgtagatattctgctttgacattaccacaagccttgacacgtggtgatttctaggaggatgcatgtaaaatctggaaccgaaccatagcaatggcaatttatactgtgttacattaaaatgcactggtctaatttgcactctgaatgaatcttatacccatgtaagattttataacataacacattattttgaaaataatagttcactgagtttcgcagatcttccaaattttgacacgtttcattttgtatcatatcaaaacatcacatttgttaatatcaccatagagctcattgtctttaagctgtcaaacacttggtggagcatgtaagtttt

SEQ ID NO: 600039 - DNA, 573 bp, Homo sapiens
tctctatttgctaaaataaaacaaaaaacttagtaagactcagagtgacattggtttacacttttgtaaatttctttgatgtgcagcttaaaagaagcagctgaattctcatatctgtttcttcatccaacctgttgtggtatgctgctttggtttaagtaaatgaagaaaatctaaccccttacaggtatatagtcaggaaaagggggagtattttgatagtcttttcagatatttgtagatattctgctttgacattaccacaagccttgacacgtggtgatttctaggaggatgcatgtaaaatctggaacygaaccatagcaatggcaatttatactgtgttacattaaaatgcactggtctaatttgcactctgaatgaatcttatacccatgtaagattttataacataacacattattttgaaaataatagttcactgagtttcgcagatcttccaaattttgacacgtttcattttgtatcatatcaaaacatcacatttgttaatatcaccatagagctcattgtctttaagctgtcaaacacttggtggagcatgtaagtttt

SEQ ID NO: 600040 - DNA, 616 bp, Homo sapiens
tgaatcttatacccatgtaagattttataacataacacattattttgaaaataatagttcactgagtttcgcagatcttccaaattttgacacgtttcattttgtatcatatcaaaacatcacatttgttaatatcaccatagagctcattgtctttaagctgtcaaacacttggtggagcatgtaagttttccaaaattctaatttttccttgaaacctcaaattttataattggcgtcaaattctgtcagttgttttccttgtacagataggctcattayttttatttttgagtcaatatctgccaaatactgaagtttgaataactatggtctgtctgtcagccatgtaaaatgttgtcccattaaaaaagaggctcattcagctcacagctcaaactatattgcaccagaggatttcctggagaccactagcatgcttcagtatgcagcagaagtgcttatatgtacttctcatttagtcacccaacatattaaaaatatgtatactcaaagatagccacttaatgaaattcataccttttactgcctcctcaatgccattcttaagcaaaattggctttttcttcttggaagcatgtggtggtaaagaaca

SEQ ID NO: 600041 - DNA, 616 bp, Homo sapiens
tgaatcttatacccatgtaagattttataacataacacattattttgaaaataatagttcactgagtttcgcagatcttccaaattttgacacgtttcattttgtatcatatcaaaacatcacatttgttaatatcaccatagagctcattgtctttaagctgtcaaacacttggtggagcatgtaagttttccaaaattctaatttttccttgaaacctcaaattttataattggcgtcaaattctgtcagttgttttccttgtacagataggctcattatttttatttttgagtcaatatctgccaaatactgaagtttgaataactatggtctgtctgtcagccatgtaaaatgttgtcccrttaaaaaagaggctcattcagctcacagctcaaactatattgcaccagaggatttcctggagaccactagcatgcttcagtatgcagcagaagtgcttatatgtacttctcatttagtcacccaacatattaaaaatatgtatactcaaagatagccacttaatgaaattcataccttttactgcctcctcaatgccattcttaagcaaaattggctttttcttcttggaagcatgtggtggtaaagaaca

SEQ ID NO: 600042 - DNA, 531 bp, Homo sapiens
tccagatgaaaaggagcctggcattaaacattttgttggaaagtgatatataaactaaaattctaaatgtagccaaaatgtcaaataaaggttaaggtaaaagacatttttcagatatgcattttctcaaaaaatttatctcccaggtaccatttctcagatgctctacagaatgaggaagcaaactaagaaagaggaakacttgagaatttaaaaatgggattcaacacaggagcaaggccaaagaatccccaggatgatggcggtgggtgattccaagatggcatcaagtcagcaggtcaggagagcagcctgcccagattggggcagatcagaaagttcaggaagacacttcttcaggaagacaaaactgaaggaatagttaatatgtctgaatgtattcagagaatatttacacaatgggggaagagttaagggttgacttagtggtaagttcatagaaaaccatataaataaaaaacaagactattattagctcctgaaaagacaaaaagtacaggcaaagaaaag

SEQ ID NO: 600043 - DNA, 426 bp, Homo sapiens
aattctcaaggaggagaaaaagattatgaaattgtctgagccataggtaacaatatctggttactgatttttattcaagaaaattcaaagtcatatataattgctgataaaatatgctggagctatatrtttcatccctgtctgacaaggaaaaatatgtttgactatagccatatagtttacctaagcatgtgccatcacaaactcaaattcttaaaccaaatttattattcacttagttatatgtgttgagaagtaagatgagtggtcatactgtaatgagactatctattaaccatgcagcacctcataactttacattcacatctcgtttattttttattttttaaatttatttttattttttaaatttattttttccaagatggagtcttgctctgttgcccaggctggagtgcagtggca

SEQ ID NO: 600044 - DNA, 594 bp, Homo sapiens
tgggtgtggaaccctctgagacatgcccgggatataatctcctggtgtgccatttgctaagaccattggaaaagcacagtattagggtgggagtcacctgattttccaggtgccgtctgttcacagcttcccttggctaggtaagggaattccctgactccttgcgcttcctgggtgaggtgatgccttgccctgcttcggctcacgctcagtgggctgcacccactgtcctgcacccactgtctgacaagccccagtgagattaacctggtacctcacttggaaatgcagaaatcacctgtcttctgcgtcgctcatgctgggagccatagactggagctgttcctattcagccatcttcttggcactgatacattcatgtttcatgcaattctgggattaagttaccttttctaactatagtactttgaatattttaamcactattatttgtaacctattattgctcatgagaattgcagtgttaatatattccctctagtagattttgaaatattccttccatttgaaatgcaaagctttctcaccataatgtatctatgtgctttttaaacttgaagatttatggcttat

SEQ ID NO: 600045 - DNA, 597 bp, Homo sapiens
aatgtaaagcaattggtattccaatgaaagtttgtaatgtggattctcttttacctgggtctttttaaaattttataattgatctctgacaacataattttgtttcatttaggttgaggcttctctgtgggtcctgagttcttcatcatgaccataacacagtaggcagtatgtatatgtctatagtagcaagtagtaatgttttataataatgaatcataaatcatagtgatgtaaaagcaggttttaatgtttakaaccacattttatataccattttaaaatgtggtataatttaatgtttattagtgagttatataactgggttccactgttttacagacaccttgcattgagtttcaattttcatttcattttttttaatagagacgaggtctggctatgttgcctaggttgatctcgaactcctgggcacaagtgatcttcccgtctcggcctcccaaaatgctgtgattacaggcatgagctactgtgcctggcctcaatttccatttcttatttaagatatggttgaacttcaactgaaagtctggcatctaggtgactctttctttcaaaaatgagatatacaaatct

SEQ ID NO: 600046 - DNA, 595 bp, Homo sapiens
tcggcctcccaaaatgctgtgattacaggcatgagctactgtgcctggcctcaatttccatttcttatttaagatatggttgaacttcaactgaaagtctggcatctaggtgactctttctttcaaaaatgagatatacaaatctaaccgatggcagtgacaattttyaaaattctttgaaattgtattagtccaaagtaatcctttttttttttttttttttttttgacagggcctcacagttgttgcccaggctgaagtgcaatggcatgatctcggctcactgcaacctcccctttgaggttcaagcgattctcttgcctcagcctcccaagtagctgggattacaggcatgtactaccaagcctggctaaatttttgtatttagtagagacggggtttcaccatgttagtcaggctggtctcaaactcctgacctcaggagatccacccacttcggcctcccagagtactgggattacaggcatgcaccactgcgccaggccccaaagtaataacttttaaaatatagaaattattttgaaattaaatgcatattatttcaaaagaacaaaagtttgccaattatattggt

SEQ ID NO: 600047 - DNA, 462 bp, Homo sapiens
atacaaattgaagcctatccatgtatttaatatttggcttctttttttttggtgatatgtataatatatttgtatttccattttcagaactatcatagaaaaatggatattttctggtttcatctttctaacatatgagtcaattaatttgttcaaaaaatatgtattattatgtaccagtcaccatgctaagcactaagaacataaaaataaaccataagatacttcattagaaatgacagatattaaaaagataatcacaaaaagcctgcatggtcatttataataaaaatgtgcagtagaggtatctaagtgggagaaaataagcacaagtcaagacatgataaacagcaaggtgactaaaagcagtttggtatcaygtatcagatgtaagaaaaatgttaaaccactttattgggatgtaatttacataccgtataattcattcatttaaaatataca

SEQ ID NO: 600048 - DNA, 593 bp, Homo sapiens
tagtccacttgtgagaaagaaatgactatgtttgcatgttatctttcacttcaaagcagtgaaagattggaatagaagaatgttaattttctaaagaagtatattgttttaggtttattgaactttgtacacagatccctttccaatgagttttcttgcctcagaaactcaggacatggaatgaaagcaaatgcyttagtgcagaataaatccggactaataaggaactctctcctcatagccaaaccacagtagaatctccgtaaaacacaatatagcagtaagtctgacagcacaaggcatttagtggaaaacttttagacgatggtggaaagcattgaagaaaagcaacacactcttcaaaatttgttaatttaatgattcttgagaaaataatgtatttttcttgcttttgtattatattgctttttactggcagcaaaaagagggctttcaacctagggatgattcttcaatgagtatttctccttcatttgcaaccatggtgtctgaatgaattattctgtttctccagaaaattgtctcaagtcatcaactcatattaactgtcaggacttccttgccttctcctt

SEQ ID NO: 600049 - DNA, 563 bp, Homo sapiens
gtaagtgaaaaactttaaagtttttatttttttagggatagggcctcagcctatcacccaggctggagtgcagtggagccaycataattcactgtaaccttgaactcctgagctcaagtgatcctcctgcctcagcctcccaggtagctaggactacaggtgtgtgccaacacacctggctatttattttctttttttatagacatgaggtcttggtatgttgcctaggctggtctctaactcttggccccaaatgatcctcctgccttggtctcccaaattgctgggattacagcatgagcctttgcaccgagcctaaaaaaacatttaaatttgagatttgggattttttttcccaatgtctagagcaaaaagtaaaattacttcatattcaactcatatatatgtaagaaatgtaaaaggatgcacaagtgagaactgataaacagtctgattaaaatactgaatagaacaaatattttttttttacatgggaatatagagaggtcatattttcagaccctcaattaggtaatttgaatgaaaaaaatataaatatcact

SEQ ID NO: 600050 - DNA, 563 bp, Homo sapiens
gtaagtgaaaaactttaaagtttttatttttttagggatagggcctcagcctatcacccaggctggagtgcagtggagccaccataattcactgtaaccttgaactcctgagctcaagtgatcctcctgcctcagcctcccaggtagctaggactacaggtgtgtgccaacacacctggctatttattttctttttttatagacatgaggtcttggtatgttgcctaggctggtctctaactcttggccccaaatgatcctcctgccttggtctcccaaattgctgggattacagcatgagcctttgcacckagcctaaaaaaacatttaaatttgagatttgggattttttttcccaatgtctagagcaaaaagtaaaattacttcatattcaactcatatatatgtaagaaatgtaaaaggatgcacaagtgagaactgataaacagtctgattaaaatactgaatagaacaaatattttttttttacatgggaatatagagaggtcatattttcagaccctcaattaggtaatttgaatgaaaaaaatataaatatcact

SEQ ID NO: 600051 - DNA, 597 bp, Homo sapiens
agtgagaactgataaacagtctgattaaaatactgaatagaacaaatattttttttttacatgggaatatagagaggtcatattttcagaccctcaattaggtaatttgaatgaaaaaaatataaatatcactaataactttcttacaatttgttattttctgaagactttwagccaagaatgaaaatcttccagtttgttttgttcatctgacactttgtctaacacctctttgcttggattcatccgtatgtatttcattatccaacaaactcttcctattactgtttaaaatttagtaaaagacatgattgtgtctgtattacagtgggatgtagatcctcaaaacatttgctataaagtagccttaagtcagcatatactatgtcatagctagtgtcatttccacagctagcaaactgcagcaaaaaaagaagaagaagaagatggcatttaaattcttaagccaagtcatctatgctttacatatgtaattcacacatgattttgagtaacgtgttagaagagggattcaatgtgtcaaccaagttatgtttccaaataggaacacttcatacatttgagctaggctggtgg

SEQ ID NO: 600052 - DNA, 576 bp, Homo sapiens
attttgagtaacgtgttagaagagggattcaatgtgtcaaccaagttatgtttccaaataggaacacttcatacatttgagctaggctggtggattctgatagtttgttcttaattttcttgcttcaaatagctgattttttttaatcattatagctctaatttataaaaatgytaatgtcagtttattcttctataagtagcagtatttaaaaactacttattcagtatatcagtttgattctttgtatctgacatgtataaatgttcttgggaggatggtcatggagctctttacataaaaatatattaagctcaatgtcatttacataaacattgtaaattttaattatcaatggaaaacacaataaaaagtaaagtcacgtgccacataaaccaatttcctttaattctttccctactatataccctgtatcttctctttcctcacatactctgtctctttagctgggttctatgtcttcttcatcatttggtctctagaatttggcacagtgcctagatagacactcatgagtgtttattcacttcattccattaacaacaacttattaat

SEQ ID NO: 600053 - DNA, 576 bp, Homo sapiens
attttgagtaacgtgttagaagagggattcaatgtgtcaaccaagttatgtttccaaataggaacacttcatacatttgagctaggctggtggattctgatagtttgttcttaattttcttgcttcaaatagctgattttttttaatcattatagctctaatttataaaaatgttaatgtcagtttattcttctataagtagcagtatttaaaaactacttattcagtatatcagtttgattctttgtatctgacatgtataaatgttcttgggaggatggtcatggagctctttacataaaaatatattaagctcaatgtcatttacataaacattgtaaattttaattatcaatggaaaacacaataaaaagtaaagtcacgtgccacataaaccaatttcctttaattctttccctactatataccctgtatcttctctttcctcacatactctgtctctttagctgggttctatgtcttcttcatcatttggtctctagaatttggcacagtgcctagatagrcactcatgagtgtttattcacttcattccattaacaacaacttattaat

SEQ ID NO: 600054 - DNA, 459 bp, Homo sapiens
gcagcagaaatactttgtgtctcaaagaatattaaaaagacatatatccaagggttgagatttaatattaatagttttactgcttctaataggactttcttaagtgaaactgacttataaaatttaagtgaatgtgctttttggagatttcaactacagtttggtcccagtgccttaactgtgttaagacacaaacaattttaccctctagtgcttttatgcctttgaagctaatgtcaacatagtaaagcaagcaaacaacatgtaaatattggcatgaaaatagttgtgatctcaagatcccctgcaaaggtcatgggaactctcaaggcactgtggattcarttttgagaatcacaggtccaagagactgggagaggtaatggacagaggaaatataacatgatcattcaggtccttgatcatgaacataaaatgaaaactgacaggatggttgtg

SEQ ID NO: 600055 - DNA, 366 bp, Homo sapiens
gaaggctgggagaattattttttgtcagttaactaaaaacagtgctgactttataaaaaatttgcttagagttttcaaaattttgattttgttaacaactacatgagtgcaacaaaacagaagaaaaattcattatttctccaaaatagtctcctagagtctgacccaaatataagcttacaatgaaattgaaaggaacttcatattcagataaacttttattctatttatcaattcattattagttgaatcacaaattgtttatttaattttatgtaaagcragaaaaaccattaaaagatgttagaaatgcaatacatcaaagcaatacttcaaaaaacctttgaaatcactgatttaattaat

SEQ ID NO: 600056 - DNA, 597 bp, Homo sapiens
gaattcatgaaatcctaagccttttactccctcttcaagcaactataatctggcttctatgtctacygagagtgactgcatcattaagcaaaccaacaactcccaacccccactgccatatccaaaggttcttgtgttattagagtttatatttaaagttagtttctatttcctttttgagattctctctctactcccttggatcttttatgccctatcattggttaatagtttatttctcctgggctcttctgtctgaaacttaaatgttactgttctcctgagaacatgttggagctggttactgcccataaacacctttcagtctgtatcttcctaaagtattatacattctattttttaccttacgtctccactatgtgtcttcctggagccttgtttagaatttagtgcatcatgcctgcacttgcagttgtgttttctcttaattttgataacaacaagaactctgccatccaagcagaccaggagatgaggcctcctttttgctcactacttaccactaaatagactaacacttgctgattttacctcttgcatgtttatacatatgttctcctctcccagacactgtag

SEQ ID NO: 600057 - DNA, 606 bp, Homo sapiens
cagtggttgttaaaaccaagatatgtcaataacacttcacatgacaaaacagtcatatggccaatactaatgtcttggttgggaaaatataattctttcccagagtggagaagagaaaagcaactaattcaacttaatagcaagtaatttataacgtatgtgaatacaagtgggaaaaacaaaacctgtcagcagagagcttttgcttgtggaccaccattttgcaaacttcatttcaggttctttaattctcaactctggttctaaaatcatatgattaatgggtctcaaattcactgaaccaaaaaaaaaatacagtttattgtagctataagccttccaatatcctttggaaaatagcagaaacagaactccaaaatasgctttggcggccttgtggaagaattgttgaactataaatcttgagtgaccatttaacaaaaactagaattaaaattcattccttgaagtaaagacaaacactcaatctcattttttattgtacaaatttcttaaatttgtttaaaaatccaaatcactaggcttccatggtgtatttatttctagccataatgtagaacacagtcattcattttaagatctgca

SEQ ID NO: 600058 - DNA, 604 bp, Homo sapiens
taatagcaagtaatttataacgtatgtgaatacaagtgggaaaaacaaaacctgtcagcagagagcttttgcttgtggaccaccattttgcaaacttcatttcaggttctttaattctcaactctggttctaaaatcatatgattaatgggtctcaaattcactgaaccaaaaaaaaaatacagtttattgtagctataagccttccaatatcctttggaaaatagcagaaacagaactccaaaatacsctttggcggccttgtggaagaattgttgaactataaatcttgagtgaccatttaacaaaaactagaattaaaattcattccttgaagtaaagacaaacactcaatctcattttttattgtacaaatttcttaaatttgtttaaaaatccaaatcactaggcttccatggtgtatttatttctagccataatgtagaacacagtcattcattttaagatctgcatcccaaatcaaattatgacctcaaaaataacaagcacatttccataaaataaaatccattaacttttctgtcaataatttcttcttaaatgttcgattgatcttgccaaggtatttctcattgtctgaaagt

SEQ ID NO: 600059 - DNA, 518 bp, Homo sapiens
accttctgggcaccagcaggcaggaagatagcaggtaggccatatttctactcaaatgatagagcacctggtttacagatttgtctgcagacctagagacaatcatctgatctagcacagttcctgggccctagccctctgccacacctatgggaccactttcagaaaagaggcccagtagtccttcatattccctacatccagtgctttctcctttttctttcccaagcccactatctctttatttgtgttctttctgtctccttgttaggctgtaaagacctacctaaaagttcattctggtgctatactagaatggtgggattttatgatccattggaaaagccatattgaaccctattcttagcaacaacaacaaaatgggttgctactccttgaagatcaawaataccagtcactagtaagaagacctctttttcctcaaaggaatataatagaaactcctatttcttcctagtgacttatttgctaagtcacctttgctgactatgcagtcc

SEQ ID NO: 600060 - DNA, 558 bp, Homo sapiens
gtaaatcataatttaaaacaaaatcatttttattagacttgtataaagtttaacactaattttcaacacaacatgttatgattcaaatgacatattaattatttttttatttcaatactatatctaccctatacactgtggacaatttttttaaggaactcatttttttttctttttttagattaaaatgggccctaaagttaccataccccatcataagctctgaaagtctttatatataaactgaatgtacatctgaattctatcacacatacatgcaatgtagaaaattcctagaatttcatgttkcctccacatccattttgaatataagtttaactttctcataccagaagcctggcttgacagtttccagttctacacctcttcccaattcctcaatgtagtgagccagatatctgccttatacaactgtctcctagtaatcacctccctacggagctagatacaacctacttgacttgccccaccaacccccatgccctgcatggagtttgcagatgtgctgcggtgaccccctctcagtcacagcgtgac

SEQ ID NO: 600061 - DNA, 558 bp, Homo sapiens
gtaaatcataatttaaaacaaaatcatttttattagacttgtataaagtttaacactaattttcaacacaacatgttatgattcaaatgacatattaattatttttttatttcaatactatatctaccctatacactgtggacaatttttttaaggaactcatttttttttctttttttagattaaaatgggccctaaagttaccataccccatcataagctctgaaagtctttatatataaactgaatgtacatctgaattctatcacacatacatgcaatgtagaaaattcctagaatttcatgttgyctccacatccattttgaatataagtttaactttctcataccagaagcctggcttgacagtttccagttctacacctcttcccaattcctcaatgtagtgagccagatatctgccttatacaactgtctcctagtaatcacctccctacggagctagatacaacctacttgacttgccccaccaacccccatgccctgcatggagtttgcagatgtgctgcggtgaccccctctcagtcacagcgtgac

SEQ ID NO: 600062 - DNA, 418 bp, Homo sapiens
tccttacatagccaaaaagcagaagagagggaatccactcctgccagccctttttatggttgtattaatctattcatgaggttgaagcctccatgacctaaacacctcccatcaggccctaccttgccatactgttgcactggggattaagcttccaacacatcaattagggggaacatatttagactttagtaacccctcattttagttttagttgttcagagattcccactctgtatgatgtacctgtacagacccttctcattatcttactttatatgaaataatttccttaaaataatagagaatgttacctgtttttttaattagacttatcgtgcaattaaaataacacttgaaatataratttattattggttagggagaattaatattgatgttaaattttatgataaaa

SEQ ID NO: 600063 - DNA, 625 bp, Homo sapiens
tgtatataatttaaatatattgtatttagtaaaatcagaatttaaaaaaggagtagcaagaataattatatttttaaaatatgcactagatataaaaaacaaaaatattgatctaatctaaatgataaccatgtgagcatcaagatttaaaaaatcaattttttatggcacatattagaaaatttataaaayggttaaaatattcataaaattcataagtaaagcacttagcaattaattaaaacttgaaatatgaaaatgtattctttactagactccattttttctacaaatatcaaaataaactaatctttaaaagtctgatgagtctgtcaatataatgtacaaaatgacagtttatattttaatattagtcacataaaaacgacagtgatgtgaattaagatatattatctaaaagcgagtagccttctctatatgtatcctcctattaaacacaagataaaatacccccaaaaatatttggttccatttttaagctaaccagtctgtccagcaagtgttatcccttagcaacaagagctgattagtcccttgattattgtgataaatgtgagtctcattctatttctcctacaatatgagaaacagacaactggaaata

SEQ ID NO: 600064 - DNA, 592 bp, Homo sapiens
gagagtttatctaaaggattcccttaggggaacattactagctaatgggttactgaaagtaaatatatatatatatatatatatatatatatatrtatatatatttggaaatatgaggcatggctcactggaaaatggcaaatgagttatgtaactctctgggtatataatagagatttttaaattattatttatttatttttaacctaacttcaatgctcctcttgccatgtaaagtcacttagaacactctagagacctcgtctattattctggaccagagtgcatgtttgatatgggaagaaagtatgtgagaatcactcaatgtctcagaccatttttggctttatctgagcactttgaagtccctgtgtccttgatactgttggcaaagtttcatcctaagatccatgactttggggagtctgattcagcactccaattatttgttttagattagaaaataaagagaaaaataaatgaagtaatattgtctccaagattttagagagagaataatataataaatgtaaagaatatagagaaaataattgataaaaatcacaaattaatccatatgaaaatagaaatt

SEQ ID NO: 600065 - DNA, 592 bp, Homo sapiens
gagagtttatctaaaggattcccttaggggaacattactagctaatgggttactgaaagtaaatatatatatatatatatatatatatatatatatatatatatttggaaatatgaggcatggctcactggaaaatggcaaatgagttatgtaactctctgggtatataatagagatttttaaattattatttatttatttttaacctaacttcaatgctcctcttgccatgtaaagtcacttagaacactctagagacctcgtctattattctggaccagagtgcatgtttgatatgggaagaaagtatgtgagaatcactcaatgtctcagaccatttttggctttatctgagcactttgaagtccctgkgtccttgatactgttggcaaagtttcatcctaagatccatgactttggggagtctgattcagcactccaattatttgttttagattagaaaataaagagaaaaataaatgaagtaatattgtctccaagattttagagagagaataatataataaatgtaaagaatatagagaaaataattgataaaaatcacaaattaatccatatgaaaatagaaatt

SEQ ID NO: 600066 - DNA, 592 bp, Homo sapiens
gagagtttatctaaaggattcccttaggggaacattactagctaatgggttactgaaagtaaatatatatatatatatatatatatatatatatatatatatatttggaaatatgaggcatggctcactggaaaatggcaaatgagttatgtaactctctgggtatataatagagatttttaaattattatttatttatttttaacctaacttcaatgctcctcttgccatgtaaagtcacttagaacactctagagacctcgtctattattctggaccagagtgcatgtttgatatgggaagaaagtatgtgagaatcactcaatgtctcagaccatttttggctttatctgagcactttgaagtccctgtgtccttgatactgttggcaaagtttcatcctaagatccatgactttggggagtctgattcagcactccaattatttgttttagattagaaaataaagagaaaaataaatgaagtaatattgtctccaagatttyagagagagaataatataataaatgtaaagaatatagagaaaataattgataaaaatcacaaattaatccatatgaaaatagaaatt

SEQ ID NO: 600067 - DNA, 525 bp, Homo sapiens
ctttgcaacctttttacttcctcaatatgatggtccagatgattttgtagatgacttcattcaaacttaaaaaagaactccacattttaatcaatttaatagttaaagtaatagggaaagaatgaaaactccagaacttatttttgcaaagctagtatttctctcatggaaaatatccaacaatggttaatcaataaaggaaagtgactatttataatttacaaaacagaataaatctgagagttacttaggaaatttttacaaaaaaaatagaatatagactaaaattccaagctaaaagtatattgaaattctatattaaaggctgcatataagcaatgtgacaaaatacaaacttattaatgaatcaaaattgtagctgttgaaaaagatttaagtgtacttgtaggaaataaattaaatgattaaaatgacatttatagcagcragaaaaaagtgaattatttaaaaatggtttgagaatacctaggttaccacacacaaaaaacatataaaaatctcatc

SEQ ID NO: 600068 - DNA, 580 bp, Homo sapiens
atatacaaattcatgtgttcataaggttactcaaaaacataaagggttggggaaaacaagacaggaaacaaaaccggccaaaacgcaataggaagcaacgagggcatcaactccttactcagaaaattgacaaaagaagaggttaaacatttatcatgtttttccttcacgagttctatttctgcgtaactaaatggtccaaggtaatragggatttttgtttatttgtcttttgtattttgtggaaagaatttaaaaaaaaaaaaacagagaatgccgttttaaacctctgacaaaataattgattcaggcaattattatcagtggatataaaactgttgaaaaattgacagattgacagtgaacttcataatgattgcatcaatcaactaccacctgaatcctctgatcagttttagtatcactgaatgtgagacaataaaataccacttttctctttatgtgagacaacatgaagtgcagagtaccatttttgatgcattcttgaccaaaaacaacaacaacaacaacaacaaaaaaccgagggcaaactcgaatctaattaagtctttatcattaa

SEQ ID NO: 600069 - DNA, 496 bp, Homo sapiens
tataaaactgttgaaaaattgacagattgacagtgaacttcataatgattgcatcaatcaactaccacctgaatcctctgatcagttttagtatcactgaatgtgagacaataaaataccacttttctctttatgtgagacaacatgaagtgcagagtaccatttttgatgcattcttgaccaaaaacaacaacaacaacaacaacaaaaaaccgagggcaaactcgaatctaattaagtctttatcattaacttcttttgatatgaaatataaggaayagagcaacaaattaaaccacactaagacgaagttgacaaacaaatgtaaatggaagacattctataggagagctgatttcgcttctgtgaaaagtcaatggcataaaaataaaggagggcatcagctcctggttaaagtcttaagagacatgtcactcaaaagtaaactgtgaacaaaatgttgccttaaaaatattattacaatgtgagcatgaat

SEQ ID NO: 600070 - DNA, 476 bp, Homo sapiens
ttcttggttccaggtaatgttgaatcaaaaacataggtctcaagtagtgacgatataaatgggaggctgtactctgattttctaaagagacagaggctctaagaatttcaaccaaagtagtttatattgtatattaaatatttgtatggaaaagtaaatatataacaaaaggtggactacctaaaaattgcattacaggggaattattttttcaaaatctttgatttttgaaaaacttctgatttgtcattaatccactttactaatataraaaagctgaatgttagcccaatattaccttcaagaaagggatcatgaaattgaaatcacaacttaaacacacacacacacacacacacacacacacacttaacctggtatatactctgtgtcaggcaccgctatatgccctagaattacacaaatatgatgtggagaaactagaagtttaatgaggaacacagaaatctgaatat

SEQ ID NO: 600071 - DNA, 393 bp, Homo sapiens
ccattgtatgttatttgtttattttatcttgctgctgttaggatgctttctttatccttgacttttggaagttygattattagataccttgaagtcatcttctttgggttaaatctgcttggcgtttcataaccttcttgtacttggatattgatatctttctctatgtttgggaagttctctgatattatctctttgaataaactttcccctctctcaacctcatctttaaggacaataactcttagatttgccctgttgaggccattctctaagtgttgtaggtatgttttttgtttgtttgtgtattcctttctgttttgtcttctctgtgtattttcagacagcctgacttcaagctcactaactctttcctgcttgagattcctcaac

SEQ ID NO: 600072 - DNA, 490 bp, Homo sapiens
ctgctttactcttcctctgcttttctcaagcagatggagtctctcacagctgtgagtttgctgtgacacacctaaagccaaaacatctcagtatctcacccaaggcccatagagtgtaccacctggctactgctgttgattactcggggctcaatgactctttagtcagcagatgatgaatcctgccagtactgggtcctttccctcaaggcagcaagttcccttctggcccagggtgtgtctagaagtgttgtccaggaactagggcctggaatgggacctcatgattctacccagtgctctatcttayggtggctgagctgatatccaagttgcaggacaaagtcctctttactccagtgctcccctctcctctcctctcctctcctcaagcggaaggaataagtctctttcagagctgtaagctgttctgcctgagactggcagaggcgtggtacaagcactccctcagtcactccagctggtgtct

SEQ ID NO: 600073 - DNA, 525 bp, Homo sapiens
ccttgtggcctagactgtatttcaagtttatttaagacccccatagcatctcagcccacagtgaaaaagctgtcagactcaagttcagattgctggactgatcaattatcctctggctacggcttgtctaaatrctcccactgtgggtgtcagctaaattctgcctggtgttggcagtactgagttccaatgcaaagtcccacaatcactgtgctctccctcctacaagtgcacagattctctgtcagtcacatggccactgctagggaatggagaggggtgacctcggcatttaagactgtcattcctagcctcatcagtgcttcttttagtgatatgaagttaaatcaggtactttcatcactcacctgattttttgttattatcaaagtgcttttttgtgtagatagttgttcaatttggcgtgcctgccgaaggataagtggtggaggattctatttgtccatattgctctgtctcctcctgagtttcttatattctggatattaattccttgtcagatgc

SEQ ID NO: 600074 - DNA, 597 bp, Homo sapiens
cataatagtaacgaaaaaagcatggtagtgacataaaaacagacacatggaccaacagaacaaaatagaggcccagaaatcaattcacacatttacagccaactaattttcaaccaacaccacaccaagaccacacattarggaaaggagagtctctaataaatgttgctgggaaaacaaaatatctatatgcagaagaatgaaactgaacccctatctgtcaccacttacagaaatcaactcaaataaactatttaatggtacctattccttaagtttactgtatctacatgcatgtaaactgaagtcctgcaatgtaagcacccacctttcacaaacattaataatttgattaggaaaaaataagtgcttaacatcgagtaaagcaaactttacattctcaaagggcaagcaggtatctttttaaaagttattattattgtacaactagaaaacaataactagattcttagcttcttgaatgcagatacatttgacccttgcacaacatgtatttgaactgtgtgggcccacataagtagatttttttttaaataaatacaatcacccttctataactgcaggttccacatccac

SEQ ID NO: 600075 - DNA, 597 bp, Homo sapiens
cataatagtaacgaaaaaagcatggtagtgacataaaaacagacacatggaccaacagaacaaaatagaggcccagaaatcaattcacacatttacagccaactaattttcaaccaacaccacaccaagaccacacattagggaaaggagagtctctaataaatgttgctgggaaaacaaaatatctayatgcagaagaatgaaactgaacccctatctgtcaccacttacagaaatcaactcaaataaactatttaatggtacctattccttaagtttactgtatctacatgcatgtaaactgaagtcctgcaatgtaagcacccacctttcacaaacattaataatttgattaggaaaaaataagtgcttaacatcgagtaaagcaaactttacattctcaaagggcaagcaggtatctttttaaaagttattattattgtacaactagaaaacaataactagattcttagcttcttgaatgcagatacatttgacccttgcacaacatgtatttgaactgtgtgggcccacataagtagatttttttttaaataaatacaatcacccttctataactgcaggttccacatccac

SEQ ID NO: 600076 - DNA, 588 bp, Homo sapiens
catttgacccttgcacaacatgtatttgaactgtgtgggcccacataagtagatttttttttaaataaatacaatcacccttctataactgcaggttccacatccacaactgaatgtgtatcaaaaatacagtcagtcagctacttcagaagctgaggcaggagtatcacctgagctccggagttcaatattacaataagctatgaccaccactgctttcaagcttgggtgacagagtgagaccccatctcaaacaaacaacagtatttgggggatgcaaaaacccatggatacaaagggctgacttttcatatacgcaggctctgaagggcccactgtrggacctgagtatgcactgattttggtgtctgtgggggtcctgggaccaatcccctttggataccaaggggcaactttacagtgtttttttgcctatctcccataaccctagaagaaaaggatgtatatatacgtgctgaatcaatacttgcatgtttctttagtaagaaacttcatgtgtttttaaattatcaagaggtggaataagttacatggcgatgcttaccaaaaatttaaaaacattattca

SEQ ID NO: 600077 - DNA, 585 bp, Homo sapiens
tttgacagtgttttagagagagacagagaggataatctaaatattttgtatcagacagaaaaaatggaagatctgtaaagattattgtgaagaaaatgagttgtattaagatggctaaaatattttatttcctttttaaatctttgaactgatgtcacgtatgtcagtttttgttaactccccagtatcacatcaatccattctggctacgtgatgtagtactagagaggttgcctcttagccaaaaagtgtacaaaagctggataaaacacaattttctaaagggagaccaagaatcccagtagtttgacctaattagcagctgagaaatktagcccttgaaagaggtaaataacctttattgggaacatgcagcatgaagtatcacttgctgatctctcatttctccaatcctgaccagtcttctccatgggctccctgtgttctctggccactttctacaaatataattttttctgattatcatccctttaattaattaattcattacttctcaagacccttgttcatttctccatcccagagattctttatctttactcatatccataaatcaaccttatc

SEQ ID NO: 600078 - DNA, 519 bp, Homo sapiens
taaaacactctattgctctagaatcataaaatgatcttgattatctggaaactgaaggtagaatttgaatagatgctcatattctattaaatcaggctacaaacttcactttgaatttatttttcatgttttccttcatgacatcttcctatccccaccccaaccgtgggatatttcccattatccccaaggagaaccatataatatcaggtttaatactcataacaatattgataataactgttatttaatgagcattcattgtgtgtcagggaatgttctaagcacattacactttgcagttattaattcttattctcagaatagtactacaaagtaaccatagtgattyttattttatattttaggaaaccaaggcccaagagaagttagatacattgcttaaaattacaagctataaggagcagaactgaaaatcaaaaccagttctatttaactccaaagtctgtgttttgtccactccatttcactccattctcagtgattatacaacagaaa

SEQ ID NO: 600079 - DNA, 598 bp, Homo sapiens
tttaccacactggagagctttactaattatttggcttgacagataaagttwttggtgaaggccataattatactaagtgatatatagtcattttccatttcaagagttactcagtgttccactcctttaaacaaacaaacaaaaaaggtggttttgctctgcaaaaaaatgcaattgacaatgatttctaggctacagtacttaagttaatgatgagttcacgtgaagtaaagagaacctccttcgaagatgtttttgccttctataggtttttctgagggtcagcagaagataacctgaaaatttatgaacatgaatgagcccttttagaattgtatggctctaacatgttatttcctttcatttgcttctctttgataaaataaacccttagtttttcagccccctccatattcatctcaatgttgctagaaactagaatggtgttttgacatagcaaatactaaatattaaatattctaaatactgaatgtttaaatgaatgtatgtttatctctcattaacccatacaggaaaatcttgagcttcatcctagaccagaaatacagaaaaagcctttcctttaggaatagaaaat

SEQ ID NO: 600080 - DNA, 598 bp, Homo sapiens
tttaccacactggagagctttactaattatttggcttgacagataaagtttttggtgaaggccataattatactaagtgatatatagtcattttccatttcaagagttactcagtgttccactcctttaaacaaacaaacaaaaaaggtggttttgctctgcaaaaaaatgcaattgacaatgatttctaggctacagtacttaagttaatgatgagttcacgtgaagtaaagagaacctccttcgaagatgtttttgccttctataggtttttctgagggtcagcagaagataacctgaaaatttatgaacatgaatgagcccttttagaattgtatggctctaacatgttatttcctttcatttgcttctctttgataaaataaacccttagtttttcagccccctccatattcatctcaatgttgctagaaactagaatggtgttttgacatagcaaatactaaataytaaatattctaaatactgaatgtttaaatgaatgtatgtttatctctcattaacccatacaggaaaatcttgagcttcatcctagaccagaaatacagaaaaagcctttcctttaggaatagaaaat

SEQ ID NO: 600081 - DNA, 636 bp, Homo sapiens
tgtgaaggttgtcaagattgggcaacattcatgacacaatagtttgagacagacataaggctctttgygagaaaacagttgcctgaaaattgagctgtttgcccaagcgaaaatgatgttgtccaataagagaactgtttgcgcagatgggcaaactgttgcctggataaattggtctgcaataatttcctgaaacaaacagcaaaattatttattagtttacagttttatctttataatcaagttatgttaacataggcagtctcagttctcagttctgtgaatataaaattaaataagatgttttcctgatttcaacacatttattatctaatgtgattgaaacacatgtaaacaaataattttggttggagaaggtgaaaatatagtatattagagacatagggtcaaaaggacctaattgttaattgaacatgggcataagggagaagaagaatctagaatatttcccacttatttaattgttttagcaaatcttggcaacacaaaataagatagaaaatatggggaaaaaaggtgaaggagaaagatagataatagtgtccattctagacaggctaactttgagataatcaaatagtaggtagatggcaaaatgggttagtattgcatgga

SEQ ID NO: 600082 - DNA, 671 bp, Homo sapiens
agatagtatctttcttacaacgataaagtcccaggtaaagtcctgttcctgaggaacatatattcacaatgaaatgtatcagatatgtacccctttccaacaacatacagaatggtttcagagtcatagaaataagcaagctctgaataaagcaatcactcttagaattcttttagagatgtaattttctattaattaacaatttgagttgactgtactccatggaatactacacaatcacaaaaaagaatgaaatcatgttctttgcagcaacatggatgcaacygaagaccattatcccaagcaaattaacacaggaacagaagaccaaataccacatgttcttacttacaagtgggagccaaacactggatactcataaacataaagatggccacaatagaacattgctaaatattggatactcatgaacatagagatggcaactgggcactaatagagtggggaagaagggagtagagaaagggttgaaaaactgttggaaactatgcctactatctgggtgacaggaatattaatatcccaaaccccagcatcatgcaatatacccagataaaaggtaacaaacctgcacaggtactccttgaatttaaagtaaaagttaaaattatgaaaaaaaagtggagtacttttaaaggtattgaaacacc

SEQ ID NO: 600083 - DNA, 671 bp, Homo sapiens
agatagtatctttcttacaacgataaagtcccaggtaaagtcctgttcctgaggaacatatattcacaatgaaatgtatcagatatgtacccctttccaacaacatacagaatggtttcagagtcatagaaataagcaagctctgaataaagcaatcactcttagaattcttttagagatgtaattttctattaattaacaatttgagttgactgtactccatggaatactacacaatcacaaaaaagaatgaaatcatgttctttgcagcaacatggatgcaaccgaagaccattatcccaagcaaattaacacaggaacagaaraccaaataccacatgttcttacttacaagtgggagccaaacactggatactcataaacataaagatggccacaatagaacattgctaaatattggatactcatgaacatagagatggcaactgggcactaatagagtggggaagaagggagtagagaaagggttgaaaaactgttggaaactatgcctactatctgggtgacaggaatattaatatcccaaaccccagcatcatgcaatatacccagataaaaggtaacaaacctgcacaggtactccttgaatttaaagtaaaagttaaaattatgaaaaaaaagtggagtacttttaaaggtattgaaacacc

SEQ ID NO: 600084 - DNA, 576 bp, Homo sapiens
catgcacaaacagaaactccaaaagcatataagtgcacatattcacacatatacacttaaacccgtgcacaaattcataccaaccacttccctctaggttttaattaaagtgccaattctaaagactgatgatttttaggagtaagtactcaaacatctaaataaaaggccggtggcatttttgacagctgacatggtgacggggatgcattgcccaagttttactggaataaatcatcttcatgctagctttcacctttgactccatttctctccttgctcccaaataggttctgggagagatgtctgcttaggcagaaatcagatgcaaggatcrgagatctatcgactccaaaatctttcctgaaattctatataaagcaataagaatggaaacattacatatcactaataattaagcattttattaactcgctcaaagacttagttttcctttctatgtctcatcctcactgtggtcatccaagccaagagaatatggtaaaccaatgggaagagagtacatctggggaaaagacaaagaggatgcatccttcaaaaagcacatttcatttt

SEQ ID NO: 600085 - DNA, 466 bp, Homo sapiens
ccggcgctatggcccacccagcaccttttccagctctattattttatcaaaatcattgccactagcagcagtttttgtgaatctggaaacctctcaaatcacaccatggaatactacttagccataaaaaggaacaaaataatggcatgtgcagcaacctggatggagttggagaccattattcattatactttttttttttttttttggagacggagtctgtatgtcgcccaggctggagtgcagtggcgcgcagctcactgcaasgtccgcctcccgggttcacgccattctcctgcctcagcctcccaagtaactgggactacaggcgcccgccaccacgcccggctaattttttttgtatttttagtggagacggggcttcaccttgttagccaggatggtggataccattattctaagtgaagtaactcaggaatgaaaaacaaaacattgtgtgttttca

SEQ ID NO: 600086 - DNA, 466 bp, Homo sapiens
ccggcgctatggcccacccagcaccttttccagctctattattttatcaaaatcattgccactagcagcagtttttgtgaatctggaaacctctcaaatcacaccatggaatactacttagccataaaaaggaacaaaataatggcatgtgcagcaacctggatggagttggagaccattattcattatactttttttttttttttttggagacggagtctgtatgtcgcccaggctggagtgcagtggcgcgcagctcactgcaacstccgcctcccgggttcacgccattctcctgcctcagcctcccaagtaactgggactacaggcgcccgccaccacgcccggctaattttttttgtatttttagtggagacggggcttcaccttgttagccaggatggtggataccattattctaagtgaagtaactcaggaatgaaaaacaaaacattgtgtgttttca

SEQ ID NO: 600087 - DNA, 345 bp, Homo sapiens
atttcttggacatattacttatctccaagcagtytgggtcagtacaactgtctgctcaatagcttgactttgagagcagccacgtcaaactgttcctacaaattgaggtttaaaacaacttaaatatttcattcaacggccgtttgcactttgcatttttgtgcttttattttcaccactagtcggtgctggtggctacaccatcaactgtatactttaggcatttctaaaggtagaagtatctcttctgaattgcagagaacagaatccgtgagtttttttcttaccttttcgcctcaggtactgagacttcccactctaggtcagaatctttgatgtaccatt

SEQ ID NO: 600088 - DNA, 483 bp, Homo sapiens
gcaaaccatcatccctactttattcccttggtcccccaccaggataactctgccacttcttaattctgtccataagatttgaaagaggacttaaaaattgatgarttttgttctggtagccataggcactagctgaaataccttaaaagtactcagagagtcttcatgactttctttatgttggtgaaacatttgcaaatttatattctcaccagaacaaaaagaactatagcttctgttccttaatattcctacccaattttatatacttttgacagttttatcacaactcctgtgtttgcagtagttatttttcccttcccttcatacatttatgtccagtacctgtggaccctccttgtgaactcttctctaatttctcacagaccaggaagggtttggaatataactggggctcagctatcaagggcctaagcataataaagtaaatgttcagttttacattttaaactcattttacta

SEQ ID NO: 600089 - DNA, 544 bp, Homo sapiens
accaggtcccatctttaaccagactgccagctgaatgcaactgcatgagtttaccttggggaggttagcaaaagaaagtttcaatccataacatcaagaaaaacatatgcttttggagcctctaaattttgaaagtggttatttagcaatagataatgcaattactaatgccataaatttttaatatgtattcaaggtgcacaacatgatgatttcatatacacatacattgtttaatgattgccacacccaaattaattatggtatctatcaccactcatgctgtatcttagctccctagaatttgttcaccttataactgaaagtwtgtgccctttgatcaacatatccccttttcctccacctccaagaccacctgtatgagtccatttcatgctgctgataaagacatacccgagactgggaagaaaaagaggtttaattggacttaaagttccacatggctggggaggcctcagaatcatggccagaggtgaaagtacttcttacatggtggcggcaagagaaaatgaggaagatgcaa

SEQ ID NO: 600090 - DNA, 532 bp, Homo sapiens
tctcagggttgtttttgcagggaaattgtgaaaaaataagtaacacctctaatccaatcttaattttgtttccacctatgaaaaagtagacttccttttgctttctaaaaagacggtgggaaaccacaaaataaaaactacaaaatgaccagctaacaacttcatgattaggtcaaaacctaatacatcaatattaaccttgaatgtaaatagtctacacacctcacttaaaaggtacagagtaagttggataaaatagcaagacccatctgtctgctgtctttaaragactcatctcctatgtaataacacacctaggctcaaagagttggaaaaagatgtgtcaggcagatggaaaacaagaaagagcaggggtcactaccttctatcagataaaacagactttaaaccaacaatagtaaaaaaggaaaagaatgggcattacataatgacaaagggttcaatttaacaagaagacttaaccatccttagtacatatgcactcaacattggagcacacagattcataaaa

SEQ ID NO: 600091 - DNA, 526 bp, Homo sapiens
atcagtaaacaatcaacagaatggaagaaaatacttgcaaactatgtatctgacaaagatctaatatctagaatccataaggaacttaaatatctcatcaagcaaaaaccaaccccattaaaaaattggcaatgaaaatgaacagacacttctcaaaagaaaacatacatttggcttacaaacatatgaataaattccaacattactaataatcggagaaatgtgaatcaaaaccacagtgacatattatctcacataagtcagaatggctattattaaaaatacaaaagcaacaaatgttgatgagtctacagagaagaaggaatgcttatacgctcttcatggaatgtaaatttgtttagccactgtggaaagcagtttggagatttctcaaagaagtaaaaatagaactactattccacccagcagtcccaacaatgggtatgtatctaaagggaaataaattgttctaccaaaaagacacaygcccttgtaagtttattgaagcaccattcacaataggaaa

SEQ ID NO: 600092 - DNA, 575 bp, Homo sapiens
tttttacttgaggtgtaatcaaacaataatattaatttactttctgtcaactcaggtttagatcaaatctcatatgtacagctgtgtatccacttggattaaattctttgacaaaatgcagaatttcaccattaagatacatttgtctaatagttttaagttttgtctaggaatatatctggctcatcacataggccgtattaatgaggaacatgagacttgtccccatgcaaaaatgtttttaaaaagyagcatttcacataaatgagagggggaaaatttaaaaatacagacgaacccggaagcatctgtgtaatcactcttggtggcctagttaacagccattttctttccctttttttcttaataacagcctacctcacatgacagaagctaaaactgccacattctcaatttagcctcagttgcagctaagcgtggcccagggtttggccaatggaacttaagaagtcttcagaagaaatccttagaaagatttccctctgttaagagcatgaataagaatgtcatccacgatgtattccacatttcatactaacttcgatcaagataac

SEQ ID NO: 600093 - DNA, 588 bp, Homo sapiens
cgtctgctctcttcaattttttccctaaaagtatggtcatatttatctactgaaaattaggattgtagggaaattcagctgggaaattgagaagtgtccttctcaacttcccaaagttcattttagattaatgggaaggaaatttacaaatggcgagtaaaaagagtctcggagtgatttagaaaacaatcagaataatctatttgtaaaggttaaatctatattactcaggaatatttaccagtgttctacagctcaggtataagaaggaagatgacagagyttccttgggaagtttttacgagtccagggctgctataagaaactacacagtttgaagaatatggaaattatcccgtggatttgggacccgaatctgaggattcaaaaactttaattcagctttaggacaggtatgtgttttttggccaaggtcacagataaagtaaaaatcagcatattacacacaaaatataagtatgtaaagggaatcttaccaagtgtaattatttaatagttttccttttatctctgtaaaaataagacagaataaacaagtaacatcaactctagagaaattgttcacaa

SEQ ID NO: 600094 - DNA, 573 bp, Homo sapiens
acaagtaacatcaactctagagaaattgttcacaaaataaagcaactagcgtgcctaaatgacactcttcatattttcctaaggagcataggatttgcttcaatgtatatttatcggtctcagagtaacaactttttcactgttgtgaaaatgccaccaccataaaatgtatcatgctttattttagcagattgaaaatggccctataaggcatggggcaatattggtgaaaatgaagagtgaactatcatggcaaatgtgcaatggagttgttggcagaaagaggatttatgatgcaatgcagaatattaaatagctttccacagaaaaagaagcagcatttgattacaaagtctytttaacctaaatatatattagagactgaaaaagtcctgcatatatatactgcaacccccattcaaagttttgcaataaaattcaagaacaaaaagaaaaacaatgaaacattaactagtctaagacgaaaacaatttggagtaaaaatatgaaatatgtcaagcattcagattttgagtgtgtagaagtgtgtgtgtgtgtgtgtgtatgtgtatg

SEQ ID NO: 600095 - DNA, 622 bp, Homo sapiens
cacatttacagcagattcttatcagagcccaagcaaaagaaagaaattgcaaggcgactccccaaatcaaaaagaaattagaagctgcccaaatatcctgattttcctcccttctactctggactgaagcatctttcttaattgcatgctctgagctgggcttttacatttttctcattttgcagatcctcaaactattttctttgtaacaggatggagaagaaagaagctttgagtcaagagagagattcccaaatagtatcgtatctacgagtttcacggcaacagcaagtaatccacatcaccaagtggaaagtctattcaatgacaaaaaaagtaggactgtcttttgtttctttctcccacagtatttgttattgtgagcagacaactttatagayagaagtgatgacaaatttaccttgatgccacaattttgtccccataaatcctgttcaatatttaattagaatggagaggtgtgtaaccaacatgactgaactcatgtgggttttgtcaggtgaagacaaatgtcttgccttttagtgtttttctttcattgaaatgtgttgggcctatttgcaaagaaaatgtaatagtcttacactatttagaaatagtt

SEQ ID NO: 600096 - DNA, 581 bp, Homo sapiens
tggatgtggtgggaatcactacccctgcaacttcaagtccttgatggtggcgctaatctctgcagtccttccagggatgtgatattgtctttgatttatgatttttctaggtagaggcagctctaatgggttccatttggcctttcccaccataatggccctcaccctaccagtcagggagtcagtgtgggggttctgccaattgctaagtatgtctatgccaattatgcattctggcactggggaaaattgactgcaggatgagtctggggaccccctgaacccactgtaagtaggacctaagctaaaattccattaattacctgacctccataagaccttactttaactggaggaccacagtgatcttttgggtctcctggaatcaacgtcagttcagagccagtgcccaggagtccccaaaatawctgaccatttccctttcccctgtgcacagttaccctggtaaaaggccttaagtttccttggggaaggatgggagaaagatcactgcataaattgtcagtaatgtagtggggtccttcctcaaagggacccagcctccccttcattcaaggggt

SEQ ID NO: 600097 - DNA, 461 bp, Homo sapiens
ctaaaagagaatatgtttctttggcagaaagaagctaaaagtactttatagactccacaacacatggtaaatataaggaaacaagctgttacagtaaaagtagaggtaattaattttttactccatacagyagtcatttattaaatattttacagaagaatcagtttcaattataatcattgaattttgttggggttttggtgtttagaagtctgctaacttctgtcaatgtttatttcttatgttaaatccttcagtgaacgtatggtgttaaatacattctgattatttggttcacatttcttgaaatctaggtgtacctatacttataaataataaagaaccaaagttattatctaaatactcaatagcaaaaaggctaaattttatgcttaaaatgactttagttatttattgaaagctgcttttataaatgtgtcgctatgtatacacaacacaca

SEQ ID NO: 600098 - DNA, 565 bp, Homo sapiens
tccttcttaacttctactgccttatttgttgcccacagtagtttctgtctggaacccttataatccattgtctccaaatcagtccctccagcatctccccattaaatctgtcttacactgtgctcgaatgattttttttttttcagtagagacctgattgtgtgactcttrtacctaaaactttcactgcccagagaatcaagtccaaatttctaggcacaacctacaggtctttcacagcctcttggcattctgcctttcaagactcatcttcctctctctatatgcctgattcattccttattgcaaaattgggtttctcagttttctttaacaaatgatacactttctcatgcatgcacctttctctacttgaatgccgtaatccacctttcctcaccatatgtcccttacagatttctatatatctttcagagcctaactaaaaagagaattcttaccatttttttcctgattccctaccccctaaaaaaaaatggaattttccccttggctgcctttgcatggtcctttcaaaagatattacagttttttgtcgtaatca

SEQ ID NO: 600099 - DNA, 395 bp, Homo sapiens
catttttaatcacccttgaaagaaaccccacactgattagcagccactccccatttcccccmagctcccccaagaaaccactaactttgtttctgtatccatagatttagctattctgaacatttcatataaatggaatgatatatatgtggtcttttgtgtctggcttctttcattcagcacatggtttccaaggtccatctatgttgtagcatttatcagaatttcattgcttttaaaagctgaataatatgtcattaaatgtacataccacattatatttatccattcatctcttgatgggcatttggcttgttgtttggccattaaaaataatgctgctctgaacacaagtgtacaaatattttcattcttttttgtggacaaataatatt

SEQ ID NO: 600100 - DNA, 607 bp, Homo sapiens
tacttcctcactttcctcatttattggcactgtaagccataggaactcgaggaaaaaggtttactcacagaattatttttgaaaaatcttccacaactaatttgtgcctattggcatcttcagccacatattagaagttaccattatcacatacaaaagctttttcttcatggagtgaagacatggtcagtcttctatgtcgaytgagctctagccttccacagatctgctgtatagaaggaaatattccatcccaactgaatcaaactgattttggacagcaaatggcaaatctcccttcctaccctgtccactacttggtgatgccttcatttacaaaactacaatcaaagaaaattggactagttctgatgatatattttcttttcttctactaaaagtagcagcacttggcagttgaaataaatgagaaggatattcttcctgatttaaatcacaaataaagtcaggtagggaatgtagaagataactttagctttcaaaatatacattcaaaccacacattaacttaaacatgtgattttcacttttcaggttttacataaggtagtgaaatgcaagtcccagtttctatatagctgagaag

SEQ ID NO: 600101 - DNA, 618 bp, Homo sapiens
gagagaaaagtatttcttatttgatggggactatcaggaaagagaaagtcataggtactaaaacaatgtgcatttctaagaagattgatggaagcttgcaacatccttgagaaaataagtactgatatttttccatctctttatatgaaaactaatgctcagagagttcagccttctcaaggtcaaacaatgactttatttcaagcatgggctagaactcagatcttggcttccccataatatttcagtttttttgccacctgctcctttgatggatgctggcatatcttgttttcagytgaatttcttacttctagaaagcgcggcaggaagcactctgtcaatagctccaggtctccttgaaatcgattgaggctctggactcctagctaaaatactgctcttatgtcaaaccacatgaaataagcactttttaaaaataaatgtgaactccaccttttgtggcaggaaggactattcaagataacaaatgaaaacagcaaattctcttgggaaggagaagggaaggtggcattctcttcaaaagcaaaattgggccatctcactaaataggacatcagatgtgagcagtcaatctggtctgcattgaacaacatc

SEQ ID NO: 600102 - DNA, 555 bp, Homo sapiens
tctgtcaatagctccaggtctccttgaaatcgattgaggctctggactcctagctaaaatactgctcttatgtcaaaccacatgaaataagcactttttaaaaataaatgtgaactccaccttttgtggmaggaaggactattcaagataacaaatgaaaacagcaaattctcttgggaaggagaagggaaggtggcattctcttcaaaagcaaaattgggccatctcactaaataggacatcagatgtgagcagtcaatctggtctgcattgaacaacatcattgcctgggttgcagtcttctaatagcctttgtctttttaggttttgggtctgtgtttgcagctgaggtgaaaatgagggtgggagaaattaaatggctatttctcttacttggcatctaccttgccatgcccctggacctgcctttcctccctcttctctttgtcactttgatgccttcctttcttccttttttctttcttcctctcgtgctccctccctccttctctaccttcccacccgatggtaatcaggttccttgagcagtggcag

SEQ ID NO: 600103 - DNA, 555 bp, Homo sapiens
tctgtcaatagctccaggtctccttgaaatcgattgaggctctggactcctagctaaaatactgctcttatgtcaaaccacatgaaataagcactttttaaaaataaatgtgaactccaccttttgtggcaggaaggactattcaagataacaaatgaaaacagcaaattctcttgggaaggagaagggaaggtggcattctcttcaaaagcaaaattgggccatctcactaaataggacatcagatgtgagcagtcaatctggtctgcattgaacaacatcattgcytgggttgcagtcttctaatagcctttgtctttttaggttttgggtctgtgtttgcagctgaggtgaaaatgagggtgggagaaattaaatggctatttctcttacttggcatctaccttgccatgcccctggacctgcctttcctccctcttctctttgtcactttgatgccttcctttcttccttttttctttcttcctctcgtgctccctccctccttctctaccttcccacccgatggtaatcaggttccttgagcagtggcag

SEQ ID NO: 600104 - DNA, 648 bp, Homo sapiens
ttttcttgaagcctactttgtctgatagtaatatagccatatctgcctactttcaaatgcttattatatgcacagtctatctcttttcatcctagtacttttaactcctctgtgtcattatatttaaggagcatcttgggtagctacatatatatgggtcttattttttatccaatatgrcaatctcttcctttacattaaaatgtgtagcctatatatattttatataattattgatagggttgaatttaaatttatcctattgttatttgtttttaatttgttccatctgttttttattttattattgttctgttatatattgtttaaatatatagtttttgttttattttctgtttcactgttacccttttcctttatttaggtcaatcaatttttaaattattctatttgtttcttttattagattttaaactcatgtattttggggggtggggggatggtcaacttagggactataatatgcatccttcacttaacaaaatatgcttgcaattaataattttctactcaaaattcactctttacacttcatagtactcaccactcctcaataacagtcatataataatacaatcccatttactcctttcttcctgcaaatgtggtactatattttactttact

SEQ ID NO: 600105 - DNA, 592 bp, Homo sapiens
tatatatatacaccacattttctttatccactcattggwtaatggacatttagactggttccatatttttacaattgcaagttgtgctgctataaacatgcatatgcaagtgtcttttttcgtataatgacttcttttcctctgggtagatagataccaaggagtgggaatcctggatcaaatggtagatctacttttagttctttaaagaatcgctctattgttttccatagtggttgtactagtttacattccaaccagcagtgtaaaaagtgttcccttttcaccgcactcactccaacatctgttatctttttattttcaaatcaaatggtggctattcttcaggagtaatgtggcatctcattgtggttttgatttgcatttccctgataattagtgatgctgagcttttttttcatatgtttcttggccatttgtttaaatttttttttaattttaataggttttagggaaagcagatggtatttggttacatggataagttctttagtggtgatttctgagattttggtgcactcaccaccggagcagtgtacattgtacccaatgtgtaatcttttatccctca

SEQ ID NO: 600106 - DNA, 512 bp, Homo sapiens
tattccacagtatatatatatatatacaccacattttctttatccactcattggataatggacatttagactggttccatatttttacaattgcaagttgtgctgctataaacatgcatatgcaagtgtcttttttcgtataatgacttcttttcctctgggtagatagataccaaggagtgggaatcctggatcaaatggtagatctacttttagttctttaaagaatcgctstattgttttccatagtggttgtactagtttacattccaaccagcagtgtaaaaagtgttcccttttcaccgcactcactccaacatctgttatctttttattttcaaatcaaatggtggctattcttcaggagtaatgtggcatctcattgtggttttgatttgcatttccctgataattagtgatgctgagcttttttttcatatgtttcttggccatttgtttaaatttttttttaattttaataggttttagggaaagcagatggtatttggtta

SEQ ID NO: 600107 - DNA, 548 bp, Homo sapiens
cctttgtgtcctcatagcttagctcccacttatgagtgagaacatatgatgtttggttttccactcctgagttatttcacttagaataatggtccctaattccatccagattgctgcaaatgccattatttcattccttttaatggctaagtagtattccatttatatatatatataatgtgatatatatgatacatatatatatcacattttatatatctatgcatgtgccagtgtctttttttttttttttttttttgcataaccactacttttcctctgggtaaaataccaaggagtgggattgctggatcaaatggtagatctacttttagttctttaaraaacctccacactgttttccatagtggttgcactagtttacattcccaccaacagtgtaaaaatgctcccttttcaccacaaccatgccaacatctattttcttttgattttttgaatatggccattcttgcaggagtaaggtggtattgaattgaggttttgatttgcatttcccggataattagtgatgttgagcatttttt

SEQ ID NO: 600108 - DNA, 618 bp, Homo sapiens
cagcacctgcatatgatatccccagtatttagtcttggtttagagaattttcttacatagctgctgatttccctcaaagtatgtatcccaagagaatctgtattttctgatgtaggcggggacgttacacacagtcactatcacaacagtctattttttttttcaaaggagtcagtgatagcagcagatattcatgaggattaatcctttaatccattaattaatcctaattaatgttgtgcttctccctacattcagacttctgtccattttcttctttccctttatgtatcacctccagttttgtacttctcttaaccccaaattgtctgtccttcatttcacagagcctattccctttcttgaatgtttcattgatacccacccttcaattatgcaaattacattgccatacctcctaagtatacctgcattttaatgaaggcaaaaagaaagactctaaagtatacatatgtatcaaatctgcatgttgtgcacatgtacsctaaaacttaaagtataataataataaaatttaaaataaagataaattgtgagacattgatggtagtaatagtggagatattttggagttaattgtgtgagtttgggaaactt

SEQ ID NO: 600109 - DNA, 382 bp, Homo sapiens
tctttcttgacccaagtatggttccatgccagaaacttgtgtgaatagagataccatagcctctaagggatccaaagacrttctgaagtcacatagatcctatcacagcagcactccaacttattccagagacaaaacagctcaaatgcaagcagccacatgggcacttttctcatgacccttttgtgagaatcaaattctgaatgacagatcagctcagagacctcttctctgcctaatgaacaacaactttgtagtcctaatagctactgctgtttagaacaagataagagaataatttccccatccaattggatacccatttgttgcatgtcctttctatttcaattgagaggcatcttatctgtcattattttaactt

SEQ ID NO: 600110 - DNA, 382 bp, Homo sapiens
tctttcttgacccaagtatggttccatgccagaaacttgtgtgaatagagataccatagcctctaagggatccaaagacgttctgaagtcacatagatcctatcacagcagcactccaacttattccagagacaaaacagctcaaatgcaagcagccacatgggcacttttctcatgamccttttgtgagaatcaaattctgaatgacagatcagctcagagacctcttctctgcctaatgaacaacaactttgtagtcctaatagctactgctgtttagaacaagataagagaataatttccccatccaattggatacccatttgttgcatgtcctttctatttcaattgagaggcatcttatctgtcattattttaactt

SEQ ID NO: 600111 - DNA, 529 bp, Homo sapiens
agatcttccattgatctttatctttctaggtcaccattagattttaatggttcaacttcacatagggattcttctattctctacaataaagccagagcactcctgcgagaaaatggggaaaattttgtaactctgtttataccctatcaacaggtccacattaaaatttaaacatttccaaaattatgactggtgtatatgaaaaatgtaaaacgagaactcgggaatcagatttaacttgttgttgtttttgttaagaatctatcatcccattctgcatcatcaaatcmtaacttgggtgcctactatgtttcctgtgctctgctaagaataagacccctattaaaataacggagacagaatttctatctttaaagcttttgatcaggatcagaaggtatattatccataagaaatacaaaaggaataaatatgtattagaagaatgctgaaaaatgttgttaaccataggccaggcctcattctcacttctgtactgtcttacagtaatggtaatcttctagcacca

SEQ ID NO: 600112 - DNA, 529 bp, Homo sapiens
agatcttccattgatctttatctttctaggtcaccattagattttaatggttcaacttcacatagggattcttctattctctacaataaagccagagcactcctgcgagaaaatggggaaaattttgtaactctgtttataccctatcaacaggtccacattaaaatttaaacatttccaaaattatgactggtgtatatgaaaaatgtaaaacgagaactcgggaatcagatttaacttgttgttgtttttgttaagaatctatcatcccattctgcatcatcaaatcctaacttgggtgcctactatgtttcctgtgctctgctaagaataagacccctattaaaataacggagacagaatttctatctttaaagcttttgatcaggatcagaaggtatattatccrtaagaaatacaaaaggaataaatatgtattagaagaatgctgaaaaatgttgttaaccataggccaggcctcattctcacttctgtactgtcttacagtaatggtaatcttctagcacca

SEQ ID NO: 600113 - DNA, 576 bp, Homo sapiens
tcttaactttctttatattatccttccaattcaatagcttcccctgtccattataacatgacccatatctcataataagcagtagaggccgttgccagaaagagagaagaaaacattggtgtttgctgtgttsatctaatttggggacttcaaggtaccctgataagtggagacctggagtcatatttgagtagccctcatctaaagcaggtgccactgacagcttggtgccaatgattctgttcttagaaaaatctccctccccaaggctagcatcaacacacaagacagacaccttaggtacacagttctgaccagaataatgagaaagtcagacatcctgtttctggttatatgcttgtcatgcataagactatgaaattttctacttttaagcaagatgcagaatttcaccaagaatatagggtgttagagaatatttcagtcatcctaagagatactcttctaggaaaaaaaagggaaacaaatcaaggacaaactgagagtgggaggggtgagaatggaggagatttgaaatagtttctgaattcttttactcccatgagtccagtgttc

SEQ ID NO: 600114 - DNA, 560 bp, Homo sapiens
tttgtgtttctgccctccttgatatggaaggagaatcaggacacagagataatgaatttattaagctgagtttttaatccctaactgcagtttatttagccaagaaaataaatgttaactggctaatttacatgtctcttccataagccacataggttgtaaagtctttactttttgaaaaaatacagtataatgaatactctacctggttactttttaaattaatcaccrtattcatagaaaggaatcaacaccagaatcttatactaacagtataattcagaataatggtcttcctccctccactgtaatcagcttctgctggtttgtctattttgcaggatttatggcttatatttcagtgttgctatggttatcccagcttcttccctttggtctgttaacaatgaatattttagagatcttttacttgatactcttactgatgttttttctacttcatgatgtaaagctagaatcaatatgtttttccttctactttatttatgagactataatctcactgagtcaaagcctgaaagaaatcttgtgttgggtaa

SEQ ID NO: 600115 - DNA, 469 bp, Homo sapiens
agttagaattttagtacagatggaaacacgactctcagaaacaagttctgcccatgtgagaggagatgctgacttttggtgcctggtccctgccttttgtccccaactaccccttgatgatgatttgcactttggttctgcccactgtggctctgtcactcttctcttctttcctctgtctcaggcgaggaacctatgacctcattttctccagggtttcaccttaaatggaagaacattttaaaactcacactcaagtgtctgtcagaggggacaatgctcaatatatgagaaagaatcacaaattacacatgattaggcattatagaaaacaaggatgaaagtatatagaggacatttgaagtctaatgctagagagacaatgccctgaattactgtcacaacagtcaatrtttagaccaaaatgtgctatgcaaagaataagcattgggatctgaggaaaagatct

SEQ ID NO: 600116 - DNA, 570 bp, Homo sapiens
ctctctgttatttaggttgatgtatcttgtgtcataagtgggatctgatgtacaacaccttcggaaggaattgatgattcttggagccagtgtacagtactcactagagccctttaagctgtccatttctatggcctgcyttttctgtgctggtggtcttttctcaagccaatcctccctcttttaggtaagctccctgctgacttcatataggatctgatgtggataaggtcatcttaataataaaggacctttggtgagtatattccttacatttctatgcaacaagaaataggatcttcatggttcttgagagattaataagaaatggaatgggattctcaaatattaagacatgccaggttttctgggactccagctagctacatattatggcccatcctcatgctcatgtttaaattgatgggcaaatctcatcaagaaaaattcagagcttaaatgatcattattcaaactaaggaacaacaactatacggttttaaagtctgaatgaaatgctggcatgtagaagcttctaacttccccatttttcttttttccctgaatact

SEQ ID NO: 600117 - DNA, 549 bp, Homo sapiens
cacttctgaataaactcaatatttttggagactctctgttatttaggttgatgtatcttgtgtcataagtgggatctgatgtacaacaccttcggaaggaattgatgattcttggagccagtgtacagtactcactagagccctttaagctgtccatttctatggcctgctttttctgtgctggtggtcttttctcargccaatcctccctcttttaggtaagctccctgctgacttcatataggatctgatgtggataaggtcatcttaataataaaggacctttggtgagtatattccttacatttctatgcaacaagaaataggatcttcatggttcttgagagattaataagaaatggaatgggattctcaaatattaagacatgccaggttttctgggactccagctagctacatattatggcccatcctcatgctcatgtttaaattgatgggcaaatctcatcaagaaaaattcagagcttaaatgatcattattcaaactaaggaacaacaactatacggttttaaagtctgaatgaaatg

SEQ ID NO: 600118 - DNA, 561 bp, Homo sapiens
gcactcttataaattaatacttgaaacagcaaaaatgtatagtaattaacccaaataccttttagtttatgtgacttaactaaatatgtaacaaatatgctggctttaattttgtttgtaaaataaaaatgaagatgtcttcagaattgttagcatgtattttctttcacctggacttactggtcaagcagagtgatatttgtctctgctaaatgtttaaaaacagaatgatcagtgttaatataaytctttgataaggaaagctagtttaacattgttggtttagtgaaaacagctatatcttctgagttattggcaaaatatccagatatttaactttaacattcatacttaggtgaatacctgatattcacaggctataaaaatagttagcagaaaaataatagaaagaatgactagctttgtctaatacctcagttttcatgagaaatctaagcataactacaagaaataaattaggtaaatgtaaattgagtaaatgtttgcaaataaatttttcatgaaacttgaaatcttaaagctatgatttattgaattaac

SEQ ID NO: 600119 - DNA, 617 bp, Homo sapiens
catccttttcctccttgggagaaagggcaacagatagaagcccgactcagccacctccttacattttaaaatgttttccaaaagtgacaatgacccagggccaaagacttggatagtcattcccttctccctgaactccagccatctaatcatgcctggaatctccactaaggagaatayggaggagtgagagccacccttcagaagtacagctgtgtctatctaaaaccacattctgctggcaataaccagcattctgggcacatgaatattaggaaatggatatgcgaagagtcacacaccagaaatcttctcctgtatttccacagaaaaaggataataacaaaatgagatctgtggtaaaggaagtgaattcatcagagcaagggccaggaactgaatacctttctcccattagaaaaatttactggttgggaatcttaatgaaaaccagcaggaagacttggcctaggagttcttactgacatgtattcaagctgctgcctctctccccctcctcttagataacatgtttcctccaaagttgagtagttttagatgttaagatcacagtttccaaaaggtagcgcctcatgaaaagattggttaatattaag

SEQ ID NO: 600120 - DNA, 552 bp, Homo sapiens
cctgaacctaaaataaaagttagaaaaatataaaataaatacatttcaacaacaataaaaagagacaaagaagaggaacacccctaaaccagcagttctcaaccttggatgcatctggacgattttgaaaagtacttatgtaatgcctcatcccacaccaaataatctggaatgtcttgcaatgggtccccagatgatttttaacctgcaaccaaggttgaaaactaccgccttaaactctaggccttcaacatgtgcccgggtactcaaattcccagcattgaacatgtttttaagctttatgcacaactaaaataggttaacaatatcttcatcaggtcaacaagtaagtattccaagttcgctccctggtcatgcagattccatgagaccatcatctctccatgttcagaagagtttttcaaatgatagytgcaaactgaaaattgaggtctttgagacaggtgagcttattctaagctgcctttaaaaagatttgatcagatgcaacttgaaatcatggaatgagttcaaaataccgtaaaacagtgc

SEQ ID NO: 600121 - DNA, 640 bp, Homo sapiens
tggtgtaaagcttgttataatatcttgaataaaaggtggtcctgatattttagttaaaaaaaaagaaaatagtgttcaaaaaatttaggaaatccagttaccagttattttaaacttaagaagaaccaaagatcaaaactgattttataagttcactcactcactcatgaataaatatttattaaatgtctaagaccttcccaacattgttttagatgctgaagatattggagaaaataagtaaaatctctgtcttcatggagctcatattttggtggtacatttttcttttaaggaaattaataggaaaagaaaggctagatttttccattagcctgtttacttattgcttcttgtgttcttcattattttctgcacatttggcttttcatgtagtgtcatttttacagtttgaaaaattttcctaattattttgtgtagtgcaggtgtacttgagacaaattcycttagtttttgtttgtctgagaactaagtatttctctctcatatatgaatgatatttttcctggatatagaattttaggttgatattttttcttccaatgttttaaagttgccattctattgttttccctcttacgttatttctaatgagaagacctaaaatcaaatactctgc

SEQ ID NO: 600122 - DNA, 600 bp, Homo sapiens
atgataaatgttaaaaaattaaaagagaaggggaataagaaatgtaagagagatggtatgttagtctgttcatgggctgctaataaaaacatacccaagactgggtagtttataaaggaaaggggtttaattgactcacagttccacatggctggggagtcctcacaatcatgrcggaaggtaaatgaggagcagactcatgtctcacctggtggcaggcaagagagcttgttcaggggaactcccatttataaaaccatcagatctcgtgagacttattcactaccacgagaacagtatggaggagaccgcccccatgattcaattatctccacctggccctgcccttggcatgtggggattattacaattcaatgtaagatttggatggggacacagccaaatcatattagatggtgtgtgtgtgttgaagttttagatggagttgcctggaaaagcctcattgagaatgtaatagagacatgataaaaagaacactgagatttttagatgtggtattagataagtcattcaaatttataatgtctcagtttcctctgtttgaaatgagtgggtagagtgaaaatcaggtgaagtgaa

SEQ ID NO: 600123 - DNA, 600 bp, Homo sapiens
atgataaatgttaaaaaattaaaagagaaggggaataagaaatgtaagagagatggtatgttagtctgttcatgggctgctaataaaaacatacccaagactgggtagtttataaaggaaaggggtttaattgactcacagttccacatggctggggagtcctcacaatcatggcggaaggtaaatgaggagcagactcatgtctcacctggtggcaggcaagagagcttgttcaggggaactcccatttataaaaccatcagatctcgtgagacttattcactaccacgagaacagtatggaggagaccgcccccatgattcaattatctccacctggccctgcccttggcatgtggggattattacaattcaatgtaagatttggatggggacacagccaaatcatattagatggtgtgtgtgtgttgaagttttagatggagttgcctggaaaagcctcaytgagaatgtaatagagacatgataaaaagaacactgagatttttagatgtggtattagataagtcattcaaatttataatgtctcagtttcctctgtttgaaatgagtgggtagagtgaaaatcaggtgaagtgaa

SEQ ID NO: 600124 - DNA, 665 bp, Homo sapiens
gtattaaaatatgttgtgtcctgtaaatatgcacaattatgtgtcagttgtaaaaagaataaaagtaaaataaaagatgactctcagaatgttacctcaaaatcaaaaccaaaccaaaccaaagcaacagctatattttctttgtgcagctcctgtgtcaaacagcctgaaacagataargtacaaatgtgacaaaatttgatttgtctccaacaattaccctcaaccacactcagatgaaacagccttctaggtagaactgatagctttcttgtcactttcaattaataaaaagtctaatccaaataacttcattgtcttggaggtgccaaagatttcttaaaggagacatgaaacatataaccataaaaatattaataaattagactctattaaaattaagaacttctgttcatcaaaagacatcattaaaagggaataaaaaagtaacttaccaagtaagagaagatattcacttatgaatattgagattcatatggattcatatccagaatatataaggaagccctatatgtgagtaagacaactcaaaaaaacggatgaaagattaaacaaatatttcaaaaaagtaagtattgagatggccaataaacatatacaaagttgtttaacttcattagtcatcagaaaaatacaaactaaaa

SEQ ID NO: 600125 - DNA, 560 bp, Homo sapiens
ctgttcatcaaaagacatcattaaaagggaataaaaaagtaacttaccaagtaagagaagatattcacttatgaatattgagattcatatggattcatatccagaatatataaggaagccctatatgtgagtaagacaactcaaaaaaacrgatgaaagattaaacaaatatttcaaaaaagtaagtattgagatggccaataaacatatacaaagttgtttaacttcattagtcatcagaaaaatacaaactaaaactatgagatattattacccaaccattagaatagctcaaatgaaacagaaactaccaagtataaaattaagatgtgaaacaataggccttccacacagttccttaaaaaactatttgataactgatatagtttggatgcttgtccccttgaaatctcatgttgggtgtgattctcagtgtcgaaagtggggcttgttgggagatatttcagtcatgggagtagatccttcatgaatggcttggtgactttcttgcagtaatcagtgagttaatgtaaagtttagttgtttaaaagagtgtggca

SEQ ID NO: 600126 - DNA, 560 bp, Homo sapiens
ctgttcatcaaaagacatcattaaaagggaataaaaaagtaacttaccaagtaagagaagatattcacttatgaatattgagattcatatggattcatatccagaatatataaggaagccctatatgtgagtaagacaactcaaaaaaacggatgaaagattaaacaaatatttcaaaaaagtaagtattgagatggccaataaacatatacaaagttgtttaacttcattagtcatcagaaaaatacaaactaaaactatgagatattattacccaaccattagaatagctcaaatgaaacagaaactaccaagtataaaattaagatgtgaaacaataggccttscacacagttccttaaaaaactatttgataactgatatagtttggatgcttgtccccttgaaatctcatgttgggtgtgattctcagtgtcgaaagtggggcttgttgggagatatttcagtcatgggagtagatccttcatgaatggcttggtgactttcttgcagtaatcagtgagttaatgtaaagtttagttgtttaaaagagtgtggca

SEQ ID NO: 600127 - DNA, 571 bp, Homo sapiens
agttagtttcctctctgacatcagcaacctctccattcagtgttctcattcaactactccaaatatcttgcttcttctcagaatctccaatacatagatatttgctctccctccatatacttgccccgttctgttttcactttcttccctctgtggtttaaaatgcaagattcttatatcaattatggtgttggatgcatttaatttatatttctagattcattatctatgcttttctgtctttctctaatcttttggcttcatcaaagaaataaaagataactgaaaatatcagtaaaaaggatgatgatagaaattatttaatgatagtaatgttttttaaatgtgaaatttagagagacagaaaagaatataagcattatatagcctgaaaatttagaaattctaacaactaaaaaaaatggaggggaagagggaaagacgttggacacgataaatttgcctgtctcatttgtaatagttgtgtgtaaagtgatataatttaaagcaaacaaatcaagtaataagtktataagtatatttaacagtacaaaatcaaacagtaaaaaaa

SEQ ID NO: 600128 - DNA, 570 bp, Homo sapiens
ccaccataatccaattacttcccagcctccatacgtggggattacaggtccctcccttgtcatgtgggaattacaattcgagataagatttgggtgaggacacagagccaaaccacataagcattcaataaatggtgtcrgggcaagtggatagttttccagatcaatgacttgcattgtacaccaggatacaatccaattgaattaaatgtttaaatgcttttttaaaaagacagtactaaaactaaaaaaatccagatattataagagaaaagattaataaattctactaatgtttaaataaagtattttaatttttaagcgaaaatttctacatgtcaaaaataccataaaaatcaaaggcaattaacatggtaaaaaaatacaacttatgtaacaaagggctaatatctgtaatattgaggaactgagaagaaaatggctgaaaacccaagagagaaatggacaaagtgtatgattcacagttcacaggaaagacataaaaatcattcttaaaaataaaggatgccccacctcattcattatgcaagcaatgcaagttacaactac

SEQ ID NO: 600129 - DNA, 439 bp, Homo sapiens
ggcatggcatacatttcctctctcatcaaaatggcaaaaatccaaatatttgattatactatatgttgtaagagtctaggggaaaagctactttcatataytgtgttcagaattttaattattatcactcctatggagggcatccttgtactctatcataattacaaatgcacgtatgctttgtcctaagaaatcaacttcttgaaattaactttatggttatttccacacacataataaatgaatgtataaggttattcactttacattgtttgtgatggtaaaaactagaaacaatataaaggtacatcaataggaaattgggtaaataattaatagagccattaaagatggaggaaacacactttgtattgatgagctagatatcccctgtttgtccttctaatccaggagttgaaaaactacagcttgaaagtca

SEQ ID NO: 600130 - DNA, 439 bp, Homo sapiens
ggcatggcatacatttcctctctcatcaaaatggcaaaaatccaaatatttgattatactatatgttgtaagagtctaggggaaaagctactttcatatactgtgttcagaattttaattattatcactcctatggagggcatccttgtactctatcataattacaaatgcacgtatgctttgtcctaagaaatcaacttcttgaaattaactttatggttatttccacacacataataaatgaatgtataaggttattcactttacattgtttgtgatggtaaaaactagaaacaatataaaggtacatcaataggaaattgggyaaataattaatagagccattaaagatggaggaaacacactttgtattgatgagctagatatcccctgtttgtccttctaatccaggagttgaaaaactacagcttgaaagtca

SEQ ID NO: 600131 - DNA, 669 bp, Homo sapiens
tatttaatataatagcagttatataacaattcctttggtaagatgtatataaaagcttttagtttgactagtattacaacactttttgttaaaacagaccattcgaagatgggactcttctgtaatcagtccaatatatgactatccaaagtcacaagaatatgtacagattgaccaaagttgtgatgactttatattgctaaatccttcaattaatagagagacagtcttgatttgaaagaacagtggagggcaatactttcaaatagttctgcttatttaacctttcccgctttacctcttaaattcctaatataaaaacagctaacatttgtgaaagatttattatattccaggttccatgccttatgccacttaaataaattatttctgacatttccacaagacacaataagggaggtatctctaccatccctatttctcagatgaggagattgaagcacaaagaattgaactaatttgcccaagtagtaggttgaaaaytagggattcagattcagctccacaggactccagaaacacagctgttagtcacaacattatcccttttaagtatctgaaaattaacagctcgtattcaaagctctctgataaaattgaagaggagcatgccattctaaagcacaggttcttcaatatagtaaatag

SEQ ID NO: 600132 - DNA, 460 bp, Homo sapiens
ctatggccttagaacgtgatggctcaaatcagaagtgaatgcaattgaatcagcccatcctaactgaggaatttagtagaatataaatctactaaagcagtgctagtcctgcaggttggcttagtacaatagttaggaagctggtggtgtttacgcagagctatataatgctactagctctctaaacactggtatcacttacagctttgttttaatcttagaatatgttccaaattcacaaacgcttgcagaccaggacacatgaacggtatttgccaagtacttcagtttctgtggaattttrtggttggttggatttttaacccaagtactgctgataggttggtccagcagtaggactggaagcaggtaaagtgagaccagatttttaccttctgtgtctctgtcattaagtctaagatgagtcatcacagaaagcctacaaagcagcctggtttct

SEQ ID NO: 600133 - DNA, 564 bp, Homo sapiens
gattaaatgcagtaacttaatttagagaagggttaataataataacaacaaaatgatgagggtgatgatgcttttccttctttaattyattccaagtttggaaactgaactttagagaatcagtaacttgcccaaggcattcaattaagtgtgtatgaagcacccactccactctagacatgttctgggtgcctgagttttgccagtgggcaaagtggacaaaaatcaacactctcacagagctcacattttaggaaagacagaggatacataagaatataattaataaagaaaatatttggtgtgttagaaggcagtaagttatatacaaaaaagaaatgtggaataagataaaaagggacggggtcaggtgtattgaggtgtggtatgattttaagagcctcaggggtacgagtgagatttggcagaattgaaattcagggaggagttggccatggagttacagaggaagagacttgcaggctgagggaaacttgtgcaaagcccacaagactgggatatgtcttgaatattctgaaaaacaagggagctttggctggcata

SEQ ID NO: 600134 - DNA, 511 bp, Homo sapiens
tgtggcaattcagttgagagatgatagcagcttggatcagggaggtgttaagagtcagggcatggatctattgtgaaggcaaattcaataggaatttctggcagattgcacatggggtatgttaaaaggtaaccttaagcacattaaaattttaacgagtttatttgcacaaacagtgattcctkaatcaagcagcatctgattgcaagcagttcagggctccactgagggagcccagggggaacactctcaagaggtgttagaggaagcaagacaaagaaaatatttgattggttaaagtagcaagttcctagttagatgttagttggtgatttctgattggttaagcttaagttttgtcttattgtttgcattgagttgggattgggtttgcttattagcaacacaaggctctggagccagctcagtctaatgacctcacaagtataattgtaatgctgtgaagaagtggaaggagttactgatggcaaaaatgctttggccagtcaac

SEQ ID NO: 600135 - DNA, 522 bp, Homo sapiens
gaatagacaaaacaaatttgaaaaagaagaatatggttggagaaatcacacttcccaaatttaaggcttctacagttatagtagtcaagacggtgtggtattgacagatgaacacacataaatcaatagaagagaagagaagagaagagaagaaaatcctggatagacccactcaagtacagccaactggtacttgacaaagatgcaaaagcaactcaatggagaaaagatcatcttttcaacaattggtattgaaacaattggacattgaaaggcaaaataatgaactctgacwtaaacctcacatgttatgcaaaaattaactcaaagtggattatagatgtaaatgcacacatgcaactttaaaactttgaagaacaaatttttattactaagcattagggagacttcttagaattaaaccaaagtcaaaatttacctaagaaaatttgataaataagacgttatcaaaattaactattgattttcaaaagacattgttaagagaatgaaaagaaaaac

SEQ ID NO: 600136 - DNA, 239 bp, Homo sapiens
gaattctctttctgggcgctcaaggaaaataataatggaaagatctctccaaagtcatggagtcaaatttccragatgccaggccactaaggaacatttcttcaaggcttgggctctctgccttctccacctcttggaaaaagtgctcaagcttacagacagactccttccttccttccctcagcatccactaccagtgggcttgttcagcactgacattagtgagcaggcagaggctg

SEQ ID NO: 600137 - DNA, 589 bp, Homo sapiens
atgctcatgttttaaaatgttcagttctttggattaaatgttcagttctttggatgaaagatgctatattccctcggtgtaaatgaataaaaagattataaaaagaaacccactaatctgtcccactattatactaaaacaacttggtaataattaactggtattattgtattattctataattgattattagtaatttaccttttaactacttgattgaagattaacttgacctgtaaaacgaacctaaacagtcagacttactttttcaaaactggtttgtcacccaggtgcagtggctcacacctataatgccagcacttagggaggccaaggcagaaggatcaattcagttcaggagtttgagaccatcctgggcaasatagggagacctcatctctatttaaaaaaaaaaattaaaatcagggaaaatggaagctaggagacagagctaatgtgcagctcccacatggatggacagaacagcatgtggagactcacaccatgatcttttgctctaagaaccatggcaggaacataccaggaaaagcgaaaaaattcacagagcctttgaaagaagcagcacgcc

SEQ ID NO: 600138 - DNA, 451 bp, Homo sapiens
cacacaatgcttctgccaaaactaccatccatgggcttatagaatgctttattcatcattgtagtagtccacattgcattgtttctgatcaaggaactcactttacagcaaaaraaatggagcaacggacccatgctggtagaatttgctggtctgatttatgttccccatcatcctgaagcaattggcttgataaaacagtggaatagcattttgaagtctcagttatgacaccagctaggtggcaatttcttgcaggggtggagtgaagttccccagaaggctgtatatgctatgaatcagtgtccaatataagatcttgtttctcctacagcaagtagcactcacaggtcaagagatcaaaggacaagagtgggagtggcaccactcactattaccccgagtgacccactggcaaaatttttgcttcctgttcctgactttatgcttt

SEQ ID NO: 600139 - DNA, 454 bp, Homo sapiens
aatcattctatgaaaaagacatatgtacacacatttttatagcagcacaatttgcaattgcaaagatatggaaccgacctaagtgcccattgatcaaagaatggacaaagaaaatgtggtatatatatataccatggagtattactcaggcattaaaaggaacaaaatgtcttttgcagcaacttggatgcagctggaggcyactattctaagtgaaataactccagaatgggaaaccaaatactgtatggtctcactaacaagtagcagctaagctatgaagatagaaagacatacagagtaatataatggactttagggactcagtgggaaggtaaacagggggtgagagatagaagactacatactgggtacagtgtacactgtttgggtgatgggtgcaataatacctcagaattcaccactatagaattcaaccatgtaaccaaaaacg

SEQ ID NO: 600140 - DNA, 432 bp, Homo sapiens
atgacacattgatgggtgcagcaaaccaccatgttacgtgtattcctatgtaacaaacctgcacgttctgcacatgtatcccagaacttaaagtataataataataataaaaatacaatcctagggtgacaaagagaaaactatacactgtaacctgtaattttacaatgcagccaaaatgaaactttccttttcaggaaaaayttttgggccataagaagtgatccactgtatgaagtttcaattatgcaagatgagtaagttccagagatctgtacagcaatagtacttctagttaacaatactgtgttataaacatttgctaagaagatagaacttaagtgttcttattataaaaaattaatgaatgaatgagtgagtgaatggataaatagagcaggaggaaacttttggaggtgatggataggttta

SEQ ID NO: 600141 - DNA, 541 bp, Homo sapiens
gcaaaataaatttgttcctttaatctggcagacattaagccactccacaactctgagtaagattsactaattacctaatgcatttaaaattgtctctgagttataaagacctttgcttttttttctttacctgtccactgatgtctgctaatattaattagattgtaaccactaaattaatataaagaaaaataaagtgcataaataagagatagaaatgacgttgcctttctacatattttatgttttttcacctcaggcaatgatctaaaatattcttcacaggaaagtggctgtatagtgatagaagcttttactcaaatattgtaaaggtttaatgatttcagtaaatcatcattaatcttgctaatgaaatttctgcactttaagtggtaattgacaatttttttagctccataatattttcataatttacctgtttttaacctgcccttcatatttttatgctgcaatggaatatcttatttatataaaccactttctgtttttaaagagcgtattaaggtcatctgtactctct

SEQ ID NO: 600142 - DNA, 589 bp, Homo sapiens
taactttttaaatctttttgtgattttgtcactgttatcctaaaacctcccatattgtttagtttttctcatttctgaaacacatatacccataagtagtcttctgtagctactttcatgtaatattaaaatattgatgrtcttaaatttcttcagtagtaccaattataccctattatgaattattttagttttagaataaatcttaatatctggttctaactgaattttttccaaaaagatggtctttcttatgtcaatcttgaaatggataaggcttcctttatgggatgccatatgcagtaaattttttaaagtgtttggtcattgaaaaaaaatgtatattcttaaattttggtatattctaaatatatgtccattcaatcaaactttgtgttttattctattcaaacctcctttatttttcagatttctgtctgcttggtgtattaattattcacagaaatttgctagattttccaactatgatgatggatttgtcaatttcttgtttttggtcatcttcgctttatatactttgtatacttatattaaagcatacaaattttgaattataacaatctaatga

SEQ ID NO: 600143 - DNA, 482 bp, Homo sapiens
ataggctatagttcttcacactagcactagctagaataaaatagaagtgaattgtattcccattttggtagcttttttattgtgtcaacytggctaggctgcagtctctccaattattcaatcaaacactaatctagttgttgctatgaagagattttgcagatgtaattaaagcccctaatcaggtatcattcagtaaagaagggtggacctgactgaatcagttggaagcccataaaagcagtgctgaggggagagagagagagagaaaacaagagatgaaattctgcctagggatgacagcatcagcctgtgcctactgtcagtgggttcaagcctactgtgatcttttctttctgactgcctatcctataaacttcaggcttacctagccagccccacaaggtataagccaatgccttgtaataaatagcacactctctccacctgccaaccaatatatattaaactgctggtttggc

SEQ ID NO: 600144 - DNA, 503 bp, Homo sapiens
gtagtatagtgatgccagcagctaggactgggaccaaacctcttaattactctaagataaacataatagattaaaacttgatgagaatccctcaatctttatggaaaggctgagagagggtgagtaaaacrcacctctgtattttctgactcaattgagcaccagttaatcttaagaaagaggtttatttttcaggcagtcctgattaaaaaaaaaaaaagctacaaagcaggtcacatgttcggataatgtactagttttaccagtgcaacaagatgtaacaattcttttttgttttagatattgctcagagcaacacatacacatatgtactactcagtatatgtaagtgtatatatacagtctggtttgtgtatatagatatatgtataaatacacatagcatatgtgtgtgtgtatatatatatgtatatgcacacacacatatatacacacacacacacacctacacagacacacaatttagaagattaaggagcatg

SEQ ID NO: 600145 - DNA, 503 bp, Homo sapiens
gtagtatagtgatgccagcagctaggactgggaccaaacctcttaattactctaagataaacataatagattaaaacttgatgagaatccctcaatctttatggaaaggctgagagagggtgagtaaaacacacctctgtattttctgactcaattgagcaccagttaatcttaagaaagaggtttatttttcaggcagtcctgattaaaaaaaaaaaaagctacaaagcaggtcacatgwtcggataatgtactagttttaccagtgcaacaagatgtaacaattcttttttgttttagatattgctcagagcaacacatacacatatgtactactcagtatatgtaagtgtatatatacagtctggtttgtgtatatagatatatgtataaatacacatagcatatgtgtgtgtgtatatatatatgtatatgcacacacacatatatacacacacacacacacctacacagacacacaatttagaagattaaggagcatg

SEQ ID NO: 600146 - DNA, 503 bp, Homo sapiens
gtagtatagtgatgccagcagctaggactgggaccaaacctcttaattactctaagataaacataatagattaaaacttgatgagaatccctcaatctttatggaaaggctgagagagggtgagtaaaacacacctctgtattttctgactcaattgagcaccagttaatcttaagaaagaggtttatttttcaggcagtcctgattaaaaaaaaaaaaagctacaaagcaggtcacatgtycggataatgtactagttttaccagtgcaacaagatgtaacaattcttttttgttttagatattgctcagagcaacacatacacatatgtactactcagtatatgtaagtgtatatatacagtctggtttgtgtatatagatatatgtataaatacacatagcatatgtgtgtgtgtatatatatatgtatatgcacacacacatatatacacacacacacacacctacacagacacacaatttagaagattaaggagcatg

SEQ ID NO: 600147 - DNA, 586 bp, Homo sapiens
gtaacacccacatttcacgatcggggcmccttaagccactatgatgcatatgtggctaaagtcagtgggtgacaagcagggctaaagggatagctgtctcattatcattcgccagctccctgccctgcggtaagacctgctaccacctggggctcattttgagatcaaccagggccccctttttctccacgaggatgtccacctgaggcccacctaggtctgtgtcctttcacagtgtttctcccaggccagtcatgttttgtttccatgaccccggctgccttgacatgtgtaatcctctctgccatcctcactcccgctgccctgccttcccatataagttagtccacctcacacggaatctggaggaccacactgggctccagtgtgaggcaatgttttattttcttcaggtacatgtattttagggctacctccagggctgggaatgtgaagagattgccaaatggctggggaccttcagtgtgtgtccagggagggaacccggctgggaattaaggcccacctgagtaatggtatggacatccagtgtcagttatcttgataaaggcctgctttcttacat

SEQ ID NO: 600148 - DNA, 586 bp, Homo sapiens
gtaacacccacatttcacgatcggggccccttaagccactatgatgcatatgtggctaaagtcagtgggtgacaagcagggctwaagggatagctgtctcattatcattcgccagctccctgccctgcggtaagacctgctaccacctggggctcattttgagatcaaccagggccccctttttctccacgaggatgtccacctgaggcccacctaggtctgtgtcctttcacagtgtttctcccaggccagtcatgttttgtttccatgaccccggctgccttgacatgtgtaatcctctctgccatcctcactcccgctgccctgccttcccatataagttagtccacctcacacggaatctggaggaccacactgggctccagtgtgaggcaatgttttattttcttcaggtacatgtattttagggctacctccagggctgggaatgtgaagagattgccaaatggctggggaccttcagtgtgtgtccagggagggaacccggctgggaattaaggcccacctgagtaatggtatggacatccagtgtcagttatcttgataaaggcctgctttcttacat

SEQ ID NO: 600149 - DNA, 522 bp, Homo sapiens
gctttatgtgatttgatttgagaagtctttatctctaagacaaatgagcatttacatgccattttataaattttactaaaaacatagtttacttttcttatacaccttacatgaaaatttaattttartagtctcaatcacatgttataatggtaacattttgtaatttttcacttgaatgtaaaacatggtaagttgttttaattgtgtgctaggtgcagataaaggctgactctctcagcatacttagaggtgtgattacttttatatgtccccaggctataccaatagtgaagcaggcaagtctatggttttcaaaggacaaagaagtagtttacatccttcaaacaattaggaaacttacattttttacctgcataatatagaccacatattaacatctggaagacatttgcattttatcaataatcttggaggctgcttttttttttttcaaacagagcctcgctgtgttgccaggctggagtgcagtggcatgatcttggctcattgcactgcctc

SEQ ID NO: 600150 - DNA, 522 bp, Homo sapiens
gctttatgtgatttgatttgagaagtctttatctctaagacaaatgagcatttacatgccattttataaattttactaaaaacatagtttacttttcttatacaccttacatgaaaatttaattttaatagtctcaatcacatgttataatggtaacattttgtaatttttcacttgaatgtaaaacatggtaagttgttttaattgtgtgctargtgcagataaaggctgactctctcagcatacttagaggtgtgattacttttatatgtccccaggctataccaatagtgaagcaggcaagtctatggttttcaaaggacaaagaagtagtttacatccttcaaacaattaggaaacttacattttttacctgcataatatagaccacatattaacatctggaagacatttgcattttatcaataatcttggaggctgcttttttttttttcaaacagagcctcgctgtgttgccaggctggagtgcagtggcatgatcttggctcattgcactgcctc

SEQ ID NO: 600151 - DNA, 522 bp, Homo sapiens
gctttatgtgatttgatttgagaagtctttatctctaagacaaatgagcatttacatgccattttataaattttactaaaaacatagtttacttttcttatacaccttacatgaaaatttaattttaatagtctcaatcacatgttataatggtaacattttgtaatttttcacttgaatgtaaaacatggtaagttgttttaattgtgtgctaggtgcagataaaggctgactctctcagcwtacttagaggtgtgattacttttatatgtccccaggctataccaatagtgaagcaggcaagtctatggttttcaaaggacaaagaagtagtttacatccttcaaacaattaggaaacttacattttttacctgcataatatagaccacatattaacatctggaagacatttgcattttatcaataatcttggaggctgcttttttttttttcaaacagagcctcgctgtgttgccaggctggagtgcagtggcatgatcttggctcattgcactgcctc

SEQ ID NO: 600152 - DNA, 522 bp, Homo sapiens
gctttatgtgatttgatttgagaagtctttatctctaagacaaatgagcatttacatgccattttataaattttactaaaaacatagtttacttttcttatacaccttacatgaaaatttaattttaatagtctcaatcacatgttataatggtaacattttgtaatttttcacttgaatgtaaaacatggtaagttgttttaattgtgtgctaggtgcagataaaggctgactctctcagcatacttagaggtgtgattacttttatatgtccccaggctataccaatagtgaagcaggcaagyctatggttttcaaaggacaaagaagtagtttacatccttcaaacaattaggaaacttacattttttacctgcataatatagaccacatattaacatctggaagacatttgcattttatcaataatcttggaggctgcttttttttttttcaaacagagcctcgctgtgttgccaggctggagtgcagtggcatgatcttggctcattgcactgcctc

SEQ ID NO: 600153 - DNA, 547 bp, Homo sapiens
gctggctcagcctcttgtgagaccatgacctcacagcccaccttggagcccaggataggtgagggttccaagagcctgaagggggtgggggcagttgagtctgtcatcactggctctggttctccagggctttcaagtctctcaaacaagagcaaagatctaccctaggatgctcctccgataaggaaatgtgtctgccccagctggcttcagggcaagtgttcttttctctgattctgtaagtctggtgccctactttaagtgaagtgatcctgtttactttctttaaaggacgggaatctgttgccctcacttttttgttaacgagaatggaccgccccacgcacgctcgcatcgagcacgacagctcccgctcgctgttctgctcgctgggaaaagtccgtcagttagggtgatttccgctaaggagctttctctgataggcacagggrtcctttagagcaatgtcaatggggctagttgatcagttacagacacacctacccttgagttttacagaagaccttatttctgagtgacgtttccc

SEQ ID NO: 600154 - DNA, 413 bp, Homo sapiens
aataagtaagtcagaaaaaaataattgscccagatattttccccttttggcccatcctgtaactttgttttctcttttcattcctttttttggagacagggtcttgctctatcacccaggctggagtgtagtgttgctatcacagctcactgcagcctccacatcctcgggtttaggtaatcctcctgcctcagcctcctgagtagctgggactacaggtgcatgccacaggccctgctaatttttttaaaaaaatttttgtagagataggatcttgctatgttgcccaggctggtcttaaactcctggactcaagtgatcctcctgcctcagcctcccaaagtgctgggattacaggtgtgagtcaccatgcctggcctcttttcattctttatgcagttgcatatgacaag

SEQ ID NO: 600155 - DNA, 413 bp, Homo sapiens
aataagtaagtcagaaaaaaataattggcccagatattttccccttttggcccatcctgtaactttgttttctcttttcattcctttttttggagacagggtcttgctctatcacccaggctggagtgtagtgttgctatcacagctcactgcagcctccacatcctcgggtttaggtaatcctcctgcctcagcctcctgagtagctgggactacaggtgcatgccacaggccctgctaattttttwaaaaaaatttttgtagagataggatcttgctatgttgcccaggctggtcttaaactcctggactcaagtgatcctcctgcctcagcctcccaaagtgctgggattacaggtgtgagtcaccatgcctggcctcttttcattctttatgcagttgcatatgacaag

SEQ ID NO: 600156 - DNA, 531 bp, Homo sapiens
aacttctggatgctatgcagtccatttcaatttgtcactttttctttaacaaaatattacacagtttttatatatgcccattttaaatgttttcaaatcatgtaaagtgagtcattattttataaaccacattgttgttttatatatatatatatatatatatatwttttttttttttttttaacagaatattggcttgcttcttccaaatggtagaaaagttagaagaatggctgggatgagtacaaagtcttacaatatacagccatatcatttttagttgatttaacagattttagagataatgaactgaccagcatcactgaaatccattaaaaatacaaagactacctacagtattgttcttcttttacaaaggaactatacagtgaggtttagaaatgtgttcagtaatacaaaatcagatcctaggaatgcttcagagaagagttcatgaaccacatattaggtcataatcagttattttctctttcgggatatctgttaaacagccttgcttttataaggaca

SEQ ID NO: 600157 - DNA, 391 bp, Homo sapiens
  misc_feature 113: n = A,T,C or G
gaattcgttgacactgttccaatgcaccagtataacattctaattgacttaagaggagacacataagaatatctgtttttgcctttaaagtatataatttatgttactgccanattaaggattctgatatatcatatgtttaaaatgtgtttgaattacttcttagtctagaactgagattgggaagaagtaaatatacacattctctttaatacagtattctttgtctctttaaacmttattctctttctgtagtcacaaattattttgcagttcgtctaagctatgccatttttctaatagatcaaatctttttggctgacatgaggctctggttacttttcaatgttggaatctctccggaaggaagttgtcaccttacaagctcttt

SEQ ID NO: 600158 - DNA, 623 bp, Homo sapiens
tttaaattgcagtttagtgtgggtatttaaattgctagctatttcaaaaatgtcctctggttttagatactataatcagctgaaaaggctattgagtgccgttacatggcctcaagatctaaaaacttttgtataaaaatagaacaatttataatactgatctgaccctctgagcatgcatgtgaagacattcctagaatagacccctgtagacgaattattaggatcgtctctcaaatcagactaacaatgtaacgtattgtctttgatgaaaaaatagaaactctgaaaaagactttttttttgagcaaaaagcatctggaagtgccttgaactatataaaatgagtgcacagatatacctagttttatgttcttcacttaattgtgctttgcagatattgtgcttctaacaagttraaggtttttgggagccgtgcattgagcaagtctattggcaccatttttccaacagcgcatgcgcacttctctgtctgtgtcatattttggtaattctcgcagtatttcagactttttcattattatttaaattattatgatctgtgatcagtgatgtttgatgttactattatggttgttttgggggtaccacagactgtaccc

SEQ ID NO: 600159 - DNA, 623 bp, Homo sapiens
tttaaattgcagtttagtgtgggtatttaaattgctagctatttcaaaaatgtcctctggttttagatactataatcagctgaaaaggctattgagtgccgttacatggcctcaagatctaaaaacttttgtataaaaatagaacaatttataatactgatctgaccctctgagcatgcatgtgaagacattcctagaatagacccctgtagacgaattattaggatcgtctctcaaatcagactaacaatgtaacgtattgtctttgatgaaaaaatagaaactctgaaaaagactttttttttgagcaaaaagcatctggaagtgccttgaactatataaaatgagtgcacagatatacctagttttatgttcttcacttaattgtgctttgcagatattgtgcttctaacaagttgaaggtttttgggagccrtgcattgagcaagtctattggcaccatttttccaacagcgcatgcgcacttctctgtctgtgtcatattttggtaattctcgcagtatttcagactttttcattattatttaaattattatgatctgtgatcagtgatgtttgatgttactattatggttgttttgggggtaccacagactgtaccc

SEQ ID NO: 600160 - DNA, 600 bp, Homo sapiens
cacaatatatttatttacaccctggctacttttaagacgaacccaccaggtgatttgcagctgttcacttatggttatacaggtttggattaaatattttttcattcttaatgctccttgcttccaaatatttatgtagacttcaattttgaattattaacctattttataggaaaaataggaaggcagtatctaaatatcttctttttaaaaaattaagctgcagcctcctatatcattctaaataaatgaagaaaacattagtagctatcatttttattacctttaaaaggtcctataactgttgataattgctagttatatatgtaaatttatttgactggcacagattaactttattacaagaatcctaagaaaacacacatataaaagcatttttgccaataaatggtttaaaaaaaagtctgtattttaaaattacttctrcaaagtggaggagcaatggaagtgttgggactattgccttaattatgaagatatcggaagcacacccagtgttatgttatgccccacattgttccagacaggagaaggttctacatgacacaagaaaaccacaggacacaagcaacatccaag

SEQ ID NO: 600161 - DNA, 609 bp, Homo sapiens
tcctaccaccccttccttccaggtacacatttcattcatttaatgacaaccaatgctgtcactgcggagactctcaacttcatggagcctcgagcgtagtgacattgttatgcccaaggctccatgaagccacagtgaagcatcgtgcccgctccctctttccattagaagcttctctgttttgtccttttatacacataagatattttaaaytcactagataattactgtaagtggtaatgcagacacaaaatttaaactcaatacattcatataaacataagcttgtatcctacaattatgcttgctcttatatttcttttctttttgtaacagaagactttaaaagtataacaatttttcaaccattacttttctaaagttttaaaaaaaaaatagactcataccacctaaaatagttttcataccaaaagttgtttcagctaaaaaatatacactcctttgagtgtaaacaatacagtaagaattttaagctacgttaaaagatcgaggacatggagaggctgggatttaagcatgtagcaatgatatattaagtgggtgaaaataattataggttgcatagaggctttgcgttaagtcagacaa

SEQ ID NO: 600162 - DNA, 559 bp, Homo sapiens
taatggttaatgtgtgcaaccattatttttcttaaatgggtttctcatattgaccctctgtgttagccaagtgtataaagttctttctaacctgagttgatggatagatttccattgacagaagccattcatgaatgattcygagcacttttatttcacaaatgtttattgagtgcctgctaagtgccaggcactgtcaaagtttgcctggagaagtccttccctcatgaagcttatagaacaatggaggaggaaagacaaatctgtaggcatttaatgacaatctgagaagtactgtgatggggaaagtacaggatgtttttatcccacataggaggggtacctaacccagattagaggtagaaatggataacaaggtaaatgtttatggagctaaatgtctcaactcaggcctaaagcatgtttaagaggtggtcagaaaaggcttgaagggggagagagtgtggaggcctgaaggtaagcaagaaacttgggacatggagtgagagaaaatggaggctttgagaggtgaacagaaccacacagctagtaagtaaca

SEQ ID NO: 600163 - DNA, 504 bp, Homo sapiens
atagaaatttacttctgatggttctggaggctgggaaatccaagaccaagccttgatatctggtgagggatctctgcttgcaagattgtgccttgttgctgtgtcctcacrtggcagaagagccatatggaagggccaggcaattctcccaaagcctttattgtaagggcattaatctcattgatcatctcattaatctcattaatctcattgataaaggcaaagctctcatggcctaatcaccctgaaaagaccccacctcttcataggtggggtttaaatttccacatgaattttggagggacctatacattcaaaccatagcagacgttttcagtgataaagaagtctgactaaaaatgtgtttgaaaagctctacaaatgtgaaccttagagaaataaaaaactttatatcatttgtgtcttaaccttgctttattttgaatactactattcattgcataaatctagtcccaaacaataacttattaaattttcctcttg

SEQ ID NO: 600164 - DNA, 610 bp, Homo sapiens
ttctttttacttaatctttactatttaaatattctgaaatatttaggtacagacggtacatttaataattccacatacataatctacagcttacacatataagagccctataggcaatactgtccctattagtaaaggagaatgacaagagctatgggctgatagtccagagtcctgggttctagggctcaacacaccccaagggaccctggacaaaagtgtccactaytaaatttctgggtcttcatctgtagatggtggaatttggtgcaaactctgtaactctacaaagtatgtgtcaaattaatagctacatttctgaagttattttgctaaaaattgaaataaagccctttgttttccagatttcagattcatgatactcttaagtacctggaacatggccagcatctaggatacaaagttgagtcttcaaaagcactattttcaaggcagggcgtctcttacacttggccagagaagacctcaagtctttattcaaggttactaacccatgactaacataaaatgctactaattttggttatttcttattctggctctaacacattaaaaaggaacaaattagttaagagctgggctgatacaa

SEQ ID NO: 600165 - DNA, 442 bp, Homo sapiens
ctctaaacttgggtctttatttcttcttatgcaaaaatgaaggsgtaaagcagaagattcctcagctcatgccctattctgctattctgattttctataattttgcctcatagtaggttttcttgttaggaaaccgtgacactacttctttagctgaaaaatgggaggactcaatgattttgcatcattttgagagctgcatctgatgcattctaaaaataatccagtgaagagggctggaaaggggtgttgagcaccagtcaacagagtaactgggggcctcctgggtatgtcctgcgtatgtcctgtgtgtgatgaaggacaacctttccaacacagaaaggaagccaatgcttaaactttagacatgtttcccattaaaatcacaaaccaaatgtgtactgaaggataattctacacttgaaactaaattgtggtatgt

SEQ ID NO: 600166 - DNA, 442 bp, Homo sapiens
ctctaaacttgggtctttatttcttcttatgcaaaaatgaaggcstaaagcagaagattcctcagctcatgccctattctgctattctgattttctataattttgcctcatagtaggttttcttgttaggaaaccgtgacactacttctttagctgaaaaatgggaggactcaatgattttgcatcattttgagagctgcatctgatgcattctaaaaataatccagtgaagagggctggaaaggggtgttgagcaccagtcaacagagtaactgggggcctcctgggtatgtcctgcgtatgtcctgtgtgtgatgaaggacaacctttccaacacagaaaggaagccaatgcttaaactttagacatgtttcccattaaaatcacaaaccaaatgtgtactgaaggataattctacacttgaaactaaattgtggtatgt

SEQ ID NO: 600167 - DNA, 526 bp, Homo sapiens
tgcattgggtgatgagcagaggcattgcagggatgcaagtagatttgggatacattttggattattgtaggctagaagaggagaggagttatagtagacagattcccctaaagatgtccacatcctaatctccaacacctgtgaatatgttctcttrcatggcagaagacactttgtagatatgactaaattgaggctactgagatgggagtatatcctggattatctgggtggcccagtgtaatcacaagggccctgatacagtcagagagaaggagatgtaatgttggaaacagaggtttgagtgatgcgaggagggcccacaagccaaggaatacagacagcctttagaaggtggaaaagattaggaaacaggctcttccctagaacctccagatggagccagccctgccaacaccttaactttaaactttagactttgattttggacttttgacctccagaagtgtaagatgataatttatgttgttttaagccctgacatccagggaaatttgttagggta

SEQ ID NO: 600168 - DNA, 542 bp, Homo sapiens
ggtgcctcctcttctcccctcctcttacctgtcttctcagcttctgtctccttactctacctaccctccctsggtaacctcattcacagccatgttggtcattaacatttatataaaaatacctaccaagtctactatctctagctcccatctctcccctgaggttatatccagctacctcctagacatggccacatgtatgtcccaaagcccctcaaatctatcatgtctcttctgatgccacattctcttcccttcaccatttaacctgtttgttccctggtactgcccatttcagctagacatcaccctcaaaccaaccaaccaatcgaggtacctctgttggctttaactatcctctctgccttgttatccacatggagcaatcctaataatttttatcaactgcagatttattgaaagtattccctctccacgcctcttagcacttcctgagaacaggacctctgtttattcccctgacttgatttttcagtctaggggataatggcccagcactgacacgtgaaataccagaactt

SEQ ID NO: 600169 - DNA, 463 bp, Homo sapiens
gttagaccaggttggcagcaaagaagaagtggctggatctctggatagttttttaagggaacacaaaacttgatggcttggcatgatgcttgagaggaagagaaggcaaaaggtttttggcctaagcaactggaaggtgatgttccatttaaccagatgggaaggatttgggagggacgggctagggtagatgatagtacaatcaagagttccattttgggtatgttaagcttgagttgcctataagacatccaagtggagatataggttaaatagttggatatgtaggtctgtgtatcaaggaagagattatgctttctgtgaaagaacaaagattctcaaacgattacatcacaaacaagtgyttcatacaagtaagttaataaatgtttaacacattacggtgtgaaaatataagggaagtccaagaactctgaaaaactaaatggaaaaacaaatttaa

SEQ ID NO: 600170 - DNA, 528 bp, Homo sapiens
tcttttaaaattgttgcatagtgtttcaaagtgaagatataccttactttattaaactatctatgatgaatatttaggttctttcaagtgttttctattgaaaacaatgatgccacatgtagccttgcacgtgtagcctttgtgggtacatttgagtattttatagtatagtcttaaagaaatggaattactgagtcaaatgcatgtgtactgtattttgatgaacactgccaaatttccaactacagtgaatgaaaatgccaactaaacttttttgtgtgtgtgtcaaattacttctcacctgatatgttagtcctttaccttgatataaagaaatacctgagacagggtgatttataaagaaaatagatttatttgactcaacattctgaaggctgtacacaaagcatagtgcttgcatcagcctctggtgagggcctcagaagcttwtaatcatggcagaaggtgaaggggagccagcatgtcacatggtgagagagggagcaagacagagggaggaggtgccag

SEQ ID NO: 600171 - DNA, 622 bp, Homo sapiens
tttaaatttttatcttataggaggaaaaaaatctttttcaaaccatttaaactattacctggtatgtgatttaaattygaatttttgacctctttcagtgtttccaaatattattccattattgatgaattgcagcacaaaataagggaatattttattggactatttaaagacacatttcaccttattggtaggtgctgaagtgggagaggaagtaggaaataaatcaaacgttccactttggttttatgataagtcataaaaatatttcttttagttctgtgatttttctgattaacttatcttcttcaataaaaaggccttttgtaattaaattagtaatatattgctctgtaaatttgagaggaataacttaaattgcagttgtgtagtgctttttgtttgtttgtttgtttgttttaagagatagtagggtcttgctctgtctcccagactagagtgcaatggtgtgatcatggcacactgcagccttgaacttttaggcccaagggatcctcactctacagcctcccgagtagctgggactataggcatgcaccaccacacctggctattttttgggtggtgggtgggaggtagaaacggagtcttgctttgttgc

SEQ ID NO: 600172 - DNA, 452 bp, Homo sapiens
gggaatgtcaagtaaattcctgtactggttctttgctgccctgtaatcaatatggcatctcacccccgacaaccaagccagccasagagagaagtgggttcccagggaaaagggtcggctgaccgacctgacggagctggtgagcacaggtgagctctacctcatttgtctctcattcctcaaagtcttctgtggtttggcttcagtgagggcaaaagaggggggactggagtgaaagtgaactctgcttttaaaatgttcgttttatctaaggtgtgcagggtgtgtggatagcaagtttgagtggtaagaaaaatcccagtccagggtctgagctctaactcttaaaactcttcagcttaacaaagtgacccacaggaacagacatgaacatctctacacagggcagggccaaaggtgttctcaggatcctgctagccaagggacaagtc

SEQ ID NO: 600173 - DNA, 452 bp, Homo sapiens
gggaatgtcaagtaaattcctgtactggttctttgctgccctgtaatcaatatggcatctcacccccgacaaccaagccagccagagagagaagtgggttcccagggaaaagggtcggctgaccgacctgacggagctggtgagcacaggtgagctctacctcatttgtctctcattcctcaaagtcttctgtggtttggcttcagtgagggcaaaagaggggrgactggagtgaaagtgaactctgcttttaaaatgttcgttttatctaaggtgtgcagggtgtgtggatagcaagtttgagtggtaagaaaaatcccagtccagggtctgagctctaactcttaaaactcttcagcttaacaaagtgacccacaggaacagacatgaacatctctacacagggcagggccaaaggtgttctcaggatcctgctagccaagggacaagtc

SEQ ID NO: 600174 - DNA, 452 bp, Homo sapiens
gggaatgtcaagtaaattcctgtactggttctttgctgccctgtaatcaatatggcatctcacccccgacaaccaagccagccagagagagaagtgggttcccagggaaaagggtcggctgaccgacctgacggagctggtgagcacaggtgagctctacctcatttgtctctcattcctcaaagtcttctgtggtttggcttcagtgagggcaaaagaggggggactggagtgaaagtgaactctgcttttaaaatgttckttttatctaaggtgtgcagggtgtgtggatagcaagtttgagtggtaagaaaaatcccagtccagggtctgagctctaactcttaaaactcttcagcttaacaaagtgacccacaggaacagacatgaacatctctacacagggcagggccaaaggtgttctcaggatcctgctagccaagggacaagtc

SEQ ID NO: 600175 - DNA, 453 bp, Homo sapiens
ataaggggaatgtcaagtaaattcctgtactggttctttgctgccctgtaatcaatatggcatctcacccccgacaaccaagccagccagagagagaagtgggttcccagggaaaagggtcggctgaccgacctgacggagctggtgagcacaggtgagctctacctcatttgtctctcattcctcaaagtcttctgtggtttggcttcagtgagggcaaaagaggggggactggagtgaaagtgaactctgcttttaaaatgttcgttttatctaaggtgtgcagggtgtgtggatagcaagtttgagtggtaagaaaaatcccagtccagggtctgagctctaactcttaaaactcttcagcttaacaaagtgacccacaggaacagacatgaacatctctacacagggcagggccaaaggtgttcycaggatcctgctagccaagggaca

SEQ ID NO: 600176 - DNA, 572 bp, Homo sapiens
ttattatacctttttgttattttattttttttwaaaaatttaaaatttgtctccgtcatggcatattatactttttaactccagaattatttgggttttaaaaaatgatttgtctttatcatctatttgatgaaacatctcatactttcctctagttctttagacatggtttcctttagctttgtaacatattgaaaatatctgatttaaagcctttttatctagtaagtccagcatgtaggcttcctcgggtgagtttctattgattaatttttatcctgtgtatgagccatacattcttgtttctttgcatgtatcttaactattttgaaaactgaacattttaaataatataatgtgcaacactggaaatcagattctacccgctccccaagcttcactgttatttctgtttgttgtagcagttgttgatttagtgacttttctgaactcattctttttttttttttttagagatagggtctgagttggtgactcaagggatcctctggccttagtttaccgagtagctgggactacacgtgtgccaccgcacctagcttatgaatgaa

SEQ ID NO: 600177 - DNA, 644 bp, Homo sapiens
gacttcagtgtattaatggccaagacagggacattatttttcatccaagaaaacctaggcaagaaaatcaccccagagaatatgttgctttaactgaatcctgtaaaatgaatatgagttactcggttaagatatgtgtaatggcgatcagggagtgggaagggaggggagcatttcaggcaaaggaagaagaatgggcaaagatccagagtcaaaagagatgacaatgcatttagggagcacaagaagttcataatgactgaaacagagcctgagagggtggagagtagagagatgacactgcctttgtattttgaatctaataaaaataacactccagcattccttgagacatgagctgagtcattccacagaattaagccacaaaaggcataattcatcaacagtcaaattggaaatgaaaatttgtgtaytactatgaatttctatattaaaatttaaaataaggcacttggaaccaaggttttcatcacatgatgactgcaagttatgattgtcagacatcctatcaaacattccaatttacactgttcccatttaagccatttcaatcacttcataagagctctattgtatactaactctgtttataaaagcaacaccaacatttaataaaatatcat

SEQ ID NO: 600178 - DNA, 568 bp, Homo sapiens
ctttcttctacttagtgcagtctattgtattttgaaattcattaagtgagttttgtaattccaggagctctgattttttaacatgtktatctcttccttcatttcctggattgctttagaagtttctatgtttttatttttaacctggtcttggatcttactgagtttccttgcaatccatgctctgaactctttatctgccatttctgagtttcttttttagggaccactgctagaaagttaggatgtccctttggtggtgtcactacatccagattttccaaggtgccagaattcttgagctggccctttctcatctgggtaggctggcacttttaatctttgtaattatttttgtgtgcgtaggattgtttcttttactttctttccctataatgttattgctctcttgttctttccctttcccttatccgttctccttagatagtgtgactatagaaaatgctgggtggggtcttttggttttgcttctgtaattctaggcacttctgttggcaggctttatattgtgctgtgctgtttgatggttaagagctggctatggcca

SEQ ID NO: 600179 - DNA, 519 bp, Homo sapiens
tgctgtggttggggccatagggcagttactctggttgggggaatggatgcctggttgcttggccagcctgggaacatgcctaacagaggaggcctatggggctttcttatcaggcccaggacatgggtgtccaggtgctcagttgcttagatgtgtgtgcaccaggaaaagcccacagggctgtttctcaggctcaggacacatacactcagctgcttggtcagcctgagggtgtgtattccagggaagcctatggggctgtttcttggggcctttggacaagccagaggtttgtccatgggggtggagtgggtactgtgtggctgtgtctcatgccctgggcatgcaaatatagctcctgtgccagcctgggggtgcatcagctgcttggyggctcaatacctctccttcttgggggagggcatgcagtgattgggctggttcaagggtaggtccgccatgagcagggctgccagactgttccttcagctagaagtagtgtggcagggattagttttc

SEQ ID NO: 600180 - DNA, 562 bp, Homo sapiens
tttccccaaaacctatggaaataaaaaatttaaaagaaaaagataagactccaggataattttcataatttctgtgttaaatatacgaagctggggtcagaaaagtgacttgtccaggcagcacagattttcagtggcaaagatgggactgaagtccaggatcttgattgtttgccaatacaggatgaagagctcatgtgtagaaatgatcaggagaggcttcctaggtgatgaatgcaagcagcttggctctaaaagatggctaccagataaactcatagacaggttcaggtagaaggtcaggatgggaaaataagggcaccctgattggaagaaacatgtgaacaatgcatataagtgaatttcctatcattttccaaaaccacatatctattctatttctggaacatgccaagcttatcctcatctttgaacttttgcactgaacatttyctctacctggaaacaaaacaaaaggtaacatttactgagtgtatactatgtacaggtactttacatgttttaattcatttaatcctccagtctttatcatgtgggcacc

SEQ ID NO: 600181 - DNA, 488 bp, Homo sapiens
ttcactcttgtcacccaggctggagtgcagtggcacaatcttggctcactgcaacttctgcctcctgggttcaagcaattcttctacctcagcctcctgagtagctgggattacaggcacccgccaccatgcccggctaacttttgtatttttagtagagttggggtttcaccatgttggccaggctggtctcaaactcctgacctcaggtgattcacccatcttggcttccccaagagctgggattacaggcatgaaccactgcacctggccaggaactcgctttttaagtgtaataattataggcatagtcattattgagttctccctcctaagtgctgtaagaaaaatggtttacccttaaaaccatttattttattatttttcccaaattagagaagaaagaagaaaatrtatttccaaaagtattcgttgccagattaagggtgctacctaaagccacattcctttacagcagtggtgtacct

SEQ ID NO: 600182 - DNA, 631 bp, Homo sapiens
cactgaaaatccaatactcattttaataactatcaaaacttacagaagcaattcctgctaatttctaagaatgataaagtattcagaggacttttgccttagaaactgggatattggggatttccttagaaaaatcatatacaacatatatagctcacagtccaaggtttaatgaatttttacaagaaaatatttatgtagtgactctgtgaggtgatgcccaggtgtctccttcatgccagaagtattcattatccacccaatctcactcaaagtgttgcctgcttatggctcatggctaagtccttcttctgagactacacaatgtccctggcacagctcacctccagtgattgayggaaatggggtaaggagactaaaccctttgactcaactagggatttatctgaaaggtcatcccatcttctcagctcccctgggactgagtgaatcctgtgttacaacttgatggcagttcaacttctgcctaatcctaccttcctctgttccttataggtataaggaaagaatggttccaaaaagtactacccaataaaacttctgcttgaaaacttagtctcagagttataccttggataacccaacctattatatcaagtggtaaaataat

SEQ ID NO: 600183 - DNA, 592 bp, Homo sapiens
atctgaaaataaaactgagaaaacaattacatctagaatagcatctaaaagaaaaagatacttgataatagatttaacaaaataattgcaaaacttgtaccctgaaaaccataaaacagtattgaaacaaattaaagacctaagtaaatggaaaaatatttcatgctcacatattgggagatttaattttgctaaaatggcaatagagtcctctccaaattggtctccagattcaacagaacatcctatcaaaatattgactaacttttttgtagaaatttacaaactgatcctaaaatttgtagagaaatacaatgaacctagactagtcaaaataattctgaaaagaagaacaaacttggagtattgaaacttcatgattttaaaactcattaaaaagctatagaattatcaaaatactatggtactgacataagaatagatatacagatcaatggaatataactatgagttcagatataagccccaataattgtggtcaacttatttttgacaaragtgctgagataattcaatggggaaaaacaatcttcaacaaatgatgctgggacaactggacagccacatgcag

SEQ ID NO: 600184 - DNA, 558 bp, Homo sapiens
aggttttatttttctttgaatatttattttatattagtctctttttgcatgataagcacatcccattgctgatgggaatatatgagggaacaaatgcatgagggaatgtaaaatggtgcagccacttcagtaaacattttggtrgttcctcaaaattttaaacagttaccatgagacccaacaattctactcctagttatatacccaagagaaatgaacacataattctacacatgacatgtacacaaatgttcacagcagcatcattcgaaatagccagaaactagaagtaacacaaatacccaccaactaatgagttgataaacacatcaactggtgtgtctctacactgaaatattattctgccataaaaggaatgatgtactgacacatgctacaaaatggatgagccttgaaaacattttgctaagtgaaagagtccagtcagaaaagaacacatattgtatgattacatttatatgaaatgtccagaataggcaactctctagacacagaaagtagatgagtggttgcctagagccaggttgttgtggggag

SEQ ID NO: 600185 - DNA, 566 bp, Homo sapiens
  misc_feature 1, 2, 3, 4, 5, 6, 7, 8, 9, 10, 11, 12, 13, 14, 15, 16, 17,18, 19, 20: n = A,T,C or G
nnnnnnnnnnnnnnnnnnnnttgattgtgtttaagtctattaaaaattgccctacagaaaatggcaaccagtcatttccatgtaaagaaacttaatgaaaatgaattgcagcaggggtggtcaaattaaatcaaacttyattgtcaagtgctatggtttgagtatttgtcctctccaaaagtcgtgttgaaatttaagccccaaagtggcagtgttgagaggccctttaagcagtgattgggttttaagagctctgccctcaagaatagattaattcatttgtggattaatagattaatgggttaatgaattaatgggttattatgggagcaggattaatggcttttgcgtcctctcttgccatgtgacctctgcacatgccagctccccttcccctttccaccatgagtggaagcagcctgacgcccttgccagaagcagatgctggtgctatgcttcttgtacatcctgcagaactgtgggccaaagaaacctcttatctttataaattaaaaaaaagaagaagaagaggaagagagatttgaactagcacacttagcccccta

SEQ ID NO: 600186 - DNA, 566 bp, Homo sapiens
  misc_feature 1, 2, 3, 4, 5, 6, 7, 8, 9, 10, 11, 12, 13, 14, 15, 16, 17,18, 19, 20: n = A,T,C or G
nnnnnnnnnnnnnnnnnnnnttgattgtgtttaagtctattaaaaattgccctacagaaaatggcaaccagtcatttccatgtaaagaaacttaatgaaaatgaattgcagcaggggtggtcaaattaaatcaaacttcattgtcaagtgctatggtttgagtatttgtccyctccaaaagtcgtgttgaaatttaagccccaaagtggcagtgttgagaggccctttaagcagtgattgggttttaagagctctgccctcaagaatagattaattcatttgtggattaatagattaatgggttaatgaattaatgggttattatgggagcaggattaatggcttttgcgtcctctcttgccatgtgacctctgcacatgccagctccccttcccctttccaccatgagtggaagcagcctgacgcccttgccagaagcagatgctggtgctatgcttcttgtacatcctgcagaactgtgggccaaagaaacctcttatctttataaattaaaaaaaagaagaagaagaggaagagagatttgaactagcacacttagcccccta

SEQ ID NO: 600187 - DNA, 558 bp, Homo sapiens
taatgaaaatgaattgcagcaggggtggtcaaattaaatcaaacttcattgtcaagtgctatggtttgagtatttgtcctctccaaaagtcgtgttgaaatttaagccccaaagtggcagtgttgagaggccctttaagcagtgattgggttttaagagctctgccctcaagaatagattaattcatttgtggattaatagattaatgggttaatgaattaatgggttattatgggagcaggattaatggcttttgcgtcctctcttgccatgtgacctctgcacatgccagctccccttcccctttccaccatgagtggaagcagcctgacgcccttgccagaagcagatgctggtgctatgcttcttgtacakcctgcagaactgtgggccaaagaaacctcttatctttataaattaaaaaaaagaagaagaagaggaagagagatttgaactagcacacttagccccctaactatgtgatgccctgtaccacctagagcaagaaggccctcaccagatatagcaccttgagcttggacttctcagccttcaaaa

SEQ ID NO: 600188 - DNA, 578 bp, Homo sapiens
ctcaacttacacaaatatctgtttctgcgagaaacagaatcattatattaaactacaaaatttaacctttccattttcagtgtgtatcttttgggttttctataagcaatgccaaacatatacactattctttttttctaagtaaagacttaaacccaaagcaaaattaaaggtttgatgtctacgtatttgcccaaggtaccaatcaatcagcagcacaaagcctccactggaataaattggaaatctggtggcagaaacccaggtttccacagatgacttcatacattttggcagtgttccaattggactgctctcatccagatccatgtgacaggaagaaccttatttgtatctataaccacccatgacctctgagattgtaggtcctgatataactagatgatcttttctttactgggtacacgtatgcatctttattttccttatatggcttttgactctgtgagatagtattaactagtgggtgaggttgtgcaagcttggaaagggaagccatgactgagcaaattattccatrtaagaacaactcatcttgaaacatgattgtgtgcaca

SEQ ID NO: 600189 - DNA, 525 bp, Homo sapiens
ctgttaagtagggttgtatggttcatttagatgtccaactaygggtacctagaatagtattctggttatggcataatcaacgttctttctctcaacattcattggataatagtctcttgatcatacttttattgtgtaaaaaattttacatttttgatttttaaaaattttaatattttttgaattgttaataaaattatgtggttaaaaatataggagagtatatggtgaaaagtctatccctacaaagtgtctcctgacctttgttttctctctctaaaacagtattgctatacccgtttctggtatcttcttaagatgtttcgtgtatatataagtatgcgtctgtgtgttcttttttcccttttatcacaaatattgcacactgttctgaatcttttaaatatcagtgtattttggagattgttccatattgcataaagagctttactcatttttaattattttcttttcctctgcacaccgttctaccacatgtatatatcatatctttaagcagtccca

SEQ ID NO: 600190 - DNA, 598 bp, Homo sapiens
ttttcactctcttccttgagttttcttaagctggtgctcgtcttttttatgactgatttgtaggagttccttttcttaatacaactattaatgtattgttgtgtattggaaatatttctctgagcttatgatttatttttgaaacttgaaaatatttctctgagcttatgatttatttttgaagctttttaattgtcgccataagaagtttaaagattttgttaattctttatatcaatttgtgttgcttgggtttgatgttatctttttttttttgagacggagtctcgccctgtcgcccaggctggagtgcagtggccggatctcggctcactgcaagctccgcctcccaggtttacsccattctcctgcctcagcctccccagcagctgggactacaggcgcccaccaccacgcccagctaattttttgtgtttttagtaaagacggggtttcaccgtgttagccaggatggtctcgatctcctgaccttgtgatctgcccgcctcggcctcccaaagagctgggattacaggcctgagccactgcacccagccttaattgtgctttttaaacacaacattaggttatacatatt

SEQ ID NO: 600191 - DNA, 598 bp, Homo sapiens
ttttcactctcttccttgagttttcttaagctggtgctcgtcttttttatgactgatttgtaggagttccttttcttaatacaactattaatgtattgttgtgtattggaaatatttctctgagcttatgatttatttttgaaacttgaaaatatttctctgagcttatgatttatttttgaagctttttaattgtcgccataagaagtttaaagattttgttaattctttatatcaatttgtgttgcttgggtttgatgttatctttttttttttgagacggagtctcgccctgtcgcccaggctggagtgcagtggccggatctcggctcactgcaagctccgcctcccaggtttaccccattctcctgcctcagcctccccagcagctgggactacaggcgcccaccaccacgcccagctaattttttgtgtttttagtaaagacggggtttcaccgtgttagccaggatggtctcgatctcctgaccttgtgatctgcccgcctcggcctcccaaagagctgggattacaggcytgagccactgcacccagccttaattgtgctttttaaacacaacattaggttatacatatt

SEQ ID NO: 600192 - DNA, 598 bp, Homo sapiens
ttttcactctcttccttgagttttcttaagctggtgctcgtcttttttatgactgatttgtaggagttccttttcttaatacaactattaatgtattgttgtgtattggaaatatttctctgagcttatgatttatttttgaaacttgaaaatatttctctgagcttatgatttatttttgaagctttttaattgtcgccataagaagtttaaagattttgttaattctttatatcaatttgtgttgcttgggtttgatgttatctttttttttttgagacggagtctcgccctgtcgcccaggctggagtgcagtggccggatctcggctcactgcaagctccgcctcccaggtttaccccattctcctgcctcagcctccccagcagctgggactacaggcgcccaccaccacgcccagctaattttttgtgtttttagtaaagacggggtttcaccgtgttagccaggatggtctcgatctcctgaccttgtgatctgcccgcctcggcctcccaaagagctgggattacaggcctgagccactgcacccagcyttaattgtgctttttaaacacaacattaggttatacatatt

SEQ ID NO: 600193 - DNA, 587 bp, Homo sapiens
ggatttattaacatatataataacatttatataagacacatctytaaaaattcctctttgcttggatgcagatttttattacaaggaagaaacaaactcttatgaatttttcattatgttattaacttgaggtaattgaatctaagttgcatttttatttataatatatataatacaatcttgttgaaaaatttaaaattgcaactacctaaatgttgttgtttcaaagatttgagggcattttgaacctcagtaagaactgagttgatattatgttccagaagattactgagatatttacagatgtaatcaaatcagagaactataatggtcattatagatgaagaatggtcattgtaatttttttttctgacactttaaattaaagctaccttaaaatgacaccgagacaaatttttgtctttagaaacatctcattgtttcaggatctgcctggcgtttcactgttcttataaatgttttattttcctgttaaccaggtagtgctgggtcacaccccttggttactgtagtaatatatcttagatacggcagtgtattgctccctctcttagctgcacacttca

SEQ ID NO: 600194 - DNA, 579 bp, Homo sapiens
ctacaatctaattacaggtataatgtagttttcttttgaaacataatgtttctctctacagtcactcccatttctaccaaagataatcagggtaagactaatttgtttgcaaaataagtttagtctcataaaaattgccctgaggtatttacataagtgcagcaagaataacccacagaggttccttttacatttgctttagtagaattttgacaaggsatctcagattgaactttttttttttttttgagacagagtttcgctcttgttgccgaggctggagtgcagtggcatgatctcggctcactgcaacctctgccttctgggttcaagcagttgttctgcctcagcctctcgagtagctgggactataggcacccaccaccatgcccagctaattttttgtatttttagtagagacagggtttcaccatgttggccaggtgggtctcgaactcctgacctcaggtgatctacctgcctcggcctcccaaagtgctgggattacaggcgtgagccaccatgccctgccagattggacttttaaaagcatcttaactctaggaagtcaaaccaatg

SEQ ID NO: 600195 - DNA, 535 bp, Homo sapiens
gattaaaacaggaaacttcgctattcattccaactgaagctcctgtttgggaagttggatattttctctctttcctgattttagaaagtcagataacaacttagttttgatttggtgatgtggaattttagcatgggtgactccatttcgatttttaatctggtttgttgtgcttagtccaaaacaatggtctcctatgatttttatgtaatagccctctagattcttggttctgccctctaagtcatgatttatttttaatgaaactactcatgtttgyagctgagtagttttatcaacctgcttcctgccaatagaatttgggggtgccaacatcatcctttcattttgtatcctctctgtccctttgattccacgttggcagtgtttttgctgaaataaaactctgtgagtcttctgtggattttatagagattcacttcattataagaaaggcatatccacagatcgtttaaaaataatcccttttccatctcatgctacaatggctgagggatgatgcttttcagttcct

SEQ ID NO: 600196 - DNA, 468 bp, Homo sapiens
ggaataacattaataaaagcctggcattgtggaaagacacagacatgtgtggatctggttttctctaaccttgcatagctcatagcacatacattatagcaatttgattgattatagcttattacagcccaaggaagactgctttaacattctgtaaggagaggtagtggcgttgaagggagtcttatctctggtacctttgggtctttcctaatcatctacagtacaagaatacagaggaaagttaatctrtaatcagagaagcagaagttgcaactgcatgctacgtgactcaggccacatattctcatttctcttaaggttcaagtaatttaaagttccaacagcttttagttttaattaatttaattttacagtaggatctgatgatttcgtggtggagactttattaaatatctgtctcagagatcgtgttttgttttgttttttttaaagaaaggggaaaga

SEQ ID NO: 600197 - DNA, 468 bp, Homo sapiens
ggaataacattaataaaagcctggcattgtggaaagacacagacatgtgtggatctggttttctctaaccttgcatagctcatagcacatacattatagcaatttgattgattatagcttattacagcccaaggaagactgctttaacattctgtaaggagaggtagtggcgttgaagggagtcttatctctggtacctttgggtctttcctaatcatctacagtacaagaatacagaggaaagttaatctgtaatcagagaagcagaagttgcaactgcatgctacgtgactcaggccacatattctcatttctcttaaggttcaagtaatttaaagttccaacagcttttagttttaattaatttaatttyacagtaggatctgatgatttcgtggtggagactttattaaatatctgtctcagagatcgtgttttgttttgttttttttaaagaaaggggaaaga

SEQ ID NO: 600198 - DNA, 559 bp, Homo sapiens
  misc_feature 145: n = A,T,C or G
atatatacatctgtgtatatatatacatctgtatatatatacatctgtgtatatatacatctgtatatatatacatctgtgtatatatacatctgtatatatatacakctgtgtatatatatacacatctgtatatacacctcgngtatatatatacagatgtgtatatatatacagatgtgtatatatatacagatgtgtatatatatacagatgtgtatatatatatgctatatctttaaggtagtctatggactatgaactaggaaatcaaggaatgctattacttggttgtttcagaagagttttgagggcccttaccaaacttgtaaccttagtgtcaaacacatacacatgcccacatacatcacacaacacacacacacatagacttgcatactacatatcaatttacatttcccactcgagtcaccagattattactaagtgtacttttttccctttttttggaaagtaaatgtaagcatgttaaattaataggattcctttttcatagagtgtacatttgaactgcaataatgtataaaggtaaagtaga

SEQ ID NO: 600199 - DNA, 559 bp, Homo sapiens
  misc_feature 145: n = A,T,C or G
atatatacatctgtgtatatatatacatctgtatatatatacatctgtgtatatatacatctgtatatatatacatctgtgtatatatacatctgtatatatatacatmtgtgtatatatatacacatctgtatatacacctcgngtatatatatacagatgtgtatatatatacagatgtgtatatatatacagatgtgtatatatatacagatgtgtatatatatatgctatatctttaaggtagtctatggactatgaactaggaaatcaaggaatgctattacttggttgtttcagaagagttttgagggcccttaccaaacttgtaaccttagtgtcaaacacatacacatgcccacatacatcacacaacacacacacacatagacttgcatactacatatcaatttacatttcccactcgagtcaccagattattactaagtgtacttttttccctttttttggaaagtaaatgtaagcatgttaaattaataggattcctttttcatagagtgtacatttgaactgcaataatgtataaaggtaaagtaga

SEQ ID NO: 600200 - DNA, 559 bp, Homo sapiens
  misc_feature 145: n = A,T,C or G
atatatacatctgtgtatatatatacatctgtatatatatacatctgtgtatatatacatctgtatatatatacatctgtgtatatatacatctgtatatatatacatctgtgtatatatatacasatctgtatatacacctcgngtatatatatacagatgtgtatatatatacagatgtgtatatatatacagatgtgtatatatatacagatgtgtatatatatatgctatatctttaaggtagtctatggactatgaactaggaaatcaaggaatgctattacttggttgtttcagaagagttttgagggcccttaccaaacttgtaaccttagtgtcaaacacatacacatgcccacatacatcacacaacacacacacacatagacttgcatactacatatcaatttacatttcccactcgagtcaccagattattactaagtgtacttttttccctttttttggaaagtaaatgtaagcatgttaaattaataggattcctttttcatagagtgtacatttgaactgcaataatgtataaaggtaaagtaga

SEQ ID NO: 600201 - DNA, 564 bp, Homo sapiens
ttttattaaccagcatttcccagagaaacagaatgaacwgggtgtgtgtgtgtgtgtgtgtgtgtgtgtgtgtgtgtctgtgtgtgtgtgtgtctgtgtgtgtgtacagatgaacagcagtatatatagcatgtttgaaatcagcaagacagactggcaggctggagacccagagaagaatttgtgctaccgtctgaagtccagtggctgtgaggaagcagaattccttgttccttggagagcctcagtgttttcttataaggccttcaactgattagatgagactcacccacattatggagggtaatcaactttcttcaaattctactgatttaaatgttaaaaatatctaaaaaataaattcaaggcaacatctagactggtgtctaaccaaaaactgtgcctacagcagctgacatataaaattaaacatcacaaggtgttagttgccagcttacaaggcaaggatggaagaagcaagctgatggaaatgaattagtgagtgtattgaatcttaacagatggctggcatttgcacagtctgctcttggaatgtgggcaaag

SEQ ID NO: 600202 - DNA, 565 bp, Homo sapiens
ttttaggagaattatcttgcatgtttattttaataaagcctggaactattcattatcttcactctcctgaaacctgaattgttctaatctcatacacttttatcttttaagatagttaaaatttaatagcctaattagtatagtagaaagaagattgctatgaaatcagactatcttgattttaatcccagctgcatcttttcttggctataaagtttggtaaayagcataccttccacgagcctggatcttctgatgtgtaaaattgggacacaatatttaattgcataaatgaaagaataggattgaaaggcacacagtaggggctcaataaatattagtgacttttcccttcctacaagatttaatcaggcagattttaataagggaatcatatccacccaattaggaatactcaagataatatggaaggacattcccacaaactgttcatattatgtctaatgtgaaaccacatttaaaaagagaaggagatataaaaacactgcctcaatgaattaaaaaaaaagtgaatgtactatatcttagcatggaaatgacataa

SEQ ID NO: 600203 - DNA, 615 bp, Homo sapiens
ctgaaaaactgtgagtcagcttgctttctcaatgaggaggcttgtggtctgggccagctttcccccacttccctggtaatctgtattactcagcagaggcaaccataatccccctgggaatataactccattggactgggacccacatccccatcccccacagcagccacagcaagccccacccaaggagaagctgagctcagacatgcttatctttgccccaacctggtggtctttctctacccaccctgctagcagaagacaatggtcatcatctcttgggagctctatggccctggctaccacctgagaaacctgaatacttaaccaggtgtccctagggcaggtttgaatcctccctataggactgcagctgatgcattcttgaaagcaccatctcctggctggaggccaaccaacacaaaaccaacacactaaacaaaaacacaaccaaaaaccctcacagaatccacctcactaccctgttaactccactggagcaggtactggtattcatggctgcaagatctgtaaatggatcacatcatgggactttttgcagacactccccagtaccagcctggagcttsgtagttctgctgggtggcgagaccc

SEQ ID NO: 600204 - DNA, 563 bp, Homo sapiens
tagtcaggctgcagtatatgccccattatatttttaaatttataatagcaatcttatcacacagtgcagaacaaaaactataacactcagtctcacacctttgccttaagggtatgtatgtgtgtggagcggggggtatccagtcatgaactctgtgtctggttattttttctttaatattcatgataagagcctgttgatgcattaataagaccttccacatgattctgtggggacargatgaggaagatatggcataatagcctgcatataaataaaccagagtcctttggtaatattactgccatctctttcctcccctcttccccaagttggattcgtaggaactcctgagagcacgaccccatcattacagagtgtcacagttaaacaaatcccagatctgctgggtctctgctctttctttttaaccaactagaccagaacaaaggaaggggaagtaagaaatcatctgacgaatgttcagaggctttttattaaatactgaagtatgaactaccagtaaggaattattttgcacattgttccttcaccaaaatagc

SEQ ID NO: 600205 - DNA, 552 bp, Homo sapiens
gtgtgtggagcggggggtatccagtcatgaactctgtgtctggttattttttctttaatattcatgataagagcctgttgatgcattaataagaccttccacatgattctgtggggacaggatgaggaagatatggcataatagcctgcatataaataaaccagagtcctttggtaatattactgccatctctttcctcccctcttccccaagttggattcgtaggaactcctgagagcacgaccccatcattacagagtgtcacagttaaacaaatcccagatctgctgggtctctgctctttctttttaaccaactagaccagaacaaaggaaggggaagtaagaaatcatctgacgaatgttcagaggctttttattraatactgaagtatgaactaccagtaaggaattattttgcacattgttccttcaccaaaatagcataaaggaagaaaagacaaaaggaaaaggatgaaaaccagggagtcaaacgctgtgcttcctttcccttcctgtgagaagataaaacaatgtaatgatttctgttttg

SEQ ID NO: 600206 - DNA, 572 bp, Homo sapiens
ccttgaacttcagccgaggtttacagagcagtgtggagtccaggaattctgtgtttcacaagcccttagtgcacacttaagatctagaaccactggtcgtctgatttcacgaccattctacagataagaactttgaattcaagagatgctaaaaaatatcctgaaagtcagccaggcacagtggttcatgcctggaatcccagaactttgggaggccaaggtgggaggatcacttgagctcaggagtttgagatcagcctgggcaacatagtgagaccccatctctacaaaaaaaatttaaaataaattagccagttgtggtggtgcacacccatagtcccagctactcaggaggctgagctgggaggatcacytgaattcaggagtttgaggatgtagtaagtcaggattgcaccactaaactccagccaggggaatagagtgagactctgtctcaaaaaaaaccaaaacaaagaaacaaaaaaacaaaaaaatcccaaagttaagcaaattagtaagagatgtgggtaggtcatgaagctggatttgatttggccagaaaatgtgagctc

SEQ ID NO: 600207 - DNA, 402 bp, Homo sapiens
gtgatcacctattctgagaataacattgtgctaactgctataaaggatataaaagcaataaaggcatggccctaacaactctacataacagcaaatggaacaggcatgtatgcaaaaatgtataagaaaataagtatgaaattaartcaatcaaataattaaattaaataaatatgaatttattcacaattaaatgtgaaattaaaacaaactgctgtgggaacagaggatgaaggaagtattgacaagcatgggaattaggtcaatattgtgagaaaatgggttgagctgatccttgaagaaaaaagaagatgtccataaaggaagaattagaatggaaatatccaactatgaccagaggagggtatctgattctccctgcattcaggaagatatgaattc

SEQ ID NO: 600208 - DNA, 607 bp, Homo sapiens
tatgatatgcttgtatccaaaactttagtttttgtataatgttttgagagatgactgccaacaatgtggcaagtaaaattattgtttgacacgtattttatttaaccccctagtgtttttttttcttatctgtaaaataacaataagcacatctaactaatgagtttattgggtcagttaaataatttagcataaggagaaagggctgctgtgcctgtactaggtacaaggaaattaggattagtttttctttaattactggataggttatgaataaatgtagcagaacattgactggaataatcagttgagaaattctggtactttttttcctagtaatatctggtgaattttctaattcaagattttatgtagaaaagaagtaggttcaagtgaaaatatataaactatatcatgttycccaaatggacttgactatacaattaacttatattcttgaccatggtattttagtacgcatttcaaatccttctacagtgatgtttggaaacgcttaatgttaatgactcagcatctctgtgactttcatccttagcaggaggcaaatacccattggagactattataacacagttgacccttgaac

SEQ ID NO: 600209 - DNA, 542 bp, Homo sapiens
gattttgacagactgaagaagttaatggcctttaatctaacagaatctgctgcatcaggaaccaggatatctctaaaaaaatcactttgtaaagtgggcttgctcatgctctctatctcccattacagatgccactccaacaaacaaatattgttaaaagtgagtatttttagttaagctgggattcygtatccctaattccaaatatgtttatattgccatgtgttgatccatgagcttgagatacaggctattaacttccagctttcctagctgcctgacatcattccctctttcctccaaaaatcctcacaatttagctacatcaataattttagtaactctttggttattggtagagctttaaattttggccagtacccaaatccatatagagatctgaagtgggggcttctgactctcccttttcagaagacatggatattaatgcccctactctatgctccctttccctgacctcctctcaatcccacttaaaaactgtattgtctctctgttgacttgaatactgtcaatagtga

SEQ ID NO: 600210 - DNA, 463 bp, Homo sapiens
tttaatggactcatggttccacatggctggggaggcctcacaatcctggcggaagaccaaggaatatcttacatggctgcaggcaagagagaatttgtgcagggaaactctcccttataaaaccatcagatctcatgagactyattcactatcaggagaacagcacaggaaagacctgcccccatgattcagttacctcccaccaagtccctcccacaacacatgggaattgtgggagctacaattcaagatgagatttgggtgggaacacaatcaaactatattaacgtttatatatgtttagatacacaaatacttaccattgtgttataattgcctacagtactcagtacagtaagatgttgtgcaggtttgtagcctaggagccctaggctctgccttacagcctaattgtgtagtaggctgcaccatctaggtttcctcaagtgtactctaagatgtt

SEQ ID NO: 600211 - DNA, 607 bp, Homo sapiens
ctctggaataggcaaggaacagactctccccctacagccttagaggggagggtggccctgccagcagcttgatttcagctcagtgatgctgattttgtacttgtaaacttcagaactggagggaataaatgtgtcttgttttaagccactgaatttgtggtaatatgtaacagcagccaccatcatacaagattattaaatttatgctgaatatattatctcaatgcatgtaagaaagttgaagcgtaccaccacttcattctccttggkttttttttttttttttttttttttttgagatgggttcttgctctgttgtccaagcttgagtgcagtagtacgatcatagctcactgcagcctcaagttcttgggctcgggtgattctccagcctaagtagtcaggatgataggtgcatccaccacacccagctaattaaaaatatatttttaaaagatatggtctagctgtgttgtccagtctggtcttgaactcctggctcaaacaagcctctcaagcagctggaactacgggcatgtgccaccatgcttagcccactttgttcttgataaagctaaacagaaaaatctaagtgaggagttgtttg

SEQ ID NO: 600212 - DNA, 543 bp, Homo sapiens
gatggccaaaatagcaaaacgcttgacgtcctaggtccctaactggtaatcccacttgaaccacaatgttgactgaatgggtagcctaactggttctcttatgtaagtgagttctcttccatcttctagacagaagccatataattgctctaatatttgaagttctctaaggaattctccctgaattttaatagaagcagctagtatttattgagtacttattacatgctaggaacttaagtcatatatccttataacaccatggggcaagtgctaacattatttcccttttccagatggacartcttaggcacagaacactccattaatttgctcaaagtcatgcagttctcaagggacaaagccaggatatgaaccaatgcattcaggcatcagaaccacaatcttagtactaaaaatatagttatcctacattttaaaggacatctttagaatcacctaggagagtcctgtgaatgagtaaatgtttaactcaaaatttggacaatgatttaaacacaacaatttttttgcttgttttta

SEQ ID NO: 600213 - DNA, 654 bp, Homo sapiens
aaatgtttcctctttgagtctactgagtgcccaagtttcaaaaagcagtcatttaaaacatgagagtttgaggacagatgaaaactataaaatataagataccactgattagtttaatagttgaattcaatagctatggctcaatgaagctcagaaatctatacattcaatttatgatgaaaagaaagattcaccatgaagggactgtgggctgtgctcaaagtgagatgttgtaaggaatctaaggatgaaaacaccactacgttatgagcagactttatagcaattcttgtctgtaaaatcattacattttctccatcggtcttcaaggaactttgatttaaatcaaggcctttaagtcatgaatctcacaacaaattaatggtgtaaattcacgaatttcataaagcaggcataggcagttatactatcagccccacttaagctgcattcatgtctctttctactcactcctctagaacatttgacataagccttgttgagttaacggaattatgccagaacacagtgcatgctatgaattcattatctgaaattaktgaaactgtatttctgcagtacagtgcatcatacacggctacagtggaacatactatattggtcacatcttttcccactcagaaaggtctttgc

SEQ ID NO: 600214 - DNA, 584 bp, Homo sapiens
acggctacagtggaacatactatattggtcacatcttttcccacwcagaaaggtctttgcaaagctataacttaacaatgcgccatgacttttagtgagatatcttcgtttggattccttcaaaggaaatcgtgagtgaaggatttaaaggcaggctgtttatttgggaaggcatcctagaaagaaccactgaggaaatataaagtttctaaaaagaaatgaagaaaatctagaatagattctcaccgtgagtatatagagcttcttccaactgaagactctgagaatcctcagaattgtccaaccaaataatgcagaagtggaggcattgatctattggggagtgtttgcctctgagggttgctttaggggagctatctactctgtatttcctggtcatgactgcccaggctggaccaagctccaatgaagctagcttctgtgaatacaagagctactcaagcctgagcaaactatacatcagcattccagaacctgagctatgcagttgaagtcatgtggcattaaaagatctgttatcagacaatagaagtcaatatgatcctgctttttggaaaaccata

SEQ ID NO: 600215 - DNA, 506 bp, Homo sapiens
gtcttagatattgtctcaaatccatttcagaactaaaagaaaagggcctggattacaaataacaaataaaaggccaacccacggaaaggaataattcattatgatatttagtaggagccaagggaattgagtcagagataatacttgtgttgagtctgtgcttttttcaaggtgtgatatatttattttgaaccccacatgtcttcgytgtgcagataaggaactcaagtttccagggaaccaaatgtcctgcctaaagtcaatcatctagtgaatggaagagccaagacctgcaggcaagtctggttccatctgttgtgttctttatgctatggcctttgggtactgaaaacacagtgactcatagtagatcatttgtaacaatggagagatgcaatatatatctgtaatcatatattacatattgttatttctgctttcctttaactttgaaacttttccaaaatcatagcgataatggagaacgcaagatttagcctcaagtc

SEQ ID NO: 600216 - DNA, 392 bp, Homo sapiens
gggaattgagtcagagataatacttgtgttgagtctgtgcttttttcaaggtgtgatatatttattttgaaccccacatgtcttcgttgtgcagataaggaactcaagtttccagggaaccaaatgtcctgcctaaagtcaatcatctagtgaatggaagagccaagacctgcaggcaagtctggttccatctgttgtgttctttatgctatggcctttgggtactgaaaacacagtgactcataktagatcatttgtaacaatggagagatgcaatatatatctgtaatcatatattacatattgttatttctgctttcctttaactttgaaacttttccaaaatcatagcgataatggagaacgcaagatttagcctcaagtcaacattt

SEQ ID NO: 600217 - DNA, 557 bp, Homo sapiens
tttccaaaatcatagcgataatggagaacgcaagatttagcctcaagtcaacatttcctcttcttttgaaatatttctagagctggttggtaatttacaaaagagctagattatgaatcattttaatctgatattatttattttgaaaagcagattaatgatgggtacacatttcaactgaagtttgcttgtgttttgggagccttggtgcttccacagggatggtgcagggagaaacagtacttacaaactgctggttcccactgacctggcccatttgctttggacaaagctcatgccgaacagccttctttctaaataactgyggctttccaaatcccatcatgtcacagtgtgtacttagtcatgggtatgaataaatttttatttcataagccaattttatggcagtcaccaagtcaaactatttgtatgataaacttccttgatttgtttaaaataaccatcctgatggtaaatagtgggcacctcagaggagttagccaattccaagacttttccatctcaaggtacttgttcggccaaacgattattta

SEQ ID NO: 600218 - DNA, 629 bp, Homo sapiens
tgaacatgtcggatttcaattgtgaactacgttcacattagttttgataagagtttgtattcaggtttcccctcaaatatattttggcactgttttctttgcagatgacatgtgaatgcattctgaatgtataacttccttctacctgactgaaaagtatttggtgacaattttaactccttgaagacctgagttgctgtataaagtggatttgttaaattttgatctaccttttcttaagagggagaaagataagaaaattttccagtgataggaatttgkttagtccattagtgcccaggatttctttttgactgagggatttaataaattttagtagctggaagttgagcatattgttcaccgaaaataaccgccattgggacctatcctttgtgattttgaagtgctaataggcgaattattctgaaatattttctcctttttctttttaccaatatctaagggccagtagctttccgtaataaaataagaagccaaaaaactattgaaagacactttttaactttaattttaggtttcggggtattatgtgaaggtctgttacataggtaaactcacgtcacgggggtttgttgtacagattatttcatcactcaggtattaac

SEQ ID NO: 600219 - DNA, 570 bp, Homo sapiens
agttccaactttttattccgatttgactttgacccctacaataattacagatttaacataaatggatattactgattattctcaataaagtagaaatgttttctctaccatggtcttcactgacaaatgatctcaaaagtacggccaaaaataaagctatcattaaaacaacattattaagttcaatattatctcgtggatggtactcatgtgatgttcttgctgtattttcaggtttttagcaaacatttcctgagtagccattaaatattcaaaccatgctaagtactctggaggatatgaagatgattaagatacagtccatgccccaaagacacacactagctcattaaagagaggcactggtaataactgataaaaaggmaaactgtcaaggaattttctgagaaaggtccaaagtgctctgggaatagaggcaaaagacagatttcttccaactgcagggatctagcagggctccatggggaaagttattttgagcagtgtgatggaggataggtgggattcctttgtcagatacggcagtggtgggttagaggttagcagtta

SEQ ID NO: 600220 - DNA, 562 bp, Homo sapiens
tctctgtaattacaactaaattattatgccctcttctcacagtcaaaaggaactgggtggtttggtttttgttgcttttttagatttattgtcccatgtgggatgagtttttaaatgccacaagacataatttaaaataaataaactttgggaaaaggtgtaaracagtagccccatcacatttgtgatactgacaggtatcaacccagaagcccatgaactgtgtttccatcctttgcatttctctgcgagtagttccacacaggtttgtaagtaagtaagaaagaaggcaaattgattcaaatgttacaaaaaaacccttcttggtggattagacaggttaaatatataaacaaacaaacaaaaattgctcaaaaaagaggagaaaagctcaagaggaaaagctaaggactggtaggaaaaagctttactctttcatgccattttatttctttttgatttttaaatcattcattcaatagataccaccgtgtgacctataattttgcaaatctgttacctctgacatcaagtgtaattagcttttggagagtgggctgac

SEQ ID NO: 600221 - DNA, 566 bp, Homo sapiens
cagggaggggaggaactgctgggtgatctttgaaagctagctaccacaccatgttggtttttattcagtttacccctaaaattctggaagagtcttgaggattggcactatgctttaattatctctttatccacaattcttagcacaaatcctggaacatagtacttagatgcttagtactgatgtttgctgatgtacttagtactgatgtttcttcagatgtttgctgactctatgaacctaattaaatcagatcaaatcagcccataggttttgagcacttattctgtgctaatctgtctagttgattgttgtggagttgaagawagggagtttcccacccatgagcttatgggtcggggacaacattgcactaaagggacacaacagaaaacgagaagattaatagttcaaggcaattacagtcaaggcgtcactgggcagtccatgactgattgccgtgctagttgtgtgggcactaatccctttagatctttagaggaggctgagttcactttagacagagaggtttcaggtagaagacagggttggatctgagtctaaat

SEQ ID NO: 600222 - DNA, 573 bp, Homo sapiens
tgataggagttgatattcattagtctgctagctaatactgtaggcccaatctacagtttatgattgtaattttggtaaatatttaaccagacaactcatcatrtatttcattcaccaggtgaagtcatagagattatgacttattctctcttctcagggaactcacactctggtaaagtagatagatgaccaagaattacaattacgatgcagtataatcagtgctgtaagagatatttggagagtgctgtggaagcatggtagagaggcagttagctacttaaaaagtgtcaaggaaaagggggattgctactctctctactcatgcaaaaaaacaaaaatgctggtagaactcaggaccccatgcctaaatatttcctgcattataaaagaataggaaagaaatatccattaacaaaaagcaatacttctagttctatgaaaactcaatatttttcacttgcatgttcttatttagtactgtgtgttttttttcttgagcaattttcaaatatgaattatctacatctttcaccaataggagaacatagtacagctgctgaggacaccaga

SEQ ID NO: 600223 - DNA, 554 bp, Homo sapiens
gaagaagcttggggccccgtagaagcagataacccagacgcttatgctagatgtcttattttccattgaatacacccagtaatttttttgttctatttaaaagtctttcataatttatccttacaaaaactatattcattgttagtccattgtattgcaaaagacctgcctgctatttgtggagcattattcagactaccttgtttgccctagcttgcaggtttttattgaaaaaaagaacagtcatcaatatcagcatgcacacacacacatacacacacaagcatatatatatatatatatacacacacacaagcacatatacatatatatgtttaaatagtagtaatcatttttggtgagtgaccatttcaaaatctcttatcaactacaaaatgagaactgtagaaaatataatactataagcaactcatatgtgaaaatggtacaatgagacagatttaggacaaaattgaccttaaggtttygattctttccaagacagcatttctgggttactgcttggaaataaaggtatactttaaatttcattg

SEQ ID NO: 600224 - DNA, 569 bp, Homo sapiens
gaaacacgaaagatggcatcctgctccttcctctggtagcttcattccagggggcctgaatgcacctataggagttggctggagacctgggttggaatacctcacccagtcagagggaaagggatcggagacaaacttgaagacgcagctcggctgaattttgtagagcagctgtgctgtattggggatccttcagcctcccagcttggttctggatcctttaaggttcacagcgttggaccagctcagatgcccaaataggaaaggtggtggcctgcttcacccatcaggcactccatcccagggakaaattagaactttgtttgcaatagaacatgagcagtggtgaccagaggctttggctgcggagagcagcaagcgaggaatggatctgagtcctgttgaaagaagcagtctggccacttctcaacaaaacagctatatcatgctgtggaattgctttttgccttgtctgcttatactctccaaagcccacagcgttgaagggctgagtcatccaaacagcaaagatgatgacccacccctccccacaagcactttttggcaga

SEQ ID NO: 600225 - DNA, 569 bp, Homo sapiens
gaaacacgaaagatggcatcctgctccttcctctggtagcttcattccagggggcctgaatgcacctataggagttggctggagacctgggttggaatacctcacccagtcagagggaaagggatcggagacaaacttgaagacgcagctcggctgaattttgtagagcagctgtgctgtattggggatccttcagcctcccagcttggttctggatcctttaaggttcacagcgttggaccagctcagatgcccaaataggaaaggtggtggcctgcttcacccatcaggcactccatcccagggagaaattagaactttgtttgcaatagaacatgagcagtggtgaccagaggctttggctgcggagagcagcaagcgaggaatggatctgagtcctgttgaaagaagcagtctggccacttctcaacaaaacagctatatcatgctgtggaattgctttttgccttgtctgcttatactctccaaagcccacagsgttgaagggctgagtcatccaaacagcaaagatgatgacccacccctccccacaagcactttttggcaga

SEQ ID NO: 600226 - DNA, 569 bp, Homo sapiens
gaaacacgaaagatggcatcctgctccttcctctggtagcttcattccagggggcctgaatgcacctataggagttggctggagacctgggttggaatacctcacccagtcagagggaaagggatcggagacaaacttgaagacgcagctcggctgaattttgtagagcagctgtgctgtattggggatccttcagcctcccagcttggttctggatcctttaaggttcacagcgttggaccagctcagatgcccaaataggaaaggtggtggcctgcttcacccatcaggcactccatcccagggagaaattagaactttgtttgcaatagaacatgagcagtggtgaccagaggctttggctgcggagagcagcaagcgaggaatggatctgagtcctgttgaaagaagcagtctggccacttctcaacaaaacagctatatcatgctgtggaattgctttttgccttgtctgcttatactctccaaagcccacagcsttgaagggctgagtcatccaaacagcaaagatgatgacccacccctccccacaagcactttttggcaga

SEQ ID NO: 600227 - DNA, 587 bp, Homo sapiens
agccttccaaactgctccaacctctgctcattacccagtttctatgttgcttccacatgttcaggtacctttatagcagtgccttactcccagtatcacttttttgtattagtctgctttcacacagctataaagaactacctgagcctgggtaattcataaagaaaagatgttttgttgactcrcagtgacacacatctggggaagcctcaagaaatgtacaatcgtggcagaaggtgaagagaagcaaggcacattttacacagtggcaagagagtgaggggggaactgccacacacgtttagtccatcagatctcatgagaactcagtatcatgcaaacagcatgcgggggtgcgggttgctcccatgataaaattaccttgcaccaagttccaatctccatgtagggattacaattcgatttgagatttgggcatgaacatagagccaaaccatatcaggtagtatggccattttgatgatattgattctttatccatgagcatgaaatgtttttccactcgtttgtgtcctctctggttttcttgagtagtgttttgtagttcctgaagaggttcttcactt

SEQ ID NO: 600228 - DNA, 574 bp, Homo sapiens
ctttttgtgggcctaagggtggcagaaaaaaagggacaggcctaagtaaaataaagagacagaattcagttgactgagaacaaaaacaaatattcctcaaaaaacaagatccgaagagagaaaggccttttagacacacacaaacacaaaaaaaattataggtttaaaaatataatgtgtaaacatatttctaacatatatatgtacatttatgtttatatataaatatgtcatatatttatatatttctgacatatatgtaattataaatataaatttacatatatatcaaagttgcttttaattaagcttttaatcatggagctcttagaaaaaacttttgaatctcttactaacacaccataactcagacaaactgctgttatttttaaagtaamacaaataccaaaccagaaagcactagacaggaacaaaactcaagttgctgtagtgaatacggtagaatcttagcattgggtagccaccactgctccttcagtttgcccatggctaacaaaagatggccttgttatgtagacgaaaactcttaggttaaaaaaaaaaaaatgtttta

SEQ ID NO: 600229 - DNA, 567 bp, Homo sapiens
tgaataaaaatgaaaatactacatgttagactttgtggaatatagctacaacagttcctaaatgaaaagttagcacggaatgtctatactggaagacattcagatcaatagccttgacttctatcttaagaaagtaaaaaaggtctggacacagtggctcatgcctataatcccagcactttcggtggcctaggtggatgggtcatgaagtcaggagttcgagtccaccctggccaatatggtgaaaccccatctctactaaaaatacaaaaattagctgggtgcagtggtgcacacctgtagtcctagctacttaggaggctgaggcatgagaattgcttgaatccagaggcagaggttgcagtgagctgaaatcacaccactgcactccaggctagatgacagaatgagactctgtctcaaaaacaakcaaacaaacgaaaagtaagtaaaaaagaagaaactacaaaaaaagagagcaaattaaacccaacagaagcagagaaaataataaacatcagaacatagtgtgaacatttttgtcctcccaaaactcatatgctgaaa

SEQ ID NO: 600230 - DNA, 499 bp, Homo sapiens
  misc_feature 77: n = A,T,C or G
gtggcccatgacatttactagaggggattattttagcaagtgtagtatccatgaggccaatgaagaaatctatttgngttgttcaagtcatagactataaaattgtgaacaataaatgttyatattttccacaatataaatatactgagtgtgataaaaattgagctggtattctgacagaaaccaatcaaagagagatacagacagcattgttggcatttgagtccacagttcaaatccttacaaaatttctttctttctttttttttgtttggagttggagtctcgctcaatcgcccaggctagaatgcaatggcacgatctcagctcactgcaagctctgcctcttgggttcatgccattctccttcctcagcctcccaagtacctgggactacaggcacccaccaccacgcgtggctaattttttttgtagtttgtatttttggtagagatggggtttcaccatgattgccaggatgatctcgatctcctgactt

SEQ ID NO: 600231 - DNA, 452 bp, Homo sapiens
gaccatcaaggtggtacctctctgagtctacaagaaccatagtgttactgtgcttggggtgtccctaaagcagatacagcttagatcacaacacccaagttctttytaatatctggaaggccttccaaagtaaaatggctacaaataagcccagagagtgaagactacaatagatacctaactcttcaatgcccagacacaaactaatatctacttgcatcagtatcatttaggaaaacattacctcatcaaacgaactaaatagggcaccagggaccaatttgccttagtatctgttttcttttggttactctttagtgccttcaggaaggtttattttggttggtttgtccagagtttatagttgttacctgtgtgtatgtgttgagaacaggggacagagaggtcagtcacttttagaagtggaaccttaaagagctttttttgtgtca

SEQ ID NO: 600232 - DNA, 452 bp, Homo sapiens
gaccatcaaggtggtacctctctgagtctacaagaaccatagtgttactgtgcttggggtgtccctaaagcagatacagcttagatcacaacacccaagttctttctaatatctggaaggccttccaaagtaaaatggctacaaataagcccagasagtgaagactacaatagatacctaactcttcaatgcccagacacaaactaatatctacttgcatcagtatcatttaggaaaacattacctcatcaaacgaactaaatagggcaccagggaccaatttgccttagtatctgttttcttttggttactctttagtgccttcaggaaggtttattttggttggtttgtccagagtttatagttgttacctgtgtgtatgtgttgagaacaggggacagagaggtcagtcacttttagaagtggaaccttaaagagctttttttgtgtca

SEQ ID NO: 600233 - DNA, 478 bp, Homo sapiens
gaccatcaaggtggtacctctctgagtctacaagaaccatagtgttactgtgcttggggtgtccctaaagcagatacagcttagatcacaacacccaagttctttctaatatctggaaggccttccaaagtaaaatggctacaaataagcccagagagtgaagactacaatagatacctaactcttcaatgcccagacacaaactaatatctacttgcatcagtatcatttaggaaaacattacctcatcaaacgaactaaatagggcaccagggaccaatytgccttagtatctgttttcttttggttactctttagtgccttcaggaaggtttattttggttggtttgtccagagtttatagttgttacctgtgtgtatgtgttgagaacaggggacagagaggtcagtcacttttagaagtggaaccttaaagagctttttttgtgtcatatcatgtgcaaacctgttagaattc

SEQ ID NO: 600234 - DNA, 470 bp, Homo sapiens
agaattcccacagattttgtttaagaccatcaaggtggtacctctctgagtctacaagaaccatagtgttactgtgcttggggtgtccctaaagcagatacagcttagatcacaacacccaagttctttctaatatctggaaggccttccaaagtaaaatggctacaaataagcccagagagtgaagactacaatagatacctaactcttcaatgcccagacacaaactaatatctacttgcatcagtatcatttaggaaaacattacctcatcaaacgaactaaatagggcaccagggaccaatttgccttagtatctgttttcttttggttactctttagtgccttcaggaaggtttattttggttggtttgtccagagtttatagttgttacctgtgtgtatgtgttgagaacaggggacagagaggtcagtcacttttaraagtggaaccttaaagagcttttttt

SEQ ID NO: 600235 - DNA, 483 bp, Homo sapiens
aatactcctttaaatttaaccaatatgttcacacacagtatttctcttacaagattatttttttcacaaaccttccacaacttgctcaaacttttagctttattttatctaaattaaaacaatcctttaactctctaaaytaggcaaaaatttacattttaatgccttcttataatcttttactgaaagcacatttcactttcctcacacagcttccatagataacttttttcagtagtctgaattacatgttacaatgttaacccttagcaatttttatttttggtgaaaaatctggcaagtaagtgactttaattatgtactaggtgtggagcctaggacaccagacagaagtgcagataaagtctgaccctttcaagcatagccagggggatggctaactccacatgtccccaggcattacctagaatctaatggctccagagcaggtaaactgaacagattttaaaactcaaggaagca

SEQ ID NO: 600236 - DNA, 576 bp, Homo sapiens
tattttcagagcttactaaagtcatgtgaactaaaaggcattacagtttttatttctctgaaaaaaatttgatttaagcactcattgtttttaagccaattagagcttttttatttataaacatcacacacaacacatacacagaagtagacccagtagttgtaagacttttcatttgccagtttttaagtttcttagttggattactagcttcagggtggagtcccctgaggaagaaggctaggaaaatatgcagtttctaggacctaataaacaggcacaactgaaaggcaaaacagatccccaaaaatttagggtcccattttatactggatccccaaagagaaatgctatggagcaggacagttcaatgatccttaccatgcattttgttgcagagcaatagaaagccaattagttcattttgtgatcagcccatccctatgggagccttatttctcagtggtgggggracattgccatactttctaggtaatcgagaatgtgcttctctgattgagatgtgcaaagagctgaatatccccccataactgccatttgccatcccccaaaaat

SEQ ID NO: 600237 - DNA, 576 bp, Homo sapiens
tattttcagagcttactaaagtcatgtgaactaaaaggcattacagtttttatttctctgaaaaaaatttgatttaagcactcattgtttttaagccaattagagcttttttatttataaacatcacacacaacacatacacagaagtagacccagtagttgtaagacttttcatttgccagtttttaagtttcttagttggattactagcttcagggtggagtcccctgaggaagaaggctaggaaaatatgcagtttctaggacctaataaacaggcacaactgaaaggcaaaacagatccccaaaaatttagggtcccattttatactggatccccaaagagaaatgctatggagcaggacagttcaatgatccttaccatgcattttgttgcagagcaatagaaagccaattagttcattttgtgatcagcccatccctatgggagccttatttctcagtggtggggggacattgycatactttctaggtaatcgagaatgtgcttctctgattgagatgtgcaaagagctgaatatccccccataactgccatttgccatcccccaaaaat

SEQ ID NO: 600238 - DNA, 508 bp, Homo sapiens
tcccccaaaaatatatttagccttagactttgtgaggaatctatctgctttcaattcctgggatttcatgaggaaaacagrtttttcccaaaatggggtctgtggtgcctcctctgtttttcccaaggagtcccaggctgttagaaattaatcttatgtcctctcatgcatgcatcaagtttggcaagccaaaatggagaaaaacaattgagttgactgaagagaaaaaagagatccaagaagagaaaaaatcatgaaggacttttaaatacacctatatctttgatatcctattttaattaagctgacttttaactatagtgctctttaagaaaatcgttttaaatctcttattacctgactttacctaggccaaacagccaatatttctggcttttgaacttttacaaaattaatctcccaggtgaaaccaataagtcataactaaggttatgacttaaccacgagtgatgaggtattttcaaagaggtagtaagcaatttttaca

SEQ ID NO: 600239 - DNA, 514 bp, Homo sapiens
ttcaaaggggagggagtgcacaaatagggtgtgggtcacagagatcacatgcttcaagggcaacaaaagatcacaaggcagaaggtcagggtgaaactagaatcactaatgaacttctatgtcccactgtgcacgcattgtcaggcttcaagagcagagaactggtctgactagaattcaccaggctggaatttcctaatcctagcaagcctgggggcactgcaggagacgagggcatgtttcatccctatctacatctgcataaagcagacacccccagagcggccacttcagaggcctcctctgtgaatgcattcttttcccagggctgttaattattaatattccttactggggaaagagttcagtgayatttatcttacccatttttggtagtaagagaaatatggctctgtccttcctgcccacaggcagccagactttaaggtcatctcccttgttccctgaaaatcgtggttatcctgttcttaaggtgcacagatttcatatcatt

SEQ ID NO: 600240 - DNA, 607 bp, Homo sapiens
tcatctcccttgttccctgaaaatcgtggttatcctgttcttaaggtgcacagatttcatatcattcaaatacacrtgctctacaaacaatttgtgcagttaacgcaatcatcacaggatcctgaggcatcattcatactcagcttacaaagatgtcaggattaagagattaaagtaaagacaggcataggaaatcacaagagtatggattggggaagggataaatgtccatgaaatcttcacaatttatgttcagagattgcagtaaagacaggtgtaagaaattataaaagtattaatttgaggaactaatcaatgtccatgaaatattcacaatttatgttcttctgccatggcttcagccagtctctctgtttggggtccctgacttcccgcaacacataatcaggcagaagttattcccaggatgcaaggctggctcaacacatgcaaatcaaatgtgattcatcacataaacagaactagagacaaaaccacatgattatctcaataggggcataaaatgccattgacaaaattcaacatcctttcattttaaaaactctcaataaacaggtattgaaagaacaaacctcaaaataataaa

SEQ ID NO: 600241 - DNA, 591 bp, Homo sapiens
atatcaagaacccaatctcttttacaatggctgcaaaagtgtaaaatacctaggaatatacttaatgaaggaggtgagtgatctatataaggataactggaaaacactaccgaagaaaataatagatgacacagacaaatgaaaatacatcctatgttcatggactgaaagaactgatattgtgaaaaatgaccatagtacccaaagcagtctacagatttgatacaattcctatgaaagtaccaatgtcattcttcacagaattataaaaaaagttgacatttatgtagaaccataaaagagcctgaataacaacagatgtaccaagcaaaaggaacaaacatgttggcgtcgcattatctgacttcatattatgctctaaagccacagtaacaaaaacagcaccatactggtataaaagtagatacatagatcaatgaaacagaatagacaattcrgaaataaagccacttacaaccaaatgatctctgagaaaggatacaaaaacatacactggagaaagtacacattattcaataaatggcgctaggaaaaaaagatagccacatgtagaagaatgaaactggatct

SEQ ID NO: 600242 - DNA, 532 bp, Homo sapiens
gcaccaccatgcccggctactttttgtatttttagtagagatggggtttcacyatgttggtcagtctggtctcaaactcctgacccatgatctgcccgccttaacctcccaaagtgagtaaaaatatttttagatatacaaaacccaaaagaacttatcaccagcagaaccacactgtaaaaaatgttaaagtctttctgaaagaagaaaaattataccagatggaaatatgtatctacacaagggaatgaagaacaccaaaaatggtaactaagagggtacctatgtagttttttaaattatctttttatctttaaaagatcatgaactggctggatgtggtggctcacacttgtaatctcagcactttgggagaccaaggagggaggattgcttgaggacaggaaattgaggctgcagtgagctataattgcaccattgcactacagcctgggtgataaagaccctgtctctaaaaaataataataaaagataattaactgtttaaccaaaagtgagtcacagaaggtca

SEQ ID NO: 600243 - DNA, 532 bp, Homo sapiens
gcaccaccatgcccggctactttttgtatttttagtagagatggggtttcaccatgttggtcagtctggtctcaaactcctgacccatgatctgcccgccttaacctcccaaagtgagtaaaaatatttttagatatacaaaacccaaaagaacttatcaccagcagaaccacactgtaaaaaatgttaaagtctttctgaaagaagaaaaattataccagatggaaatatgtatctacacaagggaatgaagaacaccaaaaatggtaactaagagggtacctatgtagttttttaaattatctttttatctttaaaagatcatgaactggctggatgtggtggctcacacttgtaatctcagcactttgggagaccaaggagggaggattgcttgaggacaggaaattgaggstgcagtgagctataattgcaccattgcactacagcctgggtgataaagaccctgtctctaaaaaataataataaaagataattaactgtttaaccaaaagtgagtcacagaaggtca

SEQ ID NO: 600244 - DNA, 471 bp, Homo sapiens
attgaggctgcagtgagctataattgcaccattgcactacagcctgggtgataaagaccctgtctctaaaaaataataataaaagataattaactgtttaaccaaaagtgagtcacagaaggtcagaggaagaaggaatgtacaatctcatttgcaatctgaattacttactgaattcatataattggtgggagggccaggaatataaatcaagttctctgatgcaacctaaccaaatgataacagatatactagtccccggttatctgtggttttacttttcaaagtttcagttatctgtgggggactacagtccaaaaatactraatggaaaattccagaagtaaataatccataggctttaaaaaaataatttataagttttaaattgcatgccattctgagtagcatgataaactctcacactgtcctgctctgtactgccctggacatgactcactcctttgtcca

SEQ ID NO: 600245 - DNA, 567 bp, Homo sapiens
atggccacattactatgatcacacyttacataattaatgttaattccctaatagcatgtaatattcagtccaattttctcaattaataaaaagtcatatagcttgaaaattctaattcatgcaattcaatattaaagttaattcttcataaagctgataaacactatatttgtatgtaagcccatctatcaaagaaatcccataccacactgaacagtctctcctctgtaacatgagccagagtgcattcctgatatatctcctactcttaagaagatttatttgccaatatgtaagtgcatgagactgttatatgtctgtctcttatcttagtgttatacaggcttgttgaaataaagaataggatatgcatattataaagtagctgccctagatccttgtataaacatgtttatcattagaaattttttttttatttttggcaagacagtgcaacaaaacaagataatcaaaagataaactcacaaaagttgatccatgaaaaaaaaaatactaccaaagagaaagggagaaagatggaaagagagatcaaaaaataaaagtttg

SEQ ID NO: 600246 - DNA, 581 bp, Homo sapiens
caactgatcatttctaagtctaacatctacatgagcagagttttcaggcttacctagagttgcaattcaaggataactggtaggctcgacaattaagggaatatttttgaatcaaaccamcattaggtagactgtatctctgaatggtgccagattcacgaccctatggaaattacttttgattacttaagcatacgtgtatcataataatattaaactacaactatttctctatatgtctatacatttgtcttaaaaccaaagtgatgtcacagcaaattctcaattctgataatgaatcatgtccttaagtacatatttacctactaatttaattaaacctttttcaaacagctgaagtattctaattttttttcatgtaatattcaagaaagaagtcagaaacctagcactttggcaatacacaaattcttacatcacaaggaaaaaaaatctaaagttatttatatttgttatctaggttaatattcagggcacattaaaagctaaagcaaagtacttgttgagttaaattacatatgtatatgaaaaatcaacagaagatcatatgatatagctgt

SEQ ID NO: 600247 - DNA, 604 bp, Homo sapiens
caggctcaacaccacgtggaagccaacaaggcttcgggcttgcaccctctgaagcaatggcctgagctctttgttggccccttttagccacaggtgggatgcagagcaccaagtacccagactgcacaaagcagcaagtccctgggctgggcccacaaaaacattttttcctcctaggcttctgggcctgtggtgggaggggctgccatgaagacctctgacatgccctggatatattttccccattgtcttggcggttagcatttggctcctcatcacttatgcaaatttmttcagcagcttgaatttctgctcaggaaatgggtttttcttttgtattgcatcatcaggctgcaaattttctgaacttttatgctctgcttcccttttaaatataagttcctattccaaaccatatctttgtgcatacataaaacaaaatactcttagcagcacccaggtcacctcttgaacactttgccacttagaaatttcttccatcagatgccctaaatcatctctctcaagttaaaaattccaaaaatctctaggacaggggcaaaatgccaccagtctccttgctaaaacatagcaagagtcactt

SEQ ID NO: 600248 - DNA, 592 bp, Homo sapiens
ttcgggcttacaaacattgagtgctaatactgacataatatcgagaaaaaaaagacaatgccaaaactcagaaaagtatctacttttttcacaaaggamaatgatatactcattattagcatcagtgcagctgataagccactaattcattttttattatttgctgagatttaagagttgacggggacacatagtttctttcagtcatgcttgcttattattaatgcccaagatcttccaatgatggatggagcatgcaacagtgctgaggtatcattatacaaagttatttctgagactattttgctaaagcataattgctgaatctactaaaattgagtctatcaaggtgaatgaatgatcatccctgaatgcaatagacatgtttctgggaagaggaaagcagcaagccttagagattaagaacaaacattatggagacatgctacttgatttgttattcattaatcatttgagagcccgagacaagttattcaaatttttaggcatccatttttcacctttcaaaaaataggaataataatggcatggagattctttaaagatcaagtgaaaaaatcttataaagctg

SEQ ID NO: 600249 - DNA, 614 bp, Homo sapiens
ttttagttattctttgcccagcttttggcttgtcttttctatctgttcctcaggcagctgcaaagttgaaaacacttgcctgtaaaacatatttcagaaataccctctaagagaaagctcttaggcctggcaagctccagttgggtcaaatgaaaacaagccttttgaattaaaacttacaggcaagtactgcacagatcagattatatatatatatataaaatcggaaatgaggctatgaatgasgtatcgcgtgcttctgctttttccagaatgcaggctattttatttttggcaaaaatatatccgagtttgaaatcagggaatgggactatgagaagataaaaatgccaccaaattcatgcttcttacagaggctcagtcatttttttaaaaaataaaatacaataaatgctccacaggttgctgcatgactttggttagtttcaacagtgatgaaaatgttacttctgacaaacttttgccagtttttgagttgactttattgagagacaaattttcagaagtcctttctctgccattttcatggatgtcactctctctatatatatattttaaagataaaacataaatgaccaaactacatcctaaaa

SEQ ID NO: 600250 - DNA, 614 bp, Homo sapiens
ttttagttattctttgcccagcttttggcttgtcttttctatctgttcctcaggcagctgcaaagttgaaaacacttgcctgtaaaacatatttcagaaataccctctaagagaaagctcttaggcctggcaagctccagttgggtcaaatgaaaacaagccttttgaattaaaacttacaggcaagtactgcacagatcagattatatatatatatataaaatcggaaatgaggctatgaatgacstatcgcgtgcttctgctttttccagaatgcaggctattttatttttggcaaaaatatatccgagtttgaaatcagggaatgggactatgagaagataaaaatgccaccaaattcatgcttcttacagaggctcagtcatttttttaaaaaataaaatacaataaatgctccacaggttgctgcatgactttggttagtttcaacagtgatgaaaatgttacttctgacaaacttttgccagtttttgagttgactttattgagagacaaattttcagaagtcctttctctgccattttcatggatgtcactctctctatatatatattttaaagataaaacataaatgaccaaactacatcctaaaa

SEQ ID NO: 600251 - DNA, 501 bp, Homo sapiens
atctcagtaagtaaaagctttgggttgagctccatagtaggggtcctgaggagtgctgatgattctttaatatcccaaattctcagggattcttaaaggtttgccaacataggcaccaaaacaacataagatgtgccatagactgaagtcagamcttgtagtcaataaaaaatctaccacatatttcaccaaccattgattttaacagtggaaaccagtaagctgaccaaaaacatgaccaaattagctacacagcaatgaaagctagtcctgaaaatattagacagtcagatactgtgtctgaatattagatagtcaagtactgtagctagtcctggaaatactagatattcacatactgtagttttctacttcatgatgaacagttagtaaagatcaattattctaatgctcctttcactcactctggtagagtgttgattgttcttcagtaatgattcttcctttctttcatagtaacaaaacttctcaatttttaac

SEQ ID NO: 600252 - DNA, 501 bp, Homo sapiens
atctcagtaagtaaaagctttgggttgagctccatagtaggggtcctgaggagtgctgatgattctttaatatcccaaattctcagggattcttaaaggtttgccaacataggcaccaaaacaacataagatgtgccatagactgaagtcagaacttgtagtcaataaaaaatctaccacatatttcaccaaccattrattttaacagtggaaaccagtaagctgaccaaaaacatgaccaaattagctacacagcaatgaaagctagtcctgaaaatattagacagtcagatactgtgtctgaatattagatagtcaagtactgtagctagtcctggaaatactagatattcacatactgtagttttctacttcatgatgaacagttagtaaagatcaattattctaatgctcctttcactcactctggtagagtgttgattgttcttcagtaatgattcttcctttctttcatagtaacaaaacttctcaatttttaac

SEQ ID NO: 600253 - DNA, 319 bp, Homo sapiens
tgagagaaaaatgtagaccttatttttatgccaagtttacaaaagggatcctaagtagtagtatyagtattgctgccaccttggctatatcctcctaattactgtgaaacaagacacaaacttctgtgaaatgtaaacctacatataaagccaaggttttatttagtctgaagaaattttttaaaaattaacctctgattttcttatcgagacaaataaacagactgacacagacttccaattaatttgtggttaagcctaacatttacaagttgtagaaataatagtcaaataattagtgcttattaaaaacaaaact

SEQ ID NO: 600254 - DNA, 537 bp, Homo sapiens
cttgacccttctattacaccaggtgctcaagtcggaagcatggggaaatccttgccttctgcctctaattctaatccaccagtgagttcgatcatttttgtttccaaaatatgtcttaaagttgtccactttttaaaatcaccactaccagcttctctatctcagtcttgcatccgcatcttgtttggttgatagtagtaatttcttcattttatgaacatggaagccaattttaaacagctaataagtggaagatggtggatttaaatccaaattaatttttataattttccaacaattaaaatctctctatagcaaacaaatttcaaataaaaaaaaaacttttgatcaaatgaaataaagtgcttttagtaatgaataaaaagtaaaacctaccaagctctctagatatatttaaatcatctaaacaatttcaataaataacttacaaatatttgccctcaaatgctcaartcaagacattgtctataacagaccatataacaaggatggttgaaagaaagtggattgattgca

SEQ ID NO: 600255 - DNA, 609 bp, Homo sapiens
  misc_feature 497: n = A,T,C or G
gcctcttctttctctttcccttcttctttttctttatgtactgccttgactcatgccaaagcaccacaattttactcatcattgcttttgcaccagcagtgcagatgttgacacagcagaacaaaaataacaccttagtattgtaataaaaatatttttggcctcatgaactttctgaaggagtcttgggaatcttggtgctctgtgaaccaaagtttgagaacacttcttcacactacttactaattattttgttcagtattttgtttctttggttgagacaggtgttattaagtaatagaacctataaaatacaaggaaaaaattttcattaagattgacagtaatgttgccttgacacattcagtcaagtgttcaggttggctgttatctagttgagtgagctggtgttaaatgggtctaattaaactggaactgaaacctatattgagagacttaattcttaggtaacagaaaacaaataaaacattaaatgnggttgatmgcatttggaccatgacaattttgggacaactccagtctgtaaatccccttcccaactctagaaacactgacatttgatgcttcttgtaagtaggtccaggagtc

SEQ ID NO: 600256 - DNA, 655 bp, Homo sapiens
aatgttgaaataaaatggaatataagtattcaaattacatataatcaagagtagctaaaatgtgctccctagcttagatgaaggagcaaggctgataagttagaataagataaaacaacagataacagttacattctgttctgtccttttctgaagactgttttacttaacctaagtcaaacagttcaaatgccttcagggattagaaaggcaatagaaatcgtgaaatcaataggtgaaatgtgtgaaattaatagggagaaatattacttgtggctaactgaagaatgcatatcccaatttaaaattctaattgaaaattcttaactatgtaagtcatttttatctaaatatgagagttgctaattggtcatctgtgtgttaaagaattcaccataatcaagaaagatgcctcagtcacacaggcaagcttgtgaaggagaaagtggatatagaatccttatgattgtttgtttaaatcattaagcaaaggagtttctcttggaccamatatgagcatagacttcaaatttagagagaaacttgttattttctaggagctgtactcaagaaaaaaacaggggacacccaccagtcagaagctacaccactattttattttagttcttattaggacttgctaggcctgcaattt

SEQ ID NO: 600257 - DNA, 655 bp, Homo sapiens
aatgttgaaataaaatggaatataagtattcaaattacatataatcaagagtagctaaaatgtgctccctagcttagatgaaggagcaaggctgataagttagaataagataaaacaacagataacagttacattctgttctgtccttttctgaagactgttttacttaacctaagtcaaacagttcaaatgccttcagggattagaaaggcaatagaaatcgtgaaatcaataggtgaaatgtgtgaaattaatagggagaaatattacttgtggctaactgaagaatgcatatcccaatttaaaattctaattgaaaattcttaactatgtaagtcatttttatctaaatatgagagttgctaattggtcatctgtgtgttaaagaattcaccataatcaagaaagatgcctcagtcacacaggcaagcttgtgaaggagaaagtggatatagaatccttatgattgtttgtttaaatcattaagcaaaggagtttctcttggaccaaatatgagcatagacttcaaatttagagagaaacttgttattttctaggagctgtactcaagaraaaaacaggggacacccaccagtcagaagctacaccactattttattttagttcttattaggacttgctaggcctgcaattt

SEQ ID NO: 600258 - DNA, 463 bp, Homo sapiens
aaagtctttccttttacctgttaagttgcttttgactgcatgtgagagagacttcaacgcaaattagctttaacaataaagatgtttatcttatataatagaaagtcaggtatgggtggatttcagacatgattcaaataaaatattggatccatatctctgacattctgccgatgttacgtttattattaggctaacttcccgtgaamtttcaagatgactaatagcaacaactgaggcaaaaactgccgcttgttcaaaccaagcattagaaacagaaaacttctccactaattgtggaaggaaagatgttcctttcagcctgtttggtttgtgctgctataatgtaataccacagactgggtaatttataatgaacagaaatttattagctcacagttctggaggctgggcagtccaagattaagaggctggcattaggtgagggccttcttgctgcatc

SEQ ID NO: 600259 - DNA, 463 bp, Homo sapiens
aaagtctttccttttacctgttaagttgcttttgactgcatgtgagagagacttcaacgcaaattagctttaacaataaagatgtttatcttatataatagaaagtcaggtatgggtggatttcagacatgattcaaataaaatattggatccatatctctgacattctgccgatgttacgtttattattaggctaacttcccgtgaaatttcaagatgactaatagcaacaactgaggcaaaaactgccgcttgttcaaaycaagcattagaaacagaaaacttctccactaattgtggaaggaaagatgttcctttcagcctgtttggtttgtgctgctataatgtaataccacagactgggtaatttataatgaacagaaatttattagctcacagttctggaggctgggcagtccaagattaagaggctggcattaggtgagggccttcttgctgcatc

SEQ ID NO: 600260 - DNA, 400 bp, Homo sapiens
atgtaacccaggtggattgcgcagtaatctgtgagtttcttatgcatttctacagctttcctttgacatatgtgtgacagcaaagggacagaaccatggccttggagcaaaccagggtctcctaatctgaggctaagtttttagagcatatctctccttcactcactgtctggctctaggccacataagaacttcttccccaactcagtttccttagttgaaagtaggaggaagcccccacgtacctacttcacagagctttccagtgaagtttagcaattggggatggcagagcatgttacaattttagaactgctctagagattcaasagtgaaaatacactagctaattaaacaaaatttggtagaaaggagaattggaaattcaccttctatcagt

SEQ ID NO: 600261 - DNA, 619 bp, Homo sapiens
tcactgtctggctctaggccacataagaacttcttccccaactcagtttccttagttgaaagtaggaggaagcccccacgtacctacttcacagagctttccagtgaagtttagcaattggggatggcagagcatgttacaattttagaactgctctagagattcaacagtgaaaatacactagctaattaaacaaaatttggtagaaaggagaattggaaattcaccttctatcagtgcccgaatggctgtggatgaacaattcctttaactactatgtatttctctagttcccacataaactctgtcatttcccatgggatcgcctggaaaatactatgcatayacccagcatatcatcgtttgttgggacacctagcagctacctctgaaaggagagggctggtcctggaagcagccagatggccctgaagaggtagctttggtcctcaggcctcccagtgctgtaggagcgaagctgaccgacagggcctctgaacactggaatggcggatgagctcagctctctgaagtggctgccgtggctgagataggagtgccctgccacacacacttcctagaggacaagttcagccaaagccacattaaaagatggttg

SEQ ID NO: 600262 - DNA, 581 bp, Homo sapiens
ctgtcaagctttcaaattttgcttctgttgttcttacttcctaaacctgaagtagcttcttcatttccctattctatgccccaatccattgtcctcttaacctggcaaagtaatacccttattctcaggggaagacttaaatgtcccaccttcactgtagtttttayagaaccgagtatctgcattccctgcaaaacagaattgttaccttgtctgcaccactcagttgttcatgattccccctaagtaccactactataccacttatggcaatgtatcaagccctttctctgctcagcatctagcatagccttgagacataacagacacagaatagggtttactgagacattattaacgagtgactaggataggtgaggcagaggtgatacagcgaaacagcacaatttttggtattagagacatctagttcaaattctggctttatcacctcctatggcaagacctccatgaacctctgtttatctatgaaatagatcatttcaataagaatccaatgagaaagggttataaatatttttgctacatggtgagcacttaacaaatttttgtgtctcttg

SEQ ID NO: 600263 - DNA, 581 bp, Homo sapiens
ctgtcaagctttcaaattttgcttctgttgttcttacttcctaaacctgaagtagcttcttcatttccctattctatgccccaatccattgtcctcttaacctggcaaagtaatacccttattctcaggggaagacttaaatgtcccaccttcactgtagtttttatagaaccgagtatctgcattccctgcaaaacagaattgttaccttgtctgcaccactcagttgttcatgattccccctaagtaccactactataccacttatggcaatgtatcaagccctttctctgctcagcatctagcatagccttgagacataacagacacagaatagggtttactgagacattattaacragtgactaggataggtgaggcagaggtgatacagcgaaacagcacaatttttggtattagagacatctagttcaaattctggctttatcacctcctatggcaagacctccatgaacctctgtttatctatgaaatagatcatttcaataagaatccaatgagaaagggttataaatatttttgctacatggtgagcacttaacaaatttttgtgtctcttg

SEQ ID NO: 600264 - DNA, 589 bp, Homo sapiens
gttgtttctctttgattgacatcaaatggtccttttgcatcatgagaaaaactctacttcttggatttgagttttcatattcttctggaagttccatagttattaattagttgctcttactttttctgaacctagaggctataagtttcatcaatgttactttctacgtattatttcagttttaaatgtcaacacctctatctcaaagagatatttgaagctgaatctctttgtgctctaggctcacaaatgcagtcctctaaatcactctcttgcacattaaaggtgtgagctaaagctggctggtacctagcattctggctcttttccctcccatgccagtgacagacattgctsatcaatcccaggctctttcctaccaagcttagagtgcacttggctttggagaacccttcctgggacagggccctaccagtcatttggagtcagcaagtaggatgaaatccatttgccatctatagaacaatgccccatgtagtaaatatcaagccaaaggttggtttttctcctcaggaagctgtttgaaacattaatgcagtagagcggtgaagcatgagaagatgctgac

SEQ ID NO: 600265 - DNA, 530 bp, Homo sapiens
atggtttgagcatggcttccgggcaaagagaagcaggtagtttggagccattttgtgtgtgttgggggtgaggggggtagtgagtttcatagctttatcaaaacttagttctgctccactcatcagcatgcttttaccatcatctgaaacttaagctcctatgatggtgtctcccttggacagggctaagagcattcttttcattctcattttcagtgtttcaagtgggccactcagaactgcttaggtcatcctcttctcatagcgacttataacacttttatgtcattaaaattctacattactggggattacattctgaggacaagattcacttgcttgtgggaggaactcttgtagactaatcccttattaatacaygtgaattcttgacctcttgggccagagaatgtcccctttgatccctttccagttcatcttttctgtagcagggactggggaagaaataactttaaaacaattatgagtacaatgctaaaattaccctaacatgccttgagaatgttaaa

SEQ ID NO: 600266 - DNA, 554 bp, Homo sapiens
cattggaatggtgtcactgaggctgcatcctgaattggatgttagccttaatgttttggatcattaagaatttcagtgggatcccaggttgggcacaggtgatgcaggacagcagttatttactaattaatatgaaatagatcagattctagtaaccagtatgaatgtaccagtgcacacaagcttaatgtcagccctggtgaaaacctaataattcattagtaactgtttgattcattttttattaaatttcacaaatgcagtctgtcttgactctcagtcctccgctgtcagaattgaattgtaagtcctgggcagatatgaaagaagagaatactcattacaatattgtatgcaaatcctaaggaggtatctgagagtttcatttctaataaggaagaccagtktgtagcacactaacccttccagcaagaacagtaagaaaaactggataagttttcaaaaatctgttcaaaatcaccagggaactaccaagagagttagggcttcagggccaatatcccaaagagaaaggaaacacactggagtaagcc

SEQ ID NO: 600267 - DNA, 619 bp, Homo sapiens
ttacatctttaattctatccttcttggcagtggggcctttaattaagttatcccagaaccaaactacaaactttcaagttaagaaagcattctttcccctccagcacaggagtccacaaagccctgtgaaaggaaccattccgagtggtggtcagcagagtaattttgtgtgtgctgtcttcacttagcaagaaccaaataactccttcattcttaggaattttctagttgcccagtgggacacctgtgagttttgattagtcctaagaacaggtcaggaggttgtatatatactatatttctgactggatttagtcctctcttccccagagactgaagattctaggcaagaatttgggagtccagtctaagaggcagaagctatctactttattaatgaagtgatgcttcatcctcttcagaagccattgaggcaaacatttttcttattactcttcatttgttgatcaagaactcatcacttaaatgtctgccaaccattctatttttttgcagggaccaaagtaacawaaaagtgtaaggaggaaaaatagtcaattggacaaaaatacagcataacaaaaaaaaaatgcacatggattctctgagttggcagagt

SEQ ID NO: 600268 - DNA, 427 bp, Homo sapiens
tgtgcataagtatgtccattaattaagaaatgaactgaaattactaatggatttcataatggccaccaaccagctgccagttggctgtagcttggtgacagatggtagtgactgatctggactagatttgacctagagatagtccatcatttattaaattgcagtcccaaataaaattccatgcattgcagcatttcaccattatgtctcacagtgagatcctctgagagcattccttatctgccgccactgttgcagacagcaaactattcaaaaggcttaaatataacactcagtaaagaaagttcataataactctcaggagatgaaaaaaaatgcaacttgaatgactgtcacttgaatgaggcatagtataaaatggcagctctgtttyatgctaatctggttacctcccagcattgatatt

SEQ ID NO: 600269 - DNA, 525 bp, Homo sapiens
gggtgatgggatcattcatatcccaaacctcagcatcacacaacatacccagataacaaacctgcacatataccccctgaatctaaaatacaagttgaaaaaaacattgacctactatcttcatgagctgttgactcaaaaggaaggatttgtgaaagagcttgaggaaccaaaayctagtatggtacttctttaaccatactaggttaaagtaacctctttaagttaattctagattctgctgatggtagaaaaataagttacttttttgggtgtgtgtacgtgtgtgtgaaagagagagcacacacacacacttgtatatatagaataaaatatagtgttaccattgcccattttgatttgcccacactaatagaaaatatcattggcatatatggtaaaaaataacagatattgtaaagtttacttcagaaggaaaaatcatagatggaaacaccaaatatgagctaaagctgacttagcacttacaatattcaggtagtattaagcacttcacaagcatta

SEQ ID NO: 600270 - DNA, 574 bp, Homo sapiens
gagtattgggttggggatctgagtgttggtgtcccatttagtcatcaatccatgaaaacaagtgattatatgcaaaggtattcaaaagggatgagaacactgatatggtaaggagagaacttcygactgaaagctagagagtgacctggacatttctgagaagatgcttgggaggatggcaacttggtagacttcatactaacaagaagcatattagagaattaacgatgatgaggaaaaggagaaggaagagaagaaggaggaatattgagcttttattctctgttaggtaccaggttaagcactggccatatatgattgtattatcacatcgggaccccgaaagctaggaggcagcttccatcatcattcctgttttataagtgaggcttagagaactaaagtaacttgtttgagattttatatcatacatagcagaccagagatttgaacccaactttttctgataccacaccctggtcttcatcactaagctatattgccttctatatcaggtgtggctacaggttgcatctttttatgtcttagatattgtggagaaaatatttgactt

SEQ ID NO: 600271 - DNA, 556 bp, Homo sapiens
acaacaaatactttcaggaaaacaaaaccacacagtgtgttgagcccactaaatagtcagtaaaagatgtctaatagcatctagaagtaggaaacgagatgagtattgggttggggatctgagtgttggtgtcccatttagtcatcaatccatgaaaacaagtgattatatgcaaaggtattcaaaagggatgagaacactgatatggtaaggagagaacttctgactgaaagctagagagtgacctggacatttctgagaagatgcttgggaggatggcaacttggtagacttcatactaacaagaagcatattagagaattaacgatgatgaggaaaaggagaaggaagagaagaaggaggaatattgagcttttattctctgttaggtaccaggttaagcactggccatatatgattgtattatcacatcgggaccccgaaagctaggaggcagcttccatcatcattcctgttttataagtgaggcttagagarctaaagtaacttgtttgagattttatatcatacatagcagaccagagatttgaaccca

SEQ ID NO: 600272 - DNA, 574 bp, Homo sapiens
gagtattgggttggggatctgagtgttggtgtcccatttagtcatcaatccatgaaaacaagtgattatatgcaaaggtattcaaaagggatgagaacactgatatggtaaggagagaacttctgactgaaagctagagagtgacctggacatttctgagaagatgcttgggaggatggcaacttggtagacttcatactaacaagaagcatattagagaattaacgatgatgaggaaaaggagaaggaagagaagaaggaggaatattgagcttttattctctgttaggtaccaggttaagcactggccatatatgattgtattatcacatcgggaccccgaaagctaggaggcagcttccatcatcattcctgttttataagtgaggcttagagaactaaagtaacttgtttgagattttrtatcatacatagcagaccagagatttgaacccaactttttctgataccacaccctggtcttcatcactaagctatattgccttctatatcaggtgtggctacaggttgcatctttttatgtcttagatattgtggagaaaatatttgactt

SEQ ID NO: 600273 - DNA, 573 bp, Homo sapiens
agtattgggttggggatctgagtgttggtgtcccatttagtcatcaatccatgaaaacaagtgattatatgcaaaggtattcaaaagggatgagaacactgatatggtaaggagagaacttctgactgaaagctagagagtgacctggacatttctgagaagatgcttgggaggatggcaacttggtagacttcatactaacaagaagcatattagagaattaacgatgatgaggaaaaggagaaggaagagaagaaggaggaatattgagcttttattctctgttaggtaccaggttaagcactggccatatatgattgtattatcacatcgggaccccgaaagctaggaggcagcttccatcatcattcctgttttataagtgaggcttagagaactaaagtaacttgtttgagattttatatcatacatagcagaccagagatttgaacccaactttttctgataycacaccctggtcttcatcactaagctatattgccttctatatcaggtgtggctacaggttgcatctttttatgtcttagatattgtggagaaaatatttgactt

SEQ ID NO: 600274 - DNA, 615 bp, Homo sapiens
gtttgcctttggatctatttttaaatgaaaaaaaaaatctcagtgcttctggtgtatgtatgtagtagagacagtcttaacctaagatgttaagagaggagtctggggacaatttatcagtgtcagaacccaacaccagaagagaaatcggagtgaccttttaacaaaggttctatttttaagatctaattgacttagccactgggattatctctggtattaaaagttatttaagggggttgctccatgaaattcaaataggatgtatggtaaatcattactaagatgatacaatggcagcaaatatttactgatgcaaaacaaaaagctctagaatacctgagggtttgcctgctatggtagtgagttatgagggacatcacaatcaaggcatgcttgtggctttttccttgcagcaaaataaataagcagcccttggagtcatcagaacacccaggaggacttataacctatcccttcggaatatttagtcaaactcttgcttactgattcttcactttctctgaatttcccactctttcctttcctaacttgtgtttctagctgccaactcccayagtatttccccatttccttaacactctcattttcaat

SEQ ID NO: 600275 - DNA, 550 bp, Homo sapiens
aatttgtattttaggaatgttacataagaaatttccaaattggccttaattccttagggaaccatattcagttaccttttttaagtggtctactttcatactggcttttaaatttttatatcatatagtctgtgggaaaagattataaataaatatttgtatagtatctgatatataagaatttgttcccagagtttgtggcaatagtgtggacactggctcagacacaagtatgtggaatccatttcaataagtattatttaaaatattaaaagtgctttttctgaaaaaaagtcaatgcaaaatcatttttaaatgtttacatatacacctaaatctccaaactgctggtagtaatattaaatggaaggtcaaaagctattttgctccctttttattggactattattaamcagtcagaaagcctagcagttcatttatcagacaaaaaaaatgtataaatgtttgacacataagccatagccaaaatgttatgactttatttgaattacattatatagacaaagcatgccaatccatcagcctcaag

SEQ ID NO: 600276 - DNA, 550 bp, Homo sapiens
aatttgtattttaggaatgttacataagaaatttccaaattggccttaattccttagggaaccatattcagttaccttttttaagtggtctactttcatactggcttttaaatttttatatcatatagtctgtgggaaaagattataaataaatatttgtatagtatctgatatataagaatttgttcccagagtttgtggcaatagtgtggacactggctcagacacaagtatgtggaatccatttcaataagtattatttaaaatattaaaagtgctttttctgaaaaaaagtcaatgcaaaatcatttttaaatgtttacatatacacctaaatctccaaactgctggtagtaatattaaatggaaggtcaaaagctattttgctccctttttattggactattattaaccagtcagaaagcctagcagttcatttatcagacaaaaaaaatgtataaatgtttgacamataagccatagccaaaatgttatgactttatttgaattacattatatagacaaagcatgccaatccatcagcctcaag

SEQ ID NO: 600277 - DNA, 478 bp, Homo sapiens
ctgggcatgcccacagtggactggagcccgacatgtgccctgggggaaatgggtggggccacggggagttcacgccttgtgcacgggaggagcttgctgtcttcakctcctgtggtgacctgggattcaatctgtgagtcagaaaagctgctagcagggctctctcttgctttggttcattttcctttttccccttcgcccaataaattccattttcctcacccttctatgtgtccgcgagcctaatctttcctggtcgtgtgacaagagcctgcttttagctgaactaaggagaaagttctgcaacaatattatcgcagtgaacaaatatgtagcttaatctttctatgtattcttgattatttcctcagcatacattcaagaaataaattttgtgtcaaaagggtgcatattttaaactttctggtatataactgctaaaatattgtataaaattacattcccagtagaggtgagc

SEQ ID NO: 600278 - DNA, 478 bp, Homo sapiens
ctgggcatgcccacagtggactggagcccgacatgtgccctgggggaaatgggtggggccacggggagttcacgccttgtgcacgggaggagcttgctgtcttcagctcctgtggtgacctgggattcaatctgtgagtcagaaaagctgctagcagggctctctcttgctttggttcattttcctttttccccttcgcccawtaaattccattttcctcacccttctatgtgtccgcgagcctaatctttcctggtcgtgtgacaagagcctgcttttagctgaactaaggagaaagttctgcaacaatattatcgcagtgaacaaatatgtagcttaatctttctatgtattcttgattatttcctcagcatacattcaagaaataaattttgtgtcaaaagggtgcatattttaaactttctggtatataactgctaaaatattgtataaaattacattcccagtagaggtgagc

SEQ ID NO: 600279 - DNA, 585 bp, Homo sapiens
tttggttcattttcctttttccccttcgcccaataaattccattttcctcacccttctatgtgtccgcgagcctaatctttcctggtcgtgtgacaagagcctgcttttagctgaactaaggagaaagttctgcaacaatattatcgcagtgaacaaatatgtagcttaatctttctatgtattcttgattatttcctcagcatacattcaagaaataaattttgtgtcaaaagggtgcatattttaaactttctggtatataactgctaaaatattgtataaaattacattcccagtagaggtgagcagatgacatttttctatcatattggtttttttttctagttttctactatactttgttgatcccaaaaggcacatttttctttcgcattttaacatctttaaaatctagttatatattacaattcatggyatatcacagttagactagtggcattttttctttctcattgatacttataatgttgcatcattcaatccatatctgaaatctataaaatatattatctgcgtttatatactgtggttgtgtttagtagatacagagaagttttagtatt

SEQ ID NO: 600280 - DNA, 610 bp, Homo sapiens
caacagtatagatggaaaaaagatttacatcttgacatcacataaaatttcagaatatcagcattaaaaatatctgagaaacttcctrgaaatggaggaggggtgaacaattcaagacctaagcactaggacaggagggtggaaactagtctttttttttttttaaagaataaaattagactgcaccaaactcctcactagtgtctactaaaaactacaagtagagcttgttttcaactttttgttttttttaagacacagggtttcgtgctgtctgccaggctggagtgcaaaggcactatcatagctcactgcggcctcgagctcctgggctcacgggatcttgtcactttagcttcaaaagtaggtaggacttcaggagtgtaccaccacagcaggctaatttaaaaaaaaatctagagatggggactggctatgttgcccaggctggtctcaaactcctggcctcatcgtcctacctcagcctcccaagtagctaagaatacaggagcatccatgtccacctttcaactttctcaagggacatactgttaaacctagaatggtatggccagttaaatgattaatcaaatatgaagttatttgcaaa

SEQ ID NO: 600281 - DNA, 422 bp, Homo sapiens
acaaaggctttttgcttcaactgcttcatatgcccatacctgggaggctgaactgatcaayttcatggaagccagaattacagagctggcagtagacaaaatgcagaggtaggtgtggaaggatcctgtcacagtttctaaattatatattataacatctaaaactactatttaatgaacgcttactgcatacctcacccgacatgagatgctatgtgtttgttatctaatttgatcctcacaacaacattaaacattttttttttacatttacaaatgcatttaatgcctaaatcacaaaggaggaacatggagctcagagaggttaagaaatgtgtacaagggcacacgacagatgcaaatatagatctgttgacttcatagctgttgtttttgagaagtgatacaacaaggcggttaag

SEQ ID NO: 600282 - DNA, 380 bp, Homo sapiens
gggaggctgaactgatcaacttcatggaagccagaattacagagctggcagtagacaaaatgcagaggtwggtgtggaaggatcctgtcacagtttctaaattatatattataacatctaaaactactatttaatgaacgcttactgcatacctcacccgacatgagatgctatgtgtttgttatctaatttgatcctcacaacaacattaaacattttttttttacatttacaaatgcatttaatgcctaaatcacaaaggaggaacatggagctcagagaggttaagaaatgtgtacaagggcacacgacagatgcaaatatagatctgttgacttcatagctgttgtttttgagaagtgatacaacaaggcggttaa

SEQ ID NO: 600283 - DNA, 461 bp, Homo sapiens
ccacagcaatttctttctcctttttttgttttaatctccctttggaaaattctatttttgtttagtgtttatagggcttagtcatctttttggtatgtctatcttgttatcttgtattctttctatagaattatcaatatgggaattcccagatttgagatgaaatgcatgagtctagttaatgtttggaattagaatctgagtgtgttttgagtgcagcacatctgaattcctcaygagaggggaatgacaattctgcttacagatgtcagataaaaagaggctattgtatctcctaattcagtatatcccaataagaggccacataaacaggacaagagttgttaaatgcaaagggaatgtatcagtaatataatttacaatttgtctgtggattctacctgtccttgattttatttacctatgatagttctgcctttctttgttggggatgttcccat

SEQ ID NO: 600284 - DNA, 648 bp, Homo sapiens
tctttagagttgtataaatccacatagcattccttcagatgagagcttattgattaatacattaaagatactggtcaactcgtgtttaatatactttggacaaggataggaaattatttacctcttaaaaatcccttttggctacttaaagaaaataattatttcagccatttagtacattgtttcaatctttgtaatcattaccattattaaaatacaataagtagtatcatctaaactatttcctttattatatctrttgcaaatactccctttcatatgagtctctatcatcttcaaactataataaagagttaggaaagaaatgtaatttgtgtttacagatgatctggttaaaacatgcaaactagttaagcccatgaattatctctaagtgtgagttttagttatgctaatgctattgttctttatttagtatattattcattaaagtactccctcatctgaactttaaagcctattatacagttaaaagtgaagagagacaaagaaaaatgaactatcaatgggtgtataagtgagaacaggtattatgtgactctttgccagactctaacattctggtgttctaagaggcctcagtgagggaagtggttgttagtttgaggtcaccattagcttaatgat

SEQ ID NO: 600285 - DNA, 648 bp, Homo sapiens
tctttagagttgtataaatccacatagcattccttcagatgagagcttattgattaatacattaaagatactggtcaactcgtgtttaatatactttggacaaggataggaaattatttacctcttaaaaatcccttttggctacttaaagaaaataattatttcagccatttagtacattgtttcaatctttgtaatcattaccattattaaaatacaataagtagtatcatctaaactatttcctttattatatctgttgcaaatactccctttcatatgagtctctatcatcttcaaactataataaagagttaggaaagaaatgtaatttgtgtttacagatgatctggttaaaacatgcaaactagttaagcccatgaattatctctaagtrtgagttttagttatgctaatgctattgttctttatttagtatattattcattaaagtactccctcatctgaactttaaagcctattatacagttaaaagtgaagagagacaaagaaaaatgaactatcaatgggtgtataagtgagaacaggtattatgtgactctttgccagactctaacattctggtgttctaagaggcctcagtgagggaagtggttgttagtttgaggtcaccattagcttaatgat

SEQ ID NO: 600286 - DNA, 519 bp, Homo sapiens
agatgaaaggaagtttctagagtctgtcaacaaaatgagagaaagttggcaggaaagtgaattttcaaatagactagctagggtacttcccaaagtcctcaattatttttttaccrttattaaatccttaacccatggcagggtactgagtgaaatcaatcagtgtattctcaggtgacttgccattgagtgcctggagtcttctctggaagtccctataacaataaggtggggtagtagacattgttactgttctgtgagaaatgaatagcacagtgattttccttcctaggagagcagggaggaaacaaaggaggcgtgaattgcatccccaggaatgtctttccatcaggcaccagagaagcatcaggagccaagttactgtcgctgatacaactcagggatctccatcaactatgcttatctgtggcatgaggaagaaatattttgtgagacctgggctttcatactctgggaattcttatttctgttagttgggacttggaaagctgccaagag

SEQ ID NO: 600287 - DNA, 519 bp, Homo sapiens
agatgaaaggaagtttctagagtctgtcaacaaaatgagagaaagttggcaggaaagtgaattttcaaatagactagctagggtacttcccaaagtcctcaattatttttttaccgttattaaatccttaacccatggcagggtactgagtgaaatcaatcagtgtattctcaggtgacttgccattgagtgcctggagtcttctctggaagtccctataacaataaggtgggrtagtagacattgttactgttctgtgagaaatgaatagcacagtgattttccttcctaggagagcagggaggaaacaaaggaggcgtgaattgcatccccaggaatgtctttccatcaggcaccagagaagcatcaggagccaagttactgtcgctgatacaactcagggatctccatcaactatgcttatctgtggcatgaggaagaaatattttgtgagacctgggctttcatactctgggaattcttatttctgttagttgggacttggaaagctgccaagag

SEQ ID NO: 600288 - DNA, 541 bp, Homo sapiens
atatgtttgggatatatatgcagatttcaatcatcaaaagacccaagatattaagctgcctcctggaatcacccagaatttttgtctttccagtgatctctgtggccatggtgctgtgtgggcaaatttcctcttgctgacctggggctggttttatttcaaagttacagcctgattcctcagagcagcattaattaaactgcaaacaatgttgtgttggtataatagagttaagatgatttttcttccccaagcatgtggttgatactatggccagaaaagtttaaaagtaaattagtgacaaatactgcgtgattccatataaggtacttagagtagtcaaggtcatagacacagaaagtagaatagtgattgtcaggggctggagggagaggggtatggcmagttagtgtttacagaatacagagtttcactttgggaagatgacaaagttctggagatggatggcataatagttgcacaacaatgtgaatgtacttagtgccactaaagtgtacgcttaaaaatggtcaaaatggta

SEQ ID NO: 600289 - DNA, 577 bp, Homo sapiens
ggcttctaaacacatacaaaatccaatcactttttacarccagcctaatgctagctaccatcatctcttgctggatttctgtgagagcttcctattgatacagacaggaggcagggaagtactgggtagaagagggcggtccctggcgagggccccaccctcaagcctggacctgcggtccaaaatgagaactttaacatccctgttttcccacccgaaatgttgccttttccaaaaccaccctggcccaccctgcccccaaccctgtacccataaaaaccccaagctccactggcaggagagcagagtggagcagcagagatgagaagagaagcagcagccagatgtcagagaaaagcaggttgacttcagaggggtgacttgatggcgggacttccgagaagagttcggtcattcaggagaaaattatcttcccactctgtcccccttccagctccccttcccactgagagccacttccacctctaaataaaatcctctgcatacaccagccttcaattcatttgggtgacctgattcttcctggacactggacaaaaacttggataccaagagg

SEQ ID NO: 600290 - DNA, 577 bp, Homo sapiens
ggcttctaaacacatacaaaatccaatcactttttacagccagcctaatgctagctaccatcatctcttgctggatttctgtgagagcttcctattgatacagacaggaggcagggaagtactgggtagaagagggcggtccctggcgagggccccaccctcaagcctggacctgcggtccaaaatgagaactttaacatccctgttttcccacccraaatgttgccttttccaaaaccaccctggcccaccctgcccccaaccctgtacccataaaaaccccaagctccactggcaggagagcagagtggagcagcagagatgagaagagaagcagcagccagatgtcagagaaaagcaggttgacttcagaggggtgacttgatggcgggacttccgagaagagttcggtcattcaggagaaaattatcttcccactctgtcccccttccagctccccttcccactgagagccacttccacctctaaataaaatcctctgcatacaccagccttcaattcatttgggtgacctgattcttcctggacactggacaaaaacttggataccaagagg

SEQ ID NO: 600291 - DNA, 553 bp, Homo sapiens
tcctaatattaattctgtggttattctttcccagtatmttttgaattatttaaaagtatttaacacacaaggtgaaaagggctaattagtactgaaaatctgaaatgtttttattttcacagtttcattgtggatctgagtatggtcatttattttttatgtactaattaaatacacgagtaatattcactctccccaaagggccctctgcacagtttccaacaaacaaaattggctctcttctcacactaagggtagagatggccattgtctatgaaatgtttaggatatcctcagcccatgctgagtgggaagacatttctttccacattgaaacttcattaattttgcctgaatcacaatccagcataggtaatgaaaaatatgaaatgtatcatttcttataaataaatgaaactatgtcagagatgtcttacaaacctgtaagaaaacttactctagtaaaatacacaagtggattataactagtaaatcaattctttgtctacaacaggtacttgttctgtgtttgagcatgcttatttttaagagt

SEQ ID NO: 600292 - DNA, 543 bp, Homo sapiens
tctcatgagaaggttcccacatgacattttgaatctcataaaagaaaaaaaaaagtctaagtaatataacaatgatgagttataaatttaagagtcctccttggattacactggtttaaaagtttttgtaccttgaaattataaaatrgtttatgtgaggaaagtgactattttcatatactataaaaggattaggtagttggcagtctctaaaaatagttgttgtaacataaaaaaaaacacccaaatacatgtctgtgttttaaagataaccacaattttgtttccaatgaaacagaacattcaataaacatccaagtgactattctacagtaagtttgactccccagaccagtgatgtgccagtgaatgtgcagtaatgcccaccgagtgtgctacaggaaatgctggaagcctcttgggcaaaacccagaagaggagagcatcccaaatctgttttcaaaaaaaaaagaggttttctcattttctgcttcctttatgggtgagagccagcttatcaaagaaaaaacagatgactcagtg

SEQ ID NO: 600293 - DNA, 596 bp, Homo sapiens
tatttctcaaaactcgagtaaaaatttttaaaagccagttagaaaatgagcaaaaaacatgaacagacatttcactgagataatatggaggtggctaaaagcatatataaagacgttcaatatyagccattcaggaattataataaaaatcacaattagctgttgaaacacatctacagaatgactaaaataaggaatattgatagcaccatatgctgatgatgatgcagagaaattggatcactcatacattgctgttggggatataaaatttttctagtcactctggaaaagagtacgacaattcctttcaaaaatatacaggcattgactatacgatatagcaactgtacacctaaacatgtatccccgagaaataaaaacttgaatttactcagaaatctgctcatgaatgttcatatgtaatgcaaaatctggaaacaaatatctttcagtaggtgaacagttaaacaaaggtgttgtattctatatcaaagaatactatccagcaatgaaaggaatgaactattgacacaagcaacaacttggatgaatctcaaggaaattatgctaagtgaaaaaagccaaaataaaga

SEQ ID NO: 600294 - DNA, 636 bp, Homo sapiens
tatttaatgcactgaaggaaaagaaaatttatcctagaatagtatatccagtgaacatattcttcaaacataaaggagaaataaagactttcccaatcatacaaaactgagggattttatcaacactggacctgtcctacaagaaatgctaaaggaagttcttcaatctgcaagaaaagggatattaatgagcaataagaaatcatgtgaaggtataaaattcactggtaatggtacgtatgcagaattttataacccaataactgtgytgtgtaaactactcatatcttaagtagaaagactaaaatatgaacatatctaaaatactacagtaacttttcaagacatagaccatataataggatataaatagaagtgacaaaaagttaaaaagtggagggaaaaagctaaacttagagttgtattagttttattattgcttgtttgcttatgcaaatagtgttaagttgttattggtttaaaatgaaggaatatgttatttgcaagcctcagggtaaactcaaattaaaaaaaacacacaacagatacacaaaacataaaaatcaagaatttaaagcatgccatctgagaaattcaccttcactaagaggaagacaggaaggaaagaaagaagaa

SEQ ID NO: 600295 - DNA, 636 bp, Homo sapiens
tatttaatgcactgaaggaaaagaaaatttatcctagaatagtatatccagtgaacatattcttcaaacataaaggagaaataaagactttcccaatcatacaaaactgagggattttatcaacactggacctgtcctacaagaaatgctaaaggaagttcttcaatctgcaagaaaarggatattaatgagcaataagaaatcatgtgaaggtataaaattcactggtaatggtacgtatgcagaattttataacccaataactgtgctgtgtaaactactcatatcttaagtagaaagactaaaatatgaacatatctaaaatactacagtaacttttcaagacatagaccatataataggatataaatagaagtgacaaaaagttaaaaagtggagggaaaaagctaaacttagagttgtattagttttattattgcttgtttgcttatgcaaatagtgttaagttgttattggtttaaaatgaaggaatatgttatttgcaagcctcagggtaaactcaaattaaaaaaaacacacaacagatacacaaaacataaaaatcaagaatttaaagcatgccatctgagaaattcaccttcactaagaggaagacaggaaggaaagaaagaagaa

SEQ ID NO: 600296 - DNA, 467 bp, Homo sapiens
tgcatgttggaacatttatttggaaacccagtgaaagaaggtctgcagattactacagtttacctgcatcaggagttggaattggtcccaaactaaattctatatcttagaaaatggatcttttgaaaccatcttattcataaataaggttcttctccagagacacacattgcagtttaactagmttaagtctttttataaggaactgatatggtttggctctgtgtccctacccaaatctcatcttgaattgtaatccccaatgtgtcaagggagtgacttcgtgataggtgattggattatggggagtttcccccatactgttcttatgatagtgagttctcaagagatctgatggtttaaaggtggcacatcccccttccctctctctctttcctgccaccttgtaaagaaagtacttgtttctccttcaccttcaaccatgattttaagtttcctcaggcccc

SEQ ID NO: 600297 - DNA, 467 bp, Homo sapiens
tgcatgttggaacatttatttggaaacccagtraaagaaggtctgcagattactacagtttacctgcatcaggagttggaattggtcccaaactaaattctatatcttagaaaatggatcttttgaaaccatcttattcataaataaggttcttctccagagacacacattgcagtttaactagattaagtctttttataaggaactgatatggtttggctctgtgtccctacccaaatctcatcttgaattgtaatccccaatgtgtcaagggagtgacttcgtgataggtgattggattatggggagtttcccccatactgttcttatgatagtgagttctcaagagatctgatggtttaaaggtggcacatcccccttccctctctctctttcctgccaccttgtaaagaaagtacttgtttctccttcaccttcaaccatgattttaagtttcctcaggcccc

SEQ ID NO: 600298 - DNA, 492 bp, Homo sapiens
tgaaattgatacaatgaaattatcagtatattaactatattcccatgaagagtttaggaaagtaccaattgcctgcatcaccaccaacacagtttattattttttaaactttgccaaaataattgataaattatatttcattttcatttaaatttgygtttctgaactattaatgaagttaagcatttttcatatttgtaaaagccagttgcattttgttcctgtttatttctggtattctatttttgcatgagactgcttttcttatgcatactatcaaatgtattatataaaacatggtttaatattgtgaatattatttctttgtctattacacactatgcttttgtttcaagtttttcacttgcgtttatactttgttttgtattatttagaaaaggtttatactttcatttactaaatttatcaaagttcattcttttataattcttgggtttttcattttatatagaaaaagcatcctcttgaaaa

SEQ ID NO: 600299 - DNA, 492 bp, Homo sapiens
tgaaattgatacaatgaaattatcagtatattaactatattcccatgaagagtttaggaaagtaccaattgcctgcatcaccaccaacacagtttattattttttaaactttgccaaaataattgataaattatatttcattttcatttaaatttgtgtttctgaactattaatgaagttaagcatttttcrtatttgtaaaagccagttgcattttgttcctgtttatttctggtattctatttttgcatgagactgcttttcttatgcatactatcaaatgtattatataaaacatggtttaatattgtgaatattatttctttgtctattacacactatgcttttgtttcaagtttttcacttgcgtttatactttgttttgtattatttagaaaaggtttatactttcatttactaaatttatcaaagttcattcttttataattcttgggtttttcattttatatagaaaaagcatcctcttgaaaa

SEQ ID NO: 600300 - DNA, 492 bp, Homo sapiens
tgaaattgatacaatgaaattatcagtatattaactatattcccatgaagagtttaggaaagtaccaattgcctgcatcaccaccaacacagtttattattttttaaactttgccaaaataattgataaattatatttcattttcatttaaatttgtgtttctgaactattaatgaagttaagcatttttcatatttgtaaaagccakttgcattttgttcctgtttatttctggtattctatttttgcatgagactgcttttcttatgcatactatcaaatgtattatataaaacatggtttaatattgtgaatattatttctttgtctattacacactatgcttttgtttcaagtttttcacttgcgtttatactttgttttgtattatttagaaaaggtttatactttcatttactaaatttatcaaagttcattcttttataattcttgggtttttcattttatatagaaaaagcatcctcttgaaaa

SEQ ID NO: 600301 - DNA, 492 bp, Homo sapiens
tgaaattgatacaatgaaattatcagtatattaactatattcccatgaagagtttaggaaagtaccaattgcctgcatcaccaccaacacagtttattattttttaaactttgccaaaataattgataaattatatttcattttcatttaaatttgtgtttctgaactattaatgaagttaagcatttttcatatttgtaaaagccagttgcattttgttcctgtttatttctggtattctatttttgcatgagactgcttttcttatgcatactatcaaatgtattatataaaacatggtttaatattgtgaatattatttctttgtctattacacactatgcttttgtttcaagtttttcacttgcgtttatactttgttttgtattatttagaaaaggtttatactttcatttactamatttatcaaagttcattcttttataattcttgggtttttcattttatatagaaaaagcatcctcttgaaaa

SEQ ID NO: 600302 - DNA, 531 bp, Homo sapiens
tctgtgccttttcagtgatggcatttataccatttatatttagtattggtatgagatgtttccataytgattatcaggaagctgttagctggttgctttgtagtttcaaatgtgtggctgctctataatgtcttgggctatgaactaagtgtgtttatgtggcagtaggtattgttctttcattttcaggtttagaattctcttaagctggtaagagaattcttgtaaggctggtctgctgaaaacaaattcccttagttcttgcaaatctggaaaagattttatttctccttcacttatgaagcttaatctagtgagatataaaattcttagttgaaatttttttttctttaaaaatgcggaaaatatgtccccaatctttcctgacttgtaaggtttctgctgagagtctactgttagcctgatggagttccctttgtatgtgatctgacatttttctctagctgcttttaaggctttttttttttttcaggtttgactttggacagtctggtgactatatgttttggt

SEQ ID NO: 600303 - DNA, 531 bp, Homo sapiens
tctgtgccttttcagtgatggcatttataccatttatatttagtattggtatgagatgtttccatactgattatcaggaagctgttagctggttgctttgtagtttcaaatgtgtggctgctctataatgtcttgggctatgaactaagtgtgtttatgtggcagtaggtattgttctttcattttcaggtttagaattctcttaagctggtaagagaattcttgtaaggctggtctgctgaaaacaaattcccttagttcttgcaaatctggaaaagattttatttctccttcacttatgaagcttaatctagtgagatataaaattcttagttgaaatttttttttctttaaaaatgcggaaaatatgtccccartctttcctgacttgtaaggtttctgctgagagtctactgttagcctgatggagttccctttgtatgtgatctgacatttttctctagctgcttttaaggctttttttttttttcaggtttgactttggacagtctggtgactatatgttttggt

SEQ ID NO: 600304 - DNA, 505 bp, Homo sapiens
tgaggtcaacctggccaacatggtgaaatcccgcctctactaaaaaaaaagaaaaactacaaaaattgtccaggtgtggtggcacctgcctataatcccagctactcaggaggctgaggcagtagaatcacttgaacctgggaggcagaggttgcagcgagccaagatcgtgccactgcactgtagcctgggtgacagagtgagactctgtctcaaaaaaataamaataaataaataaataactaaaaatgtagaataccataaagcagtgcttaaagggaaatgtatagcataagtaaatgtattaaaagagagattcaaaatgaataacctagacttccaccttaggaaaacagaagagcaatttaagccaaaagtaatcaggaaaagagaaatttaaaaattgggcaacttggatgcaactggaggccattatcataggtgaataaatacaggaacagaaaacccaatacctcatgttctcacttttaagtaggagctaaac

SEQ ID NO: 600305 - DNA, 505 bp, Homo sapiens
tgaggtcaacctggccaacatggtgaaatcccgcctctactaaaaaaaaagaaaaactacaaaaattgtccaggtgtggtggcacctgcctataatcccagctactcaggaggctgaggcagtagaatcacttgaacctgggaggcagaggttgcagcgagccaagatcgtgccactgcactgtagcctgggtgacagagtgagactctgtctcaaaaaaataaaaataaataaataaataactaaaaatgtagaataccataaagcagtgcttaaagggaaatgtatagcataagtaaatgtattaaaagagagattcaaaatgaataacctagacttccaccttaggaaaacagaagagcaatttaagccaaaagtaatcaggaaaagagaaatttaaaaattgggcaacttggatgyaactggaggccattatcataggtgaataaatacaggaacagaaaacccaatacctcatgttctcacttttaagtaggagctaaac

SEQ ID NO: 600306 - DNA, 567 bp, Homo sapiens
ttgtgtgggttgttttttttagagatgaggtttcaccatgtttcccaggcttgtcttgaacttttgggcttaaagcaatttacctgccttgacttcccagagtgctgggattacaagcatgagccactgcacctggcctatcttttcttttttaactccaaggaaagacttactaatgttaaaattctggaaatcagtctggtggaggagatatttggagtttgggtgcaggcaggtgagtggcaagtgtgkgggatgtgaggaacttccttgaagtccttctcaatactcaggttcccaggagtcaccttgcttccttcaagtttcacagagactcaccaaccagctgagttcagtgcaagatttgcatgaaaatttcttttcagttataatggattttttaaaaatgtgcatttgtgtgcatctataatctcagtgtgaatgtggattcagatactgtggagcacagttttacatgttgaattttacttatttttatatttaaaattgatattttgaattttgcatcagcttagctcattatttccaaggggttgtgcactgaca

SEQ ID NO: 600307 - DNA, 573 bp, Homo sapiens
  misc_feature 534, 535, 536, 537, 538, 539, 540, 541, 542, 543, 544, 545,546, 547, 548, 549, 550, 551, 552, 553, 554, 555, 556, 557,558, 559, 560, 561, 562, 563, 564, 565, 566, 567, 568, 569,570, 571, 572, 573: n = A,T,C or G
tatctgataaggggttaatatccaaaatatataaggaaatcaaaacaacttgatagtaaaaaaacaaaaacaaaaacaaaaccctgatttaaaaataggcaaagaaactgtatacacatatctcaaaagaagacatacaaatagttaacaagtatgtaaaaaaaatgctcaatataacaaggaaatgtgaattaaaagcayagtgagctcacacccgttaaaacctcacacctgttagaatggctattatcaaaatgacaaaagataacattgatgaggatggggagaaaagagagctgttgcacactttttggtgggaatataaattagtacagccattatgaaaacagtatggagatgtctcaaaaaactaaaagtataacgtaactaccatacgatccaggtttaccattactgagtatatagccaaagaataagaaattgattatgtcaaggaaatacctgtacttccatgttcattgcagtcttattcataatagccaagatatggaatcaacctaagtgtttatcagnnnnnnnnnnnnnnnnnnnnnnnnnnnnnnnnnnnnnnnn

SEQ ID NO: 600308 - DNA, 554 bp, Homo sapiens
aatgggtgatgggctgattacaaaataggctgattggctttgggttgcctgtaatggaatgcatggtagaaggactgcactatcttctcccataggatttccctccttctgggggatccaggatccaggatccagtataaaatggcacccttaattctagggatctgttttacctacyttggagcattagattctagatatggcctggggacatgtggagttaaccttgcccctagctatgctgaaagcagtcagaccttatctacacttctgtctgatattctaggccccacacctggtatataattaaacttgtttacttatcagatttttcatcaaaaataaaagttgctaagagttaacattgtaacatgtaattcagactactggagaaacagttttaacatacaacgtgtgtaaaggaagcagaatgtgtttttgcaagtagactataagaaggcatgggaatgtggtttttgcgctggtttagaaagttagaggattgctctgatttaaaataaagttgaaggtttaggcaaggcttgtgaagggtt

SEQ ID NO: 600309 - DNA, 568 bp, Homo sapiens
ttatgttttaattcaaaggaacaaaaactcaagattttagtgttttggaatcaagatttggagaagtaggatttatacttggaagacgcaaatggaagagtatattttattcaaaacaaatatccaaatatgaagaaaggcacattagaactgcatgttaagaaagtgtatcagatatctattggtgcataacaaattacttggaaacataacagcttaaaacaacaaacgtttattatctcccagattctaggtcaggaacacgggaacagtttagctgagtggatttggctcagggtgtctcatgaygtaataaaagtgttggctgagttgcagctgtctcacgtttgactggaggaggatccacgaccgtgcctccctcacgtggctgttggctggcctcagaggatctgttcaagactcactcatagccgcctccacagggctgcctcatagcctgcagctggctcctcccaaagcaagtggtccaggagagaatgagactgcactcaagaaggaagctatggtgttttcacaatctaatctcagaagtggcatcccagaattt

SEQ ID NO: 600310 - DNA, 568 bp, Homo sapiens
ttatgttttaattcaaaggaacaaaaactcaagattttagtgttttggaatcaagatttggagaagtaggatttatacttggaagacgcaaatggaagagtatattttattcaaaacaaatatccaaatatgaagaaaggcacattagaactgcatgttaagaaagtgtatcagatatctattggtgcataacaaattacttggaaacataacagcttaaaacaacaaacgtttattatctcccagattctaggtcaggaacacgggaacagtttagctgagtggatttggctcagggtgtctcatgacgtaataaaagtgttggctgagttgcagctgtctcacgtttgactggaggaggatccacgaccgtgcctccctcacgtggctgttggctggcctcagaggatctgttcaagactcactcatagccgcctccacagggctgcctcatagcctgcagctggctcctcccaaagcaagtggtccaggagagaatgagactgcactcaagaaggaagctrtggtgttttcacaatctaatctcagaagtggcatcccagaattt

SEQ ID NO: 600311 - DNA, 583 bp, Homo sapiens
gcctttattatgagcattaacccaggcaacttggcaaaaggatgcatcaatgcgttaggataacaaccttttggcatcttgaaatgtcaggtttaatccttaaggagaatgatatagggaagaaaaataggccttttattaaaaaatacaaactgaagtggttgacctcttagtgattaactgggtttacacacaggagtagaatgggactggaccaaaaaatgctgggttggtctgattttcctggggcagggagatggtaaacaagctctgtgtctgccaaccttacccagagtgactcataactactgactcttrttttcttccttatcagttatggtcatgtagcatcccttataaagtttcccacatacttggcatatttgtgtactactacgttttagagccttgttgttatcttagtgtgtgcatattttcttcccttcattcactgaatccctcccttcagtcagttattaggacacagaaaaatgttttactatgaattaaaagggcagttttctgctggcataacaataaatcagtttaacatttttccaccctagtaagacggtccagcatt

SEQ ID NO: 600312 - DNA, 552 bp, Homo sapiens
caactccgtctcaaaaaaaaaaaaaaaagaaagaaagaaacagaccatgcataaataaaatcgaatgatactatgatgcatgcagctataaaaagtacttactaacacgtttctgaaaagatgaattgtgaggtatgcaattctggtacaagaaagaaagcttccaacactgattttacgtatcttctaattttgatcatcctttccatttatttttaaaataaacttttttgattctcaaagaaatgcgtggtaataatggaaaagttggacaacaattagaataaaataagtatgatwcagccactcctagattacatgagctaatcaccaaagaagcgagaggaaggactatacctcggtaagagtgaggcagggaagagaaggtcagttcaacagtacagaaaggaggttcggcccagtgctagagtgctcatgaagcaactaggatttaaattttttgagataattgtttttcagttaaatgttttgtccaaatctcttatcattcaaaagaagaattagggatttttagttcttttttttaattgg

SEQ ID NO: 600313 - DNA, 569 bp, Homo sapiens
tcattctctggaaagaactataatacatttattggagcaatacacaatggaagcttcaaaaggacstcagactctcagatccctgtcctcagaggcaagctcaaatcccctaagctctgtgatgctggctctcacctgatgtggaagactgccgtgtgctggggaccgggcaacaattaaatcccaatgcttttagctgtagtgattcgttcagaaattaagagtccttttatgtctattttgttaaaataagctttacatatatgaattttaatgagtttctttaaaaatctcaaaacacacagactccatccattgcatttctaaggcaggcactatgtgagaactgggacattctatatgtttttccaaaatatattattttctatcaacaattttctataccatcctttggttagaaatatttatcttacagaattaatgtgccacattgttaaaaacaaacttttcaagaagaacaaagcttgtcattatctaaagagaaaatggggaagctttatgaatacaaattaatttctgggcacaactgctctcaaaatgaaatgaat

SEQ ID NO: 600314 - DNA, 608 bp, Homo sapiens
ttatctttggatttgtgacttaagtgaagtctgataagacaatggcatgtgcaccaaagacttggagcctcagtgcaggtatagtcctacctcccacaatctccacacatccctagaactgattctcagctgcctgatccctcttcctctgccacccacatctcacctaggttttccctcctatccctgccttgtgaccactgctatcttctgcccctggagaagcttgggcaggctaaggccaggttgggcttttatgcccaatgcaataagcttcagggcagggctctaggttctgggcacctgttagagtatacatgtatcacttgagtatccttatgcccaagccaggacaatattcaacagcaaataaaaccgctatgacaacttgagagaaagacactgataaagaaaaggaaaagcttttgttctgatttttgagcaagggggtccacggtttttatcttgcacgtggtcccacaaattatgtagccagccctattggtatgatcttrtacaaattatgaaatatttataagcctcagttccctcatctggaaaatgggaattataatgacacctatgatatagaattacaatgggaattc

SEQ ID NO: 600315 - DNA, 583 bp, Homo sapiens
acatgtcagtgcaacactacttttattttatatttatttatttagagacagagtctcactctggtgcctagcctagagtgcagtggcacaatcagagctcactgcagcctcaacctcctgggctcaagtgatcctcccacctcagcctcctgagcatctgggactataggagcgcaccaccatgcctggctacttttttattttttgtagagatggggcctcgctgtgtttccctgggtagtctcaaactcctggcctcaagtgatcctccctcttgatatatcagaagaatttgcttttttttttgaggcaggttcagcttatgctgaccttgctcaatcagtcactgttggctccagtggcttttagagtcacagatcacctttcaccacgcaygttacagatcaccttttaccatgttgcaggtcagcatagcgttgggtccatttgtccacttcccttgatgtcatggccatcaggggacaatgtgtcttctagttttcttttgtaggagcattgttcccttccatttccccaagtacttatcacatggctgctcctatttggcccagcccagtgacgt

SEQ ID NO: 600316 - DNA, 489 bp, Homo sapiens
tgtggcaagatacagagggagtggcagaagtcagaggagaaaatgatgactctaggctgaaatagatccttggaatatgagcagcaccaaacagagatggtcctggagacagagtgggcgacagckgagaacatcggcctgccaaggggcagcaagcccagccatgtgtccactgcagagtgctcatggggcctgggagtataggaatgaggttgaacagagagaatgggaaaagaccaacaaggaccttagtggccagataaacaggtttatgacacccactggcaataaggggcctctgaagtcagtgaccctggatccaaacatagtcactctaatgcacatggacaataggcaaggcagggacttatatctataccatgccctagctaggattcaattgctctgagtgggtattgcctcagtaccctaaactgggatggatgttttgctctggcagaacaacaacaacaacaataataataataa

SEQ ID NO: 600317 - DNA, 489 bp, Homo sapiens
tgtggcaagatacagagggagtggcagaagtcagaggagaaaatgatgactctaggctgaaatagatccttggaatatgagcagcaccaaacagagatggtcctggagacagagtgggcgacagctgagaacatcggcctgccaaggggcagcaagcccagccatgtgtccactgcagagtgctcatggggcctgggagtataggaatgaggttgaacagagagaatgggaaaagaccaacaaggaccttagtggccagataaacaggtttatgacacccactggcaataaggggcctctgaagtcagtgaccctggatccaaacatagtcactctaatgcacatgsacaataggcaaggcagggacttatatctataccatgccctagctaggattcaattgctctgagtgggtattgcctcagtaccctaaactgggatggatgttttgctctggcagaacaacaacaacaacaataataataataa

SEQ ID NO: 600318 - DNA, 611 bp, Homo sapiens
tgagactgtctcaaaaacaaacaaacaaaaaaagtttggcttcttgaattgctaggacagaagtctctagccataggaatagtgtaaggattctcacactctgaagggtttagtttttatattgtgaacaaatgtgaatctgaaagaaccaatccttcaagatgaattctgagtggctaattgggcctatatttaagatagagcggagcagccatttgctgaatagagtttatacactttcttactctggttccccaaaaccccacacctttttaactctggaactttcagaatttgcctgaactaatcaatcatagctcacctgcctcagccaatcaggattttgctgtatcaaccaaccagggctcagctgtattgatcagtcagaactaagcaagtttgaatctctcatttgcataaacagacctgatygggaacctgggtgggaacttttactataacacccaaaccttctttttgttctctggaatactgcatctccccagtttgctaatttttcactggaacaaggtctctttcctccaacttccttttcagagaacttttctgtgcaatatgaagaccagacaatgacttaggcagtgtgggac

SEQ ID NO: 600319 - DNA, 649 bp, Homo sapiens
gttactttttttttttgcctgaaacatggatgtgattgctgaagacatagaagccatctgtacactccacagtgacaaatatgggtgcgagagccagaaagtcaagagtggcagagtgaagaggagaaggagcctaggcctctggtaccttcayggagaccctggattggccttattcaggcttcacattacataagacaaatgaactcctgcttacaacaacagtttggtacggatccctgagcattgcagtggaatgtgctcgtagctaatgctattttaactgataaagagtactgttctgtgttgacctaaaacctcttaacaaacatgtcatcattctgccccataaatattcttatttgtctttccaggtgataagtcctcaatgatacgaagtaagcattaaacatacttcataccccttttgtcctttttgtagttaaatatctgcatttctttttaccatgaacaggcttctgcttttttattctattttaaaattagttttatactgccaattgattttattatatgtgtaatacatatttgtggtaaagatttgaaatatacagaaacatataaaaaataaagtaaaaattatacacgtaacttccactaagagaaagtcaatattaacattttgcca

SEQ ID NO: 600320 - DNA, 649 bp, Homo sapiens
gttactttttttttttgcctgaaacatggatgtgattgctgaagacatagaagccatctgtacactccacagtgacaaatatgggtgcgagagccagaaagtcaagagtggcagagtgaagaggagaaggagcctaggcctctggtaccttcacggagaccctggattggccttattcaggcttcacattacataagacaaatgaactcctgcttacracaacagtttggtacggatccctgagcattgcagtggaatgtgctcgtagctaatgctattttaactgataaagagtactgttctgtgttgacctaaaacctcttaacaaacatgtcatcattctgccccataaatattcttatttgtctttccaggtgataagtcctcaatgatacgaagtaagcattaaacatacttcataccccttttgtcctttttgtagttaaatatctgcatttctttttaccatgaacaggcttctgcttttttattctattttaaaattagttttatactgccaattgattttattatatgtgtaatacatatttgtggtaaagatttgaaatatacagaaacatataaaaaataaagtaaaaattatacacgtaacttccactaagagaaagtcaatattaacattttgcca

SEQ ID NO: 600321 - DNA, 469 bp, Homo sapiens
tatatatatacatacacacacacatacacactactataattgtatactctgctttttttaactggcattttaccattaacattttttatttcatgaagcattctgaagatttctattagttgcataatagtgtattatatagattagattaatattatataatttcactaattctcttattgctkgaaaattaactatagggaaaatttttatattccatcttggtcaagtcttttatttttttggtaggataatttttagaaatagaattactgggtagaagatgaaaatagtgttaaggtgcctatataattaccactctgccttacagaaagcagcattcatttaaatggccaacaagcatgttctgtaccactggaacatatatatttcagcatttgccaatgtttgccaatataatatctcaattttcttaattacttgtgaggttgaatatatttcatattta

SEQ ID NO: 600322 - DNA, 469 bp, Homo sapiens
tatatatatacatacacacacacatacacactactataattgtatactctgctttttttaactggcattttaccattaacattttttatttcatgaagcattctgaagatttctattagttgcataatagtgtattatatagattagattaatattatataatttcactaattctcttattgctgsaaaattaactatagggaaaatttttatattccatcttggtcaagtcttttatttttttggtaggataatttttagaaatagaattactgggtagaagatgaaaatagtgttaaggtgcctatataattaccactctgccttacagaaagcagcattcatttaaatggccaacaagcatgttctgtaccactggaacatatatatttcagcatttgccaatgtttgccaatataatatctcaattttcttaattacttgtgaggttgaatatatttcatattta

SEQ ID NO: 600323 - DNA, 556 bp, Homo sapiens
tgcctgagttcaaatcctggccccaccatttactagctgagatatcttatataagtcaacatctttaagccctgattgccccatctgtaaaatggcgatggaattgctgtgcaaaaaaactatgcctgacatayagctatgaagattacagttactactaatgcttttcctctttttaatcttcatattctagattaataggcactgaagcttaaatattagggcttgatctttttaccatatgtaaaagagagtcaaaggtttctggccacagataatcagtaacatcagaggttatctttaccattcttttgccattcttttggaggcatattgcagtgctgtcagttacattctatcatcaccgtccatggttaatgtatgcttagttgattacagccctgttcattcttgctgctctgcagttaattcctacttgcttagtggctgtggacacttctctgccctggagattctctctcaggttacaccccacttcacagcattgctccacgtgtcccagcttgttggcaatccttcctcaccctactctggc

SEQ ID NO: 600324 - DNA, 587 bp, Homo sapiens
attatgtttctaaaaagaaaaaacagcacccattttaaattaagagagaaaaaatattatgaaacctgtaaaaartaaaaccaaagacatgtgcagaatcaatatttttgtttacattttaattttattattattattatttttattttgagatggagtctcgctctgtcacccaggatggagtgcagtagtgcgatctcggctcactgcaacctccgccccctgggttcaagtgattctcctacctcagcctcgcaagtagcttggattacaggtgtctgccaccacgccaggctaattttttttttttttttttttgtatttttagtagagatggggtttctccatgttggccggggtgttctcgaactcctgacctcaagtgatccacccaccttggcctcccaaagtgctgggattacaggcgtgagccaccgcatccagccgttttgtttacatttttattaccaaaaactgttttttgagttttctcttctaaactgaaatagtcctagcaaaatatatgtagttagccgtcattctttgcatttttttatacatatgccataaatgacaacgataatagt

SEQ ID NO: 600325 - DNA, 587 bp, Homo sapiens
attatgtttctaaaaagaaaaaacagcacccattttaaattaagagagaaaaaatattatgaaacctgtaaaaaataaaaccaaagacatgtgcagaatcaatatttttgtttacattttaattttattattattattatttttattttgagatggagtctcgctctgtcacccaggatggagtgcagtagtgcgatctcggctcactgcaacctccgccccctgggttcargtgattctcctacctcagcctcgcaagtagcttggattacaggtgtctgccaccacgccaggctaattttttttttttttttttttgtatttttagtagagatggggtttctccatgttggccggggtgttctcgaactcctgacctcaagtgatccacccaccttggcctcccaaagtgctgggattacaggcgtgagccaccgcatccagccgttttgtttacatttttattaccaaaaactgttttttgagttttctcttctaaactgaaatagtcctagcaaaatatatgtagttagccgtcattctttgcatttttttatacatatgccataaatgacaacgataatagt

SEQ ID NO: 600326 - DNA, 587 bp, Homo sapiens
attatgtttctaaaaagaaaaaacagcacccattttaaattaagagagaaaaaatattatgaaacctgtaaaaaataaaaccaaagacatgtgcagaatcaatatttttgtttacattttaattttattattattattatttttattttgagatggagtctcgctctgtcacccaggatggagtgcagtagtgcgatctcggctcactgcaacctccgccccctgggttcaagtgattctcctacctcagcctcgcaagtagcttggattacaggtgtctgccaccacgccaggctaattttttttttttttttttttgkatttttagtagagatggggtttctccatgttggccggggtgttctcgaactcctgacctcaagtgatccacccaccttggcctcccaaagtgctgggattacaggcgtgagccaccgcatccagccgttttgtttacatttttattaccaaaaactgttttttgagttttctcttctaaactgaaatagtcctagcaaaatatatgtagttagccgtcattctttgcatttttttatacatatgccataaatgacaacgataatagt

SEQ ID NO: 600327 - DNA, 634 bp, Homo sapiens
atttttcttcctttgtgaaattactttggctcttcatatgtactcattctcctgcatggactgtacaatcagctaatcaaaatgagtttaaagatgaaacaggaatgcttccactgtggggggggggtgtgtgtgtgtgtgtrtgtgtgtgtgtgtgtgtgtgtgtgtgagagagagagagagagagcatgcacattaattataatgtttgctattggcttctgatggaaacatttgatcaagctacataagtttctttgcattcctaacttcctaaaagttttttgattaaatcatttattttttttaatcaagaatgaatgtttaattttagtaagtgattttaaggcccttactggctgataatgtggattttgttctttattctattagtgaaataaaagtgagttaattaatagattccccaatattaaatcttcgattctttttcaatgactctaaatttttctctttacttgcaaaaatgtttattgattaactacagatatgtatattaaacacttcttgagatggttaacacattatatgctctaaaatgtaggtgtacaactctgataacaattttactcagtgtcattaattcctatatatacattataagtataatgtatat

SEQ ID NO: 600328 - DNA, 634 bp, Homo sapiens
atttttcttcctttgtgaaattactttggctcttcatatgtactcattctcctgcatggactgtacaatcagctaatcaaaatgagtttaaagatgaaacaggaatgcttccactgtggggggggggtgtgtgtgtgtgtgtgtgtgtgtgtgtgtgtgtgtgtgtgwgagagagagagagagagagcatgcacattaattataatgtttgctattggcttctgatggaaacatttgatcaagctacataagtttctttgcattcctaacttcctaaaagttttttgattaaatcatttattttttttaatcaagaatgaatgtttaattttagtaagtgattttaaggcccttactggctgataatgtggattttgttctttattctattagtgaaataaaagtgagttaattaatagattccccaatattaaatcttcgattctttttcaatgactctaaatttttctctttacttgcaaaaatgtttattgattaactacagatatgtatattaaacacttcttgagatggttaacacattatatgctctaaaatgtaggtgtacaactctgataacaattttactcagtgtcattaattcctatatatacattataagtataatgtatat

SEQ ID NO: 600329 - DNA, 684 bp, Homo sapiens
tttttcaatgactctaaatttttctctttacttgcaaaaatgtttattgattaactacagatatgtatattaaacacttcttgagatggttaacacattatatgctctaaaatgtaggtgtacaactctgataacaattttactcagtgtcattaattcctatatatacattataagtataatgtatatgtagcccttttgaggctgctttgccttgggattttgtggatacttttactggcatgcatgtggtcacatttaaatcagaacagaaatgattaacatgataaataaaaggaaatttgtttttaaataattgcatgtagtcatgctaattcaaaggggttagggtgtcacttaagagactggagagtggatacttctgggttttggagaaaatcaatcttttcctactaattgtagacttttcyctatttatttaaattaccagaattactgtgttcagtctggactcctttaatttgttcataattgagcttgtgtgggtgttgagttggaagctctcaggagctgaataacacagctgcctctttggcctttggcatagggttttcccccaaagagctgcccttgttggcagtatgccaggaagttacattcaaagactttttgatgaggcataaaaatctttaatttccaggcttggtgttttatgaccccata

SEQ ID NO: 600330 - DNA, 684 bp, Homo sapiens
tttttcaatgactctaaatttttctctttacttgcaaaaatgtttattgattaactacagatatgtatattaaacacttcttgagatggttaacacattatatgctctaaaatgtaggtgtacaactctgataacaattttactcagtgtcattaattcctatatatacattataagtataatgtatatgtagcccttttgaggctgctttgccttgggattttgtggatacttttactggcatgcatgtggtcacatttaaatcagaacagaaatgattaacatgataaataaaaggaaatttgtttttaaataattgcatgtagtcatgctaattcaaaggggttagggtgtcacttaagagactggagagtggatacttctgggttttggagaaaatcaatcttttcctactaattgtagacttttccctatttatttaaattaccagaattactgtgttcagtctggacycctttaatttgttcataattgagcttgtgtgggtgttgagttggaagctctcaggagctgaataacacagctgcctctttggcctttggcatagggttttcccccaaagagctgcccttgttggcagtatgccaggaagttacattcaaagactttttgatgaggcataaaaatctttaatttccaggcttggtgttttatgaccccata

SEQ ID NO: 600331 - DNA, 507 bp, Homo sapiens
gtgttagtattatcctcatacataggagagaatgatggtcaaaccraaaaagcatggctgccaggcaatggaaaactagacaatttacatccctgtgcactaaaaggcttgtgattataaagtggccgtccctgatcatcagaaattatgaagagtaggcctcacactggaagacaaggaagcaaatgatcaattttcagaaagataatgaattccagaaacaactggtaatctcaatgctgatcatcagatttccatgtttgtgaaattaaaaaaaaaaaaatgtggtggtcaccagcaatctcaatggagtccttgaaataactggtgtctcctttcctttttgatgggatttctaaactgctaagtcaggaaaatgttttacatataggttatgttgatgtttataaaagtatttccatttgttttcttattgagacttatgggtcaaattacatacagaggtagacacagcattaaaatgtcccttcctgaaatgtgctaatt

SEQ ID NO: 600332 - DNA, 507 bp, Homo sapiens
gtgttagtattatcctcatacataggagagaatgatggtcaaaccaaaaaagcatggctgccaggcaatggaaaactagacaatttacatccctgtgcactaaaaggcttgtgattataaagtggccgtccctgatcatcagaaattatgaagagtaggcctcacactggaagacaaggaagcaaatgatcaattttcagaaagataatgaattccagaaacaactggtaatctcaatgctgatcatcagatttccatgtttgtgaaattaaaaaaaaaaaaatgtggtggtcaccagcaatctcaatggagtccttgaaataactggtgtctcctttcctttttgatgggatttctaaactgctaagtcaggaaaatgttttacatataggttatgttgatgtttataaaagtatttccatttgttttctkattgagacttatgggtcaaattacatacagaggtagacacagcattaaaatgtcccttcctgaaatgtgctaatt

SEQ ID NO: 600333 - DNA, 528 bp, Homo sapiens
atgaaatcattagcagtgaaaataggatttaaaagtaagagctaaactgttaggttatcaccataattggagtttaaattcggatatgtgcccttctctacctctctactcctgaaaaacctactccaggcctttttttcaatgagtgaattttcagtgtcctctttccaacrgcatttctaggtaaaatggagaaatctctgatcttttctgaaataagttattcaatactattgagcaaacaactgctaagtacacagcaagcatgttgtgataaatatgaaactaatcttttatttttttctaacatcgtctttcattcatccaacaaatattgattacctaataagtatagtcttagtacttggttgggagataccacagtgaacaagacagatgtcttttcattatactcaaaatctagtgcccacaacctttcctcaaagtgtggtagggcatataagttgtaatattaaaatgccataaaattgactaaacccctttagataaccagagcatccttgaatt

SEQ ID NO: 600334 - DNA, 650 bp, Homo sapiens
acctttcctcaaagtgtggtagggcrtataagttgtaatattaaaatgccataaaattgactaaacccctttagataaccagagcatccttgaattacataaatgatggttaaaccacttgcagtgtactcagtaaagatactgaatagtaagatgtctggatttccaaccttaattctgtaactgccttcttgaatgaaagtttttcttcatctggaagatgcatacttcttacctacctgcaatatgtgtataaattatcatcatggtcatcatgtatttggtcactgattgaaactgattacagggtagatatgtctatgggctaaaatagaatgggattggttagctggaaagtcagtttcacaaagtgaaatggcactgaattcaggaaaatagaccaagactattaacttgtcaaaatggaaaatatagcctttaaatatagtcatacacatggtgccctttggtttgaattagggtaaccaactcatcccactttgaacactgaaaatctcttccccaggaaactcctcagtttaaggaaagtgggccagtcgatcaccctattctgcatacccaattttatctgatccttcctctctcttcttccttccctcaccattctttgtttacatgccagtgtatat

SEQ ID NO: 600335 - DNA, 650 bp, Homo sapiens
acctttcctcaaagtgtggtagggcatataagttgtaatattaaaatgccataaaattgactaaacccctttagataaccagagcatccttgaattacataaatgatggttaaaccacttgcagtgtactcagtaaagatactgaatagtaagatgtctggatttccaaccttaattctgtaactgccttcttgaatgaaagtttttcttcatctggaagatgcatacttcttacctacctgcaatatgtgtataaattatcatcatggtcatcatgtatttggtcactgrttgaaactgattacagggtagatatgtctatgggctaaaatagaatgggattggttagctggaaagtcagtttcacaaagtgaaatggcactgaattcaggaaaatagaccaagactattaacttgtcaaaatggaaaatatagcctttaaatatagtcatacacatggtgccctttggtttgaattagggtaaccaactcatcccactttgaacactgaaaatctcttccccaggaaactcctcagtttaaggaaagtgggccagtcgatcaccctattctgcatacccaattttatctgatccttcctctctcttcttccttccctcaccattctttgtttacatgccagtgtatat

SEQ ID NO: 600336 - DNA, 455 bp, Homo sapiens
tggatcatcttggtattttccaccatttttgtcatcacttgaaagacaagaaccacrtcttaccatttttgtgttctcctcagtacctccgcctttgccacattttcccttcctctcatatcctctcacatatatggcctcattttcaggttcctcctggtcctctgtgaactaaacacagagacagattgattttcaatagcctctcccgtgaccttggccagcttggtataaatgctttctacatctggcatctggtcacccagctacagaattcaataaaccagtagagcactgagcaaccatgcctcttaaacaaagcactacctccctagcatgtcggcttctactctggaatccgctcccgtagcattgcctagaatcctcagtcctgcatgagccccactctgaagtccatgttcttagactagagcactggcatagtagagcttgct

SEQ ID NO: 600337 - DNA, 447 bp, Homo sapiens
ggatcatcttggtattttccaccatttttgtcatcacttgaaagacaagaaccacgtcttaccatttttgtgttctcctcagtacctccgcctttgccacattttcccttcctctcatatcctctcacatatatggcctcattttcaggttcctcctggtcctctgtgaactaaacacagagacagattgattttcaatagcctctcccgtgaccttggccagcttggtataaatgctttctacatctggcatctggtcacccagctacagaattcaataaaccagtagagcactgagcaaccatgcctcttaaacaaagcactacctccctagcatgtcggcttctactctggaatccgctcccgtagcattgcctagaatcmtcagtcctgcatgagccccactctgaagtccatgttcttagactagagcactggcatagtaga

SEQ ID NO: 600338 - DNA, 485 bp, Homo sapiens
ctatggttctaaaagagttagtagatgacagcagataggcgttatatattttggctcatcgagttggcacactttactatttgcattcccctttactgcaggtattttcattttaattctcacactctgggkagattggcgttattccatcagaagaaagtatgaaactctcatttgttgcccgccatcagaagtgccatgttaatgtagatcaccagggaattgatcaagaataagaactgggtcaaaaagcaatttctatgaggacgtttaaacaagatccatttttagtttccctaatatttacatgctttccatggggaatgagcaggcacttgactctcggctactgagcatctctgcggtacccatgaagattaaagagcattgtttcttataaagacagaagactaatgtacagtttatctttattaaattgaaaaaaattgcaactgtttgatcttcaaatctgtgtttcactgtgt

SEQ ID NO: 600339 - DNA, 546 bp, Homo sapiens
ctgtaagttaagctagagctgtctcaaactggcactgtccaagaagtctaccagccggggtaaggagactcaggggtatatgtctgaggtcagaggcttagggaaataggtcagtgggaaaatcacctacattagtgactggtatagtaaggagcactctaaaaaatccacaaaagtagccacaaagattccttgatggccagattataccagataatgccagttaagtaaaatcctatcctattgaatcttgtctttgtctcctggttccaaagactgagaaataggagaaggtggaatcctgcctcccaccataccataggatgctccttgtggttcaggtccaacaggcagaaaggaagaaagctttcatttatatyggattgcatattttagcccccgacaaacaagttgcttttttttttacccaaaagtgaccagaaagctatcagccagaaagctgagatgtcagggtgtggaagaggcagcctcaacagtttatacttgaaggggagagaagaaacaaagctgttttctgactgtgcc

SEQ ID NO: 600340 - DNA, 546 bp, Homo sapiens
ctgtaagttaagctagagctgtctcaaactggcactgtccaagaagtctaccagccggggtaaggagactcaggggtatatgtctgaggtcagaggcttagggaaataggtcagtgggaaaatcacctacattagtgactggtatagtaaggagcactctaaaaaatccacaaaagtagccacaaagattccttgatggccagattataccagataatgccagttaagtaaaatcctatcctattgaatcttgtctttgtctcctggttccaaagactgagaaataggagaaggtggaatcctgcctcccaccataccataggatgctccttgtggttcaggtccaacaggcagaaaggaagaaagctttcatttatattggattgcatattttagcccccgacaaacaagttgcttttttttttacccaaaagtgaccagaaagctatcagccagaaagctgagatgtcagggtgtggaagaggcagsctcaacagtttatacttgaaggggagagaagaaacaaagctgttttctgactgtgcc

SEQ ID NO: 600341 - DNA, 416 bp, Homo sapiens
ctatggtaacagtcttacatgactggtaagttacacaaaaattccatgaaagtatcaggatatctagactttagaragatgaaaagccaaaaatcatttggtgcaaagcagagaacatatgaggagagaggcttttgttagaataaataggactggttttgatttggttttagtacctaaagggcttatcaaacagccttctcatgcactacgtcttcaagtgtggtcatgacatggaattcactctgcagagcaggccaggtgttcagaaagaattctaattagtatctgatccatggccacatgggcatggactacgaatagccagataaacctctgtttccccactttatgatagggcacatgagaatctgataaaagctcctttgtgagccctagttatgtcttccactaac

SEQ ID NO: 600342 - DNA, 506 bp, Homo sapiens
  misc_feature 87: n = A,T,C or G
agcagtcacagccagtcagccgtcaggtcttcctttcaagaattctcatacctggacctatggcttttgttattccatggctgaatntttgcaattgcctccaacttgctcttgacccacctctgtctctgtaactctactactcatcttatytaccacatcaacattcatccatgctaaacatcactttcataatttttctaagctactccaaaccttcactaatatttcactgcctatgaataatattctctttatctttgtatcccagatttgtaccctttttaccttttccattatattatcctctattcatcttcaagtcacatagagtgattcctgtttttttctcatttgtgtttatctcttgttgaaaatgccgctgatctcacatgtttagatgctgcactgttactccttctgggacctgtacttcctagaatattctctccatctctgctcccgatcctgcctcagaacactttagcatttcctccaagaatacg

SEQ ID NO: 600343 - DNA, 506 bp, Homo sapiens
  misc_feature 87: n = A,T,C or G
agcagtcacagccagtcagccgtcaggtcttcctttcaagaattctcatacctggacctatggcttttgttattccatggctgaatntttgcaattgcctccaacttgctcttgacccacctctgtctctgtaactctactactcatcttatttaccacatcaacattcatccatgctaaacatcactttcataatttttctaagctactccaaaccttcactaatatttcactgcctatgaataatattctctttatctttgtatcccagatttgtaccctttttaccttttccattatattatcctctattcatcttsaagtcacatagagtgattcctgtttttttctcatttgtgtttatctcttgttgaaaatgccgctgatctcacatgtttagatgctgcactgttactccttctgggacctgtacttcctagaatattctctccatctctgctcccgatcctgcctcagaacactttagcatttcctccaagaatacg

SEQ ID NO: 600344 - DNA, 516 bp, Homo sapiens
gattctcagacctttgacaaatatttctgctatcagcaagaaattgatattcattaaaccatcaataaaaggggcacaggctaccttaaggcaaacggccattattcactattaactgatggaaaacacacctctgtttccactatttataatgtatgttttcacattgtctagtgaccccttttttaacagataggaaggaaatgaaaacttattaccaatttagcatgtgtcagaaatcatggtaagcatttcaatatgtgttatctcatttaatccttacaaaaactctttgagttgggttttattatcttcatttcacagaggagggaacttaggctaagragggttatgacataaagtttgtacgtggaacagcagggatctgaagggttcctgacttcaaagcacaaattccttctactgtgtgactttgagaagattttgctaatgactttgccataaagaactacatatttctactacttaacactatctactaaagtagaatttcat

SEQ ID NO: 600345 - DNA, 525 bp, Homo sapiens
atctataaactatcctcccatcatagatgacaaaaatgattccttctggaggatctgaattccagaggcatctttatctcatccatctgcctttgcatttgcaccctcgcttctgccagggcatttccactctgtgcrggcatacctgttgcagagcctgggaaaatcatgtggttcaaagcatcctttgccttagtgcttcacttccttctattcttctccatgtgtgatggatagagatggcatcagtgcagaagattcagctttttaaatgcccatccccaaatcctgtgacactggaggggaaaagggtctcttgggcgtgccacactgagggtgtcaaggtaccctgtgtccatgcctgaacaacctcactgaggttctgagcaccatggggaacttcgtggtgactgttgggtgccagggcagagcaagggcccctgttaactgtgttctgaaagccttgggacatctcagataccctagagcatcactgccctcccatgggctcttagagagaacacc

SEQ ID NO: 600346 - DNA, 572 bp, Homo sapiens
ttttggggtaatgaattcactatttgttacattttggggacataatctgagttcaggaaagaaacctaaacaagacataaaattttgactatttgtttgtgaaagaaggaatttttagtaaagaaaattaaagtatatagcaatacttggcaaacatttgaacacacttgaagggccatgctcatactcataatcaaggaatttatttgttcacataatcttccgatattttctctggatagtttcactttaaaataaagtatttggagatagggtaggagagattatgcaaatgtatgaatcttaatgagaagttcattattgaacattttgatgtgaatttcaggaaacgataaaagaccctgggatttgtgagacttaaaagaaaaattccactcttggrgaacttggaaattgccagtaaaagaactgagacccaaatgacagcagataatgtaaagccaaattgcattatgccctatggtaatgaataggaaacagggcactgtgataagcttggaatgatgatcaatatttggaacactgtgataggcaagaaggtaattaggccc

SEQ ID NO: 600347 - DNA, 525 bp, Homo sapiens
atctataaactatcctcccatcatagatgacaaaaatgattccttctggaggatctgaattccagaggcatctttatctcatccatctgcctttgcatttgcaccctcgcttctgccagggcatttccactctgtgcgggcatacctgttgcagagcctgggaaaatcatgtggttcaaagcatcctttgccttwgtgcttcacttccttctattcttctccatgtgtgatggatagagatggcatcagtgcagaagattcagctttttaaatgcccatccccaaatcctgtgacactggaggggaaaagggtctcttgggcgtgccacactgagggtgtcaaggtaccctgtgtccatgcctgaacaacctcactgaggttctgagcaccatggggaacttcgtggtgactgttgggtgccagggcagagcaagggcccctgttaactgtgttctgaaagccttgggacatctcagataccctagagcatcactgccctcccatgggctcttagagagaacacc

SEQ ID NO: 600348 - DNA, 525 bp, Homo sapiens
atctataaactatcctcccatcatagatgacaaaaatgattccttctggaggatctgaattccagaggcatctttatctcatccatctgcctttgcatttgcaccctcgcttctgccagggcatttccactctgtgcgggcatacctgttgcagagcctgggaaaatcatgtggttcaaagcatcctttgccttagtgcttcacttccttctattcttctccatgtgtgatggatagrgatggcatcagtgcagaagattcagctttttaaatgcccatccccaaatcctgtgacactggaggggaaaagggtctcttgggcgtgccacactgagggtgtcaaggtaccctgtgtccatgcctgaacaacctcactgaggttctgagcaccatggggaacttcgtggtgactgttgggtgccagggcagagcaagggcccctgttaactgtgttctgaaagccttgggacatctcagataccctagagcatcactgccctcccatgggctcttagagagaacacc

SEQ ID NO: 600349 - DNA, 529 bp, Homo sapiens
gttatgtgtctgggtggacgggacagggggcactgcctgctacccctaggcttcctcctggcatggcttcattgtgactgtcatggccggaccctttgctatctcctcgtaagcaygctttactatatttggtaatatataatgattaatgggcagtaaaactaataacatggggacacacaaaataaatgaggtggcaaatatggaaaggaagtaccacttaatgttgttgtgaaatctgacagcatactggagtttcccagtaactcagcctgaggaatctttgccagcgggaaacaaggttacaagaaggtgatacttccattaataaccttccctcagggaactctatgatcagtctttcttgtactgaaattcttgctgggttgtactgagatgtcagggtacatggaaacacttgctttactctacctcagagaagcgcacagagaaacagcaagagtgtcacaactctccacttatcctaaactgtctctcttttctcccccgagtgctgacatccattctt

SEQ ID NO: 600350 - DNA, 502 bp, Homo sapiens
attgctattaggccaggctagtgtcaataacactaagtgggtccaggatttttgttcacaattggcatattttgtcattactagataccatatctaatacactttatatatcaatggcttcgtgtattgagaatgtacccagacaccaggaaagaaatagaaaaaaaaaaaaaaaaggctacataaccctaaagagaggatttaaacttcttgagaaatttttatgaaaacatgtgaaatctcttcattggcaaatgcyttaggccctcattcgaagaccatactaacctacagaaataaagaaaaggattcttaatagctcaggttgatcaagctcttactgtgtgctaggtacttttctcaatatataacgtaacttacgtatcttacaaaaattttaaagagtcataaattctattcttatccattttatggatgaggaaactgaggccactcaccctgacattttcctacaggggccactctcctaaccatcaaacca

SEQ ID NO: 600351 - DNA, 555 bp, Homo sapiens
tttactgatctgcttatttgttaacttacctaatttatctgtttctatagcacatactctgtaccagaccctaatgtccttactttacaaatcttcactcattctattctctcaacaaccttgtgaggtagagagtgtaattttactcattttatacataaggaaattgaagcccagagaggtccagtaagtctcttagttgacacwgctagtaagtaccggagccaggatttagagtgggccagacacaccacagtgctgtgctggttgatgggtacttcctttctgggggagggtggaggagatgaggtctacctttgtcacccaagctggagggaagaggtgcaatcttagctcactgcagcctcaaactcctagactcaagtgatcctccagcctcagactcccaagtaactgggactacaggtgcatgccaccacacctggctaaacaggtacttccttaatttacccacggcattataaaaagggaggttcatttattcatttggcaatactattattgctgcatactaattttaatattgcttgaaag

SEQ ID NO: 600352 - DNA, 619 bp, Homo sapiens
atgtagcatgagtgactccattctggtttggtctggtctgttgtggcctagtgcaggagctcaaataatggcctcccatacattttattgaatatgatctatagtmtagtaaatgccagattgggacagatgtcccaatagacattcgtcctgatggcctctgtagactctgtccttccagttgccattttgaattttatacttgcccatattctagataattattaggattgccagaatttatgaactgtgagttaaccatcttgatgataatgacaacatgtaattgcaatatatttagataagaattttgtctttgaagggatggagttgagaggtgaaaattacaggctctgcctacagactttctgagttcaatcctggcttctctaattttcacttctgtaacactgagcaagttctttaacttctgttgtctcagtgtcttcatctgaaacatgagaagcataatagaattatcatttttatgagaatcatattttattagatgtaacatggttagacctgtgcctggcaagcaataaacattcaataaatgttaattattatagtaaacataataatgacccctgaaggtgtctgcatcccaacccccagt

SEQ ID NO: 600353 - DNA, 619 bp, Homo sapiens
atgtagcatgagtgactccattctggtttggtctggtctgttgtggcctagtgcaggagctcaaataatggcctcccatacattttattgaatatgatctatagtatagtaaatgccagattgggacagatgtcccaatagacattcgtcctgatggcctctgtagactctgtccttccagttgccattttgaattttatacttgcccatattctagataattattaggattgccagaatttatgaactgtgagttaaccatcttgatgataatgacaacatgtaattgcaatatatttagataagaattttgtctttgaagggatggagttgagaggtgaaaattacaggctctgcctacagactttctgagttcaatcctggcttctctaattttcacttctgtaacactgagcaagttctttaacttctgttgtctcagtgtcttcatctgaaacatgagaagcataatagaattatcatttttatgagaatyatattttattagatgtaacatggttagacctgtgcctggcaagcaataaacattcaataaatgttaattattatagtaaacataataatgacccctgaaggtgtctgcatcccaacccccagt

SEQ ID NO: 600354 - DNA, 602 bp, Homo sapiens
ctgcatcccaacccccagtacttgtgtaaatawtttgttacatgacaaaggaaaattaaggttgcgggtggaattaaggttgttgatcagctgacctgaacataaggtgattatcctgcattttccccaatatacccaatgtaatcacaaggagccttaaagtaaaagaagacaaggtgactgtggaaatgaggtacagagaaatgtagtgctgctggctttcaagatggagggaggggaccatgagccaaggaatgtaggcagcctctagaagctagaaagggcaaggaaatggattctctctggggagcactagaaaggaatgcagcctaacaactccttgaacaccttggttttagtcctgttgtgttctttgaaccactgtttgttgtaatttcttacagcatcaaatcaaaaactaatatagttatcatcataattacttttactacttttatgatatcatagtaatgtataaggaagagttttttctttaaggtgttaacgaaaaacactattaaaatatttaactaaaatagtctgtaaatataaaaactgttagagcttcacatatcccattttctagaatattactaaattaa

SEQ ID NO: 600355 - DNA, 602 bp, Homo sapiens
ctgcatcccaacccccagtacttgtgtaaatattttgttacatgacaaaggaaaattaaggttgcgggtggaattaaggttgttgatcagctgacctgaacataaggtgattatcctgcattttccccaatatacccaatgtaatcacaaggagccttaaagtaaaagaagacaaggtgactgtggaaatgaggtacagagaaatgtagtgctgctggctttcaagatggagggaggggaccatgagccaaggaatgtaggcagcctctagaagctagaaagggcaaggaaatggattctctctggggagcactagaaaggaatgcagcctaacaactccttgaacaccttggttttagycctgttgtgttctttgaaccactgtttgttgtaatttcttacagcatcaaatcaaaaactaatatagttatcatcataattacttttactacttttatgatatcatagtaatgtataaggaagagttttttctttaaggtgttaacgaaaaacactattaaaatatttaactaaaatagtctgtaaatataaaaactgttagagcttcacatatcccattttctagaatattactaaattaa

SEQ ID NO: 600356 - DNA, 580 bp, Homo sapiens
ctctagaagctagaaagggcaaggaaatggattctctctggggagcactagaaaggaatgcagcctaacaactccttgaacaccttggttttagtcctgttgtgttctttgaaccactgtttgttgtaatttcttacagcatcaaatcaaaaactaatatagttatcatcataattacttttactacttttatgatatcatagtaatgtataaggaagagttttttctttaaggtgttaacraaaaacactattaaaatatttaactaaaatagtctgtaaatataaaaactgttagagcttcacatatcccattttctagaatattactaaattaaaccttaaactttatatttttatttcagatgatttgatttggcatgttcatacttcattgcccataatacagtgctgggtcttcccttttattgtcccatatattctgtattttcatgtagtagaaatcacaggtcctggatcctttagacatttagcacctcgggctttgtttctttccacgattttagcaaagttaagatctgaaaggtggtgtttgattttatcttctgtgtaaaaatagc

SEQ ID NO: 600357 - DNA, 625 bp, Homo sapiens
ctgctttaacagcacttttcctgtcttaataaaggaaggaaggataaaaacttttgagttcattgtggtgagattaaaacaaaaacaagcagccaggcatggtggctctcgcctgtaatcccagcactttgggaggccgaggcaggcagwtcacgaggtcaggagattgagaccatcctggctaacatggtgaaaccccgtctctactaaaaaatacaaaaaattagccatgcgtggtggcgggcgcctgtagtcccagctactcaggaggctgaggcaggagaatggcgtgaacctgggaggtggagcttgcagtgagccgagatagcaccactgcactctagcctgggtgagagcgagactccgtctcaaaaaaaaaaaaaaaaccaaacaacaaaacaaaaccccaagacaagcaaaatattacataaacatgtaaactatttgtaacagtggattacccagggagtgaaggggatattcactagatatttcagggacaatccagtaccccatcagctcgagggaatcaatggtcaatttatatggtgtcaagcaagacatccaggccatggctctcacggaatttacattccagtgaagggaagagaataaacaactaatc

SEQ ID NO: 600358 - DNA, 625 bp, Homo sapiens
ctgctttaacagcacttttcctgtcttaataaaggaaggaaggataaaaacttttgagttcattgtggtgagattaaaacaaaaacaagcagccaggcatggtggctctcgcctgtaatcccagcactttgggaggccgaggcaggcagatcacgaggtcaggagattgagaccatcctggctaacatggtgaaaccccgtctctactaaaaaatacaaaaaattagccatgcgtggtggcgggcgcctgtagtcccagctactcaggaggctgaggcaggagaatggcgtgaacctgggaggtggagcttgcagtgagccgagatagcaccactgcactctagcctgggtgagagcgagactccgtctcaaaaaaaaaaaaaaaaccaaacaacaaaacaaaaccccaagacaagcaaaatattacataaacatgtaaactatttgtaacagtggattacccagggagtgaaggggatattcactagatatttcagggacaatccagtaccccatcagctcgagggaatcaatggtcaatttayatggtgtcaagcaagacatccaggccatggctctcacggaatttacattccagtgaagggaagagaataaacaactaatc

SEQ ID NO: 600359 - DNA, 529 bp, Homo sapiens
tcttttctctcattaggacatctaattgaaccttttttttttttttttttttttttttgagacaaagtttcactcttgttrctcaggctggggtgcaatggtgcaatctcggctcactgcaacctccgcctcccaggttcaagcgattctcttgcctcagcctcccgagtagctgggattacaggtgtctgccaccatgcccggctaattttttgtattgttagtagagacagggtttcaccatgttggtaaggctggtctcgaacttctgatatcagctgatccacctgccttgatctctcaaatgggattacaggtgtgagccaccacaccctgccctaaatgaactttttatccacagctcttgattttcaatagataaaatatagaaatcagaattaaaaacaataaagaccccagattttttatgctattatgaagtcattatcaactcttttgggtaatctaaagagggtggtgactcctgatttttatagccgaatctcttagataaatattttgccataag

SEQ ID NO: 600360 - DNA, 529 bp, Homo sapiens
tcttttctctcattaggacatctaattgaaccttttttttttttttttttttttttttgagacaaagtttcactcttgttgctcaggctggggtgcaatggtgcaatctcggctcactgcaacctccgcctcccaggttcaagcgattctcttgcctcagcctcccgagtagctgggattacaggtgyctgccaccatgcccggctaattttttgtattgttagtagagacagggtttcaccatgttggtaaggctggtctcgaacttctgatatcagctgatccacctgccttgatctctcaaatgggattacaggtgtgagccaccacaccctgccctaaatgaactttttatccacagctcttgattttcaatagataaaatatagaaatcagaattaaaaacaataaagaccccagattttttatgctattatgaagtcattatcaactcttttgggtaatctaaagagggtggtgactcctgatttttatagccgaatctcttagataaatattttgccataag

SEQ ID NO: 600361 - DNA, 529 bp, Homo sapiens
tcttttctctcattaggacatctaattgaaccttttttttttttttttttttttttttgagacaaagtttcactcttgttgctcaggctggggtgcaatggtgcaatctcggctcactgcaacctccgcctcccaggttcaagcgattctcttgcctcagcctcccgagtagctgggattacaggtgtctgccaccatgcccggctaattttttgtattgttagtagagacagggtttcaccatgttggtaaggctggtctcgaacttctgayatcagctgatccacctgccttgatctctcaaatgggattacaggtgtgagccaccacaccctgccctaaatgaactttttatccacagctcttgattttcaatagataaaatatagaaatcagaattaaaaacaataaagaccccagattttttatgctattatgaagtcattatcaactcttttgggtaatctaaagagggtggtgactcctgatttttatagccgaatctcttagataaatattttgccataag

SEQ ID NO: 600362 - DNA, 529 bp, Homo sapiens
tcttttctctcattaggacatctaattgaaccttttttttttttttttttttttttttgagacaaagtttcactcttgttgctcaggctggggtgcaatggtgcaatctcggctcactgcaacctccgcctcccaggttcaagcgattctcttgcctcagcctcccgagtagctgggattacaggtgtctgccaccatgcccggctaattttttgtattgttagtagagacagggtttcaccatgttggtaaggctggtctcgaacttctgatrtcagctgatccacctgccttgatctctcaaatgggattacaggtgtgagccaccacaccctgccctaaatgaactttttatccacagctcttgattttcaatagataaaatatagaaatcagaattaaaaacaataaagaccccagattttttatgctattatgaagtcattatcaactcttttgggtaatctaaagagggtggtgactcctgatttttatagccgaatctcttagataaatattttgccataag

SEQ ID NO: 600363 - DNA, 399 bp, Homo sapiens
gccaggttttccaacaatagtgggaattcagggcattcaccctttggtaactgagagttgattgtatatatgaatagttagctgcaactgttaaagtgaaaatttagattaagaacaaacattgaagcaatcaacacaatctaatattcatgaaatttctgcaatgtwtgtgttagttgctgttcagagaacactgaactagtttacagataattttcaatgtctacattggaaaactactttatttccaattacttcaggtattttaagttaaatttaggggaaaaactgatataaagaggatgattttgatttggctaacttatctgtctcatgtataactacttattgtttatgccaaatagtttttcagcttctttttaacaaaatcctgacttt

SEQ ID NO: 600364 - DNA, 576 bp, Homo sapiens
tgatataaagaggatgattttgatttggctaacttatctgtctcatgtataactayttattgtttatgccaaatagtttttcagcttctttttaacaaaatcctgactttggagtagcaacgctgactagtttaaaatattcatctctccagatattcatgcggtatttgttttcatgtaatggttttgaataataagacacggatgaagcatctgaggttaagtttttggacagctattattgtccagataaaagggacagaattatgtcttttgtccttcacctgtcctccttcttcctgcctggcacatggagggcagcagccatcccacaaacatgaggttggaagctacacggtatggatggagacgcaggaggccagaagtctggtatttgatgacttatttgaacaactgtaccaaccctagcctgcctgcctcctctgtccttgatgccagacaagaagaaaccctttttttagttaagccactgttatcaattatctgttatttgcagtcaaacacatcctaattgttaaaacaagtaatcataagtattcaatggtccttatataa

SEQ ID NO: 600365 - DNA, 293 bp, Homo sapiens
aaaactaaaagtagaattagaaaatgttagaactcattttacagatgaagaccctgagtcaatgaaatgtaaggggacttgcaccaggacaaaatcagtattctgaagccattgctgcattttttttctcatgttttgttaagtttcttcctctcacatgaacatgtgcctggtgtccgcatcaacttgccacagcctgctttccttrtctttcatgtgggtcctcctccccttccttcagagttgggctgttttgatgttttctattcacttgaatacataaaagagcagta

SEQ ID NO: 600366 - DNA, 603 bp, Homo sapiens
tcagcctggatatgttgacattcaccatcttctgggtgtggtcctccactgcaccctaccatgcaccccaagtaaagctccagctgggaaagtctttcagtttgctcaggaatctagtgacttacataattatctttagttagaagcttagagagaagaggatcatttatgtataagtgataggaccctcagaattctttcttctctaataaaataatgaggtcactaatccagttgtcattcaactrtctcttaatatttcaatgatgtgagtctagctgtaaccaaaaaacacaaggttaacctcaggattcatgcagaagctgcttgaaacctagtcccatctatagtcgtgcagccaggattgtcaggagtctgcagtgtcaaataaggcagtataattgcttctgttgaaggtaagaggagggtggggagagaggaagacatcaaattcctctgaagcaggtagagttcatcaaccctaacttaattgtaagcttcaaataggataaatcattatggtccctcattttgttaaggtttgacagctttctgacagcttccaataaaaacaaaataagttgatttatgataaagcaggag

SEQ ID NO: 600367 - DNA, 574 bp, Homo sapiens
taggaatgccagccataaaataagaaggtctggttcttgttcttactgagttataatttagaaggagaagtttaaggtataaggagcattaaatgacaattatggaagtacttaaactctgtttaacatccaggacgcaacacgtatttcttacattcagcaaatataatacttctcaagtccttctatatgtctggcactaaaataagtgcccagaatgmaaagaaaaagagaccaaagcctctgcccaaatcctgtaaggcaaaccatttccaggcctgataatgaacgtggagatggagtaagattcacaagacagaaatgatgtcatcaaagtagtggaataaaggtgggcacaggacattccacattagatgattactttaaggcagcatagtatgtccattcttggtgctagatatttgtcagcttatgcccatttaaccaatgagatgaaaagcaaaatctgctatactttctgagaaagagaagtcaggcactttctattgctgaaaatcctaagaaaacatattgctcccgttgctgcagacaactatgttatgaacacacagac

SEQ ID NO: 600368 - DNA, 548 bp, Homo sapiens
tttgtttttcaggcatggtgagaaaggttcagacaaggatccattgccttttttcccctcattagccatgtctaatcaatccccaatcctgtcaattccatgacctttatacatcttacctgcttctctccatttctattaacaccaacacagtccaaaccagggtctttgcatacctggatcactattgtggatttctaactggtctcctgcatccatcaattttcactcctctattttattctctatcatgcgaatcttataatttcttgacttacagagcatctttaatggtagctcattgctttttgataaagtcaaaacttcataaaatgtcttatgactgtatcaataatgtctacctctcccatgtcattattcagtgttccaccaccctcccgtgactaccactgggcttcagctattctgaatctccttcaaatcytgctaatgcatgtgtgttctcccatggggtaaagcatgtggttttcccaccaccgggaatgccattttctcatgtcagtctgattcctatcatctttcaggtt

SEQ ID NO: 600369 - DNA, 548 bp, Homo sapiens
tttgtttttcaggcatggtgagaaaggttcagacaaggatccattgccttttttcccctcattagccatgtctaatcaatccccaatcctgtcaattccatgacctttatacatcttacctgcttctctccatttctattaacaccaacacagtccaaaccagggtctttgcatacctggatcactattgtggatttctaactggtctcctgcatccatcaattttcactcctctattttattctctatcatgcgaatcttataatttcttgacttacagagcatctttaatggtagctcattgctttttgataaagtcaaaacttcataaaatgtcttatgactgtatcaataatgtctacctctcccatgtcattattcagtgttccaccaccctcccgtgactaccactgggcttcagctattctgaatctccttcaaatcttgctaatgcatgtgtgttctcccatggggtaaagcatgyggttttcccaccaccgggaatgccattttctcatgtcagtctgattcctatcatctttcaggtt

SEQ ID NO: 600370 - DNA, 622 bp, Homo sapiens
gtaaagcatgtggttttcccaccaccgggaatgccattttctcatgtcagtctgattcctatcatctttcaggtttcatatacaatgttacttcatgtggaaagtgggttttgaccctagtgtagattgctcctttctgctaaaggctcccgtgacccctctgtacttacattatctcactctagtataattatttgttggattaattctttttatttttgtaggtcctcgtttgtgttgttcactgttgtaatcccccagtacctctctatagtggatacgccacatatattgaagagctgaatggtttgagtacatggagaattatgcagactaccttttaaaaagcagccagggwaggggaaagtacagacactgaggataaataaaagcagttagaattcaggcagaaaaacagcagttactgaatgttctgttttagagttgaacaaataaatggccagagattgaagtagacagttaagaagctgataaacaagataaacattaaaaaatatatacacataacactggtatcatacctgattcagaccttgagccattcagctaattctgactgattccaattggtctggccagttttctgtgtgatgcaaaggta

SEQ ID NO: 600371 - DNA, 483 bp, Homo sapiens
gttactgaatgttctgttttagagttgaacaaataaatggccagagattgaagtagacagttaagaagctgataaacaagatamacattaaaaaatatatacacataacactggtatcatacctgattcagaccttgagccattcagctaattctgactgattccaattggtctggccagttttctgtgtgatgcaaaggtaatttatttaatgtattctgtgggtataaaaaaccccccagcagctctgcccaccactaaagatgagctacagtatcagtagagacatgaatgagtcacacagggtcagatgccagctctaccaagttcaagcatcttaacttgaaactgataataattcgttaaacagttgtacaaatccagactctgtatgcagagcagcagctataatgtccccaaaactgaaacttatcattataataacacaaaggatccaaatttagaaccctggaagaatggctg

SEQ ID NO: 600372 - DNA, 600 bp, Homo sapiens
cacaaacaaaaagatacttgggtgaacacacaaaatctggaagtatagtctattggtttcctgtggcttcagcataacaaactgccaccaacttcatggctcaaagcagcagaaatttattctctcatagttctggagagtcagaagtctggaatcagtaccatgggtcagaatcagggtgttggcaagaacatgcttcttctggaggctctagaggacaatctgtttcttgccccttctggctctggaagctgccagcattccttgatctgtggctgcatcaccccaatccctgcctctatggctacattgccacctcctcttctgtttaaaatctccctctgcctctatcctataagataagtgtaattgcctttagatccccacagataaccctggataatcttcccatctcartatcttgcaatcgcatctgcaaaggtccattttgccataggggataaatttacaggttcaagaaattagagcatgagtaactttttttttgaaggttgggggacatggcattttctgccaataagtaagatacataatttcaactatactttttaatcgttgtgttttcagaaaaagtgttaa

SEQ ID NO: 600373 - DNA, 576 bp, Homo sapiens
agaactatagtaaccaaaaccagcatggtactggaataaaagcagacacatagaccaatggaacagaatagagaacccagaaatgaattcatacatctatagtgaactcatttttkacaaagttgccaaggacatacattggagaaaagccagtctcttcaataaatggtgctgggaaaactggacatccacatgcagaaaagtgaaactagatctctatccctcaccatacgcaaaaaatccaatcaaaatgaattaaagccttaacttaaagacctcatactatgaaactcctacaagaaaacattggagaaactccccaggatattggtctgggcaaagatttctatagtaatacttcacaaacacagggaaccaaagcaaaaatgaacaaatggtatcatatcatgtttaaaagcttctacacagcaaatgaaacaattaacaaagtgaagagacaaccctcaaagtgtgacaacatatttgcaaactacccatctgacaagggattaataaccagtacatataaggagctcaaacaatcccataggaaagattgactgagatctgaataga

SEQ ID NO: 600374 - DNA, 585 bp, Homo sapiens
aaacataattctgaacttttaattcacctagtacaaacttgtcaatgattttctattactgtcatgaaaaatacaaatccttaacatgacctcgcaggcctcaaataagctgaccctgcttctctctctggtatttttttatttcatccctaattctttttacacrtcataattttgattttgatatcctctttcatatggactttttatatattattcagaacagaatgactaaatttgcctgatggcaacgtatctttcacatgtcccatttatattctattcccaacatccttgactatattagaatccatttacttttttggtaacactcaccacagttgtaattatttaatcattggcatatttttgaggcatacatatttttttctcttgactgtgagtgccatgtgactaagaaccccgtttgtccttcagcagcaaatctttagtccctaggatggtgcttgccacaaaattggctcttgataaaaagctgttgacttatcaagggacacatttgttcattcactttaaaatcattaaggaatacatgaaagtagacatatggagaacaaactgtca

SEQ ID NO: 600375 - DNA, 547 bp, Homo sapiens
tctctcaccttgctgacggccagtgagggaagaccaggaaggatcctgccagcctgaattgaggctgaaagaaaaggaatcctggagcaggtggckctgaacaagatgactccggccaggtctaaaccttgggggtgaaaaggatccctgagactcctttaggatctggcatgtgataagaatcctcatcaggatttggaccaaagtgataaacagagattaagagcttgcattggcacagtattgttcccagttaattgctcctctaggtaagaagcatgttgggtaaaaaataaaagcacttgccactaacattaactaataactggtatccagttattagttctaagctgttgcatgcatgatctcatttactctttacagaaatcctattgagtagctggtacttttatgctatttttatacatgtagaaaataaggcatgggaaattaattaacgtgcccagtaactcccagtttaaaggtggtattacctccattccaacccaggaagtctgcatgcagaacctgcatcttaaaccattgt

SEQ ID NO: 600376 - DNA, 547 bp, Homo sapiens
tctctcaccttgctgacggccagtgagggaagaccaggaaggatcctgccagcctgaattgaggctgaaagaaaaggaatcctggagcaggtggctctgaacaagatgactccggccaggtctaaaccttgggggtgaaaaggatccctgagactcctttaggatctggcatgtgataagaatcctcatcaggatttggaccaaagtgataaacagagattaagagcttgcattggcacagtattgttcccagttaattgctcctctaggtaagaagcatgttgggtaaaaaataaaagcacttgccactaacattaactaataactggtatccagttattagttctaagctgttgcatgcatgatctcatttactctttacagaaatcctattgagtagctggtacttttatgctatttttatacatgtrgaaaataaggcatgggaaattaattaacgtgcccagtaactcccagtttaaaggtggtattacctccattccaacccaggaagtctgcatgcagaacctgcatcttaaaccattgt

SEQ ID NO: 600377 - DNA, 430 bp, Homo sapiens
tatagtctaaacattacacattatggtgtaaatttggattgggaaaacaaaaaaaattacataactttctttatcgtggtgctctgaaacaaaacccatattatctctgtcatttgcctgtctctccattttcttaaacagaccctggtagcctccttttgactgagcccctctccatgtctccattgcttcaagtcacctgcaactcctcctgtagttgtttcttaatatatttattttattttttctttaggaagtgttgaggagataggggaggtttragctggaaagctatggattctaaagttcttataaaaaattgttgttctggactctccttggaagttcacatttatcttttccaatctcttttattgtgtgataaactattcttttcaaagtattttttaaaaatctcaaataaaaatca

SEQ ID NO: 600378 - DNA, 466 bp, Homo sapiens
atatttattttattttttctttaggaagtgttgaggagataggggaggtttaagctggaaagctatggattctaaagttcttataaaaaattgttgttctggactctccttggaagttcacatttatcttttccaatctcttttattgtgtgataaactattcttttcaaagtattttttaaaaatctcaaataaaaatcaactscaagtgaagctgtttgagatcatccataaatgcgtttgtgtggcggacagaaactcatatgctggatttggccaagcctgtattcaaatcccacctccaatacctgtggtccctgacacctgacatctggcctcgcttcgagtgtgctttttcctcccaaccaatatgggagtaaacctgagggaatagtatgttctcatttcacatttgactcttgtgactttagagcaaaatatttaaagggaaagaaaatgcgagagc

SEQ ID NO: 600379 - DNA, 535 bp, Homo sapiens
caactcctcctgtagttgtttcttaatatatttattttattttttctttaggaagtgttgaggagataggggaggtttaagctggaaagctatggattctaaagttcttataaaaaattgttgttctggactctccttggaagttcacatttatcttttccaatctcttttattgtgtgataaactattcttttcaaagtattttttaaaaatctcaaataaaaatcaactgcaagtgaagctgtttgagatcatccataaatgcgtttgtgtggcggacagaaactcatatgctggatttggccaagcctgtattcaaatcccacctccaatacctgtggtccctgacacctgacatctggcctcgcttcgagtgtgctttttcctcccaaccaatatgggagtaaacctgagggaatagtatgttctcatttcacatttgactcttgtgactttagagcaaaatatttaaagggraagaaaatgcgagagctttatttttgcaaatataaagaaggtatgacatcacacctcc

SEQ ID NO: 600380 - DNA, 657 bp, Homo sapiens
tatcagctttttgtttttcttttcagtcatttcaatagatatgtagtgacatatcatatttttatcttgcataacttctaatttttcagttttctaatggctggtgatgttgaatttctttgtawgtgcttatttgccatcagtatatatactttgataaaatgtctgatctttttgaacaatttattttttttctttttctactgttgagtatggagagtttttttatatattctagatactagtcctttctcagatataatatttagaaagaatgttttcaaacctgtaccttgtatttttataccctgaatagtgtctttcacagatcacttttaaaacatttttgataaagttcaatatatcatatattgtcttttattacttatgcttttggtatcatagctaacaattatttgcctacccaaggtcacagacgtttcctgtgtctacctcaaatactttattctaaaagttgtatatctctaccttttacatagagatgtttattgaattatttttgaataagttataggtttagggtatggttcagttttgcatacaaatatccaattgtttcaatacatttgttgaaaagactgtgctctgtgcatttaatttctttagcacctttgtcaaaaatcagttaggcttatt

SEQ ID NO: 600381 - DNA, 568 bp, Homo sapiens
ggagagaagttgagacattttaaatgatccatacatgagctaataaataccagaggggagctaatacttacagggtgcatttgaaagggtactacaattcataagctcgggaaggaattagtcagctgtcactcagaaacgaaaaagagtagagttatttgaaagatccagacttataatatcagaagaacagatatccctgaaattctaaagtctagtaaataaaattgagagagctttgagatacagggactaatttaacttagcttcttgatagagatcggataggtatggcattcacacctgttgctaaagaagatgctgcagaaggcaaagataattaagactatagtgtttcaataaactagctttagtctcaagggagcccctwgcaatgaaaagggaataggaaagaatggggaataagaaacaaatataacagatcagataatactagcttttcaagaactgtgagaatagtcaaaaagcatagaatgtctcaagaaggcattgacattaaattgattggcattaaatagacaaaaaagctgcgcattttttggaagaa

SEQ ID NO: 600382 - DNA, 584 bp, Homo sapiens
acttactattttgtattatggtgaatagaaatagtaagagttgaaatcctatcattttcctccatctcaggaggcaaacattccatctgctatcattcagtaaaatgttttagatttttgttgacaacattttccaggtggagataggttcttcatattcctagtttgataagaagttttttattttattttgcttgttttaaatggcaaatacattttctgaatgaattaatatgaccacacagtttttcttatttgtctattataacatgatattttatactgagtggttttgaataatgaactaactttgcaatccctgggtaarccccatttaggcaccatgtattgtatatattgtgcattccatttttcaatatttagttgtgaatttgtgtatctatgttcatgatgggtgttggtctatcgttttcttagactgtcttgtctggtttcggtatcaaataatctgtgaccttttaaaatgatttagagagtgttacttcctctgattttctgggagagattgtgaaggattgttattatatattatttcaatattgatagaatttttcagtgaaacc

SEQ ID NO: 600383 - DNA, 599 bp, Homo sapiens
tatatgcttgttcatttttaatataataatatatactatacatgtccctctaagaactgttttagtatcatcagagaaatgttagtgcaggtcgattatgcctaattaaaaaaatctaaaatctgaaatgctccaaaatccaaaacattttgagcatcaacatgatgctcaaagaaaacgcatattggaacaatttagatttcaggtttttggattgaagattatcaactgggaaggtataatgcaaatatttcaaacaaacgaacaaacactgaaatccaaaacacttttggttccaagcattttgggtaaggaatacccaacctgtaagttacattttcatttttgytcaattcaaaatattttctaatctcctttcagacttcctccttggctgatgtattgttttattttcaaatatttggagagttaccattgttctttctgttattaatttctagcttaattttattataatcaggcaatatacttgaacaattatttcaaatattttaagcttattaaggatagttttatagccaataataaagtttatgtttgtgaagattttatgtacacttggaaataatttgttttgc

SEQ ID NO: 600384 - DNA, 606 bp, Homo sapiens
ttctgttattaatttctagcttaattttattataatcaggcaatatacttgaacaattatttcaaatattttaagcttattaaggatagttttatagccaataataaagtttatgtttgtgaagattttatgtacacttggaaataatttgttttgctataattctgtggaatgttttataaatgtcaattacattgtatttgtttgatagtttttcagttcttacagatcctttttcttattctgtttacttgctcyattagtgaaagaagattgatgcctccagctatatttgtgaatttgtccatttttcttttagtttctgctttatgcattttgaagccttcttattgccatttgggatgagcatgcctgtttgctgaatttctattattatgtaatatgtctttttatccctatacttttccttactctgaagtataatttgcttaacactaatgttgcaactccatgtcctctgtgtctgagattttgctctatatgcaagctaacagttagcctatcagggttccatggatgttgatggagtacactaaattcttgagtctgagacaaaagacaatttatgtctcacagaaatagcag

SEQ ID NO: 600385 - DNA, 645 bp, Homo sapiens
tatttttccctagttcttggatcatgttaataatagctgctttaaaaatctgtgtctgataataccaacatctctattatctcaggatggacatcaattgattttctgtctgcttataaaatgtcatgattttcatgctccttcatatgttgagaagctatagattatatctggacatgttgggtactatgttatgaatctcagagtcttgttaagaatgttgaccttgggaggccgaggagggcggatcaggagttcaggagatcgaagaccatcctggctaacacggtgaaaccccatctctactaaaacatacaaaaaaaaaaaaaattttgcccggcttgatggccggcgcctgtagtcccagctactcgggaggctgaggcgggagaatggcgtgaacccgggaggcggagttgcagcgagccgagatcgcgccactgcactccagcctgggtgacagagcgagactccgtctcaaaaaaaamaaaaaaacaaaaaacaaaacaaaaaaaatagaatgttgacctttatgttttaggagacaagtgaccacagtgtgttcaccagccaagttttacacacctgagggccacggatccaatgtcaatcagtttttaaaagttttgctgtgctttaagatct

SEQ ID NO: 600386 - DNA, 613 bp, Homo sapiens
agaccacaaatacttatttcctgaaattttaggggtcttccctattgcttctgcttctgtgacattgctagggggcaggattagtagagaataatgatagcaacaacaaaattaaggaactttcttctattatatctgccccataaatgctccctttcctatcacttctatgagaaacagagggattcctttgaagttctttctgtctaaacccggtgctcacttctgaatattgtgctattttatgagtccaggctaagaataaccaaaggaaaataaaaatgrgtatgtggggggaattactgccaatttagtagtagtgcaaatctggttttcttccccaatattcttgctatcatttgcttattaaagtccttaggtcccttgtgcgtgcagcctgcccaggttcttagttgcatttagtgggagagacatattggtgtatgcttactcaatctctaccagagttggacccttttcatttactattaacgatcttaaaattatagctgaaatgagcttcaatacagtttaaaagtcctattcagaagagacaaaaacatccaatccattatatggatccttttgttttaattttgcttttttttttttt

SEQ ID NO: 600387 - DNA, 613 bp, Homo sapiens
agaccacaaatacttatttcctgaaattttaggggtcttccctattgcttctgcttctgtgacattgctagggggcaggattagtagagaataatgatagcaacaacaaaattaaggaactttcttctattatatctgccccataaatgctccctttcctatcacttctatgagaaacagagggattcctttgaagttctttctgtctaaacccggtgctcacttctgaatattgtgctattttatgagtccaggctaagaataaccaaaggaaaataaaaatgagtatgtgggggraattactgccaatttagtagtagtgcaaatctggttttcttccccaatattcttgctatcatttgcttattaaagtccttaggtcccttgtgcgtgcagcctgcccaggttcttagttgcatttagtgggagagacatattggtgtatgcttactcaatctctaccagagttggacccttttcatttactattaacgatcttaaaattatagctgaaatgagcttcaatacagtttaaaagtcctattcagaagagacaaaaacatccaatccattatatggatccttttgttttaattttgcttttttttttttt

SEQ ID NO: 600388 - DNA, 396 bp, Homo sapiens
gacataagtttccaattgtcttatccaaccgcctgcagcccttcccctctcagtaaaggctctggaaaatttaagttaattggaacaacgtgggagtcaaagagacttaagtccaaggtggaaggcaaagatcaatagcactagtttttagatggcgttaygtttccattgcagttaattactgagagttagcagagcacggtaggaacacgtggcatgccatggttctactgtccaaattcagatcccagctctgctccttgctaagctgtgttaccttgggcaagtcacctaacctattcctgccttacttttttcatggtcatttggttctaaattaccatgtagtaagtacccaggaaatttcacttattattaatattagtggaagaattc

SEQ ID NO: 600389 - DNA, 621 bp, Homo sapiens
acgcttatgcaagagggggtctacaaaaagaaaaaatttgacagaatgtgctttactataaacagacttcagtgattgcattatagcacatgcaccctgccaaaagatgtcctgaccagataatttttaaacagaggtagaaatttaaaccaaccttaaaaaygctttgaaaacctaaaactggtataaaatttacctttgcagttcctagtccaggatacgtaccccaagtccaggatatgtaccctcagtccctctttgcactgtgcccatgtcctccatgttatccttgtctgtctaaagcctatgaggacagtacagccaggccattactcctccaaataatgaaaagtataataaatatgatttcagcaaaatcatggttacaccttcttaaaaatattctttatctcatgttattcacaatagaaaatagttggggagggtatcatcaccttttttgggaaaaggtgtgaaataatgaaaaggaatttatatagccagtaagcagaaccaggatgaaagtatatgtcatcatatttctcttctattttatatatctctctataagtctaaatgctggaagaaaacctcttttaaaaatttttaattggctgggca

SEQ ID NO: 600390 - DNA, 538 bp, Homo sapiens
ctgaattctaccaaacacttaaagagtagctaatatcaatctcactcaaactattctgaacaatagaggaggggggagtacttccaaactcattctatgatgccagtattaacttgatacygaaaccaaagacacatcaaaaaaagaaaattacaggccaatatctctgaagaatattgatgcaaaaattctcaacaacataagagcaaatcaaattcaacaatacattagaaagatcattcatcatgaccaagtgggatatattcctgggacacaagaatgtttcaatacatgcaaatcaatcaatgtgatatacatcattatcaacagaatgaaggatataaaccatatgattatttcaattgtggctaaaaaaggatttgataaaattcaacataccttcataataaaaaccctcaaaaaactagggattgaaggaacatacctcaaaataataaaagccatgtatgatagacctacagctagtatcatacagaaagtcttttctctaagatctggaacataacaaggatgccca

SEQ ID NO: 600391 - DNA, 628 bp, Homo sapiens
aacaatatatattcgtataacttactatggtctactggaattgatgtttttgcacatcaatttgagaaactttacatttatttgagtgcctatgaacttttaagatataattgtattaaatattccttctgcatgcattaagctgaactttggatgtataatttttctttcaaccttcaaatataccttaagaaactcacgcatagcaaatagtctattttatacacccttatttttaccaatttgcatactcttctttcttttctgaagtttcaagccatctactgttagttcctttttctttagagagtttccttcaaccatttgactctcactctcaatctccattgactccaagtgcaggtggaagattagttccctgatgggtttcastttttttttgctgcacgacggagaacagaagttcatctcctccttggtcttcactcataccagggggctggaagtggaataccaaatagggctgcttctctcccttgtctcccactaaatcatgctggctgggtgaaagtatagctccctgatagctctctgggtatgtatagctctctgtgtccctctgatagcagaaaagaggagaaaatgaggagcttatagcctggacttt

SEQ ID NO: 600392 - DNA, 471 bp, Homo sapiens
ttgtaaaggtgctaccgactgaggctgttctatcttggcagaatgtgaagtccacctgcttcactactattctctgggtgtgtgagacttaaattagatttgtttgtccttcttaaatgatgtaatacttcactcagtgcctggcatattataagcacatagtaagtgttaactattatgactawcctaaggccttccatgaaaaacaaattcagatcatggagaagaaatgaggaaagtaaagtgcaacgaagaaagcagaactccccattgtggtaccaggtacacaattcaagagtagatctgatgacttaaccatgctgggcagaactggacaatacttgtctcctatagttcagcactgataaattgcccccgtttttgacatctctcaataatttttctaaattgttataataaggagaagtgatgattagtttttatttttatctaaggatggataaaactgaa

SEQ ID NO: 600393 - DNA, 304 bp, Homo sapiens
aagcttcacataacctcaaagaatcattaaaattaacttctcttttgagaaaggaccacatmcacacactgctagatggattgggcttgctttgttttgcatttttctttcgtttttcattttttttgactttatgataatcatttttattttgcaacattttttacataaaagtgaccatgaaaagtacaaaagttcaaagaatttatttatacccttcacctagattcagcaattgttgacattttgtcacatttgatttgttattcttttctgaatcgttacagactaagtagaaagcaat

SEQ ID NO: 600394 - DNA, 304 bp, Homo sapiens
aagcttcacataacctcaaagaatcattaaaattaacttctcttttgagaaaggaccacatacacacactgctagatggattgggcttgctttgttttgcatttttctttcgtttttcattttttttgactttatgataatcatttttattttgcaacattttttacataaaagtgaccatgaaaagtacaaaagttcaaagaatttatttatacccttcacctagattcagcaattgttgacattttgycacatttgatttgttattcttttctgaatcgttacagactaagtagaaagcaat

SEQ ID NO: 600395 - DNA, 581 bp, Homo sapiens
aagatgttttaatttttcatatttctaggatatataaattgtgaggtttttcaaattgctgcaaatctacaaaaaattttccaatttttttttgaaaaaaattacgtagaaatggacctgtgcatctaaaacctgtgttgttcaagggtcaattcagttgtatatgtgtatatatgtgtctatacacacacacatatatatgtattttatttgccatattttatttaatatggatgtaaaatatagtggratgagcatggattgaggaatgtaaaagtataaattattttggccataccactgaatttgaaatctggttccttcacaagtaagtagggccatgaacaaaagtatttaatctcttcgtgactcaggactcttctttaaaaaatataaaacccaaactataaacaatctggaagacaatctaggcaatccatcctggacataggcacggcaaatatttcatgctgaggacgccggaagcaattgaaacaaaagcaaaaattgacaaatgagacctaattaaatgtaagagcttctgcacagcaaaataaactattaacagagtaaatagacaa

SEQ ID NO: 600396 - DNA, 581 bp, Homo sapiens
aagatgttttaatttttcatatttctaggatatataaattgtgaggtttttcaaattgctgcaaatctacaaaaaattttccaatttttttttgaaaaaaattacgtagaaatggacctgtgcatctaaaacctgtgttgttcaagggtcaattcagttgtatatgtgtatatatgtgtctatacacacacacatatatatgtattttatttgccatattttatttaatatggatgtaaaatatagtgggatgagcatggattgaggaatgtaaaagtataaattattttggccataccactgaatttgaaatctggttccttcacaagtaagtagggccatgaacaaaagtatttaatctcttcgtgactcaggactcttctttaaaaaatataaaaccsaaactataaacaatctggaagacaatctaggcaatccatcctggacataggcacggcaaatatttcatgctgaggacgccggaagcaattgaaacaaaagcaaaaattgacaaatgagacctaattaaatgtaagagcttctgcacagcaaaataaactattaacagagtaaatagacaa

SEQ ID NO: 600397 - DNA, 531 bp, Homo sapiens
ccaacatcatactgaacggggaaaagttgaaagcattcccactaagaactggaacaatacaaggatgcccatccaccactcacattcaacaaagcactagaagtcttagctacaaaaatcaagcaagagaaataaaatgyatccaaattggaaaagagaaagtcaaattatgtttgtttataatataatcctatacttagaaaaccttaaagactccttcaaaagactcctagatttgttaaataaattcaataatgtttcataatacaaaattaatattaaaaatagtagcatttgtatataccaatagccatcaacccgagaaccaaaccaagaatcaatcccatttataattccattataatacaaaatataagatatcttggaacacatttagccaaggagatgaaagacctctacaatgtaaactgtaagacaccaatgaaagtaattgtagatgacaaaaacaaatggaaaaacttcccatgctcttgaatcaacagaatcaatattgttgaaattatcatattg

SEQ ID NO: 600398 - DNA, 531 bp, Homo sapiens
ccaacatcatactgaacggggaaaagttgaaagcattcccactaagaactggaacaatacaaggatgcccatccaccactcacattcaacaaagcactagaagtcttagctacaaaaatcaagcaagagaaataaaatgtatccaaattggaaaagagaaagtcaaattawgtttgtttataatataatcctatacttagaaaaccttaaagactccttcaaaagactcctagatttgttaaataaattcaataatgtttcataatacaaaattaatattaaaaatagtagcatttgtatataccaatagccatcaacccgagaaccaaaccaagaatcaatcccatttataattccattataatacaaaatataagatatcttggaacacatttagccaaggagatgaaagacctctacaatgtaaactgtaagacaccaatgaaagtaattgtagatgacaaaaacaaatggaaaaacttcccatgctcttgaatcaacagaatcaatattgttgaaattatcatattg

SEQ ID NO: 600399 - DNA, 600 bp, Homo sapiens
aacaacaacaacaacaacaaataacccccttaaaaatggagaaaagacatgaacagacacttttcaagagaagacatgtaaatggccaacaatcacatgaaaaaatgttcaacatcactaatcatcagaaaaatgccaattaaaaccacagtgagatactttttcacaccattcagaatggccattaataaaatgtcaataaaatatgttggtgaggatatggggaagagagaatgcttatacactgtttgtggggatgtaaattagtayaacctccatggaagacagtatggcaatttttcagagttaaaaatagaactaccatacaatacagtaatcccaccactgggtatacaaccaaaggaaaggaaatcagaatgtcaaaggtatatcttcactctcatgtcaattgcagcactattcacagcagcagagatctagaatcaacctaagtgtccatcaatagattaccagataaagaaaatacaatacacatataccgtaaaatactagccagccataaaaaagaataacattatgtcttttgcagcaatatggatggaatgagacaccattattcttaagtaaaataactcagaa

SEQ ID NO: 600400 - DNA, 600 bp, Homo sapiens
aacaacaacaacaacaacaaataacccccttaaaaatggagaaaagacatgaacagacacttttcaagagaagacatgtaaatggccaacaatcacatgaaaaaatgttcaacatcactaatcatcagaaaaatgccaattaaaaccacagtgagatactttttcacaccattcagaatggccattaataaaatgtcaataaaatatgttggtgaggatatggggaagagagaatgcttatacactgtttgtggggatgtaaattagtacaacctccatggaagacagtatggcaatttttcagagttaaaaatagaactaccatacaatacagtaatcccaccactgggtatacaaccaaaggaaaggaaatcagaatgtcaaaggtatatcttcactctcatgtcaattgcagcactattcacagyagcagagatctagaatcaacctaagtgtccatcaatagattaccagataaagaaaatacaatacacatataccgtaaaatactagccagccataaaaaagaataacattatgtcttttgcagcaatatggatggaatgagacaccattattcttaagtaaaataactcagaa

SEQ ID NO: 600401 - DNA, 590 bp, Homo sapiens
aataattcctatagttgcctcctacttgattgttctactttaagtttcactgttccagctctaagctcaatccactttctgtgacttctataagacaaacaacaacaacaacaaatggcaaatgatttcaaacatatgattattagaaataataccaggcagctataacacagatttttattttgtcatatataattcagatttttattttaaagaagtatgcagttgaagtcctctcccatactctctcaattgcaattttcctctcatcttttccatagcttgcttctgaagttagcatgcatcatttccatgtatgtttaaaaattgtactccatgtacaagttggcaaaatctatatattatcattttkcaggttttaaacttagagaggtggtcattttctccacatgttcatttgcattttcctttctctaatatatattttttcttgacatttgcatttttatctttctaaaatgctagtcttagtatgtaaatccatggataaaagtattcaatgtcttctttctcaaacataaagtttctcaagagtagcaaaaagtcccttgaatggccccttccttctt

SEQ ID NO: 600402 - DNA, 584 bp, Homo sapiens
gatctatttaataaaaaatgttgtgccagtggtgaagctctcatctctcagcttcaaacctgcacttctattctctgttgcatgatgttgcagctgagactcaagactacaattctcttttgccagtggcttcctgtttggctctgataataaaggatatggggacagcctgcttccgaatgttcctgagaaaatcacaccatccttgcctcttcactttggggcctgtatttcataacataaatagtggttcaattcaatttgcagtttttccaacatttgtggaactaatgtaattgtaccccctcagagaccactccccgtcatctcaggtcttatgtatatgggactttttgaagacatcagccccaacctagcccatttttagacagctgagcttcagtggtgcagtacccttactccaggcttctaaagttaaataatcccagsttctccactttgtttagtcagactatcccctatctagaccttgcttgatagagaaattggtaatagcagtagtcctagagaatagttcctcaaagatgagattcaagaattggtttaacattgagttaggcaaa

SEQ ID NO: 600403 - DNA, 459 bp, Homo sapiens
ttaatagaaagagatccagactgaaatctggagtcagccactccaggcctggctctactgtaaacaaggtagcttctctgtctatggggacatcacataccggcactcttcaaattcctcttctcaaaaacaggcatatgaattcagaaaagtctcaggttacaaaatcaacatacaaaaatcagtstcacttctatacaacaacattgaccaagctgagaataaaatcaaaactttattcctttcacaacagctgcaaaaaaagaaaatatctaaaaatatacttaaccaagggtaaagaaactttgaagagaagtaaaaaacactgtgaaataaatcagagacaacacaaatacatgaaaacatatcccatgtttatgggttggaagaatcagtatcatgaaaatgaccatattgcccaaagcaatctgtagattcaatgaaattcttattgaaata

SEQ ID NO: 600404 - DNA, 468 bp, Homo sapiens
tgcttccctttcttatttttgtctccactgccctggacatttccattaactctgacttataagacatcaactgctttcctccaggcttaaattttcctataacctaggaatatttgggcagtggttccattctggaaacctaatgggtgcataaaatgcactctgagttcctttaaccaatttctgagatataaagcaatctaggagtaggggtcgataggccgaaggacagggacttggccttagtgatggcctctgaagtgctcaggagaattactggctcatgctaggctcttaatgaatcatgaatatggtcaccagcagaactgagatagtatctaatacttgacaagaaaggaagggggatgttcagaggcaagcagagcaaatgttagcaggatgctggagcyccacatcacagctgcaccatttcatctctaggtaaatgactgtggaaccaacacttgg

SEQ ID NO: 600405 - DNA, 626 bp, Homo sapiens
gaggcaagcagagcaaatgttagcaggatgctggagccccacatcacagctgcaccatttcatctctaggtaaatgactgtggaaccaacacttggatgtaattaccaaacaatttccatgctaaaccactcactgtctttactttttctaaaacattggacttacctgtagctgcagggatccatatatgagacattctactttgtgttatatcttaacgtgaatttctcttcctgttgtggagtcttggattgtatagctatggtcatttaaaaaaatcaatccatcaatgcataagaatgctgacttttttttaaccaaaattgyttttatacattctcattttcagacaacaaagttgtagcacatataggttctttaacttgcccaacactacacagtcctctgtggcaggaccacaatcacaacttaggcatcatactccacagtgtatccttctactcaccttgccattggtgtcaatcagggtgaataagttatgctgcagtaacaattaggctcaaaatctcagtggattaaagcaaaaagtctttcttgctcatattatatgtgaattttagggcacgcaggggcctgctccacagttgcctcacccaaggcctct

SEQ ID NO: 600406 - DNA, 626 bp, Homo sapiens
gaggcaagcagagcaaatgttagcaggatgctggagccccacatcacagctgcaccatttcatctctaggtaaatgactgtggaaccaacacttggatgtaattaccaaacaatttccatgctaaaccactcactgtctttactttttctaaaacattggacttacctgtagctgcagggatccatatatgagacattctactttgtgttatatcttaacgtgaatttctcttcctgttgtggagtcttggattgtatagctatggtcatttaaaaaaatcaatccatcaatgcataagaatgctgacttttttttaaccaaaattgcttttatacattctcattttcagacaacaaagttgtagcacatataggttctttaacttgcccaacactacacagtcctctgtggcaggaccacaatcacaacttaggcatcatactccacagtgtatccttctactcaccytgccattggtgtcaatcagggtgaataagttatgctgcagtaacaattaggctcaaaatctcagtggattaaagcaaaaagtctttcttgctcatattatatgtgaattttagggcacgcaggggcctgctccacagttgcctcacccaaggcctct

SEQ ID NO: 600407 - DNA, 626 bp, Homo sapiens
gaggcaagcagagcaaatgttagcaggatgctggagccccacatcacagctgcaccatttcatctctaggtaaatgactgtggaaccaacacttggatgtaattaccaaacaatttccatgctaaaccactcactgtctttactttttctaaaacattggacttacctgtagctgcagggatccatatatgagacattctactttgtgttatatcttaacgtgaatttctcttcctgttgtggagtcttggattgtatagctatggtcatttaaaaaaatcaatccatcaatgcataagaatgctgacttttttttaaccaaaattgcttttatacattctcattttcagacaacaaagttgtagcacatataggttctttaacttgcccaacactacacagtcctctgtggcaggaccacaatcacaacttaggcatcatactccacagtgtatccttctactcaccttgccattggtgtcartcagggtgaataagttatgctgcagtaacaattaggctcaaaatctcagtggattaaagcaaaaagtctttcttgctcatattatatgtgaattttagggcacgcaggggcctgctccacagttgcctcacccaaggcctct

SEQ ID NO: 600408 - DNA, 526 bp, Homo sapiens
attatgcttctctatccccaatttatgtaagggaaaagagaggctcaagagctccaaaaacttccccagggcactgcagttgtaagtgggctgaagccctatgctgttgctaaatgcctggcctttcatttcacatcatttttccctggaaagtgccctgggrtcagggctggcattgtggggaaagtgaccccatctgaatatagagaaaaagttttagggagaattctaaatttattttgcttgatagtgagttaggctatcagacataatcccttttctaaaatcaacctcactaagcagcaaaataaactcgaaaactgaaaaatgattattacagaccttgacaagcaagcattgctaataaaaatgataatgatcttcagaacctaattgtttctgattctgttatggggacacacggagagcatcaccacagacagaagaccactaggctacttctcccctctggtagaggacatttcctgccaggggctggaggtaacaacatgaatcctgctctggc

SEQ ID NO: 600409 - DNA, 631 bp, Homo sapiens
caagcctggtttaatctttatataatratgggttttcctatggaaacaaacacaaaacaggaaagaaaaaagctagatactatttcaaaattatgaaattatactttatttctcatatagaaaagaaaaaagaagcaaagttttttcatctatagacacaaacttttaatgttcccagtgtgccttcttccttttccaatataaaaaagacacgagtgaagaattaatattcatatcaaatgaagccattaattgaggatataaagtttctgaaggctatcaggcaaatttgccaagcatataaagagtatactggtataaaaatggtttattacctttataccaggaaactatgctgaaagaatctttagcaacaaagcctctatttatacttcttccaaatagcctcttgtgataccaagaataaaatatatttccacatatagcaggaaacattttcctggaattttgccattgccttttggaatgatattaaatattttattttcattcagattctcttccggattttactccataaaaccatcttggcatgtagaagaaaaatatatgtcaaagaaactagtaaataagggaaggattaatcaggtcatgatgataggaaactata

SEQ ID NO: 600410 - DNA, 500 bp, Homo sapiens
tgttaatgtgttttttatggccccccatctggtctatattggtgaatctttcatgtaagcttgagaaaaatgtataagctgctgctgttggatgaagcagtccaataaatggattaagttcatctatgtcctcactgattttctacctgctggatttttttctgataaaagcrtgttaaaatatccaatgataatagtttatctcatttatatctcgttgcagtttatcagttttgcctcatgtatttctctctctgtatcttcttactcattaacttctttttctttcacactgaagaagtctcttcagcattccttgtaggatagttcaggtattgatgaaatccctcaggttttgtttgtctgagaaggtctttatttctccttaatgcttaaaggatattttcactggatatactactctagtttccaattttttttccttcagcactttaaatatgtcatgccactgtctcctgaaggtgcaaaactcactggta

SEQ ID NO: 600411 - DNA, 500 bp, Homo sapiens
tgttaatgtgttttttatggccccccatctggtctatattggtgaatctttcatgtaagcttgagaaaaatgtataagctgctgctgttggatgaagcagtccaataaatggattaagttcatctatgtcctcactgattttctacctgctggatttttttctgataaaagcgtgttaaaatatccaatgataatagtttatctcatttatatctcgttgcagtttatcagttttgcctcatgtatttytctctctgtatcttcttactcattaacttctttttctttcacactgaagaagtctcttcagcattccttgtaggatagttcaggtattgatgaaatccctcaggttttgtttgtctgagaaggtctttatttctccttaatgcttaaaggatattttcactggatatactactctagtttccaattttttttccttcagcactttaaatatgtcatgccactgtctcctgaaggtgcaaaactcactggta

SEQ ID NO: 600412 - DNA, 500 bp, Homo sapiens
tgttaatgtgttttttatggccccccatctggtctatattggtgaatctttcatgtaagcttgagaaaaatgtataagctgctgctgttggatgaagcagtccaataaatggattaagttcatctatgtcctcactgattttctacctgctggatttttttctgataaaagcgtgttaaaatatccaatgataatagtttatctcatttatatctcgttgcagtttatcagttttgcctcatgtatttctctctctgtatcttcttactcattaacttctttttctttcacactgaagaagtctcttcagcattccttgtaggatagttcaggtattgatgaaatccctcaggttttgtttgtctgagaaggtctttatttctccttaatgcttaaaggatattttcactggatatactactctagtttccaattttttttccttcagcactttaaatatgtcatgccactstctcctgaaggtgcaaaactcactggta

SEQ ID NO: 600413 - DNA, 601 bp, Homo sapiens
ttcattgctggtgggattgcaaaaatagtacaaccacattggaaaacagtttggcagtttcttacaaaagtaaacatacttttaccataaaatccattaatcgcactccttagtatttacacaaatgaactgaaaactttgttaacgcaaagagctgcacatggatatttatagtagctttaatcataataaccaaaacttggaagcaaccaaggggtcctcagtaggcaagtgaataaataagctggcacaataaaagtacttcagtacttagtgctgaaaagaaatgaggtacgaagctatgaaaatatgtgggggagacaaatgcatattactcagtgaaagaagccaattaaaaaaygctacatactttatgtttccaattatatgctaaaaaggcaaaagcatgaatacagtagaaaatatcagtagttgctaggagttaggtgggacagagggctgaacaggtagcaaacagaggatttttaggtaagtgaaactattccgtatgatactaaaattttggacacgtcattatacatttgctaaaacgcgatagaatgtacaataccaagagtgaatcctcgtgtaaagtgtgtca

SEQ ID NO: 600414 - DNA, 539 bp, Homo sapiens
tgacaacaccaaatgctgacaaggatgtagaaccacagaaactcccattcattgctggtgggattgcaaaaatagtacaaccacattggaaaacagtttggcagtttcttacaaaagtaaacatacttttaccataaaatccattaatcgcactccttagtatttacacaaatgaactgaaaactttgttaacgcaaagagctgcacatggatatttatagtagctttaatcataataaccaaaacttggaagcaaccaaggggtcctcagtaggcaagtgaataaataagctggcacaataaaagtacttcagtacttagtgctgaaaagaaatgaggtacgaagctatgaaaatatgtgggggagacaaatgcatattactcagtgaaagaagccaattaaaaaatgctacatactttatgtttccaattatatgctaaaaaggcaaaagcatgaatacagtagaaaatatcagtagttgctaggagttaggtgggacagagggctgaacagstagcaaacagaggatttttaggta

SEQ ID NO: 600415 - DNA, 524 bp, Homo sapiens
tatacattttcctcaaagggctgctttagctgtaccccatacattttcatattgtttgtgttttcatttaaaagtattttcaagtttgctagtggtttctttggctcatttttttttttagtattaattttccacatactttaaattcccaactttggctgggcatggttgctccatgcccacttggggactccaaggcaggcagattgcttgaacccaggagtttgagaccagcctgggcaacatagtgaaaccctgtctctatcaaatattagctaggtggggtggcacatgcctgtagtcccagctacttgggaggctgaggctggcaggttgcttsagcccaggaggctgaagcagtagtgagctgtgattgtgctaccggactccagcctggggggacagagcaagaccttgcctcccccaacaaagaaagaaaagaataaattagtttccaactttgtgtctaattttattctattctaagagactatacttggtatgattttgatcctcttataact

SEQ ID NO: 600416 - DNA, 578 bp, Homo sapiens
tctaggaaatccaagagacactaaataagatgaatccaaagagaccatatcaagaaatatcagaatcagatggccaaaagttaaagacagaatcttgaaagcagcaagggaaacccaagttgttagagacatgtgagcccccataaaatgatcagtggatttttttctgcagaaacttttcaggacaggagggaattaaacgatattttcaagaacttaaaaaaaaaaatgtcaaccaagaatagaatacccaggaagcctatctttcaaaaatgaagaggtaataaagacattgtcatacaaaagctgaaaaagttgatcaccagtagacctaccttataaaaaatgctaaagggagttcctcagcttagggaagatgacaataattggtaacatgaaaacatatgactacataaaactcactggtagaagtacattgtcaaatccaaaacactaatrcggtaatggcaataagtcagttatatctgtagtacaaatgttaaaaaacaaaactattcaaagcacctaaagctggaataatttcttaaggactacaaatattaaaaaatataaatttt

SEQ ID NO: 600417 - DNA, 496 bp, Homo sapiens
tttcaagatattaatgcccacaaagaatgtcagtaaaatgacaactttgaaataatgtaaagaaaaaaatagatttttatttgttaaawccataatgtctaagttcttgttgaagggcatgtaattttgtagtgtatgaatgcaacaaaactatttcagacctgactaatttctacaaaagtagttaatgaaaatgcttgctttaatattagtagttaataaccttgatgttgtgtttttggtttgtgtttttttgagacagagtctccctctgtcacccaagctggagtgcagtggtgcaatcatagctcactgtaacctagaactccttggctcaaggtgatcctctgcctcagcctccctcttgagtagctgggagcaccaccacacccagctaatggaagtttttcattttaaatttcatttctgccccctaaataatggcatcattactagtacacatgtaattcacagcgtgatcacaagtactgtcgtc

SEQ ID NO: 600418 - DNA, 575 bp, Homo sapiens
ttgtgaaaaccaaaatgctactagtgccaatgtctggattgataatttaaaagtcaaaatctattgtattttacttaagatacataaattcgtatgtgtttgttttcaaagaatcttgggcttttccatgtaactaggtatttgttcagttttattttattaagattggagacgaaaactatttcatccttgagaatttttamtgacacattaggagtttgctaaaggaaaatatttctaaagaaaataacaaaagaataatacaaatttcaagagtggaaactatgcgatcttcaggaacatgaagaaaagcccacggattggtccagtggattcttattgaatcttcaaatgtgaaattcttttctgtgcaatttgaggaaaaataataaattattatacaaagaagctttttaaaattcatttcctgtgaaaattggtgttatgctcacagatggtattctgaattttattgttcagagacctggccttgattctaacacaaggtttttgtacatagagaattttagaaggtaatttgtcaattaggtttgaatgaaaattcatgaaagata

SEQ ID NO: 600419 - DNA, 555 bp, Homo sapiens
tattattagaaggagaaatggtagcagtgagaaattcttcatatttgtaattttttccatttttaatttcaaccacacatattaaatgtaactttaatcagagttaaaaccatgtcacatgatgatcttaatttacaagtcaacaaaactacaaatatgaagaaatatttgcaakaacagattaaaagcaattaatttctttgaaagtcaatgaaaaaaatttttttttcttttttggagatggaatctcactctgttgcccaggctggagtgcagtggtgcgatctcagctcactgcaacctccacctcccgggttcaagcgattctcctgcctcagcctcctgagtagctgggattacaggcacacaccacaatgcctgactaattttttgtatttgtagtagagacggggtttcaccgtgttagccaggatggtctccatctcctgacctcgtgatccacccacctcagcctcctaaagtgctgggattacgggcatgagctaccacacccagccccaatgaacaatagaaggtgatttttattacctcaaa

SEQ ID NO: 600420 - DNA, 664 bp, Homo sapiens
tgctggttcagttgtttacagttccttatagattctggatattaggcctttgcttgagagtgcaaaaactgtttactctgatagtttcaattgctgtgcagaagctctattgtttttttggagatagggtctcactgtgctacccaggctggagtgcagtggcaggatttcagctcactgcagcctcaacctcctgggctcaagcgatcctcccacttcaggccctcaagtagctgggactacagtcacgtgccaccatgcccagataatttttttttttgtatttgtttgtagaaatggggttttgccatgttgggcaggctggtcttgagctcctgcgctcaggtgatccacctgcgtcggcctcccagagtgctggcattacaagtgtgagtgaccrcacctggctgctgtgcagaagctgtttagtttaattttctctcagttgtcaatttttgtttttgttggaattgcttttgaggacttagtcagaaattctttcccaaggctgatgcccagaatggtgtttactaggttttcttctacgattcttatagttggaggtcttccatttaaatctttaatctatcttgagttaatttttgtgtatggtgagaggtaggggtccagttttattcctctggatatggctagccagctatcc

SEQ ID NO: 600421 - DNA, 526 bp, Homo sapiens
ctaattgctatagaataattttatataattaaacattgacaaattttaactagaatcttagttttgttcttagagcagatatatcaatttagatcttccatgaatccttagatccttagatcttatatactgtatattaacaatgtctagcagaccaacttgtagagaaaaaagggcacattaaagtattcattcatataygtagtatgaagcaacatttttctctctgtcctttttatataaatataattagttccatgttttgcatactttggggtaacagatgtagcttccttgttacttaataccaagttatagcagccacaatatgagaatatcttctctgcatcaggcatgtgaaagtacataccctgaaaagtgaactcctctgggacccattggtaataacaattctaagatatcacttgaagagtttagaaaaaataaaccccaactgaatcatgaggcagagcatgcagagttggaagttcctggagtggtttccattttgagcttccaagtaggc

SEQ ID NO: 600422 - DNA, 639 bp, Homo sapiens
ctgatgaacctacagtgacacatcattataacccacagtccctagtttacgttagagttcacacttggtgttgtacattcattctataggattgataaatttacagtgatgtgtatccaccattacagtatcatgcagagtaatttcactgccctaaaatcctctatcctctgtctattcatgccttcctctcctctaatccctgcccaatccctggcatccaattatctttttactgcctccatgcttttgccttttccagaacatcatatagttggaaccatacagtattcttttcagattggcttctttcacttagtaatatgcatttaagttttctccatatcttttcatggcttgacagcttctttctctttaacactgattttttttttttttctggatgtactgtgatgtatttattcactcacctactgaaagacatcttgtttgcttccaagttttggcaattatgattaagctgtaataaacatctctgtgtagggttttttttwattttattttaagttctggggtacatgtgcaggatgtgcaggtttgttacaaaggtaaacgtatgccatggtggtttgctgtacctatcaacccttgacctaggtattaaacccagcatgcatt

SEQ ID NO: 600423 - DNA, 561 bp, Homo sapiens
ttagtggtagcaatggtcacaaaggaaagtacttaatttctatttaacttatttctattcacgtacagtaaagacaacacagtgtcctcatttattcctcttaactgtctgctgcaagttacttctacataaaatattgtccttttgtcaccactaagtacttattgtccaaaacagtacagtttattgctctcctamgtagatgatacagcatcttcccaaactctgtatattctttttttcttcttctttttcgtgggggaggagggagggtctatcccagtgagtgtcccatgctggagagcaatgaaacattctttttgcaaaaatcaaaagcttgtttatatccttacatcctttggacatcactgaagagactatattattatatgaaaagactgttgcagtcttctctctcccttctccatgttaccccttgtgcttctaccctaccatagtccctttcaatttgcttaagataaagatgtggtgccctcatgggtaaggcactataaggcaatgatgtctgaaattcagactattggacagctcacttcctgt

SEQ ID NO: 600424 - DNA, 565 bp, Homo sapiens
ttttcaaactcattttacaaagctaggattaccctgataccaaagccagacaaggacactacaagaaaacaaagttacaggctaatatccctaatgaacatagacacaaaaattatcaaaatattagcaaaccaattggraatgacagtaagaggagcaaagaaaaaaatattagcaaaccaaattaaaaacacattttttaaaaagcattcacaatgaccaagtgagatttatccctgggatgcaaggatagttcaacataggcaaaacaataaacgtaatatactacattaacaaaatgaaggataaaagtcatatgatcttgatacatgcagaaaaaatatttgacaaaatacacttccatgataaaaactcaatggtttaggtatgtagggaatatatctcaacacaataaaggctatatattacaagccaatggctaactaacatcattctcaatggcaaagagtcaaaagtgtttcctctaagattagggatgagacaagaatgtccactctcattgcttcctttcaacatagattaacctggctaagaaaaaaagagg

SEQ ID NO: 600425 - DNA, 606 bp, Homo sapiens
atgtgtccagtttcttccttctggaaggttcatggtcttgctcacttcaagaatgaaactgtagacctttacggtgagtgttacagcactgaaagatgwtatttccagagtttgttccttcagatgtgtccagagtttcttccttctgtcaggttcatggtcttgctcacttcaagaaagaagctgcagaacttagtggtgagttttacagcacttaaaggtgttatatccagagtttgttccttcagatgtgtccagagtttcttccttctggcaggttcatggtcttgctcacttcaagagtgaagctgcagaccttagtggtgagtgttacaacacttaaagatgttatttacagagtttgttccttcagatgtgtccagagtttcttccttctggcaggttcatggtcttgctcacttcaagaatgaagatgcagacctttacggtgagtgttacagcacataaaggtgttatgtccagagtttgttccttcagatgtgtccagagtttcttccttctggcaggttcatggtcttgctcacttcaagaatgaagctgcagtcctttacggtgagtgttacatcatttaaaggtgttatgtcc

SEQ ID NO: 600426 - DNA, 606 bp, Homo sapiens
atgtgtccagtttcttccttctggaaggttcatggtcttgctcacttcaagaatgaaactgtagacctttacggtgagtgttacagcactgaaagatgatatttccagagtttgttccttcagatgtgtccagwgtttcttccttctgtcaggttcatggtcttgctcacttcaagaaagaagctgcagaacttagtggtgagttttacagcacttaaaggtgttatatccagagtttgttccttcagatgtgtccagagtttcttccttctggcaggttcatggtcttgctcacttcaagagtgaagctgcagaccttagtggtgagtgttacaacacttaaagatgttatttacagagtttgttccttcagatgtgtccagagtttcttccttctggcaggttcatggtcttgctcacttcaagaatgaagatgcagacctttacggtgagtgttacagcacataaaggtgttatgtccagagtttgttccttcagatgtgtccagagtttcttccttctggcaggttcatggtcttgctcacttcaagaatgaagctgcagtcctttacggtgagtgttacatcatttaaaggtgttatgtcc

SEQ ID NO: 600427 - DNA, 606 bp, Homo sapiens
atgtgtccagtttcttccttctggaaggttcatggtcttgctcacttcaagaatgaaactgtagacctttacggtgagtgttacagcactgaaagatgatatttccagagtttgttccttcagatgtgtccagagtttcttccttctgkcaggttcatggtcttgctcacttcaagaaagaagctgcagaacttagtggtgagttttacagcacttaaaggtgttatatccagagtttgttccttcagatgtgtccagagtttcttccttctggcaggttcatggtcttgctcacttcaagagtgaagctgcagaccttagtggtgagtgttacaacacttaaagatgttatttacagagtttgttccttcagatgtgtccagagtttcttccttctggcaggttcatggtcttgctcacttcaagaatgaagatgcagacctttacggtgagtgttacagcacataaaggtgttatgtccagagtttgttccttcagatgtgtccagagtttcttccttctggcaggttcatggtcttgctcacttcaagaatgaagctgcagtcctttacggtgagtgttacatcatttaaaggtgttatgtcc

SEQ ID NO: 600428 - DNA, 606 bp, Homo sapiens
atgtgtccagtttcttccttctggaaggttcatggtcttgctcacttcaagaatgaaactgtagacctttacggtgagtgttacagcactgaaagatgatatttccagagtttgttccttcagatgtgtccagagtttcttccttctgtcaggttcatggtcttgctcacttcaagaaagaagctgcagaacttagtggtgagttttacagcacttaaaggtgttatatccagagtttgttccttcagatgtgtccagagtttcttccttctggcaggttcatggtcttgctcacttcaagartgaagctgcagaccttagtggtgagtgttacaacacttaaagatgttatttacagagtttgttccttcagatgtgtccagagtttcttccttctggcaggttcatggtcttgctcacttcaagaatgaagatgcagacctttacggtgagtgttacagcacataaaggtgttatgtccagagtttgttccttcagatgtgtccagagtttcttccttctggcaggttcatggtcttgctcacttcaagaatgaagctgcagtcctttacggtgagtgttacatcatttaaaggtgttatgtcc

SEQ ID NO: 600429 - DNA, 540 bp, Homo sapiens
tgtgtgtgtgcrtgtctgtgtgtgtctgtgtgtgtagtaggtctctgtaggtctctgtaaaaaaaaaaaatctactgctgactgtagtcaatacgtttgaaagtcactgccttggtaacattattttacccacttactgtcatatgacatttaaatgccaatggttttgaaaagtgtatctataggctagatttttatcttgaactcagacccatattttcaactatctaccagatattagcacttggatgttccacacgtcccacaaattgagtaatagaatgattaaaataatgggctttgtagccagatttgagtttgaattgtgggatttctcagcctgttttctcattcttaaagtcggaataattaaaacctcaaaatagtgctgtaagaatttatgtccttagaacagtgcctggctcacacaaaaataaataaatatcgcttgagcaccaaccacgttccaggtattgttctaggcactagagattgatgagaaaattcagcccccccaccatatgagacaatgctgctttt

SEQ ID NO: 600430 - DNA, 576 bp, Homo sapiens
tatctgtgctttctgtttgctttttaacaagtccaatttatttaataaagtgttatattgtgttggtgtttatgcacgtattctgcaattagtactttggagctaataattacatttctccaaataattgcaataatgccttatgtttatattaacaacttatatgtgtcagacattgtgctaaatacttttacaagcattatttcattcgagcttaatgatcatcttaagaaattcattaaaactattttatagttaaggaaacaaagcctaggttaagatcacgcagaaaatggtgaaggcagaacctgaactcaggtggcctgtctacaaagctaaagtcttattcaataggcttcccttgtaaaacattgaactaggcattatacaaaataataaaatagttaatgcttttaatgcctagcctatgccaatatccattttcatcatattattttcsattttaaatattcagaaattttcacattttctacatttttatctaggtggcaggaatgggattttcagcaatgagggaaatgatctatatctgtgctgaccaatatagcagtcact

SEQ ID NO: 600431 - DNA, 589 bp, Homo sapiens
agggactataaatattcattgacattggttcaattgccaaatcagtattacagtaagtcagtatcaaatcatgaagaaatacacaatgaactcagaagcatggtggaaaaaaaaaaaaagcccctatgtgtatggcgttatcaatgtaaggttattttcgcattttggacatatttttcaaactcagaaattcattccatattgattctgttttttcataacatgccaaaatgaaattctaaaaactcaatgttacctcttcagagaagcctttattctctctgtccctccagactataaatggtttttttctgtgttccaccaacacttggcttatgacttttttttaacattgccacattactttctagttgtttatttgtatcaatctccaatttatacactatgagttccttgagggcaggggccccttctggttcctcttttctagcccatagcatggtgcccagtacataataatatgttcaacaaatgtttgatgattgaatatatgcagaaaatttaaattatgagacagtrtaaataaataaaaaggaaaaggagtttacaacatataaacacacagcca

SEQ ID NO: 600432 - DNA, 652 bp, Homo sapiens
ttcaaacctcaatttccccagctataagactaagggattttgctagtttatttctaacgtcccttctacacctgaaattccatatgacatgctcctggatattctcctgaaaatgtgcacatatacacactacataaatgcccatacccacacccacacagagctagtaaaagggaaaaggccttattagtcctatatgactaaacacataattctgattattggatattgattagggaatcttttcatgtgatactatcttgtaagtggctgtgataaattttaatattctcaataatagagttctaataacattttaacagtaaaatcacaaggcttaaaatgcctgtaggcaggttagcatgcttctactcacaggattaagggccagtgtcctgctataatgtgtagtataacttaatataatccgtctcaaaaaagtaatcatataatcatacctttttaaacaagcaaccttgtattacaatgttctgtgatttttaaatttatcattaaattaaaaaatcatcctattcaagaaggtaaagtatacaagccaccatgttctctcttagttttcttcctcttctttctamcccttcatttctctcttcagaggcagaaaatcttctgcagcatcactttatatcct

SEQ ID NO: 600433 - DNA, 547 bp, Homo sapiens
ttctatagtctgtctctgtaaagattacatttttaacatcaatttctttttgttagaagtagacacccattagaatccagagtttctgagtgagtggaatttgtgggatatgttgttataaagaggatatttttgttggaggctctagaagtcaatgcaatagctccactcaagtcattggccaagtgctgagttgtacatgaacagggagagactccmtaagtcttagaagaaagaaaaagaaaaagagattcttttcctttctttgtattgaaaaagaatacaagagattcttttttctttcttttctttacaagaaagaaaaaggaaaagagattctggatgttgtgcagagctggaaaatgttaagcttcagccaaagctgaggaaaaaggccttggtgaacacctcaagcatttagttgaaaccccagaaaggccacactttaaacaaggagcacacactaaaataacagatcttaggattaatgactcaaatgaaatagagcgccaccctaaaaatcataaaaccaagcctcatatgatca

SEQ ID NO: 600434 - DNA, 566 bp, Homo sapiens
gtggaatgtctttttttttttttcctgagactgagtttttactcctgtttcccaggctggagtgcaatggtgcaatctcggctcactgcaacctctgcctgctgggttcaagcgattctcccrcctcatcctgctgagtagctgggattacaggagcccaccactatgcctggctaatttttgtatttttttttagtagagacagtgtttcaccatgttggccaggctggtctcaaactcctaacctcaggtgatccacctgccttggcctcccaaagtgctgggattacaggcatgagccaccgtgcctggccccagaagatagtggaatgttaccattaaaatgttcacagaatgtaataccagtcaacccagaattttatatctagtaaaaatttatcttcaaatctgaagatgaaataaagacaaataattagaaaaaaatagaaaaatgaaataaaatgattacatttacaagagtatcaaaagatatcaaatacataggaataaacttaatgcaagattactacataaagatctacaaattacttcagtagtagaaaata

SEQ ID NO: 600435 - DNA, 566 bp, Homo sapiens
gtggaatgtctttttttttttttcctgagactgagtttttactcctgtttcccaggctggagtgcaatggtgcaatctcggctcactgcaacctctgcctgctgggttcaagcgattctcccacctcatcctsctgagtagctgggattacaggagcccaccactatgcctggctaatttttgtatttttttttagtagagacagtgtttcaccatgttggccaggctggtctcaaactcctaacctcaggtgatccacctgccttggcctcccaaagtgctgggattacaggcatgagccaccgtgcctggccccagaagatagtggaatgttaccattaaaatgttcacagaatgtaataccagtcaacccagaattttatatctagtaaaaatttatcttcaaatctgaagatgaaataaagacaaataattagaaaaaaatagaaaaatgaaataaaatgattacatttacaagagtatcaaaagatatcaaatacataggaataaacttaatgcaagattactacataaagatctacaaattacttcagtagtagaaaata

SEQ ID NO: 600436 - DNA, 566 bp, Homo sapiens
gtggaatgtctttttttttttttcctgagactgagtttttactcctgtttcccaggctggagtgcaatggtgcaatctcggctcactgcaacctctgcctgctgggttcaagcgattctcccacctcatcctgctgagtagctgggattacaggagcccaccactatgcctggctaatttttgtatttttttttagtagagacagtgtttcaccatgttggccaggctggtctcaaactcctaacctcaggtgatccacctgccttggcctcccaaagtgctgggattacaggcaygagccaccgtgcctggccccagaagatagtggaatgttaccattaaaatgttcacagaatgtaataccagtcaacccagaattttatatctagtaaaaatttatcttcaaatctgaagatgaaataaagacaaataattagaaaaaaatagaaaaatgaaataaaatgattacatttacaagagtatcaaaagatatcaaatacataggaataaacttaatgcaagattactacataaagatctacaaattacttcagtagtagaaaata

SEQ ID NO: 600437 - DNA, 566 bp, Homo sapiens
gtggaatgtctttttttttttttcctgagactgagtttttactcctgtttcccaggctggagtgcaatggtgcaatctcggctcactgcaacctctgcctgctgggttcaagcgattctcccacctcatcctgctgagtagctgggattacaggagcccaccactatgcctggctaatttttgtatttttttttagtagagacagtgtttcaccatgttggccaggctggtctcaaactcctaacctcaggtgatccacctgccttggcctcccaaagtgctgggattacaggcatgagccaccgtgcctggccccagaagatagtggaatgttaccattaaaatgttcacagaatgtaataccagtcaacccagaattttatatctagtaaaaatttatcttcaaatctgaagatgaaataaagacaaataattagaaaaaaatagaaaaatgaaataaaatgattacatttacaagagtatcaaaagatatcaaatacataggaataaayttaatgcaagattactacataaagatctacaaattacttcagtagtagaaaata

SEQ ID NO: 600438 - DNA, 590 bp, Homo sapiens
gtgccaccacacctggatatttttattttkgtagagacaagctctcactatgttgcacaggctggtcttgaactcctgacctcaagggatcctcccaccttggcctcccaaagtgctggcattacaggcatgagccactgtgcccagacatcgagaattattttaacactacagtgattgagacagtgtagtactggtgcaaagatagacaaatacaccaatgaacatgtaatgtgatacagaagagattcacacaattatggaaacttgatatgcgataaggtctactacacaagagtgggtaaagatggtcttttcaataagtagttctgcgtcaattggatctccccgtgtcaataaatgaatctggagagacccgtatccaaaattcaatttcaaattggattgaagacctaaatgtgaaatgtgaaacaataagatttgtagaagttaacaaatgataatatcttcatgagctctaggtgagcaatgatttcctaaacaggacaaaacaaattaattataaagacaaaagactgacatgatgggctttttaagaatgtagaatgaaaaagcaaagcatacattgg

SEQ ID NO: 600439 - DNA, 590 bp, Homo sapiens
gtgccaccacacctggatatttttatttttgtagagacaagctctcactatgttgcacaggctggtcttgaactcctgacctcaagggatcctcccaccttggcctcccaaagtgctggcattacaggcatgagccactgtgcccagacrtcgagaattattttaacactacagtgattgagacagtgtagtactggtgcaaagatagacaaatacaccaatgaacatgtaatgtgatacagaagagattcacacaattatggaaacttgatatgcgataaggtctactacacaagagtgggtaaagatggtcttttcaataagtagttctgcgtcaattggatctccccgtgtcaataaatgaatctggagagacccgtatccaaaattcaatttcaaattggattgaagacctaaatgtgaaatgtgaaacaataagatttgtagaagttaacaaatgataatatcttcatgagctctaggtgagcaatgatttcctaaacaggacaaaacaaattaattataaagacaaaagactgacatgatgggctttttaagaatgtagaatgaaaaagcaaagcatacattgg

SEQ ID NO: 600440 - DNA, 590 bp, Homo sapiens
gtgccaccacacctggatatttttatttttgtagagacaagctctcactatgttgcacaggctggtcttgaactcctgacctcaagggatcctcccaccttggcctcccaaagtgctggcattacaggcatgagccactgtgcccagacatcgagaattattttaacactacagtgattgagacagtgtagtactggtgcaaagatagacaaatacaccaatgaacatgtaatgtgatacagaagagattcacacaattatggaaacttgatatgcgataaggtctactacacaasagtgggtaaagatggtcttttcaataagtagttctgcgtcaattggatctccccgtgtcaataaatgaatctggagagacccgtatccaaaattcaatttcaaattggattgaagacctaaatgtgaaatgtgaaacaataagatttgtagaagttaacaaatgataatatcttcatgagctctaggtgagcaatgatttcctaaacaggacaaaacaaattaattataaagacaaaagactgacatgatgggctttttaagaatgtagaatgaaaaagcaaagcatacattgg

SEQ ID NO: 600441 - DNA, 590 bp, Homo sapiens
gtgccaccacacctggatatttttatttttgtagagacaagctctcactatgttgcacaggctggtcttgaactcctgacctcaagggatcctcccaccttggcctcccaaagtgctggcattacaggcatgagccactgtgcccagacatcgagaattattttaacactacagtgattgagacagtgtagtactggtgcaaagatagacaaatacaccaatgaacatgtaatgtgatacagaagagattcacacaattatggaaacttgatatgcgataaggtctactacacaagagtgggtaaagatggtcttttcaataagtagttctgcrtcaattggatctccccgtgtcaataaatgaatctggagagacccgtatccaaaattcaatttcaaattggattgaagacctaaatgtgaaatgtgaaacaataagatttgtagaagttaacaaatgataatatcttcatgagctctaggtgagcaatgatttcctaaacaggacaaaacaaattaattataaagacaaaagactgacatgatgggctttttaagaatgtagaatgaaaaagcaaagcatacattgg

SEQ ID NO: 600442 - DNA, 602 bp, Homo sapiens
aatttagttttagaagaatataggagagtttaggatctgttaatgactgtctttcaactggcagggtatatgtgggcccagaagggagagcagatgttgggatcttagattataggtagagatgcaatagacttgactagattcagtgtaataatctagttatattccactgattaattttgttggtctgtatggcactagcttggctgcatttttaaaaacagatcctcaactgtgctttgtgttttagagagtttgctgcaaggaacccagcagatttctagttatgaacctgacaccaaaagcctaattgtcaattaagttccagctgcatccaacaactaatgatggaatactgtgctctttaaataaagattatttgacatctatgattcttatatgataacatattttatatatatagatatatatatgtataatcttttagtgtattatatattaaatgtcwgatatatcctccagtgagtctaaaacattataaatcatgaccttccttttctgctacttgtaaggtacatggatgtgctttggtcaagaattaggccaaggcagacatccaggcctgcatgactgtgagttta

SEQ ID NO: 600443 - DNA, 537 bp, Homo sapiens
taaaaattcatcttgaaatttcttcatttcttaaaatcaacaattatacatatatatgtttatttgtttatggagtatgtgatgttctracatattcatatgttgtgaaatgattaaagtgaattaacttttctatatctcaatgaatattagtaattagaattctgctacacagttaaactttatttgagtgttttgccaaactaataatcacaactatcatgcaatatcctgcttagaggcatactgcttgagaaataatattccaaagtaaaaaaaaaaaaacaaaaaaactcaccatttattccaaagcttgtgctaatggtaattaatgaacaaaagaggattgtttttcagattacacttaggtttttcagctttattaaggtataattgacatacaatgaactatatattcaaatgtacaacttaatgagttttggcatttggatacgcctgtgaaaccattgctacattcaagataacgaatataactgtaacccccaaaagtttctttgtgctgttttgtaatccctc

SEQ ID NO: 600444 - DNA, 497 bp, Homo sapiens
aatcaagagggagactttttaagtaaaacctaagatgcatatacattactaataggatttttccgttttctcaaaatgtgagaatggrtgacttataacctctcctactgttaaaataaatttggaagttgctctctgtgctattcacaacaaccatggtcacccaaaaggaagatgacaaagagcaaatgaataaaaacaaaatttccctaatgtggaaagatacagaccatgatcagacagggaataatatttgttttgtttccagccatttggaatgatctaacatttcttacctctggctctaccactcgggagatcatccagaactctttgaaatgaaacccactgtcatattttccactgtggcagagtctccatataagcattttgtttcgcatttaaatatatattgcttttaaattttaaatggtgatatgagtgagaacccttggcagcaaagaaattagattgggaagtcaagtgaaaaaacaaga

SEQ ID NO: 600445 - DNA, 635 bp, Homo sapiens
atactttgtataaaggaatacaaattccatgtattcttttggtttatgtgtgtgcacgcacgtgcatgcatgcattgtcattgaaaaatgacatccagactaaaaatgatcaaagaaaagtaagcaaagttataaacagacttaagaatataacagatggggaaaatgtgagggaagtgaattcattttgccaaaaaatgatattgagtgggtcaggaaatgaaaacattacctaaatacttatatactgagcacaaacaggggcaaatcaggccctcaaagactcatagctcccacygaagtcaaatgtctgcactgagagccctgtacatgcatttgaagacataactcagtcttaaacagctaataggtgagaaagaagtatttattttggatagaaatacccaaacaagtgagctttaaaggaggaaaactcatttttgaagtaaaagagaacctttttcaccatgaggaaaaacagatgctgaaacagcttgtctgatgaggtaatcacagtaaacagtagacatgcttaatttaagattaattaggtcagtagaaattctatgttgatttagtcagggactaagtgcaaacacctaaggatcttttccatcaaatcacctccagtgtga

SEQ ID NO: 600446 - DNA, 635 bp, Homo sapiens
atactttgtataaaggaatacaaattccatgtattcttttggtttatgtgtgtgcacgcacgtgcatgcatgcattgtcattgaaaaatgacatccagactaaaaatgatcaaagaaaagtaagcaaagttataaacagacttaagaatataacagatggggaaaatgtgagggaagtgaattcattttgccaaaaaatgatattgagtgggtcaggaaatgaaaacattacctaaatacttatatactgagcacaaacaggggcaaatcaggccctcaaagactcatagctcccaccgaagtcaaatgtctgcactgagagccctgtacatgcatytgaagacataactcagtcttaaacagctaataggtgagaaagaagtatttattttggatagaaatacccaaacaagtgagctttaaaggaggaaaactcatttttgaagtaaaagagaacctttttcaccatgaggaaaaacagatgctgaaacagcttgtctgatgaggtaatcacagtaaacagtagacatgcttaatttaagattaattaggtcagtagaaattctatgttgatttagtcagggactaagtgcaaacacctaaggatcttttccatcaaatcacctccagtgtga

SEQ ID NO: 600447 - DNA, 594 bp, Homo sapiens
tcactgtggtacaaatgtgaatcctcagatctggaaatactgagtactagatctaactctgctactattcaggtgtgtagtatttttttgagccacttaatcttgcttttttatctgtaacacaaagaaatctattaaggctatattatattttgtctgttaggttttatcttattactcattagaagcagttactggtgtgctgcattgagaaggactctgaagatgcaaccaagactgcargaatgattgtagtaatcgattagcaatgtctgtcatgggcaagggtattggatgaaggaaataatggcaggtataattcattcagtcttttgaataaatgaactagaatttatttgtattctaaaattttggcattttttaacttggtatatttcatatgtacagtataggggtctatttggaaatactcatcatttgaataactggaattaaatatttcctgccaaaagcccatgctccagaaagggaaaaaggacatgaagcagtacatgaaaatattttattgggaaaactattccacacgcatctcttttatgatgacttcattttctccttttgaaaaatcaggag

SEQ ID NO: 600448 - DNA, 594 bp, Homo sapiens
tcactgtggtacaaatgtgaatcctcagatctggaaatactgagtactagatctaactctgctactattcaggtgtgtagtatttttttgagccacttaatcttgcttttttatctgtaacacaaagaaatctattaaggctatattatattttgtctgttaggttttatcttattactcattagaagcagttactggtgtgctgcattgagaaggactctgaagatgcaaccaagactgcaggaatgattgtagtaatcgattagcaatgtctgtcatgggcaagggtattggatgaaggaaataatggcaggtataattcattcagtcttttgaataaatgaactagaatttatttgtattctaaaattttggcattttttaacttggtatatttcatatgtacagtataggggtctatttggaaatactcatcatttgaataactggaattaaatatttcctgccaaaagcccatgctccagaaagggaaaaaggacatgaagcagtacatgaaaatrttttattgggaaaactattccacacgcatctcttttatgatgacttcattttctccttttgaaaaatcaggag

SEQ ID NO: 600449 - DNA, 569 bp, Homo sapiens
ctgtcttccacaatgtttgaactagtttacagtcccaccaacagtgtaaaagtgttcctatttctccacatcctctccagcacctgttgtttcctgactttttaatgatcaccattctaactggtatgagatagtatctcattgtggttttgatttgcatttctctgacggccagtgaggaggagtattttttcatgtgtctgttggctgrggatgcaataattcttaagactcaaaaagatatattaataaatctaaccacttattatatacccttaagaatagagagactccattttgatacccacatatttggttgatcaatatcatgctgggaggtgtgggacacatagacaaaggatttggaatatttttaggaggtgactttggtggaattgcaagtgggggaggtatttttctgcagagggttcccttggaatcacacgtcatgaaatcttcctggtttactccctccttgggcaaaccctctgggttcctcactttgtgatctcattgtaagtcagtcaacaaggatttattttgtagcttttatgtgtcaatcactgctc

SEQ ID NO: 600450 - DNA, 583 bp, Homo sapiens
aacccaacctgttcactatccctaaaaaacttcttacagagcttcatggccattcataaagatggagttgctctggctaaagaaaagaagtttaaatctaatcagagaaatgcaaatcaaaaccacaatgagataacatctgaccccagtcagaatggctattatgaaaaagacaaaaaataacagatactggcaaaggttcagagtaaagggaattctgatgcactgttggtgagaaygtaaactagtacagccactatggaaaatggcatggagatttctcaaaaaagtaaaaatataattaccgtttgatccagcaacctcactactgggtatctgcccaaaggaaaagatcaatatattaaagtgatacctgcactcacatgtttgttgcagcactattcataatagcacagatatggaatcaacttaagtgtacaccaacagatgaatggataaagaaaatgtgacatagatacacaatggaatactattcagtcataaaaaatgaaatcatgtcatctgtagcaatgtggataaaactggaggtattgttttaaatgaaataagcctggcacaaaaa

SEQ ID NO: 600451 - DNA, 601 bp, Homo sapiens
gctataaaaagtaaacatatttcacagagaccttctaataagctgctccttatgtaagagaggcatcgtatttacctccagttcttctattaaacatccttccttttcaatcacttaatttttcctctccctgttaaggaacaacttaatattttgaaatcattctttactaaagcaacatccaaytggttactgtgttcattcatttttcaacccatacttcaactttgatataattaataataccctctcacctataaagctactctttccaacttacaaccaagaaataagcttctcatccagctttctgaggttctctgtcctttataattgtgggcaagagtccagttagcagaagcactaattgatccttaatgagtacaaagattattttgtcatactatctcagagctaaactatcttggagctagacttattttaaaatagattagctccttgcttatcttttgtcctctttaggaaacaaccaaccaaaccatgtgtggcacttttgtgcctgtgctccaatttcaacttcattcattatattgctattaagcaaaacaagtatatttttaaataaatgtcatttaccata

SEQ ID NO: 600452 - DNA, 572 bp, Homo sapiens
aaacaaaacaaaacttctgccctcactgagtttacatgccatgattcaagaatttcaaatacaatatcctactctgttcacctcccaatctttctgtaagtytaccaaaagcatacatacatttttccccaacctgagtaagaattaaaagggtattatgcctatggtctgtctacttgttgcttaatgaggtaaagcattttaatacagtttagtgatatgaaagcctgaataactgcatggagtagtaatgtcattaggctgtgatgatactcaatgagaaaagtaaaaagaaatttgcagttgccatgtgttatttgtataagcatgctaccagaaatgtcactctgttagtagactaataaaacattaatcccttaaaaactgataaagagaaaacccaaagggaaaatggaggcttgcagttaagtgaaagtagccgacagactttccagaacacagattttgagattagacaaatctggcttcagtccaggccctgccacactgtattatgtgtcaaatcatctaacttacttgagtttcattgtttctttctatgaaatagaata

SEQ ID NO: 600453 - DNA, 600 bp, Homo sapiens
cctttggtgcactgatgggacccacagcaacagacttcaaacccagctgaactgctgatactagtaacataaacctctacattaagggcacagcagaaggaaagatgtgctcatttccaagcatgaaatatatttatctcagtgtatgctgtyctatatatagatacatgtatattttgcttttatcaataaattaagaggcatagaaaaaggcaaaaataaaacacagtttgaagagaaaaaacaatcaggctcagactagattgccattttacaaatgtagagaaagaacaacttaaatccaaagcaagcagaaggaaggaaattttcaaagtaactgattatgacattatagggtagtaaacaacaagtaatataagataggtaatttcaacagagagatagaacagagagatgaaaatgctagaaatcaaaaatataacaaagataaagaatacctttagcaaactcatcagtagactcaatacagctataaagagaatctgtaaacttgaagataggtcaacaggagatacccaaattgaaataaaaggggtaaaaagtaaaagaacagcatccaatagatgtagcataatattt

SEQ ID NO: 600454 - DNA, 607 bp, Homo sapiens
ttcaattttgatgacattctggcaaagacaaaactataggaatgaaaaacagacttgagccagacgcagtggctcgctcattcatgcctgtaatctcagcactttggtgtgctgagacaagacaatcacttgaggctagaggatcacttgaggccaggagttcaagaccagcctgagcaatatagtgagaccctattactataaaaataaaaattaaaaggaaaaaaagatttcttcttggggaaaggggaaggattgagtacaaagtacaaagctgctgcacaagggagatgtgagggggatgaaactgggctctgtggtactatcggtggatacagractaaatgtttgtaaacacctatagatgtgtataatacaaaagtgcaacttttactgtttgcacacacacatacactcacacacaatcagttaggatggtgggggaacccaggacagagttcagactgtaacaaaacaatctgattgtactacaaatgtaagatgtcagctcgctgaaggggatggggaagaaaggagctgatctaaatagctgaaaaactgttttgtctgggtactctaaagttaaagataaagtgtacaaatattg

SEQ ID NO: 600455 - DNA, 607 bp, Homo sapiens
ttcaattttgatgacattctggcaaagacaaaactataggaatgaaaaacagacttgagccagacgcagtggctcgctcattcatgcctgtaatctcagcactttggtgtgctgagacaagacaatcacttgaggctagaggatcacttgaggccaggagttcaagaccagcctgagcaatatagtgagaccctattactataaaaataaaaattaaaaggaaaaaaagatttcttcttggggaaaggggaaggattgagtacaaagtacaaagctgctgcacaagggagatgtgagggggatgaaactgggctctgtggtactatcggtggatacagaactaaatgtttgtaaacacctatagatgtgtataatacaaaagtgcaacttttactgtttgcacacacacatacactcacacacaatcagttaggrtggtgggggaacccaggacagagttcagactgtaacaaaacaatctgattgtactacaaatgtaagatgtcagctcgctgaaggggatggggaagaaaggagctgatctaaatagctgaaaaactgttttgtctgggtactctaaagttaaagataaagtgtacaaatattg

SEQ ID NO: 600456 - DNA, 611 bp, Homo sapiens
ttcttcctcactctaccatcattagcttggctcttttcatgcagtagaattcctgagtcatgcacccagtaggatccctttcttgggtagcttcagagttcaagtacatttggtatgtgaaagaaaacttcttgtcactttccaaattcttagcattgtttacatacaaattgtttatatacaaatctttacaacttttaagttccgtgactacatttacatttgctttcactctttaagttttttttcagtgtactgtcactttcttgcaaaatattgtttatattgctttattctactgtttttatttgttatttctttgttttattgtttcacccccacacacacacatacacacgcacacacaacacayacacggaccataataattcactaaatcatagtataaactctgtaggtagaggtttttaaaatatgtgtgtcagtatttagagatatttatggatagatggtagagagagagagagagagagagagagagagatacatagatttttttctttcttttttctttttttttttgagatggaatcttgctctgtcaccaggctggagtgaagtggcgtgatcttggctcactgcaacctcta

SEQ ID NO: 600457 - DNA, 648 bp, Homo sapiens
aatgaaatctagttaaggaaataaattactctctatttctcttttccccagtgccagtgtttcatgcctaggtttgcgaaaccaagtgtttggagataaagttaattctaaatgtagtttctcaactatttaaatagcaagtctttctcgtgtttacttaaacgcacacagagctgcatggagtccaaacactgaacactttatatgctgacactatgtagtatcagtgcaaatgagaatctacgtgataagaaacatcatgcttataccccattctttcctgttccaaatgggatttttagagacaaaaatccttgaagtgaayaattcaaaaacttagattttaaacatcacaacgaaaagcaaagttgacaagcagcttcaacaagcaatgttgtatggtagagattcttcattagaccatgaggcagtccattaatgattcccactttctataaactgtttaacaaatatcccacaagcatttatggaatgtttattacataccagttgatattttaggcatttagactacatatgtaaacaaaagaaaatatattcaaaattagaaagtaataaattgttgtttaatgaaatttatgtcaaatatagttttgggcttatctaagttgttaaagtagataacaa

SEQ ID NO: 600458 - DNA, 567 bp, Homo sapiens
tttccttgttgttatcactgtcttaaatactaagatattgtacttattcatattttttgttttcttccatctttacaatgagtgctccaaacatggagagactttcatttaatttattctgtgatgtatctccagcacgtggtgcatagtagcactaaataaatatttgatgaatgaaaatttaaaaaataactaaagcataatcttttgctatggttttaatatttgtgtcccctccaaaattcttgctgaaaggtaatccccaatgcagtattaagaggtgagttctttaggagktgtttaggccatgagggctctgccctcaagaatgggatgccttataaaagggccagagggaactagcgaggcccttttgttcgtttccctgtgcccttctaccgtttagggacatcgtgtccaccccctcaagaggaggcagcgttcaaagcaccatcttagaagtagaaagcaaccctcaccagatatttaactgctggcatattggtcttggacttcaacttccataactttgagcaataaatttatgctatttgtaaattacccagt

SEQ ID NO: 600459 - DNA, 567 bp, Homo sapiens
tttccttgttgttatcactgtcttaaatactaagatattgtacttattcatattttttgttttcttccatctttacaatgagtgctccaaacatggagagactttcatttaatttattctgtgatgtatctccagcacgtggtgcatagtagcactaaataaatatttgatgaatgaaaatttaaaaaataactaaagcataatcttttgctatggttttaatatttgtgtcccctccaaaattcttgctgaaaggtaatccccaatgcagtattaagaggtgagttctttaggagttgtttaggccatgagggctctgccctcaagaatgggatgccttataaaagggccagagggaactagcgaggcccttttgttcktttccctgtgcccttctaccgtttagggacatcgtgtccaccccctcaagaggaggcagcgttcaaagcaccatcttagaagtagaaagcaaccctcaccagatatttaactgctggcatattggtcttggacttcaacttccataactttgagcaataaatttatgctatttgtaaattacccagt

SEQ ID NO: 600460 - DNA, 567 bp, Homo sapiens
tttccttgttgttatcactgtcttaaatactaagatattgtacttattcatattttttgttttcttccatctttacaatgagtgctccaaacatggagagactttcatttaatttattctgtgatgtatctccagcacgtggtgcatagtagcactaaataaatatttgatgaatgaaaatttaaaaaataactaaagcataatcttttgctatggttttaatatttgtgtcccctccaaaattcttgctgaaaggtaatccccaatgcagtattaagaggtgagttctttaggagttgtttaggccatgagggctctgccctcaagaatgggatgccttataaaagggccagagggaactagcgaggcccttttgttcgtttccctgtgcccttctaccrtttagggacatcgtgtccaccccctcaagaggaggcagcgttcaaagcaccatcttagaagtagaaagcaaccctcaccagatatttaactgctggcatattggtcttggacttcaacttccataactttgagcaataaatttatgctatttgtaaattacccagt

SEQ ID NO: 600461 - DNA, 567 bp, Homo sapiens
tttccttgttgttatcactgtcttaaatactaagatattgtacttattcatattttttgttttcttccatctttacaatgagtgctccaaacatggagagactttcatttaatttattctgtgatgtatctccagcacgtggtgcatagtagcactaaataaatatttgatgaatgaaaatttaaaaaataactaaagcataatcttttgctatggttttaatatttgtgtcccctccaaaattcttgctgaaaggtaatccccaatgcagtattaagaggtgagttctttaggagttgtttaggccatgagggctctgccctcaagaatgggatgccttataaaagggccagagggaactagcgaggcccttttgttcgtttccctgtgcccttctaccgtttagggacatcrtgtccaccccctcaagaggaggcagcgttcaaagcaccatcttagaagtagaaagcaaccctcaccagatatttaactgctggcatattggtcttggacttcaacttccataactttgagcaataaatttatgctatttgtaaattacccagt

SEQ ID NO: 600462 - DNA, 599 bp, Homo sapiens
gtagctctgaaagtttttgacacacaggcatataaaaagattttatataaaggtgattagaggtctttctaccagatctaatttcgtttcttcaaaaatagaaagcagaaattaggtaagagtatttaatgcaaataagtagcatagagtgaaactctcaaagataagatacatacgggctttgcaaccaaggatgacaagtaggagaatactatatgtgtgggctagaaggaaattgaatatcatttcgtcatttattttagttatgaggaaatgaattcttgtaaaggcraattatcttctccaagagacagaatataaatagaatccatacctacccactctggtttccattctacactcactctggtgagtatatctgaaatccaaggtgaatgatttggactgcccagaggccttcctaaccttggtagaataaagttgacagaatattacaaggaataagttccatcaacaaaatctaggtagaaaattgtagagcctaattgaaagagtagaatccagattcaggagacattggaataccatttactgtctatgtgatcttaggcaagactcttaacttcattaaacctaat

SEQ ID NO: 600463 - DNA, 539 bp, Homo sapiens
ttaggaagtaatgaagaccttgtgaaaatagctgttaatatatggcaggtaaaacatgcttggaaaatcagaataaatcagggtgactgggaracatgtctcctggggtacagaggggagcacataacgaagttgctaaactacagaccattgttgtcaacaattgtgaaggctaagagaggaaattgaaaacaaacagaaggaaatgggaaagtgaaaaatataaaaaatggttccagaattcaaaatgtacatttgaattatttagtaactcaaaggaaacagaacacttattaaggaaatcccataaaaaatgtattaaacttaatcatattacaagattggacaagatccaattatttatatgtacaataaggaggatgtcagataaaaaggacatacagtaatagaataggtacgtatagtattctgaatcatgaacattttatactcaaaattatttttaattggctggttaaggaatatagttatttaattaaagtcaactggagtcatatataacaatgctaaaatgtaat

SEQ ID NO: 600464 - DNA, 505 bp, Homo sapiens
catttgaattatttagtaactcaaaggaaacagaacacttattaaggaaatcccataaaaaatgtattaaacttaatcatattacaagattggacaagatccaattatttatatgtacaataaggaggatgtcagataaaaaggacatacagtaatagaataggtacgtatagtattctgaatcatgaacattttatactcaaaattatttttaattggctggttaaggaatatagttatttaattaaagtcaactggagtcatatataacaatgctaaaatgtaatgctgaataaaaaataatggacttccatggaagctgattgggtatgagctattctaattgccagagtcataaactttcttacagagattcccaaaagggagataaacatgaaccataattgataacwgtttctcactagaaagatatttcagcataggcctcatgaagtcaaggagtcatagaactggaaggtacttaatataagacaggcaaaatatt

SEQ ID NO: 600465 - DNA, 601 bp, Homo sapiens
cagccttaaaaatgatctcttaaatctaaaatggctaagtaggaatctcaatctagaagtaggagagaccaaaaagaacacttacctaatgcagccctaagtgctgccatttctcagaggccagctctcaccatggttaaatatgttcggaagagagttatttattaaaatgttggatttgaaggcctattgtgactttttctgacatcgagattttagggttcttgactgcagacagacacaaggtgttgttcttcatctacmatttggatgcatgcaaacagctaaattcatgtttaaataatcatggattagtcaaatatatttcttttacttgactgttttttccccaaaattattttggcacatacgtccctcttgaacatccaatctttttactcttggaaaaccagaaccgggtcactttgcattaatcctcaacattgtattaagaagagcctttctaggaagacagacgggaggagtgtattctcagctgacttagaaactaattatagaaaaatgcagagacagagttcttagggactcagcgagaacaaagctgagttcagacatgtttctgaaaaagcatatgcataaa

SEQ ID NO: 600466 - DNA, 584 bp, Homo sapiens
tgaagactttttttcagttatccacttggtttactcctttgtgaaggttcagttctggtatcattgccccagaaaccttccctgagcacatttttttcttcccgccaccactttgtcactttgttaaatgtgccccgtagcactctgtgcacatcttcatcatagcattaaccacactcttctgtgattgcttcctctttcatcttacactggttggtgagctccttgagggcaagaattgaatmttttaccactgtaaccctggcacctggtagatacaaagtaggtacttgtggaataagtacctactttttgttttgttactatgtatacaatcttgaacttaagttctaggaacttcactttaataatttatgaagcagaaattatattgtttattttattctttttgtgggaataaatgagaaaataaataataataattaggactattttgtggcttggggcacaaagtgcttggaaagttgtagcatgtaataaagttgaagctagggaaggaaggatgtcagactgaagatgcttggttgaaatgtggagatatggaaatagtcctcctcgttatt

SEQ ID NO: 600467 - DNA, 584 bp, Homo sapiens
tgaagactttttttcagttatccacttggtttactcctttgtgaaggttcagttctggtatcattgccccagaaaccttccctgagcacatttttttcttcccgccaccactttgtcactttgttaaatgtgccccgtagcactctgtgcacatcttcatcatagcattaaccacactcttctgtgattgcttcctctttcatcttacactggttggtgagctccttgagggcaagaattgaatattttaccactgtaaccctggcacctggtagatacaaagtaggtacttgtggaataagtacctactttttgttttgttrctatgtatacaatcttgaacttaagttctaggaacttcactttaataatttatgaagcagaaattatattgtttattttattctttttgtgggaataaatgagaaaataaataataataattaggactattttgtggcttggggcacaaagtgcttggaaagttgtagcatgtaataaagttgaagctagggaaggaaggatgtcagactgaagatgcttggttgaaatgtggagatatggaaatagtcctcctcgttatt

SEQ ID NO: 600468 - DNA, 525 bp, Homo sapiens
tcttggttgaagggatacgtgtctctggtcagatggtcactgtgggcagcttggcagatttcaatagtgtggctctttgttttatctctagaaagtagaacaactctattttgaggttccattataatcagtacaagactggttattatgaatagtactgagtcatatcaggattgcaatgtaaaataacaactgctctcttcatctcttttcactttttgttgtttaataatttttgtgtcattagaataaatttatgtaagtgttcacctccaattccttctgaaacaaagtgaagcattacttaatttgaatctaagttatgtttacaatattgacataaaatttaacttatgataacagcagatccaaatataaacaacttgtaraacaaaaaaggttgcactaaggtctctagatataatgaatataagttcattatttctatttcttatctgattatgtttgtgcttttcttagtctaacttaaaatgtaatagtgaacctagctcagagcaagcaaat

SEQ ID NO: 600469 - DNA, 588 bp, Homo sapiens
aaagtcaactgatggcagattctaaagacatctttagtttactaccacgtattggacactcactaagtgctgaacactctctcaggtgtggggacacaagagaatgaagcacagctcttggaaactgagaactcaaagttgaggagaggagctctaagtaacagaacaactgcacagtcatacaaattgtttgaaagttgtggcacatactgcccgcaaaagaggatgtaaagattaggagggcatgggaggcctgggcttcttgtggtgactgacaaggacagggataaagagcacggtgaraaacaaatcttgagtacagtggggcttcaataaacattcgtggagtgaagcagtcaacagggatcttaaaattcacaagccaagggctgtgaattacaagtgatatctattaatcatttgaaggcatccaagtactgtatttggcatatttggcaagctttggacatggaggagaaacagatcataggcactactcatccaggaatggagagtggggggagtgggacatgtaccccattgctgttacactccaagtgtaagggctggaaacaaaatttcattccc

SEQ ID NO: 600470 - DNA, 588 bp, Homo sapiens
aaagtcaactgatggcagattctaaagacatctttagtttactaccacgtattggacactcactaagtgctgaacactctctcaggtgtggggacacaagagaatgaagcacagctcttggaaactgagaactcaaagttgaggagaggagctctaagtaacagaacaactgcacagtcatacaaattgtttgaaagttgtggcacatactgcccgcaaaagaggatgtaaagattaggagggcatgggaggcctgggcttcttgtggtgactgacaaggacagggataaagagcacggtgagaaacaaatcttgagtacagtggggcttcaataaacattcgtggagtgaagcagtcaacagggatcttaaaattcacaagccaagggctgtgaattacaagtgatatctattaatcatttgaaggcatccaagtactgtatttggcatatttggcaagctttggacatggaggagaaacagatcataggcactactcatccaggaatggagagtkgggggagtgggacatgtaccccattgctgttacactccaagtgtaagggctggaaacaaaatttcattccc

SEQ ID NO: 600471 - DNA, 620 bp, Homo sapiens
aaattttaagccactgttcaagtaagtttgccatgctgggaaaggtggtaggttactctctggtggccaaaaagctagagagggtcaaccccctgatcaaggaacataaattatttgtttgctgaattgatagtatatgtttacaatgtgatagggggaggggaatcatttctccttaaagattgttccaattctaataataattattattataaacaaaggctatcatatagtgcaggaagtcatctaagcactttccaggtattaacacacttagccctcacaaataccttatgagattggtacttttactgtccccattttacagatgaaggaattgaggcacagagaggttatgcaattttgcaaagacatgcagctggtaagaactgaaackctctatacttacgcagtctggctccagggtacggtcttttcattaatataataatttagttcagtaagtaaggcatccagctatctaaaaagattctgtgttcacatagacctattattaagaaaatctatgtcatgacattagctcagaaaagataataaaaggagattcatgtggggtttatttgcacagtgaagggaatattggactatgaatatgtgat

SEQ ID NO: 600472 - DNA, 543 bp, Homo sapiens
taattatgctcaaaacaaataatcctccagaaatcttcataagtcataaaatttgcttggtatgaacattacttactaacgctttcagtctggtcttcagcaaattgtgcaacaggccaccttatagtgtggcttgcagttagacatatctgagtataagagtttctgtgtctcgttacctgtgtgtctctgagaagttacctagcataggccttgtttatacacctataaaacatggttagagatgctaactttcttgttgtgagaatctcatggwgtcatatgaagaaatatttggtcagtcattaatcactgtataaatagttatttctccagattctctttctgcaccctcctatacagtgtcctgctttgctcaccttccttcactttctgcccaacatcttgaatcaggatttgtaccttggtcttgtgccaattttaagacactgttctaccttctcttctagttatttttcttagctgtccttatggaataaaatgctctgagcattcttcatggaatttgagcgggtatggtag

SEQ ID NO: 600473 - DNA, 532 bp, Homo sapiens
aggccttgtttatacacctataaaacatggttagagatgctaactttcttgttgtgagaatctcatggagtcatatgaagaaatatttggtcagtcattaatcactgtataaatagttatttctccagattctctttctgcaccctcctatacagtgtcctgctttgctcaccttccttcactttctgcccaacatcttgaatcaggatttgtaccttggtcttgtgccaattttaagacactgttctaccttctcttctagttatttttcttagctgtccttatggaataaaatgctctgagcattcttcatggaatttgagcgggtatggtagattcaactctttgggaggtcagaatcttactgtgatctctatgagccagaataatgcccctccccaccaaagatatctatgttctaatccccaaaacctgtgaatacrttaccttacatggcaaaaggaactttgcaaatgtgattaagttgaagagcttgcgatggagagattatcctggattatgtgggtatttc

SEQ ID NO: 600474 - DNA, 451 bp, Homo sapiens
gctttttacaatcagattagtgaaactacaatcttccatatattagaaattttactaataaaggccaatctttccttcaactactgtgatttaacatttcccagagttaaaatttttagaaatgaaagggttgctaaccagccaaggatgtggaatcacacctcaccacatacgctccattgcacyttatcgttggtgacttcaaaggcatcaaaaatgcttatttttatggaacagatagagacattttactcaaaacatgacagttttcacagactatctaaaagcagtgaagttttcaatgagaattattttcctaggggcccttttatgtagtcacgaacattgtagtaagtaatctgtacaacaacctgattccagtggtgccacatttgagaaaaagccttgtcttttctccttcgatcacaaccacagtagccagagtgaacca

SEQ ID NO: 600475 - DNA, 498 bp, Homo sapiens
ggggtttgtttcattggtcaggtaacctgatgattttcattaaaaattcttagttgtataaaagttaagcaagcaattggggacttcaggactttaccagtgctaaaagtaactctgtaaaaagtaaaccagtggaaaagataaactctggggcacctctcctcccctcctgcctggctgaagcaagctttcccrcactgcctccctgtgtctgctgagagaagcaccgggtgagtttctgcctagataaagcgctgtctctgcttacttcaggcatgtagaccctttggggatgctgacagctgacaggctttgaacactagcagcagcagatctctgtgccgggctccatgagccgtccacagtgctctgtggaagaaaatgaaaagctgctggcagagcctccctaaagtttgggcagaacctgagggttatttttatttttaaaaacaaacatttagagaatagcctatttctaaacctcctttactgttacaa

SEQ ID NO: 600476 - DNA, 498 bp, Homo sapiens
ggggtttgtttcattggtcaggtaacctgatgattttcattaaaaattcttagttgtataaaagttaagcaagcaattggggacttcaggactttaccagtgctaaaagtaactctgtaaaaagtaaaccagtggaaaagataaactctggggcacctctcctcccctcctgcctggctgaagcaagctttcccgcactgcctccctgtgtctgctgagagaagcaccgggtgagtttctgcctagataaagcgctgtctctgcttacttcaggcakgtagaccctttggggatgctgacagctgacaggctttgaacactagcagcagcagatctctgtgccgggctccatgagccgtccacagtgctctgtggaagaaaatgaaaagctgctggcagagcctccctaaagtttgggcagaacctgagggttatttttatttttaaaaacaaacatttagagaatagcctatttctaaacctcctttactgttacaa

SEQ ID NO: 600477 - DNA, 430 bp, Homo sapiens
tttaaagcctcaaaaaatatgtaggttaggagcccatatttgttgtgacaatacttgtatgacatattatatgacaatttattatatagtcacattgtacttgtctcatctaattacaatggattcttcacctgacagtctctcctggatkataaaacccttgatgatagggactatgccttactcctcttcgaatttgtggtgtcttacataaggtctaagtggcatatcaaactcattcaaaaatgctgaatcaaagagctgctggctgagcgcagtggctcactccttttatcctagcactttgggaggctgacaaaggaggatggcttgagcccagaagtttgagactagcctgggcaacataatgaaaccatctctacagaacatttaaaaatcagctggatgtggtggcacatgtctgcagtcc

SEQ ID NO: 600478 - DNA, 474 bp, Homo sapiens
ggttttcaccatcaggtagatggtcattttactgttagacaaattactctaaagcaagactctggttctaaaaagaaaatagaaaatgttccatttctttctcttggttgctmttcccttttcctcatattattttatcattaagaatatgcaattaagagtcagcacaatgtggtgaatatagcagtgaattgacttgggagtgccccatacaacttccaattctaccgctgaaaaactctgtgagtgaccctcactaagcctcagtgcccacagctgtaaaatgagattggactggacaatctctgaagccccttccatttcaaaatttctatattgacttctctatgggttgtaatatttccttaggatatgaaatatgatgaaaatatggcatttctgtgaaaggtgttgcctccttaaagtgtactgtttttctttgacctttatcatttcattggcatctacctttat

SEQ ID NO: 600479 - DNA, 237 bp, Homo sapiens
ctaaattcaaccctctgcctgctttccattcttccttttcatttatttcttaagaagaaatgacacaggacctttgaagcttgagtttaactctggagccttaaagcaggacttctaaccctaaatgatctgattaaccaaaaggtttcaactaactttgrtcattgttagattgttgccaaatgctattggacattcataattgtttgctataagctaattataggaacaaataaa

SEQ ID NO: 600480 - DNA, 237 bp, Homo sapiens
ctaaattcaaccctctgcctgctttccattcttccttttcatttatttcttaagaagaaatgacacaggacctttgaagcttgagtttaactctggagccttaaagcaggacttctaaccctaaatgatctgattaaccaaaaggtttcaactaactttggtcattgttagattgttgcmaaatgctattggacattcataattgtttgctataagctaattataggaacaaataaa

SEQ ID NO: 600481 - DNA, 237 bp, Homo sapiens
ctaaattcaaccctctgcctgctttccattcttccttttcatttatttcttaagaagaaatgacacaggacctttgaagcttgagtttaactctggagccttaaagcaggacttctaaccctaaatgatctgattaaccaaaaggtttcaactaactttggtcattgttagattgttgccaawtgctattggacattcataattgtttgctataagctaattataggaacaaataaa

SEQ ID NO: 600482 - DNA, 652 bp, Homo sapiens
ttcaaacctcaatttccccagctataagactaagggattttgctagtttatttctaacgtcccttctacacctgaaattccatatgacatgctcctggatattctcctgaaaatgtgcacatatacacactacataaatgcccatacccacacccacacagagctagtaaaagggaaaaggmcttattagtcctatatgactaaacacataattctgattattggatattgattagggaatcttttcatgtgatactatcttgtaagtggctgtgataaattttaatattctcaataatagagttctaataacattttaacagtaaaatcacaaggcttaaaatgcctgtaggcaggttagcatgcttctactcacaggattaagggccagtgtcctgctataatgtgtagtataacttaatataatccgtctcaaaaaagtaatcatataatcatacctttttaaacaagcaaccttgtattacaatgttctgtgatttttaaatttatcattaaattaaaaaatcatcctattcaagaaggtaaagtatacaagccaccatgttctctcttagttttcttcctcttctttctaacccttcatttctctcttcagaggcagaaaatcttctgcagcatcactttatatcct

SEQ ID NO: 600483 - DNA, 532 bp, Homo sapiens
aagtcccagctgctccagctccagctgtggctaaaagggaccaaggtacagcttgggccattgcttcagagggaacaagccccaagccttggaactttccatgtggtgttgggcctgcaggtatgaagaagacaagagttgagctttgggagactctgcctaggtttcagaagatgtatggaaactcctgaatgtctaggtagaagtctgctgcaggtgtggaacctcatggagaacctctgctagtgcagtgcagcagagaaatgtgagattggagacaccatacagaattctcactggagcactgcctaggggagctgtgagaagagggccaccatccttcagactccagaatggtcactgacagcttgcactgtgagcctggaaaagccacagsgactcaatgccagtccatgaaagcagccatggggactgtaccctacagagccacaaaggtagagctgctcaagagtgtgggagccaccccttgagtcaatgtaccctggatgttagacatggagtcaaagtacat

SEQ ID NO: 600484 - DNA, 532 bp, Homo sapiens
aagtcccagctgctccagctccagctgtggctaaaagggaccaaggtacagcttgggccattgcttcagagggaacaagccccaagccttggaactttccatgtggtgttgggcctgcaggtatgaagaagacaagagttgagctttgggagactctgcctaggtttcagaagatgtatggaaactcctgaatgtctaggtagaagtctgctgcaggtgtggaacctcatggagaacctctgctagtgcagtgcagcagagaaatgtgagattggagacaccatacagaattctcactggagcactgcctaggggagctgtgagaagagggccaccatccttcagactccagaatggtcactgacagcttgcactgtgagcctggaaaagccacagcsactcaatgccagtccatgaaagcagccatggggactgtaccctacagagccacaaaggtagagctgctcaagagtgtgggagccaccccttgagtcaatgtaccctggatgttagacatggagtcaaagtacat

SEQ ID NO: 600485 - DNA, 504 bp, Homo sapiens
cttcccagtaactgggattacaggcacgtgctactgcacccagctttcaccgtataagttaattgttaacttcacataagttttaatacctgcaaaaattatgtgactcttccagattccaatcttttctaatttgctaaagcatacagccatcagaagtcaacatgcagagaagcactaacacggagtctctgcatgtcttgataaatgttgctttgatgcagaattcagtttgggcaacttgtgtagaaggatggtcagaaagtaattttctgtttgttggggtgtgtgtctgtgtgtgtgtgtgtatgtatgtatgtatgtatgtatatgtatatgtgtatgtaaagaacacaggttctgcaattagtccagtgttgttgtkctgggaatttaaatgttttcattctcaaagcagttctgctgagtagaaattttcacgttaccccattatacagactgaaaacctgaagcttgagtagtttgcccaaggtcacatagcaa

SEQ ID NO: 600486 - DNA, 556 bp, Homo sapiens
tctccatttcttgatcaaaagtcagttaattttgtagaattaagcaagaacgtccttattaatttttaagttcattaattcacaaatattttaggatgatttattttattaaacaggtatttcactctcaggggagaacagaagagtggacaattaaaagggagggacattacaaacacagactacaaaggcctaatttacatattttaccttacagtcacccaagatctgatttgcatatatttcacctctttcattagggagkgtatcataattttactataacatgttgagtctaacatcctttggccaaacctttccccttccaaagaagaccttgtaaaatctacttggcagtaatcaagcaatatgcatagagtgtaggtaataatgtattgtagcatttatttgttgtgtgtggggttttttttagtgtaaatagaatctgtatattcaagacatgagtctcataggataaataatctcattactttgcaatatcacttaaacttttttcaaacagtatacatccagcttattgaccagactagacacc

SEQ ID NO: 600487 - DNA, 460 bp, Homo sapiens
cttctgaagggctgctctttgtgtgggtgcttttgtgaaattctgtgtcacccacgctacccattacaatgctcacaacattcacatatttgatccggaggaaatgtagctggcactgtttttattcctgttacctcctgtcttgaagcaaaatgccagtgcttcatgcagcgtggagtggtaaacatcagctggggagaagcctttatttagggaatttatcacaamatggctttctgaagattaatactgagaaagtggaagcacggtttagtaagtatagcattggtgcaagcagatatttccaataggcagtttccagtgcatacatgaacatcatctctactgtggtctcctatctttgtgtataacacacaggttattccgctttgtatgcccaccaatgtatgcattcataaaacagatctttatactattaaggagacacaatataggccga

SEQ ID NO: 600488 - DNA, 617 bp, Homo sapiens
gaaattctatggcgtgataactaaatcatcactaaaacctctttcagcaataaaatactatgatttaattgtatactgtctttgtaatatgtttgcaagttccttaaggacaacagtataggcctataaatagtcttgattgattaaaatgaaattatgtatttctaaatgttaataagtagaacaatattaatttacacatttactgtgacttctattatcatttgcactgtacaagtgtagcttgagccaacacatcagaatagattacagagagaaactgcttcgcatttcacaggtttgatttagggtctacagtcatacttcagtgaatttgttaagacaagcatgaacattggtgctcatccattttgccttagatttgaaggaaagatgaccttggcagagaacatttatactgaagcttttaaaaattggccttgcattatgcraagtgcaagaagccagacacaaaaggcaatctaccatatgattccatttatgtgacattctggaaaaggcggaactagagagacagaaatcctgtcagtggtttgcagaaggtggggagaggagttgactacaaaaaggcacaaggcagctttctggggtggtgg

SEQ ID NO: 600489 - DNA, 303 bp, Homo sapiens
tggcttgctctaggagggtgaccatggaaatgaaaatgatgacagtgaatgtggaaagaaagttgtatgtgttgattggacaggactttccactgagtctgtaagtacaagtcttactcatctcatactcccaggcccatrtccagtgcctgcacatatcagatactcaataaatgctttgagtagaatttatgggtgatttggtacagaacacaaaaaaatagatcaaggactctgagttggagctcaagagtgagtacagaactgaatagagggtgtggagttcagttttagacatgttga

SEQ ID NO: 600490 - DNA, 610 bp, Homo sapiens
tatgtggttaatcttatatgaaactgccaaaccactctgcatcattgacaagacttggtattatttgtctttttaacttggcattcttatgtatgtgcaatggtgtcccactgtggttttaattttcatatctgtaatgactactgatgttgagcatctttttatgtacctatttttcatttgaatatctttctttgtgaaatcttttgtctatttcttaattaagttgtttgccttattgagctataggagttcttyatatatcctgggtagaagtcctttatcaaatatttgttttgcaaatatttctcccagtggagaaacaatttttaagtaggaaatatctgagttcaggggaaacaaaccgtcccaaattcaggcagtaagtgactcaggtcagtatgtcagcaatgagtactaaagtatgaatcttattctaaggcagaaatgttagtccagccatggttagggaagaactacttgtagtgcatagatatattacagccactgtgcagagctccaaagtgtatctgtctagaaaaaataagaaattatatggaaaggaaggcaatgccaattctagtcaccagcaaagagacagatacacttt

SEQ ID NO: 600491 - DNA, 509 bp, Homo sapiens
tgtatctgtctagaaaaaataagaaattatatggaaaggaaggcaatgccaattctagtcaccagcaaagagacaratacacttttatgacatttgccacagggcattaagggagcaagagggaagaggaagcaagtcaggagaaaaacggggatagcaagaaacttaacaggaacttggtacaaatgggcatggtggcctacaagtggagaaggtttgctttcagagagccagtcccaacaagagagtagtaaattcagactaattatgagtagacattggtaatccaaggagaggctaaattcaaggttggcaggatggtaaatgatgatgcatgttcagaagtctagagcagacagtatggaagagtcaagcagcacaggacatttccaagaaatctttgagaaaacagggcaggaagacagggaagacccagtgccaagggactacaacgttgataaaaataagaaatgggggctggacatggtagctcatgcctgtaatcccag

SEQ ID NO: 600492 - DNA, 582 bp, Homo sapiens
ttcttcttttaattatttttcattgaacagctttggagttacatttctacattttgatttctggtatattataaggaaagaaaaaattatgtcaaaggatactttagagaaaatacatagatagtgattacaatatggctgtaattaaattatccttaatcttgttgaagttttgttagtgcctaattttgatgaaatagtatggtgttccttccagctactgattgtatatatgtgattgcacatctttcttaaaaaagtggatttgtaggttttcacatattgtcagccacactctaatcctcttgtaaagaatgaacctggctttattcaattaaataattctctggtacaggttttcctcccrtaatattttaaagtacaatgttttgggttttttgagggtaaagtaaaagaaaatatgttttaaaaactttagttgtcaaattattttattttaagcctattttagaaattagagatgtattgtttcttttgggtgcatatcaccaattaatacgtttgatttcagatctacaacttactgctttgtaaacttcgccgaggtaaaatgaaaccatt

SEQ ID NO: 600493 - DNA, 641 bp, Homo sapiens
tctaagcagcaatacttccaggctgctggagctacctttaactgcatacagtgagatgcaagaggaaataaatgacttaaaaacagaatttattggaaaacaaaaataaaattctagccccaaaccgactgaacagacctctttcttgaccaaggagatttcaaagaaacctgaaaaactagttcagaccatgcttcattatactcccttccattttaagtttagatacaactaatcagcattaacaataaagtagagatacagctgggtgcagtaacttatgcctgtaatcccagcactttgggcagctgaggctgaggggatcacctgyggtcaagagattgagaccatcctggccaacatggtgaaaccctgtctctactaaaaatagaaaaattagctgggcgtagtggcatgtgcctgtaatcccagctactcgggaggctgaggcaggagaatcacttgaacctgggaagcagaggttgcagtgagccgagattgcatcactgcactccagcctggcaatagagtgagactccatctcaaaaaatcaaaacaaaacaaaaacacattaaaatagagatactaagactgaccaaacagagtttttgtagcactaagataccaactccaaactgact

SEQ ID NO: 600494 - DNA, 629 bp, Homo sapiens
tctggcgactcctccgagagcagccccggacaagcttcatccctctcccaaatgtaacatttgcttgaaactttccatgattggctactacccagacgtgaagtgttttggaaaaaatgagcaaaatcctttcagctatgcgacttaagccatgggagggtggaggtggagggagggcgacgagtggcgaggcggggtgggggggttgcggaatccagaatacgacagctttcttttttaaaaattattttttttaaatgtacaccgatacttcaaaaatagttttgaatagcaatgattccgttaacgctatttgcttgaaagcaaaactgtagatacttttctattttaaaaactgcttcactgttttaaaatagaagcgttggaatacgggttctctaagttatttcagcatcactttatccatttatccttttggacctgtggaaaaacagccaagaacctgataaactgagttattccctgaggctacatacacattmcattccaggacaaaaaaatgtttttagactatttcctgaaacaattaggtttaaatggagtagatccacagagtttaataagatgttttgggggttggtgtgttgttactgtgttgttgtgtgtgt

SEQ ID NO: 600495 - DNA, 386 bp, Homo sapiens
ggaggtcgagagaggtgtactgtagttggatactttttcctctgtaggagaaagaagaatggatttctctgtcctgcctttggttagtttttggtcattttctaggtatgtgtcatttctggctcttgcattttcaacacagtcgactcttgtacactgagctcagtgtctccgtggttttctggaatgcttaacgtgagcctcttttaaaaggagagttacacaggctgcctaaacattgcacagacctcctgattctaaaaatatgctgtctgtttggttaaaatggttaaattattattaagtctcatttcattgtagcttgaattgtacctgaattcttttcaktgttttccttttcaacttcctatgttctggtccatctt

SEQ ID NO: 600496 - DNA, 568 bp, Homo sapiens
ttcacagtgttagccaggatggtctcaatctcctgaccttgtgatccacccgcctcggcttcccaaagtgctgggattacaggcatgagccaccgcgcccggccccacaaatatcttatctaaaggaaaacaaaaggactttactccctggatgaaactctttatggcccctgaaactgtgatttactcattataaactagcaatacattctgttataatgacatgtagtttttcttctcaccagtatcttaaacacgtttaatctcaggttcatgaaaaattaatgagattaatgcaaatggactcactaaaatttgtgtcaagcaagaaaaatttttttaaaaaataaatattttagtgtgttaccatggcatgagaggagacaggattgtttgacatctagaagggattgttttgctcaccttgtataatttgtctgcatctsggaatccagagaaggcaacatataaattctatcacgttcctatcaccattggattcacatgatctccaaattcaggtaattgttccttcctcctcaagttctactggtggctgccttgttac

SEQ ID NO: 600497 - DNA, 509 bp, Homo sapiens
ggtcttattttgttaaataacatttcatattacctaacctccccaaactataaagcttcaaggctggggtcaagtctttcttawtttttttttcgcataactcttaaaacacatagtatagtatggtaaacctatgagacaatgaaaaactgtcttttcaagtgggattaaaaaaaatgaggcctaataataacacaatacaaaaggatttgctagtctttatgccttcatttaagaataatgatccttcagatgataattcagggttgttttaaaatcagtgtatcattttgaatttatagtgagctgactgataacaaccgtctatcaacaccagcaaactggcagattaataaacctgttagatagaaagttgaattgatggtggctgaccatatagtaaaatagcatatgagaatgaatgttaagtctaacaaattgacaaattctagttatcatccaagtgattttgccccaaggctaatcattggttgaatttaaaaataaaa

SEQ ID NO: 600498 - DNA, 590 bp, Homo sapiens
taaagtaactgaactaataatttatacttctactagcaatgctagagttcctattttcccaattacttgatttaacatctgccaatctgagaaggggaaastgacctcattgttgttttaacagaatactttcaatattgcatcctgtatgaattatctattttctaacaacatacatatgctggtatttttccagcccaatttctgttatgtatctcttttcctttctcattaaaaaataaatgtccaaataaaaaaacttaataatgccccttacctctatccctctgactcttcctagggaccattcactaagataggatacatacttctggactttatggaaataagtataaccagcttaacagagaaaagtatgataaaaatgtccatatgggcaagtgctggcataaaccataacatagtttgtgactttaatataatgctcattccagatcctgctggttttctggaagagagtgctattttcaaattaaaactctaaaattactctcataacagtacgcaaaataggttgaattggagaaaagaatgaatatcagggtacagacttaaaatttgaagtcatt

SEQ ID NO: 600499 - DNA, 590 bp, Homo sapiens
taaagtaactgaactaataatttatacttctactagcaatgctagagttcctattttcccaattacttgatttaacatctgccaatctgagaaggggaaagtgacctcattgttgttttaacagaatactttcaatattgcatcctgtatgaattatctattttctaacarcatacatatgctggtatttttccagcccaatttctgttatgtatctcttttcctttctcattaaaaaataaatgtccaaataaaaaaacttaataatgccccttacctctatccctctgactcttcctagggaccattcactaagataggatacatacttctggactttatggaaataagtataaccagcttaacagagaaaagtatgataaaaatgtccatatgggcaagtgctggcataaaccataacatagtttgtgactttaatataatgctcattccagatcctgctggttttctggaagagagtgctattttcaaattaaaactctaaaattactctcataacagtacgcaaaataggttgaattggagaaaagaatgaatatcagggtacagacttaaaatttgaagtcatt

SEQ ID NO: 600500 - DNA, 604 bp, Homo sapiens
caggaaaaacaatgctcgttctcataaaccacaactgctaatgtcattttggcttatttccttctattactttttctgagctttttaaatagcttgagatcatactgcatagaaaattctgtattctaacttttggccgttataacattaccttatatcctaaaaagtacctgcaaacattttaaatgactaaataagagaccctcatatgaatgtaccacaatttacttaactatcccactaatgttgaacatgcgtttttctccatttttctctagtatgcataacactgtaccaaaaataataggaaataaatctttctaacacttcagtttattttgtgaacttagattcctaaaaaggtatgaatactttgtaagttcctcatagagcttaaaaattgctcttcagaaagtttaccatcaagaattgaaggacgkgtctatgtcactcaaaatatcctcatcaagaagacaattttaaaaatcttttttagaagcctgtaccagaaataaataggcaaaaatatatttcttaatcctgaaagctatcagttttattcattatgcaacatctacagttctatgtttcgaaagtaatgctt

SEQ ID NO: 600501 - DNA, 605 bp, Homo sapiens
aaaaacaatcattagaggctgttaaggaacatttattgtttatttggctacctgtctataaaagtacacatgaaggccctaatagcaaaatatcaaattatcaagtgctttaaagcagaaaatgtcatttgtttctcaaaactgcaccaactttatataattgcccttttaattatccctagtggcccgtgaaatttgcaaaatagagcatcaaagctttgatttacttacatgttgcactttggcgggattcttaatgaatattgtttagtactaatgctgagatggaattcgtaaatgtttatagtgagggacttacttagaagagtggggaggccagtaatgaaactgaatcaactgggttcttcaagatggaacmatatggccatattcttgggcctaacattttgaaaaattctttttatagtggaattttatttttaattcaggtctagatgaatacaccttaagtttagttttgcagaatctttttttttctgcctagctatcttattactttccaagggcttttgaggagtaatttgtttcctggccatttcggattaaaatcacctgtttcttcataaattgtcatcttcaaggta

SEQ ID NO: 600502 - DNA, 605 bp, Homo sapiens
aaaaacaatcattagaggctgttaaggaacatttattgtttatttggctacctgtctataaaagtacacatgaaggccctaatagcaaaatatcaaattatcaagtgctttaaagcagaaaatgtcatttgtttctcaaaactgcaccaactttatataattgcccttttaattatccctagtggcccgtgaaatttgcaaaatagagcatcaaagctttgatttacttacatgttgcactttggcgggattcttaatgaatattgtttagtactaatgctgagatggaattcgtaaatgtttatagtgagggacttacttagaagagtggggaggccagtaatgaaactgaatcaactgggttcttcaagatggaaccatatggccatattcttgggcctaacattttgaaaaattctttttatagtggaattttatttttaattcaggtctagatgaatacaccttaagtttagttttgcagaatctttttttttctgcctagctatcttattactttccaagggcttttgaggagtaatttgtttcctggcmatttcggattaaaatcacctgtttcttcataaattgtcatcttcaaggta

SEQ ID NO: 600503 - DNA, 545 bp, Homo sapiens
agagtcaacaaccctaagagctggaagaattaatccccattcccacctcatgcaccctacacctgggcttcccttttacttttcttaatttgttttgttttggcagttttctgataggttcagacaagcaggtgtctttgatggacgctgagaacaaaacataccgaggcacaattctactgcagaatgcaaacaaccttgtaaaatattcccccaccaccttttttaaaggcctggaagaaaatcatttgaacctatacttagtggtgtatgtgaggcttctgggcatgcgccgtattattagagttacacaatgtagtaatcacatgcccgtgtccctggaggttacgggagtggttccccatcctctcatgcttatcccttcttcgtttttttgttttgttttgttttgttgtgtttcccygtcctttcctacctttaacatatcctgcagcattcttttagcctgttttcctccagtctaattattcttcaattttaaataatgtaataactttgacattttcatttatagttaagccacg

SEQ ID NO: 600504 - DNA, 544 bp, Homo sapiens
cacgccattctcctgcctcagcctcccgagtagctaggaatacaggggcccgccaccasgcccagctaatttttgtgtattttcagtagagatggggtttcaccatgttagccaggatcatctcgatctcctgacctcgtgatctgcccgactcagccttccaaagtgctgggattacaggcatgagccaccgcacctggctgaactttttttttttttttttttaacttccacatatgagtgagaacatgcggtgtttaactttctcttcctggcttatttcacttaacaatgtcctccagttccatctatgttgccacaaatgacaagatttcattcttttttagtgctgaatattattccattgcatatatacagcacaatttctttatccattcatgcatcgctggacagttttaaagacttcctgttccttgcctgtccactatcgacaccacagtccaaatgacagcatgctctacaatagcctcttgccacatgcatcagtctgatgactgcagcctctaactcctccctgcatatt

SEQ ID NO: 600505 - DNA, 610 bp, Homo sapiens
ttcgggaaacctgtgttgaatctcttcttaatgtgaacagtagcctcctaatttatctatttcatactacagaagtttgaaacattgggccttctttgaggcatggcagtatgggcttgaactatagaggcctttcttaatcaatgttgtccatctaagcttgctacttggggttaaagtccagcaatgggtcaggctgtagtcccaaaactcttacatctttagctggtgccccacacaaagcttctcagtgacygttagggaaataaatgcaggaaaataattatcccatcagatcactggggggaagaatgaaaaggaaaaaaaagcaaggaaggtagaaacaaactaagtcattgcaagctaggcctattttcttccaataatctcccaggtaacagcctctaccttgctaggatctgattacccgttgctggcctcagaccatagcattattgttttaacattcctaccttcctctttatcccagcatgaactgggttgtatgggaggctgggaagctgaccttgcttggggataaagagacagtttagcactcaacaatcttgaaggcagacttgaaaacacagtgattagaaaataaagcagt

SEQ ID NO: 600506 - DNA, 610 bp, Homo sapiens
ttcgggaaacctgtgttgaatctcttcttaatgtgaacagtagcctcctaatttatctatttcatactacagaagtttgaaacattgggccttctttgaggcatggcagtatgggcttgaactatagaggcctttcttaatcaatgttgtccatctaagcttgctacttggggttaaagtccagcaatgggtcaggctgtagtcccaaaactcttacatctttagctggtgccccacacaaagcttctcagtgactgttagggaaataaatgcaggaaaataattatcccatcagatcactggggggaagaatgaaaaggaaaaaaaagcaaggaaggtagaaacaaactaagtcattgcaagctaggcctaytttcttccaataatctcccaggtaacagcctctaccttgctaggatctgattacccgttgctggcctcagaccatagcattattgttttaacattcctaccttcctctttatcccagcatgaactgggttgtatgggaggctgggaagctgaccttgcttggggataaagagacagtttagcactcaacaatcttgaaggcagacttgaaaacacagtgattagaaaataaagcagt

SEQ ID NO: 600507 - DNA, 464 bp, Homo sapiens
agggggggaagaagagggtagaagaggtggtcatgtctcagctgggtctttgataatgcccaggaagaggtgggtggagatggggagtgggtccatgggggctagtagaggatggcctttctaaacagagcaygctaagtaaggagtactaagtctaagttgcttagtgtggccagaaccccaaatgcccatggggtggcaatggtctggacctagagcaccacaaggagactggatttcctactcaagaaacccagaaagattttaatcaagggcggagtctgatcagatctgtgttttagaaatacctttgggtgtcagcataaaagcaaagaaagaaaccataaaggaaaacattgacatttgactacacaaaattttaaaacttctgtacctcaaaaaaaaaaaaaacaccatgaaataagaaaaaaggcaaaaaataggggaattttttgcaaagttta

SEQ ID NO: 600508 - DNA, 464 bp, Homo sapiens
agggggggaagaagagggtagaagaggtggtcatgtctcagctgggtctttgataatgcccaggaagaggtgggtggagatggggagtgggtccatgggggctagtagaggatggcctttctaaacagagcatgctaagtaaggagtactaagtctaagttgcttagtgtggccagaaccccaaatgcccatggggtggcaatggtctggacctagagcaccacaaggagactggatttcctactcaagaaacccagaaagattttaatcaagggcggagtctgatcaratctgtgttttagaaatacctttgggtgtcagcataaaagcaaagaaagaaaccataaaggaaaacattgacatttgactacacaaaattttaaaacttctgtacctcaaaaaaaaaaaaaacaccatgaaataagaaaaaaggcaaaaaataggggaattttttgcaaagttta

SEQ ID NO: 600509 - DNA, 464 bp, Homo sapiens
agggggggaagaagagggtagaagaggtggtcatgtctcagctgggtctttgataatgcccaggaagaggtgggtggagatggggagtgggtccatgggggctagtagaggatggcctttctaaacagagcatgctaagtaaggagtactaagtctaagttgcttagtgtggccagaaccccaaatgcccatggggtggcaatggtctggacctagagcaccacaaggagactggatttcctactcaagaaacccagaaagattttaatcaagggcggagtctgatcagatctgtgttttagaaatacctttgggtgtcagcataaaagcaaagaaagaaaccataaaggaaaacattgacattygactacacaaaattttaaaacttctgtacctcaaaaaaaaaaaaaacaccatgaaataagaaaaaaggcaaaaaataggggaattttttgcaaagttta

SEQ ID NO: 600510 - DNA, 464 bp, Homo sapiens
agggggggaagaagagggtagaagaggtggtcatgtctcagctgggtctttgataatgcccaggaagaggtgggtggagatggggagtgggtccatgggggctagtagaggatggcctttctaaacagagcatgctaagtaaggagtactaagtctaagttgcttagtgtggccagaaccccaaatgcccatggggtggcaatggtctggacctagagcaccacaaggagactggatttcctactcaagaaacccagaaagattttaatcaagggcggagtctgatcagatctgtgttttagaaatacctttgggtgtcagcataaaagcaaagaaagaaaccataaaggaaaacattgacatttgactacacaaaattttaaaacttctgtacctcaaaaaaaaaaaaaacaccatgaaataagawaaaaggcaaaaaataggggaattttttgcaaagttta

SEQ ID NO: 600511 - DNA, 549 bp, Homo sapiens
tgtcccaaaatatgtattggggtgagcaagtaaaaccttttcttcaaatgcagggacttttcttaacttggggattgggttaacagagtcctccctgctgggaagtacttcccctcaatggataaaaaatagcttttaagaaagtctaatatgttaaagtcaaacttacaaaaaagctctcttaagggatttcagcatcctggcatgcttccacaaaccaaactactaccttctattaaacggaaatgcccctttaggggcaaggggtttggattcacttcttttatttmtctccacagcacctggtgcattgctgtgtctggaagttgttaaccacctggctgactgtggatcccatgggtaaggggatggtaggggttggtaaggattggtaagagactcagttttctctcagttatcttccaaaactctgcattgctaaatactttaaatcttcctcactgcctgattgaggacatatacatgcactcttttgatttctatatgctaaatcatcaaaataaaacacagaagctacctattatattt

SEQ ID NO: 600512 - DNA, 622 bp, Homo sapiens
tagttagttaagcaactcagtagccacactctgttgatggctgtggtgtcagtgacccacatacaatttggagctatatgcctgggtgctgggagaaatgcagaatttatacaatttgaaatatgaagacactagcaaagctacaagatcaacagaaactactaaaaaccagagaaagaaatgytaatttcatgttttcacttgctgctcactctcttcatcaacaaacttttttattaagtagttagcatgtgccttagttattaaagtaagatcattagcaaaggaaagttaggctataaagtataaatctaaatttagaatataaccctacagtgatcaaagttagctaataagagagaaggcaatttgaaaattttagtagtgttttataaattggttgcaagcccctgtttaaacagagtcaaatttcagtagcccatgacaatgatgaacaacgtggaaaattttgtatcataagtaaatcaaagcaggtgcttcaacagttcaacttatgtacatctgtatcatacctatgcatgtgcatgatacacacacacacacacacacacacacacacacacacacacgaaaccagaactgccaaaaagatgggaaggga

SEQ ID NO: 600513 - DNA, 615 bp, Homo sapiens
tggggtgagtttgccctgaggaacatttggcaatgtcttgagacatttggggttgtcwcagctagaggggtgctaccggcttctagtgggtaaaagctaagcatgtgccaatgcacaggacaactcccgacaccaaagaattctccagtcccgaatgtcactagtactgagcttgagaaatcctaattgaatctttcccctaacttatgagttatatagccagcaagtagtggggcagggaatcatactactctaaactatctctaaactacctctcaagtatttaactactgctactctaaattacctctcaaggtagagtgaaaccccattataaagggcttgttatacagggctttaaaatctaggcaaggagtgtttgcttgatgttgcaggaaacaggaataaagatgagcaggcatgaggatgaccagaaaaaaacaaaaacaaaaacaaaaaaacctgtttaaggaggataccccatgtgacagcaggatggcttggagaggagggggcctacagtgaggaaggccagatacaagttggtgtcagtaatctgggtgaccaggtcctggatttggtgtagttgcaatggagagaaaatgatgggcacac

SEQ ID NO: 600514 - DNA, 481 bp, Homo sapiens
cagcaagggaatgaattttaaaatggaatacctattattcgtacaccatactatttggtttcaccacatagatcaaatgcattcttgacaggttgtatttcaagcaacagttacaagtttcttcttgacttccatgatgcctcagacatgttctcaaggggaaaacaatcagttacaaggtgtactaaaacccatatttaagaaccttgatatttgcccccaagagaattagcctttgttaatgaacataattcctgggggaaaaggtacactatcaaaagtgttcccacacatatcacacacacacagtcctcttgtcttggagtcttcattggtaactggagttgaatgtttaggcaacttctccaggtattcagcaggaactattagattaaaaggactcccatagagatgcttttgagacagagtgtgacasttcataagcatcaaagtatacttggtgatcaacttctttaagaaa

SEQ ID NO: 600515 - DNA, 563 bp, Homo sapiens
gcttttgagaggatgtgaacttagagcagcagatggtgtgtatataaaccataagcagcaactatgacctcaaatgattttaacaccaaggaactctgcagaaattagggtcagccagaatgccaaagtggtatgttccgttcttcttaaaaatgggtcctgttttccaggactgactcaagcacaactccagtttctaatcasaatgtagcactcagttctacacgagaactaagcatcacaatgagaacagagcagcacaattgtaacaatgaacataatggaaatgagggaggcaatagaattcaattcctccaacagtgaataaactcaatttgaattttttaaaacactccatactttacatttcctaagtaaactttgccttgactgtccactcaagagtcaagatacacttggtaatttttaaatagatgcacaattcattggtcaaaatcacatatcagctcaattcattggtcaaaatcacacaccttgcttgaaaaggacttaatatgatgctttccccaggagttacccaggcacctaggagaaaaggagca

SEQ ID NO: 600516 - DNA, 581 bp, Homo sapiens
ttcaatatcatatgtcactaggaaattgaaaattaaaacaacctactatacacctattagaatgacaaaagtccaaaacattgatacmaccaaatgctggcaaggacatgacgcaataggatctctcatttattgctggtgggaatgcaaaatggtacagccacttcgatctgcagttgaatgctctacctctgagctatacccactcctggtacagccactttggaaaacagtttggcagtttcttacaaaactagacatattcctaccatgcagtctagcaatcacactccttggtatttatccaaatgaactgaaaatgtatgtccatacaaaaacctccacatggatgcttatagcaactttattcatatttgccaaaatgcggaagccactaagatgtccttcggcagatgaatggataaactgtggtacatccagacaatggaacattattcagcgccaaaaagaaatgagctagcaagccatgaaaagacattgaggagcattaattgaatattatgaagtaaaagaagccaatctgaaaaagctacatgctgtataattctaattatatgatg

SEQ ID NO: 600517 - DNA, 582 bp, Homo sapiens
gttattctataagcaattataggaaccagaaaaggatttttttaagcaggtgaatgatgtgcatattaatccagtttttctccttctaggatgaattttcttaaagtagaaytgctgagtcagagtatttatgtttttaaagcttttgatacatgtttttttgacactgttatcaaattatcctccagcatgggtgaccatatgtacacttctttgcatacccctaaagagtggtctttcttgattattggtgtaccataaccagatttcctccttgctgtcctaccaggcagtttcccagtactacagcaagtactgcagggtcctgaggattgtgccggggggccttctgcatatgatacaaatgagcttgattgacaagtgagtcatcaggaccatctgacgccaggagggatacattcatttgcaagtaaactattattacaatcatcggactttatactaatagattttgaatgacatggtctccaaagtgattctttgtcttgcaaaatctgcactcagagtctttgaatgctcaaagagagactccgtttaatcttctgtgcttctgtgtgtttt

SEQ ID NO: 600518 - DNA, 435 bp, Homo sapiens
tccttggggtcctcagatacttttcgatccaacttccatggagttttctccctgcggccctctaacctctctccatgctgaggatgctctcctaacagtgcttgtrttgtttggaaacagtaagtgttattaatctgaattcagtcacagaagcagaaccacgatgagctgtggaggaagcgatttatcataggaattagtcctggccccattgtgagagggatgggggattgaaggtccaggaggaaattggaagatgggaggagccacccaccatcagtctgagaagcccagcacatccaactgtgcaagtggaaggggaagccggttggggagacctatgggaagctgttcctacctctatgggcctgcagccaagtgtccagtggtggccctggggctcctgttggtcaacaggatcagcactcacaaaga

SEQ ID NO: 600519 - DNA, 498 bp, Homo sapiens
cgaatatagcactgatatgctagcagtggtttttactgggtggtagagttttaattgattttattcattgattagtttctttttccttattttctaatttttcagcattaattatgcatgactttagtattgttttaaaataaagaaaataattctctacttgcctggttgaatcctgtggcttcagggtttcagatcctttttatatgggaggtacataaacacctacattgttaggattgttttgttgtttgtttgcttgcctgttttgggaatgaattatatttagacagtagttaatcactttggttttagtctttttacaaatgtatgtttccttaagtatctagtctctctctctctctcttwtttttttttttgctagaaggtatctactctcatggaagcttaaggaagcacagttcagctcaagcaagcagtagaacctaggtctcttgcctcctactccaggcttcttccaactacaccacctttgat

SEQ ID NO: 600520 - DNA, 498 bp, Homo sapiens
ccagtacatctatcaactgtttattttaatggctatatttttatttcctaatttttactgtgtgtttgtgtgagagtgtgtgtgtgtgtgtgtgtgtgtgtgtgtgtgttaattgcaattgtcttcatatctgttaatagctgttgtccctgggatatgttattgcatggttattcacattccacttcatatactttctcctgttttaacattttgttttgtattattcaataaatacatattgtttttacattctaaaaaaaagctttcatcttggaaaacactaatgyatcaatgacatttatttcttgtggttgttcagagaagacaaaaacagttaaggaagaaaaaaagaaaataagtaagagaaatgaaattttcacaaatatcagcactggaatttagagcgtcctgaaataaaaagagagtagtttgttttgctagtattttactcatgttactacactagattctgaagaaaaatagtgtacattaatt

SEQ ID NO: 600521 - DNA, 572 bp, Homo sapiens
gttagtctttctgggtgacaaacccccatcctgattttgcctaggggctgcctgctatcagtcaactcattagggtacaaaaagacaacactttggaatttctaaggattttaggatttgtatgccaggaaacagggtcaaagaccaaatatacatcacaatatcacaatttgcttgttttttgtttcagcttgggatcagccttatttttaatacacagatgctctcctacacaggaaccccttacttattagggacctttgagattccttttcagatccccctgttgccatggaattgtagctggaacatccactccacttcctactgactggctcctgacatttctcagtccccaaatatctcaccttctcccaacagcctgaatttttgttttcttcacccagtttctgtttgcaatggcatttgtcagattttcacatatcaacatccttcttaataatgagaaccttttaggcattcacattctcatatagatccactcagtcagattgctttccacttagctgaawccaccatatagagaaaaggaagcttctattgcaggaatc

SEQ ID NO: 600522 - DNA, 598 bp, Homo sapiens
ctgtttcctcttctggccaataaattaaaagagatacaagctcaggagtactgaaacacgcattgctttctkgggcttgaatttttatgtaagtcacttattgtcctgcatctaaagatctaaactgcatccaggtttttttgtttgtttttgtttttgtttttgttttgagacaaagtcttgtggtaggagttattaaaaaattattttaggcagatagaggaaaaggggtccttggaaagttttcatttcttttcaaagcaactccagaaacatttcttgtctagcagaaaaactctggctcctagacccaggccggcaacctttgatatgcaaatgcaggccattagaaactgggtccacccaacatggcgattcccaccgttgtcctcttgcccttaccccggacatgtgcctggcaacatgggcacccccacatatccccacgtgtgtagaacgtcatggtgccctgcatttgcatattaaaagctaaggtggggggccaattttttcgcaggctacatgaatgacaagcctggtcaaaccaatcccctgagccctgtgcaaatcagacactgtctcctccagcctcctcata

SEQ ID NO: 600523 - DNA, 588 bp, Homo sapiens
gtaataagggacagtaggcacctatttcaccagaggggtggcccccaaatggacaatrcagtgtcatgcttaccttcacaagcatagtcacaagttttgtcctcttttggagtctcacatcattattcttttgtaaaagcccacatagctatagtagagaagttgcggggactctaactcaaaggtggggacccagagcagctttcaatttacgtgagtgactcattcctgatgaaggacttccacataactagtacagtgtcaagggaagggttttttgcttcctctacttaattataactttcagttttttaggaaggagaaaaagattattattagtgtgaaaaagcaccagatattagatagcggctcagaaaatatgttctgaggatagttttcctgactgagaaaatgaatttccatttaacatgactgttaactgaagaattccagtcttaggctcatatacccagctgtggtaaataaaaatttccctagttttggggtgtgtaaagaaaacacggcttgtctccagtggctaccaaaaggaaacaaacacaaaaagaaatggaagctgtgaaatgctaa

SEQ ID NO: 600524 - DNA, 588 bp, Homo sapiens
gtaataagggacagtaggcacctatttcaccagaggggtggcccccaaatggacaatacagtgtcatgcttaccttcacaagcatagtcacaagttttgtcctcttttggagtctcacatcattattcttttgtaaaagcccacatagctatagtagagaagttgcggggactctaactcaaaggtggggacccagagcagctttcaatttacgtgagtgactcattcctgatgaaggacttccacataactagtacrgtgtcaagggaagggttttttgcttcctctacttaattataactttcagttttttaggaaggagaaaaagattattattagtgtgaaaaagcaccagatattagatagcggctcagaaaatatgttctgaggatagttttcctgactgagaaaatgaatttccatttaacatgactgttaactgaagaattccagtcttaggctcatatacccagctgtggtaaataaaaatttccctagttttggggtgtgtaaagaaaacacggcttgtctccagtggctaccaaaaggaaacaaacacaaaaagaaatggaagctgtgaaatgctaa

SEQ ID NO: 600525 - DNA, 593 bp, Homo sapiens
gaattcagtgatatttctcctatttgtttttgaaaggagagaaatatggctctgttctgcctggctctcaggcagccagacctaatggttatctcccttgttccctgaacatcgctgttatcctgttcttttttcaaggtgcccagatttcatattgtttaaacaatttgtgcagttaatgcaatcatcacagggtcatgaggtgacatacatcctcagcttatgaagatgatgggattaagagattaaagtaaagacaggcataggaaatcacaagaatattgattggggaagtgataaatgtccatgaaatcttcacaatttatgttcttctgccgtggcttcagctggtccctccgttcagggtccctgasttcccgcaacaacctgtgataaaagacacccttgagtcaccctctcccccctcttcctaaagttaagaatttaggaactctgtggacttagaaaatgaggagccaggataaagctgtctgtgtgaattgaatggtagctggtcattccagaggtgttcagaaacctagatatgacctaggaggaaggagacccacagtacctgagcctagggtggagtt

SEQ ID NO: 600526 - DNA, 507 bp, Homo sapiens
gtggagggttttgctattacagttctgcaagaccaagcaatacttccttctatgcttttaccctgaaaaagatatcctgaacaggagtctcccagtgcttgaggtcagtctccagatcagagctgtgttctccggacactcactgttttctgaaccagtgagaggtgaacagtctctgttgtccccttgcttttcctggctccccctcctcccacgtacctttgctatttgtccggaaacacaggcaggaatataaagaacttaaatatacagtgttttccttaagtggctrgttattttgcaatatattgttcgagaaaatctccctgaaaaattgctgcttccttttgggggtgttagctcaggctttccccttgtgttttccaaaaaattccatgttcaagaagctgaactttcttgctccacataaaagcttcgggatatgcttaacctcctccatcttctgaactgcgtctgacattcaaatattccctgtcctactacagg

SEQ ID NO: 600527 - DNA, 633 bp, Homo sapiens
aagctttgtatatgtccaggatataaatcgtttgatctcttcttttccaaagattttgcgcagtttttctcccatattggcatttccttttcattttatttatggagtctttagaaaaacaaaagttcttaagggtaagttgttagcatggcatttccttcaatggttaatatttttgtgtctttaaaaaagaatccttttggactccaagatgagagagatatttttcctatatttccttctagaggtttaactttaatccatctggaaatatgtgtatgtgtagtggagggagggttcatatggctttcattttttccatatggaaaaccaattgtcccagctctatttattgaatagttcctcatttgctcactgatctgtaatgtcacctccttcctgtattatattatagcacacgttgacyctaatgcttccaacagggagtctctgtgctcctttgcttggagtctttatctgacccggggagcccgatagttggacatgtgtcagtcaagccatagtgctgagaatctaggagatcccacaaagaaccgccctcagctgaggactgatgaatgttgaagggcaagtactctcactcacctatcccacagctggaaagagtattct

SEQ ID NO: 600528 - DNA, 633 bp, Homo sapiens
aagctttgtatatgtccaggatataaatcgtttgatctcttcttttccaaagattttgcgcagtttttctcccatattggcatttccttttcattttatttatggagtctttagaaaaacaaaagttcttaagggtaagttgttagcatggcatttccttcaatggttaatatttttgtgtctttaaaaaagaatccttttggactccaagatgagagagatatttttcctatatttccttctagaggtttaactttaatccatctggaaatatgtgtatgtgtagtggagggagggttcatatggctttcattttttccatatggaaaaccaattgtcccagctctatttattgaatagttcctcatttgctcactgatctgtaatgtcacctccttcctgtattatattatagcacacgttgactctaatgcttccaacagggagtctctgtgctcctttgcttggagtctttatctgacccgggragcccgatagttggacatgtgtcagtcaagccatagtgctgagaatctaggagatcccacaaagaaccgccctcagctgaggactgatgaatgttgaagggcaagtactctcactcacctatcccacagctggaaagagtattct

SEQ ID NO: 600529 - DNA, 691 bp, Homo sapiens
cacgtactaaaataattcatgttggtttgcatgaattatttatgtctggtgtgcattggaaatgctttctttttcagcgagaatcagttttcttagccttggctcctcagaaaagaagatcactccttatgttacagttctgtgcccattgtaaggtattgctgtggcgttttaccractgaggagggtctcccacgtgtctgcgaagcctctgagtacttttctgtgctttttgcttcctctgtgtctacaaggcatgtgtgcaagtctccatcttgttggaagaataatccccttcctctcccatgagaggtatatggaagttactgtaggagcacacacacagagtgttgtgtttgagttttctggggctgctgtagcaaaagtgtcacagaccgggaggcttaaacaacagaaatttattctctaccatttctgggcaccagaaatctgaaatcaaggtgtctccgggtggtgctccctttggaggctctaggggagaatccttcctgcctctcccatttctgggggacttcaggcttccctgggcttgtggccgcatcactccagtcctgcctccatctccatgaggacttctcttctttatctgtgtctcgtcttctgtctcttacaggaacacctgtcattggatttaagagacccctctaaatctagccataatctcatcaat

SEQ ID NO: 600530 - DNA, 691 bp, Homo sapiens
cacgtactaaaataattcatgttggtttgcatgaattatttatgtctggtgtgcattggaaatgctttctttttcagcgagaatcagttttcttagccttggctcctcagaaaagaagatcactccttatgttacagttctgtgcccattgtaaggtattgctgtggcgttttaccaactgaggagggtctcccacgkgtctgcgaagcctctgagtacttttctgtgctttttgcttcctctgtgtctacaaggcatgtgtgcaagtctccatcttgttggaagaataatccccttcctctcccatgagaggtatatggaagttactgtaggagcacacacacagagtgttgtgtttgagttttctggggctgctgtagcaaaagtgtcacagaccgggaggcttaaacaacagaaatttattctctaccatttctgggcaccagaaatctgaaatcaaggtgtctccgggtggtgctccctttggaggctctaggggagaatccttcctgcctctcccatttctgggggacttcaggcttccctgggcttgtggccgcatcactccagtcctgcctccatctccatgaggacttctcttctttatctgtgtctcgtcttctgtctcttacaggaacacctgtcattggatttaagagacccctctaaatctagccataatctcatcaat

SEQ ID NO: 600531 - DNA, 571 bp, Homo sapiens
tgtttttacattatgtttagccatgatttactacaggaattttattcattttatttctccatggcagcgtcacacttccctaataaatgtgacaccttttgcatggtgactatgtggtattaatgaagccagtctcctccttactcacctgatgtataaatctaatgttaatcaaatgcctgttattagcccagcattggaacagtcatcagcaatgaagcaatgagaaaacccaaygggctcctgggttgattgaggtaatctttcagtagaaataaagattgaaattacattcaattctctgtatttgtgatagttgtgttctataaagtcaccataaacactgaattagcaagttgtaaactattgctcccaggggaaatacaagattaggattctatgatgtctggtcacaacattttcatcaaccagtcaatacataatcttgttttatgcatgtttctgtttaagaaaaactttctgagtagatatttttgactcattcacactgaactcatgtccagcagcaccatgactcatgcctgagtaatgcttctctaacacagagatt

SEQ ID NO: 600532 - DNA, 609 bp, Homo sapiens
tctgtatgcccactgtgcagtaacaaaccaatacactgagacagcagggtttgcagcagagaaagagcttaattattgcagcacactgagtgagaaaacactgactccactctccctgtggagtcctgagctgtagtttttaaagggattgcagaggataaggggctggaaaattggggtcattgactgctttgggtaaggaggatgaagtcatcaggatatggaaactgcattctttggtgagttagcttcttgtggtrtccttcagaccacctggcatcagtagtttcatcagtatgcaggacctgaaagaatatctcaaagggaaaacttgtttcataatgttgaagttgttatctagaaagcagttaagggaactctaatctagggtctatgtgattctaggacaagaggcacgaaacaactatgacaaagcaggacagggagcaagctgacctcaggatgagtgttgagtgtgctgtgagcttggtttattttcatttctcccctttgtttttcccctgctaaattttatgaagtttatagggatgatttcacatgtgtgttgatagttcaagatgtagctctgccctactatgaaaagtgcag

SEQ ID NO: 600533 - DNA, 609 bp, Homo sapiens
tctgtatgcccactgtgcagtaacaaaccaatacactgagacagcagggtttgcagcagagaaagagcttaattattgcagcacactgagtgagaaaacactgactccactctccctgtggagtcctgagctgtagtttttaaagggattgcagaggataaggggctggaaaattggggtcattgactgctttgggtaaggaggatgaagtcatcaggatatggaaactgcattctttggtgagttagcttcttgtggtgtccttcagaccacctggcatcagtagtttcatcagtatgcaggacctgaaagaatatctcaaagggaaaacttgtttcataatgttgaagttgttatctagaaagcagttaagggaactctaatctagggtctatgtgattctaggacaagaggcacsaaacaactatgacaaagcaggacagggagcaagctgacctcaggatgagtgttgagtgtgctgtgagcttggtttattttcatttctcccctttgtttttcccctgctaaattttatgaagtttatagggatgatttcacatgtgtgttgatagttcaagatgtagctctgccctactatgaaaagtgcag

SEQ ID NO: 600534 - DNA, 664 bp, Homo sapiens
ctcagctaatttttgtatttttttgtagaaacagggtttcactatgttggccaacctggtctcgaactcctgaccttaagtgactctcccgcctcggcctcccaaagctctgggattacaagcgtgagtcagcgtgcccggcctttattttgtttctaagatgggaaatgaacctaagactcttgaagacatttacaacgtcaattttatcaaaacaattgagagaattcaggtcataattttgagaaacaataaaaatggtcagacaaatgctgtctatgacgagtgaaagagctctatgagttttagaacaatggtctccaaggtagggagattttgttctatgccaggggacacttggcaatgtcygtagatattcttcagtgtcacaactgagtggtctcactggcacctggtgcgtggagcccaaggatgttgctcgacaccctacagtgcacaggacacccccaccacagagaatcatccactccgaaatgtcagcagtgccagctcaactgcaaaaccctgccttagcatgagagactctgtgtgcctgtctgtcatctatttatctatctctctttttgtccacctatctgttatctgtctatcatctatatatctatccacctatcatctatttggtcatctatctgttatcatt

SEQ ID NO: 600535 - DNA, 581 bp, Homo sapiens
ataaataaataagacaggaagcaaaggtgtcagttgtcagtctctcggtcatccatgcagaaaatctgacatcatgtgagcattccaaaagttaaagattttggaacattttggattttggattttcagatgaggaatgtccaccttgtactgagaaagccttcatttattggtaggagggaggaatctagggaaatctaaggaaagtactcatgtcagargtgtttgaaccagggcgactctatcttgaataggggctgggtaaaatgaggccaagacctactggactgcattcccaggaggtgaggcattctaagtcacagaatgggataggaggctggcacaagatacaggtcttgctggtaaaacagcatgtggtaaagaagccagccaaaagccaccaaatccaagatggcaacaaaagcaacctctggtcattctcactaatcattatactctaattataatgcattagcatactaagagacactcccaccagcaccatgacagtttacagatgctatggcaacatctggaaattaccctatatggtctcaaagggagagaaaccctcagttccg

SEQ ID NO: 600536 - DNA, 604 bp, Homo sapiens
atcatcttcagcctttaaatattttcttctttaaaaaaagtttaaagaawtttttttcttcaactttaaaatttaaagcttttaattttttcttcttttttaaaaaaattttaaccgagtgcttgttggattgtttatttagatatcaattcagccttatagttttaaaatcaaagataaaaactgtattttgctttttgaaaatgctaagctcataaaacattgtatagttttaaaaactcactattttcagagttttaaactttttttcttaacataattgtaggcattgttgttttccttagcaacattgattactacatatctcattttgtgatattcagtttaggtatttttctttccattcaataacatatattttcctttaaaataaaaaaaaacagcattaacagttataatttctgaatgaagcaatgagggacaattttaattttcttcttatactttttgatttcatgaattttgtctataatttttcaactagaagaaagcaataatcaaaattgcatcatggaaggtttccattgtcttagagagggagaattgagtttacctctggggcagactttcatctggcatctaa

SEQ ID NO: 600537 - DNA, 604 bp, Homo sapiens
atcatcttcagcctttaaatattttcttctttaaaaaaagtttaaagaaatttttttcttcaactttaaaatttaaagcttttaattttttcttcttttttaaaaaaattttaaccgagtgcttgttggattgtttatttagatatcaattcagccttatagttttaaaatcaaagataaaaacwgtattttgctttttgaaaatgctaagctcataaaacattgtatagttttaaaaactcactattttcagagttttaaactttttttcttaacataattgtaggcattgttgttttccttagcaacattgattactacatatctcattttgtgatattcagtttaggtatttttctttccattcaataacatatattttcctttaaaataaaaaaaaacagcattaacagttataatttctgaatgaagcaatgagggacaattttaattttcttcttatactttttgatttcatgaattttgtctataatttttcaactagaagaaagcaataatcaaaattgcatcatggaaggtttccattgtcttagagagggagaattgagtttacctctggggcagactttcatctggcatctaa

SEQ ID NO: 600538 - DNA, 604 bp, Homo sapiens
atcatcttcagcctttaaatattttcttctttaaaaaaagtttaaagaaatttttttcttcaactttaaaatttaaagcttttaattttttcttcttttttaaaaaaattttaaccgagtgcttgttggattgtttatttagatatcaattcagccttatagttttaaaatcaaagataaaaactgtattttrctttttgaaaatgctaagctcataaaacattgtatagttttaaaaactcactattttcagagttttaaactttttttcttaacataattgtaggcattgttgttttccttagcaacattgattactacatatctcattttgtgatattcagtttaggtatttttctttccattcaataacatatattttcctttaaaataaaaaaaaacagcattaacagttataatttctgaatgaagcaatgagggacaattttaattttcttcttatactttttgatttcatgaattttgtctataatttttcaactagaagaaagcaataatcaaaattgcatcatggaaggtttccattgtcttagagagggagaattgagtttacctctggggcagactttcatctggcatctaa

SEQ ID NO: 600539 - DNA, 604 bp, Homo sapiens
atcatcttcagcctttaaatattttcttctttaaaaaaagtttaaagaaatttttttcttcaactttaaaatttaaagcttttaattttttcttcttttttaaaaaaattttaaccgagtgcttgttggattgtttatttagatatcaattcagccttatagttttaaaatcaaagataaaaactgtattttgctttttgaaaatgctaagctcataaaacattgtatagttttaaaaactcactattttcagagttttaaactttttttcttaacataattgtaggcattgttgttttccttagcaacattgattactacatatctcattttgtgatattcagtttaggtatttttctttccattcaataacatatattttcctttaaaataaaaaaaaacagcattaacagttataatttctgaatgaagcaatgrgggacaattttaattttcttcttatactttttgatttcatgaattttgtctataatttttcaactagaagaaagcaataatcaaaattgcatcatggaaggtttccattgtcttagagagggagaattgagtttacctctggggcagactttcatctggcatctaa

SEQ ID NO: 600540 - DNA, 610 bp, Homo sapiens
accaccctctgtcagctgttgcccttgtcacagccgtgctgctcttcctgtttccccaacacctagccagggcccacttgtcattgccactgtttctctctggtgctcctggtctccgacacgacctcagatgccctttgccacrgaggaggaaggatgccttgcccaagcgtacaagacgtgaaacagcttcaccgctatgtcctctccatttctgggctccttttctatcttatgtttgccccctactcacagcccttccccattaagaaccaacctccaaccgcatgccagttgcaacatttctgatgatgaagtgtcaccgaagtgggcctgattgaagaaggtaaggaattggcacatggaataagaatttcaagtgttcataacaagaaggggagggtttttttttcttttcttttttgcaaagaattaataatgaaatggtgggatgcctctaactacacactttggcctcaccctgcattaactcctgaactcccagctatgtgcctgccttctccttgtactagagcctatgaacacttcataaggaagaaaaaatcagagcatccttagccatgctgagaaacagcaatgttccaagctt

SEQ ID NO: 600541 - DNA, 610 bp, Homo sapiens
accaccctctgtcagctgttgcccttgtcacagccgtgctgctcttcctgtttccccaacacctagccagggcccacttgtcattgccactgtttctctctggtgctcctggtctccgacacgacctcagatgccctttgccacggaggaggaaggatgccttgcccaagcgtacaagacgtgaaacagcttcaccgctatgtcctctccatttctgggctccttttctatcttatgtttgccccctactcacagcccttccccattaagaaccaacctccaaccgcatgccagttgcaacatttctgatgatgaagtgtcaccgaagtgggcctgattgargaaggtaaggaattggcacatggaataagaatttcaagtgttcataacaagaaggggagggtttttttttcttttcttttttgcaaagaattaataatgaaatggtgggatgcctctaactacacactttggcctcaccctgcattaactcctgaactcccagctatgtgcctgccttctccttgtactagagcctatgaacacttcataaggaagaaaaaatcagagcatccttagccatgctgagaaacagcaatgttccaagctt

SEQ ID NO: 600542 - DNA, 610 bp, Homo sapiens
accaccctctgtcagctgttgcccttgtcacagccgtgctgctcttcctgtttccccaacacctagccagggcccacttgtcattgccactgtttctctctggtgctcctggtctccgacacgacctcagatgccctttgccacggaggaggaaggatgccttgcccaagcgtacaagacgtgaaacagcttcaccgctatgtcctctccatttctgggctccttttctatcttatgtttgccccctactcacagcccttccccattaagaaccaacctccaaccgcatgccagttgcaacatttctgatgatgaagtgtcaccgaagtgggcctgattgaagaaggtaaggaattggcacatggaataagaatttcaagtgttcataacaagaargggagggtttttttttcttttcttttttgcaaagaattaataatgaaatggtgggatgcctctaactacacactttggcctcaccctgcattaactcctgaactcccagctatgtgcctgccttctccttgtactagagcctatgaacacttcataaggaagaaaaaatcagagcatccttagccatgctgagaaacagcaatgttccaagctt

SEQ ID NO: 600543 - DNA, 610 bp, Homo sapiens
accaccctctgtcagctgttgcccttgtcacagccgtgctgctcttcctgtttccccaacacctagccagggcccacttgtcattgccactgtttctctctggtgctcctggtctccgacacgacctcagatgccctttgccacggaggaggaaggatgccttgcccaagcgtacaagacgtgaaacagcttcaccgctatgtcctctccatttctgggctccttttctatcttatgtttgccccctactcacagcccttccccattaagaaccaacctccaaccgcatgccagttgcaacatttctgatgatgaagtgtcaccgaagtgggcctgattgaagaaggtaaggaattggcacatggaataagaatttcaagtgttcataacaagaaggggagggtttttttttcttttcttttttgcaaagaattaataatgaaatggtgggatgcctctaactacacactttggcctcaccctgcattaactcctgaactcccagctatgtgyctgccttctccttgtactagagcctatgaacacttcataaggaagaaaaaatcagagcatccttagccatgctgagaaacagcaatgttccaagctt

SEQ ID NO: 600544 - DNA, 612 bp, Homo sapiens
atttctggcagtttctagtatggttttaacaaaagggaattttgggaggaataacatttttaaaaagagccmactattatcattctgctttattcctaactttagtccttttgagcctgtgttatcaaatggattttgagcatatgtgaattagagaaattaatcactaggaaaggattagaattaacttttttggaaaagttccttaaaccgtgaaaaggcagtaacaccattctttgtgtgtgagattaaagagaaattaattttctttctcttcttgtctagacacacaaagtccaattgtacgcatacagtcacaaaatataggtgaaaaacgaaaactgtgttaacacggtgagacagatgttttaaccaatcaacatcaacatgcaactaggtgaaaataattaaattactccagttttcatctgtcagttggatgtttgacattgtgtagacacagcttataagtaaagataattatgaaagattattaaataaagatctccctgacacggattaattgaaaagtatttagtattttttgtaagcacagttaaactggagtggatttccgatagcatgtgtctctcccccagctcaaaaagcttt

SEQ ID NO: 600545 - DNA, 434 bp, Homo sapiens
tgaaacccttgggaatgagtatgcttttgtggacaagaggaaggggactcagaactttttaatttttttacatctgttttatgcagcaccctcagaggaatatggaacatcactcccaaatcaaactcattaatattcctgcaggaaaatatctaaatgtccaccctgaggtggaaaagaaagaacacraatagtcatctgtcagatcaggttttgcccccaaatgagttttgatatcactgtaaagttttgaactgtttttgactttcaaattgtagataagggactctggatctgtatgtcctctgatttctattaaccagtcctagaacagtaaacaaaacaaacactaaagagcaccccatttacagagtggtttaagtccactgaagttggttaacacttggaccctgaaaatccatgcatactgtatg

SEQ ID NO: 600546 - DNA, 510 bp, Homo sapiens
aagcaaaaacccctatgcttcctgtacatcctgcagaaccatgaaccaattaaacctctttcctttataaattacccagcctcaggtaaaaaaataaagcaatgcaagaacggactaatacaacattcaacgttcgagtgtaatgctgggtatgagagttgattctaggtaactagcactgaatgcatctgttcattgtttataaacatagaaagtagtggcagaactgtactaaaaaaaaatgtctcagagttgctataaactccagttaagccactctccacaggactttggaacacctaaagtactgacagcttttttttttttatgttaactttcatttcttgatgttattttcaaagcattaccctttaatgtcttccctggagcagagttatatccacagacacaaggttatcagttyatttccactgccctgccctgcttttttctttaagtaaagcgaagataaagcattctttggggaaaaccaatattgcattcggaggc

SEQ ID NO: 600547 - DNA, 578 bp, Homo sapiens
ctgtccttttttttttttagtcgttgattccctaayatctgaaggttatactgtagttgctgcaccacattgatttgcataactactctatgtcctttgaaaccacaaaatgtttaataaaagattcatttgggtaatatgtgttcagaacttagtatcaacaatctcaatgttcaaacttacaggcccctagaattatcctgatcatcccttgacttaaaaattatgttttcaggaatgccatgaaaggaatttttcttgatcatcagttttgaattggactaagtcatcctagcaataaaataaattctaacataagatcactaagactatccagattatcatgaaaatccattgcaaagaattttccctaataggggttacaaaaccagaaagtgttcagtcaactgtatgtagaaaaattgaatgaactgacataaattgaaattttcgagtattaaataggcttcacaaattatttgtacttctcagctagctgtggttcttaatttacattcacacattcttcatagtgaaaaggaatgaatgcctgtctctgcagtctttaaacataccaa

SEQ ID NO: 600548 - DNA, 578 bp, Homo sapiens
ctgtccttttttttttttagtcgttgattccctaacatctgaaggttatactgtagttgctgcaccacattgatttgcataactactctatgtcctttgaaaccacaaaatgtttaataaaagattcatttgggtaatatgtgttcagaacttagtatcaacaatctcaatgttcaaacttacaggcccctagaattatcctgatcatcccttgacttaaaaattatgtwttcaggaatgccatgaaaggaatttttcttgatcatcagttttgaattggactaagtcatcctagcaataaaataaattctaacataagatcactaagactatccagattatcatgaaaatccattgcaaagaattttccctaataggggttacaaaaccagaaagtgttcagtcaactgtatgtagaaaaattgaatgaactgacataaattgaaattttcgagtattaaataggcttcacaaattatttgtacttctcagctagctgtggttcttaatttacattcacacattcttcatagtgaaaaggaatgaatgcctgtctctgcagtctttaaacataccaa

SEQ ID NO: 600549 - DNA, 536 bp, Homo sapiens
gctgctggaaaacaatagttgcaaaacaacaatgcctcaagctgtgcataaatcagggcttgtaaaactcataagctgcacttcaactcttaagcaactgttaccttaaagaagaactagcctttccacaatatctattgattaatatgaaatactaaaagaggttttgtttcataaactgttgcttcttggcttctaaaaagatacagttttaccttttatgattttattacataattgtaaagaaataattgttgaaagaaattcacgttcctgtaattctgattctaccccatatatgttaaggaacaataaggtaacacaatagattaggctaggattaccatactggtgctcaatgaagacaatgctgccccctcaggagccacttggcaatgcctgcaggtagytttggttgtcacaattaaggatgggcgttaggtgttaaagacttggagtgggtagacgccaggagtgctgctaaacatcttacaacgcacaggaagcgccccaaaagttttaatagtgctaatgtg

SEQ ID NO: 600550 - DNA, 536 bp, Homo sapiens
gctgctggaaaacaatagttgcaaaacaacaatgcctcaagctgtgcataaatcagggcttgtaaaactcataagctgcacttcaactcttaagcaactgttaccttaaagaagaactagcctttccacaatatctattgattaatatgaaatactaaaagaggttttgtttcataaactgttgcttcttggcttctaaaaagatacagttttaccttttatgattttattacataattgtaaagaaataattgttgaaagaaattcacgttcctgtaattctgattctaccccatatatgttaaggaacaataaggtaacacaatagattaggctaggattaccatactggtgctcaatgaagacaatgctgccccctcaggagccacttggcaatgcctgcaggtagttttggttgtcacaattaaggatgggcgttaggtgytaaagacttggagtgggtagacgccaggagtgctgctaaacatcttacaacgcacaggaagcgccccaaaagttttaatagtgctaatgtg

SEQ ID NO: 600551 - DNA, 536 bp, Homo sapiens
gctgctggaaaacaatagttgcaaaacaacaatgcctcaagctgtgcataaatcagggcttgtaaaactcataagctgcacttcaactcttaagcaactgttaccttaaagaagaactagcctttccacaatatctattgattaatatgaaatactaaaagaggttttgtttcataaactgttgcttcttggcttctaaaaagatacagttttaccttttatgattttattacataattgtaaagaaataattgttgaaagaaattcacgttcctgtaattctgattctaccccatatatgttaaggaacaataaggtaacacaatagattaggctaggattaccatactggtgctcaatgaagacaatgctgccccctcaggagccacttggcaatgcctgcaggtagttttggttgtcacaattaaggatgggcgttaggtgttaaagacttggagtgggtagacgccaggagtgctgctaaacatcttacaaygcacaggaagcgccccaaaagttttaatagtgctaatgtg

SEQ ID NO: 600552 - DNA, 596 bp, Homo sapiens
ctgatactttgcatatctgagttcgtgccatcatcagcaatagcagacaattgaaagaaccatcaaaattatacagatgagtaaattgagagtcagagagagaaaggtacttgcctttcagtatgcmgaagaaagaaatgaaatcatgagacaagagtgaaggtctgctatgcacaaagcttgtattatttatattgattcatggagaaagaaccaacggcaaaggtacagaggaaagatgactagggaaaaaaggatgataaagggatggatgtggtaacagcaaagagaactctagaagccaaacaagcatttctggaaagcctgctgcatgccaggcattgtacttgcccacagtagcccacattcctataggcaagatggtcacagaaacgactaatgacaagaaggtaagagccttaggaagatcatcaggaaggtgcactggagttaacacagctacactggacaaggtgcaaagagcactttgcagagaaggtaacatgcattctgaatcttgaagatacttcaagatacttcaagaagttacaagatacttcaggatgctgatcttctcttcatcaactggttcccca

SEQ ID NO: 600553 - DNA, 322 bp, Homo sapiens
tttgccatgattgtaaatttcctgaggccttcccagctatgcggaactgtgagtcaattaaacctcttcctttataaattacccagtctcaggtattttttatagcagtgtaagaatagactaatatagcagggaaggcaggcaacgggaattgggttggttcctctcttataccacggaaggtggyaagttgttaagactgtgtgcagcatagcccatgagacttgcattaaagactaccagccctattactaatctggctgttattcaatcatcctaatctcagtttccacatctctgtaacagagttaataaacagtgt

SEQ ID NO: 600554 - DNA, 231 bp, Homo sapiens
aaggaagctgtcacagtgggccacaggaagacagcacatagctaggaatgttctgcagggcagaaatgagaagtagacatccatttacataagtgctgagaaaagagaagtaaaatccaacagagtttgtatcttggacacactggtatatggggcacctttaacyaacaggagggtgcagagaggaataggttttagaggaagagcatctcttaatatttgaatgtgttg

SEQ ID NO: 600555 - DNA, 484 bp, Homo sapiens
gcccatcaaattgatataggatcatcactaaaaagacaccactgggttttggcaatgtagaaatcactggtcatactttaatgagatttgttagcataaaattgaaaggatagagaaccagttttggagaactggaggacaaagaastataaattcctattacagtaatggtcactattaatggaaggagaaaaatatgtcataactcaagagaagacaggattgaggctgactggccattggacacaggaggagtacttgggttgatggtgggggttaactcctagatcccacttgggaggtggaaaactgtcccagattctggaagacaggagagttatacgaacaaatgaatctgttagtataaaaatgagatataatgaaaacaaaaaaggtcaaaaaaccttaaattgatgccctttgaccccgatgaggagagagtgtaaatgggttgtcctatggtgtgaatgtgttccccgaattc

SEQ ID NO: 600556 - DNA, 618 bp, Homo sapiens
gggatgggctgaaataaagggatgggctctggctagttatctgcagcaggagcatgtccttaaggcacagatcgctcatgctattgtttgtggtttaagaacacctttaagcggttttccgccctgggtgggccaggtgttccttgccctcattctggtaaacccacagccttccagcatgggggtcatggccatcatgaacatgtcacagtgctgcagagattttgttttggccagtttggggccagttatggccagatttagggggcctgttcccaacactagcctagttcatcagttgctgtataaaatgtgaaaatgtctgtgaatggctatgtgtggaaagcatttactttggttttatgcaaagctaagtcagggtcttcactcaatcaagtcttatgtggtacagctgagtgttggaaaatacaagataacatatagctgcaggtagagtccagtgggagctccgtggagggaaatttatctctacccagaagyagttggcaaaggaatcttctgcaatctgtctcaatgagtgggaattaaacaaataatgaaaagtagagaggacaatacagatagagaaacagataccataccaacggcagtgataac

SEQ ID NO: 600557 - DNA, 567 bp, Homo sapiens
actaactcagcagctttagaacatyagatactggaattactatatttcactgattggaattttttttttttttttttttttacttttgtatcccatcctgaacatgggatacatcttagcactgtgtcataatttaactggtgatgtgttttatttcttagtggaaataaaaatagtggtccacctgataattaatggcatattagattctagatgctaaaatacagttatcaaatatggaattaaaaaaagctatgtaaatctatgaagaaataaaaaaaacacacaaaataagatgatcaaagtgaccacaaaatcattcttctaactcttctgaatgtttcagaattttcatcataaaatgcaaaaccaataaattaccaaaaatatgtgaaaaagacttctataaaagtaaacaacaaaaaactcaattactgaacatggctgaatagaaaatgaactaagagctaaattagaaaaacaatcgcacagaatgcagtaaaggaacaaagataatagaaaaaagagaacagaaaaaagggagaataggcaacacttgaagagata

SEQ ID NO: 600558 - DNA, 626 bp, Homo sapiens
aaaatacagttatcaaatatggaattaaaaaaagctatgtaaatctatgaagaaataaaaaaaacacacaaaataagatgatcaaagtgaccacaaaatcattcttctaactcttctgaatgtttcagaattttcatcataaaatgcaaaaccaataaattaccaaaaatatgtgaaaaagacttctataaaagtaaacaacaaaaaactcaattactgaacatggctgaatagaaaatgaactaagagctaaattagaaaaacaatcgcacagaatgcagtaaaggaacaaagataatagaaaaaagagaayagaaaaaagggagaataggcaacacttgaagagataatagctgagaatttttctgaactgattaaagacattaatccttgggtagcaggaacacgcacataccaagcaaaaaaaaaataaaagaaattcacaccaaggcatatcataaagaaaactgcagaataacaaaagccaaaagaatatcttaaaagtacctagagagataagacagaacacctgtgaaggaactacaatggttctgtgccattcaaggtacggtatacatcattcatctaatcccataacaatcctataaggtacatggcatgaaccc

SEQ ID NO: 600559 - DNA, 626 bp, Homo sapiens
aaaatacagttatcaaatatggaattaaaaaaagctatgtaaatctatgaagaaataaaaaaaacacacaaaataagatgatcaaagtgaccacaaaatcattcttctaactcttctgaatgtttcagaattttcatcataaaatgcaaaaccaataaattaccaaaaatatgtgaaaaagacttctataaaagtaaacaacaaaaaactcaattactgaacatggctgaatagaaaatgaactaagagctaaattagaaaaacaatcgcacagaatgcagtaaaggaacaaagataatagaaaaaagagaacagaaaaaagggagaataggcaacacttgaagagataatagctgagaatttttctgaactgattaaagacattaatccttgggtagcaggaacacgcacataccaagcaaaaaaaaaataaaagaaattcacaccaaggcatatcataaagaaaactgcagaataacaaaagccaaaagaatatcttaaaagtacctagaragataagacagaacacctgtgaaggaactacaatggttctgtgccattcaaggtacggtatacatcattcatctaatcccataacaatcctataaggtacatggcatgaaccc

SEQ ID NO: 600560 - DNA, 408 bp, Homo sapiens
gtttatgcagtatgatccctggtatttggcaagggctattccagaagtcaagatgggaaagggagaaggaagcagtgaggaaggaagaaatcactgaacttgagtctcatacttaatttgaccttaaagactatgaccttaaaracaatgtccagttagattgtccttccactttagacaagtttatcaagttcaattcttctggataaaaaatatgtatcactggaaatgaggttttatacttgaattcatttcatttttaagcatatggcacttaaatattactacaatataggttactaggtgcctaatagttattattagcagagttcccttgctagcagtttctatgacaaacaactcacacagagttgcttcaaaagatgcctctgcaagggctcgcttctg

SEQ ID NO: 600561 - DNA, 408 bp, Homo sapiens
gtttatgcagtatgatccctggtatttggcaagggctattccagaagtcaagatgggaaagggagaaggaagcagtgaggaaggaagaaatcactgaacttgagtctcatacttaatttgaccttaaagactatgaccttaaagacaatgtccagttagattgtccttccactttagacaagtttatcaagttcaattcttctggataaaaaatatgtatcactggaaatgaggttttatacttgaattcatttcatttttaagcatatggcacttaaatattactayaatataggttactaggtgcctaatagttattattagcagagttcccttgctagcagtttctatgacaaacaactcacacagagttgcttcaaaagatgcctctgcaagggctcgcttctg

SEQ ID NO: 600562 - DNA, 589 bp, Homo sapiens
gggctgacttttggcagagtgacttggggacataattaacagctgacatacactctgcttctgggactcttgatttctcttgctaagcaataatgacctatatgcaaagctgggtttgctctattcttaaatctctgaaaatatccaagtcaatagaaaagttgcaaatggattacaggtcactaagcctgggttttaaaaagagaagcaagccaggtgcagtggctcatgcctgtaatcccagcaagttgagaggcaggaagaagccagtagttagagaccagcctgagcaacacagacccccgtctctacaaaaaatgttttaaaaattagccaggcgtggtggcacatgcctgtagtcctagctacttgggaagctgagacaggagaatcccttgagtccaagaattggaggctagagtaagttatcatcatgccactgcaccccagcctggrcaatagagtgagactctgtctcttaaagacaaacagggggggaaaaaaaagaaggaaagaaaaaaaacagaaaaaaaataggcaaataatttgagatgaagaaaatcataattcaccctattagagaatttgc

SEQ ID NO: 600563 - DNA, 381 bp, Homo sapiens
tgaattccaactaagttcttacagctcttagtcccatgcttttacagaacaattagtggaaaatttttggaattgaacatccccagaggtagaacaggctgaactttagtcttgagagatgcaactgagaagcacaaatatgttgcacaaaggaggtactccccattcctatagcacactttgccaatcaactacagaactcmttagtgattctcctgggtctggctttcaaatcctcccctctttcagttaccccctctttcagaaagatcaggcacataattttaaacctattttcgggaagagaaggttcactggaaggacccgaagtggagacggctaatgcttacccatatccatgacagcctttctcctgggcac

SEQ ID NO: 600564 - DNA, 595 bp, Homo sapiens
gcctttcatactggtacttttatttctgtagtattgattctcagaaatggagtgactgatcaaaaggtaagtgcatttaaaatttttgtagatcataccacatttctttcctcaaagaccacagcaatttgcrtttcatctgcaatatctgagagtgctctcttccattaaaaattatcattcttaatttctgtctatttgttagatagacatggtgtcttatttctttattttcctatcccttactactatgaggaagcatattatcatagttttatttttccagctatctggatatcctcttctgggaattgcatattcctatacttcggccagttttgtactgggttgtttgaattttaaaaaatattaatttaattaacaaatttgtaggagaaatttgtatattaggtatatgcatctctttatgtcacatgttgcgaatacatctactctatttgctgtttttcttttgactttgtcttctgttattttaagcagtaacaaggtatattttttccttatagcttttgagttttgtgtcttgtttagaaaacgtcttcctcattccaagaatttttgtttttacatttaa

SEQ ID NO: 600565 - DNA, 601 bp, Homo sapiens
tgcaattgctgggttgtatggtagctgcatgtttagttttacagaaaattgataaacagtttgctacagtggctgtaccattttacatttccaccagcaatatgtgaatgatccattttctccacatccttgctagcatctggtgttgtaactactttgttttagccattctgatagatgtgtaggaatatataataattttaatttgcatttctctaatggctaatgtttttgataatcttttcatgcacctatttgctatctgtatatcctttttggtgaacgtttcttgatgtgtcttgyccatttcctaattgcattgtttgtttcttgttttaccttgcagttttgagagttctttatatattctagacatccatcttttggctatatggcttgaaaatattttctatcagtctgtagcttgtcttttcatcctccctcacaggtcttttgcagtgcaaaggttttaaatcttgatgcagtccaactgatttttttctgtgtgtggatcatgctttcaatgccaattctagccctagagcctgaagattttctcatttttccctaaattttgatagttttatgttttacatttaag

SEQ ID NO: 600566 - DNA, 601 bp, Homo sapiens
tgcaattgctgggttgtatggtagctgcatgtttagttttacagaaaattgataaacagtttgctacagtggctgtaccattttacatttccaccagcaatatgtgaatgatccattttctccacatccttgctagcatctggtgttgtaactactttgttttagccattctgatagatgtgtaggaatatataataattttaatttgcatttctctaatggctaatgtttttgataatcttttcatgcacctatttgctatctgtatatcctttttggtgaacgtttcttgatgtgtcttgcccatttcctaattgcattgtttgtttcttgttttaccttgcagttttgagagttctttatatattctagacatccatcttttggctatatggcttgaaaatattttctatcagtctgtagcttgtcttttcatcctccctcacaggtcttttgcagtgcaaaggttttaaatcttgatgcagtccaaytgatttttttctgtgtgtggatcatgctttcaatgccaattctagccctagagcctgaagattttctcatttttccctaaattttgatagttttatgttttacatttaag

SEQ ID NO: 600567 - DNA, 566 bp, Homo sapiens
gaattctctattcccagaacaatcttttctaaagccacaaaaaacacaaatagaattcaaagttcttatgcttgatatactttatgccttctttcataaaacacatcacctagttttcacgtttctctgaatatcctatgttgtcacaaaagatatatttctcctaagttaagctaaaacgcatgattttaagacaacctaaatgaaaattgcaaacacaaaacacaytcataaattcatgcttatgaaattatgacttacagcataagttattcttgatatttaaaagaatcgtttatgagtttttgtcatcatgaatgtttgacaacaagattatctgtgaacaagagattgtgtgggcttacacagtattttcaactaaaagttacggtattttgtttaacacagaaaccacaccataggttaagtttgagattattttgaaatatctgaactactcagcaggtaaaaacaaataatacagcccatttatagctcatcagttttttgttttgagtcatctaagcaataactcaaggaaggtgagagagagcatttgccaccct

SEQ ID NO: 600568 - DNA, 516 bp, Homo sapiens
cctttaacctattttgactatgagacaggaggatagaaccaattcccccaacagccagggttcagtattattaataatgataataaaatgaatctactaacaacataccaagccttcacaatatgcagggcaccgtactaagtgctttatataagttttctcatttaatcttcacaatattaatctctactcctattcctctatttagaaaccagacctggagtgattgagaaacttgaaggaaaatcacacagtttgaaagtgacatagctagtgttcagaaacagagtctacactttcattactatcctccmctgcaggataattccagtgcaaaggatgatctgtttgtttttttttttgttttttttttttttgaggcagagtctggctctgttgcccgggctggagtgcagtgactcgatctcggctcaccgcaagctccacctcccggattcatgccatcctcctgcctcagcctcctgagtagctgggaccacaggcgcccaccacaac

SEQ ID NO: 600569 - DNA, 554 bp, Homo sapiens
tgggtgaatcttagaggcattatgctaagtgaaataaaccagacacaaaatgaaaaatattgtatgattccactggtatgagctacctacaacagtcaaatttatacagacrtaaagttgaaggatgttaccaggagctggaggaagaagagaatgagggcttattgtttaatgagtacctgagtttcagtttgggatgatgaaaacattctagagatggatagtggtgatggttcaacgataataataatataatattaatgtacttaatagtactcaactgtatacttaaaaatggtcaagaaaatggtaccccgttatcctgatgtgattattacacattgtaggcctatatcaaaatatctcatgtaccccgtaaatatatgcacctactatgtacccataaaaaaaatttaaaggctaaatggccaggcattgtgggtcacttctgtaatcccagaactgtgggaggctaaagcaggaggatcacttgagctcaggagttcaagaccagcctgggcaacatggcaaggccccatctctacaaagaattc

SEQ ID NO: 600570 - DNA, 505 bp, Homo sapiens
aggagcaagtgattgtgcaagaacaagaatttattagagaaagaagcatttggccaatgggtagaattgttggcagacaaaggtagaagagaaagacaaattattcagtatggctctagcgaactctttgcacttttatcacacaatctgaagcttgctaatcttgacatgtcttaatgttgttggattgctcattaaactggctgaaatgttcacaaagactctcacctgtcttctggcttaagctgagatttatcacacttcttggaaacatcttctggtctccagatctccctcagctaagctatacagtcagtctkttctgtaagaaagcccaaacttctctgcagtgttcctcagtctttttgatatcatgatgaacagattaagttgatgtgttcatcatgatatcaggtaagctggccgaagactctaagctgcctaaccatcccagggctgagagggatcgatatctgaagtacctataacccaatcagggcatgtg

SEQ ID NO: 600571 - DNA, 577 bp, Homo sapiens
gttggattgctcattaaactggctgaaatgttcacaaagactctcacctgtcttctggcttaagctgagatttatcacacttcttggaaacatcttctggtctccagatctccctcagctaagctatacagtcagtctgttctgtaagaaagcccaaacttctctgcagtgttcctcagtctttttgatatcatgatgaacagattaagttgatgtgttcatcatgatatcaggtaagctggccgaagactctaagctgcctaaccatcccagggctgagagggatcgatatctgaagtacctataacccaatcagggcatgtgccttagcatacccattggaaagccctgttttagagcctttatcagctgtgaacttattgaaggcaatgattttgtcctgttaatcattctattcataattttcaacaagatacgtgrttgttgttaataataattgttggttgaaatgaagttaaataaatagcaattgacttttccaaggtgacgcattgcacagatttatttatcttccctttgctgccctggagtaccagttgtatctaccaataagctt

SEQ ID NO: 600572 - DNA, 279 bp, Homo sapiens
gcagcacactggctgaattgaatctggtgtgactcccagctcttacctctcacgagggtagaagcagcaaaaaagatgagttgcctgagtgtaaaaataaatcagaaaaaccacgcacctgcatcttgtctagattcaggtcaaatatttatrcagacacaagctgagtccctaactttatgtgcactgcagtctctgctacttgggggcaggaaaaaaagctgactggaaataaaaagaaaaggggttactgctccaattctgaaacaaagaggcact

SEQ ID NO: 600573 - DNA, 554 bp, Homo sapiens
  misc_feature 1, 2, 3, 4, 5, 6, 7, 8, 9, 10, 11, 12: n = A,T,C or G
nnnnnnnnnnnncctgaggaataccaactcttcatgtgcagagaagtggaagtatagaaattcaattatccatcttctctcakccgatgaacagctagaggctggaaacgcaggttcaattgaaagttagaagctgctgccctggaaatgtacacactatcgctgagcgaggaccttttcatgcactgtgtgggcacgtgcacacacacccacccacacacacgggtacgcgcgcgcgcacacacacacaattgatttcctctctaaagtggcaagaagaagctgcctggctgcaagccttgctggcatgggtcatgccatctacaaaactgttcccttgctccccacttctgctcgaaaacctttcacagactgcagattcaagggaaagccacgccagccacccggctatctgctgggagaccctgaggtgggctcttctctttgccgtcagcaggaagagggtctcctccctcccacctgtgtcatcctgggggaagagctgtctctggaatggaaacaccgggtagaagggtgcagaggagagattgcat

SEQ ID NO: 600574 - DNA, 562 bp, Homo sapiens
cagtgtccaaaaaaaaaaaaagatatatttctatataaacatatatgtataaatgtcataaatgaatatatatattttataagtatataaaataattgtatacatatacacaatttatttcaaatttatattttaaaaatatatgtgtgaatgtatttagaattgtatatataggtataattatttagaattatatatagttatttagaatatatttataattttatatatatagttatttagaatagatttagaattgtatatatagttatttagaatagatttagagttgtatatatcattatttagaattatttaraatagatttagagttgtatatgtagttatttagaattatttaggatagtatatgtagttatttagaatagatttagaatagtatatatagctatttagaatatattagaattgtatatatagttatgagtgagatagcgcgcattcttttttcacaccaagtcttcaaatccagtgtctattgtacatttacagcacatctcaattcaaatgaactgacatcctttgggtgtttgtcccttcc

SEQ ID NO: 600575 - DNA, 422 bp, Homo sapiens
ctttacatcccctcgttatctaacctaagctttcaggcactggataagagaatctggctgccttcagccaaaycttattcgggagcatttgcaaaaccttctggcctcccaagaaggtttgcatcttctacaatttttcctaccaccctgaccgacctcctacattcttacttataagcaggagctaaataatgtgtccacatggaaagagtggaataacagagactggagactcagaagggtgggaggtggaagaggagcaagggatgagaaattacctctcgggtacaatgtacgtgattcaggtgttagctatactaaaagcccagacctcaccactacgccattcatccatgttaacaaaactgtacttgcactccctacctgtatacaaatgaaaaataaaataataaataaataaa

SEQ ID NO: 600576 - DNA, 616 bp, Homo sapiens
gatttgagaggataatgtcgttcttattttgaatgttcatactggctccttttatttggagtgggaggaaatgcaaggcttataatgacgccagtgtaaccaatggttttatcaacatagtgaaccagacagagaaataacacctgcccagatcaagcaagtcaaaacaacacgtatagtcaagtggtgctgtccttgtacacagacattacattacacaaactgttctcctaagtgagggaatttgtcccttagaaattgcttattggaacatttggacatcatgcatcatgttaaagatccataaatgccatctcgatagggtagatatgaggcgtggtaatatcctccccatatctgcatagggttcttctgctcaacggattgctrtgatgtattgcatcagagactcctgctctagtgcttcaaagacagctgagaagccccacgggagccttctgaagtcattgctacaagggctaaaataccaggagatcaggaagtcattctgaggacttgacaaaataccctactccctaaatgaaactgttatgatgtggttggtgcaaagtatgcatgcaatattttatgactgaatatatctttctattgtaaa

SEQ ID NO: 600577 - DNA, 543 bp, Homo sapiens
  misc_feature 457: n = A,T,C or G
ccctcggaagtcaagccacttctctccaatgcacaaccatagtttccaacatccagctgcttctcctctgtgccggctgagcctgggatttttacaggcacaggatggagggcagggtgggctatgggtggttttggaaaaggcaacatttgagcaggaaaacagggatgtaagttctcactttgggccacagttccaggcttttaggcttaagggtggggcccttgccagagacccgccctcttctgtccagaatttccctgcctcctgtccctatcagtagtaatagtagtagtagtagcagcagcaacagaagtaatactaactactacataccaagcattatctacrtacttcatatctattcaccaacctaattgttacaactttcactcgcgtccgtgtgaagagaccaccaaacagtctttgtgtgagcaataaagctttgtaatcaccntgggcgcaggcgagctgagtccgaaaagagtcagcgaagggagataggggtagggccgttctataagatttgggtaggttaaggaa

SEQ ID NO: 600578 - DNA, 587 bp, Homo sapiens
  misc_feature 421: n = A,T,C or G
gccattagtccctacttaagtaatatttgtaacataaatttctctgcacgtgtatgtagcccaagaataacacttcatttttggaacctagtaattttgaattcctagtaagtgagataggacgtctatgagttagcaggttaagattttrggaggaatatttaatatccctaagaagggaagtttttcaaacactgagtagcactatatatatttatatatatatagccagatttctatctatctatctatctatatatatatatatatatatatatatatatatatcgcgctatttatatatatacacaaaagtggctaatccagtagagctaatctgagcatcccagagtctcccctctctgtcgcttgtttgtgcagcgactcctgctgtggccttttagtgtgtgtgtgagcgagngaacagacacgcgagtgtgtgcgagcgagagcgtcagtgtgcgttgctttcctcctaatccagtttagattccacagtatattttttcaattacatcctggctaatatcgaaactcccttatccctaaatgtgtgagccacagtcatctgacgaaaccccaaacct

SEQ ID NO: 600579 - DNA, 488 bp, Homo sapiens
tttcttaagttttgatatttttttgccaacaggcagtcaaaaagaagataaataaaactgggttaagttggtaatgacacaataaataaatgagatgaagaaagaggcaataaatatgagtggataccaacaagaaacatgttcaagccctgaaaaaataatgagaaaaggtagaactattaataatacatcccgctctcgtatcacaccttgctccccagatacatcctatctgtcctggcaccatgttgatgctgttgttctgtaagctatgccaatgaacatgttggatgacctactccagctctacctcaagatttccaaataagaaaaggacccagggatctccttgctgaggtctttatccatttactcaggtcacaagtactaattaagcagctcttatgtrcaaaatgttattgcttcaggtcagtttttcctatactgctgttctataagagaggaagaaggtccctgccctcagaaag

SEQ ID NO: 600580 - DNA, 600 bp, Homo sapiens
ttattattttttcagttacaactcaaaagaatcagaattagaataataatggattttaactgaaagggattaccattagttaaaaggattttaactgaaactgtaatcagtctcaggagcgtttcccggataatgtttgggcacgtatttatgagtgttacttgtgaggatttgggagtaagaatgaacgaggaagttcctcccccaacacagacacatgcacacagaaactgtacaaactgaaaaacttcaggacaaaaactcgtgaatagactggagagtcatttgtgtgcatatgtgtggtttatttactagcatcacagcacaagagtttctgtcttttgcttttgtttttgttttaataggctcatttgtgtaagtgtcatgtctgtttcttgcattcccatggatatttatctagggtctagacaaactgagaaccagaaaatcaaaacatacgttcctagttacatattttctctagactggagtaaacatgatttatgtatgtagtaatcagtaagatgtagcttggacactaggaagaaaccacattgcctagcagtrtatttccacatggggaggtaatgcctgtctctc

SEQ ID NO: 600581 - DNA, 532 bp, Homo sapiens
aggtcaaaagacaaagtggaagcccttgagaatctaaaacaaagttaaagaaccaacatttacatttagataaatttatttgaaataatttctaagagccatgatgttgttatcggtcctttttctttctttcttttattcttttggcttatttaaaagcaatgttgaagaaaaaatgaaataaagcttatctttcacaatacacagaggaatggactgagctttgggaaacagtcacagcttggaattaagagtgtgtgtcrtatcgtaatttagttggatgatttggtgctcattcattatacccagaattacgctttcaagtctaccgtattcatacttatctcagtgcctgacaaataagaggaactcaaaaagcctttcattctttcatccagttcaggtatttcttgatcatcttctatgtactaggcattgtgataaatctttacaaagacagataagatctctgtctttgtggacaataaacttacattctagtcaatatcttttgaatgaatgtagtgatatt

SEQ ID NO: 600582 - DNA, 557 bp, Homo sapiens
ccttgtattcgggaacatggcaggaaagtcagagactaattccccatagaaggtaataagccataggatggaggttcttcgaaacttcagctggtaaatcaaaaccatcacctgaatttcacagagccagagtaccaaattgttacctctaaggaagagagacttggttaaaggtgtgcaactttttttatcaaggaatttgtctttttctctttgtgctgctataacaaaataccatagactgggtagtttctcaataaaatttatttctcacagttttataggctgagaagtccaagatcaaggcaccagcagatttggcatctggcctgttcttcatacagtgccttctacctgcatcctccmatggtgaaaggggctagttatcataccagggtctcttttataaaggcattagtcccattcataagggctccatccccataaatcaatcagttctcaaaaggccccacttcttaatactatctcactggagattcgttttcaacatatcaatttttaaaggcacacctcctgaccagaggatgtcatagggg

SEQ ID NO: 600583 - DNA, 577 bp, Homo sapiens
ttcaaaatgtagtttctaataacaaatctatgacttgatcctgaggtaaagtatgcaacaattccacattattttattcttgtgactcaccaaacagtttggttatttctttaatttatataaattatctataatatccaatgtccttttatgttcagatttgaattgttgctggctgtcctttttccaggactgtcctctctagctatcacaatagccttattttttcccaggcagttgccttagattgggttaattcagaaacagtccttgagatgaggatttgtgtccaaataatttattaagaatgagttctgagaggcaaacagtaagtgagaagggaaagcaggacaaggaacaggaggaagcaaagcaagagtacaatctcaggtgacatcctacagaggcctccttcagccttattccatgggaggattctggtatrtaagttatacctcagtgttcctctgaccactggatgccccaggagaatgtgaagtcccaggctttctggtttgtgagggtcaagtggctccaagagactaggggatgtcttctcacaaagaaccacaggttg

SEQ ID NO: 600584 - DNA, 554 bp, Homo sapiens
ggaccaatcagtgctctgtaaaatagaccaatcagcactctgtaaaatggactgatcagcaggacatgggcagggataaataatggaataaaagctggccaacccagccagcagtggcaacctgctccggtacccttccacactgttgaagctttgttctttcgctcttcacaataaatcttgctgttgctcactctttgggtctgtgccacctttaagagctgtaacactcaccacraaagtccgcggctccactactgaagttagcaagaccaagaatccaccagaaggaaccaaatccggacacatcttggcgaccaggaagggactatcaccaagcagcgattaccactggaccccttttgcttacctttctgtcctatttttccgtagaattcgggggctaaacatggggcacctgtcggccagttaaaagtgactagcatggccgccagactaaagacacgggtgtcaggctttctgggaaagggctctctaacaacctccaactcttcagggtttggagtgttggtttgcctggaaccagtttccac

SEQ ID NO: 600585 - DNA, 554 bp, Homo sapiens
ggaccaatcagtgctctgtaaaatagaccaatcagcactctgtaaaatggactgatcagcaggacatgggcagggataaataatggaataaaagctggccaacccagccagcagtggcaacctgctccggtacccttccacactgttgaagctttgttctttcgctcttcacaataaatcttgctgttgctcactctttgggtctgtgccacctttaagagctgtaacactcaccacaaaagtccgcggctccactactgaagttagcaagaccaagaayccaccagaaggaaccaaatccggacacatcttggcgaccaggaagggactatcaccaagcagcgattaccactggaccccttttgcttacctttctgtcctatttttccgtagaattcgggggctaaacatggggcacctgtcggccagttaaaagtgactagcatggccgccagactaaagacacgggtgtcaggctttctgggaaagggctctctaacaacctccaactcttcagggtttggagtgttggtttgcctggaaccagtttccac

SEQ ID NO: 600586 - DNA, 510 bp, Homo sapiens
tctcccttctttctaagtttctttagaaaatgtggcctgatgtattcatttgacttttggcacttgctcccctgtattacattttattttttttctctagttataagtctggtgttatccaactagattgtgattccttaatgaagaatatgatgtgtaacactctaaacataacaattgctcagtaaatgcttattgaacacaatactgattaaaagtgtgcttttaaactccacaataatcactatatagttagttgtgatagcatgataatgaactgcaaaattwaaaaattactcaaagaataaaaatagtgtttagctacatgtaaaaaaacgtcttgagtatatttgagagtaaacaaaaccataaaaggtaatctgcttattcaattggaatattgtttttatttttatttatttaatatatatatatatattttgagacaaggtctcactctgttgcccaggctggagtgtagtggtgcgatcttggcttgctgcaacctcc

SEQ ID NO: 600587 - DNA, 580 bp, Homo sapiens
gttagttgtgatagcatgataatgaactgcaaaatttaaaaattactcaaagaataaaaatagtgtttagctacatgtaaaaaaacgtcttgagtatatttgagagtaaacaaaaccataaaaggtaatctgcttattcaattggaatattgtttttatttttatttatttaatatatatatatatwttttgagacaaggtctcactctgttgcccaggctggagtgtagtggtgcgatcttggcttgctgcaacctccgcctcctggattcaagcaaatctcctgcatcagcctcctgggtagctggggttacaggtgcatgccaccacgccctgctaatttttgtatttttagtagagacaggatttcaccatgttggccaggctggtctcaaactcctgacctcaggtgatccgcccaccttggcttcccaaggtgctgggattataggcgtgagccaccacatctggcagattattatttttattacagggataactaacagacattgtgattcaattccagaccactgcaataaagtgaatactacaataaagcaagtcacatgaatttgttata

SEQ ID NO: 600588 - DNA, 460 bp, Homo sapiens
cctccaaatgtactacagacatgcaagcagcttgaaacaaaatggtacaggccaatatttagatataaggctgagaaataatgtgttattgcaagccactgagttttgaggtattttgttatggggcattattgtagaaattgctggcagattaatgggaaaaacaatttataattgttctttataatacagcatgatttaatgaaattctactatagattgagtaaaaaaatggtaaattttgaaggatatttttaaragaacacttttcccattatacacaaatagtgtgacacaactgctagataataagctaaatgcaaagtacttgtttgtatgtcttatttctcaattacagctttagcaaagtctgttagggcatcctatatatgtaaaaattgtgccaactatataaaaaagcaggacacatttttactagtataaagtgccctacttcttc

SEQ ID NO: 600589 - DNA, 547 bp, Homo sapiens
tttattgctgctgtaacatccctacaaacttactgtcttaaagcaacacaaatttattatcttacagttatgtacttccgaagtcttaaacatgttttgctgggcttaaatcaaratgtcagcagggctgcattcctatctagaagctctaggggaaatcaatttccttgcctttttcagcttctggaggccacccacattgcttggcttatggccttcttactccattttcaaagacagaactattaggccaagtctatcccatgctaccctctggctctttctcctctgcttccctcttctatctaaaagaatccttgtgattacattgaacccatagagataatccaagataatttcctccatgtcaaggtcagttgataagcaaccttaattctattggcaaacttaattttcctttatagtgtaatttaacatactcacaggttctggagacaagaatgtggatgtctttgtgagtttattagtttgcctacctcagatagtatcattggaagttgattttgctaacagtgatattaagaca

SEQ ID NO: 600590 - DNA, 486 bp, Homo sapiens
ttgttaaattgttgaacaagtaaaaatttgttgcttttcccaatttaaatctgaacaagtgagctatatggacgttaggaagacttaggcctgttattactactatccagatgaagttctgaccatcagtctagcacatatttaaaacttccttttatttttccttaaataggatgatttaagaaattttaataaagtagaaaggattttgaaggtgaatgtattctttgacttcaaaaaaaaactgtcatctactgagtgctgattttgtgctgggaaatgtgctttatcgcatttcatcttaacattctaaggcagtatctttaaaatataaarttgttggaaaatatataactgctgtaccattattccacatttttcttttaagaataacacctaatttttaaaagtaattaaatatatattgtgtttgagtttcctcaatttttgtatacgattttaatagttattttgtttgaaccagaa

SEQ ID NO: 600591 - DNA, 670 bp, Homo sapiens
tattcattaaaatgaattactaaagaaaatacagtaaataatcaatgatattttacacattgaactggaggcagtaggatacaattaattttcaagtattcattcttaattgcaagaaacttgtttgtatattcttccctcacatttgagaaaaggtgcttgaaaatataatttttattattgattcatatccttaagagactttttttttctcattcaatatctcaatcttcattactcttctgattttattacttagaacccttgatctgagtaatggagtatctttccatgtatttgtctttaatttcttcaatgtgtacaaatgggccactggtacatgaaaaggtgctcagtgtcactaatcrtcactgaaatgcaaatcaaaatcacaatgagatctcacctcacatctgttaggatagctattataaaaaagacaggagctaacaagtgttagcaagggtgtggagaaaaaggaacccttgttcatacactgttggagagatgcttctagaggtcattcacatttcttgatttctagacttcaacctcaccttccaagccagccacattgcatctctctgtgccttttgtccatagtcacttcttcctctaactcttgatctttaactcatagttccctgaatagtcccagaaatgaagagca

SEQ ID NO: 600592 - DNA, 611 bp, Homo sapiens
gtgcttagacaaagttgatgcattgtacccccaagtagatattatttatttccataattatactgtctagattgtgctaaactaggggtcagcaaacttttccagtaactgtcaggtagtaaatattttaagcttgctgaccatatagtttctgtcaaaacaaaactacataaatgaatgagtatggtcgtgttctccaaaactttatctagagaaacaggtagtcttcctttaggccacagtttgttgactccttctttaaaccagcatttaaattctcaatatcatcatgcaattatgggacattttctgaacacttgtgtacaggatgtgtagtgataaaagataaacttcagctgaattaaatttaaaggagtttaattgagcaatgaacgattcgtgaatcgggcagcccccagaatcacagcagattcagagagactcaagtgcacccatgtggtggaagaagatttatagacaaaaaaagggaaatgacatacagaaattggcagtgagscacagaaacagctgggttggttacaggttggcatttgccttatttgaacacagtttgtacacttagcagtctatgagtagttgaagtatggcca

SEQ ID NO: 600593 - DNA, 552 bp, Homo sapiens
  misc_feature 16: n = A,T,C or G
aatgctggacaggagnaagtgctttcttagacaggagctgtcttggggctcttttcagatcctgttccccactctcaattgaggcctggccttgctttctcttcccaggacttaacacatatggtagtgttctcaagcggttatagaatgtagaattttgctactgaagatgagttcaggaagcatcagcatcacctgtagtctcaggaatgcagaactcctaagccaattctctagaggatttttatacattgctagtgtgccaagcagtaatatagaggactctttattttgaatgaataaatgaaaaatgcgagaccttctttctttagagtatacttttatggtatgcattatctgaaactatcttctttgaatcctaatayccaaatgacacaatgcgttttccgtgaacccttgcccacttttaatcttttgagtttctgcatgctcatatttccttttaaagtttctccttctagttgaaactctacctattacgtaggtggccaacataacacattgagggtcataacagacattgagcagtag

SEQ ID NO: 600594 - DNA, 356 bp, Homo sapiens
actcatgcctgtagtcccagggctttggaggctgaggcaggaggattgcttgagcccaagagttcaaggcggcagtgagctatgatcgtaccactacacttgagcctgggcaacagaatgagactctgtctgttaaagaaaataaaaaagtgaagtgacaattcagcagggctttgtcctctgaccggcccaccatatatttttcctggataaaaccatgtrtaattgcataagaaaattttgatatttattaagatctcaagacatatcttttaagaatatcaaaggcctttcatatctactcaagtcaagagccattgatagaaagtcctttggctcaaatacaaaagagcatc

SEQ ID NO: 600595 - DNA, 602 bp, Homo sapiens
caacacacaatacacccacacacacatacatacacacatacaacacacacaacacacacacacacaygtatacagaggtacgttttacatgtttatattttctaatgtaaaggcaacatcaactgtagaaaatttgaaaaatattgaaatgtatgacaataattagaagctactcataatcgcataatctcaacatcaggaaaattcgcagtcgacattctgggagttttcccctaaacacatggatattttgggacaatagccctatccatacatctttgtataatatccttcttttgttgatgtgccacttcaagaatttactcggttttacaagacaaaattttaaagacagagaaaatcttcccatgctaccatatgtatttttcctctttaggggttttatagtctgacacacaaaagtcaccattcagaaccctaagtgcgtggggtcagtccctctcagccacgtcgagactttaataccagagacatggacaggcgatacctcctccccaggaccaaggactgagtgatcttgatggtgaagaggtgactgaattcttcaaatgggcactgcatacaatcaggtccacagggat

SEQ ID NO: 600596 - DNA, 618 bp, Homo sapiens
tgtggatatgattatttactgcttccaccacatgtaatttttggaaacacacagatggaaaatttctgtctatattctcatctgctgcccttacaaatggggtagagatgtttggagtcgggtagtttgtcttataccttctccatttgatttcctgggcctcacacacctgattgtgaagttccacatgctgtatttgtcttcaatcagacctatccccttgtgttctgtttagcttccttttctctttttactgtccaagtatttctccatactccagctattttcctatttcctactttaaggttcatagcaaaagtcaccacctgcatgaagctatttttctacccctatagggcagatgtatgcccaacttctctattaggacatttatctattagaaatatcatgctccctctctgagaagatgcatctccttgggtcaatgagctacgtgcatcacagaagtttcacagaagacaggcagartgattttacatgaagagagagagagagagaacagaaactttcacagatacatgacagaaaagaaagtggcccaaagaaaatagatgtagatacttacaagtaatgaacaaggaccccagcttgcagagc

SEQ ID NO: 600597 - DNA, 648 bp, Homo sapiens
ccagcctcagcaaaagagtgaaacttcatctcaaaaaaamgaaaagaaaaagcatcgtaactggagctgctgttacctccaagcctaaaagagcaagaggaaaaagtggcatggaaacccgggaagaatcacgtagaaatggcttcttgaaaggactttttgttcaaaggacatcagctcctgatgatctcacagaggagggacccagaagaatcaaccctcttctctctctctctccttcctctctctgtctctgattgtagctggagattcccactgattgaacccagctgcaagaagggcacaaggatccactgatgtgacccataaaggtcagctgcccagggcagagagcagagtggagaaatgcagagagcaggtctggaaggttaaacagaagatacctggtcattcactaaatgttctccaggtgtggcttttaaatgatttttttttaactatgaatccttggcttgagttaaatcttacaaggaagccaagtatgtaaaacaaaaaaccacccaatgaggaatgagagacctagaacccaaaattccatccagggaactccactgagaaaggcttagaaatgcttaaaaagcactgtcctgcaacgtgagtttaaatggctacatagaattctaatga

SEQ ID NO: 600598 - DNA, 648 bp, Homo sapiens
ccagcctcagcaaaagagtgaaacttcatctcaaaaaaaagaaaagaaaaagcatcgtaactgragctgctgttacctccaagcctaaaagagcaagaggaaaaagtggcatggaaacccgggaagaatcacgtagaaatggcttcttgaaaggactttttgttcaaaggacatcagctcctgatgatctcacagaggagggacccagaagaatcaaccctcttctctctctctctccttcctctctctgtctctgattgtagctggagattcccactgattgaacccagctgcaagaagggcacaaggatccactgatgtgacccataaaggtcagctgcccagggcagagagcagagtggagaaatgcagagagcaggtctggaaggttaaacagaagatacctggtcattcactaaatgttctccaggtgtggcttttaaatgatttttttttaactatgaatccttggcttgagttaaatcttacaaggaagccaagtatgtaaaacaaaaaaccacccaatgaggaatgagagacctagaacccaaaattccatccagggaactccactgagaaaggcttagaaatgcttaaaaagcactgtcctgcaacgtgagtttaaatggctacatagaattctaatga

SEQ ID NO: 600599 - DNA, 642 bp, Homo sapiens
agtctactaagtgtggaatagcattatgtctaaaaacacaatgtacataccttaattaaaatatacattatcattaataaaaagttaagggtcatttaagccttcaacaagttgtaatakttttgctgctggagagtcgtgaattggtgctgatggctactgactggtcaggctggtagttgctaaggattggggtagctgtggcaatttcttaaaatgatacaacaatgaagtttgccatgtggaatgactctttcaagaaagattttggagcatgtgatggtgtttgatatcattttatccacagtagaacttctttcaaaattgaaatcaatcctttcaaatcctgctgctgctttatcaactatgttcattgaatgttccaaatcctttattgttatttcaacaacattgacagcatcttcaccaggagtagattccaccttaagaaaccactttttctgctcatccacaagaagcaacttctcatccattaaagcttgattgtgagattgcagcaattcagtcacatcttcaggctccacttctaattctagttctcttgctactaccatatctgcagttactttcttcactgaagtcttgaacccctcaaagtcatccatgagggttggaatcaac

SEQ ID NO: 600600 - DNA, 642 bp, Homo sapiens
agtctactaagtgtggaatagcattatgtctaaaaacacaatgtacataccttaattaaaatatacattatcattaataaaaagttaagggtcatttaagccttcaacaagttgtaatatttttgctgctggagagtcgtgaattggtgctgatggctactgactggtcaggctggtagttgctaaggattggggtagctgtggcaatttcttaaaatgatacaacaatgaagtttgccatgtggaatgactctttcragaaagattttggagcatgtgatggtgtttgatatcattttatccacagtagaacttctttcaaaattgaaatcaatcctttcaaatcctgctgctgctttatcaactatgttcattgaatgttccaaatcctttattgttatttcaacaacattgacagcatcttcaccaggagtagattccaccttaagaaaccactttttctgctcatccacaagaagcaacttctcatccattaaagcttgattgtgagattgcagcaattcagtcacatcttcaggctccacttctaattctagttctcttgctactaccatatctgcagttactttcttcactgaagtcttgaacccctcaaagtcatccatgagggttggaatcaac

SEQ ID NO: 600601 - DNA, 610 bp, Homo sapiens
aaattttgttataacttgcataaacacttcagattattttataacatcttactagcataacaggatatgcgtgtgccaatggtgttaagtaaacaccaagaagaactcattactcacaagaagtataggtcgaaatacagtttcttagagtttaagtctatgggtgttgaactcagaatagcagagatggcataactatggtctcacccaatttggtgactcttgtatagactcagatggaaagttaatgctcaaacactccacattagtcatcctgagtatccctgggttctgtattaacagcaagaaatgtgtgcccttaagaagtcatcctgctcccctcctgcatggaaaagagatgcaaagtcatgtgagtgagtgtaatggattgctggtcagtgcagggatactgcaagaggacccttggaacaggttgtagatgaatcacaagcctcctgctgtccgcggtgaggtcacttgtgctgcctgaaaacttgggagtatgctgcctgagtgctcagccctgggtactgytcttcatggctcccagtcaagccccaacagtcaccgcaagtgccaccaaatgacttttactacagacagagatcaa

SEQ ID NO: 600602 - DNA, 547 bp, Homo sapiens
ctccttggaaatcactctgtatcccaattctcaccacaaaatctccagcttctaaagctttctgggtttgtgccttgccaattaagaaatctgttgacatgtctcggtttccttctgcttttccctgtagtccaaagcaaattattctcaaatctcttgactacttcaagtctgcagattccttttggtcacttcccttcttccaacccccttttcctcctacccacktcactcgaaaagaaaagaaaaaattaaaaagccatagaactgcaggcctgtgtctgtttaacaggaataccccagataccccaggagcaatgtcggcctccagctaccacagaaagagacactctcctcttcactatcaacttgtgtttggtctaggtagtgtgttattactgtcctttctactatcaatctttgtcctctcatttccccagtgcccttccacagggtcactctgaattttgacctaatgccccaacctaaagtcatgcttagaagtcatgcttactgtcagccataaccaagaaagttgcctagctgc

SEQ ID NO: 600603 - DNA, 547 bp, Homo sapiens
ctccttggaaatcactctgtatcccaattctcaccacaaaatctccagcttctaaagctttctgggtttgtgccttgccaattaagaaatctgttgacatgtctcggtttccttctgcttttccctgtagtccaaagcaaattattctcaaatctcttgactacttcaagtctgcagattccttttggtcacttcccttcttccaacccccttttcctcctacccacgtcactcgaaaagaaaagaaaaaattaaaaagccatagaactgcaggcctgtgtctgtttaacaggaataccccagataccccaggagcaatgtcggcctccagctaccacagaaagagacactctcctcttcactatcaacttgtgtttggtctargtagtgtgttattactgtcctttctactatcaatctttgtcctctcatttccccagtgcccttccacagggtcactctgaattttgacctaatgccccaacctaaagtcatgcttagaagtcatgcttactgtcagccataaccaagaaagttgcctagctgc

SEQ ID NO: 600604 - DNA, 566 bp, Homo sapiens
aaaagaaattgattgcctgaaaagacaaattatgagttccaaaattgaatcagttagaaatagcctaccaatcaaaaaaggcccaggaccaggcagattcacagccaaattttttttttttttttttttttttttttttttttkgagacagagtcttgctctgtcacccaggctggagggcaatgacacaatcttggctcactgcaacctctgcctccgaggttcaagtgattctcctgcctcagcctcccgagtagctgtgattacagacatgtgccatcacacctggctaatttttggtatttttagtagtcatgggatttcaccattttgtccaggctggtcttgaactcctgacctcaagtgatccacccatcttggcctcccaaagttctgggatctttggcctcccaaagttctgggattacaggcgtgactgtgcctagcctcacagccaaattctaccagatgtacaaagaagagctggtaccactcctactggaactattccaaaaaactgaggaggaggaactcctctccaagtcgttctatgaggccaacatcat

SEQ ID NO: 600605 - DNA, 405 bp, Homo sapiens
gaattcccttagaaaactggcacaggacaaaaatgccctctttcactactcctcttcaaaatagcattggaagttctgccagagcattcaggcaagaggaagaaatacaaggcatccaaataggaagagagtaagtcaaaccactcctgtttgcagatgacatgattctatatctagaaaacctcatagtcttgacctaaattctccatcagctaataaaaaaattcagcaaagtttcaggatacaaaatcmagttacaaaaatcactagcattcgtatacacaaacaacagccaagccaggagccgaatcaagaacacaatcccattcacaactgccacaaaaagaacaaaatatctaggaatacagctaaccagggaggcaaaagatttctacaatgtgaagt

SEQ ID NO: 600606 - DNA, 405 bp, Homo sapiens
gaattcccttagaaaactggcacaggacaaaaatgccctctttcactactcctcttcaaaatagcattggaagttctgccagagcattcaggcaagaggaagaaatacaaggcatccaaataggaagagagtaagtcaaaccactcctgtttgcagatgacatgattctatatctagaaaacctcatagtcttgacctaaattctccatcagctaataaaaaaattcagcaaagtttcaggatacaaaatcaagttacaaaaatcactagcattcgtatacacaaacaacagccaagccaggagccgaatcaagaacacaatcccattcacaactgccacaaaaagaacaaaatatctaggaayacagctaaccagggaggcaaaagatttctacaatgtgaagt

SEQ ID NO: 600607 - DNA, 526 bp, Homo sapiens
cactttgggaggccgagacaggtggatcatgaggtcaagggatcgagaccatgctggccaacaaggtgaaaccccatctctactaaaaatwtaaaaattagctgggtgtggtggcacacgcctgtagtcccagctactcgggaggctgaggcaggaaaataccttgaacctgaacccaggaggtggaggttgcagatagccgagatgacgccactgcactccagcctggcaacagagcgagactccatctcaaaaaaaaaaaaaaaaaaaaaaattaatgactgccctgctaggtttcagaatagcatgggacctgtagcccctttcttttggtcaatttctccctttcaaaatgggaatgtttacccagtgtcagtatcctcattgtatcttgaaagtaaatagcttgtattgattttatgggcacatagatttaagaaactcatttcctgatgagactctggacttaggacttgggacttttgacttaacgctgaatgagttaagactttgggggactattgag

SEQ ID NO: 600608 - DNA, 526 bp, Homo sapiens
cactttgggaggccgagacaggtggatcatgaggtcaagggatcgagaccatgctggccaacaaggtgaaaccccatctctactaaaaatataaaaattagctgggtgtggtggcacacgcctgtagtcccagctactcgggaggctgaggcaggaaaataccttgaacctgaacccaggaggtggaggttgcagatagccgagatgacgccactgcactccagcctggcaacagagcgagactccatctcaaaaaaaaaaaaaaaaaaaaaaattaatgactgccctgctaggtttcaraatagcatgggacctgtagcccctttcttttggtcaatttctccctttcaaaatgggaatgtttacccagtgtcagtatcctcattgtatcttgaaagtaaatagcttgtattgattttatgggcacatagatttaagaaactcatttcctgatgagactctggacttaggacttgggacttttgacttaacgctgaatgagttaagactttgggggactattgag

SEQ ID NO: 600609 - DNA, 526 bp, Homo sapiens
cactttgggaggccgagacaggtggatcatgaggtcaagggatcgagaccatgctggccaacaaggtgaaaccccatctctactaaaaatataaaaattagctgggtgtggtggcacacgcctgtagtcccagctactcgggaggctgaggcaggaaaataccttgaacctgaacccaggaggtggaggttgcagatagccgagatgacgccactgcactccagcctggcaacagagcgagactccatctcaaaaaaaaaaaaaaaaaaaaaaattaatgactgccctgctaggtttcagaatagcatgggacctgtagcycctttcttttggtcaatttctccctttcaaaatgggaatgtttacccagtgtcagtatcctcattgtatcttgaaagtaaatagcttgtattgattttatgggcacatagatttaagaaactcatttcctgatgagactctggacttaggacttgggacttttgacttaacgctgaatgagttaagactttgggggactattgag

SEQ ID NO: 600610 - DNA, 533 bp, Homo sapiens
cctctggacaaagcacagatcacagatgttcatgtgattttgtgttcttttttcccaggcacgtcctcaaccttgacaatataaatctctaaattgactgagatttgcttcagtcattttctttggttttacagtggtttcttatttcaacactttaaatatttcactccattaccttcttgcttgcatagcttctgaagagaagtccaatctaattcctattctgttcccctgtaggttaagattgtattgccccctctggcttctttcaagattttctctttgtctttgattttttgcagttcacatatgatatgcctattgtatatttttttgtattctgcttagtgttttttttkggggttgggggggcttcctgggtctgtggcttgctgtctgtcattaattttgaaaaattctcagccattattacttgaaatatttcatttcttcctttttttctgttttccttactggtattctcattgtgtatgtatcttttataattgtcccacagtccctgaatacattgt

SEQ ID NO: 600611 - DNA, 509 bp, Homo sapiens
cttctagccaatataatcatagcagatataaggaaggtcctgaagtcagttaattttaagttaatctaaagggaaattatcctatgtgggtattacttaatcaggtaaaagctcttcaaagagagactaggccccagctaaggtaagagattctccttgctgagttgataaaatcctctrgtcaagcctcagatgagagtgcagcctggccaatatctttcctgcagtctggtgagaccttgagcaggggacccagataagctgtgcccagaatcctgacccacagaagccatgagataataaatatatgtttcttaaggtgcatagtttgttgtaattgtttatggagcaaatggaaaaccaatacaggtgtttggcataattggaaaaaaaaaaactttggacttaaatacatcgaggccaaattcctagctctactactagctgtgtcaccactgatgaattatttaagatggctgaacagttttctcatctgtaaacagaaaaac

SEQ ID NO: 600612 - DNA, 459 bp, Homo sapiens
agaattctgcagtcactctggggctgctgctctcatcagtgagtcactaatgggcatcaggagatccccttagaaggaggtgcatgtgcctgagcctcagsgaaaattggccctggtcatggttctcaggctctcttctcaatgccaagggggagacatctggggaggttgtgaaggactatcaagttcttatgattctgatgtgtttatggcagtgagtaaaattcataggtcatttatgagctttgcctcccatttcacacagctggtcctttttagtcaggctgtacatgctccagaaagaactcagcatcagcacctggaggggcaccttctcctcccagtcctgggaggctctgagaggggaggccaggagagaagtggagggtgaggctgatagcctacctgtgcagcactcgggcctacctccaatggcctgaaccacattcttctccagca

SEQ ID NO: 600613 - DNA, 459 bp, Homo sapiens
agaattctgcagtcactctggggctgctgctctcatcagtgagtcactaatgggcatcaggagatccccttagaaggaggtgcatgtgcctgagcctcagcsaaaattggccctggtcatggttctcaggctctcttctcaatgccaagggggagacatctggggaggttgtgaaggactatcaagttcttatgattctgatgtgtttatggcagtgagtaaaattcataggtcatttatgagctttgcctcccatttcacacagctggtcctttttagtcaggctgtacatgctccagaaagaactcagcatcagcacctggaggggcaccttctcctcccagtcctgggaggctctgagaggggaggccaggagagaagtggagggtgaggctgatagcctacctgtgcagcactcgggcctacctccaatggcctgaaccacattcttctccagca

SEQ ID NO: 600614 - DNA, 592 bp, Homo sapiens
gtggctagcagccactgtactgggtagtgcacatttagagggtataaaggttaagagtgtctgttctccggccaggatcactgcgttctaggtgtgtaaccttggcaaaattacttaaccttgctgtgcctcggtttcttcatctgtaaaatgagaamaataacaacacctacctcaaaaaaatgatacaaggattaaatgaatggataaatgtctcttacggtgttctccacatgtaccaagaactcttctaaatgccttacatgcatgatttttagcaatgtagagccaggacagggcattgaagaaggataaacttctccaagagtggttctaaacatcatcttttaatgtggtagtaataaaagattaaaaacaacttcaaaacatgtcacaaaataaattctaatagatgtggaacttaaatgtgaaatccaaagctttaaaactttaacaaattattatctactagtaggtcacgaagatattctcctgtgtcatttttttttctgtaaaagacaaaaacgccatccataaaaaataaaataaaattgaccacagaagttgtatttcgtgaaatacaccagaaaga

SEQ ID NO: 600615 - DNA, 592 bp, Homo sapiens
gtggctagcagccactgtactgggtagtgcacatttagagggtataaaggttaagagtgtctgttctccggccaggatcactgcgttctaggtgtgtaaccttggcaaaattacttaaccttgctgtgcctcggtttcttcatctgtaaaatgagaaaaataacaacacctacctcaaaaaaatgatacaaggattaaatgaatggataaatgtctcttacggtgttctccacatgtaccaagaactcttctaaatgccttacatgcatgatttttagcaatgtagagccaggacagggcattgaagaaggataaacttctccaagagtggttctaaacatcatcttttaatgtggtagtaataaaagattaaaaacaacttcaaaacatgtcacaaaataaattctaatagatgyggaacttaaatgtgaaatccaaagctttaaaactttaacaaattattatctactagtaggtcacgaagatattctcctgtgtcatttttttttctgtaaaagacaaaaacgccatccataaaaaataaaataaaattgaccacagaagttgtatttcgtgaaatacaccagaaaga

SEQ ID NO: 600616 - DNA, 587 bp, Homo sapiens
ccatcttaaaaaaatagggaaagtgggatgtgggaagcagatgtgttaatgagtgggttgtttgtgtgggcacctgggctcagtctggatggggatatttggagaggcactccctctaggaggaaactgggtgtttatttaccaactcccattcctcatgggttgcttctgagacgctcacctctgtgctctcaacccgctccrtgtgtaagtagatcatattcctgaggccagagaaagccccagggcagagagatgatggtggctgaggtaggaagctgttggagtggctgtgggtgaccttcagggaggaagaagggaagaggggctggcacagacatcatctcctgcaagggtctggatgtgctcccactccccttctttctgctttttgagactgattcacttctcaatcaagtcttggatgcagaaggaaagaagggagcaaaataaattaggtacccccaaatgcgcttgtttgtggggactagagagttgaaggtataaatgtgtgtttgcattgcttgccaagctgtgactcagagtgtctggcctgagagtggcaatgcccacaggcccccagggtc

SEQ ID NO: 600617 - DNA, 602 bp, Homo sapiens
ttgtacccttaaccactccactctccttagtggtaaaatttgggggagtggtcttcccaggcttggctcattccactgctgggcacagggctatagtaggttggcacagcctaaacttaatatcatccttagagagtaattctgaatctgtctgcatgtgggcacaggcagagagasacagaacaagaaataagaacgtatcctttcttccaagcacttgttttggaatatgctgcatttagccagttgggtggacttattttcttttagctcatgaatgaactgactgcttcatgtgcctcttttctgtttgcatttatgcattgtattagtctgttctcgtgccgctataaagaactgccgagactgggtaatttataaaggaaagaggtttaattgattcacagttctgcatggccagggaggcctcaggaaacttatatggtggaagacaccacttcacagggcagcaggagacaaaatgggagccagcaggggaaatgccagaagcttctaaaactgtcagatctcgtgagacccactcattatcaagagaacagcatgggggaaactgcccccatgattcaaaaacttctacctgg

SEQ ID NO: 600618 - DNA, 538 bp, Homo sapiens
tggcagatgggttggtttggcaggtccaagatagctccactcacaagtctggtgccttggtgggactggctggatgtctgggctcacctgggccctcttcctctccatgtagtctcaggccttgccrtgtggtgtctgcagcaggctagtcagatttcttatatggtggctcatggctttaagagtgtttcaggtgacgcaggaagaagctgcatggcttctaaggacctggtctccaaagccctggagtgtcacttagccacattctattggccaagtaagtctttaaggccagtccagattcaagggaggagaactagaccttcctgctcaattgtggcagttttaatcaatgacagatcctttccagtcaagtgactttttcacatggcagatgtgaatttgagggtcttttcttctctatgagaggctgcaggatatgagcctcaactgttccacctactgctagatgttatggccatttagctcctggcgttgcagttcttgtcttgagctgggcctccagaaacaggatgcc

SEQ ID NO: 600619 - DNA, 579 bp, Homo sapiens
gtaccacatttgtgcccattttataaaagaagaaactcagacacaaagaggttaagcaacttgcctgggctcatactgctgcaaaatgaagaaccagtattcagactcaagcagcctgggtcctgatgccatggggccggaataacctgctaaaactagtaattgtccctgtaacactcaagagccctgaggtttactgctattagctgggggctctcaagtctatcatcggcactactgagttaactgactttctgtaggaaaccaaatgttctttttgtgaatttgtaggtttytgagctaacaaaaaatccttttcttcagctacctattatagtcagggtgactgggcatacctattcatttcccatggtgtcctaggactcatatgcaaattaagcaaaaagaattctgagttacattgtagctttgttactgcaaacctgggttgttgttgtaaagtcaaacagttttgtttgaggatccagtgggtgtgtgtggcagcactaagcaccttaatgtggaaatcagagatctgagttttcttctctgagtgagcagggtcaagaagccatgcaa

SEQ ID NO: 600620 - DNA, 538 bp, Homo sapiens
ggaaatggtgtcttcccattaagcaggcctgtgcctcagccatttccaggaaacttcgagggccctgcgtaatgattttcatcagcaggtctctgctgggggtggtgaatgaatgggagccactggcagtccctggaccttgtactcataggactgtacctcccaggggccatgacgggatagtccgtgaaaccttcaccccctaatctatccgtagcttctcaatagccctgggaggcagggatctcaaatgattacaccaagcagccggcaagacccgctttgggtcatttagagataaagaggaaatgtccagctgtaacasaaaagataaaggcatctaagaagagatggtggaggtctgagacctgttgggttacacggtagagtgtgggactgttaacttcatttgtttctcatttagtggggaatgggaggcatggaggaggaagtgccagactggaatgcagactcccaggttccctggcctggtaccccaagctttgtgttcctcacctggtcatcttccttttctggg

SEQ ID NO: 600621 - DNA, 536 bp, Homo sapiens
ggtgacttttaatatagagttagcagatttagcaaatgaaaatatggatgcccagttcaatttgaatttcaggtaatcagtgaatacttttttagtataagtatgtcccaaatattgcgtaagacatgctttagattaaaaatatgaaattcaaattgaactggatgttctgtattttatctggcaatcctattttaatgaccccccaaactatgccatgagaacgtcattttcatcactgctaagaccactctatattagaatattagaatttgctagccaaggaagatgactgagaaattaaggttgggagctgactttcagggtgaytttgaagttaatgctgtataactaggggttaggtggggacaggttgaactaataaccctaggacccttccagtttatgtgatgacggcatgtccagccattagctttttatcatcccatagctcttggatgctgtattctgtttttgtttcactttgttgtgttttctacccttttttgcctttgcgcttcagtttgtttaatttc

SEQ ID NO: 600622 - DNA, 568 bp, Homo sapiens
gcttgtttgcggagcctgggctattgctccacagcactgggcttggcccctgtgacaagagaaacccaggcaggagctcttaccccatgcaagtgccactgggggattaatttctctttgggacttgggggttgtggccaatgcagagaagcagcagctgggctgacaggagtagctacatttctggatcagccttccccctcctctgatttcccctattcaggtctcaggaacccagacgttgaagtaatattcttgtgagcagtggcgaaatcataccagtttggagcaactcgattcttgcctttccagaggaaataactcgactgaggggcataaggcagagggagagactgaggcaagttttagagcaggagtgaaagtttattaaaaagttttagagcaggaatgaaaagaagtaaagtacacttgttagagggccaacaagcaacttkagaggtccaagtgccctgttctgtccttgacttggggttttataccttggaaggttccagagtttgcacttcttctcccctgattcttcccttggggtgggctgttagtgaga

SEQ ID NO: 600623 - DNA, 604 bp, Homo sapiens
ggatgccgtaagcaatcaattgcttactgtagtctcatcaactsgattcgctagcttcattaatattcaagccacttaatgatttcagaatcaactctacaagatagggaataatttataatggttttagtttttactttaatgggacagtaatttattaacagaagttgccaagaaattataagattctttgcaaacaataacatattattttcctatatagccagtgttttgttttcagaaaagggaaccacttgttgaaaaaaattattataaattaattgtatatattttattattattaatgagacatattattttatttccatcctgtattggataggtttggcttttggaaaggaaacttagatccatttgtctgaagaacttaaaggaggcagtctacaagatcaacattagggtggccactgtgacactcttctttttagctcttgcacttctttcttagaaaagtcaacaggaaaaataggaagatttctgttgtattctcccttggtcaaacctcatatgaaaaatatattttacctctggggaccacattttaagagagacacattcagacactaaaaaactggttagaaga

SEQ ID NO: 600624 - DNA, 604 bp, Homo sapiens
ggatgccgtaagcaatcaattgcttactgtagtctcatcaactcsattcgctagcttcattaatattcaagccacttaatgatttcagaatcaactctacaagatagggaataatttataatggttttagtttttactttaatgggacagtaatttattaacagaagttgccaagaaattataagattctttgcaaacaataacatattattttcctatatagccagtgttttgttttcagaaaagggaaccacttgttgaaaaaaattattataaattaattgtatatattttattattattaatgagacatattattttatttccatcctgtattggataggtttggcttttggaaaggaaacttagatccatttgtctgaagaacttaaaggaggcagtctacaagatcaacattagggtggccactgtgacactcttctttttagctcttgcacttctttcttagaaaagtcaacaggaaaaataggaagatttctgttgtattctcccttggtcaaacctcatatgaaaaatatattttacctctggggaccacattttaagagagacacattcagacactaaaaaactggttagaaga

SEQ ID NO: 600625 - DNA, 551 bp, Homo sapiens
tctaagtggaactattgaagccagcatacctttcatcttttaaaattaggtgagctaataagccccttttaaagtttaagctatttgagtcagatgttttttcttttttacacgccgtcgaaagagacagcaggtaggtgcattgcctctctggcacgcactcttctgaacttgaatgaatcacccagccttttagattcctttcacagatgcaggtgtagtaaaraaataattaaaatgtattaaaaaagttaattctttttctgtacctcattttccccttctagagaacacaagggccattatcacagctgccaggacctgctcattattacgctgggctgcatggatggttgttctcaagagaacagaaccagaaggcaatagagggagagattctgtatttaaatttcactagtggctttactttgccatgctttctgtctttaaggaaacaggcactctcccctagtactgtctcttggaggttggggaccctctaaggaaggattgggggtattgaagagaagtctatgaggagaggtttgtaa

SEQ ID NO: 600626 - DNA, 554 bp, Homo sapiens
ggccattatcacagctgccaggacctgctcattattacgctgggctgcatggatggttgttctcaagagaacagaaccagaaggcaatagagggagagattctgtatttaaatttcactagtggctttactttgccatgctttctgtctttaaggaaacaggcactctcccctagtactgtctcttggaggttggggaccctctaaggaaggattgggggtattgaagagaagtctatgaggagaggtttgtaaagtgtgggtgcagatgtgttaggagaggtagaaatctttcagggatttctctctattttatagaaatataaactgaggcttaacgctgggaacctgttccttgtcaaccaggcaatccggtggcattacagagagttgaactccagagcgcttgctcccaaaccaggccccaccctccagatggccggtttrcctcctcctcaggcctgtgaattgcttcccctggaaccagaccagatgttctggagaaagcaccaggtcagcattctccgcggaaggcgccggtctccggagatgcca

SEQ ID NO: 600627 - DNA, 598 bp, Homo sapiens
tatctcattcactgaagtaagccactctctatagcccacactcctgaacagtagaggcaggagccatcttcttagaagctgccaccataccaaatacttcctgctaatatttgctgcctctctgagccatatagcagagagggctgggaaggcagccctaagaagtgtgtgttttgttctacagctattcggccccatctttcctttggagaaaacactcttcccacaaggaaggggaagcaagaattagtggcagcaaggacaatttaagcccttgaaagaagcaatcatcacattgattaataaatacttaaaatttctttttttcattgctggtcaattgtttggtgataagatagagtaagcaaggaattcaatttagaaactagagaaagctggagtctgaatttcaaccaaaacaagtcacttaccctcatgaaacctcaatccgctgatctactcaccaggatgacagtgtcwactttgtaggattaattgaataacattaacgtcttttaaagttagctctttcatattgagtgacttagttaataaaaacaggcctactgggatgtcaaatgaggacttcccctcttgc

SEQ ID NO: 600628 - DNA, 464 bp, Homo sapiens
ctatctagttccctccagcccttttataaggcactaattgtatccataagkgtggattcctaatggcctaatcacctcctgaaaggcttgcctcttaatactgttgcattggggattgagttccaacatgaattttggaggagccacaaatgttcaaaccatagcagatgcctagaggtgaaatttctgagcccgatgttttgcttgtttgctttttttgtttgttttttttttgagacagagtctcactctgtcatccaggctggagggcagtggcacgatctctgctcactgcaacctccacttcttgggttcaagtgattctcatgcctcagcctctggagtagctgggattacaggcacccatcaccacacctggctaattttttttgtatttttagaagatacagggttttatcctgttggccaggctgattttgaattcctgacctcaagtgaccgag

SEQ ID NO: 600629 - DNA, 603 bp, Homo sapiens
tgctcttgaactttttttaaattttttttttatttcaacttctacacaccaaggtttcaaaaatcttagagctgaaatttcttcctggacaccccagacatagccccagggttcctctctcacagtttatgggacttggtggctgcctcatttagtttgccacatttttcttgctcagaccagacattagaaccatgatctaccttgtcactcatgttctaaatctaaagtctttctggatgataaaccagcttcatgaaatggagctcaacatcttaatacacagtttatatatggaaggacggtttataggcacataactgggtcaacttaacacagaacagaataaaaaatgacaggcgtatsgatcagtctttggctaactcttctacctctcttggtcctgagtttggaggatacccagttcttgccaacagtgttgtaggtacgaaccttctcaaattgaggtccaaacttttctcccagctgccacttggctactgctgctggttgcttattctctcagttccactagcagaatcttctgcattcccatgttccccagacctaccaccctggagcaagtctctcaagcccagctca

SEQ ID NO: 600630 - DNA, 587 bp, Homo sapiens
caactggccctgtctctatcagatcaagagatatgaggaacatcatctgtcttcttctccttgtcttctacccctaagcatcctaggtctgctatcaaaactcccgttcacttcagacaatgacgtagtctggttttgcgggtagcgagacgggggaggtgggggagcagcatttgtgggggtggaggragggcaatagagtacagaagaacagatttctagttttgcctctgtcactaactgagccatgttgagtgcatctttcccaatctccaggcttcattttttctgcctgtaaaacacagatgcatagcttagttgttaagcagacagacaaaagacagactggctctaccccaactctgctgctcactagccctgtgaccttggaaacatttctcatctctaaaatacagatcatcataatatctacttcatgggactgtgatgagagtgaaagaagttaatacacataacactcttaggagagtgtctggtgtaggtgttttacgagtattgctgtcattattctccttaaatgtgtaattaatgaaattctagtattttcaaataaatatatgggaaat

SEQ ID NO: 600631 - DNA, 535 bp, Homo sapiens
agtcatatttgtaatttcattttttctagcaggcacattttaaaaagcaaagaagaaacatgtaaatattaattttcattatttgatttaacttaatacagttaaaatattattttaacatgtaatcaatgtaaaaaattatgaatgagatattttacactctttttctcgcatgatgtctttggtggctggtgtgtctgtgatcataggagcacgtcgacattcaaacgcrccctctttccagtgcttggtagctgcatgagcccagtggatcccaggctggagagccacagaccacaaccccaaggagcttctgtctgctgaatcagccagagcatgtcttgcttcctggctgttcggagtaaaaggagaggaagaggggtctattcttgctaggagttaggcaggggcagatggagtgcctgaggccagggtcccctccaaccaccacacctttatgtcattgtactcttggctttcaaggacatcaccgcctttatcctggactctttcagagagtctatgactcccagga

SEQ ID NO: 600632 - DNA, 482 bp, Homo sapiens
tgatccatttttttaatacctcagctggccacctttcgcctgggacactctggtgtcctcccagaatagaatcttgtccacaaccatctccccgacaggtttctagatgctgccctggccagaatcagtcacccaggctgcaccggaagccacctgttgcctgatcccagccttggcctaaatcatagtgrggagccctggctagaggctcagtgcctgccctctgaattgctagcaagatctctggcacccacaccaaggctttgtaaaactccacaaatttttctgagaaagaagtgtccctgcaagcagaaggcctacactgcatcactatttctgctgtcaaatgacagcctcagggtcccacaagtgagagatgggcagacccctgcctgggctagaattctcggggtcttgggtctccacacagaagttgctcagtcagaacccccctctgtcctccaggtgtcctgccagacaca

SEQ ID NO: 600633 - DNA, 623 bp, Homo sapiens
cttttttagttgtcaactttccctcattttcctcctgtctgctttcttctctttgcctcttccccagacttaagatttaagcagaattttatttctgtagatgtttgatccatttttttaatacctcagctggccacctttcgcctgggacactctggtgtcctcccagaatagaatcttgtccacaaccatctccccgacaggtttctagatgctgccctggccagaatcagtcacccaggctgcaccggaagccacctgttgcctgatcccagccttggcctaaatcatagtggggagccctggctagaggctcagtgcctgccctctgaattgctagcaagatctctggcacccacaccaaggctttgtaaaactccacaaatttttctgagaaagaagtgtccctgcaagcagaaggcctacacygcatcactatttctgctgtcaaatgacagcctcagggtcccacaagtgagagatgggcagacccctgcctgggctagaattctcggggtcttgggtctccacacagaagttgctcagtcagaacccccctctgtcctccaggtgtcctgccagacacatgtgctttctcccacttgaccatcaccaataaatct

SEQ ID NO: 600634 - DNA, 641 bp, Homo sapiens
gcctgccctctgaattgctagcaagatctctggcacccacaccaaggctttgtaaaactccacaaatttttctgagaaagaagtgtccctgcaagcagaaggcctacactgcatcactatttctgctgtcaaatgacagcctcagggtcccacaagtgagagatgggcagacccctgcctgggctagaattctcggggtcttgggtctccacacagaagttgctcagtcagaacccccctctgtcctccaggtgtcctgccagacacatgtgctttctcccacttgaccrtcaccaataaatcttggagctggccaaaggcaggttctcctgacattgcaggtgagaaaagctgagatccccagaggaaaaataacatgcccagcgttgcacagataaattcttggtggagcgggaaaaggtccagggtcccccagacttgaagggctcactttgctttgccacaatttggccctgggtgctgttgcctgactcagatctgactgcatgtgccagggccagcctgccctggccggtccctactctgtaaccggacacagccatgaaggacaccaaggagggggcgagggagcagaaaagatatacaaagggatttgagcggatttggttacaaagttgcac

SEQ ID NO: 600635 - DNA, 641 bp, Homo sapiens
gcctgccctctgaattgctagcaagatctctggcacccacaccaaggctttgtaaaactccacaaatttttctgagaaagaagtgtccctgcaagcagaaggcctacactgcatcactatttctgctgtcaaatgacagcctcagggtcccacaagtgagagatgggcagacccctgcctgggctagaattctcggggtcttgggtctccacacagaagttgctcagtcagaacccccctctgtcctccaggtgtcctgccagacacatgtgctttctcccacttgaccatcaccaataaatcttggagctggccaaaggcaggttctcctracattgcaggtgagaaaagctgagatccccagaggaaaaataacatgcccagcgttgcacagataaattcttggtggagcgggaaaaggtccagggtcccccagacttgaagggctcactttgctttgccacaatttggccctgggtgctgttgcctgactcagatctgactgcatgtgccagggccagcctgccctggccggtccctactctgtaaccggacacagccatgaaggacaccaaggagggggcgagggagcagaaaagatatacaaagggatttgagcggatttggttacaaagttgcac

SEQ ID NO: 600636 - DNA, 482 bp, Homo sapiens
tacaaccttcccctctcctctcacccactatcagacattaacagatgaggaaacgaaatcacagagggaccaagtgatcaaagagtggccaggactagccctggaactggagccattcttttgttcaacacgtatttattgatcatctattgttctggccacgggtctaggttcttggaaaatatcagtgaataaaactcccaggagattgggaaacctgaaatgtaagccatactgcggcaaagaggttttgtctgtgtctcttcttcctaaggtgctccctctttattactttaggagggcttcatttttcacttattttatctgcagacctcatcatgaaacaaaacactttcagcgagttgttgtgcttaaaaggagaagcytggggaggcaacggaacacagtgcaatggacactgcatttttcccccatgctccactggcccccatagttctggaaaccctaagaccataccaatt

SEQ ID NO: 600637 - DNA, 615 bp, Homo sapiens
tctgctgactaaagagacaaataagaaaattaaagatgtacactccaagaacccacgtgtttttcatatagggaccttcccaactcagtttcccagagattccatcaaatacagaccttcaaagagtttgagagtaccacctcaaagaggtaggtccagggttygtgtgatctctctttactgcatggacaagattagagggaggctctacagcacaaagaagacaagccatgagcacagaaagcctggctcttcacaggacttgtggggaagcagggagagagttgggtggttgttttttattggtgggtgggtgtcggtgagggaagggattgttagagaagtactggggccagtctttagaaggtgagaggtgatctttgcttttgccagaggcatgacagtttgggagattggccaagcatgggtgacaattcctcagtcctgagagtctcctctgtaatcagaaaatgtcatcaataccttgtcctcccattccttttcagagataatttcctttctttttgcctctgtggggaatatttcagatgacatgctgaacacctatacctgcaggccttcaccatcttcttctgttcctcaactctggtcagc

SEQ ID NO: 600638 - DNA, 544 bp, Homo sapiens
cccaacaacacacctgggcttcaggcctaagtaatgaagctctgggtggtgccaaccagaagggtcaggttggcaggaaggtcccaagaaatgtcgtctcctctcttccttaaaagcctggtttcaaacacacttcctgaacaagggctgtagtgattcacccacttcaagaaggccaacttcatgttgaggccatagtgggtggaggggtggaggtgatcatccaagcatcccccagtgtccctctaatatcccacctcttgcagatgcccaagaggcagagaatgctacagttctcttgtcattcttttaacataagacctaaggttttaatcctgggtagggcaacaaaggcaggaaagaagagaaagaaagagaaggaggtggagttgtattcaaactacatatgtgatgctgagcttaatgtattctaactcttctctgattgtcagrtgctctgcaggagtcacctaaggtaaggacagagaaatgagatgaggttccctcaagcggtcacacagtgcctggcgcttagtagtcccct

SEQ ID NO: 600639 - DNA, 636 bp, Homo sapiens
tgctctctcctctgaaacacccaatggctgataaatyccataactttgtctctagagcatcttacctgcccctggagattcaaccacacaaaactctaccttgccagtgcccaaaactacatccccagcctcaattgctcttctgagctacagatgcctctatccaatttgtctacagggcatccttggggacctctctggtagacattcaacctatgcaaaactaaaaccagtttttttctgttcacatctatttcctgctcctgcatctactcagcagtcattcactattcacttaggacagaagactaggattaaaactttacccctccacataaatcatgtcagtattttataacttatcccttcttcaactccattgctggcttgggttaaatggcttaatatcactaaagaacttaccatattgcaggcactttcctgcaatagataacaagttagaattcaagtcttttgttgatagctgtctttatggtgaacattaagtcaaagatatcaccctctgggtaactgaccgtcttcctctgcatcccttctgtggcagcagttagagcatacgcactaaaattaagtagatgtggatctaaatcccagctctactgtttagtatttgca

SEQ ID NO: 600640 - DNA, 636 bp, Homo sapiens
tgctctctcctctgaaacacccaatggctgataaatcccataactttgtctctagagcatcttacctgcccctggagattcaaccacacaaaactctaccttgccagtgcccaaaactacatccccagcctcaatkgctcttctgagctacagatgcctctatccaatttgtctacagggcatccttggggacctctctggtagacattcaacctatgcaaaactaaaaccagtttttttctgttcacatctatttcctgctcctgcatctactcagcagtcattcactattcacttaggacagaagactaggattaaaactttacccctccacataaatcatgtcagtattttataacttatcccttcttcaactccattgctggcttgggttaaatggcttaatatcactaaagaacttaccatattgcaggcactttcctgcaatagataacaagttagaattcaagtcttttgttgatagctgtctttatggtgaacattaagtcaaagatatcaccctctgggtaactgaccgtcttcctctgcatcccttctgtggcagcagttagagcatacgcactaaaattaagtagatgtggatctaaatcccagctctactgtttagtatttgca

SEQ ID NO: 600641 - DNA, 568 bp, Homo sapiens
accccattctttcctgagttttcttctgttctctcggtctccttgccctgctctctcctctgaaacacccaatggctgataaatcccataactttgtctctagagcatcttacctgcccctggagattcaaccacacaaaactctaccttgccagtgcccaaaactacatccccagcctcaattgctcttctgagctacagatgcctctatccaatttgtctacagggcatccttggggacctctctggtagacattcaacctatgcaaaactaaaaccagtttttttctgttcacatctatttcctgctcctgcatctactcagcagtcattcactattcacttaggacagaagactaggattaaaactttacccctccacataaatcaygtcagtattttataacttatcccttcttcaactccattgctggcttgggttaaatggcttaatatcactaaagaacttaccatattgcaggcactttcctgcaatagataacaagttagaattcaagtcttttgttgatagctgtctttatggtgaacattaagtcaaagatatcac

SEQ ID NO: 600642 - DNA, 643 bp, Homo sapiens
agctctactgtttagtatttgcacatccttgagctatttcctgaagctctgagccagtaaggaggtgatctccaactaggtgtttagtctcctcattggtaagataacaggattgccattaagcctgagtcctctctttaacttattgaagatttttaaggctgggagcaatataatgatttgcccacatttggtaagttgagaaacttggatccagaaaatcagtctgactaaatattggagaaaatcatctcaggtcccctgctcagcccttctcttgtagattggttcactgacctcatatggcctttgtgatatcccagagaggggaagaccaagtcacagtggcctagattctctgcagctgggctccttctgtctcagagctgggaatacaatcttcaggcaaatgactggaaagcctccttcaggcccctaacatctcccagcagtaagtatgagcactaagtgtgtgcattcagccacactaggatacagcagagctgcatgtaccccaggactcagccagtttcctacrggagcatagaagaaagtaccactaaaggagagcaaggagaaggaagaggaagagggcagtgattggcaaggcttgagggtaagagtaggaggagtgaagacagga

SEQ ID NO: 600643 - DNA, 594 bp, Homo sapiens
aaatcataagggaaaatttggaaaatgtcacgttagccttgtgtgcccatctgaagaacttcctgaggytctcctgctctaaccagggacttttaaacctcagttttgtctttcctctcttgcagcatgaagaaagtgcactttcactgttgcagtagtcttagaaaacaaatatttctgcatggtgacacggttcttactagaaccccagaacatctccatggtatgacctaccacatttcctccccaccaaaataataataataataaggctacacagtatctggaatttcttgctcattaaaatctgattactaccacactcaaaagcatctgggtctttctttggtccttactaaaaacaaaggctttgctttgaacatttctccaggcaagtcccatctgctcccccagaacaagaatgtaatgaagaaggaagtgttactaaacctttgtgctttggaccacagaactttagaattagaaaaagcagcaaaagatctacttttttctttttatttagtataaatacaactaaatctactttttgagatccccaaatatgagtattctgccccaaagaacaatgcggaa

SEQ ID NO: 600644 - DNA, 622 bp, Homo sapiens
actaaatctactttttgagatccccaaatatgagtattctgccccaaagaacaatgcggaaaactgacagcgacactgtcaagcaagccttcattgccagctctgtctctcaagagtttcaggacatgtagtaaaattatgttttgaatctgcctgttcttctccctcaatcgccactaagactaggaagtagaggcttggcaagccaagtcaaagaggcagggctgattgtgatgctctctcttggcccagccttggtcagtagagttagtcagakctcctgtatgcaatgcactctaccagcctgatggtcacaatgctatgaaatcatcaattatgaagccattgaccttcacgtgtggcaacctcaacctgtctctgtggtccttttccacccttgatggcaactctttcccccctttcaaagggtcaggtgccctaaaactcagtgaactgatggcccttggcaggtgggatgattttaagagggccaaggcccctgcacatggctcttagcacacaagaggaaaaaagaaaagcagaccaaatgcacagaaaataacaagaggccagaaattataattgtggtgcatcattgtatagtggcatgaagcctggactg

SEQ ID NO: 600645 - DNA, 483 bp, Homo sapiens
tggtctatttattcccttctgggccttatcagtcaattcagctctgcctctatatgtcctgtatcctgaacttctgcattatgatttgtttgatgaaagggttctactgtttaaaaagttgaacaaaatgactgaactatttcagctcccttacttttcagatgggaaaacgaaggcccagaggaaaagggattgccccaagtcacacaagtcattaragccaagactaagtctacaaccacctttcctgactcctcattcattgttttctgactgaatcatgtgttcttcacagcatgcaccctgtttgagtgtccatacataacctgaataaatcagagggaaaggggatgggtgaggtggagtctctcttccagcaacaatctggaatcccaaaagggggccttggcctctatgactgttcaaatgtaatcttgctgcctgccgaagacacctcctgagagataaggcaacatggtgccc

SEQ ID NO: 600646 - DNA, 483 bp, Homo sapiens
tggtctatttattcccttctgggccttatcagtcaattcagctctgcctctatatgtcctgtatcctgaacttctgcattatgatttgtttgatgaaagggttctactgtttaaaaagttgaacaaaatgactgaactatttcagctcccttacttttcagatgggaaaacgaaggcccagaggaaaagggattgccccaagtcacacaagtcattagagccaaractaagtctacaaccacctttcctgactcctcattcattgttttctgactgaatcatgtgttcttcacagcatgcaccctgtttgagtgtccatacataacctgaataaatcagagggaaaggggatgggtgaggtggagtctctcttccagcaacaatctggaatcccaaaagggggccttggcctctatgactgttcaaatgtaatcttgctgcctgccgaagacacctcctgagagataaggcaacatggtgccc

SEQ ID NO: 600647 - DNA, 483 bp, Homo sapiens
tggtctatttattcccttctgggccttatcagtcaattcagctctgcctctatatgtcctgtatcctgaacttctgcattatgatttgtttgatgaaagggttctactgtttaaaaagttgaacaaaatgactgaactatttcagctcccttacttttcagatgggaaaacgaaggcccagaggaaaagggattgccccaagtcacacaagtcattagagccaagactaagtctacaaccacctttcctgactcctcattcattgttttctgactgaatcatgtgttcttcacagcatgcaccctgtttgagtgtccatacataacctgaataaatcaragggaaaggggatgggtgaggtggagtctctcttccagcaacaatctggaatcccaaaagggggccttggcctctatgactgttcaaatgtaatcttgctgcctgccgaagacacctcctgagagataaggcaacatggtgccc

SEQ ID NO: 600648 - DNA, 540 bp, Homo sapiens
gcatacatagcatcctgggttgagttggctgttggattaaaaaatctcacagagaaagcatattggttgttaactagggctgkggcaagggggcgatgggagtgttgcagtggggttggctaaggcatgtagagctcctttctggggcagtgagaatgttctaaacttgtaatgatacacaactctgtgaatatgatttaaaaaacactgaattgtacactttaaatgggagattatatgctatatgaattatagcttaataagtctatgaaagagaagagaaaagaaaatgaaagaaaagggaagggaagggaaaggacaggaaaggaaggggagggcagggaagggaaggggaaggtaggacggaaggaaggagagagagagagaaaggaaggagggagggaggaggaagggaagaacttcaaagactccatctctttactggtctttctggccctgacattcgtctttcttctcaagaccttctgtcacttgtcattccctgagccccatcagccctatgcctctggggagcccagg

SEQ ID NO: 600649 - DNA, 584 bp, Homo sapiens
taaagctccaattcaaaaataacctgaattcttggaagtttaaattacttaaagttcaataagttgattatttaggtcattttacttactttagtgctttacattaaaattttcctgtttaatgaacatttaactaattaggaaaatttattagtcaaattgtcagactctgttaaatggcttgtcaaaatgtttgtttagcagttattcctgtcttcttaacattgttgatctttctaaccctctagttcagttttttctgggtgattgtgttaagtggtagtatttaccaattattttaaaaatcctttattatgaaaataagtcactgtggacagttaaagcataaaaagtttaaagaagcaaaaaataagcatayaaaatcaaccattattttaccattcttaggcagccactgttttttttgttttttgtttttttttaactttttagagcaattttaggttcacagcaaaattgagtagctggtacactgatatctcgtatgtctcctgcccctgcacgtgcacagcctcctccatgatcaccatcccccaccggagtggtatgttgcaaccattgat

SEQ ID NO: 600650 - DNA, 539 bp, Homo sapiens
aggagaaaataagtcatcagattaaaattgagggaaccagtcttgattcagaaattatttactgagcatttaccatgtgccaggaatcacacctgacccgtaactaccatttagggaaataaacaccaccaccaccaccttaggggtggyctacccacagggaaaacagtgctcatgagaaagcttatgttctcagagatctccgagtttcactgcttgtggagtctaacacgtagaaacacacctatgaaacccaggaacaaacaagtgaccagagaggagacagtgtctttcttttcttcaataaaagctccatccctgacgcccaaggaaagcagctcagatgtgtttttgtcaaaaagttggcttaatatcctaaagccaagaggcagtcttttgagggtgttagggatcaaccccctgcccttgaagaaaaacaaggagagtaaaaaggaaggattctaatagaactgtggagacagatcaggatgaagcaaagatttcctggcaggtctcttaggtaacaggtgcctttctcc

SEQ ID NO: 600651 - DNA, 625 bp, Homo sapiens
gctgattccccagttggatatgaaarctttaccaggataatcttggcatatcgtataacatatgaacattaaaaattcagtttatttcaaatatcaaaaaatagtacccagatgctcattttaaataattcacatatccatgaggtgctgacacattaatgttatatgacctgtattaataaatactacattacaaacacagatgtgtgatgttgggccccccacccccggtgttggccgggttgtaactcctgacaaactacggttacaataaacaaaatacaaaagaacaaaaacgaaaaatgttttaaaatttaaaaaaaatagtttgcaggatgtaaaagtaggttaggtccttaaataggttaatctttctcctaaccttctaaaaaatatattaaaagctggttgagttcactcaacactgctatacattctgtgtaaacctttatttcttttaacaatcaagaatgataagaagaaagtctgaactaaagtaatacactaatttcaactaggctccacagcagtattgctaaaaattacaaaaccctaatcttgaatacagtaaaaacattttctagaaatatcaaaacatgaaaatagaaggaaatatggcaagagt

SEQ ID NO: 600652 - DNA, 516 bp, Homo sapiens
aaaggacaggaatagacttaacattgtctcaagacaacatcataatttttaacttttaagttcaggttcagcaggatgtgcaggtttgttacataggtaaacttgtgctatgggggtttgttgtacagattatttcatcacccaggtattaagcctagtatccattgttactcttcctgatcctctccccgctctcatcctccacgctccaacaggactcaatgtgtgttgttcccctctctgtgtccatgtgttctcatcatttacctcccacttataggaggagaacatgtggtatttggttttctgttcctgtgttagtttgctaatgatggcctccagctccatccayctccctgcaaaggacatgatctgcatagtttttatggctgcgtagtattccatggtgtatatgtaccacattttctttatccagtctatcattgatgggtatttgggttgattccatgtcattgctattgggaacatatgtgtctttgtgtctctataatagaa

SEQ ID NO: 600653 - DNA, 516 bp, Homo sapiens
aaaggacaggaatagacttaacattgtctcaagacaacatcataatttttaacttttaagttcaggttcagcaggatgtgcaggtttgttacataggtaaacttgtgctatgggggtttgttgtacagattatttcatcacccaggtattaagcctagtatccattgttactcttcctgatcctctccccgctctcatcctccacgctccaacaggactcaatgtgtgttgttcccctctctgtgtccatgtgttctcatcatttacctcccacttataggaggagaacatgtggtatttggttttctgttcctgtgttagtttgctaatgatggcctccagctccatccacctccctgcaaargacatgatctgcatagtttttatggctgcgtagtattccatggtgtatatgtaccacattttctttatccagtctatcattgatgggtatttgggttgattccatgtcattgctattgggaacatatgtgtctttgtgtctctataatagaa

SEQ ID NO: 600654 - DNA, 516 bp, Homo sapiens
aaaggacaggaatagacttaacattgtctcaagacaacatcataatttttaacttttaagttcaggttcagcaggatgtgcaggtttgttacataggtaaacttgtgctatgggggtttgttgtacagattatttcatcacccaggtattaagcctagtatccattgttactcttcctgatcctctccccgctctcatcctccacgctccaacaggactcaatgtgtgttgttcccctctctgtgtccatgtgttctcatcatttacctcccacttataggaggagaacatgtggtatttggttttctgttcctgtgttagtttgctaatgatggcctccagctccatccacctccctgcaaaggacatgatctgcatagtttttatggctgcgtagtattccayggtgtatatgtaccacattttctttatccagtctatcattgatgggtatttgggttgattccatgtcattgctattgggaacatatgtgtctttgtgtctctataatagaa

SEQ ID NO: 600655 - DNA, 599 bp, Homo sapiens
cacactcagcttctaatgctttctgttttattttcttttaatctattgagctctctctgtactcaccaagaagaaagtctattatatttaattgagaactcttttctcagttggtttcctcatcacccaacctaattgtgtgtaactcccatctacatcttcgtgaaaagggcttaatttctctagttgtccatcttgatgttcagctttcattttcctaaacttggtttatgtcagctctctttttctagttaactcctctttgctcctgtcctctatgaattgcctagctttcaacagcaaggacagcaggtgctatcttatttaatttagatccataatattaatgcggtgtgacctcatgttcatattctccccacaaagttgagtgtttttgtatttctggcttcagtttgactgctttttggaactctgtrtggtcataacagatatgaatgtttatgtagaatctctgaggcagaattagcattaggctttttaaggttctcattggtaaatgatttggatttagataattattggttctttgtttagggatcattgtggaagctaagtgaagaccttgccagaattgacca

SEQ ID NO: 600656 - DNA, 599 bp, Homo sapiens
cacactcagcttctaatgctttctgttttattttcttttaatctattgagctctctctgtactcaccaagaagaaagtctattatatttaattgagaactcttttctcagttggtttcctcatcacccaacctaattgtgtgtaactcccatctacatcttcgtgaaaagggcttaatttctctagttgtccatcttgatgttcagctttcattttcctaaacttggtttatgtcagctctctttttctagttaactcctctttgctcctgtcctctatgaattgcctagctttcaacagcaaggacagcaggtgctatcttatttaatttagatccataatattaatgcggtgtgacctcatgttcatattctccccacaaagttgagtgtttttgtatttctggcttcagtttgactgctttttggaactctgtatggtcataacagatatgaatgtttatgkagaatctctgaggcagaattagcattaggctttttaaggttctcattggtaaatgatttggatttagataattattggttctttgtttagggatcattgtggaagctaagtgaagaccttgccagaattgacca

SEQ ID NO: 600657 - DNA, 594 bp, Homo sapiens
gctttcttttagagctgctggataaattctgtccggtttcaatgatttatctatatttaggttgtcaacctaggtaagaacatcctgtgcagctctctgtttgctctattgagtccttgtatggttatcttgttagtatagtgctmatgataacaggctgtgtgtaaaagctctctgtacacagctgtcgaactctgctgtgtttggtggtgcagactacaccctgaatcctgttaaagaaaacctttgagatcataacaggatgtttggaagttttaatataaatctcttacttatatcaaaagcagttgaagcaaatagtcttaaaatatagtagaattctaatgtatctgacctgcttccttaagaattcagtttggctatggtaatctctgcaatcttctccttaaataaaaactgaaacattaagtctgccccttttctttaatccctgttcaagagggtatgtcgatacttgaacccttttaccagcatttaaagaaccagctgctgctggcatagcatgtctgagattgcattttgtcctgcctacctttttattagaccttgcacagccatatttgtgagtggatt

SEQ ID NO: 600658 - DNA, 594 bp, Homo sapiens
gctttcttttagagctgctggataaattctgtccggtttcaatgatttatctatatttaggttgtcaacctaggtaagaacatcctgtgcagctctctgtttgctctattgagtccttgtatggttatcttgttagtatagtgctaatgataacaggctgtgtgtaaaagctctctgtacacagctgtcgaactctgctgtgtttggtggtgcagactacaccctgaatcctgttaaagaaaacctttgagatcataacaggatgtttggaagttttaatataaatctcttacttatatcaaaagcagttgaagcaaatagtcttaaaatatagtagaattctaatgtatctgacctgcttccttaagaattcagtttggctatggtaatctctgcaatcttctccttaaataaaaactgaaacattaagtctgccccttttctttaatccctgttcaagagggtatgtcgatacttgaacccttttaccagcatttaaagaaccagctgctgytggcatagcatgtctgagattgcattttgtcctgcctacctttttattagaccttgcacagccatatttgtgagtggatt

SEQ ID NO: 600659 - DNA, 411 bp, Homo sapiens
agatacagaaaagtaagaaggtagaaagtatgttctacaaaaatttccatcaacaatagttaaatttataggatttcagtccttgaagtttaagattcagttacctggaaaactaatttatgatcagttaccyggaaaattccatcttattctggaaaatgaccagataaatggtgtgttactgaacctgctactttagtacaaataaatgaatcaagtttaaaacaaaagcctacttaatttctagacagcttatttttacctgaaccgcaaagtattccttatgaactctttgtatatttaaaatatgactctgtaacactttacattgttcagataagcatcataaatagtaacccaaaatcattccttttctaagaataaactctcccatgtatcactttattgtca

SEQ ID NO: 600660 - DNA, 399 bp, Homo sapiens
tccttacaatataaaacacatgcattgttcctacaaataactaattttgcaattgttaatttatgccctagaaacagtaaaacgtatatatatatakagagagagagattttatccatttcagtacttgtattcaaaataggcctaagaattatttttaaaaacataacatgttcctttcagaaggtttttgtatatagttgctagtttgcttaggatattttttaaaagtgaatgaaataacctcagtgtattcttcccctccccaaggttttcctacttaatatcttaatatcctactttaattctttttttttttttttttttgagacagagtctcgctctgtctaccaggctggagtgcagtggcgcgatctctgctcactgcaaactctgcctc

SEQ ID NO: 600661 - DNA, 450 bp, Homo sapiens
aaaatggacacactgagtaagcatgaaaacctgtttcaaaagaggaaaatgcaaaaagagaaggacagatggtttcatgaaaggataaatgatcagcttactcctgagagctgccccattcctgacataaagtcttacgtcaatttacttgagcaaactgacctctgcagcccagttggacagaaggcatggcccacccttcacagctgggtccaaagctccaccaccacaagaagcagctcacttcctcctcctcctctcttccaagagggaaatggaacataagcaccctgggcctttgamgtccaccttgctcaccaacccaagtaagatccacaacctctttcccagcggcagtaatttccagcatgtacattcagcaaataccattttgttatcctcctctaattccgtgaggcttttttctccccccttcactcctttatgaaa

SEQ ID NO: 600662 - DNA, 419 bp, Homo sapiens
agatctgagagcatataaagaaatgcactatgaggtattattcctaatataaaagagaaaaattccattttaggatacaggaactgagagggaactgagaggctcaaacttgggtgttttattggtgatatctatctctctagaaaattwttcattcagaccctcaactgcttattaactttctttaaacatttctttaacatgggggatgatgctactagattgtgaagtcattagaaaaatgagacaatatacttgaagcaccaaccctcaataagtggtagctattcacatttagcccagcctcttcatttgcacaatttctccatgttcatagtaagagtcagattttctgaactcagcattggacacctgctgctattttatgatttatcgagacttctcattctattgtgtta

SEQ ID NO: 600663 - DNA, 419 bp, Homo sapiens
agatctgagagcatataaagaaatgcactatgaggtattattcctaatataaaagagaaaaattccattttaggatacaggaactgagagggaactgagaggctcaaacttgggtgttttattggtgatatctatctctctagaaaatttttcattcagaccctsaactgcttattaactttctttaaacatttctttaacatgggggatgatgctactagattgtgaagtcattagaaaaatgagacaatatacttgaagcaccaaccctcaataagtggtagctattcacatttagcccagcctcttcatttgcacaatttctccatgttcatagtaagagtcagattttctgaactcagcattggacacctgctgctattttatgatttatcgagacttctcattctattgtgtta

SEQ ID NO: 600664 - DNA, 585 bp, Homo sapiens
aatgtaaaacagcaagaggaaaggaggatggttcttttcgtacattcaaaggacacagaggtctctatttttttactttgatgccatgtaggagttttaaacaaaatgagtggttattgtctttgacaagtcctatgtaatttgttttcacagtatcatgtccgttttctacacactgtttaaatagttgtgtctgcttcactacatttcaatgtaagccccattagggcaggggccatttttgtgttctttactgatgttgaatgaatgagtgaggctgttactgtttcctgaatgaattaatgaaagcacaaatgaagttgaatgacttgtcaaattcacccagcattcacacttagtctggtttcttcctaagttcatgatctacctctagccttcattgtagagggacgagcctctrcttttaatgagatacaagatacacctcttatgctgcccacagctgcttcattaatcttgtttcatttcatctcccctcttagccatccttttccttttaagaactttctcttttccatacctctgaaacaattaggctcttgggtgcttttagaatctgagtga

SEQ ID NO: 600665 - DNA, 654 bp, Homo sapiens
tgaaagtaaactttaacttttcagatacttgttatttttacactttaaaaagttgatttgggtgataaygtggcataggaaatttcatttccaaggatgagcagatgtttttacaaatgttatcattgagattatgattggaaattaacggtcacataaatatttatatatgttacatgaaaagaattttagaacctatggtcacatataggttctatatgtttttcctatttaaattaaatgaagacattgcagacattataggtgaaactaaagccctctctgacaccccccatacctctccccatttccttgtcttccaagaggtgtccactttcaccactttcatatttcatgtagttttccaaacattgtccatgaatttacacacacacatatgaacccacaaacatatatgtatgtttttgttggccttttaacataaatgatactgtgctgtattcctttgcaacctgtagaccagtccatgtcagtatttaagatcctcctgttttctttttgctttgttgcacagtatttcacaatatgccaaagttaattgaaccatttccctatcagtttacatttagattattcactgtttcacattctaaaggacatttgtaatctatgtaatctgtttgtgtagctggt

SEQ ID NO: 600666 - DNA, 579 bp, Homo sapiens
gtccaaataacatgttataactacaagaattttttataaaccttgtagtaattacagagcaaaagcaagtaataggcatacacaataaatggtatagaagaatcaaaacatacacatagaggaaatcatttaactacaaaaaaaggcagagaagaaaaagaaagtacctacaaaacaaccagaaaacaagtaacaaaatggyagtactaaatcattaccttttaataatctttaatgcaaatgaattacattctctaattagaagaaataaagtagctgaattggttaagacaaaacaaaataaccaagatccaactgtatgttgtctagaagaaatttatttcacctaaaaatatacatattggctgaaagtgaaggaaaagaaaaaggtattccatgcaaatggaaaacaaaaaggaataggagtatattagacataatagacattaagccaaaaaaaaagtatttaaaaaaagactaggccattatcttatgataaagaaatcagtatagcatgaggatataacaattttaaatatatgtatactcaacactgggatgcttaatatgtaaaacaaa

SEQ ID NO: 600667 - DNA, 609 bp, Homo sapiens
ctacaaacagccctagagctaacgtagtacctaatagtgagaaactaagtgtttaccccctataataaaaaacatattctatgctttcaccactcctattctacaaagagctgggcattctagctaattcagtaaggcaagaaaataaataagagacaaagacagaaggaagagaaagaagaaagaaaaagagtctttttcacatatggtatcattgtctacgtagaaaatcacaaataattgacacacaaaaatctggagctaaaaaaataacaatgatatagaaaagttacagaatacaaagttaatatacaaaagtcaattggtttcttacakggcaataataaacaacttgaatttggaattaaaaacaaaatagtgttcacattagcaacaaaaagtgaaatactcccatataacttaaaaacgtatagtgctatatgaggaaaactataaaactatgatgaaagaaatcaagattttatacaaatggacagttattccatattcttggataggaagactatattaagatgataattcttcccagcttgagctacacatttaacacaatcccaataaaaatctcagcaatttagtttatggata

SEQ ID NO: 600668 - DNA, 579 bp, Homo sapiens
gtccaaataacatgttataactacaagaattttttataaaccttgtagtaattacagagcaaaagcaagtaataggcatacacaataaatggtatagaagaatcaaaacatacacatagaggaaatcatttaactacaaaaaaaggcagagaagaaaaagaaagtacctacaaaacaaccagaaaacaagtaacaaaatggtagtactaaatcattaccttttaataatctttaatgcaaatgaattacattctctaattagaagaaataaagtagctgaattggttaagacmaaacaaaataaccaagatccaactgtatgttgtctagaagaaatttatttcacctaaaaatatacatattggctgaaagtgaaggaaaagaaaaaggtattccatgcaaatggaaaacaaaaaggaataggagtatattagacataatagacattaagccaaaaaaaaagtatttaaaaaaagactaggccattatcttatgataaagaaatcagtatagcatgaggatataacaattttaaatatatgtatactcaacactgggatgcttaatatgtaaaacaaa

SEQ ID NO: 600669 - DNA, 606 bp, Homo sapiens
tttatttatgtgttctctattctgttccatttgtctatgtgcctattttgataccagtaccaagatgtttttgtgactatggacttacagtatagtttgaagtcaggtaatgtgatgcctccagatttgttccttttgcttaagtcttgctttccctatgcaggatcttttttagttccatatgaattttaggattgccttttccagttctgtgaagaataatggtggtattttgstgggaattgcaatgaatttgtagattgcttttggcagtatggtcattttcactacattgatcccatgaacatgggatgtgtttccatttgtttgtatcatctacaatttatttcagtagtgttttgtagcttttcttgtatgggtctttcacgtccttggttaggtatattcctaagtatttattttttggcagttattgtaaaatgggttgagatttttacttctcagcttggttgctttaggtttctagcagagttactgatttgtgtgcattaattttgtatcctgaaactttgctgaattcatttatcagttctaggagctatttggaggtgtctttagggttttctaggtataacaatcatatca

SEQ ID NO: 600670 - DNA, 501 bp, Homo sapiens
tgtcaaatgctttttgtgcatcaattgagatggtcatatgaattttgtttttaattctgtttatgtgaactatcacatktattgacttgtgcatgcgaaaccatccctgtatccttggtatgaaacccacttgatcatggtggattatctttttgatatgctgttggattcagttagctagtattttcttagggatttttgcatctatattcatcagggatattggtctgtagtgtgttttgttatgtgcttttctggttttggttttagggtgatgctggcttcatagaatgatttagggaggattccctctttatcttctgaaataatgtcaatgggattcgtaccaattctcttttgaacgtctgatagaattcagctgtgaattcatctggtcctgaacatttttttgttggcaattttgttattaccattttaatctcactgcttgttattggtctgttctccctggtttaagctggagggttgtatattttcagg

SEQ ID NO: 600671 - DNA, 501 bp, Homo sapiens
ctttttgtgcatcaattgagatggtcatatgaattttgtttttaattctgtttatgtgaactatcacatgtattgacttgtgcatgcgaaaccatccctgtatccttggtatgaaacccacttgatcatggtggattatctttttgatatgctgttggattcagttagctagtattttcttagggatttttgcatctatattcatcagggatattggtctgtagtgtgttttgttatgtgcttttctggttttggttttagggtgatgctggcttcatagaatgatttagggaggattccctctttatcttctgaaataatgtcaatgggattcgtaccaattctcttttgaaygtctgatagaattcagctgtgaattcatctggtcctgaacatttttttgttggcaattttgttattaccattttaatctcactgcttgttattggtctgttctccctggtttaagctggagggttgtatattttcaggaatatatcc

SEQ ID NO: 600672 - DNA, 574 bp, Homo sapiens
gctaacagcctcccagttgaaaaagggagcggggcttccaggtttcacgcctccctgcctgcccacatctgtactctggagtcacctcctcccccaagttctgtccaagaaactttatgttcagttagaattgttacaaagttcagctggaggtttccttctccatgtgatcttttcccagttcctctggcagtcctccccaaagaactctgtgagacaatgtcagaaatgtcttttgtagggaccgaaagtgcccacaggattcttcctgctgtttcctctactcctgaattttgcttggctctctaagttatctcagctccaggtaaggtcagatccttctactgtaacctggaccttcagactccccagtgagggtgtgtgtctgggggcagatgatcccccwtttacactttcacacttcgggctctcacagtatttgggctgtctccagggtcctgtaggagcaatccatttccttcaaaggatctgtagattctctcggctttcttggtgtgttcctacagtagttcttggagcaaaatttcacagtgtgagtctccacacgctgctc

SEQ ID NO: 600673 - DNA, 534 bp, Homo sapiens
gcacttacttgtcagaaacccctttatttgaatcagattgtacatgagacttaatccttagagaatcccctgacaagattactcaaagaagtatatttaattaaccgaagaaaaaagagagccatctgtcttagctcatctagacatcttgaagtatgaagccacaggaaggactatgtatttcttcagacaaatattagctcaggagtacaatactcaaagccatatgcttgatttagagtacagtaatcacacaggactatctctcactytgaatattcatattccatcaaaaatatgagttcaaaaataacaggaagctgatgtaggaaaatgatacctacaggtatacatgtgacatcagatcacaaaacttgtcaagaccttacaaaagcgtgtgatggtttgcaatcctctgcttatcaaaattctgtgtctgtggtgccctccatctgtcttggcaggtatgaagataaaattatcagttctttagcagcatatgttttacttctcagatgtttgtttatgggaaaa

SEQ ID NO: 600674 - DNA, 616 bp, Homo sapiens
taatattcacctttttaaaaattataattcaatgaattataatatattcacagttatacacccatcaccactctctaatcacggaacatttttatcatcctcaagagagtctcatatttctcagtagtcactcctcattctctcttgyccctatcctctttcaaccattaatctactttatttatttatttatttatttatttatttatttatttatttgagaaggagtctcactctgttgcccaggctgcagtgcagtggtgtgatcttggctcactgcaacctccgcctcccaggtttaagcaattttcctgtttcagcctcccgagtagctaggattacaggtgtgtaccactatgcctggctaatttttgtatttttagtagagacggggttttcccatgttggccaggctggtctcgaactcctgacctcatgtgatccacccgccctggcctcccaatgtgctgagattacaggcctgagccactgcacccggctctactttatgtttttatacattttctattctagacatgtcatataaataaaaccatgtagtatatggccttttgtgtctggcttctttcactgtgcatacatttcttaaggttca

SEQ ID NO: 600675 - DNA, 425 bp, Homo sapiens
tatggctataccatatattgtttaaccattcagcagttgacaaacatttgcactgtttccacattttggctattatgagtaatgctcctataaacattcatgtacaagtttttgtgtggaaatatgttttaaattctttgttatgtacccagcagtagaaatcctcagtcatagagtgagtttaatcttgtgaacaattatcagactgttttataaaggggcttcatcattttacatattcactagcaaaagattccagtttctcttcactcctcccaggatttgatattatctgtcttttgatcctagtgtgagtaaagtggtatatatcattgtgggtttgacyacaatatgtatttccctattgattaataacattgggcatctttttatgagcttattggccatctgtatatcttctttat

SEQ ID NO: 600676 - DNA, 410 bp, Homo sapiens
tgttgtattttcatttttagttgaaaatgctaattttctttgtgaatattttttgagccataagttctttactagtatataatttaatttacaaatatatggaaatttttcagagctcttttgtcaatgatttctaatttaattttactgtcatcagagaacattatttgtatgagttgaatctgtttaaatttactaaaactcttttgtcttagaatatgattctcactttgtaaatgccctatgtggacttgaatattcattytattgctgttgcatcaaatgtcttacacatttagctcaggtcacgttggttgaaattgttattcaagtcttctatatctttaggtttttttatttattgtgttatattaactgcatacatgttcagaatttgtatgttatcttga

SEQ ID NO: 600677 - DNA, 573 bp, Homo sapiens
atcaactctattgcaaagtttctcatttacttatgtcagtgtctttacaaatggcatcaatttaacttgactaattttaaggagaaagacaggggaaaaataatctatggaacaagtgacttggctgcttcctttcataagaggagcatctttgtggtagttcttcccttctggaaaattcattctctttgattaattttggtgtcagtgktactttgggcaggtgcaaatgcagaaagaccactatggagggttattaccgcaagtgaaatcaccaggagcagggaaagtgagatgtccctcatgtccacagtttttccctctctgccagagagctgaacacttccttttacatttcacttggcttactcacgccccagtgcctgatggcttcatttgcattcaaaccttcacctaggggaaacctggagaaactacacatgtccagttgtaaccattttgatgaaagaattggggctttataagaggggtaagcaaatagcatgcaggccaaatctattctactgcctgtttatgtgcagctcatgagctaagaactgattttacagatga

SEQ ID NO: 600678 - DNA, 503 bp, Homo sapiens
gaaagataatttgaataggcctatgtctattaaagaaattgaacccacaatcaatgaccttccaaaacaacaacaaaaaacaacaggccagttggtctcactgaattctatcaagtatttgcagaacaatactaattatctacaatttcttccagaaaaaaagcagcagagagaataatttctaacacattttatgactccaaagttacccttatatcaaaagcaaagaaatatactaattgggaaaataattctagacagatagatatctttcatgaatatacacaaaaacrtcctcaacaaaatattagcaaattgaatagaactaaatatacatattttatatatataaataattatataccacagacaagtgggatttaggccaagtatacaaagttggttcaacattcaaaagtcaattactctaacatatcacattcataggctaaagaagaaaaatcagaccataatatcaaaaaatgcagaaaaagcatttgaca

SEQ ID NO: 600679 - DNA, 503 bp, Homo sapiens
gaaagataatttgaataggcctatgtctattaaagaaattgaacccacaatcaatgaccttccaaaacaacaacaaaaaacaacaggccagttggtctcactgaattctatcaagtatttgcagaacaatactaattatctacaatttcttccagaaaaaaagcagcagagagaataatttctaacacattttatgactccaaagttacccttatatcaaaagcaaagaaatatactaattgggaaaataattctagacagatagatatctttcatgaatatacacaaaaacgtcctcaacaaaatattagcaaattgaatagaactaaatatacatattttatatatataaataattatataccacagacaagtgggatttaggccaagtatacaaagttggttcaacattcaaaagtcaattactctaacatatcacattcataggctaaagaagmaaaatcagaccataatatcaaaaaatgcagaaaaagcatttgaca

SEQ ID NO: 600680 - DNA, 592 bp, Homo sapiens
gcatacaacatttgccatatttctttataatctcaatccgatttattgaaataaagtaygattgcatatgtattgctaatgggagtttgtccttattgaaaaataatgatacatttaaactttttgcttgaaattttgtactaaagaaaagtttaaggatatcttgttcgttattctacagaataactaatacctaaagacaaaagaaaaaaataactttgaggggaagacatttggtattacaaaagccttttgatatttgattctgaaatcattagttgtccaagccaaaaaaaaaaaaaaatagtgagggggaaatccaatcttatatactgagattcagttcaaagctaatagcttactactctaaattggctttaaattcactaatattcttgagactgatgttatgagtgtgttagtttgcagtaattcatatggtgtttatactaccaatatgtaacctacttgatctttgactgttccagaaactaccaccaatagattatccataagttacatattcatggttatcagtgcatcatttgggcttgatggatttctctttcttagccatttaaaattgtaaggc

SEQ ID NO: 600681 - DNA, 629 bp, Homo sapiens
gccatattgcttataaccgtacatggaacttatattgttgcaataaagtgtgtttaaattccattacataaccttattgtattctttgatagcatccacaattttaataggaaaaaaataagcaggcaatcaaaaaagaatgattgtgagtaaccgtaaactctattctgatgcttaaaaggagtaactagtgagtttcctgtaagcacctttaaattgtgtttatggtcagtatattctaagcatcacaatgaacataagtatgattaggtttgggtcacttcaaaacactttaaataagattattcatcaaaatatattctatgagaatgtagattctgcttcataaatargactttcatatttttgtttgttttgtatgatattttaagacactttaaattttagtcttctaggattatgctgttgagttataggaaaaatataaaagcttgaagaacttaatttatttgataaaactaaacatgaggaaagtaaagactttacaaaattatacaaagaagtaatccagagtaaattggttaatgtgtttcccacagaaaactttaacagtggataagttgaggatgtaggttgtgctcatttaacacaggagaaaatatgtatat

SEQ ID NO: 600682 - DNA, 563 bp, Homo sapiens
gtcttggtgtgccttccattcaaacacccttttcatgctcattgtcatgatgctgtattccagcgttcaaggatttgatctagcgtgtattctcagttctactatagagcttactgtatagctacacttaataaattttaaaacaaaaataaatagatcgaccttgctttgaaatgaaagccaaagggaggatgggagggcagatggatggaatttacaggcaagagttgatttaagaccaataagagggcagatgagctggttattctccatttgctcccccagattcctttttggccttcctttgccctgctctgtgactggaagttgcttttatggactacccacaggtttttgttgttttagttgttgttattgttgttctgggctttcagttaattggggtgaatggtaggtatacaggcagaatatgagggactggaagagaaatgcaggttatttattttttgctggtgtcagggcgagtgttctttcatggctccttctgtcttaagactcyagtaacaccatcccctcccttttctcctccaggcttagaagta

SEQ ID NO: 600683 - DNA, 577 bp, Homo sapiens
gagcgagggctgtgaggactgccagcacgctgtcacctctcactatcacattggcaacacctgaaattgttgtggagtggggtggtcacactcaaattaaagcacatctgtttcttgctaggaacctcactgatagagcagagatttctgaaccatgaggaaatggaggaggaacatgtgacagagcttcagaaaagaacttcacacttgggtagaaaacacttcaatatgtctacagtaaaaaaaawaaaaataaaaattatatatatatatttttttttaatatatgaactgctctcctaatgcatacaagcagcacatatccccaagtctgtccattaatataaaatgaacaggagtatttttccagctgtctgaaattatctctttatttttaattccataagcctaaggaagggcaaagagagcacactgggggaagatggagtcaccgcagccacctccaaaactaatcctgaaagcttggtatgcagcacgggacctggggaaatacaatcaatacatgggccagtgctttctgttgattcacagacttgaaaagaaaaaaggagaaaat

SEQ ID NO: 600684 - DNA, 501 bp, Homo sapiens
tgctttctgttgattcacagacttgaaaagaaaaaaggagaaaataaaaagctttaatagctcaaaagtggcttaatgcaaaatattaacataccacaaaatgcatgctctgatagaattaaggygatcttttcaagctttctgtacttggctgtcagagtcagcatccagacctccctgaaatatgaggagaaatcattaacatcagaagcacatttaaggcttgatgttccctttatttttgaagcacaggtcctaagctcagaacgtgggaatcagaaatgttttccattcactttggctataaacaaagcagattaacttggtgaataatgtatactcttaattcagtatttatttcttacatatttagactctcaaaaacattgctatttttattttgaaatagttacatagagattgccattactaatatctgtcagaaaacaaactaaagaactctctagcctcatatattaaagacattcacctgtaaccttg

SEQ ID NO: 600685 - DNA, 501 bp, Homo sapiens
tgctttctgttgattcacagacttgaaaagaaaaaaggagaaaataaaaagctttaatagctcaaaagtggcttaatgcaaaatattaacataccacaaaatgcatgctctgatagaattaaggcgatcttttcaagctttctgtacttggctgtcagagtcagcatccagacctccctgaaatatgaggagaaatcattaacatyagaagcacatttaaggcttgatgttccctttatttttgaagcacaggtcctaagctcagaacgtgggaatcagaaatgttttccattcactttggctataaacaaagcagattaacttggtgaataatgtatactcttaattcagtatttatttcttacatatttagactctcaaaaacattgctatttttattttgaaatagttacatagagattgccattactaatatctgtcagaaaacaaactaaagaactctctagcctcatatattaaagacattcacctgtaaccttg

SEQ ID NO: 600686 - DNA, 581 bp, Homo sapiens
cattactaatatctgtcagaaaacaaactaaagaactctctagcctcatatattaaagacattcacctgtaaccttgtcatkgttcatatacacaaagtagggggttatattttacgtaaagctatattatggtaatttgtaagagtgcaatataaaatattaatgaattctcagttttcataaaaaatttgaaataataaaattttatgtttattcctataggaaaattagttttaaatgacatgaatttcaaattatgtgacatcttcaaagaagcattctttgcataaaatatgactgtacttaagtgtcttgctttgcaggactaacttatcttttattaggcatattgatagtcaagttgtgtaagttcagaaactattcaccagtagattccaaagtagaaagcatcacaagaaatgtagaagctgcccacattcaaagtaataaatcaccaggattcaaactcacttagtaagcttacttaagccatgttaactggctagaataaattagattgataatttggagtaaacttcttcaaaaactattggaaagatcctgttctggatgaatggga

SEQ ID NO: 600687 - DNA, 605 bp, Homo sapiens
acagcatggacattgaacatacccatcatcatagaaatttctattgaatatccctgctctagaccctgagaagcaatatttttaggaacagaaagtaaagattccctatgagaaattctggggatgatgttgggttgggccagcctctaacttccattccttgttttctraattcatggaaattatctacttgaaacaacttagagcatataacattctggaagattgcgtaccatcctaaacatgcaacagcttcaagtagactcctcaattgtaccttcaaaagattgattagcagattttgggtggtgtggggtatgctcaggccatagtcatatgcccattgctataaagtggatctcttttacaatgcagtgttctgtacgtttctgtgttagtaggatcagtcactgtctaaactcttggttagtggtgctggctgagacaggaaatgaaaacctgtacccagaatacatgcagtccatgtcaagattaagtattggccttcctgcagtagaaagagttaaaaataaatcatttaccactaaatagcaagttagactcctcaaaggatgatactataatgggagctcagagtctgtctc

SEQ ID NO: 600688 - DNA, 577 bp, Homo sapiens
cctttgcaatttcatattcatgcactgtcttggccctgaaaagtttaagycatatttctgacaattcagcaaagtaacttactaattgcatggtgtgctggatacattgtctttaccactgggctttttgtttgctttcagcatcctgatatcagctactgattctctgagagggagcacagcctgttgctgtgattggaaaaaaaaaaaaaactgattggttagaggaataatctgtaaagcttcttaaaaatatagtctcacctcagacccacttgggaccagggaccaggagctcacattgtacaaagccccatgttcagtggcctagtgaacaagacagtctttagagccatgtagttcaaaactcagctgataaccttgctacgcctcagtttccttttcttttttttaatctcaaaatagagatgaatatgaaggaatttgtaaagataaaatgaaattgtctatataatgagcacagtacaaagtaagaaatcaacaattattttctttctcctttccttacagcttgtaattaatcatggtatttatagagatgtataagcaagaatag

SEQ ID NO: 600689 - DNA, 577 bp, Homo sapiens
cctttgcaatttcatattcatgcactgtcttggccctgaaaagtttaagccatatttctgacaattcagcaaagtaacttactaattgcatggtgtgctggatacattgtctttaccactgggctttttgtttgctttcagcatcctgatatcagctactgattctctgagagggagcacagcctgttgctgtgattgraaaaaaaaaaaaaactgattggttagaggaataatctgtaaagcttcttaaaaatatagtctcacctcagacccacttgggaccagggaccaggagctcacattgtacaaagccccatgttcagtggcctagtgaacaagacagtctttagagccatgtagttcaaaactcagctgataaccttgctacgcctcagtttccttttcttttttttaatctcaaaatagagatgaatatgaaggaatttgtaaagataaaatgaaattgtctatataatgagcacagtacaaagtaagaaatcaacaattattttctttctcctttccttacagcttgtaattaatcatggtatttatagagatgtataagcaagaatag

SEQ ID NO: 600690 - DNA, 609 bp, Homo sapiens
cttgtggtatatcagcacattaaacatactcctatgcattataagataattaaaatcaagaaaggatctagcttcattttcaagtacagaagatgattgctcagagcagagcaggtctaaatagttttgaagcaacatatcagaaataacaatattcttgttcataccrgctgtatggtataatattattaccctgggatttttcattcttttaggtcatgtgtgtgtggggggagttgtgtgacttacatacataaataatgtttcatactcaatatcctgttggctattatatagtgttatatgagaatgagatatgagtttctgttttctactatttaaaggaatacaccaatttattttattttattgattcttgtcaatgcaatgttaatgctcttaaggtgagaaataatgttttcattatttgtgaataggtaagaaaatttgtgtctggcaatgagcaaggagtcttcagcatgtttgaattaggattgactgtataaacatctagcaaagtgctgaatacttcatcacagctcagtgtgtatttattgaaatgtatacttttctatatcatatttctgtgaatagaactattttctaaaa

SEQ ID NO: 600691 - DNA, 609 bp, Homo sapiens
cttgtggtatatcagcacattaaacatactcctatgcattataagataattaaaatcaagaaaggatctagcttcattttcaagtacagaagatgattgctcagagcagagcaggtctaaatagttttgaagcaacatatcagaaataacaatattcttgttcataccggctgtatggtataatattattaccctgggatttttcattcttttaggtcatgtgtgtgtggggggagttgtgtgacttacatacataaataatgtttcatactcaatatcctgttggctattatatagtgttatatgagaatgagatatgagtttctgttttctactatttaaaggaatacaccaatttattttattttattgattcttgtcaatgcaatgttaatgctcttaaggtgagaaataatgttttcattatttgtgaataggtaagaaaatttgtgtctggcaatgagcaaggagtcttcagcatgtttgaattaggattgactgtataaacatctagcaaagtgctgaatacttcatcacagctcagtgtgtatttattgaaatgtatacttttctrtatcatatttctgtgaatagaactattttctaaaa

SEQ ID NO: 600692 - DNA, 571 bp, Homo sapiens
tataattagcatataatgagcagtgagcacaaccagcggtcactctccttgccatcttggttttggtgggatttggccagcttctttactgcaacctgttttatcagcaaggtctttatgacctgtatcttctgctgacctcctatctcattctgtgacttagaatgcctaacttactgggaatgccgcccagcaggtctcagccttattttacccaccccctattcaagatggagttactctggttcaaacacctctgacatttctgttacttctgggaatattcagaaaaggaaagaatttcagccctctctttacaagatcccacttacctttttagtaaactgcccttcagtttctctctttctctctcttttttttctcragacagggtctcattctgtcacccaggctggagtcagtggcttgaccacgactcactgcagccttgacttcccaggctcaagtgatcctcccacctcagcctcctgatgagtagctgggaatacaagtgcaggccaccatgcccagctaaatttattatttattattttattatttttgtatggat

SEQ ID NO: 600693 - DNA, 598 bp, Homo sapiens
aacttttaactattgatgctgttttgtctgaggtcaaaggagtttggctctgagcagtttttgtttttgttttttttttaattttaactcaaatcctttcttctccgtgagattctgtttctcatatattttcacacttaacaatctcttattcatcaaggcttrgtgaaatggtcacttctttcacacaagagtttgatgtttacaaataagaataagcctttcttcctaaaagcttctatcaaactttatctctcttctttttatatgacctcctccttttggttttttattttatttttgcccatttgtttagttgtataagaatctccttgaaaaaatactactaatagtaataatccttacttattgcattctttgtattttatacaatgcctgacataaacccttgaataatgtagatacttaatacatagttttgaagatgtgaaaagaggtaaaacatttttatacttcgttgcagtgggaaagggcttttcttgcacttcttgacattctatttccagtctaaaacagggaaactatttttttcttaggctttgtaccctgcttcaaccacaggttctaaaattaaata

SEQ ID NO: 600694 - DNA, 388 bp, Homo sapiens
aataatttgacattttaatggcaatagatatacccaacattacaatgcttttacagtccatggtgggggaattaaaaaaaaatacttccatatatttaattatttscaaccatgttatcattagcgattctcatttaacaaacactgttcttgagacagtacaaatataaagtggaacgcaatctctattgggtagcatcaacctttactcaatcattaaacgatgagaaatattgggctgtttttgttaaggattaagaaaatgctttttgaagcagataaacatttgtccgtgctggaagctccttcagcagtaatgcattactatgcctgaccagccctagaaaccttggaaagacaaaatatgtacatgttggttgttaggcat

SEQ ID NO: 600695 - DNA, 581 bp, Homo sapiens
ctgtccttttctattatatttttagcagttatatccttatgaaaaaaatatgggtagcctctcaaaggtaaacaattccatgataaatatgaatattgatagttatctccatgatctcagaacctttccattatgatgaagaaaagcttattatctcctattctgaacaacttgcagttatacaagatttcatgaaataattttacacattttacaatrataaaattgcacacttgtcaaaaaatagagacaccaatggaaaaagcttgaaatagcaatggcttacacagcatacaagaattagtgttgttctcaaaaccagtaaacttatgagaattttgaagtatattctaccagcagaattaagagaagtatacggttgacataatatgcttttacatatagagaaataaatgtgtgtttattaagaaatgaaattgtataataacacaagcatgctctcttctaatgattacttctcagtggcagaaacagaatttgaatagaagaaacaagattaaagtcttcatcccacatcttgaatgtttggacatactaaacacaatatttcataattggga

SEQ ID NO: 600696 - DNA, 538 bp, Homo sapiens
gaaggtctgagacccaggtgacttgatggtgtgaattccactctgagggctggagaagacgagatgatacaccccacctcaaccagtgaggcagaaaaaaacaatcaagttcttccttccactttttattctattcaggccctcaattgattggatgatgcccacccacattggggagggcaatctattgtaatgagcccacaaatttaaacattaatattatccagaaaaactcttcaagacatacccagaaaaaatgtttaatctgggtacactacacaaattcacatgttaatcttatccagaaacactctcccaaacacatccagaaatagtgtttaatctgggtacactatgaccaatcaagttcgtacataaaattaaccatcacaccatcattatgcttaatctacmaacctactcccaggagtatagaaaatgttactaaatatgataccagatcagtgttacaactaagtcaaccacagacaaatttgttaggcctctaggtttatcttcgcttctttaataagcgaga

SEQ ID NO: 600697 - DNA, 561 bp, Homo sapiens
tacacccaacagaagacgatgactcagtcctgcatttcctgactatcaacctaaccacagaaggtggcctaggtgggtgcattccttctctggactgacctcaacaacctcaggaaagtaggtcagcacagcaaggccaattactcaggarccaggctgacagcaagagtgttcccttttccttctcctactaggcctgagatttcccttctccactcagaaacatatatgggtacatacaataggctgtccttctcattagttttataagccgtattttaagattgattaaaatataacactatctgatatgcaagacgatatttaaaagtaggaaaggaaaaaggacataaatgaagttaaggtttctgcaattcactgaaagtggtaaaatgttgatatcattagactgtgataagccacatatgtatattataataactagagcaaccactgtgaaaactaaacaaagagatatgctcaaaataaatcaagatgtaaacctaaaaaataaaaaatccaagtaatctataggaagtcaagaacaacaaaacagagacc

SEQ ID NO: 600698 - DNA, 532 bp, Homo sapiens
gattgcaggaaaaaaaaaagggacagggtgtcttgtgacctacacccaacagaagacgatgactcagtcctgcatttcctgactatcaacctaaccacagaaggtggcctaggtgggtgcattccttctctggactgacctcaacaacctcaggaaagtaggtcagcacagcaaggccaattactcaggaaccaggctgacagcaagagtgttcccttttccttctcctactaggcctgagatttcccttctccactcagaaacatatatgggtacatacaataggctgtccttctcattagttttataagccgtattttaagattgattaaaatataacactatctgatatgcaagacgatatttaaaagtaggaaaggaaaaaggacataaatgaagttaaggtttctgcaattcactgaaagtggtaaaatgttgatatcattagactgtgataagccacatatgtatattataataactagagcaaccactgtgaaaactraacaaagagatatgctcaaaataaatc

SEQ ID NO: 600699 - DNA, 529 bp, Homo sapiens
gtattagcaccctagaggctatttcactttttattattattatgaaacaaggcctttatttgtagctgggcagcagcacctctttgtggttacagtgccatggacttaatggcatgcttacagaattctaccttcaattggttctataaatacagccatggtttggagtatatatagcttttataaacacatatgtgataatctttattatcaatccacatcttattttccccwttctttagactttagcttgatgacaatgatggatatgaattccaacgtgttagtttcctaattttttttcttagcctaaaataaatatatatttaaagtactttcctccttaggcaatgtgtttctcatttgctgtgacactaagtgtgtaggtatggctgaccgctaacctgacatgtgcctgtcaccagggactgctggttctttcatcttcttaatggacatttctctacagatgtctgtggcctacctgactataatcctttaaattttaattcactttacatttagcctg

SEQ ID NO: 600700 - DNA, 535 bp, Homo sapiens
gaaatcaaccccctttgcattctaaggtctctggtttattgcagaccagctctccccagggctgagagccagatactgggagcttgtggtagtggtgatgtgacagaaatgttccccatggcctcctgttgtcctcctgcccaccccccacctgcacacacacaggtgcatacacatatccacatgcacacactactctctcaggaggtctgctgggaaaccaatasactttcagaaaagcctgttccaaccctggcttcgtggggcatggtgagctcctggccttctctcacaggctcttactggggaggaaagatttctctccctcacccatcactaggtttatggctgaggcacccatagtaaaagacagattaacaagaaaaaagcatacacatttatttaatatctaggtttgacatgacatgggagccttcagaaatgaagacccaaagaaacaggaaaacctgtgtgtttttatgcttaggtttgataaagagtggacagtcgtgcagatgtggacaaagggggtaat

SEQ ID NO: 600701 - DNA, 582 bp, Homo sapiens
tctcccagtgacatgttccggcttcctaatggaacccacaggctaaaggggaagctgttggcagtgtccctttcctttttgggccatgagtccatccaaataaggccccattccaatggcctgtggtctctgtgcctctctgatgagctccatcaatctgtcattcggtgctcctttggaggcactgattctgagcccagccacagcttctaaagcttctctttcagcagtttacacaaaatcaagtcagtgtgttgggaaattgttccatgccccagcctttagtctactggcaggattgactgttctttagtcaagtggaaaggagctrtattctctttcttgattcgtgttttcagatgtaggcaagcaatgtaggagggctacactgaagcatgtggttatattacgagtgacccagcacgttgcttccaaaatctgcggggaaacatttaaaccagcctgtgtacagctcagggttgaaccaggcctctgtgaggatgccaagacagccacaaaagtagcagggtctctgctgattattgccctgctgggatattctggggtcagtggttcaaattg

SEQ ID NO: 600702 - DNA, 482 bp, Homo sapiens
tgattctcctgcctcagcctccggagtagctgggattataggcccacaccaccacacctggctaatttttgtatttttagtagagacagggtttcgccatgttggccaggctggtcttgaactcctgacctcaggtaatccacctgtctcagtttcccaaagtgctgggattacaggcatgagccacctcatccagcccttttttttttttttttttataaraaacagggtcctgttctgtcacccaggctggtgtgcagtgatgtgattatagctcactgcagccttgaacgcctgtgctcaagtgatcctccagccttagcctcccgggaagctgggacttccaggcatgtgccaccacacccagctaatttttttgtattttttgtagagatggggtctccctgtgttgcccaggctggtcttgaactcaggctcaagtgaccctcccccaacagcctcccaaagtactgagataacag

SEQ ID NO: 600703 - DNA, 606 bp, Homo sapiens
tgcagctgcactccccctgaataggttagagtctggattcttttctgactctctcaagaatgtgggcagggacttggggacttccagattcaggtttcccagctaccacacgatgttggactgaaagtatagtaagacattagtggatccttaatattcaaggcacatttagaaaccatgcttctttttcacaggagatgctcagcaaatcccgagcaggagacacaggagtcaaattggaggtgaatgaaaggtcggtctgagcggcatggtgggacctaggggagcaggatctgtcttcctgacattggtctatactttgcatacttattagggaattagaggagagcagtagcagccacggggaagggctgagttgatgtaatcatcaataacagtattaatgatgacagcaatattgctgtttcactatagaaaagaaacccgcgyggtacgtcccgcctgtaatcccagcactttgggaggctgaggagggaggatcacctgaggtcgggagttcgagaccagcctgcccaatgtggtgaaaagtcatctttactaaaaatacaaaaattagccaggcgtggtggtgcatgcatgtaatcc

SEQ ID NO: 600704 - DNA, 576 bp, Homo sapiens
cactcacctgcagcgtgccagggggcatggccagatattctgcctgtgctgtcctctctgatgctcccagcgagcttcaccaatgtggacactgagatagagagacattagtggcttgcccggggtcttgcagggagtaaccacgaccggtcatccgcctgcctgttccttgcttcctyccatatccgtggccccctttccccaggggtccacttggcacagcaagggctgagatcacttttggttgacaatttggcagccttttaggagcgaggccatctgctgggatatgtctgccccatggcactctctggacaccagctggggatgttggagctgcccctggggaaccctgagagctgtagcataaatgagtgatgaggtgaggcctgcagtgccacttagagccaggaaaggtcaagtgctctgcaatcatcaggccccctccaggaccaatgtcagactggagagggcggcagatcccacagggcccaggagcatagcccactacataaggtgcctggaagtggaccctcctggttaggaaagggccagggcctcctaagagggagggct

SEQ ID NO: 600705 - DNA, 576 bp, Homo sapiens
cactcacctgcagcgtgccagggggcatggccagatattctgcctgtgctgtcctctctgatgctcccagcgagcttcaccaatgtggacactgagatagagagacattagtggcttgcccggggtcttgcagggagtaaccacgaccggtcatccgcctgcctgttccttgcttccttccatatccgtggccccctttccccaggggtccacttggcacagcaagggctgagatcacttttggttgacaatttggcagccttttargagcgaggccatctgctgggatatgtctgccccatggcactctctggacaccagctggggatgttggagctgcccctggggaaccctgagagctgtagcataaatgagtgatgaggtgaggcctgcagtgccacttagagccaggaaaggtcaagtgctctgcaatcatcaggccccctccaggaccaatgtcagactggagagggcggcagatcccacagggcccaggagcatagcccactacataaggtgcctggaagtggaccctcctggttaggaaagggccagggcctcctaagagggagggct

SEQ ID NO: 600706 - DNA, 589 bp, Homo sapiens
tggaattcctgttgaaggaacttaaaattttcctttatttcaatgatgcagtggcctgcaagcccctaggagggggtcyctgctccatctcaaagcaggagctggaaaagcatgggcctggctgctgctccatgccaaccagatggcccagcagataatcggcaacgtgcacaagcttcagctgtgcctggtgccctgtaccaggttcttaacaataaaggaggccagacgcagtggctcacacctgtaatcccagcactttgggaggccgaggcaggtggatcacttgaggtcaggagtttaagacctgcctggccaacatggcaaaatcccatctctactaaaaatacaaaaattagccgggtgtggtggcgggcgcctgtaatcccagctacttgggaggctgaggccggggaatcccttgaagccgggagagggaggttgcagtgagctgagattgtgccaccgtactccagcctgggtgacagagtgagatgctgtctcagaaaaaaaaaaaaaaaaaaaagaataaaggaataagactgctccttcatggctgccatccacatcttgagcaaagtatctcttg

SEQ ID NO: 600707 - DNA, 595 bp, Homo sapiens
agacatttgcaattgacagaacaatctcacctggattattttcttcctcacagcggccttgtgaagcaggatttagtgtcctacgagcacctgtcttcggaggcccctccgagttgcacttctggtcaggggctaagtccagatgcaaacatgggttttaagacagcccctcccacagtgcttttctgcccccatcacactatctctccctcccacttccccatttcctgcygtctttcccctactccaatctcccccacaacacacgcgcagctgggtgagtttcttgaagctcaagtccaagtgctgtttcccctccacctttgtctcccttcttgcccagagaggtcccagttcaaacccaggacaggcacgtagtctcacacctgcccctgagccaaaggtttccataatcggagaagattccccctgctccggagccccaaataaattaatccatgggtcattcaagaaaaaataaataaattccccatgtgtcctttagattccctaaagtcctaatgcatctttaatttggaggaggttcctgtgggcaggtagagaggggtcagggtgggaggcatatttgtaaatg

SEQ ID NO: 600708 - DNA, 549 bp, Homo sapiens
tgacattcaaacagaactcctatgggttcccagacccagaacggaatgtcccaaccttccgtgtgcattgactcttcgtgttggattcaccagagttttctcacctgtcaccctgcaggaagaggagccaccgccactattccctgcccagcaaaataccaaactacttgctggtctttgtaccatctctatgtgcattagactggtctccttgccgcctcttggtatatggcacttacagagacctccgctcaggtgctcaattttacttgctcctcaaatacttcttttcaccttacctttaaacagatccacttcttaagatctcctttatgtagcattttttctcctaaagaatttccaacatttgtatagcaccttatgatttataaatattgttttgtttaatccccaaagcaatcttgtgaattastatgattatcatcttaactatggagattaatatcttccttataaatgtcacacaacgtatgttagatagcagtggtctcagaagaagaactcaaaattaatttaattaatatttgt

SEQ ID NO: 600709 - DNA, 619 bp, Homo sapiens
cggcctctttgctcacacaccccttcccacctcaggctgagcgtgaagctatagtggtcacagagttcgggccaaggaggaagccagccacagactgttgggatgagtgggcagagaaatcccagcagccagcctgsagccgagcgaggcccaggcaggggcaccactggtcacggaggtctctggctggtgaagtagcacccgaaaaagtcttgcatcactattgtttttctaatttccaatttttgttgctaatatataggaatatattaatttttgtatactgacctcatatccttcaaccttcctaaactaacgttacttctagtaacttccagtgtcaaatccatcagattttcaacagaggtgattatgtcatctgtgaataaatagggtttccttcttcttttctgctcaaatatgctatgtttctttgtcttgccttattctaatacctaaacctccagtacaatgcaaatagaagtgaagagaatggacatggccttgtttcttatattaagaggaaatcattcagtccttgactagtaggtttgatgttacttaaaggctttttggaggtgccatttatcagattgaggaagttccctttaattctaaa

SEQ ID NO: 600710 - DNA, 465 bp, Homo sapiens
cttgttggccaggtgcagtggctcacacctgtaatcctagaactttgggaggcctaggtgagcagattgcctgggttcaggagttcgagaccagcctgggcaacacggtgaaaccctgtctctactaaaatataaaaaattagccggatgtggtggaatgcatctgtagtcccagctacttgggaggctgaggcaggagaattacttgaacctgggaggcagaggttgcagtgagccaagatcakgccactgcactccagcctgggcaacaaagcaagactccgtctaagaaaaaaaaaaaagatttatgcttttctattagtgtcattgctcatgacatgggtctcttgcagacagcatcctgttgagtcttgcttctttatccaacttgccactctgtgccttttgatggggacatttagtttgtttatattcaaggttaatattgacatgtgcaaatttgat

SEQ ID NO: 600711 - DNA, 465 bp, Homo sapiens
cttgttggccaggtgcagtggctcacacctgtaatcctagaactttgggaggcctaggtgagcagattgcctgggttcaggagttcgagaccagcctgggcaacacggtgaaaccctgtctctactaaaatataaaaaattagccggatgtggtggaatgcatctgtagtcccagctacttgggaggctgaggcaggagaattacttgaacctgggaggcagaggttgcagtgagccaagatcaggccactgcactccagcctgggcaacaaagcaagactccgtctaaraaaaaaaaaaaagatttatgcttttctattagtgtcattgctcatgacatgggtctcttgcagacagcatcctgttgagtcttgcttctttatccaacttgccactctgtgccttttgatggggacatttagtttgtttatattcaaggttaatattgacatgtgcaaatttgat

SEQ ID NO: 600712 - DNA, 542 bp, Homo sapiens
ggatttcatcaataccagactgtcctttaagaaatgctaaagggagctcttcaatgttaaagatgtggatattcacaagcaataagaaatcatccaaaggtayaaaactcactggtaataataagtacacaaacacagaatattataacgctgaattgtggtgtgtaagctacttatatcttgagtagaaatactaaaagatgaacctatcaaaaataactacaacaacttttcaagacatagacagtataatgagatacaaatagaaacaacagaagttaaaaggtggaggaagagttgaagttagagcatagagttttcattagttttcttttacttttatgttatttactttctctttacaattggtgttatatcataatcagttttaaataatgggttataggatgttatttgtaaacctcatggtatcatcaaatcaaaaattctacaacagataggaaaaaaacgtaaagcaagaaattaaaacacaccaccagagaaaaccaccttcacataaatggagaaaggtaggaaggaag

SEQ ID NO: 600713 - DNA, 542 bp, Homo sapiens
ggatttcatcaataccagactgtcctttaagaaatgctaaagggagctcttcaatgttaaagatgtggatattcacaagcaataagaaatcatccaaaggtacaaaactcactggtaataataagtacacaaacacagaatattataacgctgaattgtggtgtgtaagctacttatatcttgagtagaaatactaaaagatgaacctatcaaaaataactacaacaacttttcaagacatagacagtataatgagatacaaatagaaacaacagaagttaaaaggtggaggaagagttgaagttagagcrtagagttttcattagttttcttttacttttatgttatttactttctctttacaattggtgttatatcataatcagttttaaataatgggttataggatgttatttgtaaacctcatggtatcatcaaatcaaaaattctacaacagataggaaaaaaacgtaaagcaagaaattaaaacacaccaccagagaaaaccaccttcacataaatggagaaaggtaggaaggaag

SEQ ID NO: 600714 - DNA, 553 bp, Homo sapiens
cgtgcaccaaagttttgctccaagaaccatcatgggaacataccaggaaaatagaacaaattcacagactctctgaaagmagcagcttgctgctgcaaactctgagacagctgaaaaactgagtttccaaagtgtgacagggagaaaagttggcctccaaacacacatcccaactggggaaactgaaaatatagatcataggagaaggacttgtgaaaaaaaagtcttgggaccccaaaatcactaagctaaagggaaaagtcaagctgggaactgcttagggcaaacgtgcctccaattctattcaaagtcatccctctgctcactgagataaatgcatatctgattgcttccttggaaagactaaacagaactcaaaagaatgcaatcatttgtcttatctacctatgacctggaagccccctcctttcttgaagttgtcccacctttgctttgagctgccctgcctttccagactgaaccaatgttcatcttatatatcttgattgatatctcatgtctctttaaaatgtataaagctaagctgtgcccc

SEQ ID NO: 600715 - DNA, 553 bp, Homo sapiens
cgtgcaccaaagttttgctccaagaaccatcatgggaacataccaggaaaatagaacaaattcacagactctctgaaagaagcagcttgctgctgcaaactctgagacagctgaaaaactgagtttccaaagtgtgacagggagaaaagttggcctccaaacacacatcccaactggggaaactgaaaatatagatcataggagaaggacttgtgaaaaaaaartcttgggaccccaaaatcactaagctaaagggaaaagtcaagctgggaactgcttagggcaaacgtgcctccaattctattcaaagtcatccctctgctcactgagataaatgcatatctgattgcttccttggaaagactaaacagaactcaaaagaatgcaatcatttgtcttatctacctatgacctggaagccccctcctttcttgaagttgtcccacctttgctttgagctgccctgcctttccagactgaaccaatgttcatcttatatatcttgattgatatctcatgtctctttaaaatgtataaagctaagctgtgcccc

SEQ ID NO: 600716 - DNA, 553 bp, Homo sapiens
cgtgcaccaaagttttgctccaagaaccatcatgggaacataccaggaaaatagaacaaattcacagactctctgaaagaagcagcttgctgctgcaaactctgagacagctgaaaaactgagtttccaaagtgtgacagggagaaaagttggcctccaaacacacatcccaactggggaaactgaaaatatagatcataggagaaggacttgtgaaaaaaaagtcttgggaccccaaaatcactaagctaaagggaaaagtcaagctgggaactgcttagggcaaaygtgcctccaattctattcaaagtcatccctctgctcactgagataaatgcatatctgattgcttccttggaaagactaaacagaactcaaaagaatgcaatcatttgtcttatctacctatgacctggaagccccctcctttcttgaagttgtcccacctttgctttgagctgccctgcctttccagactgaaccaatgttcatcttatatatcttgattgatatctcatgtctctttaaaatgtataaagctaagctgtgcccc

SEQ ID NO: 600717 - DNA, 460 bp, Homo sapiens
gaacagaatcctgtgaggatgaatgggaagtgcagatataatcacagaagccacagccaacagtgaaggcaggcaggaaggggtgagatctgagagccctttttgctttctcactggggaggcttgtagactatggcaagatctcaacattgctggccagctgyctgggtatacagtcagtgtggttagcggggcatggtgggagggagacttgccttgctggctgcatgggagctgggtgaggcctgtcataactggctttccccaacttcccaggtgacctgtatgatgcagcaaatgcagccataatccccaaagggaacgtaactccactggcctaagaaccaccctcctattccctcagtggctgcagcaagccccgctcaaggacaatctgagcttagactcatctaaccctgtttccacttcatggtttttctctacctaccctggtagctga

SEQ ID NO: 600718 - DNA, 592 bp, Homo sapiens
ggtcttatctttaaactcctgaaacaaaattatcagccaagaattttgtgtccagccaaactgagattcataaatgaaggaggggtaaagtctcttttakacaaacaattcctgagagaattcaccactgccaagctagtactgcaggaaatgttaaaaggagttctaaatcttgaaacaaaaccttaaaatacaccaaaatagaacctccctaaagcatgttctacagggcctgtaaaacaataaaacaatgaaaaaaaaagttattcatgcaacaactagcatgaagaatagaatactacctcatatctcaatactaatgctgagtgtaaatggcctaaattctctacttaaaagaatggcagaatgaagaaaaattcaccaacaagtatttgctgtctttaagagattcacataatatataaggactcacataaggtgaaggggtggaaaaagatactccatgccaatggcaaacaaaagtgagcaagagtatctatacttttatcagatacaacagactttaaagcaacaacaattaaaaagggcaaatagggacattatataatgatgaaaggattagtccaacagg

SEQ ID NO: 600719 - DNA, 239 bp, Homo sapiens
atcaagacagaaagtcaataaagaawcaattgacttaaactataccctggaacaaatggacttaacagatacagaacattctacccaaccgactgcagaaagtacattcttttcatcagcacaaagaacagtctcagagatagactgcatgataggccacaaaacaactctctataaatttaagaaaatcaaaattttatcaagtactctcatagaccacaatggaatcaaattggaaa

SEQ ID NO: 600720 - DNA, 494 bp, Homo sapiens
ctacataatctttggatcaataatgaaatcaagatggaaattaaaaaattatttgtactgaacaataatagtgacacaacctatcaaaatctctgggatacagtaaaagcagtgctaagaggaaagttcatagcattaaatgcctacatcgaaaagtgaaaaagcacaagtagacaatcaaagctcacacctcaaggaactagagaaacaagaacaaaccaaaccccaacccagcagaagaaaagaaattacaaaaaycagagcagaactaaatgaaattgaaacaaaaagatacaaaagatgaacaaaaatctgttgttttgggaagaaaaaatgatagaccgttagtgagattaaccaagaaaagaagagagaagatccaaataagagtcaattagaaatgaaacaggaggtattacaactgataccacagaatacagaggattattcaaggctactgggaacacttttacaagggagcataaactataaaa

SEQ ID NO: 600721 - DNA, 494 bp, Homo sapiens
ctacataatctttggatcaataatgaaatcaagatggaaattaaaaaattatttgtactgaacaataatagtgacacaacctatcaaaatctctgggatacagtaaaagcagtgctaagaggaaagttcatagcattaaatgcctacatcgaaaagtgaaaaagcacaagtagacaatcaaagctcacacctcaaggaactagagaaacaagaacaaaccaaaccccaacccagcagaagaaaagaaattacaaaaatcagagyagaactaaatgaaattgaaacaaaaagatacaaaagatgaacaaaaatctgttgttttgggaagaaaaaatgatagaccgttagtgagattaaccaagaaaagaagagagaagatccaaataagagtcaattagaaatgaaacaggaggtattacaactgataccacagaatacagaggattattcaaggctactgggaacacttttacaagggagcataaactataaaa

SEQ ID NO: 600722 - DNA, 494 bp, Homo sapiens
ctacataatctttggatcaataatgaaatcaagatggaaattaaaaaattatttgtactgaacaataatagtgacacaacctatcaaaatctctgggatacagtaaaagcagtgctaagaggaaagttcatagcattaaatgcctacatcgaaaagtgaaaaagcacaagtagacaatcaaagctcacacctcaaggaactagagaaacaagaacaaaccaaaccccaacccagcagaagaaaagaaattacaaaaatcagagcagaactaaatgaaattgaaacaaaaagatacaaaagatgaacaaaaatctgttgttttgggaagaaaaaatgatagaccgttagtgagattaaccaagaaaagaagagagaagatccaaataagaktcaattagaaatgaaacaggaggtattacaactgataccacagaatacagaggattattcaaggctactgggaacacttttacaagggagcataaactataaaa

SEQ ID NO: 600723 - DNA, 494 bp, Homo sapiens
ctacataatctttggatcaataatgaaatcaagatggaaattaaaaaattatttgtactgaacaataatagtgacacaacctatcaaaatctctgggatacagtaaaagcagtgctaagaggaaagttcatagcattaaatgcctacatcgaaaagtgaaaaagcacaagtagacaatcaaagctcacacctcaaggaactagagaaacaagaacaaaccaaaccccaacccagcagaagaaaagaaattacaaaaatcagagcagaactaaatgaaattgaaacaaaaagatacaaaagatgaacaaaaatctgttgttttgggaagaaaaaatgatagaccgttagtgagattaaccaagaaaagaagagagaagatccaaataagagtcaattagaaatgaaacaggaggtattacaactgataccacagaatacagaggattattcaaggctactgkgaacacttttacaagggagcataaactataaaa

SEQ ID NO: 600724 - DNA, 442 bp, Homo sapiens
atgtgttatggaaagaaaaatattctctttggcccttatttcactgtttttatttttatatataatttttgtttaatttcctctgtgtgatgatgagatatgtctgtttctatttgggaggtggtagtttagataagttatttgggctccctgtggtgtgcatgtcagttcacactgaaaaatgtgtcttttaagtttcctgatcatgtcttcccaagcattttgcatggtgcaagtccatgtaatgtatttcatagaatcatttcaagtcttattatggcatacattctacacaaatgcactgatgtgggaggaactcagcattatttctgtcctatagagactgaaatcccactgacaccatgaccagatataataaatcrgtctgatttttaaatgattatttaagtagaaaataacagattggtactttcagtttaga

SEQ ID NO: 600725 - DNA, 397 bp, Homo sapiens
acttcttccaaattcccgataatgtcgatatttttgtcttttcccatgaatcacgaatgtttgtaatggtatatagaattgtggatctttctagaaggttttcagttsggttttcccagatcagtaagaggaatcacaatttatagcagctatagtcttaccaaatgtgtttcttaaataattaataagacttgaaagtcacaattagttcttgatccatgtgctacaaaatgcaagttgtgttagcaggcatgaaaacacattaatctccttgtaaatctccatcagagctcttgggcgactacctacattgtcagtgagcaataatttttttttaacatatgtttcaatagtgggctcaaaatattcagtaaaccatgctgtaaacagatgtgct

SEQ ID NO: 600726 - DNA, 563 bp, Homo sapiens
taattgcatacagtacaagcttaataatttttaatttattaaatttagaagtacatgtttcaaaagaaaatgttctggtcatttggctaaaaggtttttgatctttttttctgaattatagccatcatttaatttccttcaaaatgcaaatcgctggtgaagacagccatcaaatcatggactaacttttgaattcaggtaagtctgtactaaagttaccaccagcaactttgaagacaatctatatttaaaaatttttaggcatgtagatactgcataataataggaataatgcccctagcaaataatttgttctccgacatgtcaccttaacactcttacacattaactcgtgagataggtaggtagtagtatatttattcaactctttaaatgtagacagattatgtacccaataatatgctttataaattgggtttgcatwaaataataaatttctcaatggacagaattggcttgctttacttctttgattaataaatgttagctttttgagtcttcataaacttgttatcaaaaagtcttgtttgaacacttgagtt

SEQ ID NO: 600727 - DNA, 573 bp, Homo sapiens
tttgagttaaaattgcaatttgtatccttgaattcttgcggacagtgaccattaatttatagtattttaatccagtagaagtgtgatcttaccaagacattgttatcaaagcagacatcaggcccttttcggtatctrggttgcttaaccatgtcacaaggatttggaccgtcagctaaaagagacttgttaaggaatctcatgttagtttttttcacatgattaaaaataaatacaatgcaatgtatttcccaaaacatgtgagagagataacttatacatcattactctcatccaacacaattcaagtacatagggatttaaagaactaaattgtgaattatccttttctggggcatgtgtagcataattattcttgacattccaaccaaattttgagtgaggaatcgattctgcctttgcgaggtgatcagagcagtctaatagttttctctttatgaatataaacaatgtgacaagattcaaaatgcattaagatggttttcctttccagatagctctgatgtcaaaggatacaagtctgctccgcttgtatgagcagtcgtgtgtcac

SEQ ID NO: 600728 - DNA, 457 bp, Homo sapiens
agcaatgacacagaaagcaggaaggtatcacttgtagagaggaatgtatacataagggaaagctaccagagatggctggtgtttggtatagaaaaaaaacgtaagacaaaaggagagaaacagtaagaagtaaagtttcaagtgcaagtttctcaatggtcagctaatgaatgattttgaattccatcttagagagcttcacctgtatcttgaacttagaactgcattttaggagttagattctggccaatatgarttgtatggagaattgtctagaagctgcatgtggaggaatggagaacactaaaggcagaaaaatcagttgctgtgatttcttagaaatgggatcttagggccttcattatgaggtagagaagaaaacattgctaggagaaatatttagcatttagtgactgaaaatggggtggagaagagattttaaataagaatcatactc

SEQ ID NO: 600729 - DNA, 546 bp, Homo sapiens
atacaatcactggctcgtatttagcagatgagaaatatgatttttttcacattttagaaactctctctggttacagaacagagacagcattaagaaatacagggtaaatatgaaagtagggagatcaagtaagaggcaaatgtagtagtttaggtgagagaaggcagtgacctggattagggcagaggcagctgagattgacagatacacttgatactcatacgacagaactggcaagactggtgattgattagaagtgagatacaagagaaaggaagcagagaaggacaactaacaggtttcaagattgctcgtttgggaggatggcattttctcctctgaggcaacataggtagaactttccaaaggaaacaattatttataagatgctaaatctgaagcacattgaagagatactcttgtctggtttccatgagatgtgtctcatattgaaatatgtaaagtctggaaatagatataatataggattaaataatataatgyaatatcaatgaaacacatatgtctttgtctctagatatttat

SEQ ID NO: 600730 - DNA, 636 bp, Homo sapiens
cagtcaattcctctataacttcctaagtaatgtaacatgtcatactaaaatttcaaagcttactagaccaataaaatcataataggtatatgtaatttcataattgcraaattttagaaactgaatttttaatttttattaaaatattacctaaatctgataactagattccagtaacaaacgcaaactatgctggattagtgcaaaggtcactcaaactttaataatataagcctcacagactctttcaaaagatgttcaaattatcaccattttaagcactgttttaggaagaaacttcccaaggcagttgcaataagtaaaaatgtactaaaattaagcatatcttatcaagatgttgaatgacatagtatacacggcatgtatttactgacaaaaatgccttccttcaaagagtaattccacctaaagatgaaaatttttgattcctatggtttttgataaatgaacattcttaaaggcaaattttaaaaaatagccatgtctggcactttaattgaaaaaaatattcactgcttaagtactctatcactacaatcagaagattctagaatactgaaaataagtattaaatttttcaaaggtgaaaatgctgaccagtattggtaagatact

SEQ ID NO: 600731 - DNA, 636 bp, Homo sapiens
cagtcaattcctctataacttcctaagtaatgtaacatgtcatactaaaatttcaaagcttactagaccaataaaatcataataggtatatgtaatttcataattgcaaaattttagaaactgaatttttaatttttattaaaatattacctaaatctgataactagattccagtaacaaacgcaaactatgctggattagtgcaaaggtcactcaaactttaataatataagcctcacagactctttcaaaagatgttcaaattaycaccattttaagcactgttttaggaagaaacttcccaaggcagttgcaataagtaaaaatgtactaaaattaagcatatcttatcaagatgttgaatgacatagtatacacggcatgtatttactgacaaaaatgccttccttcaaagagtaattccacctaaagatgaaaatttttgattcctatggtttttgataaatgaacattcttaaaggcaaattttaaaaaatagccatgtctggcactttaattgaaaaaaatattcactgcttaagtactctatcactacaatcagaagattctagaatactgaaaataagtattaaatttttcaaaggtgaaaatgctgaccagtattggtaagatact

SEQ ID NO: 600732 - DNA, 515 bp, Homo sapiens
ggtccgctctgtcacccagcctggaggagtggcacactcttggctcactgcaacctctgcctactgggtccaagcgattctgcctcagcttcttgagtggctgggactacaggcatgtactaccatgcctaactaatttttctttctttttttttttttttttttttttttttttttttttttttgtagaggcagggtttcactatgttggcctggctggtctcaaactcctgaccttgtgatcggccctcctcagcctcccaaagtgttgggattataggcatgagccaccgtggmcggccttaatgtcaccaactttttcaaagaaatggtaggcttacctacacaatcttaaataatgttgaacatgctttgaaattctgaaattctcttgctaagctataggaagtatccttttatgttgattattaatagttttactgtgcatttagaaatattgtatacatgtgataactgaagttttgttgccaaaaggaaaagctttcgcaatgagt

SEQ ID NO: 600733 - DNA, 515 bp, Homo sapiens
ggtccgctctgtcacccagcctggaggagtggcacactcttggctcactgcaacctctgcctactgggtccaagcgattctgcctcagcttcttgagtggctgggactacaggcatgtactaccatgcctaactaatttttctttctttttttttttttttttttttttttttttttttttttttgtagaggcagggtttcactatgttggcctggctggtctcaaactcctgaccttgtgatcggccctcctcagcctcccaaagtgttgggattataggcatgagccaccgtggcyggccttaatgtcaccaactttttcaaagaaatggtaggcttacctacacaatcttaaataatgttgaacatgctttgaaattctgaaattctcttgctaagctataggaagtatccttttatgttgattattaatagttttactgtgcatttagaaatattgtatacatgtgataactgaagttttgttgccaaaaggaaaagctttcgcaatgagt

SEQ ID NO: 600734 - DNA, 515 bp, Homo sapiens
ggtccgctctgtcacccagcctggaggagtggcacactcttggctcactgcaacctctgcctactgggtccaagcgattctgcctcagcttcttgagtggctgggactacaggcatgtactaccatgcctaactaatttttctttctttttttttttttttttttttttttttttttttttttttgtagaggcagggtttcactatgttggcctggctggtctcaaactcctgaccttgtgatcggccctcctcagcctcccaaagtgttgggattataggcatgagccaccgtggccggccttaatgtcaccaactttttcaaagaaatggtaggcttacctacacaatcttaaataatgttgaacatgctttgaaattctgaaattctcttgctaagctataggaagtatccttttatgttgattattaatagttttactgtgcatttaraaatattgtatacatgtgataactgaagttttgttgccaaaaggaaaagctttcgcaatgagt

SEQ ID NO: 600735 - DNA, 642 bp, Homo sapiens
ttccttgattgcaaaaaggtctaaatgatagaattcaaaatatttggtaggtatggagttcatgagtcaataaaataagaatgtaaaaatatcttcaatgaatacaaactgttacatttttaagaaaaatgactattatttttctttttctagaaaagtacgtatttgggaagtgggaaaaatggttgtttgtcccagattacttttccattgatttgacaaaaaaaaaaaaaaaaaaaragagagagagagagagagaaataacaattttctcaaaaaattgacccaaatataaatatttttaatgtccatccctcaattcatatgttgaaatcctcatctccagagatgatggtatccaaaggcttttgggaggtgattaggtcttggttggtgggtccctcatgaatgggactggtgcccttgtaaaagacgccctagagagagacacgtctcaccccttctcctccatgtgaggttagagtgagaagatggctgtctagagggaggcaagcccttacagaacaccaatctgtccaagccttcatcttgaacttcccagtcttcagaactgtgagttactaaattctgtttataagccacccagtctatagtattttgttatagcagcctgaatgaacc

SEQ ID NO: 600736 - DNA, 577 bp, Homo sapiens
ataatcttctatgggacataaagatggaaattgttttaaaattttgggtccaaaattgttgtttcaaatggaattatataaattataaaataataagcaaaaaattataaaatctagtaattacaaaaacatttaaaccttgtgtaggcacagatagagtaagaaagttgtatcaacaactatgctcttttccatgaaccaatcctagtctgagcaaaaacttcccaactgaagcaatctcttagttcacagtgagatctgtgaacacgtatgagaaagtgagagttactcttttatgagttacaatatttagaacctgcagatagttaagaatggtaataggcccccaaagagaaataactgttttctatggccaccttattaacataaggagttcaactgagatatataataactgatcaaacaatgcttaagtgcarcagacgtcatgaaaccataaactggaaataaatatctactcaaatcaagtatatcacctacattataaaatcagtttctagtattaaaaaagtcttaacttcaaaatctcaaattccttctgaatcaagctaaaaaa

SEQ ID NO: 600737 - DNA, 518 bp, Homo sapiens
ctcctaattaaaatgaactctccacaatattgtcctaatctccccttattaccaaaaatgaccaaggtatcatttttttgatatactcagtgcttccccaacttttatgctataccccatttttatggtttcacttttcaccaccaattgcaaaaatcttacactaatatcagctaaaatgtctccattttcttaaccacaacccactttgcccccaatattggcttcattttgaagtcagaattctttttctcattatatccattatatttcgttttgaaatatatttaccttttcytttttaatataactgtttatttttgaccaacatatatttttaatctgctgtgtggagagattataaacaaataactaggaatatatgaggatcactttatcatcttcaaaacagtaaaaataacgctatatgtgtccaatgaatagcaaattcacgtgttccttttttttttttttttacattcagtttcagcttatagcacagcacatttagaaccaac

SEQ ID NO: 600738 - DNA, 570 bp, Homo sapiens
atgaaaacttttctgttgtgagtaaaatgttcctagaaaagtagctaattgtttctcaacatatatgattttatgtaggctcatctttcaaaatgtttgcttctatgaaattttcatcatagagtcacacaagacatatacagtaacagatggctttgacaaatatttttcataatgctggagtacaggtcttcaacagaaatactgtgggaagctagtattgaataaacgttggattgggctttaaaagttccaagattatacaatttagcttctattgtagtgtcttactcataaatgaaaacaaatgtttgttaaaaacaagtgaatagatgcttgagtggtttctacttcttaccagagggtaagaagactttggtgttatccaacatatcartaagttcattacagtatgtggtaagagcaggaccaaaactgggctattagtgtcttgcattttgcaatttgggctgtttcactatacttacatcatcatacattcttaatctttttatttaatattaaataagcagacatccttactggaggtaaacaactttttaggcaaaa

SEQ ID NO: 600739 - DNA, 688 bp, Homo sapiens
tttctgttgtgagtaaaatgttcctagaaaagtagctaattgtttctcaacatatatgattttatgtaggctcatctttcaaaatgtttgcttctatgaaattttcatcatagagtcacacaagacatatacagtaacagatggctttgacaaatatttttcataatgctggagtacaggtcttcaacagaaatactgtgggaagctagtattgaataaacgttggattgggctttaaaagttccaagattatacaatttagcttctattgtagtgtcttactcataaatgaaaacaaatgtttgttaaaaacaagtgaatagatgcttgagtggtttctacttcttaccagagggtaagaagactttggtgttatccaacatatcagtaagttcattacagtatgtggtaagagcaggaccaaaactgggctattagtgtcttgcattttgcaatttgggctgtttcactatacttacatcatcatacattcttaatctttttatttaatattaaataagcagacatccttactggaggtaaacaactttttaggcaaaatatacttagtacacttatttatgtwctatattattccttgaaaataaaaaaaattcttataattctggattcacacatagttatataattgtaaaagcaatagtaatttggggagcagacttaataa

SEQ ID NO: 600740 - DNA, 605 bp, Homo sapiens
ccctacattaacttcgaattacagtataaggctatgataactaaaatagcatagtactggtataaaaatagacatatagatcaagggaatggattggagaacccagaaataaagccacacacctacactcaacttatgtttgacaaagtcaacaaaaacatgcactaggtaaatgatacccgaattcaataaatgrtgctgggaaattgggattgctatatgcgaaagaatgaaactggattcctgtttctcaccatatacaaatattaactcaaaatgaattaaaggtttaaatgtaagacctaaaagtataaaaattctataagtaaagcgaagaaaaaccctttggatattggcctaggcaaataatttatgacgaaaatctcagaagacaacaacaacaaatatagacaagaagaagttaattaaactaaaaggcttctacacaggaaataagatgattgacagagtgaacagaaaaccttcagaatgggagaaaatatttgcaagctatgtatacaacaaaggaataatatccagagtctacaaggaatttaacaagaacaacataccccattaaaaaattgacaaatgacatgaacata

SEQ ID NO: 600741 - DNA, 605 bp, Homo sapiens
ccctacattaacttcgaattacagtataaggctatgataactaaaatagcatagtactggtataaaaatagacatatagatcaagggaatggattggagaacccagaaataaagccacacacctacactcaacttatgtttgacaaagtcaacaaaaacatgcactaggtaaatgatacccgaattcaataaatggtgctgggaaattkggattgctatatgcgaaagaatgaaactggattcctgtttctcaccatatacaaatattaactcaaaatgaattaaaggtttaaatgtaagacctaaaagtataaaaattctataagtaaagcgaagaaaaaccctttggatattggcctaggcaaataatttatgacgaaaatctcagaagacaacaacaacaaatatagacaagaagaagttaattaaactaaaaggcttctacacaggaaataagatgattgacagagtgaacagaaaaccttcagaatgggagaaaatatttgcaagctatgtatacaacaaaggaataatatccagagtctacaaggaatttaacaagaacaacataccccattaaaaaattgacaaatgacatgaacata

SEQ ID NO: 600742 - DNA, 605 bp, Homo sapiens
ccctacattaacttcgaattacagtataaggctatgataactaaaatagcatagtactggtataaaaatagacatatagatcaagggaatggattggagaacccagaaataaagccacacacctacactcaacttatgtttgacaaagtcaacaaaaacatgcactaggtaaatgatacccgaattcaataaatggtgctgggaaattgggattgctatatgcgaaagaatgaaactggattcctgtttctcaccatatacaaatattaactcaaaatgaattaaaggtttaaatgtaagacctaaaastataaaaattctataagtaaagcgaagaaaaaccctttggatattggcctaggcaaataatttatgacgaaaatctcagaagacaacaacaacaaatatagacaagaagaagttaattaaactaaaaggcttctacacaggaaataagatgattgacagagtgaacagaaaaccttcagaatgggagaaaatatttgcaagctatgtatacaacaaaggaataatatccagagtctacaaggaatttaacaagaacaacataccccattaaaaaattgacaaatgacatgaacata

SEQ ID NO: 600743 - DNA, 583 bp, Homo sapiens
agtcttctttttaaatgatttaattcagaagacttgatcatcaaaaaaattaaataacttataatacctgcatgtagcatgtatatattgctagttattgaaaaatataaacaaatgtgaaccatataaaagtgactcaaacttttagagccatagacttaagactaaagaaatctatcatcctcttctatcgctgcttcattcaatacatatcaacacttacatttaagtttacctgaaatcatcttattgcrttagaaatttctttcacaaaatgaaaaccctaaaattatacttcagaaattgtctttaattagtttactgcaaacatatctatttcattttaaaacagagctatatttaacttttatataattaacttatataaattaaaatttaattttgttcctagtatcttttattatgaagactactgtagtgaatataaatagtgttttgaattggtgagtggtctttcacatggcaatacacttgaaattattgacaattaattttgaccatttttctctttgacagcaggctgcagaaaatccagactcacaaaagtatgcattaacaaaca

SEQ ID NO: 600744 - DNA, 606 bp, Homo sapiens
ctatgttgaatagaagtggtaagggtgagcattcttgtactattcctgatcttaaaggaaaagctttcaactctttctcattgagaatgattttagcygtgggtttgtcacacacgacctttattcagcatagggcagataattcacctattagagtttcacaggacatggtatttttggattcagtaattttagaaccttgcctatgagaggacatttattttcctttttttttttttaatgatgttctctctctccttccatatgactgatgcccattcctttcttacctcacttaaggtcttactaaaatattccactatattttacatagcccccaccccagtttcctgccatggtagatttcattctggatttgaaatcacaacatgaagtattttagccaatttcttcagtaatatataactaggattttaacttgccagctttgcttaaattactgagaaaatgttttgcctttttttaatctcaaaagtgatcagattattttaaaaagtaagcagattcttaaaacttaagaaccatctacttagtaaagtaaaaatcaatatggagattcccatactcaaaggagttcaaaagagt

SEQ ID NO: 600745 - DNA, 606 bp, Homo sapiens
ctatgttgaatagaagtggtaagggtgagcattcttgtactattcctgatcttaaaggaaaagctttcaactctttctcattgagaatgattttagccgtgggtttgtcacacacgacctttattcagcatagggcagataattcacctattagagtttcacaggacatggtatttttggattcagtaattttagaaccttgcctatgagaggacatttattttcctttttttttttttaatgatgttctctctctccttccayatgactgatgcccattcctttcttacctcacttaaggtcttactaaaatattccactatattttacatagcccccaccccagtttcctgccatggtagatttcattctggatttgaaatcacaacatgaagtattttagccaatttcttcagtaatatataactaggattttaacttgccagctttgcttaaattactgagaaaatgttttgcctttttttaatctcaaaagtgatcagattattttaaaaagtaagcagattcttaaaacttaagaaccatctacttagtaaagtaaaaatcaatatggagattcccatactcaaaggagttcaaaagagt

SEQ ID NO: 600746 - DNA, 485 bp, Homo sapiens
aatataaaagcttataataagatagactctcaagatgtctcattcaaattctatggtaatrtagatattctctctactacttccctggaagatgggccactatcctctgccagaacacctccatattggatagggagggggtagaactcaaagattactgagacaaatccatttttagatcctttgaggctactgtttcctgatgattattcagatatcttaaatggaattaaaatgttaagtgccacatttgaaaaataggaaaacatcatatttgtacatcctgcctctttagttggtcatgtatgaatgctagtttggatcaccaaacaatgttgcctttttattcctcagcatatttttgttatgtctaacagaatcctgactaggagggaatgttttctgggaataataacgctaataaagacatgtggttatcaagtggcatctgtatgtctgtggttctcagccccctggaacacagt

SEQ ID NO: 600747 - DNA, 607 bp, Homo sapiens
ggagtttgagaccagcctggccaatatggtgaaaccctgtctctgataaaagtacaggaattagccaggcatggtggtgggcgcctgtggtcccagctacttgagaggctgaggcaggagaatcgcttgaacctgggaggcggaggttgcagtgagctgagattgtgccactgcactccagcctgtctcaaaaacaaacaaacaaaaaacaccataaaaagcatttctatacctcaattttctcrttggtgacgcaggaataaattaattattgggaaaatatttgctaatttgactagagctttctttacagcactatatttacttttcagaagcaatgatgctatgtttcgtatcggctcacctactctccagactggctttagtagcccatgttatgacagtgaaaagacactcaaaagaatctgtggaaaatttagtataaactaccacataaagaaaaaaaaatttttttgaaaaaagtcacacgaaaggaaaacctgagaaatatcacaatatacgatgttaaatactacatgggcaagcatatttaaactctgctatgaactactcatgaggaagaaaaagttcataaccaggtgtcgtg

SEQ ID NO: 600748 - DNA, 607 bp, Homo sapiens
ggagtttgagaccagcctggccaatatggtgaaaccctgtctctgataaaagtacaggaattagccaggcatggtggtgggcgcctgtggtcccagctacttgagaggctgaggcaggagaatcgcttgaacctgggaggcggaggttgcagtgagctgagattgtgccactgcactccagcctgtctcaaaaacaaacaaacaaaaaacaccataaaaagcatttctatacctcaattttctcgttggtgacgcaggaataaattaattattrggaaaatatttgctaatttgactagagctttctttacagcactatatttacttttcagaagcaatgatgctatgtttcgtatcggctcacctactctccagactggctttagtagcccatgttatgacagtgaaaagacactcaaaagaatctgtggaaaatttagtataaactaccacataaagaaaaaaaaatttttttgaaaaaagtcacacgaaaggaaaacctgagaaatatcacaatatacgatgttaaatactacatgggcaagcatatttaaactctgctatgaactactcatgaggaagaaaaagttcataaccaggtgtcgtg

SEQ ID NO: 600749 - DNA, 624 bp, Homo sapiens
aggaaaacaagtataagacaaatagttacccctaaatcccacagcttatatttagcagaatcagcatttaaaacccggatttgaatgactcaaaagtcctgcccttttccactgacatatcatatttacttggcaaaaaaggatccaggcaatgtggaatcagaaactggttcaagtaatacctacatgccatmagtgcttgatatgaggagtagcacatattttctatgtgaagttaattcattgccaacagccagaaagtcacatcctagttctatgagactctaaacccgaagtactgaccaatccttgcatatgtatcagttgttatgaatccacagagcagttgaaccacaaagctagcagcctcactctctgcatatcaaaatatagtttaaaggatattggaccgaaatttgtctctatccaaaataagccatgtgtaaccctagctctgtgtttctttcaactgtttattggaagacttttatttcctttcctttggcaacatatatcctattttacattgttaaattccgacagtcaagtaatgtgtaaaacaacttgactcaagattgtgatttgctcttagaagcgtatcttacccctctgagattgccttat

SEQ ID NO: 600750 - DNA, 624 bp, Homo sapiens
aggaaaacaagtataagacaaatagttacccctaaatcccacagcttatatttagcagaatcagcatttaaaacccggatttgaatgactcaaaagtcctgcccttttccactgacatatcatatttacttggcaaaaaaggatccaggcaatgtggaatcagaaactggttcaagtaatacctacatgccataagtgcttgatatgaggagtagcacatattttctatgtgaagttaattcattgccaacagccagaaagtcacatcctagttctatgagactctaaacccgaagtactgaccaatccttgcatatgtatcagttgttatgaatccacagagcagttgaaccacaaagctagcagcctcactctctgcatatcaaaatatagtttaaaggatattggaccgaaatttgtctctatccaaaataagccatgtgtaaccctagctctgtgtttctttcaactgtttattggaagacttttatttcctttcctttggcaacatatatcctattttacattgttaaattccgacagtcaagtaatgtgyaaaacaacttgactcaagattgtgatttgctcttagaagcgtatcttacccctctgagattgccttat

SEQ ID NO: 600751 - DNA, 526 bp, Homo sapiens
ccttttaagtgacctttgcaacccaagtgttacttgcttatttgatgctctcttgtattttaaatctcatttaaatctttgtctgtgaccaacaaagcttaagattttgtcttcatttaaaactctgaatctattccattgatcatgttagacgttcaaatgtttaatggtatagtctgacctagtgaaacaaaatggatgttgttactttttttaaagaatagaatgaaataactatttcacttgcccaaaattttaaatattttttcatctaaacttgtattgtttcccawagcagaatgtcaatattcacagtacatttctgtaaagagcaaaccaatataatgttttgagtgttgaaaaaaattccagatttttgaagaattagacaactcttcatctaccttatttctagttcacacagttatctcaaattccactgaaactaatgggatactgtcttgtgtagatgccagttgagtttataatgtgacctagtaaagctgtcttttttgttgtgttgtat

SEQ ID NO: 600752 - DNA, 593 bp, Homo sapiens
ctaatagtcactcaggcctctttcttaactgagaaacttaatcattctgatgctgatgattttaggaatgcctagagaaacacgatctgaagaagatttctaaggtataacaaatattaccaagatctcaaaattttctctcttctgggcactggaaatataatgatgagaaacacaaacacagtgcaagttgcaggagaccattgggagagtattcatccaaaaattgcacraagaggcatatattactaactctaaaaaagcactatgcaataaaaagatcttggtaacaaggagttgatagcagatggaaggaaagaacctgacaggaagtgacctgggtttagcgactgagctgggaagaaggtggatggacgattcacactgccctgggtgtcttcatccaaatctcagcaacaatttgacatctggagcacagtatatacagactaagtagtggagaagcagatggcaatgttagctctgggagaatgtttgacttcagttaacagctgagggtatgaatgaagaaatttcttctcacttatgggccaatacttaagtttccctcaacaaaaatgcattacctcaac

SEQ ID NO: 600753 - DNA, 593 bp, Homo sapiens
ctaatagtcactcaggcctctttcttaactgagaaacttaatcattctgatgctgatgattttaggaatgcctagagaaacacgatctgaagaagatttctaaggtataacaaatattaccaagatctcaaaattttctctcttctgggcactggaaatataatgatgagaaacacaaacacagtgcaagttgcaggagaccattgggagagtattcatccaaaaattgcacgaagaggcatatattactaactctaaaaaagcactatgcaataaaaagatcttggtaacaaggagttgatagcagatggaaggaaagaacctgacaggaagtgacctgggtttagcgactgagctgggaagaaggtggatggacgattcacactgccctgggtgtcttcatccaaatctcagcaacaatttgacatctggagcacagtatatacagactaagtagtggagaagcagatggcaatgttagctctgggagaatgtttgacttcagttaacagctkagggtatgaatgaagaaatttcttctcacttatgggccaatacttaagtttccctcaacaaaaatgcattacctcaac

SEQ ID NO: 600754 - DNA, 552 bp, Homo sapiens
tcaatttaaataatggttaagctgtgacatcttccggagggcttcttctacttttccttctaatagaacatcattccacttagtacaaccccatgtcaggttaggaaaacctaataagacatgtcaacctgcatctcagactgtctcctctgtaactcaagaatctatccctaaattgtttwtttgaatcagaattctgggattagtaaaagtgggacaggacaaagagaaaatggcagatcaggtagatcatttttaaataagaaaggtataatgatttaaaaaataaacctgggatgcaaaatcagaattcaagagaaagttttaattaaaactgagccgttaagtttactgatggacttcctatattctcctaaattctagagtcagcagagcctcaagaaagacattaagtgtctcacaactgatggtaagcaagtaaaagtagtcactagataaagaaaggaaagtaagtggaaaggatcaacacatttcgatttttaaaaaaaattaggatgagcaatacagacagggcaagaaagtctcaagtcc

SEQ ID NO: 600755 - DNA, 501 bp, Homo sapiens
tggcccagttgtttctatttcaactgtgactaatacaacatggactgtaactaggcaaaattacggtggaaaatgtttctttaaagcttgaatcctttactgccttgatacctcaacctttttttctgtggtgaaaaatcattgcactcaaatggcattaaattkaagaaaagagcaaaattgtaaagcaatctcagccaatttatattataaattacatattagataccatatgtaaggaagtataataccaaaagacctaaactatagccctaaattattattaactatataattcagtaaaagatttctgcatacactattattctgtttcataaatagaagtaagaaatgctgtgaaacaagaatggagaatcaagaaattcatgaataaaaaagcctgagagaatggttaagctaaatctgaaaacatagcttcaagctgatcccaaaaaacctaaaattgtgctttcaaaccatagtgtgtgttcctgaacaccc

SEQ ID NO: 600756 - DNA, 584 bp, Homo sapiens
acggtggaaaatgtttctttaaagcttgaatcctttactgccttgatacctcaacctttttttctgtggtgaaaaatcattgcactcaaatggcattaaattgaagaaaagagcaaaattgtaaagcaatctcagccaatttatattataaattacatattagataccatatgtaaggaagtataataccaaaagacctaaactatagccctaaattattattaactatataattcagtaaaagatttctgcatacactattattctgtttcataaatagaagtaagaaatgctgtgaaacaagaatggagaatcaagaaattcatgaataaaaaagcctgagagaatggttaagctaaatctgaaaacatagcttcaagctgatcccaaaaaacctaaaattgtgctttcaaaccatagtgtgtgttcctgaacacccaagtacatgtcttattaatccmtatataattagtgatgtcacagggccactccatcccaggggataccatttagggtgtgatgtggcctcataagctagattgctgctgatttgagccagtctgagtcactccctctaatccaaa

SEQ ID NO: 600757 - DNA, 536 bp, Homo sapiens
tttctaaatactacagtatttaaattttatctaagtggctctaattcaagaacaagcagttcagatgctcccagaagtacaggctatcagtgcattccaggagcacgttgtgggttgattrtttccagtacaacatcgtcctactgccatgaatttgcttgctggttaatgtctataaaaattcccacagatgtgtaaaaatatgtatttgactctgtttcttcttatccatcccttcccacactttgtggtaactaaataggaaaatcatttcttgaatatctctgtactatggttaaaatgtagtgatccaaagataaaagcttatatatgtgatccagtgccaaacaagtccctagataaaataggtattcaaagcatgaattaggttactgtatagtattttacttgacagtgaagtttaacaaggatcataagatatgaatacataaattttaaatccattatcatggataaggagatcattttattaagtcagtctattacttgtaacaacaatagtataatgagatatg

SEQ ID NO: 600758 - DNA, 604 bp, Homo sapiens
tgaatagcctcttttgatactggagactaaagttttagacacgctgttccaaaatatttatattaataactgtcagatttgaatggtaccctcaacatgacaaagttccatgtagtccaggatacaattgaaactgtgtttgcaaaatcatgacagttaagagaaatttgactccatcttgcctctaaccaccaagctgtctttggtcattcctgggcataggccaagctacctttgggagaaatttagtttatagtttaaccttaaagcaagatggtaatagcccttccctaaactaaactgcctttataaaactggtgaaagctataaggttagggttatgaggaacctgaagtctgctaagatgtaggcatagtttctgtaatcccttactgctgaggagtcaaatggccagagatcacaggatttgtgacttccctaattgctcctatacatcacatcactatcgtagaacctaagattggtcttttgagkttttttttttcagatttttgcatttctgacaaccagctgacttcactcagacctatgacccaaccagtcctgtggcccctgccgagtggctgactcagtgcacgaggac

SEQ ID NO: 600759 - DNA, 245 bp, Homo sapiens
atcaggttgtacattggctagtagttmctggtttctttggccaggtgatcagggcctaaggctaatactgaaagactgataacatgaagaatttggaaacactcatgtgtggttggagctctcagaatgtggttaaagtctctaacatttgttccttaggagagaccaccagaaatccccgccagaaaacaattcttaagaactgtagtgtaaggcttaaaattaattccaaatattatatgcca

SEQ ID NO: 600760 - DNA, 245 bp, Homo sapiens
atcaggttgtacattggctagtagttcctggtttctttggccaggtgatcagggcctaaggctaatactgaaagactgataacatgaagaatttggaaacactcatgtgtggttggagctctcagaatgtggttaaagtctctaacatttgttccttaggagagaccaccagaaatcccygccagaaaacaattcttaagaactgtagtgtaaggcttaaaattaattccaaatattatatgcca

SEQ ID NO: 600761 - DNA, 607 bp, Homo sapiens
aactgtgttcaggcatacaaaggtctggcaagcttgagagagatattttcttcagtagcatcttccgtgcaataaaaagtcttaacatatgggaaatggcttatctgattacaggtgttatagaagagtttgatagtgttaaaatttttcattctccagtgtgtggaattaaatgtacttggagaaatagtttgacctcaagttagtaatggttcttcattaattattaattttattaaaaaggaaaaaaattgtaaattgccaattctcccagtccaatattaataagaatataaaaacattagataagctgtggaatacagaatgtttagttacttctccccaatatttccgtaataatctcagagcatcataacaattagatagcaaaccagaagcattctctgatatatgtgcatattgatagaaatttctataaaaagtatacagaagacatatatttgtgttacaaaccaaaggawctgcactaattttctacttaaaaaaactataagtagaaacaaaaatgttgatttatgctattcattattgatggcagcagcggcctgtatggagcagccattgtgaagatgcccgctgcagcaca

SEQ ID NO: 600762 - DNA, 577 bp, Homo sapiens
tttccgtaataatctcagagcatcataacaattagatagcaaaccagaagcattctctgatatatgtgcatattgatagaaatttctataaaaagtatacagaagacatatatttgtgttacaaaccaaaggatctgcactaattttctacttaaaaaaactataagtagaaacaaaaatgttgatttatgctattcattattgatggcagcagcggcctgtatggagcagccattgtgaagatgcccgctgcagcacaggaggcatggcctaggttccatgctccacaggccrgcaggagataggaacaggtgggacccctaccccctattgagttggtgtggcagaagccctgcactcctgggtgcagctgcagctgcccagcctcagctccagacccaggtatccctgtgctctcaggggcccaggaagacacccctgtccccacaggcttggaaatgcctgctcccactgctccccagctcccagtaatccctctgattttggagcaaagttgtggtcaaacctgggcgctgtcatgactcagctaggagtttgcacactcagggcagtgctg

SEQ ID NO: 600763 - DNA, 577 bp, Homo sapiens
tttccgtaataatctcagagcatcataacaattagatagcaaaccagaagcattctctgatatatgtgcatattgatagaaatttctataaaaagtatacagaagacatatatttgtgttacaaaccaaaggatctgcactaattttctacttaaaaaaactataagtagaaacaaaaatgttgatttatgctattcattattgatggcagcagcggcctgtatggagcagccattgtgaagatgcccgctgcagcacaggaggcatggcctaggttccatgctccacaggccggcaggagataggaacaggtgggacccctaccccctattgagttggtgtggcagaagccctgcactcctgggtgcagctgcagctgcccagcctcagctccagacccaggtatccctgtgctctcaggggcccaggaagacacccctgtccccacaggcttggaaatgcctgctcccactgctccccagctcccagtaayccctctgattttggagcaaagttgtggtcaaacctgggcgctgtcatgactcagctaggagtttgcacactcagggcagtgctg

SEQ ID NO: 600764 - DNA, 409 bp, Homo sapiens
atgagcagccaggcaccatggacaaaatgttgatggcagcaggaggcagacaggttcctgggtagaaaggggtgggtacctggtgagcaccaccttcaagccagagatggcctaaagcctgggggcagggctgctagttctgggtggaatccacggcccagagagaaaacktatggtgctttttccaggcctgccatggcgctccatggctgcccatggaccagtcagcacacaccacctcccttctgagcccataaaaaccctggacccagccagactaacacagacatcaggactaccagcttcaggaaggatctatccactatggtctcctcaacttgttgagccgacctgcctgtggaaaggagctacctactatgggtctcctccctgctgagagttggacact

SEQ ID NO: 600765 - DNA, 657 bp, Homo sapiens
agctgtggtctgagagcagtcctgcccacttacaggcccagaaggagacatgcccatctgtgccccaagagacaggcctgcagacctgggtgacagtctagtccaccaaggaaccacataggacccatatctacttcaacccctggtgacaagcaccaaccacagaccccgctgcagactcagcagcagccacttggcctggatcccacccccactcaactgtgatcccagaggcaatcctatctcctggggacccaccaggagaaggcttttacctgccaaartcagtcataaatactacaaagaaatgttttactccatgtaaacatacacaaatgcaagactgcatgagtagcaaagaatcaggcaaacaagccaaaggaattaataaaattctagcatcagaactccaaataaagggagactcataaattgcttgaaaaagaattaaaaatgatcatccttaaggaagctcagtgagatttaagaatacacagacaactaaattacattagtaaaggaatgtataaacaaaatgagaagcttaagaaatataaactgcttaaaccataaaaaagaacaaatagaaattctagagctaaagaatgcaaggacaaatctaaatattcaatagagagctttaatagaaaatttgat

SEQ ID NO: 600766 - DNA, 565 bp, Homo sapiens
caaggcagctccttcattgggggacaattcctggagaaggggaaccctaggaccccgcaggctggagatgagtgtcttgcttggagggtctgggtgggacaggcagcatcccctccatggtgacccagcgatctcctccagaggctggagctcacatgcagagactgctagatgtgtttactcatttcttttccatacttattcttcttggaataaatgtatctcacgtaaaaactagtcctctcgctgactactcgtgtgatctttttaaattgccccttcggttaaatgtggataataatagaatgtaaaccatagtgttttttgagggagacagaggtgatgtgtatgaaacctcctgcacagtgccagtacctcataggaagagttcagcataarctgctattatacacatttaaaagtgatatatggtcactgtgccctcctacaccctttttagaagtgcagttaaaccttagagtcttgtcactcagaaatcctgttggcgtctttctgatcttctttccctaaccctgatatcttcactggagttttcctctgaaat

SEQ ID NO: 600767 - DNA, 517 bp, Homo sapiens
ttctccatcatctcattggctccaaaacaaaatccactggctggcagattactgcaatgagcatttcgtgacaggtagcttctaattgtctaaaatgtcgcttaaaagagtcaaagtacaaacaagtaaaacagcatatgaggctaccatagatgtctgagccacatctgccaggcccacatctgtgaggaggtgactgggggagttcccacacctgcagggctgcaggctccagcccagtcctctccttactgaccctcagcaygctcccgtgaatgagatggtgctatgtgcaagggaaaaatgtatggccattagttagtcatcagcaacttatctccaaacagcaagtcaggttccagcctgaggaaggggtttctagaggacggaagcccaggatctggcttttgatgggaagggtcactttggcagggctaataaaaaaagaaaagacaaacatcaaaaatgagaagaaagaagaggcagatgtcatcttaaattgaaaaaaccaggaatt

SEQ ID NO: 600768 - DNA, 562 bp, Homo sapiens
catttaaaaaattattttctgatttgtgtcctctgactctgtattttcaaataacctgtctttgagttcactaattatttcttctgcttgatcaattctgctattattgcatttttcagctccagaatttctgcttggttctttttaattatttcaatccctttgttaaatttatctgatagaattctgaattccttccctgygttatctcgaatttctttgagtttcctcaaaatagctattttgaattctctgtgtaaaaggtcacacgtctctgtttctccaggactggtccctgttgcctcatttagttcatttggtgaggtcctgttttcctagatggtcttgatacttgtagatgttcatctgtgtctgggcattgaagagttaggtatttattgtagtcttctcagtctgggcttgtttgtacctgcccttttttgtgaaggctttccagatattcaaaaggacttgggtgttgtgatctaagctgtatctgctttagggggcaccccaagcccagtaatgctgtggttcttgcagactcatagaggtaccacct

SEQ ID NO: 600769 - DNA, 569 bp, Homo sapiens
tgtgctccatttaaaaaattattttctgatttgtgtcctctgactctgtattttcaaataacctgtctttgagttcactaattatttcttctgcttgatcaattctgctattattgcatttttcagctccagaatttctgcttggttctttttaattatttcaatccctttgttaaatttatctgatagaattctgaattccttccctgcgttatctcgaatttctttgagtttcctcaaaatagctattttgaattctctgtgtaaaaggtcacacrtctctgtttctccaggactggtccctgttgcctcatttagttcatttggtgaggtcctgttttcctagatggtcttgatacttgtagatgttcatctgtgtctgggcattgaagagttaggtatttattgtagtcttctcagtctgggcttgtttgtacctgcccttttttgtgaaggctttccagatattcaaaaggacttgggtgttgtgatctaagctgtatctgctttagggggcaccccaagcccagtaatgctgtggttcttgcagactcatagaggtaccacct

SEQ ID NO: 600770 - DNA, 594 bp, Homo sapiens
agcaaacaaacaagaacataaaagttttgagaggctaacgctgacattcaggtgaaatcaatactatacacctaacttccacctagtcggtggaagacctaactccccatttccatgtcccaggcaggacaagtgcacacgtgttctgaaagggccggcagtcactgcactacccccaatgtacaaagagtggggtgcagtccctgctatctaggctttcacaatcttgtgggcaacaggaacagagaggaggcagagaaggagagkccaggtggatgagtatttatccaggtgttgtttccctaaattgtttgctagaataatgggcactgctcccaggttcagcctcctttgtaggcatccattaggaagatgtataagaaaatcaccctccacaaaaacgaccacaaaaccagagagatgtaggcttggggtattgtcaggggcaggctccaccttcagcacaattgctcctggcacttggttcttcctgtgacaacatctataatccttttgccaaacagcggttcatcaccaacatcctgtttcagacagacacgaacatctctgacatcattcagagcctattctact

SEQ ID NO: 600771 - DNA, 556 bp, Homo sapiens
gttctcacccttccctcccctttccaaaggcagaggagcctcatccaatggccatcactgtcacaggcccatggagaatactagcagactatcaccaatgtacccttaaggtacaagggcacttcagtcagcttatggtgaatgttgcctagcctgggactcatttttcagggcagtgggctcccctctggctcagggcaggtccaaaaatgccaagacccacgtcctagaatcagtgactccaagagcctacttggtgctgtatccctctgtggctgagctggtctctaaggtgcaagacaaagtcccctttacttttccctctgcttttctcaagcaggagtcttgccccatggccaccacagctgggaatgtgctgagtctcacctgaagccatcaagcctcagagtctcacccaaagccctcaatgtagtatctgtgtatcactgctggttattcagggcccaaaggctcttcagttagcaggtgatgaatcctgccaggactgggtccttcccttcaaggcagcrggttccccttctggctcagggtgtgt

SEQ ID NO: 600772 - DNA, 615 bp, Homo sapiens
atttcagttctcctgggtatatgcttaagaatagaatcactacaattttcaaccattcctgttattattaagaaagtaatacatgcttgtaggaaacggtcaaacaacacagcagagaacaggggaggaagtgtggggacacccactgcatttcccatccacagagacagcaactcaggagattagtttgcatcctttccatagctttttatatgcacacacatatttattttgtaaatacaattattctatacatattgttctacaaattgttatataactctgcctacgttgtggccatattcctaagtcagaacacacagatctatcttatcytttttaatgactaccacatattttctattgcagatgtaccgtaagtttttaaccagtcccttattaatgtatatacaagttgtttttacttttttactattacagataatgtacaaagaatatctttgtgtgtgtgtgcatatagacatacttttcctgtatattttggtctgtatttctgtactctagtatcttttaaatagaccagctatgtcaaagaattgttgaaaatatttaacctagctatataaaaacatgccaataagtaatgggaaacaa

SEQ ID NO: 600773 - DNA, 542 bp, Homo sapiens
tgattgtggcccttgagagacccatgcagaggagctagcccacctgaccccaatctcctgacccacagaagcatcataaatgtgttttgctttcagctgctgagagtgtggtactttgttaagctgtgatagaaaactaacacttgtctgatagccaagtccatgcttttatggctgaggataaactgccttgctcagtggggaattttcaacaaatcggggttgtcctacgatgaacccatctgcattgccacacgtcagtgaaaacagctaggcagaggctgagagacaatcttttggaagaatttagaatgaggacgactaagtcacctccagsgtcctatttaattcagattttatgacacttatgagaagtataataatgacaatttattgatttgagaagcttaaaataaatgtatggctctaactgttcctataatatttatacaccagaagtcattctaaaacatgaaagctaagctaatggaaagcttaggagataggtaaataaatacactttaatgcttgtattagtcagt

SEQ ID NO: 600774 - DNA, 576 bp, Homo sapiens
cgacatttcagtcagctcagaaaacaaggtgctgtgtgggcatttgctctaaaagaatccaaggatggccacatgactagatgctttgagccaatcatctggccacgttggaagtatttcatcctctgagctccaaccctgtcatgttagggcactccagtggcaggagtcagtctcattaagtggtgctttttttccagagcaaggagctggctgcaggcttgargatgtcttggtgcagagcaaggagctggccgcgggctggagggtgtcttggtgcagagcaaggagtcagctgcgggctggagggtgtcctggtggagactgtgaaggcattgctgtgagcaatttgtgccttcgtgctttctgtttctcctcatttctccagacactgcctctttttggcctggcagggccagaccctccggctgaggcaggtcgcctggggaagaaagctgactctctcctagaagaggcatgctggtgaaaggaagagggtgaagcgccacagatgcccaaggattgaaaagtgcctgtgatacagggaggggaaggtgggcagggtgcgtaaaagaa

SEQ ID NO: 600775 - DNA, 496 bp, Homo sapiens
agaaacctgaatattcacattaagtggaataaataaagactaaaaatagttccgtgtcagttcagaagaggattcaccgaatgagtgagaatgttcagtgcttagggtgtcgaggttgggcttcggggttcgaggctgtgaactggactgcatgttgcatttgaggacctcgagtttagaggatcctgtggtctgttcctatttatgcagctcgtggtggacttgtgttcaacccaggtcttctgtctctgactccggcgygttctctgccacacccagctcttggggtcgtattgactaaggtgggtccgtaactgtcactgcagtgggcactcaggggaaccctggaaagccacagagaaaatccactagcacaactgcaccttggggaaagcgcttcgtgtgtttgcttcagctattcaaggagtcctgagctcctgtacgatgaaaatgtttcttcatctctgacacttctgtggggcttcgcatacaatgc

SEQ ID NO: 600776 - DNA, 505 bp, Homo sapiens
tgagcaaaaactcagcagaagctgcatgaaaaatgtcatcacaacttaagtctgcaaatcagcaactccgctgatcaaccacaaagtaataaggagtaacagcctaggaagttatgttattgaaccagtgggcaaacgtctatctgagtgtaatgcgttgatttgtcacacttgtgtgaaacctttactgtttcttgacttccatgtactaaaagtccccatttaggacaatagctatgagtaaaaaaataggctgttctccagaagaatcatatgcagacacctttgcttctgattcttggtgcmtttgtctttcattgtaacagtgatacattcaattgtgtcacaattgccctttaatttggagcaacaccaactgtagccagctactcacaggaggggctgcaccaccctggggcgttttcaggaacattggctcaccctctatcagtgtcagtgataatgctgggataaaacaccacaggttggtaacaaccatcttctt

SEQ ID NO: 600777 - DNA, 505 bp, Homo sapiens
tgagcaaaaactcagcagaagctgcatgaaaaatgtcatcacaacttaagtctgcaaatcagcaactccgctgatcaaccacaaagtaataaggagtaacagcctaggaagttatgttattgaaccagtgggcaaacgtctatctgagtgtaatgcgttgatttgtcacacttgtgtgaaacctttactgtttcttgacttccatgtactaaaagtccccatttaggacaatagctatgagtaaaaaaataggctgttctccagaagaatcatatgcagacacctttgcttctgattcttggtgcatttgtctttcattgtaacagtgatacattcaattgtgtcacaattgccctttaatttggagcaacaccaactgtagccagctactcacaggaggggctgcaccaccctggggcgttttcaggaacattggctcaccctctatcagtgtcagtgataaygctgggataaaacaccacaggttggtaacaaccatcttctt

SEQ ID NO: 600778 - DNA, 622 bp, Homo sapiens
tctgctctctctgtctctatgcctttctatgtctgcctctttctgtctttgtctctgattctgtctctccatctctatctctctctacctcttccatctctctctatctctgaatctctctctctctctctcactgtctgatacacacacacgcacacacatacacaattgtttccactggttgagaagtaggctaagcttttcacagttgaaggctcaatcccaaagtctaaagcgaagccattatcagtgaaaagtttgctcaaggattttctggtttgtggggaaccaggcaattccctgcaagccccgcattctggcctctgcttgctggtgtgtacygcggcaacaatgcatccccctcccactgggctgttagtggagcagtgacaacgtcagcctggagccccagaggctcgcaggctttcccaggggagaccagcccatggagccacacagtggtgctcaacctgggtgcagcaggggtaagatgccaggggcttcagaagcaggaggttcccagccttttggaagattaggacacagactctctagctggcatgaacactcaggcagctctctagccaatgatttccactggcaaatgagcaggtttccatgg

SEQ ID NO: 600779 - DNA, 439 bp, Homo sapiens
ggagtaattgcctgaagacacagggctaggaagtggtagagtctggaacccactctggaacccaggcagtctgactagactctgctcacaatcgtaatacggcaagcaattctgctcatattcagtggcccatttctttttatctgaagaacaatgaattccaggataaaagaagagaatgctgatctccctggtttaaytatctgtgcatctcctttaaaggggaattatgagcaaaagaatatgttttataaaaatcaagtttcagatgttgccgatgttgccttgtcaaagcccagcaccccctggggactgcagtgttgctggagggcaccccagggctcagtgcccaggtaggcaagcccacagctgagcagcctgctcgcaggagtcacacgtgtagagtgacatgaaggacttcaggctcagacacacacat

SEQ ID NO: 600780 - DNA, 614 bp, Homo sapiens
gtccatgaagtcttaggtgaggagtccagaggagagccctaaacaggcagaggaaacgcaactttgcacttacaacaccgacggtttctcagtgcaggcccgagcacacgcacgccctggtcctcatgccctggtcctccctgcatctgcatgggtcagtcactgaactgctctggacccggcttctctgtctgctccagggccatgccggcaaatgctcccagcagccagggagggctcgtactgcatgaaaaaaggtgtgggttgttggggcggtctggaccttgccctgtctgcaggcaacagctgctgcctcgcttcagccatcactggaatttctgggtgcagaactccaggctgtgtgttgctctccccagaattctgaaggcgttttgtcctgaccttccactatctttggttgctgactatttgcrcttgctgtaattattgttccgtttgataatctcttattttctcactagtggcttctaagatgctaagttctttattctatatttatgctttcaaacgttgtattttgcagatatatggtaaatagtgcatagtctttatgctgtttttattctttattattaatgttttacagtttcgtt

SEQ ID NO: 600781 - DNA, 572 bp, Homo sapiens
acagagccaaaccatatcattccacctctggcccctcccaaatcttatgtcttttatacatttgaaagccaatcatgcctttccaacaatcccccaacgtcttaagtcattccagcattaacataaaagtccaagttcaaagcctcatctgagacaagtcaagtcccttccacctatgaacttgtaaaatcaaggatgcccaccctcaccccttctcttcracatagaactggaagtcctccccagagcaatcagacgagagaaagaaataaaaggcatccaagtcggtaaagaggaaatcaaactgttgctgtttgctgacgatatggttatttacctaaaaccctaaagactcttccagaaagctcctagaactgataaaataatttagcaaagtttctgtttccaaaattgatgtacacaaatcagtagctcttctatataccaacagcagcgaccaagatgagaatcaaatcaataactcaatcccttttacaatagctgcaaaaaaataaaataaaataaaataaaataaaataaaataaaataaaatatttaggaatatacctaac

SEQ ID NO: 600782 - DNA, 572 bp, Homo sapiens
acagagccaaaccatatcattccacctctggcccctcccaaatcttatgtcttttatacatttgaaagccaatcatgcctttccaacaatcccccaacgtcttaagtcattccagcattaacataaaagtccaagttcaaagcctcatctgagacaagtcaagtcccttccacctatgaacttgtaaaatcaaggatgcccaccctcaccccttctcttcgacatagaactggaagtcctccccagagcaatcagacgagagaaagaaataaaaggcatccaagtcggtaaagaggaaatcaaactgttgctgtttgctgacgatatggttrtttacctaaaaccctaaagactcttccagaaagctcctagaactgataaaataatttagcaaagtttctgtttccaaaattgatgtacacaaatcagtagctcttctatataccaacagcagcgaccaagatgagaatcaaatcaataactcaatcccttttacaatagctgcaaaaaaataaaataaaataaaataaaataaaataaaataaaataaaatatttaggaatatacctaac

SEQ ID NO: 600783 - DNA, 572 bp, Homo sapiens
acagagccaaaccatatcattccacctctggcccctcccaaatcttatgtcttttatacatttgaaagccaatcatgcctttccaacaatcccccaacgtcttaagtcattccagcattaacataaaagtccaagttcaaagcctcatctgagacaagtcaagtcccttccacctatgaacttgtaaaatcaaggatgcccaccctcaccccttctcttcgacatagaactggaagtcctccccagagcaatcagacgagagaaagaaataaaaggcatccaagtcggtaaagaggaaatcaaactgttgctgtttgctgacgatatggttatttacctaaaaccctaaagactcttccagaaagctcctagaaytgataaaataatttagcaaagtttctgtttccaaaattgatgtacacaaatcagtagctcttctatataccaacagcagcgaccaagatgagaatcaaatcaataactcaatcccttttacaatagctgcaaaaaaataaaataaaataaaataaaataaaataaaataaaataaaatatttaggaatatacctaac

SEQ ID NO: 600784 - DNA, 572 bp, Homo sapiens
acagagccaaaccatatcattccacctctggcccctcccaaatcttatgtcttttatacatttgaaagccaatcatgcctttccaacaatcccccaacgtcttaagtcattccagcattaacataaaagtccaagttcaaagcctcatctgagacaagtcaagtcccttccacctatgaacttgtaaaatcaaggatgcccaccctcaccccttctcttcgacatagaactggaagtcctccccagagcaatcagacgagagaaagaaataaaaggcatccaagtcggtaaagaggaaatcaaactgttgctgtttgctgacgatatggttatttacctaaaaccctaaagactcttccagaaagctcctagaactgataaaataatttagcaaagtttctgkttccaaaattgatgtacacaaatcagtagctcttctatataccaacagcagcgaccaagatgagaatcaaatcaataactcaatcccttttacaatagctgcaaaaaaataaaataaaataaaataaaataaaataaaataaaataaaatatttaggaatatacctaac

SEQ ID NO: 600785 - DNA, 526 bp, Homo sapiens
gaaagtggaacatctttcaagtgctgaaagaaaacatctatttatttatctataaaatacacatgcacgcttatatgtgtattggagagagatatatatccagtattcattctatcagagtcctggaataagaagagaaaaacagtagggtaaatagaatatccaaataaataatagatgaatccttcccaaaactggtgagacaaatgaaaactattcaagcagctaaataatcccaaataagtaaacccaaagaaatctatatcaatacacaaaataatgaatcttctcaaaactaaagacaaagcaaaacaacttaaaagtagcaagagataaatgacacattgccaacaggggaatgccaatttgaattacagcagattccgatctgaaatcacaggaagcagaaaaaagtggcacatcacttttcaagtgctgaaagaaaataactatgtatctatgtatrtatctgtcaagataaagatactgtattagtccattttcatactgctatgaagaactgcct

SEQ ID NO: 600786 - DNA, 589 bp, Homo sapiens
caccaggaaagtgggtgtacacagaaaggagaagtgatccaataacagaaccctggggttctccggttctccagtattaagagttagagtagaagaggaagaatcagaaaggaggaatcaatgaggtaggaaagaatgcatgatgttcctgaatttgaatgaagacagtatatgacaagaagcagtgatcaactatattaagtgatrgtgataattaagatgtagactgaattgataatggggtttagtaatgtagaggtcactggaaacagattaaagcaatgtttgtgaagtggtgggaatgaaatcttgtttagactgggtttaagatagtatggtaaaagaagaactcagccatcgatatcaaagacaatcacttcaagaataaagtatttttattgtctatgaatagccctgttagttactatctttcattctattttcttctgtttcagctagatttggaaaatgtatgcctaagttgcataatggctctaacacaattttatttagctccaacatagaagtatgtaaaaaaatttctgcctaaatttcatgccctcatgattagtagttgaatttactgcag

SEQ ID NO: 600787 - DNA, 549 bp, Homo sapiens
tggtatttaggactcacttcttaggtttcacatccatagaggaagtgtggcagaggaaggtaaaccctattctgcagaggctgccctgaatacccaggtatcatcaagccaacacagatggagtaggggaaattctttgccaattctaaaaaaatagcattctaggccagacgcagtggttcatgcctgtaatcccagcactttgggaggctgaggtgggcggatcacctgagctcaggagttcgagactgcctgaccaacatagtgaaaccccgtctctactaaaaatacaaaaattagccaggcgtggtggtgagtaatctcagccacttgggaggctggggcaggagaatcgtttgaacacaggaggtggaggttgcagtgagccaagatcgcaccattgcactccagcctgggcagcaagagcgaaactccattaacaataaaaagaaaaaaaatcagcattcttaggtatggcactctcayctcaaatttaccccacctagtgtcccaccaaatactttaaatagcctctaacacttcagcaga

SEQ ID NO: 600788 - DNA, 540 bp, Homo sapiens
agcctaagtccaagaacaatctcactcatttctcatattgcttttcatcatttctataacagttgtctatcacatgaaattcagtaatttcccaatatatttaacaaaagattttgtataagtaatgcatggtttctggtcatatggacaattatttttgtttatagcatwtctttctaatataacaactatatcaattcaataatagcaagcatctactatattaccaatgatcaaaaaaagttcaatatatgatttcctttagctgtttagttcatttcagagtaaagatataagtgaatcagtgcaatatagtgtgataaacgttttggtagaaatgaatctggcaaggtgatgagagaaagcattacaaaccaacagttacttgcatctggttcagttggtacacaagtttgggtggaaaagagtatttcagtcccagaaaaaagtatacaaaaatgtagaggcaccaagtaatatgaaacatttgggaaaatgcaagtcattggctctgcctatagcatacagggtgagttgggg

SEQ ID NO: 600789 - DNA, 560 bp, Homo sapiens
aacaaggaaagaaaagaaaatattggagtccagtgaacatgatatttttgtgaaacttctatgttagttgtgtttgtgcatttgtgtgtgtgtgtgagatggttactatacaaatatgtttatgtgggatatgtaaatatatcatggtkcaaaatatacttcttaatgtgcatttcaaaaagaaaggtcacgggaaaataaatgtcttgtgggtggttggaaacatttgatattttcaaattcttgccacttttgaatatgtacatccatataacaaaaaaatccaacctctgtgcccataaatgggatcatggagccagatagtaagcatctgactaatttagagagaaatttgttgcagtacctggagccatgtccttgattctgctttattgtgaatcccattccctgcccagagttgtccgcatggtatctcagctgggtggagaagcctggttcctgctgcttatggatgtttgggagtttactgtacatagtcataaagtatgcacacagtcagtgactttatacaagctcttccagttgtgaactcagcattt

SEQ ID NO: 600790 - DNA, 616 bp, Homo sapiens
ggatcagtaatgaactgtcagcttaggcctgtgcaaggcagctttatggcagctctgggactcagacctccggaggtgggtttcatatggttctggcccactttggtggcagggcaaatgctaagaccacacttagacacagtatcttcctgagagtggacctttgggaaccagtcacttcctcaggtagaaggacttttaaaaattttagaagtgtcattagctatgtctgaaccctaaaataaaatagaattacttatacaaaaagctattacctgtatttgtgaaatgcatcttacgtgcttggaataagttacacttgatatactgactaataaaaagaatttagggtcaattcaaaatggacaatttttggagcctaaaaccgatcatcttaccaatctatattgtaattgcttgtttatattcttttcttgcactatgccatgaagccctccagtggagacaaagtattcatgktttttttttttatcctctgtaactgtcaaatccagagattcaaaggagctttgacggggcgctaatgcaacaaaaagagtaacacaaaataaaaattggaagatagcttctgcttttaatggttccatgaaaatta

SEQ ID NO: 600791 - DNA, 574 bp, Homo sapiens
tgatagatcatggtggtttgaaccaaggcagtagtaatggagatggagataaatctgtagatttaggataagaattagagactgattggtagtaagacatgaaagaaaagaatggttcatacctttctgactttagcaacagtttgggtgatgataccactttaagataaggaaacacaggagaaagataataggttcaatgtgggagacgggggaagataacatgcattcagctttggacccactgaatttagagtgcttgtggggtatctgggtggttttcaggaaagtgtgggcttccttaactgtgggctcagagggggagatcagggctagggttggagagtcagcttcagaggatagataattaaagccacaagaatagctgaggtcacccagccagaaaagtttagaatggracaagcaaagggttgaggacagaacttagaggaatacctctacttaatgagtaggcagaggaaaaggagtctaagaaacaggatgtaaaagtggctaaaatgagttgggacaaaattatgaaggtgaaaggtaggaaagccaaggaatgagagtg

SEQ ID NO: 600792 - DNA, 544 bp, Homo sapiens
agccacgtgatccccactgcctaacaggaagtctcattgtcctcatgagatccttctccctgcccatggacatacccccatgtacaatatgcctgaaaagcataaggtcttacttaatccgatgagagctcagtcctgtgtccaaacaggtactcaataaattcactgctgctgttgcttctcttttccacactgtgtgtgctgtgagtgatcrtacagcatctcatgtatgacgcttgtctactaatgccaggatgcctttttggtccaggtcccaagacaagccacaacagaagactcagattcaacgttgggacagcagtttattttatttcatactctcatgctcagctaatggtccagccactgtgctaaggtggctgaaatgagagaactttctagcatcagttgtattggaacaacatcacactttgaactcttaggtccatcccttgagtttgagtcccaaaccttgactcatgcttttctctaggaaattgtgtttcaagatctttcattccctttcttgtcactggacctcaac

SEQ ID NO: 600793 - DNA, 485 bp, Homo sapiens
atgaacaacttcaggtaatataagagcaaacatttctgtggttgctatcacatgtcaagtattgacctaaggctttaaaattttgattcccccaacaacccagtgtgtgtttgcagagggctgctattattcccattttacagaagaagcaaacaggcacagaggggttaagagatttgctcttattccttcatctattaagtggaggaggtgagatttgaactggagcattctggccctggcccccatgctctcatcctctacagtacattgcctttgaagggaaattgccttcctctcttttctctggcagtgccctctgcctttgtgctattcacaccttctggtgaagtatccctttgagcttatctctcacaaattgggcctgatggtcttgatcattctctctsccccatgtctacattttttacacttgtctttttatttatgaatctggttctcagccattacaaaagaaaacacca

SEQ ID NO: 600794 - DNA, 593 bp, Homo sapiens
aattgattgtctaacatggaaaccatgctatgtgaattatttggcacagtgctaatattggctaatttagaatgtaataatcaacatggatcctttcaactgcacttacgaacttatccacagtaggtaagaatataggactccccacagggcagaaatcacctggttcctggaagatatrtagtccaagtttttaattatattcggctggagttctttttaattttatcttagtaaaaagaaatgaattttaatgtgacaaaaatgatgcttaagttgtaaaggaagcacattaaacggagtttataatacttcccactgcgatgagttttaacatttaaaatgagaaaaaggcaattctttacattcaaaatttgatcaatccagatgatagccagaataaaaattaattaccatcttgataggataagcttatctttcagatatatactacactcacctattcatacagactttgaagtctccagaataatttattttctggagtcctagaaaaacaagatgcaaacttcctgccccaagtcatagaaagagactcattacttccccatgtcttccccatagagccaata

SEQ ID NO: 600795 - DNA, 650 bp, Homo sapiens
catttcttcacctatcttaacatcacgtcagggtcctctcagtccccttttctctgttatgccttctggacctctgtggctagaaataaaccctctttcctgagttactttgattctgactgtccaatcattggtgaccacattctgggcaacttctgcaactaggtaccgttttttgtgtgtttagaaagttctcagcttttaggagtgacttatgtacattctttaatgtgaatggcacctatttcaaaccttttgtggratgtgttgattatatacagaaaattaaattctggtatagctaatacatacctgcacacgcatgcataaataggagcaataaaccagaggaacaaaaacacttccatgcaaatggcaggtggtgactcctccccttctgtcactgaagccacttggaagatttctgtgctctctctcctccctcttcctcctcttatttgcaggtctccattttgatgagtttttctgatctgacaaagtaaaatggggactgtgaactgagttgcattaatatagttctaattgaaagtagtccaagtttgctatttaatttattgtgtaatatttagttacaaaattttgtgttgatgaatgtgctttttttaaaaaaaattgtgagatgtaaacaa

SEQ ID NO: 600796 - DNA, 396 bp, Homo sapiens
tgtacgttgtctcaggggaggagaaaaacaagakggtttagacagaggctcaatttagctctggaatatgggggaaaaaagcctacaaaaatttgcatacaatctcccttattttgtaattgtgcactcattcagtgcattttatggagattaccttaatgggagtgagtgtttggggtcattgggactcctggagctttttcttagttggaggacaactttttattacggttttaatttttaaattttattttattattttttaaataaaattttaattttaatttattattttattaatctattaattttctaatttattaaggttttatttttttcttctttttagacttcaatattagcctgaaagcaattgagaagccaattccagaattc

SEQ ID NO: 600797 - DNA, 548 bp, Homo sapiens
taagtcaataagaagtcaaaatggagagtaattgctgaagggttaaatctctttttgagtatgataagggccttacatttataatggtcatctgcatttgtttctcctgtgtatctgctcaatggggaaaaaagataaccacgttagctgtttcttaagtttcctacataggataattacaaagaaccatatagtcatcgagaaagttatttttttagctaagccaatgccagtgtgtcctaatgaacaaaggctattattaaatcttaaattcaaatgtatgtaggtagttgagtaatatgtcacatatyattatgctttaatcttgaatgtgtatgtattttattcatgaatcagtggaaatatttaagttgtgtatggaaaggaataaaaagagaaacactatctgttttgttatatgcacattttgcttcttgagttttgggctttgcttcatccactctatggcctgatatctttattttcttgttcacagggtaggtttgcttaggagtggtgtgtgtgtctgtgtgtgtgtgtgtttgtac

SEQ ID NO: 600798 - DNA, 548 bp, Homo sapiens
taagtcaataagaagtcaaaatggagagtaattgctgaagggttaaatctctttttgagtatgataagggccttacatttataatggtcatctgcatttgtttctcctgtgtatctgctcaatggggaaaaaagataaccacgttagctgtttcttaagtttcctacataggataattacaaagaaccatatagtcatcgagaaagttatttttttagctaagccaatgccagtgtgtcctaatgaacaaaggctattattaaatcttaaattcaaatgtatgtaggtagttgagtaatatgtcacatatcattatgctttaatcttgaatgtgtatgtattttattcatgaatcagtggaaatatttaagttgtgtatggaaaggaataaaaagagaaacactatctgttttgttatatgcacattttgcttcttgagttttgggcttygcttcatccactctatggcctgatatctttattttcttgttcacagggtaggtttgcttaggagtggtgtgtgtgtctgtgtgtgtgtgtgtttgtac

SEQ ID NO: 600799 - DNA, 585 bp, Homo sapiens
aaaggttgaatatcttgtgtgtttgtgtggaggtatatgtatgtgtatgtgggaatgtatgtatataatttttatattatgtgtatgtattataaaatacataatatagttatatattagtttttataaaatttgcatgaatttccaagaaatctgaggtgtagttaaaaatgaaattagtggatgrcactttttggagtgataaatttagaaatgaaatgtaacatgaaagtctttttaaaagagttcagtaagtagtaaattcacaattccttttttactacttttttttgcagtattcaacaaactatcattgtttcattggctgaaaatatatgaatgaaagccaaagaactatgtaatgacactgggctattagttcttgcaaatcctataggctaacaccacttcaacagagtgggcagaaacgatcatctgatctgattacaatgtctatttatgtagcatttagtttcttttttgttttttttaaaggatttcataaatatattattcatgctaaaggaataacaatactccgaattttatagcacttgagacgatattgcagagaaatattacacc

SEQ ID NO: 600800 - DNA, 578 bp, Homo sapiens
ccaggtcgccagaagagtgttctggggaaagctgcccccacacaaggctgcaagcaccaagtcagagcctggacttcctgtgacttgaacacacagtatttctgctatcattgtacacactactcataattttgatacatgtatttaatatgtcaattagtgttctcatgttttactgcaaagaccaggtttacataatcagaaagcacaaaaargcaggatcatgttagtggtgtctaaaagattttatgaaacttccctctgcagcacaattggtatttcactttaagaagctaataaatattttagaatggcatttcatttgttttacaatgacatttggtattacaatgaaggagctggaaaaagaatataaaaaggttccctccactactcactggattccttatatttagagaccaaactgatttatagcgtacatgagtcaccgtaaatcattagcaatggcagtaggaccttaaccagtggtagaggtgaagtcccttgaatcctaaatacacaaatctacagttgacactaaacagctttcaaatttatttatatagcatattgtattg

SEQ ID NO: 600801 - DNA, 552 bp, Homo sapiens
aatactgaaataatctgtacaacaaacccccacgacacaagttaacctatgtaacaaacctgcacgtgtactcctgaatttaaaatagaaatttttaaaaaaacaaaacaactgatataatgcaattaaatagagtattccatatacagtagtatcagagaatataagaatgaatctaacaaaaaatatgcaagtagcctacatggcaaaataatataattttatgaatgagatatttttaaaagccttaatagagagatataaaccactagaattatagcataaaatgttgattctcatcaaattatttattacagtcaaagcaaatttaatcaaaattctagatattgattttatcctaatatataaacagacaaacacatacacatacacagtcatgtgcctaacaaygatgtttaggtcagttttgtactgcatttacaatagggtcccatgagataataatagagctgaaaaattcctatcacttagtgattgtgtagccattataacattgtagaacaactattctttttaaaataaatttaatgt

SEQ ID NO: 600802 - DNA, 585 bp, Homo sapiens
attgtaccttttctgtttagatacacaaatactatattagtccattctcacactgctataaagaactacctgagactgggtaacttataaagaaaaaagatttcatttactcacagttccacatggctggaagcatcaggaaacttaccatcatggtggaagacgaaggggaagtaaggtgtgtctcacatagcaataggagagaaagagaggaagtggggaagtatcatacttttaaaccatcagatcccatgagaactcattcgctgtcatgagaatagcatggggaaagtcctcccccatgatcctatcacgtcccaccaggtctctcccttgacacctggggattacaattccagatgagatttgtgtggagacacagagccaaaccatgtcaaatacatamcactgtgacacaattgcctaccagtactcagtacagtaacatgctgtacaggtgtatagcctggaagcaataagtgaaaccatatagcctaggtttgtagcaggctatgccatctaggtttgtgttaagggcactctaggatgttcacccaacaatgaaatcacctaaggacacactgc

SEQ ID NO: 600803 - DNA, 600 bp, Homo sapiens
ccactttttaattataatttttaatgagaagacatttttaattttgatgaagtcaaatataccaattgttaaatatattttcttttccttttttcacacccgaaagatataactmcatgatctaagtcttcccctacaagatttgagattcacattttaaatttggtctaaaattaatctgaaataattttagtgtatattgtaaaagtcatctctttcccatacagttttctagttattttaggaatattattgaaaatattcttatctccactggattcctttggcaactttgcaaaaagtaattggtcatactagtgagagtctgtttttggattctattctgttctattgatctatttgactagcctcactgtcttgaaattaagttctgtaattcttctttgttctttttcaagatcattttgtctctgctagctcttttgcattttcatattatcttagaatcagcttaacaatttctccttcaaaaacaaaagcctgctaaatatttgaatggaatcacattatatctgtagactaatttaagcagaatttacatcttaacattatacgaaggattctgactcataaacatgt

SEQ ID NO: 600804 - DNA, 600 bp, Homo sapiens
ccactttttaattataatttttaatgagaagacatttttaattttgatgaagtcaaatataccaattgttaaatatattttcttttccttttttcacacccgaaagatataactacatgatctaagtcttcccctacaagatttgagattcacattttaaatttggtctaaaattaatctgaaataattttagtgtatattgtaaaagtcatctctttcccatacagttttctagttattttaggaatattattgaaaatattcttatctccactggattcctttggcaactttgcaaaaagtaattggtcatactagtgagagtctgtttttggattctattctgttctattgatctatttgactagcctcactgtcttgaaattaagttctgtaattcttctttgttctttttcaagatcattttgtctctgctagctcttttgcattttcatattatcttagaatcagcttaacaatttctccttcaaaaacaaaagcctgctaaawatttgaatggaatcacattatatctgtagactaatttaagcagaatttacatcttaacattatacgaaggattctgactcataaacatgt

SEQ ID NO: 600805 - DNA, 599 bp, Homo sapiens
tatttcaatattttaggataaccaaacatgaaaacacagcatattcaaacttagacaatgtagacaagaaaaaaaggcttccaaatcagaaagtaagaagcaaaattgtccctgtttgcagacgacatgaatacaaaattttacaccaccaaaaaacaaaaacggttataactgataaacaaattcagtaaagttgcaggacasaaaatcaacatatagaaattggttaaatttctatacactaatattgaactatcaaagaaagaagaagaaaacaatctcttttacaatatcattaaaaagaataaaatactttggaataaattaaagtaaggtggtgaaagatctgtacactaaaacctacaaaatattgattaaaaaaatttaagacaaaaatgaagggaaaaacatctcatgttcatggattgtaagaatattgttgaaaatctccatactacccaaagcaatctacagattcaatgcaaatccctatagcattttctttttttttttttttttttttttttgagacagagttttgctcttgtcccccaggctgccaggctggagagcagtggcatgatctcagctcactacaa

SEQ ID NO: 600806 - DNA, 599 bp, Homo sapiens
tatttcaatattttaggataaccaaacatgaaaacacagcatattcaaacttagacaatgtagacaagaaaaaaaggcttccaaatcagaaagtaagaagcaaaattgtccctgtttgcagacgacatgaatacaaaattttacaccaccaaaaaacaaaaacggttataactgataaacaaattcagtaaagttgcaggacacaaaatcaacatatagaaattggttawatttctatacactaatattgaactatcaaagaaagaagaagaaaacaatctcttttacaatatcattaaaaagaataaaatactttggaataaattaaagtaaggtggtgaaagatctgtacactaaaacctacaaaatattgattaaaaaaatttaagacaaaaatgaagggaaaaacatctcatgttcatggattgtaagaatattgttgaaaatctccatactacccaaagcaatctacagattcaatgcaaatccctatagcattttctttttttttttttttttttttttttgagacagagttttgctcttgtcccccaggctgccaggctggagagcagtggcatgatctcagctcactacaa

SEQ ID NO: 600807 - DNA, 526 bp, Homo sapiens
agggaaaaacatctcatgttcatggattgtaagaatattgttgaaaatctccatactacccaaagcaatctacagattcaatgcaaatccctatagcattttctttttttttttttttttttttttttgagacagagttttgctcttgtcccccaggctgccaggctggagagcagtggcatgatctcagctcactacaacctccacctcccgggttcaaraaatcctcctgcctcaaccgcccgagtagctaggattacaggcgcctaccaccatgtccagctaatttttgtatttttcatagagacggggtttcaccatgttggccaggctggtctcgaactcctgacctcaggtgatctgcctgcctcggcctctcaaagtgctgggattataggtgtgagccaccatgcctggaccctatcataatttttatagaaatagaagaaaaatcctaaaatttatatggaaccacaaaagactacaaatatctaaagcaatctcgaacaagaagaaagctgaaatc

SEQ ID NO: 600808 - DNA, 603 bp, Homo sapiens
tatcagccaagaattttgtatccagcaaaactaagcttcataaatgaaggaaaaatagtctttttcagataaacaagtgttgagaaaattcaccactatcaaagccagcactatgagaactgctaaaaggagctctaaatcttgatacaaatccttgaaatacatcaaaatagaacctccttaaagcataaatctcaaaggacctatgaaataaaaatacaataaataaaaagaaaacaagggccaggcacagtggctcatgcctgtaatcctagcactttgggagcccagggcgggtggactgcctgagctcaggagttcacagtgaaaccccatctctactaaaatgcaaaaacttagccaggcatggcagygtgagcctgtaaggcaggagaattgctagaacctgggagacggaggttgcagtgagcagaggttgcactactgcactccagcctggacaacagagcaagactccgtctcttaaaaaagaaaaaaaaaaaaagaaagaaaacaaggtattcaggcaacaaatatcatgatgaatagaataggacctcacactgcaatactaacattgaatgtaagtggcctaaatgctcc

SEQ ID NO: 600809 - DNA, 624 bp, Homo sapiens
tgtgagtattggggtacagatatcactttgagrtcctgctttctgttctttcatgtatagagggttgctaggttatatggtaatcctttttttaaattttgaggaactaccatagtgttttctacagtgactatattgttttataatcctagcagcagtgcacaagggttccaattactctatattctcatcaaaacctgttattttctgggttgtttttgtttgtttgttttttgttttggatcatagccattttaatgggtgtgaggctttatctaattgtagttttgatttgcattttcccaatgattagtgatgttgagaatcttttcacatgcttattggccatttgtatatctttggagaaatgtctttttaagtccttttcccatttttcaatcaggttgcttttggttgagttataaaaattctctatactaaatattaatcccttattagatatatgatttccaaatattctctcccattctgtggggttgcttttttactctgttgatagtgtcttttgagtcacaaaattttaaactttcaggaactccaatttgtctgtttttctcttttgttgtctgtacctttggtattatgtacaagaaatcattgcca

SEQ ID NO: 600810 - DNA, 468 bp, Homo sapiens
gttctgaactgactacaacaacctcctcaaggaggaggcatggaaaaaggaaatcagtgtggttaaacttcagaaacctccctgtcttactttacccaaagaacttcacaggtgccagtcaaagcatttagcaattggttcccataggtactccccggtcagaatgaatacctcctctatataatggtgtgagcccatgggtgcttatcgactatcatcagccttacgttaacccacttgcattgattttgtgtactgggcgygaggttccaagtaaagttagtaaaaactgttcactgataaaaagaaaaagttttagaactatgtatatataagatgaaaggtgtccattttgacctgccacaaatgagctgttcagtacccagtgagaagttaataaatggcacatagtatataatgaatttcttccatttattgataaaacctcagcagcagaaggcactttaa

SEQ ID NO: 600811 - DNA, 415 bp, Homo sapiens
ttttcacatgaaactctacaaaacagtggtacaatctttccagtcctttytgaaatcctatactcaaccatggtatcagtcctctgagaagaccaaagatagcactagtttaacttgtagtgaattatataatatcccacacacttagcattactttaagaaaaaaaaaaaaaactaagtaaatataacactacttacatacatacgtaatgcaatttcagcaagaatcttcatgcaaatggaaacaagaagacaaaaacactttttttttttttttttttgagatggaatctcactctgtaccaggctggagtgcaatggagctatcttggctcactgcaacctcctcccgggttcacaccactctcctgcctcagcctccctagtagctgggactacaggcacacagcaccac

SEQ ID NO: 600812 - DNA, 415 bp, Homo sapiens
ttttcacatgaaactctacaaaacagtggtacaatctttccagtcctttctgaaatcctatactcaaccatggtatcagtcctctgagaagaccaaagatagcactagtttaacttgtagtgaattatataatatcccacacacttagcattactttaagaaaaaaaaaaaaaactaagtaaatataacactacttacatacatacgtaatgcaatttcagcaagaatcttcatgcaaatggaaacaagaagayaaaaacactttttttttttttttttttgagatggaatctcactctgtaccaggctggagtgcaatggagctatcttggctcactgcaacctcctcccgggttcacaccactctcctgcctcagcctccctagtagctgggactacaggcacacagcaccac

SEQ ID NO: 600813 - DNA, 566 bp, Homo sapiens
caggagcctggatatttgtatttgcctcactttatattacacctgggggattaattaccaagtacaagcctataaagaatctggaagaatataaaacgctttggtgcaggtttagtagaaaggaagtttgaatcagcttccagtcattaaaatggtgtggttagaaatcacactctatatgagactgtaagtggcctgaagatgaggtttctttattttcttgtgcagggatcacaaatatcttgttctggttcaatttrcaggtataaggaatgtataattaaatccttcaaattaggatgcatgtgtatgtgtaaatgtatcaccttaaacacaattcatgacctaatttttagtgtccggaagcatgaacttgtagtctcagtgcaagcatgagctaatagcaaactactgggaggcaggtatgtcaaggacttgatgaagagtcactgagggcacctggcacattcttcccaggggtcatcaaagataaagtagactgtcattcatgcagaaagatgaaaagaaaacaaatatctcctgaatgtattttccaaccctgtgtt

SEQ ID NO: 600814 - DNA, 423 bp, Homo sapiens
taggttcttatgctccatagggcactgacagctgaggtccctttgtggtactcagttggcacagaggctagtcccgagcatcccaggaaccttcactcacatgtgtggaccttggacaggatagttaggagtctgagatcaactgggatggtcaatcaaaggacctacaggtggtctctccagcatggcagtgtcagaatatttgtccttatatggctcaggattccaaaaaactgtcccaaaaaatagcaggtagaagaattatcttggttttattagtactgtaggagcttaatactccaggattaatactatacttactactgtcagtgagtttctaatacaaaaamaaaaatttagtatgcatttgctaacttacagaatgtgtatttttaataataaaatgggcatatttgttgccat

SEQ ID NO: 600815 - DNA, 372 bp, Homo sapiens
aatgaacactcaggtaactgtcttggtgttggttttaatatgccagccaagcacaataatctaattttcaaatctacaaaatgttttattatttaatgagaatcacatatttgttaaatgttaaaataatgacctttaaaaggcatatttccaatatcaccagtatgcacaacttttttaacatcattggtacatgaggttactataagactcaaaggatgtaaattataaattatacatatccatggactatatctaataaagaaaagcaaatagatataaaatgtataaattgcataaaasttgcagtaatacatgtatttaaataaatggaaataagcaatctgttggaataagcttatgatgggcatg

SEQ ID NO: 600816 - DNA, 527 bp, Homo sapiens
attttgagcaaatttgaaatataaataattatcatactagggcaattgctattttcaagaagttagggagtatcacctggtaacaaacaaataatgcttaagacaaaaccattgttattaattcacttgtgactcaatattgatgtagcttaagctgctaggtatattttttattgtttacaccacacttgatttcaaaatactgaaacagtcttgtatatatttaaagtagtgtgatttaattttttaaatgtaaacactaattcaaactagtccctatccagtagtcaaaaacacttattttatactaattacaagctaaatccttaactgacaaaatatagaaatgtattgtaagtcttwtttataagtaagttcattcttccaacaattatttatctggcacttattatatggcaagctgttccatatattaaagataaaataaaaacaatagttctcatcctcataaagattatggtctaataggaaaacagaaaattgagaaatagaattataaaaaaaga

SEQ ID NO: 600817 - DNA, 528 bp, Homo sapiens
tatcatcatatgctcattggctttgaatacttgcctgaaagattggcatttgggataaataaaccctggaaaccaaaggcttggtttattagcctctatccagagacctcaaattaataacaataggaaggagctgctaatgttaagaggatttctccccagtgacttcctcagaagtgagcttcgaaagcattgacaggaacaatcttcctagggagtagaattaagaaactcagagtaggtggcagtcattatttatagctttctcctttctgctaagtcagttactagttttatatacactttctgcctttttatttattttattattattttttgatatggagtcttgcactgttacccaggctggagtgcagtggtgtgatctcggctcactgcaacctytgcctcctgggttcaggtgattctcctgcctcagcctcctgagtagctgggatcacaggcacctgccaccatgcccagctaatttttgtatttttagtagagacagggtctcaccatgttggc

SEQ ID NO: 600818 - DNA, 580 bp, Homo sapiens
ctctaagattataaattccacaaagaatcaacaatatctttacagcttcataggctaaatgtaatactttataataaattatgatagaaaataaagagaaagcctatattgggatttttcatgtctaggtgtcttcgttcatgttgctgtaacaaaatacccaagactgggataatttataaagaacagaaatttatttctcacagttccggaggctgaaagttcaagattaaggcaccagcaggttcagcatctggtgagggctagtctctgcttccaacaggtgtgccttgttgctgcatcctcacatggcggaaggcagaagggcaaaagggacagaaggggcctagctggttccctttagccctttkataagaacactaagcctattctaaaggtagacaagaccgattaatcacgtcctaagggccctgttgcagaaccccaaattcaggctcctgtacctcatgcgcagctgaaatcaaaccaaacttggaatcaaactccaatcaaaacttggagatgcttagtgatagagaaaaatgtattcgattcggcccaagtgaggaggcaagagggc

SEQ ID NO: 600819 - DNA, 580 bp, Homo sapiens
ctctaagattataaattccacaaagaatcaacaatatctttacagcttcataggctaaatgtaatactttataataaattatgatagaaaataaagagaaagcctatattgggatttttcatgtctaggtgtcttcgttcatgttgctgtaacaaaatacccaagactgggataatttataaagaacagaaatttatttctcacagttccggaggctgaaagttcaagattaaggcaccagcaggttcagcatctggtgagggctagtctctgcttccaacaggtgtgccttgttgctgcatcctcacatggcggaaggcagaagggcaaaagggacagaaggggcctagctggttccctttagcccttttataagaacactaagcctattctaaaggtagacaagaccgattaatcacstcctaagggccctgttgcagaaccccaaattcaggctcctgtacctcatgcgcagctgaaatcaaaccaaacttggaatcaaactccaatcaaaacttggagatgcttagtgatagagaaaaatgtattcgattcggcccaagtgaggaggcaagagggc

SEQ ID NO: 600820 - DNA, 564 bp, Homo sapiens
tggacacattgggggaacaacacacactgggacctgtgtgtggagggggcrgtgaaggaaggagggagagcatcaggaagaatagctaatggatgctgggcttaatacctagtgatgggacgatctgtgcggcaaaccaccatgacacatgtttacctgtgtaacaaacctgcacatcctgcagaggtactactgaacttaaaataaaagttgaagactttttaaaaaatctagaaaattcccctgggctccccttaaatcagccaacatttcttcagaggcaatcagtacttagatttttatcatcctatattagttttgcatatttttgagcttcatctaaataagaatcaattagtattcctttatgtttaccttcttttggccaacataatattcttaagattggctcatgttgctatgtgttcagaagtttattcttttttgttatgtgttatttcactgtatatatatactatatgtaaataagccaaagtcattcattctcctttgattaacattcgggttgtttccagtttttgactgttacagttgctatgagta

SEQ ID NO: 600821 - DNA, 585 bp, Homo sapiens
tatgggcatttatcactagaaacttctcttttagaactgcttttgctacattccgtaagttttactatgttgtgtttttattttcatttttctcaagatattttttatttcacttttgatttctttattgacttattggttgtttagaagcatattgtttaatttccatatatttgtggattatgtaactttccttctgttattggtttcttgtttcatataattataattggaaaacacttgatattatttcagtcttaaacttgttatgacttattttgttgtctaacacatctattctggataatattctgagtgtgcttgtaaagaatgtgtattctgctgatgttgtgtatacataacaataaggattgttacatatatgtctgttaagtccatttgttgtatagtgttgttcaagtctgctgtttcctgatwgattttctacccattattaaaagtgggctattgaagtcctctatcactattattatgttgctgtctatctctccctttagttctgttaatatttgctttatatatttctgtgttccaatgtagggtgcatatatatttacaattatt

SEQ ID NO: 600822 - DNA, 536 bp, Homo sapiens
aatgtgtcttttatgtaatttttaatgaaacttggtcttaccttccctaaatcagccaattttctttcctgatattgaagtatttgagcaggaarttaactatgttaattcgtgttaatttcgcaatgttatagttgtaggtgaacgtaaactaggactagaagaggtaagaaatcatgatggattttcccaccccaccccagaaaacactcttgctgcatctaagttattatggaccttcagactcagcatctttctcccctagattgtgtcatagtcaacatatctatttccatgcctagatgacgttttatctcccatgcgctacccacaagtcctttggtgctgttagtgtcagaaactaattaaaccacatgatagtatcagctctcccatttttagcaacccgagagtcttagcacaaaaaaacttcatttgactcagtagatatgttctagaaaatagattttttaaaaaaagaatttttgaaatctaattatactttgagaacagtaagagagtttactatttagaga

SEQ ID NO: 600823 - DNA, 550 bp, Homo sapiens
tagtcaacatatctatttccatgcctagatgacgttttatctcccatgcgctacccacaagtcctttggtgctgttagtgtcagaaactaattaaaccacatgatagtatcagctctcccatttttagcaacccgagagtcttagcacaaaaaaacttcatttgactcagtagatatgttctagaaaatagattttttaaaaaaaraatttttgaaatctaattatactttgagaacagtaagagagtttactatttagagaaatctgagaatgaattacttcacagacaaaaagcaaagaacctttactagggactgaaagttagtgtccccccaaaatttatatgtagaatccttaatccccaatgcgatggtatttagaggtggggcctttgggagataattaggattatattaggtcactagagtaaggccctcataatgtgattactgcccttaagaggaaaaaacatgagctctgtctctgcaacatgaggatacatgaagaaggcagctgtgtgcaaaccaggaagagaaccgtcaccagata

SEQ ID NO: 600824 - DNA, 550 bp, Homo sapiens
tagtcaacatatctatttccatgcctagatgacgttttatctcccatgcgctacccacaagtcctttggtgctgttagtgtcagaaactaattaaaccacatgatagtatcagctctcccatttttagcaacccgagagtcttagcacaaaaaaacttcatttgactcagtagatatgttctagaaaatagattttttaaaaaaagaatttttgaaatctaattatactttgagaacagtaagagagtttactatttagagaaatctgagaatgaattacttcacagacaaaaagcaaagaacctttactagggactgaaagttagtgtccccccaaaatttatatgtagaatccttaatccccaatgcgatggtatttaraggtggggcctttgggagataattaggattatattaggtcactagagtaaggccctcataatgtgattactgcccttaagaggaaaaaacatgagctctgtctctgcaacatgaggatacatgaagaaggcagctgtgtgcaaaccaggaagagaaccgtcaccagata

SEQ ID NO: 600825 - DNA, 570 bp, Homo sapiens
ttaaatatgactcctgtaagaattaaaaaaagaggaataaaatattctgcaatgtttatttaatgaaagactgagaccaacttcacacaaagactaagtaacaaaacaaactattaaacagaaataattttcttcatcacattaatctaagcttttcatcatgaagctgatatattgaaataaagaaaaagtccaaaaagaaaaaaataccaaaataaagakatttcattttctgttactcaaaatagggtgagatttttacttcacctttaatctctaccttttgtaaacacatttctacctgtgccgaaaggaaaatgtagttctacatatattccacttcttacataatttttttcattgcagtcacagcatgactacatggtccttatacatgagaccttgtacatacaatactgagctactggttgatatgatttgactgtatccccacccaaatctcatcttgaattgtagctcccataatttccacatgttgtgggatggacctggtgggagataattgaatcatggggggtggtttcccccatactgttcttgtggtagtga

SEQ ID NO: 600826 - DNA, 479 bp, Homo sapiens
tggctttttcctgtacaaagaattatttttgatattttatgaaatattttgggccaatcartaaacctttaatgagaaaccactatatgcttgactgtccaaaatgtgctgcggatacaaaggtgaccaaaacgtaagatttgccctgtaggaactgggtctaatggtagaaataggtacataaataggataccctcaaactttattattagaactgcaaccatttttaaaaagaaagaagctgttattaacaattacaccaggataataggcataaactataacagtcccaacttcatcctatacatccttatgtataagcagattattgtattatacaataatgagcacttggattaatgtgaatgagagatcataggtgagcaaaggtgggccacctaactgacccctgaagaggatgtcaacagaaggcttcttggaagagtcttaaatccattccccaaagacctcacttgtct

SEQ ID NO: 600827 - DNA, 479 bp, Homo sapiens
tggctttttcctgtacaaagaattatttttgatattttatgaaatattttgggccaatcagtaaacctttaatgagaaaccactatatgcttgactgtccaaaatgtgctgcggatacaaagrtgaccaaaacgtaagatttgccctgtaggaactgggtctaatggtagaaataggtacataaataggataccctcaaactttattattagaactgcaaccatttttaaaaagaaagaagctgttattaacaattacaccaggataataggcataaactataacagtcccaacttcatcctatacatccttatgtataagcagattattgtattatacaataatgagcacttggattaatgtgaatgagagatcataggtgagcaaaggtgggccacctaactgacccctgaagaggatgtcaacagaaggcttcttggaagagtcttaaatccattccccaaagacctcacttgtct

SEQ ID NO: 600828 - DNA, 552 bp, Homo sapiens
gggatgggcagattacttctggtatacctgttagatctgagacaaaaaaagataggtttagagatttaaatgcctagtagaagccatggctacaggacaagagagtttctatgactgtcacacactgattatcttacctctcatatccacagtctggacctctggatttctggtttacaatgtgtgctgaatgcatggcttcaccaggcttctgaaacggcctagaagcaatgattgacccagcagcaatgagcaacctagtgtctagattatggtctctaaatgccattttccagtataatgaacctaggttctttggattccagtttggggacataaaatatgtaagatgagctggaaacgtgtttcatactaaacaacagggaagctataaaaggctactggagtcatatcaaaaggacactgraaattaaaggggctctcaggctgggtgcagttgttcacacctgtaatcccaatactctgggaggcagaggcaggaaaattgcttgaggtcagaagtttgagaccagcctgggaaacatggtgaga

SEQ ID NO: 600829 - DNA, 451 bp, Homo sapiens
cctgctattttttttctttataatgtaccaaagagggtgaaaagtcttaggaggaatgcctatttataatgtccctttcccatgaacttcccattcattttttccccagaggggatactattaagtttttaccctgttattattggtaataatatgtacatttgcatatgtaataattggttttgaatatrtttcttggggataataaaattagtaaatcttctttgaaaaatggcaacatctagcactctggccttatccaaacatgtcagtgtgtttatccctaatttctagtttctagctctaagtaaatttgcctaatcttaagtaggaggattaatcagacctgtgctcagttactacacaaatatgtgctatgtagcttttccaggctaatttttacttttttccatatagcttttgtagagaccttgctttcaaaaaagtgctc

SEQ ID NO: 600830 - DNA, 599 bp, Homo sapiens
atttatgtgatcctctgagtttcaataacatgattttcaaaaacaaatgtggcaatacaatatgcagactggcaaaagtttttttgacttatgaacttagtaataggtaaaatcatatatgagttaaaatgtaaatcacatttagttatgcaaatttaatgaactgctcactaaaatcatagctgacattaaacctccaggatatatgatgtattagtatattttcacactgctataaagaaatgcccaagactgggtaatttataaagaaaagagatctaattgactcacagttcagcatggctggggaggtctcaggaaacttacaatcatggtggaaggtgaaggggaagcaaggcacatcttacatggtggcaggcgagaaagagcctgtgaaggaggaactgtcaaacacttataaaaccatcagatatcatgagaactcactatcatgagaacaccatgggggaaaccacccccatgattcaattacctccacctggtctctcycttgacatgtgtagattatggggatgacaattcaagatgagatttgggtggggacacaaagactaaccttatcacatggtgcccatagt

SEQ ID NO: 600831 - DNA, 448 bp, Homo sapiens
cattaggcattactactattactttacattaatattattttcttaggatggcatatgaaagatctgtcttaactgtgactttgggggaaatctaatcacaccactcccataggtgtggattacagaactttgggagagatagacacagtgctgtccttggttctgaaaccaccayactaggacatgattgctttgaaacctcaggatactggtgaatgctggtccaacctcttccaagaattttgaagcaggcaagggcaaaagtggaggaaattatggaggaggaggagaaggaggaggaggaagagagagagaagcataattcctaagaacttgctaggaaaggggtgggaagaaacctgcttgacattgttttcaaagtgcattggttgctgtcatcaagcaagaaacaacccccttgtatttggcagagaattgtaggtgtgtg

SEQ ID NO: 600832 - DNA, 448 bp, Homo sapiens
cattaggcattactactattactttacattaatattattttcttaggatggcatatgaaagatctgtcttaactgtgactttgggggaaatctaatcacaccactcccataggtgtggattacagaactttgggagagatagacacagtgctgtccttggttctgaaaccaccatactaggacatgattgctttgaaacctcaggatactggtgaatgctggtccaacctcttccaagaattttgaagcaggcaagggcaaaagtggaggaaawtatggaggaggaggagaaggaggaggaggaagagagagagaagcataattcctaagaacttgctaggaaaggggtgggaagaaacctgcttgacattgttttcaaagtgcattggttgctgtcatcaagcaagaaacaacccccttgtatttggcagagaattgtaggtgtgtg

SEQ ID NO: 600833 - DNA, 632 bp, Homo sapiens
ttattggtctggcaataattgagatttccagatttggcaagacctaccatacacagtgtcaccagcagttctcaaacttgatgatttactaccttgctggccttgaataagcatgttctagataagatcaactcatcctggcttctctgttgaggaacaaggattctgcttccgtaatcactttaagatggatactcaactctccaatatcttcaaataatacttcacttaccaaagaatagagctaggaaagcaacttgaatatctctgctgagttaattaataatgaaactattgtcaacatatgggagcagtattagtcagtgtactgggtggggagagatctgaactctcagtttggtccatgctattccatttctcttaccagttcatttttgaactgctgcattttgaagagtggtgaatatgtggtcattttccctttctctcaggaaaatcactaaggactaatgttattctgttagaaggcttcaacacactccgtgctataataatttgatrtggaacctcagaagtgcacaagtggagatttggctacactttcagatagagaatttctattacccaaggcaatctttagaattaaatgccctatagtcaccaatttatat

SEQ ID NO: 600834 - DNA, 632 bp, Homo sapiens
ttattggtctggcaataattgagatttccagatttggcaagacctaccatacacagtgtcaccagcagttctcaaacttgatgatttactrccttgctggccttgaataagcatgttctagataagatcaactcatcctggcttctctgttgaggaacaaggattctgcttccgtaatcactttaagatggatactcaactctccaatatcttcaaataatacttcacttaccaaagaatagagctaggaaagcaacttgaatatctctgctgagttaattaataatgaaactattgtcaacatatgggagcagtattagtcagtgtactgggtggggagagatctgaactctcagtttggtccatgctattccatttctcttaccagttcatttttgaactgctgcattttgaagagtggtgaatatgtggtcattttccctttctctcaggaaaatcactaaggactaatgttattctgttagaaggcttcaacacactccgtgctataataatttgatgtggaacctcagaagtgcacaagtggagatttggctacactttcagatagagaatttctattacccaaggcaatctttagaattaaatgccctatagtcaccaatttatat

SEQ ID NO: 600835 - DNA, 551 bp, Homo sapiens
ccaaataattttccaggatttttgctttttttcccccatcaggaacacaaaaacttcttatatttgaccattttacataatcccatatttcttggagactttgttcatttcttttagttatttttactttatgtttgtgtgactgggctaatttgaaagacctgtctttgagctctgaaattctttcttctacttggtctagtcagtctactgttaaaacctcccgctgaattttgtaattacctastatgtccttcatttccagaaattctgattggtttttctttcaaatatctgtctctttagaaaatgtttcattcatatcctgaaatgcttttaaaatttcttaatgttggtttttacctttctcttgtatctccctgaattctgtatctattatttcaaatatttcatttttgtttagatccattgctggagaggtaatgtgatcttttgggggtgttatagaaccctgtttttttcttatttgactattttttaaccctccccctgcccactttctaggatgtgactttaatgtttatagttta

SEQ ID NO: 600836 - DNA, 538 bp, Homo sapiens
caagctttgggtcagtaggggagatgtttatggataaaactcagctgtggttaaagcaggttggtaaaagcaatacccaataatgggcagagggcccagccttgacagagccagctgggggacatcttagggaaatgcactgagatcttttgaaggggaagacagagagccacctcagctcccctcttaggccagcaggaaagcaatacacctcccagtcacactcctgacccagtgttccagctgttcagatcagacaggcacctcttttcatcagcaggaatgctcatgttcaatgtagagagggattgtgactccaaccctcatgcaagcctgaacctagagggcacttttgcctgtgggaatgcagtcaccmtgaagtggtccagaaagactgtctgtaggtacacccctactgatctcttgtgggagaagccccagctgtgtctgacagtggtggacacacagaagtctccttcttcaaggcctttcataagcaccagaattgcctgatggttggagtggagctgcagaccag

SEQ ID NO: 600837 - DNA, 400 bp, Homo sapiens
ctttaaatatattaaaacaataggaatactatatgtataaagtaaaattaaatcacttcgtaataggaaagctctagataccaaaatttatgcttatagtaggcgaggtctagctaactctttaagatacctcaggacctgtttattttcactcttctctcaagttagcagactttagtggtaaggtttgaatttctgccaaggggtttacaagrtcacataaaagatgtaaaaagtacctcaatacttataacatatcactgactttaagtttcctgtgcttttatttcagtcattccatctttaacaacattggcttcttgcatttctctatttctaattctaggagcactcattatttataatcaaaggaaaaaagaggaatactccttatgctacc

SEQ ID NO: 600838 - DNA, 529 bp, Homo sapiens
aaccatgggctgtgtccctattctgtgtgaggttgaagttgagccaatttcacatgattgaaaggtcattatgtagtagctccttttctattaactagcatattccttaatcattttctataggttgttggattktttaagttgtaggagttttgcatatattatatattaccacataggtagtagtatacatttgaaatatatttttctaattcattgtattttgattttgtgtatgtatattgctttcacggaaggttttttttttttggttatatgcttaaacttatcaatcttttcatttatggctacttttattttgggccttgtttagaaagctctccttgattccaaaatttttgttcagtatatattctccaatattcttatgtaagtggaggaaaaaggagaactctttttatttttttaacaatacaaatccaattagtttgtggagaagaaatgatagaaataaattattgttaggcaaacaagatactaataattttaggcaagaatcactgttggg

SEQ ID NO: 600839 - DNA, 528 bp, Homo sapiens
agcccggggaagatattaggtacatttcgtctatactgcagtttaagtctgagtttcttttttgattttctgtctggaacatctgtccaatgccaaaagtggaggttaaattctccagctatgatgtattcaggactatctttctctttagctctagtaatattgttttatatatctgggtgctccagtattaggtgcatatgtatttacaattatatcgtcttgctgaattgacttctttatcattacataatgaccttccttgtctcttctttcaggttgtatttaaatctattttgtctgatataagtataaytatccttgctctttttttggttttcattggcatagcatatctttttccatccctttattttcagtctatccacggatctttataggtgaagtgtgtttcttatagacaacagatcattgggtcttgtttcctatccattctgccactctatgtcttttgattggagagttttgttcatttacattcaatattattattgataagtaaggact

SEQ ID NO: 600840 - DNA, 637 bp, Homo sapiens
ggcctttttatatttaaatttccaaatctctgttctagataaaagattttaggtgcttttatccaaaggaacaaatgaaactgatacratcatgtcaaaggtatggatgatagtgttttccaagatgtaccaaaaccaaagtgtgatgatgctaaaaaaaaatgtgcactgtatactcaatgcctggggcaatggctaacatacattaggattcaaaatgtgttttctggtttaaatgaatgagcatgttctaatctctgataagtttgtcaagagacagtccctccaggatatggccaatgaactttgcacttgcttcgatcagcatctctgaaccattctgtctttgacttcctaatgattggttaccttggggaaagtaaggctgagcaacaatgatacaccagggaataaagtgaaggttctgcatctgttttaatccagatatgttttgtatggtatagaaaagtatgaacagtttatgagtaatctcttagtatgtccattgtctcttacataatcccaaaacatcattctctgaagtagatatttattattcccattttcagatgagaagattgaggctcagagatactttgaaactcgtccaggtcaaatccaaagtttctggagccag

SEQ ID NO: 600841 - DNA, 637 bp, Homo sapiens
ggcctttttatatttaaatttccaaatctctgttctagataaaagattttaggtgcttttatccaaaggaacaaatgaaactgatacgatcatgtcaaaggtatggatgatagtgttttccaagatgtaccaaaaccaaagtgtgatgatgctaaaaaaaaatgtgcactgtatactcaatgcctggggcaatggctaacayacattaggattcaaaatgtgttttctggtttaaatgaatgagcatgttctaatctctgataagtttgtcaagagacagtccctccaggatatggccaatgaactttgcacttgcttcgatcagcatctctgaaccattctgtctttgacttcctaatgattggttaccttggggaaagtaaggctgagcaacaatgatacaccagggaataaagtgaaggttctgcatctgttttaatccagatatgttttgtatggtatagaaaagtatgaacagtttatgagtaatctcttagtatgtccattgtctcttacataatcccaaaacatcattctctgaagtagatatttattattcccattttcagatgagaagattgaggctcagagatactttgaaactcgtccaggtcaaatccaaagtttctggagccag

SEQ ID NO: 600842 - DNA, 646 bp, Homo sapiens
caatttcattcttctgcttctggatattcaatttccccaatatcatttattgaaaagactgtccttttctagttgtgtgttcttggtaccttttcaaagtttaattgactgtaaatatgtggatttagttctgagctctcgattctattcctttcatctatgttctgctttcatgccagttctattttgtattggttactgtagcttcgtcatgtatcttcaaagaaggtagtgtgataccttcagcttagtgcattttgctgaagattcctttggttattcatggtcttctatggtttatttattagtatttgagcatttatattaacggaaagaaaaacagcacacacacagcacaaccagaactcaggaggctgcttattaatagaatctaccatatctttaagaataaggttttccttgtgtgcatctctgtgaatttaaacctattttaatagctaaaaatggacagttggataacatattcttcatactttttatatttttaaaagttaataaatcacctatttattcttttactcagatttggataattccaaattttttgattaatgtttaaactttaattatttyggtttctcatctctgttcactgttctaaatttctctgcacattttaagcatg

SEQ ID NO: 600843 - DNA, 509 bp, Homo sapiens
aggttcaaggagtaggaaatatatgtccagcatataatggatactttgtaaacattgaatggtaggatacttttcaggttaaattatgtacaktgttagaaaatatttgcaatacttaatcagaatatagaaagatcaggaaataattcagcacatttagaatctttatttcaaatgagaacagcaggccatgacagaatatagaccttcatgattctacagacgataaaattctgtacttggattgttttttcaggaaaaaaaaatatatatacttttaagccctctatgactcagaattttaaaagtgggaatctattaagtctcattctactttagtctctcattataatggaaaactggattaaataacagaatactttcaactacttagtgataaatactgtgcaataggttgtttttattctttcagatcattccctggagacaccagtaacctaactacttgagaattagcatagagatgtgatgttaaaactttgaaaatc

SEQ ID NO: 600844 - DNA, 585 bp, Homo sapiens
tggattgttttttcaggaaaaaaaaatatatatacttttaagccctctatgactcagaattttaaaagtgggaatctattaagtctcattctactttagtctctcattataatggaaaactggattaaataacagaatactttcaactacttagtgataaatactgtgcaataggttgtttttattctttcagatcattccctggagacaccagtaacctaactacttgagaattagcatagagatgtgatgttaaaactttgaaaatcaaattcctatcacgaaatattggggataatagacagatactgagtaagaacaggtaaatactgcttaattctaccygtaattctgtttaaattttcaagtgctgggagatttggagtcttggagacatgattcatttttaaaagtcaggtatgaatatattcaattattagggatggagtcttgaatagaacagaatgtaagcaacatctaggcactgagtttgagatgtacaagaaaagaacagctatcatattcacttcaaagcaagtgttttactgtcataatagattatacaactttttcaaccacaaactt

SEQ ID NO: 600845 - DNA, 606 bp, Homo sapiens
agtgaaaacaatagtctgccagaaaagaaggtctgtaaatgtggtccttggttcagtggcatcagcatcaccaggaaacatcttagaaattaaaagtttggggccctactccaaatctattgcatcagaaacagagaaatctttgaacaagttttccaggtaattctaatgcaagctcaattttgagaaccactacattataagattgcaatcatagttgccaggcacagtgactcacgcctgtaatcctggcactttggaaggcggaggtgggtggatcatttggtcaggagttcaagaccagcccggccaacatggtgaaatggtgaaaccccgtgtctactaaaaatacaaaaattaaccaggtgtggtggtgcatgcttctaatctcagctatttggaggccaaggtttgaggattgcttgaacccgggatgtggatgttgcagtgagctgagatcgcaccactgcactccagcctgggcaacagagtgaaactgtttcaaaaaaaaaaaaaaaaattwaattaattaattaattaaatttaatttaattaaaagaatgcaattatagtatagtagctgatagatgatagatagacagacag

SEQ ID NO: 600846 - DNA, 606 bp, Homo sapiens
agtgaaaacaatagtctgccagaaaagaaggtctgtaaatgtggtccttggttcagtggcatcagcatcaccaggaaacatcttagaaattaaaagtttggggccctactccaaatctattgcatcagaaacagagaaatctttgaacaagttttccaggtaattctaatgcaagctcaattttgagaaccactacattataagattgcaatcatagttgccaggcacagtgactcacgcctgtaatcctggcactttggaaggcggaggtgggtggatcatttggtcaggagttcaagaccagcccggccaacatggtgaaatggtgaaaccccgtgtctactaaaaatacaaaaattaaccaggtgtggtggtgcatgcttctaatctcagctatttggaggccaaggtttgaggattgcttgaacccgggatgtggatgttgcagtgagctgagatcgcaccactgcactccagcctgggcaacagagtgaaactgtttcaaaaaaaaaaaaaaaaatttaattaattaattaattaaattwaatttaattaaaagaatgcaattatagtatagtagctgatagatgatagatagacagacag

SEQ ID NO: 600847 - DNA, 554 bp, Homo sapiens
atagtggcagggtaagactgatagcattctggatgaaacagggatgtgtaggccatgagaaaccataaccttatctcactagtctctttctccttcacaaggttgacatttaatccatactggctaagaattgaggaaatcactttatattgaatttcttattggatatctaaatttttatcaagatcaatggcagtagttgcaatttgttgttgatatactcacatttctttgccttatgagatctatttcaaatatatgtcctttaaatttgtatatttacctaattgaaacaaagcatgcatataattatatgtctacagattccaattttataatgtggacagagcgagtaagggcakcaattttatgtgaaattgtttgtacattttgtaataatctccgcatgttctaaaacacagaaacaaacactaaccaaagaaacagtacactgaacgagaaatgcacttctgtttaatgcattctattatctttgattaaaacattccttccttatgatgtgggtaattaagtatttattcaaaaaaataaag

SEQ ID NO: 600848 - DNA, 542 bp, Homo sapiens
aaacatcatatgttctcacttacaagttggagctaagctatgaggacacaaaggcataaaaatgacatgttgaactttggggacttaggggaaggttgggagtgggggtgagggataaaagactaaccctgcttgggttacgggtgtaccaaaatcccaaaaattgctactaaagaacttatccatgtaaccaaacaccacctgttcccctaaaaacctattgaaaaaaaatgtatgaaattaccrcaaacagagggaatgaaagtagagagatctggaaagacttgctgtgtcattgaaggggaagatggagtagcccacgtttggacattaaataatacggacttcagggtgattctctataagaacatggtatcatctgctttctaactttgcccagggttttaatcagttccgttgcgagaagccaaacacacacaggatgttatcagtaggaaagagatatcattgaaataaaacacagatatgtatgtaggctctataaggactgtatctatctggtcattatttcactttgttgg

SEQ ID NO: 600849 - DNA, 542 bp, Homo sapiens
aaacatcatatgttctcacttacaagttggagctaagctatgaggacacaaaggcataaaaatgacatgttgaactttggggacttaggggaaggttgggagtgggggtgagggataaaagactaaccctgcttgggttacgggtgtaccaaaatcccaaaaattgctactaaagaacttatccatgtaaccaaacaccacctgttcccctaaaaacctattgaaaaaaaatgtatgaaattaccacaaacagagggaatgaaagtagagagatctggaaagacttgctgtgtcattgaaggggaagatggagtagcccacgtttggacattaaataatacggacttcagkgtgattctctataagaacatggtatcatctgctttctaactttgcccagggttttaatcagttccgttgcgagaagccaaacacacacaggatgttatcagtaggaaagagatatcattgaaataaaacacagatatgtatgtaggctctataaggactgtatctatctggtcattatttcactttgttgg

SEQ ID NO: 600850 - DNA, 551 bp, Homo sapiens
tatttttcaggtactgagaattctaatatctctgtgtactgtgatgatagttgctgaattcctggctagcatcatgtttgttttatgggtggtcaaaaataaatactctggtagttttgaaaccataccagaggaaccaaggatgtccttttaatagcaaaaataaaaaccgttatccgttatcctcaaagacaaccaacttttctttaaaattactgcccccccccccttttttttttctgatgccatccttctggctttgggagaacagtcacgttctgcccagattatgcttttgatgaatgtggtctctggatattcagctgggayggtgatctacagagacagcaattgaaatggccaatcacaggagccgccaaatcacgcctgagtgcaggtgtgtgattaacagcaggtgctggagatgtcagagctggcaaattggagtcttcctttctcctcaccttagtgatgctttagatttccttggaactgaaatttctgcaggaagacaaactttgtcagcaaacagctgctcactggatacttaa

SEQ ID NO: 600851 - DNA, 604 bp, Homo sapiens
agagacccacctttcttactcagtacttagctattcagccatacagatctttcttgagaccactcatgttcttgtcctcaaggcttcttcaaggctgttggcatctatggtctatggcagagccaggcttcaggcgtggacatcattctacatctttgacaccataattgggtagtagaaactctccatgcccgtgcaggactccgtctgcctggacccattacacaaatgttctttactgtcactgatgatttgctgccttccctaagccacactccgagaatcctgttctggaatcacagcacagggcccctctctcaaagaccctacaatttctctttttcattgcttccttactatctcttctattttcctttccacccagggggttctttttctagtcaggatgggaatgggcatgagacaccattttttttctttttttttttyctacacattttattctaaatccttaaaatctctccaaaggaatttaagttttttggagcataaaaggcagagacttttaggctgcttctgctttgttttctgacatatcctttcactgaagtgatgaatacagagccaagtttgtgcctgcatg

SEQ ID NO: 600852 - DNA, 522 bp, Homo sapiens
tattctgctaattgtttccttggcttggcagaagctttttagttgacgtaatcctatttgtttatttttgctttcattgtcagtgcttttggggtcatatccaaaaaatcattgtccagaccaatgtcatggagttttcctgtatgttttctcctagtagatttccagtgtcaggttatatttttaagtctttaatccattttgagttggcttttgtatatggtgtgagattagggtcctatttcgttcttctgcatgtgaatattccgtttcctyggcaacagttattgaagagactgtccttgctctactgtgtgttcttagcacctttgtggaaaattaattgactgtaaatgtatgggtttatttttttgctttctattttgttctattactatatgtgtctggttttatgccagtaccatgctgttcgatatagctttgtggtatattttaaagtcacttagtgtgatacctccatccttgttctttttgcttaagattgctttggctatttggtct

SEQ ID NO: 600853 - DNA, 522 bp, Homo sapiens
tattctgctaattgtttccttggcttggcagaagctttttagttgacgtaatcctatttgtttatttttgctttcattgtcagtgcttttggggtcatatccaaaaaatcattgtccagaccaatgtcatggagttttcctgtatgttttctcctagtagatttccagtgtcaggttatatttttaagtctttaatccattttgagttggcttttgtatatggtgtgagattagggtcctatttcgttcttctgcatgtgaatattccgtttcctcggcaacagttattgaagagactgtccttgctctactgtgtgttcttagcacctttgtggaaaattaattgactgtaaatgtatgggtttatttttttgctytctattttgttctattactatatgtgtctggttttatgccagtaccatgctgttcgatatagctttgtggtatattttaaagtcacttagtgtgatacctccatccttgttctttttgcttaagattgctttggctatttggtct

SEQ ID NO: 600854 - DNA, 523 bp, Homo sapiens
aaaccatgttatttagacatagaggtccagttgctggccttgcattagtgtgcttttgatattaatgtttagtttatagaaacactctgagctaatcttatccctcaaattcagctcttgtggtctcatgtgcccacctcttctgtgatagtccctgggcctagagggattgaatagttgttattttatttcatttctgcttttgtgtcaatactcaagatttagcagggatcagtgccttttttcagacccagtggtcaaagccctgcaacttaacagtacagggattagttaataggatatttatattacagaaagtcctatcattctctctaacatgtcagaaataaaaacactgtgatttggtgctcaggagttattgcttgcagcacttcaaaccactgtattaaagtagttaagttactcactacacatgtytaattgctgatactctagtgacagagctgtgactaaaagcatcaaaagtgtgacaggtcctatgttaaacttatcaaagcaagac

SEQ ID NO: 600855 - DNA, 560 bp, Homo sapiens
cttttaatagtcttcagagtaattttaggagatgaaatataattttatgactttttttactttttacgaacatatggagatatatacacactaatacaagtttcaaatgtattactgaataactgattaaaygtgggttttgtttacattcttttaaatgagaattaaggaaagaaaaaaatgagtgcttcttcatacctacgagaatgcctaaaatgaaacagaaggaaaatacagaatgttggtgaccacatggagcaaccagaactctcatacactaatagtgagaatattaattggtatagctacttctgaaaattgttgagtcatatctactataggccaatgtacatactttctataaatcagacatttcttccccccgaagcatatactcaacagataggcacacatatgttcaacaacagcagcaacaaaaaagaaactggaataattgtaacagacttacctgtaatgacctaaaatggaaaattacttaaatctccatcaagaacatacagaaattgtcttatattgtaccacagaacactttcgagaaa

SEQ ID NO: 600856 - DNA, 550 bp, Homo sapiens
ttgccctctgtcttctaccatgtgaagacacagcatttcttccctttcgaggatgcagcaatgagacaccatcttggaaacagaggccaaactctcaccagatgataaccagctgctgccttgaccttggacttctcagtctccggaactgtgagaaacaaatttctattgtttataaattacctagtctgtggtattttgttattgtagcacaaatgaactaagacaatgcctctcagtcaggtcagatatagccgctggagattctgaaatctatgggtgttggggctaacttaactgtttctaacccatccaagatacaacaatacaggaaaaacagaatagctacactccagggaatrtgtcatagtccactcaataggactgtatgccatattcattttttaactctctgtcatttttactctctttacttttaggctctttggcattcttttttttttttattttttagagacaagatgtggctctatcgcctaggttggggtgcagtggcatgttctcatcacacggcaacctctgcctcctg

SEQ ID NO: 600857 - DNA, 525 bp, Homo sapiens
acatataactgccactacctcttaaatatttaattgtttagtattttagaacattataaaaccacctaatggtttacctaatttatctgataatttataattatttgccataatgatacattgcacagtatgttttcatctgatgtctgcattccagacttaaaagtccatgccctattttcaaccatgtttccctttgtgataaaattatctttctctgtaataaaaatcatttttccttttaggttataatttaagaaattacattttctggttacacatacacacacacacacacacacacacacatatgtaatgtttaaaaatctaccacaatgatttttaaactatgtaatctttcatgtctatcatttattattcaataaatatttatgggatgcctcccctgaacaaggcctaatttcagaaactttgraggataaatgataagtcatacaaaaatctaacacttagaaagttttaagtcttgataatgagatgagatgcacatatctctatctccac

SEQ ID NO: 600858 - DNA, 516 bp, Homo sapiens
tttaactattaatatttcatcgacagagaatttgactcagaaaagactcagagaagtcaagaaattgcctaaattcatataatggagatagaattttaataaacatcatctgactttaaagcccatgtctttttaactttatcctggctctctttgcactcagttttgagaaaagcaaacttgaacttaaaaatgttcagattacaaaatagcttactactgtgctatattctttctgtgtactctcctatatagaaacataattttatctataaagtattttacatatgacaattagatacactactatgtaaagtcaaaatcaactgtatcttccaacaaacataagtcttgccagctacatcactacaggttgaattaagttcaaaacagtaaagtagtaaaataatagttgtgattccaatttatcttttaatttggtggctgacaatattatgcaaataatctcayagctaaatgggaaagtattcatatttctttttttatgaactcaat

SEQ ID NO: 600859 - DNA, 334 bp, Homo sapiens
gacaaataatacactagtaaatgcatattgcagttaatttcagactgtgaccaggtaaggtgatgacatagagtgactttaggagaaggggttgagatcagagaaggcctcttggaggaggtgacatgaagtttgtgcatacctctactcctctattgtcttcaagagagctatcttcaattactagcaaggctgtcacgctgggatggtgcagtggaaagaacactmcatccggaatcccaaggtctagggtgtttaccccacttctgtgtccttataagactttatatattttattttattttatatctgtgaaatgagagtcatcatatct

SEQ ID NO: 600860 - DNA, 556 bp, Homo sapiens
cctactttctttttcaaaaccagtaattcgctttcattgtatgcagagcaaaaggaatccatgatgagtcattgctattttaaagagaaraaataatcactagatagtagtatattcattgttgatatattaagcactttggatgccttctttgtacaaccagtcttatttaattaagcataatgatttaattttttttttcttctgagagtgatccccaaagtatctttataatcattttcagttaaggtgaaccctttagttgctaaagaacatgcttgctgaatttgtttccccacagataagtaaaatatgcctttctgtgttattattctgaaggtaaattaacacttaaatagggcatattcgtgtcaccgatagagagtcgtgactgcaagttgcccaggttcttggtgttttgaacaaagaattggacaaaatgctcagcgaagcaaggaaagaatgaagcaacagaagaacgaaagcagggatttatagaaaacgaaaacacactctatagtgtgggtgcagacccgagcagtggctcaagggcctg

SEQ ID NO: 600861 - DNA, 518 bp, Homo sapiens
ttgaatctgcatatattaatatatgttagtacatattatatatgcgttaatatgtaatttttttagttgttaccaaaatgtaccaattaaagggatatctgttatactacctgcaagtatagtgaaaatattagccagcaactaagattcctacaactggtaagtataatcataactgagtttgcttcctgaccatgcctctcttaaaatcatggtaaatctaaaaacattactagttccaatgtgtatgcctctgcctcttatttccccagagctcacagttttccctgtgagcagacagtctgtgattaaatacttgggctcaggaaccaagcagcttgrgtttcaatccttacgtcctttatgactttgagtgggatatttgacctttttatgctctcattttttgtaaaatggaggttcctaatagtctctacttcataaggttattgcaaagattaaatattaatagatgtaaaacccatgaagagtgcctggtacacaataagcactcacaa

SEQ ID NO: 600862 - DNA, 574 bp, Homo sapiens
tgaattttgaattttctctattcccaggctagcaatatgctgtgcaatagtcacttttgatgctaggtagtagtagttagccacagcttctagtcagtcacctgatcatcagggtaaataatcagtactctatggtgtaaygtgttgccagatgattttgcccaactgtaggctaatgtaagtattttgagcacatataacaaggctaggctaagttatgatgttcattctcttaggtgtaataaataaattttcaacttgtggtattttcaatttacagtggatttatcaaggctctaacctcattgtaagtcaaggagcatctatactacatattaaatacttatgcatatgtatatatgcatacatctgagtataaacacaaatatttgtatgtgaatatatgtgtatatcaaacttctatccctttttattgagagtccatatctcttttcaatttcttaaaagtttactaagattcacaaattgtatatagataccataatatacctaaggcatgaaattagttattgcaaatctaatgttaaacattaatttattagagtgaagaata

SEQ ID NO: 600863 - DNA, 529 bp, Homo sapiens
tcaaaattaattaattaaaggaggtggggggttccaggaaaaataagtaaacatgtaaacaaacaaactctgaagcttggcagcaaatttcatcaatattacttrttgtgattctgcagaaagaatggagaatatattgacacaagaaatattccttacgattaggccaagttttcaaagaaaaaaacccttttgtttagtttaattttaaatctcttcgttattatctcttggcaatctggtttgatatggagtaagccctaccatttagaaattttcatcagtcgtgttttggcaggtgctgacttctgtgttaactaaccagtagttatatcatagttgatttcaggatacaaaaatagccaataatacctccttatagaagtatacaagataaaaaattgtattcatcagaattttccagggagtagggtagtgagcaagatatgtgaaggtagggatttagactcatgatagtgatggaatttggtatggcaaggacaaaaggattttaattggtgaacaacac

SEQ ID NO: 600864 - DNA, 529 bp, Homo sapiens
tcaaaattaattaattaaaggaggtggggggttccaggaaaaataagtaaacatgtaaacaaacaaactctgaagcttggcagcaaatttcatcaatattacttattgtgattctgcagaaagaatggagaatatattgacacaagaaatattccttacgattaggccaagttttcaaagaaaaaaacccttttgtttagtttaattttaaatctcttcgttattatctcttggcaatctggtttgatatggagtaagccctaccatttagaaattttcatcagtcgtgttttggcaggtgctgacttctgtgttaactaaccagtagttatatcatagttgatttcaggatacaaaaatagccaataatacctccttatagaagtatacaagataaaaaattgtrttcatcagaattttccagggagtagggtagtgagcaagatatgtgaaggtagggatttagactcatgatagtgatggaatttggtatggcaaggacaaaaggattttaattggtgaacaacac

SEQ ID NO: 600865 - DNA, 570 bp, Homo sapiens
attgcattaaaaagtatttaaaatctttttatgttacaatatgttacacatattgtatgttacacrtagaatatggccaaataatatttagccataaaagattttgttcttttttatggctaaataatatttcattgtatatatgtatcacattttctttatccatttttctgttgataaaaataaaattctggttttttttttttttttttgagacacagtctcactctgtcacccaggctggagtacagtggcacaatcttagctcactgcaacctctgcctcttgggttcaaacgattctcctgcctcagtctccctagtagttgggactacaggcacgtatcaccacgtctggctaatttttgtatatttagaagagatggggctttgctgtgttggccaggctggtcttgaactcctgacgtcaggtgatttgcctaccttgggctcccaaagtgctgggattacaggtgtgagccacctcacctggcaggaaaataaaattcttttggatcctagtctccctcttgaagccacagaaacaagtccagcttcttttcacaagaga

SEQ ID NO: 600866 - DNA, 489 bp, Homo sapiens
aactttaattgtttaaggcttattatagttgttagacatgttttaacttggacatatttaggaaatgcaaggtatacttacaagctaaaaggtagaaggaacattgcattaagagtcaagagaaattatattcctcttggctcatgggggtggatccttcatggcttgataagtctttatgatagtgagttttcaagaggtctggtcatttaaacgtgtatggcacctcaacaaactgtaagagcagcctgaggggctgaaccctgcaaagccgcaggctgggcagagctgctyaaggtctttggagctcacccttataccagtgtgccatggatggaggacatggagataaagtagattattttggagctttaatatttaatgactgccctgttgagtttcaaatttccgtaaggcctgtagcctctttcttttcacctatttctccctttgggaacaggactgtttactcaatgcctatacattcca

SEQ ID NO: 600867 - DNA, 618 bp, Homo sapiens
tttttgcctgtttaaaaacactctggataatgttaatgatttgcatgacttagagccaggttctaatgaatacagcagaaggctggttactctgcagattcaccacaggaacaattatgatttcatatttaaaaagaacagcctttatttcccttgtaggggagtgaagatttcttttcttcacccatcgctaggttcttggctaagacacctgtgacaaaagatcgattaacaagagaaaagcataacaaatgtatttagtgtaagttttacatgacccaagaaccttcagaactgaagacccccaaaacagggaaaactgtgtatttttatgctaagtttgatgaagaatttgatagttgtgaagaaggattattagaagacaacaaaagtgtcacctaatggtaataagctggtgggaaggtggcatttagcaaggcctgttagtttagactattctttctgttccrtgtgtcttcagagattagggcattcttttctctcattatgtggaaagtacttctggaatgaggaccttatggtccacttcagaggaaagccagttaattctttcatagtctacttcagaggacaagggatggagaaggtcagagaatg

SEQ ID NO: 600868 - DNA, 623 bp, Homo sapiens
ttctcattttgtttacagcaaaaatgattaattgtcttctaatgggtaaatcaatactttgcttaatggtatctgtttctcagaactgcatacctctagttcattaactcttctaaatagcatcctgccttggaaaactgcacaaaatgtgctgatgtttcttttaaagtcttgataaatcttctgttctctttgtcttaatcagtctctcactaagtctgcattactaacaatacaagtatagtgttttagtattctgatacagtttacataagtaataggagaaaaaatgagaagactattgttcaaggacttataatagcaataaggctagcaatggaccaatcactcattacagaaacccattatgcaccagcaagtctaataagattgtacaacctgaagtaaaaaamtaaaaaaggaagaaataataaataaataaataaatacattgatggagttttccagtatgcagatagactaaggggctattatccattaatttaacaaatatgctgggaggcctgactatgtgattggctaacataagcagcaaagacaggcaaagcccctgagctcatggaaattcctttccagtgggtgatttaaacaatagagaagcc

SEQ ID NO: 600869 - DNA, 388 bp, Homo sapiens
attccatttcttcagctctaatatagttggtagcctacagtgcccagtgaaaacattccacatcaaggtcatcaaatgtcttctgtatttctaaattcaatggtgytttataaaattgtcatcttgagctttcttcagtgtttgtcagagccactcactatttctctctgaaacacttttctttgcttccactaaaccatgtctttttatttattccttctaaatttctgactcctttgaagattcatttacttaacgaccattacattttaacatatgtcaggacagtgcaaggcccctttatctttcctcttcagaatctctccttaaaaaaaggtaccataatgttaacatttacatgggtgtcttttcaatatatgactctagt

SEQ ID NO: 600870 - DNA, 621 bp, Homo sapiens
atggttgggatactatgcgtttattgcccccaagctgaaacataggaatcatatttgataacttccacttctgtattaaatttgtcactaaatccttttgattttactttcaaactacatctyacaaatccattcatgtattctctgtctacatttcccatctggatgtggccttttgcatgagatgatatgaaactgcaccctaaagggcaattcttcatcatctattagctcctccaacagttctgtgcacagtacctgaaaaaatcttttgaaaatgcaaatgtggatatgtgttgccaatttttcctaagataaaaaacacaattcttatcaaaatctaaaatttctgcaagaattggcacctggttaccacaccaggcaatttgaacctctttttctctctcaattactgtgtttccaccactcagaccatgatttatctcacatcagggcatctgcctttcccttaactcagaatatatcagcaatcctcctcccactccctctgcttagtaaactgcagtacctaccatcaatctcaactcagtgatcctataaataatttcaactctccttgtaatgtgcttccttatatacccatatttttatttaaataaa

SEQ ID NO: 600871 - DNA, 563 bp, Homo sapiens
agtacctaccatcaatctcaactcagtgatcctataaataatttcaactctccttgtaatgtgcttccttatatacccatatttttatttaaataaattattaatgtataattaaattgttgtgtgattattcaattaacatctgtcttcctcactaaattgcaagattcatgaagtcaaattcaagacatttgcttaacctgttatccataggaaataaaatagcrcttggccccaaataggtacttaaacattttaaaatcagtgaatatgcaaatgaataagaaactgaatgaataaatataaaatttcaaccctagaacagtattcaaactattaattatattcctaaaatttaggccactttaatctcattgaatcttctagtctctatgaattcaatctcaccattgaagtttcttttagtttctagtattcatttagatattatgatataaaaatatactgaacagttactttataataaataattacttaaggcaaaaggcaaaagtaagaagaaactgtatactatcattaaaatatatttacatttttgcata

SEQ ID NO: 600872 - DNA, 628 bp, Homo sapiens
ccgttactgacaaagagagtgtctgtcatggtcctggcggaaaacagaaaatccactaaaactgggtaatttatgaagagtttaatatagtaactatgtgaaagatttggacagagaatgaggaaaccacaggagaaggttgttccctgcagctagtatcagtgggccagttctgattgtcctgcagcagatgcgctaggtgccttgttttatgtcccctgaacctacctttgatttcagcttagggaagctcracagttctgtgcacactgcaacccctcttcatttgtgttttggaatttttcagaacccacaggagatctatgagggtaaaaactgcatagaagagcaggggagttaatattctagaataaatggggtgggctgggaatttgtaagggcctatgctttccatccttcagagagaaaatccagaagaacattctacaaggttccttaaaaagttctcagcaggcttgagttgtaattgaccaaattttaaccacctcaatgaccttttttttttaaaaaaaaaaaaaaaaaaaaagactgtgggtacaaactaggtgtatatatttgtgggaaacatgagatattttgatacaggcatacaatgcgtaataatcac

SEQ ID NO: 600873 - DNA, 628 bp, Homo sapiens
ccgttactgacaaagagagtgtctgtcatggtcctggcggaaaacagaaaatccactaaaactgggtaatttatgaagagtttaatatagtaactatgtgaaagatttggacagagaatgaggaaaccacaggagaaggttgttccctgcagctagtatcagtgggccagttctgattgtcctgcagcagatgcgctaggtgccttgttttatgtcccctgaacctacctttgatttcagcttagggaagctcaacagttctgtgcacactgcaacccctcttcatttgtgttttggaatttttcagaacccacaggagatctatgagggtaaaaactgcatagaagagcaggggagttaatattctagaataaatggggtgggctgggaatttgtaagggcctatgctttccatccttcagagagaaaatccagaagaacattctacamggttccttaaaaagttctcagcaggcttgagttgtaattgaccaaattttaaccacctcaatgaccttttttttttaaaaaaaaaaaaaaaaaaaaagactgtgggtacaaactaggtgtatatatttgtgggaaacatgagatattttgatacaggcatacaatgcgtaataatcac

SEQ ID NO: 600874 - DNA, 431 bp, Homo sapiens
taaaaactgcatagaagagcaggggagttaatattctagaataaatggggtgggctgggaatttgtaagggcctatgctttccatccttcagagagaaaatccagaagaacattctacaaggttccttaaaaagttctcagcaggcttgagttgtaattgaccaaattttaaccacctcaatgaccttttttttttwaaaaaaaaaaaaaaaaaaaagactgtgggtacaaactaggtgtatatatttgtgggaaacatgagatattttgatacaggcatacaatgcgtaataatcacatcagggtaaatgtatttagcacctcaagcccttatcttttctttgtgttaaaaacaatccaattacactctcctagttactttataatgtacaataaattgctgttaactgtaatcactcttttgtgctatg

SEQ ID NO: 600875 - DNA, 572 bp, Homo sapiens
tgtttgtttgtttgtttgtttttaacaagccacctttattttttaggagacaattctccatggttctcttgcattttacatgactttcaaatgagacawggactacccctttttttttccttagatttttttcaagttcgttttcatagcaaacaactgaaaacaactcagggtctagacctgtaacaaactgcactgtgtgcaagtgccatctggccctcttcatgttaactggggctaggagaatcacacaaaaattctgatgctgtgactcctgctgtactaagaaataaactgccctttgtctctgacccaggaatcctgcatctgttgccagtattcatgaaactgtggccaactaatttgtcagtctgaaagtagagcaacctctcatacccttcggagttcttggcacttcttctcacttctgtaaattaatccagtcttaaaagcctaaaacaaaagtcatctgtaatagtatgttgaagtggaattatttctgtttcaatactcaacacaatgtcaatagaatagatattaagaataaaaaaaaccataagacacatataaat

SEQ ID NO: 600876 - DNA, 572 bp, Homo sapiens
tgtttgtttgtttgtttgtttttaacaagccacctttattttttaggagacaattctccatggttctcttgcattttacatgactttcaaatgagacaaggactacccctttttttttccttagatttttttcaagttcgttttcatagcaaacaactgaaaacaactcagggtctagacctgtaacaaactgcactgtgtgcaagtgccatctggccctcttcatgttaactggggctaggagaatcacacaaaaattctgatgctgtgactcctgctgtactaagaaataaactgccctttgtctctgacccaggaatcctgcatctgttgccagtattcatgaaactgtggccaactaatttgtcagtctgaaagtagagcaacctctcatacccttcrgagttcttggcacttcttctcacttctgtaaattaatccagtcttaaaagcctaaaacaaaagtcatctgtaatagtatgttgaagtggaattatttctgtttcaatactcaacacaatgtcaatagaatagatattaagaataaaaaaaaccataagacacatataaat

SEQ ID NO: 600877 - DNA, 617 bp, Homo sapiens
atcccaccatttcccttttacatttggagctctcaaaatcatcttcagagaaaggcatagacttgtctcccaggtgtgttcttaacttcggcaaataaacttcctgaaatgattgagatttgtctaggtcattgttcttgattgacaatttcaacattctttatatctaacctttgttcagttcaatctatcttgttactcttccaccacaaatatgttactaaaccatctctttctggtattatttttctccaaaagacttaacatggtgtttctctgatgggggacatttagaacctcacaaaatgacttccctctttagctttctcacattaactactgttattttccaccaaaaagttactgaatactatgtgtaagtttgaaacgtttattggaaataagaagggatggagaggagcaagtcacwatggtaaattataggatgtgttcgggtgtctttctctccatcatccttcagaatttggtcttttttgaaggttttctcaatcctatttttccctgattacccctgaaagaagtgagtcttgacctttagaatatccccataatatgttaaaataaaactttaaaatctcaaattaaagtatagatat

SEQ ID NO: 600878 - DNA, 505 bp, Homo sapiens
ataattcttgttttaaaaaaagatgttatgtttctctaattagttatttagcctggtgaaatatgaagaaagaggttaagagctttgaatamgattatgtgactaaaatttctatttccttcaagtatttttaaattgtccagtagtttaatgtttcataaaaccaaataatcacataattcgtaagacaggctcattacataattaaagcatgttatttcacaatacaatcatcgaatcacaacttggacctagtttataaaatagtttgtgaaagggtaaaagaagcagtcacaagagacttcaactcaacccttgttatcatcttgcaatagttaataagaagttgaataatactaagtactcttacagataaaatcgagcaaaaataaaaatatcattttctctacttgatatctgtctaatgtaatgttaccacatttttttcaagtgtctagcaaaaattcaaattaagaacagcaaaatagtcctacaatctgatgtc

SEQ ID NO: 600879 - DNA, 613 bp, Homo sapiens
ctcaggttaactgtatgatgtagtactattatttttctcattttatagaaaaggaaaccaacaaaagaggttaagtaaattgctaatgataatatggctaaaaatagtggaactaacttgaaccaaatctttgtgattcccaaactggtttattttactagggcaatactaaagaaaataaaaagtaagtaaatctaagaagaaaatttcaaaggatgaatgactctcaataagaatacygtctgagctcaacgacacgtctaaaactaaaatcaaacagacaaaatgacctcacgtgcacaaacacatactacctgaaaaagaaagcatttatctttataacaaagacaaattttgagaatttggaaattcaataacatatcgtgactttataaaacagctacatttaactttaaatattaaaagcaaaaatatggaacacaaggctagccaatatccagacttcgcattttttttcttgaaatgtgatcattacctcttcatcttccagtgatgctcatctgagcataaaaggaattgacaattcatgaagatgcaaccatattcatgtctaagtttctctggcaaattatacagattctctgaaaattat

SEQ ID NO: 600880 - DNA, 615 bp, Homo sapiens
aaattatgatgcacatgtaaggtaatttaatagtgaatattagtaatatctataaatcttttattctctaaatttaatctaattcactcatgtattttattagattttaatgttaggctaccatgtagaattacactatgaatttgttatttttttcctgcaactataaagtgtttctggactggcagactctgtgttctgacttctggggcttmagatatcctgttgtgatccaatattttctggttctgccattgaagaattgaaaattcacactgtcttttccctttgagaaccattaccacctgctttcatctccacaatacctgtttaccataacagtctgtaactgttctctggtcttagctatgccaacaataatccagggaagcctccacccagcaggataaaaaatccattgttttactgaaacaaattcttattgatgttctccaaactctacaaacaatgtctctccatctctttcttccatttcattataccaaaaatagcacctgtcaacctggtatgtctaagcagaacttatctggcttatcagccaaacatttcacatttcatagttatgtttccttattagtatgtattcatattctt

SEQ ID NO: 600881 - DNA, 615 bp, Homo sapiens
aaattatgatgcacatgtaaggtaatttaatagtgaatattagtaatatctataaatcttttattctctaaatttaatctaattcactcatgtattttattagattttaatgttaggctaccatgtagaattacactatgaatttgttatttttttcctgcaactataaagtgtttctggactggcagactctgtgttctgacttctggggcttaagatatcctgttgtgatccaatattttctggttctgccattgmagaattgaaaattcacactgtcttttccctttgagaaccattaccacctgctttcatctccacaatacctgtttaccataacagtctgtaactgttctctggtcttagctatgccaacaataatccagggaagcctccacccagcaggataaaaaatccattgttttactgaaacaaattcttattgatgttctccaaactctacaaacaatgtctctccatctctttcttccatttcattataccaaaaatagcacctgtcaacctggtatgtctaagcagaacttatctggcttatcagccaaacatttcacatttcatagttatgtttccttattagtatgtattcatattctt

SEQ ID NO: 600882 - DNA, 504 bp, Homo sapiens
cctttctcttgtctgattacactaattaggacttctagtattatggaaatarcaatagtgaacataggcatccttgtcctgttcaagatcttagaggaaaggctttcattttcatttttttactcttcagtatgatgctacctgtgagtctctcatatgtgttttttattgtattgaggtacattctttctatactctgtgcagcttttttaaattataaaataatgtcaaattttatcaagtattttttcagtatttcagcatcaattgaaatgatcatatgttttttgtcctttattctgttgatatgaggtatcatgctgattaatttgcatatgttgaaccatccttgcatctctgggataaattccacttggtcatgataaattatctttttaatgtgttgtagaattttgtttgctagtgtttttttttgcaaattttttcatcaatattcatcagggagataaccctatagttttctatttgacgtatctttttctg

SEQ ID NO: 600883 - DNA, 596 bp, Homo sapiens
aataaacatttctcaaaaaaagacatacaaatggccaacaggcttatgaaaaaatgctcatcatcactaatcatcagggaaatgcaaatgaaaaccacaataaaatataatcttaccccagttgcaatgactgttattaaaaagacagaaagtaacagawgctggcagagttgcggagaaaattagactcttatacactgttggtggtaatgtaaattagtacaaccaccatagaaagcagcatggaagtttctcaaaaaaaaaaaaaaatagaactatcacattatccagcaattccgctactgggtatttgggtatttattcaaagaaaaataaatcaatataccaaagagaaacctgcactcacatatttgtcaaaccactattcacaataacaaagatatggaatcaacctaagtgtctacccatgaatgagtgaataaagaaaatgtggtatatatacataatggaatactattctgttgttaaaaagaataaaatcatgtcacttgcagcaacgtgaatggaactggaggttatattaagtgaaatgagacaggcacaaaaagacaaacactacatattctcaatcatat

SEQ ID NO: 600884 - DNA, 591 bp, Homo sapiens
ggacctttgaaccgaaacctgaatgattcaaagtcaacattaccataactgggggaaagggtgagcattacattttctggttagatgaaaggggaaaaggagttcaataatttgaggaacagattaggacattgtgctagaggataagaatggggattggaagtagatggtaggagataagatcagagctatagacaggaaactttatttctagatatggaatttgtatttattttaaatgtagcaagaaatcaggggagtgacattatttgtcttcyatttttaaattgtgattcttatttgtgtctcacatctgtagacaagtcctattgctgagcttcctgtggacagcccttctaattagctggctgaatattttcatctttcatccagatattttgctattaaactgcaaggagaggacagatgataaagaaaaataacatctcattgagattttttaaaatattctatttattgtgataatgatttgggagcctgttaaaaagtcacccaaaaataatcgtttgtgcttatgatgtctcaaatgataatagtttagcacctttgttattttcactcacagttaaa

SEQ ID NO: 600885 - DNA, 591 bp, Homo sapiens
ggacctttgaaccgaaacctgaatgattcaaagtcaacattaccataactgggggaaagggtgagcattacattttctggttagatgaaaggggaaaaggagttcaataatttgaggaacagattaggacattgtgctagaggataagaatggggattggaagtagatggtaggagataagatcagagctatagacaggaaactttatttctagatatggaatttgtatttattttaaatgtagcaagaaatcaggggagtgacattatttgtcttctatttttaaattgtgattcttatttgtgtctcacatctgtagacaagtcctattgctgagcttcctgtggacagcccttctaattagctggctgaatattttcatctttcatccagatattttgctattaaactgcaaggagaggacagatgataaagaaaaataacatctcattgagattttttaaaatattctatttattgtgataatgatttgggagcctgttaaaaagtcacccaaaaataatcgtttgtgcttrtgatgtctcaaatgataatagtttagcacctttgttattttcactcacagttaaa

SEQ ID NO: 600886 - DNA, 634 bp, Homo sapiens
tgggttaaccctccttgcccagatcaataaactgagactatttaatgtagtaataggtgagraaattgaaaaggaaatttctaaaaagcataatattttcacgaatcatatgagactgtagtgctttattttatgtgtattctattattacattgaactctatggtgatacaatctgcagtagagctgaacagtgggaatatgtaatcaggaataagttgttccaattcaactaatttttttttttaattttttgtatgacaatacattcagaaacatttgcattaccaagtggatatttagcctcagttttatgatattatttctattcatctattctatttaaaattatgtctataattttaaaatcgcatgcaatattatgattgtttcaacaagatcattaaataacatttattaggtgcttattgtatgtccagcaatatttatcagtgcctgtgtttcaattgctaagtattttacaggcattatgttcttaaacttcattacatctctctcaaatatagattaatgtcagtaatgtcagaaaatatcagaattataagcaagaaaatttgtaactctaaacaggcattcagccttcctaagatcttcacacagctggcaagagacat

SEQ ID NO: 600887 - DNA, 536 bp, Homo sapiens
agtcacagtgttgaaaaccttgaaagttatcatatgygttaggttttctaatactaggaggttattgccaattgttcaaagaagagaaacaaattgaaagttatgtttacttttgtgacataactgcatacacagaatagatttgtaaacttaaaaactggttaggtgaaaactaaagacatctgaaagactatggtgcagtatttctagtaactctgcaacggtggtagtattaccatagttgttcttgtttatgaggagattgtcacctgcatcgggacattatcaccttgttgagacatcaaaaatgtcctttcatatctccatcactatacaggtgttgaagttccaagatgtctgatcagagggacttttaaatatcttagctgatggatagtggctgtccacaagcaatttgttattggaggatctatattctggatctcttttattatttctggtctttatatcaaatgctttttaccgttcaatctttgatgtatcttgtctgtagtttttaacccattcaaataccc

SEQ ID NO: 600888 - DNA, 576 bp, Homo sapiens
tgtttctgtatctcactggagttaaattgactatggaggtgaagtagtttaaaataagatgtatattttgagctctagattgaacattaagaaaattttaaaaagtaaacatattgttaaagtaattgaaatattgcaccaaaaagtatttacttaatgaaaattaaagaagcraaaaagaacacaagacccaaaaaagcatacagaaaacacaaaaataaaatggaagacataaatctaactatataaacaatgacatcaaaagtaaataaatgaaacaatctaatcaaaaagcagtcattgctagacagaattttctaaaatcctactttatattgtctataggagacacactttagactcaaagattcaaataggtggaaaatatgaggatggaaatgatagcaaccacaagaatgctagaggaaccatattagtaataaactatagactataaaaagtttttttttaattaccgcagataaagatgaaaactttctaatgataagaggggcactccatcacaaagatataagagttacaaacacatattcacccaacagcaagacaccaaaa

SEQ ID NO: 600889 - DNA, 576 bp, Homo sapiens
tgtttctgtatctcactggagttaaattgactatggaggtgaagtagtttaaaataagatgtatattttgagctctagattgaacattaagaaaattttaaaaagtaaacatattgttaaagtaattgaaatattgcaccaaaaagtatttacttaatgaaaattaaagaagcgaaaaagaacacaagacccaaaaaagcatacagaaaacacaaaaataaaatggaagacataaatctaactatataaacaatgacatcaaaagtaaataaatgaaacaatctaatcaaaaagcagtcattgctagacagaattttctaaaatcctactttatattgtctataggagacacactttagactcaaagattcaaataggtggaaaatatgaggatggaaatgatagcaaccacaagaatgctagaggaaccatrttagtaataaactatagactataaaaagtttttttttaattaccgcagataaagatgaaaactttctaatgataagaggggcactccatcacaaagatataagagttacaaacacatattcacccaacagcaagacaccaaaa

SEQ ID NO: 600890 - DNA, 361 bp, Homo sapiens
atagtgcaggagggggcagggggacagctacatcacagatagcacccactagggcaatgattgatggagttgtggcagcagggccgctcgagaggccaaagcctgggagagccacaggcactgaactccmacccatgagagctgaagggagctgtacccagcaaagccatgctaatagggtcctctggggcatttggggcccaaccttaccccagtgtgtccaggaagtgggccatggagtcaaagattgttcacatgtggtttgcctcactgtgttttggactcacttgggacctattacccctttcttcttgcctacttctcccctttggaatataaacgactgtcttgtgtctgtctt

SEQ ID NO: 600891 - DNA, 646 bp, Homo sapiens
cttgtttgctttcacaggttcagagctggagaacaatttaccccaggatgaaacactcttgagtttcacttatatgatgtttagatgagactttggacttagactttaaagttgattctgaaacaagtaaagagtttttggagctattaagatggaataaatgaattttttttaatgtgaraaaatcatgaatgtgagggagctagggatataatgctatggtttgaatgtgtcctctccgaaattcaggcgttgccaatgtgatagtattaaggggtaaggcctttaaaaagggattaggccataagggctcttcccttctgaatgggattagatgtctttattaaagggcttgatggagggagtttgccccttttgtcccttcaccttctatcatgtgagggtacagcattcctcctcctagtggatgtggccttaccagacaaacaaacctgtcagttccttgatcttggacttcccaacctttagaactctgagaaaaaaaaaaaaaatctttgttttgcttttataaattacccagtgtggtatttcattattgcagcccaaaaggactcagaaaaatagagttcagagtgataaatacactgtattttcttaaactattttttctttaggaagcaagaga

SEQ ID NO: 600892 - DNA, 624 bp, Homo sapiens
tgtctttattaaagggcttgatggagggagtttgccccttttgtcccttcaccttctatcatgtgagggtacagcattcctcctcctagtggatgtggccttaccagacaaacaaacctgtcagttccttgatcttggacttcccaacctttagaactctgagaaaaaaaaaaaaaatctttgttttgcttttataaattacccagtgtggtatttcattattgcagcccaaaaggactcagaaaaatagagttcagagtgataaatacactgtattttcttaaactaytttttctttaggaagcaagagattacctactgacccaacaagtgaagggttataatgcataaaaataatactttttcctgtgtgatttatttttcctgaatgacaaagcattcctaacagtgagagttgaatgttatttcaggaaatagggaaggaggtaatgtgccccgtcactgacaatgttaaaatgatcaattgcagatattctagagcagactcaagaacttgagacaaatatataaatcttagattactttggcatatttttttgttttctttgtaagttaccatttattaagcatgcatttattgactgcctactatacgccaaccag

SEQ ID NO: 600893 - DNA, 602 bp, Homo sapiens
taaaaacctgtgatatgtcatcattttgataaacaccctttttggtgaaatcttatattgcaattattgtatttatatttattaatgcattttatacatgttagttaaatttactacttcatataaatatctaacatttagattccaaattaagctcaaaataatggaaaagatattgtaatgaggaataggaaagaagaggctgataataatagccagtttctctggaggcatgatctgggaggatacagctgctttcctttaagcagtggccagtgtcttcagaaaagaaatgtttttatgtatctttacatgaaatagatagatactatttcaaattacaaattaactccaacatagggaatcttaatataatgatcaaggtatgtamtctaaatcttttaaaaagaactctgatcttcatttaaacttaatttcaaaatgaagagtaaacattagcatgttgagtggataattaaaaaataaattatattcttatagcattatttttgtatgcaattagcattgcattctctgcttgaaggataattcatacaacccattaccctgtcccaaataaaaacttcctgggcatagcctat

SEQ ID NO: 600894 - DNA, 602 bp, Homo sapiens
taaaaacctgtgatatgtcatcattttgataaacaccctttttggtgaaatcttatattgcaattattgtatttatatttattaatgcattttatacatgttagttaaatttactacttcatataaatatctaacatttagattccaaattaagctcaaaataatggaaaagatattgtaatgaggaataggaaagaagaggctgataataatagccagtttctctggaggcatgatctgggaggatacagctgctttcctttaagcagtggccagtgtcttcagaaaagaaatgtttttatgtatctttacatgaaatagatagatactatttcaaattacaaattaactccaacatagggaatcttaatataatgatcaaggtatgtaatctaaatcttttaaaaagaactctgatcttcatttaaacttaatttcaaaatgaagagtaaacattagcatgttgagtggataattaaaaaataaattatattcttatagcattatttttgyatgcaattagcattgcattctctgcttgaaggataattcatacaacccattaccctgtcccaaataaaaacttcctgggcatagcctat

SEQ ID NO: 600895 - DNA, 602 bp, Homo sapiens
taaaaacctgtgatatgtcatcattttgataaacaccctttttggtgaaatcttatattgcaattattgtatttatatttattaatgcattttatacatgttagttaaatttactacttcatataaatatctaacatttagattccaaattaagctcaaaataatggaaaagatattgtaatgaggaataggaaagaagaggctgataataatagccagtttctctggaggcatgatctgggaggatacagctgctttcctttaagcagtggccagtgtcttcagaaaagaaatgtttttatgtatctttacatgaaatagatagatactatttcaaattacaaattaactccaacatagggaatcttaatataatgatcaaggtatgtaatctaaatcttttaaaaagaactctgatcttcatttaaacttaatttcaaaatgaagagtaaacattagcatgttgagtggataattaaaaaataaattatattcttatagcattatttttgtatgcaattagcattgcattctctgcttgaaggataattcatacaacccattacmctgtcccaaataaaaacttcctgggcatagcctat

SEQ ID NO: 600896 - DNA, 596 bp, Homo sapiens
gaacagagatgctgataattttaacataattcctaatgctttgcctgcttctcagaagctatgattaagacaaattctgagaaactcatgaatactcccaaattgaaagagaaattttaataaagacacaccaagcagattttctttttcttattgagaaaacttgagggaratggaggagaatgtaaaagtggcaagtgtggagaaactagtgaaaaagagaaatcatacaatccaaagcaagttttgatgagtgatatgttacagcgtttataaatgatttagtaaattacgccaattccttagttagaatgaagtgactttgaactaaatgaccagacaaaaagcacaggactctgttcataacccaataagtgtcaagtctacacaaaagtgacaaaacaaacaaacaaaaaaacccaccatcaaaccataggtatcccatatggtggaaaaggagtaatggaacattcatccatagcattttagaacaaatggctgtaaacagaattacccaaatttaacataaccaagaaaaaatatattaaattataaaaatatattaaatactcctaataagatctcatggcaataat

SEQ ID NO: 600897 - DNA, 654 bp, Homo sapiens
tcaggtaagtatgaaattttattgagatacgatatgtgagactaaggtgtgtgtatatgttggggagaatayaaaggatagttggctagactgagtggtgaaaccttaaaagtctaattatttatcaaaaggaaactttgtttaccttaaaaagatcatgttgaactagaaaagactgaataacttaaatggacaatttttttttcaatttgtttttatttgtatttacactgtaagcagtcctgaagacactagaaatagataagatcagtcatgaaaaactgaaaagattacctttttcatatgtgtgtcattgtgtgcaaaggttgacttctgctacagcagatataatccttctaacatattttgcatcagtggaatttttcttttcaattttattgcagcaccaagttttattatatttttgttgaaagatacatagaaaataaatactttctgatattttacaataacagtgaaactatttcaaaaggaagaaagggattgaaccattatccaagcaacagaacatataattatgccaatgaaaggggctgtcttatcattgttcttagaatcttaagagataggtgcagatagatggatgtatggatagatagatagatagatagatagatgatagatagatatata

SEQ ID NO: 600898 - DNA, 488 bp, Homo sapiens
gactacacgaggtctttccaactttcaaaaacatggaattattttgccttttttttttggtgtttttttgatgttgtgattcagtttgtcatttgcctgagaaatcagtatgagaaatttgtattgatcactatttgaagagcatataartatataattttcatggtaaatattcataaattggaaccatggtattaaagagaaatttgtttttatgttgctgataattgattccttcaccctactctaaacagtagcctttctaaaatggccatccaagcagccattggagtttaaatggctggaagcacttttattcattcattctttaaggctcaatcttacctcatccaggggctgcattacgttcacatagaagaaacaaaaaatgtcagcaagtattgggatctgcagatttattttaaagactgggtgagtctatattctcaaaagtgttgtacttttgttgtaacaaaatttgttgtaat

SEQ ID NO: 600899 - DNA, 488 bp, Homo sapiens
gactacacgaggtctttccaactttcaaaaacatggaattattttgccttttttttttggtgtttttttgatgttgtgattcagtttgtcatttgcctgagaaatcagtatgagaaatttgtattgatcactatttgaagagcatataaatatataattttcatggtaaatattcataaattggaaccatgktattaaagagaaatttgtttttatgttgctgataattgattccttcaccctactctaaacagtagcctttctaaaatggccatccaagcagccattggagtttaaatggctggaagcacttttattcattcattctttaaggctcaatcttacctcatccaggggctgcattacgttcacatagaagaaacaaaaaatgtcagcaagtattgggatctgcagatttattttaaagactgggtgagtctatattctcaaaagtgttgtacttttgttgtaacaaaatttgttgtaat

SEQ ID NO: 600900 - DNA, 683 bp, Homo sapiens
aatgtcataattgggactattttggtcagattagaattacactaagatgaatctgttgtataattttaatgaccaaagacttcatagataatgaaagatgaatttcaaaaactgtgatatgagtggtatatagatgagagatatcacagcccagggtataggctcccttcctcttgatgacaccggttgttcactttcaagttttacttttcttgctgttgtattaacattttattatctgctcatttgccctagttgaaacaatgatctcaaagtaggagtctcctcacgccttaactgtgctccttgggttaacactgtctcttgggttaacacagtgttaggagttgggttaactcctcagttaaggagtgagggaatgaacagagaaagaacaacaccctaacgttttatttttacatttgttacrcaaaaacatacacaatgtctaaataatgttgattgctgggtctttttagaaacacagctgtgaccatacattaggaaacacccccgcccctgacaatttcaaataatagtttacaggatgattgcctgaataaaaaagtgattcttatcattttttgaaataaatttgaagaatccgtgcaatgtacctttaaatcataattttctctagtaaatttaagcactttacaaggtgatcttattacttgatggag

SEQ ID NO: 600901 - DNA, 609 bp, Homo sapiens
cccttataacaactttaaaaatgatctctgtatatatcatattggttatgtttatcgagagaaccttaactaatacacttagttcaatgattaaaatgtcaatatcatccagaaacaccctcacagatatatctgggataatttttggctaaatatccagggaccccttggcccaatcaagttgttacataatcgacacagtatatgttagccttggtctctttttttaagattccacacataaaacattcacatatgcacatactgtacatatagacattagtaaatatcagatatttactaataatctagtgataattttgtaagagacatggaggaaaacatatataataatrtctattactaaaatattatgagtgtctttgatttcatctaaaatgcataaattttcccctaactttatgtattagtccattttcacactgctataaagaactgcctgagactgggtaatttattaaggaaacaaagttaattgatacacagctcagcatgactggagagggctcaggaaactcatgattatggtagaaatcaaagggcaaacaagtcaccatcttcataaggcagcaagaagaaggatgaaca

SEQ ID NO: 600902 - DNA, 558 bp, Homo sapiens
cggctcctggagctgcctgccttgccacagcagctgggttgcttgactgtgcactgtggctggactccttgcttgctcattcacacacccctctctactccactcctggctaacctttagcaggcatgggatccgggatggtactgccagccaagaacagcctgctgggccaagtgggtggaatgagcccagaaggcatgagaaatactcaggaagaaggsaccaccaaagacaaaggtttctggctagtgaagcaacacctgaaggatcctgtgacagaactgaactctgtttatgaaaaatgcgtacttgaaaatctgagaagatacaggcttgactactaaattccaggtcaagtacatctaactataacacatctaatttcatgtcataaatctctacgtagaaggttttagttaaatacaagggttttttgttgttgtttctacagtgattatcaggtgctttatgaaatagtttttctgacatttaaggaaaatggtgagtcccatggcccagtaaatcaaactagtatttctcatcctttctttccttagc

SEQ ID NO: 600903 - DNA, 510 bp, Homo sapiens
gtgcaatggcatgatctcggctcactgcaccctctgcctcccaggttcaagcaattctcctgcctcagcctcccaagtagctgggattacaggcatgcaccaccacgcctggctaattttgtatttttagtagagatggggtttcttaatgttggtcaggctggtcttgaactccccacctcaggtgatctgcctgccttggcctcccaaactgctgggattacaggcgtgagccactgcacccgtcaaaaagaacttttttaarttttttttttttaaatagtatctctggactcccaattgagttaagcataaaatagtaaaggattaaattaaatgaacttttcaattgaagtaccaattaattattagcctgaatttcttcttaaaataagcttgccttattcactcaggctgtaaattcagaagacaaatttattttgttcatttgtgctaattaaaagaaatctatcttcattttaaaaagttgtatggtcaatgtacactttc

SEQ ID NO: 600904 - DNA, 510 bp, Homo sapiens
gtgcaatggcatgatctcggctcactgcaccctctgcctcccaggttcaagcaattctcctgcctcagcctcccaagtagctgggattacaggcatgcaccaccacgcctggctaattttgtatttttagtagagatggggtttcttaatgttggtcaggctggtcttgaactccccacctcaggtgatctgcctgccttggcctcccaaactgctgggattacaggcgtgagccactgcacccgtcaaaaagaacttttttaaattttttttttttaaatartatctctggactcccaattgagttaagcataaaatagtaaaggattaaattaaatgaacttttcaattgaagtaccaattaattattagcctgaatttcttcttaaaataagcttgccttattcactcaggctgtaaattcagaagacaaatttattttgttcatttgtgctaattaaaagaaatctatcttcattttaaaaagttgtatggtcaatgtacactttc

SEQ ID NO: 600905 - DNA, 587 bp, Homo sapiens
aaataaagcaatggacattttgttatgagctttaaacaataaacatacctgctgcttatgacttaagttttccaaaacagccagatgaatagaggagaattcatctaccctgcatatggaaaaccacaggatgaataggatcctcctcctgtaatattaaataaacgtaaaatatcgggcttaaaaaagttcctgtgacaaaagcaaatgtgggcatttactcatgatacaaagcatcttaagttgtattagtatttgccatagtaaataaatgcatggtttgtgatttttaaaaccctagaaatacagtatagttgatctttgaataacatggatttgaaatatgcaggcccaataatatgtgatttttttccaataaatgtatttagaaaactttttggagatttacaacaatttgtaaaaagatgaatcacatatatgagaaatattttaaaaaataagaaaaaaattggcatgtcatgaatgcataaaatgtacgtagatactattttatcatktgctactacaaattaagcacaaatctattataaaaagttacaatttatcaaaacttatgcaaacactta

SEQ ID NO: 600906 - DNA, 514 bp, Homo sapiens
aactgaaaattaagggaaatatatatatgcaaaatatatttattatatatgtttctatatataattcatctatactattgtatcacattgtatttttaaatgatctaaactctgataatcatactttacaaactagatctaaaatttaatttccagtatttaaaaaatttatatgccagtaaaggttaagyctacctaggtgacgaaaatttcctactacaacaaatttaagtagtcgaaaatacacttattcccacatccagaatgtacattagattttgtagcccagactgagaatttgctggaggctgttgtctattttgcatggctgtggaggaacaatatttattagataagaggagtggccataaaaaaaaaaaagttttttttttttattttgagatggaatcttgctctgtcacccaggctggagtgcagtggcacaatctcagctcactgatcactgtaaactccacctcctgagttcaagcgattctgccacttcagcctccgg

SEQ ID NO: 600907 - DNA, 534 bp, Homo sapiens
caaccttgtgggggatattcagaaacagagaataacacctgctttctcatttccagagctatcagcttcccagtttgcacaattaatcaagaaataatgtgggaccactggcacaaatgaggcatctcccggaagcttaacttcctatccatcccatctcttagacagataatgccggttaattactttgaatgtaaggactttatccaaaatcacttatgtgtctaaactaactccttctacaaatcaaaaatggtaaatacctcaacagaaaaatgggcaaaagcttattattatcaacaaataagaagaaagaaaccctatgccggataacaccaaagctttggcccagtgccctcagttgaaacatcctargcttttttcttttcactcctatcacaaccaatctgatttagccccttcacactttactcctagattttgctagacctttctattttgtctccctgaattaagctttcccctctagggcattctacatatggattctaaaataatcctttgcatgtctac

SEQ ID NO: 600908 - DNA, 490 bp, Homo sapiens
atacttggctctgggttggacacaaaatgagtgctacatatagaaagccagggacaaagatgagttctggacataactcaaagactgagtaatcatgttcacagccaaccctcctgcatatgctaggcactgatgaagtgtttcrtatattcactcacctaaatttcacaacaatcctatgaaatggtaactagcataatccccagtttaaagatgaggaaattaagtcacagagcagaataacttgctcagggtcatcaagctaataaatgacagccctgggttcaaacccaggcagcctggctctagaatcaactcttaaccatttagagcatcatcactgagatggggagagggacaggctgctgtgaagagggtgaagcgaaaatgggaggagagcagcggttaagcaatgatgcgatggggctaaatgaaaatggacaagtaaacaagtaagagcaatcacaagtaaaagactggagaaggggcc

SEQ ID NO: 600909 - DNA, 441 bp, Homo sapiens
gaggcaagaccctccaccagcaaaaagatcatgacttgccagaggctcagatgattgtcagcattttttaggcaatattttaaagttaaggtattgatagcggcaggaggcagacagatcctaggcagacaggggtgggtccccaatgaaagctgacctccaaaccagacagtttaaaggctgaaagccaagctacaagtcttggataaatccgtggacagattgagaacctctcgttctgtttggcacgctttcctctgatcgatccctgcctttaacctattttacatatgcctactcttccctgtttttttacgctgtgcccatctttaagtggtgcctttttttttcagcctttttggcatactcacaaaccagtcagcacacactctcccattstgaacccataaaaatcctcttcagtcctggttccacttcctg

SEQ ID NO: 600910 - DNA, 644 bp, Homo sapiens
caaactataattattcatcattgttcaccattttcaaattctatagctttcttcacatgaaggtttatagcgctttatatgtctaaatcaggtgtgtgagaaagaactgtactgcatggattggacagttaaaatgatgcaaaaagtctgcaaagtctttagcactccagtggaaagaaagaacttcctgcagaatgtggcaaatgcatttgcatgtgttataatggaaatgctgcaatcaattatgtctggtgagtaggaatgtacttggtgcacaggtgtgcgtaaaaatgcgctctagtctccacctaaaacagagatatttttctctaacagtccaagaatggaaaaaaaaaaaaaagctatttctatgttgactttaaaaaataaaaactaacaataagtagaggaagcggacttttgtttgtttttccttgcaatatatttagttcctggctttcgtcactttaaaaatctggtattggttttaatggaraatataaagttgaagagtctgctttgaaaggaaccactttcaattttgcacagcaaaaaaatttaacttgctcacttaccaactgtcactagcataaaaatatatttgtaaatattattttacagctttattaagtaaccaacatgat

SEQ ID NO: 600911 - DNA, 510 bp, Homo sapiens
tttccctacaggggcgcttggtgtcttccagcccagctgagctgtccaatgccctctccggagacccttgtcagccagttgtctcccagcctctctggcaggaccgtcagaaatgcccttgaatgatcacatggggaggtgttgactaagtctgctgaggcctacctttagccctactctctttcccaagtttaggtccctcaacaaccaggatgaaaacacgtatgtgaattgcctggattctcagcagtgtcacggcagctcagagtcaaggcgaccttgaggatcactggagctcatgcagtcctgctagcccctacacctactcacatgggcagatgtggcyttggtcctggggagctgggtgggaaggaaggcagggatgccacaaataccttcatcttccggggaagtagagggaatgggagtgcctgactacctcagcctggggaccttggctcctcttctcactatcagcagagagctgttactgaacagtgaaaggggaag

SEQ ID NO: 600912 - DNA, 510 bp, Homo sapiens
tttccctacaggggcgcttggtgtcttccagcccagctgagctgtccaatgccctctccggagacccttgtcagccagttgtctcccagcctctctggcaggaccgtcagaaatgcccttgaatgatcacatggggaggtgttgactaagtctgctgaggcctacctttagccctactctctttcccaagtttaggtccctcaacaaccaggatgaaaacacgtatgtgaattgcctggattctcagcagtgtcacggcagctcagagtcaaggcgaccttgaggatcactggagctcatgcagtcctgctagcccctacacctactcacatgggcagatgtggccttggtcctggggagctgggtgggaaggaaggcagggatgccacaaatacyttcatcttccggggaagtagagggaatgggagtgcctgactacctcagcctggggaccttggctcctcttctcactatcagcagagagctgttactgaacagtgaaaggggaag

SEQ ID NO: 600913 - DNA, 606 bp, Homo sapiens
ctctggctcggacttcctgtactgtgttgaatagcagtgatgaaagtgagcatctttgttttttctcgacttttccccagtcattgtgatgttaactgtgggtttgttgtattcagtctttattatgtcgaggtacttttcttctacccctaattcactaaaagtttttgtcatgaaaggatgctaaattttaccaaatgctttttctgcatctatagggatgatcatagagttttattattattattattattttattattataccttaagttctggggtacatgtgcagaacgtgcagttttgttrcataggtatacatgtgccatggtggtttgctgcatccatcaacccattacctacgttatgtatttctcctaatgctatccctcccatagtcccccacctctggacaggccctggtgtgtgtgatgttcccctccccatgtccatgtgttctcattgttcaactcccacttatgagtgagaacatacagtgtttggttttctgtccttgtgatactttgcttggaatgatggtttgcagcttcatccatgtccctgcaaaggacatgaactcatccttttttatggctgcatagtattc

SEQ ID NO: 600914 - DNA, 518 bp, Homo sapiens
cattacattaggttgtctacttgtgctctttcagattttttgaagtaggcatttaatgctatgaattttcctcttagcactgcgtttgctgtatcccacaggttttgataagttgtgtcactattattattcattttgaagaattttacaacttccatcttgatttcattgttaacccaaaaatcattcaagagcagattatttaatttctatgtatttgtgtagttttgagggttccttttggaattgattttcagttttattccaccgtggtctaagaagatacttgatatgattttgattttttaaaatttattgagacttgttttgtgkcctatcatatggtctgtcttggagaatgttctatgtgctgatgagaagaatgggtattctgcattttttttgggaagaatgttctgtaaatatctgttaaatccatttattctagagtatagtctaagtcctttttttgttgattttctatcttgatgatctctctggtgctgtcagtggagtac

SEQ ID NO: 600915 - DNA, 518 bp, Homo sapiens
cattacattaggttgtctacttgtgctctttcagattttttgaagtaggcatttaatgctatgaattttcctcttagcactgcgtttgctgtatcccacaggttttgataagttgtgtcactattattattcattttgaagaattttacaacttccatcttgatttcattgttaacccaaaaatcattcaagagcagattatttaatttctatgtatttgtgtagttttgagggttccttttggaattgattttcagttttattccaccgtggtctaagaagatacttgatatgattttgattttttaaaatttattgagacttgttttgtggcctatcatatggtctgtcttggagaatgttctatgtgctgatgagaagaatgggtattctgcattttttttgggaagaatgttctgtaaatatctgttaaatccatttattctagagtatagtctaagtcctttttttgttgattttctatyttgatgatctctctggtgctgtcagtggagtac

SEQ ID NO: 600916 - DNA, 456 bp, Homo sapiens
gctagaagtttaagatcaaggtgttggcagggttggtttcttctgaggcctctttccttggcttgcagatggcggtcttctccttgggtcttcacatggtctwctgtgcttgtctgtgtcttaatctcttcttcttataaagaaaccagttatagtggattaaggcccactcattttatttggataatctctataaaggccctagctccaaatacagtcacattctgaggttctacaggctaatatttcaaaaaaggaattataaagggatacatttcagctcataacagtctttataaatcagggttctgggaatttcattccaaaagaagtctgacctcaccttttctaccagcattattgggttggaagttctttggcagcatatcttcaggaactctttaattttttttcatgtgtaatagtgttgattatgcacctcctatgggttaggcc

SEQ ID NO: 600917 - DNA, 594 bp, Homo sapiens
cctccttccttttcaccttctgccataattgtaagtttcctgagacctccccagccatacttcctgtacagactgtgggactgtgagccaattaaacctcttttgtttatgaattacccagtctcaggtagttcttcatagcaatrcaagaatggtaccaatacagaaatttggtatcaggaagtgatgccttgctataaaaatacctgaaaatgtggaaggaactttggagctgagtaatgggtagaatttggaacagtttggagagctcagaagaagacagaaacatgagggaaagttttgaacttcccagagactagttgaatgttgtgaccaaaatgctgatagtgatatggacaatgaagtccaggctgaggtggtctcagatgcagaagaggaacttactgggaactggagtaaaggtcactcttgctatgctttagcacagagactggtgacattgtgtccctgctctagggatctatgggacgttgaacttgatactggtgatttagggtatctggcagaagaaatttctaagcagcaaagcattcaacatgtggcctggctgcttctaacagtgtatggtcatat

SEQ ID NO: 600918 - DNA, 464 bp, Homo sapiens
gatctatgggacgttgaacttgatactggtgatttagggtatctggcagaagaaatttctaagcagcaaagcattcaacatgtggcctggctgcttctaacagtgtatggtcatatatgtgagcaaagaggtgatctgaaattmgaacttatatttaaggagagcataaaagtttagaaaatttgcagcctgaccatgtggtagaaaagaaaaacttattttctggggaggaattcaagccagccacagaaatttgtgttaagtaacaaggaggtgactgttaacagtcaagacaatggggaaaatacctcaaaggaatttcagagacctttgtggaagcccctcctatcacaggcctggaggcttaggaggaaagaatagtttcatgggccaggcctaggaccctgcagcctgcacagcctctggacactgctcactgcatctcagctaccccagtttcagct

SEQ ID NO: 600919 - DNA, 661 bp, Homo sapiens
tggctttatttctggattctggattctgttccattggtctgtgtgtcttttttatatcaatactgtgctgttttggttactatagcattatcatatatttagaagtcagataatgttatgcctccagctttgttcttaatgctcargattgctttggctattcaggcttttttttggttctgtataaattttagaaattttttggtaagtctgtgaagagtgacattgatattttgataaggagtgcgttgaatctgtagattgctttgggcaatatagccattttaacaatattagttcttctgatgcataagtatggcatgtttttctattgtctgtgttctcttcatttttttcattagtatttcatagttttccttgaaaatatctttacctttctggttagatttttccctaggtattttattttatttcattttagtagctattgtaaatgggattgctgtcttgatttctttctaggctagattgttactagtgtatagaaatactactaatttttgtatgttgcttttgtattaagcaacttcattgaattcatttatcagatctacaaaatttttggtaaagtctgggtttttctagatacgattacatcatcagcaaagagagataattttacttactcttttctaatttg

SEQ ID NO: 600920 - DNA, 661 bp, Homo sapiens
tggctttatttctggattctggattctgttccattggtctgtgtgtcttttttatatcaatactgtgctgttttggttactatagcattatcatatatttagaagtcagataatgttatgcctccagctttgttcttaatgctcaggattgctttggctattcargcttttttttggttctgtataaattttagaaattttttggtaagtctgtgaagagtgacattgatattttgataaggagtgcgttgaatctgtagattgctttgggcaatatagccattttaacaatattagttcttctgatgcataagtatggcatgtttttctattgtctgtgttctcttcatttttttcattagtatttcatagttttccttgaaaatatctttacctttctggttagatttttccctaggtattttattttatttcattttagtagctattgtaaatgggattgctgtcttgatttctttctaggctagattgttactagtgtatagaaatactactaatttttgtatgttgcttttgtattaagcaacttcattgaattcatttatcagatctacaaaatttttggtaaagtctgggtttttctagatacgattacatcatcagcaaagagagataattttacttactcttttctaatttg

SEQ ID NO: 600921 - DNA, 518 bp, Homo sapiens
acttccttattcagttaaaaaaaaatcctttaaaaatgaaggtgaaataggtagatcctcagatactcagataaaaggtgttattgtttgaatgtatatgtctctccaaaactcatatattagaacttaacccccaaggtggtgatagtattaacaggtgaggcccttgggaggtgataaggccatgagggctccaccctcacagatggaattagtatccttataaaagaggcttcagagagctgcctccmaacttctgtcccttccaccatatgaggacacagcattcctccacttctggaaaatgcagcaagaaaagcaccatcttggaagcagagagcagccctcatcagatatcaaacctgccagcaccttgatcttggacttctcagcctccagaactgtgagaaataaatttctgttatttataaattaccctgtctcaggtattttgttatagcagcccgaacaaattaagacaaagggaaactaagataattagttgccaacagaccttc

SEQ ID NO: 600922 - DNA, 602 bp, Homo sapiens
acttccttattcagttaaaaaaaaatcctttaaaaatgaaggtgaaataggtagatcctcagatactcagataaaaggtgttattgtttgaatgtatatgtctctccaaaactcatatattagaacttaacccccaaggtggtgatagtattaacaggtgaggcccttgggaggtgataaggccatgagggctccaccctcacagatggaattagtatccttataaaagaggcttcagagagctgcctccaaacttctgtcccttccaccatatgaggacacagcattcctccacttctggaaaatgcagcaagaaaagcaccatcttggaagcagagagcagccctcatcagatatcaaacctgccagcaccttgatcttggacttctcagcctccagaactgtgagaaataaatttctgttatttataaattaccctgtctcaggtattttgttatagcagcccgaacaaattaagacaaagggaaactaagataattagttgccaacagaccttcrctaaaagaattactgaaggaaattcttcacagagaagggagattatatcagaagtaaacttggaggcaggcacagtggctcac

SEQ ID NO: 600923 - DNA, 570 bp, Homo sapiens
ctgtgggtctgacagtttcacccaggggcacggcaaagtcaccagcactgagtaaccttgaaaggggaataggggacaaactaaagctgcatttgatcccagcccaccagtcatgcattccayaccctggttataatatcagtacagatgaaacctctgttctccttgcatagactgagagcagagagacgtattccagaatccgttctcccctctgccatggaggcagaactgtagctgggcacaagcttgcaggccaggccactcctcaggctctgcatagctggtggagccaggtaactaggttcttgtccatgggatatgagtagtggccacacatgcaacttcctgggctggtcctgtggacaccagtgtggactcttccacacatcctttcattctcactggcagttctccagtcaggggtgggggagcagcagatggagggaacttgcttctctgaatgatctcatggagtggagctggacttcccatctatcctcagacccattacaggaggggaaaatatggtctgtgttttgaggcattgcctggtcagttacttttact

SEQ ID NO: 600924 - DNA, 464 bp, Homo sapiens
gaattcaagttcccaccacctcaaactctttgtctagcatctcctccagaaagtgtctagtacactcattctcagtgaaacatacaggttaatcctaacatttcacatcttgcttaattagttggcttcccctgacaactctactaaataatcaaaatagcaataacccttccaggaaacaagatgttcaaagcagcctgacaaagtggtaaaggtcagaggcattccttccagattctagtccagtactgccaataattaactgtgtatcctggaaaagcacttccyttgtttgggcctcagtttctctagtatctaaagggattggagtcatgctgtcaaaagtccttttcacttggaacattttgtcatgtaggtgaaaagactttgaaaggtaaaaagcatcatgttaagtaaatatgcttaactacacaacactcatttgaggcattatttttctttaa

SEQ ID NO: 600925 - DNA, 401 bp, Homo sapiens
tcacattcagttgtttaagattcaaacaaaaaacccagctttgtaccaatggsttagagaacttcccataaaagtcagcaaaagaaagaagtaaaaataggaggcatgccctctttcactgtcagtaaagggccatgagcctggcaggtcatggaatttgaaagcagagaatgttagggatgggctccattgccttcatctcatccttcctctcctttcagcaataaggacatgtttttaaatggttttgctcttggatgcttttctctctatcactaaaaatggcttatgctgaaaagaagaaaaaaatatattcatacaccatatgctgaaaattgctgttgcaaaaacctgtgtttagctattcactggaacgcctgtggtcctgggccatagtcgtc

SEQ ID NO: 600926 - DNA, 547 bp, Homo sapiens
ctcattatcgctaagacaaggacagcacctagccattsatgacggatccacccccatgactcaagcatctcccattgggctccatttccaaccctgggaatcaaatttcaacatgagatttggaggggtcaaatattcaaaccatcgcaattctacagtaagtgaaattgaaattttacaatgttaattatgtaaaatccacttttttttattatatcctaggtgagctatctgaaaatttaaatttagcacttcacaaggtttgaataggatgaaattcacaggcaaagcaccatcccagctactaacaaatgataactcctactttggcagccagcaccagcataatgataatagttggcagggagatactgcaaagagaagacagaaaaggggtcacaaacaagtagcagcttagaaaaaatgaaaagtttgttaaacatgcaccaataaactttggaaggttatataatattcctgaaaagtagaagtctgtggcattaaccattcctaacatttcaggctagctttgccatatactagttgt

SEQ ID NO: 600927 - DNA, 637 bp, Homo sapiens
aatctaaatatgtacaagatcttatagactatcataatttgtattaaaatatacaatggaagatttatattgataaatatatatgtatttatgtgtagtgtttaagtaattaaagttttactagtctaaacatttctttccttctaaatgaaaacatttaatgccatttgaatgtgaatctcaatatgtttttgggtggataggtaaggagacttggcaagatgtatctaaaatttgtatagaagagaaagaaacagatcagctaacacactgttggagaatcaagaccagataggaaaatttgctaattattattataatttatggttattaattttgttattagcataggaatagacaaatagatcaaggtaacaaaagggagctcaataaaaaacacacatatatatggaaagttgaatttgataggcttgatatttcagatcccctaagaaacaaatgacttgggtaactggttatctatacagatrtgtaggtagacagatagctatagatgaatagatattgtcatggatatgtacaatttaattaagaagtcagttttggaattcatatttatatcacaacaggattcttaatgagacattggtaataaatcataaagtaaaatactgat

SEQ ID NO: 600928 - DNA, 583 bp, Homo sapiens
caccagttctgggaatgcgttaacacatagcattaaatatagctcaatggtgactcatagtataataacacaggtcagggaatgctgggtactagagagtttaaatataactgctctaatgacaacagtctccattgcaaagaacatatttggaaagaaattctcgatggaatgaatatatattgttttactcctaagaggatgatgatagatatgtatgacaagtatggtgtctatacacatcattcatactttgatgtatcacttcctttggcacatgggatattcatgtgyccaagcaaagcaagaacaagacaaatcattgggaggacatggaatgaagctttatattttttgagcaaggaatacactttgggtttaattttgacatgttgagaaaaagaagagtgacaggttttttgtttgtttgttttaatggaagaactgataattggcaagctccttggagaactgctagatgctattaactatggaaaatcaaccttacattagttgtaatcagagaatggtgtgaatgtatacaactattggatattttaatacatttacacaggtagaattt

SEQ ID NO: 600929 - DNA, 463 bp, Homo sapiens
catgtcttagagaatttacataaaaatgtggaagggaaagccacattcccaacaaatcccttccaaaactctgatgaaaagatacctttctgacaagatgcactaaaaattacatcatgtaattagcatttatgactcacatgcacatcaataatcttcatcattatgttatatttggagcatatcaccatttacaaagtttttattattcattaaaacttcacaaggtgccaggcagatccagttaatcaatgartcatataaatatatctccccaccaacccatacagaggtgcatgcgtgcgtgcatcgtgtgcaacacgacacacacacacacacacacacacacacacacacacacacacacatgctctttgcttcctctctactctcactgctaatgcgtcatctttctttccttggtcaataaacttccaaatgatagctggtttccagatgttct

SEQ ID NO: 600930 - DNA, 566 bp, Homo sapiens
cacaattgacaaagaaatctgttacctctgtggcacacaattatttaatgtaacaattataatgattactgataatgtaactaagatatatcagaattatagaagttgtccataattttagaacatatactaataatatatttatacaactgtaacccaaagaaagccaaacccccccattttattattattttttgtcaggggcaggatctcactctgttgcccagtctggagtacagtggcaygatctcagctcactacaacctctgcctcctgggttcaagtgattctcctgcctcagcctcctgagtagctggggttacaggtgcgcaccactactgcccggctaatttttgtatttttagtagagacggcggtttcaccatgttggcaaggctggtcttgaactcctgacctcatggtctgccctcctcagtctcccaaagtgcgggaattacaggtgtgagccaccatgcccagccaaacccagttttatatttgacagtgtttcttgtatgacttttgtaccaaataagccaaatttcatctttatattagtgtactat

SEQ ID NO: 600931 - DNA, 375 bp, Homo sapiens
tcacttttgttttgcattagcaaagaggttggaggcattgtgcctggtgggaggtggttgtattatggggaagacttctcttttgctgttctcaggatagtgaatgagttctcatgagatctggttgyttaaaagtgtgtagtactcccccacttcactctctctcctgccccagctatgtaagaagtacctgcttctcctttgccttttgccaggattgtaagtttcttgagggctccccagtcatgcttcctgtacagcctgtgtaactgtgaatcagttaaacccctttctttataaattgacttgtctcgggtagttccttatagaaaatggactaatacagaccccctttggctcccaaatgaggattga

SEQ ID NO: 600932 - DNA, 613 bp, Homo sapiens
gtgctcttcttactgctcagtacaatagatgactgctgctgtgatgtgcttgccaggagctgtggccttgaggtgcagcagaggagtatggttgattgcctgcaggtgtctgactgcaggatgttttcaccakgcattgaaaatcaaggcacgtatctcagttgggcaaaccagctgtaaggcaccttgtcacctcagtctatgtttagatctatgatggtaggaaataaaaacaaaataaaaatttgcttttttaaaatatgggtaagtcaagaaaatggggtgggaggaagtgaagcaaatacgtgttttgagaaatgttggtgggaattcagacattgtgggctggaagttacctcttgcagtactgtctacaaaatgctgggttaatcacaaaagtggccgggatctcattctttttaagtgaataatgacaatctctaatgtccctttcattttatgagtcttatgacatctggtttaatttgtagagatattaatcaatctttaatgtaatgaaggcatgcctagaaagtgttatcttctcttaatagctccaatcttaaaggaaaagaaaatctctcaaactttaatttcaacatcattttattgg

SEQ ID NO: 600933 - DNA, 579 bp, Homo sapiens
caaactgtcacactagcaagtcaattgttagggtcatttcaggtatttttagattaatgtcttcaataacacaagaaacagtgatgctgatctttaaggaaaggtaataaagaattgtaactgaagaagaatagtcctgtcagtttcccttctacagtctatatatgataaatttaatctagagtgtgagcaaatacattaaaggaactttggcttctgaatacttaggctcagcaggattttttcccaaactttctcagggaattatatgactagtattaatgaaactatttttgtaaatatacttttaacattcaagtttgttatatgtgagacaaatttaaatggatatcaaacagtactaaatataaaaatatttattgcaaagtttaagtctttggagatctgaactattatttcatcagtycctgttagctctatggtgaatgtatacatggctactatttctacactcactgaaatggggtaggtgagtgttaaagcaaactaaatatggcctgagaaggactccgtacttctatatttgagtgctggtggatgaactgtaacctagcttaa

SEQ ID NO: 600934 - DNA, 563 bp, Homo sapiens
atagctgagtcttggccaatcccagtggccacacttcaaccactcatagacttgtaagtgttcaaactgtgttcaaataagccaaacaccaacctgtaacccattcagctttttctgtatctcactttcgatttctctacgccatttaccttttattgtctataaatttgttctsaccacaggcatctctgtagtctctctgaatctgatgatattctgggggctgcccagtttgtgaattgttcattgctcaattaaactcctttaaatttaatttggctaaagtttttcttttaacagatggtgtcagaagtgggttctgaagtagatggtctagaaccccccaggagcattgagtgaacaacaagatacctgctggacccacctgtgtcctttggtctctgagtagctggggatcataattaagttctctctctgatttcagagctctacagatttgtgttttgagctctcttgttttgagctttatttgggtaaatttctattccagactgggtttggaagttgcaacagaaactagactgggcccaggatgggatttg

SEQ ID NO: 600935 - DNA, 647 bp, Homo sapiens
tgttggtttcacctgtgaggtaacttttggtaaagtttaaaagccagatatattggctgtggctaaaattgggtaataagaaatttaaaagtactttttttttwtaaaaaagggagtgctatagttaaaactcagcttaattaaaagtggatatccaagctacaggtacatttaaaaggcctttatgtcttttctctccattgatcttgttttgctggaaaaaaaggtttttttcttctcagtcgactgaattatttttctccattttgtcttgccactcttaatgcacacaggagaggccctaaaataacttctgatagcctgggactccttgggaaaacagacaaggctccattgaccccatttttgaaaaaacaaactaacaacaacaacagaaaaagcacctctgttttcctcatggaaccccaagaattaaaactggatagatccctctcataatctgttttgccttccagctgtgcctgcttattaggctttagaaactgaatgttttcctagtcatttcttgaggggctccatgctaaagccagtaatccaattaagaaacttagaaactgttaaatgaaaaatcttacaactactggatctttttgtctgtctgtctgtagtaatatatgtgttgtgtg

SEQ ID NO: 600936 - DNA, 647 bp, Homo sapiens
tgttggtttcacctgtgaggtaacttttggtaaagtttaaaagccagatatattggctgtggctaaaattgggtaataagaaatttaaaagtacttttttttttwaaaaaagggagtgctatagttaaaactcagcttaattaaaagtggatatccaagctacaggtacatttaaaaggcctttatgtcttttctctccattgatcttgttttgctggaaaaaaaggtttttttcttctcagtcgactgaattatttttctccattttgtcttgccactcttaatgcacacaggagaggccctaaaataacttctgatagcctgggactccttgggaaaacagacaaggctccattgaccccatttttgaaaaaacaaactaacaacaacaacagaaaaagcacctctgttttcctcatggaaccccaagaattaaaactggatagatccctctcataatctgttttgccttccagctgtgcctgcttattaggctttagaaactgaatgttttcctagtcatttcttgaggggctccatgctaaagccagtaatccaattaagaaacttagaaactgttaaatgaaaaatcttacaactactggatctttttgtctgtctgtctgtagtaatatatgtgttgtgtg

SEQ ID NO: 600937 - DNA, 542 bp, Homo sapiens
tgaagtttgctatatctactgacttcttttcacaaaatattgctctgtagcatgtgatgctgtatgatagcattttgctgaaggtaaaacttctttcaaaactaaggtcagtcttcttgaagscctgccaaggttatgtaataaactttgtcaactaagtatgtgtaactcagttttgtaatagttcagatattttgctataatttcagcaatgttcacaacatcttcaccaggtgtagattccatctcaagaaatcactttctttgctcatccataagaaacaccttctcttccactgaaattttatcagtcccatcttcaggtcccacttctaattctagttctcttgctatttttaccatatctgcagtcacttgtccactaaagttttgagctcgtaaaagtcatctgtgaggttgaaaccaacttcttccaaactcctgatgatgttgattttttgacctccttccatggatcatgaatattcttacaggcatgtagaacagtgaatcttttccagaaagttctcagttgattttgc

SEQ ID NO: 600938 - DNA, 532 bp, Homo sapiens
ttctttcaagttagtacctgtgttattttgatgtgtctccatgttatgatttcccatatacattctttyttcctgtactgttttaaattttgttttctatctcttctaatgagttgtttatttttgctctaaatattttcttgtttatagacctaacttgacattccaggattaccttgtattttctacacaacctggaatcagccaactcataaaggagtcctggtcccttttagtagaaaacggtgttcgtgttcaaaaccccatacacagacattacataagtccattgtgaattagctattattgatttggatacccatttggtatcaaaactaaaaaaataaatataatcatttaaaaattatcagtttatatggattaaattttatcactgcattacttccttgcttctctccagtttccctttacaacagtaagaacattggtttccaacaatatcaatgcattactcattatcaccatctgacaatacacatcctaattaattccacattttggctattgtgaa

SEQ ID NO: 600939 - DNA, 532 bp, Homo sapiens
ttctttcaagttagtacctgtgttattttgatgtgtctccatgttatgatttcccatatacattcttttttcctgtactgttttaaattttgttttctatctcttctaatgagttgtttatttttgctctaaatattttcttgtttatagacctaacttgacattccaggattaccttgtattttctacacaacctggaatcagccaactcataaaggagtcctggtcccttttagtagaaaacggtgttcgtgttcaaaaccccatacacagacattacataagtccattgtgaattagctattattgatttggmtacccatttggtatcaaaactaaaaaaataaatataatcatttaaaaattatcagtttatatggattaaattttatcactgcattacttccttgcttctctccagtttccctttacaacagtaagaacattggtttccaacaatatcaatgcattactcattatcaccatctgacaatacacatcctaattaattccacattttggctattgtgaa

SEQ ID NO: 600940 - DNA, 592 bp, Homo sapiens
tctctgcaataggctgtggaggtttcgggragcggtgtcatggttaatgtaaaactgcccttcttaccctcttcaaaatatcttttcttatttctgtgccccaccctggtgttgtacataaaaacacacacacatacaatgtttaaaacactatcataatgtttaattgacaataatttgagctttatgttgatagatttttaaaatagaatttgatagcttcatatactattatttgatagatttgataaaaagaaaacatagttgtactattatttgatagatttgataaaaagaaaacatagttgtctatgcttaaacttatatttccacattaatttaaatgctacctgggtcactctggcttcctctgaaggcttgatagctgtagtaactgacatgagaaactatcaagtagatactgtgttccatttttccattatctatctttccaaatatgctgacatctttttttctctttttgttccctcctggtgagttgacagtgatcaatacccttcattttacttatattaattttcagtgcaagtttctgtcactgataattgaatcccttcatcaatatgaccat

SEQ ID NO: 600941 - DNA, 642 bp, Homo sapiens
tggcttcctctgaaggcttgatagctgtagtaactgacatgagaaactatcaagtagatactgtgttccatttttccattatctatctttccaaatatgctgacatctttttttctctttttgttccctcctggtgagttgacagtgatcaatacccttcattttacttatattaattttcagtgcaagtttctgtcactgataattgaatcccttcatcaatatgaccatatatcttggatactctcaagagtttactatggagggtacttcaatttttagtttgagtgttgcaaagtcaagttgcatagcatcaggtattttcgtggattttgatccactggttttctaagcaagtgagacgccttctaaataaaagtattttcagacaccaaatcagtaaatcagataaaagttagaagttttggtaaaaacccttaaatgtgyaaagaagttatagattaacatattattcattcattatgacttccatccaaaatattattaaagtattacatagaactcctatgattctgcatagcatagactgaatatattcttaatcttctgttaaattaacaagatactgatgtccagacatcttaagtgacttacttatacattgttacagtgctaatgaca

SEQ ID NO: 600942 - DNA, 489 bp, Homo sapiens
tattttcctctttgtgctttagtttcctcatgcataaaatgaggataatatagtcactgagtttgttatgagcaacaactaatttatacatttaaagagttgaaaagtgactggtggctaagaaatgcttactaaatatcatctaattctagttctttttcagattgtataaatcttttgmcttttactaaagaaatggtcagcaaatattagcgactgcattgctttggggtactggtcagcactgaactcaccaaagagagctgttaaataactgaaaagaaagattccagtaaaatactatgtcaagaaggagaaagagaacaagagcgagagaaagagaaagagagagagagagagagagagagagagagagaattcctactaataaaggagaagctaaaaaattttaccaattaaatataaatatgtaaattatacactcgggaacatgaaaaatgaataaggctggatctgaacatatctcta

SEQ ID NO: 600943 - DNA, 489 bp, Homo sapiens
tattttcctctttgtgctttagtttcctcatgcataaaatgaggataatatagtcactgagtttgttatgagcaacaactaatttatacatttaaagagttgaaaagtgactggtggctaagaaatgcttactaaatatcatctaattctagttctttttcagattgtataaatcttttgccttttactaaagaaatggtcagcaaatattagcgactgcattgctttggggtactggtcarcactgaactcaccaaagagagctgttaaataactgaaaagaaagattccagtaaaatactatgtcaagaaggagaaagagaacaagagcgagagaaagagaaagagagagagagagagagagagagagagagagaattcctactaataaaggagaagctaaaaaattttaccaattaaatataaatatgtaaattatacactcgggaacatgaaaaatgaataaggctggatctgaacatatctcta

SEQ ID NO: 600944 - DNA, 465 bp, Homo sapiens
gcaatgtgtaataatcacatcatggaagatggggtacccatcccctgaaggatttatcctgtgtgttacaaacaatccaaatatactcttagttattttatcttatttatttatttattttattattattatttttatttttgagacagagtttcactcttgttgcccaggctagagagcaatggtgccatcttggctcactgccacctctgcctctcggattcaaccgattctcctgcctcagcctcccgagtagctgggattacaggtgcgtgccaccatgcccggctaatttttgtatttttagtagagacggggtttcgccatgttggcctggctggtctcaaactcttgacctcaggtgatctgcctgcctcagcctcccaaagtgctgsgattacaggaatgaaccacatgcctgactggctcttagttattttaaaatgtacaagtaaattatcattg

SEQ ID NO: 600945 - DNA, 598 bp, Homo sapiens
tctattgactaacgatgttcagcactttttgacatatttatttgccatctgcaccttttcttggtaaaatgccatcactgtatgaatctttaaatttacagacatggaaacgagtcttgtttacttattgtagtgccctttgaactgagaagggctctgtcttaaagattgtaaacacgcatctaaccaargtaaatattctcatagaagtaagaaacactaggttaattcagtgtattaccttattttggcttccagctcatacaaaaatgaaaaactccctaatcttattcacccacagacacgtagtgtgaaattggtgagtggcctgtataagcaagctgatcacagaggtatatgtcttgttaaatatatccatttcatgaatatcttaataggaaaaaagtctgggactttcaatgtctgcttttcaaaaatggagaaatcttacagaggttacagaaaacttcaccaaattagcaggcatgctactattttgggcataaatcctcagcaccatgaggttttaggtaggtcataaatggcattaacacattttttagtttttgttttggctactcatctaagagacgttgac

SEQ ID NO: 600946 - DNA, 575 bp, Homo sapiens
atctgagattaccactattaaatttacataaactatgtgctatgatttatgaatgatgccatttggtgactatattagtacagtatctggcctcagattttctttttttgtttgtttgtttttgagacaaggtctccctgtgtcacccaggctgagtgcagtggtatgatcacagctcactacagcctcaacctcctgggctcaacggattctcccaccttagccaccctagtagctggtactacaggtatgcactaccatgcccagctaatttttgtatttttttgtagagacaggtttcaccatgttgcccaggatcccttgaactcctggctcaagtgatccacctgccttggcctcctaaagttctgggattacaggtargagccaccacgcctgctcaaatttttaaatttttaaaaattacattattatttccacatttgtcattctagtcttctccctctctataaatgtcaggtttttctttttgttgctcaagctaagttcatcattactaggctccctctttgcttagtttgtacctcctaggttttctgaggctgagaagctca

SEQ ID NO: 600947 - DNA, 600 bp, Homo sapiens
ttctcttcaccacaaaattgaccagaaaagggccagcagtgtccagttcaatagaaaaaatcagggattaaatccccacttaaaaggccaaaaaggcttccttccaataatattcttgctagaacagaaaaaagctaggcaaagtcctactcaagcagcaaggaaccaggaagagcccaatttaatagaattaaagcaactcactatcatgctactacagaaaaatgtgcagagcactggattaagacttataagtcaccaccatggatcacattttctccagccagaaataacacaaagagtttaagaagccagcatgaatgactgggaaagacaataaggtctcagggcacatcaggaatcaggacyctatttaagtcatggcaccagaaactgtcaaataaatgcaaatccggacttagagagtgagagctttactcagaaaaaagactattgcaataggcaaaatattccaatctcagaaatctaaaagcatcttaaaatcaaacagtaaaagactttttcatttataggttagagagaggcaagcaaacataagcagagtctattttaagggagaaatttgacacaaggcaaaat

SEQ ID NO: 600948 - DNA, 607 bp, Homo sapiens
gtatcaaaaggaacaagacagatacacaaacaagtgcagacaaattttggacaacacaaatgggagtgcacttgggcaaaacagactcaaaaccaattcaaaacctgatctcaaccaaaatgtaaagcgagtgtatgagtgagctcgattgcttcccttggtaaaactcttgatgggcttttgttacattccagcctttgtataagggcactactttttaagcttttaatatttaatttatccactcagtcagtaccgaaaacagttgttatggaggcctgtgttagtgagatctggcctgcataactttatttatgaaacagatgcctgaccagaagtggcccatggaccttattttgccacctgtgctctatagtatctcatcagttagaaatcaaatttactgaaatgtgagaaaaaacacaaataacaattgctcaaacttccttcctagtaatatcagtytgtttctcattgaccaatctgtttcaaaaagccacacttatcctaaagaaagtttggaaaacagatatcaaacaaggcacatgatccccaaataaattgttacttgtgattaaggaagaaatacaaccaatttcttattcga

SEQ ID NO: 600949 - DNA, 424 bp, Homo sapiens
caaggcacatgatccccaaataaattgttacttgtgattaaggaagaaatacaaccaatttcttattcgagtttttttttttcttattctaggacatctttgatgtaaaggataaaaatgagaatttagaatttgagagttgaaccagatttcataatgacctgtttatttaactmaagtttatacaagaataggggacaatctcatcttaaagtagaaacaagatattcctagaatgtttttatttttctttactcagtacagcatttgacacaagatctgagaattcttgacttaatgatttacaaaaaacagaaacaaaaaaactagtctttcccaaattacagtgataaaatacaagtaggcctaaaatataaagggagtttcaaattctgaagatttcacatgaaatgtctgaaccaag

SEQ ID NO: 600950 - DNA, 493 bp, Homo sapiens
tttctgaatctgctttatcatcctaccctggagaacatggatttgatatatatatatattttaagttaaacattttgcttgttttaaaatagcacactaagataatgctgcactatttaatcctttgttctttttacagtcttttattcctttgagatctttgtcattttaattttttgtatcgctgcatttcctaacttatttcccatatagctctttattaaaaatattttgcatttagatcaaatgtatctgtaatttaggagatctgttttgaactaatttttaaaaggattcaacactatgagcagtttttctttttaacaaaaatatctatttcatttgatgagcatgtaaataactaatttatttcacttccygaccctaagtttgatccgagaacaccatctcatgtctgattgtttctaataacctatttaaactactattttaataaaacaatacatagtatcccttaaggggccaataatgt

SEQ ID NO: 600951 - DNA, 642 bp, Homo sapiens
agttgttacttacgtcagtcttcctgagaactcagaggctaggacttttatgaataattcagtgggcaggggcctggggtgcgtattggtctgggatgaaattataatttcaaaatggaggggtcaaaaatggtcccctgcactgagtctgttctctgggtagaggacacaggaccagtagagtcatgaattgcaggtccaggtggagtcagtggattgccagaatgcaaaagtctgaaaatcatctcaaaagaccaatcttaggttttacaatagtgatgatatctrtaggagtaagtaaggaagtcacaaatcttgtgagctttggccacatgattcctgagcatcaagggaatatagaaaggcaagcttaggggacaatggctggttatcagttaactacacttacatcttagaagaactcaggcccttcccattaggattatagacttaatagtcttacaaatggggtttaggttcctgagcaaggaggagatttattttaggtagggactcttatcatcatcttttcaaagttaaactatcaactaaattcctcctgtggttagtttgccttacgcccaggaatgagtgaggacagtcagcctgtgaggctagaagcaagatggagttggtcatggt

SEQ ID NO: 600952 - DNA, 607 bp, Homo sapiens
ggggagttattaattggttggctggatggtcagagacttggaaaatagcagaagttaaggactggtgatcaagaaatttgtggaagaggtatggatggacctttcagaattggcacagactgaagaaatttgatttccatgtgaatgtctacaaaaagtattycctgtagagtaggctgttcataatcagaaggacaaaaatgacacactctgtgagtatcaaaaggcttttccccagccaccctattgcttggaaaataaatctgtgaacaaagtagccatgctggcagaaatataagctatttatgggctcaaaacaacgtataggcgtgcctaagagacactgcaagtttgattctgaaggaccacaataaagtgaatttcacaataaagcatgacacacaatttttttggtttcccagaacacataaaacttatgtttagagtatactgtagtctattaagtgtgcaaaggtgttttgtctaaaaacacaatgtacataccttagttaaaaataccttaagactaggtgcagtggttcacatctgtaatccaaacatttctggaggctgaggcagaggaattgcttgagcccaggagatcaag

SEQ ID NO: 600953 - DNA, 468 bp, Homo sapiens
tcacactgtgtgttaaaattagcccttgtaggtttatgtgtgtgcttacatgttcattgtttctctttccctgtagactaaaagctgcatgatggtaaggatcacctatttttttattttattttttttctactattgaagatctagcatagagtaagtgctcagtaaatgtctgttgaactaacaagttgaataatcaaggaatctagcaatcaaaatagaacgtttttatcttctgtttgggaccaaggtatgagatcacatagttgatgatttgcaggcaagcttgcacccagaatttggtcattaaaatttttatttttgtctcacttkacagtctacaaacattctctcatttgtggattcttcacggtagtatatgtatttccctggcacaaggaagagcacatggtataccacacctaacaagttctttaaagatcttcgatatcttttctagactctaga

SEQ ID NO: 600954 - DNA, 550 bp, Homo sapiens
ggaggcttgaagtctaaggtcaaggtgcagggacgccttgttcctttcttcctggcttacagttgtcaccttctcactaggtgctcacacagtattttatctgtgcaagcacactcttgctgtcctactttctacatggataccagttctatcatattggggctcaaccctgatgaccacatttaatcttaattttcccttcaaagaccctgtttccaagtacagtcatatagagtttaagacttcaattcacgaattttgggaagatccaattttatccataacaattattttcaagtccatgttttgccttttttacccggttaatggtgtctttaataggatttctgaattttaactaaktttatcatttttaattattggtgttatttgtattttgtttaaataatctttgccttcccaaatctccttaaagtattactcactgtttcttctaaaagttttattgtcttaccattcacatttagtctaccatctatattgaatttattttttactatagtgtcaagtggaggttatttgtatacat

SEQ ID NO: 600955 - DNA, 590 bp, Homo sapiens
ttgttcctttcttattgaagggtacaagctccagatgcctctacctggccatcttgtggcatcattcttttgtggatattttttagctagctattttttagaaaacaaaattacatgtaggtaattatacaaactccagcacacaactaggtgagcttaagcaagtataaacacctgtgraactcaaatctttatcaaaatatgatacaataccattatttctgagaattttataatgccatttatgtgggatttttaatgaccctgataccagaggcaatgacttctctgatttttttatacattagttttgccagttaaaaaactttcatataaatgaaatcagtgtgtactctttcatatagaacttgctttatttagcatactgcttctgcaattcatctttctttttgttattagcaattgtccctttcatttattaacagtaccctattatataaatatatcacattttatatatcacatataaatatatcacatcatgttttcttgtagaaagtttatttttatttttattttaaaaatatggtttatctcaaattaaattatgtgtatgatattggatagtg

SEQ ID NO: 600956 - DNA, 498 bp, Homo sapiens
catttattaacagtaccctattatataaatatatcacattttatatatcacatataaatatatcacatcatgttttcttgtagaaagtttatttttatttttattttaaaaatatggtttatctcaaattaaattatgtgtatgatattggatagtggttgagttacctttttttccttgcggacatttagttatagcatccttgtggtaaatattttyttcttactggattgttttggtaatgttattaaaaataaaataactgaataaatatttcttgttgttgtttccatgatctattaatgtatactagtcttacttctgcacagtcttaattattgtagctttagattagctctaaaagtgatgtggtataaggcctcaatctttgttctacttatgaaaattgcttaaaatattctagatacctttcattttcatatagattttacaattagcctgcctttataaaaacattgggctgaaattataattgga

SEQ ID NO: 600957 - DNA, 566 bp, Homo sapiens
aggcagacattttgaaggataggatatgtaatggttaactaaatgggtcaatttgattaggctatgccctgtaatttgctcaaactcagctaagatgttgctgtgaagacattttgtaggtgtgactagtctacaataatgtctacaataagttgactttaagtraagtagattaccctcaataatgagaggaactcatccaaccaatggaagaccttaagagcataatctcttgtttcccagggcaaagaaattctgcctccatatttcaaaatagaaatcccttctgagtttccagccttccagcattcccttcaggtttcaaacttcagactacaacaaagtcttgtctgagtttgctgcttgctggctcacgcaaaaaattctggactcaagactggaatatcaacacctgcctgagttttcagcttgctggcctgccctgtcctgtatatttcaaacttgccagccttcataattttgtgagccaaatgtttaaaacaaatcatattcatacatacgaatatatggcttatacatacacatatatgggcttatatataatt

SEQ ID NO: 600958 - DNA, 554 bp, Homo sapiens
cttgggagaaagtgtctttgctattgggtggcagagagagaggaaaagatggctaaaatgagaaaaaaaaaaaaaaaggaattactatttcttactatagttggccaaatatctctctttttatctcccaatacaaaaactgttgcaaaatacaagtaaaattcatagcaataccaccatataataaaataataaaaatagatgaaatatcttaaaattttcaagtcataaaataattcttgaaagggttttgcacagcagcaggcaagaaaagccctacaggaattattttgtgttgaagcaaaggggagattgttattatcttctaaaagttacctcagaggcagaaaagcccyagaccaagtatgaagcaaatgagggaaaaaatagtttttaaagaatttatactcacattttcaggaacatctttacagtataatgtagacacatttgtatctttgcttttaacaacacactctctttcctgtaatagcaggatttataccaaagtacatcctgaagcacagcacactgaagtgaatggaatgtttagc

SEQ ID NO: 600959 - DNA, 610 bp, Homo sapiens
aaatctccatttctatgtcttgaagcagaatctctaataattcaaaactgaagtcatcgactttctcatactttctatcaccttcaaaaattaactctcattgaggcaagattgattagagaaaatttttggagaaaaatttacttgatcttggtgtttaagtgattcctatttcctttcttcataagttcttaggcaaaacatcataaataycagtacatttattgaaagcttgctatatgccatgtagtactctgtgtgatttatatatattaccttaatttaaaatcctaccaaacagaaacaaaactttgaggaactgaaataaatccaatgtgcctagatcacagaaagtaagagggaagatggcataaaatagaaagtcttattaggttggtgcaaaagtaattgtggttcttgacatcgaaagtaacagcaaaaaccacaataatgtttgaaccaacctaataatataatgtaactacagtgatataattaatctaccttcaatgatgaaaattgattgcagggagccacaaatggatgggcagagaccagaaaaaagagtattgctcaaatacagctaatccaaggagctttcttctactgc

SEQ ID NO: 600960 - DNA, 610 bp, Homo sapiens
aaatctccatttctatgtcttgaagcagaatctctaataattcaaaactgaagtcatcgactttctcatactttctatcaccttcaaaaattaactctcattgaggcaagattgattagagaaaatttttggagaaaaatttacttgatcttggtgtttaagtgattcctatttcctttcttcataagttcttaggcaaaacatcataaatatcagtacatttattgaaagcttgctatatgccatgtagtactctgtgtgatttatatatattaycttaatttaaaatcctaccaaacagaaacaaaactttgaggaactgaaataaatccaatgtgcctagatcacagaaagtaagagggaagatggcataaaatagaaagtcttattaggttggtgcaaaagtaattgtggttcttgacatcgaaagtaacagcaaaaaccacaataatgtttgaaccaacctaataatataatgtaactacagtgatataattaatctaccttcaatgatgaaaattgattgcagggagccacaaatggatgggcagagaccagaaaaaagagtattgctcaaatacagctaatccaaggagctttcttctactgc

SEQ ID NO: 600961 - DNA, 516 bp, Homo sapiens
cctgtgctgtggtgtgactaggctgagcctggaaaggtgaatgtgagtatgtaaagagaaagggatgtaaaggcaaagggaggagcaaagatattcaaccatacaatcaataacttaatgtacaggggttttttttttgctgmtgtaacaaattaccagaaacatcatggttaaaacaacaaaagttttattatctcacagttctgaatgtcaggagtccatcatgagtattactaagctaaaatcaaggtgtggacagggctacattctttcctggaggctctggaagagaatttacttccaggcacttgcaggttgttaacaaaattcagtttctggcagttgtagaactgaggtccccttttcttgctggcttttgccaagggtaatctaagcttctaaagcttgcctgcatttcttcgatcctggcttcctttatcttcaaaggcagctgaaatataaagccctttataatcaaaatccttcagttgcctcagcttacctgcctttcctttt

SEQ ID NO: 600962 - DNA, 588 bp, Homo sapiens
ctagctaatatttaattttaacatttttgtagagataaggtcttgctatgtttcccaggctggtctcaaactcctggccttaagctatcttcatgcctatgtctcccaaagtgccgggattacaggagtgagctaccatgcctggccaacctatctttgagtttactaagtcttctgtatgatcaggtctgctgctgaagctctccattaattttttaaatttctatcattgtattttttagctccaggatttctgtttgggtttctttttttatggcttctaattctttattaaactccttactttgttcatgcatttttttcctaatatcatttagttatctgttttttttttgtttccttatgcatctcattgaccttctttacaatcattattttgaattatttttaggcaattcatagatccccccttctttagggttagctcctggagctttatttgtttcatttggtggtatcatgtttccaagatatttcattatctgtgtagccttgtgtaggtatctgtgcatttgaaggaataaataccacttycattctttacagactggtctcagaatgtaaaga

SEQ ID NO: 600963 - DNA, 611 bp, Homo sapiens
aaaacaaagaaaaccaggactgagtaaaatggtgggtcattttgctgtattttctccttttcccagtcacattaatacactgattctgataaggatatggaaattctttaaagttaaggaacttactgtcaatgtgtttattttgcacgaatctagagaatatgtggtaaacggcctgaggccacagtgggcagatcacctgaggtcgggagttcgagaccagcctggccaaatggtgaaaacctgtctctactaaaaatacaaaaattagccagtcatggtggcrggcgcctgtgatcccagctactcaggaggctgaggcaggagaatcgcttgaacccaggaggcagagatttcagtgagctgagtgccactgcattccagcctgggtgacccagcgagactctgcaaaagaaaaaaagaaaaaagaaaaagacaaagaaattagtattttttactttaagagtaatattcactgatcacattatactttgggtagctataagattttgaatgtataaacagtattgcttgggaagaataaaaatctatatttataactgaactaaaggtttttgaaattacttttgaaaattttttaaaatagaaca

SEQ ID NO: 600964 - DNA, 496 bp, Homo sapiens
attgaataaccagtctctgaaaatctaactacagtatyacattgtgttcctgaattactggcaacaagcaggccatctagcttctgaggttaggatcaccttattctgaggtactgcacaaacgtataatggaagtacactttttctgaagtaatcactaccaagtatcaccgatcataagttcattcaatttaccttcaaaatctttcagatccaagcatcttgtaaatgtatagaaagaaaagtaatgggagggaagaagcaatgacatgcaatgtcaagtttctagccagtctataaaacctcatttagttgactctctctcagcaccagctgtaacccaattaaattcaacagtgcacaggtgttcacaggaatgactaacacgaaagcatacttccctttagggctcttaaaaaattagagttctttaatttccatacaccttcaaaatcaaaccaaacaataaaatattgaaaaaaagaaattagataca

SEQ ID NO: 600965 - DNA, 496 bp, Homo sapiens
attgaataaccagtctctgaaaatctaactacagtattacattgtgttcctgaattactggcaacaagcaggccatctagcttctgaggttaggatcaccttattctgagrtactgcacaaacgtataatggaagtacactttttctgaagtaatcactaccaagtatcaccgatcataagttcattcaatttaccttcaaaatctttcagatccaagcatcttgtaaatgtatagaaagaaaagtaatgggagggaagaagcaatgacatgcaatgtcaagtttctagccagtctataaaacctcatttagttgactctctctcagcaccagctgtaacccaattaaattcaacagtgcacaggtgttcacaggaatgactaacacgaaagcatacttccctttagggctcttaaaaaattagagttctttaatttccatacaccttcaaaatcaaaccaaacaataaaatattgaaaaaaagaaattagataca

SEQ ID NO: 600966 - DNA, 609 bp, Homo sapiens
ttttacatctaatgtttattattttagtttcttcactcaacaaaaacatattgtctctaatatgtgctcattattgtgctggatatagaaatgtaaaatatatatctgtatgccatatctgtcatcaayagaaccaccttaacctaacatgtagtcccgaggaaatgtatagcaacattgctctgtttttggaaatatgtctctttttttggaaaaaggaatttgtcaaagtatttacctttttaaataacatgctgtttatttgtgtgttggttattagctgtatgttgataatacatttgtttataggaggttagaagttagaataaataacaaaactgcatttgacactttatataccatcactttcttaattattattggttgataatttagacattaacaaggcaaccactatgggcaaatacattatatgaaaatatagcaaatatattagcacttgggctgggcgcagtggctcacacctgtaatcccagcactttgagaggccaaggcaagtgcattccttgaggtcaggagtttgagaccttcctggccaacatggtgaaaccctttctctactaataatactacaaaaaaagttagctg

SEQ ID NO: 600967 - DNA, 557 bp, Homo sapiens
tctaccaaaaagacacatgtgtgtatatatttactgcagcatgttcacaatagcaaagacatggaatcaacctaaatgaccatcagtggtagactagataaagaaaatgtggtatatatacaccatggaatattatgcagccataaaaagaacaagattatgtactttgcagcaacatggatggaggtggaagccattatcttaagtaaactaatgcaggaacagaaccaaatactgcctgttgtccttataagtgggagctaaataacaagaacacatggacacttagaaggaaatgacagacactgggatctacttgaggatggaggttaggaggtgagaaaggatcagaaaaaatacctacaaggtactatgcctcatacytgcgtgatgagacagtctgtacaccaatcccccatgacttgactttacctatattaacaaacctgcacatgtacccctgagcctaagataaaagttacaagaaaaaaaagcaaaatccaactatatgttaactataagaaatcccccttagattcaaagatacaaacagtttt

SEQ ID NO: 600968 - DNA, 540 bp, Homo sapiens
tttactatcacctatgttaaactgttccaggattcaaatgtttatgcttttattcaaaacgttatcatgcataaacytaaagtattttgacttaattttacccagtactcattgtacatcagaaaaaactcggagctatatttaaatttataataaagttaaaatttcttctattttgtgtaaaaaggagggaaagataatagaccaatactgataaaattaatatcttactttattatttacatttcgttcatcctgacacaaaatcagacaatatgttttggggaaaaatatttctaaatatttctgcttgtaaaccaaaattatgaaattgatacttgaataataactgaaggaatgactcatggaattgaagtaaatgaaccaaaaaaagaatatttataccattctttcagctattttactgatatcatattgctttttttttaagtttaaattttaaggaacaagtaaaaaataattcttcactggtaaaatggtcctaataaaataaaataagattcaagctctaaaactgca

SEQ ID NO: 600969 - DNA, 412 bp, Homo sapiens
agatctataaatttcccctttctggaatgatcctataaaataatccatcagaaaatggccaagttcaaagaccactatctctatgaagactgtcctctcctccctcagtcagaaaattattcatgaaaagccttagaccagagagaaattgcccccgaggattctctgtaaatccataaacattttcaacaacatctttgttacagatttaataatgtgctgcttcttataatgttcttaagttcacgccatgacatcaactgaaagcatggagctacatggagccaacagtttatagtcaaaacacataggtctctgacagttggacttatcygggggatatactgcagagtatcaaatgcagaggttgctcttcagagacctggaattgtcctgaagaatccctgggaag

SEQ ID NO: 600970 - DNA, 397 bp, Homo sapiens
gagttaggtgacatttaaaaagataaggaaatgactgtagtcttctgctactcggttatactttggaactgggcagagatatgtgaagtgctcttgcaaaacaaagtgcataaacatgaaacatttctgttacagtacacagaacagaaacagacaaaaacaaagattggtgtcaatctcaatgacattcaggtttgccatastggagcaagtagtgttaggccatcagacaaatgcaaatcaaaaccacaatgagataccatctcacaccagttagaatggtgatcattaaaatgtcaggaaacaacaggtgctggagaggatgtggagaaataggaacacttttacactgttggtgggactgtgaactagttcaaccatgctggaagtcagtgtg

SEQ ID NO: 600971 - DNA, 596 bp, Homo sapiens
tattcatctttgtatctgttatttcatctccctaccttggagagccacgtatatcacagctcttcggtcttgttatcctgtgttacttggcagtcttcacatacctgaaattactttcctctgtcctcttgctaggtggtaggatgctggcttaggaatcaaacaattttatttgtatccatctgctcccagaaacactcatgcctatatacatatatatatatgcatgtatacaaacacataacacatacacactcacattcctagtatgcatattcctaatgcttcaataataattatgctctataacctcttaagcctccctttcatacaacacttatcaacaaataactaaataataaaaataaatacaattctaacagctcattatccccagtgcttctttttcactatagaatttctgtttttaaaaaaagactttgtaaacaaattgttataagtcacattttatgcacagaattttttgattatttaaaattgatttttaatatgaaggaaacattayatattgtgtcccataagaactcttagggaaaaaaaacccataagttccattatcataatattttgttcct

SEQ ID NO: 600972 - DNA, 593 bp, Homo sapiens
ttgttagttgacacatatataaatatacttagatagactcttgaataaactgttacagtgccaacttagtaatttacaattaatagcttccttttaaaaaattaaataagatcctgagttaacaagctgtttcagacattataataggctgaataaaatgtcccctcaaaatatccagaacttaatccctaacacctgtaaatgttaactttttggcaaaaggaagtttgccaaaaagattagattaagttaaagatccrgagatggggagattatcctggattatccaggtgggtcctaaatgtaatctgtgtgtgtccttataagtagaaggtggagggaaatttgaccgcagaggcagaaaacaatgtgactactaaataaaaatgagatactgctggctttaaagatgggggaaggggtcacgagcacaaaatgcaaagaatgcagatctaggagctggagaagccaagggaactgattctctcctcagagcctttgtagggcgaccagccctgcagtcatactgatttttccccaatgaaactgatttcagacttctgatttccagaactgtaagagaataaacgtgt

SEQ ID NO: 600973 - DNA, 571 bp, Homo sapiens
ccttttctgttatcactttggctgtatcatttctggaaatgttctcaaaggagtgacaaagacatacatttagatttgcttgacatatgtgctttgccagtcaacaccaatatgagtgttttttagtatttctggtactctacaaatgacaagtagtgtacccaatacaaattagccttattaagacaaaaccacataaaaggcaatgcttacctgccattgcctctgactcttacagtcacgtggagtccatggagttcagaaaattttgtaaaatgttttcaaaaggcttgagttacaagttcaaattatttcacaggctaggttcatgggatctgtgacaagatgatgatatgctctacttgaagacatttaaatttaactttaattgtactggcaaaagagaggatgtctrtgtgtcaattttgccctatgactatggattatcatttctgagactcctgccatagaagttactttccaggatttgttgaaaacatctaagcctacacttcataatgagatgtaaatacttactatccagacatcatagtgtatatagagcatgttc

SEQ ID NO: 600974 - DNA, 579 bp, Homo sapiens
tagcattactgcataaagtatatactattagaccatcaatcatagtagaaaaacagtatcatcattaagtaaaatatcttattaaatttatttaacttcatggaaaactaatttttctgtccttattttttaaataattcaaatttcattacaaactgacatatcattgttttcagcaacattgctataatagtagtgtgataggtacatggagaaggaagtgatttgttcaattctgggagcagctccacaggagggagacatttgaaccaccaatcaagatgaggaataaaggagaaatagcaggtttaggggggagtgtaagataataagtgacaaagccaacactataaagggtgacaggacaaggaacaaaagacaaggagcactagtcattgacagaagaaaargggagaatcaactataaagagtaaaaggagagaaaaggcattatgttctatgacacgaagcagacaacctctggcactgcaatattatgtgtaacctcaaaagtcactggacttcttaatactctgtaactctctctttggagcctcaagagatttccttagcaagctt

SEQ ID NO: 600975 - DNA, 579 bp, Homo sapiens
tagcattactgcataaagtatatactattagaccatcaatcatagtagaaaaacagtatcatcattaagtaaaatatcttattaaatttatttaacttcatggaaaactaatttttctgtccttattttttaaataattcaaatttcattacaaactgacatatcattgttttcagcaacattgctataatagtagtgtgataggtacatggagaaggaagtgatttgttcaattctgggagcagctccacaggagggagacatttgaaccaccaatcaagatgaggaataaaggagaaatagcaggtttaggggggagtgtaagataataagtgacaaagccaacactataaagggtgacaggacaaggaacaaaagacaaggagcactagtcattgacagaagaaaaggggagaatcaactataaagagtaaaaggagagaaaaggcattatgttctrtgacacgaagcagacaacctctggcactgcaatattatgtgtaacctcaaaagtcactggacttcttaatactctgtaactctctctttggagcctcaagagatttccttagcaagctt

SEQ ID NO: 600976 - DNA, 579 bp, Homo sapiens
tagcattactgcataaagtatatactattagaccatcaatcatagtagaaaaacagtatcatcattaagtaaaatatcttattaaatttatttaacttcatggaaaactaatttttctgtccttattttttaaataattcaaatttcattacaaactgacatatcattgttttcagcaacattgctataatagtagtgtgataggtacatggagaaggaagtgatttgttcaattctgggagcagctccacaggagggagacatttgaaccaccaatcaagatgaggaataaaggagaaatagcaggtttaggggggagtgtaagataataagtgacaaagccaacactataaagggtgacaggacaaggaacaaaagacaaggagcactagtcattgacagaagaaaaggggagaatcaactataaagagtaaaaggagagaaaaggcattatgttctatgacacgaagcagacaacctctggcactgcaatattatgtgtaacctyaaaagtcactggacttcttaatactctgtaactctctctttggagcctcaagagatttccttagcaagctt

SEQ ID NO: 600977 - DNA, 530 bp, Homo sapiens
atgccacatgtcaagcattggttgacaccccatgtccctgtgctaaagccacaccaagtgatatggtccagctacccttaacttagggaaaggagacatttacttcctataacactccatctccattcacagttttaactaaaccaaatcaagaaaaaagtaccccgaattcaagaagaaattcwatatattgccaaatatgttttataataaatacctgctgtagacatcataaccgcaaagctgaaataacctaaatatctaataagaaaatattttatacagatattcatcataaaactgtattgtcaaatattttccagaatataaaaatatttaaaaataatatcaagtaaaaaggatgcaggactattatatatatatatatatttatttatttaaaatatatatttgtataaaatattcattacatagacattacatattcattactacatacaaagatgcacacacacacacacacacaaagaatagaaagaaaaatagcagaatatcagttgttatgtatt

SEQ ID NO: 600978 - DNA, 530 bp, Homo sapiens
atgccacatgtcaagcattggttgacaccccatgtccctgtgctaaagccacaccaagtgatatggtccagctacccttaacttagggaaaggagacatttacttcctataacactccatctccattcacagttttaactaaaccaaatcaagaaaaaagtaccccgaattcaagaagaaattcaatatattgccaaatatgttttataataaatacctgctgtagacatcataaccgcaaagctgaaataacctaaatatctaataagaaaatattttatacagatattcatcataaaaytgtattgtcaaatattttccagaatataaaaatatttaaaaataatatcaagtaaaaaggatgcaggactattatatatatatatatatttatttatttaaaatatatatttgtataaaatattcattacatagacattacatattcattactacatacaaagatgcacacacacacacacacacaaagaatagaaagaaaaatagcagaatatcagttgttatgtatt

SEQ ID NO: 600979 - DNA, 554 bp, Homo sapiens
cttgggagaaagtgtctttgctattgggtggcagagagagaggaaaagatggctaaaatgagaaaaaaaaaaaaaaaggaattactatttcttactatagttggccaaatatctctctttttatctcccaatacaaaaactgttgcaaaatacaagtaaaattcatagcaataccaccatataataaaataataaaaatagatgaaatatcttaaaattttcaagtcataaaataattcttgaaasggttttgcacagcagcaggcaagaaaagccctacaggaattattttgtgttgaagcaaaggggagattgttattatcttctaaaagttacctcagaggcagaaaagccctagaccaagtatgaagcaaatgagggaaaaaatagtttttaaagaatttatactcacattttcaggaacatctttacagtataatgtagacacatttgtatctttgcttttaacaacacactctctttcctgtaatagcaggatttataccaaagtacatcctgaagcacagcacactgaagtgaatggaatgtttagc

SEQ ID NO: 600980 - DNA, 509 bp, Homo sapiens
atacttttgaccaccaaattgcatatttgggtacttttgtagtataattgcttcaggcttatcttcctctgaccgaggtacaattatctacattcagaacaatgtagcagaaaaatcccaatataacttttcctttgtcatttctgaattcatttggctcttaccttccaattcctctcttatcaagggaaagtaaacatatcctggaattgccaaagsgttgcagaacttagtacaacacatctgtattttacttgctctgtaagaaagtcctttaaaaggagccagtcagactccttgctcagggctaggcttcttcccaaatgccaaggccttctcaaaatctccgaatggaatcactccactcagtcacagatttgaaaaggtcaactatgtgtgagccagcaatgaggaaagaagttactgctcctccaaatgaaagggggtgcttcaatggtggcacatgaagactcagaggcagaaatgccgatttaggaatcaccagaatc

SEQ ID NO: 600981 - DNA, 509 bp, Homo sapiens
atacttttgaccaccaaattgcatatttgggtacttttgtagtataattgcttcaggcttatcttcctctgaccgaggtacaattatctacattcagaacaatgtagcagaaaaatcccaatataacttttcctttgtcatttctgaattcatttggctcttaccttccaattcctctcttatcaagggaaagtaaacatatcctggaattgccaaagcsttgcagaacttagtacaacacatctgtattttacttgctctgtaagaaagtcctttaaaaggagccagtcagactccttgctcagggctaggcttcttcccaaatgccaaggccttctcaaaatctccgaatggaatcactccactcagtcacagatttgaaaaggtcaactatgtgtgagccagcaatgaggaaagaagttactgctcctccaaatgaaagggggtgcttcaatggtggcacatgaagactcagaggcagaaatgccgatttaggaatcaccagaatc

SEQ ID NO: 600982 - DNA, 609 bp, Homo sapiens
aaataaaataaaaaatattttgataagtatttttaatataattattttcctttgtaaccctacttattttgttttttggggcttttatttatttattttttggtttttaaaaaatttttactctttttttgtgatagaggctcactctatcatccaggctggagttcagctcactgcacccttgacattctgggctcaagggattctcctgcctcagcctcctgagtagctgggaccacaggtgcacaccaccacactcagcttattaaaaaaaaaaaaaattgtagagccagggtcttactacattgcccaggctggtcttgagctcctggattccagctaccctcctgccttggcttcccaaagggctagcatattttggtttatgcatttaaaaacaagggagtccatttgtatyatcacatagccaaaagagtccatggaacataaatgattaagaatcttgctttagagtctgacattcaactatagccatcagtaaagggtgcttataatttatgcgagaagggttaatattaggaaagggaaggtaaaaaacacataccacaaagaagaagcaacaaaatgtaaaaacacattccttaaacc

SEQ ID NO: 600983 - DNA, 609 bp, Homo sapiens
aaataaaataaaaaatattttgataagtatttttaatataattattttcctttgtaaccctacttattttgttttttggggcttttatttatttattttttggtttttaaaaaatttttactctttttttgtgatagaggctcactctatcatccaggctggagttcagctcactgcacccttgacattctgggctcaagggattctcctgcctcagcctcctgagtagctgggaccacaggtgcacaccaccacactcagcttattaaaaaaaaaaaaaattgtagagccagggtcttactacattgcccaggctggtcttgagctcctggattccagctaccctcctgccttggcttcccaaagggctagcatattttggtttatgcatttaaaaacaagggagtccatttgtattatcacatagccaaaagagtccatggaacataaawgattaagaatcttgctttagagtctgacattcaactatagccatcagtaaagggtgcttataatttatgcgagaagggttaatattaggaaagggaaggtaaaaaacacataccacaaagaagaagcaacaaaatgtaaaaacacattccttaaacc

SEQ ID NO: 600984 - DNA, 380 bp, Homo sapiens
attatttcaagatactctgagacggaagcagttggaattgtgtagtttgaaagaaggcttgtggtgactggagsacattattaaactcattagcacataaggagatgacagtttcttcagtctctaataaaagagaaatttgataaagtaaatgcagatacttgaaggagtaggaaggttcagaacaaaaactaaagcaaataacatgtatgaggcaatgaggtgtatttgcctgtctgtctgtctgagccgattcacaaagttgtccctgcaagaagccatgcctatatggctatgtttacttctttacctgtattacatccaattccaggagctccttttatatttatttgataacagtgcagtatcactgagaattc

SEQ ID NO: 600985 - DNA, 605 bp, Homo sapiens
aggatgtgttcagtcctgtgatatacaygcattttgtcctgctgctcatacattgaccctatatagtagtactgttttactccctttttgcagaagaagaaactgacatttatagagattaacttatttgtgggggagtcttctaaaatttccttctctggctttagcaatagcaaataagtgaagcaatatttagcaaacttctaaaacttacattgtttcatacacaagacaaagtaaaagccatggaaaaaacctgtgtctttccttcaaaatctgcatgcctctttaattaataaaatggagagataatgttagaaagtactaaaaaaaaaaaaaagggacagtcatttaaatctctgaacattaaggaagtttggagacagtttgctctctgtcctgccttcctctaggactgtcggaatgaccaactgagaggttacatgtgtgagagcattttgagagttctgaattgccatgtaatactttttacatttaaataagctgtacaatttatcttacttccgtagacatttattttaaaaatcactgacctacaaaaattatttggcttacaggtttataaaagcacatcattattcatc

SEQ ID NO: 600986 - DNA, 634 bp, Homo sapiens
tcttaaatattgtgaaaatatttatcaataatgcaagtaactactttaagaataaggaacaattttggttaagccaacagaaataaatattaatagataaatatattttcaaggcacataaaagagagaaaaatatttttaagtgaaaaggaacaaaactattctatacgattgaatggaatttattttaacttctggttaaatttccattcaaagagagccagcttccctcctgcactgctaatttgaagagaaagccagattaagacctcaattactttatgtagaagcagagaagggaaggagaagaacaggaaagaaaactgattatgtctggtctaagaatagtcatcaattctactttcaarttatatcccaaatctaggtacctgtcacccctctcctgcctctgctccagatcagggagatgctctggcctggaccattctgccggcctccccactggtctccctgcttccaccctttgacttctcgcatccattcatgagacccattacagacaaacaatctgaaaacataacgtggatagtcattcctctttttaacaccctcaaccactcccctgtgcccttagaatacaatcctaactcttcatcatggcccatcatcccca

SEQ ID NO: 600987 - DNA, 567 bp, Homo sapiens
tacgtggattttgttgtttttgtatcccagttcagacacaagcactttattcgttcattcttccatcaggattcacaagtaaatcacacaaatgggcatcacacttacccctataatctttgaaaatattattgcaaatgctggttgcaggcctccatttataatggcacaaaatacaccaacaacaaaataaggccattcagttaaatttagcttcataatcctccaaaaggaaactggaggtatactttcatcctagaaaacacaaattattacaacaggctagttaaaaacttttatatgtacaattcttacatacgcacaaaaattwgtaaaggaatatatcctatccttattccttatcaatgaataagtgatgacaattttgctttaaaaaatgtcatagtgattattatttagcttcaaaaaaatgttgacaaattttgctacaatactcctttattttttaaaaaataaatgatgtttccacaaacacttacttttatttggtactcagaacctgacaagagtatttataagcaggagtaaacagaatggaaattttga

SEQ ID NO: 600988 - DNA, 641 bp, Homo sapiens
aagtagggaacaagcttgtaatgatttaagagtaaactgaataaaggcataactgtctttgaatacaataacaaacatttatgagtaagagtgaccgctgtgaggaagtaaaaagagtcctagactaaagattgaaaactctcttttcatttgagtcattaaatgctacyagcgtccatacacagcgggtgggcatccatctgacttgtactagcaggcatccattctgattggtcagtgtccatgctgttcccattgttaagaattttaaatatcacttctcagtacaactaattacatgcctacataatgaaaatgtcttgctcttaattctattccttcctagtttgtcttctttcctatcccccatcatagtcgtttaaactcactactccctgccagacacttccctcatccccagcaactaagacaaaagggcatacttccatgttctttttacatttcccaaatttgttgattctacttttttttcctcagatgatgtttcaatgccctctctccatcaatgattttgtctcatccccagtcataaaaatgctcaagagttcaacccctaaacattttccctggactctgcctccccactcaagtgctgtccttatttgcctttcttttacttt

SEQ ID NO: 600989 - DNA, 381 bp, Homo sapiens
aaaagctttcatagcatgtattgttaagacaatatgaatatgcaatacagctacaataactcaaatctgttcctcaggaatacagtaacttacatacaataaaatctgataaccagcctgggcaacataacgagaccctgtctctacaaataattaaaaaattagctgggcatgatggcacacgcttgtagtcccagttacttgggaggctgaggcaggaggatcgcttgarcccagaagatcaaggctgcagtgagctatgatcatactgctgcactccagcctggatgacagagtaagactctgtctctaaaaaaaaattgtttttaaaaaatctgattaataggttttgcttataaagtgagcagtattcctatttcc

SEQ ID NO: 600990 - DNA, 607 bp, Homo sapiens
tgatctatagaaaaggcaagctttagtctttcacaatttaaaaaaaaactacatgctatcttttgttgaatgctgattctcctcctctgacatggattctctaggagttcaaatgacttaagcacacttaatggggacttgcaggacctaggaggtgtggtttgcttcagggtttggctggaagaatattagactctccaagtctagcatgccagtgctggggctacttcttagcctgacccagggaagatgcatacgtaaactgacttcttttctgggcaacagattagagaaaccctctctwttctggaaatggagacagttctaagaacttatctccacagcaaaaatctctagccatgaagggtgctgcaactcagcattatgaaataaatcatgctggctaataaaaatatccattgggactgtcacaaaggagactggtaagcatgctggtgccagctcagtagatgggctgccagggacatcccagcatggtgcatggaaaccaagtctccaggctactaaaaaatgccctccgtccattccgtctttcatccaaatcaacccaagtcattaattatttcaagaaacatttactgagtac

SEQ ID NO: 600991 - DNA, 493 bp, Homo sapiens
cccagcacagctagcggggtccaagctggtagtaagtagtgtctgcaaaaagtcctgtgatgtgatccatcttcttgtctctcagccatggataccaacaactccagtagaggtagcaggggagtgaagtagactctgtgagggtccttggttgtatatttgttaggtgtgctggttttgtgtcggttggcctccagccaggaggtggcactttcaacacagcatccaytgcagtagtatagggaggataccagcttgctctagggtcacctggataagtatttggctttctcaggtggtggtctgggccataaagctcccaagagattatgtcctttgtctttggctaccagggcaggtagagaatgaccatcaggtggaggtaggttaggtgtgtctgagctcaaactcttcctgggtggggcatgctgtggctgctgtaggggatggggtgtatttctcaggccaagggagttacatttttagaggcatt

SEQ ID NO: 600992 - DNA, 601 bp, Homo sapiens
ttgagtttttggagttcttttaatgaatcattaaacctgaggctgattttggggacttccggaacacatgacactattttgaggaggtggacaatattgaaaaccatcactatacatttttttgtttgcatcaatgtgtggcctgcctttattataatagccttataatattatatttataatgyccttattataagtttgttcaggtcacaaaaaccataattctactacttattttattgcatcatgataacacagaagataatacaaaagatcctgaatcacaatgctgactctcatatttccacttttgaaaggctatatgagaagcaaatcaatatgataaatcatcaaaggtaagatatttagtctgagcaaaccacagatgctacttgatttgattactggccagtgcaatttaatgaccacacacattttctactattccacattgccaacaagaatacccaagtcagagaaattgggattttttttctcatagacataccaaagaatatttcctaaatcatgacattaaggagaagcaaaacttaagactaactttaaaattatgggggaatgaagtaacagaagatgttaa

SEQ ID NO: 600993 - DNA, 591 bp, Homo sapiens
gaaagcttaaagtgcttaaggtcggggtaggggacctgggagaagaaaagcctcttgctctgtgcaaatggttttttttaatcactgtatccctcccacggttcagaccggctagacttccatgaaggagaacagaaccaacattccttttacccaaaagaaagagagaggtggcagtttattggaagagagacagattcaacagttccacattttaacttaccctttctcgtatcccatatgggcccccagatgagacaggattgttcccttgaccctaacccccttcatgggtgggaaatgtagtgactcatttcactcagctcgctctgctcttggccacttctcacaaaagggagtatgcaagcgagtgcaggaaccagagggaatgaatgctggaaccggctggtcactcctctctggggggagmaacgtccaagcccctgccctctcagtacctgggttcttgtctggcatccaagaaaaatcaggtcacatgaatgaattgaaggatagtgtatgtggaggatttttattgggcaataaaagtagctcttagcaggtttctagttggaaaggagattatgaggg

SEQ ID NO: 600994 - DNA, 612 bp, Homo sapiens
aaatgaatatgttctaaattttgttcctacgtgtatactaaatcgttaaaagctgtcaatagctcaaaagaagtttacttgactctgaaaaagcaaaacaaaggatcagcaacgttttaagcaaaaattcgacaagattacttcagtcttctattagatcagtccctgtagttaattcctgttctgcttgatattcatgaacatcttagttcttcatgagttgtaaagtttttttctcttctgatgtcacaatctccaaacttatcagaaacttgtatttgagagtataygttagagttttatagcagattataaaatcaccttctaaagaggaccaataaaagacaacaattgtaggtggatgatgaaaagttttagggcagccataatcaaggacacagttgacaagaaaatttgttactgctgtggcatacataatttaacataacaattataattattagtgataatgtacattaagtcatgtcagacttataggagtttttcataattttggaacacataccaataacattcatacaaatacagcccaaagaaaataaaacaccattttatatttgacaatgtttcatatataatttttctaccaaa

SEQ ID NO: 600995 - DNA, 612 bp, Homo sapiens
aaatgaatatgttctaaattttgttcctacgtgtatactaaatcgttaaaagctgtcaatagctcaaaagaagtttacttgactctgaaaaagcaaaacaaaggatcagcaacgttttaagcaaaaattcgacaagattacttcagtcttctattagatcagtccctgtagttaattcctgttctgcttgatattcatgaacatcttagttcttcatgagttgtaaagtttttttctcttctgatgtcacaatctccaaacttatcagaaacttgtatttgagagtatacgttagagttttatagcagattataaaatcaccttctaaagaggaccaataaaagacaacaattgtaggtggatgatgaaaagttttagggcagccataatcaaggacacagttgacaagaaaatttgttactgctgtggcatacataatttaacataacaattataattattagtgataawgtacattaagtcatgtcagacttataggagtttttcataattttggaacacataccaataacattcatacaaatacagcccaaagaaaataaaacaccattttatatttgacaatgtttcatatataatttttctaccaaa

SEQ ID NO: 600996 - DNA, 566 bp, Homo sapiens
cattgatgccattcaaatttaccacactcagtgtattgcactagggaaattgtcttaaagaaacacaaatattaaccctgtttaaaaaataaatatgtattgcattaattgaaaataattggaaaagaaaaaactgtaacctatgcttttttcattatsattctttcactgtgacttttaaacattgcatttaataagttatcactttggttcaacaacaattttcataaattatgtttatccaggatatataccagtcgtcattgtcatgtattctctgagagaattcaaaatagagtgggttaggttaatttcttattgaggaggcttctgaacctctaattaaatttcagggacaacagccaaaatttctggcatatgacctatagttgtaaatacacattatcctgaataaaaggagaattaattttttgaattataatgaagataaacaattgaaaataaagccagtcatgcagggaagataatctcattaaatatttatatttcattaatgtcagcattttaaaattttctcctatttcaataaaaattaagttcttatt

SEQ ID NO: 600997 - DNA, 522 bp, Homo sapiens
tgaagtaatttgtctatataaacttagtttttgaatttgttggtgtaaaggtgttcataatatcagacagttatcctttctaatgtgcactggaatcctgtctttattcatgatgttggtaacttgcattttctttttccttacttagcctcattagctgtttaagtattttaatgattattttggagaaaaatgttgggytttattagtttgctctacagttggctttttaataaacttcagtgactgctgctgtaatctttactatatattcaatttatttatgttttaatttgtttgtcttcctatatcttctcacgatagaatctgggtcaaatctgattcttatctattggttacctttttcctctttccttttgggccatattttcttgcttttttcatatattatgtaatttttcttattccattacagacataatgtagaaaagaacagtggagtctgaagtaatattgtttgtgttttccacatagtgtaaagccttttgttttgggggttat

SEQ ID NO: 600998 - DNA, 488 bp, Homo sapiens
tgtgggtttgcagaagatcaaaaaattagttttggataattaattagaaatgtctattagaagtttaatatttaatagtttaattaaagatctttattaggtgtcaagtaggcagctcaatatgcataatggaacttggctttttgcttaacctgtgtcgagggcaaataactcttttaatgagtttttcgctaaagaagaaggaagaaatggtgtagacatattttttcttcctttagtcctaatttattgttattatttctttaaaaaaatttatttattatactttaagttctgggatacctgtgcagaacgtgcaggtttgttacataagtatacacatgtcatggtggtttgctgtacccatcaacccgtcatctacattaggtatttctgcctaatgctctgccttccctagcccckcatcccctgacgggccctggtgggtgttgttcccctccctgtgtccatgtgttctcattgttcaa

SEQ ID NO: 600999 - DNA, 595 bp, Homo sapiens
aatttgatctagtagtaggttcgtcacatgggtattcaatatattattatattcttgtgtatttatttgaattatttcacaaactagattaattgtaatcagttttaaatacctgtcacagaatcatcaaaaatgaaattcacacaggcattcagctaacatctcaaaatttagttgtccaacagcaccctctgctgttctgtataagctaggaccaattatttacagcaaaaatcaacactgaaaaagctggagaggtctctccatayagtacttcccctcttccaccccagcagcaagcagcctctgcatcagaagtaccatcttttggaatctggggaatatggtaaaaacacatagtttgtgacaattattctgtacaaagattttctcccaggataatgaggagccaggggtttgaggaaaggtgtctgtgcagggcacacaccccagagagaagtctctgggccccatggcatcagtatgtcataggcaagataataaaagggtgggtggggtaaaggcgacactgagtgagtgaagggcaaagctagggtctgagctgccagtggcctgagaaaaatctgattcagcc

SEQ ID NO: 601000 - DNA, 572 bp, Homo sapiens
ccctatccctttgaatttaaacctctcatccctctaagcttacaaacctgctcatgtctccacatcccaaaacatcttctgcaaagtcctgaccctcctcgccactgcccccacctcaccaatgcactgccccatggccctcagctcctgtgcacgcctyatgcccctacagtctaccatctgcatccatccagcctccacaactgctctccaaagagtcacaagcatcaacaaatcctgtgacagcatctgtagaactggacacaattaccccttctagaaatttctcctcactaactttccaggacactgccctctcctagctctccaagctccctgttcctttcccagcacatttttggactacactctgtgctcccagcatctcatcctgtaacctcttgtcttctctccaccctcttcctctacaccctcatctgccaagacttctgcttcaccacagagtggatgactcccattcccacactcgacaaacaccccccacatgcttactatgtgccaggcgcatctacctaatatgtgccaatctcctcccaaccctggccagttct

SEQ ID NO: 601001 - DNA, 572 bp, Homo sapiens
ccctatccctttgaatttaaacctctcatccctctaagcttacaaacctgctcatgtctccacatcccaaaacatcttctgcaaagtcctgaccctcctcgccactgcccccacctcaccaatgcactgccccatggccctcagctcctgtgcacgccttatgcccctacagtctaccatctgcatccatccagcctccacaactgctctccaaagagtcacaagcatcaacaaatcctgtgacagcmtctgtagaactggacacaattaccccttctagaaatttctcctcactaactttccaggacactgccctctcctagctctccaagctccctgttcctttcccagcacatttttggactacactctgtgctcccagcatctcatcctgtaacctcttgtcttctctccaccctcttcctctacaccctcatctgccaagacttctgcttcaccacagagtggatgactcccattcccacactcgacaaacaccccccacatgcttactatgtgccaggcgcatctacctaatatgtgccaatctcctcccaaccctggccagttct

SEQ ID NO: 601002 - DNA, 572 bp, Homo sapiens
ccctatccctttgaatttaaacctctcatccctctaagcttacaaacctgctcatgtctccacatcccaaaacatcttctgcaaagtcctgaccctcctcgccactgcccccacctcaccaatgcactgccccatggccctcagctcctgtgcacgccttatgcccctacagtctaccatctgcatccatccagcctccacaactgctctccaaagagtcacaagcatcaacaaatcctgtgacagcatctgtagaactggacacaattaccccttctagaaayttctcctcactaactttccaggacactgccctctcctagctctccaagctccctgttcctttcccagcacatttttggactacactctgtgctcccagcatctcatcctgtaacctcttgtcttctctccaccctcttcctctacaccctcatctgccaagacttctgcttcaccacagagtggatgactcccattcccacactcgacaaacaccccccacatgcttactatgtgccaggcgcatctacctaatatgtgccaatctcctcccaaccctggccagttct

SEQ ID NO: 601003 - DNA, 572 bp, Homo sapiens
ccctatccctttgaatttaaacctctcatccctctaagcttacaaacctgctcatgtctccacatcccaaaacatcttctgcaaagtcctgaccctcctcgccactgcccccacctcaccaatgcactgccccatggccctcagctcctgtgcacgccttatgcccctacagtctaccatctgcatccatccagcctccacaactgctctccaaagagtcacaagcatcaacaaatcctgtgacagcatctgtagaactggacacaattaccccttctagaaatttctcctcactaactttccaggacactgccctctcctagctctccaagctccctgttcctttcccagcacattkttggactacactctgtgctcccagcatctcatcctgtaacctcttgtcttctctccaccctcttcctctacaccctcatctgccaagacttctgcttcaccacagagtggatgactcccattcccacactcgacaaacaccccccacatgcttactatgtgccaggcgcatctacctaatatgtgccaatctcctcccaaccctggccagttct

SEQ ID NO: 601004 - DNA, 424 bp, Homo sapiens
gaattctaattttagttatcggggtaatgtgtctagttaaaagataacattcctagccacatttgcggttagtagtggccacttgattgaatgtaaatggaaatactgtgtgaaatatgagcaaagatttcttaaaaggagctgactcrgcagacacgtgtttttgtgcccatttcccttctttcttcccgctgtttggaaattggacaggttggctggagccaccacaactgccatatggccttgagactagaagttgtgtccttaggtccttgagaatgatagggcagaaagaaaagaggtggctggattcctgaggacagcggggcctcctaccaggagtcctaggctgcctttctctagtcttcttttacttaggggctggggagaagcttatgtctttacgctgcttattttggagttt

SEQ ID NO: 601005 - DNA, 422 bp, Homo sapiens
gtgtctagttaaaagataacattcctagccacatttgcggttagtagtggccacttgattgaatgtaaatggaaatactgtgtgaaatatgagcaaagatttcttaaaaggagctgactcagcagacacgtgtttttgtgcccatttcccttctttcttcccgctgtttggaaattggacaggttggctggagccaycacaactgccatatggccttgagactagaagttgtgtccttaggtccttgagaatgatagggcagaaagaaaagaggtggctggattcctgaggacagcggggcctcctaccaggagtcctaggctgcctttctctagtcttcttttacttaggggctggggagaagcttatgtctttacgctgcttattttggagtttctattccatgcagctgaactgaattc

SEQ ID NO: 601006 - DNA, 583 bp, Homo sapiens
caatctgtgtcacttcctgacctcatttttacaaagtttggcaaattctgagtcttgataaatctagctctctactctctctgtcctattccagggctattgagcacttgtaggaaaaaaaggatataaaaccataaagattatacattataaacttctggtttgtaacctcaactaggatcccactacatccttcacacacacctagtgacttcatcagcttcacagagaaaatacaagtgttttggtacaaattccctttatttcctaccaatatatytgtaaccttacatgtacttgtgtccaccttttctttcttttttacagtaactatgtgagagtttttctttctcttgcctaaaacttaacccttcatctaagatctgactcctgtctcctcctgccttctcaggaatattgctctgttgattatcgctactcttccttgcactttaatttctcctggacctttaaaaaatatcagttaaacaaggcttttgaggtctttcatgatctggcctcttcctaccatctcttccacatttcacctcttagtttatgtcctagctatgcatttttcttt

SEQ ID NO: 601007 - DNA, 609 bp, Homo sapiens
gagagaagtaggggaaatgggtaggtcctgcatgtctgagggcttgagtctgggaaacactggtgtgtgtgagtgtgtgtgtgttcgtatgtgtgaatgtgtgtgtctgtgtgtgtatgtgtatggatgggtgggcaaagagaaaagctctgaacccaggaccccaataatctccagcagcagagccttagaacaaaccattgcaaactttggaactgcgtgtcttttctaagaggaaatcagatatctgacagtaacaccaaaactgccacaaagcagggtctttctaaacatcattacttatcatttgcccagtcctcttgttgcctcattcctgacttcaagagttaatggtaaaccatttacagaaatggagatttgagacatargggcatgtattctgtggcattttcccccattatatacattaggtctcagatgcaatgtcattttaaaatgtaagggaaaggaagaaattgaatgtgcctgttaggtggatactctttggagcctgtcagaaagaagactcctcccctctcgtgtggcctgttgaaagcctcttctccactaagccatcttagagctgataaatagccatctatttgcaaa

SEQ ID NO: 601008 - DNA, 609 bp, Homo sapiens
gagagaagtaggggaaatgggtaggtcctgcatgtctgagggcttgagtctgggaaacactggtgtgtgtgagtgtgtgtgtgttcgtatgtgtgaatgtgtgtgtctgtgtgtgtatgtgtatggatgggtgggcaaagagaaaagctctgaacccaggaccccaataatctccagcagcagagccttagaacaaaccattgcaaactttggaactgcgtgtcttttctaagaggaaatcagatatctgacagtaacaccaaaactgccacaaagcagggtctttctaaacatcattacttatcatttgcccagtcctcttgttgcctcattcctgacttcaagagttaatggtaaaccatttacagaaatggagatttgagacataggggcatgtattctgtggcattttcccccattatatacattaggtctcagatgcaatgtcattttaaaatgtaagggaaaggaagaaattgaatgtgcctgttaggtggatactctttggagcctgtcagaaagaagactcctcccctctcgtgtgkcctgttgaaagcctcttctccactaagccatcttagagctgataaatagccatctatttgcaaa

SEQ ID NO: 601009 - DNA, 449 bp, Homo sapiens
acttttagctccttgagaattctgacctccagaactgtaccattcatgccagtaagtttgtggcaatttgttactgcatcataaggaaattaaaacactgtgcttaccttgttgtggattgggatgtacatttggcagactggcactggtttgagggccacacttgaagtagggatgctttaaagaccatataattgatgttatttgaattattscagtccatagaaaaagatgacgagcttcccaattcattttatgaggcctgaatatgctaatatcaaaatctaataaaaaggaatataaaaataaaactataaagaattttaccggttaacatagaggcaaaaattctaaaacatattagcaaatgaagttggcattatattaaaagaatagtgtactataatcaagaagagtatataaataagcgtaaggatgattcattatag

SEQ ID NO: 601010 - DNA, 632 bp, Homo sapiens
aataaaccaaatatttagtttaaggaactagaatataaagccaaataaactaaaagaaactaggaaggaatgaatagacataaaagcagaaatcatttaaatagaacactgcaaacagagtgaaacacggttctcaggaacacctgtttccctcagaggctcctgaagtgcagcctcatgtgctctgcagcctgtgctcctcaggctgggagggggagttcacagtcacattgagcaccttggtctgtattgcagtttccagaccacacagcttactctgctcccctgaggctcctgtcctctggataccccttcttattacatcttcctttcatctcccagttactccccttccttcatttagactgactcttggatcacccatcccacatcctgccaacattccagataattttgttttctasagctttccagttcttttacctcctcttttccagtaagtttcatctcaactgcattggcaacacacaggcctaattcgctacctaaatttgctccattaatgaaattcttcatttcaatatcaccctgcccctgactcttcctgccacctattcctgactctctgccatagataattcattgatgccttttctctcaccttcggtgcc

SEQ ID NO: 601011 - DNA, 539 bp, Homo sapiens
ttcatttagactgactcttggatcacccatcccacatcctgccaacattccagataattttgttttctacagctttccagttcttttacctcctcttttccagtaagtttcatctcaactgcattggcaacacacaggcctaattcgctacctaaatttgctccattaatgaaattcttcatttcaatatcaccctgcccctgactcttcctgccacctattcctgactctctgccatagataattcattgatgccttttctctcaccttcggtgccttggcttctccatccctgtcttgaccaccttccctttctgggttagatttcctgattcaatacactcaatgcaygaaatgtagaagttctggtttatgtgtggaaagtgactaatcagttttcctcacctgccatcaagatcactagctgatttattgcaaattaaattattaattcctaatgaatcatcaggagccctgaggagtcatcagctttgaggagtgtgaggataatctgggaaagcttcatggagggagaggcc

SEQ ID NO: 601012 - DNA, 583 bp, Homo sapiens
atggagggccagcgctcagccgcagtgcctcaggtatacctggctccatgcaggttctccagccacacttctgctgctgcttgtgggcctcatctcatctgtgttcctcctacatgtcattatcagtgagcagctcacggcagcatagcgggaggaatttgtcttgcttaacyagggaaggttcagttgcgttggaagaggggatggcaaggcatctccatgtcagtctcctcctcaaggctcaaaagacacatggggcacttgagctgtgcaggaatcccatggctaatgccagcatcatactgtggcagaaactaagtggtatctgcaagaagagagaaagccttgacttcacaagtgggagaaatctctcgtggagtgactaatgttggcattaagtttgccttcagagggtggggtcatgtatacagcctcttctttctaaagtgggggcttaggatatttctatcatcttatgatatttagaagtttaagcttgattcaatcataccacaatgtatacatatatcgaaacatcacattgtaccccttaaatgtatacaactatgatttgtcaattaaa

SEQ ID NO: 601013 - DNA, 577 bp, Homo sapiens
aaaaggatgctgggaggggctgagaagccttcttgctcaaaagcccagtgctctccccgctcacctctacaggattcctgaagaagtgaggagaagatcacctgcccacagaacctaacccagcatcagaggaagcctgaagtgaggaagcctgaagtgaagaagcctgaagtaaagaagcctgaagctatagcgcagaaaggccttctcaacacatgttcaggtagggggactccaaaatggggactttcttttatagggggtgggaaagggtcttatcaaaaaaacaatgtcccccttcactcccaaacttcctacacagaatatggagttccttcacaggggggtaggaagagggtcaggacagcctccatagagccctccgcaagtcctccctyacccaaggagacagaacagttgaggcctcagattataaggctctagattagcaaagcacttattctttctcctgttagctccttctctcctgtcccaggggcccttttccttcaagtggaatcacagaatctttcacttatagactgatgcataatttcagaacaacccaggattctga

SEQ ID NO: 601014 - DNA, 602 bp, Homo sapiens
ttgcttctccttgccctgcttcaggcatagttttgtctcattttgttcctcgattttcccgatcctctctgctttctattttttaagattccttaaaaatactggcagtgcttattctggtccccaaattattatgaagatattctggtttcttttgtcctttatgttatttctccgaggctggggtgggaaggagagtgatgcttgtgcttaatttgccatctttrtttactcatttattgccttatatttacatatactgtgtaattaccatccagactttttatttagcagagtataaatttccaagtgtattatttgaatctcacataatgagaatatatttatgtcacctgtatattaaaagagaagaaatgaatggcagtgagaacattatctgtcaaaacttatggctgaagtggtgtctgaccagagaaggctttgaaatgcattagctattaaataaaaaacaataaaaagaaaagatctagtttagagaaagaataacaaaataaacttaaggaatgtagaatagaagaagataaatgatagattaatagatcagaatacagataaagaggagaaataataaataaattcaa

SEQ ID NO: 601015 - DNA, 602 bp, Homo sapiens
ttgcttctccttgccctgcttcaggcatagttttgtctcattttgttcctcgattttcccgatcctctctgctttctattttttaagattccttaaaaatactggcagtgcttattctggtccccaaattattatgaagatattctggtttcttttgtcctttatgttatttctccgaggctggggtgggaaggagagtgatgcttgtgcttaatttgccatctttgtttactcatttattgccttatatttacatatactgtgtaattacmatccagactttttatttagcagagtataaatttccaagtgtattatttgaatctcacataatgagaatatatttatgtcacctgtatattaaaagagaagaaatgaatggcagtgagaacattatctgtcaaaacttatggctgaagtggtgtctgaccagagaaggctttgaaatgcattagctattaaataaaaaacaataaaaagaaaagatctagtttagagaaagaataacaaaataaacttaaggaatgtagaatagaagaagataaatgatagattaatagatcagaatacagataaagaggagaaataataaataaattcaa

SEQ ID NO: 601016 - DNA, 567 bp, Homo sapiens
agaggcaagtgcctggggctgtcgcccaggtcatctatgcttgacactgctcagcctgcttacaaatagggttcttgctatagcaatcaaaataaccacacaaggcaagtaaaaggcacagaccagagtctggggaggttctgagtggggctgattttagcacacagaagggaatgagacaaccacagccaccgcaatgggccgggaggaaggaaggctactgtgggtcaccaagagaaacacttccttccattgtctggctatacaggctcagatgaaaataaaaataggtggacattgaagatatgcatgtgtacatcttgagccagactcacacagagaatccactggrgctggaggccataaagaaataattcagggcattttggcccagtgaaaaatgggacttaagaagccatgtacaagtcaaagacccaaggaggtgggcggattaaaccctaagcatgctctaagacatctggagaagagtttcacagtccatgggtctcaggttctcagcctgagaaccatatataaaaatagtgtggtagagacacggggcaaagc

SEQ ID NO: 601017 - DNA, 509 bp, Homo sapiens
taataacttatccactatcacaagaacagcatgggggtagacaccccatgattcaattatctcctactgagtccctcccacgacacgtcgggattatggaaactatgattccagatgagatttcggtggggacacagtcaaattttatcaaccagtatgccagactttcakattgttgcatcttttgtgtaacatgtccctacctcctactggtgatcagggtcagttattcctacctgtatagtgactcttttcctttaatgctggtcttttggcatgataacccatacagcctaaagttgcagggaaaggaagcacaaattcccatgagaacagacttgtgctcatgctgctaataaagacatacccgagactgggtaatttataaaggaaagaggtttagttgactcacagttccatatggttgaagaggcctcacagtcatcgtggaaggtgattgaggagctaagtcttacatggcagcaggcaagagagtttctgcagggaaa

SEQ ID NO: 601018 - DNA, 569 bp, Homo sapiens
gcctaaagttgcagggaaaggaagcacaaattcccatgagaacagacttgtgctcatgctgctaataaagacatacccgagactgggtaatttataaaggaaagaggtttagttgactcacagttccatatggttgaagaggcctcacagtcatcgtggaaggtgattgaggagctaagtcttacatggcagcaggcaagagagyttctgcagggaaacttttgtctgtaaaaccatcagatctcatgagacttattcaataccacgagaacagcacgggggaaaccacccctgtgattcgattatctccacccggccccatccttgacatggggattattacaattcaaggtcagatttgggtggggacacagccaaattgtatctatcattccccaagtgggtcactgggaatgatggtaaattgggctactcctacttctaccccttagttcctaggcacatttagtctacctattggagtcacagcaccatatataatgttgttggtttccagtgtacagtattgtgtcctagagaatagcattccatctttgaatgaagcttag

SEQ ID NO: 601019 - DNA, 534 bp, Homo sapiens
atcacatagtgaagagagaagtgaggacaagaaggactgtaatgtatgaacgagggtcagtcagagagtattcattgtggaattgagagtagtggttagcaagagggtaggtgcttggtggaggcagtgggaagaatgctggaagcacataaaaaaagtctcttactgagaaaagttgaagggcaaaggagattttagaacaccttctggttgctgcagtggtaaataaagttctgagcccaaggtgtttggtacggcttgtttaggaaaggaggggaaatagggacattgaagtatgatgcactgttaagtaggccctgaattagacagacttggtttcaaatctcagctttaccacttacaaactgtatgactttagataagaaactctttaaattccagtttccttatctataaaatgrggaaataagatttactgtgtgaggcgtctgtgagaattaaatgagataatgcatggacaacatctagcttggtgtttagcatatagtaaggcaatagaccaacacatgttat

SEQ ID NO: 601020 - DNA, 631 bp, Homo sapiens
aactactatagtaacagtttttttttttgtgggggtggtttggggggtggtttggcatatggtacatatttctctgagctttgaaaataactaatttccttccaaaaaaaaaaagagagacttacctcaatctttttttcttcttttttttttcttttattattattatactttaagttttagggtacatgtgcacaatgtgcaggttagttgcatatgtatacatgtgccatgctggtgtgctgcacccattaactcatcatttacttcaatcttattatgaaagtaaacaytcaaaaaccccaacacaccctagagcaaactctcaatgctccaggtactgattatccagtttcctttattctctcttctgtggaccatgtacttggatgtttacattagtcagtagctctataaaaagtctgatattacatatgttgttggactgtgtggcagtttcctgatctctagattgtagctatggtgctatcttcttaaacttagtattccagtggtcatcagaggctgtagctcctttgtgtgagttagttcagtagtgttctgagagtcattcctagaggtctcacatatagcctgctccttcagctattcaaatgattttgtaagtacc

SEQ ID NO: 601021 - DNA, 558 bp, Homo sapiens
tcttttctagcagttcaaataaagggaaactatacagcatgtattcttttgtgtctggctcctctcactcagcatcatgtttctgagattgatctatgttgttgcatgtatcagtgattcagtaccccgtcctcccttttttttttttgagatggagtttcactcttgttgcccaggctggagtgcaatggtgtgatcttggctcactgcaacmtctgcctcctgggttgaagggagtcccctgcctcagcctcccaagtagctgggattacaggaatgcgccaccacacctggctaattttgtatttttagtagagacggggtttctccatgttggtcaggctggtctcgaactcccgacctcaggtgatctgcccaccttggcctcccaaagtgctgggattacaggcgggagccacggcacccggcctcagtccccctttttgctgagaactattccattgcatgggtacaatttatttatccatttacctgttgatagacatttgagttgtttctagttttaggccattatgcgtaagttgctacaaactttca

SEQ ID NO: 601022 - DNA, 631 bp, Homo sapiens
cggcacatggggaccgcctgactccagcctgtcctctggcatctgtggcatcttctgagatataaatacaacgcagggggcatctactccacccccagccagccccagcctagaggcctgggtccttcctgcctccagacaccaatgaaaagctaggagccatcctcaactgcctcrcttttcccccccacagggtcagtgtgctggtgggagcacccaaggctaataccagccagccaggagtgctgcagggtggtgctgtctacctctgtccttggggtgccagccccacacagtgcacccccattgaatttgacagcaaaggtaggccagtgaaattcagggagggactggggggtgggactgcagcctgggggcaaggcctgggtgggtcctggggtgagggttggagcctgctggaaccccggccacgtgacctctcagcaccagctctggtgctccaactgcttacagtggatccccatggcactcactccactctcccatccagcccagcccaaggaggacgggcatgattcagaaacatgtggctctcatttcccctgaatcacccacaattctgggaggccagggccgtaacacagacaaagacagggaatgttgcacaaac

SEQ ID NO: 601023 - DNA, 631 bp, Homo sapiens
cggcacatggggaccgcctgactccagcctgtcctctggcatctgtggcatcttctgagatataaatacaacgcagggggcatctactccacccccagccagccccagcctagaggcctgggtccttcctgcctccagacaccaatgaaaagctaggagccatcctcaactgcctcgcttttccccccmacagggtcagtgtgctggtgggagcacccaaggctaataccagccagccaggagtgctgcagggtggtgctgtctacctctgtccttggggtgccagccccacacagtgcacccccattgaatttgacagcaaaggtaggccagtgaaattcagggagggactggggggtgggactgcagcctgggggcaaggcctgggtgggtcctggggtgagggttggagcctgctggaaccccggccacgtgacctctcagcaccagctctggtgctccaactgcttacagtggatccccatggcactcactccactctcccatccagcccagcccaaggaggacgggcatgattcagaaacatgtggctctcatttcccctgaatcacccacaattctgggaggccagggccgtaacacagacaaagacagggaatgttgcacaaac

SEQ ID NO: 601024 - DNA, 631 bp, Homo sapiens
cggcacatggggaccgcctgactccagcctgtcctctggcatctgtggcatcttctgagatataaatacaacgcagggggcatctactccacccccagccagccccagcctagaggcctgggtccttcctgcctccagacaccaatgaaaagctaggagccatcctcaactgcctcgcttttcccccccacagggtcagtgtgctggtgggagcacccaaggctaataccagccagccaggagtgctgcagggtggtgctgtctacctctgtccttggggtgccagccccacacagtgcacccccattgaatttgacagcaaaggtaggccagtgaaattcagggagggactggggggtgggactgcagcctgggggcaaggcctgggtgggkcctggggtgagggttggagcctgctggaaccccggccacgtgacctctcagcaccagctctggtgctccaactgcttacagtggatccccatggcactcactccactctcccatccagcccagcccaaggaggacgggcatgattcagaaacatgtggctctcatttcccctgaatcacccacaattctgggaggccagggccgtaacacagacaaagacagggaatgttgcacaaac

SEQ ID NO: 601025 - DNA, 631 bp, Homo sapiens
cggcacatggggaccgcctgactccagcctgtcctctggcatctgtggcatcttctgagatataaatacaacgcagggggcatctactccacccccagccagccccagcctagaggcctgggtccttcctgcctccagacaccaatgaaaagctaggagccatcctcaactgcctcgcttttcccccccacagggtcagtgtgctggtgggagcacccaaggctaataccagccagccaggagtgctgcagggtggtgctgtctacctctgtccttggggtgccagccccacacagtgcacccccattgaatttgacagcaaaggtaggccagtgaaattcagggagggactggggggtgggactgcagcctgggggcaaggcctgggtgggtcctggggtgagggktggagcctgctggaaccccggccacgtgacctctcagcaccagctctggtgctccaactgcttacagtggatccccatggcactcactccactctcccatccagcccagcccaaggaggacgggcatgattcagaaacatgtggctctcatttcccctgaatcacccacaattctgggaggccagggccgtaacacagacaaagacagggaatgttgcacaaac

SEQ ID NO: 601026 - DNA, 616 bp, Homo sapiens
tgaggaaactgatgtccagagagatcaaggaacttgccgaagatcacacagaaactcagaatagagcaaagatttgaaccccagcaatctggttctagagtccatgtgctaaaccactatcctctaatgcctccctatttaatatattagtcttcatatatttctggtttttttgttttttttttttttttagtttataaaaagaaaggttttggactgtggaaaaatagctgaatctggtgtgatttcagactcagtgaatatcatcaggcttacacttcaaattaaaactcgagggctgagtgtggtggctcacacctgtaatcccactttgggaggccgaggtgggagcattgcttgagctcaggagttagagaccagcccaggtaacacagtgagacctcatctctccaaaaaatatataaaaaytagccaggcatggtggtgtgcacctgtggtcccagccactcaggcagctgaggtggcagatcacttgagtcggggaggtggaggctgcaatgagccatgattgtaccactgcgctccagcctgggcaacagagccagaccctgtctcaaaaaacaaaccaaaaaaccaactccagcagcatttcagt

SEQ ID NO: 601027 - DNA, 616 bp, Homo sapiens
tgaggaaactgatgtccagagagatcaaggaacttgccgaagatcacacagaaactcagaatagagcaaagatttgaaccccagcaatctggttctagagtccatgtgctaaaccactatcctctaatgcctccctatttaatatattagtcttcatatatttctggtttttttgttttttttttttttttagtttataaaaagaaaggttttggactgtggaaaaatagctgaatctggtgtgatttcagactcagtgaatatcatcaggcttacacttcaaattaaaactcgagggctgagtgtggtggctcacacctgtaatcccactttgggaggccgaggtgggagcattgcttgagctcaggagttagagaccagcccaggtaacacagtgagacctcatctctccaaaaaatatataaaaattagccaggcatggtggtgtgcacctgtggtcccagccactcaggmagctgaggtggcagatcacttgagtcggggaggtggaggctgcaatgagccatgattgtaccactgcgctccagcctgggcaacagagccagaccctgtctcaaaaaacaaaccaaaaaaccaactccagcagcatttcagt

SEQ ID NO: 601028 - DNA, 602 bp, Homo sapiens
tccgctcaggccatgcaaggctttacttgagcatgtctaagagctgacaggatggtagagaggcggagactgaacatgagagagagagataaactcagatggagcgaggagcctgagaaggaggaaggggctgggttggccttggctggggtgcagtgggggtggcctcttccactgtaaaaggagaaagtcagagacaggagctataggcttttcagctggaaggagagattcctatcagacagcttccrttgttcctgttgaagcagggagaaagatcagctgcggagagcgcggaaagggcagggtagatatttggggaaaaggcccaatgctcctttggagccaggagtgagtgtgccagctggggactgggatttatggagacatctgtctttgtggctgcatggtcttctccctgtcagcccttagacaggcagagaagacagacttggagttttctcggagggattcagcagagcaattaggcaaggcatgcggaggtctcaggcaagagtggctgaagtgaaggccaccagccaaggaagtgaggatgcagggaaggggcaagtatgggtgctcgaggcaacagcagacactgg

SEQ ID NO: 601029 - DNA, 563 bp, Homo sapiens
tttggagccaggagtgagtgtgccagctggggactgggatttatggagacatctgtctttgtggctgcatggtcttctccctgtcagcccttagacaggcagagaagacagacttggagttttctcggagggattcagcagagcaattaggcaaggcatgcggaggtctcaggcaagagtggctgaagtgaaggccaccagccaaggaagtgaggatgcagggaaggggcaagtatgggtgctcgaggcaacagcagacactggggcgacacagtgtccatccccatgaggccaaacagaaacacatgtggcccgagtctcagaggcagagtaggtggagagcaggatttgtgatgcagacatgacagtgccagagatcaccgtcragcgtatgctcgagggcctgcagggctgaagctgtgagcaggtgtctggaaatgggatgcccacagggccattcaggcccccaagatgagggcaaatgagggagacaagccagggaagcaggccaacattgtctccgagtgagggaattgcagatggcagcaacgcacagccagcgt

SEQ ID NO: 601030 - DNA, 545 bp, Homo sapiens
agtacaaagctaaaccagatatattaacaaacctagctctctctacaaaaaaaatatagttcagtcagctaatcagataataatatgtacaaatatttcatgcactgacaaattttacagttagaaatggcattaatactaagctagagtgaaagcaagtcccagggccacacctatgaaacgagcagtccatatcctaagagatagagggctttggagaatagcctccagraaataaaggggctcgacagaatacttgatatgatagaaagtttaaaaaaaaaaatgagattaaaataaaggcaaatagtgtgagggaaaaaaaggaaggcaattacaaactctagacaaaggaaatggctctaaaagaaagtaaatgtaatcgtagtatattagttggttcttcagtaaattatttctatcttcattataatgtaaacattatctactgttaaccaacttagcaatatactattctgacgttagtggtataagagatgaattctcacttttgtagcagtcagtcaacagataatgtataaact

SEQ ID NO: 601031 - DNA, 581 bp, Homo sapiens
tcaactgcactgtcattttgttgtttgagttctcctccagtgtgagtcgagtgcacaggatgctgggggcgttcctgagcttgcaggtgcaggctctgagtttgtccttggcagccttcctcctcaggtcagaaagagggacttgcagtcatgtgggatgtccccttgaaagccccagtaggacgttgattttgagacataagggggagtctggagtgagagatagccttgggaacgtggtgtgttcaggatctgtgagctctgtggggttccataacctstatctgcctctggatttacagctgcctctatctgtgtggaagagttgggtgggggctgtgttaggcgagtctgtactggagatccttgctgtgtgttggcctttctgttctttggttggtcacgtggaaaatttgccggagtttcttttatctttctttttcctacagaatgcaccttaacccctctcatccccccaccgtgcagtgagacttacagacaggtctgagaattttatctggaaggaatggcagtgcctgatgcctgaagaagaactctagtgggaggtcatgttggactcc

SEQ ID NO: 601032 - DNA, 665 bp, Homo sapiens
cagattcaataagaatttatcaaatgcctattttgtgagaggcattgaaagacacagtatcttatttcatttttaattgaattagtaatgacttgataaggcacaaaggttagtctaactaacattttttttttccctgacatacragtgatccctacactattggctgtgtccactttattgattgtgaaacagcctaaatgcatggaattggaaactggaagtcattctacacaatacaagaaagcagcaccatctttccatgtacctgccagtgctatggctggcttggcttttccagcagttttctggacttggttgaggtggcttcctaggggcattttctcaccccctcccagctaagactgctgttaattttgaataatttggaggatgctctaccctttggggtagcagagttttgcaacccacagatcccttttgccttgaggaatggtggtgatggtgggtgtcagagattctgtctgtataagtccccgggaaagctcagctgtcgcctgacccgagggtcgtgcagtttccttaaccctgactttaagtcagccctctttaaccccgactcccaagctgggctgtcctttgaaagaaaaacgaaaccgcccagttctgagcgtcggaaaatgggcactcgctccctgggggtt

SEQ ID NO: 601033 - DNA, 561 bp, Homo sapiens
ctctgtcgatgatcctgccccatcctttatgtccccctctagtcctattttctcccattgtttattatttagatctctataaatatacttttctgatatttccctccagtccatagcaaatactactttcaaaacattgtgttgaatgtagaattacagatagttcagttgaaaggccttccttatttcagattacttacagtccacaaaagctctgtgtcaacagtttatcattacacggggcataaaaatatactttcaaatctacattaaacattttctttttgaggggttcattttattaagctacactgttaatgaccactgatgtggaatctctttcactggtttgaatttctttaaaagttaaagatccttgcttctctgaagtatcttgggggtaaggagagctgatccttcagcctggctctgcagtttctgtctctccagatcaccctgggagaggcagaagggaccacagcatggcacrgattgtgtagctaaaaatttggaggcctctggcaggggttccagatacctacatgtgaaatagaaaaatag

SEQ ID NO: 601034 - DNA, 488 bp, Homo sapiens
cttagggacgtggacctggtggaagagaggtgctggcactgcattcacgtggcaaacatcacatttttacttacagtgtattttggggtctctggtatgggctagtggaaatcatttttttaatgtttaagaaaagaaaataataaaattaaaatatayccaggccttccttctggagatataagtaacagaaatactacacaggaagctccatctgccgtgtgtgtttgtgtgtgtgtgtgtaacgatcagcaatgtctttcacttttgcaagaagaaagatacagtttgagttatgggtttgctttggtttttctctccctgtctcccacccccacttcctgttaggggggttgcttcccaaacttgagagccccatcaacacacagctccctggagaggcttcattctcagggtgctgccagccatcacccttcttagagtcataggagacatgtgaagagctcttagaccttctcactaaatga

SEQ ID NO: 601035 - DNA, 488 bp, Homo sapiens
cttagggacgtggacctggtggaagagaggtgctggcactgcattcacgtggcaaacatcacatttttacttacagtgtattttggggtctctggtatgggctagtggaaatcatttttttaatgtttaagaaaagaaaataataaaattaaaatatacccaggccttccttctggagatataagtaacagaaatactacacaggaagctccatctgccgtgtgtgtttgtgtgtgtgtgtgtaacgatcagcaatgtctttcacttttgcaagaagaaagatacagtttgagttatgggtttgctttgktttttctctccctgtctcccacccccacttcctgttaggggggttgcttcccaaacttgagagccccatcaacacacagctccctggagaggcttcattctcagggtgctgccagccatcacccttcttagagtcataggagacatgtgaagagctcttagaccttctcactaaatga

SEQ ID NO: 601036 - DNA, 573 bp, Homo sapiens
ctttttttttttggtgatggagtctcgccctgttgcccaggctggagtgaattggctcaatctcggctcactgcaacctccacttcctgggttcaggtgattctcccaccttagcctcctgagtagctgagattacaggcacctgccatcatgcctggctaatttttatagagacggggtttcaccatgttggccaggctggtctcgaactcctgacctcagatgatccacccaggctggagtgaactggcgcaatctcggctcactgcaacctccacttcctgggttcaggtgattctcccaccttagcctcctgagtagctgagattacaggcacctgccatcatgcctggctaatttttatagagacgggggttcaccatgttggccaggctggtctcgaactcctgacctcagatgatccrcctgcctcggcctccacaaagtgttgggattacgaggcgtgagcctctgcaccccagctgattgcaagttttggatatgtacaatgcacataagtatctatttgtgtgataatacgtctcactaatttttcaaatggtagttagctac

SEQ ID NO: 601037 - DNA, 601 bp, Homo sapiens
tggaacacttgaattagccgttgattttaatcgtcttttgcagccgataacattaagggtttcttttatgaacctttaatacgatagtttttaggtagtgggagagaggagttgtttttgttttatatgcttttccagaagaagaagaaaggtgattcaactttgaatttcctttgatcttttcttgatcttcttaacccgttttcagaatggctaccactctmcctctccagaactttcagtggctcactattgccagtcctcattcttttttcctcccatggctggtttaatttagatctccctatctggaatttgatttctttgcagcagggaccatgattcttgtttttcagttcacatggatcccagagaatagagtaacactcagcaaatacttctttttatgggagagggtgttaggtttttaaaatccttttctcataggctgttagatttgatttactgcttcgtacctgggctttctgttgaggccaaggggtaggagtgtctttgggagtgcatcagagtccgggtgaggcctgtgaccagccagtggggccccagaagctcagttagaactgcttgtacctcctggtcc

SEQ ID NO: 601038 - DNA, 601 bp, Homo sapiens
tggaacacttgaattagccgttgattttaatcgtcttttgcagccgataacattaagggtttcttttatgaacctttaatacgatagtttttaggtagtgggagagaggagttgtttttgttttatatgcttttccagaagaagaagaaaggtgattcaactttgaatttcctttgatcttttcttgatcttcttaacccgttttcagaatggctaccactctacctctccagaactttcagtggctcactattgccagtcctcattcttttttcctcccatggctggtttaatttagatctccctatctggaatttgatttctttgcagcagggaccatgattcttgtttttcagttcacatggatcccagagaatagagtaacactcagcaaatacttcyttttatgggagagggtgttaggtttttaaaatccttttctcataggctgttagatttgatttactgcttcgtacctgggctttctgttgaggccaaggggtaggagtgtctttgggagtgcatcagagtccgggtgaggcctgtgaccagccagtggggccccagaagctcagttagaactgcttgtacctcctggtcc

SEQ ID NO: 601039 - DNA, 518 bp, Homo sapiens
ggcacttaggttactagacagtgaggaggtcatgctagacttccccatgtgtacccagtggaggggagagcatggcaaagaagtccccatgtggtcacatccagcccagggtggcagcattggtggagggaagtgcctgtctggctagatggcctgccacaaccctcctggctttccatggcctgcccaggatgtacagggcttcagagagcaaatggtctccagcaggacctagaacctactgtgactcaatggcctccagtccagggatgagggagatacatgtggctctgaggcctctggcagaaaagagttaacatagtcagtttgagactgcttgcaaggttggcccttggctggcatctacattggatttggggtgggttcccagcactcccagaaaggacaggagcagttcgctgygcctgaactctttgtacaaaaatgtggtttatgctgaacacctgccttccttctggaagcccggacttttggtacatcctaggccacagatgctt

SEQ ID NO: 601040 - DNA, 621 bp, Homo sapiens
ctgacaccagcacactctggtgtcagaatcttgggtttatattctggctactcaaactgtgtggycctgggcaaattctttaatcttttttgggtttcaatttccatagctataaaatgagaatagttgtagtatctatctcgtgaatttattatgagaattaaattattttctctgtggattaaaaaaaaggacttttgcccctgattcttgtttttgaatacagtcttgatccccagaagtgtggcagctctcttgtacacatgatgaagagtgtgaaggggaaaagttgatatgcaaacaatggtggatgagggggtgaagctgttgggatccttgatgactgtggggtggccaaagctgacctcccaccttcagactttctgaaatcaaccactgatggctgggccttctgttacttgtaaccaaacgtatcttaattgatgcaggcttgttgccagactgtaaactcattgagggcagagccatgtcttattcacctttgggctgtcaaggacagcctaacctaatgcacggtggcacacagtaggtggtgcttagtggtttatgataggaagatgtgtggttagaaagcagggaaggaggcaaggaggcagggag

SEQ ID NO: 601041 - DNA, 604 bp, Homo sapiens
attgcggtaaagcgtccagaagtgaaaactggagcctcctgtgtgcagattcaccatgtttagtggggctgtgcagtcctgcatgggctggagtggggacagctgtggcagaaatgaggtggacagagtgaggtggtgggcatgtcaactgcaaagttccttcattayggatcgacatgctcctttacatatcctgctgggctagttgctcacagtggagagtctggagttattgcaattctgtggcaggcaaaatatatagaataaaagaaaatgccttaattgggaccattgttgggagaaagagggcaagaactgttctaagggatatttctgtagtcttagcatcctcttcttaatttttgcagattttatgtcctgttgtcagtttctttaaaaaacaaacaaacaaaagagattacaagtgatttatgggttcacctcctaagaggtccagtgtgggaaaacaaaggaagggaagaaatcgatgtaaggagattaataattctggtaggaggcaccacgtgatgcacaggcctaaacttcctattgaagctggttggaaggccgaggcaggaggattgcttgagcccaggagtttgag

SEQ ID NO: 601042 - DNA, 604 bp, Homo sapiens
attgcggtaaagcgtccagaagtgaaaactggagcctcctgtgtgcagattcaccatgtttagtggggctgtgcagtcctgcatgggctggagtggggacagctgtggcagaaatgaggtggacagagtgaggtggtgggcatgtcaactgcaaagttccttcattatggatcgacatgctcctttacatatcctgctgggctagttgctcacagtggagagtctggagttattgcaattctgtggcaggcaaaatatatagaataaaagaaaatgccttaattgggaccattgttgggagaaagagggcaagaactgttctaagggatatttctgtagtcttagcatcctcttcttaatttttgcagattttatgtcctgttgtcagtttctttaaaaaacaaacaaacaaaagagattacaagtgatttatgggttcacctcctaagaggtccagtgtgggaaaacaaaggaagggaagaaatcgatgtaaggagattaataattctggtaggaggcaccacrtgatgcacaggcctaaacttcctattgaagctggttggaaggccgaggcaggaggattgcttgagcccaggagtttgag

SEQ ID NO: 601043 - DNA, 543 bp, Homo sapiens
cagtatcagccactttgttctctgaagtttcccagccccgtggtagatctaccatgctgtgcctcacccaggtgcacagtgatctctcacttgattatgagcctcaaagacagtggctgtgtctaattcatatctatattctcagcacaatccctggctcttctcccacctgtctgcctttatgacccacactagtcccgctggcttctttctacttctgaacttggccgaaccatccaacctgaaggcatttgcattagctctacacagaatgctcttcacacacacgcacacccttcacctgctcaatgccatgcttttttttttttttttgagatggagtctcacactgtagcccaggctggagtgcagtggcgtgatctcggcttaatgcaaccttcacctcccaggttcaagcaattcttttgcctcagcctcctgastacctgggattacagacgtgtgccaccacacccggctgatttttgtatttttagtagagatgaggtttcaccacattggccaggctgatctcaaactcat

SEQ ID NO: 601044 - DNA, 570 bp, Homo sapiens
aaaattagaaacctcaataatgttaagtgctagtggcaaacagagatacaagaacccttgggtggcaaatacagatacaagaaccctcgccattggaaaagtagactgacatccattacccagagaaattagccatcacttagtcaaatcaagtgtctcctcagacccagcaatcccactgctaatgttatgacccaaggaaactgttacmtagctccacaggagacacatacagcatgttcattgctgtcaggggattttgtgatggtggttgcggggtatagatatgaaaaaacacagtgaatacacaccatggagaagtatgcagtaatgagaagcagttagaaagctgttaaccacagtagcatcatggaaagacctcagagacatggtgctcagtgacaaaagtaaaagaaagaagatatgataaaattatttgaataaattagaaatgcttacaaccactgcagacaaagtcccatattaaccatattagagtgattgcccgtaggaagaaatggggaaaggggagaagggtaagagttaatcagagatgaagagattttgcat

SEQ ID NO: 601045 - DNA, 570 bp, Homo sapiens
aaaattagaaacctcaataatgttaagtgctagtggcaaacagagatacaagaacccttgggtggcaaatacagatacaagaaccctcgccattggaaaagtagactgacatccattacccagagaaattagccatcacttagtcaaatcaagtgtctcctcagacccagcaatcccactgctaatgttatgacccaaggaaactgttacatagctccacaggagacacatacagcatgttcattgctgtcaggggattttgtgatggtggttgcggggtatagatatgaaaaaacacagtgaatacacaccrtggagaagtatgcagtaatgagaagcagttagaaagctgttaaccacagtagcatcatggaaagacctcagagacatggtgctcagtgacaaaagtaaaagaaagaagatatgataaaattatttgaataaattagaaatgcttacaaccactgcagacaaagtcccatattaaccatattagagtgattgcccgtaggaagaaatggggaaaggggagaagggtaagagttaatcagagatgaagagattttgcat

SEQ ID NO: 601046 - DNA, 564 bp, Homo sapiens
ttctttcttttctttctttttttttttgagacagagttttgctcttgtcgcccaggctgtagtgcaatggcactatctcagcccactgcaacctctgcctcccgggtttgagcgattctcctgcctcagcctcctgagtaactgggatcacaggtgcacaccaccacacctggctaattttttgtatttttagtagagacggggtttcaccatgttggctacactggtctcgaactcctgacctcaggtgatccacctgcctcagcctcccaaagtgctgggattacagatgtaagctactgcgcccagcctggaatggtgtttctgaccccacctttttttggctgcagtttgaccttgttttcttagttttgggttgcatggaacaataggaagagaaaacaaatggatcactgttcatcytgagaggcatgaaaggtgaatggggcgtgtgcagtggctcaagcttgtaattctaatgctttgggaggctgaggtgggaggattgcttgagcccagcagtttgaggctgcagtgagctatgatcacaccactgcactctaa

SEQ ID NO: 601047 - DNA, 599 bp, Homo sapiens
tttctaaatctagaattacaatggagctaaaatttagcttatagcagaaggaaacaatccacattaattatctcttagagttataatgtaaaaargcaacacttttaaccttgataagcataagagaaagatggcatcagtcaaatttgctttcatagaataattcctttaaagttttaatacatcctagaaaaacctaattgggggagggtggtcctaaccacaaatacgcaagtattctaccatcttaatggattcccccttcttgctgacaacagtgcctcactaatggaaaagaattattggaaaggtgatttgagtacatggtacatttaagacccttactttcttagctattatccattcaatagaagatactactgtatttagccaatagaggaaacatgttcagagagagagtgctttaaaaatatccttctagctcaggaccttgggttccacttagctccccgccatcactctcagcttgcactgtggtcccacagctttctattaaatgcactaacattctgccagtcagctcaaagtctcagagtcagcaaaaatgtctcctcttctctaaaatgaaacccaagttg

SEQ ID NO: 601048 - DNA, 599 bp, Homo sapiens
tttctaaatctagaattacaatggagctaaaatttagcttatagcagaaggaaacaatccacattaattatctcttagagttataatgtaaaaaagcaacacttttaaccttgataagcataagagaaagatggcatcagtcaaatttgctttcatagaataattcctttaaagttttaatacatcctagaaaaacctaattgggggagggtggtcctaaccacaaataygcaagtattctaccatcttaatggattcccccttcttgctgacaacagtgcctcactaatggaaaagaattattggaaaggtgatttgagtacatggtacatttaagacccttactttcttagctattatccattcaatagaagatactactgtatttagccaatagaggaaacatgttcagagagagagtgctttaaaaatatccttctagctcaggaccttgggttccacttagctccccgccatcactctcagcttgcactgtggtcccacagctttctattaaatgcactaacattctgccagtcagctcaaagtctcagagtcagcaaaaatgtctcctcttctctaaaatgaaacccaagttg

SEQ ID NO: 601049 - DNA, 599 bp, Homo sapiens
tttctaaatctagaattacaatggagctaaaatttagcttatagcagaaggaaacaatccacattaattatctcttagagttataatgtaaaaaagcaacacttttaaccttgataagcataagagaaagatggcatcagtcaaatttgctttcatagaataattcctttaaagttttaatacatcctagaaaaacctaattgggggagggtggtcctaaccacaaatacgcaagtattctaccatcttaatggattcccccttcttgctgacaacagtgsctcactaatggaaaagaattattggaaaggtgatttgagtacatggtacatttaagacccttactttcttagctattatccattcaatagaagatactactgtatttagccaatagaggaaacatgttcagagagagagtgctttaaaaatatccttctagctcaggaccttgggttccacttagctccccgccatcactctcagcttgcactgtggtcccacagctttctattaaatgcactaacattctgccagtcagctcaaagtctcagagtcagcaaaaatgtctcctcttctctaaaatgaaacccaagttg

SEQ ID NO: 601050 - DNA, 565 bp, Homo sapiens
aggtcaaggtggaaacaaaattaaacaataaaataatttaaaatttgagaaattaaattagtatcaagttgatgcctggcattattgatatattttattccctattgtcaccaaacctggaagaggccagcctacaggtctttagggggaggcaaagggggaagaaaaatggacacaatgagtaaagacaaaatgttcctaataattttgttacttctaatttggtgtggtacaggtatgccatcaatccccagaggactgtgtgtgcttgttgatgtgttttaggggagactcacaatcttgactagtacaggaaggtatggggaaaagaaaaagagaagtttttcttttctctgtgtttagkatgatggttctttctggtcatcttccataagtgacaagcaggatccaacaaactgattttagcagctcctatagctttcatttaggttatatttaactatgggatcatttttattccattcagcaccaacttcattatcagtgtttagtgtttattatgtaacaataacaaattctaaatataaggacttgaagttgtgaa

SEQ ID NO: 601051 - DNA, 565 bp, Homo sapiens
aggtcaaggtggaaacaaaattaaacaataaaataatttaaaatttgagaaattaaattagtatcaagttgatgcctggcattattgatatattttattccctattgtcaccaaacctggaagaggccagcctacaggtctttagggggaggcaaagggggaagaaaaatggacacaatgagtaaagacaaaatgttcctaataattttgttacttctaatttggtgtggtacaggtatgccatcaatccccagaggactgtgtgtgcttgttgatgtgttttaggggagactcacaatcttgactagtacaggaaggtatggggaaaagaaaaagagaagtttttcttttctctgtgtttagtatgatggttctttcyggtcatcttccataagtgacaagcaggatccaacaaactgattttagcagctcctatagctttcatttaggttatatttaactatgggatcatttttattccattcagcaccaacttcattatcagtgtttagtgtttattatgtaacaataacaaattctaaatataaggacttgaagttgtgaa

SEQ ID NO: 601052 - DNA, 580 bp, Homo sapiens
aaatataaggacttgaagttgtraatcctgtgatttaatgtgacatttccttggagaggattttcatagtgaatcttgatgtttaaagaatgcgatggaaatgatctatttcagctttgcctcttacattaatgggtttttttgatcctttataggaaatgctggtggtgaatagacctcactgttataaaatgtgtatagaagcttgaaaaaggaaatacattttggactgtctgtaaatagtcaactattatgcattatttatgacatattttgtggctatataaatgctattgatcatgatatttttatccaacaacatatggttgatatgattcccacctgctagtcgtatagtataaatgtttgctttaagagtatatgaactgggcaaatacagggaactaaataacatacatagtttatgaattgaaatattagttcttttatatttgaatatacaatatacaaggttctgttttcattctgtctttgaaaaaaatcttcatgtgatttatttgcaatattgagctaaattgtaccagttttataggaacatattttgttaaatagcataaaa

SEQ ID NO: 601053 - DNA, 580 bp, Homo sapiens
aaatataaggacttgaagttgtgaatyctgtgatttaatgtgacatttccttggagaggattttcatagtgaatcttgatgtttaaagaatgcgatggaaatgatctatttcagctttgcctcttacattaatgggtttttttgatcctttataggaaatgctggtggtgaatagacctcactgttataaaatgtgtatagaagcttgaaaaaggaaatacattttggactgtctgtaaatagtcaactattatgcattatttatgacatattttgtggctatataaatgctattgatcatgatatttttatccaacaacatatggttgatatgattcccacctgctagtcgtatagtataaatgtttgctttaagagtatatgaactgggcaaatacagggaactaaataacatacatagtttatgaattgaaatattagttcttttatatttgaatatacaatatacaaggttctgttttcattctgtctttgaaaaaaatcttcatgtgatttatttgcaatattgagctaaattgtaccagttttataggaacatattttgttaaatagcataaaa

SEQ ID NO: 601054 - DNA, 548 bp, Homo sapiens
tgtttcagcattattctacacacagacacattttagtttgagctaytggtgactttatataattaagcagtagcataagataggcaacttctcttccataggtaatgaatattaacaacttgctttacaggaaaaagatttaaaggaaagttgctttactcaaaataggaaagacaggaatttctttgtctctttggtatgtgacctggaggcttctttcaattttacaaatatgctttgtttaaccatttggaattaaagtaacactataatgaagataattacaagaaaaaatattgcaacttaacttccaaatatttttgctttgagggtgtgttaagatatttgaataagattacagccctagccctagaactctgcatttttggtttatactgaaaaactaaatgctggattggagaatttttctgtttcgcatttattgctaagtcaactaaaacaaagactctgtaataaaacctactctaccctactctactaaagagtcagaaatcagatagggtggatctgtagtttgtccagtgaga

SEQ ID NO: 601055 - DNA, 548 bp, Homo sapiens
tgtttcagcattattctacacacagacacattttagtttgagctactggtgactttatataattaagcagtagcataagataggcaacttctcttccataggtaatgaatattaacaacttgctttacaggaaaaagatttaaaggaaagttgctttactcaaaataggaaagacaggaatttctttgtctctttggtatgtgacctggaggcttctttcaattttacaaatatgctttgtttaaccatttggaattaaagtaacactataatgaagataattacaagaaaaaatattgcaacttaacttccaaatatttttgctttgagggtgtgttaagatatttgaataagattacagccctagccctagaactctgcatttttggtttatactgaraaactaaatgctggattggagaatttttctgtttcgcatttattgctaagtcaactaaaacaaagactctgtaataaaacctactctaccctactctactaaagagtcagaaatcagatagggtggatctgtagtttgtccagtgaga

SEQ ID NO: 601056 - DNA, 592 bp, Homo sapiens
cattctttgttcttaaagctttcagctgattggatgatacccactcatactatggagggtaatccgttttactcaaactgatttactgattgtagatgtcaatcacatttaaatacagtcttcagaacatcttgggtgttgttttactaaaacagctgggcaccctagtccagtcaagttgacacacaagatttaccattgcactgaccaagagtatcaacawctattgcaatgactgctcgtggtgtattgatgaggggcattatgccttccatgtgcttgcaatccttatcctggttgtatttaaatgttccttcggtataagaaaatctcttttattggcaaaacttcaagaatattgtagaaaatgaaataagttatatctaaaagatttttttcatttgaaaggcaggaagagaaagacattgtatctcatgaagagagttttcaatgaactacacttctctttgctgttgcattattttctgatgcaggcattttaaattcttctcatctgattatataatccaaagtttcagcacacattcactatacatccctcactcacccatctatgctgtagaaagatctt

SEQ ID NO: 601057 - DNA, 572 bp, Homo sapiens
ttctgatttttttgctttcacatcttttactatagtaaaacacaaatgtaaatcttttgaaacttaatcattaatttttcaattaaaaatttatttaaaagaaaattagttctggaagggtgtttattttggaatctgctatgcatattctggagtgcatttttgctgatttatttcccttttgttgctataggttctaaatgagcaatggattgagttccatttcacactgattataacttcggtgtatgaatatgaagagaaacaaagagagggtatattagtcatgtttttattttctatattttatgatgctctgacatcttggggactgaggagctaggagagattgttctttcccagggttagctaattcctagagacagcaaaaaatttgacwggaataagactttgatatgcaaaccaccaatcctgagttcatatcctcccacacccacctccttttaccagtctcctgtgatccagaacaccacacccgtgccctaaatcacctgagggccaaggtactaaacaactagaggccacccctatagcccaaagcccactgaaat

SEQ ID NO: 601058 - DNA, 572 bp, Homo sapiens
ttctgatttttttgctttcacatcttttactatagtaaaacacaaatgtaaatcttttgaaacttaatcattaatttttcaattaaaaatttatttaaaagaaaattagttctggaagggtgtttattttggaatctgctatgcatattctggagtgcatttttgctgatttatttcccttttgttgctataggttctaaatgagcaatggattgagttccatttcacactgattataacttcggtgtatgaatatgaagagaaacaaagagagggtatattagtcatgtttttattttctatattttatgatgctctgacatcttggggactgaggagctaggagagattgttctttcccagggttagctaattcctagagacagcaaaaaatttgacaggaataagactttgatatgcaaaccaccaatcctgagttcatatcctcccacacccacctccttttaccagtctcctgtgatccagaacaccacacccrtgccctaaatcacctgagggccaaggtactaaacaactagaggccacccctatagcccaaagcccactgaaat

SEQ ID NO: 601059 - DNA, 600 bp, Homo sapiens
aaataacaacacagaatattacataaacttagttgataaagcagcagcagagtttgaaagtcttgactccaatattgaaagaagctctacagtgggtaaaatgctatcaaataccacatgctgcagataaatctttcatggaaggaagagccaatggataaggcaaacttcttattgttggggctgttgtctttttaaagaaattctcacagcaacctcaaccttcacctgattagtcaacagccatcaacatcaaggcaagaccctccaccaggaaaaagattataacttattgaaagttcaggtgatcattagcgatttttagcaatgcagtattttttttaaattaaagtgtgcacattatttgtatagacataatgctatgaacacttaccagactatagtatagtataaacataacttyaatatgcactggaaaaccagaaaattctcactttcttgccattttcacttcattgcattggtctggaactcaaccagccatatctccaaagtacgcctgtatactgaatatcatacattactatagcaagtaatttcaaataaaatattcacattttttaaacctacattttgttc

SEQ ID NO: 601060 - DNA, 535 bp, Homo sapiens
cagtgaaatatctctaaccaatcattaaacatccacagcagtggataccagcaattctgaaggatggctctcagacggggtccccagcatgtaacccttaggatgtatcatctgttccctaaagatttgtctttagtttcccagattctaaacacaaacagtgactttaacagtctctgcagttctatcttgggctgtcaaaaattattttttattatagatgattcattggcagaaagaatattattttctttccctctaaaatgtttttaaggtatttcagtagytattgataaattttaacctggaggtaagcatgtctttcaaaagaaaatatggaagttcatatagactggctttctcttctacagggaatttgttagatttattttctgtatgtccatacctggtaagaatccccacgtaggccaacgtagttatatgtgacacaagtcacagataaaacagccccgaatctgtgggtaaaatagagccataatattgtcccacataactcactcttttacttccagct

SEQ ID NO: 601061 - DNA, 535 bp, Homo sapiens
cagtgaaatatctctaaccaatcattaaacatccacagcagtggataccagcaattctgaaggatggctctcagacggggtccccagcatgtaacccttaggatgtatcatctgttccctaaagatttgtctttagtttcccagattctaaacacaaacagtgactttaacagtctctgcagttctatcttgggctgtcaaaaattattttttattatagatgattcattggcagaaagaatattattttctttccctctaaaatgtttttaaggtatttcagtagctattgataaattttaacctggaggtaagcatgtctttcaaaagaaaatatggaagttcatatagactggctttctcttctacagggaatttgttagatttattttctgtatgtccatacctggtaagaatccccacgtaggccaacgtagttatatgtgacayaagtcacagataaaacagccccgaatctgtgggtaaaatagagccataatattgtcccacataactcactcttttacttccagct

SEQ ID NO: 601062 - DNA, 535 bp, Homo sapiens
cagtgaaatatctctaaccaatcattaaacatccacagcagtggataccagcaattctgaaggatggctctcagacggggtccccagcatgtaacccttaggatgtatcatctgttccctaaagatttgtctttagtttcccagattctaaacacaaacagtgactttaacagtctctgcagttctatcttgggctgtcaaaaattattttttattatagatgattcattggcagaaagaatattattttctttccctctaaaatgtttttaaggtatttcagtagctattgataaattttaacctggaggtaagcatgtctttcaaaagaaaatatggaagttcatatagactggctttctcttctacagggaatttgttagatttattttctgtatgtccatacctggtaagaatccccacgtaggccaacgtagttatatgtgacacaagtcacagataaaacagcccygaatctgtgggtaaaatagagccataatattgtcccacataactcactcttttacttccagct

SEQ ID NO: 601063 - DNA, 551 bp, Homo sapiens
ctgtgaagggattacggatggctaaaagaagaagatcccacgagtggaaaaatactgaaaagtgtcrtagtgtaggtgaagaaactcaagtgaaattactcagagcagatcacaaatattttagaccatataatgcactcagcattgttcctagagcatcataaacactcaatgtaagtttcacttctccttcctctccttttcctcctctctcttctgccccttccttcttttttttctttcctttcttcttcctcttctcctccttttccttcttactgctgttgttgttacttattttcattatttctccttcctttacttcccatcctgacaatagagatcctacccaaccattcagttaacttcactagtatttgagttctacctccttcattaagctttctccggctaatcctaacctgcattgacctcccatttggggattaatatctggtttcacactgtcttaaattgttccttgttactccaattattatttaatcttgtcagatgaataaagtgacaaatactttgaaggctgaaaccat

SEQ ID NO: 601064 - DNA, 474 bp, Homo sapiens
ttaatcaccttccaaaggccctacctcctaatagtttcacattggccattaagtttcaacacacgaattttggagkacacatttcagaccatagcaattgcttaatctcattggaccttaattttattatttgcacaataaacagggatgatgtgatgcctcagtactctttccagctccccatgtttgatctcttccttatcaatagtgtgcaattcttacccccacataccagtattcaaatgaagtcctacatctgcagaattcttgttctaacttgtcataccagcagccacgatcatccattaaaattcttttctaataattatagagttttagatcagttttttcgggaaatgaaaaaaaaatcaaagaggtgactaagaagttattgatagacacataaagattacagtaatttaaatttgagtatccaaaggggctataaatatcaaggggacagggctacctctc

SEQ ID NO: 601065 - DNA, 474 bp, Homo sapiens
ttaatcaccttccaaaggccctacctcctaatagtttcacattggccattaagtttcaacacacgaattttggaggacacatttcagaccatagcaattgcttaatctcattggaccttaattttattatttgcacaataaacagggatgatgtgatgcctcagtactctttccagctccccatgtttgatctcttccttatcaatagtgtgcaattcttacccccacataccagtattcaaaygaagtcctacatctgcagaattcttgttctaacttgtcataccagcagccacgatcatccattaaaattcttttctaataattatagagttttagatcagttttttcgggaaatgaaaaaaaaatcaaagaggtgactaagaagttattgatagacacataaagattacagtaatttaaatttgagtatccaaaggggctataaatatcaaggggacagggctacctctc

SEQ ID NO: 601066 - DNA, 474 bp, Homo sapiens
ttaatcaccttccaaaggccctacctcctaatagtttcacattggccattaagtttcaacacacgaattttggaggacacatttcagaccatagcaattgcttaatctcattggaccttaattttattatttgcacaataaacagggatgatgtgatgcctcagtactctttccagctccccatgtttgatctcttccttatcaatagtgtgcaattcttacccccacataccagtattcaaatgaagtcctacatctgcagaattcttgttctaacttgtcataccagcagccacgatmatccattaaaattcttttctaataattatagagttttagatcagttttttcgggaaatgaaaaaaaaatcaaagaggtgactaagaagttattgatagacacataaagattacagtaatttaaatttgagtatccaaaggggctataaatatcaaggggacagggctacctctc

SEQ ID NO: 601067 - DNA, 567 bp, Homo sapiens
aaagtcttcacaagaaggttcagcattttgctcctctgttcctgcracattttgttcatacctttattgtagcacttatattgtattgcaagtttccttgtatatttcacttgtttattcattctttcacttactaatttaggcaataaataaaattatctgctatatgaaaaatttggaaaataataataaccagctgctctgtcacactattcccacatattgcttatttaaactttaccacctcctatgagatagaaattatcactatcttccttttaaaaatgaggaaattcagttttggagaaggtaagtgtatgctggatgatttgcagctagtaaatagtgtgccacaatttgacctattctattctgttctgttctgttctattctattctattctattctattctatttttagagactgggtctcactctgttgcccaggctggagtgcagcagcacaatcgtagctaactgtagcctcagacccctgggcccaaccaatcctccttgtgagccacaattttaacacagatctgattgatatcaaaatacttagacac

SEQ ID NO: 601068 - DNA, 567 bp, Homo sapiens
aaagtcttcacaagaaggttcagcattttgctcctctgttcctgcaacattttgttcatacctttattgtagcacttatattgtattgcaagtttccttgtatatttcacttgtttattcattctttcacttactaatttaggcaataaataaaattatctgctatatgaaaaatttggaaaataataataaccagctgctctgtcacactattcccacatattgcttatttaaactttaccacctcctatgagatagaaattatcactatcttccttttaaaaatgaggaaattmagttttggagaaggtaagtgtatgctggatgatttgcagctagtaaatagtgtgccacaatttgacctattctattctgttctgttctgttctattctattctattctattctattctatttttagagactgggtctcactctgttgcccaggctggagtgcagcagcacaatcgtagctaactgtagcctcagacccctgggcccaaccaatcctccttgtgagccacaattttaacacagatctgattgatatcaaaatacttagacac

SEQ ID NO: 601069 - DNA, 499 bp, Homo sapiens
taccatcgagaatatgctgccatacattaaggaaggagtgagggatactgtttgaagtctggtattttatcttataacatataagatcttagcattaactcttgtaccaagtggcccttgtccaacatgtgtgtttatattggcgtctctttagaattttttttgtaaacactgccaactcatcataactttgcttttagcatcttctaaaagaggtaagcaacataataacattgcttatgatacatataaaaacactttcttgtaagtgctaagagtcctagatttacaaaaaatcttgtaaacttaagaacatggactatatacaaaatataaagtaagagttgtactagacattcaaatacttatagtattttccctatcttgtaaaaagatacactttttagtgttgttagaatgccttaagaatcatggcctcttgggtttaaatttatgtaaaaaactacacartttccattttctggtttattttgtcctg

SEQ ID NO: 601070 - DNA, 616 bp, Homo sapiens
tcccaaattaatgttcttgccactaaaccaggctgcttccttataattaggaaagttgtgctcctgaacaagtgtttggtttttccaaatatgggatctgctttgcaatttgtccatgttgatatcagtagccctagttcattcatttctttctctaagtttaatagctatagctaaattattcttcaaagccattgtgccaaattatactgtgaataccaatgtataagcatctccttttttccatrctcttgctgtggcaacacactactagttgcctatccaatacccatttttcattcttttcttagaaacttggctttctttccccctagcagtaaggtatccaacttcaaaaaatatatttcccagcctcttttggtaactagatgtagctatgtgacacagttcttgccaagaagatacaatcagaatctgttggagattcacaaaaagtttttcatctctcagataggtcttggcccttcttttgctgctttcttcattttagactatcctggagtgcagacatgaggttagagatagaacagtgattttgaatccatgggatatcagtttgagggtgaaagacctacagtatgaaagatgtaacaga

SEQ ID NO: 601071 - DNA, 576 bp, Homo sapiens
aataaaagctctcatgaataaagttcattctatatactttaatcaatgttaatataatctgacaaataaatgccattacaagcataaatcttaaatatggacatttgtgattaatagaagtatctcgagcttctcaggcgttatgatgactagcaaaatggcaactgccagcaggatggttcaggtacttaaattacatactccattaataaggttccctgacagagagaccattctaagcccaatacatcagaagctttgagatcagcaggactattatctcactcctcttcaatttcacagattctaagaaaagcaaatcaccagctttgcttacacatcagggtctgccagacactgcagaaataataaaaacactacctcagaagaaatttatgtctcaagaagaaatcaaatttatccaatgtggactgctgtttgtcataagacaaaaaawttgtctttataataagtgacttccaaatgacaaacaagaaattgtacattaaaccacattaataaatattctgcaaaaaaatagaaaatttatatttttttacattagagcagtgtaaa

SEQ ID NO: 601072 - DNA, 563 bp, Homo sapiens
tttaatttgataggtttaattgttatttcaaaatcaaatgtttcttggccgggtgcagtggctcacgcctgtaatcccaacactttgggagactgaggcaggtggatcgcttgagcccagaagttcaagaccagcctggccaatatggcgaaaccctgtgtctactaaaaggacaaaaattagccaagtgtggtggtgcacgcctgtagtcccagctactcagcaggctgaggcacgagaatcatttgaacacaggaggctgaggttgcagtgagccgagattgtgccactgcactccagcctgggtgatagagtgagactgtgtctcaaaaaaaaaaaaaatcaaatattacttggaaaatttctctttcaaacagattttgctttgtatatgcttccaggaaaataattacaatattttagaacagagtgaaacacagagaaaatcacttttatcattgaaaatgtagaataygaattaattaatgatcattacattctttctttttacaaacattgaagttattgccatctgaccatctgtatctaaacctaatactgcc

SEQ ID NO: 601073 - DNA, 532 bp, Homo sapiens
gggattgatgggttgaatggtagttctaagttctttgagaaagaccctgtctcaaaaaaaacaaaaacaaacaaaaaggtgttcccttttctctgcaacctcaccagcatctattattttttgactttttaataatatccattctgatggatgtgagatggtatctcaytgtggtgttggtttgtatttctctaatgattagtgacgacgttgagaatttttttacttacttgtgggttgcatatatcttcttttgagaagtgtttgttcatgttctttgcccattttttaatgggtttgtttctttgcctgttaagtttcttataaattctggatattaaacctttgttggttgcatagctgcaaatatattcttccattctgtaggttgtctgtttactctgttgatagtttcttttgctgtgcagaagttctttattttaattagatcccacttctcaatatttacttttgttgcaattgcttttagagtcctcatcatgaagtctttgccaggatctatgttcaaaat

SEQ ID NO: 601074 - DNA, 544 bp, Homo sapiens
agataaatttttggtagtgaactggattccttctttgaggggacccaggcttcctgtgattcaaggggttctgggggctgtaaactagctcaagtctggaaattgattgcagcgtcctgaatatagttttatgatttgaattagagttttgttcatttgacctagaacttttctgcttacacagacagagtaataacttaggagccgccttactctatttcacttcaagttagaccatggttatcaaggaaatgccacaggtctgcactagtcagactattctaattccttctttgattctgtcgtccattaccataactatgtccaccttgtccttggtggttgagtgccacaacttggcctctgtccccatataggtttttcaattaagtagatgcagctcccactgtaaggtctagcctacagaggagaacaatcacagagctctttaaggaagctcacaaacttatttctcaaagtggttggtgaaaggtacatctttgggacygtccctctttgggtgagtagttcttagatagcaaat

SEQ ID NO: 601075 - DNA, 609 bp, Homo sapiens
tgatattttatgtatctatataaagagttaatgccaaggactatcatcagtgctctctttactataagatatgaactcatttacaagatataaagtataagcagattggagagacaactctagaaatactagaactaatttaaaaaactcatccttaaaattctgttcttctagaactattctaactaccaaaatctatactagtcagggttgtccagagaaacagaaccartaggatacatatacatgtagagatatatagaaagagacttttttataaaggattggctgagaagtcccacaatctaccatctgcaagttgaggcccaggaaagttggtggcatagctctaatccaagtctgaaagcctcagaaccacaggggccattggcataggttctgatctgagtctaaaggcctaaaccaagagcactgacatctgagggcaggagaagatgaattgtctagttcaagaaaagagagcaaatttacccttcctctgtctgttatatttgggtcttcagtggattagataattcctacacatgttggtgagggtgatcttctctgctaagtctactgattcaaatcttttccagaaacacccac

SEQ ID NO: 601076 - DNA, 609 bp, Homo sapiens
tgatattttatgtatctatataaagagttaatgccaaggactatcatcagtgctctctttactataagatatgaactcatttacaagatataaagtataagcagattggagagacaactctagaaatactagaactaatttaaaaaactcatccttaaaattctgttcttctagaactattctaactaccaaaatctatactagtcagggttgtccagagaaacagaaccaayaggatacatatacatgtagagatatatagaaagagacttttttataaaggattggctgagaagtcccacaatctaccatctgcaagttgaggcccaggaaagttggtggcatagctctaatccaagtctgaaagcctcagaaccacaggggccattggcataggttctgatctgagtctaaaggcctaaaccaagagcactgacatctgagggcaggagaagatgaattgtctagttcaagaaaagagagcaaatttacccttcctctgtctgttatatttgggtcttcagtggattagataattcctacacatgttggtgagggtgatcttctctgctaagtctactgattcaaatcttttccagaaacacccac

SEQ ID NO: 601077 - DNA, 609 bp, Homo sapiens
tgatattttatgtatctatataaagagttaatgccaaggactatcatcagtgctctctttactataagatatgaactcatttacaagatataaagtataagcagattggagagacaactctagaaatactagaactaatttaaaaaactcatccttaaaattctgttcttctagaactattctaactaccaaaatctatactagtcagggttgtccagagaaacagaaccaataggatacatatacatgtagagatatatagaaagagacttttttataaaggattggctgagaagtcccacaatctaccatctgcaagttgaggcccaggaaagttggtggcatagctcyaatccaagtctgaaagcctcagaaccacaggggccattggcataggttctgatctgagtctaaaggcctaaaccaagagcactgacatctgagggcaggagaagatgaattgtctagttcaagaaaagagagcaaatttacccttcctctgtctgttatatttgggtcttcagtggattagataattcctacacatgttggtgagggtgatcttctctgctaagtctactgattcaaatcttttccagaaacacccac

SEQ ID NO: 601078 - DNA, 534 bp, Homo sapiens
aaagagctattttcctgtatcagcattctgttccttctcagtgtgtgccttgcttgtccacagaaagatggtagaaaatcctctatggaaagttttcgtgaaagtaacagcatcagcatgcttttatcagtgatgacagaaagataatccacatgtgaaagcacttggtgctttagcttattctgaatgacagaagcataatagaatctcctaagcattagcattctacaataacacagcattgtcatctttgtctgatcctggctcatgcaaatctcagtgtttcaaattcctaacaaaaactagagaaatgcacctcaaagctrttatgtggaaatggattaggtacagatctaaatctttaaacaaacccttaatgaggtaaaagtcatagttatatacttcttaaggaatgtttatgggcaagatgaaaatgcagaatctaggtctcacaagcaatttacatgcctaaatcctgtatatattttgtttctcaaagtattagccttttctgtcctttctccatatttgata

SEQ ID NO: 601079 - DNA, 582 bp, Homo sapiens
gtaatgattaaggtatggtgagccttcagaaatttttgaagtaggagaagtttttcagccacttcttctcatatctctttcatatctctttcagtgcttatcttccaggagctaaagtcttctgtrtcactccctggttgtcctgaactacttattattgtcttatgcactaaatctagatcttcctttcccagcattaccgttgtctccaaagttatctctcttttgttgaaccgatcaaaccttaaccgtctggtttctcattctcttggctttctgctcctaaccagtgcttaggcagttagcatggtaggattagaaagagccttgagtcaaagttctggccaacacctgtggtgtgcccttctatgctgggcactattctaaatgcctagcatgttgtaacttgttcattctcgaaaacagtcctatgaaagcaggcaccatggggttaaatcacttgtctaaagtcacacagctatcaagtgggggaaccaggattccggtccacgggctttgggtctagattctatatgttttgttgctatgctatcatagtgacaatgattaaccctgtgttct

SEQ ID NO: 601080 - DNA, 631 bp, Homo sapiens
aactctggtgggataattagagacatggactttatttcaagccagattcttgactcataatagagtcatatattttattcctaaatcctcccattcaaaaaacaagatgatatattagcattgtccagaattctccaaggaatgccgygggatctggtgagtggagattttaatcccaaatcagagatcttgtctttgtgtctaccactactattgaattgttttctaacaagaagttattagtctattcatcccattaattatttttgagtttgtattaggtgccaggctctgtgcttggaagaaaaagttcagagatgaataagttacagtctaaagagcttatggttgtcataataactacagttataggaatatgcatgggtattatgaaaaccccaaggagtaacacctaacctgttttagtggggatgggagacatggagtggaagaggaggggaagggaagatgaattgagggtgtcatgatgcttgggttaagtcttcaagaataactaggaggtagccagacttagatgatagcttgagcaaaggaatccataaaagtagcacattggtgccagagagcaagcttttggtgtgctggagtaaagagtgaggcaagagcattg

SEQ ID NO: 601081 - DNA, 582 bp, Homo sapiens
gctctgcccttctaaatagatcaattgatttatggattaatggattatcatgggaggggaaatcatggctttataagaagaagagaggtctaagatagcaccttaacttgcatgcccccttgccatgtgatgcctgccactacctaaggacaccacagtgagtccccaccakcaggaaggctcccaccagatgtgcccccagatcatgaaatttccagtctccataactgcaagaaaaaaaaatccttttctttataaattgcccagtttcagatattctactatgagcaacagaaaataaacaaagatactaatctaaacatatttcaccaaattatatagagagaaacctttcttaattatctttctagcacccaaacacagcacaggcctaccactgaataaaggcttaatgaagatttcctggtcttagtctcaacctctagttctttttattttattgttgttgttttaaacaaagagacaattttcttttttagatatcacaggtcaattaatcatgtaaaattggctgaaagttttgaacatataaaataatttcaaacataactgtattcattg

SEQ ID NO: 601082 - DNA, 617 bp, Homo sapiens
ttccacttcttttccaccacctacttttcagctttggattgtagtcagctctatttttarcccatccatcaagattttcaaaaattctctgtgaaccctttgttacctatgcagaactaactcataggtcaacacaacaataaaaatgcaaattatagatgttcctcattatgcagaaaagaatattttaattcttggtccaaacatgttgcaatcttagaccttgctaaatttccctgagatttttccattcataaatttagtaatgtcttcttgcaatttttttttttttgttcagtttttcagtcctgacatgcaactttgagaggttgggcatactttggtaggaactgtgtaacccaaaagaataaaagcttcttaaaggttatccagcttgaactatgtccaagttttccgcaaatgagctatataaaattttgccatatgttcctctttatattgatacatctgaatagagaaagatatttataaacaatgtaggtatagtcactgattgaggaggcattagttttctgaatattcagataactcaatatctggcattgtttaatttatctagacaagtgacatttggttaaaacaaacctataaggctt

SEQ ID NO: 601083 - DNA, 563 bp, Homo sapiens
gaaaaaaacagaaaataaatattgaatatggattaattgatgaatgtattgacaaatgttaataggataacttttttgttttgtgattaagtgggcagaaagaagtgcaaaggtcattttcatatttgaggcatgtaagtaaggaatttcagctattgtgggagatccacagagggagaaacagtgacttatatgtaatgcatattttgtcccaatgtagaaaaaataggatggttggtcttactgggatagaacaaagtaaagattcaattaaaacggcaagagtttctgatcagccagtactgagtctwgagaaaggtagtatgggaagatgagaagtactcactcttttccttgtcccagtgttcctaagctgaccaacacaactgtggtctctggggaaggggcaagagctaaactatttggaaaaacagtgtttgtattccctggatcatcagcatttatttttcttttggaccagaatttgtaaactttgtagaactattggctgggaggaaatttgttctacttactgtcctctcactgtggaccaggggtgtcaa

SEQ ID NO: 601084 - DNA, 620 bp, Homo sapiens
agtatacacatacaatgacataccagtcagcctcaaaaataacggatattccaacatatgctaccacataggatgaaacttggggacattatgttaggtgaaataacctagtcaaaagaagacaaatactgtatgatcccacttttatgagatacttagaatagtcaaaattatacatagacaagagaatggtggttgtaaggggctgggtagataggaaatgggaagttattttttaatggctacggaggatcagtttacaaaatgcagagttatggagatgagtggtgatgattgcacattatgcatatattgatttaataccactgaattatrcacttaaaaatggttatgatagtgaattttatgtacatatattttaatacaattttaaaagttgtaaaaaaaagttctaggcagtagaattctgtaatatggccaatgttttagatagatcattaatcagctttgtgaagaaagtatttaagacaagtaggctaggttaggagccagcataccagtcaggagatttttagggtaattagaggaagaggcccattacattaggtcatggaagctgagataaataagagggatctatattgttcttacggttcctg

SEQ ID NO: 601085 - DNA, 565 bp, Homo sapiens
tcttacacggcagcaggaaagacaacgtgtgcaagggaaccgccctttataaaaccatcagatcttgtgagactcattcactatcacaagaacagcatgggaaaaacctgtccccatgattcaattacctcccaacaggtccctcccacaacatgtgagaattatgggaacttcaattcaagatgagatttgcgtggggacacagccaaaccatatcagtagccttctagattgatgtctttcattgactaatgtgctttttagcctccatgtgttttcatgacttgatagcatttattttcagtggtgaataatattccattgtctcaatgcatcacagtttatttatccactcacctagtgaagaacagacatcctgattgcttcccagttttggcaattatgaataaagctgtgctaacatctgtgtgtacatgtttttgtgggcataagttttcaactcatttcaaggagcatgattgctgaattgtatggtgtgtttagtttaataagaaagtgtcarattgtcttccaaagtttctgtgctatttttcattcctgccag

SEQ ID NO: 601086 - DNA, 538 bp, Homo sapiens
tacattggtctctttggtgggtgaaatctctattcgcctttgttaaattgttaatggcttcgaagtttagctacctggttttccttaattttttttttttttgcagtttgtttagaactttttattttcctaaattgacaaatttatgtaaattttacttatgaacaatagtcccccttaaaagcaattcacatctagacatctagtacattcctagatttaatgtactctttaggtctaatcttacctactcactcaatagttataaattaaaatataatacagctttgacttctagactaaatctgacagctgagatttaatttgccattatgacctcgtagttgtaaaacagaaactagatctatagctcaccttattaaagcatggccatctatcastgcctaatttaatccctactttttccaagaaatttacaaaaactcatttttttctataaattcatagcttttactttcattatcccttttatcatttaacttttcatatgggtctttctcttaaagatcagtgactg

SEQ ID NO: 601087 - DNA, 522 bp, Homo sapiens
tttatgaacgtctttctgaagcccaataaatagttgatgaatcattcagtagctaaggaaaaaaaaactatattaatcactgtattttgggcagagttaggcttttattatgacactgaatgttgcctggtgtccagaaagcagtccccgaagcagttttaataaatgctactgctggaagtatatatattttcaacagactgaagtgtgatttctaaacacttaaaaggaaagcagacataaaaaaagattgagaaagacatcctagtatacttgaaaactactaaattgataaatatttaaagagttcatgaaaatgtaaggaatgcarttatttaacaatatatactgataatttgatatccaaattaatttaaagagctgaacatcacaattcccaaatcaagcattgtgtagtttccaaaaggtagcactcattcactcatcttcttccttctcaatattcaaaatctcacattttggttgtaatacattttccaataatttgttgtattatttccc

SEQ ID NO: 601088 - DNA, 560 bp, Homo sapiens
gattccatatttctagagaaacaaaacaatgactagaacaaaaccatcagtttcaaatggatgagtgcttctctgtgaatgccaggccaaagagcaagagtggtagcaaacctggttcaatggtttgtgctattccacatctgcctgtcctgatggagaaggggtccccttctttacccctcacaaaggcgctgtatgggatagtgtaatcccacmcaggctcattagataaacatccaaagcaactcaaatctcactaggaatagtgaaacttgtgctagaaataaaaacaaaagccagagtcagagagttttttgtttgtttttctgctaaagacaaatcaattcctgtcatggattttcatctgatatattatttgaaacaaaataatttatatgcaaagatagaaacagaagaataaagtatcatttccaattaaacatgattgtgctgcctgatttattttttcaaagtgagagaaatacaatgagttataacaagctttattatagcttcaaatataaccaagctaaaaatgactttgattttgtgtgactgat

SEQ ID NO: 601089 - DNA, 606 bp, Homo sapiens
tgtttttctgctaaagacaaatcaattcctgtcatggattttcatctgatatattatttgaaacaaaataatttatatgcaaagatagaaacagaagaataaagtatcatttccaattaaayatgattgtgctgcctgatttattttttcaaagtgagagaaatacaatgagttataacaagctttattatagcttcaaatataaccaagctaaaaatgactttgattttgtgtgactgattttcttcagaaagttgaaatagacacggtatgttctaaggttaccatgttattttttaacgcaatattttacactgtatcaatacaaaattttttagatcaagaatatatcaaatcaccattttcttctctaaggtttttgaaatctaaagtgttggcagaaatcttctaactctgaggttagaactaatcttattaaaatggtttcctatacacaatgggaagctactgaagggttttaagtaaaatcagatctgtgtttgaaaagctctctctgggccaggtgcagtggcttacgcctataatcccagcactttgggaggctgaggtgggtggattgcttgagcccaggagtttgagaccaat

SEQ ID NO: 601090 - DNA, 606 bp, Homo sapiens
tgtttttctgctaaagacaaatcaattcctgtcatggattttcatctgatatattatttgaaacaaaataatttatatgcaaagatagaaacagaagaataaagtatcatttccaattaaacatgattgtgctgcctgatttattttttcaaagtgagagaaatacaatgagttataacaagctttattatagcttcaaatataaccaagctaaaaatgactttgattttgtgtgactgattttcttcagaaagttgaaatagacacggtatgttctaaggttaccatgttattttttaacgcaatattttacactgtatcaatacaaaattttttagatcaagaatatatcaaatcaccattttcttctctaaggtttttgaaatctaaagtgttggcagaaatcttctaactctgaggttagaactaatcttattaaaatggtttyctatacacaatgggaagctactgaagggttttaagtaaaatcagatctgtgtttgaaaagctctctctgggccaggtgcagtggcttacgcctataatcccagcactttgggaggctgaggtgggtggattgcttgagcccaggagtttgagaccaat

SEQ ID NO: 601091 - DNA, 533 bp, Homo sapiens
aaataaaaacttactagggaggttaaattcaaacttccagttgacagaagaaataatcaatgaacttgaaggcagatcagtagagtgtatgcaatctgaagaaaagagagaagagtgaaaaaacaaaaaacaacttcagagaaatgtggaataccatcaagtataattgaagaactgaactccaaatgatggtgaatacaaagagatccacattcagatacattatagttaaaargttgaaagaccaaagagaaaaatcctagaaaacagcaagagaaaaatcacacaccacattagcaataagaccaatagctgattcatcatcagaaccaatggatgccagaaggcagtgggatgacatattcaaagggctaaaagaaaaatattataaaccaaaaatcctatcttaagaaacacgctttcaaaaatgaagtcaaagacatttccatatacaaaaaaactgaggtaaattttggttatcaaaaactactttacaaggtatgcaaaagaaagttcttcaggctgaaggcaag

SEQ ID NO: 601092 - DNA, 619 bp, Homo sapiens
agacaattgatagttccttcaattgatgagcggataaatgtggttatctacacaatggaatattattttccaataaagaggaataaagttacaagattggtcagccttgaaaatatgctcagtgaaagaagcccttctcaaagaaccacatatttaatgattctatttatatgaaacatccagaattggcaactctatagaaacagaaagtagatctgtgttgactaagtctgagagtcagggaggtggagttgagggattaattgataatggtacaggattttttggtggggagggtaataaaatgtctaattcattgcgatggtatttgcacaactctgaatatactgaaaactattgaattgtaaactttmaatgagcgatttgtatagcatatgacttatatctcaataaagttgtttttacaatccttaggaaagttggctgctaaaggatacattacatttttaaataattgcataacttttttctctgttgaacataaattgatagaatttattcatctcatgactgatatactctaatagagtagaaatgaaaagaaacacagatcaaaagaatcacatttatgcatcctaactgacagttcacatgatga

SEQ ID NO: 601093 - DNA, 591 bp, Homo sapiens
atagccacaagagaagcctctaaggagttacacagctgatcatctcacaaagcaaggggagtttcagctgagtaacagcccttcgtacacgacaggggaggcatgctacacaattgcatgatgtgcacattcaaacttaaacctggtttcccacacacaacacttagaaataatcatataatgtgatttacaatttgctattccttcttcaccaaaatgagcaaggggaaagaggagggagaaccacaggaatcccccagaaggaaccgaaagtatgttaattatcttaytaaatatacttaccttttctgctgatatgaactgagtccaagtgttgtctcggtctgtaaaaggaataaaataatgattaaaaaactgaagccaaatatttatattacagacatatggaatatccaaaatattctattttagtttcaacattcattttatacccatttggattttaaggttaaacctggtctccaaatcacatacaatgactagatcaaattgtaaacacacatgaagtaacagaaagtaatgcgatggatttttaaaagtgtgccaaaccgacacatcctgagaacagcc

SEQ ID NO: 601094 - DNA, 386 bp, Homo sapiens
aaagtgttttcttccttccctccttctgttctggagaatggctaatgatctgtaatttccattttattttcgtttccctgatttctcataaagctgagcaacttttcatgtttacttgaccatttggatatcttcctttgtgacatccgttaagtcttttacccattttgctgttggtttgcatgtcttttttcccattgttttgtagaggttctttataagttctgaatacaagatctttcctggagccgtaacctcacascagtaacaaaaatcagttccattacatgagttctttattggttacatatattgaaaatagcttctctcactggatggattgcccttttggcttatgtaatggtgacttttagtgaacaggaatt

SEQ ID NO: 601095 - DNA, 649 bp, Homo sapiens
gagatcttagccctaaaatcttagcctacatcaatgtcttggaacatttcctctacgttttcttcaagtagttttatagtttcgggtcttagatataagtctttaatccattttgagttgatttttgtatatggtgagagrtaagagttgacccagcaattccactactggctatttatccaaagggaaagaaatcagtatttcaaagatacacctgcaaccccaggtttaccgtagcactattcacagtagcaaagatatgaaatcaacctaagtgtccatcaatggatgaacaaagaaaataggtatatattaaacacaatggaatattattcagccataaaaaacaataaaatcctgttattttcagcaacatagatggaactggagtttatgttaagtgaaacaggcaaggcactgaaaagcaaatattgcatgttctgacttatagaagggagctaaaaaagtttatcttgtgaaggtaaagagtagaatgacagtcaccagaggctgggaagcatttgctttttggtgtgagagggaggatgaagagaggtaggctactgggctcaagtatacagttattaacagacagaaggaataagccctagtttttaacagcagggcagagtgactatagttagcaacc

SEQ ID NO: 601096 - DNA, 649 bp, Homo sapiens
gagatcttagccctaaaatcttagcctacatcaatgtcttggaacatttcctctacgttttcttcaagtagttttatagtttcgggtcttagatataagtctttaatccattttgagttgatttttgtatatggtgagagataagagttgacccagcaattccactactggctatttatccaaagggaaagaaatcagtatttcaaagatacacctgcaaccccakgtttaccgtagcactattcacagtagcaaagatatgaaatcaacctaagtgtccatcaatggatgaacaaagaaaataggtatatattaaacacaatggaatattattcagccataaaaaacaataaaatcctgttattttcagcaacatagatggaactggagtttatgttaagtgaaacaggcaaggcactgaaaagcaaatattgcatgttctgacttatagaagggagctaaaaaagtttatcttgtgaaggtaaagagtagaatgacagtcaccagaggctgggaagcatttgctttttggtgtgagagggaggatgaagagaggtaggctactgggctcaagtatacagttattaacagacagaaggaataagccctagtttttaacagcagggcagagtgactatagttagcaacc

SEQ ID NO: 601097 - DNA, 649 bp, Homo sapiens
aggctacaataagacaggaatgcattattgcactcccacctgggcaacagagcaagaccttgtctcaaaaaatacatacatacatatgaaaaatcagtgagactgcaaaaaaattgggcctaataatacaagagttggtaatcatgtacatgtagcaacaaacactatcatattctacatgtggtataatataaatatttgaaagtaaactggcaatatctagagtaaagctaaggatgagcatatcctatcatgtagctacttatattcacatatgtacaagacattttcactgcagcaatgtttataatagcaaaaaactagaaccaactcaaatgttccctaagagagaaaaaatggcaaactggtacatctgtataacaaaataccacatattaagtcaaaacaaaaagctagcgctatatttatcaacatgamtacatctcaaaaacataatattgatgaaaaagcaagtttcaggatatatacaacttttaaaatgtcaacaatctacagaaaaagattttctttcttaaaaaagaaacaggctttattccagcaaacagtttgcaaaccgtggagatgtaccttggtagaaaataaaggcgccttctgagagaacaaagaaaaggggttgtcatttacagag

SEQ ID NO: 601098 - DNA, 393 bp, Homo sapiens
gaattccagcatagattataatttaaataatcgaatttggtatttaggtacattgtttatatagccaagtgtatatgctttactacctaacaattattctagcctaggtgaatccctaattgaaacacctggctaacactttagacacataaattaagtgggatacagttttctcatttgtattatctccagcttcaacctcatttatcctttttcctagtataatacattgttytcaaccagaaattaaagtagatatccaacattattttcagtgcttgtacttcatgagaaataatctgattttcaagacacctcttaagtgcatttgcattttattttggtaatggcagagacctcatgtggccagtttgattgattgaagaatgtatc

SEQ ID NO: 601099 - DNA, 616 bp, Homo sapiens
ataatacattgttctcaaccagaaattaaagtagatatccaacattattttcagtgcttgtacttcatgagaaataatctgattttcaagacacctcttaagtgcatttgcattttattttggtaatggcagagacctcatgtggccagtttgattgattgaagaatgtatcactcttattcaagcaaaggaattcagacttaaatgcctacctctgtgctgaagctgacagacagtattaactcttatcaaggccatcttttagacctgattttcatttatatgaaaacagacctgtccatgtctaataagtaaaaactgatagaatacattaaaaagtcactggtttatcatagaaaagtttgatgggtttagagctcagtgayttaagcttgtaaaactgcattcttgggcaaaatatttatattgtatataaatggttggcagcttattccagttgatctcttcacatctgccttaaaagtgctatgtagagatacattaacagagttataataaaacagtgttttaaaatctagcctataaacaaaaactagtttgaggcacccaagcatttagtgagagattgagaatgatgcttaatggatcaaaaaag

SEQ ID NO: 601100 - DNA, 622 bp, Homo sapiens
aaaagtttatattgaaccattatgtaatccttaagtaaaataatcatgggactatggacaaagtaaaaatttctatttgctttccaaaacacaaaactaagttaaaactttatacctgataatccttttctgaatggaccaagggtttttggtgacttgaatcttatcacacgaaaacatgcctattcaatttttatttcacctgctctgtgacattttaaagattactgatgtcatcatattttcttcgttttcctttacacactcaagagcaaaatcattaaatrtaagttaggaagacatttaaaaatacttaatttctgaaatttattaccacctttctttacctcttttgtctcttctgggtctgaatgatccacagttatataaagatcattttgtaaatatttcagagcactaaggggatccacttgggccttttcttcaaacctagaaaatgtaaacaaggataattatctggagttatgagaaaatatcagaaatgtctttcagacctggaataaaatacactgttatactgagtatgaggagttgttctggatatttagaaaatgtcagtttaggaatccagaattaacaatactgccaggtagatagtgta

SEQ ID NO: 601101 - DNA, 622 bp, Homo sapiens
aaaagtttatattgaaccattatgtaatccttaagtaaaataatcatgggactatggacaaagtaaaaatttctatttgctttccaaaacacaaaactaagttaaaactttatacctgataatccttttctgaatggaccaagggtttttggtgacttgaatcttatcacacgaaaacatgcctattcaatttttatttcacctgctctgtgacattttaaagattactgatgtcatcatattttcttcgttttcctttacacactcaagagcaaaatcattaaatgtaagttaggaagacatttaaaaatacttaatttctgaaatttattaccacctttctttacctcttttgtctcttctgggtctgaatgatccacagttatataaagatcattttgtaaatatttcagagcactaaggggatccacttgggccttttcttcaaacctagaaaatgtamacaaggataattatctggagttatgagaaaatatcagaaatgtctttcagacctggaataaaatacactgttatactgagtatgaggagttgttctggatatttagaaaatgtcagtttaggaatccagaattaacaatactgccaggtagatagtgta

SEQ ID NO: 601102 - DNA, 589 bp, Homo sapiens
gtatacatattatttatcaggagaaacctacaaaggcagtatttaaaagttaaatatgttttatgctgctacaaaaagtatattatgattgcaccaaatttcttataacttactcttttatytaatatattagctggatatatgctgggaaaaaacactggaatatttcagaaaatattgctttcaagtaggaaaaaacaaatgactgttcaaacaaaaataataatatagtatgaaatgcaagcatgtctaaaagaaaacaatagcaaagaagaggataaatgaaggtgtagtagtttgagactcatatactgtgtggaaaatgatgtatcacttgaagttatagtgataatgaaagatatatactataaatcctgaaataacaaaatgttatattaaaaatatgcactagaactactaaaatattcaattctaaagaagatacaaaacagatgaggaacaaagaaaaggtaggaaaatatatttaaccctaaccataccaacaagcacattaaatgtaaatgatttgattaccctcaattaaaaaggaaacttgtcagatttaaaaaataaaaccaaaatatacact

SEQ ID NO: 601103 - DNA, 481 bp, Homo sapiens
aaataccacctgataattgtgtatcattcttttgatatgctgttgaatttagtttgctaatattttgttgagtatttttatgagtgctcatcaattatcgatttgtagattccttttcttgtagtgtctatggctggctttggtagcgggagactgatgacctcatagaatgagcttgsaagtatttccttctcttcaatattttcaagtgttagaggagggatggtgataatttttctttaaatgtttggtagaattcttctgtgaagccaactggtcctggacttttctttgttgggagttttttgactactgattcaatctccatactagttgttagtctgttcagattttctatttcttgaggacaaatcttggcaaattttgtgttccagggatttattcatttcttcaaggtcatctaatttattggtgtataattgtccattgtattctcatatgattctttgtatttctatgg

SEQ ID NO: 601104 - DNA, 552 bp, Homo sapiens
ccataggtttccactgagtttcaattggttccctgtctgtctgttgcttcaaaactctctcaagaaactaagctggggaaatcatagtagtcatgtcacttgtttttaatctcttagaaattactgccttacattccgtgatatccagcattttgtgaactgttgatatatattttgcacattatgtgaactatttcatctattttttccatttttgattgttttagatgaaaaggtaactccaatcctttttactacatcttggccagagtggaattccactaaatggaaacttaaattttcagattaactrtagagtcggtgaataaagacttatttaatctttatttgaaatatattgaatatgcagtcaatgaatggcaatattttgtattagggcataggctacatttctgaattagctcaaggataaggcccatttgtgtttagtaaaacctaaatagaacaagatagaaaataacataaaaattaactgtgatattgttatttcactattttatctgggtcgtattttttatttaagcaaaaacc

SEQ ID NO: 601105 - DNA, 586 bp, Homo sapiens
aagcttgaacaatgatatccaataattatcttcacctttttcaatgtaaagtactgatagcctttgataacagctacttggtcatctttaagaaagtatgacttatttttaaggatctaaagctgttatcagtacagtgttaagaagtacctttttgtagcattttttaagattccttattcgggaggctgaggcaggagaatggcatgaacccgggaggcagagcttgyagtgagccgagattgcgccaatgcactccagcctgggccacagagcgagactcggtctcaaaaaaaaaaaaaaaaaaagattcctgagataaatatctttaggatggttaagatgttgccacacctatgaactgagagaagtattcaataattagataaagataagaataaaaatattggcctgactaatatctaacatttactgtgggcttacttcatgtcagacagtattctaagatcttcatgtgggttagctcatttaatcctccaaaaaattttataagagttttgttatccccactttaaagacatgaaaactgaaaaacataaagatcaaggaatttgcctaaggatgc

SEQ ID NO: 601106 - DNA, 278 bp, Homo sapiens
aatatctttaggatggttaagatgttgccacacctatgaactgagagaagtattcaataattagataaagataagaataaaaatattggcctgactaatayctaacatttactgtgggcttacttcatgtcagacagtattctaagatcttcatgtgggttagctcatttaatcctccaaaaaattttataagagttttgttatccccactttaaagacatgaaaactgaaaaacataaagatcaaggaatttgcctaaggatgcacagttaataagt

SEQ ID NO: 601107 - DNA, 636 bp, Homo sapiens
gtattataacattagactttcataatttttgtcttgaccagatagtaacaataaaagttgatccaaaatatcaggactataatatcattcttcatttttgagatttgtttcttttttaatgagcacttattgtacccctgctatgtatcaggctccactgttgatcagcaaaggaaactattcagagaaatctataggtttatttaaaatgggaaaagttgaactacgtttctaaccttgtggtttcaccactctttctcatcatctagtggtcaacttgctcctttcttggactgtttgtactggagccctcttttcctatgcatctttatatagttggctctttctcagcaytgaagtctcaggtcacaatttcagcactccttagagagggtttctcttgatgctctaggcagaaaagtactctagtagataccagcctaccactgttttatgatattactatttttaatgatctgaaattctcttatttatttatgcatttatgtaaccatgtaagtacatgctattttctgtaccctgccccacaagtgaacagcaaccttgtatgttttttccactgtgatatttcataagtacttatgaattagatgagtctttaaaaatctaagctca

SEQ ID NO: 601108 - DNA, 553 bp, Homo sapiens
cagcttgggtgacagagcaagactccacctcaaaaataataataataataaataaaaataaaaataaaaaagtcattcccagagatatcaaatattggaggaggaacacctggtaggaaaaggaaaaggcatggtgagttcagctttgaatgtgatgatgttaaggggctgtcttgacattatacccttagaaatacatgtcagctaaattctaggctagacctattcattagtaatttgccaatatacaaattttgtcaatatacaaaaactacagttaaagttgaggtcattcaggcggagagaacagagcaagaaacacaagggacaagaatggagccctgggatcagaaacttttcagaggccagaggagaaaaggtacccacaaaggaaagtaaaaatattgccgatgtgacaggaargagcacaaagagagggcagagagagctggtataagaggcggtggtaagtacagtaatggtaatgcctccaagtggtgaagtttgaaaaggacaagaaagtttccatcagccataaatacagtcgcaaatg

SEQ ID NO: 601109 - DNA, 334 bp, Homo sapiens
cctccccttatctcagtctgccagtgatggtttgtgcctctggtcgctgggtcagatccaggactaattcactcacctctgatttctagttccacmcttatgacgaaagcattcttaaatctgatattcacataaaaaaggatttgattgtctttggcatgtctctgcagttagttaatcatgtcttgagcacagaaaaatgggaagaaaatggaaataagatttctttgataggaggagtcctgctaagacttgtctgtccctgagctgagatatgctaatttaccttaaatctttccataaaccacattctgaattccagtttataaatctt

SEQ ID NO: 601110 - DNA, 465 bp, Homo sapiens
taaccaggctttttgacatgcactattgactggatggtgatgctattcagtgaaggaaaatggctctggaggaaaaccagatttaggagtgagatcatgagtttggtcattgctacgttgagtatgagktgcctttggatggtggaggtccagagtaggtcatggcctgtatgggcatggagcttagaggaaggactggagacatgaccttcaaagtcattggccttgaaatgatatttgaagtagtgggtgtgaatgagattgcttaggaaaataatggaaaatagaaggcttagaagtgaagaaaaagacagactgagaaatgaggaggcaaaagtagttgaatttggtgattgacaagttgaagaaggtgaaagaaaagctgttgcctagaatggcttctggattttacatgtgtgtgatctagtgggtgatgatacattaacaagctggggataacttttg

SEQ ID NO: 601111 - DNA, 513 bp, Homo sapiens
tatacacacccagtttccagctttggatatacstgagctcatggggagaggaatcaaaataaaacaccagagagccgaagcatggaaaagttgtggtagcagagaagtctggcaatgaggactatgggcccaaaatgattattataaatctgtttatgcaaaggcaatgaaaatgcaaataattcttcagacaatacataatataatataaaactactattaaataatgttgaccaggagttctggattatattacctcacaatgcaagatatattacaggagtgaaaaaaattatgatgttatattccttaatctatatggaaaaggatcaataagcattgcctcaatttgtgatctaagtagataaaaaggcatcaaattactttttaaattaaaaaataatcactagtggccaggcacggtggctcacgcctgtaatcccagcactttaggaggctgaggcaggcagatcatgaggtcaggagatcaagaccatcctggctaacacggtg

SEQ ID NO: 601112 - DNA, 513 bp, Homo sapiens
tatacacacccagtttccagctttggatatacgtgagctcatggggagaggaatcaaaataaaacaccagagagccgaagcrtggaaaagttgtggtagcagagaagtctggcaatgaggactatgggcccaaaatgattattataaatctgtttatgcaaaggcaatgaaaatgcaaataattcttcagacaatacataatataatataaaactactattaaataatgttgaccaggagttctggattatattacctcacaatgcaagatatattacaggagtgaaaaaaattatgatgttatattccttaatctatatggaaaaggatcaataagcattgcctcaatttgtgatctaagtagataaaaaggcatcaaattactttttaaattaaaaaataatcactagtggccaggcacggtggctcacgcctgtaatcccagcactttaggaggctgaggcaggcagatcatgaggtcaggagatcaagaccatcctggctaacacggtg

SEQ ID NO: 601113 - DNA, 513 bp, Homo sapiens
tatacacacccagtttccagctttggatatacgtgagctcatggggagaggaatcaaaataaaacaccagagagccgaagcatggaaaagttgtggtagcagagaagtctggcaatgaggactatgggcccaaaatgattattataaatctgtttatgcaaaggcaatgaaaatgcaaataattcttcagacaatacataatataatataaaactactattaaataatgttgaccaggagttctggattatattacctcacaatgcaagatatattamaggagtgaaaaaaattatgatgttatattccttaatctatatggaaaaggatcaataagcattgcctcaatttgtgatctaagtagataaaaaggcatcaaattactttttaaattaaaaaataatcactagtggccaggcacggtggctcacgcctgtaatcccagcactttaggaggctgaggcaggcagatcatgaggtcaggagatcaagaccatcctggctaacacggtg

SEQ ID NO: 601114 - DNA, 533 bp, Homo sapiens
tgaaattggaaacaggacatcaatgaatacattcagagggactcagggttttgaaatagaaataaatggggagcccactgttgatgtactagatgtcctgttaaaggttaatggtggtattcaccatctgagtcatttgactactaccagccttcaactgagatggtgagtgagcataagtaatacgcgaattcacggaagagcacacccaatttaaacaaccttctagagaccctgcttcagaaaaaccaaataagattcaaatctggaggtgtctttaacaaacrtaaggaagtcaaatggagaagctataaccttagctctgtccccaagtaaaccaacaagaggtttggatttaaaagggtgaagttcctaggaactcaggacaaacaaaactaagtcaacagaaccaaaatactctacatttgagataaaatgagcattgccaggaactaagggatttaagaagcatgagcttaaaacaaaggggataaaggactccatccctccacaagcttgacaggtgttaacta

SEQ ID NO: 601115 - DNA, 420 bp, Homo sapiens
tttcttctgcatggtgacaaggaagtatggttctgttagctacagacaccattctcagccccaaaggcctttcccctattcctctccaagtatcctaacttatccatactgcgaggcccaacacaagctctcctgccctctgacttcattagttttatttacaccactccatttataccaccataacttgagtttatacccattcaattagctaatgattatgcactgtcttccctaagagtccccattggygcttgtttagtatagcaaagaactatactactatttctttcttctactgttgcaatatacacatttgtgtcatttccagtgtttgctttgtatgcccggggcattaagctttgaaggccgatggctcatgatataactgaatggaaatgggactaattttgagtagta

SEQ ID NO: 601116 - DNA, 420 bp, Homo sapiens
tttcttctgcatggtgacaaggaagtatggttctgttagctacagacaccattctcagccccaaaggcctttcccctattcctctccaagtatcctaacttatccatactgcgaggcccaacacaagctctcctgccctctgacttcattagttttatttacaccactccatttataccaccataacttgagtttatacccattcaattagctaatgattatgcactgtcttccctaagagtccccattggcgcttgtttagtatagcaaagaactatactactatttctttcttctactgttgcaatatacacatttgtgtcatttccagtgtttgctttgtatgcccrgggcattaagctttgaaggccgatggctcatgatataactgaatggaaatgggactaattttgagtagta

SEQ ID NO: 601117 - DNA, 591 bp, Homo sapiens
atcaaggtggtacctctacaggtctgcaagaaccacagcattactgggcttagggtgccccctaaagcagatacagctttgatcraaacactcaaatcctttggaaggccttcccaagaaggacaagtacaaataagtccagagagtgaagactacaataaatacctaacttttaaatgcccagacactgaagaacatctactagcatcaacaccatccaggaaaacatgacctcctcaaatgaattaaataaggcaccaggggccaatcctgaaggaacagagatatgtgatgtttcagtcagagaattcaaaatagctgtgttgaggaaacgcaaagaaattcaagataacatagaaaaggaattcagaattctatcagataaatttaacaaggagattgaaataagattttttaaatcaagcagaaattctggaaatgaaaaaatgcaattggcatattgaagaatgcatcagagtcctttaatagaggaatgtatcaagcagaagaaagaattagcaggctggaagacaggctatctgaaaatacacagtcaaaggagacaaaagaaaaaagaataaaaaacaatga

SEQ ID NO: 601118 - DNA, 592 bp, Homo sapiens
catcaaggtggtacctctacaggtctgcaagaaccacagcattactgggcttagggtgccccctaaagcagatacagctttgatcgaaacactcaaatcctttggaaggccttccyaagaaggacaagtacaaataagtccagagagtgaagactacaataaatacctaacttttaaatgcccagacactgaagaacatctactagcatcaacaccatccaggaaaacatgacctcctcaaatgaattaaataaggcaccaggggccaatcctgaaggaacagagatatgtgatgtttcagtcagagaattcaaaatagctgtgttgaggaaacgcaaagaaattcaagataacatagaaaaggaattcagaattctatcagataaatttaacaaggagattgaaataagattttttaaatcaagcagaaattctggaaatgaaaaaatgcaattggcatattgaagaatgcatcagagtcctttaatagaggaatgtatcaagcagaagaaagaattagcaggctggaagacaggctatctgaaaatacacagtcaaaggagacaaaagaaaaaagaataaaaaacaatga

SEQ ID NO: 601119 - DNA, 591 bp, Homo sapiens
atcaaggtggtacctctacaggtctgcaagaaccacagcattactgggcttagggtgccccctaaagcagatacagctttgatcgaaacactcaaatcctttggaaggccttcccaagaaggacaagtacaaataagtccagagagtgaagactacaataaatacctaacttttaaatgcccagacactgaagaacatctactagcatcaacaccatccaggaaaacatgacctcctcaaatgaattaaataaggcaccaggggccaatcctgaaggaacagagatatgtgatgtttcagtcagagaattcaaaatagctgtgttgaggaaacgcaaagaaattsaagataacatagaaaaggaattcagaattctatcagataaatttaacaaggagattgaaataagattttttaaatcaagcagaaattctggaaatgaaaaaatgcaattggcatattgaagaatgcatcagagtcctttaatagaggaatgtatcaagcagaagaaagaattagcaggctggaagacaggctatctgaaaatacacagtcaaaggagacaaaagaaaaaagaataaaaaacaatga

SEQ ID NO: 601120 - DNA, 591 bp, Homo sapiens
atcaaggtggtacctctacaggtctgcaagaaccacagcattactgggcttagggtgccccctaaagcagatacagctttgatcgaaacactcaaatcctttggaaggccttcccaagaaggacaagtacaaataagtccagagagtgaagactacaataaatacctaacttttaaatgcccagacactgaagaacatctactagcatcaacaccatccaggaaaacatgacctcctcaaatgaattaaataaggcaccaggggccaatcctgaaggaacagagatatgtgatgtttcagtcagagaattcaaaatagctgtgttgaggaaacgcaaagaaattcaagataacatagaaaaggaattcagaattctatcagataaatttaacaaggagattgaaataagattttttaaatcaagcagaaattctggaaatgaaaaaatgcaattggcwtattgaagaatgcatcagagtcctttaatagaggaatgtatcaagcagaagaaagaattagcaggctggaagacaggctatctgaaaatacacagtcaaaggagacaaaagaaaaaagaataaaaaacaatga

SEQ ID NO: 601121 - DNA, 408 bp, Homo sapiens
agaattcaacaatacattagaaagatcattcatcatgaccaaatgggattcatccctaggatgcaaggatggtttaacatttgcaaatcaatcaatgtaatacatcatatcaacagaataaaggctaaaaaccatatgrtcattgcaattgatgcggaaaaagcatttgataaaattcagcaggtcatgataaaaaccctcaaaaaactggaagtagaaagaacatgtctcaatgtaataaaagccatatgtgacagacccacagctagtatcatactgaatggggaaaaaccgaaagcctttcctctaagttctggaacacgaggaggatgcccactgtcaacactgttattcaacattgtactggaagtcctagctagagaaatcagacaagagaaagatataaac

SEQ ID NO: 601122 - DNA, 408 bp, Homo sapiens
agaattcaacaatacattagaaagatcattcatcatgaccaaatgggattcatccctaggatgcaaggatggtttaacatttgcaaatcaatcaatgtaatacatcatatcaacagaataaaggctaaaaaccatatggtcattgcaattgatgcrgaaaaagcatttgataaaattcagcaggtcatgataaaaaccctcaaaaaactggaagtagaaagaacatgtctcaatgtaataaaagccatatgtgacagacccacagctagtatcatactgaatggggaaaaaccgaaagcctttcctctaagttctggaacacgaggaggatgcccactgtcaacactgttattcaacattgtactggaagtcctagctagagaaatcagacaagagaaagatataaac

SEQ ID NO: 601123 - DNA, 629 bp, Homo sapiens
ataaacggcatccaaattagaaaagaagaattcaaattatcattgttggcaaatgatatgatcttatatttgggaaaacctaaagactccacaagaaaactattagaactaataaattcagtgaagttgctggatacaaaatcagcatacaaaaatcagtagcatttctatatgccagcagtgaacaatgtgaaaagatattttacaagtaatcccatttacaatagccacacataaaaccatatcatcatttcaaaaatattaaaatacataggaattaamcgaaattaaatacctaggaattaaccaaagaagtgaaagatctctataatgaaaactataaaacactgatgaaagaaattgaagaggacaccaaaaaatgaaaaaatattctatgctcatggattataaatatacacatattatgtaatatatacacttattatgtgtttaatatatcatatacccattattatatatataatacacctattattatgtaatatatgcacatactatatataaatatatatacctattatgtacccacaaaaattgaaaattaaaaaaattaaattaaattagtggcttgagctaatttacttttagggtttcttcttcccctaaga

SEQ ID NO: 601124 - DNA, 546 bp, Homo sapiens
ctagcttcgacatccagattcatttatgtgatgtatgatcttcaagtctagttaataattcacagcctaggctactagttaataattcacagcctaggctaaaataggacagcagacctccacgtgccctgagcggtttattagcaactaaatctgtggaaaggagccaggcagagctaacgaccacttccacttgtgaaccactcaattttgtgcatttagtctgtctggtgtttagaaatgaggaatctagcagcaatcagagtgggacaggggccatgctgggacacagaaaggggctggcaaatatcgcggaatcaaaacaagagcgagagaatggagtacctacttcacacctgatctcagttaatttgcacctcaagcctatcaggccagcattacttccattttacagaaaaaaaccaaggctcagagagatcaagtaatttgttaaggtcatgcaagccagtgtgggaaagtcacgaaattgggccctcaggctaaatttgttcyacagatgtgttttattcaggccccacaaagctt

SEQ ID NO: 601125 - DNA, 597 bp, Homo sapiens
gtaggttaagtgaagcatgcacagtatagttctaagggaaatttgkcaaggtctttagtagtagaagtaggagtatagttgttgagtcaaagttggccatcacaagagtcctgcgcctccaagatatgggcctgtgttagtccctgccatgctcagctattgtcagggagaagctatgggaaatctggcctcatagtagacttgtattttaaagaccactagctggagccattggccagttactctccttgcagttggcaaactaaaagacatgttttcatagccaaaatactgtcccctgcatctgaaaatttacctcacaagttaagggataaaagtaatctatttccaaggggagtgaagacataggcttggttgagactcactttctctctttcttccttctttccattcttgacagctttgactgggaacacctctctgacagattctatgctacatgctttgataaagtagggattcaagctaaggataacatagggaaggttgtctaagcaatgatggtacagacagttaataaactaagagttcctgactttgtctactatttgaaagaattcaattgctgcctttagg

SEQ ID NO: 601126 - DNA, 597 bp, Homo sapiens
gtaggttaagtgaagcatgcacagtatagttctaagggaaatttggcaaggtctttagtagtagaagtaggagtatagttgttgagtcaaagttggccatcacaagagtcctgcgcctccaagatatgggcctgtgttagtccctgccatgctcagctattgtcagggagaagctatgggaaatctggcctcatagtagacttgtattttaaagaccactagctggagccattggccagttactctccttgcagttggcraactaaaagacatgttttcatagccaaaatactgtcccctgcatctgaaaatttacctcacaagttaagggataaaagtaatctatttccaaggggagtgaagacataggcttggttgagactcactttctctctttcttccttctttccattcttgacagctttgactgggaacacctctctgacagattctatgctacatgctttgataaagtagggattcaagctaaggataacatagggaaggttgtctaagcaatgatggtacagacagttaataaactaagagttcctgactttgtctactatttgaaagaattcaattgctgcctttagg

SEQ ID NO: 601127 - DNA, 597 bp, Homo sapiens
gtaggttaagtgaagcatgcacagtatagttctaagggaaatttggcaaggtctttagtagtagaagtaggagtatagttgttgagtcaaagttggccatcacaagagtcctgcgcctccaagatatgggcctgtgttagtccctgccatgctcagctattgtcagggagaagctatgggaaatctggcctcatagtagacttgtattttaaagaccactagctggagccattggccagttactctccttgcagttggcaaactaaaagacatgytttcatagccaaaatactgtcccctgcatctgaaaatttacctcacaagttaagggataaaagtaatctatttccaaggggagtgaagacataggcttggttgagactcactttctctctttcttccttctttccattcttgacagctttgactgggaacacctctctgacagattctatgctacatgctttgataaagtagggattcaagctaaggataacatagggaaggttgtctaagcaatgatggtacagacagttaataaactaagagttcctgactttgtctactatttgaaagaattcaattgctgcctttagg

SEQ ID NO: 601128 - DNA, 597 bp, Homo sapiens
gtaggttaagtgaagcatgcacagtatagttctaagggaaatttggcaaggtctttagtagtagaagtaggagtatagttgttgagtcaaagttggccatcacaagagtcctgcgcctccaagatatgggcctgtgttagtccctgccatgctcagctattgtcagggagaagctatgggaaatctggcctcatagtagacttgtattttaaagaccactagctggagccattggccagttactctccttgcagttggcaaactaaaagacatgttttcatagccaaaatactgtcccctgcatctgaaaatttacctcacaagttaagggataaaagtaatctrtttccaaggggagtgaagacataggcttggttgagactcactttctctctttcttccttctttccattcttgacagctttgactgggaacacctctctgacagattctatgctacatgctttgataaagtagggattcaagctaaggataacatagggaaggttgtctaagcaatgatggtacagacagttaataaactaagagttcctgactttgtctactatttgaaagaattcaattgctgcctttagg

SEQ ID NO: 601129 - DNA, 581 bp, Homo sapiens
tcttgatattcaaaaacctaaacatccacttaagcccattagcttcccagcaatggttcttatctaaattgaaaaggctgaaatgacagacatacaattcagaatctggatggcaaggkagctcatcaagattcaggagaaagttgaaacccaacccaaggaatccaaaaagtccaataaaattatccaggagctgaaaaataaaatatcaattttaagaaatatccattttaagaatgaaaaaaatatccattttaattctggaaatgaaaaattaactataagaatttcataatacaaatagaagtattaacagcagaaaagaccaagctgagcatagaatcccagagcccaaagaccagtttattgaatcaactcagttagacaaaaataaagaaaaaaaacttaaaacgtgaacaaaacctctaacaaatatgggattatgtaaaaagaccaaacatatgactcactgacattcctgagagaggaaagagtaagcaacttgggaagcctatttgaggatatagttcacaaaagaatttttcaatatagctaaagaggttgacatgcaagttcaagaa

SEQ ID NO: 601130 - DNA, 597 bp, Homo sapiens
ggagattgattataggcctggccaagtgaattgtagttgaaaatactctaagtaggagctcaaaaaggaatcaagaccacarcctaattcagcaattcccaaatttttttgtgcttagggcaactttgcactgcatatttggttatatctattgatatttgccatgctgatatttgccatgcagacaaattttcacaacaaaagaatgcacaagcacacattccactgtccatcagaatgaaaatgtcaagatgataatgacctaatactttctgtaacctcttgaaagctccactatacaattgtgagatggagtgaagaacaatgtattaatgttttcatgaatctgaaaggatctcaggactccttgaggtccctgggctatactttgagaactatttgtttaatatacatggactacaaaatcctgctggggtttagacagcttcaggtcattgggcatgtgtgtgccaagtggttcatgcccatggacagctgctgttagccttagggcaggccctgccttggtgaaaatggggtttctgctatactttccatctagctcatgttttatcaagaaactgtttgaggataagt

SEQ ID NO: 601131 - DNA, 618 bp, Homo sapiens
aaagcttcacacttaccctatctgatcttacacagagccaataacaaacaggcaatggagagtgattctctatttaataaatggtgcagagatgactgactagccatatgcagaagaataaaactggatccgtaccaatatagttttaagtttgttccttccaaatctcatgttgaaatgtgattttcaatttggaggagaggccaagtgggaggtatttgggacaytggagcagattccttataaataacttggtgccatccttgtggtaatgagtgaattctcactatggtagttcatgtgagatccagtcgtttaaaagagtgtggcagctcttttcattaaatgttacccagcctcaagttttccttcataggaatacatatggacgaacacacctaccttccacaatatacaaaagttaactcaagttggattaatgatttaaatgtaggacctcaaacgataaaaattttagaagaaaatctaggaaataccctacttgacacagccttggcaaagaatttttggctaagttccccaaagcaattgcaacaacaacaaaaattaagaagtgggacctaattaattaaagcgcttctctacagcaaaagaaac

SEQ ID NO: 601132 - DNA, 584 bp, Homo sapiens
ttgtttacaagtataagtccttgtaatgaagaatggccacaaatggctagataggagattgattataggcctggccaagtgaattgtagttgaaaatactctaagtaggagctcaaaaaggaatcaagaccacagcctaattcagcaattcccaaatttttttgtgcttagggcaactttgcactgcatatttggttatatctattgatatttgccatgctgatatttgccatgcagacaaattttcacaacaaaagaatgcacaagcacacattccactgtccatcagaatgaaaatgtcaagatgataatgacctaatactttctgtaacctcttgaaagctccactatacaattgtgagatggagtgaagaacaatgtrttaatgttttcatgaatctgaaaggatctcaggactccttgaggtccctgggctatactttgagaactatttgtttaatatacatggactacaaaatcctgctggggtttagacagcttcaggtcattgggcatgtgtgtgccaagtggttcatgcccatggacagctgctgttagccttagggcaggccctgccttggtga

SEQ ID NO: 601133 - DNA, 587 bp, Homo sapiens
agtgctcagaagaagacacataagcagccaacaaacatagaaaagtattcaatatcattaatcatcagagaaatgcaaatcaaaaccacagtgacatactatctcacatcagtcaaaatgttaaatcattattaaaaagtcaaattacagatgctggcaagccttcagagaaaagggaacacttatacactattagtgggaatgtgaattagtccagccactgtgtaaaggagtttaaagatttctcaaagttcttaccagagttgctgttcaacccagcaatctcatgactggcyatataaccaaagaaaaaataaattattctaatgaaaaagacataaggactcatgctgattactgtactattgacaataacaaagacatagaataaacctaggtgcccatcaatggtggattggataaagaaagcatggtacacacacaccatggaatactatgcagccataaaaagaaatcatatcctttgcagcaactgggatgcagctggaggccgtaatcctaagcaaattaacacaggaatggaaaaccaaatagcatgtgttctcacttattaatgggagctaatc

SEQ ID NO: 601134 - DNA, 582 bp, Homo sapiens
tactggaagagggtagggcaaagtcactgagtgtcagatatttcttgggaatagaaastgattttgataaaataaaactcattgtacatttattcgagtgattactatttgattcattcatatatcagtgattaaactataagctccttgtgggtaagaatcatgtttattttgctcagtccattttactgagaatccaacacaatgcacatagtaaatggttacatttactgaatgcatggatgaaagaataaatgaaaaaatgtacttggagttgaaaaaagtgctaggtaaaaagtggtgaaaaaaattggcatggactttgttgtaaaaatcacagtcaaatgtgaaaacaaaataaataagttaaaactggccttccttcaaacaggaaagttctagctcattttctgtctttgaacacaattttttctctgcctggacagttctttctcaacatgtacttcttgtgaaaggcataactcactacttataaaattacatgttaaaattgtcctgtgtgcaagtctaccagtctccttacaaactgtaaactcttagagattaagcagtgaacctgtt

SEQ ID NO: 601135 - DNA, 550 bp, Homo sapiens
atctatattacttcaaccaaatttctttcatccttatccttaactttcagaaatgtttgacattgttgacaactccttctcattccatggcctccatgactgacctaatttatttaggcttctctgatcakctctttatttatcttgtttttcttagcttttccttaaacgattctgtttctcaaggctcaactcaaggtcttctgtttcctctaagatatgtcacctactaaatattattatctatctaactccaggcgtaactgagctcttgtgagctttgtactcatacattatatttctttgaagccaaaatcctatctagtttaagacacatcgttattttgtctatttaaaaaatgctgtcgaattactccagtaagtttttcttaatatttattatgcttattaaaatatattttaggcatatttatacaaatgtcttactatatatcaatgtcgagcatatataaaaattttctagtgaaattagtgggttaagaatttctaaaataattttacattcagacacttctgaataattttttta

SEQ ID NO: 601136 - DNA, 550 bp, Homo sapiens
atctatattacttcaaccaaatttctttcatccttatccttaactttcagaaatgtttgacattgttgacaactccttctcattccatggcctccatgactgacctaatttatttaggcttctctgatcagctctttatttatcttgtttttcttagcttttccttaaacgattctgtttctcaaggctcaactcaaggtcttctgtttccyctaagatatgtcacctactaaatattattatctatctaactccaggcgtaactgagctcttgtgagctttgtactcatacattatatttctttgaagccaaaatcctatctagtttaagacacatcgttattttgtctatttaaaaaatgctgtcgaattactccagtaagtttttcttaatatttattatgcttattaaaatatattttaggcatatttatacaaatgtcttactatatatcaatgtcgagcatatataaaaattttctagtgaaattagtgggttaagaatttctaaaataattttacattcagacacttctgaataattttttta

SEQ ID NO: 601137 - DNA, 550 bp, Homo sapiens
atctatattacttcaaccaaatttctttcatccttatccttaactttcagaaatgtttgacattgttgacaactccttctcattccatggcctccatgactgacctaatttatttaggcttctctgatcagctctttatttatcttgtttttcttagcttttccttaaacgattctgtttctcaaggctcaactcaaggtcttctgtttcctytaagatatgtcacctactaaatattattatctatctaactccaggcgtaactgagctcttgtgagctttgtactcatacattatatttctttgaagccaaaatcctatctagtttaagacacatcgttattttgtctatttaaaaaatgctgtcgaattactccagtaagtttttcttaatatttattatgcttattaaaatatattttaggcatatttatacaaatgtcttactatatatcaatgtcgagcatatataaaaattttctagtgaaattagtgggttaagaatttctaaaataattttacattcagacacttctgaataattttttta

SEQ ID NO: 601138 - DNA, 582 bp, Homo sapiens
tactggaagagggtagggcaaagtcactgagtgtcagatatttcttgggaatagaaactgattttgataaaataaaactcattgtacatttattcgagtgattactatttgattcattcatatatcagtgattaaactataagctccttgtgggtaagaatcatgtttattttgctcagtccattttactgagaatccaacacaatgcacatagtaaatggttacatttactgaatgcatggatgaaagaataaatgaaaaaatgtacttggagttgaaaaaagtgctaggtaaaaagtggtgaaaaaaattggcatggactttgttgtaaaaatcacagtcaaatgtgaaaacaaaataaataagttaaaactggccttccttcaaacaggaaagttctagctcattttctgtctttgaacacaattttttctctgcctggacrgttctttctcaacatgtacttcttgtgaaaggcataactcactacttataaaattacatgttaaaattgtcctgtgtgcaagtctaccagtctccttacaaactgtaaactcttagagattaagcagtgaacctgtt

SEQ ID NO: 601139 - DNA, 557 bp, Homo sapiens
aactattattcactgaaatctatattctctttaactttgtggacacacagcttgactgcacactyggtctcccttgcagtagccatttaattgagcaatagataatacgctgggatgaaagtaaagcatttcgcttacaagctcgcttcataagaatctcctaagcatatttctttttgctttagtcaacttctgattggctggaatgtaaatgagtggagtgattttataagccacctattgtaactgtgatgtaagcaagaaataaactttttttgcaagcttgtccaaccaaccttatttttttgttgttctattttgttttgttttaggcttttagcagcctgaagccttggtttttagtttctgtctctagtggtaagcagaaaagaggcatgaggaagaggctttactggcccaaacagaaacagaaactaagaaccaatgactgtattcccacctctggacacccttagaaggcattgtagatatctgggattatttgttagagaagctaattttacattaatatagtgaggctgtaaagtctgtggagg

SEQ ID NO: 601140 - DNA, 582 bp, Homo sapiens
tactggaagagggtagggcaaagtcactgagtgtcagatatttcttgggaatagaaactgattttgataaaataaaactcattgtacatttattcgagtgattactatttgattcattcatatatcagtgattaaactataagctccttgtgggtaagaatcatgtttattttgctcagtccattttactgagaatccaacacaatgcacatagtaaatggttacatttactgaatgcatggatgaaagaataaatgaaaaaatgtacttggagttgaaaaaagtgctaggtaaaaagtggtgaaaaaaattggcatggactttgttgtaaaaatcacagtcaaatgtgaaaacaaaataaataagttaaaactggccttccttcaaacaggaaagttctagctcattttctgtctttgaacacaattttttctctgcctggacagttctttctcaacatgtacttcttgtgaaaggcrtaactcactacttataaaattacatgttaaaattgtcctgtgtgcaagtctaccagtctccttacaaactgtaaactcttagagattaagcagtgaacctgtt

SEQ ID NO: 601141 - DNA, 559 bp, Homo sapiens
cttctgccttgtgatcttttattacccttgaagcatgtgatctctgtgacccacaccctatttgtacactccctcccctttgaaaatcgctaataaaaacttgctggttttgtggctcagggggcatcagggaacctgccaacatgtgatgtctcccccggacacccagctttaaaatttctctcttttgtactctttccctttatttctcagaccggccgacacttagggaaaatagaaaagaacctacgttgacatactgagggctkattcccctgataataaaccatggtcaaaataattttagcataggacattcaaagcatattaaatcaaatgttcagcataatgataaataaattccaaaaagtatccttgcaatcttaaatttcagaaatatttgtgggactttgtgaaaccccctccaagctcggttatttgcaaaatatatgataacaaactgcattacctgatttgctaaacaaaggttttggctataagtcaacctaactgtgaagaacatttttcaaaaatgatgatttgggttgaaaataattgt

SEQ ID NO: 601142 - DNA, 609 bp, Homo sapiens
caaccttttgacttttagataataccctttctgactggtgtgagatagtatctcattttggttttgatttgcatttctctaataattagtgatgttgagcatttttttgtacgcttgttggccatacgtatgtcttcttttgaaaagtatcttttcatgtcatttgcccactttttaatggagttgtttgttttttgcttgttaatttgtttatgttccttatagattctggatattagacctttatcagatgcatagtttgcaattattttctctctttctgtacattgtctttttactctcttkatagtttattttgctctgtagaagctcattgttttaattatatccaatttgttaatttttggttttcttgcaattgctttcaatgtctgtcatgaaatttttgccagggtctatggccagaatgttatttgctaggttaacttccaggatttttacagctttaggttttacatttgagtccttatccatcctgaattcatttttgtgtacggtgtaagaaggggttcaatctgctgcatatgtttagcctgttgtcccagcatcattaattgaatagggagccatttcccctttgcttgtttc

SEQ ID NO: 601143 - DNA, 594 bp, Homo sapiens
gaaaaaaaaaacctacaggaaatgcaataaaattgagatggaaatcacgaagagtgaaggatattacttaatcttttcagtcagtccataatagagctagtaaagaaaaagcatgcgaggaatacagaacccttgagtaacgtaattagaagtttcaggatgaaaatatagatatggatatacatacagaaatacatagatatatacatacattttataaatataaagtacataaaatgtatatataaacctttattttagtaagcgtatatgtagttgtgtatgtatacttwtaagttcccaaggaaaattatgaattaagcaataaaaaaaaccttaatatattttaaaatgtaaaatcaatttttagaaatattttcaaatacaagaaaagcagaaattaataacaaattagaaaactgaacagttccagaggcccttacatctggcagagaaggatgtatttgttttggcatagtctttcaacatcttttgtgtcaataggagaaacacaattcaaatatcaaacttactggaaaaaaatcattatgaaacaattacctaaatggaccaattggatataataaaaacaag

SEQ ID NO: 601144 - DNA, 514 bp, Homo sapiens
atgaattaagcaataaaaaaaaccttaatatattttaaaatgtaaaatsaatttttagaaatattttcaaatacaagaaaagcagaaattaataacaaattagaaaactgaacagttccagaggcccttacatctggcagagaaggatgtatttgttttggcatagtctttcaacatcttttgtgtcaataggagaaacacaattcaaatatcaaacttactggaaaaaaatcattatgaaacaattacctaaatggaccaattggatataataaaaacaaggatcagaggaaagttcatagctttaaatatttacattggtaaataagaatatatttacattggtaaataacaaagaattaaaaaattgtaactagcatacaattcaaaataaacctagttatgttaagtgaaacaagctagacccaaaagacaaatacaatatgatctcatttatatatgtaatctaaaatattcaaattaatagaagcagagtagaatcatgattgccagg

SEQ ID NO: 601145 - DNA, 514 bp, Homo sapiens
atgaattaagcaataaaaaaaaccttaatatattttaaaatgtaaaatcaatttttagaaatattttcaaatacaagaaaagcagaaattaataacaaattagaaaactgaacagttccagaggcccttacatctggcagagaaggatgtatttgttttggcatagtctttcaacatcttttgtgtcaataggagaaacacaattcaaatatcaaacttactggaaaaaaatcattatgaaacaattacctaaatggaccaattggatataataaaaacaaggatyagaggaaagttcatagctttaaatatttacattggtaaataagaatatatttacattggtaaataacaaagaattaaaaaattgtaactagcatacaattcaaaataaacctagttatgttaagtgaaacaagctagacccaaaagacaaatacaatatgatctcatttatatatgtaatctaaaatattcaaattaatagaagcagagtagaatcatgattgccagg

SEQ ID NO: 601146 - DNA, 630 bp, Homo sapiens
atttggatttatcaattaaatattatcttcaaatgcctatagaaggatctttctctttataatttgaaaagaccaaattgcagttcttactaccctctgaaactaataccagaataaaatttctratcttcctgtatataaaattgttcttgtagcatctctatgaaaacaaaacaaaacaaaatacaagagttacatataactgtacatgcgaacatataccctatatgtacttgatttctgctaatggaacaacttaactatgattactatcactatcgttaatcttagaatacctcaaaagttaaaaagttatcttcatattataaaatatcacagaagagcacgtaaattaaaacataatagaaacatttagaatactgataaaaatattactaagaacttaattttaaaaatgagaacgttgttttgacaaaatgttataacccagagtaaactatgcactaattactgacatgttatatagtaaaatcttttgtttagttcacatgttataaagaaataaacatatttaatgctcatataagtattttaaattagtagccatcatattaattatcaactaaatgttggcgcttttttttttttttttttacaagtggtagagat

SEQ ID NO: 601147 - DNA, 490 bp, Homo sapiens
ttttatttatgcactgaatgaatactcattaagaaattgctacatgcaaggaacaaaaataaatgaacattgtaaagactatcagacctatctgatcatattgatctatgagtgagttaattttcccaaagacagaaggttaactataagataaagtttcttaatctgaagaactaatgagatatatatcataaattgaaacatcttaacaatgtttatgagggactagaactcaattagttttaacagatgaaaacaggttagagaagtaactcatcttcagatttcacctcttcatgaaattggccctgtgaatmtattttctcaagtagctcaaagtggcaatttctcatctaatgtgtcatatctgcatattaaaatattaatgttcacatttttatcttattcactttttatggcatttttcctcaagaatctactgatgaggggaggggaagtcttacagcctctattctagctattggcttta

SEQ ID NO: 601148 - DNA, 603 bp, Homo sapiens
gctgggtcaaatgaaacctctgttttaagttctttgagaaatctccaaattgttttccacagtgactgaactaatttaaatttctgccaagagtggataagcattaccccttactccacagtctcgctascatctgtattttttttttccttttaatagtagccattctgactggtgtgaaatggtatcacattgtggtttagatttgcctttctctaataattaataatggtaagcattttctcatatgtttgttggccacttgtatgtcttcctttgaaaagtatctgttcatatcctttgcccatattttaatgttctttgcttattgatttaagtttctcatatattctggatattagatctttttcaggtgcatagtttgatttctgccatcctgtagattgtctatttactctattgataatttttttttgcgtgcagcagcaggtcccacttgtcaattttctgttgttgcaattgctttggggaacttagccaaaaatttgttgccaagccgtaagttttcttctagaatttctacagtttgatgtattacacttaaatcattaaaccatattgaaaaaatttctgtatatggtg

SEQ ID NO: 601149 - DNA, 605 bp, Homo sapiens
gtgtacaacattcatgagaaaacacccccatgaaccaatcaccacccaccaggccccacttccaacactaaggattgcaattaagcatgagatttgtgtggggacacagaccaaaattatactgtgtacttttacttccctctttcattttgtgtttttgatgttctgatttatttatttttatattgtgtattcattaagagattattgtggatacagttatttttaattttattaacctttatgctagagctataggtgacctatacaccactattacrgtattaaagtatgttgaattttacaatacacttgcctttagcaacgagttttatacttccatatgttttcatattactaattagcttccttttatttcaacttggagaactccctttaccatttcttgtaaaagaagttgagggatgatgaactcttttatcttttgtttgtctgggaaagtctttatttctgtttcatttctgaaagatagattttctggatacagtaattttggttgacaagttttttcttttcatcactttgatatatcatcccaatctgttctggcctgcagagttttgccaggaaatccactgattgcc

SEQ ID NO: 601150 - DNA, 605 bp, Homo sapiens
gtgtacaacattcatgagaaaacacccccatgaaccaatcaccacccaccaggccccacttccaacactaaggattgcaattaagcatgagatttgtgtggggacacagaccaaaattatactgtgtacttttacttccctctttcattttgtgtttttgatgttctgatttatttatttttatattgtgtattcattaagagattattgtggatacagttatttttaattttattaacctttatgctagagctataggtgacctatacaccactattacagtattaaagtatgttgaattttacaatacacttgcctttagcaacgagttttatacttycatatgttttcatattactaattagcttccttttatttcaacttggagaactccctttaccatttcttgtaaaagaagttgagggatgatgaactcttttatcttttgtttgtctgggaaagtctttatttctgtttcatttctgaaagatagattttctggatacagtaattttggttgacaagttttttcttttcatcactttgatatatcatcccaatctgttctggcctgcagagttttgccaggaaatccactgattgcc

SEQ ID NO: 601151 - DNA, 574 bp, Homo sapiens
tatctgtggatgttctcactctatacatcttgttttatcttgaaatgagggattaaattttgtgcttctctcaatcttgcaaagcttgattagatgcagggagctcctgtttgtttgtttttttatggagtggtgccctaaattgstcagctgtttgcctttttgaaatctcatatagtcaagctggctgtctgtgtgagatacttgcacttgctgtctgcagtggctcacttgagaggctgtcttctatgtgggaatttaattcccatgaggttatttggggtgcccattgtcattttgggtggggtccataggcaagacatccctgacttatatcagcattcttgatggagtttgtgaagcagttattagagtatgcagccatccctccctgctcccagcccctgcaactcaccttaactttctgaatggcatgagaaagaagtgtgtctcttgggcagtgtgttgcatggctgtggaagcctggcactcatttcttgtgctattgctttcctctgtgggagtaatcatcctctgttgttgggggttacttttggcactaagttatgctgcc

SEQ ID NO: 601152 - DNA, 559 bp, Homo sapiens
atcactgtctatttctctttataaattatagccagttcaggagaaataaaaattattttggcccatatttcttctataactgcctaaaatttcttcttcaattttatgccatggattgatccaagattacaaacattgacattatatgaacatttatatatttcttccccacttaattgattaagagtaacctgtttaaagtctcggacgctactgaggaattatcmagagagcacaaattttggaatgattaacatgatttttgatgacatttgtaaaatttttaatcttgtaatagataataacataacgttttccaggaagattaaaagccactctcctgataagagtttaaggggcattttggggagtattgctgaaataaagttaagtaaaatgggaaggaatagattaaaaaggaacaaacctagtagaaaaaaactgaacttgttttacaaagcacatacaagttttgaatagggaaactgcagtggaggagattattagggagatttctgtcaattgaatgttcatttttgggcttctgacaaaatatcat

SEQ ID NO: 601153 - DNA, 559 bp, Homo sapiens
atcactgtctatttctctttataaattatagccagttcaggagaaataaaaattattttggcccatatttcttctataactgcctaaaatttcttcttcaattttatgccatggattgatccaagattacaaacattgacattatatgaacatttatatatttcttccccacttaattgattaagagtaacctgtttaaagtctcggacgctactgaggaattatcaagagagcacaaattttggaatgattaacatgatttttgatgacatttgtaaaatttttaatcttgtaatagataataacataacgttttccaggaagattaaaagccactctcctgataagagtttaaggggcattttggggagtattgctgaaataaagttaagtaaaatgggaaggwatagattaaaaaggaacaaacctagtagaaaaaaactgaacttgttttacaaagcacatacaagttttgaatagggaaactgcagtggaggagattattagggagatttctgtcaattgaatgttcatttttgggcttctgacaaaatatcat

SEQ ID NO: 601154 - DNA, 615 bp, Homo sapiens
aaaactttgtagcccaaaaatctgttcaatttttgaagcattagttgtgcaacytgtgctcaggcattgttgtggagaagatttgggctctttctgttgaccactgccagctacaggggttgcaattttcagtgcatctcttcaacttgctgagcatatttctcagatgtaatggtttctctgggattcagaaagcagtagtggatcagactggcagcagaccactaaatagtcaccatgacctattttttaggtgcaagtttggctttaggaagtgctttggagcttcttcttggtccaaccactgagctggacatcacccgttgtataaaatccacttttcatcacatattgcaatccaattgagaaatagttccttcttgttgcgtagaataaaagaagaaaacgcttcaaaaacgacgatttttaaaatttttgttcagctcatgagacacccacttattgagctttctcacctttccaatttgctccaaatgccgaacaaccgcagaatggttgacactgagttctttggcaacttctcatgtagttgtaagaggatcagtttcgatgattgttctcaatttgttgttgtcaacttccgatgaccagcca

SEQ ID NO: 601155 - DNA, 572 bp, Homo sapiens
ctacttataaccaaaggatcagacttcatcttggcctggcttcacaaagctctcattctgaggtgagaatccagctaaatctcttataaaagtgtgggaaagggtcagagcaggaggtagaataaaagctaattctytggtttggaatctgcatgagaatgtcattaatggaagtacagttgacccttgaacaacacaggcttgtactttatggtccatttatacatggattttcgataaatatattggaaaaaattttttagagttccaacaatttttgaaaacttgcaaggtgaaccacatagcctagtaatagaaaaaaaataaaattagatatgtcatgaatgcatagaatatatgtggagactagtctatttatcatttactacaataaaatagatacaaatctattagaaagttaaaatttctcaaaacttatggacacaaaaactatacatagtaccaggcacattatcatttgcagttgagagaaatgtaagcaaatgtaaaagcacagtagtaaatcacaactacataagactaactgtagtaacactgtactactgtaataa

SEQ ID NO: 601156 - DNA, 572 bp, Homo sapiens
ctacttataaccaaaggatcagacttcatcttggcctggcttcacaaagctctcattctgaggtgagaatccagctaaatctcttataaaagtgtgggaaagggtcagagcaggaggtagaataaaagctaattctctggtttggaatctgcatgagaatgtcattaatggaagtacagttgacccttgaacaacacaggcttgtactttatggtccatttatacatggattttcgataaatatattggaaaaaattttttagagttccaacaatttttgaaaacttgcaaggtgaaccacatagcctagtaatagaaaaaaawtaaaattagatatgtcatgaatgcatagaatatatgtggagactagtctatttatcatttactacaataaaatagatacaaatctattagaaagttaaaatttctcaaaacttatggacacaaaaactatacatagtaccaggcacattatcatttgcagttgagagaaatgtaagcaaatgtaaaagcacagtagtaaatcacaactacataagactaactgtagtaacactgtactactgtaataa

SEQ ID NO: 601157 - DNA, 594 bp, Homo sapiens
aggggccatatccacagggctagacaatagatggactgtgggcctagtcttcactgaacctcatcaaatggtgcccactgcactggcaccctagcacarccaccccaggtccacctgagctctctggccaggagcagctttgcacttccctggtatggagctcccagggaagtgggagtaggcaggtcaccatttctcctgctttgcagccctagctcctattgtcctcaggctcaggggggagcatagtgatcacagactaacagggacacccagcaccttgcagctgccttacggaaaagcagtcagattgttttccatgtagggcctcctctactatgcctcactggacagggccccctgacttggtaccccaaggacccttccaccagggctttgggtcggtagcagctctgtgcttccctgggagggagctcccagagggagccagcaggctgctatttttgctgctcagcaaatcctatgaatatacacaccatggaatgctacacaggcacgagaaaagaataagatcttgtcatgtcaagggaggtgattggaatatgggggcagtttctaccatgctttttcatg

SEQ ID NO: 601158 - DNA, 646 bp, Homo sapiens
gatcattcctcatctcatctctaggtcctcatggcatcctatatcaatatttagtatcacaaaataatgagctatttttatttgtatatacacagatttatatcatgcatttacttatctcttttaattcagcatttttgttaatattgtatcgaaataatcagatagtatgtcacacaaagaggaacatcttgaaaataaaataatttaatattagtaattakatgggacaacaggtataaaccagaactttcctggaagattgaaccattagtcaccctaaatgcagttccaacttgtaaactaaatcaatagctccaatttagtaaaatgttctgacaaaaaaaaaacaaatttaaaaaatctgtcaatattatgactcaaaacagcacaatattagataacaagatggacaccagtacaaaagtaaaattagaatctctaagtgtttttgaaaagtgtattcttaacgtttgcatttttaaagcagtgaaaaaagtgtgaatagaaaaaacaagctactaatattcctaattgatttactttataatatcctaactggaatcttttctttttctcttgctctgtataatcaattttttaccgagcaaacagagtaatcttttctttttgttaatcagatcgt

SEQ ID NO: 601159 - DNA, 646 bp, Homo sapiens
gatcattcctcatctcatctctaggtcctcatggcatcctatatcaatatttagtatcacaaaataatgagctatttttatttgtatatacacagatttatatcatgcatttacttatctcttttaattcagcatttttgttaatattgtatcgaaataatcagatagtatgtcacacaaagaggaacatcttgaaaataaaataatttaatattagtaattagatgggacaacaggtataaaccagaactttcctggaagattgaaccattagtcaccctaaatgcagttccaacttgtaaactaaatcaatagctccaatttagtaaaatgttctgacaaaaaaaaaacaaatttaaaaaatctgtcaatattatgactcaaaacagcacaatattagataacaagatggacaccagtacaaaagtaaaattagaatctctaagtgtttttgaaaagtgtattcttaacgtttgcatttttaaagcagtgaaaaaagtgtgaatagaaaaaacaagctactaatattcctaattgatttactttataatatcctaactggaatcttttctttttctcttgctctgtataatcaattttttacygagcaaacagagtaatcttttctttttgttaatcagatcgt

SEQ ID NO: 601160 - DNA, 619 bp, Homo sapiens
taataaaaatgacctgaccatgctcactgagtacatgaccttttttttgtaacacgacatgccggctgccaacgggaaaggtgctcatatgactttatgaaatgtgaaatgagatttaaaaaacattgttttaaacacacatctataatttcaagtgcttgttcaagtggaatatctaagtgatatactcagaatcttaagtgctctaaatatgcttcctcagcactaaaataccacaaggtttaatgctttgaatgaagtaccaggatttttgaaacaccaccaaaccatgagacaaaattcccataaataatttcctctacttgttaagaaaaaaaaatcaatgaagtacaactctagggcatatttataaaacacatcccactgctattacaaaacatgtagaaatacttacgaccttactgccatcaaagattggattaggarcaattcacacctagctcctcagttgtaaattcaactctttagctttggagcgtgatatacttgtttgactttcatttgatgaattgatgaaagaagtcccatgagacaactctccataatttctggctaattctcttatttgaatactagagctatttaaagagttttcaga

SEQ ID NO: 601161 - DNA, 407 bp, Homo sapiens
tcaagtgctcaataacagatgaagggatttgaaaaaaaatgtggtacataaatacaatggaatactattcagccatataaaagaataaaattctgtcattcatggcagcatggatgaaactgaatgacattaatttaagtgaaataagccaggaacagcaagttaaacactgcattttgtcactcatacctagaagctaaaaaaaacagttcatctcatagaagaaaaagcagacgaaaggatactatactagaggccgcgatgggtaggggaaagaggggagagggagagatttgttraagaatacaaaattatagctaaataggaagaataagttctagtgttgtatagaaatataggatgcctatagtaaacaataatatatagcttcaaatagctcaaaggag

SEQ ID NO: 601162 - DNA, 595 bp, Homo sapiens
acgaggcattgaggaccacactttaaaataataagagccatctatggaaactcaatagccagcatcattctaaacaggcaaaagctggaaacattaccctcaaaaaccagaacaagacaaggatgcactctctctctcataattcctattcaacataataatggacatcctagccagggcaatcaggcaatagaaagaaataaaaggaggccaagcacggtggctcacgcctgtaatcccagcactttgagaggctgaggtgggtggatcacgaggtcaggagatcgagaccatccwggctaacatggtgaaaccctgtctctactaaaaatacaaaaaattagccaggcgtggtagtacacacctgtcatcccagctgcttgggaggctgaggcaggagaatcgcttgaacctgtgaggcagagcttgcagtaagctgagatcatgccactgcattctagcttgggcaacagagtgagactccatctcaaaaaaagaaagaaagaaaagaaaaaagaaataaaagacatacaaacaggaagagagcaagtcaaactattgctgtctgcagacaatatgcttttgtaactagaaa

SEQ ID NO: 601163 - DNA, 595 bp, Homo sapiens
acgaggcattgaggaccacactttaaaataataagagccatctatggaaactcaatagccagcatcattctaaacaggcaaaagctggaaacattaccctcaaaaaccagaacaagacaaggatgcactctctctctcataattcctattcaacataataatggacatcctagccagggcaatcaggcaatagaaagaaataaaaggaggccaagcacggtggctcacgcctgtaatcccagcactttgagaggctgaggtgggtggatcacgaggtcaggagatcgagaccatcctggctaacatggtgaaaccctgtctctactaaaaatacaaaaaattagccaggygtggtagtacacacctgtcatcccagctgcttgggaggctgaggcaggagaatcgcttgaacctgtgaggcagagcttgcagtaagctgagatcatgccactgcattctagcttgggcaacagagtgagactccatctcaaaaaaagaaagaaagaaaagaaaaaagaaataaaagacatacaaacaggaagagagcaagtcaaactattgctgtctgcagacaatatgcttttgtaactagaaa

SEQ ID NO: 601164 - DNA, 582 bp, Homo sapiens
ttatgaactttcctctctcataacaggcttaatcatgataaaaacaagagtcatgtctaacagagatgacttttaaaggttgcttaataattttctgaagtttaattaaccatttctagttatatggctatttgggtcatttatgtattttattatcaaaaaatatcttgaatacaatctattttagtgttttaaaattttctttagaaagaaatttccaagaataagatgtataaaaaaatcatgttcttaaagcttttgatacatatttccagattgctttctaaaaagagaatagaaatttggctttctaccaayaatctatgagggtctacctcaccctatcttccaaattgttcaatattgaaatttttaaaagccttttctaatatgataggtttaaaaatatatttttgctttcaatttgtaaggcttgattaatactgggtttaaaattatatcctaattgtaaatatttataaagacaaatttggttataattctacttctgtcaatagcctgatcttaggttttactccttttatctatttaggtcctatatttatattatactttatataa

SEQ ID NO: 601165 - DNA, 474 bp, Homo sapiens
tatctgcttacaagcgaatgtatgatgaaaaaaagaaacggccatcgacatatttctgaaaagtgtgacatttctaatgaagagcctcagccaggtccttcaggaggtattccagaagaaggcattattatcatagaatattacagcttcatgtgtattattgcccctgaagaccgtccagkgggacaacacgtggaggtgaaagacagtgatattaatgaccctcacactgtgtatgcttaagctaatgtgcatgtttatgtcacagttcttaacaaaaaagtttaaaaaggaaaaaaaaagttaaatagaaaaatcttacagaatatttaaaaaaacagtatttttgtactgctgtagaatgtatttgtgttttaagctaaatgttatcacaaaagagtcaacaagctaaaaagattacaaagcttataaagtaaaaaagtcacagtaaactgaggttaatttactattgaa

SEQ ID NO: 601166 - DNA, 474 bp, Homo sapiens
tatctgcttacaagcgaatgtatgatgaaaaaaagaaacggccatcgacatatttctgaaaagtgtgacatttctaatgaagagcctcagccaggtccttcaggaggtattccagaagaaggcattattatcatagaatattacagcttcatgtgtattattgcccctgaagaccgtccagtgggacaacaygtggaggtgaaagacagtgatattaatgaccctcacactgtgtatgcttaagctaatgtgcatgtttatgtcacagttcttaacaaaaaagtttaaaaaggaaaaaaaaagttaaatagaaaaatcttacagaatatttaaaaaaacagtatttttgtactgctgtagaatgtatttgtgttttaagctaaatgttatcacaaaagagtcaacaagctaaaaagattacaaagcttataaagtaaaaaagtcacagtaaactgaggttaatttactattgaa

SEQ ID NO: 601167 - DNA, 474 bp, Homo sapiens
tatctgcttacaagcgaatgtatgatgaaaaaaagaaacggccatcgacatatttctgaaaagtgtgacatttctaatgaagagcctcagccaggtccttcaggaggtattccagaagaaggcattattatcatagaatattacagcttcatgtgtattattgcccctgaagaccgtccagtgggacaacacgtggaggtgaaagacagtgatattaatgaccctcacactgtgtatgcttamgctaatgtgcatgtttatgtcacagttcttaacaaaaaagtttaaaaaggaaaaaaaaagttaaatagaaaaatcttacagaatatttaaaaaaacagtatttttgtactgctgtagaatgtatttgtgttttaagctaaatgttatcacaaaagagtcaacaagctaaaaagattacaaagcttataaagtaaaaaagtcacagtaaactgaggttaatttactattgaa

SEQ ID NO: 601168 - DNA, 474 bp, Homo sapiens
tatctgcttacaagcgaatgtatgatgaaaaaaagaaacggccatcgacatatttctgaaaagtgtgacatttctaatgaagagcctcagccaggtccttcaggaggtattccagaagaaggcattattatcatagaatattacagcttcatgtgtattattgcccctgaagaccgtccagtgggacaacacgtggaggtgaaagacagtgatattaatgaccctcacactgtgtatgcttaagctaatgtgcatgtttatgtcacagttcttaacaaaaaagtttaaaaaggaaaaaaaaagttaaatagaaaaatcttacagaatattwaaaaaaacagtatttttgtactgctgtagaatgtatttgtgttttaagctaaatgttatcacaaaagagtcaacaagctaaaaagattacaaagcttataaagtaaaaaagtcacagtaaactgaggttaatttactattgaa

SEQ ID NO: 601169 - DNA, 623 bp, Homo sapiens
cagttagtattcatctcagttatcagatcaaatgttgtgatattggccaggcatggtggctcatgtctgcaatcccaacactttgggaggccaaggctggaggattgcttgaggccaggggtttgagaccagcctgggcaacaaagtgagacctcttctgttcaaaaaaatcaaaaaattagccaggtgtgtagggtacgctgtggtcccatgtgcacggcaggctgaggcaggaggatcgcaggaggttgaggttgcagtgggctgcattcacaaacactgtactccagcctgggtgacagagtgagaccctgtctcaaggaaaaaaaaaagttgtggtattacagtgcttctgttcaagtaacccttattttacttaataatggccccaaagcacaagagtagtgatgctggcaatttgcttatgtcaaagagaaactgtaaaacgtttcatttatgtgaaaaggtacacattctcaataaggaaagaagaaaaatcacatggtggggctgctaagttctatggtaagaatgaatcktttatctgtgaaattgtgaagaaggaaaaggaaacccatgctagttttgctgacagatcttaaactgcaaaagttatggccaca

SEQ ID NO: 601170 - DNA, 623 bp, Homo sapiens
cagttagtattcatctcagttatcagatcaaatgttgtgatattggccaggcatggtggctcatgtctgcaatcccaacactttgggaggccaaggctggaggattgcttgaggccaggggtttgagaccagcctgggcaacaaagtgagacctcttctgttcaaaaaaatcaaaaaattagccaggtgtgtagggtacgctgtggtcccatgtgcacggcaggctgaggcaggaggatcgcaggaggttgaggttgcagtgggctgcattcacaaacactgtactccagcctgggtgacagagtgagaccctgtctcaaggaaaaaaaaaagttgtggtattacagtgcttctgttcaagtaacccttattttacttaataatggccccaaagcacaagagtagtgatgctggcaatttgcttatgtcaaagagaaactgtaaaacgtttcatttatgtgaaaaggtacacattctcaataaggaaagaagaaaaatcacatggtggggctgctaagttctatggtaagaatgaatcttttatctgtgaaattgtgaagaaggaaaaggaaacccwtgctagttttgctgacagatcttaaactgcaaaagttatggccaca

SEQ ID NO: 601171 - DNA, 532 bp, Homo sapiens
gcctttctttatgccaacaaagcagcagagacccagaggtgaaatgtagcttttctactttctagacctagaatcttggattctataagcccaatccaatgccttgttgtcatatcatgttttcttccactatgtgaatcaaacaaataatttatttttaattctctaatttgtcgtggcagtgtaggaatagcccacatcttatacaaaaaccagataccaaagatatttttgaatagctttctaagaagaaaacttcgtgtggtatgatatgcttttgtgtatagaaaccagagctgcttccctatgcagttcttctgtaaggaaaaagaaaacttattttgatgccttacaatctaaataagtgttgtttcatactacaaggctgagagaccaaggtaatagatttacaacaattattattttccaacaaaataaaagatgattgcagttgcattttagccttctgsgatctctcatctctccataccattacgtgttgattgatgtgatcatttatttgtccttgaca

SEQ ID NO: 601172 - DNA, 532 bp, Homo sapiens
gcctttctttatgccaacaaagcagcagagacccagaggtgaaatgtagcttttctactttctagacctagaatcttggattctataagcccaatccaatgccttgttgtcatatcatgttttcttccactatgtgaatcaaacaaataatttatttttaattctctaatttgtcgtggcagtgtaggaatagcccacatcttatacaaaaaccagataccaaagatatttttgaatagctttctaagaagaaaacttcgtgtggtatgatatgcttttgtgtatagaaaccagagctgcttccctatgcagttcttctgtaaggaaaaagaaaacttattttgatgccttacaatctaaataagtgttgtttcatactacaaggctgagagaccaaggtaatagatttacaacaattattattttccaacaaaataaaagatgattgcagttgcattttagccttctgcsatctctcatctctccataccattacgtgttgattgatgtgatcatttatttgtccttgaca

SEQ ID NO: 601173 - DNA, 508 bp, Homo sapiens
tgttctggacaaggatttttgggaaatgacctcaaaagcacatgctgcaaaagcaaaaacagacaaatggagttacatcaaactaaaaagcttctcaacagaaaaagaaacaatcaacagaataaagagacaatgtacaaaatgggagaaaatatttgcaaacttacatctgattaagggataatatccaaaatatataaggaactcaatttaatagcaagaaaacaataaccagattttgaaatgggcaaaggatctgagtagacatctctttaaagaagacatacagatggtcaatgagtatctgaaaaaatgctcaacatcattaatcatcagggaaatgcaaattaaaaactacaatgagctatcaccttayacatgttagaatggctatgatcagaaggacaaaagacagcaaatattggcaagattgtggagaaaagggaaccttgcacacagttggtggtaatgtacattagtatagccattatggcaaacagtataaatg

SEQ ID NO: 601174 - DNA, 610 bp, Homo sapiens
tatttattggcttcagaagcctcgtgattatatttcctttacgtattagtatatcaaactcttgatagagtttttaaaaatattaggaagcaaagagaatgaaggaaaaccatgaagctgtgagcaaggatttggctgttccttcacagaagaaagaacttagattttattttcaatgtttgagagacactgttaatgtacttgcctagtggattcttcctgcctgctgcacagacaaaaccagttcactgagaccaaggcattgcagtaaagaatttaattgatgaaggcctgctatgccacatgggagacagagttactactcacatagtcccctgcaaaattcggagactagggtgttttaaggatagtttagtgggtcgggcggcggggggttagaggaatgggttcttttgattggttgggggtgcaatcrtaggggtgtggaaaatggtcctcaaccactgagtctgttttctgggtgggggccccaggacggactggtggaaccaagagtccagggtctgggtggtgccatcagattgtcagaaatgcagaagcctaaaaagacattttaaaaggccaatcttagattgtacagtagtgaatt

SEQ ID NO: 601175 - DNA, 599 bp, Homo sapiens
aactgttttacccaaatcctataacacaatggcagatctgtcgagaagctaggaattttcatgtggtcccacaattaattcactgattacttaccctctgagtaagctcagagggtaagtcgaagagatggctgaaaaatgaaaacrgggcccttgccagagtccgttggcagtaatgcaaggatacttcaaaagttggtcatggtttagagatgttaatctgttttgttcttaaagtttaattactggctttatgtagggtaggggagactaggacatactattattgtatttaaccagtgttcacattgcaacataatttcaaaggctattttgaggcacaaatataattgattgcaatgtgtctaactcatatcagatgtcaactaagtagaaaaaaatgtgtatcagctcctaagtagaaaagaaggtccatcagtcaaatataacgtcccctaggttacatcttccacaacatgaagaaattaaaccaaagaatctaatcttattggggcttattatagcattgttgaacatactatttttacctattacaaattgagattgagtataaaatgatttttaatagtgttttagtt

SEQ ID NO: 601176 - DNA, 628 bp, Homo sapiens
gtaaatgtagattcccatttggtttcaatcatgtgcaatttccttttatttacttaatagggtaaagggcttaactgttttacccaaatcctataacacaatggcagatctgtcgagaagctaggaattttcatgtggtcccacaattaattcactgattacttaccctctgagtaagctcagagggtaagtcgaagagatggctgaaaaatgaaaacagggcccttgccagagtccsttggcagtaatgcaaggatacttcaaaagttggtcatggtttagagatgttaatctgttttgttcttaaagtttaattactggctttatgtagggtaggggagactaggacatactattattgtatttaaccagtgttcacattgcaacataatttcaaaggctattttgaggcacaaatataattgattgcaatgtgtctaactcatatcagatgtcaactaagtagaaaaaaatgtgtatcagctcctaagtagaaaagaaggtccatcagtcaaatataacgtcccctaggttacatcttccacaacatgaagaaattaaaccaaagaatctaatcttattggggcttattatagcattgttgaacatactatttttacctattaca

SEQ ID NO: 601177 - DNA, 609 bp, Homo sapiens
aaagaatctaatcttattggggcttattatagcattgttgaacatactatttttacctattacaaattgagattgagtataaaatgatttttaatagtgttttagttttgtgtgtattaaattacatccagcaatacttaataatttttaagcttattatatattgttctttttcttattcacattgatataaacatttgccattttgttctacatgggataatttatattcttagtttaactaactatggaaataaatgataatttattttaatataaaagtaaattatrgaattaacttcagaagaaagtattctaaacaaaagatctgaatactgtatttatttttatgtattcttccaaaagggtttttaactatattggatataatgtagttttatagacaccctaggattaatcttaaatgtatggaaaacaaaaggataaaagaaaaataaaactattacatgagagatacataggtaagtgacagaataaacaaaatatgcacaagttaccttcaacacaaagaaaaccaataattcaatatccaagctttagtgataaaatgaggtcacagacaaccaactaggaatgaacgaattagag

SEQ ID NO: 601178 - DNA, 622 bp, Homo sapiens
gcttggaaaacagatataaatgggaaaattccaaactattccacatcagcaagtgtaatttagcactgctgcaatctgtctaaaaatctgttaatttaagtgcatggggtagtctctgccagttctttcccctgcctgtttttttaacacaatataattttgaagaactgcattctgaagttcccctgaactataacttaccatacattctctgctttatttaagccatatctcttggttatttaaataatacaaattgaaatataacataaatgaactatataactaaatagccaagaatttagtraggttaaaaaagaaatagtgcatcggttacctaaatgttaggatatttccttggcttagtattgtcatgaatcagctaagaatttttgcatatgcaaagggtcacaggcagatggcatttaacctaacatgcaaatagcccttcaacctccttttatacctacagtaggcattgaaactgacagaacctcagagatatatgcccaggaatctcaggaattcaaaatgaataataagtaaataaatgcctggtttgggatatgttggtttatatttagaaagaaaagataatggttccataaaatgtggttatgaa

SEQ ID NO: 601179 - DNA, 582 bp, Homo sapiens
aagcttcataatggcaggggtggctacatctctagaatatagggatatgcctagaactgtatcgcgcatatgtgcttatataatacgatatttgttgaatgaatgaatattttgctggttttctacaaggattaaatgcaggtatacctataaagcacatggcaaccatatgataagcagcagctgcttttactactgccacaatcactctatctactcttaatgtttctttgagtcaatgcccgacctatttgacagatcacatattaacccctcctgcagaagtagcrgaatacagattcacagcttcccttctatgctctggctgtgctcttgtctttttacatagaacctctgaaagattaaaactgaagtccaatgagacactaactggcgagtgtttcttagaccagtgcttctcaaattttaatacacatacagatacccgggaatattgctaaaatgcagtctgacttagtaggtgtgcgggtggcccgagactctgcatttcaaacacgctccaggacatacagatgctgctgctctgtggaacacactttgagcagcaatgacttgacttac

SEQ ID NO: 601180 - DNA, 647 bp, Homo sapiens
cctcaacattttacaaactattggggatgaaaatatacacataaaacaaattaaataatatttcatttcaagaatgatatatacagcatatttaataaaaagtcagaaaatgtgagttcaatatggattgcatgaattcataagtactcaaggactttggttcagaaatgatgacaaaagttgtctgtgtcatatagaaggtttaatttggggaatcatgaataaatgtgggaagggcaagattgtgtagaacaaagaaacactgttagaagttttctggtaagtgtctggcatgataaatatcatgtttgggaaagattaattggaagggattagcaaaatgcaagactgcttttgaggctgctgcaataactcaggcactgacctactttcctgatttgatygtcacttttccctcagcataaaagtatccctgcagactgatacactctagtccttgtagcattccattctcatttctactcccatgtttatgccacgtgcttgcagttcactggaaaggataggatttaaaaacagtctttgacccaaatcctgattccaccacttaatagtaatttaacttccctaatcctattcaataaatggaattgcaacacctacttttgaagttgagctgtgatgag

SEQ ID NO: 601181 - DNA, 583 bp, Homo sapiens
gatgtccaaaatatcttttcaaatgtttgtgtatcataatatttttcatagtatttctcaaaaatgcaaaaaaaaaaaaaaacttacsaagtttaattttgtagaattaccaaatggacttggttaatgataatgatattagaaacaaacaaaaaaagtcttatattcaagagaaatttcaaagctaaaagcaacaatacttgataacgagttagagatgaaggagcctgagtcaaaattgatttcacaaataacagaaaattacagtggattaaacaagaccactgtttattcaatgtttctttcttgttcaagtaagagaagtccaccagtagcattccaagtcttgtagggcatcatttctcaaaacataagagatccaccatcttcttactttctgccctggcatttccatctaatggatgtaattttcaaggtaagaaaaaaaaatagctgctggaattctggtcattgcttttgtggtgaacaaaagtttggtagagaggataaaaacaagcccataccaggtgttaaagggccaatccaaaatgctccacatgtaaacttttgtttatataatgtt

SEQ ID NO: 601182 - DNA, 587 bp, Homo sapiens
gagctgagatgactattgattgtgtcttttgatgcacaaatgttttaaattatgatgtagtccagtttacctctttttttcttttgttgcctatgctttgggtgtcatagccaaaaaatcattgccagatccaataatatgaggattttcctctgttttcttccaagmgttttattgtagctcttagatttgtgttttaatcccttttttattaattttggtatatggcataaggtaatagttcaaatcattcttttgaatgtggatatacagttttaccaacaccatttgtagaaaaaacagccttttcctcattgaatggtcttgtcaaccttgttaaaaatcacttcaccacatatgtgagggtttatttttgggctctgtattctgctccattggtgtgtatgtccatttttaagccaccatatagtcttctgattacagtagctttgcagtaagttttaaaatcagaaagtgtgagacttttaactttgtgttttgtgatttttttttcaagattgttttgctaatttgtggttttttgagactgcatataaatttttggaaagatttttctatctttgcaa

SEQ ID NO: 601183 - DNA, 600 bp, Homo sapiens
ttttgtaatgagaacacttaaaatctctgttatcaattttaaagacaatacattgttattagctatagtcaccatgttgtaaaacagatctcttgaacttattcctcctaacttaaatttgtatcctttgctcaacatctcttcaacctcactccaccccacccctagcacttgttaaccatcattttattctgtacttttataaggtcaactctttagattttacatataagtgagatcatggtatatttgtgtttctgtgcctggcttcttacatttagcataatgtcctccaggattatccatakttttgtaaaatgacagcatttccttcttttttgaagccaaatagtgttccattatgtatacatatcatgtttttttgttcattcattaatgaacacatagatttattttatatcttagctatttttagtaatattgtaataaacctgggagtgtagatatctcttcaacacactgcttttatttcctttaaatatatatctagtggtgggattactggaatatggtagttctatttttgttttttaaagaaactttcacagtttaccgaataattatgctaatttatacttc

SEQ ID NO: 601184 - DNA, 600 bp, Homo sapiens
ttttgtaatgagaacacttaaaatctctgttatcaattttaaagacaatacattgttattagctatagtcaccatgttgtaaaacagatctcttgaacttattcctcctaacttaaatttgtatcctttgctcaacatctcttcaacctcactccaccccacccctagcacttgttaaccatcattttattctgtacttttataaggtcaactctttagattttacatataagtgagatcatggtatatttgtgtttctgtgcctggcttcttacatttagcataatgtcctccaggattatccatatttttgtaaaatgacagcatttccttcttttttgaagccaaatagtgttccattatgtatacatatcatgtttttttgttcattcattaatgaacacatagatttattttatatcttagctatttttagtaatattgtaataaacctgggagtgtagatatctcttcaacacactgcttttatttcctttaaatatatatctagtggtgggattactggaatatggtagttctatttttgttttttaaagaaactttcacagtttacckaataattatgctaatttatacttc

SEQ ID NO: 601185 - DNA, 638 bp, Homo sapiens
tatgttccaatggaatgaggcagtttaaaaaataactgtacacacataaatgaggcagagaatttcagatcatgaaaagtgctgcagagaagatgaagcaagttcatatgatagtatgatttggtagcaagggatgtatgagcatgacacatttgaccygaaaataaagaagaatacagctttgaaaacacctgaatggagggagttccagcctgaggaaacagtaaatgacaaggctcaaagatgaaagtaagcttagtatgatatagggtcagaaaaaaggctgaggtggacacagcatcttttggaagtggtaacatttactgtgatgtataagattgagggaggagcagaactagaaggaaatatcataaattctgttttggttttgtcaagttttcatggcttcatagcatctaaaccaagatcttcaatatgcagttggatacatgagcccagggcccagagcaagaaaacggctagggctggaagtataaatttgggaagatgtcaatgtctttgggtgtagtgagttatgaagactctggcataagaaattagaaaggtaagcagagtcatatcatgtagggccttgcatgccatatgttaaccaggttatattttcttccaaaagtact

SEQ ID NO: 601186 - DNA, 646 bp, Homo sapiens
ctgctttcttgtttcagttctcatactatgtaagttttctttttgtggtctatttagcgccacatttccctcatgcttatgctttttgttgctgattttgtgatttaaaatggtctccagccatagcgctgacatgctgtctagtgttcctaagtgcaagatgtctgtgatgtgccttaagggacagatacctgtgttagatgagctttatacaaccatgaattatggtgctgttggtcctgaggttcaaagttaatgaatcaatgctatatattaaataaagtgtctttaacagaaacacacttaaaacaagattatgtattaactggttgataaaaattttgcagccagaaaatttgcaggaacctaaccttgtgtttccccaaggagcaatgattccatattcgctaattcagtgtttgcagtaatgtttgcagcaacttcctaaaacataactacctttaataaagaggattgactgaatatctcaacaagactacgctgaattacatgggttattttatctgtcattaagtaaaatgtatagtgcagttttacttggcttttcctgycctggccttgatatcaacaaatacaattatataaatgtgtgaactaaagccaagggtagcacagtgaatgatga

SEQ ID NO: 601187 - DNA, 584 bp, Homo sapiens
tggggaaacggcgtttctgggaagttagattgcccaggaaagtgggataatgggaattgaatttttttttcaattccaaagtcaaatgttttaaataaatgcaatactctgataatattttatatatttttctataaatattgtaatcaatacttgagttataaattaatggaacacattaaaattcamgtaactttttgtttgccacatttcaactagaaagattcacacttcttattataatttaacattgcatttcccaatattattcatggagtgttagtccattatatgaactacatatataaagaagacaagggaaaaaaaaaagcaatcttccctcttccttccacaatgatggaatacatttcaaaaacaactgtggtttttgtttatggcagcatgaagatctctagggatttgaatctttacagtatatcttggactcagcgaaagtagaatagaatcacatttccaggaggttacctaatatcataaaaggcttttgctaaatctcaagtgatctgcagtaacattttactgctccgttgctatagctttccacatgtaagtgtatataagct

SEQ ID NO: 601188 - DNA, 584 bp, Homo sapiens
tggggaaacggcgtttctgggaagttagattgcccaggaaagtgggataatgggaattgaatttttttttcaattccaaagtcaaatgttttaaataaatgcaatactctgataatattttatatatttttctataaatattgtaatcaatacttgagttataaattaatggaacacattaaaattcaagtaactttttgtttgccacatttcaactagaaagattcacacttcttattataatttaacattgcatttcccaatattattcatggagtgttagtccattatatgaactacatatataaagaagacaagggaaaaaaaaaagcaatcttccctcttccttccacaatgatggaatacatttcaaaaacaactgtggtttttgtttatggcagcatgaagatctctagggatttgaatctttacagtatatcttggactcagcgaargtagaatagaatcacatttccaggaggttacctaatatcataaaaggcttttgctaaatctcaagtgatctgcagtaacattttactgctccgttgctatagctttccacatgtaagtgtatataagct

SEQ ID NO: 601189 - DNA, 583 bp, Homo sapiens
aaattatctcttttaacctctctgggccccaaatcacacagctaataagctataattgactgtattattattattattttctttttttgagacggagcattgctctgtcccccaggctggagtgcagtggtgcgatctcggctcactgcaacctctgcctcctgggttcaagtgtttctcctgtctcagcctccctagtagctgggattacaggcaaatgccactgtgcctggctaatttttatattttwagtagagacagggtttcgccatgttggccaggctgatgtagaactcctgacctcaagtgatccgctcacctcagcctcccaaagtgctgggattacaggcccataattgactttataaaagaacctgcactcttaagtattggaatatactgcctgttttttatttgatagtgttatttactatcttaaaataggtaaatacattacaggactattcttacaaagatttaggcaaaattatatatgggagggtgttctctcttgtggcacagaataaaactgaatattccatttttctcccctacattcttagatacccttacaattatttta

SEQ ID NO: 601190 - DNA, 583 bp, Homo sapiens
aaattatctcttttaacctctctgggccccaaatcacacagctaataagctataattgactgtattattattattattttctttttttgagacggagcattgctctgtcccccaggctggagtgcagtggtgcgatctcggctcactgcaacctctgcctcctgggttcaagtgtttctcctgtctcagcctccctagtagctgggattacaggcaaatgccactgtgcctggctaatttttatattttaagtagagacagggtttcgccatgttggccaggctgatgtagaactcctgacctcaagtgatccrctcacctcagcctcccaaagtgctgggattacaggcccataattgactttataaaagaacctgcactcttaagtattggaatatactgcctgttttttatttgatagtgttatttactatcttaaaataggtaaatacattacaggactattcttacaaagatttaggcaaaattatatatgggagggtgttctctcttgtggcacagaataaaactgaatattccatttttctcccctacattcttagatacccttacaattatttta

SEQ ID NO: 601191 - DNA, 572 bp, Homo sapiens
atatgactattttggagaataaagtgtgggaggaagcatcatgtgtctccttgcaggcctaaaacagtgaaatctcaggcaccatttttcagtctgtctccctccctgctgtggttactaggaggccttgtgttgtggatccaaaacatcgaaacagcatggattatggattacagagttgctgcaaaaacagtkcccaaagaggtgcccaaatatgtagcagatttggaatgaatcagaaataagcctttgttgcattgagcactgagatatgggcattttttgtttctaactagcccagcttaccttggtttttgtagaaattagtaccagaagtgagatgttattttaataaacacaatatgtttggtatcagttgagtgatcccacagtgagcaaacagagagagaactgatattagtgactttggaaaaatggaaacacatttcatacaataaaaaatcttagaataatgtgagcagcagatcatgtacttgacaaatatgtgactttggtttaaaagcagaatgttcatgtatgtgagctgctattaactgtatttggcaatatat

SEQ ID NO: 601192 - DNA, 572 bp, Homo sapiens
atatgactattttggagaataaagtgtgggaggaagcatcatgtgtctccttgcaggcctaaaacagtgaaatctcaggcaccatttttcagtctgtctccctccctgctgtggttactaggaggccttgtgttgtggatccaaaacatcgaaacagcatggattatggattacagagttgctgcaaaaacagttcccaaagaggtgcccaaatatgtagcagatttggaatgaatcagaaataagcctttgttgcattgagcactgagatatgggcattttttgtttctaactarcccagcttaccttggtttttgtagaaattagtaccagaagtgagatgttattttaataaacacaatatgtttggtatcagttgagtgatcccacagtgagcaaacagagagagaactgatattagtgactttggaaaaatggaaacacatttcatacaataaaaaatcttagaataatgtgagcagcagatcatgtacttgacaaatatgtgactttggtttaaaagcagaatgttcatgtatgtgagctgctattaactgtatttggcaatatat

SEQ ID NO: 601193 - DNA, 562 bp, Homo sapiens
atagaaataatactaaacattggttctaagagtaaaattttaaattaagaacattaaaaagacaaatattaacaacactgtgctgagtcaggaatgagttatagttctattttccatacctttattgagcaaaagaccagatccctgagccgcacataagtcaggatcttgttgaagatctgaatcagttccaaaccctccatggctgtgtgttttccatcactgcaacaatggctttcggtctcatctactaagaagtgggagaatcctaactctttcaattttcttatctctcagccttggaaataagtttctttctgttttatctgactataacataatattacaaaattatatgattagagaaaagagctaaacctgaactttgctagagaaaacagtctattattttaagtgagaaaacgaataaaaakatgcaaattgtatttcaaaaacagcattacatagaaacttcacctaggacaagccttcttgtgtagtgaagacagactttgaaaaaagcgaatctgaggcttgttcctaagacaggttgtttcccaga

SEQ ID NO: 601194 - DNA, 556 bp, Homo sapiens
aaaattccaaagaattgaggaaactacccatgagagactctgtttaacaggcacattactgaattcatctataaaacatatgaacataattgtatctatttataagaacaaagcttcaatttgaggaagtgatcaggttttgaaaaatatcccctaaatcacccccttatttcataactagaatgaaatgacaagactgaagctggggraaaaaaaagaaaaaaaagaaaaacaacaaaactaaagctctttgttcatcgaaattaatatggtaaacccatgtcatttttgtaaacaataaatttcaaagtattggtggctttttccttcatatgttactgcttacagtatttttcaattagggacaatttgttacaagcaaggcaaaaacactggcagtatgactcacatacaatggctaaaaatatagttagatttgtttggcatctaatttggggctattttaattcaaatattaaaaacgtaaatgaaagttatgttttggagtgagattgagtttagcatattggactttggaaatcttatttctatgaac

SEQ ID NO: 601195 - DNA, 609 bp, Homo sapiens
ggtcatatcatgtatgttttatagatggtccatcccacctagtatatactagttacgtggtagtttcacagcagatgcgataaataaaattgagaactttggtgttttttatcattatttcctctcatatataccagtctttgcccataaggtaattctatgaaaaaggataatgatatttatctcaggcattaaagcaaaaattcacaattttcatatattctttacattgtaaatgaagatactaatatctattttaaaattagttacaacactagtttatcttgggagttgctttgagatatttaatatttttccctctgatagttaacacaaaacttacaaaagaaacaagtgtgaatctcagtgatctcacacattgtgttattataaattactttataacagktcatcactacagaattaaaacaaaatgaatgtgaacaacattatattagtataataacattaaattctaattttttcagcacaatatttcaaaaataaactactttgagaataaagcagttacaaataaattgaataggtttcaaataatttccatttaggcaacttttcattctaaccataaatagtataaacatgcaa

SEQ ID NO: 601196 - DNA, 606 bp, Homo sapiens
atctcagcctgaattatcttcaaattggtttaaaccactgtctccctcctcttggattcctcatgacttccttttgtgttggaacatgaacctcccaataagcagctctggttttccacttcacccttgaacttcatcataggtcctttcttgctttgagcctcctaaaatttggtgaaaatgaaaagtagcttcttatagagatttttgattcccatggaataaagatgagaacacttattctgctcctttctccctctcattaaataacttacattctrttagtcaaagaatttaatcccagataagttacttacatttgatagtcattgttttgcatttattaaattgtttatagggacagtatctgacttgatcaagttttattatgtttttctttttactgataaattatacagttttggtggaaagtacttaaagaaaattgcattgtcaaactcaaaaatatgaatgcaaatttttatactaatggaattcacagataattctaaattataaagtgcttgagatataagcaataatggagaagaaatattttcaaaattctcaaataggacaatattcaaagaaatttttaaaatatac

SEQ ID NO: 601197 - DNA, 654 bp, Homo sapiens
tctgttagtcaaagaatttaatcccagataagttacttacatttgatagtcattgttttgcatttattaaattgtttatagggacagtatctgacttgatcaagttttattatgtttttctttttactgataaattatacagttttggtggaaagtacttaaagaaaattgcattgtcaaactcaaaaatatgaatgcaaatttttatactaatggaattcacagataattctaaattataaagtgcttgagatataagcaataatrgagaagaaatattttcaaaattctcaaataggacaatattcaaagaaatttttaaaatatacaaaaaaagcttgtttatgaacaactagagtagaatgaatgtagtaccaatgttttttaagaggtaaactatatgtgatggatagctgttatgtttgaaatcatgtacaaatatgaaatttgatgtgattatgaaatattactttattagcgatataaaatatacttgttttttactatctttaaggagaaaaaattatatttacgtcatacttttattttacatttataataactgctaaagagatattcccaaagctttcacacaaatacgacaagcatatcaaattcacttcaaagcaggaacttgacttccatgcaaaataa

SEQ ID NO: 601198 - DNA, 495 bp, Homo sapiens
cgttttggcattgactatcttttcaaagcttttgaaattaaccacaattgcaggatctgtttcttcgatatactgttcatcatttgtggagaaactctttgccatgccttatcaatgatttctaaaacctttttatgtaaaagcatttccaaaggcctttcagtgaatcttcttgattggcagacacactgtagaccacatattgtttgcatagggaaataagcacaagaagctacaaaggaggcaataccgtactagttcacaggatgcattaragaggtcctgtttgagagaaggaaagccacctgaatgttgtcactacatattaccacactgtgtggttgtctaggaatattgtcaataatgtgtaaagccttctttgtgaggttttatttggctgtttctccttcaggaagcagagttattagcatcgtatgtaatttacaaaaaccttctcattaactagtgttgatattgaaactccagacaaatgat

SEQ ID NO: 601199 - DNA, 545 bp, Homo sapiens
ttcaggaagcagagttattagcatcgtatgtaatttacaaaaaccttctcattaactagtgttgatattgaaactccagacaaatgataatttttttgaacattttttgagggcatggagatttacaaaatgatcattagaaaaggttgaaacttaactcccagcaatgaaggtgatctcttctggatactttgtgatccaatgctttcttctcctatagtaacataaatggtgagaaagacatatactttcaaaactcaaatttgttttgcctataattttttacattgaatgattgctcacttgtatagactctttcatcaatactttttaaaaattagatggtaatgtgatgttcacctcactgtcagctatagcgcctcccctgttgtcttgatgttgtggaatatggcttaaatayacagcaaaactaagggctccctgctttattaattatccttctctatgacattcttccccttaagcttctcaaacatgttcgcagtctcccagatcaacacagtacagaaaaaagtgtcttaatc

SEQ ID NO: 601200 - DNA, 572 bp, Homo sapiens
tggagctttatgaattggaaacactgatgttggcagaagttcagtattgggaaaaatctaaagttagtaagaagcctatggcatgagggtgactgtttttgaaagaaaggtagagaagttaccctgattttggaaaagtgtgaggagagagtgtcaaagataaagctcatgacacttgaaatttgctaagaagcaatcctgttctttgtattttctagctccaaaggcttctaagtaaagaaagatacaacttaatggtggggttgaccattgaaaagatacgagggcaaatctaaatcttcagggacccactggtcttttaaatatttactaccctcaccttttgcatgtgtctcattattaatggcttctgctgcaaagggygggactaaacctaattaaaaatgaacattatttcaaagctcttttagagtaactctgagatgttttcctaaaggaaataaacccaaaaatgctttaagtatattattcatccaaattgaaagagccagctacaactgatgttgaaatccactatctgttaaataagaaatgcagtgtttaatagaaaa

SEQ ID NO: 601201 - DNA, 625 bp, Homo sapiens
aaatgtaaggcaatactctctgtgtatgagtataggcattttaatgaagctatgtgactcaattttgcactttggagtatttaggtgccagttgcaggtagtcacaaaataacacctgaacccaggaagctgaagccctggctccttcgacttgctttttgagcctcagcttccttgtttttgaatagagacaaatctctgcctatccataaagctttgtgtatcttaaactgcaaagcaaagyatataataaagttttggttaaaatgtaaaacactgatcaaataggaaagtacattataattcaaattgctggtttccaggttatggacaatcagtggactgggaactgtacaaaggctattatacctttaaattgtgaataatcatttaacttgattttatcaagtggtaagatttaaggagtaaacaagtttatattattttcttcatgactaaatggtagaaaaatagatacataataacctttaagttgcatgaaaatcatctaaaatgattattaatattcttcttccttctcactgttttttttttctgagaattgatttgcaaattatagctccacgtgattcattatatttttggaaaaatgcccaaaaacata

SEQ ID NO: 601202 - DNA, 561 bp, Homo sapiens
ggaggagaaaaaaaaaaaaggaggcttgcttttgtcacacttgtttcctattaaagagccttacggtggattgagtaattgtgtacgaaggtagtctggctggcagatgtgtgcagccccagcgagcactagattcaaggcaggtgggttgtaccagggcgcaaacaacattgagagagagagaggcgtgattaaaacagcaggcctctgttttatagtgctggaagtggggtagcattaaaactcctaggagacagagtttccggaatggtattgctctgtagcaaagaaaacaataaattcaataaaaaagaaagattctcaaactacaatagttatagagatatttttaataatcactttaactattaatgaggggctaaatartgcaccctttccccaataccctaactgaacttaattaaaactactcaatcatgggtcatagtgggttattgatagtgttaacgtgatggatttgaaacagatccttcattctgctgcataagccaagttatctttttaatctgaattaaattgctttaaggagatttacactgt

SEQ ID NO: 601203 - DNA, 557 bp, Homo sapiens
gtttaatcagatgccatttgtcttgacttttcaatagtagtcattctgactactgtaaggtggtatcttgtggatttgatttacatytctcagataattagtgatgtggatcattttttcttgtttattggctgtttgtcttcttttgagaagtgtgtgttcatctatgcacacaaactagaaaatatagaggaaatggctaacttcctggaaacacacgaactcctaagagtaaatcaggaagaaattgaaaccctaaatagaccaatattgagttccaaaattgaatcagtagtaaaaaatctaccgaccaaaaaaagccctggacaaaatggattcacagcaaaattctactagacatataaaaagagctggcaccaattctactgaaatgattcctaaaaattgagaaggagggactcctccctaacttattctagtaagccagaaccaccctgataccaaaacctggcaaagacacaacaaaaagaaaactacaggccaatatccctaatgaggacagacataaaaatcctaaacaaaatagtagcaaatca

SEQ ID NO: 601204 - DNA, 557 bp, Homo sapiens
gtttaatcagatgccatttgtcttgacttttcaatagtagtcattctgactactgtaaggtggtatcttgtggatttgatttacatctctcagataattagtgatgtggatcattttttcttgtttattggctgtttgtcttcttttgagaagtgtgtgttcatctatgcacacaaactagaaaatatagaggaaatggctaacttcctggaaacacasgaactcctaagagtaaatcaggaagaaattgaaaccctaaatagaccaatattgagttccaaaattgaatcagtagtaaaaaatctaccgaccaaaaaaagccctggacaaaatggattcacagcaaaattctactagacatataaaaagagctggcaccaattctactgaaatgattcctaaaaattgagaaggagggactcctccctaacttattctagtaagccagaaccaccctgataccaaaacctggcaaagacacaacaaaaagaaaactacaggccaatatccctaatgaggacagacataaaaatcctaaacaaaatagtagcaaatca

SEQ ID NO: 601205 - DNA, 434 bp, Homo sapiens
ccaatattgagttccaaaattgaatcagtagtaaaaawtctaccgaccaaaaaaagccctggacaaaatggattcacagcaaaattctactagacatataaaaagagctggcaccaattctactgaaatgattcctaaaaattgagaaggagggactcctccctaacttattctagtaagccagaaccaccctgataccaaaacctggcaaagacacaacaaaaagaaaactacaggccaatatccctaatgaggacagacataaaaatcctaaacaaaatagtagcaaatcaaatccagcagcatgtcaaagagttattttaccatgatcaagtaggtttcattcctgggatgtaaggttgattcaaattactcaaataaatgaatgcaattcatcacataaacataattaatgataaaatgctatatgatca

SEQ ID NO: 601206 - DNA, 575 bp, Homo sapiens
cacagcaaaattctactagacatataaaaagagctggcaccaattctactgaaatgattcctaaaaattgagaaggagggactcctccctaacttattctagtaagccagaaccaccctgataccaaaacctggcaaagacacaacaaaaagaaaactacaggccaatatccctaatgaggacagacataaaaatcctaaacaaaatagtagcaaatcaaatccagcagcatgtcaaagagttattttaccatgatcaagtaggtttcattcctgggatgtaaggttgattcaaattactcaaataaatgaatgcaattcatcacataaacataattaatgataaaatgctatatgatcatctcaataaatacagaaaagccttcaataaaatccaacatcccaacatgataaaagccctcaacaagctaagaattgaaggaatatatgtcaaaayattaagagccatttatgattaatgcatagccaacatcatgaacaggcaaaaactggaaacattccccttgagaagtggaacaagacaaggatgctcactcccaccactgctatttaaca

SEQ ID NO: 601207 - DNA, 596 bp, Homo sapiens
gtgtaaaggtaactggaatcactggaataactctcaaacatttatgtcattattcatttttaaaaaattctctctaaagttytagcctaagaagatatgaataaaaaagaaacaacaaagaaaccttcttctacattgcaagctattaattttaataatgaactggagaaaaccaagttactttgtaatatatatttaagaaattgaaaaataatgaatgatagagtgtactaagccaatgaacttctgtactaaagaatattacataatttggataagtataatggaatattctgactaataactaactttatcagatagaatattaaaaaatggaggtatggattatgaaaacaaagtataaaaactgttatctttaaatacaaaggaacttccaaagtacagtaaatttgaaaaaaaattctagtttacttgcaacaggatactgcaatattaactttttcttaaattcactttcaacattttacttcaaaattacagctatagcaaatttacacaagtgaaagtaagaatttaatcactgatgcagataattccagcccttcactaacctgagaaggcatctaattataatt

SEQ ID NO: 601208 - DNA, 596 bp, Homo sapiens
gtgtaaaggtaactggaatcactggaataactctcaaacatttatgtcattattcatttttaaaaaattctctctaaagttctagcctaagaagatatgaataaaaaagaaayaacaaagaaaccttcttctacattgcaagctattaattttaataatgaactggagaaaaccaagttactttgtaatatatatttaagaaattgaaaaataatgaatgatagagtgtactaagccaatgaacttctgtactaaagaatattacataatttggataagtataatggaatattctgactaataactaactttatcagatagaatattaaaaaatggaggtatggattatgaaaacaaagtataaaaactgttatctttaaatacaaaggaacttccaaagtacagtaaatttgaaaaaaaattctagtttacttgcaacaggatactgcaatattaactttttcttaaattcactttcaacattttacttcaaaattacagctatagcaaatttacacaagtgaaagtaagaatttaatcactgatgcagataattccagcccttcactaacctgagaaggcatctaattataatt

SEQ ID NO: 601209 - DNA, 576 bp, Homo sapiens
attactcccctacaagcctcagctgattttttaaaaaacctaaaacaagttttatttttacagaacatgaaacttgctggctaaaaagataaagaatgaaagaaagtctttgtgaaccaagcaatctatccagaaaagagctagagaaaaatttgcaagaattatatattttcaaaaatttcctaagactttagactagggggtatgctttattaattacaaggaggttaaatactattctctcagcagtcaacaatgatgtatttgctgtctgtctactattggcacaaaatagaaagaccagaatgacttggatacaaatactgtactcaagaagtttacagtgctttaaaaatgattttatatgtatttatgtatgtgtgcaggcataarttataaaataaaaatagccagaggaagatggccctatgacattttgtattagcctccatcaattcagttaacttttcccaccacttcaagaaaccagactaatgtgttacaatggaatccatagaagaccaatacaataattatagtatgtgtgctacagtaagtatggtagttacatagcta

SEQ ID NO: 601210 - DNA, 588 bp, Homo sapiens
tacttttaaacatgtaataaggcaacaacctgtaagtatcagtgtgtctcaactgtgcaaaagaaactaaaggaaagggcatttacttcatggactgttgtgtcagaggggcctgagcaggttgatacagcagtagcaaaattaaaagagtatcaacttctacatacattgactactctgctaaatctagtatggaattagaataatacacattaactacctgtacttcttggggtgttgtgatttaaggacttacaaataagagactggcaaatggcttttcttctttctgatttgtatctattagaacataggtaagaatttagagagggagaatatgcacatagcctcccactttaagcccaggaagaattttctatgacaggatgtagaatgtacaaggaagcatgaaagggttaggacaagtgaaatttcatgtgtcgacatggataaattttactttcctgcctgccttaaatcttggttgtatttcaaaaagtaaaactactgtgttattttagattactgackgcaatgctagttttatttacagcgtttctattaagcataagcaaggcagcagttatg

SEQ ID NO: 601211 - DNA, 588 bp, Homo sapiens
tacttttaaacatgtaataaggcaacaacctgtaagtatcagtgtgtctcaactgtgcaaaagaaactaaaggaaagggcatttacttcatggactgttgtgtcagaggggcctgagcaggttgatacagcagtagcaaaattaaaagagtatcaacttctacatacattgactactctgctaaatctagtatggaattagaataatacacattaactacctgtacttcttggggtgttgtgatttaaggacttacaaataagagactggcaaatggcttttcttctttctgatttgtatctattagaacataggtaagaatttagagagggagaatatgcacatagcctcccactttaagcccaggaagaattttctatgacaggatgtagaatgtacaaggaagcatgaaagggttaggacaagtgaaatttcatgtgtcgacatggataaattttactttcctgcctgccttaaatcttggttgtatttcaaaaagtaaaactactgtgttattttagattactgacggcaatgctagttttatttacagygtttctattaagcataagcaaggcagcagttatg

SEQ ID NO: 601212 - DNA, 499 bp, Homo sapiens
tctgtaaacacaaaagaaatgggtgaaatgatagtacatatatagtacatgtgagaatttatgacaatgttatcaatgttctaagaataataaaatagaaacraggcaaatggaatacataatgaattattaaaccaagaatatatgtatttttaaatgatgaaaatttaaagatgaataaaatcaggttaaaaatttaataaacccaggatatggaagatggatttaattcatatattcaaatatttatgagtacctaccatgtattaggcactatacttgataaggtgatatagaagtaaacaaatatgcatgacaattacatttggaacagaggaaagaaacaagtaagtgagaaggtactttgttaaaaagcaatacatcaacagaagattctgggaaaatggcagcgtgtaaagcactaggaatctgtctccttacctagacaacaattacaatggcataatctgtcagatgtaactatttttggaaatctgga

SEQ ID NO: 601213 - DNA, 497 bp, Homo sapiens
tgtaaacacaaaagaaatgggtgaaatgatagtacatatatagtacatgtgagaatttatgacaatgttatcaatgttctaagaataataaaatagaaacgaggcaaatggaatacataatgaattattaaaccaagaatatatgtatttttaaatgatgaaaatttaaagatgaataaaatcaggttaaaaatttartaaacccaggatatggaagatggatttaattcatatattcaaatatttatgagtacctaccatgtattaggcactatacttgataaggtgatatagaagtaaacaaatatgcatgacaattacatttggaacagaggaaagaaacaagtaagtgagaaggtactttgttaaaaagcaatacatcaacagaagattctgggaaaatggcagcgtgtaaagcactaggaatctgtctccttacctagacaacaattacaatggcataatctgtcagatgtaactatttttggaaatctgga

SEQ ID NO: 601214 - DNA, 614 bp, Homo sapiens
agtcctatgcatcatttgcctctctaaagccttatgaagtatgtattattattccaaatttagaagacagaaaaattagattcaaggtcacatatactgcttcaccgtaaatttctgattactctattaactgatactttattaatcttataataatatttgtggcttaaccccgcaccaacttgagcaatttgattccagtttaaaaagtaaattatatatttgttttcttgttttatattaaaaatagttttctaatcaatgttcaccatttttgtttgaaatctggaagctatgcacctgtgtatgaacatctatgcatatatcttttgatcccactcttaaactcccctaaccatttccattgcccataaacattaacattttagagtgaaaaatttggtkgtgtaaacattaatgtaataattaactcaacaaaagtaatcagcacatgataaataattggctaaaagtaaaaaaaaaaaaaaaacagtattgttatgtagcctcaaagcaacaccccacaaatggcttgataaatacgtgcaatgaaatgaaactttacaatggaaattctcacagaaatcaccttcaccaacaggctgaatttggca

SEQ ID NO: 601215 - DNA, 585 bp, Homo sapiens
accaaaaactatatgaaatgtcatttatatggcattgtggaaaaggtaaaattacagcaacaggcaagtgatcagtagatgcttctggtcagaggtgactataaagggataaaaggaaactttgtggagttgattgtggtggtggttatgtaacttrtgtgtgtgcaatatatttatatatacatacatacacacagatatctgtggatgacttcacgttgttctctagtgtttctttgttccacacacattcacatctctattctgtttctctttgttcatggaggactaatttgatacatttaattcataggtatgaggcatccttagaatcactattaatattaattataacttttattctggtattaattttgtgtcaattgtttaagtttttattctaccattttttaaatgatattttaaataatttttttagagattttaaagagttttcaagtgttcagcttcttaagtcatagagaacagaagagatttagggagtaatgtatatgtcttacaaagtattttatgttatacttaagttcatggatcacatacaaaggttttaaattagacaaggat

SEQ ID NO: 601216 - DNA, 585 bp, Homo sapiens
accaaaaactatatgaaatgtcatttatatggcattgtggaaaaggtaaaattacagcaacaggcaagtgatcagtagatgcttctggtcagaggtgactataaagggataaaaggaaactttgtggagttgattgtggtggtggttatgtaacttatgtgtgtgcaatatatttatatatacatacatacacacagatatctgtggatgacttcacgttgttctctagtgtttctttgttccacacacattcacatctctattctgtttctctttgttcatggaggactaatttgatacatttaattcataggtatgaggcatccttagaatcactattaatattaattayaacttttattctggtattaattttgtgtcaattgtttaagtttttattctaccattttttaaatgatattttaaataatttttttagagattttaaagagttttcaagtgttcagcttcttaagtcatagagaacagaagagatttagggagtaatgtatatgtcttacaaagtattttatgttatacttaagttcatggatcacatacaaaggttttaaattagacaaggat

SEQ ID NO: 601217 - DNA, 567 bp, Homo sapiens
atatgggagaaaagccacagtcatcttgagtaaattgtagcttattagaaccagtcagggtaatcggaaaatttcaatccaatgtatattagattatgccccccaaggtatcagtgcagctgtccagatccctcattaaaaagacctttagccaactggacttatcagtatttcactgttgtttcctctttgcatggttacatataaatgcttgatttcctcgtacaattggtccttttctttgtgtttccmaatctaacacttattttcaaattactagcagtgtaaatcaagaaaattatcaccctaaaaaaattcctaaaccacaatttatgaacccattaaaatatctataaataattagtaaatacttagattaaaatgactggaatttttatcttcagactcatattttgcgttatttaactgatggctgctgctcaaataaccaggtggcctgtcaaaacaaaataagaatagaactgaaagcaaaatagtaatgtatcatattgatttgcaaacagctgctataaagaggacaaatgaaaacagtgaatagataagcca

SEQ ID NO: 601218 - DNA, 585 bp, Homo sapiens
ctgttcagacaatggatttgttttgaattgcagaggaaatactactttatgcaagtgggtgataaacttatggaacacattgcaacaagctatgtactggtaggatatgtaatgaattttakaaacatttaggctgatttacaaaaggcagatcaataaacagtgtctaaaggaaaatgaagtatcctaactactgaggcctctgcttgctttcagagcccctgttaacaagcaaatattatactaggaggaccatagttataatgtaatatataaattcttgtatttctgtattgtaattatcaatctcctttctcagcaccagcaatatatagtctcttcagaatttattcctccctggatattgagctacgttattattcctcatggctccttgtccagttcatattattctaaatattaaatgtttgggtagtactttatgcctttatgatattagtgcaataggtgatgaaacttaccaaatctgtggtatatctccacaataaaatgaacagacttaagcacaaaagataacatgcatattaatttgctgtattgtgttaaaagtcaccctctgttttc

SEQ ID NO: 601219 - DNA, 553 bp, Homo sapiens
agagtgtgaagaggtttctggcatgagctaacagacagagtctacagaacacttagtattataagaagtggtatgggtaaaaagttcagctggacacaagtgatgaaataatttacatcccaatgtgccagttctggggatgtttgccctcagatccattcccaccttttctttgctatgctgtgtgtagcagggaggataatgggcttcatgcasattggttttcatccaagttgaaccaataggagacactggagaaaactaggaaggtggtaggaagagaaaggcaaagaaagatgtgcatctctgcctctggtggtctctctggcagttgctataccctgggcttcaggttctagtaaatcacaacacccatttgtccttagaaaatagagctagaagatggctttctgctaatctctacctctctctcctttctagtttaccaatttttcttttactttttgtattagtccattttcatactgctgtaaagaactgcctaactgggtaatttgtaaaggaaagaggattaattgactcacagttcagc

SEQ ID NO: 601220 - DNA, 553 bp, Homo sapiens
agagtgtgaagaggtttctggcatgagctaacagacagagtctacagaacacttagtattataagaagtggtatgggtaaaaagttcagctggacacaagtgatgaaataatttacatcccaatgtgccagttctggggatgtttgccctcagatccattcccaccttttctttgctatgctgtgtgtagcagggaggataatgggcttcatgcagattggttttcatccaagttgaaccaataggagacactggagaaaactaggaaggtggtaggaagagaaaggcaaagaaaratgtgcatctctgcctctggtggtctctctggcagttgctataccctgggcttcaggttctagtaaatcacaacacccatttgtccttagaaaatagagctagaagatggctttctgctaatctctacctctctctcctttctagtttaccaatttttcttttactttttgtattagtccattttcatactgctgtaaagaactgcctaactgggtaatttgtaaaggaaagaggattaattgactcacagttcagc

SEQ ID NO: 601221 - DNA, 553 bp, Homo sapiens
agagtgtgaagaggtttctggcatgagctaacagacagagtctacagaacacttagtattataagaagtggtatgggtaaaaagttcagctggacacaagtgatgaaataatttacatcccaatgtgccagttctggggatgtttgccctcagatccattcccaccttttctttgctatgctgtgtgtagcagggaggataatgggcttcatgcagattggttttcatccaagttgaaccaataggagacactggagaaaactaggaaggtggtaggaagagaaaggcaaagaaagatgtgcatctctgcctctggtggtctctctggcagttgctataccctgggcttcaggttctagtaaatcacaacacccatttgtccttagaaaatagagctagaagatggctttctrctaatctctacctctctctcctttctagtttaccaatttttcttttactttttgtattagtccattttcatactgctgtaaagaactgcctaactgggtaatttgtaaaggaaagaggattaattgactcacagttcagc

SEQ ID NO: 601222 - DNA, 654 bp, Homo sapiens
aactcactcactatcacgagaacagtgtgagagaaactgcccccatggtccaattatctccacctggtctctcccttgacacatgggggttgtggagattacaattcaagatgagatttgggtagggacacaaagcctaaccatatcacttgtgtaaaagtttctttctttaaattccatttgttttcaatacacagaaaagtttctcagattattatttaaccagtgcaggctagattccaattaatgtaactaaactagagtttggatttcctatagacaaaaaaagtgccctttaggattatagaaggaagatttttataccttaattatcaaaaattttctaaaacaatcctttacagggtaacatttttagaaacagtgtagttgtacaatttacatgatttaaaattcaccagttttaagtgtaacaagtcaataattttaagtgaattctcacttagcataawatattgaaagttcaatcatgttgcaacaggtatctgcacttcatttcattgccaaataatatattgtatggatatagcacattacttattccattcaatagttggttgacttttggattatttccatattttgactattaggaatactgctatgataaaaatttgcccaaaagtctttgtgtgg

SEQ ID NO: 601223 - DNA, 654 bp, Homo sapiens
aactcactcactatcacgagaacagtgtgagagaaactgcccccatggtccaattatctccacctggtctctcccttgacacatgggggttgtggagattacaattcaagatgagatttgggtagggacacaaagcctaaccatatcacttgtgtaaaagtttctttctttaaattccatttgttttcaatacacagaaaagtttctcagattattatttaaccagtgcaggctagattccaattaatgtaactaaactagagtttggatttcctatagacaaaaaaagtgccctttaggattatagaaggaagatttttataccttaattatcaaaaattttctaaaacaatcctttacagggtaacatttttagaaacagtgtagttgtacaatttacatgatttaaaattcaccagttttaagtgtaacaagtcaataattttaagtgaattctcacttagcataaaatattgaaagttcaatcatgttkcaacaggtatctgcacttcatttcattgccaaataatatattgtatggatatagcacattacttattccattcaatagttggttgacttttggattatttccatattttgactattaggaatactgctatgataaaaatttgcccaaaagtctttgtgtgg

SEQ ID NO: 601224 - DNA, 654 bp, Homo sapiens
aactcactcactatcacgagaacagtgtgagagaaactgcccccatggtccaattatctccacctggtctctcccttgacacatgggggttgtggagattacaattcaagatgagatttgggtagggacacaaagcctaaccatatcacttgtgtaaaagtttctttctttaaattccatttgttttcaatacacagaaaagtttctcagattattatttaaccagtgcaggctagattccaattaatgtaactaaactagagtttggatttcctatagacaaaaaaagtgccctttaggattatagaaggaagatttttataccttaattatcaaaaattttctaaaacaatcctttacagggtaacatttttagaaacagtgtagttgtacaatttacatgatttaaaattcaccagttttaagtgtaacaagtcaataattttaagtgaattctcacttagcataaaatattgaaagttcaatcatgttgcaacaggtatctgcacttcatttcattgccaaataatatattgtatggatatagcacattacttaytccattcaatagttggttgacttttggattatttccatattttgactattaggaatactgctatgataaaaatttgcccaaaagtctttgtgtgg

SEQ ID NO: 601225 - DNA, 567 bp, Homo sapiens
aggtggaacaaggcggggctagtctgcattcccctacacccagtccttcctcagtgttgtcagagtcccccagagagctgaaactccactcccacttggcttcacattacatacctcctagttcacaggactcgcttagaccaagcttccattttgacctggcagcaacaaggtggagtgaagtgttttgggaaggcactatagttggcactstacccctcctccaacttagtatgagcaggatccagatggaacctgagtttctgtcctccaccaggcaataaagtgaaatgaggtgatactggataaatgctttattttccactctgatgtcagcagagcccagagtggactgagcttatacccctactgagtgaatgagacagtgctaattgaaactgcttttactgggaaggtgtcagtgtgattcgggggagaactgttcttttccataatcttcttcattgaggaagtgtgaatcaatgctccacatttataagtatgattttaatggggcctaccaggggcatgaacatttatctccacctgaacctgtatgtaatacct

SEQ ID NO: 601226 - DNA, 567 bp, Homo sapiens
aggtggaacaaggcggggctagtctgcattcccctacacccagtccttcctcagtgttgtcagagtcccccagagagctgaaactccactcccacttggcttcacattacatacctcctagttcacaggactcgcttagaccaagcttccattttgacctggcagcaacaaggtggagtgaagtgttttgggaaggcactatagttggcactgtacccctcctccaacttagtatgagcaggatccagatggaacctgagtttctgtcctccaccaggcaataaagtgaaatgaggtgatactggataaatgctttattttccactctgatgtcagcagagcccagagtggactgagcttatacccctactgagtgaatgagacagtgctaattgaaactgcttttactgggaaggtgtcagtgtgattcgggggagaactgttcttttccataatcttcttcattgmggaagtgtgaatcaatgctccacatttataagtatgattttaatggggcctaccaggggcatgaacatttatctccacctgaacctgtatgtaatacct

SEQ ID NO: 601227 - DNA, 416 bp, Homo sapiens
tggaacaaaacgaagatgcccactctcaccatgcttaccactcctatttcatatagtactggaagccctagccagggmaattaggcaagataaagaaatgaaaggcatccatattggaaaggaaggagttaaatggtctctgtttgcagatgacatgatcttttatatagaacaccctatagactccaccaaaaaattattagaactaataaacaagttcaataaagttgcaggatatatcaacatacaaaaatcagtattgtttctataaattaataacaaactatccaaaaaagaaatcaagaaaacaacctcgtttttaatagctaccaaaatattacttagaaataaatttaactaaggaagtgaaagatttataaaataaaagctataaaacattgatcaaaggaattgaa

SEQ ID NO: 601228 - DNA, 566 bp, Homo sapiens
aatctcacatcctctatttgagattagactgtgatgtaatatcaccatatacrtataagctatatgtgtttttaagaaaagtcactgacctgttataaatggctgtatctttgctttccagcagggatggagctggctccaactgtttttttctatagtccaaaatttattaaaagataaatgacgatggtaatctcataaagacatgcactccacagtaaatctgatagcctctcaataataagatcattagttaattaaaatttttattctgtctataatattttcttaatcttttctatattttttattgttttgtatattcccccattttaaaatgagcatacatttacatttcctttatactcagaaatacattaacattgtaccaatgtactcaaaacatttcagcagtaatgcttgaaacaattacctacaatttatttaatatctgcataggataataatttccagaatatttattggttttactcaaggtgagatataataaaaataacatcggcttgggaaaccaatctacgtgaccttggactaatcacttgact

SEQ ID NO: 601229 - DNA, 566 bp, Homo sapiens
aatctcacatcctctatttgagattagactgtgatgtaatatcaccatatacgtataagctatatgtgtttttaagaaaagtcactgacctgttataaatggctrtatctttgctttccagcagggatggagctggctccaactgtttttttctatagtccaaaatttattaaaagataaatgacgatggtaatctcataaagacatgcactccacagtaaatctgatagcctctcaataataagatcattagttaattaaaatttttattctgtctataatattttcttaatcttttctatattttttattgttttgtatattcccccattttaaaatgagcatacatttacatttcctttatactcagaaatacattaacattgtaccaatgtactcaaaacatttcagcagtaatgcttgaaacaattacctacaatttatttaatatctgcataggataataatttccagaatatttattggttttactcaaggtgagatataataaaaataacatcggcttgggaaaccaatctacgtgaccttggactaatcacttgact

SEQ ID NO: 601230 - DNA, 538 bp, Homo sapiens
tgttcatttaaacaataacctccacgtagccacatatcctgtgtggatgaaaatgtgcttttcataagaggaaatgctagtctcctgttcccctctcccctcagacatcttctttccaaatatcttaccagtgcaggggaattgaaaacaaaacaaaacacaaaaaccttcttctgaaccaatgtctagaaagtttaaagtctgttttatcagagactaggattgcaacccctgctttttattgttttccatttgcttggtagatcttcctccatccctttattttgagcctttgtgtgtctctgcacgtgagatgggtctcctgatacggttactctctgctgttatttgtcttaagctgtgaatgaatcttacaccrttaatagcaataaaatttcttatctagaggacagaattagtttaagtaatttaaaactcagatttttctctttataaaatgcagttacctgcaattcatgataggctatttatgtatcattgttgctcaacagtggatatttagtgagtgcatcttgta

SEQ ID NO: 601231 - DNA, 568 bp, Homo sapiens
tgatttttttaaaatgaagcagatatcctggagctgaaaaatgcaattaggatattgaagaatgcatcagagtctctttagagcagaactgatcaggcagaagaaagaactggtgatattgaagacaggctatttgaaaacacacagaggagaccaaaaagaaaagaaaaaaaatgaagcacacctacaatatttagaaaacagcctcaaatggcaagcctaagtgttagtggccctagaggaagtagagaaagagataggagtagaaagtttatttaaaaagatgtaacagaaaacttccaaaacctagagaaagatgccaatatccaagtacaagaaggttatagaacacttagcagatttaaaccaaagaagactayttcagggcatgtaataatcaaactcccaatgtcaaggataaagaaaggatcctaaaagcagcaagagaaaaaaaaataacaaaatggagctccaatatatctggcagcagactttataatggaaaccttacaggctaggagaaatgacatatttaaagtgccaaaggaaagaaacttttatcctagaa

SEQ ID NO: 601232 - DNA, 597 bp, Homo sapiens
agaccagcctgggcaacatgatgaaaccccgtctctactaaaaatacaaaatttagccgggtgtggtggtgtggtgtctgtagtcccagctacttgggaggatgagatgggaggatcgtgtgaaccctagagttggaggttgcagtgagtggagatcttgccactgaactctagcctggataacagagtgaaaccccgtctcaaaaggaaaagagaaataagcttcagggacatggagggaaacaatacatactggtcatgattgcatcccactaataaaatcccatttggacacagcatatgatccttttaatgtgctgttgaattcagtttgcgagtattttgttgagaattttttcttctatatttatcaaagatatagacccayagttgttgtttttttcttaacttttattttaagttcaggggtacatgtgcaggtttgttgtataggtaaacttgtgtcatgggggtttgctgtacagattatctgatcacccaggtattaagcctagtacacattactagtttttcttgatcatctcactcctcccactctccactctccactctccaacaggccccagtatgtattgt

SEQ ID NO: 601233 - DNA, 508 bp, Homo sapiens
aatgatctcggtgaaaagacagggcttactttccatgaaaatgtcagacatcatgggattaatttcattttatataaatatattgttaaagattatattctgcataaaagctaaaayacatttatttctaaacgtaaaagtaaatagtaaataaacaaatcactaaacattctagatttataatgttcttattttatagctagaatggtaatttaaaatgtttacaatcaatgatctcaaagtctttatagttgatcacaattataaaaataccagtaccaaggttcctcatatcattaagcaggagctagaaaggaagatacgtgaaaataaagatcagcttgaagggaatgatatatgtaaatgtttttaaccatttgaaactttgacagaagataatatttatttcattttggtgccaaaaatttttctttgcaaagtcaaaaaaataggctgtacacataaatactgtaatattacagtatgtgctacctattttcctatggca

SEQ ID NO: 601234 - DNA, 498 bp, Homo sapiens
ctcctgccctgtggctctgtagtttacagccctcgtggctgctttcatgggctggygttgagtgcctgtggcttttccaagtgcatggtaaaagctgtcagtagatccactattctggggtctggaaggcggtagccctcttctcagagatccactaggtaatgccccaatgggactcagtgtgggggctctgaccccaaatttcccctcagcattgccctagtagagattctccatgagggctccaccactgcaggagacttctggctgaacatccaggtgtttccatacatcctctgaaatctaggtagaggcacccaaacctcaactcttgtcttttgtgcacctgcaggctcaccactgcatgaaagccactagggcttggagcttgcactctctgaaacaatgccctgagctgtaccttggccccttttagccaaagctggaactggagtggctgggacacagggcaccaaggcccaaagcttcatagagcag

SEQ ID NO: 601235 - DNA, 609 bp, Homo sapiens
ttggcttcattagctgaaaaagaccacgaacagttaaattatgtctgttatataacttaacggatgattctaaaaaaatctgttaaagacaatgacaataaaatttattttaaaatyttattcataattcaaaataaagctttgcaagtttattttttcatatttaaacatttatgaataccataaatgttatagtaaataagggttaaaaatttaacattaacactattttgcagtgataatgcaaacataaatttggtagaacagtgacatgatgaacagttttcttagtcttactaaattaaaaactaagaatagaaatatactatagttttattacagtgcatacttattgtttaagtccatgtaagcaagctacaaaaccaataaatatagacgctgtagctttcaaatttagaaatgttttttaagcactcacaattctaagatacttttaatatagctatatggaattgcaaattttgtgcaaacagacaaaaaaagtaaagtagaagtacttcagagtgaaaatacacacttttttctttttgctgcctattatcaacttgatttcagaaattatttgactcaaggactattttattaatc

SEQ ID NO: 601236 - DNA, 609 bp, Homo sapiens
ttggcttcattagctgaaaaagaccacgaacagttaaattatgtctgttatataacttaacggatgattctaaaaaaatctgttaaagacaatgacaataaaatttattttaaaattttattcataattcaaaataaagctttgcaagtttattttttcatatttaaacatttatgaataccataaatgttatagtaaataagggttaaaaatttaacattaacactattttgcagtgataatgcaaacataaatttggtagaacagtgacatgatgaacagttttcttagtcttactaaattaaaaactaagaatagaaatatactatagttttattacagtgcatacttattgtttaagtscatgtaagcaagctacaaaaccaataaatatagacgctgtagctttcaaatttagaaatgttttttaagcactcacaattctaagatacttttaatatagctatatggaattgcaaattttgtgcaaacagacaaaaaaagtaaagtagaagtacttcagagtgaaaatacacacttttttctttttgctgcctattatcaacttgatttcagaaattatttgactcaaggactattttattaatc

SEQ ID NO: 601237 - DNA, 556 bp, Homo sapiens
ggattttatgagtcctttaagttttgtccaaagtcattggtaaattgtaaatcattgtattattgaagttatttaatgaaaagaaagttaaaactttagatttaataaactgtgattttcaaaaataaaactaaaatacagtaagatatctaaatgtatctttaaaaaagcaaaggagttcaaacaaaataatgagagcaaagtataagagacttaaaaatcaaagaaatgtgacttgcaagatttcctgtactattggagtaggtggaaaaatctgagtttacaagaatgtctagaagctaactatgagctactattatagtacaactacaaaagacatgtggyagtgagtgaggtggagatcggtttagaagtttctaggaggatgttgcctgtgcacagctactgcttttgtgagtttatagccaagtgctggtggtaagtctacgttgcctaggagtgccaccttcaggtaaactggtccagcagtaagcagagtatttgaacacagaggggaaaagcaatgaaatatgaaatcttcagcataacaccacgg

SEQ ID NO: 601238 - DNA, 556 bp, Homo sapiens
ggattttatgagtcctttaagttttgtccaaagtcattggtaaattgtaaatcattgtattattgaagttatttaatgaaaagaaagttaaaactttagatttaataaactgtgattttcaaaaataaaactaaaatacagtaagatatctaaatgtatctttaaaaaagcaaaggagttcaaacaaaataatgagagcaaagtataagagacttaaaaatcaaagaaatgtgacttgcaagatttcctgtactattggagtaggtggaaaaatctgagtttacaagaatgtctagaagctaactatgagctactattatagtacaactacaaaagacatgtggcagtgagtgaggtggagatcggtttagaagtttctaggaggatgttgcctgtgcacagctactgcttttgtgagtttatagccaagtgctggtggtaagtctacgttgcctaggagtgccaccttcaggtaaactggtccagcagtaagsagagtatttgaacacagaggggaaaagcaatgaaatatgaaatcttcagcataacaccacgg

SEQ ID NO: 601239 - DNA, 341 bp, Homo sapiens
aaacttgtacatcaatttcagaagaaatgacaatttactacattgagcctttcaatccatgaatatggtatggctttttatttatttaaatctacattaatattstttatcagtggttgcaaattatttttttctgttgatttccatgtgttcattaattgtatatagaaatataattgcttttgtatataagtcttctatcatgaaactttgctgaacacacttattagttctatttgctatttactatattactcggtattttctctgaagatgatcatgctatctccttgtatggatagttttattactttctttgatgtgtatcactttatttttgt

SEQ ID NO: 601240 - DNA, 593 bp, Homo sapiens
tgattcctttatctccctacattgtgtcattgttttataagccctgtgagttttacacattcatgtgttttcatgatggtgaatatacatttttcactttcatgtttgaaatgattttgggcatttcttgtagggctagtctaktagcgatgaattttctcaacattttcttgtctctgaaagttgttttttttcactcatttatgaagattttacttgctggaaaaaattcttgactgacaggttttgtttttgtttttgtgtttttcccagcactttaaaagtaccattctggctgggcgcagtggctcatgcctgtaatcccagcactttgcggggccgaggcagttggatcatgaggtcaggtgatcaagaccatcctggctaacacggtgaaaccctgtctctactaaaaatacaaaaaattagctgggcatgatgacgggtgcctgtagtcccagctacttgggaggctgaagaaggagaatggcatgaacccaggaggcggaggttgcagtgagccgagatcatgccactgcactgcagcctgggcgacaaagcaagactctgtctcaaaaagaaaaaaaaagtac

SEQ ID NO: 601241 - DNA, 593 bp, Homo sapiens
tgattcctttatctccctacattgtgtcattgttttataagccctgtgagttttacacattcatgtgttttcatgatggtgaatatacatttttcactttcatgtttgaaatgattttgggcatttcttgtagggctagtctattagcgatgaattttctcaacattttcttgtctctgaaagttgttttttttcactcatttatgaagattttacttgctggaaaaaattcttgactgacaggttttgtttttgtttttgtgtttttcccagcactttaaaagtaccattctggctgggcgcagtggctcatgcctgtaatcccagcactttgcggggccgaggcagttggatcatgaggtcaggtgatcamgaccatcctggctaacacggtgaaaccctgtctctactaaaaatacaaaaaattagctgggcatgatgacgggtgcctgtagtcccagctacttgggaggctgaagaaggagaatggcatgaacccaggaggcggaggttgcagtgagccgagatcatgccactgcactgcagcctgggcgacaaagcaagactctgtctcaaaaagaaaaaaaaagtac

SEQ ID NO: 601242 - DNA, 593 bp, Homo sapiens
tgattcctttatctccctacattgtgtcattgttttataagccctgtgagttttacacattcatgtgttttcatgatggtgaatatacatttttcactttcatgtttgaaatgattttgggcatttcttgtagggctagtctattagcgatgaattttctcaacattttcttgtctctgaaagttgttttttttcactcatttatgaagattttacttgctggaaaaaattcttgactgacaggttttgtttttgtttttgtgtttttcccagcactttaaaagtaccattctggctgggcgcagtggctcatgcctgtaatcccagcactttgcggggccgaggcagttggatcatgaggtcaggtgatcaagaccatcctggctaacacggtgaaacccygtctctactaaaaatacaaaaaattagctgggcatgatgacgggtgcctgtagtcccagctacttgggaggctgaagaaggagaatggcatgaacccaggaggcggaggttgcagtgagccgagatcatgccactgcactgcagcctgggcgacaaagcaagactctgtctcaaaaagaaaaaaaaagtac

SEQ ID NO: 601243 - DNA, 593 bp, Homo sapiens
tggttaggtatatttctaactactttattttttgcagctattatgaaaggggttgagttctttrtttgattcttatattggttgctgttgatgtataacagagctactgattgtgtacattaattttgtatcctgaaacgatgctgaattcctttatcagttctaggagttttttggaggagtctttaaggttttctagttacaccatcacatcatcagcaaacagcaacagtttgacttcctctttactgatttggatgctctttatttctttcttttgtctgattgctctggctaggacttccagtactatgttgaatagaagtgacagtgggcttccttgtcttgttccagttctcaagtggagtgcttttaacttttccctatttagtattatgctggctgtgggtttgtaacagatggtttttattacattaaggtatgtcccttctatgccaattttgccaaggattttaatcataaagggatgctggattctgtcaaatgggttttctgcatctattgaggtgatcatatgatttttgcttttaattctgttcatgtggtgtatcacacttattgacttgcatatg

SEQ ID NO: 601244 - DNA, 645 bp, Homo sapiens
taatactggcttcacagaataatttagggaagattctccctttctctatcttgtggaatagtgtgaatagaattggtaccaattattttttgamtgtatgctataattaagctgtgaatctgtctggtcctggacttggttttgttagcaattttttaattaccattttaatcttgttgcttgttattgatcttttcagagtttctatttcttcctggttggagggttgtatatttccaggaatttatatgtgcatggataaattcatgtacatatagtttatgtggatgaaggtgttcataatagccatgaatgatctgttgtatttctgtggtatctgttgtaatatctcccatttcatttgtaactgagctttctggaacttctctcttcttggtttacattgctaatggtctctcaattttatttatcttttcaaagaaccagcttattgttttattttttgtgtttttttattttaatttctgatgggtttgggtttggtttgttcttgttcctctagtttcttgaggtgtgagtttagattgtctagttgtgctctttcagactttttgatataggcatttaaggctgtgaactttcctcttagcaccaccttcggtgtatcccagaggttttaatagg

SEQ ID NO: 601245 - DNA, 645 bp, Homo sapiens
taatactggcttcacagaataatttagggaagattctccctttctctatcttgtggaatagtgtgaatagaattggtaccaattattttttgactgtatgctataattaagctgtgaatctgtctggtcctggacttggttttgttagcaattttttaattaccattttaatcttgttgcttgttattgatcttttcagagtttctatttcttcctggttggagggttgtatatttccaggaatttatatgtgcatggataaattcatgtacatatagtttatgtggatgaaggtgttcataatagccatgaatgatctgttgtatttctgtggtatctgttgtaatatctcccatttcatttgtaactgagctttytggaacttctctcttcttggtttacattgctaatggtctctcaattttatttatcttttcaaagaaccagcttattgttttattttttgtgtttttttattttaatttctgatgggtttgggtttggtttgttcttgttcctctagtttcttgaggtgtgagtttagattgtctagttgtgctctttcagactttttgatataggcatttaaggctgtgaactttcctcttagcaccaccttcggtgtatcccagaggttttaatagg

SEQ ID NO: 601246 - DNA, 513 bp, Homo sapiens
tcaaattatgctacaagtctgtagtaagcaraacagtatgttacttctacaaacacagacaaatagatcaatggaacagcatagagaaataaagccacatatttacaaccaactgatctttgacaaaatcacaggaactggggaaatgacagccttttaacaagtggtgctgggaaaatttgattgccatatgtaaaagaatgaaatggacccctatctctcattacatacaaaaactaactcaagatgaattaatgatttaaatttaagacctaacggctttgaaatactagaagaaaacctagggaaaactttttgggcattagtctagcaagaaaaaaatctatgaataagaccttgtgttggtctatttgtgttgttattaagaaatacctgagattggataaattataaatagaggaggtttctttgcttcattgttctgcagactagacaggaaacatagtgccagcatagtgccacatcacattttatcacatagatatgtacaat

SEQ ID NO: 601247 - DNA, 513 bp, Homo sapiens
tcaaattatgctacaagtctgtagtaagcagaacagtatgttacttctacaaacacagacaaatagatcaatggaacagcatagagaaataaagccacatatttacaaccaactgatctttgacaaaatcacaggaactggggaaatgacagccttttaacaagtggtgctgggaaaatttgattgccatatgtaaaagaatgaaatggacccctatctctcattacatacaaaaactaactcaagatgaattaatgatttaaatttaagacctaacggctttgaaatactagaagaaaacctagggaaaactttttgggcattagtctagcaagaaaaaaatctatgaataagaccttgtgttggtctatttgtgttgttatwaagaaatacctgagattggataaattataaatagaggaggtttctttgcttcattgttctgcagactagacaggaaacatagtgccagcatagtgccacatcacattttatcacatagatatgtacaat

SEQ ID NO: 601248 - DNA, 553 bp, Homo sapiens
aagagattccattaatgagactgggatattgttaagtgaactgataaaaataacttggagaaaatttggcrtcaactgccaaatcaaagagaaagtttacaaagcagaagctattcaaactaacattttcaggatattaaaaatattttcatgatattaaaattattttgaataacattggtacctcttattactggaaaattataacattagtgtatcgccttaatattaaaaacagctatcagtcaaatatcagaactcgtctaatcccaggaagatgaaataaagatgaataaaattagttcctctgggcctgtctctaggtgataatgaatgagaagataagagctaaatggcttttatgaactagaggaggataatcacaaggaggataaactagtggaggatgagtgctttatagaaaaggagaggtacacactgaagttaggcaaaattatatatgacagtgaatactatcagatggccacctgtgagggagtatattacatctcattaaatgaatggcatctctgggtgattggaattaatattt

SEQ ID NO: 601249 - DNA, 579 bp, Homo sapiens
gtctacaaaacaaattgaaacatggtgaaattaaattcatatatgtatatataaytgatcattaattatttttatgcgagattattaggagttatgataacaaaatgtaatatattgggcagggcacggtggctcacacctgtaatcccagcactttgggaggccgaggcggggggatcatttgaggtcaggagtttgagaccagcctgaccaacatggtgaaaacccatctcggctaaatacaaaaaaaattagctgggcgtggtgtcgcatgcctgtaaccctggttacttgggaggctgagacaggagaatcactcgaacctgggaagcagaagttgcagtgagccaagattgcaccactgcactccagcctgggcaacagagtgaaactccatctgaagaaaaaaaaaaagtaatatctcctgtctggtatactgaggaaccaatcagcaagtaaagtgctatattccaactgtgattcctaggacactctgtaatggaggacatgaaaatggctaaagaatttgtcttttaatatcaaaaccattgtacagaaaaaagaataattaatttttat

SEQ ID NO: 601250 - DNA, 579 bp, Homo sapiens
gtctacaaaacaaattgaaacatggtgaaattaaattcatatatgtatatataactgatcattaattatttttatgcgagattattaggagttatgataacaaaatgtaatatattgggcagggcacggtggctcacacctgtaatcccagcactttgggaggccgaggcggggggatcatttgaggtcaggagtttgagaccagcctgaccaacatggtgaaaacccatctcggctaaatacaaaaaaaattagctgggcgtggtgtcgcatgcctgtaaccctggttacttgggaggctgagacaggagaatcactcgaacctgggaagcagaagttgcagtgagccaagattgcaccactgcactccagcctgggcaacagagtgaaactccatctgaagaaaaaaaaaaagtaatatctcctgtctggtatactgaggaaccaatcagcaagtaaagtgctatattccaactgtgattcctaggacactctgtaatgkaggacatgaaaatggctaaagaatttgtcttttaatatcaaaaccattgtacagaaaaaagaataattaatttttat

SEQ ID NO: 601251 - DNA, 602 bp, Homo sapiens
atttacagccgagttctatcagaggtacaaagaacagccgatactattcctactaaaactattcgaaaaaactgagcaggggagactcttccctaactcattctatgaagccaacatcatcctgatgccacaacctggcaaagacaaaatgaaaaaagaaaagtacaagccaatatttctgatgagcatatttaaaaaatcctcaacaaaatacttgcaaactgaattcaatagcacatcaaaaggttaattcaccacgatcaagtagatttaattcctgaaatgcaaggttgattaaacatacacatatcaataaatgtgcttcatcaaagaaactgaattaaaaacaaaaaccacatgatgatctcaatagaygcaaaaaagctttgctaaaaaacaacattccttcatataaaacctcaagaaactagacatagacagaacatatgtcaaaataataagagccatctatgacaaaccgactgccaacatcgtatggaatgggcaaaaactggaatattacccttgagaaactgaacaagccaaggatgcctattctcaccacttttgttaaacataatactggacatgctagccacaac

SEQ ID NO: 601252 - DNA, 602 bp, Homo sapiens
atttacagccgagttctatcagaggtacaaagaacagccgatactattcctactaaaactattcgaaaaaactgagcaggggagactcttccctaactcattctatgaagccaacatcatcctgatgccacaacctggcaaagacaaaatgaaaaaagaaaagtacaagccaatatttctgatgagcatatttaaaaaatcctcaacaaaatacttgcaaactgaattcaatagcacatcaaaaggttaattcaccacgatcaagtagatttaattcctgaaatgcaaggttgattaaacatacacatatcaataaatgtgcttcatcaaagaaactgaattaaaaacaaaaaccacatgatgatctcaatagatgcaaaaaagctttgctaaaaaacaacattccttcatataaaacctcaagaaactagacatagacagaacatatgtcaaaataataagagccatctatgacaaaccgactgccaacatcrtatggaatgggcaaaaactggaatattacccttgagaaactgaacaagccaaggatgcctattctcaccacttttgttaaacataatactggacatgctagccacaac

SEQ ID NO: 601253 - DNA, 611 bp, Homo sapiens
cacattatcaaacttcaaactatactatcaggatacagtaatcaaaacagcatggtactggtatagaaacagacacatagaccaatggaacagaattgataacccagaaataaagctacacaaatacagccaccaaatattcaactaagttgccaaaaataagcaatgaggaaaggactttctattcaacaaatggtgctgggatacttgtgtagccatatgcagaagaataacactggatccatatctttcacaatatataaaaattaacagatgatggattaaagaattaaatgtaagacatcaacctaaaaaaaccctagcagaaaacccaggaaccattctgaatatcagccacgggaaaggatttatgactaagtcctcaaaagcaattgcaacaaaagcaaaaattgacaagttgggacacaattaaactaaagaggtcctgcacagaaaaagaaacttatcaacagrgtaaacaggcaacctacagaatgggagaaaatattcacaaactatgtatgcatctaacagaggtctaatatccagaatctatctgaaacttaagcaaatcaaccagcaaaaaccaaataaccccattaaaaaatgtg

SEQ ID NO: 601254 - DNA, 380 bp, Homo sapiens
tctggagatttctcagagaacctaaaacaaaacaactattcaacccatcaatgtaaagaaaacaaattattctgcagaaaaagacccatgcattcgcacgatcactggagcactgtatatggtagctagacatggaatcaatctaggtgtccataaatggttgcttggataaagaaaatgtggcatatatayaccttagaatagtatgcagccataataaagaataaaatcatgtcctttgtggcaacaaggatgcagccagaggccattttcataactaaattaatgaaggaaaaggaaaagaaaatctttttgcatcaatcttttgtgtggaaatgtgtcttcatttgtataggaatggaatcagtaggtagtatgtc

SEQ ID NO: 601255 - DNA, 536 bp, Homo sapiens
agaataaagtaaaaaatggattaaagacttaaatgtaagacatgacactgtaaatctactagaagaaaacgtagggggaaagttccatgacaggtctgtaacagtgacttytcagatataatcccagaagcacaggcaacaaaagcaaaaatagacaaatataattgtattcaactaaaaagtttcagggcagcaaaagaaacaatagagtgaagagataatgcacagattgggagaaaatatttgcaaattgtacatcagataagggggctaatattcaaaatatacaaggacacaaattactcagtaacaagagaacaaataaacctatttaaaaatgtacaaaaaacctgaatagacatttctcaaaagaagacagaagtagttaacagatacaagaaaaaaattctcaatatcgctaatcattagagaaatgcaaatcaaaaccacaatgaaatatcacctcatacctacctgttcaattggatcaaaaaaacaaaaggtaagtgttggcgaggatgtggagaaaaagaaac

SEQ ID NO: 601256 - DNA, 536 bp, Homo sapiens
agaataaagtaaaaaatggattaaagacttaaatgtaagacatgacactgtaaatctactagaagaaaacgtagggggaaagttccatgacaggtctgtaacagtgacttctcagatataatcccagaagcacaggcaacaaaagcaaaaatagacaaatataattgtattcaactaaaaagtttcagggcagcaaaagaaacaatagagtgaagagataatgcacagattgggagaaaatatttgcaaattgtacatcagataagggggctaatattcaaaatatacaaggacacaaattactcmgtaacaagagaacaaataaacctatttaaaaatgtacaaaaaacctgaatagacatttctcaaaagaagacagaagtagttaacagatacaagaaaaaaattctcaatatcgctaatcattagagaaatgcaaatcaaaaccacaatgaaatatcacctcatacctacctgttcaattggatcaaaaaaacaaaaggtaagtgttggcgaggatgtggagaaaaagaaac

SEQ ID NO: 601257 - DNA, 577 bp, Homo sapiens
ttcagcccaactcttttctttggcaaaatcttgtggatcatatttggaacttctgtagacatttcaaactcacagatccatgtgttttaaatgaagattgcctgcatagsgtatggaacaagatttacctttatcactggatcactacaccacaaaatgaacattatttgaagccacaccttttttgtgaggttgacaaaacaaggcagccagatttgaaaggttatgaattctgcaatggaacttgattcatggcatctaataaagatatttgaatgctcctgccaagttcagcaacaagacttgccagaacatagaatctcaagtaagcctacccttaatcttctgtgagaaaagaaaacaggcccaacagcagcagcggctggatttgagaattcatccctgcatttttttctcttaataaaggtcagctataccactgagaaacaacgtctcagtaacacctgatactgttcagaacattcagcaagaagagaggccttctggtcatttaggaatgtatctacattgtatgaattacctcctttttatagttgtttatcactaaatacagaca

SEQ ID NO: 601258 - DNA, 577 bp, Homo sapiens
ttcagcccaactcttttctttggcaaaatcttgtggatcatatttggaacttctgtagacatttcaaactcacagatccatgtgttttaaatgaagattgcctgcatagcstatggaacaagatttacctttatcactggatcactacaccacaaaatgaacattatttgaagccacaccttttttgtgaggttgacaaaacaaggcagccagatttgaaaggttatgaattctgcaatggaacttgattcatggcatctaataaagatatttgaatgctcctgccaagttcagcaacaagacttgccagaacatagaatctcaagtaagcctacccttaatcttctgtgagaaaagaaaacaggcccaacagcagcagcggctggatttgagaattcatccctgcatttttttctcttaataaaggtcagctataccactgagaaacaacgtctcagtaacacctgatactgttcagaacattcagcaagaagagaggccttctggtcatttaggaatgtatctacattgtatgaattacctcctttttatagttgtttatcactaaatacagaca

SEQ ID NO: 601259 - DNA, 571 bp, Homo sapiens
agcaaaaatcctaacaaatacagttattaataataggaagaagtttgtaagaaataaaaatatggagaatctaggatttattatctagctattggagactacaggtagacagtctcatgaatagtccccagtaggaatcagaagtccatgggaaacagtgatgaagcagctaaataagtacacctagaccatttcaagataggcaggtctgtgcaaacctacaccaatgtccaaggaagctgagaggcctaagaaagaggctgacatatcctgtttcttagaaacaaacatttaatagggacttaaggaacagaagccatgtctgtgtctttggtggtggcaagacaagatggcrgatcctggcaccattatgtctctgatccagggcttacacaccatagtgaaattagtggctcagatggaatttgtaggccaattgaagtgtgataacatcaaggttgtttgacctaaggacaggatttaaagttaagtaccttctcttacacaaggaacaatagataaatggaaattttagaggccttccagatattggagttaatcagttaagcca

SEQ ID NO: 601260 - DNA, 579 bp, Homo sapiens
ttaaacatttactttaattggacatttatgtgaatgtttctctagtatacatatctaacaatagaattgccctccaattggcaattgtacactctgaccagtgatttatgaaaatactcattttcctataaacttaccattaatatctgaggctgttaaatatttgcttatctcctgagtggaaaaagtmgtatctcactgctattttaatttgtacattttaatgattggtaggaaaagctctttaaaaccatctgtatctgagagggatgggcaactgggtggaggaagaataataggcagattcaacaatattggtaataatctaattcattagttcagtgttgggttcacgtgtttattttatgacacatgaaaaagaatatatgtaatgtattaatgtaagttcaaatattatgtgttaaaataattaggccatatgtacagtatatgtatatcaactatgtaatcttttaagcaaatacttgtaagtaaatgtctgcacagtaaaaagataaatatcaaatggtgaatagtgggtaatactgagtggctgaattagatgatttatgtcccttt

SEQ ID NO: 601261 - DNA, 532 bp, Homo sapiens
caggctggtctcaaattcctaggctcaagygattctcctgcctcagcctcccaaagtgatgggattgcaggcatgagccagtacacctggctgaattttatctttcctaccagccttttcatatgagctgagcctgcagctgtgcctaagcatagccctttgaacttgatagactgtgagcttggaaagactcctttgcagtctgagtcctctggcaaatacactagcttggttaagtggacttttctttgattgatgttggctgcatctagaaagcaggattgccaccactccttgaagcaccctatgattagagtgtctgagtgctgcttctgctctgctgaggctgttgacaaattgcctgaaaagaccccctgtcagaggatgatgggctcgtctgcagcagggccacttgcagcccaattgcttccaagattaaacctttccaaagcggtctgcactgcccggtacacagttgggccactggtttaagattacagatgaaggtactgaattggatctcatttaaaaa

SEQ ID NO: 601262 - DNA, 532 bp, Homo sapiens
caggctggtctcaaattcctaggctcaagcgattctcctgcctcagcctcccaaagtgatgggattgcaggcatgagccagtacacctggctgaattttatctttcctaccagccttttcatatgagctgagcctgcagctgtgcctaagcatagccctttgaacttgatagactgygagcttggaaagactcctttgcagtctgagtcctctggcaaatacactagcttggttaagtggacttttctttgattgatgttggctgcatctagaaagcaggattgccaccactccttgaagcaccctatgattagagtgtctgagtgctgcttctgctctgctgaggctgttgacaaattgcctgaaaagaccccctgtcagaggatgatgggctcgtctgcagcagggccacttgcagcccaattgcttccaagattaaacctttccaaagcggtctgcactgcccggtacacagttgggccactggtttaagattacagatgaaggtactgaattggatctcatttaaaaa

SEQ ID NO: 601263 - DNA, 366 bp, Homo sapiens
ccagctcgttttcgtagagatgagatttagttatgtcacccaggccgatctcaaactcctgggctaaactgatcatctcacctcagcctctcaagtagctgggactacaggtgcacaccaccatgtccggctaatrtttattttaatttttttctagaggtgggatctcactatgttgttcaggctactttcaaattttgggcttcaagtgtttctcctgccttgatctcccagtgttgggattatgggtgggagccaccatgcccagcaatcacaaggatctttatgaaagaaagagggtaggacagttagaattggagcaggagatgtggtgatggaagcagagatcagagagggagatttgaa

SEQ ID NO: 601264 - DNA, 538 bp, Homo sapiens
ctaaaaacattttgtacatgtttggtggacctactcattttctgttggaattgagtggaactgctgggtcataggatgtatatttgttttgttttggtatatattgcattttccggaatgattgtaacagcttacactcctatcagcagtataataggttcctctcctatcttccttccttcctccctccctccctctctccctctctctcatgattcttcatcattcaacttgagcccttgcatacagaaaaaatgttgatgaatttgcataaaaaccgacaagctgctgggcttggtggctcacgcctgtaatcccagcactttgagaggctgaggcaggtggatcacttgaggccaggagttcgagaccagcctggccaacatggtgaaactccatgtctactaaaaataccaraattagctgggtgtggtggtacatgcctgtaatcccagctacttaggaggctgaggcaggagaatcgcttgaacctgggaggcagaggttgcagtgagccgagatcatgccactgcactgc

SEQ ID NO: 601265 - DNA, 557 bp, Homo sapiens
ttagtgtcaaactaagaagagcaaattctaagaaaaaaggaagaaaaatattgtctgctattataaagaggtagagctgaatgaagactaagcctttagatactaaattgagggcgtagtggctggcaaatgcctgtaatctcagcgctttgggaggcctatgtgggaggatgccttgagcccaggagtttgaggctgcagtgaggtatgagccactgcacwccagcctgggcgagagtgagaccctgtctcaaaacagcgataacaataagatacaaaattgagaaactgttacttgatttacagtatatattctgtccagcagtgatggaataacaaggactggatttaccttgctattttaagcaactagaaaactggacaatatacgaaataccaatttgtaggaattaggtaacaggcaatgcaagactgtggtcactgaaaggtgggaaacaaacttactgagctctgcggtttccccaatttattatctggagctgcttttcaggctacagagcggggatggggaagccaaatagagcctggtatcttag

SEQ ID NO: 601266 - DNA, 245 bp, Homo sapiens
ctgagatcacagcactgcactccagcctgggcaacagagtgaaactcygcaacaacaacaacaacaacagtaaaaaagtaagttctatttgccactgaagtcatttctggaattaaaacaataaaatgacatttctactaaaatgtttttctagctagaggtgacaagtgtggccataagtccttcatggaaaagcctggctctgagctgcagtcctggcactttccattgcccctgaagccccc

SEQ ID NO: 601267 - DNA, 286 bp, Homo sapiens
cctgcctcagcctcctgagtagctgggattacagaaatgcgccaccatacctggctaatttttgtgtttttagcagagatggggtttcaccaagttggtcaggctggtcttgaactcctgaactcaggtgacccacccgccttggcctttcaatgtgctggaatgacaggcatgagccaccatacccggcctgatgtgatgattgagtttcytactatatctgtgttcctgcagaattttagtggctgaagaaaatacactagtgttgattttctttttcatgaaa

SEQ ID NO: 601268 - DNA, 558 bp, Homo sapiens
tcagggtttttgtacacaatgataggaattattgttacattacagggtgactctgcgaactccttttgaaaaaactctcatcatatcaggactgttttactagctgttagaccaccattgtactggctactataacatttcttggtattctttcttgacttgaactaattatttcctacttgccacactaaaggtaagagattacatgtacttcctgttatatttcactgcattaagacattctttatcagcatttcttaaaatcatagagagtcattggccaatatctttgtgggacttgcagttrgtttcttagctttttaagttatgttatttaatggacctctttttcttttttcttttttttttttttaaatttcactggaaatgtcacatttgcaatcctactttatgcatgtttccatggcttttttgagccgcctgtagaggactacactacaagtttaattctgcaggtttcttcgcaaagagtcaaactgtatgaattttaatactctactcttataaaacatctccttttgtatttttttcctacaa

SEQ ID NO: 601269 - DNA, 558 bp, Homo sapiens
tcagggtttttgtacacaatgataggaattattgttacattacagggtgactctgcgaactccttttgaaaaaactctcatcatatcaggactgttttactagctgttagaccaccattgtactggctactataacatttcttggtattctttcttgacttgaactaattatttcctacttgccacactaaaggtaagagattacatgtacttcctgttatatttcactgcattaagacattctttatcagcatttcttaaaatcatagagagtcattggccaatatctttgtgggacttgcagttggtttcttagctttttaagttatgttatttaatggacctctttttcttttttcttttttttttttttaaatttcactggaaatgtcacatttgcaatcctactttatgcatgtttccatggcttttttgagccgcctgtagaggactacactacaagtttaattctgcaggtttcttcgmaaagagtcaaactgtatgaattttaatactctactcttataaaacatctccttttgtatttttttcctacaa

SEQ ID NO: 601270 - DNA, 548 bp, Homo sapiens
ttttttttttgagacagattagggctgtaggaatagtgttaccaggaataacttgtggattgtttactactgcagtcagctgtgattttccaaatagggagatgcctgtttttctcacataagagtaattgtgctggtaggctcaggctgacattggttcagttgctcaaacatggtaagactggcttccctgtgcttctcttcacttttctttctggtgcacggtgatggagggagctcctgtcatcatgtctccatccaagcaggacataaataagtaaagaaaatgcagcatgagccctgcctgyaaccatgatcaggaaaagcaagaggcgttttttgaatcctagcacaattttgcataagtctcttggttttaaaaaagatgaattttaaaatagtaaaataatataaagcacaaattctgaggccaaagtgataggatttaaatctgtgctctgccacttaggaaaattacttaaattctctgttatttaggttgcaccctgtaaaatgggaggaggaaaataatatttgactcatagttt

SEQ ID NO: 601271 - DNA, 436 bp, Homo sapiens
ggattacaggcatgagtcaccatgcctggcctgatttgcttctgactagtgtcctgcatttattaaagaccctagatcactcctggtgttctaaaaataaccaagcccacctatctgccttctagacatgggctggagggcctgccacgagcatccttgggtattcccaatagccctagttaacccaggctgacttacaattcctccctctcttaaccaaaattatgttgaatttttgtgttccttgtcttttaactgaaaagctcttgtttatttgttatttaatttaattttatttttttgagacagactctcgctctgttgcccagggtggagtgcagtggcatgatcttggctgactgcaacctccgcctccyggattccagcgattctcctgcctctgcctctagaacagctggtgctacaggagcctgcc

SEQ ID NO: 601272 - DNA, 331 bp, Homo sapiens
gacgacccaaatgtataagggtaaatagatctgcttttcctttgctcaggtgtgctcttgccattgttccatctgtgattgagcaccctttccgcagaaagtaaagattgccttgctgagagatcttttgtcttcatgctgacttttcttcatggcaccaattatmtatttctaacaattctggtatttctaacaaccctaaagaaaacacctacagcccctacccaacaaccaataggcaacatccaggaagattgtgaccccatagtactcagcctatgaggaaccaggggaggtacctgcagacgaagggatacattgcttgttgaaa

SEQ ID NO: 601273 - DNA, 310 bp, Homo sapiens
cggccctgtttggcatttttaatgccctattaccattatttgcacttattcttttgcagaatttcagcaccaggtggtgaggatgttccttctggccatgcacgtgcaggacacacaacaggcacttgataagtgtgtgctgagcaaaactcacttcttccttctggccacattcatcacaggtgtactcaaagcagcaagagcttgccccagctcaraagtgcttagttgctaattagctgttttcacaaagatactgaaattggagacatcagtgttcatcctttagccatagcattggaaaaatatg

SEQ ID NO: 601274 - DNA, 364 bp, Homo sapiens
cacctgtttgttgcctgatatagaggagatgcctgatcatgaattccatgatacagttttaagagatgctatgtatggttcactcagtgaatctcactttcttacrtaagcacatgtgcaagtcatttttttctttttttttgagaaggagtcttcttgctctgtcgcccaggctggagtacagtggcatgatcttgggtcactgcaacctccacctccgggttcaagtgattctcctgcttcagcctcctgagtagctggggctacaggcatgtaccaccatgcccggctaattttttgtatttttagtagagaagggttttcaccatgttggccaggctggtctcgaactcctgacctcagg

SEQ ID NO: 601275 - DNA, 364 bp, Homo sapiens
cacctgtttgttgcctgatatagaggagatgcctgatcatgaattccatgatacagttttaagagatgctatgtatggttcactcagtgaatctcactttcttacgtaagcacatgtgcaagtcatttttttctttttttttgagaaggagtcttcttgctctgtcgcccaggctggagtacagtggcatgatcttgggtcactgcaacctccacctccgggttcaagtgattctcctgcttcagcctcctgagtagctggggctacaggcatgyaccaccatgcccggctaattttttgtatttttagtagagaagggttttcaccatgttggccaggctggtctcgaactcctgacctcagg

SEQ ID NO: 601276 - DNA, 577 bp, Homo sapiens
gtatgagaggttgggtattgtggttcatgcctacaatccaagcatgttgggaggctgaggtgggtggatcacctgaggtcaggagttcgagaccagcctgaycaacatggtgaaaccccatctctactaaaaatacaaaaattagctggacatagtggcaggtgccagtaatcccaccgacttgggaggctgaagcaggacaatcgcttgaacctgggaggtggaggtttcagtgatctgagaccgcaccactgcactccagcctgcataacatgagcgaaactctgtctcaaaaacagaacagtaagagaaaactgaagctgagtcccactcattgtatttactttcctaaataaaacaacattataaaaaacactactcagtaatataatttagttgaaggggaaaaaacagacttatcaaatttttttgcaaaaaagctgatccatcattttccacaattcagtgattctggcataccatacttccttccccatcaaaatcacaggaatacaagttttctcaatctaatgaatttaataacttgggttattaaatattattataaaataggcag

SEQ ID NO: 601277 - DNA, 580 bp, Homo sapiens
gtcgttcctctggttacttttatagatgaacacatattccttccagtccttgtgatagaaaatggtaattttaaatggcattgaaactgaagtattaaataaaaaaatatctttctatacaacaggagacagtaagtatgtcctggcaatttctcaaagattttagttcacaggtctgagaaaaattctattagctttaattatttatcagcagtcaatttagattactgttcttgacctatttttacagtgtatgggccacccagaaatgaaataaatgaatagtctttttctacaatggctgattttctgaaataatagaaatctggtttaaaggaggaataaaaccccaaacatgtagttaccacaatatataacccaccatgctgtttttgtagttggataaaatgaacatctwtgtgagttttttggttattaaataagagtatcttgaaagggttaaactcactcctgctgtaatttcttcccatttaaatgtctttgtgccatttaagacacgttctgtgtcctggcagaaagtctccaatgctgatgctgtggctttcacgtggtgcctggt

SEQ ID NO: 601278 - DNA, 580 bp, Homo sapiens
gtcgttcctctggttacttttatagatgaacacatattccttccagtccttgtgatagaaaatggtaattttaaatggcattgaaactgaagtattaaataaaaaaatatctttctatacaacaggagacagtaagtatgtcctggcaatttctcaaagattttagttcacaggtctgagaaaaattctattagctttaattatttatcagcagtcaatttagattactgttcttgacctatttttacagtgtatgggccacccagaaatgaaataaatgaatagtctttttctacaatggctgattttctgaaataatagaaatctggtttaaaggaggaataaaaccccaaacatgtagttaccacaatatataacccaccatgctgtttttgtagttggataaaatgaacatctttgtgagttttttggttattaaataagagtatcttgaaagggwtaaactcactcctgctgtaatttcttcccatttaaatgtctttgtgccatttaagacacgttctgtgtcctggcagaaagtctccaatgctgatgctgtggctttcacgtggtgcctggt

SEQ ID NO: 601279 - DNA, 580 bp, Homo sapiens
gtcgttcctctggttacttttatagatgaacacatattccttccagtccttgtgatagaaaatggtaattttaaatggcattgaaactgaagtattaaataaaaaaatatctttctatacaacaggagacagtaagtatgtcctggcaatttctcaaagattttagttcacaggtctgagaaaaattctattagctttaattatttatcagcagtcaatttagattactgttcttgacctatttttacagtgtatgggccacccagaaatgaaataaatgaatagtctttttctacaatggctgattttctgaaataatagaaatctggtttaaaggaggaataaaaccccaaacatgtagttaccacaatatataacccaccatgctgtttttgtagttggataaaatgaacatctttgtgagttttttggttattaaataagagtatcttgaaagggttaaactcactcctgctgtaatttcttcccatttaaatgtctttgtgcyatttaagacacgttctgtgtcctggcagaaagtctccaatgctgatgctgtggctttcacgtggtgcctggt

SEQ ID NO: 601280 - DNA, 562 bp, Homo sapiens
ttgggtagagagttttaggtggtttgcaatgctcttccagttcctatttctttgcttctttgatcttctgcctggttgttctattcattattgaaagtgggtaatcacatctcccacttttattggtaaatctatttttgtcctatattttytcagttttttgcctcaggtatttcagaactctgttattaggtgcctaagtgtttataattgccatatcttcttgatgaattgatccttttatcatcgtaaaatgtccttatttgccctagtaacaacttttgtcttaaagtctttttttttttttttttttttttgagatggagtcttgctctgttacctgggctggagtgcagtggcacgatctcagctcactgcaacatctgactcccaggttcaagcgattctcctgcctcagcctcctgagtagctgggattacaggtgcatgccaccacacctggctaatttttttttgtatttttagtggagacggggtttcaccatgttggccaggctggtcttgaactcctgatgacctcaggtgacccgcctgcctcgggc

SEQ ID NO: 601281 - DNA, 545 bp, Homo sapiens
cttgcctcttcctctccagtcaactccatcatcaacctttctgggctcttctttcttgggttcaatttctctgttccctctgttctcccatgaagccagattcaaagttagtgcaagcgtacggcctttataagctccaagccagtcctcaacagaggtcattccaatcccttactctcacacacctgctatggttagaattgggataaaggggctaggagagaccctgyttggaccttgatccaaaatgacaggtttcagtacagtgttccagaaattctcttaatggtttattgggcaccaactcaataaataaggtagccctaggatgccttagcacctcttattggttcttgtaaccctccttactactctataaataattacttcattagatgcctttcagtatatttgtagaggattttcttttctgattcctgtctccaactctcactgggcttcctctctttctctctcaggctgccggggatggtggcttcccactgctgctacttccccagtgcaacaatagaccttgttgttcc

SEQ ID NO: 601282 - DNA, 629 bp, Homo sapiens
ttccactccattaaaaattatttgtcattacaaattattattttaaaggctatggaacaatatgtgtcccacagcataattgtaaaaccacatacagttgtcccttggtatacagagagaattagttccagccacctatctctgcatataacaaaatccatgcatactcacgtttcgcagtcatccctctggaacccacatatagaaaaagtccaaatatgagttgggcatagaggcaagcacctatagtctcagcaacttgggaggctgaggtgggaggattgcttgagcctgggaggttgagactgmagacagctgtgatagcaccaccacactccagcctggacaactgagcaagaccttgtcttggggggggaaaaaaaaaacaaaacaggttagaaattctaatgagatctgttgggtaaaattccatataagcgaaaaataaatgaagcaaattgtgataaatcagtacaacggactttttggagtctctgacaataaaggtaagaaaaatgcaaaacacagagatagatggtaaaaaaaagaaattagggaagcattgtgtatgtttaataagaagacgctggccatgtttgtgcagcagcagtatgtcacaatacgatata

SEQ ID NO: 601283 - DNA, 594 bp, Homo sapiens
tatacaacagtttatttgccttttgtttttttgtaaggaacatatatactaaaagttctccttgctgtcaaaagaatatgtgtgagtaagttatttgaacttttctgtttttctacttttcctgccatcatcccacagcctttagacattttttatttttttagaaaattgaacaagtgcttgttgtcgtggctcatacctctaggatgggaggcaggggtagaagggycacctgaggccaggagtttgacaacagcctggccaataaagtgagaccccatgtctacaaaacaatttaaaaattagccaggtgtcatcatgtatacctacagtcccagctactcaggaggctgaggcaggaggatccttagcccaggagttcaaagctgcagcaagctgtgatggcaccactgtactccagcctgggtgacagggtgagaccccatctcctaaaagaaaaaagaaagaaagaaaatagattaagtagcaagttgtatgtggcttacttggaatatttctaaactagaagttctcaatctttcggggtctagcatccttttacattttttaactttattgaagatctcttaagac

SEQ ID NO: 601284 - DNA, 557 bp, Homo sapiens
agggcacatagacggctctgtcaagtgatgggctgagaggccatgtgccatttctcattgtgggtgttgtcagtcctcagagcagttgttcactctctgctctgagcacccccatatctcctctacagcactcaacattttattttagttttgctatctatatagatatgtgtctgtctatctcctgaccatctcgctatctctccatctgtctatcatctctgtatctctcctattgattttgtttcactggacaaccctgataatacacagccaatccataaactgagacaaaraaagctcgggctggatgccatagcttgagcctgtaattccagcatgtttgggaggctgaggtgagaggatcacttgaggccaggagtttgagaccagtctggacaacatagcaagaaataaaatatctccaagaaaataaaaataaaaattagccaagcccggtagtgcatgcctgtagtcccagctactcagaaggctgaggtgggaagattgctggtgtccaggagtttgaggttgcagtgagctgtgattgcactaca

SEQ ID NO: 601285 - DNA, 557 bp, Homo sapiens
agggcacatagacggctctgtcaagtgatgggctgagaggccatgtgccatttctcattgtgggtgttgtcagtcctcagagcagttgttcactctctgctctgagcacccccatatctcctctacagcactcaacattttattttagttttgctatctatatagatatgtgtctgtctatctcctgaccatctcgctatctctccatctgtctatcatctctgtatctctcctattgattttgtttcactggacaaccctgataatacacagccaatccataaactgagacaaaaaaagctcgggctggatgccatagcttgagcctgtaattccagcatktttgggaggctgaggtgagaggatcacttgaggccaggagtttgagaccagtctggacaacatagcaagaaataaaatatctccaagaaaataaaaataaaaattagccaagcccggtagtgcatgcctgtagtcccagctactcagaaggctgaggtgggaagattgctggtgtccaggagtttgaggttgcagtgagctgtgattgcactaca

SEQ ID NO: 601286 - DNA, 606 bp, Homo sapiens
gcgtactattaataaataccttctctcatatgagtcaggagggtcaggttccattcactcatgcacattctgggcrggactgttcagggcagcctccacatctcgaattgacgcccacatttccctctctgggtgtcaatttccttatctgggagagggggtgataacagtgataaccctccccctaatctggaaggtgaaagcccaggagaagggaggcaatgcttagagcgggagcagtgcaggggcaggggtggagtggggggcagtgccgggaggcaggaggactgctattgtggttactgttgaaacttccaggagaagttaatagcctggcatggtgggtggtcagaaccccagaatctttggacccagaagcttcaggggcctcccagccaccaggtgataccattaccctccacattctacctaaaatgataccagggctgaaagggtccatgtcacctgcccgtagtcacagagggggcccatccagcctctgcagatgggcttagaggttaaaacagcccaggtagaccaggcgtggtggctcacacctgtaatcccagcactttgggaggctgacatgggaggatcacttgagcc

SEQ ID NO: 601287 - DNA, 589 bp, Homo sapiens
tggctgcaatgagttatgatcatgctatggcactccagcctgggtgacagagcgagaccctgtctctaaccattccccacctcaaaaaaaaaacccaggaattacatgcaaaggatgcacgtgcttctggtgaggaagtctctaggcctgggctccccctagagccgcccatcgtcctgacgtgcactcaggcggtgcggcagggctgggcggaagggaggctcatgccgcacacagggctattttcttggtgggatgaggctttgccaaggaagtcctgcttccagggacaggggtctctaaggcccagagcagagttgaggaaaaaagacctcaaatctgcaggaggacacacagggcgggtggaccccagctccagctgsggcgttggtcagggaggggtactggcagcatgagaagtgaagctgccagaagaggaacccacttttactcactctgctgggggccgcccacctgtgctttcccagggagacaggggctgggcagccccagctgggagttgagaccaccttctgggtgaccccagccttgtctcagcccaggcctccggtgcttctggggctcacaa

SEQ ID NO: 601288 - DNA, 570 bp, Homo sapiens
tttccactgtagttgcatgaaaatgagaatgcactgagctcatttaagatgtactaagacatacttgcagtttcctataagttataggggcatgtagttctaagaactcacgggggagagcagccaaagcatccttggttaccccagtcccatagaaggtgtctctaagaagcagatgctggcaggtcggtgaaggggcacaagcaccacttgctttatgaggcccctgtgrccaaggaaagaaggtaggaaccagctgttaaagtagaactccgcaaaacaggtcttactccacttgagtctgttctccagcctttgggattcttggtattcacaggcctacacttctctgctttctctttcccacaccaactggcaaaagttgttgtgtgatgaagatgatccaaatgtcagacttgggctcaggacacctggggtctggtcccagcaactctatttgatggctgtgtggctttgatgggtcatttaacacctctgaacttcacattcctcagctctaaaatggaaatgaggatagcaccaaccacataaagttattgtacggtttcc

SEQ ID NO: 601289 - DNA, 470 bp, Homo sapiens
tcttttcttcctcagtttatccagaggacccaaatagaacattgtaattactctcaggacttgtggttaatttttaktttattgagttttttgtgttgcttgaggtgagcatatttaattaagcaccctcacaaccaccagtttattaatgttgataacaaaaatgatgataaggtactgttctaagtgccttccatgttttaactcattttattctcataaccatcctatagaatgaggaatatattttatccattccattaaaaagaatggagaacttagaccttgatgccatttaatgtgctctgccaggggccagctgtgggttgtgataaagaacctctcattctttcccctcacacagtagcacctttgtccctgactttccaccatgcttttatttaacaaggtatagcaaacacttagagtaggtactggtttagatattttatctgtattgactgatttta

SEQ ID NO: 601290 - DNA, 507 bp, Homo sapiens
acttagaccttgatgccatttaatgtgctctgccaggggccagctgtgggttgtgataaagaacctctcattctttcccctcacacagtagcacctttgtccctgactttccaccatgcttttatttaacaaggtatagcaaacacttagagtaggtactggtttagatattttatctgtattgactgattttatcttcctaaaactctatgagagcatatacaattgtgattgccattttatagatgaggaaacagagacagagagcagttgagtaacttgcccaaggtcacacagctagtaagtggcaagctggggtttgtttgctggaagcctggctcgagagtctactcccttaactgttttgctattctacatgtaaaggaattgattaaagaagaaaaaaaagactcactatgacatggaaaggcaracattccatttgtaaccctagcccctcatctaggcataggcagaggctcaggatgagacattctgttttgggaa

SEQ ID NO: 601291 - DNA, 652 bp, Homo sapiens
taaatatttaaattaataaaagtcaactaaattttatgtttctggaatcagctttgatataaattgttttagttgaagtatgtgacaaaaatcatgtcactatgtagctgcaaaaatcatatgtagttgataaacaactacatctatttagtcatctcttttaggtaattgtgaatattctttgctactacatcaatctcaacaaatggtagtttcttacaggatagttggaaggtataatccaaaatatcaatgatatttttcattctgttaagttaaaatcaattggtctaattcacacttttaaaataaattttacttatgtatcactctgtaatattaygatttggttatatataaaatactggttcactaaataataccaatattcaaaatgttgatccatttcattatacaatatttttaaaattcacattcattgatatcaccccaaatctcagcagaaaagttttaaataatggaagctgtcaagctcacagaagcagatgtaagttttccaaagttctaatttttttcttgaaagtttgaattttatcattggtaacaattattgtcagctgtttttcttgccgttgacaagttcactgcatttattttcaagatagtgtctgccaaatatacctcagtattc

SEQ ID NO: 601292 - DNA, 564 bp, Homo sapiens
ttggagaatagagagagggaaggaacggggaagggaaaaaraagcagagactgtctgtgggctgcctctatgggtttctgttctagtacacacatttcttcacaataaatctgttttttgttaaatatggtagagtgaaattctgaatctctgatccttgtcattaggtaagcctaattaggcttttctattaggccacaatctcctatatttcatctttgaatttggaaagcccagcattgcattgtacccactactaatcaggcattcactggcaaaattttgaatacaaatatcatctttctgttccaccttcctcataaatgagtcttctaatagtttatgaggagattatagggaaaaaaattcaatgtggttgatatcggatagattttttccttgagatagaaatacagtatgcccccttatctgccagggatttgttccgttactcccagtgaattactgaaatcatggatagtactgaatcctatagatactatggtttttcctgtacacacatacctatgataaagtttaacttataaattaggtatgaaacca

SEQ ID NO: 601293 - DNA, 540 bp, Homo sapiens
gatttataaggggaggctcatttatggattaaatattttatcctttacttagcagtcttgcataaatttttaaacttgggatacaaaaaaaaagatagatcatagcctaaattttactaatcacactgggtagccttcttagtaacactgtctattcttttctgttccaaatctcaggggcaagataatttgctcatttcttgtgcctagcactttaggaacttgaagcttcttttcaacaaaaaagagaacatggaaattcacattcagtgtattctagaccaagtaaagccaaggaggtcagcaaaaacaggacgtgtctactaaaatcacagacctggtagctaaggagcaggmaaccgagcataaccaagcagaggtattcaatattatttctgcctttatcatctaaagatattattcacatgggcaacatgctatgtccagtaattgtgcgtattctctcatttatatggaagtttctgtgctagctgaaatggtaccgtctccttttccccagtgaagccagcttaccagttg

SEQ ID NO: 601294 - DNA, 668 bp, Homo sapiens
acattttcagccttggaaagctaagagtgcagaacgaaagccctaataattgaggtaaagagatgtgtgtcatgtctaattctgccccttttctgttttttccatgcgaagcttaagtggtttatggaaggcatccaatacgaagtcacaattaaggttgctgtggttacagtgagaaagaagaaaatactgttgatcttttcttccaagccccattcttacaacagtaattttattacacagtatttcagaatatcatgttatagctaatcttctgccagggaagttttctgtttggggcttccaaagtaaatataaaatacaatataatggatgtctctcccaaaaactttacctttaaatcttgatttaagattcagtacataatatctgataaaaatgagcttagagtgatgtcgccatagataagaaacagtgcgtaaacacatgaatgtggttgctgggctttgccactcttactcagactgcgctaatactacacaaattctctctcataaccagtacagcttcttgtctaaaaggtttagtttttacaacttttaaggaagctcattcatatcttcttctaaacctactggaaattttagctttgtttcttctaagcatcgtsttaactttttgttaagaagttcctacttaatggggca

SEQ ID NO: 601295 - DNA, 581 bp, Homo sapiens
taacccaaggggatattaaatagggcacatgtacaaagctatacatttttaggtaagaagaagaggattcttccctttcagcacataaacatgtttggcccagggcagagcaagagaatgacacacttggtctttttctcataaacaaaggtcttgctatttcacctccaaagcaattttctaggctatgtttttactatttttgaartgagaaagaaagatttctgatgtaaccctgaaagcaggagaaccatttttttgctgcaagcatagtgtattatcaatttggtgtgaggcctggagagcacggaagtgatcacttcttagtgcagaggggagaaagttctgagtttgcacaaattagtagttttcattgtttatagaagatgatcaaaaattcataaatttcagaaaaacatggaatcagaaattgatgttttattttcttctatgttactttagctggatattttcagccattttcagaatggtttatattattaattttatattcatagaatcattgaccttaagaagctttgctctaatagaaacttcattctgtttttccatccaatcag

SEQ ID NO: 601296 - DNA, 624 bp, Homo sapiens
attctcctaaccactctgcagtattgccattattcactgtcctaccttctaacaattagaattcagtttgataaaaacatatactattgtgacctctatgtatgccaaagttctgcaaacttctccaacttcagtgtaacttaatgaagtagaacaaatcagtttatccatgttatgttctattcagaatttgtggcattcactgttgttatcttagctttgtttactctctgttgttcttactgaaactgcttctcatcttcagacagttytcagcagcagtaaaatcaatctttgtgagggcatactattaaaaaaaagtggcaggtagatacagaaagatgtatttaaagtacatgatattgtgcatcctttctcttctaccttcaaagatagaatccagcgtatagggattttcgccatgtgaaagagagatatattctgacagtgtatgcagaaataaaattctactaaagtacccattttcttctcctaattttttaagtgtaaactactataaaattcaaatggaattaagtttttttttgtctgaagaacatattcaatatgcaattttagttcttcagtttcccattatcgggctgggtattctgcatatttctc

SEQ ID NO: 601297 - DNA, 487 bp, Homo sapiens
gactattggaaaagatttgttcttatttttctctatgttagtaaaaaaaattaccctggataaacgtttgagaaactgtatgttgaaaataatgtaatatgattttatgcacatattaagcttgattttgctagcagattawattttggtaaacagaaaaggtaagaagatgtttcaggttagaaaaatgaaatgttttaataaacagaatcaagacaaatttttggcacatttgtaggattatgagagggtgaaactatttgagcaaaaaatacatattatagattagtgggcatgaagaaccatcagcaaaataaagccaggattatggaaggcttggaaaaccagacagtctaggcatgttggattatctggattatttagatactcctattgcagtaaggcatagagtcaaatataaagttgccatgactttatatttcttaaaagatgtactaatgatagataggtgtacttagttatgact

SEQ ID NO: 601298 - DNA, 470 bp, Homo sapiens
tgttcttatttttctctatgttagtaaaaaaaattaccctggataaacgtttgagaaactgtatgttgaaaataatgtaatatgattttatgcacatattaagcttgattttgctagcagattatattttggtaaacagaaaaggtaagaagatgtttcaggttagaaaaatgaaatgttttaataaacagaatcaagacaaatttttggcacatttgtaggattatgagagggtgaaactatttgagcaaaaartacatattatagattagtgggcatgaagaaccatcagcaaaataaagccaggattatggaaggcttggaaaaccagacagtctaggcatgttggattatctggattatttagatactcctattgcagtaaggcatagagtcaaatataaagttgccatgactttatatttcttaaaagatgtactaatgatagataggtgtacttagttatgact

SEQ ID NO: 601299 - DNA, 539 bp, Homo sapiens
acaacactccactacatagttactgctcagagagagaaatcactttaggtgcctctcttttgtgctccttaagcaccatgagcctctatctacaataacatgcatttaattagagctcaatttgagcagaagtcctatctgtattttccccatcattgtacccttagcacagatcacacagatgcttgattaaaacatagttggacaaatggaagatgggaatgagtgtgycactgactgccttgcctgtgtgctctaatgcctagtactctgttagcacagagaaggtgcttagtaagagatatgtgttggccagaagaggaagacaactgtgagggcacgagaaaagacaatccattcattattctcattgccattagaataaagttagtaatacctatggctgttaaagttcatcttggttcaaaccttgcttgtctatcctgcttcatcttttgcctcttaccagacatctgctttccctgcacaccactgcaaactgcataactgcaggcctaatcattcaagctctctcttcg

SEQ ID NO: 601300 - DNA, 569 bp, Homo sapiens
tgataaacatctatggaaattgattttatggctgaggtggggaataaagcaggatgtagcawagttctcaggtttgtggcttagaaatccaaaatggaagatattgctatttactgagacaaaaatttggggcatgtctaaagaaaatatacgtgagtttaggctggcatatattggatgtgagctatctttggggtactcaaggagaagtgtatagcaatcatttattgtggaggaagcaatagaagctaacatttaggatttctgtcttcagagttaaagtgcgttgcactcatgccagctaaccctctaggtcagtttcatgaccttaggaaaataacttgacatcttaaaatcttatgtttattagccagaggctttaaaataactagcttaataattgcttcaaagattatgacaatctcaaatataatttttttatggtctaccttcccaactgaattttctgttctttaaggatagagactacatctcttttaattctatatgttagtacctagaactgtgcctgagacatagtaagaactcagtaaatactgagtcagttg

SEQ ID NO: 601301 - DNA, 603 bp, Homo sapiens
tctaatgcattcctctttgatgcttttaagtatacaggagttttcattcttgcaacaacctggtcgctccaatgttcttatctcactaaatccttgaatatgtcccattccattagacactctcaaaacatcactcacataaggcttttgtgtgcttatgaggtaagaaacaataatcatagatcaaatagtaatatgcataaacaatagcaatcagaatataaggcaytcttattttaagattttcttttttagccatgttttctactcactggcaggtcattttgctgtctggctggtcattttcctgctggggtctctattctctctccacatccatatatcccaattaacatattatatgaagctatttttttaatctctatttcccctcgcttgactaaaccatccccaaataatttttatcttagcaaaaacaaaaacaaaaaactaagatttttaaggtatattccaaggcaaagatagctttctttctgaaaggaccctttaaatatcctattacaaaaacagtttagtctaaatattgtctttaatctcaaataaattgacgaattacttagcaggaggcactagagacttaga

SEQ ID NO: 601302 - DNA, 634 bp, Homo sapiens
tttatagctctggattcagaaaaactatattactccctctttgcgttattaaatgctgatttgggtacctttatggaccttcattttttcatctctaagtgggaaatcatgacaactcatctgcattttttttaaaagctactgaattgttccctctgttctcgtccaaatcccaaccaaggaaayatccagtattctaacagcaaatccaagctttttttcactcctcactgaaaattcttaaacccaaatccaaggtcttagggattacagttaaagctatctttgtattttggaggttgcatactttatttttagccatttcctgtctctaggttatgttccagttattttaaacatctcttgtattatctctgccattcataagcatgaatgcatataattgggtgacagagcaaaatactgattctctctcttggctgggaaactctgcctatattactgggtaatcttgcagctaagaggtattttgtatcatctgtatattgttactttgtcttcattaattttatttgaacacataacacatgccaagcattctgagaggtatttccagatggatttaaaatttatctaccataagaagttatatggtcctccaaataatagaaaa

SEQ ID NO: 601303 - DNA, 595 bp, Homo sapiens
atttgcataagtaacaagaagctgaatgttaatccccaagacaatagtgaaaatgtctccagggcatgtcagagacctttgtggcagcccctctcatcgcaggcccagaggtagaggaggaaaaagtgttttcatgggccgggcccagggtccttctgctatgtrcagtctagggacttggtgccctacgtcccagctacaccagctgtgattaaaaggggccaaagttcagctcaggttgttgcttcagagggtggaagcctgaagccttggcagcttccacatgctgttgagcctgtgggtgcacagaagtcaagaattgaggtttgggaccttctgcctagatttcacaggatgtatggaaatgcctggatgcccaggcagaagttttctgcaggggtggggtcctcatggagaacctctgctatggcagtgcagaaaaaaatgtggggtcaatctctactggggaaccaccattgcttgcctccagaccccagaatggtagatccactgacaccttgcactgtacacctggaaaagccacaggcactcaacactggcccatgaaagcagccaggaaggaggctgtacctgt

SEQ ID NO: 601304 - DNA, 595 bp, Homo sapiens
atttgcataagtaacaagaagctgaatgttaatccccaagacaatagtgaaaatgtctccagggcatgtcagagacctttgtggcagcccctctcatcgcaggcccagaggtagaggaggaaaaagtgttttcatgggccgggcccagggtccttctgctatgtacagtctagggacttggtgccctacgtcccagctacaccagctgtgattaaaaggggccaaagttcagctcaggttgttgcttcagagggtggaagcctgaagccttggcagcttccacatgctgttgagcctgtgggtgcacagaagtcaasaattgaggtttgggaccttctgcctagatttcacaggatgtatggaaatgcctggatgcccaggcagaagttttctgcaggggtggggtcctcatggagaacctctgctatggcagtgcagaaaaaaatgtggggtcaatctctactggggaaccaccattgcttgcctccagaccccagaatggtagatccactgacaccttgcactgtacacctggaaaagccacaggcactcaacactggcccatgaaagcagccaggaaggaggctgtacctgt

SEQ ID NO: 601305 - DNA, 595 bp, Homo sapiens
atttgcataagtaacaagaagctgaatgttaatccccaagacaatagtgaaaatgtctccagggcatgtcagagacctttgtggcagcccctctcatcgcaggcccagaggtagaggaggaaaaagtgttttcatgggccgggcccagggtccttctgctatgtacagtctagggacttggtgccctacgtcccagctacaccagctgtgattaaaaggggccaaagttcagctcaggttgttgcttcagagggtggaagcctgaagccttggcagcttccacatgctgttgagcctgtgggtgcacagaagtcaagaattgaggtttgggaccttctgcctagatttcacaggatgtatggaaatgcctggatgcccaggcagaagttttctgcaggggtggggtcctcatggagaacctstgctatggcagtgcagaaaaaaatgtggggtcaatctctactggggaaccaccattgcttgcctccagaccccagaatggtagatccactgacaccttgcactgtacacctggaaaagccacaggcactcaacactggcccatgaaagcagccaggaaggaggctgtacctgt

SEQ ID NO: 601306 - DNA, 549 bp, Homo sapiens
agctgaatgttaatccccaagacaatagtgaaaatgtctccagggcatgtcagagacctttgtggcagcccctctcatcgcaggcccagaggtagaggaggaaaaagtgttttcatgggccgggcccagggtccttctgctatgtacagtctagggacttggtgccctacgtcccagctacaccagctgtgattaaaaggggccaaagttcagctcaggttgttgcttcagagggtggaagcctgaagccttggcagcttccacatgctgttgagcctgtgggtgcacagaagtcaagaattgaggtttgggaccttctgcctagatttcacaggatgtatggaaatgcctggatgcccaggcagaagttttctgcaggggtggggtcctcatggagaacctctgctayggcagtgcagaaaaaaatgtggggtcaatctctactggggaaccaccattgcttgcctccagaccccagaatggtagatccactgacaccttgcactgtacacctggaaaagccacaggcactcaacactggcccatgaa

SEQ ID NO: 601307 - DNA, 438 bp, Homo sapiens
aatatagtttggtggttagaatatcttgatttggtcatggttttgcttgttcattcagtcaccaaaatctagcctgttaagtaccaagtagtgcattcagcccaaagtttaagtgttagatgtaccacatactaactgtaataatcttagartaagtattttctaattctcaagactattcagcaagtctaatgagataattaatattaaaatgcaactcacactcacagagaagcaaaacagccagaggaagatgtctttaacatttcctaaatagttattgaataccaactccatgctatgcattattctagtccttagcagtgatacactagaagttccatagattccataacttttgcacactaaggaaacttattatctcttaaactgtggctaggaattatgcttgtagatttaaaaaatccaaattatgta

SEQ ID NO: 601308 - DNA, 533 bp, Homo sapiens
cattattatttccaccatttcaagatgatgaaactgggtctttcagagtttaaatgacttaacaaaggtcacacagccaataagtattcaaaccaaagaggctgattccagaggcaatgatttttaacaatgatgctctcttgaatgaattgaggtatgagaaaagagtagggagaacttcttggcatgcatatggtgacttggaaaaaaacataaatacttattcactatctgaagaagaaatgcaacaaattgcaggcagaataattctgaggtggctgatatcctctgatgggaggatgattatccttgattgacctgtaaatgtaagagctgagaacatcagatttagccaaaaagtaaaattcccaaaatcttggctatatatttctaatttcaaagtcttctacctgaattcaaacctaactaggaaatataatgtgtatcaaaggcacaagtgtttcartagtgcataagaatagggctttctgaagaaagtgccagagattcaggttctacattttccacttcat

SEQ ID NO: 601309 - DNA, 567 bp, Homo sapiens
gggctctgctctctggaaagttccattcaaaaagagaaaaaacaatatatataaatgtataattatatactgagataacctgtatgaaagaaaaaatatggggttataaacctataaaacagaggaacatgatcatatctatttggtcaggaaaggctgttatattagctatgatgagrttcagttgcatatgtaagtatcacgaaataagagtgacagaaatgagaaagaagtttactactcttttataaaaaagactactgaatataggtgttccaaggtcatgcacagaagctgcaagttgacaaaggtccatactccttctcttttgtttctgccattttaagcatgtgcttccactttataaacaaagatggctggttgagccccagcaatcaggtttgcattccagttagcaagtagaaggaaagctttatgcaacctgttcccttacattagcaggtgaacacttagtcatacagccaaccatagccatcccatttcacgtgaccacaccagcttcccttcagttttaagttcccttacaattgaagggaagctggtgtg

SEQ ID NO: 601310 - DNA, 598 bp, Homo sapiens
atttaagacctggttcaacatctacctctcaaaacaagtcttccaaaaaaataaaaataacccccccaacccaaattaccatgattatttccatataatgcaaaattaatcatttatttatgtactcatttttacacttgttaatcatgtgttaaaaagaaatgattgctggctgggtgtggtggcttacacctgtaatcccagggagtgggaggccgaggcgtgtgggtaacctgaggtcaggagtttgagaccagcctgaccaacaaggagaaatcccatctctactaaaaatacaaaattagctgggcattgtgtcatatgcctgtwgtcacagctacttgggaggctgaggcaggagaatcacttgaacccaggaggcagaggttgtggtgagcccagatcgtgccattgcactccagcctgggcaacaagagcaaaactccatctcaaaaaaaaaaaaaaaagaaaagaaaagaaaaaaaaaaatgattgctaaccaattagagtgcaaaaatttaaagtaaagggtcaatattttttattttttataaagtgctaagaatagtactaagtgtacaacagacattactaatat

SEQ ID NO: 601311 - DNA, 344 bp, Homo sapiens
taaaataagttagtttgtcataccctctaagaaagcatgtttctaaacatgaaagattgaatgggtatgtggcctagttgttgaaaaaatccttttgcagggagaaaataaaggtcacagaaaggaaaaatggtatcctgaaggcaaacgacatcaatgtcattcccaataaataaaagtgaataggcatgagttatacaactttatctctctctctctatatatatrtgtgtgtgtgtgtgtgtgtgtgtatgtgtgtatagtatatcaatctatatatgtatacttagatagatagatttttttcttttaaaacaacttataatattgtgaagaggatagtt

SEQ ID NO: 601312 - DNA, 605 bp, Homo sapiens
atttgtctcttgttcaaagcaaaataaaatatctgtcttctgctaagtactgataaagatcttatccattatttacatgttaaaataagttagtttgtcataccctctaagaaagcatgtttctaaacatgaaagattgaatgggtatgtggcctagttgttgaaaaaatccttttgcagggagaaaataaaggtcacagaaaggaaaaatggtatcctgaaggcaaacgacatcaatgtcattcccaataaataaaagtgaataggcatgagttatacaactttatctctctctctctatatatatatgtgtgtgtgtgtgtgtgtgtgtatgtgtgtatagtatatcaatctatatatgtatacttagatagatagatttttttcttttaaaacaacttataatattgtgaagaggatagttctttcttggctgtgctataccatgatggttattttatacttacgttttctgaagtttcaatgattgtgcttattttataacattttgtagagtggaaaacattatgaayatttcagagtgcataagggcttagctaatctaggggttcagtagtacacattaatttagtgtctcccattgt

SEQ ID NO: 601313 - DNA, 568 bp, Homo sapiens
  misc_feature 559, 560, 561, 562, 563, 564, 565, 566, 567, 568: n = A,T,C or G
tgcttattttataacattttgtagagtggaaaacattatgaacatttcagagtgcataagggcttagctaatctaggggttcagtagtacacattaatttagtgtctcccattgttaaggagctatctagaacatactgccgggagctatgtaacagtcattttctttagccctaagtatctaaggtatctaggtatttagcccaatagtatctagggttacttccattatttaagaataaagcaatgaatgaagctattgtttttgcctccaagttagaaaactgaaagtcagattaaattatacataatctaaatcaatttcaagtttttaaaataattttctcctttttaaaattaaaaaaaaawttttttgagacggagtcttgttctgtctgtcacccagatgggagtgcagtagcctgatctcactgcagcctctgccttttgggttcaaagggttctcctgcttcagcctagcgagtagctgagatcacaggcatgcgccagcatgcccaactaattttgttttctagtagatacagggtttccacaaagtnnnnnnnnnn

SEQ ID NO: 601314 - DNA, 604 bp, Homo sapiens
tgacttatttaataaatgtcctgtaagagcctatgtgtcaggcagaaaaccagactctctctcagagaatacttcttcagatcttaaaattttggtctaaatattttaactgagcttaaatgtgttcaaaaatttgcctttactgcctttcaacatcatgtaaccctagatttataaacacagaaaagcatggaatagaagaaaaaggtcgtatttggaatcrcagagatgtaagtctatttctcagctctagtacaggtgcctctgattctattaagatgggaataagttattaatgaacatacaagcttaaatttataaaatttagagaaataaatctatctgaaaacagctgataatttttaatctattgaaacttctgatcagggaagaatagatatcaacaaatcaccttttatgcaaaagactttctgcccacgttttaaatcaatgagctttgttcctaaatgaaaaactaattgtgtatgtatgtgtgtgtgtatttatatataatcttagctattttatgcaatgatttacataactcactaagtttaaaagtgtaatggcattccaaattttttcctatgattcatttaagata

SEQ ID NO: 601315 - DNA, 583 bp, Homo sapiens
agatgtttaattaactcacagtttcacatgggtagagaggcctcaggaaacttataatcatggtggaaggggaagaaggcacgtcttacaagtggcaggcaagagagagaaagtgtgaaggaagaactgtcaagcatttataaaaccatcagatctcatgagaactcactatcacaagaccaggataggaggaactgccgccatgatccaatcactcccctccctcgacacatgggaattacaggtccttccctctacatgtgaggattacaattcaagatgatatttggatggggaagcagatscaaaccatatcaatgaccattggaattaaatacattattcaaaaacaggttctacagtttgctagagtgtgactataagcaagtgaaattatttctctatttttactttcctaaaccattggaaaataaaaaaaatatttaggtcataaggttattctaaaagctcaatggaatatatatggaatcttgtaaaagtatttacttccagtaaagatggaactcaagattaactggttgttaatgatgaagggactttttaataatagcatattttattt

SEQ ID NO: 601316 - DNA, 549 bp, Homo sapiens
tgcaatctggtttcctttttagtgaattaaatccaaaatcctcttcttagttcacatctaatcttttaaatatatgacataatatgtgacataatatgactcaagaacaacccctctactcagcatggaggtctgttgagaaaacagactacagctcaccagaagaaatcaacacacgctgttaaaatcagctaattgaactgctttactctaaatataaatgwcttaaatcttagcatctatgatgatacactagtcagtcgttattcattaatttgtgtatttaaaagatataaagccattatcatgcagcaggcatcattacagatgctaagttataaagctgagaatcatatggtcccagcatttgtgaggggaaaaagtacacaaataattgtaataaaatgtgttatgctataatagagatatttgccattgcagtatggtatcatagaagatgagtcacttacaaaaaacctttaatacatatcattgtgtccaagtatataaaaacaataaaaaagtattcaacataaatctttttattta

SEQ ID NO: 601317 - DNA, 549 bp, Homo sapiens
tgcaatctggtttcctttttagtgaattaaatccaaaatcctcttcttagttcacatctaatcttttaaatatatgacataatatgtgacataatatgactcaagaacaacccctctactcagcatggaggtctgttgagaaaacagactacagctcaccagaagaaatcaacacacgctgttaaaatcagctaattgaactgctttactctaaatataaatgacttaaatcttagcatctatgatgatacactagtcastcgttattcattaatttgtgtatttaaaagatataaagccattatcatgcagcaggcatcattacagatgctaagttataaagctgagaatcatatggtcccagcatttgtgaggggaaaaagtacacaaataattgtaataaaatgtgttatgctataatagagatatttgccattgcagtatggtatcatagaagatgagtcacttacaaaaaacctttaatacatatcattgtgtccaagtatataaaaacaataaaaaagtattcaacataaatctttttattta

SEQ ID NO: 601318 - DNA, 497 bp, Homo sapiens
tgtttttccaagacatcattactagaaagatgtcatctgattcccgtgtcacacatgggatatatctattacataactctcaataccacaatctaaagggcaatgtagacattaatttgtctcagttgattttccagtttgaaaaaaattgaaatggaactcttttatacattctgacaataatgctaagttcatgatccaagttacctaagacgcacatattaaacgttgcagaggtttttccttggaatttcaattactttcataggttgccctcttgtggccatctgtaaagctactaacaacaaaatgaaaacattgtatgtytttttttccatctagtaaatgcttcgagggtttgttaacacatggtatcttaaaattgacttaataatatgtcaggacaaaattgaaatgaaaaatcttaaatatgaattatagacaaaatcttgattgctgaaaattcagtattggctacaataaaattattcaataaa

SEQ ID NO: 601319 - DNA, 511 bp, Homo sapiens
aatgctactagcaatgttatcctaacagaacatttccagttattacagtgaatataaaatttggattatggaattgaatttgttggtgttgtctgatgaaaaaaaatactgctcaagagtcaggatctaaattctggaacattgaatgaatgaatggccttgtgaaaattaatttttttgagcccagttcttcttaatcctctgtcttacctaaccccaagrtccgatgatatactaaaaggaagggaaaacaatttaaaaggttgtataaaattataaattcttatatagaaatacagagaaaaaaggaaagttcaaagtatacgtttttcattctattaaaacatttcttctgttgatacatggggatctaactcaagaattctagaaccttgaaattggaagataccatttcaactaagttgcaacataatttccacagtgtctactattcagtgttcatgcttctgtaagcgagttcatcatttgcaaatatatccaagagcaagac

SEQ ID NO: 601320 - DNA, 644 bp, Homo sapiens
ggggagggatagcatttggagatatacctaatgttaattgacgagttactgggtgcagcacaccagcatggcacatgtatacatatgtaactaacctgcacgttgtgcacacgtaccctaaaacttaaagtataataaaaaataaaaaaaagaaaaagaaatagaggcacaaagaagaaagtaaatttgctcaaggttacaaacagctatcaagaggttgagtcaaaaatcaaattgaggctgactttccagagtccacactctacaccactacatcttatgctattttgcaaggattacaagaaattgaaatcaaaggtttatataaaatatggtttgcacacaatattgtatactttctataattttattaacttttaataaattgtagtctgaactgactctatgtgtacacttgacactaattattttggaaactttcctagcagttaccctttatcatctttggggcatatacaaaatgttaaccattctacatcaccaagcttctccagcatgtttatcctagtgttctgtgctttttctcttytacctactttccactatatcttcccctcagacttttcactgtgcctttgaaacctctattttacataaaacaatctttcctattttatcacttt

SEQ ID NO: 601321 - DNA, 653 bp, Homo sapiens
ttattgttgagaaactctgttcccagaagtaagtagatggaaaagaaaaaaggttgtgttgttgttatggtttttatcagcaatattactcaaattttctgatttcttctgcatatatactagaataaagatatattttataataatcattaaataccttgattaaatcaacctccgattttgttgaaagctaacaaccagaaaacatctggctttcaaaaaggatttcttatgtagctattaaagtcattcactttcctaacacctaaatctataatttgagtggtttcttattttggtccttgaagttttgagaccctggagtaatgcgacacagttaagattcatgagaaacatacactctgaaagagaagattgatttaaatgcagacagaactccttaattgcggcactgttctcagaataataaattttagaaaagggtacatatagaagaagaaaatgaatcccttgcaaatatccatgtccttgtatttcttggacagtcttcataccttaattttaaataactatcaaacatctatccctgcaatcaaatacgtttcmggtggttgataaatgttgactcaatgaatgtgctgcttacacaatatggctaagtaattgctttaaacatcatttctaatcaatat

SEQ ID NO: 601322 - DNA, 602 bp, Homo sapiens
ttgtatttacaaacagttttttcaagtaaaattagtaaagacacttaatctggtcatcatccttttcctataaaatcaaataaaattagaacattcctgtttggaaaaaaaaaagatatgaaatgttgagtcacattttcacacttttggttagtatattttaacatctttctttagtttgccaaatagctttccaagattatttttggttgtgaagaaacttcattcttagtttgattgctttcaatttatcataaaactatttcaatcgaaaattatatatatatattacaatatcacacctcaaataaaatttaatgtgcttatgttatcaatcattggttttcaggcaatggctaccactttacgtgaagggtaaataacatacccawtttaatcgctacagacagaccactaccaaaaatttcttaagatgtatcttttccaagagaggtaaattatgaagttgagcttcaggaaatttaatattagctatcacaaccacctcaatttttacagaaaggaattgaaaatgaaacagtaaaagtatgactaaactatacttaacttaaaacggagtaaattaaaaatcctgaagccag

SEQ ID NO: 601323 - DNA, 596 bp, Homo sapiens
attgtgttgaatttgtccctttcttaattgtttttctcttgtccaaaattatcttttcacatttatccaagatccagctccagtgtcgcctctgtcatgtcatcccttcagtctagaggaatggttctttttattttccccccactagtctgtagatcttttgtatcccttttaaggtctgcagtaggcaagttattcacatgttattgtgcctgccccttcaacttggagctcctagagaatttgaattgtgtttctcctgtttccacttgttttccacacagtagcctatgatacctgtaaacatgtagatcaggccactccatttgcctaatcccaatcctccaatagtttcctgtcacatttctgagaaaatccaaagtcttatccacagcctataagctgtacaatatatggccctggtcctctctctgtcctcactttatttcacactatctccttacacactatcctcaggcaacatgggtgtcrttgcagttcacaaagcataatgtcattgatacataaaagacctattaagtaccagctataagttgcacactattctaggcatttaggatacattagtgaacaaa

SEQ ID NO: 601324 - DNA, 597 bp, Homo sapiens
ctctgggctgattttgctagatatcataaatgcctgtatagtgattgatacacctcttaaatgaagcacaaagtacaggagaaggagacactaatcaacatcaataattcaggtactttaaagtattgtttcccataatagttaaaatacatttaaaaataatgctcattttacaatattagaataagattgccaattttcttctaagtgaagctaaattgaaaaaaatcwtgagacaagttattagtgaatatttagctggtcataagcaagtgctttctttacgacttttctaatattacattttttgtatcaatttgtaatttcgaacttttataaaagcaaaagtgacactcataataggccttattattgagatgtagctaaaggtaaaaagataatgaccaaatccactaggagggattgtgtactcgaggaatagcaaccacataatacccctctagtaatgaacattaattgttttaatcaagctctaatttgaaatcagaattttaaaaaactaatcacatttattgtagtggataatttaaagcttttgtttcattttaaacagattctcagtgacagataaatcat

SEQ ID NO: 601325 - DNA, 546 bp, Homo sapiens
ttacaaaactggattgaatgcaggggatataagtacacaagggagataagtttggaaatgcttagctatctctggagttggaaagacgagaacacaagaagaatgcgtaaaaaacaaagaaacaaaaaatagcagcagacacctaacatgggtgatgaatataacagtcagagctacggtgcttygttgaaagcaaaagtctagaaaagcaagtaagataaactcatcacaagcatcttttgagtccctaaagtctcctttcctgggaagatttaatagaagaatatggcagtcacccatcctctggcataacatctataaatgtgttattcctccatcccctacccaaaactctttcaaggtgatcattcaaatgcatacttttctgcatattataaagtaatttttcgcttcttttgtgttttgatagatgtttcctggtatttagcttcagaatgtttccttttatgcatctgaaacattgtcatttcttggagactctaatgtggctttaaaaaaagaggatcactctgtccccaactgtta

SEQ ID NO: 601326 - DNA, 408 bp, Homo sapiens
ggtctctaaatcctgacctcaggtgatccactcaccttggcttcccaaagtgctgagattacagacgtgagccaccatgcctggtcgagtattcctgtttttaatggtctcctggcctgtccatcttcttctcctgtaaatgcccctggatccagatgaggtgtaagagcctccaggccaagggttatgtcatgtgtagcttcaatcctttcagtgctttgcctgagacgggcaatcaataagtgttgaataactgggcaagaaatgatgcaggctgccctatttttgtcctctggagcacaggtgaggagcagcagaagacaacgctaccagctctacctctaagcaattgcccagggcccagatgagaagggacagaaaaaaaayaaaacctcatcccacatttgc

SEQ ID NO: 601327 - DNA, 632 bp, Homo sapiens
gtatattggtaccatgtaattacagaatttcagtgataatgatctctatgtgctgatatagaaaggtttctaaggtgcatttttgggtcccaaaagcaagttgaaaaatagcatagatagtatgaacctatttgtgaaagattgaaaggatagaaacttaaatatgtatactttatatattggtataaatatttgtatgtgtatagaaaatgtcagacagataatgtcaaaacactgataaaaggaattacttgtgagaaatggaaatgtgaggtggggaatagggaggtagaaattcttttmtttcctgtgtacatcatgagcatgttttttaaaaataataatacaattactgatgatccttttgaagatttttaaaaatgaaatgggaaaatgtttagattatacccttgaagggaaaaactagaattcagatctatgcaggatgatcaaagaatgttgaaaaaggagcatgcgtgccatttttgtgttgtgtgacgtggggggtggatggacagacactcatttttaaattttttttcaagcagtccttgtacctcagcctcctaagtaactggcataccactgtgcttggccttgatgctcctttctgtaagatgttttggaaggca

SEQ ID NO: 601328 - DNA, 529 bp, Homo sapiens
gcaggaatttactacagctataacaaaaatcgtaataatattcagttaccttttgctaagaactttcaaatatttcatttgagctcaataactaccctagaagtatgcatggtaggtgttctttccatgacaaagttaagaaaagtgagaactacaaaaaaaattaaattcccattcttacagcagattaggagtagactaggacctaaaaccataatctttgatctcttaggactggcatttttggggtagcccttcttttttcctaatggtaagactaatcagagcaccaatattttttgaaagctcctcgctacaggttcrctcagcccaaagtaagagaaaatggccctatgcagacattagacaactgccacaatggctcaatgtggagcagcatcctcaactgacatcacatggtcccatttaccttaccactcgcagaactaagtttcattgtaaaaaatataagttcatttagtagcatgtagccaagctatggttgtaaatattattggatgtctcagat

SEQ ID NO: 601329 - DNA, 588 bp, Homo sapiens
aagttcatttagtagcatgtagccaagctatggttgtaaatattattggatgtctcagataaacactgttgtaaatttatttaaccctaaactatttgtgtgtcattcttcatgacttattacagatattccttaactgttcaatgagaacttggaaaattttgaacccactagacaggaggttagcttagggaactgagacttgacttgtctactcaaaggtgcctgataaataggatcatagaatctcatgttggaaagaaccttaaaagtaygaggaaatctcacatacctccactaattctcccaaatccaggatgactctcttactagtttgatatgtggggttctgtttaattttcaaaaggaggcattttgtttcaaaatatatattgtcaatgaagggcagcatcaccttcaagggagcaaaagttggtctttaaggaatgaaaaaactcttagctaataacaatgatttctgtccctccaaagcccaaccctacatgaaaagtcttattccttagcatttaattgatcttgttagaaattaaaatcacttaatttaaaattaatttaagtatatttttc

SEQ ID NO: 601330 - DNA, 505 bp, Homo sapiens
atcatgtttataaagcccttacctttcactagcacacattaaatagtagtcattcaatccatatatttatatgaatatatatattcatttatatatatgaaatatatgcaatcatcatttgtaaaaaaaaaattaaagcaggtggtaacagggagtatatgggaattctctgttctttctgtttaattttactgtgacctaaggctactctaaaaataaagcttataattacttaaagaccaataaaaaagtaagaatctcatacattaaaacaattaaaacaacaagatgccaaatttcatctgtttaactgtcaacacttaaaaatactgattatttcaactgtgggtgtagtaagtaaatttcacaaaaaaatagtgacaggaatatatgacaatacatatcaagattccttaaaatgtatacacacttstgactcagtaattccatttatagaaatttattttcaggaaataatcagataaatgtacagagatatgtgtga

SEQ ID NO: 601331 - DNA, 722 bp, Homo sapiens
  misc_feature 678: n = A,T,C or G
ccagcttctcttctgattttgtgtaacttatgcagtagggacattcaactcaattttccccgaactgttcgttgtctagggccaattcaaacaaaggacacattctcaatggctttctggaatgctaagcgtgatgatgggccaccttactgccaacctgtgctttttggatgtatccaacttatgtactgattatatgaaatctggactatctgccttgcctgctgtcttcctaatagacagtgctacaaagaatacagctgctcartccacatgaacccatcatcaaccataaatgccaaagtgccctcctataaaagcaaagtctttatgactccacatatgcaagacattttcatgactggtaatagaagctgaaatatgagttgttaataccatatacattttgttctgaaaaagtaaaatgtggtgttatgccctgggcacttctgaaaactcaaaattcctaggtatttagaagtttcaacaaccccatacatagccttttcctagttctctattgatgattcagtgggccttgaacttctgtgaaaagctgcaatctctttaaagcagaaaaacagataagaggaaaaactagccttttacaatggaaggaaaatagggttcccgggaatggccatgaaacaaggaaacagatcaagtatgttctatggntatgtattattaacatgacagatggagataagattatgaattga

SEQ ID NO: 601332 - DNA, 722 bp, Homo sapiens
  misc_feature 678: n = A,T,C or G
ccagcttctcttctgattttgtgtaacttatgcagtagggacattcaactcaattttccccgaactgttcgttgtctagggccaattcaaacaaaggacacattctcaatggctttctggaatgctaagcgtgatgatgggccaccttactgccaacctgtgctttttggatgtatccaacttatgtactgattatatgaaatctggactatctgccttgcctgctgtcttcctaatagacagtgctacaaagaatacagctgctcagtccacatgaacccatcatcaaccataaatgccaaagtgccctcctataaaagcaaagtctttatgactccacatatgcaagacattttcatgactggtaatagaagctgaaatatgagttgttaataccatatacattttgttctgaaaaagtaaaatgtggtgttatgccctgggcacttctgaaaactcaaaattcctaggtatttagaagtttcaacaaccccatacatagscttttcctagttctctattgatgattcagtgggccttgaacttctgtgaaaagctgcaatctctttaaagcagaaaaacagataagaggaaaaactagccttttacaatggaaggaaaatagggttcccgggaatggccatgaaacaaggaaacagatcaagtatgttctatggntatgtattattaacatgacagatggagataagattatgaattga

SEQ ID NO: 601333 - DNA, 549 bp, Homo sapiens
ggagcccgtcagttccatctctaatcaggtcgctactctcatttagagggtttaatgtaccatccttcatagtgggacacgccactccgacccatgggctgctaagaggagctgcttttccctcccctccgctctttttcctctgcatccacccgctcaagagtctcacctggacatttggagggcggtgctgacctcctccgagacgtcgtcacctacagcgccaccgcgctggtcctaaggtacaggtctgccctgccccaaacccttcaagtcttcaggccggccccaagctacagctcaaggctcactttgaccttgcgtggccctgtctccatagctcatttccggcatcgtccttyctggcgtcccataaggtgcccagcataggacgtttgacggatctccagcactgcagcttctcagcctcggcactgctgacgtttggggctggctcattctttgcagtggggagggtgccctgtgcattgcagcgtgtcgagcagcatccccggcctccacccactaagtgccagtagcatctccctc

SEQ ID NO: 601334 - DNA, 480 bp, Homo sapiens
ctcaattacaggtgactgtgcaattacaayatctggagatcctccctcactgggggacaggtcctactggcacctcatgggtagaggcgagggatgctactcagcatcctacagtgcacaggacagcccccatcacaaagaatcatccagaaagtcaatagtgcagagatggagaaacccaatggaggcctcctttcaatcagtgttttagggtaggtaggttctctggagcagaagctgagacagactttgaggtccaagggatcaacattgtgaaagggaggaagagaaggaggaggaggaggagcaggagaaggaggaggaggcggtagcaggactgggcatcagtgagatgagggagatgaagttgagttgaaaaataaaataaaataaaagtgatttcttgcttgtggcatttttagcttgtgcaaatcgtccccgtaatatttcttcttccatttttaagaagttgaactgtga

SEQ ID NO: 601335 - DNA, 496 bp, Homo sapiens
gattctcaattacaggtgactgtgcaattacaacatctggagatcctccctcactgggggacaggtcctactggcacctcatgggtagaggcgagggatgcyactcagcatcctacagtgcacaggacagcccccatcacaaagaatcatccagaaagtcaatagtgcagagatggagaaacccaatggaggcctcctttcaatcagtgttttagggtaggtaggttctctggagcagaagctgagacagactttgaggtccaagggatcaacattgtgaaagggaggaagagaaggaggaggaggaggagcaggagaaggaggaggaggcggtagcaggactgggcatcagtgagatgagggagatgaagttgagttgaaaaataaaataaaataaaagtgatttcttgcttgtggcatttttagcttgtgcaaatcgtccccgtaatatttcttcttccatttttaagaagttgaactgtgatgtgggcacaag

SEQ ID NO: 601336 - DNA, 480 bp, Homo sapiens
ctcaattacaggtgactgtgcaattacaacatctggagatcctccctcactgggggacaggtcctactggcacctcatgggtagaggcgagggatgctactcagcatcctacagtgcacaggacagcccccatcacaaagaatcatccagaaagtcaatagtgcagagatggagaaacccaatggaggcctcctttcaatcagtgttttagggtaggtaggttctctggagcagaagctgagacagactttgaggtccaagggatcaacattgtgaaagggaggaagagaaggaggaggaggaggagcaggagaaggaggaggaggcggtrgcaggactgggcatcagtgagatgagggagatgaagttgagttgaaaaataaaataaaataaaagtgatttcttgcttgtggcatttttagcttgtgcaaatcgtccccgtaatatttcttcttccatttttaagaagttgaactgtga

SEQ ID NO: 601337 - DNA, 496 bp, Homo sapiens
gattctcaattacaggtgactgtgcaattacaacatctggagatcctccctcactgggggacaggtcctactggcacctcatgggtagaggcgagggatgctactcagcatcctacagtgcacaggacagcccccatcacaaagaatcatccagaaagtcaatagtgcagagatggagaaacccaatggaggcctcctttcaatcagtgttttagggtaggtaggttctctggagcagaagctgagacagactttgaggtccaagggatcaacattgtgaaagggaggaagagaaggaggaggaggaggagcaggagaaggaggaggaggcggtagcaggactgggcatcagtgagatgagggagatgaagttgagttgaaaaataaaataaaataaaagtgatttcttgcttgtggcatttttagcttgtgcaaatcgtcccygtaatatttcttcttccatttttaagaagttgaactgtgatgtgggcacaag

SEQ ID NO: 601338 - DNA, 562 bp, Homo sapiens
catgggtattattttatttcttaagcgaggtggtgggtcaaaggagttttaaaattattctttatccctttttgtgtatttttggtatttcctaatggatgattacatctaagtttatttttaggtagggcatgtttatacaggcatatatacctttaagcagacttattctgcaagaatcttttggaactggatgatttctcagttgaaaagtcttctgaggattatmgggtctgttgtaatctcctgagcacacaatttttccctgcccggcctggcagtgatgtgtgatgtaaagactatcggctttggggatctctgtaaataaagagggcacagctgaaagtagctatggtggttttaaatccaaaaattcattgatacagctccctttgttttattttttgagagagtctcactctattgcccaggcagtggtgcaatcatagctcaccgcagccttgaactcctggacttaaggggtcctcctacctcagcctcctgagtagctgggactacaggtgcatgccaccccacttggctaatttttttaatgtatttg

SEQ ID NO: 601339 - DNA, 562 bp, Homo sapiens
catgggtattattttatttcttaagcgaggtggtgggtcaaaggagttttaaaattattctttatccctttttgtgtatttttggtatttcctaatggatgattacatctaagtttatttttaggtagggcatgtttatacaggcatatatacctttaagcagacttattctgcaagaatcttttggaactggatgatttctcagttgaaaagtcttctgaggattatagggtctgttgtaatctcctgagcacacartttttccctgcccggcctggcagtgatgtgtgatgtaaagactatcggctttggggatctctgtaaataaagagggcacagctgaaagtagctatggtggttttaaatccaaaaattcattgatacagctccctttgttttattttttgagagagtctcactctattgcccaggcagtggtgcaatcatagctcaccgcagccttgaactcctggacttaaggggtcctcctacctcagcctcctgagtagctgggactacaggtgcatgccaccccacttggctaatttttttaatgtatttg

SEQ ID NO: 601340 - DNA, 562 bp, Homo sapiens
catgggtattattttatttcttaagcgaggtggtgggtcaaaggagttttaaaattattctttatccctttttgtgtatttttggtatttcctaatggatgattacatctaagtttatttttaggtagggcatgtttatacaggcatatatacctttaagcagacttattctgcaagaatcttttggaactggatgatttctcagttgaaaagtcttctgaggattatagggtctgttgtaatctcctgagcacacaatttttccctgccyggcctggcagtgatgtgtgatgtaaagactatcggctttggggatctctgtaaataaagagggcacagctgaaagtagctatggtggttttaaatccaaaaattcattgatacagctccctttgttttattttttgagagagtctcactctattgcccaggcagtggtgcaatcatagctcaccgcagccttgaactcctggacttaaggggtcctcctacctcagcctcctgagtagctgggactacaggtgcatgccaccccacttggctaatttttttaatgtatttg

SEQ ID NO: 601341 - DNA, 542 bp, Homo sapiens
ctactaatgactgcaacaaagtcaaaaggacaagtgtgtgcacaaaacctgcctccacacatacctagcctaaccctgaaataactcatccygtgtaaatgaggtggctaagggcatgagctctggggccatatttccttggttcacatcctgagtccaccacttactggctgtgtgaacttggcaaatcatccagcttctctgggactcagtttgccatccatggaatgggaacaataacagtatctacttcatagagttatttagaggactagacacggttgatatatgtaaagtgcttagaacagtaccaggtatacagaaagccctacataaatgtttgctctttaatcgtatgaaaactgaatgttgcattctaagttagacagagctagacacttctaccatctgttaaaaaattgcctattaataagcttggacaacgtcatgagcatgccaattgtgatccctattaccgtatgtttgtttcaatttatagttctgttgttctctaaaaatttatttcactgtttccctggaga

SEQ ID NO: 601342 - DNA, 542 bp, Homo sapiens
ctactaatgactgcaacaaagtcaaaaggacaagtgtgtgcacaaaacctgcctccacacatacctagcctaaccctgaaataactcatcctgtgtaaatgaggtggctaagggcatgagctctggggccatatttccttggttcacatcctgagtccaccacttactggctgtgtgaacttggcaaatcatccagcttctctgggactcagtttgccatccatggaatgggaacaataacagtatctacttcatagagttatttagaggactagacacggttgatatatgtaaagtgcttagaacagtaccaggtatacagaaagccctacataaatgtttgctctttaatcgtatgaaaactgaatgttgcattctaagttagacagagctagacacttctaccatctgttaaaaaattgcctattaataagcttggacaacgtcatgagcatgccaattgtgatccctattaccgtatgtttgtttcaatttatagttctgttgttcyctaaaaatttatttcactgtttccctggaga

SEQ ID NO: 601343 - DNA, 652 bp, Homo sapiens
caccagtttgtcaaatgactcttgttgcctttcctcccccactgtctcccaaccccaaccctggaggagccagaaaaggaaggagaaaaagctgatcctacccctctttcccagagcaaattctgagccacaaggaggaagaaggtctgacttagatgtgagattgaagttttaaattggactgaactacactttttaatagctgagaatgagctgtaattattcagccaagactgatgtgatgggtgaacatggccagatgctgtgggatttcctctgaagacatcatcatcagagcaggaagagttgggtggagaactttgaaggcgattcttcaaagtaagtaaaaatacagctagtttccatgtgtacctcaataagttcatttctactcagtaaatgggctaatggaaaatggatacaacaccagtttcatagggttattatcatgaaggttaaacgagttcacatacgtaaaagtgattcacatggtccctgacaagtaatgtaaatataaatcatacaacatgtaacaaatatctgagggcttattctgtgccaggcattgttctgggtgtaggggatgcataatgaacaraaagtcctcatagagctttcattctagaggagacagacaaaacaaaatcattac

SEQ ID NO: 601344 - DNA, 590 bp, Homo sapiens
cttacttttaaacaaataccagaattttaaaattataactgaggtttgtttkttttttttttttttttttttttttttcagaatagtcatcttggaaaattattaggaatttattccaagaggtcctttgttcaacagtcttctggaaattcctttagagactggttcaaaagcttctgagctacaccaaaaaaattagtctcattattttcagaataccaaaaaagggtttttcccagttcgatcatccattttctttccctaccttggctccaaaatcaaacccacccttggaggatgggaatgtgctgcccagggatgagaggagctggtgagggacaggggtttggcccagggtgagagcactggacatgcttttgacacatccttcaagacaagtcttaaaagtcctatatggttgcctttctaaaaagttacagtgttttataggtcactatgtgctgacctgctcaacgtggtcaaaatgcttagaaatgctgcataataaggcaccctctagtggagtcaccttgtacattagcataataagggttctgagaagtcttgcagtaaaggaaactgtttaaact

SEQ ID NO: 601345 - DNA, 590 bp, Homo sapiens
cttacttttaaacaaataccagaattttaaaattataactgaggtttgttttttttttttttttttttttttttttttcagaatagtcatyttggaaaattattaggaatttattccaagaggtcctttgttcaacagtcttctggaaattcctttagagactggttcaaaagcttctgagctacaccaaaaaaattagtctcattattttcagaataccaaaaaagggtttttcccagttcgatcatccattttctttccctaccttggctccaaaatcaaacccacccttggaggatgggaatgtgctgcccagggatgagaggagctggtgagggacaggggtttggcccagggtgagagcactggacatgcttttgacacatccttcaagacaagtcttaaaagtcctatatggttgcctttctaaaaagttacagtgttttataggtcactatgtgctgacctgctcaacgtggtcaaaatgcttagaaatgctgcataataaggcaccctctagtggagtcaccttgtacattagcataataagggttctgagaagtcttgcagtaaaggaaactgtttaaact

SEQ ID NO: 601346 - DNA, 590 bp, Homo sapiens
cttacttttaaacaaataccagaattttaaaattataactgaggtttgttttttttttttttttttttttttttttttcagaatagtcatcttggaaaattattaggaatttattccaagaggtcctttgttcaacagtcttctggaaatycctttagagactggttcaaaagcttctgagctacaccaaaaaaattagtctcattattttcagaataccaaaaaagggtttttcccagttcgatcatccattttctttccctaccttggctccaaaatcaaacccacccttggaggatgggaatgtgctgcccagggatgagaggagctggtgagggacaggggtttggcccagggtgagagcactggacatgcttttgacacatccttcaagacaagtcttaaaagtcctatatggttgcctttctaaaaagttacagtgttttataggtcactatgtgctgacctgctcaacgtggtcaaaatgcttagaaatgctgcataataaggcaccctctagtggagtcaccttgtacattagcataataagggttctgagaagtcttgcagtaaaggaaactgtttaaact

SEQ ID NO: 601347 - DNA, 590 bp, Homo sapiens
cttacttttaaacaaataccagaattttaaaattataactgaggtttgttttttttttttttttttttttttttttttcagaatagtcatcttggaaaattattaggaatttattccaagaggtcctttgttcaacagtcttctggaaattcctttagagactggttcaaaagcttctgagctacaccaaaaaaattagtctcattattttcagaataccaaaaaagggtttttcccagttcgatcatccattttctttccctaccttggctccaaaatcaaacccacccttggaggatgggaatgtgctgcccagggatgaraggagctggtgagggacaggggtttggcccagggtgagagcactggacatgcttttgacacatccttcaagacaagtcttaaaagtcctatatggttgcctttctaaaaagttacagtgttttataggtcactatgtgctgacctgctcaacgtggtcaaaatgcttagaaatgctgcataataaggcaccctctagtggagtcaccttgtacattagcataataagggttctgagaagtcttgcagtaaaggaaactgtttaaact

SEQ ID NO: 601348 - DNA, 398 bp, Homo sapiens
tctgccctaagtcaccataagacatttggaaattctctgcaatgtgcttagcaaaaataaaaaaaaaaattaatctccccctccatttatccaataatttttttatttttatgtttttttcaattacctgagaattttaaatccatggtgcaggaagttcayttgtatgtttattgaccaaaaaagcaaatttaagaaaaaatatttatctatttcttagatttaatgtatcctttacagatacaagttcattttcctcattttagaacatagacatgcattttatataaacttagtttgacttatacaagcactatctccctggttgactctaagctttctgaaagcaggactcatctcattcttcactgcatcccagatcctagtgtgacatggag

SEQ ID NO: 601349 - DNA, 511 bp, Homo sapiens
caagcctgggcaacacagtgaaaccctgtctctactaaaatacaaaaaactagtcaggcgtggtggcgtgcacctgtagtcccagctactcaggaggctgaggcaggagaatcacttgaacctgagaggcggaagttgcagtgagccaagatcatgccactgcactccagcctgggtgacagagcgagactccatctccaaacaaaagaaagaaaagaaaagaaagaaggaaaacaacactggaagagagtatgatgatctcactttacaaatgaggaactgggatctagggtgattcaaggctgtctccattcacagtctctggccagtggaagaaacaggaatctgattcttctacctgtcatcttctttactgtggctgacacatgcccacacaygccagagccagcacggtgtcctctcattgtgaatgacaccccctgccccactgcctctcttggtgttgcctcaagagacacccccagagccacccaggaaggccattcagtct

SEQ ID NO: 601350 - DNA, 505 bp, Homo sapiens
caccttaggaaactggaaaaagaagagtgaatttaatctgaagtaagaagaagatacaataagaattagagcagaagtcaatgaaattgaaaacaggaaatcaataaagaaaatcaataaaatcaaaagccagtcctttgaaaagatcactaaaattgataggcctctagcaagcataacaaagaaaaaagagagcagacccaaattagtaatattagtattgaaggaggagacaccactacagatcttatagacattataaggataataaaggaatactataaataactctatgcccacagattcgataatctagatgaaatggactagtttcttgaaagatttgatttgccaaaactcacacaraaagaaacagacagaataggtctatatctattaagtatattgaatcaataattaataatcttccaaaacagaaagcaccaggttcagatgggtgcactggtaaattctcccaaacatttatagaagaaattttgtcaat

SEQ ID NO: 601351 - DNA, 597 bp, Homo sapiens
ttcatccactcattcacccaacaaatactgactgacagcctaaaagtatggctagataggatatagtagtgaacaagacagatgagcttcctgccctcaaaagcttacattatagtggtagagacaaacaatgaacaagtgaacaaacaagataatttaggactgtgatactagcataagttgtaacctcaactgatattaaagacttggaagacttgaaaccaactgtaaagtcaaggtgtaccagatacatccaccatccatttaccaatgacttttctcagctataggagaaagccatcctcatcagaggtaaaatgtctcccttcattattctgtggctgagaagaattagctatcttaaaagcagccaccaaatattcctgccagtggggtggaattggcctaagggtgtsaggtgacgaaggaccttgtcacacctttggccctaaccaactgtgtgaccttggccaaatctctgaacactctggttgatacatctgaaaagaacaagcatttgtatgaccttttacagtttacaaagagcttttaccaggcagtcttatctcctccttctagtaacactatgaattaaat

SEQ ID NO: 601352 - DNA, 591 bp, Homo sapiens
tctcaacacttaaaagatattactccattgtcttctggcatctcttactgctcatgacagtctaataattattcttttctctcatagctttaaatttttaaatcttaatccatggatattttaaaaatattaataccatcaatgtggattaaataaatttttctagctctattgtggcatgcatctgagcccagagtatttgccttaattgtgataatcaaaaaggaatgggctttgcggtcaggcagrtttgattttgaaacagaattctgacatttgctgcattgatcttgtgcaaggaaattctccaagctcccttctcacctctttagaaagtgtctattattacctacattgcagagttaatgcaagaattcaatgatagtatgtgcttccaaaatatttcttataatagtcatcattatcttgtctttgcttcattcttatctctaatgttaagcaaatccttcaagtactacctcagcttcctggtctgtcatattgagggcagtaattcagacctcacggggttgtgtgagaagtaattgagaaaatgtaatgtctaaagtatattcggccctcaatacatgt

SEQ ID NO: 601353 - DNA, 422 bp, Homo sapiens
tcaatttatttataaggaacactattctatgagatttcagataggtattaaaataaaaaataaaaataaaaaactattagacctcactaggtcaatatactaggttaaaataacttagttactacagaatctccaaactttcatttatgatcacttgttttcattgattatataacataggtgtttagtataaaaatatataggaagcattttaataaaataaaatatatgtgaaaatctaatttcttatgtcatattgagaagccctggatatgtactgagaagggtatatcactcttgtggtattcttgccaaaaatgtttacmttcaaaccagtcatgagaaaatgtcagaccatccaaatttagtgatattctgcaaattaactggccactactcaataaaaatgtgaaagttttaaa

SEQ ID NO: 601354 - DNA, 584 bp, Homo sapiens
gattgtttctttatgaataatatrtatcatttaggaaacatttttatctaatttttaaaaatacctcatggaaatcttttcaagtcaatagcatagatataattaattatttttatgggaaaatgtttcatgccatttaataacataccagcatttattcaaccattcccttaatgatgagcattcattttatttctaagtttggttttcagccagcagatccataataaattaccctttgaatttctgggcatattcatactttcatttctatgagagagattctcatgaataggaatgttagaataaaatatacatattttagctataattgactgtaatgtttcccttgaggtaatgattcaaatttctacactatacagaagtagatctttccacttattactgacagccataaatattgccatctgttaacatttctttcatatagatgataagtaaccttttattgttacttcaatttcttttgagcttaattttgtcttcaactcatagtaagattgagcatcatcagttatactcataggttattgaaactaactcttctttgaggtgttaatttg

SEQ ID NO: 601355 - DNA, 559 bp, Homo sapiens
ctatttatgagttcacatatgataaggtttctttttcactttgttctagtgaatggttaggttttgcaaatgattcatgttgcaacagaataaaatccatatcattctgtgagctacattgcttcatttatataattgtccattttcttttgacccttccattatgaaaattgtttcaacaaacacaaacattgtgattttatagatgaaagtttattaattaaatgtatactgtcagtttatctyaaaaaattaattgaatggacagtcaaagtaagcagggttgtattaatgttggctttatcaatacagttagtactttaaaaatggtcatttaagggtctgaaaatggatttgcttaatggagcattttgaagagggcagatttcatgacatatgagagacaataaagatgttagtttcctttttcagtctaagtatattttggaactacagaagcaaaggtaaatcattttttctgctacagggcttccttctcaaagattataatatgttaatattttgtgtgaattttcaaaggtgtgtggtgatatgcatt

SEQ ID NO: 601356 - DNA, 572 bp, Homo sapiens
tcaaatcggtgaaaataaaagatgaagaaagaataatcaaagcagcaaaaagaaaagagacacattagattaaataaagtcccaattccactttcagaggattttcagcagaaaccttgcagtgccaggagagagtggtgctatatttgaagcactgaaraaaacaactgacaaccaagaatactatgcccagcatagtataataataataaaataaaaataaaaaaaacacttagtagacagattttctcagacaaataaaaggtgaggaaattcatcaacactagatctgtcatataagaaatgctaaaggaaggtctttagtcagaaatagacattgacttctatctaaaaatgtctaatggtatgaaactcactggtgtaaaaaaaaaagaataaaggacaaattcagaatactctaatagtgtaattggactaaataaatgacttacgtatgaagactaaaagacaaaactattataatcaacaacaattaagagaagcaatataagtaataaaattaaaacattaatatatcataatgttgagcatggtgttaaatcataagtttg

SEQ ID NO: 601357 - DNA, 591 bp, Homo sapiens
aagtatgtcatttatatattttggatcttggttttacattttttaaattgtgaaatatataatatataaatacaaatatacaaatatatgcacacrttttaaggaataatattaaagcaagcatccttgttaccaccactcagcctaacagtgaaaatattgccatctacttagaattccctgaggtgcccctctagtgtttcttcttcccttctctcccaacaatccgaataatcaccaatctgaattttgtgttactcattctcttattttctttttatttttatcagacacatatatttatgcctaaaatataggcataaatgtctatttagtttggcctgttttggaaatttataaaaatggaataatactttaggtttatttctgtcacttattttgttcaaaattatataatatatgtaagattcagtaatgttgtacacatacctgctattaggtttcaaagaaatttcaaattgcaatgtcttcctcacaaaattaatgtttacttattataaagtaaaagtctttatctttggtaatgcctttcattatataatactttctcagtaaattatataacaatcc

SEQ ID NO: 601358 - DNA, 617 bp, Homo sapiens
ctcataatgacttgtatagttgtaggtaattcattcaaattgttgtataatatccattgtgtctgtaagttgatttttttttatctatttcactactaattgtaatttaggtagtttccagttttaagctattacaactgtgctgttaactttsttttacatgtctgttaatgggcattgacaagacatgggactgttgctcataagatgtgcatatgttcagctttagttgatctgctgtactgtgtttcaaagtagctagcccatttgaaactagaatctgaacaatattagagttctgattgttctccttggaaaggatcagagttttgattgttcttaatttcactaaaaggcggtattttcatctttttcattttagtcattcctataagtagtatcacatagtggttttaatttgtttctccccaatggctacaattaaacactttttatatatttattggcaattcagatatcatgtttttgaagtatttattcaatatttgttcatttatctattggattatctgtcttcttgattgctggttcttcatatatttatacattctaaaaaagtgaagtttgttgtcagatatgttacaaatatgttttat

SEQ ID NO: 601359 - DNA, 617 bp, Homo sapiens
ctcataatgacttgtatagttgtaggtaattcattcaaattgttgtataatatccattgtgtctgtaagttgatttttttttatctatttcactactaattgtaatttaggtagtttccagttttaagctattacaactgtgctgttaactttcttttacatgtctgttaatgggcattgacaagacatgggactgttgctcataagatgtgcatatgttcagctttagttgatctgctgtactgtgtttcaaagtagctagcccatttgaaactagaatctgaacaatattagagttctgattgttctccttggaaaggatcagagttttgattgttcttaatttcactaaaaggcggtattttcatctttttcattttagtcattcctataagtagtatcacatagtggttttaatttgtttctccccaatggctacaattaaacactttttatatatttattggcaattcagatatcatgtttttgaagtatttattsaatatttgttcatttatctattggattatctgtcttcttgattgctggttcttcatatatttatacattctaaaaaagtgaagtttgttgtcagatatgttacaaatatgttttat

SEQ ID NO: 601360 - DNA, 470 bp, Homo sapiens
agattggggtaaataaaaggggggcctaggtctgagagtatgaataatgcatacatgatggcaacattctcttaaatatgtattaataaaatttcaggacacttcaaaaaccaacataaaaattccagtaacttttgcaaaaatttttaacaaataaaatatatgccaaaattttaraaagatacctcaattatttacggagaatatcatcaatgaaatacaaactaattatttaaaagtctctcaagatttaatgaacttgctgaatcgagcaaaacttgagggggaatctgcatttctgaaatttagtatttccctatatatcccacaggctctactgtctgatttaaaaacaaatgaaaaatcccagcaccgccaccaccaccaccacaataaaaaaaattctataagacaaaccctaaaaatgacacatcacttccttttgtttgaagccagtctggttatgatta

SEQ ID NO: 601361 - DNA, 534 bp, Homo sapiens
gggaggctgaggcaggagaatcgcttgaacctgggaggcagaggttacagtgagctgagattgcaccattgcactccagcctgggccacaagagcgattttttgtctcaaaaaaaagagagagagagagaaattatctaagccaaccaccawccataaggcatattcagcatgtgcctcctaataagatgcactgagcagggtacgttacttcaatgctactcctgacagagaccaaaattgagacacattttacaaaataacagactgtactctgaaaatatcaaatgtcaacaaaaaaaagggacaaaggaaagctgaaagtttccaaacgaaaggagacttacgagaaataaaacaaataaaatgcatgatctaggatttaatttagagaatggtgaaaaattgtcaatggaacatttgacaaagtttgaatacgtattatagattataaatactgtaccaatgttacacttccagataagacatgattaaaggtgttttaaaacatcttatagaaaaggtctttgttctt

SEQ ID NO: 601362 - DNA, 534 bp, Homo sapiens
gggaggctgaggcaggagaatcgcttgaacctgggaggcagaggttacagtgagctgagattgcaccattgcactccagcctgggccacaagagcgattttttgtctcaaaaaaaagagagagagagagaaattatctaagccaaccaccaaccataaggcatattcagcatgtgcctcctaataagatgcactgagcagggtacgttacttcaatgctactcctgacagagaccaaaattgagasacattttacaaaataacagactgtactctgaaaatatcaaatgtcaacaaaaaaaagggacaaaggaaagctgaaagtttccaaacgaaaggagacttacgagaaataaaacaaataaaatgcatgatctaggatttaatttagagaatggtgaaaaattgtcaatggaacatttgacaaagtttgaatacgtattatagattataaatactgtaccaatgttacacttccagataagacatgattaaaggtgttttaaaacatcttatagaaaaggtctttgttctt

SEQ ID NO: 601363 - DNA, 519 bp, Homo sapiens
gaatgtctgtaaccaaagagacattggtcaaaattctgacttgtgatttttttttttataattaggtagggtacttaatctctatacatttcaacttttgttgttgttgttattgttgttgtttttggacatggagtctcgctctgtcacccaggctggactgcagtgacacatctcggctcattgcaacctccacctcccagattccagtgattctcctgcctcagcctcccgagtagctgggattacaggtgcctgccaccatgcccggctaatttttgtatttttagtagagatgtggtttcaccatgttggccaggctgatcctgacctcatgatctgctggcctcagcctcccaaagtgctgagattacaggtggaagcyactgcgcccagcctacattacagctttctcatctttaaaattgaggtataaggatattaattgtagttataatatctacctaccttattgttttcaaaaatgtaaaataacactaaagtctcactagtagatat

SEQ ID NO: 601364 - DNA, 597 bp, Homo sapiens
gtaaaaatctacatagtacaagagaaaaaatgaaaattaaattccttcctcttccattccaccaccccatctccctccattggtgaaaaaatagctactattcacaaattctttgattcttcaataaaattatattagtcttctttttacattattctatacctgggacttttcacttaatattaattatgtagcttacagatacaaatctttcttttataacttgtattttggacagttcttgttgactcttctatgaaatataaggaaattaacacatttacacatttctgtcatttcccctccatcattttttcagataatctcactcatttttattacattgtcagtatttaggacacttacattttgatttatgcacaaaatttttagatatttttaygtatagttttatatcaaaatactttcctgtgcattgtcaaattttaacagtttctccaaaatggcagtacaatattattatttttatcatcattattttgatgtatctctagttgactgtattccagccacaatgttttattaagtttaatatgaaattgataataaattggctgggaataaaattattcagtc

SEQ ID NO: 601365 - DNA, 554 bp, Homo sapiens
atggaatatatgttgttaagtaaaaataacaaagaaaacataaaattatatatgtagtatattctcaattatgcaaataagactagatggaaatttaatttttctgtcatataggggcagaaaggttaaataaatcaaataaacatagattaaaatgtaccataattatcactgaaattacagttataaagatttgaggattttctttctccttactttctatgatattttaattgagataatacgtttcattttatcaaatgaaaaaagtattgatttctctcatttgataaaagtagttagaaaaaaagagaaatagtagatttaaagaaattatcattatgcaactagaaacgagtaacagaatagrcaaccaactgaaaggagcataaaaatttgcttttattacaaatataaaacataactttctgacaatattattaaatatgaatctagtaaaatgaccttgttaaaattgtatatacctcctaaaatgttacatttattaataaaagctattaatatcatagatttgaatttaccaaccttcagtg

SEQ ID NO: 601366 - DNA, 473 bp, Homo sapiens
ctattttctccttcttggtaatagaaccctcaatttttagctgagctcttagctacccagatttaaaatatacttcccagcctccctcacagctggatgtgtccaagtgactcaattttggttaatagatagaagtgaaagtattaggtgcaacctcagagttgctcctcaaagtggggaaaatgtatcctcctcaggccttcttccttcagactagaaagcaaacaccctccctattgttcacagccagyctgcttttctcatttacattacctggcaggctctggtaggcattgatgttttgagccctgctccattcattcatgtacgtagttaagcgtgtaccagcccaaggcactctgctaggtagctggggatgtgatgttgaagaagacagatatggtcaccactccagcttatgacatagacactaaacaacgaacaacttcattacaattcgacaagcgctacaa

SEQ ID NO: 601367 - DNA, 365 bp, Homo sapiens
tccagggggctcagaccttccttgttctcacctggtcacctttttcccgctttcagaaaatgtgtaagaagcacatgcttcccccattcaactagtgggagaaattctcaattggactgtagagtaaggtaattctaggaataggcaagcctccacaaagcctcagaaatagttccacagagaaaagcaaacacaggccatttagcaccgttggccccagaggctctgaggctaacccctaggactgtcgggtggctttcagatcccactcactccacattcatcccaagtctcacttycagcttctttctcatgaagccaagacttcagaagactggtttgttgtccaaccagagagagatggc

SEQ ID NO: 601368 - DNA, 184 bp, Homo sapiens
gtctgtgtgcatctgacccttgcttgtagcctggcaggtcctgcttcctcagggaaatccaccagagcctgtgggctttgctgacctcacctgactttagagtgcactggcttcagccctcactgctcttgccggytccttctcctgggttttgttttttttttttctgagatggagtctcgct

SEQ ID NO: 601369 - DNA, 520 bp, Homo sapiens
aactaaaaatgataattagtgacctacccatgcagtggaatatagatttgttatttgtaaacattctgaaatgaggagtgtgcaagttgtactttacaaagatgccaatcaatcaatcaatcaatcaatcctatcccacattctcttctaacaatgtgactgacactcctcccattgagaggggaagtaagttgtatgctcccatcccttgaatgtgggcaaaggcttaagactgctccaaccaaaagagtatggcaaacaataggtcatacaaaggataaagcttccacctagtttccttcctcttgacatatttgttcttgggatctgatcaccatgttatgaagaagcataaactagcctatgaggagagaacatatrgcacaggcccttttggagaactgagctccctagccaaacacagtcaattgctagacacacgaataaacaatgttgcagattatttcagccctcacagcctcctagtcctcaagttgagaccccgaacagcatgaaagtg

SEQ ID NO: 601370 - DNA, 648 bp, Homo sapiens
catagtgaatcagacccataacaatcagacaagagaaagaaataaagggcatccaagaggaagtcaaactatcgctgtttgctgatgatatgattatatacctagaaaactctaaagatttttccaaaaagatatgataaatgaattcagtaatgtctcaggattcaaaatcaatgtgcacaagtcagtagcactgctatatgccaacaatgaccaagctgagaactcaacttcttttacaacatctgcaaagaaaataaaatgcttaggaaatctacctaaccaaggtggtgaaaggcctctacaaggaaacaaaacactgctgaaatgaatygtcaacaatataaacaatggaaacacatcccatactcacagatgggtagaatcaatgttctgaaaatgaccttactgccaaaagtaagctacaaattcagtgcagttcccatcaaaataccatcatcattcttcacagaactagaaaaaacaatcctcaaattcatatagaaccaaaaaagaacccgcatagccaaagcaagactaagcaaaaagaacaaatctagaggcatcacattacctgacttcaaactgtactacaaggctatagttaccaaaacagcatggtactgatatccaaataggcacgtagac

SEQ ID NO: 601371 - DNA, 619 bp, Homo sapiens
acgttaagagcacggaccctagagccagactgtctggattcaaatccctgctccaccacttaactagctatgggatattctgtgcctcagtctcttcattagtaaaatgggcctagtcagttgtgtccacctcagggttatttagtgagtttagatataatcaatgctttagatatatacaatgctttaaaaatgcctggtwcatgctaagtgacacaaaagtattaactgttatagtgattatatgtgttgtctttatattagttgtactatagaaaatagtgactagtatattatggtaaatctttaacttggtaatatttcatttggtacaataaaacaaattctatttatagttctttgaaatgtataccagacttttcaaatgacacttttatgtgtctttttacatttgccagattctttacattattgttttacttcttgttgagggagatagtgggaaaaatatatttgttgtttctcataaagaaacagacatacagagtgtttaggaccttttaaagtatagcaataagaaagtcagtggaaagactaaaattagaacccaacatattccatgtgccaatgtgttgagccaagctatctgttctcctta

SEQ ID NO: 601372 - DNA, 594 bp, Homo sapiens
ttgaaattttagtaggagattgtattgagtctgtggatcagtttgggaattattgccatcttaacagtagtaactcttccagtccatgaacagtatgtcttttcatttctgtacatttcctttaattttttaaacagtgttttgtagttttcagtggacaagtcttacacttcttggctaaatttattcttaagtattttattccatttaatgctattgtaaacagaattgttttyttaatttcatttttggtttgttcattgctagtttttagaaatacaactgctttttgcatattaattttgtattctgcatttttgcagaccttattagctctaaaatattttagtggattcttccgggtttttttatacataagattatgtcatctgcaaatagaaatagttttacttctaatctggatgtcttttcatttctgtttttcttttttttttttcgcccagtttccctggctggaatgcttagtacaatattgaatagaagaggtgtgagcagacatccttttcttgttcctgattacttaggggaaagcttttactgtcttaccattatgttagttttgaggttttcaca

SEQ ID NO: 601373 - DNA, 635 bp, Homo sapiens
atgggcattatagtgggttagccaggtgggtccagtgtaattcaagggtcttttaaatgtagaagagggaaaagacaagtcagtctcatagtgatgccatgtgagacagatgcaagtgcctttgaatacagaaaggggccacaagcctaggaatgtgagcagggaaacttctggtagcttaaaaaggcaagaaaacagcatcttccctaggcctccagaagtaactcagccctaacaacaccttgatttcagcccagtaagatccatttggggcttctgacttcaaaatcagtaaaatcataaatctgtatcattttaagccaataaatgtgtgataatttattagagcagtaagggaaactaatgtatggaatgttctcaaatttcaggtattagggtgagaatggggggccatttgcctactagaaatatacccatctctttaactgaagagaaagctaacaggaggttaggtaagtaagtagtaggtaagtctggagtttctgatagccactgaccatcaaacaaggacctattktgaaagaccatggcgttttcagagcacctagcatggtgcctgatgctaaatattaaatataaaaactcccttcataaatattaatagcaattcttac

SEQ ID NO: 601374 - DNA, 626 bp, Homo sapiens
ctcacagtaacacagcaatagcattagtaatgacctcaagaatattgtaaagatattaccactaattattgttactatttaaaatacatcacttaatttgaaaagtggtttattcaacaccccgctactatcaccaccaagaactcttagattctgctttacctttgttgtcaaataaccaaaaggatgagaaaaaaatgatttaagttttttcttactatagagaacaagttctcaaacttcatagagcctcagaatctctgggaaagcttgttaaagcacagattgctgggctgcactcccagagtttcagatttagtaagctagcrggaggggccaagaatttgcatttattacaagtttccaagtgacagatgctgaagaactgaggaccaattagagaaccactgctgtagaagaagtttatagtcattggttggaagcctttggttgagagggaaaagagactgagactcacaaattcctggaggaaacgagtaagggaaaaacatagagagaggaatgcccaccttgccctttacagccacagacaagaagacaaagccgaaccccccgtgtcaatcaacactaatgcggtgggagcctgagagcctcaatgttggcta

SEQ ID NO: 601375 - DNA, 626 bp, Homo sapiens
ctcacagtaacacagcaatagcattagtaatgacctcaagaatattgtaaagatattaccactaattattgttactatttaaaatacatcacttaatttgaaaagtggtttattcaacaccccgctactatcaccaccaagaactcttagattctgctttacctttgttgtcaaataaccaaaaggatgagaaaaaaatgatttaagttttttcttactatagagaacaagttctcaaacttcatagagcctcagaatctctgggaaagcttgttaaagcacagattgctgggctgcactcccagagtttcagatttagtaagctagcaggaggggccaagaatttgcatttattacaagtttccaagtgacagatgctgaagaactgaggaccaattagagaaccactgctgtagaagaagtttatagtcattggttggaagcctttggttgagagggaaaagagactgagactcacaaattcctggaggaaacgagtaagggaaaaacayagagagaggaatgcccaccttgccctttacagccacagacaagaagacaaagccgaaccccccgtgtcaatcaacactaatgcggtgggagcctgagagcctcaatgttggcta

SEQ ID NO: 601376 - DNA, 606 bp, Homo sapiens
gcaatggctggctagatacagcctgtagtgcccagattcaaatcttctctgggtgaccaaaacttagccctagtgtcttagagaagcagcaggtgcttttcaagaggcagtgtgctcaatggtgaagagcacaggcttcaaagacagagagttgtgaatctagttacttgtgaatctaacaatgtaaccctcagtagattatgttataataaaaattgttaacatttatttagcatttttatgcctttctatgcactagttgtgtgtgtgtgtgtgttaaatataatttcatttatcctcacaatatcgctaaaaggtacaaaatactataacctcctttatgtaaattatgcaatgggttcagagagcttaaatgacctgcccaaagtcacacagctagtttgtggcaaaccctgggtaaagtgcatgtaatcccatgtaatcccatgtaatcccatgtaatcccatgccagagggcatgttcttattcatagcattatagtatctatagggtgctactcagagtgtgattggagaagtgaaggctgttgtttaaaaggtaaagaacttataaacaaaycacatccctaagcacactacttagtt

SEQ ID NO: 601377 - DNA, 632 bp, Homo sapiens
tgtgtctcactttctacagcttttctttcctgtgctccattctgacccagatatggatctcatcctttttctacaaaaagctttcacacaagctggagttggattaaaaaataatagtatggcgaggcacggtggctcacgcctgtaatctcagcactttgggaggctaaggcaggcaatcacttgatatcaggagcttgagagaagcctggccaacatggtgaaaccccatctctactaaaaatacaaaaattgccaggmacagtggtgcgtgcctgtaatcccagctacttgggaggctgaggcaggagaatcacttgaatctgggagacagtggttgcagtgagctgagatcgcaccactgcactccagcctgggcaacagaatgagactttgtctcaaaaaaaaaaaaaaaagaaaagaaaaaaaacacccaaaaaagtatggagatgaacactaaagaataggaataaatcacccccagtcagaattggcattggctgttaaaagtttcatgtgactactttaccagctgaaaatcagctcttcacacaaggcacatgtaggtcaactgaatttaatgaaaatatgtgaacatggcttttccacttaaatgactgaaaatctaatat

SEQ ID NO: 601378 - DNA, 612 bp, Homo sapiens
taggtgatgttaggagaaacagaatgtattaaacacatagattcagaagaacatgtctgggtcagtgaggaatatgaagacttaggttagataaatagaaactgtcaagagattctgttcttgagtttgcaacatgtaagtgagccaagaatttagtttgagtcagaacaggtgggcagacctcatgtaaaaactggactgtgtcagagttatttcttcttgccccaggaatagtatcctcttctcaggctaatgatgtataatgagcagagccacctgaaaatgcggtaatcagaaactaagcaacaatcctgtaagtttccactttggagatgggatttgggatgaaatttggagggcgttggagaagagactatgggaaaggatttgggttcctttctactgaagagcatcttgggcgtggwgggcggctgctatttcgttgtgcaggtcatacacctgcacaaaccagcccagccaactcctgcttgcctgactgacactccctttgggtggaaggagatccaagaggattaaacaagatcctggggataaggtcaatgctataatgttattttggggagggagagatctttaaaaaggtatttgtga

SEQ ID NO: 601379 - DNA, 618 bp, Homo sapiens
  misc_feature 270: n = A,T,C or G
ctgtggctatatacccagtaatgggattgctgggtcaaacggtatttctggttctagatccttgaggactcaccacattgtcttccatgatggttaacctaatttacactcccaccaacagtgtaaaagcattcctatttctccacagccttcccagcatctcttctttcttgactttttaataatagccattctgactggsgtgagatggtatcttattgtggttttgatttccatttctctaatggtcagtgatgttgagctttttanagtaatcaacataatgtttttaaggttcatccatgtcattgcatttgctcgtggcatgttcccttttactgctgagaagtattctaccgtaagacgtaccacaatatgttcggctatttacctgttgatcaatgcttaggttgtttacaatttggcctatgatgaataaagctgctataaatacttgcatctttgtgtggacatatgttctcatttttcttgggtaaacacctagaagtggaattgctgggtcatatgataagcatatgctcaactttataagaaactaccaaaccgttttctgaaatggttgtgccattttatgttccaagcagcaatgctgaaaag

SEQ ID NO: 601380 - DNA, 593 bp, Homo sapiens
gagtgtgcaaaaaaacaaatcactgcaaccacttagatggatgtctgacccagagatgaaacatattccagtgattctgttttagaaatgtgtccctattgaaccatgcctttctatccctctaagcaccaccattactgtatccctggattatggcaactgccctgtgatggttaatattgagtgccaacttgaatggattgaaggatgcaaagtactgatcttgggtgtgtttgaaagggtgttaccaaaggagatgaacatttgagtcagtgggctgggaaaggcagacccacccttaatctgagtgggtaccatctaatcagctgccagcatggccagactataaagcaggcagaaaaaacgtgaaaagattagactggcttagcctctcagcctacatctttctctcaggctggatacttcctgyccttgaacattagactccaagttcttcagatttgggactcagactggcttccttgctcctcagcttgcagatggcctgttgtgggaccttgtgattgtgtgagttaatactactaaataaactcccctttatgtatacatctaacctattagttatgtccctc

SEQ ID NO: 601381 - DNA, 618 bp, Homo sapiens
ttatgatttttacaaaaggcatattgggttggaggagccagtttacaaattccttagacttttggtgtcaataagttcttcagatgctgttatccttactgggaaagaagaattatgaacaagatttaaaaacctgagagcttgacttaagaaacatgaggtgatgggcattttattagcttgattgtactatcatttcacaaatatgtacacatatcaaaacttcaggttgtacagcttatttattattattttttgagatggaatcttgctttgttgtccaggctggagtgcaatggcmaaatctcagctcacggcaaactccgcctcccaggttcaagtgagtctcctgcctcagcctcccaagtaattgggtttacaggtgcccaccaccatacccagctattttattttttctgaatttttagtagagatgggctttcatcatgttggccaggctggtctcaaactcctgacctcaagtgatctgccagtcacagcctcccaaaatgctgggattacagatgtgagccatcgtggccagcctgtatagcttaaattgatacaatttttatatgtcaatcatacctcaagaagactggaaagaaaaagttgagg

SEQ ID NO: 601382 - DNA, 618 bp, Homo sapiens
ttatgatttttacaaaaggcatattgggttggaggagccagtttacaaattccttagacttttggtgtcaataagttcttcagatgctgttatccttactgggaaagaagaattatgaacaagatttaaaaacctgagagcttgacttaagaaacatgaggtgatgggcattttattagcttgattgtactatcatttcacaaatatgtacacatatcaaaacttcaggttgtacagcttatttattattattttttgagatggaatcttgctttgttgtccaggctggagtgcaatggccmaatctcagctcacggcaaactccgcctcccaggttcaagtgagtctcctgcctcagcctcccaagtaattgggtttacaggtgcccaccaccatacccagctattttattttttctgaatttttagtagagatgggctttcatcatgttggccaggctggtctcaaactcctgacctcaagtgatctgccagtcacagcctcccaaaatgctgggattacagatgtgagccatcgtggccagcctgtatagcttaaattgatacaatttttatatgtcaatcatacctcaagaagactggaaagaaaaagttgagg

SEQ ID NO: 601383 - DNA, 486 bp, Homo sapiens
atacaaggctggagcatgaccacagcagtaacaattcctggtcayggggctaagttgtcctaaaaggtaaatcttatttccctgtgtaaaatataagagatctgagccctggagactccaactaacccctaaggctacacatcttaaaaaatgataaggccaggaggacttgaaaccagaccatctggcaccagagctcttacctttgaagctatgctacatgccctgctcaaaaacagaggctgattgcaaatctaggatgctaggtccgaacagaatctgcagccaagccgataggactgacctctcctctaggaaatgttacccttgagctccttaaatttcccctgattactaaggagtttggtttccatggagactgagacaaagagttccagttaaatatgagagttaaatacttctagttttgaaaatgtgagatcgaaaaggcaagaaaccaggctttcctactgtctcacataattt

SEQ ID NO: 601384 - DNA, 486 bp, Homo sapiens
atacaaggctggagcatgaccacagcagtaacaattcctggtcacggggctaagttgtcctaaaaggtaaatcttatttccctgtgtaaaatataagagatctgagccctggagactccaactaacccctaaggctacacatcttaaaaaatgataaggccaggaggacttgaaaccagaccatctggcaccagagctcttacctttgaagctatgctacatgccctgctcaaaaacagaggctgattgcaaatctaggatgctaggtmcgaacagaatctgcagccaagccgataggactgacctctcctctaggaaatgttacccttgagctccttaaatttcccctgattactaaggagtttggtttccatggagactgagacaaagagttccagttaaatatgagagttaaatacttctagttttgaaaatgtgagatcgaaaaggcaagaaaccaggctttcctactgtctcacataattt

SEQ ID NO: 601385 - DNA, 486 bp, Homo sapiens
atacaaggctggagcatgaccacagcagtaacaattcctggtcacggggctaagttgtcctaaaaggtaaatcttatttccctgtgtaaaatataagagatctgagccctggagactccaactaacccctaaggctacacatcttaaaaaatgataaggccaggaggacttgaaaccagaccatctggcaccagagctcttacctttgaagctatgctacatgccctgctcaaaaacagaggctgattgcaaatctaggatgctaggtccgaacagaatctgcagccaagccgataggactgacctctcctctaggaaatgttacccttgagctccttaaatttcccctgattactaaggagtttggtttccatggagactgagacaaagagttccagttaaatatgagagttaaatasttctagttttgaaaatgtgagatcgaaaaggcaagaaaccaggctttcctactgtctcacataattt

SEQ ID NO: 601386 - DNA, 565 bp, Homo sapiens
agttggctatgtcaatgagacattcaggaggatatgcaaagtaagctttaattagcaatagactagtgaagtcagacagcaagtatgaatctaggagtcacacaatattgatgctacttaaaatcacaggaagcaagatctatgtagtgagactatagaaaagagaagcaaaaggcccagagcacaaatagaggaaaaggaatctccccaagaatgctaaaaaggagtaacaggagaaggagcagaaacgaaagaatgcaaaatgacagaaaccaatagaaaagagagtccggaaaaaaaatgctaaatgatccagagagrcctaataaagtgactgtttaaagtgtttcttacatttggtagttggtgagtttgtagactttggcatgacagtcacagtttcagttatgagttatgggatgaaaatagattggagcaggttgaagatcgatgggatatgagaaaatgaagacagcatgtgcagacaactctttctagaagctttgctgtgaaagaagaaagagaaatagggagttaggctaagtgaaagaagccagacccaaaa

SEQ ID NO: 601387 - DNA, 565 bp, Homo sapiens
agttggctatgtcaatgagacattcaggaggatatgcaaagtaagctttaattagcaatagactagtgaagtcagacagcaagtatgaatctaggagtcacacaatattgatgctacttaaaatcacaggaagcaagatctatgtagtgagactatagaaaagagaagcaaaaggcccagagcacaaatagaggaaaaggaatctccccaagaatgctaaaaaggagtaacaggagaaggagcagaaacgaaagaatgcaaaatgacagaaaccaatagaaaagagagtccggaaaaaaaatgctaaatgatccagagaggcctaataaagtgactgtttaaagtgttycttacatttggtagttggtgagtttgtagactttggcatgacagtcacagtttcagttatgagttatgggatgaaaatagattggagcaggttgaagatcgatgggatatgagaaaatgaagacagcatgtgcagacaactctttctagaagctttgctgtgaaagaagaaagagaaatagggagttaggctaagtgaaagaagccagacccaaaa

SEQ ID NO: 601388 - DNA, 504 bp, Homo sapiens
ttaaacatttttgtactacgcctctgatagtagatgctcagtaaatattagctattaatgatattaygattctgtgcctaaattttcattcataagaactggacttaacaggtataataagaaacactgggccatcatgtgccttagctctctgaatgagaactgaggtaataaaagacttaataggagacaattcatatgacctggaacttctgctctctgacagctaccccagaaagggtctgaaaaagaaacaaagtcatctgcttctaagttactgtcagaggtaggctggcttcatgggcacacaagtgcagttgtatagggctttgtgctcaggagggcccccgcactcagaggactgctgggtttcattctctgctgttaccttcttgaaatgcttaaacaagaggctctgcatttttatttacacagcatcccacaaattacgtagccagtcctgcttagaggttagggttatgagctcttctactttcaggctta

SEQ ID NO: 601389 - DNA, 504 bp, Homo sapiens
ttaaacatttttgtactacgcctctgatagtagatgctcagtaaatattagctattaatgatattacgattctgtgcctaaattttcattcataagaactggacttaacaggtataataagaaacactgggccatcatgtgccttagctctctgaatgagaactgaggtaataaaagacttaataggagacaattcatatgacctggaacttctgctctctgacagstaccccagaaagggtctgaaaaagaaacaaagtcatctgcttctaagttactgtcagaggtaggctggcttcatgggcacacaagtgcagttgtatagggctttgtgctcaggagggcccccgcactcagaggactgctgggtttcattctctgctgttaccttcttgaaatgcttaaacaagaggctctgcatttttatttacacagcatcccacaaattacgtagccagtcctgcttagaggttagggttatgagctcttctactttcaggctta

SEQ ID NO: 601390 - DNA, 591 bp, Homo sapiens
caagtctgcaggaggaatgcatccagggactcacaagtcagccagatcaggacggggaaaccacaaagtagctggagatttccccactagattccactgacatccaatccagagcaagggctgtgtccagtttatctctaggtccccacagaatacagggtctgcacacagtggcccttcatgagaatgtgggcyggagtggttggaacctttttgtttgggtagagaggggagcagctgctgtttttagagaaatatcttggggcatcacagagtgtgaacactgaagtgaaaaatgctccacaaaagaatattttcatcttcaacagacatcgcaaaaatgttctgctgtggtttaatcacgagctcacccacagaaaacaatccacaaataacatctagttcaagaggcagtgagcttttccctcacccatttggaattcaaagatagcagtgctaagaagagaaagcctggcatgcttgaaggacttgcaagggaagcagctaggcaacctccctcacaatgatcatccatcatggtctctctggacaatgaccaaaccacaggagccacatagacacagattcact

SEQ ID NO: 601391 - DNA, 591 bp, Homo sapiens
caagtctgcaggaggaatgcatccagggactcacaagtcagccagatcaggacggggaaaccacaaagtagctggagatttccccactagattccactgacatccaatccagagcaagggctgtgtccagtttatctctaggtccccacagaatacagggtctgcacacagtggcccttcatgagaatgtgggccggagtggttggaacctttttgtttgggtagagaggggagcagctgctgtttttagagaaatatcttggggcatcacagagtgtgaacactgaagtgaaaaatgctccacaaaagaatattttcatcttcaacagacatcgcaaaaatgttctgctgtggtttaatcacgagctcacccacagaaaacaatccacaaataacatctagttcaagaggcagtgagcttttccctcacccatttggaattcaaagayagcagtgctaagaagagaaagcctggcatgcttgaaggacttgcaagggaagcagctaggcaacctccctcacaatgatcatccatcatggtctctctggacaatgaccaaaccacaggagccacatagacacagattcact

SEQ ID NO: 601392 - DNA, 506 bp, Homo sapiens
ctccatgactataaatttcctgaggcctccccagccctgaggaactgcgtgtcaattaaacctctctcttttataagttacccaatctcaggcatttcttcatagcagcatgagaagggactaatacactgggcctcaaggaaaatggagaaaaaaatagctgcctcatttcttaacaaaaggttattgtaaagagagaagaggaaggaaggggcaagatgaaactgggtgtgggaacattttgaaagttaaaagcaatgaagaaatgcaagcactggtagttgtattaaggtattgctgggtgatacrggcatgagtaacagaaatcataatgcagaaagctcttttactttgtattaattaactagtcttacaaaagacctgtaaaatatttactggtggatccattttacagaccagaagcttgaggttcagaaatgctaactgaattccccaaacttacaaaatgggattatgaaattatactggggaagaaggcccaggga

SEQ ID NO: 601393 - DNA, 432 bp, Homo sapiens
ctgccctttcaccaatacagttctgattttgtgtattgtgaactttctgatgtacatcacggtagaagaatggagtgtgctgactgatggaatactcctcctaagacagagtttaccaaccatgtcctaatagtaatagtctttttgaagaattagtctacagtaaaagaaggtgacataaatgctttagcttttagcagagcttccaaggttgaactaggaaacaccaaactcaggatatactatacaatgatgtgggagtccaaagtcagtatgtttgggaaagccagccgactatttccttctcttggaaacttataatgaataatrtcatggtaaaggctctgagaatcctgcaggaaacaagctgcttaattaaccttattaacccagcattccctaaacgtatttgaccattgtaacatttcattc

SEQ ID NO: 601394 - DNA, 577 bp, Homo sapiens
acgtgcctgtgtcaacaaggagacagacatgcaytggggagtaagtagaatgatacattgggtggactgacttgaacaccatccagtgttcaggtgttggattgggaagaggcctgagaaccagggaaattgatggtataactctgagtctgaagtcaaagtcctgagaatccaagggggtgggggagggaaactggtacaaatccctgagtccaaaagcctgagaacctggagttctgatgtctaaaagtaggagaagaaggggtacccagcttctgggtgagggcatatcttccttactcaatccatggattcacataccaatctcttctggaaataccctcagacacccagaaatagtgctttaccaactatctgaatattctttaatcccctcaagttgacacctaaaattaactatcgtggtcacaataatgtactcccatgaagatgtgaataactgatgtctttttttgttactaccccccacccacgcccatgtatatttgcatcataaaaatggagagtgttttcataaaggaattaaaatcaaacatctgatttttaggccatgcag

SEQ ID NO: 601395 - DNA, 577 bp, Homo sapiens
acgtgcctgtgtcaacaaggagacagacatgcactggggagtaagtagaatgatacattgggtggactgacttgaacaccatccagtgttyaggtgttggattgggaagaggcctgagaaccagggaaattgatggtataactctgagtctgaagtcaaagtcctgagaatccaagggggtgggggagggaaactggtacaaatccctgagtccaaaagcctgagaacctggagttctgatgtctaaaagtaggagaagaaggggtacccagcttctgggtgagggcatatcttccttactcaatccatggattcacataccaatctcttctggaaataccctcagacacccagaaatagtgctttaccaactatctgaatattctttaatcccctcaagttgacacctaaaattaactatcgtggtcacaataatgtactcccatgaagatgtgaataactgatgtctttttttgttactaccccccacccacgcccatgtatatttgcatcataaaaatggagagtgttttcataaaggaattaaaatcaaacatctgatttttaggccatgcag

SEQ ID NO: 601396 - DNA, 577 bp, Homo sapiens
acgtgcctgtgtcaacaaggagacagacatgcactggggagtaagtagaatgatacattgggtggactgacttgaacaccatccagtgttcaggtgttggattgggaagaggcctgagaaccagggaaattgayggtataactctgagtctgaagtcaaagtcctgagaatccaagggggtgggggagggaaactggtacaaatccctgagtccaaaagcctgagaacctggagttctgatgtctaaaagtaggagaagaaggggtacccagcttctgggtgagggcatatcttccttactcaatccatggattcacataccaatctcttctggaaataccctcagacacccagaaatagtgctttaccaactatctgaatattctttaatcccctcaagttgacacctaaaattaactatcgtggtcacaataatgtactcccatgaagatgtgaataactgatgtctttttttgttactaccccccacccacgcccatgtatatttgcatcataaaaatggagagtgttttcataaaggaattaaaatcaaacatctgatttttaggccatgcag

SEQ ID NO: 601397 - DNA, 539 bp, Homo sapiens
ctcttctggaaataccctcagacacccagaaatagtgctttaccaactatctgaatattctttaatcccctcaagttgacacctaaaattaactatcgtggtcacaataatgtactcccatgaagatgtgaataactgatgtctttttttgttactaccccccacccacgcccatgtatatttgcatcataaaaatggagagtgttttcataaaggaattaaaatcaaacatctgatttttaggccatgcagaagaactgtagccaacaaatagacctgtgtgtgtatgagtgtgtgtgtatgttttaggagaacagagcaaaaaagggaatatactatagttaagtctctagccaagatctgaacaagatctacttatctcatctttgtccctggctaatataaatttctatggaattttcttaatccatggagatactagagatatgttgtattttctgtcagttcaaaatttggaagtcttgacaggttccatrtttgatcacttcagacagtaagctttaagtaaacacctccac

SEQ ID NO: 601398 - DNA, 590 bp, Homo sapiens
aagccacctgcctgaacctcttatttggcagttagcataggctaccatgtgtggttatctacccacctaccgaccaaccatctatctgcatcacttttgtctacaccaaatagctaatattctccttcaggctggaacctgtgtacctctagaattagacttggtatggagagtcagaattttaaatatttattattaatgataaagggtgtgttgtgatctatatatgagattctgctgctttgaagaagaaatatacacttcaaggtagatttatcatcctgaccatgttcaaagattattcgagaatgcctggcttgagataggcaacctatacaaatggagtatccgtgtgattaaagcggagatacagagcagactgccttggtttagaccaattcttttacctctctaagccttggtttcctcacctaaaaaaaatggccaaaacaatacctatttcctaatattatttgaagcataaaacacacacacayacataaatattttttcactcatcagataaatttttaagcatcagtcttgtgccatgcaggaaacaaaggaaagttcctcctcatagaaagctt

SEQ ID NO: 601399 - DNA, 626 bp, Homo sapiens
gctggtgacaaaaaataaatcagggaagagggatatgatgtgcgacattgggggcctccctgagaacgtgacttgagtagacctggagggaatggaaagtgagacgtgtggatactgagggaagagtgctccaggcaaagggaacagcaagtgcaaaagcccagggacagtaaacctgctttgctccagaaaaacaagatcggtgtggctggagcagagaaaaaggggtgagggagagtagcaagaaatgaagacaaaaaagtacaggaagctatatcatttcaatttctctatttctaaaagggtggaagcagggtgattaagaataaaaaaaaaagacacctgaaaggttgtaataagtattaattgagcttgtgtgtgtagattgcctagcctagtatttaacactaggaaattttgaatttcagtcacttttcatttcttttaacarcttgctgcacctaatcctcccccttttccactctctcctggtttcccagccctcactctaattctctcctgccatcatctctccaaccaccccacagcaaagctgctctcctgtggggctgtcactttctaaagaatatgatacatggttcacaccacggtgataataatctcct

SEQ ID NO: 601400 - DNA, 635 bp, Homo sapiens
atttaacactaggaaattttgaatttcagtcacttttcatttcttttaacagcttgctgcacytaatcctcccccttttccactctctcctggtttcccagccctcactctaattctctcctgccatcatctctccaaccaccccacagcaaagctgctctcctgtggggctgtcactttctaaagaatatgatacatggttcacaccacggtgataataatctcctatatttcaatgggttttttttacaaattccagaagactttggcttgcattggctcattagatcctcaaaacattcctgtgaggtagaaaggaggacagggtttccttgttataaaagaagaaattagcattcaaaggttaagtgacctctctaggttgtgcacctatacaatgacagaataagcgcagaattcaaatcccttggttccagtctggactgtctctttaatgactgtcacaactgaatgtgtccacttcccagggtcacataaaagtagaggtattggaaacaccagccttaacatgaataagggcagcaacctagttcagacacttctggcagcaagaccaggccagcagctgaccagggactgtattctcacacagctgatgctcactgtccatgctg

SEQ ID NO: 601401 - DNA, 635 bp, Homo sapiens
atttaacactaggaaattttgaatttcagtcacttttcatttcttttaacagcttgctgcacctaatcctcccccttttccactctctcctggtttcccagccctcactctaattctctcctgccatcatctctccaaccaccccacagcaaagctgctctcctgtggggctgtcactttctaaagaatatgatacatggttcacaccacggtgataataatctcctatatttcaatgggttttttttacaaattccagaagactttggcttgcattggctcattagatcctcaaaacattcctgtgaggtagaaaggaggacagggtttccttgttataaaagaagaaattagcattcaaaggttaagtgacctmtctaggttgtgcacctatacaatgacagaataagcgcagaattcaaatcccttggttccagtctggactgtctctttaatgactgtcacaactgaatgtgtccacttcccagggtcacataaaagtagaggtattggaaacaccagccttaacatgaataagggcagcaacctagttcagacacttctggcagcaagaccaggccagcagctgaccagggactgtattctcacacagctgatgctcactgtccatgctg

SEQ ID NO: 601402 - DNA, 319 bp, Homo sapiens
gcttccttgctactctgagctgcctcttgactccctaccctctgtccccttgccgtgctacctccaaaagcagttcagcttttataaccagaaaagctacttttaatactcctaccaaattaaatttaagggacaaacacagaaaagagagagagggacttagctgagggttgggaaagaaacagcctggattgctgaggggagtcccagtgaagaatctcctggaattgttcccacctgaagaaagcasatgtcatggcagccattaacaggcatcataaggaggtctaacaggcccacatctgagtggaagatggtt

SEQ ID NO: 601403 - DNA, 319 bp, Homo sapiens
gcttccttgctactctgagctgcctcttgactccctaccctctgtccccttgccgtgctacctccaaaagcagttcagcttttataaccagaaaagctacttttaatactcctaccaaattaaatttaagggacaaacacagaaaagagagagagggacttagctgagggttgggaaagaaacagcctggattgctgaggggagtcccagtgaagaatctcctggaattgttcccacctgaagaaagcacatgtcatggcagccattaacagrcatcataaggaggtctaacaggcccacatctgagtggaagatggtt

SEQ ID NO: 601404 - DNA, 457 bp, Homo sapiens
cctttctcctcccttacagtttagtgggtcaagaaatgtttgcctcttttaaagttgagtcatttttttaaaaagcgtagaattcatacaaagataagatggaaaaaagaaaagaataaagaaaagcaaatgctttttaaagaaaggcgaagaagaatacagaacagtsccatggagaaaaggaaaactgcaatagaaatttaaaagaactaaaaaacaatgtcctctgttagacatgcacacaaagctcatatgcgaaaactcaaggaagaaagagcaaaaccagaagagctaaatatgggctggaagcattcagaaaagaaaaaaatagggccctcacagaaataaaagcaaaattagaaggagcaaaatggaaaacaaccaccagttaacacagtatgagacataaagagacatgaaggaaagaaaaaaattaagtggaaataaagtttaagaa

SEQ ID NO: 601405 - DNA, 461 bp, Homo sapiens
agaccagcaagcaattcatctcgagctcagtggtgccacatacaggtatctgccaggcatcgtgggtgtggctccaggagcactccctgcagccacggaagggatcatccttggaggcatcccagtgattcacaatctcccgacagtggtacatccttcccaagctccctctcccaaccagcccacaaaacacggagacaatcgagagcaccccaacgcmcaatagcagagaatgccaaaaggtaatcattccaatacacttgggaccaagagagtgaacaaatagatggaataaaataatttgacggtctttttaactgattctggacatatccatcattgatgttgcagtgttaaaactacaagagctagaaaactgaaaatgtcatctgcttgtggaagtgctgaaagactaggatgtgatttattaacaaccaacttctgttattgtgtgttgagtt

SEQ ID NO: 601406 - DNA, 624 bp, Homo sapiens
ttacctagccttatgagttccttatggaaatgtaagttaaaaatacaatgagatgtcactttattcccacgaatataactaaaattagaaagatcaacaataycaagcattggtgagaatgaggaggaacaggaacattcatatcctgctgttacaagaagaaacttgtacaaccactttgaaaactgttagtgctttttttttctaacaatgcaatgcctaaatctgtaccaatagaaatggacacacacaaacacacggacacacacaaccccaaatgaatgtctgagaatcttcacagcagcattattcataacaaccctaatatccagtaacagaggatggataaattttggtgtattcatataatagaatactgcaaaacaatcaaaattagcgtattgctgctacatataacagtatgtatgcatctcatgattatagctctttcagagaagttaaacacaaaagtatacatactttatgcacatcaatggccatatatgatttcatttatatggtatatgagcactagcaaaactaagttatgattttcaaagtcggaatggtggttgctttgaagaatttggagggagagtgattggagagctatagaaaatgttc

SEQ ID NO: 601407 - DNA, 478 bp, Homo sapiens
ttcactgcctcaacttaatgtgcacaccacttaacactctcatccctcttggctcccaataaacaaaccataataatagaaagtgwtatctacccactcaacagacaatttcatatgatagtacctactgcaattgcttctgaaattacccaaatgtcttcctgtaaaccttagtaattgagtttggcatataacacactttgaaaaagaaataatacttttcccaaatcgaaaactttaatttatttataataatttataattaattaatttagttaattccaagtgttttgctacccctaaatcatgcatctattttgtagtttttttaacctattagcgttgtgatggattagatgtctcaattaagccaaatgatgccctataatgtccctaaagagtggtatgaatggaaaactttaaaataaacatgtctggacaaaaatcaaatatatgaacaaagaaaatcatatgtttt

SEQ ID NO: 601408 - DNA, 452 bp, Homo sapiens
ctggtaggtaattaaggttaaatgaggtcataagtgtagggccctaaacytgttaggattattgccattatataagataagacaccagaaactcattcttgctcactcaagtctctctttctcctttctctccacctctctctccctctctctctctttctctatcttccccccccacccccactttctcactctcactcttggtactatttgaggacacagggagaaggcagctgtctgcaagccaggaaccaaattggccagtacctcttggacttcccagcctctagaactgtcagaaataaatttctgttgtttaatttacttagcgtatggtattttgttatggtagcccaagctaactagtgtgaggtggaagcttaattaggttttgtttccctgacaaaatctttcagatttagagggccacctatgagtttaggtgatccctc

SEQ ID NO: 601409 - DNA, 627 bp, Homo sapiens
tacaagttccatacaagtgaagggacttacccaaagttggccagtaagacattacaaaaactgactttttcctccttaatccagatcaggtctttctgactatcctaaastgcaccatcccatctcatctttctttccccttacacacatatacaacacatatgcatatatgcacacacagtattaaccttagcccacatcagcaggtcagtactcacagcctcatagacattccttctactttccacaatcccacccattccccaaaccccacagctttaggctaaaccctcctccactgggtctttggagatggagtttcactcttgttgcccaggctggagtgcagtgccccgatctcagctcattgcaacctctgcctcctgggttcaagcaattcttctgcctcagcctcccaagtaaccaggattacagggatgcgtcaccatgcccagctaattttttgtatttttagtagagatggggttcaccacgttggccaggctggtctgaaactcctgacctcaggtgatctgcccaccttggcctcccaaagtgctggatttacaggcatgagctcacgtacccggccctcctttgggtcttcatttacatgtttcttcttcc

SEQ ID NO: 601410 - DNA, 570 bp, Homo sapiens
aggtttaaaatgccctgagaacaataatcttctctcagaaaaagatgtgtctggaattggtcacctccagctttttgtgaacttgatacaggactgaggactactcaacaccccaaagtgagacagaaagacacaaagaggaggatggacttagtggcaggtggcacagatttcagcctttttcagaggcaaaggcatagctctgtttcctctgttctccctctctcccttcctctgtctggagctgtgctttccatgcccacatccttacaagttcaagtatctcccctgccctcatctcctaagggaagggccaagggggtcctcattmataagaacaaatggtgctggctgcaagatgtgggtcaatgatgaggtcaaattctgaatcccttggtttcaaattttgcaatgattcctcatttctcatttacctgtttccaatccgcattttcagatatgctattattatcatgggctagggatatctatgtgaagagctggttttcttcttgggtttgtccttggcaggagtgctttgcattagccatatgtgatagtttatgaatg

SEQ ID NO: 601411 - DNA, 439 bp, Homo sapiens
ggtactctttgtgggctgtgggtggggagggtctggcacatttcacacggaataattattttgaaatttaagcagtctttagtmtatcaggttgacactctctgttcttcaccatcttattaggagatgtcctcgccccacccgatctgcctctcttgtggtttgcaggacagcctcctgctgcaggaggtgggaagcgagccagtcagagcccctggagtggaggccccacgaccttctcatctgcaggtcgcgtctcctgtggcggtggcagcagcagctgcccatatgtgtggagcacttaagtgcctgggccctggaccccataccgttctcatgccgggtgccctttactccctgattccacagggctggtcccattgtcctcaggcccagagaggcgggctgggatccaggtctgccacgccagctgcactca

SEQ ID NO: 601412 - DNA, 439 bp, Homo sapiens
ggtactctttgtgggctgtgggtggggagggtctggcacatttcacacggaataattattttgaaatttaagcagtctttagtctatcaggktgacactctctgttcttcaccatcttattaggagatgtcctcgccccacccgatctgcctctcttgtggtttgcaggacagcctcctgctgcaggaggtgggaagcgagccagtcagagcccctggagtggaggccccacgaccttctcatctgcaggtcgcgtctcctgtggcggtggcagcagcagctgcccatatgtgtggagcacttaagtgcctgggccctggaccccataccgttctcatgccgggtgccctttactccctgattccacagggctggtcccattgtcctcaggcccagagaggcgggctgggatccaggtctgccacgccagctgcactca

SEQ ID NO: 601413 - DNA, 439 bp, Homo sapiens
ggtactctttgtgggctgtgggtggggagggtctggcacatttcacacggaataattattttgaaatttaagcagtctttagtctatcaggttgacactctctgttcttcaccatcttattaggagatgtcctcgccccacccgatctgcctctcttgtggtktgcaggacagcctcctgctgcaggaggtgggaagcgagccagtcagagcccctggagtggaggccccacgaccttctcatctgcaggtcgcgtctcctgtggcggtggcagcagcagctgcccatatgtgtggagcacttaagtgcctgggccctggaccccataccgttctcatgccgggtgccctttactccctgattccacagggctggtcccattgtcctcaggcccagagaggcgggctgggatccaggtctgccacgccagctgcactca

SEQ ID NO: 601414 - DNA, 580 bp, Homo sapiens
ttgggaaacacagcaaatccttgtctcaaaattaaaagaaaaaaggaaaataaaacatttaaataaaacaatataaatttttttctaaaattagttaactaagcctgtcatacctttcgttttatgaccatcactcagaaattgcaattattaaaatttgcctgagttttaagcataagagctgtaatgtggcttgctatatctgtttattaaatagatagatatatactgacattcaattttataggcatacataattcaatatagggctacatacatatgtagctatatacagatatgcattcatatatacatatatgtgcattaacacacatatatgtacatttacatgtatacagatatagatatatttagatatctataaatacytatatagctatagatagatagatatttcaaatatgtatatatatatatgaactacacattacacatatatgtgctttttatgattttacatctctgttcatgtcagatgcaggaattaattttctgtttctaatgcttttattcgttttggaaatgaagtttattgtgaccacatataataattctggaa

SEQ ID NO: 601415 - DNA, 630 bp, Homo sapiens
tccacagtcaataatatatttggctttttgaacatttataaaatagtgagcaattcatttacattaggtctgtttggagacgtggcaagactgggagtttggggaatctaaatattatttttcatccactcacttttataatagggcctagggaagatgactggataggttcttcatggttactgcagaagatagactctctgggccttttctcccttcacttgtgtaaagaatgtcttcaagactccgacttcactaggacattaattcataacaatatgatagactaggtttttcattagagaagaaatataaaatgctttccagaagggaaaatggcaggaaaataatattttcagaaactgcctacagatctcacactgaacttagtggaagawtcatcttgtagaaagcacaaaccctttctattttttttttttttttacagatgtttggagacatattacacaggtgcgttgtacctagattttagcaggtattctttcagtttccagaaatatcaaacaggatcgactaaagcgaaggcatacatgatcaagatattaatattactttttcctggatctactttcgctcccccaccttatgtagtcatctattatgtcgcca

SEQ ID NO: 601416 - DNA, 500 bp, Homo sapiens
cagaaaccttgtcacatttagtccaccatattttgaggtttctttgtaataaatttaattatgctctgattctccttgtgtctctctcctttcagatttggaatcatttacttttcaccattttgacttgagaatatagacctttgcgatatcagcatcaggtaggttgtacatttgtttgcttttcctaagaatatatctaaccgccttgaatgggttttgattttatcttctgtctcacagaaaagcagaaactcaaggtgactaggtgctgtcaatcacaggagggctaamgtgacaacggaattgctgtatctcctgctgttgctacttacatcttattttcttttactgcgttctgtaataacatttaggctcaaagaaacattaattagtatttttgaataacatattaagtgcttatgtttcttaatttgagggctatggtctactaaacatctatatacattttgccatgcaacttttcaacccaacagaaa

SEQ ID NO: 601417 - DNA, 543 bp, Homo sapiens
gaattctcagcaagcgccttgctacctctgaaccttgccatgattaccacaattataaactcaggcctttctgcagttttgtccacatagcaaaacttcctccaagtctttaaaatttaaatgtctttctttcagatttgagggcaggagcacatctcgcattgccctgaacactttgyttcttttctaccatcctcatctctctgagccggctcttccctctcaaaatgtgtcctatcaatctgatttcttctcctaatgtgaaaacaaatgaacaaatagtcccctacttttgtcatctccagagaacacaagagctaatcacatacccagagactatgagagtttaaaggatttatccaagagcttttacacataagaagtattctcctgctagccctcttcacagtgaaatgcctgtgtgtcttgttaaaactgacactaaaaaatgacaagatagagccattttgaagaactgagggtgaccattccaagataattcaggtgtttcctaaattttctgaatatccctatgcattaaaa

SEQ ID NO: 601418 - DNA, 550 bp, Homo sapiens
ggcatcgatggtgcagggcagagacatgcactgagtagctgctgccctcactgaagagaaagtgttcactgacttggcctttccccaggacctctccctcccctgctttccagaaagcccagttttttgggagctgtacctgaacacctgggaacattccagtgggacaggcagctcagagcattagcaagggtcagttaccttgttcttcttcctgtggagacaattgatcatcatgggtcagcaagacgkaggtgcttgtccatttagtccctgtgttattacagagacctatagctctggattatggaagatctgtgagtggcacaggcattgaggaatcacagcatcattattgtgcatctgcagggaatggcttgaaaatagactggtaataacaaatgtttcaggtcactacaaaatacctttgaatatttaaatatgcttctgacaaagacttttttcccacatgaaacaatgggagcaacgtgacaatcacagaggtgttgttagtataacaaagggattgtcgctcccacaatgtccactt

SEQ ID NO: 601419 - DNA, 515 bp, Homo sapiens
ccatatgtatatgtcccaagtcaattttatatattcagatattagagaaataaaaatctgacaaaataaaacaaataaatacaaataagcagaattagaaaagggtattaatgtattaatgayatcagattcattaattgttagggacttaaaatgcactagaaaaatgtaatattctgtatctagattataacaatttttttttgtcattgactttccaaatcttactagaagttttctatctcttatcttaatttttggtagatggaaaatcactctagattgaaatttatatgatacagatcacatgtaatttatataggttcaacatgccatagactatcttgttctcattttcattttcagtttaaaaatattataaattagaacatttttattgtgcattgaatggaaaaataaaattgaaactatatttatgcctttgaagttagtctcttcaaagtaaagtggtaaattttcatctggttttggtttactgtttttgcaaaaagttc

SEQ ID NO: 601420 - DNA, 515 bp, Homo sapiens
ccatatgtatatgtcccaagtcaattttatatattcagatattagagaaataaaaatctgacaaaataaaacaaataaatacaaataagcagaattagaaaagggtattaatgtattaatgacawcagattcattaattgttagggacttaaaatgcactagaaaaatgtaatattctgtatctagattataacaatttttttttgtcattgactttccaaatcttactagaagttttctatctcttatcttaatttttggtagatggaaaatcactctagattgaaatttatatgatacagatcacatgtaatttatataggttcaacatgccatagactatcttgttctcattttcattttcagtttaaaaatattataaattagaacatttttattgtgcattgaatggaaaaataaaattgaaactatatttatgcctttgaagttagtctcttcaaagtaaagtggtaaattttcatctggttttggtttactgtttttgcaaaaagttc

SEQ ID NO: 601421 - DNA, 411 bp, Homo sapiens
tcattataactaaaaaaaatctaaattttaaattatctatgggtaaaaaaaaatcaagcaaacagaaatattcaagaacaccaacaaactccagcaagctacctccatggaacagggtagagggcaactagcaatgcctaaaattaatgctgaaccatcagccaagaatggaagattattcaacttgtgaaaataaagattgcaggggtcaaattgataaagtataagggcgtgttggatgaaaaggtagtctcctaggagtggaggaacacagtgaaaggagttgatggaaatggaaaagcattctttcgaagcamaaggatgaattgcaaaagagcaagtggaaaaaaacaagattttcaaggcaaaagaaaatttaaaaaattaaaagcgtacaacctggtccccact

SEQ ID NO: 601422 - DNA, 593 bp, Homo sapiens
gtatatattttaaaaaactgataaaaaggtcttgagatatttatacacccatgttcatagcagcagtattcacaacagctaaaatgtagaagcaactcaagtgtccactgagagatgaatggataagcaaaatgtgagatacatacgatgaaatattactcaagcttaaaagtgaagaaaattatgacatatgctatataacgtgaataaaacttgaggacattatactaaatgaaatcagccggtcacaaacaggcaaataagacaaattccacttatgtgaggtacttagagtgggcaaaactacggaggcagaaaatagaatggtagtttccagaggttgaggaggggggaaattgggagtcatttttaaatgagcataaacttttarttttacaatatgaaaagagttatgaagactgatgatggtgacggctgcacaacattttgaatatattaactccactaaactatacacttaaaaatgcttaaaattgtaaataaatttatgttagttgtatttcaccaaaataaaaaaaaaactgtttcctgcaggtaaagtgcttagagcagttaaacactcaacgttatta

SEQ ID NO: 601423 - DNA, 551 bp, Homo sapiens
gggctttatgtagcaaagctgctaggccagcacctgattacttgccttaagaattgtaagtgaaagacagatgcatttgtcttctttcagccactgttattttgggcctcttttctttsataaaacctagccctaactgatacactgtgtattatggaaatgttaaaatgttaattgctagcatatcagaaagagttttggttcctaaacttgtgtttatagcatgtatgccctggaaaaccattgttagctagacaatcaataaatattttagggttaatggggaaaatcaaacactgggcttaagtagctgctggtcaagagactattataacagatcaagaataatagataagcatttgaaagaaggaaattgagtataaagagtgatattttaaaactctttctacttcatatttgcccctatttatattgatcaatgattttcttaatcaccaaaaatattttaaaattttgtgttaaaagtaacaagtttacactcttttttgaattagtaaaattttcctcagctttcttgcactttgaatgac

SEQ ID NO: 601424 - DNA, 616 bp, Homo sapiens
ttttagtccaataacattttcccacacaattttttgtcagtttatgttattctgagttccttataagagataccattaagtaataaataatttctaattttcccttgaataaagtttccctgtgaaatgcatattatttttatttcctatatagttaacacatttcagattttacaaaaatttaggtcactctataaaatatatgccaagaattttaactagagcaaaacgttttttyatttagtaagtacatacttttggtgatgtcaatcttaccctaatgttttttaccttaacattattccttcccaattttaaataagaaaatgtcagttttgaacctcaaacttggtaaatttacttatttattcattcaacaaatgtgtactacgttaagccctgtgttaagaatcataacattttctttatgtatcttatgctttacctttctgggagaatcatctccttcttagtgtcctccaccctccatacactattttctgccacaggctatcataaatattttatagacttcatttttgttcatgtgtttcgcttatctagaattaggaaggaactacatctgtcttctgtcaatatccttgatacctaactt

SEQ ID NO: 601425 - DNA, 413 bp, Homo sapiens
gaattcctgctctccagaagtttacagtcctagtaaaatctggagacatttttggaacttaattcttgctttacataagaataaatattattaacttcttggtaagaacaagacttgtgcaatgagaagtggttcatcaaattgttctcaggaatttgcaccatataacaaaggacattttcatccagtcaaaatatccattaaaaaaaaagtgatggttgatttttactcagtcttctaggactgcaaactaatggttacaagaacattttttttctccaataataccaggttattrtcacatagcccaattgaaaaggctccattttatgaccaaattgtcccctttcccctctgagcctctgaaatgaatagaggagataaagtgggatctgagtaaaaaagtataattt

SEQ ID NO: 601426 - DNA, 547 bp, Homo sapiens
gaattcctgctctccagaagtttacagtcctagtaaaatctggagacatttttggaacttaattcttgctttacataagaataaatattattaacttcttggtaagaacaagacttgtgcaatgagaagtggttcatcaaattgttctcaggaatttgcaccatataacaaaggacattttcatccagtcaaaatatccattaaaaaaaaagtgatggttgatttttactcagtcttctaggactgcaaactaatggttacaagaacattttttttctccaataataccaggttattatcacatagcccaattgaaaaggctccattttatgaccaaattgtcccctttcccctctgagcctctgaaatgaatagaggagataaagtgggatctgagtaaaaaagtataatttagacagataaaatatgattcagaggagaatttggtgacaatatggagayacaaaaataaagaaatcgaatctattgttagaataggcccattgtatcctttcttcatgccttgtccctagatgatttttcaatg

SEQ ID NO: 601427 - DNA, 547 bp, Homo sapiens
tgacattacattcacaatagattacattgaaatgtgacattcaccctatgttttatgtttatcgaacataaaattatgtacatgaaattawgaaaatatatataatagttatacagttataaaagatacataggacataaaatcacacattaaattaaaatgaccaccaatattctgttatgtctttttctactgtttatttctatgctcatatatttgttaaaaatgtgggaaaatggcatttatattgtacatactaagtttcttactacattagccccacttactctccaaaattaccattttgatgactgcataagattctatcatttagatgtggcatgatgtatttattcatttgccttatctttaagcatagttttaatatttcataattataactcatatgaaagaaacatatttacatagtctttacctctgtttctcccttttttgagaattgatcactctatcataatattgcatttatgatatataatatatatcctcatgtacatattttaaagcttaataaatatagccaaac

SEQ ID NO: 601428 - DNA, 670 bp, Homo sapiens
gaggccttcatttatatcagcagaggctgaactgtgtggaaaatctaatgttattgatctatgtggaaattacactgtgaggttctccttaattgtgtgtcaaaatccagttggctacagaggatatttattgtcaacttctaccacaatatcatgtcttattgccaacattaaatttcaggtaagtgcagaaatacatacctgttcccaaaaaggccaataaaatatagtacatattaattcatacttgaatgaataaaaatttaaaattttttgatggaatattcattttgaggcactcagaaaccattacaatatatcacatttgtcaaaaaataatgcactctgttagctacaataatatatgagaagttaatattcttttatattgcaacaagcataattggctgctgcacataggaatactgtagtgcatccttaaatactgtatctctaaattgtagatataatttaaatataaaattatttcatatatattataacrtgtgcaatttaatttaaatacaaatttagaaagaattacaataaaaagagcttcctaatcattcttattttgaatttttctgttatttattactgtcttctgggagggcaagatttccatttttgtaaaaacacattgaggtgttagcctgacactgctaaatta

SEQ ID NO: 601429 - DNA, 373 bp, Homo sapiens
tgatcctatttggaaataaaatccagtatttgcagatgtaattgattctggcccaattgttctatagaaatgatgttcatggtttcttttgaataaacacagaaattaacccagtcttaaaacttgaaaaagttacaattatcttacctaagttcctttytcaggaaactaactatcaagccttccagacagtatcaaggaactgaaacttaccagatcaccacatctggtcgaggagatgctagacccctcacgcattatgattgtctagccgaacacctgcctcctgacgaccaactcctcttccctcgttcttgttttccaacgcatgggtacatttcttccctactatacaaacccttaattttagtcc

SEQ ID NO: 601430 - DNA, 586 bp, Homo sapiens
ctgctctgttgcccaggctggtctcgctgcaacttccacctctgggttctagccattctcttgcttcagcctcccaagcagctgggattacaggcacctgccatcatccttggctaatttttttttgtatattttttagtagagatgggatttyaccgtgttggccaggctagtctcaaactcctgatctcaggtgatctgcctccctcggcctcccaaagtgctgggattacaggtgtgagccaccacgcctgggcaattcttgggtttttaaattgttctttttaatttttgttctttttaatagaattcataaaagctgctaataacaaattccatagattgaataaaacacagttcatgtatctggacactggctatgtagccaccaggtgataaggtggctatgccaggtttagcaagtgatttccatttctggtctcacagtgactgctctcgttaccaccatttttagacagcaggaaagggcttgtggacataaaggaaaaggcagtaattttttaggcaagttgaacccagtacttcaacatacatctccaagtctagtcttatgttcataactagt

SEQ ID NO: 601431 - DNA, 621 bp, Homo sapiens
ccaagctaaataagggttccaggaccagagtggctagcaaccctgtcctaatggaaaatgaaggggagctggacatgggtatttttatagggtacttctttgacctggtgactagttgtccaaccagtaaccaggggatccctcacatgagataaccgcttatactgggagatgcccttgtggctcctttggcccatgtctagtttatgccaggcygaccattgctcgggcactgtgagtccaaccttttattctcccttggggcagatggaaggtacaaattcaatacactgtcacaatagaaaataactccaaagacttttttacttacagatcctgggcaaggcgggcatgagtcaggagggcagacttccttcctgagtcgcacaaggcagaaatgaagggtcaagcagaaacagagataagtggcaactagaggtatatatgagggaacagagcttgggtcactttaagtttgtgggcaaatgcctcagagtttcctctaaagaaaggggccagaaagggagagcccagtctactaggctaggcagaagagatggatctgagttatctctggccactggcttgagctacttgggtaagatatagaattggaaactg

SEQ ID NO: 601432 - DNA, 621 bp, Homo sapiens
ccaagctaaataagggttccaggaccagagtggctagcaaccctgtcctaatggaaaatgaaggggagctggacatgggtatttttatagggtacttctttgacctggtgactagttgtccaaccagtaaccaggggatccctcacatgagataaccgcttatactgggagatgcccttgtggctcctttggcccatgtctagtttatgccaggccgaccattgctcgggcactgtgagtccaaccttttattctcccttggggcagatggaaggtacaaattcaatacactgtcacaatagaaaataactccaaagacttttttacttacagatcctgggcaaggcgggcatgagtcaggagggcagacttccttcctgagtcgcacaaggcagaaatgaagggtcaagcagaaacagagakaagtggcaactagaggtatatatgagggaacagagcttgggtcactttaagtttgtgggcaaatgcctcagagtttcctctaaagaaaggggccagaaagggagagcccagtctactaggctaggcagaagagatggatctgagttatctctggccactggcttgagctacttgggtaagatatagaattggaaactg

SEQ ID NO: 601433 - DNA, 591 bp, Homo sapiens
cttatccattctgccattctgtagcttttaagtggagtattcaggctatttacattcaatgttcaaattgagatgttaggtaccgttgtactcattatactagttgttgcctgaataccttgttgttgttgttctattgtgttattgtttkataggccctatgaagtgtatgctttaaggaggttcttttttggtgtgttttgatgctttgtttcaataattagagccgtttttagcagttcttgtggtactggcttgattgtggtaaattcattcagcatatgtttgtccaaaaaagactttattcttccttcatttatgaagcttagtttggccagattcaacattcttgactgataattgttttgttcaaaaaggctttaaagatcagtctccaatcccttttagcttgtggggtttctactgagaaatctgcgttaatctgataggttttcctttacaggttacctgatgtttttgcctcacagctcttaagattatttcctttgtcttgaatttagataacctgatgactgtgtacctaggtgatgatcattttgtggataaattttctgggtgttatttgagctt

SEQ ID NO: 601434 - DNA, 598 bp, Homo sapiens
attattccctcaaggaagttttccaaactttgatatttctcttcttccttgggaacacaaattattctyaggtttggtcatttagtataatcccaatcttcttggaggctttgtttttgtttgttggtttttgtttgtttgtttattctttgatgcttttttccttatcttattgggttaattcaaaagccttgtcttcaagctctgaagttcttttttctacttgttctattctgtcattgaaacttcccagtgcattttttatttctctaagtgtgtctttcatttcccagaagttgtgattgtttttttattcatgctatctatttttatggaggctttttggtccacatcctgtattattcttcaactttcttttagttcattttcaccattctctggtgcctccttgagtagcttaataattgaccctctgaattctttttctggtaattcagagattgcttcttggtttagatccattgctggtgacctagtgtgatcttttggtggtactaaagaattttgcttttttatattaccagaattgtttttctggttctttctcatttgggtagactgtgtcagaggaaagacc

SEQ ID NO: 601435 - DNA, 539 bp, Homo sapiens
ctgttctgtctatccgagtgggaactgcaagttagtactgcctcctatctgcctttttttcctgtaagttattttttgagtaaatttaggtamtttatatttttctaaaaaatctgttttatccagattttaaggctaatatgaatatgttttagcgaaggattttatttcccaatgtaacagtttttccatttttacttttaaactagcatttttttttttttatctttccagtctcctttgtttaactagtggattatctagtttcttttccaaaaaaaatctttttttttcaaatattccttaaggtttcaaatttattaatctctactttttaaaattaaatgatctctgctttccttacacttctttgcattttctaacttctttagatgaatgtttaattaatttttcaagactatatgtttcatgcgtgtccgtgtgaagagaccaccaaacaggctttgtgtgagcaacatggctgtttatttcacctgggtgcaggcgggctgagtctgaaaagagagtcagcgaaggca

SEQ ID NO: 601436 - DNA, 558 bp, Homo sapiens
ctctgggttctagccattctcttgcttcagcctcccaagcagctgggattacaggcacctgccatcatccttggctaatttttttttgtatattttttagtagagatgggatttcaccgtgttggccaggctagtctcaaactcctgatctcaggtgatctgcctccctcggcctcccaaagtgctgggattacaggtgtgagccaccacgcctgggcaattcttgggtttttaaattgttctttttaatttttgttctttttaatagaattcataaaagctgctaataacaaattccatagattgaataaaacacagttcatgtatctggacactggctatgtagccaccaggtgataaggtggctatgccaggtttagcaagtgatttccatttctggtctcacagtgactgctctcrttaccaccatttttagacagcaggaaagggcttgtggacataaaggaaaaggcagtaattttttaggcaagttgaacccagtacttcaacatacatctccaagtctagtcttatgttcataactagttgcaagggcag

SEQ ID NO: 601437 - DNA, 622 bp, Homo sapiens
taaaaacttttacaaagacatttatgcatacatatgcaagtrtcacctgcagatgctatgtcaagatgttagtggtgaaaggactataaatttggctttattctcttatatcagaatattactgtagctcagtaaaaatcaagttaacattttcttcatttttcctttggataaaatctgtattagaatttattcaggattttgcaattcagtgacatattaccaaataagtcaacagttacatggatgtggattcaaatatcatgtatagaaattttataaatgatgttaaactatttttaaagtatacattgatttgcagtaatttaaaaaaataaattgttcatttcttgtttacatgaatatttctctccaaaagcaaacattcactttttaattttgattgttcagtatataacctcattaacattttcttttctccatccactattttcagtcatagaagtatctgtaccatcattttctactgataatgcctcccacccagatatttcagaaaatactgtaaaaataatattggtaaaatgagtgatgataagaaaaagaaagcagttagcaatagcaagggcctctttttctttcatctttaatataacagaac

SEQ ID NO: 601438 - DNA, 622 bp, Homo sapiens
taaaaacttttacaaagacatttatgcatacatatgcaagtgtcacctgcagatgctatgtcaagatgttagtggtgaaaggactataaatttggctttattctcttatatcagaatattactgtagctcagtaaaaatcaagttracattttcttcatttttcctttggataaaatctgtattagaatttattcaggattttgcaattcagtgacatattaccaaataagtcaacagttacatggatgtggattcaaatatcatgtatagaaattttataaatgatgttaaactatttttaaagtatacattgatttgcagtaatttaaaaaaataaattgttcatttcttgtttacatgaatatttctctccaaaagcaaacattcactttttaattttgattgttcagtatataacctcattaacattttcttttctccatccactattttcagtcatagaagtatctgtaccatcattttctactgataatgcctcccacccagatatttcagaaaatactgtaaaaataatattggtaaaatgagtgatgataagaaaaagaaagcagttagcaatagcaagggcctctttttctttcatctttaatataacagaac

SEQ ID NO: 601439 - DNA, 622 bp, Homo sapiens
taaaaacttttacaaagacatttatgcatacatatgcaagtgtcacctgcagatgctatgtcaagatgttagtggtgaaaggactataaatttggctttattctcttatatcagaatattactgtagctcagtaaaaatcaagttaacattttcttcatttttcctttggawaaaatctgtattagaatttattcaggattttgcaattcagtgacatattaccaaataagtcaacagttacatggatgtggattcaaatatcatgtatagaaattttataaatgatgttaaactatttttaaagtatacattgatttgcagtaatttaaaaaaataaattgttcatttcttgtttacatgaatatttctctccaaaagcaaacattcactttttaattttgattgttcagtatataacctcattaacattttcttttctccatccactattttcagtcatagaagtatctgtaccatcattttctactgataatgcctcccacccagatatttcagaaaatactgtaaaaataatattggtaaaatgagtgatgataagaaaaagaaagcagttagcaatagcaagggcctctttttctttcatctttaatataacagaac

SEQ ID NO: 601440 - DNA, 581 bp, Homo sapiens
tgtcatttataggtttttgtttgtgtgtttgtttcaaataaattccaaataaatactggtcaactatgtaccaatatctctattcgagcttattttgcaaaacatttcactctgaatcaatctttatgcaggacaggaacaatttatcaagtaatccttcaaatgtcctctcctttttgttcctcagataataatatcattattgctgtttccataatgagtcctaaacatactggggaagtcayatgaatataactaactgataataacagaactgatgaaagcaacaacaacaacaaaacaatcctatctgtcaccttaagaaatgtcaccctcaggaaaataaaattgagcatgtagtgtgtaccacatctacctgcctacatctcttgggccaaaaaaaaaaaaaaaaaaaaaggtttatttacgtcttccacagctctggcttactgatcttctctggacctcttgactgtcaatatttttgtttggggggaatactttttctctttccaagctgaaagaaaagtacaagcttgttttctattttccttcaggacataaaagaagaaaaacagcag

SEQ ID NO: 601441 - DNA, 525 bp, Homo sapiens
tattcaggataagtattactttcatctcgctccttacacctatccccaccactagcttaaaatttataacttagtttgttaatttaaatttctttatggcaaggagttccctagagtctggcagtcctgggtaaatggaaaaaaattgagtttagaaaaatgmaaatgtaaggacttgatcctggatattggcaccccacttaaaatgcatcaagaccctaaggccatttttgaaagaattgatgatgtgttcaaagtcagtgttatcaatcccgaggtcacattttcataaggtattcaattaaatattccaaggtgttctttttaaagttcattgagagctctttttaaaatgttcaaatattgaaagtatttttatcttttccaactgagaggattcaagcaaaatcatctgtatttgtcaactttattttgcattttactttatgaagactatacattttcttttagtattcacttagaatataatatgcacagattgcatggtatttcttatgcatgtaa

SEQ ID NO: 601442 - DNA, 509 bp, Homo sapiens
tactgaggtttaggacttcaatatatcttttttggggagacaaaatccaatctgtaacactcatccacattgttattgtctttttggtagtaatcatcctaatggctatgaagtggtatttcattgcggttttcatttgcatgttgttaatgactaattatgttaaccttctttttatgagctactagacattttatctttttggagatatttatattcagatgctttgcccattttcaatttacttatttgttcattatgcgtggtaaaagttatttatttatatattctgaatacagaatatataaatgtgagaagtacacacccaatttctgaggttactatgaaaatatatgatttgaaaatatcttctttcattttgtgttttgttttttctttcctgacaatgtccttagaagcaccaaaacttaattttgataaaatctgccttayatattgttgcttatgctatttgttttagatctctaagaaatcatccccttttccaa

SEQ ID NO: 601443 - DNA, 599 bp, Homo sapiens
aagcaataacttgagcaaatgtcactttttctttccaagaaattgttgtatcttaccttgtgcacatggagtcataataataagtgtcaaaactgtaaaggtctgacattttatcctatctacaagtttacaagttagcctaaagaagttctgtagatattggcagaagacatgatgcttctgagatgaagacctttactactcatgacacatcaagaagtataatcttcaaaatcatatcatttccacagtgatgrtgagcccaggaagattccatgaatgtaatgagcttctatcacagatgaggaaccccatatataaagaactcccgatttaataaggaaatataagaaaacctgcccaatctttgtcccagaggaagacattatctttattatcctggacagcaaataattctaccttctgccctagtgggagagagtatcattcaaggttgctcatgaaacaagtattattgaaaagaagatagagaactagtctgtcacaagacttgtttaaatgtgagaaatccatgtagagtggtttccaaaaatcggtcacagagaaagaaagcaacaaagcatttaggtttctcaaag

SEQ ID NO: 601444 - DNA, 622 bp, Homo sapiens
gtaaaggtctgacattttatcctatctacaagtttacaagttagcctaaagaagttctgtagatattggcagaagacatgatgcttctgagatgaagacctttactactcatgacacatcaagaagtataatcttcaaaatcatatcatttccacagtgatggtgagcccaggaagattccatgaatgyaatgagcttctatcacagatgaggaaccccatatataaagaactcccgatttaataaggaaatataagaaaacctgcccaatctttgtcccagaggaagacattatctttattatcctggacagcaaataattctaccttctgccctagtgggagagagtatcattcaaggttgctcatgaaacaagtattattgaaaagaagatagagaactagtctgtcacaagacttgtttaaatgtgagaaatccatgtagagtggtttccaaaaatcggtcacagagaaagaaagcaacaaagcatttaggtttctcaaagcatcatcttaagcaatgatttggatggaacttgttgcagaccactaagtgacattgttacagtgcatagctagttcagtatgagcagtgcataagagggttttccaccccccaacac

SEQ ID NO: 601445 - DNA, 566 bp, Homo sapiens
acttttcatttcctgatccctagatatctagaatgcccttacataaccctcggaggaaaaaaaaataaactttagtgtttcagtgttgtttgtttgaagataacttaaaactctaacagattttggtatggtataaatattacaagttttctagtcttcattattaataagcctgaacttattgcaaacattttaatatataaagcaataagaattagttgataaattataaaacaaaaaaaagctaatgggtctttaataatgagaagctaatttttaaaaatcagrgaaagtaaaattaactaataatcattatttgtttttgtagtttgccatttttgctttctttatttaaaaaatgttttttaagttagtgaattctacattgagtgaaataatatatggagaagaaaagtgaagaaaatattttaattcaaatctatacattttgaatagcacagctaaaagttattcagcactgcctcacttaaaaaagataaattttttgtcttagctttcaaaagaaaaagatccaaaggataaatactaaataattattgcttatt

SEQ ID NO: 601446 - DNA, 565 bp, Homo sapiens
aactctacaagtaagggatctacagcactgtctgcactggataggtattgcctgctctgcaaaatacagggagtcatgatctaggattactatagaaaagtacaagggtatcattgtggaaaagtagtttggataaactgatattagaagtggagagaccagatggaatattaaagcaatactcctgaattaggtaaatgtgatcatgtgaatagtgcaactgatagggatgaaaagagctttgtaaatcggaggaaaatcttgaatctggaagcatcagttgggcagcttttcactaatcattcagaagaaggtttgtagaagggtrcaaaagtaccctttaccccactaaaaattacataggtgagtctaggcgtgatgttttcctggtactgaagagcatttctggaaagagcatcaaagttcttgaagttaaaatgtggcatccagacaatctaagtggaagaacaacaaagtacataaaggatgtacattgtttttacatttatgaaagaacacattgatatttgtttaaataaccagtgtgccacaaaaaataaaaatt

SEQ ID NO: 601447 - DNA, 565 bp, Homo sapiens
aactctacaagtaagggatctacagcactgtctgcactggataggtattgcctgctctgcaaaatacagggagtcatgatctaggattactatagaaaagtacaagggtatcattgtggaaaagtagtttggataaactgatattagaagtggagagaccagatggaatattaaagcaatactcctgaattaggtaaatgtgatcatgtgaatagtgcaactgatagggatgaaaagagctttgtaaatcggaggaaaatcttgaatctggaagcatcagttgggcagcttttcactaatcattcagaagaaggtttgtagaagggtgcaaaagtaccctttaccccactaaaaattacataggtgagtctaggmgtgatgttttcctggtactgaagagcatttctggaaagagcatcaaagttcttgaagttaaaatgtggcatccagacaatctaagtggaagaacaacaaagtacataaaggatgtacattgtttttacatttatgaaagaacacattgatatttgtttaaataaccagtgtgccacaaaaaataaaaatt

SEQ ID NO: 601448 - DNA, 626 bp, Homo sapiens
ttgagtacataaaaagaataaaggtacagtccttaaaggtgctcaatattatgactaatgtacatagaaaatatgtttaaataattacaaaacaaattgtaagtaaaggcataatgagaaaggtaaaaataaattctaagaagtttagaagagtgagagattattttctaatatgagggaraaggtgtgaatgtggaggaggtacttcttgagcttggacatgatttctgggcttatttgcagacaaaggaggtacatcgaatagctaagaaatttgaactgaattctttagataagttttaataattggtatgttttcagtggaagacttccatgatgtttatttttttaatagaatagcatttttgaaagtatgacaagtagccatgtcagcatggtatgaagaaagagtaatgaaataaataagctattacaatgatgggtatatatgttaaggaattattcattaaatggggtaggaattgggatttttaaaaagtggaatgaacaaaacttgtgagcagtcataattttatttggaatggtgaaaataagagctgaagactaagcagttttctctcttagatttgatggatggtgatgacattatctaacaaaaataatta

SEQ ID NO: 601449 - DNA, 537 bp, Homo sapiens
acattttcatgacttcaattaattagaagtttttaacttgaagccattgatttttgccattgactattttttcatttatccatttgctatagacatattatcatttcatgatattttatgtaatgctttgcaatcagacctagaccaatttgacatgagtatctactaggttttcccagtcagataacagttattggcaataattagatgagcgttggctattttgctacaaccttactttcagattgtaattaagactgagaccaaattcttccacatatataaatcttcattactgagcaggcagaaaatagtcatacagactattttgytgagtaactttagtgaagttttcagctctctgttgtttgagatggtcatgagaccatccccattgaaaactactattagtagatagtgtctactgatgctatcagacgctctcagtaccaaatctacaaaaagaaaatacctaggaagacatttaggtttatctgtaatttcttatattcatgtgaggctatactgtctatgaaa

SEQ ID NO: 601450 - DNA, 537 bp, Homo sapiens
acattttcatgacttcaattaattagaagtttttaacttgaagccattgatttttgccattgactattttttcatttatccatttgctatagacatattatcatttcatgatattttatgtaatgctttgcaatcagacctagaccaatttgacatgagtatctactaggttttcccagtcagataacagttattggcaataattagatgagcgttggctattttgctacaaccttactttcagattgtaattaagactgagaccaaattcttccacatatataaatcttcattactgagcaggcagaaaatagtcatacagactattttgctgagtaactttagtgaagttttcagctctctgttgtttgagatggtcatgagaccatccccattgaaaactactattagtagatagtgtctactgatgctatcagacrctctcagtaccaaatctacaaaaagaaaatacctaggaagacatttaggtttatctgtaatttcttatattcatgtgaggctatactgtctatgaaa

SEQ ID NO: 601451 - DNA, 577 bp, Homo sapiens
tgtatttatagactagcttcatacatggaaatagctttaccaatcaacctggctagagattctatgggcctctcaaaccttttctgtgaatgtgtcttctctggaattgtgtgtgtagatttataattagagctacttactggttttatttcttttctttaacataatcttttgcatttgctctttttcatcttctttgcattaattactccatcagcatgtctgaacattatggcaaacaacttaattctacatatgtatttgtggtgagaaaaaagaatcattttaagtgaacaattcaacattttgaagactgacaccattttacatgatttcttttctcagttaatgatatttatatctacctatttcccaaattgaaaacctccccaaaacatctttagttcatatcacttattcctttagttaatcaatcactgaaacatgttgattagagctcccgattcctttggaaatttcaccacgtcattcccacyatgattccctttttgcataatccaatatctattattaatacaaactcctgttcctaaaactcaaatgttattggtgtaat

SEQ ID NO: 601452 - DNA, 569 bp, Homo sapiens
agatctcatgagaactcactatcatgagaacagcatgagggtaaccactctcatgattcaattacctcacaccgagtcccttgcacgacacatgggaattgtgggaactacaagttgagatttgggtggggacacagccaaaccgtatcaaccttcttccctctgtgtatctctttttcctctttttcttcttcttcttctttttttttttaattgagatggagtctcgctatgtcgccaggctagagtgtattagcgcaatcttggctcactgcaacctccacctcccgagttcaagcgattctcctgcctcagccccccgagtagctgggattacaggaacgcaccaccacgtccagctaatttttgtatttttagtagagatgggtttcaccatgttggccaggatggtctcgatctccttacctcgtsatctgcccgccttggcctcccaaccctctgtgtatctctgtatattcccctctccttataaggacaccagccactggattcatcctaatctagtatttcttcttatggcagcaggaagaagtgttgagcaaaagggg

SEQ ID NO: 601453 - DNA, 528 bp, Homo sapiens
agcctgggtaatttacgaagaaaaaggtttaaatgactcatagttctgcaggcttaacagaaagcatgactrcagaagctcaggaaacttaaaatcatggggaaagatgaaagggaagtaagcacgccttaccatggcagagcaggagagagatagagaaagcaaagtgggaagtgctatgctttcaaacaaccagatctcatgaggattctatcatgagaacagtaagggggaagtccgctcccatgattcagtcacatcccaccaggcccctcctccgacacatagggattacaatttgagataagatttgggttgggacacagagccaaaccatatcggcagatgtgagtaaattaaggctcatgagatgggggggactatgccggatttatctgggtgggcctgatgatatcacaagagtccttataagaggtatacaggaggatcaaagtaacaaagtccatgcagccacagatgcagagactaaagtgatgcagccacagatgcagagactggagtgatgcg

SEQ ID NO: 601454 - DNA, 528 bp, Homo sapiens
agcctgggtaatttacgaagaaaaaggtttaaatgactcatagttctgcaggcttaacagaaagcatgactgcagaagctcaggaaacttaaaatcatggggaaagatgaaagggaagtaagcacgccttaccayggcagagcaggagagagatagagaaagcaaagtgggaagtgctatgctttcaaacaaccagatctcatgaggattctatcatgagaacagtaagggggaagtccgctcccatgattcagtcacatcccaccaggcccctcctccgacacatagggattacaatttgagataagatttgggttgggacacagagccaaaccatatcggcagatgtgagtaaattaaggctcatgagatgggggggactatgccggatttatctgggtgggcctgatgatatcacaagagtccttataagaggtatacaggaggatcaaagtaacaaagtccatgcagccacagatgcagagactaaagtgatgcagccacagatgcagagactggagtgatgcg

SEQ ID NO: 601455 - DNA, 528 bp, Homo sapiens
agcctgggtaatttacgaagaaaaaggtttaaatgactcatagttctgcaggcttaacagaaagcatgactgcagaagctcaggaaacttaaaatcatggggaaagatgaaagggaagtaagcacgccttaccatggcagagcaggagagagatagagaaagcaaagtgggaagtgctatgctttcaaacaaccagatctcatgaggattctatcatgagaacagtaagggggargtccgctcccatgattcagtcacatcccaccaggcccctcctccgacacatagggattacaatttgagataagatttgggttgggacacagagccaaaccatatcggcagatgtgagtaaattaaggctcatgagatgggggggactatgccggatttatctgggtgggcctgatgatatcacaagagtccttataagaggtatacaggaggatcaaagtaacaaagtccatgcagccacagatgcagagactaaagtgatgcagccacagatgcagagactggagtgatgcg

SEQ ID NO: 601456 - DNA, 623 bp, Homo sapiens
taattgttttttgcatttaaagtaatggcaaaaactgcagttacttttgcaccarcctaatatttacctaaggattctagtggcctggggtcccagatgccttcaagcagttcagcagtgcaacatatatgtttccctttccttcatggctaatccaaacattgtatcctaaccccagcatctcaagcagggtggatagaaaagggcagtccttttaataagcaaagatgaatccttccagaatcttttcagaagactttcctttctattggccctaccagagtcacccaggtacacctagtaacaaaagggctagagaagtggctctgtccttcattctgggctggatggaatgccacgcgatgttctgctggtgtagaagagaatgggagaagtggaggaagggatctcaggaagacagctgggagtgactaccacggtagttctctatcacgacactagtccagtaaatcctgctttgcaggagtaacaccagtgagcagctcgccgctgatgagatttattcccaaaataactttcaaatctgaagaggaatggctgctctgtatttcatttcagcaagtctccatggatattatttttctttccactgactttattta

SEQ ID NO: 601457 - DNA, 454 bp, Homo sapiens
ttcaaacttctgattatctaatattgcctaagcgcaaccatgtgcaaagtggggctgcattcatcacaatgaagataagtctatttaaacaacttcaagatcatgtttatgaataagattgtgaaactaaaaacttcatttgtgttcataaaacacttgagagctacagagagctcaatattattgtcaagggtcaagtgtccagcaaagggctgcccatggagacataatcacattgcttcatcattggggcacgtaccattaaggaattttcaaggaataatcacttgtagtacatctacttaaagcaatttcgtatttatttattcaattgaattatttatgttattcataaygaaacgaaactccaaacagcattggttccgtcacgtcttcctttgcttttatctggtttaccgcatgtgactatttttatgcaaatgaggttatgatg

SEQ ID NO: 601458 - DNA, 553 bp, Homo sapiens
acctttggggctggcagtgcctctaaaagaagtgggaattctttcttacacagttaagtctcaagagcatccatttctttttttttttttgagacagagtctcactcagtggtccaggctggagtgcaatggtgtgatcttggctcactgccacctccttctcccaggttcaagcgattctcctgcctcagccccctgagtatctgagattacaggcacccaccaccacgctcagctaatttttgtatttttagtagagatgggttttcaccatgttggccaggctggtctcaaactcctgacctcaagagatccacccacctcggcctcccaaaatgctaggattacagacataaaatgtattttttaatattcagtccttttcaaggaaaaatyacttcaatatgtggaaaaaatcaaatcgtgaaaagaggaaaaacacacattatactttttttttcttctggtctgactactatggaggaagcagaagcaggaggtagctgagcccatcctccaactttcacaaagtctcccatgacctcagaacatc

SEQ ID NO: 601459 - DNA, 496 bp, Homo sapiens
gaacatggggagattcagggagtgtgagcaaatattgagaaagagagtttgggatgtaaggtcatgagtcataaagtgtgtggatgygcagtccttctctctgaggggatctgccaaatccctgaggcctacacatttctgtccttagatttcttgttctttctttctgtaattactgcccaccactgcccccaccccaccatctcatttgtgcaggggtgaaagattgaacaccttttgggagccttggtggtcagggtcagtgggggtggtgcagccttgcagaacatgctctactgccactgaccattccagggttacttgtattttagccaaagcagtggggagtaggggggagtcacagatatagggcataggaaagcaggagttagggactaggggggatttaataagtgattggaagtgatgcagggcaggtgagccctaaaattggggcttaacctgggaaggtttttggctttgctcaggaaagaat

SEQ ID NO: 601460 - DNA, 446 bp, Homo sapiens
gtgagcaaatattgagaaagagagtttgggatgtaaggtcatgagtcataaagtgtgtggatgcrcagtccttctctctgaggggatctgccaaatccctgaggcctacacatttctgtccttagatttcttgttctttctttctgtaattactgcccaccactgcccccaccccaccatctcatttgtgcaggggtgaaagattgaacaccttttgggagccttggtggtcagggtcagtgggggtggtgcagccttgcagaacatgctctactgccactgaccattccagggttacttgtattttagccaaagcagtggggagtaggggggagtcacagatatagggcataggaaagcaggagttagggactaggggggatttaataagtgattggaagtgatgcagggcaggtgagccctaaaattggggcttaacctgggaa

SEQ ID NO: 601461 - DNA, 446 bp, Homo sapiens
gtgagcaaatattgagaaagagagtttgggatgtaaggtcatgagtcataaagtgtgtggatgcgcagtccttctctctgaggggatctgccaaatccctgaggcctacacatttctgtccttagatttcttgttctttctttctgtaattactgcccaccactgcccccaccccaccatctcatttgtgcaggggtgaaagattgaacaccttttgggagccttggtggtcagggtcagtgggggtggtgcagccttgcagaacatgctctactgccactgaccattccagggttacttgtattttagccaaagcagtggggagtagrggggagtcacagatatagggcataggaaagcaggagttagggactaggggggatttaataagtgattggaagtgatgcagggcaggtgagccctaaaattggggcttaacctgggaa

SEQ ID NO: 601462 - DNA, 498 bp, Homo sapiens
gaacatggggagattcagggagtgtgagcaaatattgagaaagagagtttgggatgtaaggtcatgagtcataaagtgtgtggatgcgcagtccttctctctgaggggatctgccaaatccctgaggcctacacatttctgtccttagatttcttgttctttctttctgtaattactgcccaccactgcccccaccccaccatctcatttgtgcaggggtgaaagattgaacaccttttgggagccttggtggtcagggtcagtgggggtggtgcagccttgcagaacatgctctactgccactgaccattccagggttacttgtattttagccaaagcagtggggagtaggggggagtcacagatatagggcataggaaagcaggagttagggactaggggggatttaataagtgattggargtgatgcagggcaggtgagccctaaaattggggcttaacctgggaaggtttttggctttgctcaggaaagaattc

SEQ ID NO: 601463 - DNA, 596 bp, Homo sapiens
cttacactgaggtgtaaggggcggctgagggcttcattgctaccctatctcagggtattttaattttcaatgagtgtaaaactgagytccaaagaccaaactgaaacttgctgcaccagaaagcaaactgctttgtcaaggccactggctgtaggtttcagcaataccattgtcctcacagcctcactgttggacaggcctagtctcctgcttagggcgtttttctccagggctctgcaaactacacatcctgggtgcctgcataattggctgcctataggggtgccttgttatctttttctataagatggggaatacattgctttgccttagacttgctgtcatctgtcccacctgggagggacgggctggtgttccctctgctgccaaacactcctggatcgcaggatgcaacctccaggctgtgtgctgatgcaaccgaacaatagcaacaagaaccagaaacatggaatccaggccagccctcgcgtgtggcacctgcccttgacctccctcgcagcacttctgcggggtgtttacaaaaactgcacctgctctaatagctgatggtcgtgctgggagaaaataataatcta

SEQ ID NO: 601464 - DNA, 596 bp, Homo sapiens
cttacactgaggtgtaaggggcggctgagggcttcattgctaccctatctcagggtattttaattttcaatgagtgtaaaactgagctccaaagaccaaactgaaacttgctgcaccagaaagcaaactgctttgtcaaggccactggctgtaggtttcagcaataccattgtcctcacagcctcactgttggacrggcctagtctcctgcttagggcgtttttctccagggctctgcaaactacacatcctgggtgcctgcataattggctgcctataggggtgccttgttatctttttctataagatggggaatacattgctttgccttagacttgctgtcatctgtcccacctgggagggacgggctggtgttccctctgctgccaaacactcctggatcgcaggatgcaacctccaggctgtgtgctgatgcaaccgaacaatagcaacaagaaccagaaacatggaatccaggccagccctcgcgtgtggcacctgcccttgacctccctcgcagcacttctgcggggtgtttacaaaaactgcacctgctctaatagctgatggtcgtgctgggagaaaataataatcta

SEQ ID NO: 601465 - DNA, 450 bp, Homo sapiens
agaaacattcattatttttaaaaaaatagaaacgamctaataactaagtgatagaaaatggaaaagcaataaaggtacattaaactgtgcactattatagagttatcatagctatgtaggagcaggaaagaacatttactaaataatgtaatgtgagaaaagcagaaaaaaactgaatatccataatgactataaccacgcaaaaagctccatgtgtttaaataaagatggaactaggataaggagagatgaaaataattcaggtattttaagaaaagtttataactcaagtttttgaacacttttgcaggatgaagggacacagagagtgattttaacacttaaaatccagcctctaggaaccattaaaaccatttacaccagtggacatgcagtcacctggattattactgcacctagtagtaaatgccaaaatgtgtctggtcaaag

SEQ ID NO: 601466 - DNA, 614 bp, Homo sapiens
ttcctaaacctctgtgagtgtcaaattcctcatttatgacayggacatcatatctgcttgatatggtggtgcatgatggtgtgtacctgtagtcccagctactcaggaggctgaggtgggaggatcgtttgagcccaggaggtcaaggctgcagtgacctctgattgcatcattgcactccagcctgggtgacagaacaagaccctgtctcaaaaataaataaataaataaagcagatgattggttagagaccacctacttcacaaggttacttttataactggataagacagtgaatacaagaatgcttgatacctctaaaatatcacatcgatacaagaaaccagtatagctctttgtcaatacgccccgaaagagagtaaaacatcattcccgtttttaactgcacgtggaccacaacacattattttattattcacttgctatttctgtagctaattccccagctttcattctttccttttataaaagaagcaaaaaggaaatcaatgaaataagaatactgctattttctgacacaaattaaactccacatccaaacacaaacagaatcacagtagcatatgggtctattttctcaatcttccccccag

SEQ ID NO: 601467 - DNA, 625 bp, Homo sapiens
tcaattttaaaacccccaaaaaatgaaaaaaattccaagaaacacaagggcaggatcttacctctgaaccgggccccctatcttgtgtctttggaatctgtgcattcttagcatttaaaattcaggttcaagccaggcacagtggctcatgcctgtaaaatcccagcactttgggaggctggggcaggyagatcatttgagcccaggagtttgagaccagcctgggcaacacggtgaaccctgtctctacaaaaaatacaaaatacaggtgggcatggtggtgcacacctgtagtccctgatactcggtaggctgaggtgggaggatcacttgagcccaggagtttaaggctgcagagaaccatgatcacaccactgcactccagcctgggtgacaaagcaagaccccgtctcaaaaaattttttaattttaaaattcaagttcaaatctgtattagaccattcttgcactgctataaacaaatacccgagactgggtaatttatgaagaaaagagattgaattggctcacatttctggaggccatacaggaagcacagtgctgtcatctgcctgacttctggtaaagcctcaggaagctttcaatcatggatgaaggtgaagca

SEQ ID NO: 601468 - DNA, 625 bp, Homo sapiens
tcaattttaaaacccccaaaaaatgaaaaaaattccaagaaacacaagggcaggatcttacctctgaaccgggccccctatcttgtgtctttggaatctgtgcattcttagcatttaaaattcaggttcaagccaggcacagtggctcatgcctgtaaaatcccagcactttgggaggctggggcaggtagatcrtttgagcccaggagtttgagaccagcctgggcaacacggtgaaccctgtctctacaaaaaatacaaaatacaggtgggcatggtggtgcacacctgtagtccctgatactcggtaggctgaggtgggaggatcacttgagcccaggagtttaaggctgcagagaaccatgatcacaccactgcactccagcctgggtgacaaagcaagaccccgtctcaaaaaattttttaattttaaaattcaagttcaaatctgtattagaccattcttgcactgctataaacaaatacccgagactgggtaatttatgaagaaaagagattgaattggctcacatttctggaggccatacaggaagcacagtgctgtcatctgcctgacttctggtaaagcctcaggaagctttcaatcatggatgaaggtgaagca

SEQ ID NO: 601469 - DNA, 490 bp, Homo sapiens
ccctagaatgttaccctggagcatctcttcatcatcttcctcacttgactcctttgttttgctggagcatgtgcttgagtagcttcctcaaaacaaattcagaggaggtaaaattgttaagagcctacatttttgcgatgggtttactttgcatttgctcctggcccaaagyattctatagatgactgttaagagttctaaatggaacattatttttttctctcaaaattatttaagcattcttccattgtcatctaatgtttctacagaggaatctaatgccaactatatgtaatctgcatttattctctgaaagctttcaggactttttcttcatccaagttgttttgaaattttaaatttacatttcttgatgtgagtttagttttttttcttttcatgaattatgtaggaactgggtgggatcttctaatctgaaagctcacatcctacggattctgggaaattgtcttgcatcatttgtttgatg

SEQ ID NO: 601470 - DNA, 557 bp, Homo sapiens
gcacattactgggaaatctggtaaaatctaaataagggccagcagtggtggctcacacctataatcccagcaccttggaaggctgaggctggctgatcacctgaggtcaagagtttgagtccagtctggccaacatggtgaaaccccatctctactaaaaaatcaaaattagcmgggcgtggtgccgggtgcccgtaatcccagctcatccagaggctgaggcagcagagtcgcttgaacccaggaagtgaagtttgcagtgagctgagatcatgccaccacattccagcctaggaaacaaagacttcgtcaaaaaaaaaaaaaaaaaaaaaaatctaaataaggtctgtagtttacttgacagtattgtactaatgctaatttatgagctttgaccatcataccacagttacgtaagatgttaccattagggaactctctgtattatctttgcaactttcctgcaagtctaaaactatttcaaaacacaaagttaaaaatgaagcttacatcaaaggcagcagcgtgcagagatgcaaagagatgagtttctgggt

SEQ ID NO: 601471 - DNA, 566 bp, Homo sapiens
tttttgtatttttagtagagatgggttttcgccatgttggccaggctggtcttgaactcctggtctcaattgatctgcccacctcagcctcccaaagtgctgggattacaggtgtgagccaccaccgygcctggcccttatttttattttttgtagagatggggtctctctttgttgcccaggctggtctcgaacttctggcctcaagtgatcctcctgcctcagcctcccaaagtgctgagattacaggcatgaaccactgtgcctcgtctgactatgtttcttatacaagcatatcgtgggattgctcctgggtagagacagaagttggaggtcccctttagtggtatctgtatttgttttcaagaatgaataatgtgaggtcaagttgtatctttcttcccccacatctgcctgtcaaaggaatagttgtgatttcatttttgattcagaactgttgctgactgtggcatcagtgggcaattgtagggtaacacagtgtgtctcttatttaatgcctcttcatgtcatgcccatgtgaaaatctcaggcttttagtcaagctt

SEQ ID NO: 601472 - DNA, 473 bp, Homo sapiens
atatatcaacatattaaaccaagacaaaaatttgaaccacagaagatacaataaaagcagggagagctgggcacagtggttcatgcctgtaatccaagcgctgaagcaagaggatcccttgagcctaggagttygaaaagaacctgggaaaggtgtacagcaagactccatctacacacaaattttttttttaattagccaggcatggtggcccacacctacagtcccagctacttgggggggctgaggcaggaggatcacttgaccctaggagtttgaggttaccacgagctatgatcacaccatggcactcctgcatgggtaacagagcaagaccctgtctctaaaattaaaaaacgagtggcagtggggcatgtgttctggtcccaccttggctctgagcagatcccccagctaagccaccaccctctatatgtcctgctcactctcagaacccctcctgccttcggtcc

SEQ ID NO: 601473 - DNA, 414 bp, Homo sapiens
ggacattcttcagccctcaacccatctgcacaatattcctccctcctctgcccttatgcaggattttccttttggaacatacacacactggttgtctaaacaggcagaagcccttccattcactcattcaacaaatacggaatgggcatctgctatgtgcctgacacagtgctaaatgctgggctagccttgcgsgggcaaagaataacatggccctctccttttcccttctctctctgcattgctactcttccttcactgctgttccttcattctgctgtgtaaattcgattacttcttctcccaccaggctaaaaggttcccatctggttgcatctcaaaccccagatgtttgctaaactgcactggaaataaggtgggctgcagagtggctctcgtcgtcaggaggcacaa

SEQ ID NO: 601474 - DNA, 629 bp, Homo sapiens
accacgcttggcttttttattattattattattatttatggagacaaggtctcatgatattgcctaggctagtgttaaactcctggggtcaagcaatcctcctgcctcagcctgacatcagctctctaatggccaagggaggaagtgcttatctctcctgatgtgttaaatttttctgtttaaatttctaatatgcaaaatatcaatacgtatgacctatctcaatacaagcattttgggggtcttcaataaattgtaagattgtgaagggttcctgagcccaaaatgtttgagaacgctgcccttgttctaaccagcagtttatagcaaatacaagggtctacagaagcaagttaaattccatgaggaaacatcagcaaagccccaggatataatatcygacatttacaggtgacatgacatagtatctgggatttgctttaaaatactccaggacgaacaagggtgtctgtggggtgggagcgaaaaagattgaaaaactgaacattagtaaaaaccaggtgacagatggggtctgtgggggtacatttacaatcctctctactttaagacagaatttttaattttattgtcacaatacaataaagataaaaagaaattcagtaaat

SEQ ID NO: 601475 - DNA, 493 bp, Homo sapiens
acacaagtgtgcgcagtattggacacttaaaaatttgttaagaggatagatcttgtgtgaaaggttcttaccacaaaaaaaactaaacgaaaatgaaataaaaatgaataatgtaaaggataggtaaattacaaagtacacaaaggcaaaaaagaatttcactgtcttttgaatgaaccctttataggcggtttctgctttatatgcaggggtggaaggtgaagaacctgctattgacagtgactttgaaagactttgagaaaatwgtgtaagtaggtacaaaatgtcatcacaaaccatgtgtcttataatacatgtagcaagaatggaatactgtgtagccataaaaaggaatgagatcatgtcctttgcagggacatggatgaagctgggagccattatcctcaccatactaatgcaggaacagaaaaccaaacaccgcgtgttgtcacttataagtaggggcttaacgatgagaatacatggacacagg

SEQ ID NO: 601476 - DNA, 493 bp, Homo sapiens
acacaagtgtgcgcagtattggacacttaaaaatttgttaagaggatagatcttgtgtgaaaggttcttaccacaaaaaaaactaaacgaaaatgaaataaaaatgaataatgtaaaggataggtaaattacaaagtacacaaaggcaaaaaagaatttcactgtcttttgaatgaaccctttataggcggtttctgctttatatgcaggggtggaaggtgaagaacctgctattgacagtgactttgaaagactttgagaaaatagtgtaagtaggtacaaartgtcatcacaaaccatgtgtcttataatacatgtagcaagaatggaatactgtgtagccataaaaaggaatgagatcatgtcctttgcagggacatggatgaagctgggagccattatcctcaccatactaatgcaggaacagaaaaccaaacaccgcgtgttgtcacttataagtaggggcttaacgatgagaatacatggacacagg

SEQ ID NO: 601477 - DNA, 397 bp, Homo sapiens
ctcttgcttaaagcttccagtggctttccacggtacctggattttttttctttttttaagtggcagaatgaattggatgatgtcagaggaagagtcttctaaggccagtccgtggagttagtaatkatctctcttcgaatccaaaaggttcattgagatatggaaacttctctggctctgggtgacatcaggtcgccaacctagtaagtcctttactgctgaccccgcactggactgagatgacaacttcctggaggggccctcccccgtcccctcaccgttgtcataacacccaccaaactcacagtctggggaggagaaggggcttacagaggtcctgctttcaacacaaagaccaaagacatcgccatgaaatgagagcccagattttaagaac

SEQ ID NO: 601478 - DNA, 616 bp, Homo sapiens
tcacccttgaccaaggtggttcaggagccaatgggtaaatgctccccttttgcctcctacggggacaattccaagagacagttgatggggccctagtcagaggctcaaatgatagttcccaagattccagtccctctttctgaactttttgccctgctttcccaggttttatttttatttggcagaaagccccacagtgttgagcaccaggtgcccttcatggtggccgactcagtgacacattcttgtgttgacctcttttccttccctttctcactctgctttgcttcttgccctgccctctgcatttacacttgctaataaattttacactcacaatgtttggaagtctctgcttttgagggacccaggcagctctatcgcaagagagaaattttaatatgatgatatgtgctgtgattctcctasaagaagtagtatgcaaaacttcccaaaagtgtctgactgggccactcctttttgttcttcccagaacctacagaactaaaataaactgcccctctattgattttgcttcttgattgtagggtgtctgattctctaactttttagcatctccaaccagttcacagcattgagggagcagacattgacc

SEQ ID NO: 601479 - DNA, 593 bp, Homo sapiens
tatatacatctttgtgtttaactttagtttcacaaagatttcctaaggtagggattgctatccacrctttatagggaggttaagtaactggcctaccattacacagccaatcaggtggcacaggtgggatttagacccacattcgtctgaattcaaaaccagcactccatgagtaaacatccatttgactgacatgagacaaatcagagatctgaaaggttaaatgacacaatacatgtgcctagcacggtccatagcacataataaagtctaaaaaatgtttgctgctaggattattatgatgatcattactactgtcattattactgctactattattattttcattatcaaggttccaacacttgggatctaatttccaggacttagaaatacctcagttgttaaaatgataggtacaactttaaattccctaaaccaatcacaaaaggtgaaatgacaagaatccaacaagttaataaacacattaccaaaatgcagaataaatgaatgaatttaaataacaactgtttctaaagggctcacaattgttcacagaacttcacctctttaattgattttttaatgagcta

SEQ ID NO: 601480 - DNA, 593 bp, Homo sapiens
tatatacatctttgtgtttaactttagtttcacaaagatttcctaaggtagggattgctatccacgctttatagggaggttaagtaactggcctaccattacacagccaatcaggtggcacaggtgggatttagacccacattcgtctgaattcaaaaccagcactccatgagtaaacatccatttgactgacatgasacaaatcagagatctgaaaggttaaatgacacaatacatgtgcctagcacggtccatagcacataataaagtctaaaaaatgtttgctgctaggattattatgatgatcattactactgtcattattactgctactattattattttcattatcaaggttccaacacttgggatctaatttccaggacttagaaatacctcagttgttaaaatgataggtacaactttaaattccctaaaccaatcacaaaaggtgaaatgacaagaatccaacaagttaataaacacattaccaaaatgcagaataaatgaatgaatttaaataacaactgtttctaaagggctcacaattgttcacagaacttcacctctttaattgattttttaatgagcta

SEQ ID NO: 601481 - DNA, 587 bp, Homo sapiens
ttcgttctttcccttaatgactattaggacctccaaacctgagcagtctagcagtctgccatcctggtcatctgtccagaatggttggagaaaggctatccattgagcagccctgaaggctgacatcaactccccactaatgagcttcctagtgacaaagtatcctatggaagtgtattccgatcaagkaaaatctattgtaattagagtttatatagcaagccaaacaaagtcatttggtatcactcaatacccaactgtgagcattgcacagtgtctcttgaagtgcttcaacagaacacagatgactcaggggctcccccatatgctccttggccctgagctggtgtgacagttccagggaaatctgctgctggcttccagccagtcaggatcctgcctgctaggactgttctagtcagttagttggccgggtccagttgttgtcttagtggtagctctctgccatccccagtggtgataaggtgtctggtaaaggctgctacagaggccccccacagccactctcaaccctcctgactcatctggtttccctcctattgactggactattttctgtgcgtgca

SEQ ID NO: 601482 - DNA, 587 bp, Homo sapiens
ttcgttctttcccttaatgactattaggacctccaaacctgagcagtctagcagtctgccatcctggtcatctgtccagaatggttggagaaaggctatccattgagcagccctgaaggctgacatcaactccccactaatgagcttcctagtgacaaagtatcctatggaagtgtattccgatcaaggaaaatctattgtaattagagtttatatagcaagccaaacaaagtcatttggtatcactcaatacccaactgtgagcattgcacagtgtctcttgaagtgcttcaacagaacacagatgactcaggggctcccccrtatgctccttggccctgagctggtgtgacagttccagggaaatctgctgctggcttccagccagtcaggatcctgcctgctaggactgttctagtcagttagttggccgggtccagttgttgtcttagtggtagctctctgccatccccagtggtgataaggtgtctggtaaaggctgctacagaggccccccacagccactctcaaccctcctgactcatctggtttccctcctattgactggactattttctgtgcgtgca

SEQ ID NO: 601483 - DNA, 554 bp, Homo sapiens
gctgcacactgtcatcactgggagcttcaaaattactgttgcctgagcttttctccttgcagagcatttcagctgctctgaagaatctccctaacatctctcggaagtaaccccttggttgggtccctcacggtggatttttgtgagtgccatatagcttctgttttaagacacagcagcccaaatatacctttcaaattggaagatgagttgtaccttttttccagcagctgtgggaggcaactgactcttayttccttgcagtggcttactaattttcaattagttgtaaacatgctttccacatttggtaaagctcaaatcatcagtttcacgtgatggggtcacaaacagaaatttattttattatctagattgacattttatactcaataactgattctatggaaaattgtcttaattttaccaataacgaatttgagagtttgagtcagtttatacatttgtacatatatatttttctcttcatttagaacttactatttcttatcaaacatgaagttactttcagtcctttagtcatggaagattct

SEQ ID NO: 601484 - DNA, 698 bp, Homo sapiens
acgtattgaaagagataacctaaggtccttataaggcaacaaattattgcctctatttgacttactatttttacttgaaagtaatagaagtgatatttctttaaaaagtcataatgtgtaacttttaatgcatttgagttactccaacacttaayaactcatttctctaaggaaaaatacctgtacaaatgaaaatactggtcttatggctataacctacattaggcatatgttaacaaaaatatttttacgcagaattgtttttgctaaaatttgggtacttggcaaagagaaatattcttgcagcattctcagtccttcttaagtgaagtcttagataaagtgtcaagaaagagaactgttggcaagctgccatcagagttcattgcattcagaaattcaagaaagcacaaagaaatttctaactctgtaggtgtgagaggagaaaaggggaaggaaaagtagtgttcaaagatgtaagaaaaaaatcttatgatagagacagctgaaaaataatgaaaaatgtgcttttggggtcaggctttctgtgtctgcaactctgttccaccatggccagttctgaactcaagcaagttaacttctataagcctcaggttcttcctctgtaaaataggttttgtggtagtctgtcttgtaagattgctgtgaagattaaatgagttaatgcatgtagagca

SEQ ID NO: 601485 - DNA, 547 bp, Homo sapiens
  misc_feature 91: n = A,T,C or G
tgcaggaagcatcatctatgaccccacatcaaaaaacaaaacaaaacaaaacaaatgagatacaatgtatcagcctgcacggtggctcacnactgtaatcttagcactttgggaggcggacgaggcagatcacttgaggtcaggagttttgtgacagcctggccaacatggcgaaaatctgtctctactaaaaattacaaaaatagctgggcatggtggcacacacctgtaatcccaactactccagaggtggaggctcaagaatctcttgaacccgggagacagaggttgcagtgagctgagatgtgccactgcactccagcctgggcaacagagtgagattctgtcttaaaaacaaacgaataagcaagttatgtatcaatatttatatgacagtagaaatctgtcttttttttcattctaaggcatactctaagccaaggaatagtgtacagagaatcagctatgtgctcctagatgctctgggctgagtgtggccaacacaccagagagraaaggtgggtgaccatggggtgtaggagtcttt

SEQ ID NO: 601486 - DNA, 569 bp, Homo sapiens
tactccctctccttctattgtttttcttgaacgctgttgaagccagaattttgtgaaacttcagaatgtgggttatgggacctcttttcttgcttttaattttaaattccttttgacacatctttaaactgtcttcctaacttctcaaagatgactatgttcaaagatctttgatttcttccagtattctctcagaaatgtcagaagtattctatcctggaaagagcacactgtctggtggggaagggtggtagattaaagatgtttattaatacttggctgctcctccttcaagaggtacattcctactaccttgtcccagtcttggatggatttgtgacctgctttgttcaataaaagtgaaggtggtggtgctatccaagttctaggcttagcccttaagaagcctggcaactcccactttttttctcttgtgcagctgctgtgctgtaagaagcccaagcccaaccactgagtgattaaccagcatgtggagagaggccttagacgatgagatgtcatcaytgatgttttgctctcagcatctgaatgcagctgcatgagtgacc

SEQ ID NO: 601487 - DNA, 520 bp, Homo sapiens
aggaatttaatttaatattctgggaataaggggagcttttgaaggtcttttgtttgtttgtggggtggagtgtgttgctgggtgaaatatgacatgatagatacataagataatttacttgatattgcgaaggatgaattagaaagaaaagagtttgcacgcagggagacatattacaatgactcatccacccatttatctacctttcaacaaaaatttagtcagaatctactgtttcccaggcattacaaaatgttgtggcaacaatctggtgaaagagtgtgagataagaaagtgagtgagctagaaagttcgcagtagtgatttaatgtagggctgggaccgtcctttttatgtttgccctttggtgtttttctcaaatgtaggcatggtcctttcaccactgtccaagttacctctctgtaaccactggctacctgrctttgtatcatcttatcggggaaaagtgacctcatggccactggcttgctgtaagaagaaggggtgtgggtgatgggga

SEQ ID NO: 601488 - DNA, 523 bp, Homo sapiens
gtcccctttattcttgattatccctatgtgttccatatagtcttgggggcagtgggatgatgggaacagctccaacttggatcctgcaagtggtttattctggtgcaactactcattagtgacaagatgtcagaacagttgttttaatttctctgagcttaaaagttccttcatcaagagaaggaggagttgtgtagcattatgtgtgaaagcactttacaaactacaaagcgatgtaaaaatataagttctcaacacagctgtcaagaccctttgcaaacactgttggatcatgtcatatctgtgttcaaaccctgatgttttcccatctccctcagagtaaaggccaaagtctcacttcaactccaaatcttctccccgcaaatctcctcccctcactctcacccttcaagcaaccccttggctcacacaggtatgtttctaccttgaggcctttgtatttgctgatctttctgtctagaatgttctcttcccaggrgtcacatggctcattcctcactcc

SEQ ID NO: 601489 - DNA, 620 bp, Homo sapiens
gcattaacagacatttggaaatccctgtaaatccatcatcctgaaagacagcacagtgttcatggtgactccagagggagtgaaatgaaatatgccatcgactctccagaggttaatcgatcatatttctggtgctacttggtttgacataaccaaatttgcactgaaaatcaastcatctatctttgttctggtcaacttaaaaaatttaatcctatttgacctttgctgaggtgcagtcaaagaaaaacagattcttttctgagctaggcaacctcctcttatctatattacagtcacctgagcgggtccatctttgctctaattcaagagcactgagcagcccgtgacaaatctcatcactggctttttggaccccagcagcagggagactgggagatttttgttttacttcgagatggtaaaggaaatttattttaagaaaaattaaagcaagagaaagcaacagaggaagagtaacatgatgctttcatttaccatatgactgaggcagaaataaatccagagaaatcattaggttcccacaatcaactaattttctcatggaaacgatcaccactgcccaactcactgtggcctccagaaagcagacttggccc

SEQ ID NO: 601490 - DNA, 620 bp, Homo sapiens
gcattaacagacatttggaaatccctgtaaatccatcatcctgaaagacagcacagtgttcatggtgactccagagggagtgaaatgaaatatgccatcgactctccagaggttaatcgatcatatttctggtgctacttggtttgacataaccaaatttgcactgaaaatcaagtcatctatctttgttctggtcaacttaaaaaatttaatcctatttgacctttgctgaggtgcagtcaaagaaaaacagattcttttctgagctaggcaacctcctcttatctatattacagtcacctgagcgggtccatctttgctctaattcaagagcactgagcagcccgtgacaaatctcatcactggctttttggaccccagcagcagggagactgggagatttttgttttacttcgagatggtaaaggaaatttattttaagaaaaattaaagcragagaaagcaacagaggaagagtaacatgatgctttcatttaccatatgactgaggcagaaataaatccagagaaatcattaggttcccacaatcaactaattttctcatggaaacgatcaccactgcccaactcactgtggcctccagaaagcagacttggccc

SEQ ID NO: 601491 - DNA, 578 bp, Homo sapiens
gcagtatgttcccagtggatattcaggagcaagactgatgataaattcttgacttttgtcctggtacttttaaactcttcttctttcaagtctgctttttacttctagacaattctctagatatactgctgttcttcctccttttccttcacattaaaattttgaaacaaaaaataactcactggtccacatgcccctcatgcccactggtatacccagcagtgcagctgtcttgaccctctcgtgtcaacacatcaatcaatcagtcatmcttaagagaacatttgtaaagtaactatgttttgagctttttggttcagttttattgggatttttaaataaactgcattcattggatatccaacagtagcccaaacatataggaacataatctgaaatatcacagtttcaaatttcataatttgagatatcacaagaactcaaaataatctgccttactaataatctgcattaaggctgatggtattcaataagaaaagtagaaagttcttacccaatgggtttagagctgccaacttgggtacaatagaaatgatatacagttttcaaagccacaa

SEQ ID NO: 601492 - DNA, 408 bp, Homo sapiens
ctttgcagaccacatctatgagcagaggggcacaaccacattttgtgggagatgyatttcagcatcaggaggcagttaagttttcacaggtcatccaaggactaaatggacaatagctcacaagtctttacacctcaattccagagaaaagctctgtgcaattactactgtcttacagctgtggggactgaggcacacactggcaagaaaattactttaggaactatcttccagcaggatcaggaaagaactggcctctgccgaacactgcattcgagtgagcttgtgtcccagatatcaggatatcagtctgtctaggtcccagctgtattcccagtaactggcagagttcctgggacaaagtaggtacctgcattcactttctattgtcacagtaacaaattacca

SEQ ID NO: 601493 - DNA, 438 bp, Homo sapiens
ctattttcacacatttgtaagcaaataaacaaataaaagcagaatgatgaaataaccagatttattaacctatgtatgtttggcccccatggtctggattctgttcttctgcagaacygttttctccttgatcatctagtgatttctggtgtagtggatttttttttttctaacagatttggttttaatgaactcaggaacaacgaggattatttggattaaagcttatttatcttcttctctaattatatttttagaaggggacatggggtcactaaatgtgtctttcctaatactacattatctctctcttccagaatatctcctcaatgtgacttttttttgggttggaggtggtggtgaggaggtggggcttgggagaagagctcttactaagtgcttacttactcccttattttcaatgtgtgggctacatgc

SEQ ID NO: 601494 - DNA, 554 bp, Homo sapiens
agttccaatggaagcattctcattttcctggacttgccaaaacatagccagcccattttagatcaaacttcttacttaactttagatatttttttttttttttgaggtggggagcattgcagatgtgtaatggatttacactccaaacctttgtataacccagaatcccttttccaccatgagaaaatgttcaagtcagtcattttcagtaaaacctactcactgtycccaccctggctgagcagaacgctggcctcagtcattgtctcctgagatcagcacctcttctcactgaggttctagccatacttttctgtctcactggaatctcacatctttataatatctctgctcactttttctttaaaccacatagagaaaattactgtgtcaacatttttccagtttgaatgcctattcttataccaacacactacccagacagtggattgatcactgatgggctctggaatgtggatttggttgacacaaagatatgaccatagactccaccaaagattgtcatgtgagcgtggctcctctatgacagaacc

SEQ ID NO: 601495 - DNA, 472 bp, Homo sapiens
aggtaactgacaggcagggccttttctattttattcargcaactcagtgggtggtggtgtcaaggccccccatggggttactgtacatgaaacaagtccataaaacaaacggtcaaactcgggtcggggctgttgctagtaaagggagttcccgttgtcttaaatcaccctggattgtttactgcaaaaggcagtggttaatctgaaacacagacagaaataactgcagccttgtgcctctgcatgtcttggctgagcccaacttttgcattctaagcactggaagtaccaagtggccaggatgctggaagccaaaaagtaatgtttccttttgctgttgttgagaaaggcattcaggaaaacaattgagcacaataagggccttcctgttccggcaagcaggcagccgtgtgaaccacccagtaaacgtggagtgagtcatcctggtgcactgtaagcttccttcgccttt

SEQ ID NO: 601496 - DNA, 472 bp, Homo sapiens
aggtaactgacaggcagggccttttctattttattcaggcaactcagtgggtggtggtgtcaargccccccatggggttactgtacatgaaacaagtccataaaacaaacggtcaaactcgggtcggggctgttgctagtaaagggagttcccgttgtcttaaatcaccctggattgtttactgcaaaaggcagtggttaatctgaaacacagacagaaataactgcagccttgtgcctctgcatgtcttggctgagcccaacttttgcattctaagcactggaagtaccaagtggccaggatgctggaagccaaaaagtaatgtttccttttgctgttgttgagaaaggcattcaggaaaacaattgagcacaataagggccttcctgttccggcaagcaggcagccgtgtgaaccacccagtaaacgtggagtgagtcatcctggtgcactgtaagcttccttcgccttt

SEQ ID NO: 601497 - DNA, 472 bp, Homo sapiens
aggtaactgacaggcagggccttttctattttattcaggcaactcagtgggtggtggtgtcaaggccccccatggggttactgtacatgaaacaagtccataaaacaaacggtcaaactcgggtcggggctgttgctagtaaagggagttcccgttgtcttaaatcaccctggattgtttactgcaaaaggcagtggttaatctgaaacacagacagaaataactgcagccttgtgcctctgcatgtcttggctgagcccaacttttgcattctaagcactggaagtaccaagtggccaggatgctggaagccaaaaagtaatgtttccttttgctgttgttgagaaaggcattcaggaaaacaattgagcacaataarggccttcctgttccggcaagcaggcagccgtgtgaaccacccagtaaacgtggagtgagtcatcctggtgcactgtaagcttccttcgccttt

SEQ ID NO: 601498 - DNA, 545 bp, Homo sapiens
ctcttctgccaaactgaaactaggcttcttagaggaagatgtttttgataaaggatgaaggtgatttgtcagttgaagagtagtatcattttgcaatcatagtagaaaatatttcaaaaacatgcaaggttataggagagtaaagctaccagatttctccaaaaaattgttgatcgttgcaattgatacatagttactaaaaattcacatttaaaacacatttaagtttcaactaaacaaatcaggtgaagcaaacgaaaacattaatttgtattacactaaaatatctgccagatttgtgcactaactggattaggcttataattagaggaaattccaggctatgtattccttcactcagtatgaagctatctaaaaaacaaatacacttgaaaatccatttttacaagtcaggtggcagccgcttgcacatctcaatcagtcaataagaaaacatttyaaactgagctactctgaagaagctcagacattctttaagttaagacacatctcatttcccagccacaatctgcatccctaagaca

SEQ ID NO: 601499 - DNA, 505 bp, Homo sapiens
aaaaccatgggcccctacaaagtatagtggggaaaccacagactctggggccacatggcctgcaccttctcccagcatctttcttcaccagccaagtgactttgggctactaagtctcataacctctctgagcactgtctttttacttgtaaaatagtatcaatactaagtccaagcctaccaacttcccagggttgttttgaaaaatcaaaggagatatcgtatgtggaagcactttgtaacctgccatacaaatgaggggtgtttagttttaagatcacctagcctagcatttttagttaggggaggcagagaaataataaacatttactcatgtccactgtgtataggaaatatgaatatatactccaatgcagtcttctagactttctcatgaggcagacagtgtttgccccacgtgagagatgagaaaactgaagttctaagaagttggctaacttccytagatcacagaatatgatttgcagtccagtgtgaaaatggt

SEQ ID NO: 601500 - DNA, 441 bp, Homo sapiens
ggcaaggcccatattgggtgagtaccaggcccagggctgcacacataggttatggcacagctgagtctggactccaatgctgtcttagctgattttctgttgctataaccaaatgactgagactgggtaatttataaagagaaaacacttgtttcttatagttctggaggctgagaaatccaaggttgaggggctgcatctggygagggctttcttgctggaggggactctgcagggaacccaggtggtgcagggcattacatagcaaggacttcatgacagacaaccaaactggcttttttaacagacccactgttgtgataactaacccactccctcaattgcctattaatccattaatccaataatgactccatcacccctcagatgtcccacctctcaacactgccgcattgtggatcacataaacttttgcaggac

SEQ ID NO: 601501 - DNA, 540 bp, Homo sapiens
ggtatactgctcaggctagtctcaaattccttatctcaagtgatcattccctcttagcctcccaatgagccattgcacctggtcccaaaggcacttcttaataagcatcctgcatgctaaaccctgtctataaaagtctttaagaattggctttctgtaaaccccagccagcaatacataactattttgaagcctccacagaactcttgagcatttgctacaaaccagccagcaatctcctcccatccaagtttttcagtgtataaactccaatctcttcrcaaagtgtcatcctgctccacaaagaagaataaactagttattgattatgtcttctttgctttctatacactccaatcaagctgtttcctccttcatagtgtgatgtgaacccatattgtaggcttttactcatgaaatgactatattattaaaagagagattctctcatctctaagcccttccttatgaagaaatttgtaaataaatttattaatgaattacctatcatgtttttcttactcaaaataaatcaggtgc

SEQ ID NO: 601502 - DNA, 466 bp, Homo sapiens
tggaagataggttagtgaaagcaattctttaataaataatatgaagaatttatgtttactcagactgtaagtgatacgaatgactcttcaaattttcatttattaactaattcagttgctcctattaataccactttatacaggaataaactgagacacagagctgacaaatgacttatccaaggccatacacctaatgtttggctaagccatgrccatgttaataataataataacaacgactagtaggcactcttgaatgtttactatgcactaggctctgtattgagtaccttacaaaacttaccttcttaaatttctacataacaaattctgatatatatgcactatatgggctgagtatccctaatccaaaattcttaggaccaggaatgttttgaatttcagattttcttttcagatttgggaatatttaaatatgaataatgaggtactttggaaatgg

SEQ ID NO: 601503 - DNA, 583 bp, Homo sapiens
aagaatggagtttgctgggacacaccaaacagtgtcgtattattcaagcatataatgtgacatatttacaacaccagaaatgttaggagatgcagcaaagaatttcagggtcaggtgccaagaaaaacagaagagtagagagatttgagaattatttaagaggtacaaaaagtgtggcccactgaggactgaatttagagaaggaagaaagcaccaactataaggacccttaaggtgcctaagtaaggagttagagcacacttaggttgtgaattggaggtagatgatgactgggtttggagcatgttgaatctgaggttctgtggaacataaaaatggatctgtgcattaataagttagataattgagggcatagctwagaaacttcaggcctggaggtgtggaatgatgtgaaattatcagcactttttaaacgcagatatacccaaagacataatgaaaaactaaacaatacagctataaaataatttacatggttaaaattgttaaaaattattgttgcatacttttataaagaaataataggagagaaagtgactaaagtaaagctccaatcaccaag

SEQ ID NO: 601504 - DNA, 583 bp, Homo sapiens
aagaatggagtttgctgggacacaccaaacagtgtcgtattattcaagcatataatgtgacatatttacaacaccagaaatgttaggagatgcagcaaagaatttcagggtcaggtgccaagaaaaacagaagagtagagagatttgagaattatttaagaggtacaaaaagtgtggcccactgaggactgaatttagagaaggaagaaagcaccaactataaggacccttaaggtgcctaagtaaggagttagagcacacttaggttgtgaattggaggtagatgatgactgggtttggagcatgttgaatctgaggttctgtggaacataaaaatggatctgtgcattaataagttagataattgagggcatagctaagaaacktcaggcctggaggtgtggaatgatgtgaaattatcagcactttttaaacgcagatatacccaaagacataatgaaaaactaaacaatacagctataaaataatttacatggttaaaattgttaaaaattattgttgcatacttttataaagaaataataggagagaaagtgactaaagtaaagctccaatcaccaag

SEQ ID NO: 601505 - DNA, 446 bp, Homo sapiens
taaagtcctctggaaaccctgtttaaaagacatggacaatagaaagcatttcttgtggctgggcgcagtggcccatgcctgtaatcccagcactttgggaggccaaggtgggtagatcacctgaggtcaggagtttgagaccagcctggccaacatggtgaaaccacgtctctactgaaaatacaaaaaaaattagcggggcatagtagcaggcacctgtaatcacagctacttgagagactgaagcaggagaatcgcttgaacccsggagtcagaggttgcagtgagctgagatcgtgccattgcacttagcctgggcaacaatagtgaaactctgtctcaaaaaaaaaaaaaaaaaaaagaaagcatttctcatatttctcatgactacctctaagttttagtaaggcaaacaaattattattaatgaaatttgaaatgattgt

SEQ ID NO: 601506 - DNA, 666 bp, Homo sapiens
ggatcccccttctttcttgagacacttacctcatttggcattaggatagcccacttgcctggttttcctcctttgtttttggccacttttcagtctttattatcgttcacttgccatcttcctggcatcttaatgcttgattactccagggccaggatcctgaaccttgtctttttctatctctattgacactattgataatgtcatccatctgctggctttaaatatcatctaaatgttgatgacttcagaattttcacctcttctccagacattctttcaactttcagacacttattgtctaaygtgtacaaaactgagttcatgatcttcacttagtctttgacatctcaattaatagcaacatcaatcttccattggcttaggcccaaaacttcagtgttttatttcttccatattctctgtgcaatctagcagcagtctgctcagtgtttcctgcaaagtatgtgcagaattgaaccactataagtacctctgcaactccatcctagtcagagtcaccatctcttacccgaatcagatgaaattttcctaactgttctccttgcttgtgtccttgtagctcatcgatataattcagagccataaaagagattctgattcggataaaaagtaagtcagagtttgtttcatatctgctcaaat

SEQ ID NO: 601507 - DNA, 527 bp, Homo sapiens
ggtctactctatttctacacatagagtataaaaatataaagagatcgatttttaacctttaataggtaaccacagaaggtcatgcttgagtaatgactatagttgttaaatttataaatggagaaataggaaatggtgtgataagctgtagaggctgtgacctgtttatagggacaactacaactcagccctatcagttctaaggctttggttccagggttactaatgattatatgacttattcaaaagaagttgcaattctaggttttaaagtaaaatcacccaggtttttagtgtttgcaactgatttaagttgtaaaccrtccctcatccctcccaaatgaaaaaaacacaactctctgctaaaaggctgctggaaaggagttttgggttaaatcgaatggttacacttcttggctaaaaatgttctttcttatgactctgatcacctcttatctgtttgcatctagttggaaagacagggatgaagaggggggaatatagttgcattaagaaagcaaaaaaga

SEQ ID NO: 601508 - DNA, 527 bp, Homo sapiens
caccccccggtaggggcagactgacacctcacacggccgggtattactatacatttctacctgatgtttatttagacttttctctttagctttaacttataaaaaagttctattagaaatcaatgaattcaaatggaaagtattatacataaataaaaaatatatgcatttttgtataatttttaaggttgtggaagcaacaaaagtagcacaataaatagcttcataaaagtaacagtaaagatagttatgaagttctctgctacagtagcacaatactgtaaatgcatttcaaatttaattgaaaatatgtaatatagcctccctagatggaaccatatttttaaaagtgctcagtgctttcccacatggataagacaatacttatgcagtacatagtgttaaacttttatgcttccttatttatattacatattgttttagaaagaattttgcraactccgtattggacaatgtctaatcttctaagttggtcccatcctattcctgaaaaatagtattaactt

SEQ ID NO: 601509 - DNA, 632 bp, Homo sapiens
tttaaaatggactttctggttctacaagagctagaagtcattaataaaattttgtgtctacaaaatttcagaataattttccaagttatttgcttgtcaaccattaaatgtagaagtatcttaatataaagccatgcatgactgtaaataaatccaacaggagcataaaaacagtttaataaaggtgtattttgcatttaagcttcttcatgatgtaataggaacagaggcaacgtgaagcgaatttttaaagtacaatatttgtgaaatgtttctggggtcaaaattctccctgcccacccttccccgcaggatttgtggtttttaaagaattatataataattgatatttataagtgataaaccataatactgacacattgtctgatgaaaataaggtctgtggtaaatatttttaaatgastgaacactagaatgtaagcttcgtgtaaacaagaattttctcttattctattatttatcgctgcatcctaagtatctataatattgcctggtacatcatagatgttcaataagatatagagaatgaaagaaaggaaatgcaatcaccattttactgaaactccccttaataaatataatatgttcttgctaaatccaaataatgtttt

SEQ ID NO: 601510 - DNA, 429 bp, Homo sapiens
ttataggttttaatccctaaatgtaaaactgaaactcaattaaaaattttttagtgattattaagatgatatttctttttgattaaatatattatattcactattttatctttgagtttagtacaatgagtgacctacttccattgaattacaatcaactatcaattttgattgaatgaatgaaacctagctwaaaaaagtactaaaaatattatataatggatccaggactttgtattataatcttatgcaaaatctaagctgaatttcaaataatggaaaatgtattcaatgtgaaattgttgataattcttgaatttctttaacattttttaaagttataaaatacaggaaaaaatttatgggtcattttaatgacagaaatatgaaatatattcttgtatattaattaagatgacgaatgggttc

SEQ ID NO: 601511 - DNA, 402 bp, Homo sapiens
ttaccctaaacctgagttaatctaactacagggtaatagttgtttatatgagaattggtctagaaggcacgaaaagtataaatgagttcttgttatgacaaaaaaaaaacctagaaatttctgagttaggtgcattagtaccctttataaagaatgaagaatccctatttaaaaaatgtagtagtttttgattaaaactgttacatctctgttgctcctgccatcctggtactgctgctcttattgcaactgccagagcttccacacactaacatcacttccactgctacgcactaccytactacaaggctcagttgaaactcacagccttggtcttcagaagccctgttttggatgctgttctatgggtcctacactggctgttcaaaatgctttgttctc

SEQ ID NO: 601512 - DNA, 616 bp, Homo sapiens
tttaaaattcttggaattactaatatattatcctctcccttgggaaaaaaaaacactttaactggtttctttttatttttaaaacattttgaagattggtgaaagggaaaaagttaagcctcactaacttaacgttgttagctatatttaaatatatttctgtcaatctttgtattttacagaaaaaaaaaatcytaagatattttaagaactgccagcctatttatatacaaagttaatgatgaaagtcaatttacttgtttaagaaactcataggctggccgcagtggctcaggcctgtaatcctagcactttgggaggccgaggtgggtggattgcctgagctcaggagttcgagaccagcctgggcaacatggtgaaaccccatctctactaaaatacaaaaaattagctgggtgtggtgccatgcgcctgtagtcccagctactggggaggctgagacaggagaattgcttgaacccgggaggcagaggttacagtgagccaagatcacgccactgcactccagcctgggacagaaagagactccacctccaaaaaaaaaaaaaatgaaaagcataattgtgcctcttttaggtatgagaagaaacataaa

SEQ ID NO: 601513 - DNA, 455 bp, Homo sapiens
tgtcaagtcaatggctgcatatcgggtactaggagatgtgttaatttgctcaaacaatgaagccacatctggtgcaattggagtcaccacttagttaagcttatgataatccactgtcattctccaaggtccatctgtcttctgcacaggccaaataggagagttgaacaggagggatgcaatactatttttgatgtactatttttcttggtagaggcagctctaacgcctttcatttggtattttccaacataatagctgtcaccctaccagtcacagagccaaygtgagggttatgccagtggctaagtatgtctataccaattatgcattctggcactggggaaatgaccacaggatgagtctctggacccactggacccactgtaagttggacctgagctaaaactcctataattacctgacctccataagcccctactttaactggagga

SEQ ID NO: 601514 - DNA, 455 bp, Homo sapiens
tgtcaagtcaatggctgcatatcgggtactaggagatgtgttaatttgctcaaacaatgaagccacatctggtgcaattggagtcaccacttagttaagcttatgataatccactgtcattctccaaggtccatctgtcttctgcacaggccaaataggagagttgaacaggagggatgcaatactatttttgatgtactatttttcttggtagaggcagctctaacgcctttcatttggtattttccaacataatagctgtcaccctaccagtcacagagccaacgtgagggttatgccagtggctaagtatgtctatacmaattatgcattctggcactggggaaatgaccacaggatgagtctctggacccactggacccactgtaagttggacctgagctaaaactcctataattacctgacctccataagcccctactttaactggagga

SEQ ID NO: 601515 - DNA, 610 bp, Homo sapiens
tttgaacccaaaaggcagaggctgcagtgagatcaggctactgcactcccatctgggtgacagacagaacaagactccgtctcaaaaaaatttttttttaattttaaaaaggagaaaattattttaaaaacttgaaattgatttagattatgtataatttaatctgactttcagttttctaacttggaggcaaaaacaatagcttcattcattgctttattcttaaataatggaagtaaccctagatactattgggctaaatacctagataccttagatacttagggctaaagaaaatgactgttacatagctcccggcagtatgttctagatagctccttaacaatgggagacactttttttttgtgcactactgaacccctagagtagctaagcccttatgctctctgaaatrttcataatgttttccactctacaaaatgtcataaaataagcacaatcattgaaacttcagaaaacgtaagtataaaataaccatcatggtatagcacagccaagaaagaactatcctcttcacaatattataagttgttttaaaagaaaaaaatctatctaagtatacatatatagattgatatactatacacac

SEQ ID NO: 601516 - DNA, 606 bp, Homo sapiens
ttctaatttcttcatatctctgtcaacaattaatttttgtttgtggttttgatttcatttttgtaatgcttagtgatattgagcattgtttcacatacttatcgtcattgtattacttctttggcaaaacacacattcaagtcctttgctcattttttaatatggttgtttgtatttttggtgttgaattgtcagagttctttatatattcttaacattaattctttattagataatgacttgcaacaattttacccctttctgtggattgccttttcaccctgttaatagcatcctttaatataaaaagtttttaattctgatgatattcaattcattaattttttttcttttcagcacaaaagcctgtgcattaggtttcatatctaagaaataacctacaaatccaatgtcattggarcttttcttctatattttcttctaagagttttatactttttgttattacatttaggactttgatccattttaaattaatttttgtatataatgtgagattagggtacagtttcattcttttgcatattctggtttttcaaaatgccatttcaaatagtgttttaaagattttactttgcttcccag

SEQ ID NO: 601517 - DNA, 606 bp, Homo sapiens
ttctaatttcttcatatctctgtcaacaattaatttttgtttgtggttttgatttcatttttgtaatgcttagtgatattgagcattgtttcacatacttatcgtcattgtattacttctttggcaaaacacacattcaagtcctttgctcattttttaatatggttgtttgtatttttggtgttgaattgtcagagttctttatatattcttaacattaattctttattagataatgacttgcaacaattttacccctttctgtggattgccttttcaccctgttaatagcatcctttaatataaaaagtttttaattctgatgatattcaattcattaattttttttcttttcagcacaaaagcctgtgcattaggtttcatatctaagaaataacctacaaatccaatgtcattggagcttttcttctatattttcttctaagagttttatactttttgttattacatttaggwctttgatccattttaaattaatttttgtatataatgtgagattagggtacagtttcattcttttgcatattctggtttttcaaaatgccatttcaaatagtgttttaaagattttactttgcttcccag

SEQ ID NO: 601518 - DNA, 606 bp, Homo sapiens
taaaggtactattattatccaccagtgttggatttcctgcagttctatgatgatttaggcctgaagctagcaaactatgatctatgggccaaatctggacatcacccataagataagaacacttgttacatttttaaagggttgaaaagaacaaaagaagaacactgtttcatgccacatcaaaattatatgaaatgcaaatttcagcatccataaagttgtattggaactcagccataatcattcatttatataatgtgtatgactgctttcttggtacaaaagcaaatttgaatagttgcaacagagagtatgtagcctacatagactaaaatatttgctatctggcccactacagaaaaagcttgctgaccccagattaaactcccatgttgtcccactatctcwtggattcttacaattacattacttcagatcatgaaatgtctttagttcaacaaggcctatgatgccataccttgtcattttttttttctgacttattctattcagaaaaatcttttttctttcctggtgggaacttccttttttctggttaccagctgctgcttgtctagctggtaacatttatttatccaaagcatt

SEQ ID NO: 601519 - DNA, 587 bp, Homo sapiens
agaagtatgacagaaaatgaataagagcaaagaactcagtgtagtagaataggaagaagcatctgttgatcaatatattcattgcctctttaaatattttgttttatcttcataatagttgtaaaagcaatctctttaattccattttatatatagataaaatctcagaaaagtatgtttcctattctcacattactggtaagtgtcagagacaagatttaaatttaagattccctcattttattttattattttttattgtggtaagaacacttaacatgagatctaccctcttaacaaaattttaagtgcacaatacagtattaactataggctcaatggtgtacagcagatctcttgaacttattcatactgcataactgaaaatttacatccattgtacttttaaaacgcaatcttccttaaagcatttaagattttagagtcaaagaaagtcaagaacaaggattaaacacttgatgcgtactagttgctttatatttctggagaagttatttaacytaaaacctaaaaagagagatattcttaagaactatgtctcacactttaaaactggaattttatgt

SEQ ID NO: 601520 - DNA, 587 bp, Homo sapiens
agaagtatgacagaaaatgaataagagcaaagaactcagtgtagtagaataggaagaagcatctgttgatcaatatattcattgcctctttaaatattttgttttatcttcataatagttgtaaaagcaatctctttaattccattttatatatagataaaatctcagaaaagtatgtttcctattctcacattactggtaagtgtcagagacaagatttaaatttaagattccctcattttattttattattttttattgtggtaagaacacttaacatgagatctaccctcttaacaaaattttaagtgcacaatacagtattaactataggctcaatggtgtacagcagatctcttgaacttattcatactgcataactgaaaatttacatccattgtacttttaaaacgcaatcttccttaaagcatttaagattttagagtcaaagaaagtcaagaacaaggattaaacacttgatgcgtactagttgctttatatttctggagaagttatttaacctaaaacytaaaaagagagatattcttaagaactatgtctcacactttaaaactggaattttatgt

SEQ ID NO: 601521 - DNA, 640 bp, Homo sapiens
cccagtaattctcctaggtatatgcccaggaaaaactaaaacatacatacacacaaaacatgtacacagatgctcatagcaccatttgatttataataggcaagagtgaaaacaagaccaatgttaatcaactgaataaatggataaaatatggtatatctatacaatggaataaatattatgaggcattataatgaaatgaagtactgataaatgttacaacatggaagaaccttaaaagcactatgttaagtaaaataagccagtcacaaagtaccacggattgtatgactcaatttttaataaatgtctaaaataaggaaacccttaaaatacaatgtaattagtggtttcctagggctgagaggggagggctttgggaagaagttggggagagactgctaatgggtgctaggttycttttaggagtgaccacaatgttttattttgttaaatgaaaactcaatataatgccaactgatccttatcatagttctgcttatcctgaaatagttacagtacataatcagatatatgataatacattaaactacttatgattaagaatattacctgtagaaaagagttaaatgtgacattttcctgaatcggcttcattctcattcataagtcttccctt

SEQ ID NO: 601522 - DNA, 636 bp, Homo sapiens
agcttgcacagtccggaaggctatggtcattcaatgtctagtgcgtttcacccagatacatcacttttaacttttataatcagtwtcaatactaaaaactgcattcatcacataatttctgaaaagccagaaagggcattttaacaatttgccttgatatttgctttttcatcattcccccctcaaagtcaatttgatatataaattatgttatcttcatctagatattgatgctttcctcattaaattactgaaggttttgaaacctagtcagagacattgttaattttgttgagaaagaaaaaaagtaataataaatctgattggcttaattatcccagtgcttaaatttagccggaagaattttatatcaggaaaataactcctttattcttagcacatagccttgactgtcttttaaatttctcagatttcaaaataaaagtttgaatgcccactggagtcctcactcaagggctttcaagatccaatgtgttccttaacaatatatgccatccaagcagtacctcttcagatatgagagtgctacaaaaagctttttttcttttttctgtcaacaaatgactttatttaatcatatcactaggaattcggccctactagaggtaagaatgt

SEQ ID NO: 601523 - DNA, 636 bp, Homo sapiens
agcttgcacagtccggaaggctatggtcattcaatgtctagtgcgtttcacccagatacatcacttttaacttttataatcagtatcaatactaaaaactgcattcatcacataatttctgaaaagccagaaagggcattttaacaatttgccttgatatttgctttttcatcattcccccctcaaagtcaatttgatatataaattatgttatcttcatctagatattgatgctttcctcattaaattactgaaggttttgaaacctagtcagagacattgttaattttgttgagaaagaaaaaaagtaataataaatctgattggcttaattatcccagtgcttaaatttagccggaagaattttatatcaggaaaataactcctttattcttagcacatarccttgactgtcttttaaatttctcagatttcaaaataaaagtttgaatgcccactggagtcctcactcaagggctttcaagatccaatgtgttccttaacaatatatgccatccaagcagtacctcttcagatatgagagtgctacaaaaagctttttttcttttttctgtcaacaaatgactttatttaatcatatcactaggaattcggccctactagaggtaagaatgt

SEQ ID NO: 601524 - DNA, 544 bp, Homo sapiens
gaggctcacacccagcactcctggaccatttccctagcaacgggaggagaaaggcagctcagacacacgcgtgccccggcgccctcccggaacgtgccccggcccggtggcgtggcaggagctcggcatcttcccgtggctccgtcagcagccaaaaggagaagcgtccatcggaaaaatggcatattacaaattttgctttgggaagcaaagctcggttcagaccattgtcaaaggaggagagggggaggcggctcttaaagcagccgcggcccctttgccagaacagccgcagctccccgcgtgcagctggagccccggggcggagaccggagaccggggactgggtttgactttcagaaacttaaccacgcggcgccgctcccmctccgcgcccgggccacccggggtgtgtggggcgtccctccaaaagaaagcttggagaaaaggcgtgagaagtatctgggagagaagttctccacccagtctcccctcctggagcccctctggagtttaaggctaaccctgggagttagaaacctaa

SEQ ID NO: 601525 - DNA, 563 bp, Homo sapiens
aggttattgtgcaaataagtcagaattgtagaataataatataatatgatcctacttttataaaattaaaaaaatacattatatgtttatgtaatacaaaaagaaaataaagtgatacaagtctgtgaaaagacttatctaatgattaacataagaaaatgacatgccaataaccaataaatctatgaatatatagttatgttaaatgacacattgaaaaaagttgaaaacatcagtgtggacaactgctaagtaaaacagaaactctcaaatatttggttttaatataacaagattgaacacctttggtaatcgataaggcagcaaatattgaaactatttctttttttttttctttttctttttttgagacggagtctcactctgtcacccaggctggcatgcagtggtgtgatctcagctcactgcaacctctgcctcccaggttcaggygattctcctgcctcagcctcccaagtagctgggactacaggcctgcaccaccatgcccggctaattttgtatcttttagcaagagacaggatttcaccatattggccagg

SEQ ID NO: 601526 - DNA, 563 bp, Homo sapiens
aggttattgtgcaaataagtcagaattgtagaataataatataatatgatcctacttttataaaattaaaaaaatacattatatgtttatgtaatacaaaaagaaaataaagtgatacaagtctgtgaaaagacttatctaatgattaacataagaaaatgacatgccaataaccaataaatctatgaatatatagttatgttaaatgacacattgaaaaaagttgaaaacatcagtgtggacaactgctaagtaaaacagaaactctcaaatatttggttttaatataacaagattgaacacctttggtaatcgataaggcagcaaatattgaaactatttctttttttttttctttttctttttttgagacggagtctcactctgtcacccaggctggcatgcagtggtgtgatctcagctcactgcaacctctgcctcccaggttcaggcgattctcctgcctcagcctcccaagtagctgggactacaggcctgcaccaccatgcccggctaattttgtatcttttagyaagagacaggatttcaccatattggccagg

SEQ ID NO: 601527 - DNA, 580 bp, Homo sapiens
ttgtgggtgaatgtaattcatcctttsaaactcagtctaggcaccatctcctctggggaggctttcctgagtccctcagaccgaagggagggttctactctagcacaacagaggtactgtcccaagaaactttgcctgaggggtagtcaacagctctccaattttacttcaagcctgcaaaatgtaagacacatgcaaaaatagacagcttagtgatccagagaacaggttcaagcctggctttactacctactatctgtgtgaccttaggctaattgccttatgttctttacagaaaataaatcaatctatgtcctagtacacaaattagaaaggtttggaatatttattataataattaatattaattttaataattcatggaaagctacctattgataacttacagtaaacaatattaattattattattcatgtaataatacataggtacagtctagttacacatgtgtaaaataaagataggctatggatacagattacataaagatatatgttaaaacagataagcattagaatacatgtaaataagacccaaatatagactaatcttaggtat

SEQ ID NO: 601528 - DNA, 600 bp, Homo sapiens
  misc_feature 174: n = A,T,C or G
tgcggctgctctctaggcttggaaaagttgtcccctaaatacccatatggcttgctttctttaccttttcaggtctttactcaaatatttattagtaagggccatgcctgatcatcctgcttaaatttatgaaattattacatcccttctcctcatcacccaacctctcttctntacttttcctccaaagcacttataaccacctagtatagtgtatattttatttctttatcttacttttctctttcttcctccattgggctctatgctctctgaggtcaggcaggggtgtccaatcttttggcttccctgggccacattggaaggataaattgtcttgggccacacataaaatgcaataacactaatgatagctgatgagctaaaaaaaaaaaaaaatcaccaaaaaaatctcataatgttttaagaaagtttatgaatttatgttgggctgccttcaaagccrtcctgagccacttgtggcctgtgggccccaggttggacaagcttgagtcaggggattcttttatatttggttcatagctgtattttctgtctccaatatctagcatttagctggagtttaaaaaaaatactaaa

SEQ ID NO: 601529 - DNA, 656 bp, Homo sapiens
taaaaaaaaaactatcatatattaaaaatcttaatgaaaacaagaaaacaaatataattcatcgagccttatggctcaagtgtctacaacacgagtgtcrttatgtatgagaccagcattaatgctgcacctcaaatccccttcaagaatgaagtgggttttatatcaagaggtggtggtgacattttgaatatgttacaatcatagcactgaggtcagaatgtatatgatttgctttgaaggaatttttaagagatattgacacaatttctgtggatttgaaattccatttttttcacattcttcatgttttttcactaaggaatttatttcttaaactaagccacttttgacacaaaaaaaagtgtatgaatatttatatgactttataatactgctaccactatttattatctatatccgactttcagtttgtggaaggacaaaatgaaaagtagaatattttgattagtttttcactttggaatagtttatatttgaattattctatttttttttggcctgctcttattgttattctgtcagaaggaatgataccaacagaaaaatagtcattagtattatcaagatgagtttctatttaacctgagattttttgctaaaatttatagtctaatttgttgtacttaatatta

SEQ ID NO: 601530 - DNA, 656 bp, Homo sapiens
taaaaaaaaaactatcatatattaaaaatcttaatgaaaacaagaaaacaaatataattcatcgagccttatggctcaagtgtctacaacacgagtgtcattatgtatgagaccagcattaatgctgcacctcaaatccccttcaagaatgaagtgggttttatatcaagaggtggtggtgacattttgaatatgttacaatcatagcactgaggtcagaatgtatatgatttgctttgaaggaatttttaagagatattgacacaatttctgtggatttgaaattccatttttttcacattcttcatgttttttcactaaggaatttatttcttaaactaagccacttttgacacaaaaaaaagtgtatgaatatttatatgactttataatactgctaccactatttattatctatatccgactttcagtttgtggaaggacaaaatgaamagtagaatattttgattagtttttcactttggaatagtttatatttgaattattctatttttttttggcctgctcttattgttattctgtcagaaggaatgataccaacagaaaaatagtcattagtattatcaagatgagtttctatttaacctgagattttttgctaaaatttatagtctaatttgttgtacttaatatta

SEQ ID NO: 601531 - DNA, 504 bp, Homo sapiens
taatagtattagagcagatttcttttctgttaatgtttgcattgggcgccatttctatatttttaatttcaatgcgtctgtgttcttatatatgtttcccacaaataataaacaatttytgaattttatttgtatgcagactgataatctttctctttaaattatttggtatctttataattactgtaaatacttgtatatttgtatttagtctactattttaccaagggatttctatttttcctatcctgtgttttttttttaaatcaacctttcatgccaccatttgaattgcatttttttcctctgttatctagaagttttacactcttgctattcttttgctaacctacaaaaaacaatgtgcatccttagcaaagtgtaatgttaatgtatactttccctgccttatacttccatgtgtaggatgtgaaatatattattatatttttatcaggcaatattcctttagatttattcacatgtataccatttatgttacca

SEQ ID NO: 601532 - DNA, 652 bp, Homo sapiens
tgcgtattgagaagtctttttytttgatataatcaaaacaagaggttttgaataataaaataattttgtgaaaataattaaagctataaatacaatttaaaggatgttaattattcttttcttttaaaacattagttttattcagtgttaatgtgcatgagatgattagaagcgtaagcaataaatttataatttacaaattgtgagcaatgtgagcaatttcatttgaataccaataataatctgattgagtttagcaaaaataattaaccaactggcatataatttagctttggttttgtgagccagcataaaaattcattaatctaaaataactttaaagatcactatcattttaaaatgatttttctcactatttggcttggcttctcttcaaactgtgttttctgttccagtcaaagtttaaaatatgacattaatacaaaattaattcttaacatttatcatacttgtctattactatggcaaagatcttaccaagatatagaaattaagtgtaattgatttgagctgtaatttttaagaatctagactttgaaacattcattgtctatcaccattgccattcatattcactgcccctctagaatcatggccattaactagtacaatatctcctaggctcctaaac

SEQ ID NO: 601533 - DNA, 622 bp, Homo sapiens
cacaaaatataagcatgggaaaactttaagggaatttaacaagcagcttgccattgaacatgcattaactaaaatggcagttgagaagagaagagaaattaaaaggcagtgcattctcagtgaaaatcccaaatatgccactaattattgtgtaactttgggcaagattttaatgattctatatctcagtttcctcatcagtaaaatgtggataacattaacatatattagacagggctggctatctcttcaacaaaatctgctctccccttcttaatcaagttttgctaggaagcatttattcattaatggaccctctttctcagctcttactgcagccagatgtggtcatgtttcyagctcttgttgatgaaatctgaatagaagtgatgtttgtctctttcaaattaagattgttaagaagagcatgctttctctccatgaaggaaagctgcctaccaaacaggaataatcccctttgactatataattgagtcattgtttttgcgccatttgctaccttagtttaccatatactaacaactgacctagaattgttgtgaagaacattttaacacatagcctcactgacagtaaaatcttagtaaatgttagcaattta

SEQ ID NO: 601534 - DNA, 535 bp, Homo sapiens
ttaaagggtttgcatgcagttartagagcagagaaatatgaagcagcaaggtaaaaacacagaatattcttaacactaggtttctgaatatatttgcttatatgctttaatatgtgcacttgtgcctttagactttaaattgaagctaggcagatcataggaggttaaattcttaggttatgtcctgttctttggtgttatatattgctaattgatgtgttattcatgtattttctgaacctgacaagttgaacaggtaattaatatcttttatactttgcaaaatgcatcctcatgaatcttcagaagagaaattttgaataaaaatcatattgtatgaaggtagcacagcgtgcttacataaacatcccttgaactgtttttgttttgttttttttcagaagaggagttgtccttaggagagttgaaatgaggtgatttggaacataaatttaatattttgataatataaaacttccttcgtaggaactggaacctgcctgaggtagcgtcctgatttgcattccagaaggca

SEQ ID NO: 601535 - DNA, 468 bp, Homo sapiens
agataaattttgtaatatactcaattgaacagaacattttaaatacttgagaagtggtcattcatagctattttggggacactatttttattcttacccacccatggatggggcctgagaaatatcttcaaagtagctatgagctaatttacattgttttaatyttaattagtccaattcagcagagcttcattaaaataacagaatatgagaaatccaggataaaactgtttatactccattgtacacgcatgagtgtgtatgactgtggttatgattgtgtttgagaatgtgtgtgctctcttccctgatgtagaatggaacactgatggcacaaagcatggcttgagagaattttacctcccttccgcatgtccatcaaacccttttctatatttttatatgcataatagatgttttctcagtcttataagatattccatacaaatgcagctttacattccatct

SEQ ID NO: 601536 - DNA, 309 bp, Homo sapiens
ctattatgtgctaggtgctagaattagagtgatataatgtaaataccacttattgagaattttgatagacattgagaatactgcatacatattattgatgctaattctaactataacccatgaagtaggaaccattatagttttacgagaagagagattaaataatttgcttaaggtcacatgcctagtraattacagagccccagaaatgaactcagattgccctgatgttattatctaataacgttcttattggtctccttctgagcttcatgctacctgttggttagatatatttaacttcatttt

SEQ ID NO: 601537 - DNA, 421 bp, Homo sapiens
taggttcctaaaatgtaaaaagaagccttggtgattaaaagtgcagaacaaaaccttgcagtcaaaataatgttgatctgctacaggagtaacaagttgctaaacagtgctactcaaagtatagttccaggataagaacaggtgaaagaagtatgctatgagctgataaaagaagtctgccatcagtcattgatgacaaagcacagaaatgtagagctagaaacctttagaacagattgattaattttatrtttatgtaatctaataataaataaattgaatttgtatttttatagccttttaaatttcatgattttagctatttatttttactacattttagaaaagttttagtcaatgacagattaaaaataaaaatgatggtcctttattataaatagcttgaaagcacttgtgttaa

SEQ ID NO: 601538 - DNA, 433 bp, Homo sapiens
gaattccaataaaaattaaaatttgagctcaggaattttgaaatattaaraaactatatgttcagtggtacctgtgggatggctgatgaattgaagatctgtgaggatatctgtttccaattatagaatcttagtggctggaattatgccaattgaaactaagtttaaatagttactttgcatcacatcaaaatatgcatttagtatttttaggagttatgaggaaatttgaacttctgctttacactaaactcaaaaagaattaatctaagataataatttcagttttacaaaaccatttgacacactgtagtcagttcatttctaatagttagcttctttatctgcaaatctcttcatgatcagtagagtcccaacctacactaagattttttttactaacttcaacctgtcaaaaccagaactcattatc

SEQ ID NO: 601539 - DNA, 496 bp, Homo sapiens
tgggggatggagcaggccatgcaatagtagttcagatagcaggggctcaaccacagactccaagtgaaaaagtcagcaacagcatcaaagtagggcatggctctgttctcacgggagatgagagtgagatacagtagacccccttatccatggtttcagttacccatggtcaactatggtccaaaaatattaaaaggaaaattccaggaataaacaattcataagttgtaaagggcacattgttctgagtagcatgatgaaactgcatgccatcctgccctatcccaccctggatgtgaatcatcctttggtccagcgaatccaacagtctacactacccgctcattcatcacttaatagctctcggttaatcagatcaattgacgaggtatcacagtgyttgtgttcaagtgacttttattttatttaatatggactccaagcacaagagtagtggtgcttgtatattataactgttctattttgttattagtta

SEQ ID NO: 601540 - DNA, 517 bp, Homo sapiens
actaaatcggtcagtacctgtcctgagacagtgacgatttgcatttatttggccactttaattttcatacactttaattcagcagacaatttgcaattttgtgtctggcaaaatctccccatgaaaagtagtatacagatgaggaaaagcttctgatttatcattcaggtcattcaggatccaaatcacaatctcctcccctcccaataaaataatataaccacttcactgcaccggctgagggcttttcaggattgagtccatcttacaattgcccatttcaacaagatttggctgtccaccatctgcagtacgcattttgtcatgaaaacaatgccarttccacaacatcaaacaacataaccgtgacagtcatggaagggaggccatatccccaacaattcctaatagagcttttgtgctgctgttagaatttttcttaagaaagatcactttctaacattagagctgaggaccgtaactcattaacaaaataagagattcatttggttttggt

SEQ ID NO: 601541 - DNA, 604 bp, Homo sapiens
tccaatgatatctaaaaaaactgataatgatatgacatgagtgtgtgctctgccagtacttattcatagtcacctaaagtgatttcctagcatcacttttttattgcagtaacaaaaaataacaccatgaaatctaccttcttaacaaagtttaaagcatactgtacagaattgttaactaatatacacattgttacacagcagatctctaggagtttttcctgcctgtgtgactgaaattctatactcattgacagcacctcctcatttcccctccttcctgacccctggcaaccttccagttgccacttttaatgaatgatcctttatttaatagtctgcrtttctagaattcttcataagtacctattcctattgttatgaatttttgttttgagttgtttttactaaataattgtttccagaatcttcaaaagctttccagggatgactagccatttttttacttctttgttatctggtgtttctgttacaaaacataattcttaattagaaattttaataagatgaagtgacagaaaatgtaattggtacatctttgtgtatacattgcattctttaatctctgcatctgacctcaagg

SEQ ID NO: 601542 - DNA, 552 bp, Homo sapiens
gaagtagctctgtggtatttagcctctaggatatattttgattatgtgctgaatttttggcatgtgttataaaacagtggcttgtttgtattttttaaaatgctataatcatagtaaatacctttatgcttatctttatgtacttagaatttgagttctgataatttatttttytatgggaggtggggaggtttattttttaaattgcagtccaaaggagtaaatttgatgttacattggacagtttattcagataccacaaactttacagatttaattagatagataatggatgatgttaaaaactaagcagcatcttaagtttaaatttttatttttatttctttttctgtcatcattatttatgaaaactggttgaaaatgaagttaaaagattttctgtacatcataagattggacagaaatattatttaccttaaaactttttctgagtaaaaatttaaacataaactagaactcagcctgaatttttttttaaaccatctttggaagcacatataaaagtagagtaaatacatcgaatgtagctta

SEQ ID NO: 601543 - DNA, 607 bp, Homo sapiens
aggtttagggaggttgtataactttcctgtctcgtggatggcagaactggagttcaactttgactctgaagcctttatgctgtagctctctttgatcagtcagtcagccagtcgttgaacctgatatttaataagcctctggatgtgctacgtaggcgctgtccttggtgctgataccaccgcagtcagcacaacaaaactccaagagttctgttttaccaaggaggaaagggaaggaataattgcattcaaactcagtaaaaaaaaaaaaaaaaaaaaggaggtgaccatacagtctgacaataaatagatgtgcaacaacaaaaagccctaggttcataataagcttggcgtttgtggaaaaggaaggatgccaccatggtttggtacagttataagggagagactggagagaggccagataatgcagagyctgaaagcaaaacaacgagtttgatttaattctgctttcaacaggaggccgctaaaaaagtcacacattcaagaggaaaacattcgggttatcacttcagaacaatctccatggctgctttgctgtgggggatgccagggagcaaggacggagacagggaatccagggagggtg

SEQ ID NO: 601544 - DNA, 607 bp, Homo sapiens
aggtttagggaggttgtataactttcctgtctcgtggatggcagaactggagttcaactttgactctgaagcctttatgctgtagctctctttgatcagtcagtcagccagtcgttgaacctgatatttaataagcctctggatgtgctacgtaggcgctgtccttggtgctgataccaccgcagtcagcacaacaaaactccaagagttctgttttaccaaggaggaaagggaaggaataattgcattcaaactcagtaaaaaaaaaaaaaaaaaaaaggaggtgaccatacagtctgacaataaatagatgtgcaacaacaaaaagccctaggttcataataagcttggcgtttgtggaaaaggaaggatgccaccatggtttggtacagttataagggagagactggagagaggccagataatgcagagtctgaaagcaaaacarcgagtttgatttaattctgctttcaacaggaggccgctaaaaaagtcacacattcaagaggaaaacattcgggttatcacttcagaacaatctccatggctgctttgctgtgggggatgccagggagcaaggacggagacagggaatccagggagggtg

SEQ ID NO: 601545 - DNA, 534 bp, Homo sapiens
caaaagtttaacctctcagaaaagttataaaaatcagatttaaaattttatttatttttgtcttgttgattatgaaaatacgttttgcaaatcataatagcctctgttggtcaacagtggtgaattgaagaccagataacacccccaggtatggtttgtttaaccttgagtttcaaacattcaactaatactaggtgaygggttgataggtacagcaaacaaccatggcacatgtttacctatgcaatgaacctgcacatcctgtacatgtatcttggaacctaaaataaaatttaaaaaaactcaagagtacaggaaacaaaagataatgaaataacatcttcaaagctctcaaagaaaattactcaaaatctagaattctataactatatgaaatatttttcaaatgaaatataagatatttattattttagttaggatctagagagacatgtaagaccactgttctatgttatcaataaaaataatctagactaagtaacaacaattaaatggacatacagcacctagaaa

SEQ ID NO: 601546 - DNA, 343 bp, Homo sapiens
agctgcactgtgaaggcaggcatgagttcctcactttgccacaatccccactgctccctactgtgcctctgacatgaaacaccaattaccaattagcttcacttgggatacggagcttttcttacagtagaggaatatctcttatttaggcccatcatgagcagwagtgggaacaaggaaacaaaaccaagacagccatatgtctgatgacccagcctgcctccttcgagtgtgatgacctcccaggtcctggatttaatacctccgatctttacacactacacaatattggaagaaagtcagtgaaaactggaaagtacccacaagttgcataccatacatt

SEQ ID NO: 601547 - DNA, 564 bp, Homo sapiens
tatgtatatgtgagtatctacatttatagacagattgaaagagaaaaagaaggggggatgagaaaatgggcatgtgtgtgtgtttgtgtatatgcatatatatttgtccatttgtatcacatttgtcatccagatgtagattttttgtaatgcactcttactgaaaatatgaccaacataaagaagaaatgttttttctttattataaattccagataaaacattttaagtaaccctcttgcaatgccccaacccaaacaaaattcataaaagttcctgccataaaagtgtttgctgtgaaattttaataactttcaagatgtcctgtttcaagaaacattttagtcatcttgaatgaaccaaagggtttaattaaacaaccacacttagacgttggaatgcataatttgcccaktgaactgcaaatcccctaatcctacagggaatcacatgctctttccaagatagtccaacgggccaggaggtgacctgcttcctgcttgggccacacccattactcaagctgagagaattagaataaatagtagtgccgagactgagatg

SEQ ID NO: 601548 - DNA, 458 bp, Homo sapiens
atcctgcgtgcttccagtgaacctagtctttgctgaggacaagayatgttgacaaacccaggcacaaggactgtctgccttatcactgactgcatttttaatgactgctgaataattcaggccactgaaggctggtgcgtgcttgcagtggcttagaaattaaaaaaaaaagaaaaagtaaagttactaaattacttctgcaaacaactactaaaagccacatagacttcatgatttgggaagttgactacaatgtgctaccttaaaaggtggccattttcaacttagagatatcagttcatctgacagtaattaccaaaacagatggggaaaatgccaaaagtagaatcctaatggcaatgggatggatgcatttaggaaccatggagcagaaagagattctgccagattgcatgacagcggagaggagaactgaaggccagatgttgtgcatgtga

SEQ ID NO: 601549 - DNA, 411 bp, Homo sapiens
ttttatggctatttctttaatctgatgcataattaatgtacaaagttcaacttcgttttggtcagatcccagattactcgaggcatccggagggkttaatattttttggtgcatttgggggtaggaggttgggataaaacaacaaatttttatctatatggaaggatgcttaaccgggattttttttttttttccaaaaagaaaatacttaagttatccttgctttcagagttcatgtccattggaagtgtcaagagattctgtgttcaaacattctcaaagcaccgctttccccttaccccttacctaagagaacataattctaaaaatccctttggggaataattttctctgccttccatctctctcaatgatgtgtccaatctccacaatttgtctggcctcctcttg

SEQ ID NO: 601550 - DNA, 411 bp, Homo sapiens
ttttatggctatttctttaatctgatgcataattaatgtacaaagttcaacttcgttttggtcagatcccagattactcgaggcatccggaggggttaatattttttggtgcatttgggggtaggaggttgggataaaacaacaaatttttatctatatggaaggatgcttaaccgggattttttttttttttccaaaaagaaaatacttaagttatccttgctttcagagttcatgtccattggaagtgtcaagagattctgtgttcaaacattctcaaagcacygctttccccttaccccttacctaagagaacataattctaaaaatccctttggggaataattttctctgccttccatctctctcaatgatgtgtccaatctccacaatttgtctggcctcctcttg

SEQ ID NO: 601551 - DNA, 583 bp, Homo sapiens
acatgggtatacctaaacagttacaaacccccaaacctgattatgagctcttgtgaaacttctctaaaaatttggggcaatgtggagttacaggtagaacttgagcttttcaagtcagaaaccttagttctgaatgtttgtgcctctatgtatcaactcagaactttagaggagatccttgccctttaggtgtgtttgtgtgttgaagtgttactaacactattaataatgtttacacatgggtaatattaaccataataatgcttacttggtgcccaaagtaygtttgatactttacatatgttacctctctcaagcattacagtaaacatacaatatgcataggatagccccactttgccaataaggaaattgatccttagattaaataacatacttgaaattgtgcagtaagtacatggaggaatgtccatacaatatatctatttaaaccacctaacagtggggtattatggaagagcatatgggagcactttgcaaagtgtcaaccgcagaataagtgcttgataaatttcacattatacctctctctctctctctgcagatttcagtcacttatgac

SEQ ID NO: 601552 - DNA, 583 bp, Homo sapiens
acatgggtatacctaaacagttacaaacccccaaacctgattatgagctcttgtgaaacttctctaaaaatttggggcaatgtggagttacaggtagaacttgagcttttcaagtcagaaaccttagttctgaatgtttgtgcctctatgtatcaactcagaactttagaggagatccttgccctttaggtgtgtttgtgtgttgaagtgttactaacactattaataatgtttacacatgggtaatattaaccataataatgcttacttggtgcccaaagtacgtttgatactttacatatgttacctctctcaagcattacagtaaacatacaatatgcataggatagccccactttgccrataaggaaattgatccttagattaaataacatacttgaaattgtgcagtaagtacatggaggaatgtccatacaatatatctatttaaaccacctaacagtggggtattatggaagagcatatgggagcactttgcaaagtgtcaaccgcagaataagtgcttgataaatttcacattatacctctctctctctctctgcagatttcagtcacttatgac

SEQ ID NO: 601553 - DNA, 613 bp, Homo sapiens
tttggtttgctggttccctatatgcctcccttcactgagtgtaacctttgtgggggcaggagtcttgtctgagtcatcattgcccaggggcgttctgttgtgttcagccaaatgttgaatgaatggatgatgcaatagatgaatgagacaagagtctctccagggaagctgaagtggcacacacactctcaaggtcttgaaaatgcctgacccctagtgcaggggttccatgatgcaccatagagttgatggtaggcaggcaaaatgaaarcttttaagccccattgattcacctgtgcttattaaactgccttgcctctaaaaatgatcattctccagtgaaaaccagggatagcgacgctcagtgcagatttcccaaaggaagaaaatccaatgaagtgcatctttgcagtgtgtgcattgcttgtcaacctgccctgcaattgtgtgtattcaataagggtgataatgatgatgacaatgattttatcagtcaagatcccacacaagaaacacaaccaataggatacttctataggttaagagatttattgcaagggagtacttataggattgcgaggctgactaagcaattcagaaatccatgggccag

SEQ ID NO: 601554 - DNA, 613 bp, Homo sapiens
tttggtttgctggttccctatatgcctcccttcactgagtgtaacctttgtgggggcaggagtcttgtctgagtcatcattgcccaggggcgttctgttgtgttcagccaaatgttgaatgaatggatgatgcaatagatgaatgagacaagagtctctccagggaagctgaagtggcacacacactctcaaggtcttgaaaatgcctgacccctagtgcaggggttccatgatgcaccatagagttgatggtaggcaggcaaaatgaaagcttttaagccccattgattcacctgtgcttattaaactgccttgcctctaaaaatgatcattctccagtgaaaaccagggatagcgacgctcagtgcagatttcccaaaggaagaaaatccaatgaagtgcatctttgcagtgtgtgcattgcttgtcaacctgccctgcaattgtgtgtattcaataagrgtgataatgatgatgacaatgattttatcagtcaagatcccacacaagaaacacaaccaataggatacttctataggttaagagatttattgcaagggagtacttataggattgcgaggctgactaagcaattcagaaatccatgggccag

SEQ ID NO: 601555 - DNA, 570 bp, Homo sapiens
cccagcaatagggggaacgactcaaagacagctagagggctttgccagccagagggcatgcaggaactctgaagtggtgggttgttaagaactaaaatattccatttgcaccgcagagctcagaattaatttccactgtcctgatggagcaggtgggaaggaatttgacctctcccctttgcctagaaactggtcctttctggaagcttctgagcttgctatggaaaaaaaaaaaatttttccacttctttcccctgctaccttattttcttgttctctgaccatttatctcaaacaaggaattattatctttctaatgaagccacagtagacccttcatttakcctaggatatgtcacccctacaattttctgtgaagtgtttttttctcaaaagacttctgaaattgaatttcttacgcatatgggaggagaatgatctttatgatgacacgatgatcttatccagcaaatatatttccctgtagatccctactttagcagatggcatgatcggggtgctcaagctaaacacttctttgtcctccttaattcctctctcatgggcaga

SEQ ID NO: 601556 - DNA, 601 bp, Homo sapiens
ctggtttaaattggtctcttctgggatccaggcatcaagactagttaaaactctccaaggagccctgctacccagccagggttgagaatcaatgtcttctagtctcctgatgattcctgagaacatygaaattctggggcttctcagggcccatgcatgtctacctgaagggccaaacaggtctttcaaagcatcttcaactcccctgtgcttcctgggtactaaggatgtgtgcctagtaccttcctggtgctgaatatcctgagcaaagtaactcacggctctgccatcaagtggcttagaatgtaacagagaagaaatacacataatataaagcatgcacaatagcatttaatttctcatttgctgagtgactcaccaaggaataagggctattcagaggttgtggacagactctaagagactagaggagagaacagtcattccacctgcagaggctgcagaagtctgcacaaactcctttcctatcaccctctaacacttcctagagtaagtggaggtcccagaaattttactctcttgtccagtggcaatgaactgcaggcctctccacacaggctgtggctttcaaataagaaca

SEQ ID NO: 601557 - DNA, 570 bp, Homo sapiens
agtaatgctttcaaagctctccaggggattcttagtgtcaggctctcgtgatctcactttgttgtcctcaccatcctatcaggtagatactattattatcatgatgcctatttttatcaataaggaaaaggatgcttggactggcatcctgtcagacacataaagaggtgagtggagagagcctacagagcctgagttcctgagcctcattctatactgcctctgcacagggaagtctttaaagcacggtttgatgaagaagcaagagctcagagcaaagttactgccgttagttatctcctatgctgatcaagtgttccctttggcagggagacgacaagggactcatacactcacttactcaacaagcatccaacttttaactattrggcaccaaatagaggctgggccccaggttaacacatggaggacacattctgctgccttgatgtctggacatcatgacagtagtagtgatgataatgatataaccacaagccaacttttattgagaacctgccattcatcaattccactttatacatcatatactgtctcctttaatgctca

SEQ ID NO: 601558 - DNA, 574 bp, Homo sapiens
ttttcaacagtgttgcaaagatcggagatggggttatttttggcacattggkgatactccctaaataacagctaacgttaatattatgaataaaatattaaaaacactactgttataaagttccaaaattatgcacactcaggacacaacagcaaataaaactcaagaaaactgtggaaaacaccttcttattaacggttgagccattaatgagtgaattgaaatttgaaatgtctagagaaatgatggtacaaaatgcagtgaccacattcttgaaaaattcatacctatttcagaccaaaatcactcattctaaacttccagtctttttcttcttgttcatcattgtatgaaatacaacataaagcacccttctaggtatgagcaataatgcttcagagacgtaatgcctataatttagttttaggataataacaattgcaaaaatggcttgtgaatgtctttctaacttagatttgaatggctttcacctccaatcagaagacaggattgaaaagaaaaatttttcctcttttaagtagcaacagagaggattatatacctgggaggtcct

SEQ ID NO: 601559 - DNA, 574 bp, Homo sapiens
ttttcaacagtgttgcaaagatcggagatggggttatttttggcacattggggatactccctaaataacagctaacgttaatattatgaataaaatattaaaaacactactgttataaagttccaaaattatgcacactcaggacacaacagcaaataaaactcaagaaaactgtggaaaacaccttcttattaacggttgagccattaatgagtgaattgaaatttgaaatgtctagagaaatgatggyacaaaatgcagtgaccacattcttgaaaaattcatacctatttcagaccaaaatcactcattctaaacttccagtctttttcttcttgttcatcattgtatgaaatacaacataaagcacccttctaggtatgagcaataatgcttcagagacgtaatgcctataatttagttttaggataataacaattgcaaaaatggcttgtgaatgtctttctaacttagatttgaatggctttcacctccaatcagaagacaggattgaaaagaaaaatttttcctcttttaagtagcaacagagaggattatatacctgggaggtcct

SEQ ID NO: 601560 - DNA, 574 bp, Homo sapiens
ttttcaacagtgttgcaaagatcggagatggggttatttttggcacattggggatactccctaaataacagctaacgttaatattatgaataaaatattaaaaacactactgttataaagttccaaaattatgcacactcaggacacaacagcaaataaaactcaagaaaactgtggaaaacaccttcttattaacggttgagccattaatgagtgaattgaaatttgaaatgtctagagaaatgatggtacaaaatgcagtgaccacattcttgaaaaattcatacctatttcagaccaaaatcactcattctaaacttccagtctttttcttcttgttcatcattgtatgaaatacaacataaagcacccttctaggtatgagcaataatgcttcagagacgtaatgcctataatttagttttaggataataacaattgcaaaaatggcttgtgaatgtctttctaacttagatttgaatggctttcacctccaatcagaagacaggattgaaaasaaaaatttttcctcttttaagtagcaacagagaggattatatacctgggaggtcct

SEQ ID NO: 601561 - DNA, 584 bp, Homo sapiens
tgtaatagtcccctttctagatacaagagagctcctatataaagactcttcagattcaggtaatgaacgaacaaaatattaaatcctccaatatgcatttctcaagagctctcatatgcagaccttggactcagtgytggagacacaaggaaaagattccttcccatcatgaactcccagtcacaaggaggcagcaaggtaagtaacgagaggctccatagatcgacacagaatactatgtggtgatggagtaggggtttctaggccacctgagaagtagggtaaggagaagtgatgtcaaagcataggcaagatggtcatgtagaaatgagctgaacagaaaaaggaaaagaggctggaaatgagagcattcagacagaggagacatccagaaatgactcagaggtgagagtgcatttaatgttttgcagatggttagaaaggaagtgatgacaaggtcaatgatgtatagataggcagaggattgatcctgaagtctcgttgggaactcagactttaccctaaggacaaggaagaggttgaggggttgtcaagccggagaacaccatgcaaagcagttagag

SEQ ID NO: 601562 - DNA, 589 bp, Homo sapiens
gctccagcaatcccactactgtgtatatatccaaaggaaacgaaatcagtattttgaagggatatctgcactcccaggttcactgcagcattattcactatagctaagatatggaatcaacctaagcgtgcactgacagatgaatggacatgaccaggcactgtggctcatgcctgtaatcccacgactttgcgaggctgaggtgagcagatcacttsaggtcaggagttcaagaccaggcaagccaacatggtgaaacttcgtctccactaaaaatacaaaaattagctgggcttgatggcggcgaggggagacacgtgtaatcccagctacttgggagtctgaggcagtaaaatcacttgaacccacgaggcagaggttgcagtgagccaagaccgcgccactgcactccagcctgggcaacaagaacaaaactccatcccccacagaaaaaaaaaaaaaaaaaacggacagaagtatgctctgtatctacaatggaatgtcattcagccctaaaaagagataaattcttgtcaactgcaacactgtggatgaacctggaggatgtcatcttgagtgaaataagcca

SEQ ID NO: 601563 - DNA, 559 bp, Homo sapiens
gtcatacacagcatgaccctccctggtaaatacgttcacataaaatgccctgggtacataaaaaattctgaaaattcagtatgacgtccttcaagagtctaatggtaaaatgcactcctctaaatgcttgctcagtgtctgctgtgtacatagttatgatccccgtccctgsggtatatactcttagtctttgccttcaggtagtttactttcttggagggaggggataaaaactaactaaagcagagacaaggtaagtgtaatcacagcagctgaggctggagctgaggcgatgaagcaggaaactcttgtggttcacttaggaaggatttcacttagaagacacaaatgaagaaatggctttatatcattaagctggctttaaagcatttaatcattgtgtcagcatccatggtcaccagtaaacaattaatataagcatcccacgctcccaggaacagcaaaaaaagcatttgttttactcttcagtgttatttttcacctaatggctaatccacaaatgtctactaagtgaaatcatgcttcacataccatttag

SEQ ID NO: 601564 - DNA, 576 bp, Homo sapiens
tctgtgagccgctgcctccagggccatagccgaccctgctccgagatcccagccgccgctctccgtgcaggaggggtgcccaccctggggaggccagggtgcccggagtggagggacagggcttcaagcgaccgggagtttccagcaaacccctgatccctgagcagtttattttaaaagcttttgcaaatgttggacggtttcgtttggtggaggccgtctttgcactaaattctcctgtcctcccccttcgaaacgcacaaaatgaattttgaacagattttggatgagaggttttcttccttttttcatcttctgaaacatttccccctcatttcttctcagataaagacccagaaaccygggacagttactcggtgtacagctagtcaaatactgaggaaaccagtcgatatttgccaaagattgggcatgttctgggtggtctcagattttgaagaaacgacttttttactgcacaaaatagttttacaatcagttccatcagacagccccaggggctctcctagggaaaggggccaataggcaaggttgcatggggataagagaggcaag

SEQ ID NO: 601565 - DNA, 593 bp, Homo sapiens
ggtacaagtgcaggttccttgcatgcatatattgtatggtgatgaagtctgggcttttagtgcacccatcacctgattagtgaacccaataggtagtctttcaatcctcatacccctcccacctgcccactgtttagagcctccagtgtgtaaagggagctaacatttgaggycctattatgtgtcaggcactatcctggctgcttcatatgtgctctttcattcaatatgcataacaactcaataaagtgcatatatataaatataatactatatatgcatagatagtttgtcaataaactattttggagtacttttatatttatgaaaaagttgcaaagacagcagtgataacatacccctcacccagtttcattgctcctattgttattaccttatgttaccttgcttagtttggcaaatttaaaaaatcagcacaacattggtacattactgtcaattaaactctcaattttattcaaatttcaccagctttttcattaatgtatttttgtatgttctataatctagtccaggataccacattactttagttgtcctgtctcctttgtctcctctgatctgtgacagtt

SEQ ID NO: 601566 - DNA, 648 bp, Homo sapiens
tcaagcatatattctagaccataaaacacatttttacacatttaaaaattaaaaccatacaaagtatgttttctaaccacaatggtattaaatgagaaataagcaacagaaagatgtacggaagatctccaaattttaaaaaactaaatagcatacttcttagtcaccataatcaaagaagaaatcaaaagataatgtagagaatatttgaactaaatgaaagtgaacatatactaaaatttgcaggatgctgatagagcagtacttacaggaaaatttatagcattaaagaaaggtctcaaattaataacctaactttccattttaagaaactggaagaagctaggtgcagtcttgcatgcctataatctcagctactcaggaggctcaggaaggaggatygcttgagcccagtagtttgaggccactgtgtgatcatgcctgtgaatagctactgcagtccagcctgggcaatacagtgagaccctatcacttaaaaaaaggaaaagagaaggaaggagaaaaaaggaggaggaggactggaggagtaagttaaactctcaaagtatgaaaaagggaggaaataataacataccagaatgtttcagaacagatatcagtgaaatattaaacaaaacagtagaggga

SEQ ID NO: 601567 - DNA, 546 bp, Homo sapiens
gtgcctaataaatgttagccagtatcactaagggttgtygccaagacagtcctggctctttccccatcatcatggcagcgagattggccagggtgccacctttactcaactttcagtggcctgaggcccccaggaagtttcttctctgaattcaaacaaggtaaccacaaaggggtagccctgcacatcagaataccccactaaccaccccccacttccttccactgagagcctgaatccactgaaatctccaagtacctggtagcagctggtggtatttctgaactcgtaaagaagggaaactaattttcccagttccagaaaatggcttgaggcctcctaagtgcccccttcagacgggcagctggagcaggctggggagagagctgcgctgcgtgggctttccgaggaccatatgggcaacacggctcattccgcggctacacccgccccgcttgtcatccccaatcatacttgctctaatccgtgttttaatttactctgctggtgcaacgcccgtgctgccagggcggtccttggggcccc

SEQ ID NO: 601568 - DNA, 422 bp, Homo sapiens
tggcatagctgaaaaacaggaagctagaggaggcagcaggagaagacgccagaggataacaagagaagataggctgagtgctgctcactcacacactcactcaggtcggccgcccaggcctctcaacaagccacatggtcagttcgagcatcttcctcccaattgatagatgatgcagaggagagggttgctaggacctgcccacgtcacacagccagtcattggcaaagctggagtttgaagccagctgcctggcatccrcaggtgccccttctaaccatctgtctactgcccaagcacaaggcatttattaaaggccccaggcattctcttaagagcaagaggagctaagtagaagcacacaccctcatctgcatcttgcgacaagattccactgactgctggtagagaatagatggagg

SEQ ID NO: 601569 - DNA, 422 bp, Homo sapiens
tggcatagctgaaaaacaggaagctagaggaggcagcaggagaagacgccagaggataacaagagaagataggctgagtgctgctcactcacacactcactcaggtcggccgcccaggcctctcaacaagccacatggtcagttcgagcatcttcctcccaattgatagatgatgcagaggagagggttgctaggacctgcccacgtcacacagccagtcattggcaaagctggagtttgaagccagctgcctggcatccgcaggtgccccttctaaccatctgtctactgcccaagcacaargcatttattaaaggccccaggcattctcttaagagcaagaggagctaagtagaagcacacaccctcatctgcatcttgcgacaagattccactgactgctggtagagaatagatggagg

SEQ ID NO: 601570 - DNA, 624 bp, Homo sapiens
tggacaacgtcgcaagatctcatcgctacaaaaagcaattagctgggcatagtggtgcacacctgtagttccagytactcgggaggctgaggcaggaggatcaattgagcctggaaggttgagtctgctgggagccatgatcatgccactgcactgcagcctggtcatcagagtgagaccctgtctcaaaagagagaaacaatagctctattgagatacacttcatgtatcataaaagtaacctatttaaagtgtacaattcagtagttgttactattttaggagagttatgcaatcacggcaatttgattttagaatggtttcgtcccctcaaaaagaaatctggtactcattagcagtcaccccagttccctgatccttctcccttctatagatttgtgtattctggatgtttcgtataaatggaatcacacaatatatggtcttttgtgactggcttatttcacttagcataatgccttcaaggttcgtccatgatgtagcacgcttcagtgcttcattcctttttgtggctgcataatattccattgcatggttagatccgattttatttatccatttattggtggatgaacatctggtggttgttttcactttttcact

SEQ ID NO: 601571 - DNA, 382 bp, Homo sapiens
ccgggtgcagtggctcacagctataatcccagcactttgggaggctgagttgggtggatcacttgaggtcaggagtttgagacccgcctggccaacatcgtgaaaccctgtctctactaaaaatacaaaattagccgygcgtgatggcgggcatctgtaatcccagctgttgcgtagactgaggcaggagaattgtttgaacccgggaagcagaggttgcagtgagccaaggtcgtgccactgcactctagcctgggcgacagagtgaggctccatctcaaaaaaaaattttgttttaaagattaagttaacctcgtcacagtgactgtgccaccacatgcacaggccttgcccacactcaagagagggggtcttagaattc

SEQ ID NO: 601572 - DNA, 501 bp, Homo sapiens
gacacttggttgcagctggtgctagaccccccacagtggttaagagggcaggcagcagcagtggtagtagcaaagggacagatagccaaggaaagatcccctttctcccaccgagggaaatcaactcctgaagttctgttcgacccagcatcagaagatccattgcaggagatggcaccagtgatcccagtcgtgccctccccttatcagggagagaggctcctcacttttgagcccacagtgcttgcacctccgcaagacaaacatatccctaggccacccagagtagacaagagaggaggtgaarcctctggagaaacccctcccttggcagctcgtttaagacccaaaactgggatacaaatgcccctgagagagcagcggtatactgggatagatgaggatggtcacatggtggagaggcgtgtttttgtgtaccagcccttcacctctgccgaccttctcaactggcaaaacaataccccgtcctatactgaaaag

SEQ ID NO: 601573 - DNA, 333 bp, Homo sapiens
ccaaagaaaatctagtctatagtgctcatgtttaaggtgatggagactcccaaagacagttgtctcaaggacttttgtcaagacaaatgtggaagccagactgacaaccgtcgttttctttgggctatgtaaatgtctgtggtttctagacagcttgtgaggctgaaaacgtgacacttcaaaaagatatttcagatamagtgggtgagctaagtaaatgttttgcaatgaaaggtttggctctcttttgtccggcttgagagtggctaatgtatatgccatctctgtttggacaactctggttatcgcctaatgtgtgtgagatgacagatg

SEQ ID NO: 601574 - DNA, 333 bp, Homo sapiens
ccaaagaaaatctagtctatagtgctcatgtttaaggtgatggagactcccaaagacagttgtctcaaggacttttgtcaagacaaatgtggaagccagactgacaaccgtcgttttctttgggctatgtaaatgtctgtggtttctagacagcttgtgaggctgaaaacgtgacacttcaaaaagatatttcagatacagtgggtgagctaagtaamtgttttgcaatgaaaggtttggctctcttttgtccggcttgagagtggctaatgtatatgccatctctgtttggacaactctggttatcgcctaatgtgtgtgagatgacagatg

SEQ ID NO: 601575 - DNA, 484 bp, Homo sapiens
ggtcatcggggtgtcgggacgacagttacctgcatgcctaatggaataagcttgggcatggggagagaaaaaacagccttttctagctatacaaagttgtgtaaaggcatgggccatttctactaaaaggtcagctgtcactacgcgtgtacttyttttttgagaaaggttctctgtcaccaaggctggagtgcagtggcaaaatcaaagcttactgcatccttgaccttctgggctcaagtgatcctcctacctcagcctccctggtaactgggaccacaggcatgtgccaccacacccagctaatttttaaattttttgtagagacagggtctccctatgttgcccacgctggtctcaaactcctgacctctggtgatctgcctgcctcggcctcccaaaatactgggatcacaggcatgagctaccgtgcccagcctaggaggaagtgttatcgggggacctggggaaaactcagcaaaac

SEQ ID NO: 601576 - DNA, 484 bp, Homo sapiens
ggtcatcggggtgtcgggacgacagttacctgcatgcctaatggaataagcttgggcatggggagagaaaaaacagccttttctagctatacaaagttgtgtaaaggcatgggccatttctactaaaaggtcagctgtcactacgcgtgtactttttttttgagaaasgttctctgtcaccaaggctggagtgcagtggcaaaatcaaagcttactgcatccttgaccttctgggctcaagtgatcctcctacctcagcctccctggtaactgggaccacaggcatgtgccaccacacccagctaatttttaaattttttgtagagacagggtctccctatgttgcccacgctggtctcaaactcctgacctctggtgatctgcctgcctcggcctcccaaaatactgggatcacaggcatgagctaccgtgcccagcctaggaggaagtgttatcgggggacctggggaaaactcagcaaaac

SEQ ID NO: 601577 - DNA, 484 bp, Homo sapiens
ggtcatcggggtgtcgggacgacagttacctgcatgcctaatggaataagcttgggcatggggagagaaaaaacagccttttctagctatacaaagttgtgtaaaggcatgggccatttctactaaaaggtcagctgtcactacgcgtgtactttttttttgagaaaggttctctgtcaccaaggctggagtgcagtggcaaaatcaaagcttactgcatccttgaccttctgggctcaagtgatcctcctacctcagcctccctggtaactgggaccacaggcatgtgccaccacacccagctaatttttaaattttttgtagagacagggtctccctatgttgcccacgctrgtctcaaactcctgacctctggtgatctgcctgcctcggcctcccaaaatactgggatcacaggcatgagctaccgtgcccagcctaggaggaagtgttatcgggggacctggggaaaactcagcaaaac

SEQ ID NO: 601578 - DNA, 610 bp, Homo sapiens
gatcagaaatattgatccatgtgcacgcagataaaatggcttctgctaaacagactaaaatctttctctctagtctttctcacttgtacaaacccagtttgttttcaaaaaatcacagtagcaatgcaactcatcactctagaaaagcaagcttaggctacctgaaagattttcccttggaagtttagcgtatgtttgactaacaaraattccctacatcagagactctaggtgctatataatccaaaaacttttcagcctgttgctcattctgtcccatgctggcaataataccttgtcagcccattacccttattttgaattgctccatctcctggtgggacttgtatcttgtctgccatatcagaacacaaacccctgaagaggttctgatttgattttttttttttcttcatgcctaccctttttttggaagtttccagccgcaatttgaaatgaaatgacaaggtgtatatttgatcaattttcattcccaccattgcattacaacctctaacttaaatgggtaaccctaaggcatatcaaagaagcagattgcatgataaacggaaacagaaaaaaagaacctacatttattttgctttagcat

SEQ ID NO: 601579 - DNA, 610 bp, Homo sapiens
gatcagaaatattgatccatgtgcacgcagataaaatggcttctgctaaacagactaaaatctttctctctagtctttctcacttgtacaaacccagtttgttttcaaaaaatcacagtagcaatgcaactcatcactctagaaaagcaagcttaggctacctgaaagattttcccttggaagtttagcgtatgtttgactaacaaaaattccctacatcagagactctaggtgctatataatccaaaaacttttcagcctgttgctcattctgtcccatgctggcaataataccttgtcagcccattacccttattttgaattgctccatctcctggtgggacttgtatcttgtctgccatatcagaacacaaacccctgaagaggttctgatttgattttttttttttcttcatgcctaccctttttttggaagtttccagccgcaatttgaaakgaaatgacaaggtgtatatttgatcaattttcattcccaccattgcattacaacctctaacttaaatgggtaaccctaaggcatatcaaagaagcagattgcatgataaacggaaacagaaaaaaagaacctacatttattttgctttagcat

SEQ ID NO: 601580 - DNA, 489 bp, Homo sapiens
tggttgattttggccaactctgtactccaacataaccatagtcttcctaaagataacgaccctaatgcaataggtagacactggtaagtaagtgcattctcctcacatttcaggtactgtgctagatcttatataactctcatttatttctgggcagcatttcttatctaaaaataaagttctattactgraggccaagaatttgaggctgcagtgcactatgcttacacccataaatagccactgcagtctagcccgggcaacatagtgaggccccatctcaaaagacagtaacaaaataaataaattaaacaaatagaaatataaaatattttcttctctcagattagcaagaacttccataacatcaccaaaaaaggcacatctaacaaatgaaacccccaaaatttagtatttggaggatgcaataaataacatcaaattttagtaagctcagtatcttatttaatctggtgcaagaaattcaaa

SEQ ID NO: 601581 - DNA, 637 bp, Homo sapiens
attcaatgtctcagacatttctaacccatgatagtcaaatattgaattctagctgcttctctcactaatgacctatgaacttaagtctcattcctccagagtctcccttgtcatagttaatgtctccacccactcaatgggccaattcagaaacatgggaggcatttatgaggcccctgtccttgccctcaacacccttccccacgaccttgtcagcagcaagtgcccccacatacrtgttgattcgtgacctttgttcttcactcctgccatcatcatcccattccaagtcaagagctcttgtcctaacccatcccaactcagcccctttccaattcaaatggatgcaccacgcatcactaatgaaattgtcactcacctacttgaaaccctccagaattttccattgcatttaaaatgaaacccacattgcttatcatgattgctgaggcccttttacctggttcttcctggtgacttgttccagttgcaaagaccgtttgccatttctaaatcctatctaagtctcttcccacacccccactgtgctttctctcatgggttttctgtcagtccactccatgccttcccaaacttgatatctcggtgtgtgctgttttgtataaggccaactcca

SEQ ID NO: 601582 - DNA, 637 bp, Homo sapiens
attcaatgtctcagacatttctaacccatgatagtcaaatattgaattctagctgcttctctcactaatgacctatgaacttaagtctcattcctccagagtctcccttgtcatagttaatgtctccacccactcaatgggccaattcagaaacatgggaggcatttatgaggcccctgtccttgccctcaacacccttccccacgaccttgtcagcagcaagtgcccccacatacgtgttgattcgtgacctttgttcttcactcctgccatcatcatcccattccaagtcaagagctcttgtcctaacccatcccaactcagcccctttccaattcaaatggatgcaccacgcatcactaatgaaattgtcastcacctacttgaaaccctccagaattttccattgcatttaaaatgaaacccacattgcttatcatgattgctgaggcccttttacctggttcttcctggtgacttgttccagttgcaaagaccgtttgccatttctaaatcctatctaagtctcttcccacacccccactgtgctttctctcatgggttttctgtcagtccactccatgccttcccaaacttgatatctcggtgtgtgctgttttgtataaggccaactcca

SEQ ID NO: 601583 - DNA, 580 bp, Homo sapiens
tagaataaaaaatgaataaaatgttaattttttggaggaaatggttaattttttctacaaaattgtgtgacagctttacagaccttactcttcacaattgacttgaacattaacatcacaaagagggtcctgttkacaaaagaatagtcaagaacttcatgaatttttgacagtgactcttttctaaccctttaatccaaatatatttaagtgtccatcgtcgtcctttatccaactcatttgttaactagttttcttctgtgagttcctttgcctataattgaagcagttctctgaaatcacccaaactgattttatgaaagcccatgcttttggaaagatttgcacttcggctttgcaatctatttacattgactgtacttgcattgtattgctagatgttgactatcagttaggacaatcaaaaatatattgataatgggcagggataaatcagaagttactgtcaataacaaagttatgttttatgggtattttataggtgataaattcattactgagcaatttcatatcatgttttaattctcctggttgtaatatggtgactctggagactcaa

SEQ ID NO: 601584 - DNA, 580 bp, Homo sapiens
tagaataaaaaatgaataaaatgttaattttttggaggaaatggttaattttttctacaaaattgtgtgacagctttacagaccttactcttcacaattgacttgaacattaacatcacaaagagggtcctgttgacaaaagaatagtcaagaacttcatgaatttttgacagtgactcttttctaaccctttaatccaaatatatttaagtgtccatcgtcgtcctttatccaactcatttgttaactagttttcttctgtgagttcctttgcctataattgaagcagttctctgaaatcacccaaactgattttatgaaagcccatgcttttggaaagatttgcacttcggctttgcaatctatttacattgactgtacttgcattgtattgctagatgttgactatcagttaggacaatcaaaaakatattgataatgggcagggataaatcagaagttactgtcaataacaaagttatgttttatgggtattttataggtgataaattcattactgagcaatttcatatcatgttttaattctcctggttgtaatatggtgactctggagactcaa

SEQ ID NO: 601585 - DNA, 608 bp, Homo sapiens
agttaggagaagtagaatgaatatcacccccaggaaaccgcggtgtactttacatatgcaatttaaattaccctacttagcaggtggtagtattctacacctgaagacactaaggcggtgaaaggttaaattgcctacagccatgctgctgattaaatgttgactcagggatataacccaggtaggctaaccttgaaagcagtgcttcgtgaaaaaggctgaactgtctactgctaactgtgactcagggrcacccgttaagataagttgggaaagttgccctttccactaagcatatatatgtttttttttttttaaaagtcacattgaaacagcaggagttataggaaaataaaaacaaattagggcaaagtaatttttttcaaccaaaatgaatccacatttctctttttatgccggaataactcactcggtctctctctaaatctctctctctctctctctctctctctctctctctctttgcgtgtgtgtttgcgtgtgtgtgtatgtttaacagggatcatcaaagcagttgagttcccctctgcactggtcattgatccgccagttcaaggagggatgcctgagttaacaccattatagct

SEQ ID NO: 601586 - DNA, 566 bp, Homo sapiens
tgcatgttactagcctattgatgcacagtgagggtggatggcaggcattcttgggtgcttataaarctcctcttctcaccccagcatcagcaaacacacaggcacacgcatgcacacacacccagcatcttttgtgccaatgcagtcatgactgcattcatgggccagggaagcggtaaaactgggctccttcctggactcaatactgagtctggtttagtctaaagtgatcatcagaatgccatcgcccttgccaatgatcaaggatgagtgtgttgcaaaattctggccaatgaagggtgtacagggagatttctttcattcttgagcaagggcacaaggaaggaatgtttttctgctcctggatataatcttctcaccttggaattaaggtcagtatattaggaaccatgagtggagccagctgatgccctgaagagaatagcagaatgaaaagattaaaagagcctggattagccaggcatggtgctgcatgcctgtagtctcagctacttgggaggctgaggcaggaggatcacttgagcccaggagtttgaggttgcagt

SEQ ID NO: 601587 - DNA, 566 bp, Homo sapiens
tgcatgttactagcctattgatgcacagtgagggtggatggcaggcattcttgggtgcttataaaactcctcttctcaccccagcatcagcaaacacacaggcacacgcatgcacacacacccagcatcttttgtgccaatgcagtcatgactgcattcatgggccagggaagcggtaaaactgggctccttcctggactcaatactgagtctggtttagtctaaagtgatcatcagaatgccatcgcccttgccaatgatcaaggatgagtgtgttgcaaaattctggccaatgaagggtgtacagggagatttctttcattcttgarcaagggcacaaggaaggaatgtttttctgctcctggatataatcttctcaccttggaattaaggtcagtatattaggaaccatgagtggagccagctgatgccctgaagagaatagcagaatgaaaagattaaaagagcctggattagccaggcatggtgctgcatgcctgtagtctcagctacttgggaggctgaggcaggaggatcacttgagcccaggagtttgaggttgcagt

SEQ ID NO: 601588 - DNA, 609 bp, Homo sapiens
atctgtggtggaagaccctatagagtacagtacaataacaaagtagtcaattctactagagaaggcagctatgcaattcagccaaacccatgtcaaatggccataaattattgtttacaagataatgttaatatgcacgcaaaatcagcataccgttatcttcctgacatcaccatgtgaaagagcctagtaaagttcattcattcatatcactcccacaggcctaatcttcatagaaaacagtctatttatacagaatacttctcaaggaaaatcagcatagcacagaggaaaactcaagttggacacacttgtgttgctgccagttctaagcacgtacaagctgtgggatctaaggtcacgccttgaacccatgtgaaactcagttatcgtttctgtaaaatggggaataagtggtaaacatatattgagagcctaacataacatagtaaatggaaaacaaatgtcagttgcctgctttttgcaaaatccttggtgtcctatgcctcttmcccaattcgtacgacctaccaaatccagcacaggcactatgactaaaaaattaaaacttgctcctagatgtgctaccaatggtaacccgagggctga

SEQ ID NO: 601589 - DNA, 564 bp, Homo sapiens
agagcaacataaagggtaacgacatgttaagatccaaatggtaagagtgaaatctgtgagttttaaaatatatagcaaaaattactatatcaataataataacaatgcttaacctaggaggtgagtaatggaagcaaagtatcctaaagttcttgtcttctccaggaagtgatataatactgatttatattaaaatttaataagtcaaagatgcaagatgtaaatctctacaaatttaaaaagctaatggagaagaaaagcagaatgataaaaaggcaagaaaggagagaagatgactaggtacagtggcctgtaattctagcaccgtgggcggccaaagcatgaggatcacttgtgaccagcttgggcaacatagcaaaactctgtctctacaaaaattaaaattaaaaaagaaatagccaggtgtggtggcaggtaccggtagtcccagctactcagaaggctgatgtcgagggattgcctgagtccaagagttcaagggcacagtsagctatgattatgccactgcactccagccagagtgacagagcaaggccctgtctc

SEQ ID NO: 601590 - DNA, 583 bp, Homo sapiens
gaaggaaagtgataatgtaaaactacgaactagctaactacaaacagctacaagaagttctgctgcagaaaacaaatgcaaatttgcagtaggctcaataagggcaaagggaattgaggagagtggaaaatacttgctgttttctttgcttctttgacttattttttggttggttgtaagtgggaaaacttgaatctgtcttcccactccctttgtctgcaggttcacctttagcttggaaggaataaaaaactcgccaaaatttcctaasttgtagaatagaaatagtcacctccaaagatcattagaacaatcaagaacaaacatttcacaaacctagtaataggtagacaatgcagggtttatcttacctctcttctctacttttctttcctgaaggttaaaaactgcccaaacttaaactgtgccagctacactgaaatactgagcagtacgaaattacctagtagcaatgttaggggagaaggggatattccaggagaactccagaaaagtcagcaagcttgttcccaatgtctggccatggaagatcggagcagaagacttacttgaaatggttcct

SEQ ID NO: 601591 - DNA, 595 bp, Homo sapiens
tattataatcttatgcagccacagtcatatatgcggtccatcattgattgaaatgtcgttatgcagcccatgactgtacacattttgaggtacagggatcaggacttcaacataggaatttgaggggctatgacacaaatgcaatgtgttaaaatcaggtcatattggattaggatggactctaagtccaatgattgatgttcttataagaaaaggagaagagactcagatatggctctctcctggcttctggtggtcactggcgatccttgaggtgccttggcttggtgctacatcaccctagcctctgctccatcgtcatttgcctttcttctccatgtgagccaccacacccrgctatagtctttttttttttttttttttttgagacggagtctcactctgtcacccaggctggagtgcagtggcgcgatcttggctcactgcaagctccgcctcccggattcacgccattctcctgcctcagcctcccaagtagctgggactacaggcgcccaccaccatgccaggctaattttttatgtttttagtagagacggggtttcaccgtgttaaccaggatgtattgtcggtt

SEQ ID NO: 601592 - DNA, 501 bp, Homo sapiens
gacacttggttgcagctggtgctagaccccccacagtggttaagagggcaggcagcagcagtggtagtagcaaagggacagatagccaaggaaagatcccctttctcccaccgagggaaatcaactsctgaagttctgttcgacccagcatcagaagatccattgcaggagatggcaccagtgatcccagtcgtgccctccccttatcagggagagaggctcctcacttttgagcccacagtgcttgcacctccgcaagacaaacatatccctaggccacccagagtagacaagagaggaggtgaaacctctggagaaacccctcccttggcagctcgtttaagacccaaaactgggatacaaatgcccctgagagagcagcggtatactgggatagatgaggatggtcacatggtggagaggcgtgtttttgtgtaccagcccttcacctctgccgaccttctcaactggcaaaacaataccccgtcctatactgaaaag

SEQ ID NO: 601593 - DNA, 463 bp, Homo sapiens
aaggtaactggtaagtcaagacacttagaccagttcccatacatagacacttggttgcagctggtgctagaccccccacagtggttaagagggcaggcagcagcagtggtagtagcaaagggacagatagccaaggaaagatcccctttctcccaccgagggaaatcaactcctgaagttctgttcgacccagcatcagaagatccattgcaggagatggcaccagtgatcccagtcgtgccctccccttatcagggagagaggctccycacttttgagcccacagtgcttgcacctccgcaagacaaacatatccctaggccacccagagtagacaagagaggaggtgaaacctctggagaaacccctcccttggcagctcgtttaagacccaaaactgggatacaaatgcccctgagagagcagcggtatactgggatagatgaggatggtcacatggtgg

SEQ ID NO: 601594 - DNA, 329 bp, Homo sapiens
ggtagttctttatagcaatgtgagaatggactcatacactggttaaaaaataaataataaagaaaacccaggattctaataatagtgactattttattgaggccctttcatgtgctaggaactctgtacacacttgttcatgctatcctcactgtgtctctccaaggtgagaaattattgttccattttgcgcttttttggggaggatctccaggrttctatggtttaggcactggaatcttgctgaacgcagaaaacttggatgacctgtggttagcacttggcttggcccctgttaggaggtgggcagtgtgtgtgtgtgcagcagc

SEQ ID NO: 601595 - DNA, 598 bp, Homo sapiens
ctcctaacttgttgctctgatgaaatatttatgtttgctctggagaaacaagtataaaacctggatctctctgggatatcaacccagatccaaagtaaggcactgctcgtaaatgaggatttgaggctggctacactttctctcaggtacacttctagrtaagagcctaaggctgacagaagggagtgaaggagagaggcatgggaccagtctccacatgggatcacccactttccacttcttccctttatctccttctcctttccatctctctctacctctgtcattctagtcatcactgaaggggaggagtggtttcagacactcgggatttcacaaaggccattgaagaggagaatgttctttctcttcacaccaggaggagagtgcatgagtatttagatctacaattcacacaaggtgggtacacaagtatttataatatatctacaattcacaccagaatggggacacatgagtcagtactaagatacctacagtaggcaggaaattgctccttttgagaatcatctcaccattataaggctgtaagaatgtctcattagattactctttaattaattaattaattaattaa

SEQ ID NO: 601596 - DNA, 708 bp, Homo sapiens
tcccaacaccaaaaagattcagggacctggaatcttagctgggtctgcaggaacgctcagatttaatcacccaacaggagtcatttattcagcatcctgagcctccagcagtaaacaagagaggacaaccaatcccaggagaaaagaatggacaaagagctgcttgggtataggaaaagctcatggtctcatgaaagtgcatcactggctttatggaaggacccttcaggaaaaagcactgctcacattcaaatgctccacccagggtatttcactctttttgctgcttttccaggaaagaaaaaatacttcctcttggaaacccaagtggaaggactcagcttttattgtaacaggagagctaccktattttccatgcttggaactaaatatctgtgttgagaagtcactttaatgaaagagtctatgtaaatacatgtgccacttaatgggaacacagaattactttctagttgctcctgggaccaggtcatcaaggtaaagtttttcaatttcatcagggaagagcaagaagtgacaatggaatttttcttttttttcttagagccagagttttactctgtcacccaggctggagtgcaatggcacgatcacggctcactgcagccttgacctcctgggctcaagtgatactcccaccttagcctcccaagtagctggggctagaggtgtatgccaccatgccca

SEQ ID NO: 601597 - DNA, 669 bp, Homo sapiens
tgtaggctgctaggcaaggaaaacttaaagtgatgatctctgcattctcagctggctttatcctctttctttggtttgtttaatgtattcgtcttaccagtcatagctatggttttaccattctagccattcttcagtacatgcacaacacacatccatatacattcctackttagagataacatttttagtcattttcctttattagtgacttcattcaaaatcccatggtatacaatttctgttgtctttattctaaggcttctgcccatagtgagagactgagtcagtaatccagtaatctgtagattcagttcaatcccagtcaaaatcacagcatggtattttgtagctatctgtcaactagttctaaaatggatatgaagagaccagagagttagaatggccaaaatatgtttgaaaaaggagaacaaacttagaatacctgatttcaagacttagtataaagctataggaattaatacagtgtgatattgccagaaagatagacaaacagataaatagtctatacatggttagtatataggtgaaaggtaattcagtggataaaatacagtatttgtagcaagtggtactagaacaattggacatctgtatgcagaaaaacccaaaaccagttttaattcccactgtataaaaattgaccca

SEQ ID NO: 601598 - DNA, 254 bp, Homo sapiens
gtgttttttttttagagacaggatcttaccatgttgcccaggctgatctcaaactcctgtgctcaagtgatcctcttgcctcagcctcccaaagtcctgggattacaggcgtgagccactgcaccctggcmcctatcatctattaaagtttccatcttccaataccagtacatatgataattaaatttcaacatgagttttgatgaggacgtttgaaccaatttttcacacttctcagggttaaattcaggggt

SEQ ID NO: 601599 - DNA, 254 bp, Homo sapiens
gtgttttttttttagagacaggatcttaccatgttgcccaggctgatctcaaactcctgtgctcaagtgatcctcttgcctcagcctcccaaagtcctgggattacaggcgtgagccactgcaccctggcacctatcatctattaaagtttccatcttccaataccaktacatatgataattaaatttcaacatgagttttgatgaggacgtttgaaccaatttttcacacttctcagggttaaattcaggggt

SEQ ID NO: 601600 - DNA, 566 bp, Homo sapiens
tgcacagcccacagaccgggagagtcccttgggtgcctacgccaccagggccctgggtttcaagcacaatactgggaggctgtttgggcagacaccgagctagctgcaggagtgttttttttttcataccccagtggcacatggaacgccagcgagacagaactgttcactcccctggaaaggggctaaagccagggtgccaagtggtctacttcagcggatcccacccccgyggagcctagcaagctaagatccaatggcttgaaattctcactgccagcacagcagtctgaagttgacctgggatgctcaaacttggtgtggagaaagaggtccacttttcccctcacaatgtaaagaaagttgcggggaagtcccaattgggtggaatcctccacagctcagcaatgccgctgtagcctgactgcctctctagattcgtcctctctgggcagggcatatctgaaaaaaggcagcagcccagcaaggggcttatagataaaacccccgtctccctcggacagagcacctgggggaaggggagactgtgggtgcagcttcagcag

SEQ ID NO: 601601 - DNA, 549 bp, Homo sapiens
ccccgtcattctcctgatactgtgggcacagacacctgggcttataaggactgggtttagcccgtcatttattttatcctatcctaaaaagagaagcttagagcattgataatcttctttcttatttcaracagcatcagtattactcatggatgacttagaaattgtcagtagacaggctgagaactcgccaaagagctggagggggcttggggtttttggtaggaccaggaaagttcattcatgtccatagcaaagccagggccagagaatgagggacacctggaatttagtaggagcaccatgattcaaaggctggggagagatgagcaggaaaggatcaggggagggggacaaagctggcacaaagagcctgatttcaggagaaaaagaggagtagcagttaggctcctgaaggagaataagggaaggtttggagtcctgggtgattgcttgggatgccagcagcatttgagaccaaacaggggtgtgaagatgggtgggtcagctcaccttgcagagtgtagcataaatgggcacagccagaaa

SEQ ID NO: 601602 - DNA, 603 bp, Homo sapiens
aggggaaatgaagtaaattacctgctcagggttacttacagaatctctaacaaaggaaagataatgaaggtttgagtatttgtggctcaaattggcagtccataaagatatttagccccagagcaatttgtctttgatcttgcaaaaattcttcagcggcagttcttcagaacaactttcacattgtcagagcgggaatcatgagcacggctgtaatgtaggaactagtgcctaccctgctctaagaaagccaaatgagaagaacaaacagtattaaaatgaagagaaatggaggcagagagacacagaaatggaattaagaagaaaatggaaaaagaaatagaagaaaagagaataggatattggttgtgatgacttcgttaggaccctgtgtttagtaatgcttttggccttaaagtcttttattatctgaaattaatgtagttactgtcctttggttaaattttactgstgttctatttttaatcctctaacacttaaattctgtttactttaccctgatattgttgttttacattttaatcagtttttaagcccccaaaatattatttttggatatagtcactgtttatttagatttat

SEQ ID NO: 601603 - DNA, 527 bp, Homo sapiens
tgtaggaactagtgcctaccctgctctaagaaagccaaatgagaagaacaaacagtattaaaatgaagagaaatggaggcagagagacacagaaatggaattaagaagaaaatggaaaaagaaatagaagaaaagagaataggatattggttgtgatgacttcgttaggaccctgtgtttagtaatgcttttggccttaaagtcttttattatctgaaattaatgtagttactgtcctttggttaaattttactggtgttctatttttaatcctctaacacttaaattctgtttactttaccctgatattgttgttttacattttaatcagtttttaagcccccaaaatattatttttggatatagtcactgtttatttagatttattcatgtatttactattctctttctctttaatccgtcttgcatcccagattgaaaccactctctgcctgcattrtattctttagaattttttttggtaaaagtctactagagcaatttttttccattttactttgcctgaa

SEQ ID NO: 601604 - DNA, 582 bp, Homo sapiens
agtgactcagccccaggcttcacctttccttttgcataagaatttggggaggtcccgagatttttttcctttcccttacgtggtccactcactcccaacactaaggacccaaagcccttggcttatgcctccattctgcacactgacgtcaggctgagctactttgctcttagttgaggcacatctgcattaatttccttttgctgctataacaaattactacagatttggtggcttaaacaacaacaatgtgttatgttataattttgtaggtcagaagtctgatgaaggtctcactgggctaaaatcaaagtgtccatagggctgtgtttcttctggaggatctgagggataattcatttccttgtcttttccaacatctaaaggccacccacattccttggckcatagttcctctatttttaaagccagcaacagcatgttgggtccttcacattctgccatccttctggttttctgagcagagctggaaaagattttctccttttaaggactcatgtgattagattgggctcacctgaataatccagaataatcttgctacctcaaagtccttcagtt

SEQ ID NO: 601605 - DNA, 575 bp, Homo sapiens
ttccctctgctttctcctaattcctgccttgtgagtggtcctgatgctgacagatgcagtaggtatcttgcagccacgagggagaaaacagcatgacttaggacaggacgagctgaaagtggatgacacgtgatttctgatgaaagccttgagccatgacattttttaaatgaaactagatacctcttactgaaatggagagatttccagttaaatttccagcaaaagaatgaaaaatggaaattaactataaatcacttatttatgtaaaataatacgaacataatttctatttggggttctgtttttgttattgtattttagtaaaccttaaaatataagagatttaaagyttacttataacctgagtctgccaagtgttttctatttctttgtgtatggttttaagttcttcagcctcaaatagtacttcactgggtgttttcaggaacctacatctgtttggggaggaattgctacgttataatcctctacgactttgagtccaaggatatacacaccccagcaatcatagtcttatagccactaattcaattcttcttatagcttttggg

SEQ ID NO: 601606 - DNA, 575 bp, Homo sapiens
ttccctctgctttctcctaattcctgccttgtgagtggtcctgatgctgacagatgcagtaggtatcttgcagccacgagggagaaaacagcatgacttaggacaggacgagctgaaagtggatgacacgtgatttctgatgaaagccttgagccatgacattttttaaatgaaactagatacctcttactgaaatggagagatttccagttaaatttccagcaaaagaatgaaaaatggaaattaactataaatcacttatttatgtaaaataatacgaacataatttctatttggggttctgtttttgttattgtattttagtaaaccttaaaatataagagatttaaagtttacttataacctgagtctgccaagtgttttctatttctttgtgtatggttttaagttcttcagcctcaaatagtacttcactgggtgttttcaggaacctacatctgtttggggaggaattgctaygttataatcctctacgactttgagtccaaggatatacacaccccagcaatcatagtcttatagccactaattcaattcttcttatagcttttggg

SEQ ID NO: 601607 - DNA, 556 bp, Homo sapiens
ctaataaaactaaggagaacatttaaaaatagcagaagtcaacatatagaggaggaaatagatttgagagatttctgaggtctaattgacaggactcagtgagttatagaaagggggaggatgataacagctgaaggtaagcttgggaaattggatacattttgatgccgttaactaagacgaggacaatgagagtaaagttggagttcagaaggacttgcaagtatcattggagcgattctagctgctctatgagttacgtagtgtaagggggaggtgaagagctccatccgtctctcaaaactccagcttctccccttaagattaggagatgctaatatgataatcagattcaggtcaccaaaggagacacatttacccctaggtaggggcagtgtcaattaaaatgccaarctcataagagatctccagtctctggtgagttctagcacactctcactcgctcactctccctctccctctcctcctacaagatacttttaaaaacatttaaaagctttattgagctataaatgacacacaataaactgcatat

SEQ ID NO: 601608 - DNA, 489 bp, Homo sapiens
cagccacaggtgccagctgggtgagtaccaaccaggtggattaggtccaccacccagaagatgcataaaaaaaccacacctgtccccccagatccacagaagccatcttagggaagaatcagtggggatactcaagayaaaaaatgtggaaggctctttttctgtcttttttccaagagctgattattatctgaagggattgcttactaattggaactaagatttcacccagacagtgctaaatgtcagagattcttccccccgctactggagatcagagagaagttcgcaacatttatagataaaaatcatatctcaattgtagtataagttaaatttgtaactattatatttgtttttgaaagccataaaagtctgcctatttacaaccaaataatgccatagttgacaattttaaaaaatagaaagtttatcttttacctagcatatgcagtagctatattcaaacatgaaaatgaacacaattaa

SEQ ID NO: 601609 - DNA, 489 bp, Homo sapiens
cagccacaggtgccagctgggtgagtaccaaccaggtggattaggtccaccacccagaagatgcataaaaaaaccacacctgtccccccagatccacagaagccatcttagggaagaatcagtggggatactcaagacaaaaaatgtggaaggctctttttctgtcttttttccaagagctgattattatctgaagggattgcttactaattggaactaagatttcacccagacagtgctaaatgtyagagattcttccccccgctactggagatcagagagaagttcgcaacatttatagataaaaatcatatctcaattgtagtataagttaaatttgtaactattatatttgtttttgaaagccataaaagtctgcctatttacaaccaaataatgccatagttgacaattttaaaaaatagaaagtttatcttttacctagcatatgcagtagctatattcaaacatgaaaatgaacacaattaa

SEQ ID NO: 601610 - DNA, 489 bp, Homo sapiens
cagccacaggtgccagctgggtgagtaccaaccaggtggattaggtccaccacccagaagatgcataaaaaaaccacacctgtccccccagatccacagaagccatcttagggaagaatcagtggggatactcaagacaaaaaatgtggaaggctctttttctgtcttttttccaagagctgattattatctgaagggattgcttactaattggaactaagatttcacccagacagtgctaaatgtcagagattcttccccccgctactggagatcagagagaagttcgcaacrtttatagataaaaatcatatctcaattgtagtataagttaaatttgtaactattatatttgtttttgaaagccataaaagtctgcctatttacaaccaaataatgccatagttgacaattttaaaaaatagaaagtttatcttttacctagcatatgcagtagctatattcaaacatgaaaatgaacacaattaa

SEQ ID NO: 601611 - DNA, 619 bp, Homo sapiens
  misc_feature 278, 311: n = A,T,C or G
atagtgtcaatcactcacattaatgataacttttaagtaaagcaaattccatttcacagagaacacgggaagttggacacttttaactgtgactgtcacttaacatatagcagacaagcaaagctcatgaatgcacrtgacacaactctctgcagccatatgaatcccttatggtataacttctccaagtggcaaaaagaaacacgttcattaacagatccaaagatgtaagctcttcgtagcatataaaaaaagaagcaagggccgggcggtggtcnatgcctgtaatcccagcactttgggaggccganggcgggtggatcacttgaggtcaggagttggagaccagccagggcaacatggcaaaaccctgtctctattaaaaatacaaaaattagccaggtgtgatggcacatgcctgtaatcccagctactcgggaggctgaggcaggagaatcgcttgaacccaggaggtggagattggagtgagctgagattgctccactgcactctagcctgggcaacagagcaagactctgtctcaaaaaataaaaacaggccaggtgctatggcttacgcctgtaatcccagcacctttggaggctgaggcaagtggatc

SEQ ID NO: 601612 - DNA, 619 bp, Homo sapiens
gagctttcccagaaataccattgaaaatcgcaaaagatttgttacttctccgtatgaaaagagaggtgccagaaataaacaggtatatttgatatgttactattgttgaattacccgggaatagatgaggttattttttatcaaaacagagggaaagtgtaggaaaaatttcctttcaatggaaaattaaatattgcctatagtccaccctttcacattatctgcttttgactccatgggagttattttacagcttgtaaaatgtagataactgatagaaatgaaaaataattcttggctctagacctgtacatttagtcctgccagtagaggttcagtggaattccctttgccaccctggaagaagctggcttgagctctgttggtgcrtttgtttcaacattcctttgctccatacaaatgtagcttttttgacttctcctttgagtcagttataatctgctgtttgagagtcatgattttattttatttatttattttttttgagacagggtcttgctctattacccaggcttgagtgcagtgatgcaagcttggctcactgcagccttgacctcctgggctcaagtggttctctgactcagcctcctgagtagct

SEQ ID NO: 601613 - DNA, 540 bp, Homo sapiens
aacctgcaagtacacccagcaaagaaaacatagtgacaggcccaggaaagcaggttagaggcagggagcaagagaattcacattcttctgtgatcatcggtgttattattactccctctttgttggtgaggctcagagagaggaggtgaactgcctgaagctacaccactagcaagaacaaagtcacgatttgaactcaattcctttgcctcccttactaagagatactaactcggaaatgctctgaacagtcagccaagcaatgtcttcagacagtttatattttactctgactctcacctcagggagccaaaataagatcatctccctagagagcactgcagagaaaattctcaaagagctggagggaaatgccaacccacttctacccgccgaagccacagggaattcatagcttgatgyactttcaggaaatagcgacggatttcacagtgaactgaattgacacttagcaatgtgaatctgcagctaaaacatctcaaaaccgactacatggacaccaggcactgcgggtggctg

SEQ ID NO: 601614 - DNA, 540 bp, Homo sapiens
aacctgcaagtacacccagcaaagaaaacatagtgacaggcccaggaaagcaggttagaggcagggagcaagagaattcacattcttctgtgatcatcggtgttattattactccctctttgttggtgaggctcagagagaggaggtgaactgcctgaagctacaccactagcaagaacaaagtcacgatttgaactcaattcctttgcctcccttactaagagatactaactcggaaatgctctgaacagtcagccaagcaatgtcttcagacagtttatattttactctgactctcacctcagggagccaaaataagatcatctccctagagagcactgcagagaaaattctcaaagagctggagggaaatgccaacccacttctacccgccgaagccacagggaattcatagcttgatgcactttcaggaaatagcgacggatttcacagtgaactgaattgacacttagcaatgtgaatctgcagctaaaacatctcaaaaccgactacrtggacaccaggcactgcgggtggctg

SEQ ID NO: 601615 - DNA, 539 bp, Homo sapiens
tgtgatgtatttgtttactgtctgtccccaaggctgtgctctgggaagctgcagcctgttatgtgacccaggaggcttcacagggttcaggatttggactctgggactaaacctcatccctgccatccatgagggtcatgctcaattctgagcatctggctcctggcgccctcatcctgacccagggcgggtggcagctggtgtggcaggctcgtgacaggttgggttgtccaygacgtcctgctctcccagagctcagccacaggtctggctgtccatgatctcctgctctcccagagctcagccacaggtctggctgtccatgatctcctgctctcccagagctcagccacaggccaggatgtccacaatgctctcccagctgctcaggctcaggtgccctcagtttctagccatcctttgcctctcaaaatccaactccctggggcaaaggacaatctcgaccccttggtgtggccccatgaggccaggaatccagccctttggtccttcaaggcctggggtccagggtgactgga

SEQ ID NO: 601616 - DNA, 539 bp, Homo sapiens
tgtgatgtatttgtttactgtctgtccccaaggctgtgctctgggaagctgcagcctgttatgtgacccaggaggcttcacagggttcaggatttggactctgggactaaacctcatccctgccatccatgagggtcatgctcaattctgagcatctggctcctggcgccctcatcctgacccagggcgggtggcagctggtgtggcaggctcgtgacaggttgggttgtccatgacgtcctgctctcccagagctcagccacaggtctggctgtccatgatctcctgctctcccagagctcagccacaggtctggctgtccatgatctcctgctctcccagagctcagccacaggccrggatgtccacaatgctctcccagctgctcaggctcaggtgccctcagtttctagccatcctttgcctctcaaaatccaactccctggggcaaaggacaatctcgaccccttggtgtggccccatgaggccaggaatccagccctttggtccttcaaggcctggggtccagggtgactgga

SEQ ID NO: 601617 - DNA, 485 bp, Homo sapiens
actctgtcttaaaaaaaaaaaagaaaagctgttgccagagacaaaaagaacactatgtagtaattaaaagaccatcagaagatacaattacaaacatatacacactaagcaacacagtcccaaatatgtgaagcatacattgacaaaattaaagggaaaagtagttctatagctggagacttcaatacctcattctcaacaaygaatcgaacatatagtcaaaagatcaataagaaaatagagggtttgcacaacatcacacaccaactagacctaagagacatatatagaaaactccaccccaaaaagagcagaatacacatttttctcaagtgtgcatgggacattctttggggtagacctatatattagaccacaaaacaagtctcaataaattttaaaaattaaaattatgtaaagtatcttctctaaccacaatggaataaagctagaaatcaacatcagaaggaaactgaaaaatttgc

SEQ ID NO: 601618 - DNA, 555 bp, Homo sapiens
ctgtcctccccagacaggcccccatccatggccgatcactggatgctgtggtggsgacagcagtgcatgaggtcattgtcttgtgagccctgtactttatggatgaggatatggaggctcaggcggttgggaactcagccacatcacacagcttgcaaatgtcacagctatatcaagcccaagctctgcctgcaccaaaactcgtagacccagctcctctgtcacccaccaatctcacgttccacagttccagtatttgatagtctctcccatctcgcaatatgtacgcacttgattcatcattacaaatcatgtacacaggtcctatcgtatcccatgcaccatactcagaactgagaacagtaaaatgctgactgccctgggatggctcattggcacactcaagcccctcttggcacaggattccagcaaggctcagtaggaggaggtcagccctgccagtagttagaggggctcagaggagaggttagtcctgtcctggtttagggagctcagaggaagggtcagccctgtcctggttcaggggcttacagg

SEQ ID NO: 601619 - DNA, 555 bp, Homo sapiens
ctgtcctccccagacaggcccccatccatggccgatcactggatgctgtggtggcsacagcagtgcatgaggtcattgtcttgtgagccctgtactttatggatgaggatatggaggctcaggcggttgggaactcagccacatcacacagcttgcaaatgtcacagctatatcaagcccaagctctgcctgcaccaaaactcgtagacccagctcctctgtcacccaccaatctcacgttccacagttccagtatttgatagtctctcccatctcgcaatatgtacgcacttgattcatcattacaaatcatgtacacaggtcctatcgtatcccatgcaccatactcagaactgagaacagtaaaatgctgactgccctgggatggctcattggcacactcaagcccctcttggcacaggattccagcaaggctcagtaggaggaggtcagccctgccagtagttagaggggctcagaggagaggttagtcctgtcctggtttagggagctcagaggaagggtcagccctgtcctggttcaggggcttacagg

SEQ ID NO: 601620 - DNA, 446 bp, Homo sapiens
tatctgtaaatggtgaggtctacaaagtcttcttcttgaggaagctcttataaaccacagcagtcttcaaaatctgattttcatcaaaaacccttggtcaggatctagttgtattgtgggggaaaaaatcctgagcctggtgttttgtcagtgtcctgagccagacacagtggccacaggtccctgccargggagaaatcacgaggtgcgacgaacaccttgcaaatgtctgtagacatcccactatttattactgggaagaaaatctcatttgatacaagttgggaatttggactctgacctgagaaaggtaggttctctgattcagtagatagaaaaaaaaatagacgctctgtctggacaggagtacaagctggaggaaaacccagcttgtagcagtcatgacacctgacctgtgtgaaaaccagtcccttcatgcatttgat

SEQ ID NO: 601621 - DNA, 521 bp, Homo sapiens
ccctgggtgctgaaaagagcaggtcaacgtcaccctgaggaggacaggagccaggaccctcaggagcttggcagtgggagtgggctgcccttctctctgagtgctgtccttaatgtgactttgtctctgatttcaggtcccggtgtttaattcctgataccaattcctgggagagaaaattgggttcctccagcttcgattaggtgttctcttgaggacctatgagcagtkggcgaggtcgggggagaatcacatggctgcccagtgctcccaggtgtacagaaattcctagcagggtggaagcctggtgacaggggaaccccttaagagttgtctgttgtactcagctaatctttgtgggcaggaaaaacaatttgctatttgaaatcacagcagcctgtagccacttctgaatcctaaggaagtctcagaattcctctttggaatagatgagttttttgactgtgaatgaaagacaaacaccagggaaagacttggaaagtgtaggaatgagaaaaaaa

SEQ ID NO: 601622 - DNA, 521 bp, Homo sapiens
ccctgggtgctgaaaagagcaggtcaacgtcaccctgaggaggacaggagccaggaccctcaggagcttggcagtgggagtgggctgcccttctctctgagtgctgtccttaatgtgactttgtctctgatttcaggtcccggtgtttaattcctgataccaattcctgggagagaaaattgggttcctccagcttcgattaggtgttctcttgaggacctatgagcagttggcgaggtcgggggagaatcacatggctgcccagtgctcccaggtgtacagaaattcctagcagggtggaagcctggtgacaggggaaccccttaagagttgtctgttgtactcagctaatctttgtgggcaggaaaaacaatttgctatttgaaatcacagcagcctgtagccacttctgaatcctaaggaagtctcagaattcctctttggaatagatgagttttttgactgtgaatgaaagayaaacaccagggaaagacttggaaagtgtaggaatgagaaaaaaa

SEQ ID NO: 601623 - DNA, 587 bp, Homo sapiens
cacaggtgcaagagagagaggccgactattttttaaactgtaagtagcccctttgggacctgagaggatttgctgtttcacatagaagctttcagggcagcatcttttggggaaatgttacctaatagaaaatatttgaggcaatttgggagttgatttttagcctgccccttgagtaaatatcacttaaaactcaaaactgtgggctcaaactaccgtgtatgtagaagaaatctaaagctatgacaattctcctcttagctgtacctaagacactattggtactgtaatggataatttttgttctcataataaattcattcaacagataaaataaccaatrtacaaaaagaaaaagaaatgcccccaaaagaactaatagatcatgttggaacaaactcgtggctttgatggaggatcagtataacacagcaaagtccagagaccaatccctgggcttgaatcctgcctctgccgcccactggctctgtaaccttggacaagacagttaacagctatgtacctcagtttcctcatatttaaaaagcaataacaatactatatagctcattgggttattgtaagat

SEQ ID NO: 601624 - DNA, 584 bp, Homo sapiens
gttggaacaaactcgtggctttgatggaggatcagyataacacagcaaagtccagagaccaatccctgggcttgaatcctgcctctgccgcccactggctctgtaaccttggacaagacagttaacagctatgtacctcagtttcctcatatttaaaaagcaataacaatactatatagctcattgggttattgtaagattaaagagtctaaattatgtaaagtccttggaatcatgcccagcacacagtaagtgctctataattaatacccattattagtagaattttatattaaaccctaatttaaatgatcaggtaacaaatgggattgaaacccttcaaaagttaactaatttcagaactatgaagaattgacttcaggtctttcttccttcattgctcctgtgtgttctgaaacaattcactcacttccttccaagtttcatcatctaggaagcacaaataaataataaacatcataaattccatttagtgttatgcagagaataaactgtaggaggcaagattggtgcaggaatatcatttagaaggctattgcagtatagtccaaatgagacatatt

SEQ ID NO: 601625 - DNA, 587 bp, Homo sapiens
cacaggtgcaagagagagaggccgactattttttaaactgtaagtagcccctttgggacctgagaggatttgctgtttcacatagaagctttcagggcagcatcttttggggaaatgttacctaatagaaaatatttgaggcaatttgggagttgatttttagcctgccccttgagtaaatatcacttaaaactcaaaactgtgggctcaaactaccgtgtatgtagaagaaatctaaagctatgacaattctcctcttagctgtacctaagacactattggtactgtaatggataatttttgttctcataataaattcattcaacagataaaataaccaatatacaaaaagaaaaagaaatgcccccaaaagaactaatagatcatgttggaacaaactcgtggctttgatggaggatcagtataacacagcaaagtccagagaccaatccctgggcttgaatcctgcctctgcygcccactggctctgtaaccttggacaagacagttaacagctatgtacctcagtttcctcatatttaaaaagcaataacaatactatatagctcattgggttattgtaagat

SEQ ID NO: 601626 - DNA, 568 bp, Homo sapiens
cacacttgcattgctataaccccaagcccacttcagccaaaaatcaatcatgcatgcctacttgcacttgtacacctaaacacacacacacacacacacasagagagaaaggcatgctctgatgcctcttggcacacattttggatcagcttcattagggtaaccatctgggtcatttcaattctgtttccagtcctgaaataattatggcatctgattcagccactccccctcccccacttctccccactccctacctcccctgccccatctaccagctgcataagtgtaaaactttgtaaagagaatataattaatgttttggaaacattggagaattttttaatccacataggctcatatggtcagaggcccagagctaatctctttgctggtcagagcaaaagcaagcccatagcaccatggattaattccttagaactgtgtatcctctccctacctccttttctgatctctctgaactctccaatgtggctaagctcataattgggacagcagccaacaaataaaatgtgactctgtaatttcatctgcatccatccaaaat

SEQ ID NO: 601627 - DNA, 570 bp, Homo sapiens
  misc_feature 134, 135: n = A,T,C or G
ctctccctacctccttttctgatctctctgaactctccaatgtggctaagctcataattrggacagcagccaacaaataaaatgtgactctgtaatttcatctgcatccatccaaaatgtactaaaacgactgnnctacgcgttggcctctactaactgcttgactttatttatgccaaaaaaaaaaatgattatagtttgggttaatataatcacataccggcccaaaaaatccccaagcttgcaaacggtaagtggctaatgtatgtaaaaatacagtcattggaagacactgtctattaaagtatttcaatcactgaatttttaaactatggaattttaaaggctgcagaagataagaaatttatataaatcagactggtcatgacaaattcaccagccaattactttatctccccatggccacataaatgttgtctttaaagatgtaagcatgcagctgcctatgagataaagaacatcataagtaaagaacatttattttattgtttttgtttgcttgactgatttcttaaatacttttgcttcttcttactgcctaatttattc

SEQ ID NO: 601628 - DNA, 556 bp, Homo sapiens
catatttcaggcaggaagaaacaaaattagcaaaaatcaggagaatggagagctcaaggctcattgcagaaaaaaccaattttatgtggctgaattttaatgtatgaaggagaattgggaaagaagtttcatcagtaaaaaggggataaggagactagaatttatgctgagatcaaagatctccatttttaaaatagagaaactccacaaatagattttttgttttgttttgtttttgtttttgttttgagaaagggtcttcctctgttgcccaggctggagtgcagtggtgcaatctcagcccaccgcagcttcaacctctgggactcaagtgatcctcccacctcagcctcccaagcagctgggactacaggtacacaccaccatgcctggctaacataattagattttggtggttaaaacatttttctgttagctttgtggaaaaggagttggatggaagcaaattgaaaggagtgaattggcacacacaaggactaagtttgagaactgctgraactgaggactctaacacatacagattactctttattct

SEQ ID NO: 601629 - DNA, 622 bp, Homo sapiens
actaataactaacttagaactctttatttaccaggactttgaaaaaactgattgtagaaaaaagtcaatccccaaacaaatcaaattttatgtgaatattatgcattttatggatatcccctaatgtgaatamatttagtcctctcatccacttgaagttctcaaaaacttcatgctgtctttgcttttgggccttcagttatgctttttgctctccctatttcctatctttacctggataaatcatactcatcctgaatcccttccaaaactggattgaccatgaatgaaccctcataatatgtaggtagcatatctttgtcaagataggctagttttctattagtaataaataatcacaaattctcagtagatttaacgtaacaaatctttaatttcagcctgttctacatatccagtgttggtttgctggaggtttctgctcattgtagttactcaggaaccctggcaatggcagctttacttgagatacacttccatgatcacctcggtggtgaattgtgtcctgactcctaaagtattcattgtaaattacacatcactgctattcatgtatcattggccagagaaagtcatgtggccaatctccttaactttaata

SEQ ID NO: 601630 - DNA, 570 bp, Homo sapiens
ccatgaatttgctattaagaatagtgctgcaataaatatatgagctccctacaccttcttctgggcttgctccagcaataattccagccctacattctctctgtggaaagaggttggaggcctcttccagcaagtatgaaagagaaagcacattcccctccccacttccactggccctgtaccttctttcctggcttactccagagataaattcctgaatctctcattagagggagacaggaggactactccatgcctgaaagagaaagtgggcactccttgtgcctttctccctgacttgcttcagtgttaactccagaccagaagattccccctgctgggagattatgagactttgctttctcaaacaggagagtgggacttcctgtaccctcttccctggcttgttctggtgatacatccrgatccaaagactctccttggaaatagtttctgcatgctcaactcttacagctttcatccaaaggactagctcctaaatcacctagctgtagttgttgacagagttctgcactcctgagtctcttaggccacagagaacaaaaaggt

SEQ ID NO: 601631 - DNA, 512 bp, Homo sapiens
ctgcctcttctggaagtgagaatgggsattcatccctaccatgccaatttctcaagggataaaaaggaaacttccacaaatatttcacttcagtagatgatgaagattctataaagagatcatacaactagggaaatcttcccttttgatcatgtcactttccttttcaaaaatctctgtaattcttcagtgcttgcagaatcaatccccaaatccaccagccatcattcaaggcccattaaaaccacactaactaaccatccttgtccagtcacttctgcctcctagaggtgcatgtgcaagtgggaagtgatggtgaaattaacatcctggtggtgaacctctgactaatgggaaaccagacaccctttccaatcctaccaagatgcattttatgtaacgtctcaggggtgcagttctacagatccagcaatgagttgcatttagctgtggccagatcaaaaatgcattcttgtactggttctccctccctccttgcttcccttctcttg

SEQ ID NO: 601632 - DNA, 512 bp, Homo sapiens
ctgcctcttctggaagtgagaatgggcattcatccctaccatgccaatttctcaagggataaaaaggaaacttccacaaatatttcacttcagtagatgatgaagattctataaagagatcatacaactagggaaatcttcccttttgatcatgtcactttccttttcaaaaatctctgtaattcttcagtgcttgcagaatcaatccccaaatccaccagccatcattcaaggcccattaaarccacactaactaaccatccttgtccagtcacttctgcctcctagaggtgcatgtgcaagtgggaagtgatggtgaaattaacatcctggtggtgaacctctgactaatgggaaaccagacaccctttccaatcctaccaagatgcattttatgtaacgtctcaggggtgcagttctacagatccagcaatgagttgcatttagctgtggccagatcaaaaatgcattcttgtactggttctccctccctccttgcttcccttctcttg

SEQ ID NO: 601633 - DNA, 548 bp, Homo sapiens
ctctcaaaacatgatgcaatcctctcaagaaaaggtatattatctgctcaaagaactgacaagtcattgggtcaagatgttctctacccagagtgcacctatgtggtcgttgccaacatttgcccctaaaacaggctgatctgtttttgtttttgatgtttctatggatgaccaatttctcccacttcattaattaacatagtattttgtaggggaaagaaaagaaatatgccaataattttagtcaagacttgatctggactataagattatattatgtatatttatgctgatgattcttgaatagttatgtatttaattctttcagagtagtcttattgtccttagttctatattcttgaaggacattatgttatacccctaggaagtacctacattctctttyggacttaacgatgatagctgggcccctggactaaatatttattatagattctatatgataccgtgcttgaccaatcaagctgtacatgtgcctatctgtctagttccattcctgtgccttcccagtacaatctacatcctaa

SEQ ID NO: 601634 - DNA, 656 bp, Homo sapiens
attatttgttaaataagtgattcagacagttgtattcataaatttccttagggagactacaaggtcctccttccgaactacctgccctgggtctaaactcatcctgctttatcttggcatcctcttttttaacaataacttttgtgttaaagcattggtgcaaggtctcctggaggctcttgttgaagtgtgcatgctgccttggagggacaggagggccgtttcattatcacaggctggcaaactgccaccttcagtcatttaacatctagtaactgatctccttttatgtgcaaggcagtgtagtcagatgaggagaaaggtggttcccagaggacttgaaggattgttaatatttgatggctatgaaggcagaaaaaatgttgaagcatgaggaaaatggaagatttgaggatgaagggacatctaggatgagttgctgccactgggatcacttataaagcagtgggaataatttggaagtggaggatatgtttcaataatgttgaaatgaaagccaatggtrtttttctagagattttaaaaattcatccaacaaataattattgaatgactacaatgtatctggcatcaaggacttagagatacagaagtaaacaaaacgtatcaagtctctgccctaaaggaacttatag

SEQ ID NO: 601635 - DNA, 478 bp, Homo sapiens
cagctagcatgtgaaaaaacattccacatcactcattacagaaatgtaaatcaaaataaaaatgagatgmcatctcataccagtcagaatagatattattaaaaattcaaaaaataccagattctggcaaggctatggagaaacagaaatgtttttacactgttagtgggagtgtaaaattagttcaaccattgtggaagacagtgtggcgattcctcattgctgatatggagaaagtcttagggaactggatataaaggtcaaaccagccacagcattcccttaagccaaagcctaattcagaacgaggccctaactctcttgacttctataaaagttcagaggtgagaaagctgaagaagaaacttagaagctagcagaggttggttcatgcggtgtaaagaaagaagtcatctctataacattaaagtacaagatgaagaagcaagtgctaatgtagaggcttcagcaagttacg

SEQ ID NO: 601636 - DNA, 627 bp, Homo sapiens
gatagcttcagctcaggagtttgagactagccttggcagcatggtgaaactcaatatttacaaaattaaaaaaaatagttgagtgtggtagcttgcacctgtagtcccatctacttgggagtctgaagtgggaggattgcatgaacctgattttgccactagacaaaagcctgtggtctgtgtgacagtgcaagacaccatctcaaaaaaatgaaatatagaaataaatcacgtgaaaccaaaacagccaaagtaatactaagcaaagaggacaaagccagaatcatcaagctactcaacttcaaactatactaycaggctaccataacccaaacagcatggtactggtacaaaaacagacacatagacgaatggaacaggttagggaacccagaaataaagctacacacttacaaccctctgatatttgacaaagtcaacaaagtcaagcaatgggaaaatgactccatattcaatatatgttgctgggattactggctagccaaatatatacaggaaattcaaactggacccctttctttcaccatatacaaaaatcaacttatgataggttaaagacttaaatgcaaaactgaaaactatgaaaaccctagaggaaaacttaga

SEQ ID NO: 601637 - DNA, 627 bp, Homo sapiens
gatagcttcagctcaggagtttgagactagccttggcagcatggtgaaactcaatatttacaaaattaaaaaaaatagttgagtgtggtagcttgcacctgtagtcccatctacttgggagtctgaagtgggaggattgcatgaacctgattttgccactagacaaaagcctgtggtctgtgtgacagtgcaagacaccatctcaaaaaaatgaaatatagaaataaatcacgtgaaaccaaaacagccaaagtaatactaagcaaagaggacaaagccagaatcatcaagctactcaacttcaaactatactatmaggctaccataacccaaacagcatggtactggtacaaaaacagacacatagacgaatggaacaggttagggaacccagaaataaagctacacacttacaaccctctgatatttgacaaagtcaacaaagtcaagcaatgggaaaatgactccatattcaatatatgttgctgggattactggctagccaaatatatacaggaaattcaaactggacccctttctttcaccatatacaaaaatcaacttatgataggttaaagacttaaatgcaaaactgaaaactatgaaaaccctagaggaaaacttaga

SEQ ID NO: 601638 - DNA, 652 bp, Homo sapiens
gatctttcaaattatacaaataaattattacatgtatccaaaaactatgtacatgtattatgcatccataaaaataaatttaaaaaagagacaaaagggagttttagtgattctaggttatagtaggatatgagaaaatgaaaagggaaaaatcaaagagatagagggcgccagatttatagggtcttatgggccaaggaatgttttgaagtttataatagtgatgagaaacctcagacatattttatataagataaaaatacctaatttccttttgaaaactattactattgtggctgtgtgggaactgcagaatgttgaagaccactttgatgaacattgtagtagcccaggtttgatatttgagaattttgtttaactcaagggaaattcaaatgaaagttaatttcatattctrtctatctgcacagaaaagattacacattgaatttgtagctataggtagttggtaatgaaatgcaggttgatttgtttcttctttttgctcctgcatataataaagatcttgtaatgagcatgtaccgtttttacagtgaaagagttattttctctatcaagccagtagaaaacaaaaaagatcagaagctgctcttcttatttcatacaaaccaattttaaaacaacaatgatc

SEQ ID NO: 601639 - DNA, 652 bp, Homo sapiens
gatctttcaaattatacaaataaattattacatgtatccaaaaactatgtacatgtattatgcatccataaaaataaatttaaaaaagagacaaaagggagttttagtgattctaggttatagtaggatatgagaaaatgaaaagggaaaaatcaaagagatagagggcgccagatttatagggtcttatgggccaaggaatgttttgaagtttataatagtgatgagaaacctcagacatattttatataagataaaaatacctaatttccttttgaaaactattactattgtggctgtgtgggaactgcagaatgttgaagaccactttgatgaacattgtagtagcccaggtttgatatttgagaattttgtttaactcaagggaaattcaaatgaaagttaatttcatattctgtctatctgcacagaaaagattacacattgaatttgtagctatrggtagttggtaatgaaatgcaggttgatttgtttcttctttttgctcctgcatataataaagatcttgtaatgagcatgtaccgtttttacagtgaaagagttattttctctatcaagccagtagaaaacaaaaaagatcagaagctgctcttcttatttcatacaaaccaattttaaaacaacaatgatc

SEQ ID NO: 601640 - DNA, 561 bp, Homo sapiens
acatgggtgaaggggtggtacaggaggtaatcagtggttacatggagatgggtgttggggttgtataggagggtccggtggggggtattatgaaggggaacaaggaaactttggggagtaatggatatgttcactacccttmtcaaggtaattgtttcactgatttacacatgtgtcaaaattcatcaaattgtagactctacatatgtacagtttattatatgtcaattatacctcaataaagctatttaaataaaggtaagttcaccttttactaattgtaacagagagctctctggaatttactttctttatttgtgaatgacaataatagttgagtcccatgtaccctccaggttactagagggatcaactgagatgattttaaaatgatctgcaaattgcaaagagccatccatacaaaatatactatttctgttgacatgattattattaatttcaaaaaccctagatgatcaacgagcaaatcagtgatttctggtggaaaagaggcatgtggacaaatgtaaaaggcctgagaagcagagaattcagtttggc

SEQ ID NO: 601641 - DNA, 546 bp, Homo sapiens
gaatgcttaaagttaatatcatcagttatgtcttgttaatagcatataccgttggtaggggstgatgagaatggtactttactcatgtggtctttctcccccaaacctgcaaccccagtctaatcatgggaaaaacatcatacattcccagtttggaggatattctacaaaatacttgagcagcacttctcccaaattaatgatctaaatatttttgcaataatatttcctattttattccttaaaaacagtgagaatgtaatgaaggcttagttatagtgaaaattgaaagatgtattgaaaatactatacttaatatcttaaagtcttgttgatttggacctcactaatacatacaaacattcacacccatgtaacatacataatttatacctatgtgtgttttggggtaggactactttgtttctgctttcaaaagccaaataaaatgtcatgtgtagtttgatctcaacacaacataaataatataacatttcaataatataatattcaataatataataaaaatattaattatatatatct

SEQ ID NO: 601642 - DNA, 394 bp, Homo sapiens
caactggggatgggggagctacaggaagccaggatcactggggatcacctgtgaggctggctaccttggaacaataagctattaatattggactctttcttcctcctcacttatacatagcaccctgaatccatgtgcagtaacagatgagaatggatattggtttcatcactggaaagaaaaggggattttttctttttgatgaggcagagggaggagagagatgaggaaactggaagaaaaaatttggttctttggtcgatctagagtcctggactgaatgtgggtcactaggatggaatttcacacataggacacaatttcacrcaatggaagaacccagttttgagaaaatctttgtgtagttcagcctagaagctgaaagaatgtctag

SEQ ID NO: 601643 - DNA, 580 bp, Homo sapiens
aaacacaggctcttctgaacaacttatcagtctttttttttttcaaaatgacctacaatgacaaaccaaattaattatctctaatacaaatgacttcttaaaacaaagacttgatatccaataatttttgaattcgggaaaagaattctagaagccaatctccataatagaatcccttctctctcccaaaatgtaattgtgacagtgcactgacagacccagtgagaaggactgggccttcaaraatcttctatcaaaagagtaatatataaaagagctgacagataagaactacctatcactcttaatattggtaatcctctttaggattagtttgcacccataaagttctcaagacttcaaactgggaaaagcttattgaactttcatttaatatatattttaaataaaaataaatcaggttcaggcgatagctccatgccaccaaagaacgaacttttttttacataaaaaccttgttatatgagattcatgaaccccattctctttgataaccgccagcatatttagataattgatcatgtgtgctgcccttgagttcctagtgactgtcaattaa

SEQ ID NO: 601644 - DNA, 493 bp, Homo sapiens
actgggccttcaaaaatcttctatcaaaagagtaatatataaaagagctgacagataagaactacctatcactcttaatattggtaatcctctttaggattagtttgcacccataaagttctcaagacttcaaactgggaaaagcttattgaactttcatttaatatatattttaaataaaaataaatcaggttcaggcgatagctccatgccaccaaagaacgaacttttttttacataaaaaccttgttatatgagattcatgaaccccattctctttgataaccgccagcatatttagataattgatcatgtgtgctgcccttgrgttcctagtgactgtcaattaagtttgttcttaatgttgctgcatggaaatggctacaagcaaagacagatgacactgctgctttagggtgataggatttgaaaaatatcatgacaaatgcttctggcaactcaacagcagaatattcagatgtaaattccactt

SEQ ID NO: 601645 - DNA, 513 bp, Homo sapiens
gatttcctcgagttgtttgacagccacagtataaattcataattttgtgtattttctttgaacagaggagaatacaactcacacagtatttactgagtacattkaatgcatttgcagagttctgggatagactcggaagaagctgggagtatgggtcaccaagggttgggtaggcaaaatcggtatgttatatttcctgctgctggagtttgcacactgttgtaggggagtaagggataatacaaattactacgacacatttaacaaatgccaagtaaaacttatgaatgaaagtactgaaaaaaactaccgtttttatatgattctatatttaaaatttaaaatcgattttatattttatttctgcgggatacaatgaagcttgaggaaaagtagaaatgtatctcttcctccatttcccttcttctgctccccagaagtgcaccagaaagaagtgctattttccgggatgaaatctctctggcctatcagttctagaacgcctattcaaat

SEQ ID NO: 601646 - DNA, 513 bp, Homo sapiens
gatttcctcgagttgtttgacagccacagtataaattcataattttgtgtattttctttgaacagaggagaatacaactcacacagtatttactgagtacattgaatgyatttgcagagttctgggatagactcggaagaagctgggagtatgggtcaccaagggttgggtaggcaaaatcggtatgttatatttcctgctgctggagtttgcacactgttgtaggggagtaagggataatacaaattactacgacacatttaacaaatgccaagtaaaacttatgaatgaaagtactgaaaaaaactaccgtttttatatgattctatatttaaaatttaaaatcgattttatattttatttctgcgggatacaatgaagcttgaggaaaagtagaaatgtatctcttcctccatttcccttcttctgctccccagaagtgcaccagaaagaagtgctattttccgggatgaaatctctctggcctatcagttctagaacgcctattcaaat

SEQ ID NO: 601647 - DNA, 598 bp, Homo sapiens
agactggagattatccatataatcagtccatatttacgactaatctttccccctcatatttggttatatgtgaaatggctgaaaacttttgctctttttttacgagttgtttcttgaattctgagtcagcattctctcagaaaaatgttatagttaaattagatagttgcctatcatttactgtcttctctattgcatgcgtattcttattcttgtttacattagcaataaatagctcctggagagtataatgatacttttatttccatcaagcactgtgatcacagcttcagtcatatcataacacattgctgtaccgagctaagttaatgactcctcaatacagtgtaataaactcataaatgaacrtttattcaatttttagtaattgtgggttaagtcttccaggaatgcataaaatatagagccttctgagtttatgattatttttcttgcttttaaattaatttaatttgttaccatatatctgatgtatttcaattccaattcagagatgttgaagtcgagtcttgtttaaaaattcattctttaatgtttttatgtttattttttgaagtaaaaaaaaacctataacgta

SEQ ID NO: 601648 - DNA, 415 bp, Homo sapiens
gaattcatttgattcctggtaccttccttgtcagattattatgaagttaacaaacgatatgtgtaaaaatgattggatcattactttccgcaccacacatatccatttcttgtcatttctttgtttttcctctcagttatattttacaccttgtatttgcctttgatgggatttatgttgttttttcagttgtggtataattgtactgaaccattttattcctgtgtgttcatgcatgaggctatcgatatgctcatttgtgagaccatgtacacgctcaygtgtaaggactggcttgtgttcatacatgacaagatgtgtgtgttcacacagagagtgtgtgtatgtgttcatgaggccatgtgcctgtgcacagtatccttctacgctaattatctacatttattgtagcctt

SEQ ID NO: 601649 - DNA, 639 bp, Homo sapiens
gtcttctctggtctgtgacattttctctgtctttccttgtttgtcattaccttgactgttttaaagagtactgtttcagtattttgtggatgttgaaaataattttttgatactcaaaaatttcatttatctgtttaaggcaaaagtatatctatacctatttgatttttgtggacatatttcaggaagcagatgcagatttcctggttgttttagttttgtttgtttrtttgttgttgtttttacctgaaaatgatggcacatttcttcttgacaccatcagggacacagaacttttatcaacactgtgtttaccttgtaatgcctatcctcagatgaactgtgttcccagatcattggatccttgaggtctaaaatagtaactgaacagaagaggtgatgaatatacatgcaaaatgaagagaggggaacatttcacagagagatagaatagtagccaaccaaaatggacataaagtttcaagaaacaaaagttaattactatggcagaaatcaggttatatgtaactttaggtataatggattacattgtgttgtactagggttgataactctttattgccggttacgttgggcttgaggaatattgaaggcaagattctggtgtttcacttcatg

SEQ ID NO: 601650 - DNA, 594 bp, Homo sapiens
ccaaatctcatcttgaattcccacgtgttgtgggagggacctggtgggaggtaattgaatcatggtggcaggtctttcctgtggtgttctcatgatagagaataagtcttatgagatctgatggttttataagggggagattctctgcacaagccctcttctcttgtctgccaccatccacataagatgtgagttgctcctccttgccctctgccatgattgtgaggcttccccagccatgtggaactgcaagtccattaaacctcttccttttgtaaatgcccagtctcaggtatgtccttatcagcagtgtgaaaacagactaatacaccaagtgaccccaatgtgcagccaatgtcatgaaccacttgcctagaaagggmaaatatactactaaccaaatgtcaaagtgtatttttcattgtaagttaataaactgacaatgtggctttattatcaatctttgttaacaagagtccgtccctatggagaggacccactctcacactggctcagatgcaaagtggatacctcagaatgggccttccagtccttgctctgtgatctactatggtgaaaccaaagagggtgatg

SEQ ID NO: 601651 - DNA, 620 bp, Homo sapiens
tcgctcgcttgcccatcacttgccttctgctgtgtggcccrgttcctaaccagccacggaccaatactggtccatagcctaggggttggggactcctgttctggggcttcccagagcataaacacaaccaaaaatgaagaggagaggggggccccacagtaactgagattccattcctgaaaacgagcagcatttagaaacttgaaaaagaaattgggttgcacccttgtaaagttataaaactatttatcttgcatttttgtgtttgtggcacaggacactatttccatatatggatcatcaatatttatataattagaacagagggaagtatatgaactaaagttccatgtttttaccatgattcagaatacccttcaagatttttaatgccttgaatacgaatgatgggtattggtaatcaatggctggcaggtctttatgtctgtcccctaatctgtaaaacaaggtcattagatgaaatatgttataaagtgaaacaatgcaatgaagcttgtaataaaatcatcaattgccttccctatctgtcttggtgattggggcttaaacaaggaaggtagcctggggagaatctcaccatcatatatgaatctttacag

SEQ ID NO: 601652 - DNA, 561 bp, Homo sapiens
tacaattttttttttttttttttgagattgagtctcgctctgttgcccaggctggagtccagtggcgcgatctcagctcactgcaacctctgcctcccaggttcaagtgtttctcctgcctcagcctcccaagtagctgagattccaggcacccatgaccacacccagctaatttctgtatttttagtagagatggggtttcaccatgttggccaggctggtctcaaactcctggcctcaagtgatcctcccaccttggcctcccattgacctcatgctcatgattacaggcatgatccactctgccccgccaaaagctatgatttattacatgttatgactcataacaccatctactgcaaaatataaattgtaatgtagattatattaataagctttacacatcatatttaacttttattttttcttcaaatttatgaactatgttcgaaaaaacatcctamtatttctcttcacagaatcattcctttccgttccccactactccttcctcttgatttccaccacacctctgttactatgcccaagaacaagtgtgag

SEQ ID NO: 601653 - DNA, 636 bp, Homo sapiens
ggattctaggctgatattcagttttttttcaatttacattatattttacattaatcttacacttacattaatgtaaattattgtacattattttacattaatcttacattaatcttatttacattaatctcacttacattaatcttttacattaatcattttacattattcttattttcaattgggttataaatgttttgaaagaacattttattgcagtcaactctatcttatctgtgaatgttttatttactttttaaattgcataccattccttttctttcaacctcctcccagccaccaagctgggctccaggctagtgacagaggtcctacttggaagatcaagacaaggcacagaagtgtgtaacatgaacatctaggaaaaatgaatactaaatctatgtccacattcttaaaaattaaaaaatgctattattccataaaatttaaattatgaaagtttggtcaaataaataattgtacatttacagcatagaatattatgtagctatttaaaggaatgaatttaacttgaaattttcacaagctrttgctgaatgtaaatgacacacaaagaagtgtgataattatttggggtatacttttataaataatgtaaaatatcaatttatg

SEQ ID NO: 601654 - DNA, 613 bp, Homo sapiens
tccacactgattggtaatgctatctcattcatacttcactttccattcatatgagggtttatttccagtctcacttttctgttccttcagtatattggtctaagtaaaattkttttaattacaatgaaattttaatagcatattttgatgcttttcaggaaaaaagttattatatttggttgtttttcaaaattactttagctgttcttggtctttcgtacatggcaatgctttcttgggtcagcttgttctattcatgaaaattcctgtttttttttatttgaattgcattggatttatagattaattggatttacagattaacatcttcaagatattgagtctttctgttcataagaacattgtaatttccatttattggaatgctgtcttatgcttctcaatatttcataactttttcatgtgatctcgcatattttgctagatttacttttaagaaatgtaaaattctatgaacagtattctaaaactatatttcctagttagatctttactggtatacagaaaaatattaactgtttattttgacctagcaatcatactgaactttcctgtagtttcaatataaataatcctggatttttttgaacat

SEQ ID NO: 601655 - DNA, 613 bp, Homo sapiens
tccacactgattggtaatgctatctcattcatacttcactttccattcatatgagggtttatttccagtctcacttttctgttccttcagtatattggtctaagtaaaattgttttaattacaatgaaattttaatagcatattttgatgcttttcaggaaaaaagttattatatttggttgtttttcaaaattactttagctgttcttggtctttygtacatggcaatgctttcttgggtcagcttgttctattcatgaaaattcctgtttttttttatttgaattgcattggatttatagattaattggatttacagattaacatcttcaagatattgagtctttctgttcataagaacattgtaatttccatttattggaatgctgtcttatgcttctcaatatttcataactttttcatgtgatctcgcatattttgctagatttacttttaagaaatgtaaaattctatgaacagtattctaaaactatatttcctagttagatctttactggtatacagaaaaatattaactgtttattttgacctagcaatcatactgaactttcctgtagtttcaatataaataatcctggatttttttgaacat

SEQ ID NO: 601656 - DNA, 512 bp, Homo sapiens
gtttctctacttacaatgcctgccaaggaattgtgaagagaaaaatgaatgtttaaaaatggtgaaaaacttcctggaaaacacgtaatataatattttataactatattattttttctataagagtaccataaaaccaaatattttataaaagtattgcctttcattttcccaccttcaaaggtagactgtaccgtgacgttatttgatgttcagtgaactgcragctgtgctgaaaagaatggatcttgacagcctcttcaacttctattgcctccttttttctgtcaaaagtacctacctatattagcttctgggaacctctcttctttgctgttgtgctctgcattttattgatgaatttgtaatacagcttagactactaagaattacaaagattgattaggatttctaaaaatgttcctctcatctctggttgtctgatgtgatgctttgaggccaggaacaaaagcagcatgaaggatgctagcaaaggagaaagcagaggtgag

SEQ ID NO: 601657 - DNA, 604 bp, Homo sapiens
attaacaaaggaaaaaagaacccagggtgaaataaaaattagaattgtaattaattaatgatgaatttgagtgacaggtacatggaattccaatactagtctccagtctaactgaagtgcaaatggccaactgaaaatgtccataaactaattttttaagcattaaaagagaaatatgtttacagtgacaaaagcattcaacctggttgggagaggctakaatataccgttgtctctcctctcaactaatcgtgggcctaatttttgtgggcctcaaattcttttcttattttttttatttttattttttatttatttttttttttgagacagggtctcactctgtaaccaaggttggagtacagtggtgcaatcatggctcactgcggcctccacttcctggactgaagtgatcctcctgcctcagcctttcaagtagctggaattacaggtgcacaccactgcatgctgctaatttttgtatttattgtaaagatggggtctcaccatgttgctcaggctggtctcgaactcctggctcacacgatccacccacctcggcctcccaaagcgctggcattacaagtgtgagtcaccatgcccg

SEQ ID NO: 601658 - DNA, 575 bp, Homo sapiens
catgagcagctgatgatcatccaagtttggtgtactcaaagaaaactcatgacgaatcctcaagttttcttaaagtaaatggtcacccctgccactcgccycatgtatctatcatctgtcaagtaaatcatatttttatgtattgaattttctgaaatccaaaaccaattttatctatagatttgtctcagtaagccaaagttaccaagatataggattctgtaaaaataatttggtctgagtgttattaagttgtccaaaatagttcatgaaatatttttggcagccagaaaaccgtattgctttaaagacaaaattttctgcctcctgttgtcgctccaggaggtgagaaaataaaccactgaacaacaacaacaacaacaaagccagactcaacgtttccctgaaaaggtttattatatagagattctgggatcagctgctacaacattgcctgtcaggttggggaagaatacctttagatgataatagttgctccctttttttttcaaaaaaaaaaaaagagagagcttgaacctgcaagctattgcagttactgaactactgctccctac

SEQ ID NO: 601659 - DNA, 570 bp, Homo sapiens
gtgactcaagaatctttagcctggcaggaagtagaaatctgataaagtttagttgttacataaccctgtttggtcaaaaaatgtgttttgagttgattggtatcaaattaacatttgtaagctgctggtccttttaactagtgttaaattaagaaaaattttccattaagcagaatttctaaataattttcttaatttggatcttctaaagagaaattttaagccrccagcacttggactgactagatagccctttgctttgatgcctggccaatttttcctccatctgtgagtcagcgtaagtatgcctactctttttctaacctcccctggcctcactcgtgcaggatagaagtcctggctttctgttttctccttatgtacttacggtgcacttgtgtaacaagagctcttttaagtataatcttcaatttgataagggcctacctctggagttggcatgatgttacaccatgtgtaagagtaggaattaccccagtttatcttttcctatccagtgctgcacacaatgccaggcatatagtaggtactctctaaatacatgataag

SEQ ID NO: 601660 - DNA, 570 bp, Homo sapiens
gtgactcaagaatctttagcctggcaggaagtagaaatctgataaagtttagttgttacataaccctgtttggtcaaaaaatgtgttttgagttgattggtatcaaattaacatttgtaagctgctggtccttttaactagtgttaaattaagaaaaattttccattaagcagaatttctaaataattttcttaatttggatcttctaaagagaaattttaagccgccagcacttggactgactagatagccctttgctttgatgcctggccaatttttcctccatctgtgagtcagcgtaagtatgcctactctttttctaacctcccctggcctcactcgtgcaggatagaagtcctggctttctgttttctccttatgtacttacggtgcacttgtgtaacaagagytcttttaagtataatcttcaatttgataagggcctacctctggagttggcatgatgttacaccatgtgtaagagtaggaattaccccagtttatcttttcctatccagtgctgcacacaatgccaggcatatagtaggtactctctaaatacatgataag

SEQ ID NO: 601661 - DNA, 547 bp, Homo sapiens
ggttttgttctttgagtggacagtcctagctggtacaacgagatgtgagtagataaatgcaaaccaaactcaaatctcttctttgtctcttatatttatgagaacattttgtttataagtaacagaaatccagtttaagcttgcttgaacacaccagagaatgtataaactcccctaactggaaattcctgggttgactagatgcaggcctagttagatctagtgcctgattgtgtttcaggaatgtttctccattttgtggctctggtttcttctgggtttgctccattttctgtggtactctataacaatgggaaagatgattcctgtgtctttataaacatagatagcatccttactcttctcaatttcagaaggaaagagaactgttttgtctcagtgtctgtattaatcccggaaaaagttgttrgactgaccctcctgcagttctgtgccgtctcttggttgaaacactgagtgatgtgggaggggcaacgagtcacttccattgacagcacctccagagttggaatggaatggaggcaaa

SEQ ID NO: 601662 - DNA, 575 bp, Homo sapiens
ttttgccaggtgcatgtctggcactcagtaaattcggattaagcaaaggggaataagaagtggaagggaccggttaactgactggaatctccggcttcttactccctacttaaacatgccctcgttcaaatgcactggctgtctttgtccccttgtatggtgccctgctaggcacattcagtgcaacagtgaactccagcaacattcagaagtgcagaaaacacatgcarcttcatgccatgggccagtcaaaccttaataaaagtaaaggataaaaagtcttaacattgtgctataaatgttgattaccagatagtaataaaaattacaggatgtactagaggctttatttagcttctaactcaaacattaccttttaagtaatatcaggaaattccactcttgaataggtttctgtaataactcctaaatgaaacacaccagaaattttacagtaaggatcatatttcttaataaatccagttttgttctattctgaaccatatcccaaatcaacccatgtgtcttgctccttcaacaatctaaacaaatgcaggtcatccaaatgatatatt

SEQ ID NO: 601663 - DNA, 314 bp, Homo sapiens
tcagaaaggctaggttgttactgagaatctcaccacccaatgggtagaagaattaggactcaaaagctatgtcctttgattataaatccagggttctatgctgtaaacctgcggtctccaaatcctgrgccacgaaccggtcctgctccatggcctgttaggaactgagccacacagcaggaggtgagcggtgagcaggcattaccacctgagttctgcctcctgtcagataaggagcagcattagattctcacaggagctggaaccctattgtgaactgcacatgcgagggatctaggttgtgtgctccttat

SEQ ID NO: 601664 - DNA, 365 bp, Homo sapiens
  misc_feature 327: n = A,T,C or G
aagacagccctgttctctcccagtccagtcagcaaagttaagagccatgcagaggagcatggagaacccttggatatcgatgcctattaccatattttgttgcagctgtccccatgcaaaaaccccctgggctttacacatgctcaagtttggtctctgtctactctctgggcagtccccctaccagctcaactgtctgtaggggtggtggcatcttgtgcagccaggatmccagaagtccatggtaagtgtgggtttctctacaggttcctcacttaccacttccttaggagcccattcagggcaaggagtccttctataggtcgngcatccatgcagtgctcttagtttcctctctctttagc

SEQ ID NO: 601665 - DNA, 554 bp, Homo sapiens
gaaggaagcacatcatgcactgttggctcactctggcagtccaacctggcattgtctttacacaatccagcatgcagctttgtatttacaataatcaggarcatttcatcttttattccatagcaatagtttcatggggtctccctacattctgtcccaaaaaataaataaataaataaaaaataaataaaattaattctatgtaaaatcctgtgtgagctggctgcatcaccttggcccacagagggtgttttcttatcttgataagatagtctatggttgccctaccaggtactctctttttattattttatttattattttatattttatagacagggtctcactctgttatccaggctggagtgcagtggcatgattatagctcactgcagtcttggccccctgtgctgaagtggtcatcccaccacagcctcctgagtagctaggatcacaggcatgccccaccatgcccagctaattaaaaaaaaatttatgtggcggagcacagtggttcatgccttgaatcccagaactttgagaggccaaggcag

SEQ ID NO: 601666 - DNA, 598 bp, Homo sapiens
  misc_feature 227: n = A,T,C or G
ctccagcatcatcgcctccccggggctgcggggcttggatccgggatccccgagccggccgagctgctctctccctctattcccccgagcactgctggccaccactctgtgccttcctcckgcctcccagagcctccctccgtcgccggctgccggaccacagctcaggtccgccatggtgccgccctgctgttgctctggggcgccagaggcctccgtcccctgcncaggcttaggggtctacgggcgatctcccttctggcgatgctccaggccttcacccggctcccgagcttccacaacatcaggcccgctcaggacgggtgtgctcatcccttcactttttaactttttgttgtttctatttatatttttttgtactatgtcttgaaacgttcttgtagttattactcttgattggtttattatttagtcttcctacatagaatgagtttacacaccacagctatagtgttataatattctgttttgttttgtatagttactattatcgatgacgatttttttaccttcagttgattatttattgctcattaatgtccttcctgactgaagtactccctttagcattccttgt

SEQ ID NO: 601667 - DNA, 377 bp, Homo sapiens
  misc_feature 301, 322: n = A,T,C or G
ctccaaaatgtcctttcacattttctagaaaaagattgtttygaaactactgaatcaaaagaaagatttaattctgtgagttgaatgcactcattgtaaagcagtttcaagatagcttatttctagtttttatttcaggatattccgttttttactataggccttatagcactctgaaatgtccctttgcagactctacaaaaaaaagtttccaacctgctgaattgaaagtaaggtttaactctgtgagctgaatgcacatatcaacaaagcagtttcacaaacatcttctttctagttnttatctagggtaattcagctnttctgtataggcctcactgaaatgtcccttcactgattctacaaaaagagtgttt

SEQ ID NO: 601668 - DNA, 377 bp, Homo sapiens
  misc_feature 301, 322: n = A,T,C or G
ctccaaaatgtcctttcacattttctagaaaaagattgttttsaaactactgaatcaaaagaaagatttaattctgtgagttgaatgcactcattgtaaagcagtttcaagatagcttatttctagtttttatttcaggatattccgttttttactataggccttatagcactctgaaatgtccctttgcagactctacaaaaaaaagtttccaacctgctgaattgaaagtaaggtttaactctgtgagctgaatgcacatatcaacaaagcagtttcacaaacatcttctttctagttnttatctagggtaattcagctnttctgtataggcctcactgaaatgtcccttcactgattctacaaaaagagtgttt

SEQ ID NO: 601669 - DNA, 377 bp, Homo sapiens
  misc_feature 301, 322: n = A,T,C or G
ctccaaaatgtcctttcacattttctagaaaaagattgttttgaaactactgaatcaaaagaaagatttaattctgtgagttgaatgcactcattgtaaagcagtttcaagatagcttatttctagtttttatttcaggatattccgttttttactataggccttatagcactctgaaatrtccctttgcagactctacaaaaaaaagtttccaacctgctgaattgaaagtaaggtttaactctgtgagctgaatgcacatatcaacaaagcagtttcacaaacatcttctttctagttnttatctagggtaattcagctnttctgtataggcctcactgaaatgtcccttcactgattctacaaaaagagtgttt

SEQ ID NO: 601670 - DNA, 377 bp, Homo sapiens
  misc_feature 301, 322: n = A,T,C or G
ctccaaaatgtcctttcacattttctagaaaaagattgttttgaaactactgaatcaaaagaaagatttaattctgtgagttgaatgcactcattgtaaagcagtttcaagatagcttatttctagtttttatttcaggatattccgttttttactataggccttatagcactctgaaatgtccctttgcagactctacaaaaaaaagtttccaacctgctgaattgaaagtaaggtttaactctgtgagctgaatgcacatatcaacaaagcagtttcacaaacatcttctttctagttnttatctagggtaattcagctnttctgtataggcctcactgaaatgtcccttcacwgattctacaaaaagagtgttt

SEQ ID NO: 601671 - DNA, 488 bp, Homo sapiens
ttaggtatttactgaatgagttaataacagattaggcataggtgaaaaaaaaaatgtgaactttgaagataagtctgaagcaatatccagaacaatgccttgaggtcaaaaagaagcaaaaaaaaaaaaaaaaaaaaaaaaaaaraaaaagaaaaagaaaaagaaaagaggtaagagacaggataagaaggcctaacatactaaactagtcccaaaatgacaggagacagaatatgaagcaaagacaatatttgaaaaaataatggctaagaaacttccaggactgataagacaccaatccatatattcacacagcccaaagaatccgatgcctaatcacagcttagtaaaacagaaagccaagccaaagataaaaatctcaaaagcagcaaacaaaatcacattatcttaaaagttgagacacaagagttgaggtctcaataacatgaaatgtgctgaaataaagtaaccctgctaacctagaattc

SEQ ID NO: 601672 - DNA, 400 bp, Homo sapiens
tctcaacaaaacaaaacaattattaattgaacaaatatttttgaagcctgctgtaggcagatagtgtggcaacattgagtgggaacaaaacagagcctgtgtgtctgagcttaaattttagtgggggacatagtcaataaatattatatatgtacacatacacacacacaaataacatcaggtagtatatagatcttgaaatagaataaaataggttcaggggacaggggatactactttagttggtaagagaagggcttttgagaagccgttgtgctaagagacctgagtgttcatgagtgaggtggctgtaccattcttgtcgagatgtgaaatagaataaaatgaggtgcccatcattttgktttggaagagttgtgtatagttggaatgaattctt

SEQ ID NO: 601673 - DNA, 299 bp, Homo sapiens
ttcttagccattattttttcaaatattgtctttgcttcawattctgtctcctgtcattttgggactagtttagtatgttaggccttcttatcctgtctcttacctcttttctttttctttttctttttcttttttttttttttttttttttttttgcttctttttgacctcaaggcattgttctggatattgcttcagacttatcttcaaagttcacattttttttttcacctatgcctaatctgttattaactcattcagtaaatacctaatttaggttattttttagtatagaattc

SEQ ID NO: 601674 - DNA, 299 bp, Homo sapiens
ttcttagccattattttttcaaatattgtctttgcttcatattctgtctcctgtcattttgggactagtttagtatgttaggccttcttatcctgtctcttacctcttttctttttctttttctttttcytttttttttttttttttttttttttgcttctttttgacctcaaggcattgttctggatattgcttcagacttatcttcaaagttcacattttttttttcacctatgcctaatctgttattaactcattcagtaaatacctaatttaggttattttttagtatagaattc

SEQ ID NO: 601675 - DNA, 608 bp, Homo sapiens
tttttattcaatcaccaaacatctattcagcatctacttttcacacagtacagtggcactaggaatatgccaatgagcaaaattgacatagtctctgcctttgtgaagcttatggtcttgtagaaagaggcacaatgaaataactttaaagtgtcttgtgatgacagagaaatgtgctacggaggcttatttcatagttctatgggtgtttaacatggaggcttgatctggtgtagggctggaaaggcctccccaggaggtgacaggcacagctctggggggrtactgaacatacactagaccaaggtcaggtggtggagatcactgcagtcacttgtaatcaagtcctgaaatcatggctgggaaatcagtgaccttcacgtacgagggcagtgctgattttgttatagtaatatattttttatagatgagaaaaaagaactgtggcttcaggaagtttagtgagtcactcaagcccctggagactggacagaactgacatttgagcctaggtgtgcagactgaaagtgtctccagcattttccacaccctctcaggccatggtcatctgactatagttaaagcacctgatgcctggctggttaaca

SEQ ID NO: 601676 - DNA, 608 bp, Homo sapiens
tttttattcaatcaccaaacatctattcagcatctacttttcacacagtacagtggcactaggaatatgccaatgagcaaaattgacatagtctctgcctttgtgaagcttatggtcttgtagaaagaggcacaatgaaataactttaaagtgtcttgtgatgacagagaaatgtgctacggaggcttatttcatagttctatgggtgtttaacatggaggcttgatctggtgtagggctggaaaggcctccccaggaggtgacaggcacagctctggggggatactgaacatacactagaccaaggtcaggtggtggagatcactgcagtcacttgtaatcaagtcctgaaatcatggctgggaaatcagtgaccttcaygtacgagggcagtgctgattttgttatagtaatatattttttatagatgagaaaaaagaactgtggcttcaggaagtttagtgagtcactcaagcccctggagactggacagaactgacatttgagcctaggtgtgcagactgaaagtgtctccagcattttccacaccctctcaggccatggtcatctgactatagttaaagcacctgatgcctggctggttaaca

SEQ ID NO: 601677 - DNA, 608 bp, Homo sapiens
ttttaaattactgagagtgtggtattctgttagagcagcacaaaagtggaccaaggccaggcagggtgagcttctccaagctaccgttgtctctgcctggacaactgcaatagccttgttgttggtcttccactttcagtctcatccttccccaaaccacccaccagacttcagccagagagaacttctaaaatgcaaataaggccatctcacattgcttccacccaaccttcaatgttccctccaggttcccatgcagagaccctgagacttcacgttataccaggaagccctagttaaatatatcactagccatcaatgcacaatgaaataacacatttttaggccaaaatataattattgtatagtagaaatggatgacatcagaaataaaagtttccttaaacaaggtggatacccaaagtgcagttcgcagaccttctgaatcagaayctgcattttaacaagactatttgtgtgaacaatggtttgagaggcactatcttagtgacaatttttactgtacgaatcaccaatgaggctaaagggttagggattaaatgcataggctttagagttaggcctggctttgagtttaaggtgtgttg

SEQ ID NO: 601678 - DNA, 583 bp, Homo sapiens
ttgaggctggaagttcagcctcttcttgctctctctcaccctctctttgcccttctgtcagagcatgacacagcaagaaggccgttgccagatgtggttccttgatcttggactttttcagcttcccgaactctgtgccaatcaatttctgctcattttaaattactgagagtgtggtattctgttagagcagcacaaaagtggaccaaggccaggcagggtgagcttctccaagctaccgttgtctctgcctggacaactgcaatagccttgttgttggtcttccactttcagtctcatccttccccaaaccacccaccagacttcagccagagagaacttctaaaatgcaaataaggccatctcacattgcttccacccaaccttcaatgttccctccaggttcccatgcagagaccctgagacttcacgttataccaggaagccctagytaaatatatcactagccatcaatgcacaatgaaataacacatttttaggccaaaatataattattgtatagtagaaatggatgacatcagaaataaaagtttccttaaacaaggtggatacccaaagtgca

SEQ ID NO: 601679 - DNA, 549 bp, Homo sapiens
gacagctatggtttgaatgtgtcccctaaaatgcatgtatagaaaacttaatcttcaaagtaacagtgttgggaggtggggcctaatgggaggtgtttaggtcacaagggctctgcccttaagaattgattaattcccattataaaagggcttgaggctggaagttcagcctcttcttgctctctctcaccctctctttgcccttctgtcagagcatgacacagcaagaaggccgttgccagatgtggttccttgatcttggactttttcagcttcccgaactctgygccaatcaatttctgctcattttaaattactgagagtgtggtattctgttagagcagcacaaaagtggaccaaggccaggcagggtgagcttctccaagctaccgttgtctctgcctggacaactgcaatagccttgttgttggtcttccactttcagtctcatccttccccaaaccacccaccagacttcagccagagagaacttctaaaatgcaaataaggccatctcacattgcttccacccaaccttcaatgttccct

SEQ ID NO: 601680 - DNA, 597 bp, Homo sapiens
taggttatattgcatcaaagccatttatgcatttatccattcattcatacagcagatatttattgagtaactagtatgtgctgagcctgctttaggcatgggaaatatactaaacactgcccctggcctcaargaacatatattagtggggaagactagtagaggcacataaataggcaattataattagtatggttagtacaataaaataaatatgccaggaaattaaaggaaggggaagaggaacagaaaaaaaaatgcttagcctgaggggaactcataatgagaaaaggccttctggaggaggtgacacctgagatttgaaggctaacgaggagtaattgagatggaagaattggaaagacaggataagaaaaggcatggcctagagaaataggttaagaataaaaaaaaaaacaacaagaatgaaaagtcaagaagattatagaatttgttcttgaagtatcctgaatgccttgagaaggaccttgatttgaacccatggttagtgatagggtgtgggggtactgaagggttttaggtaaggagataatagcctagtttcactagattcaaacttagggcttgatgttctgg

SEQ ID NO: 601681 - DNA, 588 bp, Homo sapiens
ggttatattgcatcaaagccatttatgcatttatccattcattcatacagcagatatttattgagtaactagtatgtgctgagcctgctttaggcatgggaaatatactaaacactgcccctggcctcaaagaacatatattagtggggaagactagtagaggcacataaataggcaattataattagtatggttagtacaataaaataaatatgccaggaaattaaaggaaggggaagaggaacagaaaaaaaaatgcttagcctgaggggaactcataatgagaaaaggycttctggaggaggtgacacctgagatttgaaggctaacgaggagtaattgagatggaagaattggaaagacaggataagaaaaggcatggcctagagaaataggttaagaataaaaaaaaaaacaacaagaatgaaaagtcaagaagattatagaatttgttcttgaagtatcctgaatgccttgagaaggaccttgatttgaacccatggttagtgatagggttgtgggggtactgaagggttttaggtaaggagataatagcctagtttcactagattcaaacttagggctttg

SEQ ID NO: 601682 - DNA, 513 bp, Homo sapiens
agacacagaactttgtacagacaaaaactaaaaaacaattaagtctgactttctctagtctacccacacatgtgtctgtaagagtcaacaacaatcaaagaaggaaagaaattactaaagatgtaccacagtgccccttggtatttaaaatgccatctgaacagattgttaatggttttcaaaagatgccttggcacctccccagaaatactgaatcataatcacaaggggaaacagaggagaaatgatctatattttcaaactagctgtccagataattctgatgcaggactagatttaagaatctctgcttgggaccataattcctcacacaatcacacatagggaaagcaatgatgctattctgggttcatcttacccaatattcaggctctcagtgcagaacaaagagccatgatccaaggagcatagctgttatctttcctgacattgacctcaaacaacattsaaacaattaataatcacctagcacctaatatgtgccagggactt

SEQ ID NO: 601683 - DNA, 551 bp, Homo sapiens
tgcctggccatacttgctttaccaatcagggtgccctcatggtccatactaatgcaagtgtggctctcagaaaatctacaatagagtcattaggaggaaggatttaaagtacacagtcctgggccctatcaggccaatggaaaggcactagattagaaagcttcccagggattttgtatccaccttttgaaatacctttctgttactaacaatttgttactttcayggctggcttcaaaaatcactaattgaaataatgagagaaaaacttgccatgaggacttgaaaaagtcattttttctttctggacctcagtgttacctttagtataatgagggaggtaaagcctaagatcccttaggtttagcacatttaggtcagaaataggcatcatagcaggttgatactgatgaattttcaaatctcaaaacaaattaagatagcactctttcaggtaaggagtagtgcagacaaatagtctagagaaataagaatctagaccagacagaggaaaacattggccaatggtcaggcaagagggtgaaaagaca

SEQ ID NO: 601684 - DNA, 537 bp, Homo sapiens
aacctaaaaccttggtttatatctagtatattttatctaatgaaaaacaaaaggtgctttagtacagccgatggtcagtgtaaatcgattttgatacagcctacctaaaaggataaggaaggattatctcacacgaatatcatttctttctttctttcgagacagagtttcgctcttgtcacccaggccggagtgcaatggcgtgatcttggctcactgtaacctctgcctcccaggttcaagcaattctcctgcctcagcctcctgagtagctgggattacaggtgcctgccaccattccctgctaattgttgtatttttagtagagatgaggttttgccwtgttggccagtctggtctcaaactcctgacctcaggtgatccacccacctaggcctcccaaagtgctgggattacaggcatgagccactgtgcccggccatgaatatcatttcttttttgaatataactggttaatgatgaagctcatcaatggctgaatattaattctctgtgaaatatctatgaatgccttat

SEQ ID NO: 601685 - DNA, 623 bp, Homo sapiens
ttctctgttttgatgctaaaggagatggctcacagccacggagccagtaagcagtggactgcaactcaaacacagaccctgtgaccccaaagcttgggttctcttgaccactgtgctgtagtggggccaggagcaaaatgcctcaagcattgcctctgcccccaaagagctaagggttcaactgagagaccgggcatggacacaggaaaagtgtcctattttaaaagtcatgaaaatattaaaaatatatattttaccatctatttgttattgatcactgctcctaagttttgttacattataaacagaagtattagaaatgctagtatacagaaaaccaaacaccgcatgttctcacttataagtgggagctggacaatgagaacacacagacacacggyggggaacaccacacactggggcctgtcacagggtaagcgggtggtgggagggagagcatcaggaaaaatagctaatgaatgctaggcctaatacctaggtgatgggttgataggtgcagcaaaccactatggcacatgtttacctattaacaaatcctgcactttaccccagaacttaaaatgaaatttttttaaaaaattttaaaaaaagaaaagttagta

SEQ ID NO: 601686 - DNA, 468 bp, Homo sapiens
tcatagaactgaagagagttagggccttactttggattagattttggcttaaggggatattgtggctggtttgatctgtccagatcactaaaactttctttatatcagcaacaagggtgtttagattccttattattcatgtgtttcctggattaacatttttaatttccttcaaaatttttcctttgcattcacaactaggctgcttggtgcaggagacctagtttttggcctgtcttggctttcaacctgccttctgactaagcttaattatttataacttttggtttaaagtgagagacatgtaactctycctttcacttgaagaaatagaggacattgtagagttattaattggccaatattgatgtgtcttatggaataggaaggccccagaagagggagggagatggaggaacagccagttggtgaagtagttagagcacacacaacaatcatcaattaagt

SEQ ID NO: 601687 - DNA, 589 bp, Homo sapiens
tcatttgcttacttccctttttccctttgcattttatttgatgaagaaaccacattgttttgtctagtagagttrtatagggttttttttgtggttaatgtaacatttcttcatgtaaaaactgctaaggtggctctgtaggtggtaatgttttcttccatcagaaatcatgtgtctggctctatgtccttttgtaatgttcgtagccattatgctaatacttaaatctattaattcattaagggttgcaaaacagggatattttgtcaattcttaatttattagcagcgatacttgtatgagggaggaactgtccttggtttttactttttaggttacctagtggtaaagcttgtgaagacatagatttaccttttaaaaatgtaaactggatcatgtctttgccctgcagaaagtcttcctgtggcatcttcatgcacacagtgaaatgtgtagtctatacatattctgcacgatttggctctgacatgatctttttcatcatgttccatcactgctagtaaactattataatgagcttaaatttcaattaaataaaaacttgaagtttattaaaatgtattaaaaa

SEQ ID NO: 601688 - DNA, 589 bp, Homo sapiens
tcatttgcttacttccctttttccctttgcattttatttgatgaagaaaccacattgttttgtctagtagagttatatagggttttttttgtggttaatgtaacatttcttcatgtaaaaactgctaaggtggctctgtaggtggtaatgttttcttccatcagaaatsatgtgtctggctctatgtccttttgtaatgttcgtagccattatgctaatacttaaatctattaattcattaagggttgcaaaacagggatattttgtcaattcttaatttattagcagcgatacttgtatgagggaggaactgtccttggtttttactttttaggttacctagtggtaaagcttgtgaagacatagatttaccttttaaaaatgtaaactggatcatgtctttgccctgcagaaagtcttcctgtggcatcttcatgcacacagtgaaatgtgtagtctatacatattctgcacgatttggctctgacatgatctttttcatcatgttccatcactgctagtaaactattataatgagcttaaatttcaattaaataaaaacttgaagtttattaaaatgtattaaaaa

SEQ ID NO: 601689 - DNA, 589 bp, Homo sapiens
tcatttgcttacttccctttttccctttgcattttatttgatgaagaaaccacattgttttgtctagtagagttatatagggttttttttgtggttaatgtaacatttcttcatgtaaaaactgctaaggtggctctgtaggtggtaatgttttcttccatcagaaatcatgtgtctggctctatgtccttttgtaatgttcgtagccattatgctaatacttaaatctattaattcattaagggttgcaaaacagggatattttgtcaattcttaatttattagcagygatacttgtatgagggaggaactgtccttggtttttactttttaggttacctagtggtaaagcttgtgaagacatagatttaccttttaaaaatgtaaactggatcatgtctttgccctgcagaaagtcttcctgtggcatcttcatgcacacagtgaaatgtgtagtctatacatattctgcacgatttggctctgacatgatctttttcatcatgttccatcactgctagtaaactattataatgagcttaaatttcaattaaataaaaacttgaagtttattaaaatgtattaaaaa

SEQ ID NO: 601690 - DNA, 597 bp, Homo sapiens
ggcaaattctctgatctattaagtttaattgagcccaggctcattggggctaaagcatataccttgtgatttcgttgacagtagcatcatctgttgctatgtaatacctgggtttgactaaattagaccagccgttaactagaaggatgcattggtccaagaatgaaagatcagactgacagctgatgagcagtcttcctttacagattgtctttactgtaggatttccatggcaggtctaaaaaatgcggaataatggaaaatgatagatcttgtaggggaaaagagactactttttacttttattataggaatggaatgtgtttggygtccatctcctactttatagtattatagttatacagtagttttaagatttggatcttgcttatgaaaaatttataagccatccccatattgtttgttctagacatgcttatgttctactgtctatagaaacatatgattttctttaaagattttttaaaatggaagggatattattctataaatcattaaagtacaaatattagttacatgaatgaataagcaccacagctataggataggagctgaattcaaatttgagaaccatgt

SEQ ID NO: 601691 - DNA, 511 bp, Homo sapiens
tcataccctagcagtgacgtgcatgtttatatgtttttaataaattttttattttataatagttttaggctaaggcgggtggatcacttgaggtcaggagttcgagaccagcctggccaacatggtgaaaaccctgtctctactaaaaaaaaaaaatacaaaaattagccaggtgtggcaggtacctgtaatcccagctacttgagaggctgagacaggagaatgcttgaacctggaaggcggaggttgcagtgagccaagactgcgcaattgcactccagcctgggcaacaagagcgaaactccatctcaaaaaaaaaaacaaatagttttagacaaaattkgcaaagacaggagagagagtaatcatataccccacaaatagtttttcctacttattaacatcttacattattttggtatactagtcataataaactgatgttgacacactattattaactaaagtccatattttatctaggcttccttagtgtgtgtgtgtgtgtgtg

SEQ ID NO: 601692 - DNA, 472 bp, Homo sapiens
gtggggcaaggaggaaggcagcagcttggggagccagcatgggctgctgtgctgttcccacactggttaccctttggggccagaatcaatgtggccactgtggccttgagattcttgccacctgtggcctttgacagcccatccatgggtatgggatgggagttggggttggcctgcttaaaaaaaaaaaaaaaaaaacaaaacaagtgaaatcaattttagaatgttttgtaaaaagggaatttcacttgaacatttaataacctatgactcttttacatatacagcctccccttggtgttcaaggggaatkggttccaggacctcccgctacaccaaaatctgtagatgttaaagtcctttatatatataaaagggtgtagtatttgcatataagctatgcgcatcctcctgtatactttaaatcatctctagttacttataatagctaatacaggtgaatgtatgtaaa

SEQ ID NO: 601693 - DNA, 592 bp, Homo sapiens
ggaaaataatagaaaacattaaggaaattaagacgtgtgtgtgtgtgtttttaagagataagcagaattgagaaaccattagatagactaagtaaaaaaagaaaactttcagataaaaaaatccttaaaattaataaaattataaatgaaagaggaaacattacaactgcatatgacagaaatataaaagcatttctcagagatactatgaacaattatatgtcaacaaatkggatagcctagagaaacagataaattcctaaaaacatacaacctaccaagacgaatcatgaaaaaacagaaaatccaaacagaccaataatgagtaaggaaattaatcagtaatcaaaaatctcccaataaagacaagcccagtaactgacggttttactggtgcactctaccaaacatttaaggaagaattaacaccagtccttatcaaatttttatctgaaaaactgaataggaggaagcacttccaaattcactttattaggccagcattaccctgatattaaagccagacattataagaagactactaatcaatatccctaatgaacataggtgtaaaaatcttccacaaaatacc

SEQ ID NO: 601694 - DNA, 592 bp, Homo sapiens
ggaaaataatagaaaacattaaggaaattaagacgtgtgtgtgtgtgtttttaagagataagcagaattgagaaaccattagatagactaagtaaaaaaagaaaactttcagataaaaaaatccttaaaattaataaaattataaatgaaagaggaaacattacaactgcatatgacagaaatataaaagcatttctcagagatactatgaacaattatatgtcaacaaatgggatagcctagagaaacagataaattcctaaaaacatacaacctaccaagacgaatcatgaaaaaacagaaaatccaaacagaccaataatgagtaaggaaattaatcagtaatcaaaaatctcccaataaagacaagcccagtaactgacggttttactggtgcactctaccaaacatttaaggaagaattaacaccagtccttatcaaatttttatctgaaaaactgaataggaggaagcacttccaaattcactttattaggccagcattaccctgataktaaagccagacattataagaagactactaatcaatatccctaatgaacataggtgtaaaaatcttccacaaaatacc

SEQ ID NO: 601695 - DNA, 555 bp, Homo sapiens
aatcatctgggaaatgcagatcaaaactgcaatgagatattatctcaccccaattagaagggctgttattaaaaagacaaaatataacaagttctggtgaggatatggagaaaggggaatacttacacgtgtttggtgggaatgtaagttagcacagtcactatggaaaacagtatggaagttcctcaaaacattaaaaatacaactgtcaggccaggcgcggtggctcacgcctgtaatcccagcactttgggaggccgaggtgggcagatcacctgaggtcaggagttagagaccagcctggccaacayggtgaaaccctgtttcaattagaaatacaaaaaattagccaggcatggtggtgtagtaatcccagttacttgaggggctgaggcaggagaatcgcttgaactcaggaggaggaggctgcagtgagccaagatcgcaccattgcactccagcttggtcaatgagagaaactccgtctcaaaaaaaaaaaaaaaaaaaaaaaaaaagagaaaggctgggtgtggtggctcatgcctgcaatcccag

SEQ ID NO: 601696 - DNA, 555 bp, Homo sapiens
aatcatctgggaaatgcagatcaaaactgcaatgagatattatctcaccccaattagaagggctgttattaaaaagacaaaatataacaagttctggtgaggatatggagaaaggggaatacttacacgtgtttggtgggaatgtaagttagcacagtcactatggaaaacagtatggaagttcctcaaaacattaaaaatacaactgtcaggccaggcgcggtggctcacgcctgtaatcccagcactttgggaggccgaggtgggcagatcacctgaggtcaggagttagagaccagcctggccaacatggtgaaaccctgtttcaattagaaatacaaaaaatkagccaggcatggtggtgtagtaatcccagttacttgaggggctgaggcaggagaatcgcttgaactcaggaggaggaggctgcagtgagccaagatcgcaccattgcactccagcttggtcaatgagagaaactccgtctcaaaaaaaaaaaaaaaaaaaaaaaaaaagagaaaggctgggtgtggtggctcatgcctgcaatcccag

SEQ ID NO: 601697 - DNA, 582 bp, Homo sapiens
ttgttcatatttatcatgtacaacatgatgttttaaaatatgtatacattatagaatggttcacttgagctagttaatataygcattactacacatttttgataacaacaaattcccagaagaatgataataatattgtgctgaaatctgctacatatattgttttaaaattcaaaaggctcatttgttttctgcctgaaaatggataagattaaatgtgcttctgataagtctgttttgaatggatcattcaatactgtttaatattcatttttaaagccaaataacatataaaattataatattttgttttctttttatagattcaatttttattttagattcagggcttacatgtgcaagtttgttacttgagtatattgtgtcatgctgagatatggagtatgatggattccatcactgagcatagtacccaattgctagtttttgaactctctctctccctctcccatcttatgttccatagtatctattgttgccatctttatgcccaagaatacccattgcttagctctgacttataggtgtgggcatgcagtatttggttgtctgttcctgcat

SEQ ID NO: 601698 - DNA, 247 bp, Homo sapiens
ctctgcccggccgcccatcgtctgagaagtggggagcgcctctgcccsgccgcctcgtctgggatgtgaggagcgcctctgcccggccgccccgtctgagaagtgaggagaccctctgcctggcaaccgccctgtctgagaagtgaggagcccctccgcccggcagctgccctgtctgggaagtgaggagcccctccacccggcagccacccagtctgggaagtgaggagcgtctccgcccggcagc

SEQ ID NO: 601699 - DNA, 247 bp, Homo sapiens
ctctgcccggccgcccatcgtctgagaagtggggagcgcctctgccccgccgcctcgtctgggatgtgaggagcgcctctgcccggccgccccgtctgagaagtgaggagaccctctgcctggcaaccgcccygtctgagaagtgaggagcccctccgcccggcagctgccctgtctgggaagtgaggagcccctccacccggcagccacccagtctgggaagtgaggagcgtctccgcccggcagc

SEQ ID NO: 601700 - DNA, 247 bp, Homo sapiens
ctctgcccggccgcccatcgtctgagaagtggggagcgcctctgccccgccgcctcgtctgggatgtgaggagcgcctctgcccggccgccccgtctgagaagtgaggagaccctctgcctggcaaccgccctgtctgagaagtgaggagcccctccgccyggcagctgccctgtctgggaagtgaggagcccctccacccggcagccacccagtctgggaagtgaggagcgtctccgcccggcagc

SEQ ID NO: 601701 - DNA, 576 bp, Homo sapiens
gggtgtgctggtgctactgcctagcacagtgggtgtccagtggggatacagcaactggtgttctctaacaacacataggaagcaggcaggcctcagcctctctacctatcaccctccaagggtgacttgctttctaatctggctgtgacctgggttggttccttggctctggttcccttagtcaatcctctctggaactagaggccagcttgtcttccacccctatcagctgggccatgctctttcctctttccttaggccctgccagccagtgggctaggcctggtcctacttctactactttgtccatcatcctcttcragtgacaactcaggtacagctagatgttgaaaaccactttcccctagaaaaggtgctactgtgtctcactctctgataataacttttagatattcacactggcttgatctggccttgcatttactatctcagtcgactgggtatagaatgtcccagctactacctcgcctgtcttggttcactctatgctgccagataggaactcctggtttgctacatggccagggctccttgcattttgattatcttggaaat

SEQ ID NO: 601702 - DNA, 625 bp, Homo sapiens
acacaattattacatttctgtcttgcttactgggaaggaaagataactcatacagaaaagttttgccataggtttttttctggccattttatgcacactaagtgtataactaagtttggccattttcaccaactgtctgtattagggagactaaatcctataaaactgactcttctcagtgactcatgtctgaaatcatggttccttcaataaaatgtaggctgaagttttctagggtaacctctgaatgccagactcactcccagtagagaagagcttttgagaaagagttttcctaaataaagagactttattgtctctaatgcctctagtaatgagcccagagaaaatgtaaggaccattccaggccagttatatgacacctggaactaagggctggatgctggagagagggttttctctggtttgcctgtaggtatgtccatatagtggggtttctcacagatgtacctcacattgattggcttgacygtgctcctgcacagaaactggggccaactgtgatctctgggggctctgaaccctgtctgggtggagacgatatcattgctcaccagcaaatgtcaacgataaatacctgaatgttggcttggtatgctgagtc

SEQ ID NO: 601703 - DNA, 629 bp, Homo sapiens
accctctaggactcaccccgggtgccactcctaggagctcccaccacaccaacagcccacgagagatgaatctgccttgttgcctgctggacggaaaggcccatctgcgstactgtgttcatgaatgtaaaatggctgataaactgttcatataagtaatacattttccttttaaaatgtctttttcactgtcttagtccattttctgctgctaataacagaatacttgaaactgggtaattgataaaggaaagcaatgtatggaggctgagaagtccatatctggtaagagcctgcttgctggtgaggactctctgaagagtggcagggtatcacatggtgagggggctgagtgtgctaacatgctaactcaagcctttcttcctctcctgataaaaccaccactacccctcccatgataacccactgatctatgtatccatgaatacataaatagattgatccatttatgagggcagagcccttgtgattcaatcacctcttaaaggccctccctcttagcattgccacattggggaccaagtttcaacatgtgttttgagagaagacgctcaaaccatagcattcacttaccccccacaagtgactgtgaatttcaagaattatgg

SEQ ID NO: 601704 - DNA, 623 bp, Homo sapiens
gatgcttgtgcctatgcttcctgtgcagcctgcagaaccaggagccaaataaacctctattctttataaattacccagcctcaaatattccttcatagcaatgcaaaatggactgagatgggtgattttaaggagagaggatgaatgtcagctattgccttgaagtcaactgctgcagtgggggctgtagtctgtcccatgtaaccttcctcttgcaaagttttgctgaaaatgccgaccaaccagaatcctgaaaaagctatgcctaagtggaaatatttagttatccatagaaatgatatttcctggtataaaggattttacctttatacctttattttgcctaaggtttttaatagacttctgactagttagcctaaacctgtgtatctgtaggtcttacatgtgatgatgtttacaaccttgatagctgcttcatggtagccaaggttgttggagtaggtcatgaatgctgccagctggcttcttctacaaattcatgccatccgamctcagctatggaccctccttgctatggaacagccttttagtctctgtttttttccctactgtatttcccacagctgctattccaaaccttttccattgttctcaaattcaga

SEQ ID NO: 601705 - DNA, 666 bp, Homo sapiens
cctagaagagtgcctggcgtacagaagacagtcaatagatatcagttgaataaatgaatgacctagcatagtagacattcaataaatatcagttgaatgaatgaatgagccgacatatagtaggcattctataaatatcagttgaatgaatgacgaacagcaggaaagagataaagtgatggtaaagagtgattgagcatggaatgagcggttttctttgtgtgtgtgtgtgtgtgtgtgtgtgtgtgtgttttgtaacagataattagaaaataccttttctgagcaactgatgacatttgaccagaactggaatgatgaaagcaggactattttatctactaggaattataagcataatgcctgtgactaagagtttttcagcacctgggaaagtgtttcaggcctggaaaaatattactggcattaatttatgaaaagaatacagcaaaattgaaaccaacaatatttatttraatgcatacaaaatgtcaattgtaactaatcaactgcaactcaactgttatcattttatataaattctactcaatatgcaatgtgagtatattttaataggtttgatctgatgtgcttagaacccacaagaatcttgttagatgggaaagagctagttgtgtgaaaatcttggggaggactattacaagc

SEQ ID NO: 601706 - DNA, 574 bp, Homo sapiens
atattggttctttaaaaatgtcagtcataccgtgagatttttctgtttaatgctttctaaggacttcccatctcactaaaagtataagcaaaagttttttataatagtctacagagccctacttgttatggtcctcctttgtttctccagccttatttcctacttctcttttccttgttcgttctgctttagacacacaggtattcttgccactccttgaacagtctagacatgttctctcctcatggcttttgtgcttgttcatcccaccacctgcaatgttgttgcccagatatctctgatatggtttgtctgtatcccacccaaatctcatcttgaattcccacgtgttgttgggggggaccagtaggaggtaattgaatcatgggggcaggtctttcccatgctgttcttgtgatagcaaataagtctcatgagatctgatggttttaaaaaggggggttttcctgcacaagctctctgtctgtggctatccacataagatgtgacttgctcctccttgccttctgctgtgattgtgaggyttccccagccatgtggaactgtaagtcca

SEQ ID NO: 601707 - DNA, 541 bp, Homo sapiens
cttccattagtgaagtcacttaaggcttttggcaatcacaagactagcaacagggattttggacgtgaaataattcattactttttttcacatgaaaaatgctgcattaggaatttagttgtacttcatgtgattcaagctgtgtaactttctcgtagcaaagaaatatgaattggacttataaattgctgagtactttctccaatccaaaaatccagacaattctgacatgcatagatggacaaagttgattaatgaccaaatagagtgaagggaaacactttgagtattagaaayagaaatgggaaaaagaaacaaaatatagagaaagttttgtgatctgaggaaatacagcagaaacctgctcagatttctttttcctgctgaaatatagttattctctcaacaaatactaagggagcagatcagaataaacaatgtatctttgaacttactagtaaactttgatactggttaagagcactgacaagtgtgtctgtaatttgacaattcattgttttgtttgttctcatccacgtat

SEQ ID NO: 601708 - DNA, 376 bp, Homo sapiens
gttggaaaatgaatgaaggaatacaaattattataaaataaacatctgaaaagtctatgataatcatacaaatgtcagacaataaacaatgagaarcaaaagtacacagcaaggccaccatatttgtgactgttgttgggctctgtggtggtaggaggtacttcttacagttttcactttgcaaatatttattctttgatttaacccatcaccactatgactgctgccactcactgaatcaccaaaaattgggtaaatatctttttattaacttttcataaatgtatgtatagctcacatttatttcaatgtttaatatgagaagtatttggaatctttatttagaagtttgttgatatttttgtaaccagaaata

SEQ ID NO: 601709 - DNA, 612 bp, Homo sapiens
ctgtatattttgaagttatggtgagcataatttgctgatttattggatgtaagaaagagaggaatcaagggttttggctgacatcatgacaatgagttactgttactgagcaggggagttccaatttggacttattaagtttgttatgcctgttaaatatccaaatagaaatgttgactatatgtttggatgtacacatctgaaagtcagggaagaggtccaggtataagataaaagtaggaagtaatcacctatagctgttatttaaagccataagactagatgggttcacctaaagatgaatagtagacagaatagtgttaatgaaggatgaacctaaaatatttcacagtttgccagtgatggatgtaataaaagaaaataaaaccacacaggaagctgtgatggtacagctaatgagatagaaacagggccaggatcaagtggggtccctgaagtcaagtgaaggaagtgtttcaaggaggagagagagtgatcaactgtgacaaatgttcatgagagttcaagcgttcragatgtgaaatgaaaatggattattgtatttagacatactcagcttattgttaacctcgataagagtagttgcattgg

SEQ ID NO: 601710 - DNA, 555 bp, Homo sapiens
gaattctgcttgtggtatgctttcactagtgtctttcatttctatcttatctttactctcttgattatatttagttctgttcaatttcaattcttaacctaaagtacatagagttacttattattatttttttatatatatcctagttgtactatggtacaattaagaactctctttgacaggttttcaagtggcaacaagagcacctgttctcaacatgaatgtgatttgcctgtgccatccagctgccctttggtcttgcttgtttcagcaggtgttgctggctaggcaggtgtctgcgtattggttccctcctccatctgatattcatgtgcacygctcatgagaaggcctgcaaacatcagtacattcttcccagatggaggaggactatttggtcaataagagatatcaaacaattgtatcttttacattccccaaactattctactataccgtattctcatttttttcatgatttatatattaatatatattcatatatatcataaatgtcagtaactgctagacatttatttactgatcattttctgt

SEQ ID NO: 601711 - DNA, 555 bp, Homo sapiens
gaattctgcttgtggtatgctttcactagtgtctttcatttctatcttatctttactctcttgattatatttagttctgttcaatttcaattcttaacctaaagtacatagagttacttattattatttttttatatatatcctagttgtactatggtacaattaagaactctctttgacaggttttcaagtggcaacaagagcacctgttctcaacatgaatgtgatttgcctgtgccatccagctgccctttggtcttgcttgtttcagcaggtgttgctggctaggcaggtgtctgcgtattggttccctcctccatctgatattcatgtgcactgctcatgagaaggcctgcaaacatcagtacattcttcccagatggaggaggactatttggtcaataagagatatcaarcaattgtatcttttacattccccaaactattctactataccgtattctcatttttttcatgatttatatattaatatatattcatatatatcataaatgtcagtaactgctagacatttatttactgatcattttctgt

SEQ ID NO: 601712 - DNA, 603 bp, Homo sapiens
aacatatgattattatggatcttcagkgtgatagatgactcatttgcttgttgaaaatcacatgaaagacccttcttaggccaagtctgtgccttacacatctctttatcccctgctctgtgagcacagttctttatacataacagatacttaatggattttctgagttgagttgaattaacacacacacacagacacacacacacacacacacaacctcttgggtttaacatcgaaggatgtttttgtctttaaaatgttatcaagacatgcattagttatttttgatttagtgctttggatttcttcaggacaatgtgcttttcctttgtcactaaagtactttgatccagtaatcttgagaccatgatagagtacatgcatgacaatggcatacgtgattcaatcctttgggaagaagatgtagtcatatcccaagtgagtgtgaaattgtattcctccctctctcactttagtatgagacaaatatgcttgctgcctcatttttaattgaaaacttttagaatatctagcaaatgttttgaaagagaatgcatagagacccctaaataaaatttggagagtctgtagagggaaaatgtt

SEQ ID NO: 601713 - DNA, 645 bp, Homo sapiens
caagttactgtaattttctctcttcttgtctccagctgattagtgcaaattaaccgcctgagcagttagcctgcaatatggaaatcttagctatctgctgagaaggcagacttttttctttkttttaactatatctatgtagaattccagaattcttgaatgacattgctgtatttcttaacgctgctttgaacttaaaggacatgtttgtatgtctgttttgagctttgagaatttattaaccttaatattattatgattataatctttataaattcctttataggaattcaaaagaaaaaaagggaaataaaatgcttagatacctcatctcttaattgaagataataactatctcactagattattgtgacagttaaaaactaaataatgtgtggaataaatgtttagaatacagtgtggtccagagtgtgcatttgatatccttttaaaattgttcttattaggccattgaatttgattcagtgaaatgtactacttatttcaatctcttcgctctcagaaaatgagatatgtaggcaatttctatccattacatttcatatggtccatagagagcttgaaaaacaagaactagtttacaaaaaagtcagctcttgaccaattattagaaatagaatgatg

SEQ ID NO: 601714 - DNA, 580 bp, Homo sapiens
tgtgtgtgctgatctttagcctactcttggactatgtagtaagaacagtctggaatgatgaaggagaggagtcaaatcacaaggccatgtttaagatatggcttcgagtaactataatccttgaaagtccacatgcttttttttttctttcagaaaaagaatataaagaccaaagaacattatccactatgaccatactataattttgtttcaaaatatgtgcaagttctagaaaatggacactcctacattgtatttttgcttcattggttttactttccgtcatgtttgttttgtttccttcggaaaggagtgtacrttactacaagtgtgttagagagataactaccctcaagggtgcggttttaatagaatcaaggagagctttggcatgcccctgatttaaaaataaatttttttttttgcattagtatgcctgttttcatgacatgtatgtgtgtatgtgcacatatggacgcacccacacacttaattacgaattttcctctgacaatttatacaaacaggaggcagggaaatgctgggtagaagagggcagttccccaggaaaggccccacc

SEQ ID NO: 601715 - DNA, 580 bp, Homo sapiens
tgtgtgtgctgatctttagcctactcttggactatgtagtaagaacagtctggaatgatgaaggagaggagtcaaatcacaaggccatgtttaagatatggcttcgagtaactataatccttgaaagtccacatgcttttttttttctttcagaaaaagaatataaagaccaaagaacattatccactatgaccatactataattttgtttcaaaatatgtgcaagttctagaaaatggacactcctacattgtatttttgcttcattggttttactttccgtcatgtttgttttgtttccttcggaaaggagtgtacgttactacaagtgtgttagagagataactaccctcaagggtgcggtttyaatagaatcaaggagagctttggcatgcccctgatttaaaaataaatttttttttttgcattagtatgcctgttttcatgacatgtatgtgtgtatgtgcacatatggacgcacccacacacttaattacgaattttcctctgacaatttatacaaacaggaggcagggaaatgctgggtagaagagggcagttccccaggaaaggccccacc

SEQ ID NO: 601716 - DNA, 580 bp, Homo sapiens
tgtgtgtgctgatctttagcctactcttggactatgtagtaagaacagtctggaatgatgaaggagaggagtcaaatcacaaggccatgtttaagatatggcttcgagtaactataatccttgaaagtccacatgcttttttttttctttcagaaaaagaatataaagaccaaagaacattatccactatgaccatactataattttgtttcaaaatatgtgcaagttctagaaaatggacactcctacattgtatttttgcttcattggttttactttccgtcatgtttgttttgtttccttcggaaaggagtgtacgttactacaagtgtgttagagagataactaccctcaagggtgcggttttaatagaatcaaggagagctttggsatgcccctgatttaaaaataaatttttttttttgcattagtatgcctgttttcatgacatgtatgtgtgtatgtgcacatatggacgcacccacacacttaattacgaattttcctctgacaatttatacaaacaggaggcagggaaatgctgggtagaagagggcagttccccaggaaaggccccacc

SEQ ID NO: 601717 - DNA, 593 bp, Homo sapiens
ttccagaggtgaggtaccagtgttggttctgcataataataaaaccctttcaaagaastagaacttaaaaaaaaatgaattgcaaacctcatacagtatagaattaaaatgctagaccattaaaactaagcagttgtacaaactttaagaaaagattttaaaattgtttttaaagggaccaaatgaatcaattgttatttaaaagaacctttattcagcattgtgttggctaaatacttcatgtgagttcttgttttaaggcaagtcaccctcattttttttattgcttatttaagaaagctttttagtggatctttatttaagaaacacccatagtctttttgttggtttgttttaactgagctttttagttgctctgaaagcagtaaatctctttggttcactgtgtgctttgatagagatttttttcttgccagcaatttcttgcttcctatttttgaaaagaccagtgttctgccttcacttaaatgtgaaatggagaaaattaaaagttagttttatgtgtttgtttcttttaggaataaaagtataattaacaactttatagagagaaggtttgtccacagagctag

SEQ ID NO: 601718 - DNA, 558 bp, Homo sapiens
agaatttttatttgtacaggcacagtatacattaagtatataaactctgtcatgtttgttacatgcttttattccagtttatttgcttttaatttttttctgacatttttgatatttttattttatttttattgcattatggtcaaacaatacagtctcttaaatacggaggtgttttgactgtggtatcttatcccacgatcacaaggactgatttagcttatttcatggggtgactggctggctcttcgccttgccatttcattcacttctttccaaagtagactgttgaatggaagaggctattttccccaggtggctattttgttttgatatgtaaacttttaaaatgtggctatatatttagtgtggggacccamttaaagcctagagttggtataatgattgttttaagttgaaaattttaagattcaacagacatcaaaataagccttctcagaatttcccttatttgactaaaggcagaaaattctgggaatgttctgctataaatcccctcttaggtgtggtttgactcccagaaaggaaatcaaaagt

SEQ ID NO: 601719 - DNA, 558 bp, Homo sapiens
agaatttttatttgtacaggcacagtatacattaagtatataaactctgtcatgtttgttacatgcttttattccagtttatttgcttttaatttttttctgacatttttgatatttttattttatttttattgcattatggtcaaacaatacagtctcttaaatacggaggtgttttgactgtggtatcttatcccacgatcacaaggactgatttagcttatttcatggggtgactggctggctcttcgccttgccatttcattcacttctttccaaagtagactgttgaatggaagaggctattttccccaggtggctattttgttttgatatgtaaacttttaaaatgtggctatatatttagtgtggggacccacttaaagcctagagttggtataatgattgttttaagttgaaaattttaagattcaacagacatcaaaataagccttctcagaayttcccttatttgactaaaggcagaaaattctgggaatgttctgctataaatcccctcttaggtgtggtttgactcccagaaaggaaatcaaaagt

SEQ ID NO: 601720 - DNA, 517 bp, Homo sapiens
ggaccacttcctttgtagacctcatacgcatatgagcaaacttttccttctcttgttaatctgtcctttggcagtttaattcasaagctcctaggtactaaacctaaataggaagaggaaaagttttcccttcccagtattagtttgtgataatatattatgcatttttttggcttaatataaatctatttttgtgaatattctatggatattaacattaattagaaagatataaaattaaatttatatcctttggctttatgtgtagacccacccacatgaaatgcctatgtccctataccctaaattatttggaatgtgcattgtgttaaggcctgagaggtttttgtaattttacttatttagctactttcttgttttttttaagttttagctgtcttaggtaactatgctattttgttcagaaagtttgaagaatgttttattttcatgtaagtagttttccccactctctgactcctgtatggagttttccctttcatatcatcattgcagc

SEQ ID NO: 601721 - DNA, 517 bp, Homo sapiens
ggaccacttcctttgtagacctcatacgcatatgagcaaacttttccttctcttgttaatctgtcctttggcagtttaattcacaagctcctaggtactaaacctaaataggaagaggaaaagttttcccttcccagtattagtttgtgataatatattatgcatttttttggcttaatataaatctatttttgtgaatattctatggatattaacattaattagaaagatataaaattaaatttatatcctttggctttatgtgtagacccacccacaygaaatgcctatgtccctataccctaaattatttggaatgtgcattgtgttaaggcctgagaggtttttgtaattttacttatttagctactttcttgttttttttaagttttagctgtcttaggtaactatgctattttgttcagaaagtttgaagaatgttttattttcatgtaagtagttttccccactctctgactcctgtatggagttttccctttcatatcatcattgcagc

SEQ ID NO: 601722 - DNA, 585 bp, Homo sapiens
tcatgtaagtagttttccccactctctgactcctgtatggagttttccctttcatatcatcattgcagcccctggctcagtttgggcttaagtgggctattgagctgtccacacagggcacctttactcatcctaccagataagccttgagcaatatgcartcagctgttgattgaaggccctcagccactatcaaagctgacagggtttatttgcatttttaatgtgattctgagtgctccctctaaaggtaacagaaggataggcttcccttagccttctgcttagcttcctgctttggccatgacagtcttcactttcctttttttctgatcttttgatcttatcctccaaagtatttttttttttttttgcaaggttgtagtccctttctcctccctacacttaggcaagtaactctcatctcagggttgcaggatcttccttctttcctactagtctttccatactttgttatactatgtttgagtcctccttttgaggcttctctaggaatttttgcttaattcctattttgaagtgaaagaactaaaaatgaatctttttggcttttgtctcctggta

SEQ ID NO: 601723 - DNA, 575 bp, Homo sapiens
aaggcagctacaaaactttgcataagtaaagaggagctgaatattaataaccaagacaatgaagaaaacccaccacaggccttgaggcgtatgagagaaaagtggttccacccagacccctgctgctctatgccgcttgggacttgatgacctgcatagcagctgctccagctccagctgtggctaaaaggggcaaaggtaaagttcacatcattrcatcagagggtacaagccccaagcttcagtggcttccaggttgtgttgaacctgcattcacagaaggcaagagtttgggatcctccacttagatttcagtggatgtatgaaaacgtttggatgtccaggcagaagtctgctgcaggactggagccctcatggagaacctctactaggtcagggcagtgggagaatgtggggttggagctcccacacagagtccccactggggcactccctagtggagctatgagaagattaccaccatcctccagacgccagaatggaagatctaccaacagcttgcaccatgcacctggaaaaggcataggcattcaacaacaacccatgaaagcaac

SEQ ID NO: 601724 - DNA, 530 bp, Homo sapiens
ttgaaacctgaatattacattgattatctaattatcacattctgaaccctgaatgggtaatactattattctattttaccaacaaaatatattaactcccacttaaatgacattgtctgaataatgacctctatttttcctttctatcctagtgggaagcatctactctgggagtctgtttcaagatctcttatcctggattttatatctcttattgctgaactccccaaaatgaagccaaatgacaagatgtgaaacctaatataccagactttaatagctcacagggggaaatacaaagaaatccttagtactaacacttctgagttcagagtaaactctgccatggcaagcacagtgcctagcacrttgtataataaatactcaataatctcaggtaacagaatgttgaatggagcttttctttgaccttgaaattagaaaatggagctcacagcaaattctaaaaagagcaagaaacggttggggcagacctctaactgaggacatcctacaaggattgcaaataa

SEQ ID NO: 601725 - DNA, 509 bp, Homo sapiens
tgaatgattaaaatatctttgctattaaacttgtaccttgtaccattacttgtttaaagagttttcctggttattggagattctggattgttgttgttatttccagttttgtagttctgatataagaagttctaaaggaaacacatttaatgacacggacttcttgggaggaatgcagattacaattcctcctttagtgttgacttaaatatcaatgctagctttctgaggcatagtcagtaaaatccagtgccccctagtattattttaattgactatttttctgtttaaacaaaataaaatgaacatttgtcacttttcaagctgatataatgagtacttggtagcaccatactttttttccaactgtgtattaaaaatgtgtgatttaccaattttaaatagcaaacttcacttagttacatacamgttgagaaataatagtgttttgctattctaatgataagaattgttaaataaaactgtgatcatatcataatcagttacag

SEQ ID NO: 601726 - DNA, 576 bp, Homo sapiens
gtcaaaatgtaaataagcattttaaaagtttaaggcagtcatgaatcacagatgaggaccctaccttccaagatgggtatatttatggggagaaaaaagtacaaagggtcgtatgtttaaatgttttatgatgttcaaaccccctacagctttagaaccgtctcagtcctcaaagtgatacatagtggttgggggtgggggagcaatctctgtatttaatttgtccaaacatagtctgaggcatttaatagccaaatgtctgtaacattttcacttatgtcctactgcaagtgcattagttagtgacagtatcagcttggaacctgtgcctgctcagggagccacctaacagaagtagaaaacctgctaactactccaaagatctcattacaaaaccttttacgtgtgtaggcaaacccgcttcatttgctatcttcccaacttcacataacaacccagattagaatttcattagtcagtcctgctcccgmtagctgttaactttgattcaatctttaatttctcagtcattattagcttcaacaggtgggtgatgggaaagggttttttaaactc

SEQ ID NO: 601727 - DNA, 540 bp, Homo sapiens
ccttgactaaaatatctatttacttttactctaatattctaataattatcacacctagaattaattatctcctcttgttgaatacttttgcaacaagttcacactcatagtgaaatgcactctgtctcaagtacagtgtgatgattttactttaatagaaaactgagggccacagcttaggaacaaaattgtagactagctccacccctgacctcagttacaatcctcattacaccccaatactaaatagtttgatattgaagcagtgtcatgttcaaaaatgcagttccacacacaaaactaactacaatasaattttattctttactcttgtcttttgaaagaccttgaaagtaatccaaatatatcttgcataacagcaattgttagaataagattgttcctctgttacatcttcccttatggtgtcctcagaggacatgctaacccaaaatctggcaccttggcagttgagaaaacagcagaagcagatgtcccttctcccctgatgcaggccatcaaaaaaatcatctgaccttt

SEQ ID NO: 601728 - DNA, 410 bp, Homo sapiens
tttttcttattttctctcctctttttctcaacactttattatataatagatttaatctgtatgaaatagacctttttagaaggatttgtagtagaaagagaacaaggttgaaaagaaaaaggtcatctttgatggggtagaatattggtctcattattctattcataatggtatcacaagtgttgaaaatattagcaattatcattgaggcgaaatgaagaagaaacttcacatattccacaactcagaaaatgttaaggttctttatgtatttgaccttatttaattctttcaacagcyctgcagggcagcactatcataattcacatttttatgacaataaaacaaaggcagaagaaatatccaaagtcacacagctagtaactggtggagccaggatttgatctcag

SEQ ID NO: 601729 - DNA, 505 bp, Homo sapiens
cttaataattatgtaaaataattatcttggtgcctttcttcttgctatctgaagactgaagacgtcctagatacatgcataaagagtttccacgttttaaaatataggtatttagaatgtaatctcttactttttgcatttgtccaaaatarttcattcgatggaatgaacagaactgattcaatagcacagctaaactctgtagtagtgaggaataaataccttttctgagtgtaaggcaaatccttgttttcagattcccttttattaaaagaaggaaagggtggagaagatgcaaaaggagatctataagattcctttgtttgaaaaaatatccaaaacttggaaataaagcaaatggaggggtgataatttctttcaatggcatacttaggaattgtaaaaaaggcttgctcaaggactgattaattaattctctagaagagtgctgcccaacagcactttctacagtgatggtgagaaaagaaaaatagctaagagcagt

SEQ ID NO: 601730 - DNA, 505 bp, Homo sapiens
cttaataattatgtaaaataattatcttggtgcctttcttcttgctatctgaagactgaagacgtcctagatacatgcataaagagtttccacgttttaaaatataggtatttagaatgtaatctcttactttttgcatttgtccaaaataattcattcgatggaatgaacagaactgattcaatagcacagctaaactctgtagtagtgaggaataaataccttttctgagtgtaaggcaaatccttgttttcagattcccttttattaaaagaaggaaagggtggagaagatgsaaaaggagatctataagattcctttgtttgaaaaaatatccaaaacttggaaataaagcaaatggaggggtgataatttctttcaatggcatacttaggaattgtaaaaaaggcttgctcaaggactgattaattaattctctagaagagtgctgcccaacagcactttctacagtgatggtgagaaaagaaaaatagctaagagcagt

SEQ ID NO: 601731 - DNA, 651 bp, Homo sapiens
ctttgtttgttcaactcagtttgcttaattccttccagggataaagtgagtacatgcttcttggtaaagattatggtgacatataaaagtaaaaataaatgcaattatatcatcttattcagtaggcattttcaaacgttcctgcaaagaaatgtggtataaaacctaaatgttaatttcccacttaaaccattcaagagatacataaatcgaggaaaatggaataggtwtcttcataatcttaccttttcctttaacatcacaacttatggggcaataattgagtagaaataaaaatgttaaaatattcataatatacaagaacagaaacgtgaatagaaacaaatctggatttggaatttttctgattttctgtgatgtcttcaaaatttctgccatcatttttggctcctacaccaaagctagaagacaacttaaatgtatcccattaaatatgattacatatttaatattgactaaagaaaggtggtgagtttctgttacataacttcactactgctttgatactctttgaagttaccatatttccctcctggaaactgcagtatgttcctaactggtcacttgttttcagacttttcccctttatccatacagcaaccagaatgatctttttcaaatactgaatag

SEQ ID NO: 601732 - DNA, 409 bp, Homo sapiens
tactaacagtcattacttaaccagctattaaaaaatagcttcagaactatttgttgtaatgtgtgcgatatttaattattttggcaagtcgcctatatagcattttgatttgaaactacccagaagattataaaattcagatgaagcaaaagagaaatatcaaattttatctaatcattggccttcttgtttcattttaaaggtaaaatattgacttaaaaagtttaaagattaggtagatcattaatataatagaatatccatctgaggtaactaagtaatactcttcaattctgatataagttttagtgcatttttatttcctctctctctctctttatatatatatgtatgtrtgtgtgtgtgtgtgtgtgtgtgtgtgtgtgatatgtatatatgccattatata

SEQ ID NO: 601733 - DNA, 464 bp, Homo sapiens
tggaacatatacgccgtggaatactatgcagccataaaaaagaatgagatcatgtcctttgcagggatayagatgaagctagaagcaatcattctcagcaaattagcacacaaactgataacatattttaatatataaagaataaaaataaaacaaatcccaggtacctagcaaaaatgtgaagaatatttccagtacactggaagacataaatgtgccccaaacccattctcctccaactgagaaagagccgatatcttgattgttgtgtttattttaaatttttaaaagagttttaacacatatgtagtgtatttcccagcagcagattgtttaattttgcatgtttgaattgcatgtgtgaattttgtgattaatattatttttattatatccttgatattcatccattcttcttgtagtcatacttcactcattttcattgctgtatagcattcctttgt

SEQ ID NO: 601734 - DNA, 464 bp, Homo sapiens
tggaacatatacgccgtggaatactatgcagccataaaaaagaatgagatcatgtcctttgcagggatacagatgaagctagaagcaatcattctcagcaaattagcacacaaactgataacatattttaatatataaagaataaaaataaaacaaatcccaggtacctagcaaaaatgtgaaraatatttccagtacactggaagacataaatgtgccccaaacccattctcctccaactgagaaagagccgatatcttgattgttgtgtttattttaaatttttaaaagagttttaacacatatgtagtgtatttcccagcagcagattgtttaattttgcatgtttgaattgcatgtgtgaattttgtgattaatattatttttattatatccttgatattcatccattcttcttgtagtcatacttcactcattttcattgctgtatagcattcctttgt

SEQ ID NO: 601735 - DNA, 521 bp, Homo sapiens
aaattagcacacaaactgataacatattttaatatataaagaataaaaataaaacaaatcccaggtacctagcaaaaatgtgaagaatatttccagtacactggaagacataaatgtgccccaaacccattctcctccaactgagaaagagccgatatcttgattgttgtgtttattttaaatttttaaaagagttttaacacatatgtagtgtatttcccrgcagcagattgtttaattttgcatgtttgaattgcatgtgtgaattttgtgattaatattatttttattatatccttgatattcatccattcttcttgtagtcatacttcactcattttcattgctgtatagcattcctttgtatgactgcttcatatttaatgtatgtaggtattttttcaatgtatatttacttatatcaaaatagatactcaattttatactctgctcttattgtttaattttagaatcaagattattgtctatgttgaaccattatcttaagccttgtttctatt

SEQ ID NO: 601736 - DNA, 515 bp, Homo sapiens
aatcatcacactggggaaaactgtttgatgtggaaaacaagccagcttggctctttcacaaggaagagttaaaagacaaatgcagagagatgactggggacagatgagaaccctgcaggacaaagggtagggcgctgacccagcagtcagaggtcctcccaggactaatccagataactaaagcaacktcagttttctaaaatgacaaaaggttgagcatgcaaatcagaaagagtattttaattctaggccctgaatacattctgacaaccacttgtgttaaagatttttagcggggaaaatccctttagtaactcacgcagaaatggaaaaacagatgacctccagaggaacaagactgaggctggcccatccctttctgcacaacaaaggctggaagagaagacagcacaggccatggggtcctgcgctggtgccaggagccccaggtcccagccttaggtcctagtctggtgtgctttcttttgaaagggcattctcagatatgcgggagt

SEQ ID NO: 601737 - DNA, 567 bp, Homo sapiens
aatgcaactattcataataaaagttattaaaatatagaatctgttaaaatataaatataaaatataaattttaaccaaatggaatgccaagataaagatttgttgttaacaagggctcacagaacaggatcaacagaatgggaaaaatgcctggagaaaagggtccagrtatcagtaaagacatcacacccacagtgatcaggttatcagtgagtaccagtagataccgagtggaaggaagtcaaagtctccatttatacccaaatgtctggcatgcagtttgctgaatgtaactactaagttgactgtacaatcattgcctttttattaagttcaatcattctcagtgatcattctaatccgagaacccatttatccagctactattataagaaggcacctaggtaggactgacatttacaaaggctaacatcagatgaggagcactgtctgtggagtgtcaaaatttcagggtctgccacattttcacagtagcaaagaaaatgaaacaggacattaaatgtgtagtcacaggtcagagttttcattcctttaagaacggaatac

SEQ ID NO: 601738 - DNA, 567 bp, Homo sapiens
aatgcaactattcataataaaagttattaaaatatagaatctgttaaaatataaatataaaatataaattttaaccaaatggaatgccaagataaagatttgttgttaacaagggctcacagaacaggatcaacagaatgggaaaaatgcctggagaaaagggtccaggtatcagtaaagacatcacacccacagtgatcaggttatcagtgagtaccagtagataccgagtggaaggaagtcaaagtctccatttatacccaaatgtctggcatgcagtttgctgmatgtaactactaagttgactgtacaatcattgcctttttattaagttcaatcattctcagtgatcattctaatccgagaacccatttatccagctactattataagaaggcacctaggtaggactgacatttacaaaggctaacatcagatgaggagcactgtctgtggagtgtcaaaatttcagggtctgccacattttcacagtagcaaagaaaatgaaacaggacattaaatgtgtagtcacaggtcagagttttcattcctttaagaacggaatac

SEQ ID NO: 601739 - DNA, 478 bp, Homo sapiens
gttgatggggatcccagcagatagccaacaaaagggaacctcacttctacagcagcaaggaactgccattctgccaaaaacctaatgaacttggaagcagattattttctggagtctgtaggtaagtgcctgtcttgcggacaccttgatttcagccctgggatactctaagcagaggsgccaggtgagcccacctggatttgggacctacaaactatgagataatagatgtgtgctgttttaagccactgattttgtggtaattcgtgacagcggtggtaggaaacgaccacattgagattcatagtacttcttacatctgttgtcatgtttttcatttgttttagaaaattctcatccactcctaatacattttgtctgatacattatttctgccctctcctcctggatattgaattagatgaatgttagatattttcatcattgtccttaggttgcttatgttttgacatgtttc

SEQ ID NO: 601740 - DNA, 607 bp, Homo sapiens
tgattggtgacattgagaacagcagtttctgtaagtgaaggcagaaaaagaatacagagtaaattacaaactcgaggtgaagaaatttgccgtaaggcaaaaagaaggaargcaagaaaggtaataggtagtagctggatggagatgtgggacttagtagaatatttttgtttttggaagggagtaaatagaatgtttgtttttggataggggtccttcctcctttgaagtactcatagctttatgatactcctctgaagtacccacacctgtttacttgtcatattccttactttcacttacaggtgatttgataccagtcctcaagcacccaccagagggccttgtgcacatcggcctctctgccaatgctgttgaatgagtgacagccttctgagggccaggcactgatgaccaagattaggaaactgcagagggtggtgagaaggcatttgtagggaaagtggtgtagggcccatgattatgcagggaggtcagcaccctgagccactgctggggggactcaactcatgctcaagacatggctctgagcggcaactcatgagtgctcaatttccagaggaaatgtgtgagttcctttaaaagt

SEQ ID NO: 601741 - DNA, 607 bp, Homo sapiens
tgattggtgacattgagaacagcagtttctgtaagtgaaggcagaaaaagaatacagagtaaattacaaactcgaggtgaagaaatttgccgtaaggcaaaaagaaggaaagcragaaaggtaataggtagtagctggatggagatgtgggacttagtagaatatttttgtttttggaagggagtaaatagaatgtttgtttttggataggggtccttcctcctttgaagtactcatagctttatgatactcctctgaagtacccacacctgtttacttgtcatattccttactttcacttacaggtgatttgataccagtcctcaagcacccaccagagggccttgtgcacatcggcctctctgccaatgctgttgaatgagtgacagccttctgagggccaggcactgatgaccaagattaggaaactgcagagggtggtgagaaggcatttgtagggaaagtggtgtagggcccatgattatgcagggaggtcagcaccctgagccactgctggggggactcaactcatgctcaagacatggctctgagcggcaactcatgagtgctcaatttccagaggaaatgtgtgagttcctttaaaagt

SEQ ID NO: 601742 - DNA, 607 bp, Homo sapiens
tgattggtgacattgagaacagcagtttctgtaagtgaaggcagaaaaagaatacagagtaaattacaaactcgaggtgaagaaatttgccgtaaggcaaaaagaaggaaagcaagaaaggtartaggtagtagctggatggagatgtgggacttagtagaatatttttgtttttggaagggagtaaatagaatgtttgtttttggataggggtccttcctcctttgaagtactcatagctttatgatactcctctgaagtacccacacctgtttacttgtcatattccttactttcacttacaggtgatttgataccagtcctcaagcacccaccagagggccttgtgcacatcggcctctctgccaatgctgttgaatgagtgacagccttctgagggccaggcactgatgaccaagattaggaaactgcagagggtggtgagaaggcatttgtagggaaagtggtgtagggcccatgattatgcagggaggtcagcaccctgagccactgctggggggactcaactcatgctcaagacatggctctgagcggcaactcatgagtgctcaatttccagaggaaatgtgtgagttcctttaaaagt

SEQ ID NO: 601743 - DNA, 607 bp, Homo sapiens
tgattggtgacattgagaacagcagtttctgtaagtgaaggcagaaaaagaatacagagtaaattacaaactcgaggtgaagaaatttgccgtaaggcaaaaagaaggaaagcaagaaaggtaataggtagtagctggatggagatgtgggacttagtagaatatttttgtttttggaagggagtaaayagaatgtttgtttttggataggggtccttcctcctttgaagtactcatagctttatgatactcctctgaagtacccacacctgtttacttgtcatattccttactttcacttacaggtgatttgataccagtcctcaagcacccaccagagggccttgtgcacatcggcctctctgccaatgctgttgaatgagtgacagccttctgagggccaggcactgatgaccaagattaggaaactgcagagggtggtgagaaggcatttgtagggaaagtggtgtagggcccatgattatgcagggaggtcagcaccctgagccactgctggggggactcaactcatgctcaagacatggctctgagcggcaactcatgagtgctcaatttccagaggaaatgtgtgagttcctttaaaagt

SEQ ID NO: 601744 - DNA, 622 bp, Homo sapiens
ggtgatgtgactctcctctcctgcctggctccagccaaaaggggggattgtgacatatcactggacccaacacctaggtgatgggactctcctcttttgcctgggcccacatattttgggtattgtgacctgggtgatgggagcctactgcttgaaccctacccagagggagctttgtgacatatctctgcatccatcacctaggagatgtgactctcctctcgtgcctggccccagccaaaaggggggatcgtgacatgtcactggattcatcacctaggtgatgggactcctcttttgtcttggycccacatactgtgggtattgtgacataatgctgggcccaacacctgggtgatggaaggctcctgcctgggccctgctcacagagagccttgtgacagatctctgcatccatcatcacctagatgatgtgactctcctgttctgcctgcaccctgcccatggggaagattgtaacatatccctgggtgctgttcccagtcttgcctcatggcctttgccccagctgtgtcctctgccctgcaggatgcacctctgctccgtgtggctccctcccactctcactctccaaatgccccgaacccctgagccccactgc

SEQ ID NO: 601745 - DNA, 588 bp, Homo sapiens
gagctgtgcaattgagtgatgtacaaatcctaatgctcaactgcttcaaacctacaataacagcagtttcaaggatttcagcctaatacatttataaatatatttaaattccaaaaatattcaattctgtgtcaaaagcaaattgcacaatcatatttagagtaacatgttactaaatattatttagagtaacattttaaaactctacaaattagcactttatgttttgaggatgggaatagatgcagaacaattgtttattgatacttgacacaaatgttcctatctctggatgagggacacggatgccctcaaggagggrtatgcgagatcctcagattgcttaaaaatctgaagccaacggacaacatattcaaacttgctaaagctggtggtgaggaaatgggtgttcattattttatacaatttctcaagtaataagaaggagacaacaggaaagggaaggaaaataaatcaagtctccagtgctctgtttccacagcctctgcagtagacttcctggagcccttgactgtggttgcagcacaggaggcctgtccttgcagaggagcagagcacagcgggcca

SEQ ID NO: 601746 - DNA, 532 bp, Homo sapiens
gatgctgggtacaatgcttacatgggacctccctgtgtggccgtggcttcctcctggcttggcagctgggttccaagagcaagcatcrcaaggaagagagagccaggctgaagcagtaattctttttatgacccagccttggaagtcacccagtgccaccacattctattcagcttgcaagctgatgtgagaattcatgtaaaaaatggatggtaagagacaaatagattgcttagcacatagaaggtcttcagtaaaatattggaatacaaaaacattgctcaacttccaaggcatagccaacattatggcccccatatgttctcccaaaattctgcttgccaaagacctccatctgagttgagtcaccctgggaccttgagagccagtccatcaagagaagggacccagtgtctcttagggatgatgggttggatgggttgtgggaagcaggaggtccctcatgacatggaagacagctgctgcagaggcttgttgagggtgggagccagactgcaagggcatgaggaga

SEQ ID NO: 601747 - DNA, 603 bp, Homo sapiens
agatctctgagctgatgcagtgaagttgtgtgcatcctcgtgaggccttacatataccactcgtgtgccccacccacacatgggagtattaactgacaggaccagttcaatgcagaggcggggagtccaaacctaatccactcatgtgcagctgaaatgttctggtatctatatttaagaagtaaagagagttaagtatatgagtatacttctatacttactatatttaagcatattaagtatgatatagatgcttatatgtaagtgtgggagtgaatatttaatgattttcatgtctaatgctagctttctagtaaactttattctcttatgcaggttttgggggagctggctgacatattccattttaatcatccccaatcattatcagtcatggggtttgtttccaaagtggtatgaagtgagaagagactayatactgaggctggacgaggagccaaaagttacgtggaaggccaggagcaggactgtgaaccagaggggacgttgtcttaggcaggaaacaggacccagagtgggaggcaggtgggaccaggaagaagcagctggaatggtgctgcaggggtgtggggctggctccat

SEQ ID NO: 601748 - DNA, 616 bp, Homo sapiens
aaaaaaaaaaaaaaaaaagaaaagaaataaaagagatggggcaaataaatgagaaagaagaaataatgcccctagtctctctttactaaaaactgccaggccttcttgctctccttcccaaccctttcagatggccagaatcaaagtgcagatcccttccaactgaactctagaaataatttcctaggcagttgctttggtttccattctttctatttccaattcttcttgaataccacaataataacagctaacatttatgaagcacttacagctgacaggactgttctatgagcttccaatgtatcatctcagtcctctcaacagccctttgaggtagacgtttttattcattttattgyacatatgactgtatggaggcacacagaattttagtaaattgcccaagctcacagggatagtaagtagaggcagagctgggattcaaatctaaatagtccagtgctcctgatcatgaaacatttaacattagctttcctctagtttgactttcttcaggcctgtcttctactgaagaaccctccatggctccctactgcctgcagatgtctcggtggccttgttggctctctacacctgggccagccatctgctc

SEQ ID NO: 601749 - DNA, 561 bp, Homo sapiens
aagctttacaccgtggaggttgtaaggamaagtgcatgcacaggggagagaattctaggcttaggaaagagcacatgtagcaacttggaggtaagagagagcatggctcactggagaaatgaggaaatgagggagaacagagtcatggcctgtgaaacaagccgggagaaagatgaggttgtgggactggagcctcatgggggcatcactgagctgcgagcgcaattccatgtaagtggcctggctgggtgcacctgcatggctagctcacatattgggcctcagaaataattcttttgatagatttgctatcattatctccagttcacatttcacctccagatcatgggaagacatgaccataaataaaggggttgggaggtcagcatcttttacaagaaaatgccatgactttggtacatgtttacaacactggtgccttgctggaaatctaatgccaccacagctgtgatcaattttctttccagtggactgcattgtagttttccaggctggcactgaaaccctcaaaacatcaccgaggctggtgccgtatcttcc

SEQ ID NO: 601750 - DNA, 469 bp, Homo sapiens
taaaaccttattgattgcagttcctttattcctaggaagttaacatgtctttaaaatgcgcttagtattttcattaggattgccgtcatcttttgtagggtctggttacaaaatagcataggttttcagtggtctgatccaatacattttcaccttgcatgtgtgattttgcagaatatgaggttttgaagaattacactgtgtgatgtagaaaactattgctatttaacactcttgtgcatagtgtrgtgcaacgtggtgtttagaagcagtgacactggcatcagggaggcctgactttgagttctatactcttccttgactccgcccttccccattggctcatgaaatgctcctaccaggtgccgggttccagctgcagaggtttcccacccacagcccctttattctactcccaccttgcctggatttccctagtcctttgtggcctcagaagggaaaccatatt

SEQ ID NO: 601751 - DNA, 469 bp, Homo sapiens
taaaaccttattgattgcagttcctttattcctaggaagttaacatgtctttaaaatgcgcttagtattttcattaggattgccgtcatcttttgtagggtctggttacaaaatagcataggttttcagtggtctgatccaatacattttcaccttgcatgtgtgattttgcagaatatgaggttttgaagaattacactgtgtgatgtagaaaactattgctatttaacactcttgtgcatagtgtagtgcaaygtggtgtttagaagcagtgacactggcatcagggaggcctgactttgagttctatactcttccttgactccgcccttccccattggctcatgaaatgctcctaccaggtgccgggttccagctgcagaggtttcccacccacagcccctttattctactcccaccttgcctggatttccctagtcctttgtggcctcagaagggaaaccatatt

SEQ ID NO: 601752 - DNA, 568 bp, Homo sapiens
gactccatctcaaaagaaaaaaaaaagttaataatgcaaatgatttttttcatagaaaaacaactgaattgtgtcctgtgtaatgcaattggagtgctggccagtttaaaaattctttgtaaattaatttcagctttcctgatagcttgtaaatgtgtgtcctttccattctyctttgagccagttgtaataacgtatttatttcattaaagatgagataaatgccatctttgatatgtatttattttatatttttacaagattcatgatattacttttcttaaaaaaattatttaacattcccttgacatagatttctagaagtaaaactatttggacaaattttatacattttgctatgatttttgatatgtattactaaattttcttcccaaaagatggcattgatttatattctcatcaatagtatatgagattatctatttttacacattattaatatagatgtattataatcattatcataattttaatactttaataaagtagagatgaaattgtatttttgtattaagttacatatttttcctttcagtaaaggtgtctt

SEQ ID NO: 601753 - DNA, 515 bp, Homo sapiens
ttggggttagaataatatgtcatctgagctgattctctaaaggattccattacaaaaagtcccctaaatgataattgcggactttgtcctgttatcaaccacccccaccaccccccaagcagctgggcttaaaattgcctgctgactgattccctggggttttctgtgtaactcttccatctccagtaacattgcacatgtgtacacatgtgtgcatacacacgcatgcaccctaaacccacaaatatttattgaatgcttgtgtaagacagtgaaggccttgtggaaagtgtacartgtgatacctgccctcaagcaatgatgatcctgttggagagtgtgtaaatctatgaaaaaacaatttgcaaagcaagagttaaatattaccagccccaagggaagagaggacagcttaatctttaataaagctgtcacctctgacccactgcgttctcacaacagctccgagaaatgctcatggcaaaggctgcagagtgatgagggaaggaccggag

SEQ ID NO: 601754 - DNA, 597 bp, Homo sapiens
gtaagcttgttacagaccgtggtctgttctgggagcttccgcaaaccagctctggcgaatctgaaaaggccgcccactccttcgcaccgggagcctgtgaggtggtgcgggcccagatgtgaccaggacacactggacgttgctcagcggtggcctccacaccaggtcatgaggcagacagagttcctgggagtttgacrtcctggacccaacccggcccaacccacactggctgcattttgaagccaccaggcagcccctgggccaggacggcctgggaagggagggcttgatgaacaggtccccaccctcctccctcctgtgtccccgttctgcggccgcctcctttgccagggccccaggtggcgccggactccccttcctgccctagaggcctcctctacggccctgtccccatggggagctccatcctgttcaccacaggaagcatttcccaaagggagctgctccagccaccaggtctgagggatggtgggtggggcgggtggggagggggcattttcagaaagagttctgaggaaaaaaatgacttctgtgggaaattccaggttgaagcgtcatgggttgaatcgtgcc

SEQ ID NO: 601755 - DNA, 497 bp, Homo sapiens
aaatgtagaaaacaaggaaggttttctttraagatgggagtgatctaggagaggaagacatatgcagtgggagaggccaaagataaaatacagggagtatctgaataaaatgcccagagtcagaagaggagcgggaacccagtcagtgatggagtagcctttgataggatgatctccttttccatttcaagaggtgggaaaggatgcctgtgaatggatgccaggctaaccaaagcggggctgctccctcagtaacaggttatccagcatgatagccactagctacatgtggctaccccaaactaagatatgctggtaaaaacacactgaattctgaagacttaatggagggaaaaatgtaatctcattatttttctttttttttgagatggcgtctcactcagctgcccacgctggagtgcagtggtgcaatcttggctcactgcaaccactgtctcctgggttcaagcgattctcccgtctcaggattacaggca

SEQ ID NO: 601756 - DNA, 497 bp, Homo sapiens
aaatgtagaaaacaaggaaggttttctttaaagatgggagtgatctaggagaggaagacatatgcagtgggagaggccaaagataaaatacagggagtatctgaataaaatgcccagagtcagaagaggagcgggaacccagtcagtgatggagtagcctttgataggatgatctccttttccatttcaagaggtgggaaaggatgcctgtgaatggatgccaggctaaccaaagcggggctgctcyctcagtaacaggttatccagcatgatagccactagctacatgtggctaccccaaactaagatatgctggtaaaaacacactgaattctgaagacttaatggagggaaaaatgtaatctcattatttttctttttttttgagatggcgtctcactcagctgcccacgctggagtgcagtggtgcaatcttggctcactgcaaccactgtctcctgggttcaagcgattctcccgtctcaggattacaggca

SEQ ID NO: 601757 - DNA, 497 bp, Homo sapiens
aaatgtagaaaacaaggaaggttttctttaaagatgggagtgatctaggagaggaagacatatgcagtgggagaggccaaagataaaatacagggagtatctgaataaaatgcccagagtcagaagaggagcgggaacccagtcagtgatggagtagcctttgataggatgatctccttttccatttcaagaggtgggaaaggatgcctgtgaatggatgccaggctaaccaaagcggggctgctccctcagtaacaggttatccagcatgatagccactagctacatgtggctaccccaaactaagatatgctggtaaaaacacactgaattctgaagacttaatggagggaaaaatgtaatctcattatttttctttttttttgagayggcgtctcactcagctgcccacgctggagtgcagtggtgcaatcttggctcactgcaaccactgtctcctgggttcaagcgattctcccgtctcaggattacaggca

SEQ ID NO: 601758 - DNA, 497 bp, Homo sapiens
aaatgtagaaaacaaggaaggttttctttaaagatgggagtgatctaggagaggaagacatatgcagtgggagaggccaaagataaaatacagggagtatctgaataaaatgcccagagtcagaagaggagcgggaacccagtcagtgatggagtagcctttgataggatgatctccttttccatttcaagaggtgggaaaggatgcctgtgaatggatgccaggctaaccaaagcggggctgctccctcagtaacaggttatccagcatgatagccactagctacatgtggctaccccaaactaagatatgctggtaaaaacacactgaattctgaagacttaatggagggaaaaatgtaatctcattatttttctttttttttgagatggcgtctcactcagctgcccasgctggagtgcagtggtgcaatcttggctcactgcaaccactgtctcctgggttcaagcgattctcccgtctcaggattacaggca

SEQ ID NO: 601759 - DNA, 629 bp, Homo sapiens
agggaaaattcttatattttcctcctcccctcaaactagtatgtttcaagagaaattcttacaagagagatctgggagtatggctaacattctgagatacctgtcacactatgctccagaaactggggtctttatttctggcgagacaaaacagtaacacttgcgtgactctgtatcaggcatttttctaaacattttgcatatattaastcatttaagaaccctatgtggtatgtgtcatggtgcccattatttcacagaccaggaaactttaacacagaaaggataacttacctaagatcatataattagatagacccaaatttctaaccgaagggctggagaatgcaggggtataatccacagagcatcattaggtagactgtggcagaattaggtactttcacttctctttgccaatcaaggacagcaataacgtcagtcctctcctcttcatgctgttacaagcaggctgcagtcaccagaacagaccagggtttttcaccttaggaatgtccttccctttccgtataaagacgctctttactgacagtattaagatagacttgggttattcttttttctagtaacggtgagggacctttgtttgtctttaaattttgcctagt

SEQ ID NO: 601760 - DNA, 629 bp, Homo sapiens
agggaaaattcttatattttcctcctcccctcaaactagtatgtttcaagagaaattcttacaagagagatctgggagtatggctaacattctgagatacctgtcacactatgctccagaaactggggtctttatttctggcgagacaaaacagtaacacttgcgtgactctgtatcaggcatttttctaaacattttgcatatattaactcatttaagaaccctatgtggtatgtgtcatggtgcccattatttcacagaccaggaaactttaacacagaaaggataacttacctaagatcatataattagatagacccaaatttctaaccgaagggctggagaatgcaggggtataatccacagagcatcattaggtagactgtggcagaattaggtactttcacttctctttgccaatcaaggacagcaataacgtcagtcctctcctcttcatgctgttacaagcaggctgcagtcaccagaacagaccagggtttttcaccttaggaatgtccttccctttccgtataaagacgctctttactgacagtattaagatagacttgggttattcttttttctagtaayggtgagggacctttgtttgtctttaaattttgcctagt

SEQ ID NO: 601761 - DNA, 602 bp, Homo sapiens
ctatcaccccatcagtcaggaaattgcaagggttttaggagctcgctgccaggacataaaccaagtatgtatgtatataatatcacaatatcacagtcttaaaaagaaagaaatcctgatgcatgcgcccacatgaatgaaccttgaaaacatgctcagtgaagagagccagtcacaaaagaataagtactgcatgattccacttgtatgaggtacctaaggcagtcagattcaaaaggacagatgatacaacggtgattgccagggsgtggagggaaggaggagtggtgagttattgtttaatggacatagagtttcagtttgggataatgaaagagttctggagaggaagggtggtgatagttgcacgatgtgaatatccttactgctataagggagggaaaaatgctttcctctactgtcttacattctatagtgagggtctgtgaattaagctgaaaaaagacagattaacagggggaaaggcatatagattttacttgatgtaattttcattttcatgtgcacatggaggccttcacagaaaagaaatgaggatccaaagagacaggtagacctgagggcttatatgccgctgtaac

SEQ ID NO: 601762 - DNA, 602 bp, Homo sapiens
ctatcaccccatcagtcaggaaattgcaagggttttaggagctcgctgccaggacataaaccaagtatgtatgtatataatatcacaatatcacagtcttaaaaagaaagaaatcctgatgcatgcgcccacatgaatgaaccttgaaaacatgctcagtgaagagagccagtcacaaaagaataagtactgcatgattccacttgtatgaggtacctaaggcagtcagattcaaaaggacagatgatacaacggtgattgccagggcstggagggaaggaggagtggtgagttattgtttaatggacatagagtttcagtttgggataatgaaagagttctggagaggaagggtggtgatagttgcacgatgtgaatatccttactgctataagggagggaaaaatgctttcctctactgtcttacattctatagtgagggtctgtgaattaagctgaaaaaagacagattaacagggggaaaggcatatagattttacttgatgtaattttcattttcatgtgcacatggaggccttcacagaaaagaaatgaggatccaaagagacaggtagacctgagggcttatatgccgctgtaac

SEQ ID NO: 601763 - DNA, 468 bp, Homo sapiens
gaattcctctcctggagtgggatgcatttcagtgtggttttgcttcagtctttttttgttgctataacattagcttttttatttttaaggaattttgttatggcgagcattgcaccattggtcccatctcctgaaactttcactttgctttgactcactgataactactggcccrtctcaaggcaagatgaatccagtcccttgtcaagtgagagggatttactgacattatgcacaacaattctataaagatgcacttccttatgatcagggagaagctttcatcctttggagccttccttccagacccaacccttcttctgttctgggcctggccatttagagttgaaaagggatcaaatggggaaaagtcacttccacagggataacccctttatctggaggccgttaccacaatccaccacatctaattgcacttttcagcctggccttggtttctcattagag

SEQ ID NO: 601764 - DNA, 468 bp, Homo sapiens
gaattcctctcctggagtgggatgcatttcagtgtggttttgcttcagtctttttttgttgctataacattagcttttttatttttaaggaattttgttatggcgagcattgcaccattggtcccatctcctgaaactttcactttgctttgactcactgataactactggcccatctcaaggcaagatgaatccagtcccttgtcaagtgagagggatttactgacattatgcacaacaattctataaagatgcacttccttatgatcagggagaagctttcatcctttggagccttccttccagacccaacccttcttctgytctgggcctggccatttagagttgaaaagggatcaaatggggaaaagtcacttccacagggataacccctttatctggaggccgttaccacaatccaccacatctaattgcacttttcagcctggccttggtttctcattagag

SEQ ID NO: 601765 - DNA, 523 bp, Homo sapiens
ctgctccttgttcctccctgtggcaaaatctggcgccaggaagagtttgagtgtgtaggcgtgtgtgtgcaggtgtaagtgtgcaggcacgtgtgtcgaggtgtgtatgtacagccgtgtgtgcacgcatgtgtgtgcaggtgtatgtgtgtaggtgtgcgtgtgcaggcatgtgtgtgtaggtgtgcatctgcaggtgtgtatgtacagacgtgtgtacaggcatgtgtgtgcaggtgtgcatgtgcaaggtgtgtgtttgcaggcatgcatgtgcaggtgtgcgtgtgcaggcatgtgtgtgcaggtgtgtatgttcataatggccctaacgcccaagctggaaagttgtggatttacgggaatgaaggcaagaaacacctggcccgcccacggaactcaaccgcattataggcattcttaagccacaaayaatagcatgagcgctctgtgccttaaggacatgctcctgctgcagttaactagcccaacctattcctttaattcggcccatcccttcgtt

SEQ ID NO: 601766 - DNA, 523 bp, Homo sapiens
ctgctccttgttcctccctgtggcaaaatctggcgccaggaagagtttgagtgtgtaggcgtgtgtgtgcaggtgtaagtgtgcaggcacgtgtgtcgaggtgtgtatgtacagccgtgtgtgcacgcatgtgtgtgcaggtgtatgtgtgtaggtgtgcgtgtgcaggcatgtgtgtgtaggtgtgcatctgcaggtgtgtatgtacagacgtgtgtacaggcatgtgtgtgcaggtgtgcatgtgcaaggtgtgtgtttgcaggcatgcatgtgcaggtgtgcgtgtgcaggcatgtgtgtgcaggtgtgtatgttcataatggccctaacgcccaagctggaaagttgtggatttacgggaatgaaggcaagaaacacctggcccgcccacggaactcaaccgcattataggcattcttaagccacaaacaatarcatgagcgctctgtgccttaaggacatgctcctgctgcagttaactagcccaacctattcctttaattcggcccatcccttcgtt

SEQ ID NO: 601767 - DNA, 586 bp, Homo sapiens
atcgcttgaacctgggaggtggaggttgcagtgaaccaagatcaagccactgcactccagcctgggtgacaagagcaaaactccatgtcaaagaaaagaaaaaagaaagaaagcaaatattccagttaaatcaggtcattgattttgactagatgtctaagtgtcatgtacacctaggaggtaatactagaaacaattgggtatacccaaccctcacaccacaatgcaaaagtaacattaattaacacagtcatgaaatgcagttctaccaaaacaataaagttgttyagtggagaaaatattttattttgctttcatttttaattttaaattaagtaaaatttgaaagttcttttgcactagcccacctatcaagtagtcagcagccatgtgactggtaccttctacattgcaccacacagttctagaatttcatataaatgaaatcatttactatatactctttttggcatctttcattcagcataattgttctaagattcatgcatgttatgtgtatcaatagttcattcctttttattgctaagtattaccccattgattggatataccacaattttttaat

SEQ ID NO: 601768 - DNA, 586 bp, Homo sapiens
atcgcttgaacctgggaggtggaggttgcagtgaaccaagatcaagccactgcactccagcctgggtgacaagagcaaaactccatgtcaaagaaaagaaaaaagaaagaaagcaaatattccagttaaatcaggtcattgattttgactagatgtctaagtgtcatgtacacctaggaggtaatactagaaacaattgggtatacccaaccctcacaccacaatgcaaaagtaacattaattaacacagtcatgaaatgcagttctaccaaaacaataaagttgtttagtggagaaaatattttattttgctttcatttttaattttaaattaagtaaaatttgaaagttcttttgcactagcccacctatcaagtagtcagcagccaygtgactggtaccttctacattgcaccacacagttctagaatttcatataaatgaaatcatttactatatactctttttggcatctttcattcagcataattgttctaagattcatgcatgttatgtgtatcaatagttcattcctttttattgctaagtattaccccattgattggatataccacaattttttaat

SEQ ID NO: 601769 - DNA, 638 bp, Homo sapiens
tgtgaacatgagatatttttctatttatttgtgttttcaactttttctcatctttcacctctttagttacatttattcctcagtatcatctttgtatgccattttaaatgaaattgttycctgaatttctttttcagatagttcatcattaatgcatagaaacacaactgatttttgtatgattttaatgctgcaactttgctgaatctattagctctaagaggttttggtggagtctataggattttttacatataagatcatgtcccctgcaaagaagacaatctaacgttttcctttctggttagaatggctttaatttctttttctagtctaattgctcttactacgactttcaggactgtgaggaataaaagcagtgacagtgggcacctttgtcttattcctagtcttagaggatatgttttagttgtttactatttaatatgttagctgtggtcttgacacatatagtctttattatgctgaggcacattcctttgatacctaatgtgttgagagttttttatcatgtcagacaagactataaaacagcttttataatgaggtaaaggaaaatacacttggaatgaaaggacaaaaattgaaaatctcagcagaaaaatagaaaatgctag

SEQ ID NO: 601770 - DNA, 638 bp, Homo sapiens
tgtgaacatgagatatttttctatttatttgtgttttcaactttttctcatctttcacctctttagttacatttattcctcagtatcatctttgtatgccattttaaatgaaattgttccctgaatttctttttcagatagttcatcattaatgcatagaaacacaactgatttttgtatgattttaatgctgcaactttgctgaatctattagctctaagaggttttggtggagtctataggattttttacatataagatcatgtcccctgcaaagaagacaatctaacgttttcctttctgrttagaatggctttaatttctttttctagtctaattgctcttactacgactttcaggactgtgaggaataaaagcagtgacagtgggcacctttgtcttattcctagtcttagaggatatgttttagttgtttactatttaatatgttagctgtggtcttgacacatatagtctttattatgctgaggcacattcctttgatacctaatgtgttgagagttttttatcatgtcagacaagactataaaacagcttttataatgaggtaaaggaaaatacacttggaatgaaaggacaaaaattgaaaatctcagcagaaaaatagaaaatgctag

SEQ ID NO: 601771 - DNA, 638 bp, Homo sapiens
tgtgaacatgagatatttttctatttatttgtgttttcaactttttctcatctttcacctctttagttacatttattcctcagtatcatctttgtatgccattttaaatgaaattgttccctgaatttctttttcagatagttcatcattaatgcatagaaacacaactgatttttgtatgattttaatgctgcaactttgctgaatctattagctctaagaggttttggtggagtctataggattttttacatataagatcatgtcccctgcaaagaagacaatctaacgttttcctttctggttagaatggctttaatttctttttstagtctaattgctcttactacgactttcaggactgtgaggaataaaagcagtgacagtgggcacctttgtcttattcctagtcttagaggatatgttttagttgtttactatttaatatgttagctgtggtcttgacacatatagtctttattatgctgaggcacattcctttgatacctaatgtgttgagagttttttatcatgtcagacaagactataaaacagcttttataatgaggtaaaggaaaatacacttggaatgaaaggacaaaaattgaaaatctcagcagaaaaatagaaaatgctag

SEQ ID NO: 601772 - DNA, 600 bp, Homo sapiens
atagaaacatacaatatcctggaaaagatagcaaatttaagttcaatactgyagtgaagaaaactattaagctttatttaaaccataacccattaacactcagacttacttgaccacagaattgttgcttcctacataatgtattagaaagcagaagaattagtgttctatagaacacacctgaattttgtaaacgctgcgctaaataaagtttaacaaatgcatttactgtacaatatttgagagttttttatttgctactgtgaatgatgaatactcaaggtggaggatagtatatggaatatttctcaaatttatttatgtcagaactactttactgcatgacacgaactgagaattattgtttaggacctataaacttccttattttttacaatatatttctccctttcttactcagagaaggtcatataatctctatgtcataaaatgctaagaaatgcgatttcattactactcttattactattagtatgtttacctttaattgatgcattatataataaagaatcctgaatgtcataaatctaaagctcaatgaatttcaacaaactgagcccaattgtgtaaccaacatct

SEQ ID NO: 601773 - DNA, 600 bp, Homo sapiens
atagaaacatacaatatcctggaaaagatagcaaatttaagttcaatactgtagtgaagaaaactattaagctttatttaaaccataacccattaacactcagacttacttgaccacagaattgttgcttcctacataatgtattagaaagcagaagaattagtgttctatagaacacacctgaattttgtaaacgctgcgytaaataaagtttaacaaatgcatttactgtacaatatttgagagttttttatttgctactgtgaatgatgaatactcaaggtggaggatagtatatggaatatttctcaaatttatttatgtcagaactactttactgcatgacacgaactgagaattattgtttaggacctataaacttccttattttttacaatatatttctccctttcttactcagagaaggtcatataatctctatgtcataaaatgctaagaaatgcgatttcattactactcttattactattagtatgtttacctttaattgatgcattatataataaagaatcctgaatgtcataaatctaaagctcaatgaatttcaacaaactgagcccaattgtgtaaccaacatct

SEQ ID NO: 601774 - DNA, 601 bp, Homo sapiens
tctccctttcttactcagagaaggtcatataatctctatgtcataaaatgctaagaaatgcgatttcattactactcttattactattagtatgtttacctttaattgatgcattatataataaagaatcctgaatgtcataaatctaaagctcaatgaatttcaacaaactgagcccaattgtgtaaccaacatctagctcaagaaacagaatattttasctacctgtaaagaaaaggggaacaaaaatttccccagaccttccaggaccaccttattttctttaaaagaaaaggaagcagtaaggtcagaagaacagtctataaaaatactgtccaagtacactagatgaacttactataggatgcagacgttgtagtataggttttgaacaccagttatactgacacacaaactgaagatctatccccctcctcacagctttagagcttagcaattgaccaataaaaatgtagagggaattatttaaggcaagtctgtttaacttgtctttcagcaaacattgcattgactaaatcctctgttctttgatcttttgaacattggtggtagagttaaacatttaataaaaaagcgaatg

SEQ ID NO: 601775 - DNA, 587 bp, Homo sapiens
actgattgacagttacagacaatattcatggacagtggtggaagccacaggctgggacagttttctttctggaataaaatctacatcactggaagatgctgctacttagtttcttttattttttttttaagttaatttagcttaatttttaaaaattgacaggccaggcactgtggctcacacctgtaatcccagcactttgggaggcccaggcgcgagatcacctgaggttaggagttcgagaccagcctgaccaacrtggagaaacaccccctctccactaaaaatacaaaattagacgggcatggtggtgcatgcctgtaatcccaggtactcgggaggctgaggcaggagaattgcttgaacctgggaggcggaggttgcagtaagctgagatcgcaccattgcattccagcctgggcaacaagagcaaaactccgtctcaaaaaaaaaaaaaaaaagttgacagatgaaattgtatatatttattgtgtacaacatgatgttttgttttatatatatatctgtgtgtgtatatacacacacacatacatatatacatatattttggaatggctaaatcaagc

SEQ ID NO: 601776 - DNA, 587 bp, Homo sapiens
actgattgacagttacagacaatattcatggacagtggtggaagccacaggctgggacagttttctttctggaataaaatctacatcactggaagatgctgctacttagtttcttttattttttttttaagttaatttagcttaatttttaaaaattgacaggccaggcactgtggctcacacctgtaatcccagcactttgggaggcccaggcgcgagatcacctgaggttaggagttcgagaccagcctgaccaacatggagaaacaccccctctccactaaaaatacaaaattagacgggcatggtggtgcatgcctgtaatcccaggtactcgggaggctgaggcaggagaattgcttgaacctgggaggcrgaggttgcagtaagctgagatcgcaccattgcattccagcctgggcaacaagagcaaaactccgtctcaaaaaaaaaaaaaaaaagttgacagatgaaattgtatatatttattgtgtacaacatgatgttttgttttatatatatatctgtgtgtgtatatacacacacacatacatatatacatatattttggaatggctaaatcaagc

SEQ ID NO: 601777 - DNA, 629 bp, Homo sapiens
tgtctttctgtgcctattttacttaatgtaatatctgttgcaaataacaggattttcttcttttttatggctaaggaaaaaccagatttatataccagattttctttatccattcatgttgatatacacttaggttaattcattttcttgtctattgggaataatgctttaataaacatgggagtgcagatatccctttaacatactgatttaatttcgtttggatatatacccagcagtgggattgctggatcatatggtggttctatttttgattatttttaggatctccatactrttttccatagtggctatcctaatttgtatttgcaccaacagtgtgtaagtgttcccttttctgcacaccctggccgacgcttatcttttgactttctgattatagccttactgctcctcagtttcttgtgttatttgtaattgtcttttatggctgtctgcttggccatttaatatttatttgggaaaagatactatcttaactcacagcttctaatagatataaatatgatgcttatggccaggcacggtggctcatgcctgtaatcccagcactttgggaggccgaggtgggtggatcacccaaggtcgggtgttcaagaccagcctga

SEQ ID NO: 601778 - DNA, 587 bp, Homo sapiens
agtgcatatttaattctcctaccatttatgcattatttaattaaaatarcatttttgcatatcatcaagtttattttaatatagacatttatctcacatgcaacctaaagaatcttaaaaattccaatttatttgctgtataaatatggtgatattttattcattcagcactgttgggcatagataaatccatataaggaaattttcaaacaactgaatcttaccgtctgttaagcatagactttcagtactttgtgtcattataagtctttgcttcttagagtgtcctctcctttttttttttttttggtggagcagggtgttttcttcagacttcttgactggattatgaatatttgaagttccatatactaacttcaagtaagcgagattttgctaaaatttatctgaattatcaaaaagcatcaaacgtatagacagcctttttgacctgatagatttatcttacccttaaacatattattttaatatctcttctccttacctacacgactcaaattattaaattaagaaatccaattttaaaataaatatgcatcacccaccaaaagtaattctaataaatt

SEQ ID NO: 601779 - DNA, 585 bp, Homo sapiens
tggaggttaggaatgttgaacttaagaaccagaatgtcatcagtgaactgagatcctcagggcaaatatattttagtaaggatgagttttagtaaggatgacactgtgggcaccatgaaagggcaaagtttcattgaatttgactgagctatgttacactaacatcttcatttgcctacattttgttactgagtataatagtcctctatttagtctttcttgcatgacctacctggagtactctctccacctccttatatgtaataattaaaatctgcgatattatctgtcccataacttggaacttgtacaattctagctcatgattagcacataaagctggtcaagggtgaagtgctcaacactatttctttccttcttctcttgagtctcagactttgggaattccctcagagttttacagccttcattctcatataaatttgaagtagtgccaggaatagcttacatatgttttctctcattcygtgatgatgaactcagcttttctttaaaaatattaacttcataaacgtaggtactataaatccattctcaacttcagtttttaaaacaatctttaga

SEQ ID NO: 601780 - DNA, 634 bp, Homo sapiens
tgcacatttctttcgggaaatattcacagacttgtgtaacattcatcaatataatattgccttaaaaattaccaattctgcattacctaattagatattgatgatgaagtgattagagatgtttggtgatgttacaattgcctttccttctgagtcayattggtggtgactagtgggtttaaaccaggttagtgtcttctgaactgagatatgagaataaagcagagctggctcatgttaatggtgcacaaaatcaaatactatcccataggcaatattcagaagtaaagagtcaaaaagtaaagagcttgtacaaataaattgtcaagaaaactactttcaaccaaagcaataacaagtatggcagctaagcattcacttatcatctccaaacagtaacttcactggccccattttcatttttaacaactcaatgcaagaaagaaatacaaaaaattcctattcacaaagcaattcaataattagaaatatagtatagtacaattgcctgatctatgaatatgctctatgaatcaaggggattgtgactatctaaataaagaagtgttattgataagaagaagtatattatctcatgcgtcttaatccctagtaggggagtttaaattggttt

SEQ ID NO: 601781 - DNA, 440 bp, Homo sapiens
tttatgtaataattaaaattaattagagaggtattgtcactaagtacacaatattttttaaaccaaagtaggtggttaaaaccagaaatgtgttcttttagaagtgaatagtaactgagattgtataaagattttaataatgaactattgcttgtgtgtctatgtataaacattatttaatacacattcttgttgckatattttaaacacacatctctgtgactactatacttttggggggatccaaagttaataattttaagacaaaatattatacttttatttagttaaatttataatgatcatctcccttgaaatttcctgatttcatgtcatggttttggattctgcttagtgaactgaatggccaaacattggaaagtcattttaaaatatctatttctgtgctgaagcacagaaagtatttcagagtaacacct

SEQ ID NO: 601782 - DNA, 613 bp, Homo sapiens
agcatctgctctggatgattttctctttcttcccttaacatgatataattccaatagttgtgggcttttaaatatgtatgtgctgataagtttccaaattatgtcaatagccttgaactctcctttgagacacagtactcacatattcaaccaatacttgacatctctctttatgtatgcaatagaaaactcaagtatagaatattcaaaataggacatttttctacatctttaatatttttttctcttagtgtttgccattataaaaacactactgttgcacttgtgtaaacagtatcacaattcaatgaaaaacgtaggctgaacgcttgggagtttttctttattcctcacatcaaatccatcatcaaattctagagaaacaacctccaaactacaagcaaatctttttggttttctccatatccatgccaccaactgggtctaaactactcttatttctcctctaaggtaatacaatawttttgtaactggtgtactttctttcactttattcttcccatgcctagcctcaactcatttgacacagagaagccagattgttcttcataaataaatatgttcgtatcagtcctcagcttaaagtatccca

SEQ ID NO: 601783 - DNA, 611 bp, Homo sapiens
agatgaaccgtatgtttgagttaattagttctctttgttcctgaaatgttttttctaactcctttgtcatagttttgtcacattttactccttctcccattccttcactgcccttcacacagctgagaaaacatattttaatgaaatccagcttaaatatattaaaaatgttcccactgcaaaataaataaataaacaaataaatgaataaataaacttagctatttacaaaattgttatcatgtaatttattggttaaatgtaaaatcgwgaatattaataatgatgcaattggattgctagcaatatattttacaaattagtttgtacatatatgaattaaaaagttttaaaaggtgaaaaatgaaagtatttattaaaccaaaccattttcttctgatgaaatgttaagtaattaaattatgatcttttaattaaattcactgcatattttaaaatcacagagacggatttataaatctggggttcagagtcctgttatgtgaggaaatctaaggaggatcccaaagttccagaattgtcctgtttcctccactcttttgttctgagactttgggaaagttattcaatatctaaattgcaattttttc

SEQ ID NO: 601784 - DNA, 611 bp, Homo sapiens
agatgaaccgtatgtttgagttaattagttctctttgttcctgaaatgttttttctaactcctttgtcatagttttgtcacattttactccttctcccattccttcactgcccttcacacagctgagaaaacatattttaatgaaatccagcttaaatatattaaaaatgttcccactgcaaaataaataaataaacaaataaatgaataaataaacttagctatttacaaaattgttatcatgtaatttattggttaaatgtaaaatcgagaatattaataatgatgcaattggattgctagcaatatattttacaaattagtttgtacatawatgaattaaaaagttttaaaaggtgaaaaatgaaagtatttattaaaccaaaccattttcttctgatgaaatgttaagtaattaaattatgatcttttaattaaattcactgcatattttaaaatcacagagacggatttataaatctggggttcagagtcctgttatgtgaggaaatctaaggaggatcccaaagttccagaattgtcctgtttcctccactcttttgttctgagactttgggaaagttattcaatatctaaattgcaattttttc

SEQ ID NO: 601785 - DNA, 490 bp, Homo sapiens
atttctaagtagtggcatctttgctatgattgtaactcataaacagcatccgagttatgcaacatggcttaggtagagaaagtggcaaatattttttggcwctaaccaaatttcctatttctgttttcatagtctacatacagaaagaaaacaaagccctgagcaagaaacctgctatgtgggtgtcagtaccttgaaagccaggatgggtacaagttgttcagaggctttaagcatatcagttaatgtcttccccaaagccatggtcaaccacaatctgcagaagtatgctaaataggcattgtgcaagtattgctcattcacaggcaaaaaaatttcctttctgttcttgcgcagtcttacatgaataaggaattggaaacagcttcctgtgctacacgaaacagaactcctgggttaaaattagtcccagcaatgtccgtaattagtggtataagagggcatgtgttgctaatcctctctggccctc

SEQ ID NO: 601786 - DNA, 555 bp, Homo sapiens
tctgtggcttgccaactctcttgagatgagaagttgatttgtgagccacgcttccacttctcaattccgtggacattgaataaaacctacattgcttgtggctcacatttgattgagtattgacttcaagacaccaaacagagaaagatccgaccttttgggtgaccagctttgtcagtaacagaatcattgtttattgaagcatggataaaggcaataaaattacccagctttaagagtccttaccatttaaaaatacatactaaaatagttacagttttaaaatgaagagtaggttttttctaagcatatttcctctataagtgaatttgtagtagttatgcttgttttgttttagtttttcatttaatacttccagttattttcttcaaaatagtccaagataaagaaaacaagaaagttaaaaatagtaatgtataatatcattgtacaaatcaaagatatacattattatggaaaccatctatttaaaattgtaataatttttgacaatgtacattgtatatgttagtamgtagggtagaagattaaatg

SEQ ID NO: 601787 - DNA, 607 bp, Homo sapiens
  misc_feature 43: n = A,T,C or G
atctagttacaagcctaaaatgtggcttccataaattcttttnacagggtttttcaaatactaagttcaaagagcagaagttattacatccgtgcactagtaacaacacttttaaagttctgtgaatcttaaaataatcaggtgaaaatattacatcacagtaaagcaaccgtattatatggaaggttgtgaggagtgaatgtccaagaaaccttaaaagtgtagcaagtcagttacatatttgaaattagacaaaacaagaatttaaggacatcaaaagaaacgccaaaatctgtgatgtgtgagtacatcaaaggtaagggataagtgagtgcccttattgataaatgttcttaggtctaaaaggaaataaaatctttgcttaaaaaattaatattccactttcaaattgttagcattcagcaaatattaactagcgttgatacaaacatatgtttagtatgtaattatcccaaatatatgataaraatgtagtcttctagaaattttggaaaaagttttggctgaaatgcataaacaaatggaaaaatgcaaaactgagctaattaaaaaattaaaatgatagcaaaattgcattttaaaaagg

SEQ ID NO: 601788 - DNA, 573 bp, Homo sapiens
tggagacagctacacctccacaggtcatgcactctgcacatctgcayagtcagcactacaatgttgatttatatcaaagtctatagcctatactttccagagtagtagctgtagtggtggctggaagcatacttagggccacgtagctagaaatgaagaggccaaggagtcctgtgctaaaatgcagggagaagaaacttgagacatcacagagcactgaatcatgaggtctagtggatgcctctctagaaaccttgtcctcaaagtcctagattggaggggtagccttgaagatttctgaaatgcctttggggtcattcttccattgtcctgaagaatttcacctggcttccttctatccatgctaatcttatcaaacagttgcttggccacatccttgcacacttttccattctttacatggccaggctgtgaattcttcaaatctttacattctgcttcgcttttaattataaattccatctttaaatcattttctgctctcttactttactgtatgcagttaaaagaaacccctcagcttcaaaagttagcctggtgtggtggtgcaca

SEQ ID NO: 601789 - DNA, 234 bp, Homo sapiens
agctctcaacagccaaatataaaacaattaggatattaatgagaattatgattgcaatgaaatgaaacataaaatacaaaaaaatccataagttcataatcagyttttaaaaatacgcatagatcacctttagataactttttctggaataatcccaggttacaattgttgtcttaggataattattaatataacttcattttactcgtaagtgtcacagtttggagattaagt

SEQ ID NO: 601790 - DNA, 555 bp, Homo sapiens
tttctttactgtccggctggtttcctggggaaaaaataataatatttcaaaggggaaatactttgttaarcatattcctttacagcaacctagcatattattcaacacttaaactcacacattgcattttattctaatatcttgaggctagtatttgtgaaaaggtattaataaaaacaggctttcccttacatccttctcaataataatctgtcagttggagcactttccccataagctcagtatactataacaaaaaaagtgtttggaggcacattaaaattaaacacgctaattcagttttcctaatatattctgcttttgtttcctagcaaattaatgacgatcatggtgtatattagaaatagtaagtaaatattttaaaaatatttttagaataaaattactaaccatatcaccaaagaaagagatagttaaaaagaaacattgtacaaattgtgcattgacacaaaatagaccgtattagcatcccagagacaagaaacaactatgaggaattaaattgaaaatccatgtgaagggaatgtatgcatc

SEQ ID NO: 601791 - DNA, 555 bp, Homo sapiens
tttctttactgtccggctggtttcctggggaaaaaataataatatttcaaaggggaaatactttgttaaacatattcctttacagcaacctagcatattattcaacacttaaactcacacattgcattttattctaataycttgaggctagtatttgtgaaaaggtattaataaaaacaggctttcccttacatccttctcaataataatctgtcagttggagcactttccccataagctcagtatactataacaaaaaaagtgtttggaggcacattaaaattaaacacgctaattcagttttcctaatatattctgcttttgtttcctagcaaattaatgacgatcatggtgtatattagaaatagtaagtaaatattttaaaaatatttttagaataaaattactaaccatatcaccaaagaaagagatagttaaaaagaaacattgtacaaattgtgcattgacacaaaatagaccgtattagcatcccagagacaagaaacaactatgaggaattaaattgaaaatccatgtgaagggaatgtatgcatc

SEQ ID NO: 601792 - DNA, 555 bp, Homo sapiens
tttctttactgtccggctggtttcctggggaaaaaataataatatttcaaaggggaaatactttgttaaacatattcctttacagcaacctagcatattattcaacacttaaactcacacattgcattttattctaatatcttgaggctagtatttgtgaaaaggtattaataaaaacaggctttcccttacatccttctcaataataatctgtcagttggagcactttccccataagctyagtatactataacaaaaaaagtgtttggaggcacattaaaattaaacacgctaattcagttttcctaatatattctgcttttgtttcctagcaaattaatgacgatcatggtgtatattagaaatagtaagtaaatattttaaaaatatttttagaataaaattactaaccatatcaccaaagaaagagatagttaaaaagaaacattgtacaaattgtgcattgacacaaaatagaccgtattagcatcccagagacaagaaacaactatgaggaattaaattgaaaatccatgtgaagggaatgtatgcatc

SEQ ID NO: 601793 - DNA, 555 bp, Homo sapiens
tttctttactgtccggctggtttcctggggaaaaaataataatatttcaaaggggaaatactttgttaaacatattcctttacagcaacctagcatattattcaacacttaaactcacacattgcattttattctaatatcttgaggctagtatttgtgaaaaggtattaataaaaacaggctttcccttacatccttctcaataataatctgtcagttggagcactttccccataagctcagtatrctataacaaaaaaagtgtttggaggcacattaaaattaaacacgctaattcagttttcctaatatattctgcttttgtttcctagcaaattaatgacgatcatggtgtatattagaaatagtaagtaaatattttaaaaatatttttagaataaaattactaaccatatcaccaaagaaagagatagttaaaaagaaacattgtacaaattgtgcattgacacaaaatagaccgtattagcatcccagagacaagaaacaactatgaggaattaaattgaaaatccatgtgaagggaatgtatgcatc

SEQ ID NO: 601794 - DNA, 564 bp, Homo sapiens
taaaactggaaaaatatataaaaagagtgcagagttttcctttagtctttcttaaaaacagttatttaaataagattgaaaacaaawatacaataatatgtattgaaatacatttgaaaaattttgaacttgcatggattatttacatttatttgtcgcatttctcttgaagaataatataaacttgaaaaaagtaaaacaaatttctcactttactcatctttggatctttaaatgcttatcacatgatggagaaatcttatttaaaaaataatgttactggtattaatttccatatgttttaagtactctaatcaaaataatatcttatagattcatataatacagatgacatcataaaaaagattttctttgcacctttgccaccacttcatatctagcccaatgtaagaaacataatctagtaattatttctttttttttacattatcttcatacatattctccatttcttgatttatagactgtgttacctattaactgtccactgcggaagctgcaaattttgatcacgcagggagttctccacttctcatcattgtc

SEQ ID NO: 601795 - DNA, 593 bp, Homo sapiens
acttttgtgaaaaatattaaaactggaaaaatatataaaaagagtgcagagttttcctttagtctttcttaaaaacagttatttaaataagattgaaaacaaatatacaataatatgtattgaaatacatttgaaaaattttgaacttgcatggattatttacatttatttgtcgcatttctcttgaagaataatataaacttgaaaaaagtaaaacaaatttytcactttactcatctttggatctttaaatgcttatcacatgatggagaaatcttatttaaaaaataatgttactggtattaatttccatatgttttaagtactctaatcaaaataatatcttatagattcatataatacagatgacatcataaaaaagattttctttgcacctttgccaccacttcatatctagcccaatgtaagaaacataatctagtaattatttctttttttttacattatcttcatacatattctccatttcttgatttatagactgtgttacctattaactgtccactgcggaagctgcaaattttgatcacgcagggagttctccacttctcatcattgtcttcatcaaatat

SEQ ID NO: 601796 - DNA, 593 bp, Homo sapiens
acttttgtgaaaaatattaaaactggaaaaatatataaaaagagtgcagagttttcctttagtctttcttaaaaacagttatttaaataagattgaaaacaaatatacaataatatgtattgaaatacatttgaaaaattttgaacttgcatggattatttacatttatttgtcgcatttctcttgaagaataatataaacttgaaaaaagtaaaacaaatttctcactttactcatctttggatctttaaatgcttatcacatgatggagaaatcttatttaaaaaataatgttactggtattaatttccatatgttttaagtactctaatcaaaataatatcttatagattcatataatacagatgacatcataaaaaagattttctttgcacctttgccaccacttcatatctagcccaatgtaagaaacataatctagtaattatttctttttttttacattatcttcatacatattctccatttcttgatttayagactgtgttacctattaactgtccactgcggaagctgcaaattttgatcacgcagggagttctccacttctcatcattgtcttcatcaaatat

SEQ ID NO: 601797 - DNA, 594 bp, Homo sapiens
tattttattatttacagaataatgccataaggcacrtatttaatagttgatgttcagtatagtatatatattgtattttcataactagattatattcttttcaaaactgagctaaaattccttagattgaatgtttgtaagaaagactcattaccacatgaacaagaatctaacttttttgaaaatggctaaatagtgccattatgttcagatgaaaggaaacaagataattctgtgaagaataaccaggtcatctctatttttgtttaaaatctctttcacatattttgtcagttacatactacacatccattacaatatttggaaacttttcctcgggttgctttggaattaaaagtagaacaataattcaggtaattcaggtaaatgtttgtttcacaattatataacttagccatgtcctgttcacatattctttaagaaaagtgcctatgtatattttaatgtatgaaaataggctccaattaaatgaaagaacagcaacagcctgacaaagctcacctttgtacctggattctactgagaaggaaaatcaaatgatcaccatcaagtgacattttttgattttatatt

SEQ ID NO: 601798 - DNA, 545 bp, Homo sapiens
cacatttttaaagaaaaaaagtttttttycctttttattaatctggattgaagaaaagcacacatttcatttattgtctggattacagattcttattaaacaaaccggagctcattataaaatcaatatcaacttaaccaccatgccctcaggaggaacagcaaaaaggtcactccaagaaattcaaacaattttcctgctggaagggcatgattttaattacagatactattaattagagctgtcactgggaaggcttttttttttctgttaattatcacaaactcagtcctaagtatgcattttcaacctgcagtttttttttcaaattagtcatttctgcatgcaagtccaacctttccattctatcaatattttatatttgaatttcaaagtatatcaaagggcgccacgctttctaaaaatctctgcctgtatgatcttccgtctctcacgcatggaacagaactggtgtgataatttatttatgtactgacacagacttggcctgaagacctggcatcctacattgaaggtcttgctca

SEQ ID NO: 601799 - DNA, 400 bp, Homo sapiens
  misc_feature 1, 2, 3, 4, 5, 6, 7: n = A,T,C or G
nnnnnnnccattgactttcatgacctctgatttaaaagcaaagattgcacattatttaccactggatgccttccctgaaatgtaatgaggactaagtacaaatatgacagatgtaattatcatagttttatcctgcacagccagggccttcctttgctgtaattgtgagcttttcattcagctgctgctaggaaggtaattatcattgtaccttcagctatttcataaagaagaggcaccatcgatttcttctgcttcattcttacaacccaaatttggaaaaaaaaaagaattgtggtatgaaataaaggaaagacacaaaatgtaccataaaattacttctccctcctggccttgcttwctcacccaagctcctgcccagtaaggcctggagagggag

SEQ ID NO: 601800 - DNA, 574 bp, Homo sapiens
ttaaacttctatgaaaattttatacctgtactaaatgaaatatgaattatctatgcccaagttttattagaaagtcaaaatgctttcatcctaagtagcaaacacttgaaattagctgtaaagccaaaattgagagactgaattttgtttgatttagtgggaagaaaagaactgcaaaatgtgttttctaaaggcctatgaaaaatgagaaaataagtgtctctcatggtgagggtgcctttagatatgtaagagggtttaagagaaaaatagaaatgtgcttctgacgaacaaactttgcccgctttaccattttacacgtggacctctatgtcaatgaaaagcaccattgtcaaatgtattgtatgagttgcttaacacctggtataaagagagaacccatgaataagcttcttcaacaagcataatctcaggaaaatatcaggaaaagttactatgctaatacttaatatctaggacaccactcccatrtttaacaggtcaaccatttccaaaatattgatcttaggcatcattcattaaaaaagtgtttgttaatgcatccatattccaa

SEQ ID NO: 601801 - DNA, 540 bp, Homo sapiens
  misc_feature 406, 518: n = A,T,C or G
tgcttctgacgaacaaactttgcccgctttaccattttacacgtggacctctatgtcaatgaaaagcaccattgtcaaatgtattgtatgagttgcttaacacctggtataaagagagaacccatgaataagcttcttcaacaagcataatctcaggaaaatatcaggaaaagttactatgctaatacttaatatctaggacaccactcccatatttaacaggtcaaccatttccaaaatattgatcttaggcatcattcattaaaaaagtgtttgttaatgcatccatattccaacatttttgtttctatttatgtatattcatatactactatgtatgattttatgtatattataaaaagtrtaaaaatagacattttaaaataatagctttaagtagaaactntaatatttattttctgcacatcattgaattatctatatagtacctgagcacacctatgcccaatttgaagattactagaatgtatagtactggtttactacatcaagatcanaacacgagtattcctgaatcat

SEQ ID NO: 601802 - DNA, 575 bp, Homo sapiens
tgtgaggagtaaactgagttcatgtgaaaacatgtaatatagtggctagcacacatagtgcacccagcatataattgttttctacattcttgttccattcttccaaatggagaattatgactgtccctgtgaataaatattaaatgcaaatacagcccaaaggaacatagctgaggtagattcaggataataccatactgagaactgagaaaccaggtaggaatctgacattaccaaagaaaaggctgattgcacttttgagaactttagagaaggtgtggaaatccttatacagacaacttaggcatstgagccagtgaaggctagacaacttgatggagatgtagaacaacataaaaatttttaaaaatcaggcatggcttagttttattgtctgtaatgattttaagtatttttttattttcttctaaaataaatttaaggtagctgctaaaatactttaggtgctaatgacatattgtcacctttaaaggtaatagttgattcagagatttatgagttattttgtattatttgctgttggtagtgatttgtcttttagttttactttttgt

SEQ ID NO: 601803 - DNA, 478 bp, Homo sapiens
gtggctcatgcttgttatctcaacacctttgggaggctgaagtgagaggatagtgtggacctacaacatagtgaattctcagtatgttgcccaggagtttgagatcagcctgggcaacacagtggaaccttgttttctacaaaaaaaaaaaaaaaatagaaaaattagctgggcatggtggcacatgcctatagttccagctactccaggaggctgaggcaagagtatmgcttcagccagggagattgaggctgcagtgagtggtgaccatggcatcgtactccagcctgggtgacagggtgagaccctgtctcaaaaaaaaaaaacaaaaaacccaaaatgaaacaaaacatcattcactaatttatctaaggcagatacctacaatgtcctagattttgttttctctcttgaactatccagtgagtaagcaaattagatttattctgtcctttatatatttcacttccaataaatg

SEQ ID NO: 601804 - DNA, 596 bp, Homo sapiens
ttaatgggttcccctgtgttcttttgcctacaaatctacaaagcttacctcccaatctgccctcacactgcacttctttcctttatttacaatgggaagaagtatcccaacttgcatgaccccaccttccatctcttctacttgtgacttctcaggtataygcctctgcctgataaatatttttattcctaatatttagctctattttctccatgaaattgttcccattaaacacctctttatatttactacacatctctaccaatatttggctgggactacacatccctctctaaataccatccatgtatctgctacttcacagaaacatctcaaaggtttttttgtgtttgtttgtttgttttccagataccatttccatatctttgccttcatttttctctaaatttgcacaatccttgtgattcttccaaattttctgaggtagttacattattttcttgttgctaagtccactcagttttcttggtttcccaccagtatttaagaggtaatgattcaattctttttgagatagtattccctttacctccttaacactctcctaactttgttttgtttcttttctcttcctg

SEQ ID NO: 601805 - DNA, 604 bp, Homo sapiens
  misc_feature 539, 548: n = A,T,C or G
tattatgagttactgaggaaggaactcataatacaaaagtaagtttcaagttttaagacatggagggtcaatttctctttattcaaacaactgtaagcatcagttctatgggawaattaggccggtttcaccatccccacaagaacttcctgtaggtatctgctactctttccatctgggatccagattaaaaacacttacagtacaattgaatcaagcagatctgcagcttgaagtggtggtgcctagctgagcccagcctggacacacagaacaccagccagtcttcaaatacaggcataatgcagatgtgaatggcagggccatcctatgcactatagatgtggaaaataaattattattttcatttgccactgagctgttgtggttgtttattacatacaatttctgataggtataattcctatatttatataaaagcaaatattacagacaatgtcaaactctctttgttcttcctttaggtcctatttctttcctccttttcctcgaataagcattcgtatgcagatgacggnggccttcanaagtaatttccataattttactatatactgtttaaatgttgtgtgtggtctgctgc

SEQ ID NO: 601806 - DNA, 595 bp, Homo sapiens
cttgtctttactgcaatctctgaacataaaatgtgaagatttcatggacacttatcacttccccaatcaatagccttgtgatttcctatgcctgtctttaatckcttaatcccgtcatcctcgtaagctggggaggatgtatgttgcctcaggcccctgtgatgattgcattaactgcacaaattgtttgtagagcatgtgtgtttgaacaatatgaaatctgggcaccttgaaaaaagaacaggataacagcaatgttcagggaacaagagagataacattaaactttgaccgccggtgagccgggcggaacagagccatatttctcttctttcaaaagcaaatgggaaaaatattgctgaattctttttctcagcaaggaacatccctgagaaagagaatgcatccctgagggtggacctctgaaatggccacttcagggggcggccgtcttttatggtcgaagctgtagggatgaaataagccccagtctcccgtagtgctcccaggcgtattaggacgaggaaattcccacctaataaattttggtcagaccagttgtctgctctcaagccctgtctcctgataagatgtt

SEQ ID NO: 601807 - DNA, 595 bp, Homo sapiens
cttgtctttactgcaatctctgaacataaaatgtgaagatttcatggacacttatcacttccccaatcaatagccttgtgatttcctatgcctgtctttaatctcttaatcccgtcatcctcgtaagctggggaggatgtatgttgcytcaggcccctgtgatgattgcattaactgcacaaattgtttgtagagcatgtgtgtttgaacaatatgaaatctgggcaccttgaaaaaagaacaggataacagcaatgttcagggaacaagagagataacattaaactttgaccgccggtgagccgggcggaacagagccatatttctcttctttcaaaagcaaatgggaaaaatattgctgaattctttttctcagcaaggaacatccctgagaaagagaatgcatccctgagggtggacctctgaaatggccacttcagggggcggccgtcttttatggtcgaagctgtagggatgaaataagccccagtctcccgtagtgctcccaggcgtattaggacgaggaaattcccacctaataaattttggtcagaccagttgtctgctctcaagccctgtctcctgataagatgtt

SEQ ID NO: 601808 - DNA, 595 bp, Homo sapiens
cttgtctttactgcaatctctgaacataaaatgtgaagatttcatggacacttatcacttccccaatcaatagccttgtgatttcctatgcctgtctttaatctcttaatcccgtcatcctcgtaagctggggaggatgtatgttgcctcaggcccctgtgatgattgcattaactgcacaaattgtttgtagagcatgtgtgtttgaacaatatgaaatctgggcaccttgaaaaaagaacaggataacagcaatgttcagggaacaagagagataacattaaactttgaccgccggtgagccgggcggaacagagccatatttctcttctttcaaaagcaaatgggaaaaatattgctgaattctttttctcagcaaggaacatccctgagaaagagaatgcatccctgagggtgracctctgaaatggccacttcagggggcggccgtcttttatggtcgaagctgtagggatgaaataagccccagtctcccgtagtgctcccaggcgtattaggacgaggaaattcccacctaataaattttggtcagaccagttgtctgctctcaagccctgtctcctgataagatgtt

SEQ ID NO: 601809 - DNA, 608 bp, Homo sapiens
tataacaatgatctatggaaagatgcatcttgagtttcaactggtgatactagacaaacctctcctttttaaactttccacccctattctagcagcagcagataatctatgggaaaattataggggtagaaaggaatgaatgagaggcaaggtgacaccgggacctcaagtctctcctggacttgtttattctgattgtctatcaaaagagaattacctctgtacatcagyaaacctgaattacagagaagagttaagtcaattacaggtgttctaattgtagcaaaattgcaataaggcctggaatgacatggatataagactttatttcctcaactctcatgcattctacatttattaataataatggtatgctagaccctatgttaataactaacatacaaagataattacaacatggtacctgtaagaggaggggataataattgagagaagagatagtcagtgggcatatgaatacacaggagtatcatggatatatgaaaaagtgatggaacaagagtttagtgtagtagatgcagtctgtattgttaggactttgaagtcaatctaagtttgaggatttattttttcctatgcacaatgga

SEQ ID NO: 601810 - DNA, 623 bp, Homo sapiens
aaccacacaggttgttatttgaaaataggctgtttatcagttatcaagcatatagatgcatatttattggaatcatgtttatgattagctgactaccataaatgagagatttacattgatttattggcttgtaaaaatgtgttcactgagttgccgctgatcaatgaaactcagattttgatggctatttacaaccatggctacagaataatcagtttttgcttaaatttgtgggaaatattttcattctcaagggttggctgggtctggtttattttagttttgctttcacttacatggtatagctrtaacttctgtggtgtgcctcttactttttagaaatgatcctgcattctacaaatctgtttaaactatgtcaagctccaacatctgtttcctcaagccagtaatactactgctttcagcttgtactctatttctataaaaaattaagaaaaaaatcctcagaggaaacataagatgaatatatagcttatcttatatgcttaatgtttctcagtgattgtctatgctcatatccttcctctattggttattcttcaaaatttcatatatatattggctcacatttacagttatttgcagcaaaaaagtcagtccaa

SEQ ID NO: 601811 - DNA, 595 bp, Homo sapiens
  misc_feature 526, 569: n = A,T,C or G
accacagagcctggcactgtataggtgtataagtttgaacacacaagtgctgtaacaacaggatacctaatttgataatgggactcactatgtgaaaagtggttatggttcaaagacaaagagatgtactctgggtcaaatcaggaaaggaacttccttctctctaaaatagcaacagctttgcctaggattggtgaatcaaatcaagtgagcctcactagacatatgctaatttcaagagttacatgggtagccccttgccactggatgtttatatgaaagtgaaattaacttctgtcattatatttttagatctttttgtaatagwagcttagattataccctaacaaaggtatcaaccatgaactgatgtcctgtaaaactgtcctgaatcctaacatttgctctggatcccagacatgtatccaattgcctattcaacattgttacttgaatgtctgctaataagaacgattgattaactctgttctttgaatgcattcttctttggtgtttccttttcagnatacagcacccttcttcacttcatcagccatggaagaaaaggngtaatttcttatttatttcatttacc

SEQ ID NO: 601812 - DNA, 612 bp, Homo sapiens
gttacacttactacacttctcaagctatcataattatctcacattcattactcaaaaacagtgattagcaaattctgccacaaaagataatgcataacataaagctttaagctgcaggaaacatcctagagttttgtgtggccttcatgatagctttaggcaccacatcatattatagttgcgagaaattgartttagagaggtccaaactgaaactaattgacctttgtctttctatcacccttatttttatctctaacattgtatccacttccatcaccatggaattatttgcaatgccctactggctgatgtgggttcatcacaacttctggtgaatttgctcaccaattagcaacccctgggaagagaggtagataaaacatagactttcaaacatgttatgtgattacattgggtcattttctaaatacaattaaaaactcaactatagctatggtcaacacgagtaaagtggctgaaagttttgcaaaatttataagttatacaagacattgtaaattaagcagaggttttccagttgttcttcatccaatgtgcaataaattaaaaaactggttttacaagatgtgatatgaaggagcattatgg

SEQ ID NO: 601813 - DNA, 609 bp, Homo sapiens
ggatttcctccccctccaggttttgggaatagtttcaagaaaaattggtatcaattcttttttgtatgtctagtagaattctactgtgaatccatctgatccaggacatttttttggttggtaggctttttattactgattcaatttcagaccctgttgtttgtttgttccagttttcattttcttcctggttcattcttgggagctgtgtatttcccgaaattatccatttcctccagtttttctaatttgtgtgcataaagttgttcataatagtctctgaggaacttgtctatttttgtgggcttagttgtaatgtcayctttgtcatttctgattgtattttttggatcttctcttttttgtttttaatctaactagtggtttattaaccttattatctgaaataactaattattggttgattgatcttttgtatagatattttacaccttaatttcattcatttttttctaatattagttatttcttttatttctgctagctttacaactattttgctcttctcttttttcattttctctaagtgcaacattatattgctaattgaaatcattctaacttctttatgaaggagtttagcactat

SEQ ID NO: 601814 - DNA, 479 bp, Homo sapiens
cctacatactaatactcattttgcaccatggcagaatctatgatttcctggcttcagaaaatggccattatcaactggcaattagatcaacatctaaagaaatgtactgagggaaacgtgtccagtttggtaaatggataaggtttgtatatcaccgcaagcctcatgctgtaagcacactgaacccagcagggatcagaagagagtggaactgggcaaattctcttcaactactactagaagagcaattcacatcatatgacttacaactgtgtttcattaacattttcttggaattcagcttgcattggatttcatagatttgtctagaatttgtcataagaattcagaggtaaataaggcatataatgtggccatccaatactaaaaaacctaatccagagacagaaaatacacttcatcttgggctgggcgcggtggctcaygcctgtaatcccagccctttgggaagcagaggc

SEQ ID NO: 601815 - DNA, 526 bp, Homo sapiens
ctgtgtccccacctaaatctcatcttgaattgtaactcctataattctcacgtgtcatgggagggacccggtgggaggtaattgaatcataagggtgggtctttcccatgttgttctcrtgatagtaaataagtcttacaagatctgatggttttataaaggagagttctcctgcacatgctctcttgtctgtcaccatgtaaggctttgctcctccttcaccttctgccatgattgtgaggcctccccagccaagtggaactaagtccattaaacctccttttcttcataaattacccagtcttgggtatgcctttattagcggcatgagaacggatgaatacaaatgtgaaactagaacattaaaacctttaaaggggtgtgactaatttttaaaaataagaaaggaacatactcttaaggagaaggtgactataaaattaataactagggggtagtgaataaaattaaaaactgcgggggagggcaaagcaaggtggtagaatagaagcctacaccatttatc

SEQ ID NO: 601816 - DNA, 526 bp, Homo sapiens
ctgtgtccccacctaaatctcatcttgaattgtaactcctataattctcacgtgtcatgggagggacccggtgggaggtaattgaatcataagggtgggtctttcccatgttgttctcgtgatagtaaataagtcttacaagatctgatggttttataaaggagagttctcctgcacatgctctcttgtctgtcaccatgtaaggctttgctcctccttcaccttctgccatgattgtgaggcctccccagccaagtggaactaagtccattaaacctccttttcttcataaattacccagtcttgggtatgcctttattagcggcatgagaacggatgaatacaaatgtgaaactagaacattaaaacctttaaaggggtgtgactaatttttaaaaataagaaaggaacatactcttaaggagaaggtgactataaaattaataactagggggtagtgaataaaattaaaaactgcrggggagggcaaagcaaggtggtagaatagaagcctacaccatttatc

SEQ ID NO: 601817 - DNA, 578 bp, Homo sapiens
gaggtagttcagcctgttagcaacaaatatatttctcgaatatgtacatatttgaggtttgctttttgccatttaaatggatttgttaacaaagttataatgagagaatttcattcatcagttttgattgatttaattcaagtctttaaaaaaaattttttgkgggttcaatacaaggactatattcatatgttagtttttgtgttagttttatttgtttattcttttagcgatgagggtcaactcctgtgtcttccactgtactatgggacatatggccgaggcttcagaattctctcagacatctcactcattaaccaaaaaaggaaaataccacaaagaaaattttatggcagaaactgaaattgtaataaatttctctctgaggactcccagtgtaactgacaagttttgtgccaggggtcctttaggaacaagagattttacttgatttctttcactgctggcctgcagaggctgccaaaactgtgtacaattctcagacgcttgatgactagcacagctgcaatcctgtgtcataggctcccaaatcaagaaattaaacactgtagccttac

SEQ ID NO: 601818 - DNA, 582 bp, Homo sapiens
aaaacaattagactctattaaatgatgaaaaaatacccaggctgcacttgaaagactggaagaaatggaagaacaattgtattctctgcaaattggaaaaacataaatcacctaggtatgtgaattatatcaagaaaattgatactgattctggtctttacattccaaaacaaataagtactatattctacagagatataagaggtctgttttcttgcctagctactcattttaatattcttgtttcacttaatggcaatcatcgcaaagaacatttcagtctattttagtccagttayggtaatataaaatcaattcactcttaaggaaaaccatgtcaatttattggagatataagcatgaaaatcctatctttcaagatatgatggtattagttattatagattcagtaattacacatacatccatttggatatgttaaaattatatatttgactataatcctcaatacagattttttacattggccaatgcccttcatggaacattgctgaagtaaattagacccttagaggtacaaatggcagtgttaacacagataatgccggaatgtatttcatt

SEQ ID NO: 601819 - DNA, 642 bp, Homo sapiens
gggtttcttggaaagtatggtaagaatttaatatatccgatcataatttctgggtaccacaagtcccaagacaaacccttatttaacaatggtaattatcctgtagtgccagcactgtaaaaatcagcggagaacagagacaaacaggtcatcagatctgaaaaactcctagaaaagtcaaaggaagaaccacagaagagaaataagataatcagatcacagccaagagtcaaatatttcataaatgccaaggtcaaagcaaacatagacctaggaagagatacaacaaagtcagagccaaagggtgcaggaagaagacagacactgtactgtygattgggaaacatttaggctggcaaaaagttaaaaattgcaaaaggctggtaggcaccagggtgaaatagttttaggaagccatggggataagataaaactttagaattaaatttctaggttcctttttctcataggaatgggtgctaggctggcctgtgggcagttgagaggcaatgattatttttcttgtggctgagtttacttctggcatttgccccacacaataactacatattctagatcctaactgaatgagtcaggttggactttatagagaaaaaattgagatccaaagacagagaatcc

SEQ ID NO: 601820 - DNA, 642 bp, Homo sapiens
gggtttcttggaaagtatggtaagaatttaatatatccgatcataatttctgggtaccacaagtcccaagacaaacccttatttaacaatggtaattatcctgtagtgccagcactgtaaaaatcagcggagaacagagacaaacaggtcatcagatctgaaaaactcctagaaaagtcaaaggaagaaccacagaagagaaataagataatcagatcacagccaagagtcaaatatttcataaatgccaaggtcaaagcaaacatagacctaggaagagatacaacaaagtcagagccaaagggtgcaggaagaagacagacactgtactgttgattgggaaacatttaggctggcaaaaagttaaaaattgcaaaaggctrgtaggcaccagggtgaaatagttttaggaagccatggggataagataaaactttagaattaaatttctaggttcctttttctcataggaatgggtgctaggctggcctgtgggcagttgagaggcaatgattatttttcttgtggctgagtttacttctggcatttgccccacacaataactacatattctagatcctaactgaatgagtcaggttggactttatagagaaaaaattgagatccaaagacagagaatcc

SEQ ID NO: 601821 - DNA, 605 bp, Homo sapiens
acacaatacaccatacaaaatctcttaatagtatgaagaaataaagcaaggaaagagaatggagaacaatgaaatgtatgtgtgtgtgtgtgtgtgtgtgtgtgcatatacacacacactaatgtatatagggtgcacaagaaagactaccaggaaaaggcattatcaaagtagaaatctrattaaaattagagagtgagaaatgcaacactacggaggaaaaagattgaaggcagtgaggagtgcaagtatagtcttgtttttccataaaacatcgatttttaattttgtaattaacgtgacatagcaaaataagaatgtttttatttctaacttaaatattttagtcaaagttgcatcagaaatcaaatatttctttgaccttttccaagacttattaactaccattatagttgttagtattatatagtaacacattgcttaaaatacattataaaccttttttctttctctttatatatgacatataaaattatgaattttgtaacatgattcatatttgaaaacattttaaatggcatgacaactttcacagaaaatgccactggaatcacataaaacgttcaaatgcttgaaatgtttca

SEQ ID NO: 601822 - DNA, 605 bp, Homo sapiens
acacaatacaccatacaaaatctcttaatagtatgaagaaataaagcaaggaaagagaatggagaacaatgaaatgtatgtgtgtgtgtgtgtgtgtgtgtgtgcatatacacacacactaatgtatatagggtgcacaagaaagactaccaggaaaaggcattatcaaagtagaaatctaattaaaattagagagtgagaaatgcaacactacggaggaaaaagattgaaggcagtgaggagtgcaagtatagtcttgtttttccataaaacatcratttttaattttgtaattaacgtgacatagcaaaataagaatgtttttatttctaacttaaatattttagtcaaagttgcatcagaaatcaaatatttctttgaccttttccaagacttattaactaccattatagttgttagtattatatagtaacacattgcttaaaatacattataaaccttttttctttctctttatatatgacatataaaattatgaattttgtaacatgattcatatttgaaaacattttaaatggcatgacaactttcacagaaaatgccactggaatcacataaaacgttcaaatgcttgaaatgtttca

SEQ ID NO: 601823 - DNA, 189 bp, Homo sapiens
aagaaggaaagattgaatttgtgaggacagctagcgacataaaagattaatttacaaagaacgtttaattgtattcagtttcaaaacagtttgttgcctacaactaaggatagattttatcctgtgtttcaagaagcattaataasaattatctcttggtgtttactaagtgtaggccatagaaaattt

SEQ ID NO: 601824 - DNA, 491 bp, Homo sapiens
gtttaatctcctcttcttataaggacagcagtaatattggattggaatctatgcccaatgagctcatttaagcttaattgcctcttcaaagaccccatcttcaaatgcagtcacattttgaggtacacattctgacattaggacttccacatataaatttgggaatagggtagacacaattcagcctgtaatagggacattggcctgtctttgagccaggagctctccagaggaagaaaatatctggtggtcagcataaatgctttccagcctttctggtgtgttggaaaccagaaaagtgaaaagtaagycttctctaaatcagtttttaatttttatacaatgaccctgaatttgccccaaatatttgcagaaaatagttacaggaatgcaaaagaaacaaaaacaataactttgaatgaaagaactaacttttcctaaaggaaaccagtattagaaaagggaattctatgcagagatcatgttaagcc

SEQ ID NO: 601825 - DNA, 569 bp, Homo sapiens
atacctgttggccatttgtatgtcttcttttgagaaatgtccaatcagattctttctccagtttttaattagattattttttcttcttattgagttgattgagtttcttatatacctacttattaacctgtcatcagattacagtttacttcatggttcttcttaaattctgtaggttgtttctttattctctcaattgcttcctttgttgtccagaagctttttagtttgaggcaatctcayttgtttatttttgcttttgttgtctgtgctttggggattatattaaaaaattatggcacagaccaatgtcaagaggctttttcttatatttaagtctttaatcaaatagcatggtgctgacatttaaaacacacacacatatagaccaactaaacagattagagaccccagaaataaatccatctatttatgatcgattgattttcattaaaaatgtcaagaacacacaacagggaaaggacagtctcttcaataaactgtgttgggaaaactggatatccacatgcagaagaataaaattggacctttatctcaaactacacaca

SEQ ID NO: 601826 - DNA, 641 bp, Homo sapiens
  misc_feature 317: n = A,T,C or G
cccagtaaggttaggtgggtctctaaaataggagaccaagtataaaaaagaagacttaaaatattttcaagaagtccttgagataattttttcttctctatatttaaataataaaatgaatcacaacacagaatatgtggtatctattacataatgtttcctcttttaaaagtatgtatattttactaaaacctcgtgatttatgactgcaatagtatatcaaatttcacctagcaaggaagcttctagaaatcacatagaagagttgccaaagcttaagcttaatttttattttcaattttaagttatttttgaanagtgtaagtaggaaaacatgtaagtttttaaaagccatagaattcctaaaatgattaaatagtattaggccagccattggcaataaccaaaggcaaagaaagaggtatgctaatagattcataaagcaaacagtaaagtcaaaacattttatgaatcagtatctctagtctctactaaggaagtatcaaagagttaggctgrcaaagaaatacagagaacaagtagatttcctagaaatctggaagcctaagacttggacaagaagaagcaggtcagcctgaaggggatcttgaaaacaagaaaaggctccagcaaaaagagag

SEQ ID NO: 601827 - DNA, 555 bp, Homo sapiens
tcattaaggatgaaattattttgtgtgagtagaacttcactgtagactatcaaagtaatgtgaaggcaagtgaaaaaagtgtatacctagtggcttttctttttttcccatactggggtgaggaaacttttttcaaatccacaaccaactgtgatctagcagctaatatttggtttacggtatggtgggagagatccattttatagacattactgtctactatagggaatacaggattatttttcttcttagaaatgtcagtttctcagcttcttgaggctgctttgaattcccttagcttctgcagtgatactggtgttgtttattcttccttaacagggagggaaaagggcaaggacacacaatggtccccaagagtccttgtaattgygtctgcaaacaaagaccagtttgctcagtttcctcacctgggtaccctcccaccaggtcagctaggagttaaactaactccaagcattgtccctccatattgcctttaccaaagtcagacggtcagggacttgagatctcatgagaattgcttcctcagatcac

SEQ ID NO: 601828 - DNA, 538 bp, Homo sapiens
cctaggagagaacacaggcactgccacaccaccacagggaacagctgctgtctggggtcagcagaccagttcacacgccacacaaggttgctatagatccaagtcataaaaatcttccagctcctcatgaaacaagtcgctctcatcttcagagtctgttagttcatcgtccccaactgcagccaaaagcataagcaacaactcacccagctcaaaggtgacaacctcttcttcatcgttgtcaaaggggctgctgttctctctttcctcaatgagttcccagaagtggttccttcattgggccgggtatctgcttgatgttcccaccttctgtctctgtggctcctctctayggccatcagggtacacatgcttataaaaaccgttccctccaaacgggcagctcccatgtccttcatcaaaatacctgcacgccttgttgctcattgcctccttgtatttcagaatgagtttctgcttctcttctttctcctccacacagtactcacttggaacgacaaagttagatgtgatccga

SEQ ID NO: 601829 - DNA, 354 bp, Homo sapiens
attcaagtgaaatagcttaatttcaatttttaactttcatgtttttgaaatcagtaagaaattgcactgggaactgagagtcagatatacatgtagaaatgttgccgcctacatcactctgccaacaatcaggcatgggaatggccaagtccttacttcagggagtggggagagtgataaagttaaaaaayattaaacagaagtttttcttaaattttttccttaaaaatattttctttccatgttacagaaaatgctatatgctaatatttggtttattctgtgagctttcaactctgacttttatgtaatgggcttgtatatcatctacttgatcatatctctgtctcatgt

SEQ ID NO: 601830 - DNA, 472 bp, Homo sapiens
cttgctgaactgtgagtcaattaaacctctttcctttataaattacacagtctcaagcaattctttatagcatatkaaaacagactaaaacactaactcatagttgtattttgctaatttggcaactaaagtattctagtcttgcaacagcttttctttcttgtttcatcaaatggtttttgataaatttgtactaaaacctctcctttttcttcttttaattttacatcttttctgagtggctactgagaattttataaatttttataacaaggtatctaataatattaaatatctctttctcctaaatatcataaaggttttagtaaactttacccaatcaaatacaaccattattttatggtttaagttttatttttactctttttaagcataaaatggtgtattgttgttcatttaaatttaagtaacatacttcatcattttgggtgattgtgttattactttatta

SEQ ID NO: 601831 - DNA, 472 bp, Homo sapiens
cttgctgaactgtgagtcaattaaacctctttcctttataaattacacagtctcaagcaattctttatagcatatgaaaacagactaaaacactaactcatagttgtattttgctaatttggcaactaaastattctagtcttgcaacagcttttctttcttgtttcatcaaatggtttttgataaatttgtactaaaacctctcctttttcttcttttaattttacatcttttctgagtggctactgagaattttataaatttttataacaaggtatctaataatattaaatatctctttctcctaaatatcataaaggttttagtaaactttacccaatcaaatacaaccattattttatggtttaagttttatttttactctttttaagcataaaatggtgtattgttgttcatttaaatttaagtaacatacttcatcattttgggtgattgtgttattactttatta

SEQ ID NO: 601832 - DNA, 472 bp, Homo sapiens
cttgctgaactgtgagtcaattaaacctctttcctttataaattacacagtctcaagcaattctttatagcatatgaaaacagactaaaacactaactcatagttgtattttgctaatttggcaactaaagtattctagtcttgcaacagcttttctttcttgtttcatcaaatggtttttgataaatttgtactaaaacctctcctttttcttcttttaattttacatcttttctgagtggctactgagaattttataaatttttataacaaggtatctaataatattaaatatctctttctcctaaatatcataaaggttttagtaaactttacccaatcaaatacaaccattattttatggtttaagttttatttttactctttttaagcataaaatgktgtattgttgttcatttaaatttaagtaacatacttcatcattttgggtgattgtgttattactttatta

SEQ ID NO: 601833 - DNA, 525 bp, Homo sapiens
ctgacaagtactcttattcaggtttctgatagctttagagattataccattggaataaataaaaacttccagcattcatgagaattgctggcccaacatcaggcaaacaagaataattacatgggactgaactaacagaggactaaaatgatgtttatgatttcttttgtttgaaacactgcttttttttttaacgttttgtcttccagggtcaagaaaacttttttcttttgagctaytcaagcttacaacaaattgggtaaagtatattttgtgagcaaaacctgaagcttttatatatctctctaactcatttctccagaatttggaaactatatttttaatttatagcaatatagttatttgcataaattcaataaagatctgttgtatttatgtttgtttgtttgtttctctaacaggacacaattggagatactggttactttacaaagcatttaactggaatggcatattttccataatgaccagactgctttgaggaattaaggttgacttataaag

SEQ ID NO: 601834 - DNA, 499 bp, Homo sapiens
  misc_feature 468: n = A,T,C or G
tccgtgggtcggacaagcttgtgctatgtagtgtggtatgttgttttgctttgaaatatctctttcaaatcatttagaggatgttcgattgtacacaagaagactgcttagtgctctaatgttgaaataygtgttataatgtatgtcaaaaagagattacattttacattcttctgtgactatgaaattaatatgtatgttcagtgcttgaagtatatgcatgttacataatttttagaaagagataaagttaggtctgaagcgcattagagaatcacagatgtttcttgtaagagaatacatatgcttcataggaattttgaactgctttctgatgctaagctttgttcactgcaaggatcatatgaataatttcattgagttgccccagttcttacttacacaagccttgagaaaggagctgaagtgataaataacttgcccccctcacctagttctgaattgctntagccttttatgtttcatgaatgtgaaggga

SEQ ID NO: 601835 - DNA, 499 bp, Homo sapiens
  misc_feature 468: n = A,T,C or G
tccgtgggtcggacaagcttgtgctatgtagtgtggtatgttgttttgctttgaaatatctctttcaaatcatttagaggatgttcgattgtacacaagaagactgcttagtgctctaatgttgaaatatgtgttataatgtatgtcaaaaagagattacattttacattcttctgtgactatgaaattaatatgtatgttcagtgcttgaagtatatgcatgttacataatttttagaaagagataaagttaggtctgaagcrcattagagaatcacagatgtttcttgtaagagaatacatatgcttcataggaattttgaactgctttctgatgctaagctttgttcactgcaaggatcatatgaataatttcattgagttgccccagttcttacttacacaagccttgagaaaggagctgaagtgataaataacttgcccccctcacctagttctgaattgctntagccttttatgtttcatgaatgtgaaggga

SEQ ID NO: 601836 - DNA, 517 bp, Homo sapiens
  misc_feature 369: n = A,T,C or G
ccctaccctacaggagcttacactcagggaaaaggggaatcagcttccttgatgaaatataagttggtctatttaaattcttctctagctttctcatcccaacatgtgtacctgtgcagttcaaacagattctagaaagactgggacagaattcctgttaagagaagattgcatttactgtgctagagcatttgtttctcagagcccaaaagctctttctgctgtagatgtcttatcaagattatatgaggagagcctgaaacataatccttctcactgccatttccatatctctgccgtaaggcccttgttttaaattctagaaggtgaaaacaattcacaaacagaaatgattaatgkgatgaagancagatttatgggaaaggatcttaagagataaatatgtatgggttgacttcaggaggctctcagaaattgttcttggtgatatagttagtgaggaaggattagcatgatattaaagctaaaacaaagtagggtagaagaggatgattca

SEQ ID NO: 601837 - DNA, 517 bp, Homo sapiens
  misc_feature 369: n = A,T,C or G
ccctaccctacaggagcttacactcagggaaaaggggaatcagcttccttgatgaaatataagttggtctatttaaattcttctctagctttctcatcccaacatgtgtacctgtgcagttcaaacagattctagaaagactgggacagaattcctgttaagagaagattgcatttactgtgctagagcatttgtttctcagagcccaaaagctctttctgctgtagatgtcttatcaagattatatgaggagagcctgaaacataatccttctcactgccatttccatatctctgccgtaaggcccttgttttaaattctagaaggtgaaaacaattcacaaacagaaatgattaatgtsatgaagancagatttatgggaaaggatcttaagagataaatatgtatgggttgacttcaggaggctctcagaaattgttcttggtgatatagttagtgaggaaggattagcatgatattaaagctaaaacaaagtagggtagaagaggatgattca

SEQ ID NO: 601838 - DNA, 517 bp, Homo sapiens
  misc_feature 369: n = A,T,C or G
ccctaccctacaggagcttacactcagggaaaaggggaatcagcttccttgatgaaatataagttggtctatttaaattcttctctagctttctcatcccaacatgtgtacctgtgcagttcaaacagattctagaaagactgggacagaattcctgttaagagaagattgcatttactgtgctagagcatttgtttctcagagcccaaaagctctttctgctgtagatgtcttatcaagattatatgaggagagcctgaaacataatccttctcactgccatttccatatctctgccgtaaggcccttgttttaaattctagaaggtgaaaacaattcacaaacagaaatgattaatgtgatgaagancagatttatgggaaaggatcttaagagataaatatgtatgggttgacttcaggaggctctcagaaattgttcttggtgatatagttagtgaggaaggattagcatgayattaaagctaaaacaaagtagggtagaagaggatgattca

SEQ ID NO: 601839 - DNA, 569 bp, Homo sapiens
gtggaaactgtaacactcagctgtgtgacaggttgcttttcacaatgatttgtgtcacaggatttttcaacttttgaaacagggtagaaaatacacaattttacttttttttggttaaaaggaagctgaagaaaaacaaggacaaaatattgactatacaaatgaaagcttaaaatgaaaacaacacaaaccaaactcaaaatacactgagggtaccaatttgctctttagaattttctgggattattgttgctttaaaactgtagagtaaacaaggagcggttctctgtgactcatagttccagattgacagctgtcatttctctttagcagataaagaggcacttcctttttttagttgtcagctgctaaggcagtttagtgagcactggagaaccaggtcagggtgagcacacagactgctgtaatggcacaaaatcaaaccccacttttggacttgggtctaayggcaaaggcaagattgaacattggagcactgattaaagtcaaacctcccagtttcaagaggtttattcattttttaaaaggcctattagtaactgaatgag

SEQ ID NO: 601840 - DNA, 577 bp, Homo sapiens
  misc_feature 387: n = A,T,C or G
gcttttcagtagtgaaatttaagagtgtatcaaaccacagatggacaggtgttgagagggttgcagagcctaaggtcagaacctaaagttttttattcaattaagctgaatgctagtttaattatctgttcatgaaaagtaacaaacatttcctgggttrggggaaggagtatttcagaatagttgggagtaagggttagggtgggcaaagatggcagtgtgtcttcagtagtagataacaaccctgaacaaggtcaatgaacggacctggtcctatattctcccacacaacttgggctgtggactccagacagcacagctgtaaacacctatctggtattagtgtcataatcagctattgagtctttagagaccaggaaatactangactggtggagcttctgggagcatctagttagagagggaggtgcctgaggggctgtccttggacaacagtgggtgaggagagttgtcgggagagtgtcaggaggaagccagtccagaacttcaacaaagcagtgacacttctgtttctatatcgagatgtttatttcattttatttatttatgttttgga

SEQ ID NO: 601841 - DNA, 577 bp, Homo sapiens
  misc_feature 387: n = A,T,C or G
gcttttcagtagtgaaatttaagagtgtatcaaaccacagatggacaggtgttgagagggttgcagagcctaaggtcagaacctaaagttttttattcaattaagctgaatgctagtttaattatctgttcatgaaaagtaacaaacatttcctgggttgggggaaggagtatttcagaatagttgggagtaagggttagggtgggcaaagatggcagtgtgtcttcagtagtagataacaaccctgaacaaggtcaatgaayggacctggtcctatattctcccacacaacttgggctgtggactccagacagcacagctgtaaacacctatctggtattagtgtcataatcagctattgagtctttagagaccaggaaatactangactggtggagcttctgggagcatctagttagagagggaggtgcctgaggggctgtccttggacaacagtgggtgaggagagttgtcgggagagtgtcaggaggaagccagtccagaacttcaacaaagcagtgacacttctgtttctatatcgagatgtttatttcattttatttatttatgttttgga

SEQ ID NO: 601842 - DNA, 615 bp, Homo sapiens
tgacttaccagctcatggtgtatgctgctaatccattttaccactcattccctagtctcttgaactttccttaaacactagtttctccaactgggaagggacaaaaggaaaaagcagaagtctgatggccaagttctaatccccactgtgccatgtaactgtgagcgcattttctctctttgagaagtctcagtttctgcttctataaaatgacatgcttggactaatgatcccctacagctcttctagatctaaaaactatgattttgtgtaagagcatatcaagatatggaattacatgctgaaaaaatataacggtaatcaaccaatattcattacatttagtttacgtgcagacagagtaccaagtgcataggcgtatgtgagggatataaaaaaagtctaggaaatgactcctgccctccatgggccaacaacctaatcagagctttaaaacacactgaaaacatgccaagtattgtgagcagatgtgcaaagtgccaggtgaacggtagagatgatcaaaacttagacgccacatarccaatatactagaagacctcactcagaataaggagagaatgaaccactgaaatgacaagaatgcggctagct

SEQ ID NO: 601843 - DNA, 514 bp, Homo sapiens
ctagaaaatcattaatgagatattaaaatktaaaaatagatcatgacataagtacagtatatttctaattgtatgctttaaaaatccatgaataagagaaaaaaacctagaagggtatataccaaaatgtttaccatgttattctggggatagatttttttttcttcttttttttttttctgtattttttacccgtttgacaataaatctatattattgtgaagttaatgaatcgttatgttatttaatattttccaatcagcactgattagatttatgatgacttaaacattcaactccaagaaccttatccctgaaaaattactgtacttgtctttgttctgcgtttcataccagtgagtactaatttcattgtccatagagaataattcactgctgtgaacaagacttacattttgagcacaagccctaacatttgctccttaaaagtggtgtgtgtaaatatagtataagaactgtgggaaaattatttcattgcctgttaaataaccat

SEQ ID NO: 601844 - DNA, 481 bp, Homo sapiens
attaaaatttaaaaatagatcatgacataagtacagtatatttctaattgtatgctttaaaaatccatgaataagagaaaaaaacctagaagggtatataccaaaatgtttaccatgttattctggggatagatttttttttcttcttttttttttttctgtattttttacccgtttgacaataaatctatattattgtgaagttaatgaatcgtyatgttatttaatattttccaatcagcactgattagatttatgatgacttaaacattcaactccaagaaccttatccctgaaaaattactgtacttgtctttgttctgcgtttcataccagtgagtactaatttcattgtccatagagaataattcactgctgtgaacaagacttacattttgagcacaagccctaacatttgctccttaaaagtggtgtgtgtaaatatagtataagaactgtgggaaaattatttcattgcctg

SEQ ID NO: 601845 - DNA, 514 bp, Homo sapiens
ctagaaaatcattaatgagatattaaaatttaaaaatagatcatgacataagtacagtatatttctaattgtatgctttaaaaatccatgaataagagaaaaaaacctagaagggtatataccaaaatgtttaccatgttattctggggatagatttttttttcttcttttttttttttctgtattttttacccgtttgacaataaatctatattattgtgaagttaatgaatcgttatgttatttaatattttccaatcagcactgattagatttatgatgacttaaacattcaactccaagaaccttatccctgaaaaattactgtacttgtctttgttctgcgtttcataccagtgagtactaatttcattgtccatagagaataattcactgctgtgaacaagacttacattttgagcacaagccctaacatttgctccttaaaagtggtgtgtgtaaatatagtataagaactgtggraaaattatttcattgcctgttaaataaccat

SEQ ID NO: 601846 - DNA, 531 bp, Homo sapiens
  misc_feature 34: n = A,T,C or G
gtggttctgtgtcttaatgagcttaaaatctaanttaggaagacataaaaagatacacatcaaactattagggcattaaaccatatggtattaactctagtagaagttcagagaagggaaaaagaatgatgagctagaatcttgatactccatgctcgggacatggagtgatcctctgaccrgtagcagttctgttgttcagagtttattagtattgtaaaatgtcaacacttccacccccgcacccctaccttctgtatcagaatcagcattttaacagcatctccaggtgaatgctatgcacatttaagtttgagaaatgctgagtcagaacaatacaagcactgtgtttttgaccccagatcactatccaacagaaccttctgcaatgatggagaccatctatttttttttgctgcctagtatgaagctactagctgttgagcaacttgataggtagctagtgaagctgaggaactggattcttatttctaaatctaaatttaaatagccacatggacctaatggcta

SEQ ID NO: 601847 - DNA, 621 bp, Homo sapiens
aaggtcatatttagtttctcaatggaagtttccaatctcgtcgtacccatggttccagaagcctcataaggatcmcatttttgctctaatgaatgaaatccagagtactacatatgcattggttatgtgtatttcggatgaatccctcttgagagtgagaggaatttcccttttaaaaaacttctgtgacaacaaaaaggcaataaaagaaaagagaaaagtttccatgccagttctcagcaatgcttttgctttggaagcgagatagtgagctatcagaaaccctctgaagtgttactgcttagacgtttgacctttgataactttgcatataaaagagcctgtcacttacaccacagggattggaaaaaaaattaaagagttaattttatgctttgtttgtattgttattttagggaagatgagaacattccatatgcctatttaattttcccaatatctttacaatgattaacttgttgaaaatcactggcgatattattaaaagagcagaggcatcatttgaaaataaagttgacagtggggtatgtggttgctttgcttctgatgttagggttctgtttcctgtagggtgggacgttttatgagaatagggtatcc

SEQ ID NO: 601848 - DNA, 542 bp, Homo sapiens
cctgcatctagctatctatctatctttctctttctttctttctttctttctttctttctttctttctttctttctttctttctttctttcaagttatttagctttgaaagtaaagttctttgatcaagaaaaagtttgttctgggaaaactccattttcaagtattccttaactacttgggctgaactatgaaaattttttctattttcccttcctgttttcagaatagttacataagataatcttgcaaaaaagtgaatggaggtcatattttaaacaataaatgggaaaagtaattattttacctatttcagataccagtttttgctttaaatgtcacaaatattgcagcacctggctttttttcaaaagaggactgagacacggggttctgcacttatcagtcacttaagctgggataattagccacgtgttaaaattaagttttctagtataaattgaaattttgamaaagacgtaaaatattattataagtataaataacaggttaaaataattatgccctcattaaaaaaaattaa

SEQ ID NO: 601849 - DNA, 570 bp, Homo sapiens
ctctatagtgctgggattacaggcatgagccactgcacccggtggctacatttctttctaagttctggcttttaatggaataaatgtcagttggctccttttggctttccccagaaccrttcaataacaactttaaatataaggatgaatgaatgaatgcagtgaatgaacctagaaagtaaatttcacaaaggaacccctcattatatcactgtgttatatgaataaggccatacttgaatttggggaacaagctttacctagaaaaactgtcatgctccatagaccactacacatgctgtgtgcgaatgtgtgcacgcacacacgctatgtgtatggtattggaggctttatgtggggactggttagaagctgctaccgaagcagctggaaacgttggtcaataacttggcaaaattgtctgccgttcagaaggctagagctctcgcaagctcaaaaagaagatgaaactcaggttttgttattaacatattgtttcaattccatttgtcactggttagcttcaagaaagtctgtttagtcccagtggaagcagcaatgccaattggt

SEQ ID NO: 601850 - DNA, 570 bp, Homo sapiens
ctctatagtgctgggattacaggcatgagccactgcacccggtggctacatttctttctaagttctggcttttaatggaataaatgtcagttggctccttttggctttccccagaaccgttcaataacaactttaaatataaggatgaatgaatgaatgcagtgaatgaacctagaaagtaaatttcacaaaggaacccctcattatatcactrtgttatatgaataaggccatacttgaatttggggaacaagctttacctagaaaaactgtcatgctccatagaccactacacatgctgtgtgcgaatgtgtgcacgcacacacgctatgtgtatggtattggaggctttatgtggggactggttagaagctgctaccgaagcagctggaaacgttggtcaataacttggcaaaattgtctgccgttcagaaggctagagctctcgcaagctcaaaaagaagatgaaactcaggttttgttattaacatattgtttcaattccatttgtcactggttagcttcaagaaagtctgtttagtcccagtggaagcagcaatgccaattggt

SEQ ID NO: 601851 - DNA, 570 bp, Homo sapiens
ctctatagtgctgggattacaggcatgagccactgcacccggtggctacatttctttctaagttctggcttttaatggaataaatgtcagttggctccttttggctttccccagaaccgttcaataacaactttaaatataaggatgaatgaatgaatgcagtgaatgaacctagaaagtaaatttcacaaaggaacccctcattatatcactgtgttatatgaataaggccatacttgaatttggggaacaagctttacctagaaaaactgtcatgctccatagaccactacacatgctgtgtgcgaatgtgtgcacgcacacacgctatgtgtayggtattggaggctttatgtggggactggttagaagctgctaccgaagcagctggaaacgttggtcaataacttggcaaaattgtctgccgttcagaaggctagagctctcgcaagctcaaaaagaagatgaaactcaggttttgttattaacatattgtttcaattccatttgtcactggttagcttcaagaaagtctgtttagtcccagtggaagcagcaatgccaattggt

SEQ ID NO: 601852 - DNA, 570 bp, Homo sapiens
ctctatagtgctgggattacaggcatgagccactgcacccggtggctacatttctttctaagttctggcttttaatggaataaatgtcagttggctccttttggctttccccagaaccgttcaataacaactttaaatataaggatgaatgaatgaatgcagtgaatgaacctagaaagtaaatttcacaaaggaacccctcattatatcactgtgttatatgaataaggccatacttgaatttggggaacaagctttacctagaaaaactgtcatgctccatagaccactacacatgctgtgtgcgaatgtgtgcacgcacacacgctatgtgtatggtattggaggctttatgtggggactggttagaagctgctaccgaagcagctggaaacgttggtcaataacttggcaaaattgtctgccgttcagaaggctagagctctcrcaagctcaaaaagaagatgaaactcaggttttgttattaacatattgtttcaattccatttgtcactggttagcttcaagaaagtctgtttagtcccagtggaagcagcaatgccaattggt

SEQ ID NO: 601853 - DNA, 453 bp, Homo sapiens
tttcagggaactattaaattatactttagggactccatatgatgtaactcatccccataaaccttctccactagcatccttcaccttctactaacccttcagatgtcacctaaaatgtttattcctatttaattacttgtttgtctttctgactagatcataaactcagaaggcagagattgaatctgtctcgcttggcaaacaatttatgttcaatataygtttgttgattaagagatgtaagtattgaacacagcatagtgggcttcaaaccaagaaatgctaggatattttgttgctaagagaatgactttatcctctcttcctgttgcctaatatacatgatctgatgataaaaccttatttctatattcctattacctcttcaaatctgcatagaaaagccttcacctaaaagcagaactaaatttcaagattttatcagaatttcgg

SEQ ID NO: 601854 - DNA, 564 bp, Homo sapiens
atgcctagaaagacattgacacagggcagatcttgagtcctaaatttgctacttgtataaataagactaaatgagggtgatatgagagggtgtggggcccctcccaagatcaggttcacagggtgctaagacctgtttgctgctctttgctgrgtgtatgatctgtccacagagagtgtctataaatatcctacaggagcaaattaatccgggcatttacctaggcagtcctcaggagactggtgccctggctagtgaaacaggtacagatgaaagagaaggtctgtaggactgcacaatgaaaagacagagtcctggctgggcatggtggctcacgtctataatcccagcattttgatagactgaggcaggtggatcacctgaggtcaggagttcgagaacagcctggccaacatggtgaaaccccacctctacaaaaatacaaaaattagccaggcatgatggcagacgcctataatcccagctacctgggaggctgaggcaggagaatcacttgaacccagaggtgcagattgcagtgagccaagatggcaccactgcact

SEQ ID NO: 601855 - DNA, 564 bp, Homo sapiens
atgcctagaaagacattgacacagggcagatcttgagtcctaaatttgctacttgtataaataagactaaatgagggtgatatgagagggtgtggggcccctcccaagatcaggttcacagggtgctaagacctgtttgctgctctttgctgagtgtatgatctgtccacagagagtgtctataaatatcytacaggagcaaattaatccgggcatttacctaggcagtcctcaggagactggtgccctggctagtgaaacaggtacagatgaaagagaaggtctgtaggactgcacaatgaaaagacagagtcctggctgggcatggtggctcacgtctataatcccagcattttgatagactgaggcaggtggatcacctgaggtcaggagttcgagaacagcctggccaacatggtgaaaccccacctctacaaaaatacaaaaattagccaggcatgatggcagacgcctataatcccagctacctgggaggctgaggcaggagaatcacttgaacccagaggtgcagattgcagtgagccaagatggcaccactgcact

SEQ ID NO: 601856 - DNA, 564 bp, Homo sapiens
atgcctagaaagacattgacacagggcagatcttgagtcctaaatttgctacttgtataaataagactaaatgagggtgatatgagagggtgtggggcccctcccaagatcaggttcacagggtgctaagacctgtttgctgctctttgctgagtgtatgatctgtccacagagagtgtctataaatatcctacaggagcaaattaatccgggcatttacctaggcagtcctcaggagactggtgccctggctagtgaaacaggtacagatgaaagagaaggtctgtaggactgcacaatgaaaagacagagtcctggctgggcatggtggctcacgtctataatyccagcattttgatagactgaggcaggtggatcacctgaggtcaggagttcgagaacagcctggccaacatggtgaaaccccacctctacaaaaatacaaaaattagccaggcatgatggcagacgcctataatcccagctacctgggaggctgaggcaggagaatcacttgaacccagaggtgcagattgcagtgagccaagatggcaccactgcact

SEQ ID NO: 601857 - DNA, 548 bp, Homo sapiens
actgcaattcacaggcaaacccgagtgccgagctgggctcacaaccagtggactgtggagtcaggggcacacaacctcctgagacattagctggggcagctaagggagttctttgggccacccctactcccacccctggcagtggccatgtggcacagacagatctgtgcatttgggagagggagagctagcaacttggggactttacattgaactcagtgctgtcccatcacagcagagacctggcagcattcatcatctgctgactaaggagcccctgggacctgtataaccaacagccatagccaggtaatatgctgcrggcatctacagccaactcagctggctgagttcctcgcctcatgggggacgtgtgcaatggctgcaaacagcagcttccttggtggtgtatgcagcctgtttcttgtatggctgctctaagggaccttggagacaggccctcagatggatgttcatgtctctgaccttgcactaccccagtgtaggctccaaaaaggtatgtgaggtgcttttggaaagccccgggg

SEQ ID NO: 601858 - DNA, 548 bp, Homo sapiens
actgcaattcacaggcaaacccgagtgccgagctgggctcacaaccagtggactgtggagtcaggggcacacaacctcctgagacattagctggggcagctaagggagttctttgggccacccctactcccacccctggcagtggccatgtggcacagacagatctgtgcatttgggagagggagagctagcaacttggggactttacattgaactcagtgctgtcccatcacagcagagacctggcagcattcatcatctgctgactaaggagcccctgggacctgtataaccaacagccatagccaggtaatatgctgcgggcatctacagccaactcagctggctgagttcctcgcctcatgggggacgtgtgcaatggctgcaaacagcagcttccttggtggtgtatgcagcctgtttcttgtatggctgctctaagggaccttggagacaggccctcagatggatgttcatgtctctgaccttgcactaccccartgtaggctccaaaaaggtatgtgaggtgcttttggaaagccccgggg

SEQ ID NO: 601859 - DNA, 590 bp, Homo sapiens
gccaaggaggtggatcaattgaggccaggagtttgagaccagcctggccaacatggcgagaccccatctctactaaaaatacaaaaattagctgagcatgttgacacacgcccgtaatcccagctactcaggaggctgaggtgggagaatcgcttgaacccaggaggtgcaggttgcagtgagccgagattgcgccactgcactctagcctaagcaatggagcaagaccctatctcaaaaaaaaaaaaaraaaaagaaaaagaaaagaagtagaagctcatggccagggatggtggctcacacctgtaatcccagcactttgggaggccgaggcaggtggatcacttgagccgagttccagaccagcctaggcaacatggtgaaacctcgtctctataaaaaaaagaatacaaaaattagttgggcatggtagtgagcgcctgtgaggctgcttgtgaggctgaggtgggaggatccctttagtccaggagttcaaggctgcagtgagctgtataatgccactgcagtccagcctgggtgacagtgagaccctgtctccaaaacaaaatttttttaaaaagtagaagctt

SEQ ID NO: 601860 - DNA, 591 bp, Homo sapiens
agaatttggctaaatttggtatgtcgtggtgggcccttttaaaaatgccttctggacacagtagcttgcagagggtgacaaaggtaccactctcttttcctttgaatccttgagcaattgtcattttccaaattgaagaaagttgcccaagtgctggaggtgccaggatattgtttctatgacagtgaaatacattactgcccactgcgtygagcctagaagtttgtagctgcacatctgcctcactaattatgctcctaatgtgacagagggaaaagtacactgtaattttgatatacggtagtttcatgaatatagcattagtgcagaacttcaggggtgcctgtataagccagagaatgaggctgcattaaatatccagtaactatcaagctagcagagatgttctattagctgaatggcagagcatgcaatttagaagctggagactctgagttttctctcagcagcaatgtctaaacataattaatcagttgcttctcacagtaagtgacactaattagttgcactctaattgccatgtatggagtaatgttactccattctaagtgctctgtagagtagcgacat

SEQ ID NO: 601861 - DNA, 550 bp, Homo sapiens
ccattatcaggctgtgatggtgagagtttgagacaacttaatcattaattcagttggtctgggttttgttatggctttaattagattcagcttatctccgggtttaaaagtcttgaagatgagatctgcaggtcttgagatctatgcatcagcaagactctaaagacctrgctatactttacagcctagctatcatcattctttttattttttaatttatttgttttttttttttttgagatggggtctcactctgttgcccaggctggagtgcagtggctccatgttggctcactgcaacttccacctcccaggctcaagtgattctcccacttcagcctcccaggtagctgggactacaggcatgtgccaccatgcctggctagtttttgtgtcttttggggtagagacagggtttcaccatgttgcccaggctagtctcaaatttccgagctcaagcaatccacctgcctcagcctcccaaagtgctgggattgcaggtgtgagccactgtgcccagccctagttatcatcattcttacctgtaaga

SEQ ID NO: 601862 - DNA, 586 bp, Homo sapiens
ttgaaaattttgaagctaatcaatttttccatttctagggaaaatacactctattatagagcaaatagccacacgagaccattctatatgtttctgaataagaaaactttgagtctaaggcattggtctagtgtctaaaaaaatttttaccgggaaagtttaaagcagcttaaacgcactttttttcttttttactayggtgatagattggaggatcccatggaaaaatatggaatattagagctgtgaggagcagcataatattttaggaaatgagcatattgcctctcagcacttattgtgctataccacatggctaataagaggatggaaaataatttaaaccagaaatcataacagtagtatagtaactgctcttctggttattgtcattcttcttcttcttgctgttgttactattaatttacgtctgttccccatgtggtatatgatgttatatattacttataatttttgctgtacagacattcacatatgggctctgtcttatttgatcatacttgtcattaaaatacctgagagaacaatgtcctcttgatttaaaacaaaaaaagctttggtttta

SEQ ID NO: 601863 - DNA, 586 bp, Homo sapiens
ttgaaaattttgaagctaatcaatttttccatttctagggaaaatacactctattatagagcaaatagccacacgagaccattctatatgtttctgaataagaaaactttgagtctaaggcattggtctagtgtctaaaaaaatttttacckggaaagtttaaagcagcttaaacgcactttttttcttttttactatggtgatagattggaggatcccatggaaaaatatggaatattagagctgtgaggagcagcataatattttaggaaatgagcatattgcctctcagcacttattgtgctataccacatggctaataagaggatggaaaataatttaaaccagaaatcataacagtagtatagtaactgctcttctggttattgtcattcttcttcttcttgctgttgttactattaatttacgtctgttccccatgtggtatatgatgttatatattacttataatttttgctgtacagacattcacatatgggctctgtcttatttgatcatacttgtcattaaaatacctgagagaacaatgtcctcttgatttaaaacaaaaaaagctttggtttta

SEQ ID NO: 601864 - DNA, 584 bp, Homo sapiens
gcagttagaacagcttattctttcatattaagtagaactatgaagctgttgcctgtatttaagaaggtaataacaggtatttgcatttcttttctaagcacaacacatcggctagaactcaactagtatttcctgctaaaaatagacctcaatatgaaaaggagaggcaaagaagaagcaacagttatttccccttatagaaaattgcatttcttgggcttctttgtcctacgtagaatgaacattatgtaggttttggattcttccccttaaatcttggaatagctaaaatacactttaacttctcccaattactcactttcctagcatagaggaatttatttatatatagtttcatttatgtaatttcttaacatctgktaaaggctataaagagacagttcacataatcctcaaaggaaaatagactgagaataaactaggactgtatccaccagccaaagatgtgaatgccagacaaaggcaccttgatgatattttcccttccttcttgttttcttttaatttctttttgtctttttttgcttcttatagttagaactaaagccaaagactaggcatct

SEQ ID NO: 601865 - DNA, 586 bp, Homo sapiens
acatatacagatgcctagtctttggctttagttctaactataagaagcaaaaaaagacaaaaagaaattaaaagaaaacaagaaggaagggaaaatatcatcaaggtgcctttgtctggcattcacatctttggctggtggatacagtcctagtttattctcagtctattttcctttgaggattatgtraactgtctctttatagcctttaacagatgttaagaaattacataaatgaaactatatataaataaattcctctatgctaggaaagtgagtaattgggagaagttaaagtgtattttagctattccaagatttaaggggaagaatccaaaacctacataatgttcattctacgtaggacaaagaagcccaagaaatgcaattttctataaggggaaataactgttgcttcttctttgcctctccttttcatattgaggtctatttttagcaggaaatactagttgagttctagccgatgtgttgtgcttagaaaagaaatgcaaatacctgttattaccttcttaaatacaggcaacagcttcatagttctacttaatatgaaagaataagctgttct

SEQ ID NO: 601866 - DNA, 583 bp, Homo sapiens
ttacctacacatccctacccccatttccttctgctcttctaatctgacattctggaacgtcatctttattagcttgttgataatgttgtactgctaactaaatggcacttttactcatttctgtcagggtccaatcagcatggttagggtgatatttagggatcataatgatatgttagcagtgaataattttaacatattaactgtttattcctctggttgtcaggccctgaaaaaacagatgacagtacccttggttgattttacatttcttttggctgagatcactagtatattgaagtgttaaaatgtcacttctcacatttttctttgcaattaaagttggttcatctcacatttgtaattttttatttgtaaagaaagtaattggaaagtaagccctcttgttcattcagtttccccattagggaactttcatattaatgttataaatattcttaattattgtagtagcaccttcagcaaaatcaattgccatatcaagttgataatatyatacaatatacatatttacataaatcctcgaagctattattctattttttttccataagttattggg

SEQ ID NO: 601867 - DNA, 586 bp, Homo sapiens
  misc_feature 349: n = A,T,C or G
tttgctttgattagctcttaggcctttgttatacaaatgacaataataagagatggaaaaatttacagagccagagagtctgggatagtatattgggggaggagctatgtctaggcaaaagagaccagggtgagagaagagagaaacagagacagtgtgtgtataaatattaatatgtgtatatctttgtataaatatatgtatatttgtagagaacttgtgagacattaaaaacattcattaggtcttataagaaattaggtcttataaatataggtcttgtaaaaacaatgtcccttctcatgtcttttcaaaataatacagtaagtattttcaatacttcagttgngtttttttttatttttyttattttttattattatactttaagttttagggtacatgtgcacattgtgcaggttagttacatatgtatacatgtgccatgctggtgtgctgcacccactaactcgtcatctagcattaggtatatctcccaatgctatcccttccccctccccccaccccacaacagtccccagagtgtgatgttccccttcctgtgtccatgtgatctcattggtcg

SEQ ID NO: 601868 - DNA, 572 bp, Homo sapiens
gaaaagaaccttataaaaccatcagatcttgtgagaactcactcagtatcatgagaatagcatgagggtaacccccaccccatgattaaattacctctcactgggtccctcccacaacatgtggggattatgggagctacaattcaagattagatttgggtggggacacagccaaaccatctcagctactataacaaaaataccatacacctgatggattaaacaatataaatttgttcttcatagttctggagactgagatgtctgagatcaagtcccagcatggtctggttctggtaagaaccctcttcctagtttgcagatggttgccttgttactgtgtcctcacatggtagagagagaaagcaagttctctctttacaaamgcactcaccccatcatgggagctccatccttatgacctcatttaactctaattacctcctaaaagcacacctccaaatacaattactggatagagttgtccaggttcttggcctgttgaacaaagaattgaacaaaacacacaaagtaaaaaaaaagaacaaagcaacaaaaaacaaagcaacaaa

SEQ ID NO: 601869 - DNA, 596 bp, Homo sapiens
tgatttttgtgcatattagttggaaatctttcaagaatatttaggaatattctaagggaaaagtgtattaatatcccagaaaattaatttttttcccagtagcttaggaataagtcaaatggctaaatttcagcttttgttttggacatattatctaaatatatacataggtattatatatattcttatatactatatgtattcttatatactatatgtattatatatagtatatccataggggattggttccaggaccctctgtggataccaaaattgtgaatgctcaagttctgcagttagccatgtagaatccatagatacagaggatcaactatatataattattttaaaatctaaaaggacatatactaaactcatcagcatrattttatctggatggagggttaaagctgattgccaaagaggctatccatataataaacgattagtaaaatttcaaacattaaaaaaatacaaaatggagtaaaataataatagtagctaacgtgtactaaatcttcatcatgtcacacactctttcagctgttttgcatgttttaatttattcaatcattacacaactcttatgaggc

SEQ ID NO: 601870 - DNA, 596 bp, Homo sapiens
tgatttttgtgcatattagttggaaatctttcaagaatatttaggaatattctaagggaaaagtgtattaatatcccagaaaattaatttttttcccagtagcttaggaataagtcaaatggctaaatttcagcttttgttttggacatattatctaaatatatacataggtattatatatattcttatatactatatgtattcttatatactatatgtattatatatagtatatccataggggattggttccaggaccctctgtggataccaaaattgtgaatgctcaagttctgcagttagccatgtagaatccatagatacagaggatcaactatatataattattttaaaatctaaaaggacatatactaaactcatcagcataattttatctggatggagggttaaagctgattgccaaagaggctatccatataataaacgattagtaaaatttcaaacattaaaaaaatacaaaatggagtaaaataataatagtagctaacgtgtactaaatcttcatcatrtcacacactctttcagctgttttgcatgttttaatttattcaatcattacacaactcttatgaggc

SEQ ID NO: 601871 - DNA, 420 bp, Homo sapiens
ccaaccccataaagcaatcaaagttgaaatttcagagttcccagggttcaacagagacctttaaggtaaaagccagctttggtgcctatttatatcccaggattctactttctccttgtatttagagtatatacatttggttatttcaatgactgctcatagatatgtgtttttcmtattttacatggctacccagggctaggactatggctagtattttaaagtatttaagttcttcaagatatttaacttgtagtgctagagatataagctgagtctattatttcctttccaagatgcctctgaggttaaaactttacatttagaaaacgtgttcttaaaaaacaggaagaatcaaagcactttcctgaggaaacacaaaaataaaacaaaaatacgctgttttctatttaactcatt

SEQ ID NO: 601872 - DNA, 578 bp, Homo sapiens
gctataagtagtatctttctgcatttacagataaggaaactgaagtttagtaaagtcagttaaacaatttcatggcttaatgtggaacaaataccttcaaaaaaatctttccccaagaaaaacaaagtaacaaaccaagcaaaagacaaacaaaaactttccagggatattttgaacattttttagatccagtacatgaaaaagaatttacatatacctttattcacatctgtttctgatattgtggtaacttcattcagcttcttgaacttctttttctaaatgttcttattatgatctattctctactttctgttccgtaacctacaaaattatgctgtcttctaaaactacagagagaggaaaacctttattctctaaaactagtccaatgttcagggaatcttatgacttctgtgaaaacatggtccaggctgtacaaagatttaatgaaaatgtatagaatttaaatccaaaagaatctgttattacagataaggaagttgagacatagagagttaaggtgacttgtcaaagatagtgcctgtactwaattgaactacctgacctcctggccc

SEQ ID NO: 601873 - DNA, 581 bp, Homo sapiens
aatatatattttatttattttgtttgtaggaccctaattaaatgacatcagcaaagctggaaaatcctgcctatcaggtttaacacttactctggtagtcttctcaaacctttccaaggttgaagttactgatgattaacttctgagaatacccgtggtaactatttcagacctgtgaactatcacaccctcttcatgtcacacaaggcatgtcagcagacacctgcatcaagcgagtacctttttagaaggctgtaatgttagattttgtttttggaagtgacagtgaccgttctagccaccaaatggtaatacttcctctgagccttccaagaccttagccgactttcttccagataaagtcactacctgcataagactaacattaccmgtgaatcggctgttcctgcagcagaggctgtacctgaaatgtaactggcaatttcagctcatctatagatgagaacaaagggtcacatttaaaaggtttccagcccagggagagccagttagagcatgtgcaacacaatcagctgtacaacagtgaagggaagatgcagtattactcacagataaagagt

SEQ ID NO: 601874 - DNA, 581 bp, Homo sapiens
aatatatattttatttattttgtttgtaggaccctaattaaatgacatcagcaaagctggaaaatcctgcctatcaggtttaacacttactctggtagtcttctcaaacctttccaaggttgaagttactgatgattaacttctgagaatacccgtggtaactatttcagacctgtgaactatcacaccctcttcatgtcacacaaggcatgtcagcagacacctgcatcaagcgagtacctttttagaaggctgtaatgttagattttgtttttggaagtgacagtgaccgttctagccaccaaatggtaatacttcctctgagccttccaagaccttagccgactttcttccagataaagtcactacctgcataagactaacattacccgtgaatcrgctgttcctgcagcagaggctgtacctgaaatgtaactggcaatttcagctcatctatagatgagaacaaagggtcacatttaaaaggtttccagcccagggagagccagttagagcatgtgcaacacaatcagctgtacaacagtgaagggaagatgcagtattactcacagataaagagt

SEQ ID NO: 601875 - DNA, 465 bp, Homo sapiens
aattgttttcatgatttctttgtgcaaagctgggattagcaaaaagcaattcctagaagacaaaactttgaatcatttacagtcctgagatgccattttaagcaacgaaaaaaagcaatagttaggtctgggtgggatgggaaagagaaaagggaggcaatatagttactaagctcccaggagtcaagtgtatgcagacaaaagctgccgtgtaacatgtggtcttactagtttgtgtgtcatgtaatacttgactrtgttttaatcatgaaagggagatgactgaagaattccagaccttaaatagattccagaccttcgttgtctatacttctttatatttggtaaaggaaggaatgttagatgtagctctagggacatcttagcctagtgtcagacagtagtagtaggtatgggcctcccaccaaatgaggttaccagagtaatctgaagactgggccaagt

SEQ ID NO: 601876 - DNA, 415 bp, Homo sapiens
aaccctgtgaagttctgaaacacttctttggctcaaataaacmaaacgggttttttttttaatttttaattttcatatagtcatcattaatgtgatagaccataaagaattcaggatcaggaatctggataagttcatggtcagaaatgtagacataagttatgccacagtgtctaacctgacgggtcctggtttaacaaggcctcatagtcacatccctccatacactcaacttgcaattgcctgctttaagagacagggcaattagcgataaagagagagtgagagaattattgcattctgaacacatctgggtaagaggaaaggtcttccatcctaggatgtagccagacaaaggatgcccaccagagtgaagaatgaaacatagtcttgatttacagatttgcagtaaact

SEQ ID NO: 601877 - DNA, 602 bp, Homo sapiens
tccttgtagatttttgatgttagaactttgtcagatggataggtcgtaaaaatcttctcccattctgtgggttgtctgtacttaaatgtaaaacccaaaactagaaaaaccctagaagaaaatctaggcaataacattcaggacataggcataggcaaagatttttatgatggaatcaccaaaagcaattgtaacaaaagcaaaaattgacaaatgagatctaattaaacgaaagagcttctgcacagcaagaggaatatctattttaaaggatttcaaaggtgtaggaaggtacaaggcaattacaaggcatactgtgctgctgttaaaacctgttccattcctctccatagcttctggtggcttgctgggaatgctggcattccttgacttgcagttatgtgtatggtagatgcacctgatagcaatagcttaagcatacccagagaatgatcctgtatggcagatgcacctgaatgtgattccaaggaatctgggagttgccaacccggagatctgtcccctgtctgtaaggaacatctgagcccaccagccatactcaaggccytgagtttgggttgaatgaaggttaccaggtggag

SEQ ID NO: 601878 - DNA, 467 bp, Homo sapiens
gttagcattttaattcaggtgtaggtgtttagaaaaggcagttactaaaattaatcatatggggacatgatgtgtaaacttgtaaagtcaagctgcaagtttgggccatgctgagtagtaattccatccagtgatctctgcagaaagttccagtgggtgcagatatttaaaaccaaactctagaccagcctaattctagggctgtattagtccattcttgtgctgctggtaaagacatacctgagactgggtaatttataaagaaaaagaggtttaatgaactcacagttgcacatagctggggaggtctcacaatcatggcagaaggcaaaaggcacatcttatatggcagcagacaagagagagaatgagagccaagtgaaagggaytaccttataaaaccatcagatcttgtgagacctattcactatcacaataacaggatgtgggggggcaggcagggaacc

SEQ ID NO: 601879 - DNA, 587 bp, Homo sapiens
cctgcctttgcaaagaagatggtgtgtccaacgatgttgttgcctcctaatggaagtgtagttatgataaatgtcaaagagctgacacaataaatacaaaaaaagttaataaaataaagggagcaagggtcttgtgagtaacccctttgtaagtgagtactttggggagagtttgataaagctttaaaatgcagcatctcatttgaacttaasagctgaacagtcccttctataggtaaagaaactgagattgaaaaaggctaacttacccaagcacaaatgtatttgaatggggactaaatcacagttttgttgactctaacttcaaggcatgaagaagaaagcatttaagatgaaggaatcattgaaaaagtaagtcaggtagagaggaagggaagtaacttaggcaacatacgtaggactaaggtggattgcttacttagggagagctgcaaaagcagtgaaaagaaagattggaaatttaaaagataagagcaatagatattcagaaatgtgttctctagacagtgaggagtcactgacatttctgaatagaatggtggtataatgaacagagtgaagcacgg

SEQ ID NO: 601880 - DNA, 563 bp, Homo sapiens
acttgtgggttgtgtaaagagaggtgtcatggagaaaggtgctttaaaaaaaaattgaatgtagtccaacaaagatgtggcagactacatatttaaaaggttgtgaatgcttgcagaaattgattcattcacactgttgtgaatcatttagcacacacttcaaagagattttagcttcttagtctctgcctcccacttcctgagaaaggctgttaatcaaaatgaagactcatagatacagccttgggaacaggacaaagggatgaggatgaaggaacacggcatggaacacttttactcctctaagggcagtttgaatttttttggtttgggtgtttctttcttttttctttttcttttttttttgagaagtaaaggtataatgcagtagcatcacttactatacagattcttagacggggktcattattatagttatacagaaacataagtaagtccctatttaggaaatgcttctaaatgtgcccaagtcaaaaactacactacccgtttcacttaaaagcagctctcctctgaaattattagattatagagtaaaggag

SEQ ID NO: 601881 - DNA, 314 bp, Homo sapiens
aaaaaaaaaaaaaaaaaaatacaaatatacaaaaattaattgggcatggtggcaggtgcctgttatcccagctactcaggaggctgaggcaggagaatmgcttgaaccagggaagcagaggttgcagtgagccgagatcacaccactgtgctccagcctgggtgacaagagagaaactccatctcaaaagtaataaaaataaataaaaataaaacacttggccatgagcatgagtattttagcggcttttcctatttactcaaataggtttgtcaaccacatgttattccaaagatttgtcaaccacatattac

SEQ ID NO: 601882 - DNA, 596 bp, Homo sapiens
acaaataataacaaaaataggtagctttaaatagatttagatataaatccgtataatatgaagtgaaaagaaaactctgccaggtgcagtagctggctgggtgtggtggctcaagcctataatttcagcattgtgggaggccaaggcaggtggatcacttgagctcaggagttcgagtccagcctgggtaacatgaccaaaccctgtctctacaaaaaatacaaaaattttccaggcatagtggcatgtgcctgtagtcccagctacttgaggtgggaggatcgcttaaacctgggaggttgaagttgcagtgagccaagattgtgccactgcacttcatcctgggtaacaaagtgaaaacctgtctcaaaaacaaaacaaaacaaaatagtatagtagtctaatttttattatgtaaaatatacagacttacaaataaaccaatgaatacatagarctactataaggacccatctacttttaaaagtaattatctctgtggtacagctattgaggggatggcaagagcattcttttgtgtttctacgtttaatgaaatgcaatgtattaatcttttgccataagcatatattatg

SEQ ID NO: 601883 - DNA, 391 bp, Homo sapiens
tcctgtatgaggtgtctgttaacccctgctgggaggtrtctcctagtcaggaagcacgggggtcagggacccaacttgaggaggcagtctgtcccttagcagagcttgagcaccatgctggaagatccgctgctctcttcagagtcagcagacaggaatatttaagtctgctgaagctgcgcccacagctgtccctccccccaggtgctgtgtcccagggagataggagttttatctataaggccctcctgggtgctgcctttctttcagagatgccctgcccggagaggaggaatctagagagcacaaattaaatttaagtaaaagtgacagtgttaactttggacaatgtaggcttcaagacaaaaagcataaaatagaataaaagaga

SEQ ID NO: 601884 - DNA, 610 bp, Homo sapiens
atgacatttgaaacctacttatttcttaaaggaatcagatatggctatttagcagtgttctgtgcaagtgtgccatgctaaggggtcgaacactgctgagagtctagaacttgtttttcataagctaaggctgagtggtcttctatctagccataaagattgatctctaagaaacgaagagacatcttcagattctgtttcctgaaaaaaaagtatggtttcacatttggtctaaaaacagacccttccaacaaatatattagcatcattaaaatgaaacacaaactgccagccttccttggagactcgaacttagctatagacatggagcttgtacaaacaacctgaaatatgcaacttgcagcttccagtcattactagtcaaacagaatttaatatatacttaatgaatatctcaagagaaaaaaaggagacaccctcattttgcagctgycatcagcatttgctcctgaatcatcccagtttttccctcctgtaataatcaaataattctctagcctttcatgattttgctgtacatatctttttggctatctaattaacactgtgatttttgttctacatatgttgtgtaatagtagattctgtc

SEQ ID NO: 601885 - DNA, 589 bp, Homo sapiens
aatgtgtttgatgcatagctcttgaccattttcattatactttgaagaaagaagaaaagaaaatttgagtaaacctgtgcttactgatgaaccctaactctaaatagcacctggactgactttgtttatagacattgatgccttacagctagtacagagtttaaagccaccttaattttagatccatctttaaaatgttttgtttataaattcaaagattcttatgaaraattaaacacccatttgtactctaaaaacattccataaagacacaataaatgagacaagaattattagcaagtctcttaataactaactgaaaataacagaataaataaaccacaatacttaaccactgtcaatttagttcagtaccctctttctagctataaaactaagggtggggagtatttttataggacggtgtagtggttctctacagaatcaacttcaaattagtgaataaaattaaatctattataaagctatttttcttttactttaggtactgcattccatatattaactacctattatgtaaaatagctcttatatttatttgtgtaaaggctgtcaagtatcctgaaag

SEQ ID NO: 601886 - DNA, 514 bp, Homo sapiens
gaataaatctctttggatattaaaaaaaaaattaaaacagaaattttaaaaaatatttattacttatctaaactaataaataacccatcatatgtaaacataaataacacttttaatgaaaagcagctattttccaagacaaaagtggcattgtttatcatttttttgatggctctttaatgtctgctttattagaagacagtggtattctcgtatctgcttctatatatagtctgtgatgatgttgtatatcgcgcactgctagaaaaactccattgtactcttgtggagaataagmatgaaaaacgcaaatacagtgaaaccccgtctctaccaaaaatacaaaaaattagctgggtgtgtggcaggtgctgtagtcccagcttttcgggaggctgaggcaggagaatgatgtgaacccaggaggcagagcttgcagtgagccgagatcacaccactgcactccagcctgggcaacagaaggagactccatctcaaaaaaaaaaaaaaggaa

SEQ ID NO: 601887 - DNA, 598 bp, Homo sapiens
gaggcttagcctgagaagggttcatggtttcacccaggaaggaattcaggggtgagccggaggtgttagatggcaactttgtattttgttttgttttgtttggagatggagtctggctctgtcatccatgctggagtgcagtgacacaatctcagctcactgcaacctctgcctctggggttcaagtgatccgtccaccttagcctcccaactgggactataggtgtgcgccaccacacctaactaatttttttgtatttttagtaaagataggtttcaccrtgttggctaggctggtcttgaactcctgacctcaagtgatctccctgcctcagcctcccaaaatgctgggattacaggtgtgagccagcatacctggcctaggcagcaacttttattaaagcagcagtgtacagtagcagcagagttgctgctccttgcggagcagggctatcccatagggggcatgcccagagtagcagctcagaggcagtcggccgtgtatttttagccacttttaattacatgcaaattaaggggcagattatgcagaaatttctaggaaaagcgtggtaacttctgcgttgttgggtcattg

SEQ ID NO: 601888 - DNA, 610 bp, Homo sapiens
ctcactttgccttccacgctaaaggcccattttgaaacctcgaaagcctacaaagctcttctgggggcagtgggtggggtattgggcagggacaatgttaaccagttacccaatagctgtgatctttaaacagctcaccctgacaacagcctcttgtagattttgatgggaaagttttcaaaattccccaatgtctgcatcaagttgtaaactgaagcagtaggagacattcttctggcttctttagacaaggttgaagcagcctgaaaatactcagatggtggtsgtttggaatgtggtgggaaaaccttttctcaccagtaggataacctgtcagccataacaacaatgcaggcactgtttgcagctgagtaactcacttcctggaaggcactgaccacattttcttttcctcttaaagcaaataaatgaattaaatggtttaaacacattttgccagcaaatagaaagattatttaatacttttgggtaaaaaaattttgtcctctaaatttagcagctttgcctgtatttctcagacactcagaaggggttgcggggaagaagcctccaagaatatacttcagaaacatttttttccaaatgtatt

SEQ ID NO: 601889 - DNA, 601 bp, Homo sapiens
attgtgacagtacaaacaggtctcttccccatcacatgcaacagtaaactgcattgctgggaggtggcaaactcatgcaaaaaggaaagcacttgacaagggctgagtgaataatgctgcgagcttaaaaagaccctgttaaatgcctttgtatgttatttgtatacaatttctgattcttaaaaactgaaaattatatttttgattctttttcttctcgcatttttatagtgatcaaataagtttcctttaacattataatattaaaaataattcaagagaatgtattttttcatattatrtattaaaatgaagttaggtcatcaagggaacactaacgagggacgctattgtggtacagtgcattgctatatatgtttagaaacattaggggtcaattgaaatcctgatatgatttaatcagcatttaacatgtgatttattctgaaaatccagtagagaaactatgaaattcctctacatagtagccattcatagactgaaatgccttttagtagaaagaatggaaaacgtgttcccaaatgggaaacataatcccaaaagcgatccacaacccatattcaacatctcaacaatatga

SEQ ID NO: 601890 - DNA, 601 bp, Homo sapiens
attgtgacagtacaaacaggtctcttccccatcacatgcaacagtaaactgcattgctgggaggtggcaaactcatgcaaaaaggaaagcacttgacaagggctgagtgaataatgctgcgagcttaaaaagaccctgttaaatgcctttgtatgttatttgtatacaatttctgattcttaaaaactgaaaattatatttttgattctttttcttctcgcatttttatagtgatcaaataagtttcctttaacattataatattaaaaataattcaagagaatgtattttttcatattatatattaaaatgaagttaggtcatcaagggaacactaacgagggacgctattgtggtacagtgcattgctatatatgtttagaaacattaggggtcaawtgaaatcctgatatgatttaatcagcatttaacatgtgatttattctgaaaatccagtagagaaactatgaaattcctctacatagtagccattcatagactgaaatgccttttagtagaaagaatggaaaacgtgttcccaaatgggaaacataatcccaaaagcgatccacaacccatattcaacatctcaacaatatga

SEQ ID NO: 601891 - DNA, 579 bp, Homo sapiens
taacaatttaattttgttggcatactgtctgttaaagttatcttataactagtctacctgaagtagacctattcgtgctaccaggcagccctttcaagaacataactgtcttgttgcaagggggaaaaaaatcattatgcagtacacactgatgtattcaaatagggaagcaaatgtgatcaagattgttagtcagggcctcatttaaagctgaacattgtctacaacaacagttagtttaattgtctacatgtggaacacttccttttagatgaaaagaaatgcagttcgggtcaggtgtagtcaccatatcagcaacagtagagagacatttaactttttgaaaggaatgcagatatgaaagtatagataggtatatattgagattataaaatacttagaaatatattgttaacatgggcaaaatggagaaaactccattyccaaggatgaatatcataatatttgtaggaagtacacattacttcaaaagagaaaagattgtatttctccctcctcactttttttttttttttttaaggttttaagatcttttaaatagaatgaacttaggctttg

SEQ ID NO: 601892 - DNA, 574 bp, Homo sapiens
ttttttctgccctgtctgttcccctcatatctggttcttacctatctgcacacttggccttgacttgacacttaatactgtgccttgttttctagattgttcttgcctggggtagtgtccatggctccccttttctccctgccctgaagccacagcccacagtaccatccaagtccaggccaggttctgtattyctagtcataacctagacacagactgaggctcccattcctcccaaatctgcatttgctctggaaggaatttagtagcactcgtgagtttcatagcatgaattagtttcctggtatttagtcaccatgggtgaactatctcatagtttctgcactagcagagcctgcaccagatcctgatattctcgatcttttcagaaaatgggaaaatgtaacacccacactgaaactgccagggagccctaagcccatcacagtactacagagaacacaactgccagaaacctcggtgagacattttggttggcctaatggcgcagagcttgaggtgccaattggtatgagggggagacaaataacattctgcaaatggaccagagcca

SEQ ID NO: 601893 - DNA, 575 bp, Homo sapiens
aaccaggggcaaggactacatcaacttgktaactgtgaggatgtatctttaagatttcacaatggatcctcttctaccaaataattacattgtgtaaactatcagacatttcatcttaatttcgattatctttatttcatattttcaaggatctctgtaacagtacagatacctaaacacttaggttcagtttttaggaaggacttatgacaatttcgagaacttatgttatcctttacatattgtgcatttacatattataaacgacatacagattttttgaggtaatttaagactaaaatatttgctctctgttgggatgattagagtgacttactggttctctactcagactttcccaaatacgactttaggaaaactaattttagcaactaagtgtttaaaaatctgccttatcaatatataactcacaggaactgcaatttttcttaaaatcatcataatgttattgcaagcctgagcccaaataatttctctccaacgaaaatttgttaatcttgtttgctgtaccacactatctaccattttctatagttaaacaaaaagagactatc

SEQ ID NO: 601894 - DNA, 575 bp, Homo sapiens
aaccaggggcaaggactacatcaacttggtaactgtgaggatgtatctttaagatttcacaatggatcctcttctaccaaataattacattstgtaaactatcagacatttcatcttaatttcgattatctttatttcatattttcaaggatctctgtaacagtacagatacctaaacacttaggttcagtttttaggaaggacttatgacaatttcgagaacttatgttatcctttacatattgtgcatttacatattataaacgacatacagattttttgaggtaatttaagactaaaatatttgctctctgttgggatgattagagtgacttactggttctctactcagactttcccaaatacgactttaggaaaactaattttagcaactaagtgtttaaaaatctgccttatcaatatataactcacaggaactgcaatttttcttaaaatcatcataatgttattgcaagcctgagcccaaataatttctctccaacgaaaatttgttaatcttgtttgctgtaccacactatctaccattttctatagttaaacaaaaagagactatc

SEQ ID NO: 601895 - DNA, 575 bp, Homo sapiens
aaccaggggcaaggactacatcaacttggtaactgtgaggatgtatctttaagatttcacaatggatcctcttctaccaaataattacattgtgtaaactatcagacatttcatcttaatttcgattatctttatttcatattttcaaggatctctgtaacagtacagatacctaaacacttaggttcagtttttaggaaggacttatgacaatttcgagaacttatgttatcctttacatattgtgcatttacatattataaacgacatacagattttttgaggtaatttaagactaaaatatttgctctctgttgggatgattagagtgacttactggttctctactcagactttcccaaataygactttaggaaaactaattttagcaactaagtgtttaaaaatctgccttatcaatatataactcacaggaactgcaatttttcttaaaatcatcataatgttattgcaagcctgagcccaaataatttctctccaacgaaaatttgttaatcttgtttgctgtaccacactatctaccattttctatagttaaacaaaaagagactatc

SEQ ID NO: 601896 - DNA, 599 bp, Homo sapiens
aaccaggggcaaggactacatcaacttggtaactgtgaggatgtatctttaagatttcacaatggatcctcttctaccaaataattacattgtgtaaactatcagacatttcatcttaatttcgattatctttatttcatattttcaaggatctctgtaacagtacagatacctaaacacttaggttcagtttttaggaaggacttatgacaatttcgagaacttatgttatcctttacatattgtgcatttacatattataaacgacatacagattttttgaggtaatttaagactaaaatatttgctctctgttgggatgattagagtgacttactggttctctactcagactttcccaaatacgactttaggaaaactaattttagcaactaagtgtttaaaaatctgccttatcaatatataactcacaggaactgcaatttttcttaaaatcatcataatgttattgcaagcctgagcccaaataatttctctccaacgaaaatttgttaatcttgtttgctgtaccacactatctaccattttctatasttaaacaaaaagagactatcgttacaattgtttaataatacatt

SEQ ID NO: 601897 - DNA, 564 bp, Homo sapiens
gggtttcaccatgttggccaggctggtcttgaactcctgacctcaagtgatccaccttcctcggcctcccaaagtgctgggattacagacatgagccaccrcacccagcctaggcaatggtttttttttaaagaggtaggaggctatagatggatttacctgtttgtttttggttttttttttcttaaaagaggagttccaggggccataatgaaaaagctttgagagcatattgagcagtgagatattgattcaggagaaaggaggttctaagcagtgttgtaattgaaagtgcagaagaaaggggttaacctcagctttagctcccatcttccatttcaatctttgtgtcaactttctcattctttccatctggagtcaagtggacaatcaagccttcataggtgaaatatgcctactattatttatatctttgcattgttgcaagtgattgcagcagttattgtactgcaaactgacagatacaggtaagaaaactttataaacgtttaccagagtccaagttcctccagatcactgccgtacaatgactcctaattgaga

SEQ ID NO: 601898 - DNA, 621 bp, Homo sapiens
agactgtccataggaattcttaaagtagtaagctagcagcatgaattcaaaatgtgaatcatttgtttaaaaatctgcacacatttttttagaattacctcataatmagcctcactgcttaaaaccatggttcaaacttgttttctgtacctaaatgatccacatgctaaagatattcctatttaattccatctttcattgacagaaaaaattctaagctggagtcaccccccactagcttcccactatgttctgcaggaatatcagagtattggaaatgttatagcagtttgaaaactatccccctagaacagtatttttcaaatgcctggttgtaacccattagcaggctgtgtgtatttagtcagtcataaccagcatctaaaaacaaaatagaatcgaatacagtacgtttatcacacacaacaaagataaataaaaggtaactttttgtatcagaggtatatctatctatctatcaattggctcaccatgtaaaagctatttttactccctatggattacagggtcaaaagaagactgaaagctactggccaagagaatggataaacaaattgaagtgtatcatttcattgaaatattgcacagcaactaaatact

SEQ ID NO: 601899 - DNA, 621 bp, Homo sapiens
agactgtccataggaattcttaaagtagtaagctagcagcatgaattcaaaatgtgaatcatttgtttaaaaatctgcacacatttttttagaattacctcataataagcctcactgcttaaaaccatggttcaaacttgttttctgtacctaaatgatccacatgytaaagatattcctatttaattccatctttcattgacagaaaaaattctaagctggagtcaccccccactagcttcccactatgttctgcaggaatatcagagtattggaaatgttatagcagtttgaaaactatccccctagaacagtatttttcaaatgcctggttgtaacccattagcaggctgtgtgtatttagtcagtcataaccagcatctaaaaacaaaatagaatcgaatacagtacgtttatcacacacaacaaagataaataaaaggtaactttttgtatcagaggtatatctatctatctatcaattggctcaccatgtaaaagctatttttactccctatggattacagggtcaaaagaagactgaaagctactggccaagagaatggataaacaaattgaagtgtatcatttcattgaaatattgcacagcaactaaatact

SEQ ID NO: 601900 - DNA, 621 bp, Homo sapiens
agactgtccataggaattcttaaagtagtaagctagcagcatgaattcaaaatgtgaatcatttgtttaaaaatctgcacacatttttttagaattacctcataataagcctcactgcttaaaaccatggttcaaacttgttttctgtacctaaatgatccacatgctaaagatattcctatttaattccatctttcattgacagaaaaaattctaagctggagtcaccccccactagcttcccactatgttctgcaggaatatcagagtattggaaatgttatagcagtttgaaaactatccccctagaacagtatttttcaaatgcctggttrtaacccattagcaggctgtgtgtatttagtcagtcataaccagcatctaaaaacaaaatagaatcgaatacagtacgtttatcacacacaacaaagataaataaaaggtaactttttgtatcagaggtatatctatctatctatcaattggctcaccatgtaaaagctatttttactccctatggattacagggtcaaaagaagactgaaagctactggccaagagaatggataaacaaattgaagtgtatcatttcattgaaatattgcacagcaactaaatact

SEQ ID NO: 601901 - DNA, 635 bp, Homo sapiens
tttaaacaaacacatttagcaaaatagtcctgttcctttggttgagggagggcatgctctctacatcacggtacataaaattgagtttgtcaatagaatgaataaactacaaacatggatagctgctttagcctaacacatatgctttaaaaccrtctttgcaaatagtctataacgactttaagctgtttaaatgatgctttttaaattataaaataatttctctaaggtattttatcttccataatccttaccacaaccctgtgagatgaatataattatttgcattttgctggtaataaatatggtgttcagaggttcttaaaaactgtccatggttacatactgagaaaatcagttgaatgagattgaatttaaggtagtttaactccatgcattttatgctaatccagtcgtttagttacaatccctttttcccgaacgtttagacagacagggacatctggagaggcagtatgagtgtaaggacaaaagggtcaaatgcagatgggggacacttggagtctcaactttcctccatgctcactcacgtgtggcctttgtaactgagttgtccaaaaataagatacactttgattagaattgcagtgcacagcatacgtctgcatataact

SEQ ID NO: 601902 - DNA, 635 bp, Homo sapiens
tttaaacaaacacatttagcaaaatagtcctgttcctttggttgagggagggcatgctctctacatcacggtacataaaattgagtttgtcaatagaatgaataaactacaaacatggatagctgctttagcctaacacatatgctttaaaaccgtctttgcaaatagtctataacgactttaagcygtttaaatgatgctttttaaattataaaataatttctctaaggtattttatcttccataatccttaccacaaccctgtgagatgaatataattatttgcattttgctggtaataaatatggtgttcagaggttcttaaaaactgtccatggttacatactgagaaaatcagttgaatgagattgaatttaaggtagtttaactccatgcattttatgctaatccagtcgtttagttacaatccctttttcccgaacgtttagacagacagggacatctggagaggcagtatgagtgtaaggacaaaagggtcaaatgcagatgggggacacttggagtctcaactttcctccatgctcactcacgtgtggcctttgtaactgagttgtccaaaaataagatacactttgattagaattgcagtgcacagcatacgtctgcatataact

SEQ ID NO: 601903 - DNA, 450 bp, Homo sapiens
gtgatgtccaatgggcacttccaactcaatacgtcttaaacagaactcttgatcttccccatttccaaaccctggcaagcctttaacctctctgctcttatttccttgcctagaatacagggcaygtaatagcaacagtgcaggctggagctacagtgcccggcttggcactgttcacttgctgtgtgaactacttcacctcttcatccccaagttccctcatctgtaaaatggaaataacaatattaacagcccctacgttacagggttgctgtgaagcggttagaacagtgtctacagggtcagcgctgtaatacctgttggaaattattcttacgaagaccaaatgaggtaactttgtgcaagtgctgtgtaaacgacacagtgctaggcacacacttctttcagtaccaatgccactcgagtctgtgaaaagcaaatgtcaataat

SEQ ID NO: 601904 - DNA, 488 bp, Homo sapiens
aaaaacaggctcattagtgtctttctatctagttatttttaatgcaaagtgcwcttaacattgagaactaatacatatttaatctcttaccagtggtaattgtgaatctaatttttaaatttttttattcaatgtgttatttaaaacaatttctttctagatcagtaaagacattgctttagataactttacatatgcaaacttttgcacaagattgtctttgattataataaaatgctctggaaacttgctactcaaaaaatggcttaaagaccaggagcatcagcatcatttgatgtcttgttagaaatatagaatcccaggcttatctccagaaatcaaaatctgcattttaataagatccctggatgacatatatgcacatgaaaattctacaaccacttctttacagcaccttctctcctagtgtcaaatactacaaaactgcaatgtagagattcaaaagaatgaaaggaaacataaaaggt

SEQ ID NO: 601905 - DNA, 643 bp, Homo sapiens
gttacaggtgtgcaccattgtgcctagcttcacttttgttttatgaacaacacagctgttatttgtaattagctttctactgtcagtaccaaaaactattgttttgttataagcactgtgaaaataaaatcgtaagaggagggatatgagagtcaaatagcaaacacacacaccagaaattggacagacacattatttattcaaaagttttatcaaaataaaggaaaccgtcacttgaggtaggtttcagactgaatttatcaatggcttgtggaaattgtgttcattttaatagacagcaggtgttaaaacaattgaaaagtgaccttctctgcatctggattacaaaagctgcctcagtgtttgtgaaaaaaacaggataataataaaaaaaaaaccaacatcctgcctccagctagttcctttttcttttttctcmcactgggcagttttattaatagataatagcagcagctcataagaaacacacacacaaatttacactcatttcccagtggaagtgatgtttatttgacgtaaaatggctttggtgtttgtgagatctattctctttggaactctattcagaaggttacatacacattgctcatatccctttaaattagtttactagcatattctc

SEQ ID NO: 601906 - DNA, 587 bp, Homo sapiens
tcaatgctcccttcctttcctttccacaaaagcaggttactaagacccagtaaaccctccrgccggcgcgcgacagctgcttttgagcccttgcttctttttcccctgtacaatttgaatgttctgtgcactgaagggggactcagggaccggccagtcagcctaatgctggggcacaagtgatgattagaatgctatgatcccctgtcttgttttgcagacaccagattggagccttcattgtggcctcctccaaatccccacgggcacctgggaggagggaagaggcacagattcaccctgcagagaaccaagagagctgggaggcagagatgccagcatgggaaacccacccaggcaggacctcatgaagcagaggacagcatgcaggtagcgctggcctggccgggccctcaggaagcgacctggctctcctagccccaccggtctgtgtcccttggaaatcaagtctctgaattgaaaatgttgagaaggaatgaaaaacactcccgagtgacttcttttttcttcaatggaaagaccctgcacagggacccggctctgagctggtgacaggacagcccacc

SEQ ID NO: 601907 - DNA, 614 bp, Homo sapiens
actgaactgacaatcagtgagttaacagtaagttgcagctgcctctggaacaataggcatatactatcccatttgcatgaatcttcaccattccctattacattactattaatgtgtatgaatgtctattattgtatccaaatactgaatagtatgccattaaatcactagagtataccagtgatttaatacccagtctaattagcttatttaagttacatgcatagcgtcatttatatgcatgtgaaaacacctaaatattaaaacaaatgtgggagaagaacccagagttgaaaaactaaacaaatttaaatgawgttttcacttatttactgttacgttaatggatgtggtgagaatctctctttagtcgtgaagagagatatatctatgattttcagtctgttggataaataactgtgcccaaattaacattcatgtaaatggtgaggcaaatgtatcaaggacatgacatgatttatacaccaaaaaatgtgacacataggcagtgtttttgccacaacatccagatggaatacatgacatgatctaaaagatggaaatctttccattcaaaacaatgtgatcacagagccaacatgctctttctcctc

SEQ ID NO: 601908 - DNA, 433 bp, Homo sapiens
agaattcttgatatggagtaaattttagaaactttctagtttaatctctttattttctgggtaaggaaactgagtcctagaaaaatgaaatgakttagccaacatcaaattactttttggagtctccagctcttattttaatattctttatgtcatagttgtgtgtataacattgacagaagagggcagaggattagtgaagaaaaatagccctccccaaaagaaactgattaaatagtctgacaaggataagataaacatggagagaatagagatcaaatgaatgagttgaaagaatggagaaaataagaaagaaaatgccgtggtaagaggaataacaaaaaaacaggctacctgaaattaattgttatattaagagtctccacttcataacttaaatggatgtcctcagttaaaacatggaatggtaaac

SEQ ID NO: 601909 - DNA, 432 bp, Homo sapiens
gaattcttgatatggagtaaattttagaaactttctagtttaatctctttattttctgggtaaggaaactgagtcctagaaaaatgaaatgagttagccaacatcaaattactttttggagtctccagctcttattttaatattctttatgtcatagttgtgtgtataacattgacagaagagggcagaggattagtgaagaaaaatagccctccccaaaagaaactgattaaatagtctgacaaggataagataaacatggagagaatagagatcaaatgaatgagttgaaagaatggagaaaataagaaagaaaatgccgtggtaagaggaataacaaaaaaacaggctacctgaaattaatygttatattaagagtctccacttcataacttaaatggatgtcctcagttaaaacatggaatggtaaac

SEQ ID NO: 601910 - DNA, 496 bp, Homo sapiens
tgtctgacaaatttaaaaagcaaccatcttaagcaagactaaaggactttttattggtaatctctaaggatttaactagttccagttgaatcatcagaaactatcagaaactgcattttctttccttgctccccttttttgctcaggtctcttatattgtgccaaatacattgatttaaaaacttcctcagaacacwtctataagacatgactgatttttgaacacgatcttaggcactgttaacaaatgatatttcaatgaatctagttgtctgaaataatcaaaatggactactaaagcttttcatataaacagacccttcataaatttttaaagctatctaacaccctaatcatctttagtaatgactgcaattcattcctaaaatttatttgttacatttagatgtctctgtattatactttgttaataatggtgcttatttgctcatgcacatggattgttaagaggtcatatttgtcagcttgctagcag

SEQ ID NO: 601911 - DNA, 628 bp, Homo sapiens
aagcaaatgcaacttttgtaaccaagttaaaggtagccatgagaatctctatttgattacaagtaactttcttctgttcttccttgttttagaaaataaagctatgaacttctaaaaaattaaaacaaatctctgatattcagggggaatagaattcctggaaaaagacagtgaaaacattcctattgctccacacagaacattatctacaaagtatgatagacctaaagttaatgaattcactagccattgcttccacaaacataaatcagtaatatgatttttgccttgactgaggcaaaatgccaattaattgaaggtatattttctaaaatggtaatttaaataaagtttctttattaaaaatgtgggattttcattsagttcagctctcccatgaagcacctttattagagaattaatactaaaagccagagacagtagtaatgacctttagggaaaaatggattttaaaatattaggcagtctgcatttttaatttgaattttaaaaacatgatctaaattagagctactggatagaaataggtaggtgttaagctgggtagaaagctcagtgtatttggtcaaggggttttcatttgctctcaatgttgagccaaatttgt

SEQ ID NO: 601912 - DNA, 602 bp, Homo sapiens
gaaggtatattttctaaaatggtaatttaaataaagtttctttattaaaaatgtgggattttcattcagttcagctctcccatgaagcacctttattagagaattaatactaaaagccagagacagtagtaatgacctttagggaaaaatggattttaaaatattaggcagtctgcatttttaatttgaattttaaaaacatgatctaaattagagctactggatagaaataggtaggtgttaagctgggtagaaagctcagtgtatttggtcaaggggttttcatttgctctcaatgttgagccaaatttgtgctaacatgtgagcatgtatgaatatataacttggatgtttatgtgccttgatgtaattgaaataatacttgagtagcaatcagaacartctatttttaaaagcatcataaactggctgtgtaactgggaataaagagaaaaacccctctttgcatgttgaagctctttgaaagcactaaaaatataataacataatgagtaggtcattgaaagggaagactaaacttctccataaatccaagtattttccagagttaatcaagtatatattgagctttaggcttacat

SEQ ID NO: 601913 - DNA, 598 bp, Homo sapiens
aaaccaaactttaaagtgttacagctttaaatttcataaagcctgaaaattctcaacgccattacctgttaaggattttccataataatattgaatatataataaaaactcacaattattattcagagacattatgtagaaataactgaaatatatatttgtgtccagaggattcattcacgtattgttaaggactaagaaggttttgtgaagcctagaagaacaatattgcatctaacaaaacaggtcagtgtgaagttgctttattgccaggacaaggcaacatcccagtagccattttagatcagaggatgaagaaataaatgggctcaagacacaaawggcttgcgagaataccatttcctcagggagggaaaaagggttagagaaagatataaagggtcaaaaatatttttaaatttatgctaatgttaaataattaaatttaattctaacattacttagcacattcagcagatgatatgaaacgagaaaagatgcaattgcacaaatcagcaaatggatcccttgcttagttaaatgttttagcaatcggttcagttggaatacagtggttaattagagtagattctggcta

SEQ ID NO: 601914 - DNA, 547 bp, Homo sapiens
tgcaatgataagataaaatgcgcttgtgcttgtcatacatcatttggtagagagcccatatggaaaaggcaccagatgaagaacaccttggttgaacgtgatatggtctggctgtgtccccacccaaatctccccttgaattgtgataatccccaagtgtcaagggcagggccaagggaaaaaaaaatgaattatgggggtggtttcccccatactgttctcatggtagtgaataagagtcatgaggtctaatggtttcacaaatgggagttcccctgcacaagctttcttatctgtcaccatgtaagacgtccctttgcycttccttcatcttccaccatgattgtgaggcctccccagccatgtggaaccatgagtccattaaaccattttcctttataaattactcagtcttggatatgtctttgttagcagcatgagaatgaactaatacagaaccattgctttggaaaattaaatatatatatttaaatacttgtattcgctatataaatatatatagttaatactgagtgtcaacttaatt

SEQ ID NO: 601915 - DNA, 598 bp, Homo sapiens
tactcatgtattatcagtttggaatgaccaccctgacgagtgacagcaagactcagccccatccacggacagttccacacatgacatctctgtcatgcaggactcagaaaggacaaaagccatgcagttgctgctctggattcttattcaccagtgaccatcagggatgactaaagacatctagtcacttttttaatagtctggatgcttggatgaaattccacttcagatggcccaatagtacacatactcacttacacatttatgagtgcacatgtgtacatgtaaccttgaacacttgcatgcttaaccatcaagatagtgggagtaatcttttaagcatacgctaagaataattcatgttaacataaaaataggcccaagcacagcagtttattagttagagtgagawtgagttcatacgtaatgttaacagtggctttgaacacaatttaaagttacattttgttttaaaaatcatacatttataataaaaatatgtgaaatatgtgagagtggtcataagtttggatggtagggaaaatgacaagatctttagagaagaaacacatttttgtgtgctaaaaataaccaatga

SEQ ID NO: 601916 - DNA, 598 bp, Homo sapiens
tactcatgtattatcagtttggaatgaccaccctgacgagtgacagcaagactcagccccatccacggacagttccacacatgacatctctgtcatgcaggactcagaaaggacaaaagccatgcagttgctgctctggattcttattcaccagtgaccatcagggatgactaaagacatctagtcacttttttaatagtctggatgcttggatgaaattccacttcagatggcccaatagtacacatactcacttacacatttatgagtgcacatgtgtacatgtaaccttgaacacttgcatgcttaaccatcaagatagtgggagtaatcttttaagcatacgctaagaataattcatgttaacataaaaataggcccaagcacagcagtttattagttagagtgagattgagttcatacgtaatgttaacagtggctttgracacaatttaaagttacattttgttttaaaaatcatacatttataataaaaatatgtgaaatatgtgagagtggtcataagtttggatggtagggaaaatgacaagatctttagagaagaaacacatttttgtgtgctaaaaataaccaatga

SEQ ID NO: 601917 - DNA, 624 bp, Homo sapiens
cgtgtgacaaatatttaattttcaatataagcacagtactatgttatgtttggggaagcatgtgaactaagaaccattatttattgagaattttakagaacatcatacacatttcctgtctacaagaagacaagaatgggcaaaataatcattgtgttatagcatgctataaattcaaggtatgcttcaagtgtttttgaagtattctcctatttattcttcaagtactggaaatcttcaaatattgaagtatctgggcgtcaagtccccattgtgctttgaagctaatggagcagacagacatgtcaaggggcagtccccatgcagcacggtgaatgccagcacaggccttggtgcagagtgctctggggccatgctagtgctcttactccagctttgggggacaaacattctgattgattggaggagtctagagggcatcacatactaccctggctctctccctgctctcctcctggtcgagtgtcctggccaaactctcatgatgtgaagtctacccctacacaggccatatccctaagttccacatggatccttttccctttctcacatctgagcagcagaaaagctcaaccctcagtcactgacagaaaacatctgcta

SEQ ID NO: 601918 - DNA, 404 bp, Homo sapiens
gtaacatactagactttattcaaatgtgtatagtctattaacgatttagtcattgctttgggcatttttttctcatagtcccataagaatatgcagcatgttttatcaatagatgattcartaattttggtaccgcttttaatatgttttcttacaacactctactctgtttgaacttatcaatgtctctcctattcatatatatttctacataaatcggagagtcaaaattatctaagaatggatgctcatgtgaatgatataaatgaattaaaactgaacgaagaaatgaatcaataattctctaattataccattaatccttgatatttttttcccttgcagtatggtctaggtaaaagttttagtgtcctgaatctgcaggagtacttcatgaatgtaag

SEQ ID NO: 601919 - DNA, 404 bp, Homo sapiens
gtaacatactagactttattcaaatgtgtatagtctattaacgatttagtcattgctttgggcatttttttctcatagtcccataagaatatgcagcatgttttatcaatagatgattcagtaattttggtaccgcttttaatatgttttcttacaacactctactytgtttgaacttatcaatgtctctcctattcatatatatttctacataaatcggagagtcaaaattatctaagaatggatgctcatgtgaatgatataaatgaattaaaactgaacgaagaaatgaatcaataattctctaattataccattaatccttgatatttttttcccttgcagtatggtctaggtaaaagttttagtgtcctgaatctgcaggagtacttcatgaatgtaag

SEQ ID NO: 601920 - DNA, 548 bp, Homo sapiens
tgtgttgatcagcaactatccagatatttaggcattctttcagtttcacatgtgttttcttgtattcctctgggtatccgtggtgaatgcagcatggaattctttcaattagttcactcaagtggaaagagaaacgtagtaatttgaagattatcatttttatcatgatcttagaatagaytgggacttgatgaaatggcattgtaataagaagtatgtgtctaaacatagtaagaggcagaagctcattgctaaaaggcatgattagctcacaagcattcaaaatttcatcagcgtaaatgattattcaaaagccccagcttgattggtaaggatgttgtttgtttgtctgtacattggctttattgaggagatattttctttttttttttttttttgctaaaaccagatttatacactaaaagtaagaagcttataatgtgaatcatgaaaaaatcactactttctcggtctcttgttttacatgaaagttatttcaacaggggcttcacctgggcttgagattagatatgtttaacataaactgt

SEQ ID NO: 601921 - DNA, 573 bp, Homo sapiens
ccatttggtattcttcctgaacctccacctcctgccaacctccaccctcaggtaggccccagtgtctgttgttctcctctatgtgcccatgtgttctcatcatttagctcccacctataagtaaggacataaatatttggttttccgttcctgagttagtttgttaaggataatggcctccagctccatcaatgttcctgcaaaggacctaatctcatgcttttttatggctgcatagtattctatggtctatatgtgccacattttctttatccagtctgccattaatggatatttaggttgattccakgtctttgctcttgtgaatagtgctgcaatgaacatatgtgtacatgtgtctttatgacagaatgatttatattcctttgggtatatgaccagtaatgggattgctgggtcaaatggaagttctatttttagctctttgaggaaccaacacactgctttgcacaatgattgaattaatttacactcccaccaacagtgttataagcattctcttttctccacaacctcaccagcacctgtcattttttgacttttgaataatag

SEQ ID NO: 601922 - DNA, 578 bp, Homo sapiens
gaaccatcgcaaatgtccaacaaaaaagggaggcataagtaaaagatgacacatcttaggaatatactttcaaaaactatgttttcaaaagcattcctattcataataaaatgtgaacttcaaagtaatrttatgcaatcatatacatacagtttctaatatgaaattaattttctctaatagccacagtcacatacctgtgcatatgatagaatttatgttccagaatttttaaagtattacctctgcatagtggggcttgttggtaattattttgattatttttataaataactttatgttttcaatattttcttaaaaagcattcatttactttataactagaaaataatggaaattaaaatgtatcatgttaatctacaaaattatactcgttcatatctcagaataacctgtatctttgtaattgtttagtataagtagagtagaaacagtcaaacattgtaggataaaatcatatatttgcttatataattaattatgtaatctgtttcaataaatttttagtaaaaaactcagtgagaaagagaatgaatgctatcttctttctggcccaa

SEQ ID NO: 601923 - DNA, 578 bp, Homo sapiens
gaaccatcgcaaatgtccaacaaaaaagggaggcataagtaaaagatgacacatcttaggaatatactttcaaaaactatgttttcaaaagcattcctattcataataaaatgtgaacttcaaagtaatgttatgcaatcatatacatacagtttctaatatgaaattaattttctctaatagccacagtcacatacctgtgcatatgatagaatttatgttccagaatttttaaagtattacctctgcatagtggggcttgttggtaattattttgattatttttataaataactttatgttttcaatattttctwaaaaagcattcatttactttataactagaaaataatggaaattaaaatgtatcatgttaatctacaaaattatactcgttcatatctcagaataacctgtatctttgtaattgtttagtataagtagagtagaaacagtcaaacattgtaggataaaatcatatatttgcttatataattaattatgtaatctgtttcaataaatttttagtaaaaaactcagtgagaaagagaatgaatgctatcttctttctggcccaa

SEQ ID NO: 601924 - DNA, 593 bp, Homo sapiens
taaaaatttatatttaaattttaaattcccttacctctcaagtttcaagattgacatctaagtaacatttctcagaaattaaaaaaaggaaaaaagaaaagaaattctagttagaataccacacgccacgycccaaaggtgagaggaaaaagtggttgagaatatttggtctctgtggttcagaagttacagaggaaacagctactatcaaattggaatccctaagagcaatgcacaaaatggaattccagagtggcatagacctggtgtcagaacttaatcaccgaagacaaggtgagcatggttaccatgacgacagcaaagtcaaagcagtgatcagaataccctgactcaaaaaagatctatgatgctgactagtggatcatggtgtccctagaagagaagtacgtacaaatccattaaattcatacttgatctgcatacgtggaagagttctagctcaagtgaacagaagtctaatttgaatcaccaaaatagtcatgatcccataatcaattcccagacttgagccagtttacagacccagaatccactgaatgaaaaggcagacaggtccccttgaggaaggaccc

SEQ ID NO: 601925 - DNA, 482 bp, Homo sapiens
tttttaaataaaatttctgatgtctcccacatttaaaagagtgaaaaatgaagaaagataaataatttcattcccactgcctgagaaaaggactcttattcctttactctttccctcttcttcaaaaatatattctggttatttataggtataatgtcgttaatatattatcatataattttaatattctttttaatactatttcttatttttatatttttctttagtattttgtggattgatgaagaatttttttcttttaaacttctctcagtgttgccccatcgtattactacgtgataggacttaatttatttsctggatgttgtggaatcttactttatagtactcttgtatttggtcaggatgagtcaaactgttggattgatattgtttggaatgtgatgagccattttaatctatatattgaatttttccatctcagggacacttctaatttccatctgattcaattttgtttt

SEQ ID NO: 601926 - DNA, 602 bp, Homo sapiens
tacttagactgctgtttttttttattatttttgatactttatggtaagatagcatgggaaaatagcaatttgtatctcataacgaaaaatgtcaccattcgctaaggatttttcttttgtggattgcacctcccagaaagtactgctcttcttctcactgtaggaggaacttaagtctctgtagagatattgtgtttcttttctttcctatgattttttttacatttagctttagttttatttcaaatttataaatagttttctcaaatacttagtgtatcatcagtgttccctttcttttataacacttttctttttcatttttatctctttatttttcttcaagtcttgtcagatagactcagtcttcaatttttttgttttgttttgttttttttgagacagagtcacactctgttacccaggctggagtgcagtggtgcgrtctcggctcactgcaactttcgcatcctgagttcaagcaattcttgtgcctcagcctcctgagtagctggaattacaggcacctgccaccgtgcccggctaatgtttgtatttttagtagagatggggtttcaccatgttggccaggcttgtctcaa

SEQ ID NO: 601927 - DNA, 602 bp, Homo sapiens
tacttagactgctgtttttttttattatttttgatactttatggtaagatagcatgggaaaatagcaatttgtatctcataacgaaaaatgtcaccattcgctaaggatttttcttttgtggattgcacctcccagaaagtactgctcttcttctcactgtaggaggaacttaagtctctgtagagatattgtgtttcttttctttcctatgattttttttacatttagctttagttttatttcaaatttataaatagttttctcaaatacttagtgtatcatcagtgttccctttcttttataacacttttctttttcatttttatctctttatttttcttcaagtcttgtcagatagactcagtcttcaatttttttgttttgttttgttttttttgagacagagtcacactctgttacccaggctggagtgcagtggtgcggtctcggctcactgcaacttycgcatcctgagttcaagcaattcttgtgcctcagcctcctgagtagctggaattacaggcacctgccaccgtgcccggctaatgtttgtatttttagtagagatggggtttcaccatgttggccaggcttgtctcaa

SEQ ID NO: 601928 - DNA, 640 bp, Homo sapiens
tattaagtgtgtccctggaaggcatgctagaggttctaaattttttttaggctgggcatagtgagacacacctgtaatcctagcactctgagaggctgaggcagacggatagcttgagcacaggagttggagacccgcctgggcaaacatggtgaaaccacgtctcccctaaaaatacaaaaaaaaaaaattagccgactgtggtggtgcatgcctgtagtcccagctacttgggaggctgagatgggaggatcacctgagcccaagaagtctaggctacagtgagttgtgatcatgccactctactgcagcctgaataatgggagtgagaccttgtttaaaaaatagtaataatagtgtcatcccctcctttgaagaagtgtatgagagaagctgccaatcttcacttttgtttagtgcttccaggctgtcttgttcaagaacaaatccatatcacaacccttatttgaaaacctcattggttccttttattttcctagcaacatccaaattcctaacctctttttaatctttacaatcttatctaaagccttttctctggattcaaatcctggtaaccccattatacatttctttgcaccatgamcattggtccacaactatataaaaatatcttgtt

SEQ ID NO: 601929 - DNA, 356 bp, Homo sapiens
gcctgttaaactaataaacttcaaggaatcatttatattagcagtataaatgagatgacaggtaagggtggatgttgggagcaaaaaaatatatatacaccatgcaaataaagtacaaaccaacccaacatacaaataaaagtaacaagcaaaaccaagggaaacaatataacaaaacacagcaatttctcaatacctttcatttgctcttgctrtaccctgccatcaagtccgtgtggcacctatgttttctttattctcaatatttaaacatctccctactcttatttaccaaatattcctaaacctcttaagttgactctttaactggtgaaggaacatagttaacagatcgt

SEQ ID NO: 601930 - DNA, 621 bp, Homo sapiens
tcttgtcataaccctgtgaagcaaagcctattattatctccattttagagaggaggaaactgaggctcagcaagtatcctgcccaggatcatagatctagaacatggtagacctgagatttaaatgcagccatctagttcgagaacctgccttcttaacaatgaataatacctggctttagcaaggcaatacattagtctcccctgcttatcccacactgcagaatgaacagattagggtaaatggattctacctttgacaagggactcaaatatagaggcttcataaaattaaatcagtccaaaaatagtggttctctaacttttggagtctgatcatcctttacaaaagccagagraaaaaaaaagcatgtcaagggcagagattccacttccctaagtcttctcatgcaccagaagctactcttggtttctccttctatgttctttgcttcttaatttgaaactgtgagattctttctggatgtgtatactatttgtctcagatattccttgtcagtttctatctatggatacataaaatagaaagtcctttttccaaaaatgtgtgactatccaaaggatgaaggcaacagctttaggttaacttatttcacattac

SEQ ID NO: 601931 - DNA, 599 bp, Homo sapiens
  misc_feature 593, 594, 595, 596, 597, 598, 599: n = A,T,C or G
aaaataattaaaagctgaacggcaagctctgaacgatttgcaatgtttatagaagctagaggattaataaactacttaaaacctattataagttaatcaaattacgaacaagcaaagaaaatgaacataaaatacagaaattaaaatatacaaatgtcaaacataagaaattgcatgtgtcactagyagtcacagtggtggtgaatattaatagaacaataaaatatcatttgatctcaattagaacaaatcattgcaaaaaaatttaaatgttgaggtgagaaaataaattgaaatatcactataaattgttaatcattaagtgtatcagaaatgacataagtgcaaacattattgtcctaaatttgcttatcctgaaaatgtcgaaaacactaccaaaacagaattggaacccatataaaataaattaatattattcactaactaaaaatatgtgtagacgaatgcttactgatatataaacatgttcacaagagagtaagcaaaaatggcagattataagcaattcacttacattattatttttgtgtaataaaaatgcatacacaattgttttagaaaaaagataatannnnnnn

SEQ ID NO: 601932 - DNA, 567 bp, Homo sapiens
cactcttcaccactaccatttgtgaattctaatgaaaactctattcacaaatagattttaattggacctaattcagacaatcgattttttaaaaagcagacatagttttaagtgctttcaaaatatctagttacttagcagaatttcaaagacatatacgtgtgtgggagtgtgcactcatgtgctcacacatgtgtatgcgtgagttacatattttcccctcaagcataaagaaattgtatggctgctcacctgggcaccccagtttttagtaactgaagaagttctttcttttctcattgacaaatgaatgtaagtagctcagtctttttctccacagctcatcctgctttttcagttctgagaatgaccatagagactttacaaactttatactaatccgagaattgctttgtgttgggaaacactgtgctagctgagtcactcgtttgagagatgcgtcacagagaaacgaaggaccaagtctaaagcaacacaaaaaatggcaatatgtagtayaaatacagacttgactatgttaaattttgttttttgaaaaagaatttt

SEQ ID NO: 601933 - DNA, 518 bp, Homo sapiens
cttagagtcctctttatatatacattatgcttagtagtccttggaaattcacttagcacactgaagaatatcaatatctaaagtgtgaaaagaagttaagtggtctactttataccagttgtttgaacctgacctaacatagtccataaataaaagttgttagaaatggtttataccacccactgcataacagtcaaagaaattatataacctgaactgaaaaccagtatatttttaaaattttgctcaattttgaagaaagtaatgaaaatattaaatatttggaaaatatacacctatattgtcacctttactgccattttcctaayagcagcactgttagcactataggatcattaaactttatatttcaattacttaactattgaaacactttggatggagagtctctttagagactacattcattcattttaaattttcaccaatttaactttttttaatgtacaaaacaaactacaaatattctttcttgtcctttgttcacattggctaat

SEQ ID NO: 601934 - DNA, 488 bp, Homo sapiens
attcagttcaaccaagcacactgatccactcaaagtatgattaggatgtatgtatcccttatacttgtgctataattcrtattaattactcataactatctactctatttctcttttatagatatgaacaatttttactgcccaaattattaaaatattatccctcattttatcagaatggtatgtgcacacagacttttcagaattaaaacttgcaaaacatagagaaaattatttaatttgaaaattgcatgctatatttgtgtggaggctcacaaacgccaatctaataatctcaatttaaaaaatccttttaaaagaaacaagcaaaatggatattgtaaccatatttaggtcatggtaactgaatataaagttaggtggaaagtagagtttttaatttaatgcaatttttatttcttcaaggcactatcttagaaaattagcatttggtgctaagttttccaattaaatatttatggctttat

SEQ ID NO: 601935 - DNA, 610 bp, Homo sapiens
tgaaggagctagacaatcctgctgctggtgatggtgaatgtgtgttatatatctaaagcagtcagcacagatcactgtaataagctagcatttgaacagagacctccaaaaagttagagaagctatcaagtggatttccaggcaaagaacatcaagggcaaatgatttgagacaatatcataatgggtttgtttgaggatcaacaaggagaccacatggctaaagtggaggagagaggatcagagaggttgcaagagrgcagaccatgtgaggcattaagaaggtaatggccaaccagtcaagtggggaagggtgtgagaagatgagtgacataatcaataagtcatctgggctttgtgaagaatagatggaagggtgctaaggattaaggtgtacatttaggaggctattgttattccagagcttattataatagtttgactgagagatgatattttgagccaggatggttagtagtcattcttggaaattatttggaaaatagagttaataggatttgctgatgatgtataaggtataggaataaatgagtctatagtaactgtatgatgactacctgagcagcaagaagaatagaattgctttcaat

SEQ ID NO: 601936 - DNA, 624 bp, Homo sapiens
atcaacagaataaaaagcagaaaaacaataaagaaaattaatgaaactaaaagctgattctttaagaaaagcaatacaactgataaaattccagtcagattgattggcaaaaaaatgagcaaacatacaaattaccaatatcagaaataagagmggtaagatcaccacaaatcctaaatatattaaaagcatagtaagagaatataataaacatctttttgcagattactttaataacttaggtgtaatttacacatttttcagatacataagctatcaaaatttactcaaaaagaaatagataacctgaagatccctatgtctattttaaaaattaagtgtgtacttacaagcttacccacacataaaaatctaggtgtaggtggcaacactagttaattctaccaaacattgaataaagaaataatgcaaattctatataagttgaagaggcttgaaaaaagaattgaagaggaggaaacacgttccaactcattcaagaaggccatcactacatcattataatgatgcaaaagcagacaaaatacaagaaacaatactacaggcaagtacactttgtacacatttgtgtacaattctatacacattttatcagtcataccc

SEQ ID NO: 601937 - DNA, 598 bp, Homo sapiens
tactcatgtattatcagtttggaatgaccaccctgacgagtgacagcaagactcagccccatccacggacagttccacacatgacatctctgtcatgcaggactcagaaaggacaaaagccatgcagttgctgctctggattcttattcaccagtgaccatcagggatgactaaagmcatctagtcacttttttaatagtctggatgcttggatgaaattccacttcagatggcccaatagtacacatactcacttacacatttatgagtgcacatgtgtacatgtaaccttgaacacttgcatgcttaaccatcaagatagtgggagtaatcttttaagcatacgctaagaataattcatgttaacataaaaataggcccaagcacagcagtttattagttagagtgagattgagttcatacgtaatgttaacagtggctttgaacacaatttaaagttacattttgttttaaaaatcatacatttataataaaaatatgtgaaatatgtgagagtggtcataagtttggatggtagggaaaatgacaagatctttagagaagaaacacatttttgtgtgctaaaaataaccaatga

SEQ ID NO: 601938 - DNA, 409 bp, Homo sapiens
acttcccaaacaaaaagagttatgaaccagtttttagtgccatgctcttcaaagtgaaccaaaatgtaaggattagtggacatttgagggaaggctccatcatgaaaatatgaatgtagagagttgaggaactcttataagtagaacaaaaaagatttttttgttcttagagaaaatataagaaaattaatagattaatttaagtggtccaagatacaaccartgagttccatagagagcaggaaaaagtacagcaaagaaattatcaaagaaatgacacaagagtacttcccaaaactgaaaagacatgagtctttggattataaagcacaaatgccaagtacaatgaataaaagtaaaaacaataaaaaaatattttttgaggtatataattatggaatatcaaaac

SEQ ID NO: 601939 - DNA, 594 bp, Homo sapiens
gcagaatgttaggatctgattgtcgggtggtggatacacgtatatttttgtgctgttttctgtattttgcagtattttatttttgaaaattaccaaaacaggccgaacacagtggctcatggctttaaccctggcactttgggagggcgaggcaggcagatcacttgaggccaggagtttgagactagcctggccaacaaagtaaaaaccyatttctactagaaatacaaaaaaactataacaaaaatattttcggtgaattttttcctaccaaaaagatgcataagctctgtatagtatatttttaaacttttcaaatgtaaagatgccatataaatatggaatagctgacattagttgtgaattgaaatattgctgtatgagatagagggatgaaatgatgcttatcagttgaacttttgtactattaacagtaattgagctgttcttgcctgctagtgtgcctacaagacagtgtgctagctttctggaaacatggaatgcaaggtagaagttttagatctaatgaggtaagtaaattatgtccattaagtagtcacaagacattatcaaattccacttcaaacagttcga

SEQ ID NO: 601940 - DNA, 513 bp, Homo sapiens
cattgttatttgactcaattaacttaaattactaagatataactgaataagttatgtcattaattatgactcatccaagcacatgctgtttagcaaggaaattttgagttttgtaggctataaattaagagttaatgggagtctgtaaacaacatttgatttcaggaacacagcgttctgttttcttaaagaagactaatgacttaaaatggcatcttgcttcactggttaaccaacagaawgagaagacagggactgtgaattctaattttaaataatgatttatctcacactaggtgaggcaattagctttggtttccttggatataaaatggaacaaataatacccaattaccttgttggaacatcataatgagaaacccaggatgcatacttacaaataaccttaaaaatataaagttctaaattacataaataatgatgtttccaaatccatcagtcacatgcaaagtgtgctgccagttttatgctacattcttgagctcataacat

SEQ ID NO: 601941 - DNA, 600 bp, Homo sapiens
ttctttgataatactttagacagaactcaaatatcatctgaaaagataaatcaatgtaaataactgacctgaagcacagagasattaaaaattcagaaaatacagaaagaaaggataagacaccataaaggaaactaaatttggtttaaaggtacctccataggtggtaaactgtaacctaactttgtatgtaaatcaacttccacttaatttaagagcatattcttgtaacaaatagcttcacccaattgcagcatccaggcttcagccacagactgccaactgatcagatctttaggtttttccttttaacaacatatatgagataaggaaaaagagtctaaaatgtttgccattggagttaggaaggaaattttaaaaaaggtaactgggcagaagcaatatttgaagaataatagtacagatatttcaaaaaaatgacacaagataccaagcaacagatttaacattaacacgacaaactccaagggggtgttatagccactttgttggattttttggcagtatcttctaatatgaacataaattgccacgtaaataggcaatttctatcctaggtacaaagaaaagagaaatgtt

SEQ ID NO: 601942 - DNA, 377 bp, Homo sapiens
tcccttttccaaaatgggttgaaataatactgtcaatgtcttattgacaaagcccaatatccaacaggaataaaagtatacatatgtgcatgtgcttgtttgtgtgtatgtgtttcaaaagatgcagtaattaaacaggcatatctgtagcttggacaaacagaaatcaaaatgtgacaaagagggagagatgaagtattcttctggtgtgattttaacagcctggtaaaatactgttgggtaagccagagggatagtgartcagtaacaaccatattcttataatcctgatataatttatttaacaaaaggaaaaggtcttatagagttttccatttccaatgggcataagagatcatcttatataaaatagatgc

SEQ ID NO: 601943 - DNA, 543 bp, Homo sapiens
acacagctggtcgtgaaattgtaggagcaaaatgatcataccttttygccatgtatcacaagggtcatggttaacacttctataacataagacagattataagagaaaaaatatttttaacagttttacctgacatggtagtctttagaaatgaagattaaaagacccaaggaaaactgtattttatgcttagttcaatgaagaatgggcatcatatagaaatataattgcacaaaaaagggtattatcttggttgggtgtgatggttcacatcagtaatcccagtgctttgggaggcccaggaggaaggactgcttgaggccaggagtttgaggacaactgggcaacataggaagaccctgtctctaccaaaaaaaaaaaaaaatggggaagaggtataatctaatggtaataaattgaggaggataactcaacaagacctatctgttcagattattcttggcttctcctgaagcattccttcctctggatataggagaggacacctgtctctggaggatcttcagaggagaagggacaaag

SEQ ID NO: 601944 - DNA, 480 bp, Homo sapiens
gacttattcatactgtcataaaattccctcctgcccaaaaacattttagtggctcttccaaagctgccctattttatgaatggtttttccagtcataaagcaggctgtcctttacatattgaattagtttggcacctctgtcatagatcaattgcccatatatttgtgaacgaagttactctattctgttccactgattgttatgtctatccttattcttaaatttttttagttatggtagctttatactaaaataataatgtagagtaaytcatctttgtttttgaaaatgtagttgttttggctacatttctgggccatttgtttttccatataaatgtaaggatttatatgaaaatcttgtccatttctattaagaaactcatagaaatttcagttgagattgtataaaatccataaatcattttcaaaagaattgataatattgagtctttccaactatgaacaacattacatact

SEQ ID NO: 601945 - DNA, 624 bp, Homo sapiens
catggttctgattttgcctatttccctcttcattactattagttattgcttcatgtatatttcagccattattaaatgcataaatgtgaagtagtgttttgccttcttgattaatttgcttccttgtcattatgaaattgctatgtttatctctagtaatatagcttattttatagtaatttttattaatttttactacagtctttccagcttttttatgctcagtgtctttagggtttatattttttcattatctaacttattgatatgatttggctctgtgtcaccacccaaatctcatgttgtagctcccaygtgttgtgggagggatccagtgggagatgattgaattatgacagcaggtctttcctgtgctattctcataatagtgaatgatctcatgagatccaatggttttaaaaacaggagttgtcctgcacaagctctgtttgcctaccgccattcacttaagatgtgacttgctcctccttgccttctgccatgattgtgaggcctccctagctatgtggaattgtaactttaataaacctcttccttttgtaaattgtccagtcttggggatgactttatcagcagcatgaaaacagactaatatacttatca

SEQ ID NO: 601946 - DNA, 627 bp, Homo sapiens
atacagtctataatttctagagtttttatttgggtcttttttatatatataccatttccatcctattatgtttctattttgttttaaatatttgtatagaattacaatagctctttatcaatttttgtcttctatttaagttatgtttataattcccaggtctgtttttgttaagtaagtttaatctagattttgggtcataatttatggctgtttggcttgtttagtaatttagattagatgttgagcattgtaattttgttgtttttctttaaataattttgtttttaaaatatttttggtctaaaattaatttttaaattatttgctttgtttgcttttgagctttgccaaggcgtgtgtagaacagcattcattctaaagaaagcccagataccttgctaagacatggcttctyttacatctagactgaatgctatgggtaattactgaagagtgcctctgtggtgactcagagcttaaacatctgcttgtcctttgtgagcctttagagttgctatgcgtacaaattccttgtctttctttgcccttccctttagaattttactcctttcatgtgcagcctagtactcagcaaagaaccaagaatccctaaattcatttcca

SEQ ID NO: 601947 - DNA, 621 bp, Homo sapiens
ggcacaagaatcatttgaacctggggggtggagtttgcagtgagccaagatcatggcactgcactccagcatgggtgatagagtgagaccctgtctcaacaatgaataaataaataaatgaaaaaaatttgatttttttatgagttttacttactatgtcctctgtgagaatcaataataaatcaagcacaaatccccaagcatggtttgttagttacaaagtagaatgctttcattttcttttagttacatatgtactgatatggtttagctccaaggatggtttgttagttacaaagaagaatgcttttattttctactagttgcatgtgtactgatatggtttagctctgtccccaccagaatctcatcttgaattgtagctcccataattcccattagtcctaggaggaatccactgtgaggtaattgaaacatgggggtgggtgtttcccatgctgttctcatgataagtctcacaagatctgatggttttataaagaggagttcctctacacatgctctcttgcctgccaccacatragataggactttggttctccttgcattctgccatgattgtgaggcctccccagccatgtggaactatgagtcaattaa

SEQ ID NO: 601948 - DNA, 549 bp, Homo sapiens
atcctacatgctgtaatttccttcacaaaagactgtcatgcttttacaattatagcattttttgtttacttaatctcttacaggctctgccttttcaagcrtgttttgatgaaaatgacaaaggtgatcaggaaaaaaagtataataggaaaaataaaatataatcttaaaaatatttttctccaatttgattgcctatatttgtgcctttaccctcttttccctccattatggaggagaagagttgtaggacatgatgtgtattagttcactttcacactgctataaagaattatctgaaactgggtaatttatgaagaaaacaggtttaattgactcacagttctgcaggttatacaagaggcatgactgggagacctcaggaaacttacaattatggtggaaggtgaaagggaagcaagcatgtctttaccttggtggagccgaagagagagagagagaagggggatgtgccacacacttttaaacaattagatctcatgagaactgactcactatcatgagtacagcctgataatctgcccccct

SEQ ID NO: 601949 - DNA, 564 bp, Homo sapiens
actgtgcatttgttgaggacactaaaaaaaaagtggaaaggaaaagatgaaatgctgaaaaacttaagcagaaatttcagctgctacccrtctcacaggagacataatattaattcctgccaaggtggagttgcttgtaaataccttgggctttccactaacagtaatgcattaggaataatgagttcgtccctgaactaggagatttactcttggaataaggaaaatgtaaaacaggcccaccttgatagagcataaaaccaagttcctaattgtacaaggtgatatgccaattacttaattgagggctaaagaaaaattaacactcctaaaaggaggataacagaatccagagtctctacaatgtcttattatacatatttacattatatcattctacacttgaagaaataggaaaatctactccataatgctggaattagccgtaatgtactttaaagctgctataaagaagtagaggccaggcatggtggcccttgcctataatcccatcactttgggaggccaaggcaggaggatcacttgagtccaggagtttgagat

SEQ ID NO: 601950 - DNA, 601 bp, Homo sapiens
gaatctgaatttaacatatttaacaattctaacttgatgcattggatgtgcttttcttctcaatgtttctggaacagaatcatgattttctcaatgtagctcaaggagattagtcccttgaaaattaatccacaataattgtatttgtaaaaaatttagttataaaccagaatcacaaaataatcaatttataattagygatattactattacgttcatagtagtagcaaggacatctactgtctccaagtctttctggtgaagccaaattccaaccagaagttagtttggtgaatacagaatgaattcaaccacaattagttttataaatttcaatggctggtgtcatcaagctgggataacctgaggcagccatctccctttctagccaagtggacctcttcccacactagacagatacaaagtcaaaaagccaggctccagcctctgaatgcactttttctgggctcatctgaaagactgtctttctgttaacatagcctttctctgaagaatagtatgatcaatgacaattaagcttcctattcaaaatcaccttctaatcttgctctactgagatttctactaggtcattttgttt

SEQ ID NO: 601951 - DNA, 601 bp, Homo sapiens
gaatctgaatttaacatatttaacaattctaacttgatgcattggatgtgcttttcttctcaatgtttctggaacagaatcatgattttctcaatgtagctcaaggagattagtcccttgaaaattaatccacaataattgtatttgtaaaaaatttagttataaaccagaatcacaaaataatcaatttataattagtgatattactattacgttcatagtagtagcaaggacatctactgtctccaagtctttctggtgaagccaaattccaaccagaagttagtttggtgaatacagaatgaattcaaccacaattagttttataaatttcaatggctggtgtcatcaagctgggataacctgaggcagccatctccctttctagccaagtggacctcttcccacactagacagatacaaagtcaaaaagccaggctccagcctctgaatgcactttttctgggctcatctgaaagactgtctttctgttaacatagcctttctctgaagaatagtrtgatcaatgacaattaagcttcctattcaaaatcaccttctaatcttgctctactgagatttctactaggtcattttgttt

SEQ ID NO: 601952 - DNA, 331 bp, Homo sapiens
tcatgcaaaatatgtcctttgatcaccgtggaacaacagaaagatacctgaaaagtccccaattatttgaaactaaataacacatttctaaacaactcatggatcaaaaaagaaaaaagacactttagaaaatatattttactaaataaaaatgtcattaaaacatattttaaaatttgtaagatgcaactaaaatatcacctataggaaaatatgtaacgttacatgcctatttaatacaacagaagaaataactcaagtcaataattttgttttccaccttaaaatytgcgtaaaaagcaaataaaactcaaagtagacaaagaaaaaa

SEQ ID NO: 601953 - DNA, 619 bp, Homo sapiens
aaatcttgtggcctttatctacagttactgtcacttctgcctaccacatgcacacacacacacacacacacaygcatcatttctccttgtcttttgtgaagaatgtaggaatggatgtatcaatagtaaacaaaaattaattattgtgataagtgaatgataatttttacttggaatctagccagattgtgtggaaagagaaacaagagcaaggataggcacatgaatagcaagaattcatgagtgtgtaatgtgtgtactgtagtgcctcagagatacgtttattgtgctagaatgtgctgtacttaagggatatgccatttaagaactaaatcaagaagaaattgtcttacaataatgtggtctgtattcaccaaagctaaacaaatgaggggaactgcaagttattcaatacgtgtattatttgataaacattttttgacaacctacagtatggaaggcaccatatcacagtggctgtaaaagaagtggctacttttttcacaccaggagaaagcgaaaaatattgaacttgtcagcgtttgagtttttaaatataccacctctaatagtttgcgcttgtgttctttagtgtaatcttggcccagtgcctgaggac

SEQ ID NO: 601954 - DNA, 619 bp, Homo sapiens
aaatcttgtggcctttatctacagttactgtcacttctgcctaccacatgcacacacacacacacacacacatgcatcatttctccttgtcttttgtgaagaatgtaggaatggatgtatcaatagtaaacaaaaattaattattgtgataagtgaatgataatttttacttggaatctagccagattgtgtggaaagagaaacaagagcaaggataggcacatgaatagcaagaattcatgagtgtgtaatgtgtgtactgtagtgcctcagagatacgtttattgtgctagaatgtgctgtacttaagggatatgccatttaagaactaaatcaagaagaaattgtcttacaataatgtggtctgtattcaccaaagctaaacaaatgaggggaactgcaagttattcaatacgtgtattatttgataaacattttttgacaacctacagtatggaaggcaccatatcacagtggctgtaaaagaagtggctacttttttcacaccaggagaaagcgaaaaatattgaacttgtcagygtttgagtttttaaatataccacctctaatagtttgcgcttgtgttctttagtgtaatcttggcccagtgcctgaggac

SEQ ID NO: 601955 - DNA, 577 bp, Homo sapiens
aaacaatcaaacaaaaccctgccagtcaagaatactacacccaataaacttatccttcaaaaatgaaggagaaataaaatcttgtccagacaggcaaaaacggagtcaattcattaccactagatcagctctacaagaaatgtttaaggaagacctatgcctggaagtgagaggataatatccactgtcataaaaatagacaaaaatctaaaattcaattattagacttttgaaagaaaaatacacatatgaggaacagaaaagcctgttttttttkttgttgttattgttgttgtcatcactacaaaaaacaccaagctgcaatgataaacaatgaaaagagaagaaaagaataaaggatataaaaaacaatcagaaaacaattagcaaaatgacagaaataaaaacttacatatcaataataatgctgaatgtaaatggattaaattatccatttaaaagatataggctggatgaatggaaaaaacaccttacccaactctatactacttatagcaaacttacttcacctgtgatgtgtcatatagactgaaaataaagggttgtaaaaagatat

SEQ ID NO: 601956 - DNA, 645 bp, Homo sapiens
cctggatcttaaacaacatgctcctgaaagaccattagctcaatttaaaaagtaagaagaaaataaaaaaaaaattgaaacaaacgaaaatgcaaacaaacctaccaaaacctatgggatacaggaaaaacagtgctaagagggaagtttatagcaaaaaatgtctatgtcataaaagcaaaggattttaaataaaacaacctaatgattcaactctaggaactagaatagcaaaaacaaatcagagcraaaattagtagaaggaaagaaatcataaaaatcagagcagaactaaaggaaataaggactaatacaactatatagagaatcaacagaaaatcagttttttaaaagataaaattaatcagctgctatccagactaaccaggaagaaaagagaggactcaaataaaatcagtaagaaaaatggacacatcagaacaaataactcagaaatacaaaagataggcagagattattatgaacaaattcacactaacatactggaaaacattgaggaaatagataaatttctggacacataaatcttaccaacattgaatcaagatgaatagaaaacctgaacagaccaataatgagtaataagatttaatcagtaataaaaaaatcttccaataaagaaaa

SEQ ID NO: 601957 - DNA, 542 bp, Homo sapiens
aatgaaggccatatatgacaactcacagctaacatcatactgaaaggggaatatctgaaagcctttcctctaaaatatagaacaagacaaggatgcccactttaatcactcctattcaacatagtactgaaagtcctagtcagggcaaatcaggcaagtgaaacggaaaggcaagtgraaagccatccaaattagaaaagaggaagtaaaattctccctctttgcagaatacgtgatcttaagtctagaaaaacctgaagatgccatcaaaaattcttttagatatgataaacaaatctggtaaagtttcaggatacaaaatccacatacaaatatcaagtgttgctatatgccaataataagctaactgaaaaacatcaagaaagcaatttcatttcatttacaatagctacaaaacaaataagacacctatgaataaatttagccaacgagttgaaagacctctgaaggaaaactgtaaaacattgacaaaagaaactgaagaggacacaaacaaatgaaaaaacatcccaagcccatgg

SEQ ID NO: 601958 - DNA, 542 bp, Homo sapiens
aatgaaggccatatatgacaactcacagctaacatcatactgaaaggggaatatctgaaagcctttcctctaaaatatagaacaagacaaggatgcccactttaatcactcctattcaacatagtactgaaagtcctagtcagggcaaatcaggcaagtgaaacggaaaggcaagtggaaagccatccaaattagaaaagaggaagtaaaattctccctctttgcagaatacgtgatcttaagtctagaaaaacctgaagatgccatcaaaaaktcttttagatatgataaacaaatctggtaaagtttcaggatacaaaatccacatacaaatatcaagtgttgctatatgccaataataagctaactgaaaaacatcaagaaagcaatttcatttcatttacaatagctacaaaacaaataagacacctatgaataaatttagccaacgagttgaaagacctctgaaggaaaactgtaaaacattgacaaaagaaactgaagaggacacaaacaaatgaaaaaacatcccaagcccatgg

SEQ ID NO: 601959 - DNA, 638 bp, Homo sapiens
aagtaaaattctccctctttgcagaatacgtgatcttaagtctagaaaaacctgaagatgccatcaaaaattcttttagatatgataaacaaatctggtaaagtttcaggatacaaaatccacatacaaatatcaagtgttgctatatgccaataataagctaactgaaaaacatcaagaaagcaatttcatttcatttacaatagctacaaaacaaataagacacctatgaataaatttagccaacgagttgaaagacctctgaaggaaaactgtaaaacattgacaaaagaaactgaagaggacacaaacaaatgaaaaaacatcccaagcccatggattgkaaaaattaattttgttgaaatgaccatactatccaaagcaacctgaaaattcaatgcagtccctatcaaactaccaatgacattttcacagtaatataaaaaaatcctaaaattcatatagaacataaaaggagcccacatagcccaagaaatcttgagcaaaaagaacaaagctggaggcatcacactacctcacttcaaaatgtattacatgttatatcaaccaaacgagcatggtattgttgtaaaaacagaaacatagaccaatggtacagaacagaaaacccagaaata

SEQ ID NO: 601960 - DNA, 519 bp, Homo sapiens
aaaaggttgggaactgctgctataaatggaatatttgaattagaaaactaaatcttgcattttatcctttttaattcacayattctcaaacatttactgagaaacttcttaataaaagtcagagcactattgctgaggataacagatatggaacctaccttcataaagtacatgaatagaaaaaacacttaccattaataaaacaagtagtgtactttaaaggataaactgacaatcttctataacccttatcaccacaggttttctgctattgtgagttattttgtagttcataactttaattggaagagagtaattgagttttatatctttcacttaatatgattttatacgattttataatattttataataagattttataagataatataatcgctacttcatgcagcgattatattatctgtgagtctcctcctacttaaatattaaaggcaatatcagctagcagatatgataatcattaccataataataaacagattttacagttgggag

SEQ ID NO: 601961 - DNA, 604 bp, Homo sapiens
attctgattaaaatgtgacctttgaatgctcttctgggagaaatgtgtagctctaaattatgagacactacaatattatttcccattaaatttacatcttttatcctaaaatattacagttcccaataaaataagaaaaaaaatcatatttttgtgtttcatttccacccttttatacaagagataaaaataattcccaaagaattaataatgacattggagaaaattatagggaaaaagtgagtcagagcataactgcatgcaaattatttggacagacattaacatgtaaaaaatggtctgcaaacataaaagctgtaactgagaaaggagtagcatttttcctcattaacctataataaaaagatgcttgcaaggacaaaactttaagtgatttgttaaatagaactcttcctatgttcttttgaaaaaattgatgtaggctgatacccaggttaatttattagttaatgtatttctatatcttttaaattatctgaggtagatatataaacaatatgaaataatttctcattcctttgagtaaagtatttcaacacaagtraaataaagaatgcaagaaagggcttcgcaggatttatac

SEQ ID NO: 601962 - DNA, 601 bp, Homo sapiens
tgtgacttgcagaacagcactgcttagctccctggattcagccccccttcctagggatatgtacaaatggatctcctgccttgccgggtatcctggggcagagtatgtaaaactcctaggtctctgtgagtgcctgaacaactgctccatcaagactccacacagctctgtgtatcagacccaaggccctgcggcatgggcccatgagagtattttctgatccaagggttgcaaagatctgtgggagaaggtggtttcccaggcaggctcgcacagtcactcactgcttcccttggccaggggtggggttcctttggctccatgctactcttggatgggctcttaccccactttgctcttcttcattctcaatgggttgtttgtctagtcagtcccagtgtgagaacctggatatttcagtggaaggtgctgaatacactctcccttttcatttctctttgtgagtgccatggactgcagctgcttctaatcagctatcccgtcccygtgaaatcttctttttaaaattggaagaatacattgcaagaaaagaagacaaaatactggggtgcaattgaaattaagaactaactatttcagg

SEQ ID NO: 601963 - DNA, 580 bp, Homo sapiens
ttacagacatcatttgacttatgttttctaaaacacatatttatcttcatttttatattataatacttttaaaaaaccttttgtgttcattttcatcaatgtacatacctaccactaacatactctcctcccatccttttataactaattgtactacatacagatatgtttttataattgttatttttattattagytaattatactatattataatataattattatgggggtacctataggcgcttgatgattgcattataaatatacataatttatgccacaaaccctgctgtaaaacgtaagttaaagtaacaaattccagtttcccaaatgtagcactaatggctcaccatgttgtagatagaacaccaataatattctcacataaatttctgccttcagttcctgaagcactaaaattttattgttatacctccaaaaacctttagagaaagaaatagagcagaaatattcagacgtatcaaaaatatgtaatttttcattcatgacctttgtatatctattataaatgtatacctcttttcaatgtttctatacaaaacataccataattcaa

SEQ ID NO: 601964 - DNA, 618 bp, Homo sapiens
actcatggtaaaaatagttatgtcttaagataatgtttctgctatatcacttttgtcaagctagatagatcttctaatacttattgagatttggcatatttattattacttaactaaatatatggtctttgttgactaatttgtgtttctttcatgttttacaatcattaggaataattatttctaaggctcagctaggagaagggtcctaagttgtccccgataggatctctcactattagtacatactaggtagagtatttagaaatcaactcaaagcaaaattctgatttaaaaaaattaattgaactttatgaatctctcactatattgttggttagcctagtactaatctgcctgtaggcactaagatattactcatttggatattatatttcctataaattccaatawccataaatgatttcaaattatcataaaaccttaagttgttttctttatttcttctaaaaaaatgggatatatgtgcagaatgtgcaggcttgttacagaggtatatgtgtgccatgttggtttgctgcacctattaacccatcctctaagttctctctcctcatcctccacccctcaataagccctggtgtgtgttgttcccct

SEQ ID NO: 601965 - DNA, 466 bp, Homo sapiens
aaacatcagacaagtaaaggttattcttcctagcttcagaagcagctgatttttcaacataataaagaaagaaaagtctcatcatgaaattcaacatttacattacaggccattaatgattagtttaaaagactgttttcaagtagccatgcatgctgagagaaacggagccaaagttctgtgaatgatttcatcttgctctccaatacagcttttaattatgaatactttttaaagtgcattacattaattagccatttactcagcaggctgcttctcagggctccttccagctcccttractctgtggcaggacctggcagtcactacagcaagagtacgacttcagatgttcggaaatggaattcaatgatcttttgccaacatgaagaagatagatatgagcataaggaaaaaggaaaggaatgcatcgtctgcaaaacattgtttcatttctcaaacacag

SEQ ID NO: 601966 - DNA, 588 bp, Homo sapiens
  misc_feature 166, 168: n = A,T,C or G
aactcaagccagctgcaaaaatttgcataagtaatgagaagccgaatgttaatagccaagacaatagggaaaatgtctccaagccatgtcagagaccttcacagcaactcctcccatcacaggcctggaggcctaggggtgaaatatggttttgtgggctgggcgngngcctgctgctctgtgmagcctcgggacttggttcctcgtgtcccagtcactccagctttaaccgtggctaaaagggaccaacatacagattggccattgctcagaggtgcaaccccaagccttggagcttccatatggtgttgggtctgcagatacacagaaggcaagagtttgagagcctccatctagatgtgagaggatgtatggaaatgcctggatgtccagcgagaggtctgctgaaggggcagacctcagattaaaaacctctactaaggcagtgaggaggggaaaagtggtgttgaaatccctacacagtccccactgggcatttgcctagtggagcagtgagaagtcaaccactgtcctccagagcccagaatggtagatccactgaccagcttgtactgtgcacctggggaa

SEQ ID NO: 601967 - DNA, 634 bp, Homo sapiens
ggctagcatttacaagcattgtatcactgaagaatttgttttgcaattgaattacaatcaaattttgagtggcaaagtttttaygttagtagttgcctgtaatctaagaagtgattgttgccatgagaaaaccaccatatcgttaaatgtttcagcagggtagataagacatatacttgcttaagggttattccaaatgactaaggagatccctttgttgtctaatattccatatttataaaaataagaatgacaattgttttttatctctttttaacgctctttgtgcaattttacttcttgacatttatcctatggaagtaatccacatgtatacacaggtatagctacaaagacattcaattgctgcattgtctatattagggaaattttgaaaattacctgaaagccaaataatatgaggcagctaaagaatgaaaaagaaccaaaaaggttgttgtggatccacacttcctaacgtgggcagaggcttatgactgctattgagaggaaaaaggcaggttacaaagctagatgtgtatgataagcccacttttctgaaaatcaaacatatataaatagaccaataatttaaataataggacttacactaacatattagcagttagtcact

SEQ ID NO: 601968 - DNA, 521 bp, Homo sapiens
aacttgctggctttaatgcttgctctggtacttactggccatatgactttggaaatataattcagcttcatgaaggctgaactctcacatctctaagaaggacatcactcttgtccttcctcatgtggcagataagatgaattagccagatgatatatttctagcacttgtcaaagcacttgatatataatttttgctcaataaatggtattcattattatcaatataactattaataagaagaaggtattttcaatatcagkggttctcaatcagaggtgattttgctcccaccctaccccccgaccagaagacgtttgacaaggtatggaaaaatattttgtcacaaccagggagatgggtgaggagtttctattgacatctagtgggtagaagatagaaaggatggaaaatatcttacaatacccaggacaatcctccgcaacagagtcatccatccccaaatgtcaatagtgctaaggttgagaaatcctgccataattctctatgcttaacaacct

SEQ ID NO: 601969 - DNA, 604 bp, Homo sapiens
tgacttgcagtgcaataaatgattctattgtataaaatattaggtatagaaaagaagcctgaatgaaaagcttcttatgaaatgatggcaractcctttctcacaaaatgcattattcactaaaaaccaaatcatgttgttttggcctttcttgagacatacatatttattggcctttcttgagacatatttatttgacctttattgagacacgtttataaaaaactagatcaagcatcagctgttattagtaagttatatagggatctatacaagtatacctagtgatattaaaacccagaacagtgttatgtttaagcaaaataagttgcattagcttattattgcatttagagttaattttttccaacatgacaatctgaatatttgcaaaggttagcagttatgtttaatcagtaaaattaatcagtattagtgcatactttatagtgatcaatcacattcaattttaggaacagagttgatcacattagaatgtattagtgattattcagacactgaaaaaaataggccgttagctttcattttatgtcactaatattatatattactaatacttatttgaatactttgaatatttttc

SEQ ID NO: 601970 - DNA, 583 bp, Homo sapiens
cacagttaccaaactaaagaaccactctggtttggtcctttcttttccttttaaatcattgttctattctgctttgcgttctctttgtggagcttaagactgttgagatttatgaactcaccaaataaaatctgctttttatctttgaagttatggttcacatccacctagatcctcctaagtgcasttattccaacaaactgaaagggacagaacctaatgtaaatctgcacaaggacagagggtgtgctggggaaggtgataaaaaaaccatgtaagagaaaaccaaatacttgatcaatatgtttcaaaagtttcaagatcattaaagacaagaaaagactggaggaactgttacatatcaggatagactaagaagaaatcacaactaaatgattttgatacgaatctggaacaaaaaaagaacatcagtggaaaaagtgatataaattgaataagcgctatacatttgttcatgttattgtaccactttttattttctgttcttgacactacactgtggctacattaaatgttaacatgagggaaagtaagtgaagatgaggaatataaaagaatggtg

SEQ ID NO: 601971 - DNA, 632 bp, Homo sapiens
aaaatctttaaaaagttaaaaaactatacatggaaacctacacacaaaccaaggtcatgatccaaaaggtgtctgaagtctcattttcaggaatacagaaaatctagggagtgacatatttggttagcagatggaaaatttgtttccaatgataagcaagtttcacattttctcagaaccacctaaataaatcatctaacaaattctgggaaaaaaaacagcagaataaagtgctcggtttggaaagcaaagggtagggtactatggttcccactaccttcttcgacatttccagtagcagagcaaagaaagaaagcttgagtaagcaacaagccatctgtattcattctgtgagtgctcctcctcccctgcattacaatttgtccttcttaaaagcaaaaatgtacacttagttactgcgacccagtatcyttcatttggaggatttaaaacacatgccaacactcacatttatagaaataagaagtaccctacttttggaatcctagatgtgataccatggtaagaaatcttctaataattcacacagattctttcatagagtttattcattgcataatattgcatgtagcagcaacgaatatttggcttaacagagaggaactacagat

SEQ ID NO: 601972 - DNA, 485 bp, Homo sapiens
taaacttatattctaaataaatgccaaggcaacataaaattctaagaatttgctataacacttcacagtcaaaatatgtctacttgtttatatcaatgagcttcatactcacagcattatttattcactttattgaccatcacaatatgtcagttgattccaatatgacttttaaatttcactatagtaaaatttatttaagtagacwggtttctttggccaggaacatcttagaatgagcagttatgaatttccaatgctactgaatacaaatttaaatgaaatttttaacttcaaaatttaaaagactaaataacagcgataagctacatgctacacttttattatgagaaaagcttggattccttttgggaagagtttcccagagcctttacatctttttctaagctgttaagtgtgttactgtttttgtccaaacctaaatgcaaaagaaaaaataaggcttgaagtcacaggtaatgaag

SEQ ID NO: 601973 - DNA, 569 bp, Homo sapiens
ggatctatcagctgccaccaaaattaactcaaaacatgctgtagacctacagatgaactataaaactataaaacttctagaaatagaagtaaaataaattcttcatgactttgtgcttgtcagtaaatatttaaatataaagaatccaatgcatgaaatttaaaaatgacaaactggattttatcaaaattccaaatttttcattgtgaacaaatttttaawggaaatgataaatgatttctgtatgttaaaacaaccttgcaccccagggtaaaccccacttggttagggtgtgtaatcatttatttgtactggagaatttggtttgccattgttttattgaagattattttattgaagattatgcttatcagagacactggcttgtagttctcttttcctgtggtatctttgtctggcttttgtatcatggtaatgttggcctcataaaatgagtttggcagtattttctctactcctactttatgaaagagttttaaaggggttggcataaattcttctttgaatgtttggtagaattcaaccaagaagccatctagtcctggttt

SEQ ID NO: 601974 - DNA, 459 bp, Homo sapiens
gcaggaaaagaaaaaaggaaacaaaaaaatagggaaggaaaaagaaactgaatgcaaaagtgcatggagatttagaagtgattaccgactcgcacaatcacacrtgtacatcctctcataactgtgacagggtagtttctgttatactcaacatcattttaaatgatacatgcatttttttagtatgtgttcactttctaactctccactcatcaaacttccaacatgtcttcccttgtagttactttttgatgatagatttctttcttatttcagtgagaaaaaatgaaaaatagcaattgctcgagcatcaggaaatattctgttaactttctcattataatacagctttctcttgacctcagatctctttatagctattcccccatttctccactcctcttaactgaggaaaaacaactcaaaggaggtgcctgtactcattgtcaccaattcctc

SEQ ID NO: 601975 - DNA, 582 bp, Homo sapiens
cttcctccaccttctcagcctactcaacatggacaacaagaatgaagacctttataatgattcacttccacttaatgattagtaaatgtattttctctttcttatgattttcttaaataacttttttctctagcttacgttattgtaagaatacagtaagaatacagaaaacatgcaaacgttattgtaagaatacataaaacatgcaaaatatgktttaattgacttatgttatcagtaaggctcccaaacaataagctattagtagttatgtttttggggagtcaaaagttatacatagatttcaaactgcacaaggactcagtgccactaacccgcacgttgttcaagaatcaactgtataccatatcttactgttagccatcatggtgcttttgcacaatagaacaccagaacttattcctcctatccaattgtaatcttgcacccatttaccagcctcttctcatcttcccctccccagtctctggtaaatgctgtccttctctgcttctatgataccaaatttgtatttaaattttcaattccatatatgagtgagattatgcagtatttgttgtt

SEQ ID NO: 601976 - DNA, 582 bp, Homo sapiens
cttcctccaccttctcagcctactcaacatggacaacaagaatgaagacctttataatgattcacttccacttaatgattagtaaatgtattttctctttcttatgattttcttaaataacttttttctctagcttacgttattgtaagaatacagtaagaatacagaaaacatgcaaacgttattgtaagaatacataaaacatgcaaaatatgttttaattgacttatgttatcagtaaggctcccaaacaataagctattagtagttatgtttttggggagtcaaaagttatacatagatttcaaactgcacaaggactcagtgccactaacccgcacrttgttcaagaatcaactgtataccatatcttactgttagccatcatggtgcttttgcacaatagaacaccagaacttattcctcctatccaattgtaatcttgcacccatttaccagcctcttctcatcttcccctccccagtctctggtaaatgctgtccttctctgcttctatgataccaaatttgtatttaaattttcaattccatatatgagtgagattatgcagtatttgttgtt

SEQ ID NO: 601977 - DNA, 633 bp, Homo sapiens
atccatttttggacacttagattgattctgtatctcagctattgtaaatagtgctgcaacaaacataggagtgcagatatcattttgacatcttgatttcatttcttttgtataagtacttagtgatgggactgctggatcatatcacagttttatttttaagttttgtgactaaccttcatactgtttttcatggtggttgtattaatttacaatcctaccaacagtgtgtaaatrtttccttttctccacatctgtgccgccacttgttttcctttgtatatttgtttatagacattctaactggagtgaggtcatacctcattgtggtttttacctgcatttctctgatgattagtgaagttgagcatttgtatgtacttgttggtcatttgaacgtcttctgagaaatgtcttttgaggtcttttactcactttttattggcttgttttttgttactgttgagttgtttaaattttctatatattcttgtcatgaattcatgtcagatgtatagtttgcaactattgcattccattctgtaggttgtctctttactctgttaattgcttctttgatgtgcagaaggtttttagtttgatgtaatctcatttgtctgtttttacatttgt

SEQ ID NO: 601978 - DNA, 600 bp, Homo sapiens
aaaatcataagagctatgagttcatctgcaagttaagattgaaataaaccaattaaggctgggaaacaagatggttacccaaacctaattttctaaattggcagtgtattgaatttacattcttgttagcttctttattaagcagtttttattttgccttcataaggtcattttaagaaaaattatactggtctttcctctgaaggtagagagtcaggggcagagagatcaggaaagtaccacctgcttgtttaactgatggatggttgttttttcttaagattaatgtctttaggtggaaaaccatctgttctcataacatatccacagtctgtctattagagggcaatatataacagctagcaccacatgttaaatgcacacgtgtttccaaatttcctcctgtaaaataactttacaacatatttgcatccatgtcagtcctttgcttgtggakgaataactataattcttgagtttgtgtgatttataacaactttcaaagagaaataagactggttaagattctattattttgatatatttctcatatcatagtcaatttctaggcatgggcctggaatatgaagccttcataaa

SEQ ID NO: 601979 - DNA, 660 bp, Homo sapiens
atctactccccttttttttaagatgtggattttttctatcttgacacttgagaccttaaaattctctgtaactttttacctgtatgggatgtcttttaaaattacctagataattctgaaatttctcagtttcattaactttccttttatttaagatatctacctgattcctttagccttatatactatattctgactacacttaaacttacctatctgatttctttagtcttgtatactatatcctagctaaagttacctattattgtcctgctatgtcaccagatagaccttagtactatatatggcacaacaatttcttactttccttaaaatttaaaaatatcaaattggtatgtagacatctagcaacatgatttttaaagatatatacttatcttgattttatccagctctcattatatgaacaatagctgataatctgttacttataaggcatctatgatccaagtcttagtctataatctgagacattttattgttaaagtgtttataaatcctkaggctggatgtaagaagctaaaattaaaagtgctagaaaaaaacctaatactttttttcttaacatttgaagaagtatagataaaagagctccaagcagagacaaaagaagaactaaagtgatcaaagtcagaagag

SEQ ID NO: 601980 - DNA, 552 bp, Homo sapiens
taatatcctggtggcaaaaatccaaaaccagtataaatttctttcactttataaaaagcttttctttaacaactataatatgaaacaataggttttgattttgtgatgcaatattaaattgcctcaatcagatataagtatgtttggataattctagtatataacttttgtgtgcttgcagttttttatcatcagagatattttctaaaattattaaatattacatttaaaatagttaactgattatgtgctacaactttcagaatacacagaaatataaataattctaggaccaggccagttattaaactactcattagtttaaactctaactagacacaattatgattcttcttctttgggatttttttaaccgaggaattaatgtttaatattgtagtgaatgttcataggaaagtaagatatatttctataatctttaagtgcaagctttgattgaaatattttatctatgtatacatatgcacaaattccaaaggtaaagcttcatacattttcgcagygtgaatgcacctgtttaacctataccca

SEQ ID NO: 601981 - DNA, 514 bp, Homo sapiens
ttttctagtaagcaaagcatctctttatcatatgaaaatggactgagagcatatgttagagtttgaaagtagtttaccatatgccgactgtagtgttaagtcataaatgtcctcaaatcctttgacactcctccyatcaaaaggtgaaatctatgtttccttcccttgaatctggatggacttttgactgtttaggaagaaatgctgaatgccttcagaggctaaatcagatagagcttctacccgatggtttttgaaagttcacactaaaacacagccttcaacctctgatagcctagcagccatatgaataggccatatagagatgctccagccaatagcactagatggggttccagatgatagtcagcatcacttcaagataagtgaagggagagaactttgtggcgaagccagcccagcgtccacctgactataaaacttgtgagatcctgggtgagaatcacctagttgaacccactcgacccttaggaatatgaaaggttataataaa

SEQ ID NO: 601982 - DNA, 524 bp, Homo sapiens
tgaaaccctgtctctatgctaaaaatacaaaaactagccgggtgtggttgcacatacctgtagtcctagctactcgggaggctgaggcaggagaattgcttaaacccaggaggcagaaggtrcagtgagcgaagatcgtgccactgcactctacactccagcctgggcaaccgagcaagactccatctaaaacaaacaaacaaacaaacaaaaaaacagcatttgtgtgtactttttattcataattattctaaaacatctatatgattgccatggatgtaataaatgaatttcatgctattgaacatatcaacatttaaaattaattgttgtgtttgtagaaactagttactttcttaaaagaacaaagatgaaaaaagataaaggacgacaaggaacagaaaaccaagttatttttgtgaaaaatcaggagtattttattccagtttatatcaaattcccaagactaccaaatccgaatatttcagtatatgtagtctaaggtctcacttggctcttgtttt

SEQ ID NO: 601983 - DNA, 619 bp, Homo sapiens
ctatgctaaaaatacaaaaactagccgggtgtggttgcacatacctgtagtcctagctactcgggaggctgaggcaggagaattgcttaaacccaggaggcagaaggtgcagtgagcgaagatcgtgccactgcactctacactccagcctgggcaaccgagcaagactccatctaaaacaaacaaacaaacaaacaaaaaaacagcatttgtgtgtactttttattcataattattctaaaacatctatatgattgccatggatgtaataaatgaatttcatgctattgaacatatcaacatttaaaattaattgttgtgtttgtagaaactagttactttcttaaaagaacaaagatgaaaaaagataaaggacgacaaggaacagaaaaccaagttatttttgtgaaaaatcaggagtatyttattccagtttatatcaaattcccaagactaccaaatccgaatatttcagtatatgtagtctaaggtctcacttggctcttgttttgtgattgtactaatatcgatgaaaaccccactaacgtgacttaaagtaaaaacatgcaagaaaatataaagattaaaattggacatatcacgatttaaaatttcttcc

SEQ ID NO: 601984 - DNA, 404 bp, Homo sapiens
tttcttacatagattttgcacatattttgtcatatttatttctaaatatttttagatgctaattaaaataatcttgtgtttttaacttcaaattctagttgtttattattgatatagacaaaaataattgattttttatattgacctatctcgccaccttcttataatttttatttgttataagaggattttttgtagattttttgtatttttyggcatgtacagttgtgccatctgtgaacaaagacatgtttattttttcctttctaagacatatgcatgttattttattttattatgttaatgtatcaactaggactgccagtaaaatgttgaatagaagtcatgaaatgagacgtcctggactggtacctgatttagcataaaacacctagtttttcact

SEQ ID NO: 601985 - DNA, 548 bp, Homo sapiens
ctattgcaattttcgggaggtgccataaatcacacccacataagacagcaaacttaatggataaatgtgtattctgactgctctacagactgtccattctctcatctctcttcttcctcgggcctccctatacccttagacaccacaatactaaaattagtccaactaatatctctgcaatggcctctacatgttcaagtgaaagaaagaggtggacttctctaacttgaaaagctagaaatgattaagcytagtgaggaaggtatgttggaagctgagatagctggaaaactacactgcttgaagcaaaaagccaagttctgaatgaaaaggaaaagttttgaaggaaattaaggaaattaaaagtgctactccagtgaacacatgaatgataagagtatgaaaaaagttttattattgacccggagaaagttttaatggtgtgagtagaagatcatacaagccattcccttaagtcaaagctgaactagagtaagttctaactctcttcaattttatgaaggctgagagaggtgaggaagctacgg

SEQ ID NO: 601986 - DNA, 548 bp, Homo sapiens
ctattgcaattttcgggaggtgccataaatcacacccacataagacagcaaacttaatggataaatgtgtattctgactgctctacagactgtccattctctcatctctcttcttcctcgggcctccctatacccttagacaccacaatactaaaattagtccaactaatatctctgcaatggcctctacatgttcaagtgaaagaaagaggtggacttctctaacttgaaaagctagaaatgattaagcctagtgaggaaggtatgttggaagctgagatagctggaaaactacactgcttgaagcaaaaagccaagttctgaatgaaaaggaaaagttttgaaggaaattaaggaaattaaaagtgctactccagtgaacacatgaatgataagagtatgaaaaaagttttattattgacccggagaaagttttaatggtgtgagtagaagatcatayaagccattcccttaagtcaaagctgaactagagtaagttctaactctcttcaattttatgaaggctgagagaggtgaggaagctacgg

SEQ ID NO: 601987 - DNA, 524 bp, Homo sapiens
gtgcaaatctcatcctgaattgaatccccagtattggagggggtagtggtgggaggtgattgaatcatggggccakatcttcctctcagtgctgctcttgtgacagtagtgagtgcttgtgagaaagtacatggcaccttctccatctctttcttgctcctgctccagccacgtaaaatgtgcctgcttctccttcgccttgtgccatgattataagtttcctgaggcctccccagaagcagaagctgctatatgcttcctgtacagcctgcagaatcacaacccaattaaatctcttttatttgtaaattacccagtctcaggtatttctttatagcagtgccagaacagactaatacagaaaatcagtactgatgagtagggcattgctataaggatacctgaaaatgtggaggcaactttggaactgggtaataggcagaggttggaagagtgtagagagctcagaagaagacaggaaaatgagggaaactttggaacttcctaaagacttaagttgttaa

SEQ ID NO: 601988 - DNA, 475 bp, Homo sapiens
ggaaataaggaacttattggcaactggagtaaatgccactttcactatactttagcaaagagactggtggcactgtgtcctagggatctgtggaaatttgaatttgagagcgataattcaatgtmtctggtggaagacatttataagcagcaaagggtttaagatgtgacctggctgcttctgatagcctattctcatatacatgagcaaataaatgatctgaaactagaacttatgtttaaaaggaaagcagagtgtaaaagtttgaaaaatttgcagcctatccatgtggtagaaaagaaaagcccattttcaggggaggaattaaagtcagctgcaaaatttgtataactaaaaaagagccaagtgctaatatccaagacaatggggaaaaggccttgaagacatttcagagaccctcgtggcagcctttcccatcacaggcccagaggctaggagggacaaatggttttat

SEQ ID NO: 601989 - DNA, 454 bp, Homo sapiens
ttttaagtagatttttacctgaaggaatagtttttttttcttctgcctatgtcaaactttatcatgcaaatctcaataataaatactgagttgtgattccatctttgaggcaatctgtccgtcaggtgggcagaggaatcttaatattttttttcaggtctgaaagsattgtcaccatagcagacttagacaataatacaaaagagagagcaagaaaaacaaagcatacattttaaccttttctttctgactgattctttatattttaatatatggaatgtgagatagtttttgggaacctctttcatgattaagaatgaagaagagtaaaagataaggtgaggtgtttatatccactgcacaatgatctccatcttctggaaaagaaaacaaccaccatcacaagtaatttggataaatatggtagatctcaaactctagttactcaagaatt

SEQ ID NO: 601990 - DNA, 454 bp, Homo sapiens
ttttaagtagatttttacctgaaggaatagtttttttttcttctgcctatgtcaaactttatcatgcaaatctcaataataaatactgagttgtgattccatctttgaggcaatctgtccgtcaggtgggcagaggaatcttaatattttttttcaggtctgaaaggattgtcaccatagcagacttagacaataatacaaaagagagagcaagaaaaacaaagcatacattttaaccttttctttctgactgattctttatattttaatatatggaatgtgagatagtttttgggaacctctttcatgattaagaatgaagaagagtaaaagataaggtgargtgtttatatccactgcacaatgatctccatcttctggaaaagaaaacaaccaccatcacaagtaatttggataaatatggtagatctcaaactctagttactcaagaatt

SEQ ID NO: 601991 - DNA, 601 bp, Homo sapiens
ctaacttcacaacacatgtgttttatatattatagcttaatcattctctgcacatctagaatcagagtgactacaatttgaatagaaagtgactctagaagcaattcatcagaatcttttcatttttagagatgagataatgcaakaactactgtgagacaataaattatgttataatttatgaagaaatatacaactaaaatctctttaattattgagtatacaaattttgttctttaatatatgcatagatgtcagtaatgacatttagagactttgtacaaatatttaatttaccttttaattcaacaggtatttatttgaacaaaggtatttatttatttttggcagaatagctattcctctgaaactttcatctctataaattgtacacccataaatctggttgctacagtcagaaacttaatgttctttcatgtcccactctctccctttcttctctccacagtcctttaggttctaactacagacatgtgtcacttatttcttcctttggcatcaccagtctggtgcaagccaccgtctccccttacatgcttcctcttacagtcctaactggcctctctaattttaccgttgc

SEQ ID NO: 601992 - DNA, 528 bp, Homo sapiens
ggcgtggtgcgggcgcctgtaatcccagctactsgggaggctgaggcagcagaatgggtgaacccgggaggcggagcttgcagtgagccgagatcgcgccactgcactccagcctgggtgacagagcaagctccgtctcaaaaaaaaaaaaaaagaaaaaaaaaaaatgaaatcagtttgcattgagtcctaattattttagcaaatgcttactgtgtctgaaaatcaggtagagactgactgaccaggagataaattctatgggcaagaaaaggccagtgttaaatctgtgggagttttgtaacaatgaattttgcttctttacacactatcttatcaatgtggacatggataagaaacaaaaacccctctgtagttgatgacagtatcaagtagttggtagatggggttggggggtgaagtgcatcgctatgacatgaagagctgtgcaggatcctccgagaggatccttatttccaggatcctcctagaaaaagccaggaccttgagaatgatggcagctaattt

SEQ ID NO: 601993 - DNA, 528 bp, Homo sapiens
ggcgtggtgcgggcgcctgtaatcccagctactggggaggctgaggcagcagaatgggtgaacccgggaggcggagcttgcagtgagccgagatcgcgccactgcactccagcctgggtgacagagcaagctccgtctcaaaaaaaaaaaaaaagaaaaaaaaaaaatgaaatcagtttgcattgagtcctrattattttagcaaatgcttactgtgtctgaaaatcaggtagagactgactgaccaggagataaattctatgggcaagaaaaggccagtgttaaatctgtgggagttttgtaacaatgaattttgcttctttacacactatcttatcaatgtggacatggataagaaacaaaaacccctctgtagttgatgacagtatcaagtagttggtagatggggttggggggtgaagtgcatcgctatgacatgaagagctgtgcaggatcctccgagaggatccttatttccaggatcctcctagaaaaagccaggaccttgagaatgatggcagctaattt

SEQ ID NO: 601994 - DNA, 578 bp, Homo sapiens
ctccaaatacaatcatgttgggagttagggcttaatagatgagtttttcagaggacacagttcagtccataatggttatatataatgttttatattgggttttagaaaatattaattctgaaaaatggtaataaatttctgaggggggaaaaaagacatttggtcttccaagcaagggatctgggtgataatttcatgggtatactaatatgtaacaatgcctaagctgtccatttaagatgtgtgcacttccctctatgaaagttatagctcgagaaggaaacagcatcgttggcttatcattgctttctaggacacagtagaaatttccagtcctgggatcttcacaaaagagtccaagttactgtttcagcatttcgcgtgtctgggtgttttaggaatacagaatataatgtggtatcaaacttgcctcctagccacataaaccatttactgtycctcaacgtgactgtttactgtcacacattcctctgtttgtacatgttgcgcccttttctaggatgtctttcttcttttctctgcctaatgcaatcccactcatccctcaagccttgtaa

SEQ ID NO: 601995 - DNA, 538 bp, Homo sapiens
gaattaccaatgagaataatctactgggaataactaatctgttcaagctggcgaaagcagtggatgtggaagtaaaggttttaatattgcccaatagaaatgttctctcatttatttaatgtcttctattggaaaactgtagaaaactgtaataatgccattcctaaataccatgcccttttgagaaggtgaacagtggtattagttcacaagccccatgcttaaaatgtaactcagtggtgtgaaatagagaayttccttctccacgtatatcttttgatcatcttgtgcattgttgctctgcatatttgttaaataaccacactagctcatttcaaatgagcatacaagagattcctacttctccaggaaatgtcaaatattcctggtgtagcaaataaatagatcaaaaggaagcacaactatttagaagaaggcagaagatagtaagatacatggattttttcatttgagtatatcctagttataaaaagagatataatgttgaggggagcaggagatagaagttaggacaggg

SEQ ID NO: 601996 - DNA, 564 bp, Homo sapiens
gtgacctctttgtttctatgatttgactactttatattttatttatktttttaagacagggtctcactctgtcacccaggctggagtgcagtggagcaatcataactcactgcagccttgacctcctggactcaagccatcctcccacctcagcctcctgagtagctggaactacaggcacatgccaccacacttggctaatttttgtattttttgcagagaaagggttttgccatgttgcctaggctggtctccaacttttgggctcaagtgattcacctgcttctgcctctcaaagtgctgggatgaaaggcctgagtgaccacattcagctggatttgactactttagatatctcatataagcagagtcatataatatttgtgtatacatacaatggaatattattcagacctaaaaaagacattttgcaatatgtgacaacatggatgaaccttgagaacattatgctaagagaacagaggttccttgccagaagctggggaatgagtggaatctaacagaggtaatgtcagccagtaagccaaaatagccagtcaatta

SEQ ID NO: 601997 - DNA, 564 bp, Homo sapiens
gtgacctctttgtttctatgatttgactactttatattttatttatttttttaagacagggtctcactctgtcacccaggctggagtgcagtggagcaatcataactcactgcagccttgacctcctggrctcaagccatcctcccacctcagcctcctgagtagctggaactacaggcacatgccaccacacttggctaatttttgtattttttgcagagaaagggttttgccatgttgcctaggctggtctccaacttttgggctcaagtgattcacctgcttctgcctctcaaagtgctgggatgaaaggcctgagtgaccacattcagctggatttgactactttagatatctcatataagcagagtcatataatatttgtgtatacatacaatggaatattattcagacctaaaaaagacattttgcaatatgtgacaacatggatgaaccttgagaacattatgctaagagaacagaggttccttgccagaagctggggaatgagtggaatctaacagaggtaatgtcagccagtaagccaaaatagccagtcaatta

SEQ ID NO: 601998 - DNA, 619 bp, Homo sapiens
ataccatattcatggaatagaactaaaaccatatgaacatctcaataaatacagaaaaagcatttgactaaattcaacaccctttaatgatagaaacactcaacaagttagaaatagaaggaaatgtcttcatcctggtgaaggacacctagaaaataaccacagctaatatcatacttaatggtgaaagactgaataccttccccctaaaatcaggaacaagacaaggatgtatgtgcttatcacttcaatttaaaattttataggaggttctagtcatggcaattaggcaagaaaaataaattaaatacatccagattataaaagaagaattaaaattatttatctaaagataacaggatcttgtatataaaacatcatarggaatccactaaaaactattataactaaaaattagcaaagttgcagaataaaagatccatatagaataaccaattttatttgtatacacttgcaataaataatctaaatataaaactaagagaaaattccatttacaacagcatcaaagataataaaatactgaggactaaatatagcaaaaagggcacaaacctatactttaaaaactgtcaaacattgttgaaagaaagcaaaa

SEQ ID NO: 601999 - DNA, 619 bp, Homo sapiens
ataccatattcatggaatagaactaaaaccatatgaacatctcaataaatacagaaaaagcatttgactaaattcaacaccctttaatgatagaaacactcaacaagttagaaatagaaggaaatgtcttcatcctggtgaaggacacctagaaaataaccacagctaatatcatacttaatggtgaaagactgaataccttccccctaaaatcaggaacaagacaaggatgtatgtgcttatcacttcaatttaaaattttataggaggttctagtcatggcaattaggcaagaaaaataaattaaatacatccagattataaaagaagaattaaaattatttatctaaagataacaggatcttgtatataaaacatcataaggaatccactaaaaactattataactaaaaattagcaaagttgcagaataaaagatccatatagaataaccaattttatttgtatacacttgcaataaataatctaaatataaaactaagagaaaattccatttacaacagcatcaaarataataaaatactgaggactaaatatagcaaaaagggcacaaacctatactttaaaaactgtcaaacattgttgaaagaaagcaaaa

SEQ ID NO: 602000 - DNA, 542 bp, Homo sapiens
catcaaccctgtccctgtgaagaagggtatacaaataagtgtcaggacctcactggattattgggtcattctcctcctgtgattcccctgtmcctaagcatgttaattaccttctctatgtcctttcctcctattaatccccctcttgtcatttattcattttcagctaacctttagagggtgaagggggagcttcccatttgcctctacagattcaacatgcttctttgtaaatctagagacccagacggactgagaatatcccactgtggccttggcttgtcctggtctcacagctattccttctcacgtactcttctgcttgacttcagtgactatttctcgccaagaaaatgcaaatcgctcatgtgagggcagctgatcaacagcacaattccaccctctttggagaaccatcctcgaccaactattcctgaaactagctgaaatttggacccacttctgctaaagttttgggtaaaaccttctgtcatgcttatgttagtggtactctggtttattttcttccatataaaccaagc

SEQ ID NO: 602001 - DNA, 542 bp, Homo sapiens
catcaaccctgtccctgtgaagaagggtatacaaataagtgtcaggacctcactggattattgggtcattctcctcctgtgattcccctgtccctaagcatgttaattaccttctctatgtcctttcctcctattaatccccctcttgtcatttaytcattttcagctaacctttagagggtgaagggggagcttcccatttgcctctacagattcaacatgcttctttgtaaatctagagacccagacggactgagaatatcccactgtggccttggcttgtcctggtctcacagctattccttctcacgtactcttctgcttgacttcagtgactatttctcgccaagaaaatgcaaatcgctcatgtgagggcagctgatcaacagcacaattccaccctctttggagaaccatcctcgaccaactattcctgaaactagctgaaatttggacccacttctgctaaagttttgggtaaaaccttctgtcatgcttatgttagtggtactctggtttattttcttccatataaaccaagc

SEQ ID NO: 602002 - DNA, 542 bp, Homo sapiens
catcaaccctgtccctgtgaagaagggtatacaaataagtgtcaggacctcactggattattgggtcattctcctcctgtgattcccctgtccctaagcatgttaattaccttctctatgtcctttcctcctattaatccccctcttgtcatttattcattttcagctaacctttagagggtgaagggggagcttcccatttgcctctacagattcaacatgcttctttgtaaatctagagacccagacggactgagaatatcccactgtggccttggcttgtcctggtctcacagctattccttctcacgtactcttctgcttgacttcagygactatttctcgccaagaaaatgcaaatcgctcatgtgagggcagctgatcaacagcacaattccaccctctttggagaaccatcctcgaccaactattcctgaaactagctgaaatttggacccacttctgctaaagttttgggtaaaaccttctgtcatgcttatgttagtggtactctggtttattttcttccatataaaccaagc

SEQ ID NO: 602003 - DNA, 542 bp, Homo sapiens
catcaaccctgtccctgtgaagaagggtatacaaataagtgtcaggacctcactggattattgggtcattctcctcctgtgattcccctgtccctaagcatgttaattaccttctctatgtcctttcctcctattaatccccctcttgtcatttattcattttcagctaacctttagagggtgaagggggagcttcccatttgcctctacagattcaacatgcttctttgtaaatctagagacccagacggactgagaatatcccactgtggccttggcttgtcctggtctcacagctattccttctcacgtactcttctgcttgacttcagtgactatttctcgccaagaaaatgcaaatcgctcatgtgagggcagctgatcaacagcacaattccaccctctttggagaaccatcctcgaccaactattcctgaaactagctgaaatttggacccacttctgctaaagttttgkgtaaaaccttctgtcatgcttatgttagtggtactctggtttattttcttccatataaaccaagc

SEQ ID NO: 602004 - DNA, 439 bp, Homo sapiens
acagttagagtattagtcctttttcacrctgctgataaagatatacccaagactgggtaatttaaaaaagaaagaggtttaattgggcttacagttccaagtggcttgggaagcctcacagtcatggcagaaggcaaggaagagcaagtcaagtcttacttggatggcagcaggcaaagagagagaacttgtgcaggggaactcctccttttaataccatcaaatctcattagacttattcactatcatgagaacagcatgggaaagacctgcccccatgattgaattactgcccaccaagtccctcccacaacatatgggaattcaagatgagatgtgggtggggacacagcaaaaccagatcaaatagaaatagaaatcaaaatagacaaacaaaaaactagaaagaatctgagagcctatacttcaaggtgtttta

SEQ ID NO: 602005 - DNA, 494 bp, Homo sapiens
ttttcccaaatacttgactgataaaaatacatacagatttttaacttatccagtctattacagtttatttgccaactcttagttccctcttgtgctacgtttaaatttataagatgagtacagagactttttgaataactaatttaattaatgaattttaaagttaacttttgtagagttttagatacgtcctttgctcatacagtttagaaattacattgaaaagtaatctaatgcaaagttttttgttttaaaatttaatttaaaaggtttgagtraatctttctttctttttttttgaggtggagtctcattctgtcgccaggctgcagtgcagtggtgcgatctcggctcactgcaatctgtgcctcccggggtcaagcgactctcctgcctcagcctccagagtagctgggattacaggcacacgtcaccacacctggctaatttgggccttcttagtagagacggggtttcccatgttggccagaatg

SEQ ID NO: 602006 - DNA, 600 bp, Homo sapiens
ttttgaataactaatttaattaatgaattttaaagttaacttttgtagagttttagatacgtcctttgctcatacagtttagaaattacattgaaaagtaatctaatgcaaagttttttgttttaaaatttaatttaaaaggtttgagtgaatctttctttctttttttttgaggtggagtctcattctgtcgccaggctgcagtgcagtggtgcgatctcggctcactgcaatctgtgcctcccggggtcaagcgactctcctgcctcagcctccagagtagctgggattacaggcacacgtcaccacacctggctaatttgggccttcttagtagagacggggtttcccatgttggccagaatggtcttgatctcttgacctcatgatctgcccgcckcagcctcccgaagtgctgggattacaggcgtgagccactgcgcccagccgagtaaatctttctttaaaaattactgaagctgagtctaatatactgtatttattgcatcaactcaaaattgaattttatgccacctttttggtcagttgtgaattgaaattttataactgaaattgtttacaagattatgttaaagtagg

SEQ ID NO: 602007 - DNA, 622 bp, Homo sapiens
aatctatattatagctttgtgaaggaggtactattacttacactagcatcttctttctcatcctcgccctgctgttcaccatccctcactttgagaaattgaggtttaaagaggttatataattttcccaagtatattaggagtgtctgttctcatgctgctaattacccgagactgggtaatttataaagaaaaagaggtttaatgggttcacagtttcacatggctagggaggcctcacaatcacggtggaaggtgaaaggcacatcttacatggtggcaggcaagatagaatgagagccaagcaaaaggggaaaccacttataaaaccatcagatcttgtgaaacttattcactgccatgaggacagtatgggaaaaactgccccataattcaatgatctcccaccaggtccctcccaccacatgtgggaattatggaagctacaattcaagatgagatttgagtggggacacagccaaaccatatcaccaagactgcatatttaattgataatcggtaggtagtcctgggactctaacttaggagatcccagagtcaaggtctcggccattgcactaatttccttttaaggaatttcycaatctagtcaaattggtgg

SEQ ID NO: 602008 - DNA, 582 bp, Homo sapiens
aaacaatgatcatgactgtgaagaagagggaaagggtgttaggagagtttacaaagagagtgtatgtgtggggctgatctattataaaggggcaggagggcttcccgtagagttgcactttggagctgatgttgactggggaggtggtgcatggtgggggaggagtgtgccagccaaaggaggagcacatagaagcctgaggtgagaagggtcctagcatgttctggaaccaaagagaagaccagtgtggctggaatactgggggaaggggaaggctgggaggacacgaggctggggaggtagacagagccttttatataatattaaatgttgacagagtctttaggctaaaaaacatttaggggagccgttacgtgtgtaattattcctaactgaaaagttcaaagtactgttatttgagctatattttgttaaaatmaacaatgacaacaacaaaccactaggacaacaaaaatttcttcctggattgctttttagattgggtattttcatagttgtattagtttcctaaagctgctgtaacaactgaccacaaacttgatggcctaaaaccacagaatg

SEQ ID NO: 602009 - DNA, 516 bp, Homo sapiens
caacatgatgaaaccccgtttctactaaaaatacaaaaattagccagctgtggtggtgtgcacctgtaatcccagctactcaggaggctgatgaggcaggggaatcacttgaacccaggaggtggagtttgcagtgagctgagattgtgccactgcactccagcctgggcgacagagtaagactctgtctcaaaaaaaaaaaaaaaaaaaaaaagaaagaaagaaagaaagaaagaaagaaaaagaaaccaatagatttctgttatttattttcaccaataacaagaagttgtttcagaagcacaagggcgaatgcttggggactgcttgatgaaaatgaggkgcatacctgtgattttcaaaatgtgttcttcggaacttctgggctacacagagtaacttaacaggctgcttaaataaatatgatcctggcgccctctgagataagacccagcacagtctctgggacatttaatttctttcattcccactgtttctataggatattaaaaacaa

SEQ ID NO: 602010 - DNA, 532 bp, Homo sapiens
attggccggaggagctgccatctggactttgacgacgaaggcatcatttacacagggctggcattcagagycagggtcacaaagcagctctttccaggagcaaaatgaagttgtcaagcaagtatttgctctgactctgccaggcaccattcagatatgacaaacttgccttcctctttttattacagcttactaattctggagaaagatggaaatttttttttttaatgcgtgctcttccaaaggtcaaaacaattttaaacaagggcaggcacagtcctgcaataaaaattcagcaatctagttgtgcaataagtccgtgtaggggctgagggaagtgtcatgtttacctctctggaaagggcactgtaatcaaaagactgatggcaagaggagctttgaatttgttgttctatttctcccacatctgcatgaaattgtgtctttgaaactatatattatggagatgagtgatactggagagaaacacatgctctgaagtaaacagaaaaatacagcagcataataaaat

SEQ ID NO: 602011 - DNA, 583 bp, Homo sapiens
agatagattgaaagtgacaggatggaaaaacacatgtcatgcaaacagcatctgaagtcattaaaaaaagaggagcaaactaaatgctaggcaagaatacgggaagaaaataataaaagctagagtggagatatacaaaataaattatagaaaataacagagatagttaacataatcaaaactaattctttgaaaagatcaataaaatggacaaactgtgaactagactcaccaagaatattaaatggaaaagactcaaactactaaaattaaaaattaaatatggggtattactacgaactttacagaaataaaaaagatgataagggaaactatgaactaatatatgccaacaaattaaacaagatgcaaaggacaaattcctaaaaaaatacaaactaccaaaactgacccagaaagaaatagaatatattaacrgcctttaacaaataagattgaattaattgtttttaaaaaaaaaactacccataaagaaaagtacaagcttcactggtgatttctgcaaaacaaactcgtaacatagaaaaggaggtatccctattcattctatgaggctattatt

SEQ ID NO: 602012 - DNA, 371 bp, Homo sapiens
ctcactcactattgagaggacagtaccaagggggatggtgctaaaccattcatgagaaatcttaccccatgatccaatcacctcccaccaggtcycactttcaacattggggattatattttaatatgagatttgggtgagaatacacatccaaactatatcagttactagagttagagtactaaaatgtcactttctcctcttccccttgtcaaatctgtagctggaaaaactatgggggttgagaagtccatatgttatgtatatctacactacctccagagaggcctgagaattatccacatagactgttccatcagagtggactctcctggcctgtctgcatattgcactcacacttgggatccagt

SEQ ID NO: 602013 - DNA, 518 bp, Homo sapiens
tcagttgcatatgcgcttgcccagctctgtgcttgtgcttggccctgtggtgagttctgaatgaatataagttgtaacctctttacaacttgtaacctcaagtagctttttctttattttatttttatttttttttgagacggagtcgtctcctgtctcccaggctggaatgcagtgccgcgatctcggctcactgcaagcttcgcctcccgggttcacgccattctcctggctcagcctccagagtagctgagactacaggcgcccgcaccacgcccggctaggtttttttttttttttttttttttgkatttttagtagagacggggtttcactgtgttagccaagatggtctcgatctactgacctcgtgatccgcccacctcgtcctcttttaagaggacaattaaaagagggggattacagggatgagccaccgtgcccggctctactcaagtagcttaaaatctagctcaagagaaagcaatgtgcttttcggcattgaatcaaatgtgaaa

SEQ ID NO: 602014 - DNA, 518 bp, Homo sapiens
aaatatggcattagtctattcatgagggatctgctcccattatccaaataaatacctcccagtaggcctcacatcacaattctgctacattgaagatgaggcttcttacatagaaacttttggggaacacactcaaaccatagcaccctacatgtttaaatttatttctgtactctatattatgttccattggtttatgtttttgttttataatttaaaatcttccctgtcctaaaagatggaagaataacacccttagctggcattttttgttttgttttgtttatggcttgtattaattttatttttttaactctaagacaatagygtttagctgatctgaaggaatgcacatttattacaaggggccacagaggaatatcgcagggggacaccagtcacatcaccacagaacccagtgcatttggaaagaaaaatgataagacctgggttgacaaacagtgggaaagtagacaggagctcactacacatggttcatactatctgtagtcagaact

SEQ ID NO: 602015 - DNA, 584 bp, Homo sapiens
attttgtcacccagatactaagcctagtacccaacagttatttatcctgaacctgtattagyccatttttatgctgctatgaagacatacccgagactgggtaacttataaagaaaagaggtttaattgactcacagttctacatggctagggaggcttcaggaaacaatcatggtggaaggtgaaacaggcacatcttacatggtggcaggcaagagaagttagaaccaagggaaaggggaagccccttgtaaaaccatcagatctcatgagaactcactcactatcacaagaatggtatgggggaaactgccctcatgattcaattatctctacctggtcctgcccgtgacatatggggattattacaatttatggtgagatttgggtggggacacagaaacaaaccatatcagaacctctccctcctcccaccctccactctcaagtaggtcccagtgtctgttgttcctttctatctgtccatgtgttctcattatttagctctgacttataagtgaaaatatgtgatatttggttttctgtttctgtgttagtttgccaaggataatggcctccagctc

SEQ ID NO: 602016 - DNA, 578 bp, Homo sapiens
gaaggcattcaggtcccagcatttccattgcagcattcattttggatctgtcccattggaatactaagcctctcatccgtacggtatcatttctctacgccaactcttttattcaagggaaatgggtggaaagaaatcaggaaaattggttacagcctaaaatgcaacatgatgctgaaatgtcaatggaagatacagatttaatgttttaccctttccagctatcayataaagatccaagttggacaaataggataaatttttagtggggaaggcagttccatgctttttatgactctactactttctctaccttttattccttctttcagtccttctggaagaagttctcctatttctcacttttctgaatgcacccagagcagaaagagatttgtcaatctcctgtatacacttatagtgaactaaatttattgtgagaaaagaaaacattgcctttacatattgtgttatcctttttacataaacctgggtgtcatcagaatctttgatatattactaatctaatgagctttgaatctatatatttcatacttaatttctccttaataaaatga

SEQ ID NO: 602017 - DNA, 578 bp, Homo sapiens
gaaggcattcaggtcccagcatttccattgcagcattcattttggatctgtcccattggaatactaagcctctcatccgtacggtatcatttctctacgccaactcttttattcaagggaaatgggtggaaagaaatcaggaaaattggttacagcctaaaatgcaacatgatgctgaaatgtcaatggaagatacagatttaatgttttaccctttccagctatcatataaagatccaagttggacaaataggataaatttttagtggggaaggcagttccatgctttttatgactctactactttctctaccttttattccttctttcagtccttctggaagaagttctcctatttctcacttttctgaatgcacccagagcagaaagagatttgtcaatctcctgtatacacttatagtgaactaaatttattgtgagaaaagaaaayattgcctttacatattgtgttatcctttttacataaacctgggtgtcatcagaatctttgatatattactaatctaatgagctttgaatctatatatttcatacttaatttctccttaataaaatga

SEQ ID NO: 602018 - DNA, 601 bp, Homo sapiens
atctgcaaatgaagtactcgtgcactatatctgttttttagaatgaggaaatcacgcattttatgtttgttccgttttagcattaacaaaagaaaataattttgctattacttccagttgagttgaacttgaaacttgggctgctttaatgttcttaaactataattcataaatgctaataaatgatttgtaarcagtggttctataaaaaagtatatcaccaaaataacttgggaaataaattagtggatgtgtctcatcaacagactgcttacataccataatgaccattttttcaagagtcatgatctcttttttcactgcttgagttgacatgctgggtgatagttactaaattggagtcagaagatctcagtgtgaactcatgctctacttaatcagtctttgtgctttagtttcctccatagaactagttgttctgagaactgaaattactttgtcaaatgtaaagcacatacagatgcaacctaacaatattaactgtgtatatgagtacatttcaacagctcagcattgaccactctggcatattttccctgattttcatgcgggattaacacaggaatcacgttttattcca

SEQ ID NO: 602019 - DNA, 601 bp, Homo sapiens
atctgcaaatgaagtactcgtgcactatatctgttttttagaatgaggaaatcacgcattttatgtttgttccgttttagcattaacaaaagaaaataattttgctattacttccagttgagttgaacttgaaacttgggctgctttaatgttcttaaactataattcataaatgctaataaatgatttgtaagcagtggttctataaaaaagtatatcaccaaaataacttgggaaataaattagtggatgtgtctcatcaacagactgcttacataccataatgaccattttttcaagagtcatgatctctttyttcactgcttgagttgacatgctgggtgatagttactaaattggagtcagaagatctcagtgtgaactcatgctctacttaatcagtctttgtgctttagtttcctccatagaactagttgttctgagaactgaaattactttgtcaaatgtaaagcacatacagatgcaacctaacaatattaactgtgtatatgagtacatttcaacagctcagcattgaccactctggcatattttccctgattttcatgcgggattaacacaggaatcacgttttattcca

SEQ ID NO: 602020 - DNA, 535 bp, Homo sapiens
aaaattccgcatcaaaactgcaactctttcaatctgagttacttcctccatcaaagtcttgagcccctcaaagtcatcaagttaaaaacatattttagctacacaccaaacaagtaaagattggctttaattgcttgtgacttattttcccaaaggtcagtgaaggccaactcctcaggtataatccagaatatatcgttatcctttctgggagaattttccttaatgagtcatttctaagcattgtctcttcccaacacattagaggaaacctgcttcttayatattttaagaaaagactttgaaatggtccagcaaaggaagaaagccttacgatgtctaggaaggaactagaagtcttgaaaaacatctaatggttggaattacgctgggagagttccaatattggaacatgcaggagaggattcagggcacacttgcttcttttgttgcccactgtctcagtccattagggctgctataacaaaacatcataaactaggtggctaataaacaacaggaatttatgtttcac

SEQ ID NO: 602021 - DNA, 535 bp, Homo sapiens
aaaattccgcatcaaaactgcaactctttcaatctgagttacttcctccatcaaagtcttgagcccctcaaagtcatcaagttaaaaacatattttagctacacaccaaacaagtaaagattggctttaattgcttgtgacttattttcccaaaggtcagtgaaggccaactcctcaggtataatccagaatatatcgttatcctttctgggagaattttccttaatgagtcatttctaagcattgtctcttcccaacacattagaggaaacctgcttcttacatattttaagaaaagactttgaaatggtccagcaaaggaagaaagccttacgatgtctaggaaggaactagaagtcttgaaaaacatctaatggttggaattacgctgggagagttccaatattggaacatgcaggagaggattmagggcacacttgcttcttttgttgcccactgtctcagtccattagggctgctataacaaaacatcataaactaggtggctaataaacaacaggaatttatgtttcac

SEQ ID NO: 602022 - DNA, 634 bp, Homo sapiens
tggtatctgaaaagcccttggcactcaataaacatttactattatcattaaggaagaagagagcaacaattatgatccacattyacactgtaatatcttgcacttggcaggcactttgtaaaaatcgttgatatggttttgtatgaatttatatttttattttaggggtttaaataagctcagtgtggctttccatcaaattagaaacagtatccttaagtacaaggaagtatcaccgtctacttctcttgtgtgatccagagttgacaaagatatcatataataagagtttcaatgccaagcaaatgaattaacacaccttataaccacagctctattgtttttgaagtatgcacaatgttattaaatttattaagctggttattaagcttatttatttttggaagcaaaatgtctgagaatctcaccttcctgaggtgaggatgcttcaactttttcaatagcagaatcccttactaatatatagaatttagtaagatttgtatggtcctgacaggcttctctatcagctataccctttcccacattgttatacatctggcattgttcattttctattccctaaaatggaaaggagaaaaatgtctttctttgttcattttgatagtgattt

SEQ ID NO: 602023 - DNA, 633 bp, Homo sapiens
tatttttggaagcaaaatgtctgagaatctcaccttcctgaggtgaggatgcttcaactttttcaatagcagaatcccttactaatatatagaatttagtaagatttgtatggtcctgacaggcttctctatcagctataccctttcccacattgttatacatctggcattgttcattttctattccctaaaatggaaaggagaaaaatgtctttctttgttcattttgatagtgattttgatagtgatttaatcattttgatagygattttaaaatacaaaagatggatggggacatacaaaaattgaattaaatcataagatttatcaagatgaaaattttcaattcagaattaaatggtcttagatgctctgaaatttgttgtaagtagaaaatcagttcaattatcagattggaaagtatatataaaaacactttttatcaaattcttgttatattttcttaaatgtacttttaaaagttacttccaggataaactgcaattttgtatctcaaatgtctttcaaaatcaacctatggtaaaagacaggctgcaaaaatttaggaacagtacattgacaaagaaaatgttaaataagtagatttaaccattatatgctagcttgaagtaa

SEQ ID NO: 602024 - DNA, 580 bp, Homo sapiens
aagtgggagttgaacaatgagaacacagggacacagggaggggaacatcacacactgaggcctgtcagtgggtggggagataggggagggatagcattaggagagagtttttaaagttctctttggatttctgaatttcctttgcttcctttggcatttgttgacattcatgttagtttccctcagtttctcttttaaattccaggcttttctaaagtagctgaagatctttggctacctcttcatgtttaaggagggagtaataaaaaggctggtatatgtgctgcctaagtgaatgctaaaaaggctgatttaaatctctttatccatagtggaaactgtcaaccagagggcttcatatttaagtgaaagggtgggaagccagcttttatattatggggattttccacatgccmgaaaaaggcaggctttactctcaggtataaatacctacatgccctttagagaactgtttgagttttttgcctggagagtaaaacacctggctataagcagatgagcataggggagaagggcatttggtcgataggaagatcttcaattattacaaatagcccca

SEQ ID NO: 602025 - DNA, 505 bp, Homo sapiens
gttcatgcacatacttttttctacttaggcatttgtttaaagttttctatgataaaaaggctgaaaattttttttaaaagatcaaaaagtcaattaaatttaaaaacctatatgtcttctcactctcctaattttgaccgattcttctttttcatctgtgttatttcactattctttgccttctccctacaaccccaaacacataggaactgtgttaagcccagtttgttttcyttctaaagcatacttggtttccttcctccttttttaatttttttctaatcattccctaggtgcacaggacctcattttccttcatctgtgataacttcctgtctcctaaccctgtctttcctaagagaatagtttattctaaccagaacaaatattattgtaatcagaataaaataatagtgtaattccacttgtatttccaggccactccttagaacagacttattttgaaaaaataaaacgatctgtggcaggactaaatacctagaat

SEQ ID NO: 602026 - DNA, 536 bp, Homo sapiens
tgcctctgtctcctcttctgataaatgggaaaaacaataggacttacatcatagggttgttgtaaggagtaaatgacttaaaatatttaaagtgtttggaatagttgccagcacaaagctgttgttgttattgcatgattgattgttgttgtctcaccccgggacatctctgtggccagaggttgacctaaatatgtctgggagcaggaatgagagcactgtcattggcatcacaggaatggggcagacaggagccccaaaagaggatgtgggaaaggaaggtgtgtcagccaaacaraaacagctttccactgttttcctcatccataaaatagctttactattaagttaagtgtgattgtgagaataatgatgtatgtgaagtgcctgtcatgtggcaggccttcaagatataatagttacttaatctacacatgacaaaaccgacagcctgggctggttacagtaatgggcattaatgaaattattattttgaaggaaaatcagaaggatctagattggtttgtggattgtat

SEQ ID NO: 602027 - DNA, 546 bp, Homo sapiens
aattctaatttgtatgtaactgatactactaattcctccattcctccttaggaatgttaggaataccaatccctcaaatttcaccgttggtaagttcccgattctggcaaggtattttagtattatttggggaacattcatcatcatcatatactttatttaaaaagaaccttcacataactaggactgtgaccagcacatcactggtagaagctgagaaaaggagagggcattctttaacctaaaccagaactccatcaattaaagtagtttctttccttgtatatttataaagtgatttttttatgctaggaggatgtttgagatctctttttatctcttaatgccaagatagcagagaataaaactgtaggagaarataaagcagaggcttattaataacatgtactcataataataaatatacattacattgcacttgttcttagccaaaaaaatttttattgatacttaaagtgaacaaacaaaaacaatacgactgacttcagccacttctgcctgcaaatatgagcagaagaataggga

SEQ ID NO: 602028 - DNA, 591 bp, Homo sapiens
ttcgcacgattacttaaaaccttctccttcttactttcctgaaactattgagccatcacttttatattccttcatctcaccttatatttacattaaaatatctctctttaccttcattcattcctatcttttctttcagaagagatgccacttctgccttcaaaaaaactgtcatcttcccaggctctctctctgatccttttctaccattttcctccatcccaaacttcagaatctcatttttctctccaagttcataatttaatcattaattctcactgtggttggagaaaaagaaaaacaaaagccaataaacaaaatggaaaataacccttgaccctgcttcccctctgggttcagtccaatttcatgcccatcttacactgaaaagcaatcagagggaatggtttcygttgcatttcattgaccactacctattctctccaaaacttctgccatctagattctgttccctctttctatcaaacttacccccaggattcaccagtgaataaacaaaccaaggagttcatagctttttatgcccattgctcaagatgtcatcattacttttgatactagtaagcctgc

SEQ ID NO: 602029 - DNA, 613 bp, Homo sapiens
cattaaatgagtgagtaaataatttaattaatccagtagtgtagagtgcagattaagttaatgtgatcctccaaagaaacaactctttggttttcatagatggggagttttgggtggggagatgctgggaaggggtgagtctatagacctggtccaggcttgacctggaagcagggctctgaatgttcacaagcagttctaactaaagctagaaagaagagagctaaactgggaacatggtaggggctgcattcaagatcaggaattaaatattaagtcaagactataattaaatattattagaggatcacagaccctgtttcatatttcctggaacctcccatagatagcttttcttgctgcggataggccaaatttatatgctctgctaagarcctgaaatagaatctgtattattgatagaagtagaacccagtattttgacaggcagctgggttgagggcagggctggcttttgttcttaaatattaagaaacttaacaaacacatacatgcactgacaactagaagtgggccaaatgacatttcagttagaagaaacagaatgtacaaaggctcagagatgtgaaagtctgtaccatgtttgggggat

SEQ ID NO: 602030 - DNA, 613 bp, Homo sapiens
cattaaatgagtgagtaaataatttaattaatccagtagtgtagagtgcagattaagttaatgtgatcctccaaagaaacaactctttggttttcatagatggggagttttgggtggggagatgctgggaaggggtgagtctatagacctggtccaggcttgacctggaagcagggctctgaatgttcacaagcagttctaactaaagctagaaagaagagagctaaactgggaacatggtaggggctgcattcaagatcaggaattaaatattaagtcaagactataattaaatattattagaggatcacagaccctgtttcatatttcctggaacctcccatagatagcttttcttgctgcggataggccaaatttatatgctctgctaagagcctgaaatagaatctgtattattgatagaagtagaacccagtattttgacaggcagctgggttgagggcagggctggcttttgttcttraatattaagaaacttaacaaacacatacatgcactgacaactagaagtgggccaaatgacatttcagttagaagaaacagaatgtacaaaggctcagagatgtgaaagtctgtaccatgtttgggggat

SEQ ID NO: 602031 - DNA, 552 bp, Homo sapiens
gagcataaaatggcatttcattgtgttaatctgattttttctaattactggaaagattgagcatcttttaatatgccattcaaactctctcttttgcaagttgctagttcatattgcttcccattttcatactggcagtttaccttttccttaataatttgtagttgtatatattaacatacctatactctggacactagccctttgttaaatgtattacaactcccagttggtggcttgtcttcattttgcattgtcttttttttttttgtacaaaagattttaatgttaatctaagtagtttatttttttctttttaaagaagggaataaatttgaggatgtcctgtcttctccactgcctccarttcccaagaaaatgttgaaaaggggaaaattaatgattcacttctctaactatgataataaataataagtgatgttaataggaaaaaacccagacggtgttaacatttttatactagagctttaaaaagctgcttaaatgtcaatttgtgctaaaatacaggctttaaaagaggcctgcaaaatt

SEQ ID NO: 602032 - DNA, 531 bp, Homo sapiens
tgggctctgcctagtttgaacttcctggcgtctttgtttacactgtgagggtaaaactgcctactctagcctcagcaatggtggatrcccctccctctaccaaggttgagcatcccaggtccagctcagactgctgtgctagcagtgagaatttcaagccagtggatcttagcctgctgggctctgtcggggtgggacgccaacgagccagaccacttgactccctggcttcagcccctttccaggggagtgaacagttctgtctcactggtgttctgggcaacactggggtatgaaaaaaaaaaaaaaaaaacttctgtggctagctcagtgtccacccaaatgaccaccctgttttgtgctggaaacccagggccctggtgggtgtaggcatgggaaggaatctcctggcctgtgggttgtaaagaccatggggaaagcacagtatctgggccggagtgcaaggtacagtccctaatggcttcccttggctggtagagggagttccctgaccccttgtgcttactgggt

SEQ ID NO: 602033 - DNA, 561 bp, Homo sapiens
aaaataacagtccttttattacctctgcttacaggcgaggagactgagatgctagatgttaataacttgccaaaaatcacataaacagtargaagtggagtaaggattcaaacctttgttcctaccactacacaggaaaatagagcccagagcagagcagctatttgcttaaggccacgcagctggctagtactgatttcaggtcacctgactccccatccaggattctgagatagcctaggatttatgaacaaacttagaaaccattttcaactgccaaccagaaagagtgagttgcccagagatttgggggcagaaaccctactcaggtgtcaaagtctgatgcaccccttgtgtctttatctgtgtactgaggataataatctgactggttgtagagtccttacattctgatgatctggatcaaggctttttctcacatctcgactacaccagacaaaagtcactcaagcatgaaaggaatgacagtggggcataagtggaattcagcagagattgttccaaagacattgttctctgcgagaaggtacgttcagagga

SEQ ID NO: 602034 - DNA, 561 bp, Homo sapiens
aaaataacagtccttttattacctctgcttacaggcgaggagactgagatgctagatgttaataacttgccaaaaatcacataaacagtaggaagtggagtaaggattcaaacctttgttcctaccactacacaggaaaatagagcccagagcagagcagctatttgcttaargccacgcagctggctagtactgatttcaggtcacctgactccccatccaggattctgagatagcctaggatttatgaacaaacttagaaaccattttcaactgccaaccagaaagagtgagttgcccagagatttgggggcagaaaccctactcaggtgtcaaagtctgatgcaccccttgtgtctttatctgtgtactgaggataataatctgactggttgtagagtccttacattctgatgatctggatcaaggctttttctcacatctcgactacaccagacaaaagtcactcaagcatgaaaggaatgacagtggggcataagtggaattcagcagagattgttccaaagacattgttctctgcgagaaggtacgttcagagga

SEQ ID NO: 602035 - DNA, 561 bp, Homo sapiens
aaaataacagtccttttattacctctgcttacaggcgaggagactgagatgctagatgttaataacttgccaaaaatcacataaacagtaggaagtggagtaaggattcaaacctttgttcctaccactacacaggaaaatagagcccagagcagagcagctatttgcttaaggccacgcagctggctagtactgatttcaggtcacctgactccccatccaggattctgagatagcctaggatttatgaacaaacttaraaaccattttcaactgccaaccagaaagagtgagttgcccagagatttgggggcagaaaccctactcaggtgtcaaagtctgatgcaccccttgtgtctttatctgtgtactgaggataataatctgactggttgtagagtccttacattctgatgatctggatcaaggctttttctcacatctcgactacaccagacaaaagtcactcaagcatgaaaggaatgacagtggggcataagtggaattcagcagagattgttccaaagacattgttctctgcgagaaggtacgttcagagga

SEQ ID NO: 602036 - DNA, 561 bp, Homo sapiens
aaaataacagtccttttattacctctgcttacaggcgaggagactgagatgctagatgttaataacttgccaaaaatcacataaacagtaggaagtggagtaaggattcaaacctttgttcctaccactacacaggaaaatagagcccagagcagagcagctatttgcttaaggccacgcagctggctagtactgatttcaggtcacctgactccccatccaggattctgagatagcctaggatttatgaacaaacttagaaaccattttcaactgccaaccagaaagagtgagttgcccagagatttgggggcagaaaccctactcargtgtcaaagtctgatgcaccccttgtgtctttatctgtgtactgaggataataatctgactggttgtagagtccttacattctgatgatctggatcaaggctttttctcacatctcgactacaccagacaaaagtcactcaagcatgaaaggaatgacagtggggcataagtggaattcagcagagattgttccaaagacattgttctctgcgagaaggtacgttcagagga

SEQ ID NO: 602037 - DNA, 600 bp, Homo sapiens
gttcaaaatagtaatagcaacaatgtatttggtaattatagcttatggataagtgaaatagatgatagcagtgttgggacaagagggggaaattgagaatactatgttataaggtatttgcactacccatggagcagtatagtgttattttaaagtgaacttggattaactgtatatgtatattgcacactctagggcaaccmcttaaacattttttgaaagaagtactactgatattctataagaggagagaaaagggaatcatataaattgctcaattaaaaccaaagatggcaggaaaaagagcaggaaatagaaaaacaaagaacagggtaacaaatagaaaacactaacaaatatggttgatattaatccaactatatcaataatcactttaaatttcaatggtctaactatactgattaaaagacaaagactgtcagaatggatgaacaaacaagatcctacagtatgttgtctacagaaaactcagtctaagttaaaaggctcattttaaaagtaaagggatggagaaaaatataccatgttacaccaaccaaaggaagctctatcagaaatggacagatccaacaggcagaa

SEQ ID NO: 602038 - DNA, 587 bp, Homo sapiens
tcctgggtgataattttgagcctctttgccactctctatttcttctttaccttagtcagtttcctcccagtttccttcctttttcttttcttgctatatctttgcatagatttcctctttatcctcttaatagctgctttctctatcagcctttctccctttcccttctctctgcctggctttcttaactccactgtctctgaatatttataccaaactcctaacttaaaaaaacaaaattcttcatagttctmggtttgagagaagggcaggagatgaagcacttgtgctcttggttaaattcaggtctttgactgttgatcaattattttctgaaaagttaatgttttcttcttgttcatgttcacaattattgtggctgcagtgattttatatatgcatacgtgtattcttctatatgacatttacaagtgttgacagaatattgcctttttcagtaaagatcttgccagctggtgcctgggtgcatagactgcctatggctcttgaattgcatgctgaaaacttcataatgaaaccagaaaatcacagaagcataaacacagctgcttatgcctataaagtaa

SEQ ID NO: 602039 - DNA, 555 bp, Homo sapiens
  misc_feature 258: n = A,T,C or G
gggtgcacactgccgtgtacctgtgtcctcttcctgggggctggtcactcccactgtacccactcttctagaaagaagtcaagggcagtaatgagaaatgacagcaggaggagaaagtgcaaagtcccaatgacaacaggtggtaatactgtcagttcagatgcacatcccggtagctgagtggcgatggagctgaayctagatcagtactcaaactctattaaacctacagcactaattgctcccgtgaagcccatngtgttccttctcacccactaggatgtttctctggccgttcagaagttccaggccgctgctgtatccccaaacacgggtgcttgtttacattcttccccacgctcatagatgagggactattttattcttgttttaggcagctcagaagatgcccacagactgggcctcctgcagcagtgtgcggctctggctccccataaatcctcttcattctgtctcaatgagatgacatgctaatattatctggaaaatcaatactatcccccagctttgctgtatcagcagagctgctcagca

SEQ ID NO: 602040 - DNA, 635 bp, Homo sapiens
  misc_feature 1, 2, 3, 4, 5, 6, 7, 8, 9: n = A,T,C or G
nnnnnnnnnctaacagccatttacagaacattctatccatcagcaacagaaaacacattcttcttaatggcacacggaacattgtaaagtatagattaaatgtggggtcacaaaacaaggctgtgtaaatgcaagaatattgaaatcatattaagtatcttttccaaccacaatggtatgaaactagaaaccaataaaaggagaaaaatctagaaaattcataaatatgtggaaattaaagtaaatacttctaaacaaccgatgagtcaaaraaaaaaatcaaaagtgaaattttaaactctcttaaatttatacaaaaatggaaatacaacacactaaaaactatggatactgtaaaagcactcctaagtaggatgttggcagcagtgaatgcctacattaaaaagaagaaagaccttaaataaacaacttaacattctacctcaaaaaactagaaaaagaaaaagaaactaagtccaaagttagcagaagaaaaaaagtaataaagctcacagcagaaataaatcaaatagaaactagaactatttaaaaatcaaaactaagagttgagtttttgaaaaaataaaattaacaaacttttagcttgaatcactaagaatttaaaaaaagacacg

SEQ ID NO: 602041 - DNA, 576 bp, Homo sapiens
  misc_feature 1, 2, 3, 4, 5, 6, 7, 8, 9, 10, 11, 12, 13, 14, 15, 16, 17,18, 19, 20, 21, 22, 23, 24, 25, 26, 27, 28, 29, 30, 31: n = A,T,C or G
nnnnnnnnnnnnnnnnnnnnnnnnnnnnnnnaaaaaatttgtcttttaaataaatatacaagaaaaaagaatttcattgaggaagtacatttctctataaaatttttgaggaaggaaatttatttatgaaaattaaccagctaaatgcaggcaggaaaggtgagggaaaagcgcacatatcattttgggggtgggtgaaaacaaaaacaatggtttttaatggatttaaagtcattaatggattgcttgaagagaatgyaaggttgaggggaggagatgtttgaaattttcaagtcatatagaattatattcccttaatttacctgactaaaaatatataagtagtatgttagagtcagatgatgctgggagttaattctccaactttacagatggaggcttatgacctggagctcatactggtatatacgtagacctagaacctaagcttactgagctcgagcccaggtctcctttgtgagctgccatgataggctttggtagggaagtagatatcccagctctttcaacttgcctcaaaaatgaatccagagctcactgcattgatgttggggg

SEQ ID NO: 602042 - DNA, 609 bp, Homo sapiens
  misc_feature 1, 2, 3, 4, 5, 6, 7, 8, 9, 10, 11, 12, 13, 14, 15, 16, 17,18, 19, 20, 175: n = A,T,C or G
nnnnnnnnnnnnnnnnnnnnttctaccatttgtagcaatacaaagaaaacacactattctctgttcatgtatctaaggtaataagcaaatttaaagaataatacagaaaaagctagataaattaacttgaatgaaatagtttctttttttcttgaaatggctcaagtccttttcnaactaccactgaagttttttagaagttaaaaaatccatggcaggatataggtttcttccttcttgtcccaattaaaagcattctgaatactaaaactctaattttattctcttcactttcgtctagatgtagaaatacaagggcagatgagcaaaggatctttgtagcagattgtttgaaaaaaggaggatttaaaagaaaaaaattagctttaacyatagaaaatgttgacccttaggaaaaaatttgtaaatgcaattaaaggaaaaaaaaaggaaataaaaatttagaaataaaatgatctgtggtagggatatacagagtgctacattgaacacacgttttcacccctcatactcctggagcaagtatatgttcaggagagatgaataacaatgtcttcagtgggaagcaatggggaaggacaagaaatg

SEQ ID NO: 602043 - DNA, 541 bp, Homo sapiens
tgttagcactgtaaaattatgtgtgttacacaagtacaacatgcagactaaggtcgtgtattacctagcctcataccagcgtcacctagaacagcaaaaatgtatgcagattaatcacaatatatttggatgtacaaaacatattgagagcaaaatatgatggaaatttaggtgatgctctttgagcattgcttccattttccaataatgtaaccaggaatcactgttcatgtaattaaagaacaataagtctatgtgaatcaaaatatacatatacatgcaaatgttaaacctcagtaggaagaggcccattctcttgcttgctgmtatatatatatatatatatatatatacacacacacacacacacacacacacatatgtatgttgtgtgtatatgtatatacacacaacaatctataggcttgccttttaaaatagtataagcaacaaattttaagagaaacaataatgagtgtgtaaaacattagatatgtgtatgtacctttgctattatttgtggaaatggggctataaaata

SEQ ID NO: 602044 - DNA, 537 bp, Homo sapiens
ggttctattttttattgaaagtaatggcaaaaaacgcaatgccttttgtaccaacctaatagttaataaacatatcctcaaatgaaatgtcttagaattgtgttcatcaagttaatattaataatttattagaatagcactctaaagggttgcagcctatgcatgaaaatacttacaaactactacatgataatcaattctttttggcaagactgctatttacatggacacaagagttattataagaatgttgtatgtatacatgaatagtgtctgttaaacactggatataataaaaacaatagtttttctgttaattataacaatctgaacatttttgtgattatatttcacaaatgacacaccattttatttgcagatttttcttatccccaaagtttttgttaatttattaccaacacagcacacaagtctagtggcaatgcattrcctctgcagttgattttgaagtaagaaggcctatttattgcattcattcctgcttagatgacatcttaaatttgttaattggattat

SEQ ID NO: 602045 - DNA, 649 bp, Homo sapiens
gaagctttaatgttactattaagtaggtagggaaatkaccaatattataaacgcagatttccagcctctccttttaatgctttcagaatgattccacaagaaccttgaaaatgttgagtatttatatttattttatgcccttttattgtgattttttaaataaatacttttttttggtaaatactggaagttaatattctatagtttagaaaagcaattttgaacactcaactagtgagcccatataaaactacataacagcacagaatatagtaaaataataatataatgaactgggagacaaactaggcactgtgtgccaagtttttcaaggaagatacaatttcaataccaatgaaataaactcccacaaattgatttttctttgtgtgcactcatcagtgtaaatacaattaagtaataaagcctgtacttgttcaggaaagatgttttctattcatagtctgatatctgggtgctttggtttctgataatttgttatgtaaaaaccctgcaaattaaaaaaaaaaaaaatcagcagctccaagttcatgggcccttatcacagaggatttaaaacctgtgcattttctttaaactgagaatattattacattttttaatccagtgatgagaccataatagtttt

SEQ ID NO: 602046 - DNA, 649 bp, Homo sapiens
gaagctttaatgttactattaagtaggtagggaaatgrccaatattataaacgcagatttccagcctctccttttaatgctttcagaatgattccacaagaaccttgaaaatgttgagtatttatatttattttatgcccttttattgtgattttttaaataaatacttttttttggtaaatactggaagttaatattctatagtttagaaaagcaattttgaacactcaactagtgagcccatataaaactacataacagcacagaatatagtaaaataataatataatgaactgggagacaaactaggcactgtgtgccaagtttttcaaggaagatacaatttcaataccaatgaaataaactcccacaaattgatttttctttgtgtgcactcatcagtgtaaatacaattaagtaataaagcctgtacttgttcaggaaagatgttttctattcatagtctgatatctgggtgctttggtttctgataatttgttatgtaaaaaccctgcaaattaaaaaaaaaaaaaatcagcagctccaagttcatgggcccttatcacagaggatttaaaacctgtgcattttctttaaactgagaatattattacattttttaatccagtgatgagaccataatagtttt

SEQ ID NO: 602047 - DNA, 649 bp, Homo sapiens
gaagctttaatgttactattaagtaggtagggaaatgaccaatattataaacgcagatttccagcctctccttttaatgctttcagaatgattccacaagaaccttgaaaatgttgagtatttatatttattttatgcccttttattgtgattttttwaataaatacttttttttggtaaatactggaagttaatattctatagtttagaaaagcaattttgaacactcaactagtgagcccatataaaactacataacagcacagaatatagtaaaataataatataatgaactgggagacaaactaggcactgtgtgccaagtttttcaaggaagatacaatttcaataccaatgaaataaactcccacaaattgatttttctttgtgtgcactcatcagtgtaaatacaattaagtaataaagcctgtacttgttcaggaaagatgttttctattcatagtctgatatctgggtgctttggtttctgataatttgttatgtaaaaaccctgcaaattaaaaaaaaaaaaaatcagcagctccaagttcatgggcccttatcacagaggatttaaaacctgtgcattttctttaaactgagaatattattacattttttaatccagtgatgagaccataatagtttt

SEQ ID NO: 602048 - DNA, 566 bp, Homo sapiens
tttatatttattttatgcccttttattgtgattttttaaataaatamttttttttggtaaatactggaagttaatattctatagtttagaaaagcaattttgaacactcaactagtgagcccatataaaactacataacagcacagaatatagtaaaataataatataatgaactgggagacaaactaggcactgtgtgccaagtttttcaaggaagatacaatttcaataccaatgaaataaactcccacaaattgatttttctttgtgtgcactcatcagtgtaaatacaattaagtaataaagcctgtacttgttcaggaaagatgttttctattcatagtctgatatctgggtgctttggtttctgataatttgttatgtaaaaaccctgcaaattaaaaaaaaaaaaaatcagcagctccaagttcatgggcccttatcacagaggatttaaaacctgtgcattttctttaaactgagaatattattacattttttaatccagtgatgagaccataatagttttctgaaataattcagaataattatatacctaaaagtta

SEQ ID NO: 602049 - DNA, 566 bp, Homo sapiens
tttatatttattttatgcccttttattgtgattttttaaataaatacytttttttggtaaatactggaagttaatattctatagtttagaaaagcaattttgaacactcaactagtgagcccatataaaactacataacagcacagaatatagtaaaataataatataatgaactgggagacaaactaggcactgtgtgccaagtttttcaaggaagatacaatttcaataccaatgaaataaactcccacaaattgatttttctttgtgtgcactcatcagtgtaaatacaattaagtaataaagcctgtacttgttcaggaaagatgttttctattcatagtctgatatctgggtgctttggtttctgataatttgttatgtaaaaaccctgcaaattaaaaaaaaaaaaaatcagcagctccaagttcatgggcccttatcacagaggatttaaaacctgtgcattttctttaaactgagaatattattacattttttaatccagtgatgagaccataatagttttctgaaataattcagaataattatatacctaaaagtta

SEQ ID NO: 602050 - DNA, 625 bp, Homo sapiens
aatttttgggttaagctgatttttacttttctgaaagaaagatccaaacacaatgcctataataaatcttagaaattgtctgtctccattggtgagattagtcagtataaacactaacatatataaataaaaccaaacaacagttactcttttccataatgttatgcttttgtgttcaatgaaatatttaatttaattactaaatttctagcatttctctgaaggataaaacaaataagcaaacaaacaaattaacaagaaaaamccaaaataacttcaatgaattaaaactgtctagtgctacctttcctataattatcgtcaccaaataaagtgcctattggacagagatggctggttcactgcaatctccattgaccctttcgccatcagtaaaaatgtcctctaatgcttagccggacacatgatcaccaggaataaatgctatattcccaatcttttcttaacatagggcatgacacatgtgaccaatttctgacctatgttgtgtaaggggaagtaacgcgtgtaacttctgagaagctgacttacatgcagggggcatgtcctatctctgtgctttcttccttcttggaaaggcagctctgatggctagatctggggc

SEQ ID NO: 602051 - DNA, 625 bp, Homo sapiens
aatttttgggttaagctgatttttacttttctgaaagaaagatccaaacacaatgcctataataaatcttagaaattgtctgtctccattggtgagattagtcagtataaacactaacatatataaataaaaccaaacaacagttactcttttccataatgttatgcttttgtgttcaatgaaatatttaatttaattactaaatttctagcatttctctgaaggataaaacaaataagcaaacaaacaaattaacaagaaaaacccaaaataacttcaatgaattaaaactgtctagtgctacctttcctataattatcgtcaccaaataaagtgcctattggacagagatggctggttcacygcaatctccattgaccctttcgccatcagtaaaaatgtcctctaatgcttagccggacacatgatcaccaggaataaatgctatattcccaatcttttcttaacatagggcatgacacatgtgaccaatttctgacctatgttgtgtaaggggaagtaacgcgtgtaacttctgagaagctgacttacatgcagggggcatgtcctatctctgtgctttcttccttcttggaaaggcagctctgatggctagatctggggc

SEQ ID NO: 602052 - DNA, 625 bp, Homo sapiens
aatttttgggttaagctgatttttacttttctgaaagaaagatccaaacacaatgcctataataaatcttagaaattgtctgtctccattggtgagattagtcagtataaacactaacatatataaataaaaccaaacaacagttactcttttccataatgttatgcttttgtgttcaatgaaatatttaatttaattactaaatttctagcatttctctgaaggataaaacaaataagcaaacaaacaaattaacaagaaaaacccaaaataacttcaatgaattaaaactgtctagtgctacctttcctataattatcgtcaccaaataaagtgcctattggacagagatggctggttcactgcaatctccattgaccctttcgccatcagtaaaaatgtcctctaatgcttagccggacacatgatcaccaggaataaatgctatattcccaatcttttcttaacatagggcatgacacatgtgaccaatttctgacctatgttgtgtaaggggaagtaacgcgtgtaacttctgagaagctgacttayatgcagggggcatgtcctatctctgtgctttcttccttcttggaaaggcagctctgatggctagatctggggc

SEQ ID NO: 602053 - DNA, 592 bp, Homo sapiens
tgattgtcattttagatctataactctttttctgagctttgggtctatataagccaaatttctgctcaacggagcaaccatatccccactttaattggacaagtctctccagaaaataaatctcctatttcctgttgtgttaaatgaagaataattactaaggtattcagtaatgataaagaatctgggaatttaactgttcttgatatgaaatttcaaaytacacactttttttgggggggaagccaaacccacctccagcattttattcccacacatgataagcttgtccaaggtgtgtgtggtttggatgactttatattttgttagctttcctcttccctctacatatggacactatgttttgtcaaaaggaaacgtgtacactggttgcttgttaaaaatagcaaggaagactattcaggactatagcaatgggggaataatatagctatagtagagagagattgaactaaaatttctcccagcatggagctggaaatttataagcaaagagctgagggagtgagtcagtggatagaaactaattagatattaagggtggcggggggtggggtggcggggagcgggg

SEQ ID NO: 602054 - DNA, 592 bp, Homo sapiens
tgattgtcattttagatctataactctttttctgagctttgggtctatataagccaaatttctgctcaacggagcaaccatatccccactttaattggacaagtctctccagaaaataaatctcctatttcctgttgtgttaaatgaagaataattactaaggtattcagtaatgataaagaatctgggaatttaactgttcttgatatgaaatttcaaactacacactttttttkggggggaagccaaacccacctccagcattttattcccacacatgataagcttgtccaaggtgtgtgtggtttggatgactttatattttgttagctttcctcttccctctacatatggacactatgttttgtcaaaaggaaacgtgtacactggttgcttgttaaaaatagcaaggaagactattcaggactatagcaatgggggaataatatagctatagtagagagagattgaactaaaatttctcccagcatggagctggaaatttataagcaaagagctgagggagtgagtcagtggatagaaactaattagatattaagggtggcggggggtggggtggcggggagcgggg

SEQ ID NO: 602055 - DNA, 592 bp, Homo sapiens
tgattgtcattttagatctataactctttttctgagctttgggtctatataagccaaatttctgctcaacggagcaaccatatccccactttaattggacaagtctctccagaaaataaatctcctatttcctgttgtgttaaatgaagaataattactaaggtattcagtaatgataaagaatctgggaatttaactgttcttgatatgaaatttcaaactacacactttttttgggggggaagccaaacccacctccagcattttattcccacacatgataagcttgtccaaggtgtgtgtggtttggatgactttatattttgttagctttcctcttccctctacatatggacactatgttttgtcaaaaggaaacgtgtacactggwtgcttgttaaaaatagcaaggaagactattcaggactatagcaatgggggaataatatagctatagtagagagagattgaactaaaatttctcccagcatggagctggaaatttataagcaaagagctgagggagtgagtcagtggatagaaactaattagatattaagggtggcggggggtggggtggcggggagcgggg

SEQ ID NO: 602056 - DNA, 532 bp, Homo sapiens
tatgaaccagcatgcccggccaatctatatcttttaagtgtgaaatgctttcagaaaaatatttcaaccaaaagggagaaatgtggaagttgtgagcaccaaaatggagtcacttacatcaaaccataaaaaaatgaagctgggaggccatgaaagaggggccttcatgtacatatgtctataataagaactgctgcaatggttctctcaaaaaccacraaaatgttagatatgataattctatgaagacatctctccagcaacagccaatattatcaatgagtatttgccaactcttgtaacaagcttctctggcccatgaggtttattacaaaacttacataaaatttctcttttaagatttttgccttcctgatatggtttagatttgtgtccccacccaaatctcatgtcgaattgtaatccccaatgttggaggaggggcttggtgagaggcgattggatcatgggggtggatttcctccttgctgttcttgtgatagtgagttctcatgagacctgcttgttgaaa

SEQ ID NO: 602057 - DNA, 203 bp, Homo sapiens
tacaaaatgtccttctttatctttgggaatactctttgttttatagtctgttctgttaatagagcaactccatctttctttcttagctttttccattcttttattctcaacctgtgttttgtatttaaaaatgtwtctcttatagacaacatatagatgttccttgctttttatccaatttgacaattgtagccttttaattg

SEQ ID NO: 602058 - DNA, 590 bp, Homo sapiens
ctagttctctagggaagaatatcagtccctctggaaaagggagggaaaggatgagaagctgaaagactgcaatcattttttaaattgtcaaatgagtccatttgttggaacagaaataatttagtagaaaataggcaatcaagttgaagttttcttctcctcactatttaatcttgatatattgagaggctcttaacatattaaaaatggacaatgaccaaaatgagaattggaatttcagccaaaagtatatgtgctttcatccacttgtggaaatacaagttctaaatgataattaatgttagtcccccatccagagtgatatccttattctgtgtagctttggccrtacaaaccagcctggtccatcaacagggaacaacttgacctctgatgaggaacacttttaccctgacagaaagtggtaatgttttcttagcttctgtagtctgacttaatgtcaggcaaaggcaactttgaagagacagtccttcaaataatactattggcacataatatttattacctttttttaaaaaaaaatgagatgaaagtcacataatttagaattaatcattttaaagtgtatg

SEQ ID NO: 602059 - DNA, 455 bp, Homo sapiens
tcatcaccagcatttgtcattatgtctttttaattataaccattctagtaattgtggagaggtatctcattgtgcttttgatttgcatttccctgatgactaaatgatgttgggcatcttttcatatgcttattggccatttgaatgtcttctctgaagaaatgactgttcaggtcctttgacmttttttaaaatcaggttatttgtctttttattatttgagttatgactttttatatatttaaggtgaatgttttttaccgaatgtatgatttggaaatattttctcccagtctgtgattcatgttaattttccttattttatgttttattttattagttttttagatacaggatctcactctgttgcccaggctggagtacagtggtgcagtcatagctcactgcagcctccaactcttgggctcaaacaattctcccacctcagcctgcag

SEQ ID NO: 602060 - DNA, 455 bp, Homo sapiens
tcatcaccagcatttgtcattatgtctttttaattataaccattctagtaattgtggagaggtatctcattgtgcttttgatttgcatttccctgatgactaaatgatgttgggcatcttttcatatgcttattggccatttgaatgtcttctctgaagaaatgactgttcaggtcctttgacawtttttaaaatcaggttatttgtctttttattatttgagttatgactttttatatatttaaggtgaatgttttttaccgaatgtatgatttggaaatattttctcccagtctgtgattcatgttaattttccttattttatgttttattttattagttttttagatacaggatctcactctgttgcccaggctggagtacagtggtgcagtcatagctcactgcagcctccaactcttgggctcaaacaattctcccacctcagcctgcag

SEQ ID NO: 602061 - DNA, 523 bp, Homo sapiens
tctgggtaacatcccaagacccctgtcagaagtgaagaaataaaagtaaaaacaaacaagataactttttttttttctgagatgaattttcactttgatcatccagggtaaagtgcacttgtgacatctcagctcgcagcaacttctgcctcccaggttcaagcgattctcctgcctcagcctcttgagtgcctgggattacaggcatgagtcagcacacctggctaatttttatattttaagtagagacagggtttcaccatgttggccaggwgattctccaactcctgacttcaggtgatccacacaccttggactcccaaagtgctgggattataggcgagagctaccacgcccagccaacaagataatttttaagcagatgatgtaaagtagggaagtgaagtgggcactgaagaggggaatgctcagcaaacctgcacatgtcagaaaatcagctttgtgccccatagtttggtgaacatgaatgatcccatctctaattccctgttgtaaaagtgtt

SEQ ID NO: 602062 - DNA, 523 bp, Homo sapiens
tctgggtaacatcccaagacccctgtcagaagtgaagaaataaaagtaaaaacaaacaagataactttttttttttctgagatgaattttcactttgatcatccagggtaaagtgcacttgtgacatctcagctcgcagcaacttctgcctcccaggttcaagcgattctcctgcctcagcctcttgagtgcctgggattacaggcatgagtcagcacacctggctaatttttatattttaagtagagacagggtttcaccatgttggccaggakattctccaactcctgacttcaggtgatccacacaccttggactcccaaagtgctgggattataggcgagagctaccacgcccagccaacaagataatttttaagcagatgatgtaaagtagggaagtgaagtgggcactgaagaggggaatgctcagcaaacctgcacatgtcagaaaatcagctttgtgccccatagtttggtgaacatgaatgatcccatctctaattccctgttgtaaaagtgtt

SEQ ID NO: 602063 - DNA, 523 bp, Homo sapiens
tctgggtaacatcccaagacccctgtcagaagtgaagaaataaaagtaaaaacaaacaagataactttttttttttctgagatgaattttcactttgatcatccagggtaaagtgcacttgtgacatctcagctcgcagcaacttctgcctcccaggttcaagcgattctcctgcctcagcctcttgagtgcctgggattacaggcatgagtcagcacacctggctaatttttatattttaagtagagacagggtttcaccatgttggccaggagattctccaactcctgacttcaggtgatccrcacaccttggactcccaaagtgctgggattataggcgagagctaccacgcccagccaacaagataatttttaagcagatgatgtaaagtagggaagtgaagtgggcactgaagaggggaatgctcagcaaacctgcacatgtcagaaaatcagctttgtgccccatagtttggtgaacatgaatgatcccatctctaattccctgttgtaaaagtgtt

SEQ ID NO: 602064 - DNA, 523 bp, Homo sapiens
tctgggtaacatcccaagacccctgtcagaagtgaagaaataaaagtaaaaacaaacaagataactttttttttttctgagatgaattttcactttgatcatccagggtaaagtgcacttgtgacatctcagctcgcagcaacttctgcctcccaggttcaagcgattctcctgcctcagcctcttgagtgcctgggattacaggcatgagtcagcacacctggctaatttttatattttaagtagagacagggtttcaccatgttggccaggagattctccaactcctgacttcaggtgatccacmcaccttggactcccaaagtgctgggattataggcgagagctaccacgcccagccaacaagataatttttaagcagatgatgtaaagtagggaagtgaagtgggcactgaagaggggaatgctcagcaaacctgcacatgtcagaaaatcagctttgtgccccatagtttggtgaacatgaatgatcccatctctaattccctgttgtaaaagtgtt

SEQ ID NO: 602065 - DNA, 561 bp, Homo sapiens
gaagacaaatccagggaaaatgtatcactctcatggcaaacacaatcatctgcttctactggtaccaggaagaatgtcttccaaacaccaaggagggaggggtcaaggagaccactggcttattaattttcatccttcattccactgaatcccagaaccaccggacagtgccactgaggatcctgaaagccaagctctacctctttgaggaaaaatttcttgtcacttaccaccctaaagcaatgagaatgagagtgtcctgtggccccagacagcctccattctcagtttacaccataaacatgctgggggaacactaaaggractccctaaaatcgatgccattattttttattttgaaaattttctaccagaaatggaccaggtgctgtggctcatgtctgtaatcccaacactgctggacaccaaggcaggcagttcacttgaggtcaggagttcgagaacagcctggcctacataatgaaacgatgtctctactaaatacaaaaaaattaagaatcatttgactccagaaggcagaggttgcagagagccaagatc

SEQ ID NO: 602066 - DNA, 561 bp, Homo sapiens
gaagacaaatccagggaaaatgtatcactctcatggcaaacacaatcatctgcttctactggtaccaggaagaatgtcttccaaacaccaaggagggaggggtcaaggagaccactggcttattaattttcatccttcattccactgaatcccagaaccaccggacagtgccactgaggatcctgaaagccaagctctacctctttgaggaaaaatttcttgtcacttaccaccctaaagcaatgagaatgagagtgtcctgtggccccagacagcctccattctcagtttacaccataaacatgctgggggaacactaaagggactccctaaaatcgatgccattattttttattttgaaaattttctaccagaaatggaccaggtgctgtggctcatgtctgtaatcccaacactgctggacaccaaggcaggcagwtcacttgaggtcaggagttcgagaacagcctggcctacataatgaaacgatgtctctactaaatacaaaaaaattaagaatcatttgactccagaaggcagaggttgcagagagccaagatc

SEQ ID NO: 602067 - DNA, 561 bp, Homo sapiens
gaagacaaatccagggaaaatgtatcactctcatggcaaacacaatcatctgcttctactggtaccaggaagaatgtcttccaaacaccaaggagggaggggtcaaggagaccactggcttattaattttcatccttcattccactgaatcccagaaccaccggacagtgccactgaggatcctgaaagccaagctctacctctttgaggaaaaatttcttgtcacttaccaccctaaagcaatgagaatgagagtgtcctgtggccccagacagcctccattctcagtttacaccataaacatgctgggggaacactaaagggactccctaaaatcgatgccattattttttattttgaaaattttctaccagaaatggaccaggtgctgtggctcatgtctgtaatcccaacactgctggacaccaaggcaggcagttcacttgaggtcaggagttcgagaayagcctggcctacataatgaaacgatgtctctactaaatacaaaaaaattaagaatcatttgactccagaaggcagaggttgcagagagccaagatc

SEQ ID NO: 602068 - DNA, 506 bp, Homo sapiens
actagcccaggaaatgtggtaaaatcttttctctgcatgaaatacaaaatattagccaggtatgctgccacgtgctggaagttccagctactcagaaggctgagaggggatgattgcttgagcctgggaggcagaggttgcagtargtcaagattgcaacactgcacaccaccctgggtgacacccaatctaaaaaaaaaaaaagtctttcaatccttttgtccagatgcccacaaaatacctgccatgttttatgttgtcttggttccctcctagggtcccattagaacacttagtcccatccagcccagccctcaccttactttgtaatgtaggcctgatttctttcagtgaaaccttgaccttaaccttgagaaaaattacaccctcagtagttcctgtcttccacctgaatgggcatatgatctaccatgttaggtagcataaaacccaggtgcccagtggatacacagagatttttattgtgttttttagggatgacatcc

SEQ ID NO: 602069 - DNA, 603 bp, Homo sapiens
cagtggcgcgatcttgtctcattgcaaccttcgcctcccgggttcaagtgattgtcctgcctcagcctcctgaatacctgggattacaggcgaatgccaccactcccagcaaattttgtgtatttttagtagagacggggtttcaccatgttggcaaggctggtctcaaaatcccgaggctgccttggcctcccaaagtggtgggattagaagtgtgagacaccatgcccggccataataataaattttattttatctttttttttttgagacggasttttgctactgttgcccaggctggagtgcaatggctcagtctgagctcaccgcaacctccacctcccaggttcaaacgattctcccgcctcagcctatcgagtagctgcaattacagacgtgcgccaccacgcctggctaattttttgtattttaagtagagaaggggtttcttcatgttgctcaggctggtctcaaactcccaacctcaggtgatccacctgcctcagcctcccaaagtgctggaattacaggcgtgagccactgcacctggctcataatagtacatttttaaaaacaccataaaatataatccttgcaacactc

SEQ ID NO: 602070 - DNA, 513 bp, Homo sapiens
tttaaaccccaggtggaggttgcagtcagctgagatggcaccattgcactctaaactccagcctgggcaacaagagtgaaactctgtctccaataaaagaatgggaggaaagtgattacaataaccaaatttcatttaaatgccttgattttcttgggctgcatcttattgattggacaactcagtcagtgccttttgttttttccatcaataactgaagattcctgaggcttaaactggaaaacaggttacttaataatagagggcaccagacagattctgctcagttttcctttatttctgattgtttctttacaaccatccatgcaagagtaactcyctcatgtattctcaagcctgaattccactctagacattcagattcccattttcgactctacaggatacacgttcccaaagtcccatcgaatccatggcaacatttcccccaagtcctgcccctgcttgatcagcattcctttcccactttcagagcccatgtgtgaaacgatg

SEQ ID NO: 602071 - DNA, 309 bp, Homo sapiens
cttttttgttaagattttgtttttgttttttggacagggtctctctcttttgcccaggctggagtacagcagtggtgtgagcatggctcactgcagcctcaatcttctgggctmaagtgattctcccacaccagtcacccaaatagctgggactacagatgcatgccaccatgcccggctaattaaaaaaaaaaaaagtagaggccgagcaccagtggctcacggctctaatcccagcagtttgggaggccaaggcaggtggatcacttgaggtcaggtgttggagaccaacctggccagcacggtgaa

SEQ ID NO: 602072 - DNA, 553 bp, Homo sapiens
tgcagcctcaatcttctgggctaaagtgattctcccacaccagtcacccaaatagctgggactacagatgcatgccaccatgcccggctaattaaaaaaaaaaaaagtagaggccgagcaccagtggctcacggctctaatcccagcagtttgggaggccaaggcaggtggatcacttgaggtcaggtgttggagaccaacctggccagcayggtgaaacacccgctctactaaaaatgcaaaaattagccaggcatggtggcagatggctgacaccagcttctgaggatggagactgaggcatgagaattgcttgaacctggaaggtaaaggttgcagtgagttgagatcgtgccactgcactccagtctgggcaacacagtgagactccatccccgtcctcacaaaaaaaataacgttgtgtagaggagggtttctgccatgttgcccaggttggtctcaaacccctgggctgaaatgatcctcccactttggcctcccaaagtgttggggttaaaggcatgagtcactgctcccttcaagaattttgaaa

SEQ ID NO: 602073 - DNA, 596 bp, Homo sapiens
ggaagcctgcccaatgtgacctgcaagtcttgcttcactcccaggttcccattaaaaacccagctcaaccctgaccagctccaccctcacttccatttgtaattttgacatgactttattacaggaccatcaggttcctatgcctgctgcacagtagyttagcaatattctgagacagcagggtttgcagcagagagtttaatgatcacaaggtggctgaatgagaagctaggaggagatcctcaaattcatctccccaaggagtactgaaggtttccagtggatcctggatagcaagaggccggaaagttggggtagcggtaagagggaagaagtcaacaggatgtagaaactgcattctttggtgagttggtgcattgcatggcccttcagatcagctggcatcagcagtttcactgacatgcagaacctgaaagaatatctcagatgaaaaagttaatgttttacaatgcttaaatggttgtctgcagggaagttaaggggaactgtaatctaaggtctatatgattttggaacagtaggctgccagtaaccatgaggaaccaggtcagagagcaagaagacctcctgatgaa

SEQ ID NO: 602074 - DNA, 647 bp, Homo sapiens
tactcagggacaggatgtaagccaagcgaaagaccttccataggtggtgaatttggaagcctgcccaatgtgacctgcaagtcttgcttcactcccaggttcccattaaaaacccagctcaaccctgaccagctccaccctcacttccatttgtaattttgacatgactttattacaggaccatcaggttcctatgcctgctgcacagtagcttagcaatattctgagacagcagggtttgcagcagagagtttaatgatcacaaggtggctgaatgagaagctaggaggagatcctcaaattcatctccccaaggagtactgaaggtttccagtggatcctggatagcaagrggccggaaagttggggtagcggtaagagggaagaagtcaacaggatgtagaaactgcattctttggtgagttggtgcattgcatggcccttcagatcagctggcatcagcagtttcactgacatgcagaacctgaaagaatatctcagatgaaaaagttaatgttttacaatgcttaaatggttgtctgcagggaagttaaggggaactgtaatctaaggtctatatgattttggaacagtaggctgccagtaaccatgaggaaccaggtcagagagcaagaagacctcctgat

SEQ ID NO: 602075 - DNA, 596 bp, Homo sapiens
ggaagcctgcccaatgtgacctgcaagtcttgcttcactcccaggttcccattaaaaacccagctcaaccctgaccagctccaccctcacttccatttgtaattttgacatgactttattacaggaccatcaggttcctatgcctgctgcacagtagcttagcaatattctgagacagcagggtttgcagcagagagtttaatgatcacaaggtggctgaatgagaagctaggaggagatcctcaaattcatctccccaaggagtactgaaggtttccagtggatcctggatagcaagaggccrgaaagttggggtagcggtaagagggaagaagtcaacaggatgtagaaactgcattctttggtgagttggtgcattgcatggcccttcagatcagctggcatcagcagtttcactgacatgcagaacctgaaagaatatctcagatgaaaaagttaatgttttacaatgcttaaatggttgtctgcagggaagttaaggggaactgtaatctaaggtctatatgattttggaacagtaggctgccagtaaccatgaggaaccaggtcagagagcaagaagacctcctgatgaa

SEQ ID NO: 602076 - DNA, 371 bp, Homo sapiens
ttccagtggatcctggatagcaagaggccggaaagttggggtagcggtaagagggaagaagtcaacaggatgtagaaactgcattctttggtgagttggtgcattgcakggcccttcagatcagctggcatcagcagtttcactgacatgcagaacctgaaagaatatctcagatgaaaaagttaatgttttacaatgcttaaatggttgtctgcagggaagttaaggggaactgtaatctaaggtctatatgattttggaacagtaggctgccagtaaccatgaggaaccaggtcagagagcaagaagacctcctgatgaatgctgaatgtgttgcaagcttggtttatttttgtttctctccctccctt

SEQ ID NO: 602077 - DNA, 371 bp, Homo sapiens
ttccagtggatcctggatagcaagaggccggaaagttggggtagcggtaagagggaagaagtcaacaggatgtagaaactgcattctttggtgagttggtgcattgcatggcccttcagatcagctggcatcagyagtttcactgacatgcagaacctgaaagaatatctcagatgaaaaagttaatgttttacaatgcttaaatggttgtctgcagggaagttaaggggaactgtaatctaaggtctatatgattttggaacagtaggctgccagtaaccatgaggaaccaggtcagagagcaagaagacctcctgatgaatgctgaatgtgttgcaagcttggtttatttttgtttctctccctccctt

SEQ ID NO: 602078 - DNA, 258 bp, Homo sapiens
cttctaccctatccctaacactgtcgatttcttgcttcatgaagtgaatatagatatgtgatatgaatggacatctgattcaatccggtaatctggggagagccaaaaacccaatcaggattaactgggtggagcttcasaaatgcaatcagatatggctttttgattggaagctagcagtgcacacgtggaagggcgtgggtgggagttgtgattagaaaggtcaataaaagcttctaaagacccacaggagagacc

SEQ ID NO: 602079 - DNA, 258 bp, Homo sapiens
cttctaccctatccctaacactgtcgatttcttgcttcatgaagtgaatatagatatgtgatatgaatggacatctgattcaatccggtaatctggggagagccaaaaacccaatcaggattaactgggtggagcttcagaaatgcaatcagatatggctttttgattggaagstagcagtgcacacgtggaagggcgtgggtgggagttgtgattagaaaggtcaataaaagcttctaaagacccacaggagagacc

SEQ ID NO: 602080 - DNA, 258 bp, Homo sapiens
cttctaccctatccctaacactgtcgatttcttgcttcatgaagtgaatatagatatgtgatatgaatggacatctgattcaatccggtaatctggggagagccaaaaacccaatcaggattaactgggtggagcttcagaaatgcaatcagatatggctttttgattggaagctagcagtgcacacgtggargggcgtgggtgggagttgtgattagaaaggtcaataaaagcttctaaagacccacaggagagacc

SEQ ID NO: 602081 - DNA, 378 bp, Homo sapiens
gggccaggtgggctggtggggagggcccaggtgtccaactgaaggaacagctgggtcatgtgaagtgaggaggcccaagggggatggtggtggtgaggaagccgagaggacttggccattcaccagctcctcagggaaagcactgctcaccacscaaggtccatggaggtaacaggaacctctcctctaatggcactgaaaggcaccatgaaaagtgagaactgggccgggcacggtggctcacaatgtaatcccagcacattgggaggctgaggtcaagagttggaggccagcctgtccaacatggtaaaccccaactctactaaaaatactaaaattagctgggcatggtggtgggctcctgtaatcccagctact

SEQ ID NO: 602082 - DNA, 378 bp, Homo sapiens
gggccaggtgggctggtggggagggcccaggtgtccaactgaaggaacagctgggtcatgtgaagtgaggaggcccaagggggatggtggtggtgaggaagccgagaggacttggccattcaccagctcctcagggaaagcactgctcaccacccaaggtccatggaggtaacaggaacctctcctctaatggcactgaaaggcaccatgaaaagtgagaactgggccgggcacggtggctcacaatgtaatcccagcacattgggaggctgaggtcaagagttggaggccagcctgtccaacatggtaaaccccaactctactamaaatactaaaattagctgggcatggtggtgggctcctgtaatcccagctact

SEQ ID NO: 602083 - DNA, 378 bp, Homo sapiens
gggccaggtgggctggtggggagggcccaggtgtccaactgaaggaacagctgggtcatgtgaagtgaggaggcccaagggggatggtggtggtgaggaagccgagaggacttggccattcaccagctcctcagggaaagcactgctcaccacccaaggtccatggaggtaacaggaacctctcctctaatggcactgaaaggcaccatgaaaagtgagaactgggccgggcacggtggctcacaatgtaatcccagcacattgggaggctgaggtcaagagttggaggccagcctgtccaacatggtaaaccccaactctactaaaaatacwaaaattagctgggcatggtggtgggctcctgtaatcccagctact

SEQ ID NO: 602084 - DNA, 561 bp, Homo sapiens
ggaggccagcctgtccaacatggtaaaccccaactctactaaaaatactaaaattagctgggcatggtggtgggctcctgtaatcccagctacttgtgaggttgaggcaggagaatcatttgaacccaggaagcagaggttgcagtgaggtgacatcacaccactgcactctagcctgggcgacagagggagacttkgtctcaaaaaaaaaaacaaaaaaatgtggaagtgggtaggatccaaggggaaaacagagtgaagaaaagtcagagagagggacaagaagcagggaggggaggagctgctatccaggatgtggagtttaaattcagaaatgagttcttaaattctcagtctcacctctattttcccacaggaggtggaaacttcaagtgctggatttacaggatgtctgtgagaacttctggatggtttggtctgaagctatggcccgtgggtccttcctcaatgccaagaggaacaaaacaccagtgcaggactgtccaaggatgagaggacagcagcccttgactgtgttcgtagaactttggctcaagaaca

SEQ ID NO: 602085 - DNA, 561 bp, Homo sapiens
ggaggccagcctgtccaacatggtaaaccccaactctactaaaaatactaaaattagctgggcatggtggtgggctcctgtaatcccagctacttgtgaggttgaggcaggagaatcatttgaacccaggaagcagaggttgcagtgaggtgacatcacaccactgcactctagcctgggcgacagagggagactttgtctcaaaaaaaaaaacaaaaaaatgtggaagtgggtaggatccaaggggaraacagagtgaagaaaagtcagagagagggacaagaagcagggaggggaggagctgctatccaggatgtggagtttaaattcagaaatgagttcttaaattctcagtctcacctctattttcccacaggaggtggaaacttcaagtgctggatttacaggatgtctgtgagaacttctggatggtttggtctgaagctatggcccgtgggtccttcctcaatgccaagaggaacaaaacaccagtgcaggactgtccaaggatgagaggacagcagcccttgactgtgttcgtagaactttggctcaagaaca

SEQ ID NO: 602086 - DNA, 609 bp, Homo sapiens
gaaggatcctgctgagtactcaggggctggtgttgctgtcagggatgttagcctagagcctcagcttcctgtaaaatgaggatgatgatgtccaacagcttatgggaccttggtaggatccaatgagatggttcatgtttagggcttggcatggggtctggcatacagtaagatcaatacatcttgttcttttttctcttctcagcagaagtcccagcayttttcatctttcaatctcacctccttttcctgataatagagaggcaacaagaactcagggcatgcaatggggctcaacttctactctctgccacaatttcatcatgattcccccaaagagcagagccccaggagccagcagggggcagggtgggcatttctggactggattcattcataataagatcaaaatttccaatccgtatgtctcgggtgccatctgctgatagatccgaccagatggtataattgagtgttgcaaggattatattttatggtgttttcaaaaatgtactattatgagccaggtgcagtgagtcatacctgtaattccagcactttgggaggctgaggcaggtggatcacctgaggttgggagtttgagaccag

SEQ ID NO: 602087 - DNA, 218 bp, Homo sapiens
tggcacatatacatcatggaatactatgcagtcataaaaaataagttcatttcctttgcagggacatggatgaagctagaaaccatyattctcagcaaactaacacaggaacagtaaaccaaaacaccacataagtgggagttgaacaatgagaactcatggtcacaggtaggggaacactacacatcagggcctctcggggtgtggagggctaggag

SEQ ID NO: 602088 - DNA, 547 bp, Homo sapiens
ccggctattttttgtatttttagtagaaatggagtttctcyatgttggccatgctggtctcaaactcctgatctcaggcgttccacctgccttggcttcccaaagtgctggaattacaggtgtgagccaccgtgcccggcctctcacgtgcctttttaagttgatgggaaaatgacacccaggataatttatggccatagtgagaattattggaaatctttaagactgtttttcttacaaaaccacaatggtaggattaaacagtctgaatgggatgctagcatgtagagccttctaaactctctttctctccttttttggggaatttgggatctgcctactgattacaattaattgcacttttttaactgtttgattaagatttttttttttcaacagtctgactctgctgcccaggctggagtacagcactggtgtgagcatggctcactgcagcatcaatcttctggattcaagggattctcccacctcagccacccaagtagctgggactacagatgcatgccaccatgtgtagggaaaagaa

SEQ ID NO: 602089 - DNA, 213 bp, Homo sapiens
attatcattaaggatgaaggttctrgaaccatcaggaacaagggtcccaacttcacacaagttacttaactgctggcaggctctatttcatcttatgtaaactacagataatacctactcacctcaagggtgtatcaagggtttatgtaagctaaatttgtagaaagcagttagcacagtgccaggaagagtccaagaagaaatggtacttac

SEQ ID NO: 602090 - DNA, 213 bp, Homo sapiens
attatcattaaggatgaaggttctggaaccatcaggaacaagggtcccawcttcacacaagttacttaactgctggcaggctctatttcatcttatgtaaactacagataatacctactcacctcaagggtgtatcaagggtttatgtaagctaaatttgtagaaagcagttagcacagtgccaggaagagtccaagaagaaatggtacttac

SEQ ID NO: 602091 - DNA, 213 bp, Homo sapiens
attatcattaaggatgaaggttctggaaccatcaggaacaagggtcccaacttcacacaagttacttaactgctggsaggctctatttcatcttatgtaaactacagataatacctactcacctcaagggtgtatcaagggtttatgtaagctaaatttgtagaaagcagttagcacagtgccaggaagagtccaagaagaaatggtacttac

SEQ ID NO: 602092 - DNA, 587 bp, Homo sapiens
ccctctgggacaaagcttccagaggaaggaacaggcagcaatctttgctgtttggcagcctctgctggtgatacccaggcaaagagggtctggagtggaactccagcaaactccagcagacttgcagcagaggggcctgactgttagaaggaaaactaacaaacagaaaggaataacatcaacatcaacaaaaaggacatccactcagagaccccatctgaaggtcaccaacatcaaacaccaaaggtaaggaaatccatgaagatggggagaaaccagtgcaaaaggcrgaaaattccaaaaaccagaatgcctattctcctccaaaggatcacaactccttgccagcaagggaagaaaactggatggagaatgagtttgacaaattgacagaagtaggcttcagaaggtaggtaataactaactactccacgctaaaggagcatgttctatcccaatgcaaggaagctaagaacattgaaaaaagattagacgtattgctaactagaataaccagtttagagaagaacataaatcacctgatggagctgaaaaacacagcacgagaacttcatgaagcatacaca

SEQ ID NO: 602093 - DNA, 637 bp, Homo sapiens
ataatagagttatttttctgtgagattcctgtagtaaatgactgactgaatgcatttgtacctacaaaatctacaatatttacgctatctggaacatactagattcacagctagtaattctcattttacaaaaactgagatccggatatttttgttttcatgttttgcttaagctcaaaatgtaacagcgaaggctatactagaattcaggtctcttgattctcagaacagttcatgttccatcatgccaggacccactgcacacttagattctgtactttgccaccatcacatttatataaaacttaaaacgcaagtctataaagaggccaatgtctatcaacaataaatcaacctgtaaatcttacytatttttcaatttctccccagcaatttacttcttcattcaaatagtctttctaaggaacagtggtggtttttttttctttttttttttttttggttaaagatattctgcaatttaacttaaaggccaaggaggaaccaacaccttctttatcttgtaggtttaacaagcattcccagaggaaagtcattgttattactaacaaacacaacatcagctttttgagacagaagatatttatatatctatccaatatcagataagatttta

SEQ ID NO: 602094 - DNA, 629 bp, Homo sapiens
ggttggtgggtgcaacaaaccaccatggcacatgtatacctgtgtaacaaacctgcatgttctgcgcatgtatcccagaacttgagtataattaaaaaaaaaaaaaaaggtcagtttagggagtgtatactcagggcagcttgaatctatgctcccaggtaaacatttaaaaaagaaaagaaaggaaggaagagaaaataaaagggcagtcttgaccctgcacttataagtcttatcttttccctgttaaaaaaaaaataaactaggcctggtgcagttgttcacgcctataatcccgccactttgggaggctgaggtgggagcatcagttgagcccaggaatttgagaccaacctggggaaaacagtgagacctcatctccacaaaaaataaaaaaaattggctgggtgtggtggcatgttcctgtggtcccagctactctagaggctgagctgggaggatcacttgagcccaggaggttgaggctgcagtgatccatgatcacactactatactccagcctgggaaatagagaccctgtctcaaaaacaacaaaacaacagcaaaaacaaaccccctttgtcccaatcaaaggagttctctcattytaccctaatgaaatgtatcct

SEQ ID NO: 602095 - DNA, 398 bp, Homo sapiens
aaagcttgggaactgagtcatgcaaagactgccttccttttgttcctaagtakatagctacaaagataaaaggccacaaacctccctaggggaccttccacatgatttgcccatcaggaaattccttgtaggtccctagatctttagcctataacagttctgttgaatttcaccctgacaatgtaaattcacagctcatcttcataggtaaaggacaaagacaggactagatcctccctccactcactagagacaaatgcacgtttggctgcttcctgtaccctgtgattactttatctaatgtaaaactgcagattcactgagacaaatgcataatggactggccttctacctcctcctttcacatgtaaaatgtgcattcagtgaaagctgatcaa

SEQ ID NO: 602096 - DNA, 405 bp, Homo sapiens
aggcatgcaccaccgcgcccagctaatttatttttcgtagagacggggtttctccacattagttaggctgatctcgaactcccgacctcaggtgatccacctgcctcagcctcccaaagtgctgggattacaggcgtgagtaccgcgccasgcaggatcacattttcttaatgaattatctctacaaacattacatttaaatcttaaaatgataatgaagaacatattttcaagtgaagtcaagcaggaaaatgaagtcaagcaggaagggcagggcctgcaaattcttcagagacgaataaacagatcttgaagactcccaaggtgctaggaatggaaagggagtctagggtgacgcccaggtctctcgcttgcaaggatacagagcaagggagaagaaacagg

SEQ ID NO: 602097 - DNA, 547 bp, Homo sapiens
aatgaggaattgaaagttatttgaaattagaagaaagagaactggcaggggacgggcggaacagtaaatggacctaaggaagtagaaaggagagtctgtggcatcacagtgacataggttatataaaaacagacctgcagagctatggtttggttcagtgtagttgatttggaaggtggacttatactggtaggatgcaaaagcaattattttattgctcattctttctatgatggttcagaaaataggacagagtagagtactttcagatctagtcattttatttgtgtttatgtggatccagccccatttctttcatatgtgttatagatgctctttatcttcatataggttatccaccatggggattctggaagaaaagttgagttctaggctgacttttcctgactttcagaaggttcytaggtcccatttgacccatcagagtttgtgcagggaaggtgaaaccaaatttgtcaaatccttccaaattattttgtattattagaaatatgatttcattactgagattttagaataattgagt

SEQ ID NO: 602098 - DNA, 534 bp, Homo sapiens
tgaaaaagcatctttgctgacgactgggaacgccagaggaggttttatagtaaggtctataatagaatrctgggacgagctggggtagttttccgcctcaggctgtgctgccaataaaagcgcaggccagcccgctgtttttaagtgccgtggactatgatgtcagaattcattacgcacacaggggctatttactgcctcataaacttgtagacaaggaaattgttggagaaaaaatggtttccaaagcttcaatgcaatcattcattgggcagttccccccaaggaccaccaagtccatctccaaggacttttctggctgaaagcaaagtcctgtgtccagagtagtaaaaactcctgggctcgttctattttgagtacttatgccatatctaagccagggttggcccaagttgaagggtacatctttaagggaaagatgcttttccacagccccatggctgtgcccagcagacactcaacatggctaaggtgagaagggggaggaggagagagaagggtaagaaaggaagg

SEQ ID NO: 602099 - DNA, 534 bp, Homo sapiens
tgaaaaagcatctttgctgacgactgggaacgccagaggaggttttatagtaaggtctataatagaatactgggamgagctggggtagttttccgcctcaggctgtgctgccaataaaagcgcaggccagcccgctgtttttaagtgccgtggactatgatgtcagaattcattacgcacacaggggctatttactgcctcataaacttgtagacaaggaaattgttggagaaaaaatggtttccaaagcttcaatgcaatcattcattgggcagttccccccaaggaccaccaagtccatctccaaggacttttctggctgaaagcaaagtcctgtgtccagagtagtaaaaactcctgggctcgttctattttgagtacttatgccatatctaagccagggttggcccaagttgaagggtacatctttaagggaaagatgcttttccacagccccatggctgtgcccagcagacactcaacatggctaaggtgagaagggggaggaggagagagaagggtaagaaaggaagg

SEQ ID NO: 602100 - DNA, 593 bp, Homo sapiens
gacttttctggctgaaagcaaagtcctgtgtccagagtagtaaaaactcctgggctcgttctattttgagtacttatgccatatctaagccagggttggcccaagttgaagggtacatctttaagggaaagatgcttttccacagccccatggctgtgcccagcagacactcaacatggctaaggtgagaagggggaggaggagagagaagggtaagaaaggaagggagcagaggcagaacatccccacattattagtcctcttggtatgggagcaggcaaatagcccctcatcaaggccaactctttaaaacttggtttcaactaacattatctattaggcaccaccatgcagtgtgttagagacacagaacccaaaactgggcctggcaccccgcaggcactcaaaacatatttgctgaatgaatgatgaaaaaagaaatrccacccctattctccagcctaaagtaaagctgactgtattagtccattttcatgctgctgataaagacacacccaagactgggcaatttacaaagaaagaggtttaatggacttacagttccacatggtgggggaagccttgcaatcatg

SEQ ID NO: 602101 - DNA, 607 bp, Homo sapiens
cttccttcctaaagactcagattccatttattaatcccatgagacatgttagaccctaagaccgtgtgatttaggggaggttaaccccattccccccttcacaggagcatcctgagtagcccaagtcagctccaccgcacttgcctatgattggcataggtaatctataagtgtcttttccctggagactgttgcttgtccagggagaagcatggatctaaactggccccaaaaaataaagacaggagaaccttcatgccactgataaaggatataatttttttctatttataaccttttggatataaacaacaaaakcacatactttcactgacactatcttacaaccagaacataaatgagttctaggatgaaatggattctataaccatcaaagtagaaaattagaaagaatttgagtcctttgtgataccactgagctgctaacacaacccactccaaaacttgcccaactccaagacttcctgctacgtgagatgatgacttagcgttcctgcctccataagcaaggatttctgttgcttgcagcctaaagcatcctacctgatactcttcattctctttcactgtgggttaaaaattcaac

SEQ ID NO: 602102 - DNA, 561 bp, Homo sapiens
tctcattatgtatatggaaatattcccaaatccaaaaatttaaatacttttggttccaagtagagccctttgacatacaccttgagtgaagcagaggaaagagaaaaggtgcttttgacgagggtggacctgagtggaaaggatgtcagtttctgggtatcttgcgttccttatggcatagctgtgtgtaagttagcgcacttgtgaattgtaaggaacccgcaagggtatggagttgttagagagatctcatggccgcaggcayggtgctcccagggaggacagctgacgagtaattcctagtccttgcaaatcgacaggattggcccctgtgaacccgtcagattccccacatcctggttacctgctttgatgcctactctttgtaaataaattttttaaaccacacagttttaattatatattagcagcagtagtagttgttgtttttaagactacgtttttctccaaacgcttgtagatacaagatcagctttgctttttttggccggaacactagttctactacaattgaagcaaaatagtcttttattatagaaa

SEQ ID NO: 602103 - DNA, 561 bp, Homo sapiens
tctcattatgtatatggaaatattcccaaatccaaaaatttaaatacttttggttccaagtagagccctttgacatacaccttgagtgaagcagaggaaagagaaaaggtgcttttgacgagggtggacctgagtggaaaggatgtcagtttctgggtatcttgcgttccttatggcatagctgtgtgtaagttagcgcacttgtgaattgtaaggaacccgcaagggtatggagttgttagagagatctcatggccgcaggcacggtgctcccagggaggacagctgacgagtaatycctagtccttgcaaatcgacaggattggcccctgtgaacccgtcagattccccacatcctggttacctgctttgatgcctactctttgtaaataaattttttaaaccacacagttttaattatatattagcagcagtagtagttgttgtttttaagactacgtttttctccaaacgcttgtagatacaagatcagctttgctttttttggccggaacactagttctactacaattgaagcaaaatagtcttttattatagaaa

SEQ ID NO: 602104 - DNA, 421 bp, Homo sapiens
agcttcttcccagataaaagagatgatgtggacggtgttcataatacaaaacttccatttccccttacttgaaaacaacttcccatggctcacgacagactcctgmagttttaagaatgatttagtgtagaatcaatatcaagcacctcctgtaccctctgccctcacgcgtgggagcaggatacggtccagcagatggcgtcatccccatgcttcaggagttttgcaaatactaatattaacaggcatagcagaaaagcagtagtaacatgtctgcgtcacttattataggcacagtcatcaagcattagcatttactctacacatacttttttaaaattctgcaatttattggcataggacagtgagcagtcattccacccagtctccttaagcagtattcctctttctatcttattag

SEQ ID NO: 602105 - DNA, 421 bp, Homo sapiens
agcttcttcccagataaaagagatgatgtggacggtgttcataatacaaaacttccatttccccttacttgaaaacaacttcccatggctcacgacagactcctgaagttttaagaatgatttagtgtagaatcaatatcaagcacctcctgtaccctctgccctcacgcgtgggagcaggatacggtccagcagatggcgtcatccccatgcttcaggagttttgcaaatactaatattaacaggcatagcagaaaagcagtagtaacatgtctgcgtcacttattataggcacagtcatcaagcattagcatttactctacacmtacttttttaaaattctgcaatttattggcataggacagtgagcagtcattccacccagtctccttaagcagtattcctctttctatcttattag

SEQ ID NO: 602106 - DNA, 597 bp, Homo sapiens
ttggtttcaggaccctggctcttaccaatgatggaaaagtcctattcrttatcacagaaatgtatatgtatagttttcccttgctatccacagggaggttggtttcaggaccctggctcttaccaatgatggaaaagtcctattcgttatcacagagatgtatatgtatagttttcccttgctatccacagggaggttggtttcaggaccctggctcttaccaatgatggaaaagtcctattcgttatcacagagatgtatatgtatagttttcccttgctacccacagggaggttggtttcaggaccccagcagatgccaaaacctgtgaatcctccagttgctgatagacaatggcatggcatttgcatagaaccgtggactttaactcctctctgggttacttacaatacttaatacaatgcctacacgtcacttcagtcacgtagattcaatgtagtactcaatgcgcagcaaattcaaactttggttttggaactttgcagaatttattttctgaaaattttcaatctgcagttggtggaatccatagatgcagaagccctgactgtactggagattagaccatgtcccata

SEQ ID NO: 602107 - DNA, 597 bp, Homo sapiens
ttggtttcaggaccctggctcttaccaatgatggaaaagtcctattcattatcacagaratgtatatgtatagttttcccttgctatccacagggaggttggtttcaggaccctggctcttaccaatgatggaaaagtcctattcgttatcacagagatgtatatgtatagttttcccttgctatccacagggaggttggtttcaggaccctggctcttaccaatgatggaaaagtcctattcgttatcacagagatgtatatgtatagttttcccttgctacccacagggaggttggtttcaggaccccagcagatgccaaaacctgtgaatcctccagttgctgatagacaatggcatggcatttgcatagaaccgtggactttaactcctctctgggttacttacaatacttaatacaatgcctacacgtcacttcagtcacgtagattcaatgtagtactcaatgcgcagcaaattcaaactttggttttggaactttgcagaatttattttctgaaaattttcaatctgcagttggtggaatccatagatgcagaagccctgactgtactggagattagaccatgtcccata

SEQ ID NO: 602108 - DNA, 597 bp, Homo sapiens
ttggtttcaggaccctggctcttaccaatgatggaaaagtcctattcattatcacagaaatgtatatgtatagttttcccttgctatccacagggaggttggtttcaggaccctggctcttaccaatgatggaaaagtcctattcgttatcacagaratgtatatgtatagttttcccttgctatccacagggaggttggtttcaggaccctggctcttaccaatgatggaaaagtcctattcgttatcacagagatgtatatgtatagttttcccttgctacccacagggaggttggtttcaggaccccagcagatgccaaaacctgtgaatcctccagttgctgatagacaatggcatggcatttgcatagaaccgtggactttaactcctctctgggttacttacaatacttaatacaatgcctacacgtcacttcagtcacgtagattcaatgtagtactcaatgcgcagcaaattcaaactttggttttggaactttgcagaatttattttctgaaaattttcaatctgcagttggtggaatccatagatgcagaagccctgactgtactggagattagaccatgtcccata

SEQ ID NO: 602109 - DNA, 597 bp, Homo sapiens
ttggtttcaggaccctggctcttaccaatgatggaaaagtcctattcattatcacagaaatgtatatgtatagttttcccttgctatccacagggaggttggtttcaggaccctggctcttaccaatgatggaaaagtcctattcgttatcacagagatgtatatgtatagttttcccttgctatccacagggaggttggttkcaggaccctggctcttaccaatgatggaaaagtcctattcgttatcacagagatgtatatgtatagttttcccttgctacccacagggaggttggtttcaggaccccagcagatgccaaaacctgtgaatcctccagttgctgatagacaatggcatggcatttgcatagaaccgtggactttaactcctctctgggttacttacaatacttaatacaatgcctacacgtcacttcagtcacgtagattcaatgtagtactcaatgcgcagcaaattcaaactttggttttggaactttgcagaatttattttctgaaaattttcaatctgcagttggtggaatccatagatgcagaagccctgactgtactggagattagaccatgtcccata

SEQ ID NO: 602110 - DNA, 562 bp, Homo sapiens
cctgactgtactggagattagaccatgtcccataaaaccatgcctctcacacttggacgtgcacacaaattaaaaccagcccaactgtcccatagaattgggacaattttttgaataaacatagaaattgaccctcctgatcttaaaacttgaaacttacatttgtctcatctgagttgcttcctcaggaaaggagctgaaactcatcagatcaccacatccagagaagatgccagtccrctcattcatgattgcttcctgtattaatctgttctcacactgctataaggacatgctcgacactgggtcacttgtaaaggaaagagatttcattggcttacagttcagcatggctggggaggcctcaggcagaaggcggagccaacacgtccttcgtcacatggtggcaggaaggagaagaatgagcaaaagggaaaagtccctcataaaaccatcagagatcgtgaggactcactcactaccatgagaacagcagcactggggtaactgcccccatgactcaattacctcctaccagatccctccaataacacatagggat

SEQ ID NO: 602111 - DNA, 562 bp, Homo sapiens
cctgactgtactggagattagaccatgtcccataaaaccatgcctctcacacttggacgtgcacacaaattaaaaccagcccaactgtcccatagaattgggacaattttttgaataaacatagaaattgaccctcctgatcttaaaacttgaaacttacatttgtctcatctgagttgcttcctcaggaaaggagctgaaactcatcagatcaccacatccagagaagatgccagtccgctcattcatgattgcttcctgtattaatctgttctcacactgctataaggacatgctcgacactgggtcacttgtaaaggaaagagatttcattggcttacagttcagcatggctggggaggcctcaggcagaaggsggagccaacacgtccttcgtcacatggtggcaggaaggagaagaatgagcaaaagggaaaagtccctcataaaaccatcagagatcgtgaggactcactcactaccatgagaacagcagcactggggtaactgcccccatgactcaattacctcctaccagatccctccaataacacatagggat

SEQ ID NO: 602112 - DNA, 562 bp, Homo sapiens
cctgactgtactggagattagaccatgtcccataaaaccatgcctctcacacttggacgtgcacacaaattaaaaccagcccaactgtcccatagaattgggacaattttttgaataaacatagaaattgaccctcctgatcttaaaacttgaaacttacatttgtctcatctgagttgcttcctcaggaaaggagctgaaactcatcagatcaccacatccagagaagatgccagtccgctcattcatgattgcttcctgtattaatctgttctcacactgctataaggacatgctcgacactgggtcacttgtaaaggaaagagatttcattggcttacagttcagcatggctggggaggcctcaggcagaaggcggagccaacacgtccttcktcacatggtggcaggaaggagaagaatgagcaaaagggaaaagtccctcataaaaccatcagagatcgtgaggactcactcactaccatgagaacagcagcactggggtaactgcccccatgactcaattacctcctaccagatccctccaataacacatagggat

SEQ ID NO: 602113 - DNA, 479 bp, Homo sapiens
ggggagattccaacgcagaaggggacaccccgaaacgctccttagggcacccagtcattgctcactctgcagttagcctgtcagaaggtcgatagctgtgtgctgatcagaacggaagaagggcraagggaaattcctaagagacacaggcgcaataggcactaacttaaccgctataggaccttcctggggtggcggacatgggcagtgctgccatcaggcaggattcatgctgatcaccagcacatgttaactgacatgtttactgttaactgacagtaaaggagaatccccaaacttggggcgggaacaaggtggagactcaagacagaggcagcaacttaaggaaacaatctgatataatcaacagccccacgcagagccctcagggctgctcccagccgggccagcccactcctttcctggggtgtactcttacgtccttcataacccacacttcccagtaacacattcaccag

SEQ ID NO: 602114 - DNA, 479 bp, Homo sapiens
ggggagattccaacgcagaaggggacaccccgaaacgctccttagggcacccagtcattgctcactctgcagttagcctgtcagaaggtcgatagctgtgtgctgatcagaacggaagaagggcaaagggaaattcctaagagacacaggcgcaataggcactaacttaaccgctataggaccttcctggggtggcggacatgggcagtgctgccatcaggcaggattcatgctgatcaccagcacatgttaactgacatgtttactgttaactgacagtaaaggagaatccccaaacttggggcrggaacaaggtggagactcaagacagaggcagcaacttaaggaaacaatctgatataatcaacagccccacgcagagccctcagggctgctcccagccgggccagcccactcctttcctggggtgtactcttacgtccttcataacccacacttcccagtaacacattcaccag

SEQ ID NO: 602115 - DNA, 479 bp, Homo sapiens
ggggagattccaacgcagaaggggacaccccgaaacgctccttagggcacccagtcattgctcactctgcagttagcctgtcagaaggtcgatagctgtgtgctgatcagaacggaagaagggcaaagggaaattcctaagagacacaggcgcaataggcactaacttaaccgctataggaccttcctggggtggcggacatgggcagtgctgccatcaggcaggattcatgctgatcaccagcacatgttaactgacatgtttactgttaactgacagtaaaggagaatccccaaacttggggcgggaacaaggtggagactcaagacagaggcagcaacttaaggaaacaatctgatrtaatcaacagccccacgcagagccctcagggctgctcccagccgggccagcccactcctttcctggggtgtactcttacgtccttcataacccacacttcccagtaacacattcaccag

SEQ ID NO: 602116 - DNA, 572 bp, Homo sapiens
tgaatgtgttccttccaaaatccaggtattaacattttatggccaaagtggttgtattaataggtggggcctttaagaggtgattagttcatgagggctcctctggtgaatgggattaaggcctgtataaaagaatcttctcttcatgcagcattcagcttgcttgcccttctgccttccaccatgtgaggatacagtgttcctcccctccggaggatgcagcaacatagcaccatcttggaagcagatggcagccctcaccagacaactaaacctgccaacaccttgatcttggacttctcagcctccagaactaaataaaatttagcttatgagaaataaagttccattctttataaattacctagtctccagtatttttgttayagcatcacaaattgactaaaacaggaggaaagatagccatttcaataaatgatgctggaataacaggacacccatgggcaaaaacatgaaccccaacttaaacctcacaccttaatacaaaattaactcaaaatagatcacaaacttaaatctaaaacacataatgatagacttttaaaaaacac

SEQ ID NO: 602117 - DNA, 572 bp, Homo sapiens
tgaatgtgttccttccaaaatccaggtattaacattttatggccaaagtggttgtattaataggtggggcctttaagaggtgattagttcatgagggctcctctggtgaatgggattaaggcctgtataaaagaatcttctcttcatgcagcattcagcttgcttgcccttctgccttccaccatgtgaggatacagtgttcctcccctccggaggatgcagcaacatagcaccatcttggaagcagatggcagccctcaccagacaactaaacctgccaacaccttgatcttggacttctcagcctccagaactaaataaaatttagcttatgagaaataaagttccattctttataaattacctagtctccagtatttttgttatagcatcacaaattgactaaaacaggaggaaagatagccatttcaataaatgatgctggaataacaggacacccatgggcaaaaacatgaaccccaacytaaacctcacaccttaatacaaaattaactcaaaatagatcacaaacttaaatctaaaacacataatgatagacttttaaaaaacac

SEQ ID NO: 602118 - DNA, 600 bp, Homo sapiens
gtgcactctcaaatgagaatcttatgacctgcttcagtggaaagtcagaaaattctactatggcctgcttcaggggaaaagggtagaagaagatcgcagagaccttcctgyttctgctgttttctcaaatccaaggagccacattttgaggtagtgtgtgttgatagttcacatcacctccacgcccaccttgggcttaatcccagctctagagtacaaatggctgtggggatggagaaaattccatgaaaaaaacacactgggctagtaggaaatgaacaatagcgtaagaagtgagacatatcctaagaaaactcagttcttgatcttttgataaatagaagaaacagtattctctgaaattgacctaataggcaaagatgcgatgccataggatgtcaaagatggtgattgtttttagacatgcacagtcacaagctcctatgtaggaggaagagaatagaaaaaaaggaaaatatattatattggaaaaatctaaaactaattttacagtgccatagctgaagattgctacagatccatggaattgaaataatattacagcaaatagcctgtgcactcttcagcatgattttctca

SEQ ID NO: 602119 - DNA, 576 bp, Homo sapiens
ctcttccatcatgattataagtttcctgaggccttcccagccattcagaactgtgagtcacttaaacctctttcctttataaattatccagtctcaggtagttctttatagcagcatgagaacagacaaatacatcatctaaatcagatatgggtgagagtcaaagcaggattcttcctgaggcatattatcctccagctgtgaggctgtgaaattaaacaaattatctacttccaaaatacaatggtggaacagacatagaatagaaatttcattccacaaggaagaaattagcaagaagaaaggggtagcagttgccacataagtccaacactcaacagggaaaacaacattaggtcttaaagctggaagataaagttttttgactctgtattccacatcctggatacactggggcaggtttgggctcccaaggcgttgggctcccaaggccttgggcagccctgcccctatggctttactgggctgtctacccarcaactcttacagattagagtctagtggttatggccctcccaggctggagttgcatgctggtagctctacagttctgag

SEQ ID NO: 602120 - DNA, 607 bp, Homo sapiens
tattcagtgttacctgggggcagatgatttctgcactttctcagccacctcaacttgaacatcttcatcgtcatcgttgtcattttctgyaaatacagaagtgttcgttcaggtatttcccacttcacagtctgcaagcacagtcagcccaatgtgcaacagagacatgaacatctaggcatgggtcaccgttcaactgaaaactctcatgttttatctttaacagaatgccctggcatggtttcctgatccatcaggcaatgcatttctgatctggagggccaccatcaagatgtggccaaatattgaaaagaccttttgcttcccatatcactggaggcttgtgcagcctctctctggacgttggcagctgtctcccccatcctgccagatctgattcccaggcacaggcttggtgtcctgtcacggtttgcatttcaaacctcattctttctcttagaagcagacaaacttgtcccacagtcctctatgcatcagaagatttcaagcctccaagtggcttctgctgtgttcttcagggacattctatccatggggagtgctccagtctgaagcacttcctaccacaaaacgcccccacataaag

SEQ ID NO: 602121 - DNA, 557 bp, Homo sapiens
catttcaaacctcattctttctcttagaagcagacaaacttgtcccacagtcctctatgcatcagaagatttcaagcctccaagtggcttctgctgtgttcttcagggacattctatccatggggagtgctccagtctgaagcacttcctaccacaaaacgcccccacataaagtgccttctccaacatcacacggcragggccttcatctcattttggaaagcagttgtaagtgttcccacatttgaatgcttcagacccttgcaagagacaatttgtctgccacggagagagagaaactcaggaaggacaagtcattcactctctgacagttactaagaacattgccgaaaagacagcctgggaaccttcattcttagtcctgagctcttttcactctaacaagcctgctcccatcgcagcctccttcctgtcctttaaaactagacagatgctgcctcttgctccaaagaccacctttcatcaagggaggagggacacttgcaatactgtgacctccaaccccatgggtttcccatctccgttcttacccaaga

SEQ ID NO: 602122 - DNA, 233 bp, Homo sapiens
taattctcatcaaataagggtgctatttacattgagatagtgactattactataagtaacattttagtctcttgacaagcatgggaagcaatggaatgaagggcaatggaaggaagggcactgcattatgaaaaggactttttaaaagaaaaccatctccaggcactattcccctttgtggaaatgaagwgaatattttctgaactccacctgggacatatgaacaatgagca

SEQ ID NO: 602123 - DNA, 540 bp, Homo sapiens
gtgttttaatcatattcctgatctgaaaagtcccctttttgtatactttcaaatgttccacacttccttttcagaaggttccatttgaactacmaacttaaaacaggtaattctgtcccattttattgacaggcaaactgagactcaacgtgacagtacattttccacgagtatatctcaggttagctacagagtgatgggatcttgagtgaattatttaacttctcttagcttccatatagtctctctctcacatgaggactaaagtaaatacatgtaaactacttgagaacagaccctaatacgcaataatgttagctagcattatagactttaacttgccaaagatccaattgttaataggaatcaggactcaaacttaagtctatctggcataaaaaaacctatgtcctcagctgggcgtggtggcttacgcctgtaatcccagcactttgggaggccgaggcgggcagatcatgaggtcaggagatagagaccatcctggctaacacagtgaaaccccgtctctactaaaaatac

SEQ ID NO: 602124 - DNA, 540 bp, Homo sapiens
gtgttttaatcatattcctgatctgaaaagtcccctttttgtatactttcaaatgttccacacttccttttcagaaggttccatttgaactaccaacttaaaacaggtaattctgtcccattttattgacaggcaaactgagactcaasgtgacagtacattttccacgagtatatctcaggttagctacagagtgatgggatcttgagtgaattatttaacttctcttagcttccatatagtctctctctcacatgaggactaaagtaaatacatgtaaactacttgagaacagaccctaatacgcaataatgttagctagcattatagactttaacttgccaaagatccaattgttaataggaatcaggactcaaacttaagtctatctggcataaaaaaacctatgtcctcagctgggcgtggtggcttacgcctgtaatcccagcactttgggaggccgaggcgggcagatcatgaggtcaggagatagagaccatcctggctaacacagtgaaaccccgtctctactaaaaatac

SEQ ID NO: 602125 - DNA, 540 bp, Homo sapiens
gtgttttaatcatattcctgatctgaaaagtcccctttttgtatactttcaaatgttccacacttccttttcagaaggttccatttgaactaccaacttaaaacaggtaattctgtcccattttattgacaggcaaactgagactcaacgtgacagtacattttccacgagtatatctcaggttagctacagagtgatgggatcttgagtgaattatttaacttctcttagcttccatatagtctctctctcacatgaggactaaagtaaatacatgtaaactacttgagaacagaccctaatacgcaataatgttagctagcattatagactttaacttgccaaagatccaattgttaataggaatcaggactcaaacttaagtctatctggcataaaaaaacctatgtcctcagctgggygtggtggcttacgcctgtaatcccagcactttgggaggccgaggcgggcagatcatgaggtcaggagatagagaccatcctggctaacacagtgaaaccccgtctctactaaaaatac

SEQ ID NO: 602126 - DNA, 540 bp, Homo sapiens
gtgttttaatcatattcctgatctgaaaagtcccctttttgtatactttcaaatgttccacacttccttttcagaaggttccatttgaactaccaacttaaaacaggtaattctgtcccattttattgacaggcaaactgagactcaacgtgacagtacattttccacgagtatatctcaggttagctacagagtgatgggatcttgagtgaattatttaacttctcttagcttccatatagtctctctctcacatgaggactaaagtaaatacatgtaaactacttgagaacagaccctaatacgcaataatgttagctagcattatagactttaacttgccaaagatccaattgttaataggaatcaggactcaaacttaagtctatctggcataaaaaaacctatgtcctcagctgggcgtggtggctyacgcctgtaatcccagcactttgggaggccgaggcgggcagatcatgaggtcaggagatagagaccatcctggctaacacagtgaaaccccgtctctactaaaaatac

SEQ ID NO: 602127 - DNA, 561 bp, Homo sapiens
aggggaggaagaaatggaaacctaaacatctactgcaatgaaaaccaacagcaatgacagtaggagtaattcagccttcgytgaaaacatgtcatcaaacacactctggtttccctgaatctgttgcctccaggtgttaacacagaattaagcatccacaattgctgaaagtcacctggggcatggtgggttttgatcttcttccccttcttttcttccccttcttctttccttctttgatcttcttccccttcttttcttccccttccccttcttttcaatttctgcaataaattcagacatggacagacacattaagctgattcccctacacacataacaatccactgtctaatcctcacacagggacctcaggctcctcagcataagaataggacactgtgagagatatatttcaggaggcctgaaggctggtcatgatagaaattcctcggtttttctcccagaaactgtgggtaaaatgtccctattctagtagatcgttatcccaatatcatttgtcccaagtttgtgcaaacagttacgccatatttttccaat

SEQ ID NO: 602128 - DNA, 414 bp, Homo sapiens
cagtgtctttctctttcctcactctgtccaccctcagaatggtaactctgcccaccgctatctaccctggcacaccgcgctctccatagggcttccaacaccctgtcctgccccaacttcataaactctcctcaaatgacccagttggtatacgcctttcatttcctgtaagagccctaacatgacttctgagcagatgcgaacagatatatggaaatccagagacccctggactgagggttagtggaccttcagggattccagcagcattccaccatgctcatccrcgtggcaggatgacatacccaatttatctgctcttgaccttctcttggataaaacaaagggctgaagccaggtgcagtggctcatgcaggtaatcccagcactttgggaggccgaggtgggtggatc

SEQ ID NO: 602129 - DNA, 603 bp, Homo sapiens
cttaatactactgaactgtaccgttagaaatggttaagatgagtaggcaggcgtggtggctcatgcctgtaatcccagcactttgggaggccaaggtgggtggctcatctgaggtcaggagtttgagaccagcctggccaacatggtgaaaccccatctctaataaaaatattttaaaaattagccgggcgtggtagtgggtgcctgtaatcccagctactcaggaggctgaggccagagaattgcttgaacccaggagatggaggttgcagtgagccaacatggtcccactgcactccagcctgggtgacagagtgagactctgtctcaaaaaaaaaaagaaaagaaaaaaaaagaaaaagaaatggttaagatggtaaatttcatgttgcttcttactacaattttttaaatggctaccttatttaatctctgtgagaattaaatgatatcaagtgcaaatgcctgacacacagtagatgctcggtaagtgtaacattcttttccttctccttctgaatggcttgtgaattatcacaaacattaaagagacttctagcatccaaagcmtattgatatgggtagaaagggaggataagatct

SEQ ID NO: 602130 - DNA, 565 bp, Homo sapiens
agtaaaaactaaaaaaaaaatcagacaagaatattatttcatgaaaatgtcagggttatagtgtctttcagtttcaccaattcctctctgtttaataaaataaatttatagctttaacctacaactctgcagacaaccatgtgtttgcttttgaaatagttgtctaaaaagctactgaaatatttccattttgcttctgttcagagcacgaccctggaagaatctagaagtcaaattactrtttagttttagtagaagaaaaaaataatgtttaatagtcaaagctgggcagcaaatgcatatgggaaaaacaataaaacgtgtcttgaatggatttcactccatatgagtttccttttccattgcttttcaaatttgtttcattcctttaagttgatgcttttatcttttcctgttaagcatggatttgacttttgattcgttgaattgcagtgttggtggaacactggtttttacaattaaaaatgccaagcaaaaaatgtggctcccaggagcccttcctggtcagtggtgttcaatcacccactcctggcagaaagtaagt

SEQ ID NO: 602131 - DNA, 541 bp, Homo sapiens
ccatgattttctcattttcatgtggtattctattttttccttcatttgagatgtaatagaaaattgctattctgaaatttcccagtaaattaattgtctctgcatactatgtagattagtttgaaactttaagaaatatgtgtaatgggtcattaaaggtgttatttttattactaaattctattaaaatgtgcatatgtatgaatatatgacatataatgatacaaataataccatatatgtataatgcaatgcttaattataattatgtgtattacatagttatcaaatcctttggttatttatttaatacatcagrgaaggaaaaatatattcctatcagctgaaatgtaggagccctttttcaagatattccttaatatggattcttaatcttcaggcaactgccttacaattgtttctgtagctgaatacctcctatattaatctttacttcatatgtttctttaaaacaactcaggaccaaaacaattacccaatctagtctttcactaagtaaaaatactcatgaaataataag

SEQ ID NO: 602132 - DNA, 541 bp, Homo sapiens
ccatgattttctcattttcatgtggtattctattttttccttcatttgagatgtaatagaaaattgctattctgaaatttcccagtaaattaattgtctctgcatactatgtagattagtttgaaactttaagaaatatgtgtaatgggtcattaaaggtgttatttttattactaaattctattaaaatgtgcatatgtatgaatatatgacatataatgatacaaataataccatatatgtataatgcaatgcttaattataattatgtgtattacatagttatcaaatcctttggttatttatttaatacatcagggaaggaaaaatatattcctatcagctgaaatgtaggagcccyttttcaagatattccttaatatggattcttaatcttcaggcaactgccttacaattgtttctgtagctgaatacctcctatattaatctttacttcatatgtttctttaaaacaactcaggaccaaaacaattacccaatctagtctttcactaagtaaaaatactcatgaaataataag

SEQ ID NO: 602133 - DNA, 574 bp, Homo sapiens
ggcaactgccttacaattgtttctgtagctgaatacctcctatattaatctttacttcatatgtttctttaaaacaactcaggaccaaaacaattacccaatctagtctttcactaagtaaaaatactcatgaaataataagttaatgtgcatrctatatcaatgcaaactaaaatcaatacagaattaaaaaaaattgtccatgtgctgcctacagttatctcataatttcccgattgtgtgtataatacacatgggaaaacagaattttgtgtgcaaattaattaagagcttggagtttggagtcagctgcctaggtttaacttcttatcctgctgcttagctatgtggcttccaggtcccttagtttcctcattagtaaaatgggaataataaatcatctacctcacagggttcttgtgagaattaagataacattaaaaaactcagagtagtttcacatagttcgtaacacacacactttttgtgctaatttttaccgtgtattaaagaatcattgtgtgggtatttgtattcattgacttttccatgcatgcaatactccaatactaac

SEQ ID NO: 602134 - DNA, 528 bp, Homo sapiens
attattacactggtgctaaaagcatgatttttggagtcagactattttgtttaaattctagcttaattatttataattctgcaggctatggaagctttcatgacctctcyttgcctcagttttctgtgtgtaaggtgatgatagtaaacgctagtgcaaatgacataagattgttacaaggataaagaagtaatctgtattattaaaaaagaatctggcacaggataattgctcaataaatgttaactgttataatctcctcactgtcatctctcttatttctttttcctctttattctggggacgcttctgaaagtttttctcttctgatttgattttctcaagtcactagctttcttcagtaaatccaatgtgtattttactcaaacttctgcgatattagttttattgaaatcttttcttatcttacctagatcccttttcatctaagcttgttggttttatatctcatcttcttattcttttaagccagactgttctttccttatgacagcattgtcctattta

SEQ ID NO: 602135 - DNA, 528 bp, Homo sapiens
attattacactggtgctaaaagcatgatttttggagtcagactattttgtttaaattctagcttaattatttataattctgcaggctatggaagctttcatgacctctccttgcctcagttttctgtgtgtaaggtgatgatagtaaacgctagtgcaaatgacataagattgttacaaggataaaraagtaatctgtattattaaaaaagaatctggcacaggataattgctcaataaatgttaactgttataatctcctcactgtcatctctcttatttctttttcctctttattctggggacgcttctgaaagtttttctcttctgatttgattttctcaagtcactagctttcttcagtaaatccaatgtgtattttactcaaacttctgcgatattagttttattgaaatcttttcttatcttacctagatcccttttcatctaagcttgttggttttatatctcatcttcttattcttttaagccagactgttctttccttatgacagcattgtcctattta

SEQ ID NO: 602136 - DNA, 517 bp, Homo sapiens
ggaagctagaaattcaaagattggggtgccagtgaattcggtttctggtaagaattctcttcctggcttgcagatggcctctttctcactgtgtcctcaaatggttgaaggagatagagatctctagcttctttctcttaagggcaacaaccctattggattagggccccatccttatcacctcactgaacattggtcacttccccatttccaaatacagtcacattggggattagggcttggacatatgaattttgagggacacattcagtccataatcatcctcattttgctttttaataccatgtaaagcaagtmtcatctcttttccatataccaatccagtcactatttggaaaattgtaactctctgaagctctactaaccttcctcaaatggtttcaagtttcttcataatatgggcaattctctgaataggggtcaaaagatctttatcactttaaaaagaaaaactaaaacactaaatatgtgaacacatttattgtacacgtttacg

SEQ ID NO: 602137 - DNA, 596 bp, Homo sapiens
attagtttaatttctttgtttttaaatggaaatagtaacagattctgccgcttagagctgtgataagttaagttacttgtttttttgtaatgtgcttaacaggccttctggctctgaacatgtcgtcaatacacgtttactattatttcattaaaagctatgcaaaatcatcgtcaatctaccaaatagtgtgtcagaagtgcaacacaatttatgcaagatgtcttgaactaactataacttattaaacaatctttctcatttcttacatttaaytttatcacagcaaaaataaatgcgaacaacatcaaaatcatattaaaatgtacagtatatctactgaagatttataaagaccaaagggaggcagaataagtgtagtcatacaacaagattttctaagatgtatatttatacattctttcctctccataaaccccacatttttaatagctggcccagagcttcgttcatctctctaccctgtcttatcttcagccttttatgacacacatcatgcagcccttatctatcatcttcaacatttcagtttttttccctgtacagttgattatttcttatccatagaaatttag

SEQ ID NO: 602138 - DNA, 554 bp, Homo sapiens
gcatagttttcaaatattttccctcattctgtagtttgttggtttactttgttgatatttcctttgctgtgcaggagctctttagcttaattaggtcccattygtcagcttttgtttttgatgcaattgctcttagtgtctgcctcatgtaatccttaccaggtcctatgttgagaatggtatttcctaggttatcttccagggattttatagtttgagggttacacttaagtcttttaaccaccttgagttaatttttgtatatggtataaggaaagggtctagttccaatcttctgcatatggctattccagaaccatttgtcaaatagttattccagcaccagtttatcaaatagggagtcctttccctattacttgtttatgtcagttttgtcaatcagatagttataggtgtacagcattatttctgggctctcgattttgttccattgttctatgtgtctatttttataccactgccatcttgttttggttattgtagccttgtagtatagtctggtaatgtgatcacttcagctttggtctttggct

SEQ ID NO: 602139 - DNA, 483 bp, Homo sapiens
tggcccaaggcttgtagaagtccttttgaacttgagaattacctctgcataacatccaagtggttctctgcttcagtgtagaaggctggtgggtgtggggtgggtgcaggggagctgggggattttctctatcccagtcttgcacagatccctgtggagagcatgaatgcccctgggcactctcacttattcaccctttcccatgttggagakgttttcctagctccatgctgaggccagataggcgggtgcccagctttgctcttctctgcttcttgtgttccccttctgctttaattgatcccaactagtttctcagatgatcagccttacagggccactgctcactggcccttttgtttcctctacgtgagagtggcatacaagagctgctgctcgtctcccatcttagcttatgcttttatgtttgggagaaatctagtaccctgaagctgccaaacggtaaagtagtcccagctaagc

SEQ ID NO: 602140 - DNA, 537 bp, Homo sapiens
caaaaattttccgggtgtgggctcctctattctygtctattcaagaggctgaggcagaagaatctcttgaacctcggaagctgaggttgcaatgagccaaggtcgtgccactgtactacagcttgggtgaaagagtgagactgtctcaaaaaacaaaaaagaaaagagctgctaagtcacattgtcaacggcatggatataggaagaggttacggattgaggatattttacacccaatctgtcagtggagaagccataaaatgttttctaacattttattggaataaaacaaaattatctatttttctcattcagttttgtcattctgagagttatgtttacccccaaaatttaaggcacagattattgatgttactttttcttattttttattacctccgaaaatgtaaatggtttatgtcaaagattgataacagtatgcaatttaaagtcacaaaaaatgccaatatgcattttgtagaagaattatttctttccattgtattgatagtttgctgtaaaagttacagtttttga

SEQ ID NO: 602141 - DNA, 537 bp, Homo sapiens
caaaaattttccgggtgtgggctcctctattctcgtctattcaagaggctgaggcagaagaatctcttgaaccycggaagctgaggttgcaatgagccaaggtcgtgccactgtactacagcttgggtgaaagagtgagactgtctcaaaaaacaaaaaagaaaagagctgctaagtcacattgtcaacggcatggatataggaagaggttacggattgaggatattttacacccaatctgtcagtggagaagccataaaatgttttctaacattttattggaataaaacaaaattatctatttttctcattcagttttgtcattctgagagttatgtttacccccaaaatttaaggcacagattattgatgttactttttcttattttttattacctccgaaaatgtaaatggtttatgtcaaagattgataacagtatgcaatttaaagtcacaaaaaatgccaatatgcattttgtagaagaattatttctttccattgtattgatagtttgctgtaaaagttacagtttttga

SEQ ID NO: 602142 - DNA, 537 bp, Homo sapiens
caaaaattttccgggtgtgggctcctctattctcgtctattcaagaggctgaggcagaagaatctcttgaacctcggaagctgaggttgcaatgagccaaggtcgtgccactgtactacagcttgggtgaaagagtgagactgtctcaaaaaacaaaaaagaaaagagctgctaagtcacattgtcaacggcatggatataggaagaggttacggattgaggatattttacacccaatctgtcagtggagaagccataaaatgttttctaacattttattggaataaaacaaaattatctatttttctcattcagttttgtcattctgagagttatgtttaccccyaaaatttaaggcacagattattgatgttactttttcttattttttattacctccgaaaatgtaaatggtttatgtcaaagattgataacagtatgcaatttaaagtcacaaaaaatgccaatatgcattttgtagaagaattatttctttccattgtattgatagtttgctgtaaaagttacagtttttga

SEQ ID NO: 602143 - DNA, 569 bp, Homo sapiens
aatttcctcagctgtaaaatatgggtaagtacgcatctactgggttgttgtaaggattaaatgagctaatatttgtaatgaacttacagctgaccctagccaaacaaacaaacaaacaaaaaaagctacatgctccagaatgcttgcttacttgttgaatgagtgcatgaatgtcctttaatgttgtatacatgatgtgtttcctccctttaataataaagattaatggatatagtgtcaaagcctgaggaatggttaacagacaacatcagtgacagtgaagaacaagatttcatggaagtatgaaaataatttttgttttcttattctagaagggtagacaagttacactgtcttaaataccagcaggctgaatattcattaatctgtttttctaagtaatataaaaataaaacatggtgagtattttagaaaaccaaaatgataattatttttaaactaaatatttaaaaaattattaatattagcatatgaactaggatcaaatgcttcatarcatgagcttctatttatgcatcacagtcaatttctaaactttcatttccaga

SEQ ID NO: 602144 - DNA, 626 bp, Homo sapiens
tatttccaaatggattcactagaaattaaaaaaaattaaattrttaaacttctttactgtgttgaaattataaactaatttgaaaattaagataatgtttacatttttggagtcggtcactaattcttcaaaaattccagtcaaatataatagtacatgcaatcacacatgtgttttcaatcctagtgacttacttacatctgaaaaaaaggtagcatctttctagaacttataatatcaacttctgcatatataaaaaacaaatctaattgattaacaatatttatttatttccataattattttatttcctctcatacttagcaaagagaatagctggtaacatctgcatttactaggaattaagatttggtgtccttaactaacttggacccgaaagcaagagtccatgcactgaaaagtgtaagcaattaaagcactaccaaggaaagtgtttttctaccaccagagagaaggcatttactctcagaccttgaaagttatcatcatttatggtcatcaggggaagcagagtttttcacaccccaggcacaaaattgaaagtgtctgtttcattctcttctcacatcctgagctctgggtgattttgttaaaggaagcattaa

SEQ ID NO: 602145 - DNA, 615 bp, Homo sapiens
attcactagaaattaaaaaaaattaaattgttaaacttctttactgtgttgaaattataaactaatttgaaaattaagataatgtttacatttttggagtcggtcactaattcttcaaaaattccagtcaaatataatagtacatgcaatcacacatgtgttttcaatcctagtgacttacttacatctgaaaaaaaggtagcatctttctagaacttataatatcaacttctgcatatataaaaaacaaatctaattgattaacaatatttatttmtttccataattattttatttcctctcatacttagcaaagagaatagctggtaacatctgcatttactaggaattaagatttggtgtccttaactaacttggacccgaaagcaagagtccatgcactgaaaagtgtaagcaattaaagcactaccaaggaaagtgtttttctaccaccagagagaaggcatttactctcagaccttgaaagttatcatcatttatggtcatcaggggaagcagagtttttcacaccccaggcacaaaattgaaagtgtctgtttcattctcttctcacatcctgagctctgggtgattttgttaaaggaagcattaaac

SEQ ID NO: 602146 - DNA, 428 bp, Homo sapiens
tcagtcatctggtatatagcaatataagtgtatgtctcasatacatattctagcacacacacatacacacatagttactgtgacactgtaacagtataaaaaagaataaaaaatcaatgaggggctgacataaaatctttcaactacagcatatttaacaaggagggaaaacctgcttagctggctgcctttttaatttcaaggtaactttattggtccaaatactgaatgttcctccaaatttgattataacaaatgtccagttcccttacatcacaggatgaatgtcgagttttttagtgagataatcctttagtaaaggccaatgtttcagacaaggttttaggagaaaaagtctttcgaaatttagtcaattattatcatcatctttctgcaatttcaaaactctgtcctcccctacataacaa

SEQ ID NO: 602147 - DNA, 448 bp, Homo sapiens
atgttcctccaaatttgattataacaaatgtccagttcccttacatcacaggatgaatgtcgagttttttagtgagataatcctttagtaaaggccaatgtttcagacaaggttttaggagaaaaagtctttcgaaatttagtcaattattatcatcatctttctgcaatttcaaaactctgtcctcccctacataacaacctctctgacttattaacaagcttctagaaaaataacctaaaaccactctgttgcttcttccagttcatttattcttcctcagaatattacaatttgatttttgttaacattttttctccagaaactggtgggtgaacttttgtaacattggtgttcaacagatgcttctttttccatctttggttcttgtgacatttttttcctttgtctayggccagcctctctattccttaactaatttggcatg

SEQ ID NO: 602148 - DNA, 569 bp, Homo sapiens
ggattaacatcagctagtctcaaaatagaattaatttggaatatattctgcaaaatgtcaaaaagttatataaatcaagccaaaaaatttagtgctcatgaaaatatatgacagctaatttattgatgcagtttttctcaggatctgtgtaaatcaaaacaatatattctatggtagcatttttgaaatcattctatgaccatggctgtcacctattaatacatagaatacatagaaattctccaaattcatcttgtccacagatagagcattgagaacttgttaaaatcattcacgtattgaacaaaacacaaactctctcctaatgcttgtcccccaaataaaaataatgtgatttttacagatwgctttgtgaaacacagttgcaatttccacaggtgtattgaacacatcatcctcaacaaatttgtagcattatatatatgaacatatagtggtatccaaagacagtctgataacccagtttcaaataattccaatgagaaaattaatttggctttacaaagaagtactcattatcaaggccacccatgctaatgttacctaaa

SEQ ID NO: 602149 - DNA, 619 bp, Homo sapiens
tcagggttgaggaataaaggccatgaccacattcctgtttactgtagctacttcccatacctctctagagacctttctatccacttgtaagggtaaggtgaaaatgatggctgttgccttaggaaagacagcagggacatgsctctcagcttcatttcctacgtcttggaagtatctgacttccagatatgcattactgtattaacacgcaggtcttggaggaatggatagtttatttttccagctaaattttatccttaggcggaggaatactaacgagaagtatttatgtcctgtagtatattcaaattactgtctcccaccacacagagaagcagcctgttgttcctttttctcttttgtccttttgtctcttttctttcttctcttcattcttgatttctctacaatctaagcagcttgtactcctataccaaggcctgcagaatcacatattttagattacagttcacgtttcaacaactgtatcaaattaaataattaagactgacttggcctggatttaatcccttccttgctttggttctttatttctttggtgctccagaaactagggcatgattcactggacacggcagtatgcagagaaagaaaagat

SEQ ID NO: 602150 - DNA, 537 bp, Homo sapiens
tgggtcctttccacaacatgtgggaattatgggagtacaattcaagatgagatttgggtggggacacagagccaaaccatatcagcttctaatccttttctgtccatctttctcatctgtaaaatggacaaataggatatgccacatatgttatattagcaagaaataaagtatttagcatagtgctggcaatatagtgggttttaagcatatgtgagtttcttttctcaaattcagattcatagctcatatacccaggaaaccccgacagcatttcacatgtcctacctctacaactaccctaaatgaagacctggagtagtgagggatgaccaagaagaaacttacaggctttgacaaagaacctgagttttatcctgaggccaatataaagttgaaagagtttaaactttaaatgctgagggattttaacacattcctctaacsaataggcagtatgacacaattaatacaatggtacctggttttaatttcctatcaattgtctgcactttaaatctttcttacagagtcaat

SEQ ID NO: 602151 - DNA, 595 bp, Homo sapiens
actgctcttttcactctgcacagtttccttgggtgtctttttactcattttaatgtttttttcctgctacctttatatttaatattctcaaacttctatttttaatgcatatcatatactgggtgacagactctttaatataaatcagcctgctggacatatatacctggatgcttattcccacaaaagttcaaattctgcatttccaaagtggaatgtaccactcatatatatgaatcaagttcctctttgcctcaccrttttctagagactcagaccactccttccagtcttcgctgctgctgagcaaattctttttctttctttgctttgagcaactgttacaagaggaagtcatttatacggccttcaacaagagagttcagtgagactgaatcattggtccaacttattaccagacagcatctggcctgataacacatcctcatatagctctctgtcctctctactttattttccttttctctcttgtgctccacatgattgcatttttaaataaagtaagtagtagcacaggaagaatccaggctgaaacatcataaaaatttgctcctcttttggtggtatctgctga

SEQ ID NO: 602152 - DNA, 574 bp, Homo sapiens
ccttcttttataaagcatgcccacacattaccaggctgagaaaggtgactgtcttttgggcaacataaaatctcttatatatccactagaagagtgacccttgcttttgcttcgttttgttgtatcccatatcccagcatactcaatggatacgatattcattcaccaatttccctctatggcaggagttctcatcmtatgagaaggctctacctctcccaaatacttgaacggtatttcagattctaacggaggaagaccaggtatagtggtacagtttctgattctgttatgcctgctttgtgctgggtttgggtatttttcctctcgtaaacccactccctgaaaataactacacaaatatatgctttacgaggagcagagtggaactgttttgtctttatatctcagtacctagacgataatctgaccatcagtagtagtaaaaggtcaatatatatttactgtgaataaatgaatgaatgaatgaatgaatactccaggaataaacctcaggcaaactgaggtcatttcttgctggggctgaatagtatggtactcttagaaatttgaa

SEQ ID NO: 602153 - DNA, 600 bp, Homo sapiens
gaacggtatttcagattctaacggaggaagaccaggtatagtggtacagtttctgattctgttatgcctgctttgtgctgggtttgggtatttttcctctcgtaaacccactccctgaaaataactacacaaatatatgctttacgaggagcagagtggaactgttttgtctttatatctcagtacctagacgataatctgaccatcagtagtagtaaaaggtcaatatatatttactgtgaataaatgaatgaatgaatgaatgaatactccaggaataaacctcaggcaaactgaggtcatttcttgctggggctgaatagtatggtactcttagaaatttgaattttgatttatatagtgccttagcgcacagaattctttgaggtgtaacaagtacatatacctggtaagtaggcagtcaaattggcaatgtctgtagaaaaggtgagaaggctggataataataatcaacaattatctgatagacttaaaggcactatctactgtaccaagcagtgtctgttgtatagctgaatgcctttgggaattaaaggccaaggargttttctctctgacaggatgagctcagcatagatg

SEQ ID NO: 602154 - DNA, 605 bp, Homo sapiens
tatatttacatctttgtttttttgtgctgttttctgaaatatctgacctcttcttygtgacccctccccaaccaaattttgtgttagttgctttttggaaaaattcaggaaaagggactacgttgacttttaggttgaggagaaacaaatgacaaacaacaagtacaataacaataactagaaatgataacatatatgctatgtatttggccccattctgaggatttaaaaaatatacatcaaatcatgcaatactctgtggtcagtattattgttatcatcaccatttatagatgaggaaactatgaagtcacataggaaataagtaatacaaccactattcaatgtatggttccagtgtcgttgttcttctttacagttctatatgatcgtttctaagctttagaatcagactgttaatgatatcaatatgtcactttactttaaaaatgtaagcagagactataacaaaaactatgcatttaatcttaaattcccttgtgaaatgggaaggacagaatttgcacatggaataaaggctcgattcattttgggaaattatgatttcacaaaactggtcactttattgctattatttaaagagt

SEQ ID NO: 602155 - DNA, 605 bp, Homo sapiens
tatatttacatctttgtttttttgtgctgttttctgaaatatctgacctcttctttgtgacccctccccaaccaaattttgtgttagttgctttttggaaaaattcaggaaaagggactacgttgacttttaggttgaggagaaacaaatgacaaacaacaagtacaataacaataactagaaatgataacatatatgctatgtatttggccccattctgaggatttaaaaaatatacatcaaatcatgcaatactctgtggtcagtattattgttatcatcaccatttatagatgaggaaactatgaagtcacataggaaataagtaatacaaccactattcaatgtatggttccagtgtcgtygttcttctttacagttctatatgatcgtttctaagctttagaatcagactgttaatgatatcaatatgtcactttactttaaaaatgtaagcagagactataacaaaaactatgcatttaatcttaaattcccttgtgaaatgggaaggacagaatttgcacatggaataaaggctcgattcattttgggaaattatgatttcacaaaactggtcactttattgctattatttaaagagt

SEQ ID NO: 602156 - DNA, 613 bp, Homo sapiens
gggcctgcctgtatgatgcctatctacagaggagcacacatggccatcaatagcaaaagtagtaattagatttgtcattatgtactaccagctatgaaggwgtgaaaggcagctagggaacatgacctaccatttatgagcttaacaataaatgtttcttttgatgtatatgcccacgagaggcagagagatcaagataatgagagctatgcaaatagttacatcacggataacaagaaaaaaataaatccatatctctccactggtaattcccaatgctatttctccttcattggttctccagaacttcagcacaattatttgtttcttgcaggtcatttcctttcttatatgtagtcaacacctcaaaatctattatgtctttcaataaaacacatttcttccttcaaagctaactcctgattctcattcattcagactgaaaaactttgatatatctttggctcatctttcatttctttctctactctttattctctctgccatttagaactaaatctcctgtttggactaatgaaacatttcctaactgttctcaccatctttagttttccctccaacttatacaataaagcttcgtaaatttaatttt

SEQ ID NO: 602157 - DNA, 613 bp, Homo sapiens
gggcctgcctgtatgatgcctatctacagaggagcacacatggccatcaatagcaaaagtagtaattagatttgtcattatgtactaccagctatgaaggagtgaaaggcagctagggaacatgacctaccatttatgagcttaacaataaatgtttcttttgatgtatatgcccacgagaggcagagagatcaagataatgagagctatgcaaatagttacatcacggataacaagaaaaaaataaatccatatctctccactggtaattcccaatgctatttctccttcattkgttctccagaacttcagcacaattatttgtttcttgcaggtcatttcctttcttatatgtagtcaacacctcaaaatctattatgtctttcaataaaacacatttcttccttcaaagctaactcctgattctcattcattcagactgaaaaactttgatatatctttggctcatctttcatttctttctctactctttattctctctgccatttagaactaaatctcctgtttggactaatgaaacatttcctaactgttctcaccatctttagttttccctccaacttatacaataaagcttcgtaaatttaatttt

SEQ ID NO: 602158 - DNA, 454 bp, Homo sapiens
gtagaaattaagacattcccagataaacaaaagctaagaaagattgttaacactggaccttccttgctagaaatgctcaaggggaatcctgcagtgtgaaatgaaagaccatagacagtaactgtatgttgaatgaagaaataagagtaaattaataggcaattattaaagttaaatggcttataatgcactttttgttttataataatttctaataattgttttctaaataattaaacagattaatacattaaaattrttctaatagtgttataactttggtttataactttatattttgttttctaaataatttaaaagactaatgcatttcaaaaattactagttggggggggcacacaatgtataaagatgttatgtataaagatgtaattttgtgccatcaacaatcaaaaggagtgggaacagagctgttaaaggagtagagtttttc

SEQ ID NO: 602159 - DNA, 613 bp, Homo sapiens
gggcctgcctgtatgatgcctatctacagaggagcacacatggccatcaatagcaaaagtagtaattagatttgtcattatgtactaccagctatgaaggagtgaaaggcagctagggaacatgacctaccatttatgagcttaacaataaatgtttcttttgatgtatatgcccacgagaggcagagagatcaagataatgagagctatgcaaatagttacatcacggataacaagaaaaaaataaatccatatctctccactggtaattcccaatgctatttctccttcattggttctccagaacttcagcacaattatttgtttcttgcaggtcatttcctttcttatatgtagtcaacacctcaaaatctattatgtctttcaataaaacacatttcttccttcaaagctaactcctgattctcattcattcagactgaaaaactttgatatatctttggctcatctttcatttctttctctactctttattctctctgscatttagaactaaatctcctgtttggactaatgaaacatttcctaactgttctcaccatctttagttttccctccaacttatacaataaagcttcgtaaatttaatttt

SEQ ID NO: 602160 - DNA, 379 bp, Homo sapiens
aagaagctttgcctgacactcctctagtacaagttagacaagtcgtatatatttaggcccctgtacttctactagaaatcttatcaccctatactgcaatagcttatttatttatatactcctcctagaatttaaactgtaacttcagtgattttatctatttcttcactcctcattgtattctgtgtgcccaatatattccctttaacagtgatggcattcartagttgcagagtagttaaataatgtgttggagcctttaacataaaggccattgcatattacatatcatgtggagaagtttggaccttattctttatgtcaatgcttttaactgtatgtgaggaagtactaaaacccataggatacacatggttta

SEQ ID NO: 602161 - DNA, 379 bp, Homo sapiens
aagaagctttgcctgacactcctctagtacaagttagacaagtcgtatatatttaggcccctgtacttctactagaaatcttatcaccctatactgcaatagcttatttatttatatactcctcctagaatttaaactgtaacttcagtgattttatctatttcttcactcctcattgtattctgtgtgcccaatatattccctttaacagtgatggcattcagtagttgcagagtagttaaataatgtgttrgagcctttaacataaaggccattgcatattacatatcatgtggagaagtttggaccttattctttatgtcaatgcttttaactgtatgtgaggaagtactaaaacccataggatacacatggttta

SEQ ID NO: 602162 - DNA, 379 bp, Homo sapiens
aagaagctttgcctgacactcctctagtacaagttagacaagtcgtatatatttaggcccctgtacttctactagaaatcttatcaccctatactgcaatagcttatttatttatatactcctcctagaatttaaactgtaacttcagtgattttatctatttcttcactcctcattgtattctgtgtgcccaatatattccctttaacagtgatggcattcagtagttgcagagtagttaaataatgtgttggagcctttaacataaaggccaytgcatattacatatcatgtggagaagtttggaccttattctttatgtcaatgcttttaactgtatgtgaggaagtactaaaacccataggatacacatggttta

SEQ ID NO: 602163 - DNA, 379 bp, Homo sapiens
aagaagctttgcctgacactcctctagtacaagttagacaagtcgtatatatttaggcccctgtacttctactagaaatcttatcaccctatactgcaatagcttatttatttatatactcctcctagaatttaaactgtaacttcagtgattttatctatttcttcactcctcattgtattctgtgtgcccaatatattccctttaacagtgatggcattcagtagttgcagagtagttaaataatgtgttggagcctttaacataaaggccattgcatattacatatcatgtkgagaagtttggaccttattctttatgtcaatgcttttaactgtatgtgaggaagtactaaaacccataggatacacatggttta

SEQ ID NO: 602164 - DNA, 630 bp, Homo sapiens
aaaaaacatattttaaaaggtgaaaaaaaagagagagagagaaagggaactgagcatatgagtgaacaaaatgggaagactggactgaattttttttgtgtactttaagtgctggaaccacgttgaatttatcatttatataaaagtataatttaaaagctcaaagttaaaaatcaaaagaacaaattttctgtaaggctaaatttatccaatcttcatttatttcaaaggttcttgtttttataatggtgatagttgatagtagatactgtttttgatttttatttaatgtatttagttttttaaataaaaataatttattaaaattaataaagcatatattaacatttcattttgtaaaacataagtgaaacctgaactcaagtactgagccttaatactaaactctaaagcacatggtttttagatcatttctastgttgggaaaccttttttccttgaatttgtgtttataataatcaggttaattaggtttctgggacaggagtcttaaaagtaatagaagggaaacaaagatacacaattcatatgacaatttgtaatgtaaaatatatataatagattaaagacaagaaataattatctgcattagattataagaatggtacc

SEQ ID NO: 602165 - DNA, 574 bp, Homo sapiens
attggttaacctggtattaaggaacaatttttttggagttgaaatgccttttccaaacaaatttttatttttatttatttattttaaaacttattttaaaatctatttttgtatgtgtgtgattttttatttaaaaaattattatttattttatagayatatagtaggtatagatatttgtggggtatatgagatattttgatacagacttacaatgtgtaatgatcacgttagggtaaatggggtatccagcacctcaagcaatcattatttctttgttctatgagcgttccaattttactccttcagttaatctaaaagatacaaccaattattgctgacttatagtcaccctgttatactatcaaatactagatcttattcattgtatctaattatatttttgtgcgtattaacctttctttttacttttgaatcagtaaagtcctttctctttatattgttattgccacttctgttttttaatggtagtctttgctgtctactgtaactgatttagcccaatttaagtgactttttagattagtgtactttgaaaaccaataaagttggt

SEQ ID NO: 602166 - DNA, 574 bp, Homo sapiens
attggttaacctggtattaaggaacaatttttttggagttgaaatgccttttccaaacaaatttttatttttatttatttattttaaaacttattttaaaatctatttttgtatgtgtgtgattttttatttaaaaaattattatttattttatagatatatagtaggtatagatatttgtggggtatatgagatattttgatacagacttacaatgtgtaatgatcacrttagggtaaatggggtatccagcacctcaagcaatcattatttctttgttctatgagcgttccaattttactccttcagttaatctaaaagatacaaccaattattgctgacttatagtcaccctgttatactatcaaatactagatcttattcattgtatctaattatatttttgtgcgtattaacctttctttttacttttgaatcagtaaagtcctttctctttatattgttattgccacttctgttttttaatggtagtctttgctgtctactgtaactgatttagcccaatttaagtgactttttagattagtgtactttgaaaaccaataaagttggt

SEQ ID NO: 602167 - DNA, 587 bp, Homo sapiens
gttattctgttcttatttatctctccatcttttggaactccagttacttgaaatttttatctgtttaggtcattgagtctatgggttgttgaatctctgctcattttttccccaccattttatatctttctttcagcatagtttctactcctgtcaagtttaatggycttttattctgcagtgtgtaatatattgttaaacaaacatagttgaggtattatatttttatctttagatgttctacttgtttcactttattagttgactttttgttatttctatactagattcttattttttagtttccatttttctcctatttttcttcagtccttagacaaattgataatgacaattttaaagtcttttacgttgatcatataatctctatgatttctttccttactggttttctttgagtcatttttatcctattggccacagtttcccacaaattttttccatatttaatcatgtttattgaattttggacattgtattattactttattttgtattcttccagatttttccctgtattccaattatttatgtaaataagatattgtagtagcaattactcattc

SEQ ID NO: 602168 - DNA, 587 bp, Homo sapiens
gttattctgttcttatttatctctccatcttttggaactccagttacttgaaatttttatctgtttaggtcattgagtctatgggttgttgaatctctgctcattttttccccaccattttatatctttctttcagcatagtttctactcctgtcaagtttaatggtcttttattctgcagtgtgtaatatattgttaaacaaacatagttgaggtattatatttttatctttagatgttctacttgtttcactttattagttgactttttgttatttctatactagattcttattttttagtttccatttttctcctatttttcttcagtccttagacaaattgataatgacaattttaaagtcttttaygttgatcatataatctctatgatttctttccttactggttttctttgagtcatttttatcctattggccacagtttcccacaaattttttccatatttaatcatgtttattgaattttggacattgtattattactttattttgtattcttccagatttttccctgtattccaattatttatgtaaataagatattgtagtagcaattactcattc

SEQ ID NO: 602169 - DNA, 562 bp, Homo sapiens
cttgtaacataaaataaatatgctatttttaaacgaaaaattccacatggcttataataatggaatgaacagtttccagtaccaaacccttactattaccctgattccctactcaaaaaaattttcatactatttcataaatttattctgttattgactttcaagtttctaagtaatatgttcatattkttgtgtattaccttttaaatttaacacatttttacttggcttagcgtttatgcttcaatgattgcccaactttacagatataaatccctctttttgttattcaaatactatgaacacttattaattttaatcttttaaacatttacagtctctccactatcatgtttaaaatttactttattgctctcctatggtgaatctactctaaactgaattctatatgttactcaggcttagtttattcatttattgatatattcattgataatataatcaaatttcattagtaccagcttcaaaatgactggagtatttgaaagctaataaataatataaggctgatgtaatttagtcctatacttttttagccaca

SEQ ID NO: 602170 - DNA, 562 bp, Homo sapiens
cttgtaacataaaataaatatgctatttttaaacgaaaaattccacatggcttataataatggaatgaacagtttccagtaccaaacccttactattaccctgattccctactcaaaaaaattttcatactatttcataaatttattctgttattgactttcaagtttctaagtaatatgttcatattgttgtgtattaccttttaaatttaacacatttttacttggcttagcgtttatgcttcaatgattgcccarctttacagatataaatccctctttttgttattcaaatactatgaacacttattaattttaatcttttaaacatttacagtctctccactatcatgtttaaaatttactttattgctctcctatggtgaatctactctaaactgaattctatatgttactcaggcttagtttattcatttattgatatattcattgataatataatcaaatttcattagtaccagcttcaaaatgactggagtatttgaaagctaataaataatataaggctgatgtaatttagtcctatacttttttagccaca

SEQ ID NO: 602171 - DNA, 562 bp, Homo sapiens
cttgtaacataaaataaatatgctatttttaaacgaaaaattccacatggcttataataatggaatgaacagtttccagtaccaaacccttactattaccctgattccctactcaaaaaaattttcatactatttcataaatttattctgttattgactttcaagtttctaagtaatatgttcatattgttgtgtattaccttttaaatttaacacatttttacttggcttagcgtttatgcttcaatgattgcccaactttacagatataaatccctctttttgttattcaaatactatgaayacttattaattttaatcttttaaacatttacagtctctccactatcatgtttaaaatttactttattgctctcctatggtgaatctactctaaactgaattctatatgttactcaggcttagtttattcatttattgatatattcattgataatataatcaaatttcattagtaccagcttcaaaatgactggagtatttgaaagctaataaataatataaggctgatgtaatttagtcctatacttttttagccaca

SEQ ID NO: 602172 - DNA, 604 bp, Homo sapiens
tggaggaattaatatcactgaaattgcccaaagaaacttaaasatttgatgttattcctatcgaactaccaaagtcattcttcacagcattagaaaaaagctattctaaaagaacaaaccaggaatcccaagaagacccacagaccctctgaaggaagtggagtgctcctgcaggaccctggagatatctcaaatactgtgctggtatccacagctgagagaccacagatggttaatatcacaggactctgtgcagacaaccccctggagccgggtaggcttgctgtgtagctagatccagaagagagataacaatcattgcatcttggctcacagaaagccacattcataggaaaagggggagagaactgcatcaagggaacaccctgtgggacaaaagaatcggaacaacagcctttagccctagacctttcctctgacagagcctacccaaatgaaaaggaactagataaccaactctggtaatatgataaaacaaggctctttaacacctcccaaaaagtctcactagttcaccagaaatagttccaacctaagaagaaatctctgatttacctgaaaaagaattcaggaggtaagttat

SEQ ID NO: 602173 - DNA, 553 bp, Homo sapiens
aaccaactctggtaatatgataaaacaaggctctttaacacctcccaaaaagtctcactagttcaccagaaatagttccaacctaagaagaaatctctgatttacctgaaaaagaattcaggaggtaagttattaagctaatcagggaggcaccagagaaaggtgaagcccagtgcaaggaaatccaaaaaacaatacaagaagtgaagggagaaatattcagggaaatagatagcataaaggaaaaacaaaccttcaggaaacactggacacacttacaaaaatgcaaaattctctggaaagtctcagcaatataattgaacaagtagaataaagaaattcagagcttgaagacaaggtttttgaactaaatctaaaaaagacaaagaaaaaaataagaaaacatgaaaagtctccaaaaagtctgggattatattaaatgamcaaacctaagaataattggtattcctaaggaagaagagaaatctaaaagtttggaaaacatatttgggggaataattaaggaaaacttccctggccttgttagagacct

SEQ ID NO: 602174 - DNA, 606 bp, Homo sapiens
gagagagatcaatgtgtgagatgcaagcagatgggacactgaagaatgaatgcccacaaagagaaaaggataaaggcaacaatcagggacaaaatggctggccagaaccccctactgctggtcaagggattcagaaatcagacatggatttaatcggactggcaggaatcaattattattatgaggactgagacagaccaggctccatttcattaggccccgaggagcctatggtctcaatggaggtaggaggctggaaaaaggactttatggtcsatactggtgtggagcactcggtagtaaatcaagcaatttggctattgtctaaaaattatgtcaatataattggagctacaggaataacagaaaagaggccttatttcaaatctaaaatatgtgtccaacatgaatttttatatttgccaaattgtctggtgcccttgttaggaagagatttgctccagaaattgcaagcacaaatctcctttacactagaaggggacatgactctaaacctaggtcaaagaaaagccatcataatgacgcttactgtcccaacaacagaggaatggagactctatgagagatgcaaaatttgtaaagatg

SEQ ID NO: 602175 - DNA, 627 bp, Homo sapiens
ctgtaatccttttttgctgttcccaacattaaatcaatcatagtaccaattagatgctccaactgtttggagagcacctgcagggttatattggatctgtggaacaaaggcttatcaattactacctgataaatggacaggggcatgtgtattaggaaaaataaggccatcctttttcctactcccactgcagcaaggggaagatctaagctatccgggctatgatgaaggtggaaaaagaatcagaagaaatgtgtttacaaaaataagtactgtggaaaaaataaatactaacattaaaaaggacattgaaatagggagctggaaagataatgaatggccccctgaaagaattatcaaatactatggactggccagctgggcacaagatgggtcatgaggatgctgtactcttatttatatgttaaaccacatcataaggttgcaagcagttctggagattatagtcagtgaaacagcccgagccttagacttgctagccatacaggcaacccagaggagagatgttatttatcagaacaggttagcactggattatcttttagcttcagaaggaagagtttgtggaaarcttaattcaatgaattgctgcttacaaattgatga

SEQ ID NO: 602176 - DNA, 550 bp, Homo sapiens
gttttcttcagacaggttttgcattatacttgtggaggttattcctaggactgttatgcttttattctatagtttaatgaattatcttttccataacatcctttatttcattactgataatatataaaataattcctttattggtatatctccattagtttaatttttaatttttaaaaaattttaacttctcttaactttccaatttgtatatctttttttagtttttagtttttaattgctgtggatacataataggtatatatatttatrgggtacatgtgatgtttttatacaagtatacaatgcgtaatgatgaaatcagagtaactagagtatcactttcagcacttatcatttttttgtgttcggaatattccaattctactcttttagttattttaaaatacacaataaattattgttaactatagtcatcctattgtacaccaaatactagatcatactcattttaactgcatttttgttcccattaagcattcctatttttcccggcccgccccgaccaacccttcccaattgggaaaac

SEQ ID NO: 602177 - DNA, 550 bp, Homo sapiens
gttttcttcagacaggttttgcattatacttgtggaggttattcctaggactgttatgcttttattctatagtttaatgaattatcttttccataacatcctttatttcattactgataatatataaaataattcctttattggtatatctccattagtttaatttttaatttttaaaaaattttaacttctcttaactttccaatttgtatatctttttttagtttttagtttttaattgctgtggatacataataggtatatatatttatggggtacatgtgatgtttttatacaagtatacaatgygtaatgatgaaatcagagtaactagagtatcactttcagcacttatcatttttttgtgttcggaatattccaattctactcttttagttattttaaaatacacaataaattattgttaactatagtcatcctattgtacaccaaatactagatcatactcattttaactgcatttttgttcccattaagcattcctatttttcccggcccgccccgaccaacccttcccaattgggaaaac

SEQ ID NO: 602178 - DNA, 550 bp, Homo sapiens
gttttcttcagacaggttttgcattatacttgtggaggttattcctaggactgttatgcttttattctatagtttaatgaattatcttttccataacatcctttatttcattactgataatatataaaataattcctttattggtatatctccattagtttaatttttaatttttaaaaaattttaacttctcttaactttccaatttgtatatctttttttagtttttagtttttaattgctgtggatacataataggtatatatatttatggggtacatgtgatgtttttatacaagtatacaatgcgtaatgatgaaatcagagtaactagagtatcactttcagcacttatcatttttttgtgttcggaatattccaattctactsttttagttattttaaaatacacaataaattattgttaactatagtcatcctattgtacaccaaatactagatcatactcattttaactgcatttttgttcccattaagcattcctatttttcccggcccgccccgaccaacccttcccaattgggaaaac

SEQ ID NO: 602179 - DNA, 557 bp, Homo sapiens
tcactgtttgctgacaatatgattgtttacctcgaaaaccctaaagactcctccagaaagctcctagaactgatgaagaattcagcaaagtttctggatacaagattagtttacacaaatcagtagctctgttgtacaccaacagcgaccaagcaaagaatcaaatcaagaagtctaccccttttacaacagctgcagaaagaaaaaaaaaacttaggaatatacctaaccaaggaggtgaaaaacctccwcaaggaaaactacaaaacactactgaaagaaatcgtagacaacacaaacaaatggaaatgcatcctaagctcatggatgggtagagtagaatcaatatttggaaaatgaccatactgctaaaggcaatctacaaattcaatgcaatccccatcaaaataccaccatcacttaacataatttgaaaaaacaattctaaaattcatatggaaccaaaaaagagcccacatagccaaagcaagactgaggaaaaataacaactctggaagcatcatgctacctgatttcaaactatactataaggccat

SEQ ID NO: 602180 - DNA, 399 bp, Homo sapiens
gatctttgaggtatgtttccaaaaatctgaagatgragggtgtagtatacatatgatgtattagatgaaataaatttggctgcatttttatatttgttgaagctggcagatggctatagtgggtttgtcatactactctatctacttatgcatatgtttgaagatacgcaaagaaaaaaaaactcttactataggcactccaacatgatttccactggtgtttactttgcttctttcttggcatcatgacatcccaagcagttctcaagctccagcacattggtttaaaatgccctagtttttcaaaatctccatttctccttatattttaaatgtgtttatttgtcttttccttatctacccctttcctaatacctggaaactcactcaactgtgtcg

SEQ ID NO: 602181 - DNA, 399 bp, Homo sapiens
gatctttgaggtatgtttccaaaaatctgaagatggagggtgtagtatacatatgatgtattagatgaaataaatttggctgcatttttatatttgttgaagctggcagatggctatagtgggtttgtcatactactctatctacttatgcatatgtttgaagatacgcaaagaaaaaaaaactcttactataggcactccaacatgatttccactggtgtttactttgcttctttcttggcatcatgacatcccaagcagttctcmagctccagcacattggtttaaaatgccctagtttttcaaaatctccatttctccttatattttaaatgtgtttatttgtcttttccttatctacccctttcctaatacctggaaactcactcaactgtgtcg

SEQ ID NO: 602182 - DNA, 576 bp, Homo sapiens
tttgcttttgatcttaaaattatataaaaatgacattaaaattagaacaaaatcttttcatcaacatcagcaaattattggaatatacgctcagttttggtataagaataactgcattgtagtattacaagaaaactttgaaaagcaatgtataatattactatcaactaaataataaaatgtgtaagcaatgtcattatcttgctatcygtattgtttaattacatataaattaatttatatgtaatacaaatgacatataatatgtattttagagatataagctctgagtaaactcttatttatttaagaggtgctaattgtatcaactcctatatgattttatcatgaacttattatttattgaaagtagcaccttatgaaaactaaaccataaattaagatgcaaaaaataaaataatacttgttttcagcctgaacaattaggaaaatgccagctaaaataaaaatttagtctgtgatattgttcaatactaggtaagagttaatgattctataaaataaatagaatcttctatttgatacaaagtgcatatttttatttaagttgaaaat

SEQ ID NO: 602183 - DNA, 576 bp, Homo sapiens
tttgcttttgatcttaaaattatataaaaatgacattaaaattagaacaaaatcttttcatcaacatcagcaaattattggaatatacgctcagttttggtataagaataactgcattgtagtattacaagaaaactttgaaaagcaatgtataatattactatcaactaaataataaaatgtgtaagcaatgtcattatcttgctatccgtattgtttaattacatataaattaatttatatgtaatacaaatgacatataatatgtattttagagatawaagctctgagtaaactcttatttatttaagaggtgctaattgtatcaactcctatatgattttatcatgaacttattatttattgaaagtagcaccttatgaaaactaaaccataaattaagatgcaaaaaataaaataatacttgttttcagcctgaacaattaggaaaatgccagctaaaataaaaatttagtctgtgatattgttcaatactaggtaagagttaatgattctataaaataaatagaatcttctatttgatacaaagtgcatatttttatttaagttgaaaat

SEQ ID NO: 602184 - DNA, 511 bp, Homo sapiens
cagttttccacacaataataaattgagtgaagattgagatactggtataacaatctactcgaattttaagttaactaagaagaagaatactgaacttagtattctgtgattcttttagtcttatttcagtctatgcaagttttatttttgtctatttaaatgtagcaaacatggaaagaattattctgacagaggtcggctaaaccaagtagtattcagagattctagaatttctgtctcccttgaattacatagttacattatgcctctatctatctatgcatccatctatctatctatcaatcatctatctacttgtatcatatttgtatttatatctatctayagatacaacatatagttgtaaatatgactatccgcctatagatagatagcttccatttatcatctatcacaatcatttaagaagagacccgagagcagaataatttctagtaaattgaaagtatttatatacaaagacaaaaaattaatatttgcttcagtggac

SEQ ID NO: 602185 - DNA, 568 bp, Homo sapiens
gttcaaagtccttgtcaatccttttaatattgaaggaaaagtagggtcccataacacatattttcagtcgtacattaaactgactggttataagtactgagaataaasaatcactttgactaactgcattatagtataccatgattaagatctttatattcattttctgcagctgagtaggaatagcacattttaaaacttacatagaagtgtttctgatctctagacactaataacttgctatctagcagttttaatctagaaaaagtaataagattaattactatagcttactataaatatacaccgtggaagacactcatgagtgactgcttccttctcatgtattcttttaagtaggagtttatcccctgtatccatcacagacatttcctttcagatagctcctaatcccccaattttacctgtatcagaaaggtttcaggagatatgaataatttatgtctttagaaacatagtgtaaatatttcatgaggtatttattaaataatgcaacccaataaaattatgtaaattttagtttgcatagtaaagtacgaaaagcaag

SEQ ID NO: 602186 - DNA, 222 bp, Homo sapiens
tgtcctagtacttgggcggctgaagtgggaggactgcttgagcccaggagattgaggctgcagtgagccatgatcgtgccactgcactccagtgtgggagacagagccaacaccctgtctcaaagagagaaaaaaagaagggctatttgatatatcccagcacctaatagagtgcctggcatagytgagcactcagtaaatgtgtcgaaggaaagaaagatg

SEQ ID NO: 602187 - DNA, 201 bp, Homo sapiens
actacatttcctaaaggggtcattgattttcctttcttctttgagatcattctttaaatgaaccgagtcaaatgaggaacccagtcccatgttgtattgtcawgaaggggaaacaaaatccaggagcccctcctgtatcaggagctgacggaaggccctggtgctggtcgaggtcttcagtttcccttgtttgggaagtgg

SEQ ID NO: 602188 - DNA, 598 bp, Homo sapiens
tgcagtggtgggatcttggctcactgcaacctccacctcccggattcaagtgattctcctgcctcagtctcctgagtagctgggactacaggcatgcgccaccatacctggataacttttttttttttgtatttttagtagagacggggtttcactgtgttggtcagtctggtctggaactctagacctcaagtgagccttctacctcggcctcccaaagtgctgggattacaggcgtgagccaccgtgcctggctattgccaaattttagattaagaaaatgaggagacgataaaactaatggtagagaatttttttttagaatttaraatttctttaatagaaattaaatagctttccagagtcatccagctattcagtggtagaactgggattagatttggtctttctgactccagagtcagacttttaactgctatgttatattagatttaaacttattttcttaattattaaataatgtaagtatgccccttttttctcatttctatggaaatgagaaaggtgctgcttttaacgtaaaaactataagctagacataagcaggccatttagagggatacatacacatatccac

SEQ ID NO: 602189 - DNA, 555 bp, Homo sapiens
cagcactttgggaggccaaggcagaaggatcaaccacttgagaccaggagtttcaggtcagcctgggcaatataagaagaccctgtctctatttaataaataaataaaaataaaaaagaataaggaagctttatgtatataccatcatggaaggaagtctaacataagtgaaaaaacaaattgttaaccttatgtgtaacatatttttaaaataatatgttttaatcatgcctgggcccatccacttctctttggaggtccctaaggaagcttaatacataaaaacagtggtaaaggcaggcaaaatatcactttaatactcactggggtcctggcctccagtgggcaggacaaaggcccctctgacagtgcacacagaaaggatccagcggttcctggggctccctctaccttcayatcctgtcactctgcctgggcccagatcctccaccttgccgtgcatgcacacaggggccactgattgactcagaagacccccaccctctggtggctctggaatctcttccttcagggtgtgaaggccagggagagagg

SEQ ID NO: 602190 - DNA, 618 bp, Homo sapiens
cgcaatcttgcccccgcagcctgcgcaccgcttccaggagagggagccggccgtcaccgggggcggctgcgagctgctgcccggattcaccatggtctgcagagggcgggaaggggacagggagagaaagacaaaacaggggcgatgcaaaagttagtaatcgccggagagagagcaagcccattcccctcctccccgcggagctgctggaaggaaacagcagggcaagggcgggaaggaggctgagggggagagggaagaagggaggctcgccggcagcagccgcctgtttacttttctcaagctttgttctggggccacgagctcctctcaactttcctgcgcttgccgccgctgacaatttcagctccggtactgtcaaaactccgagagcaggctccgctgcgcgctccacccctcgcggcacctcctcccagcccccgcctccgcccactgccccctcctcccctcctccgccgcccgcctccagcaaatgagggtcaaacccacccaccgccgcgcccggcccctccccagcccccgccgggscccgggacagagccgagaggagtggggaggcggcggccccgccggagcctcgttccctcccgggttctg

SEQ ID NO: 602191 - DNA, 359 bp, Homo sapiens
tcaaggctgcagcaagctgcgattgtgtcactgcattccagcctgggtgacagagtaagaccctgtctcaaaaaaataaattaataaattaataataataataaaaaaagaaatcctatctataggaacgatggggatgccaatgatcaatatctagtgctacgttattttcagcaacaagaaagyggatcaaattacagcttgattaatatttcattacatctatatttctgttcagaacccagcatgcaattcttgtcgactctgtgaggacagttccaaaatgacttagggaaaaataaatggagggccgagcatggtggctcatgcctgtaatcccagcactttgggaggccgag

SEQ ID NO: 602192 - DNA, 522 bp, Homo sapiens
ccttttttaagtttatctgtgtctatggtcatgtgtgttagctctggaatcagaaccccctgcacctgattcagtctctaccacttattatctgtgagacctcagacaatttgcttaattttactgccttagttttcccatctgtaaaataggcataataataacacctagctatgaggctgttgtgagaattaaatgcaatatggcaagtaaggtcttttgtgtagtgctttttatatagtaaatgctaaataaatgtgagtgacttttwaaaaatcctcacaacctacacagcgctgtgctattatctacattttacagatgaataaactgaggcccacacggatgaaagtttcaaccaaggacactcagggagtggatgacattgataagctttgaacccaggtctgcggaatgcgaatctgcccctatgctgccagccctgctgtctcccaagcttggccaacagcctctcacgtggaatcatgagctcctccacgatctcattggtaacatgatctc

SEQ ID NO: 602193 - DNA, 522 bp, Homo sapiens
ccttttttaagtttatctgtgtctatggtcatgtgtgttagctctggaatcagaaccccctgcacctgattcagtctctaccacttattatctgtgagacctcagacaatttgcttaattttactgccttagttttcccatctgtaaaataggcataataataacacctagctatgaggctgttgtgagaattaaatgcaatatggcaagtaaggtcttttgtgtagtgctttttatatagtaaatgctaaataaatgtgagtgactttttaaaaatcctcacaacctacacagcgctgtgctattatctacattttacagatgaataaactgaggcccacacggatgaaagtttcaaccaaggacactcagggagtggatgacattgataagctttgaacccaggtctgcggaatgcgaatctgcccctatgctgccagccctgctgyctcccaagcttggccaacagcctctcacgtggaatcatgagctcctccacgatctcattggtaacatgatctc

SEQ ID NO: 602194 - DNA, 605 bp, Homo sapiens
agtggtgtagtcccagctatttgggaggctgaggtgggaggatcacttgagtctgggaggtcaaggctgcagtgaaccatgatcacaccactgcactccagcttggacaacagagtggactctgtctcaacaaaattttttaaataaaaacaaaaattagctggttggggtggcgcacatctgtggtcccagctacttgggaggttgaggtgggaggatcaattgagcccaggagttagaggctgcagtgagccataatcatgccactgtactccaacttgggcaacagagcaaaccctgtctcaaaaaaattaaataaatagaaagtgaggccgggcttggtggctcatgcctataatcccagcactttgggaggccgaggcgggtggatcacccgaggtcatgagttcaagaccagcctggccaacatagtgaaatcccgtctctactaaaayaatagctattattaataaataataataatacgaaaatgagtctggcatggtggcacatgcctgtaatcccagctactctggaggctgaggcaggagaatcgctggaacccaggaggtgggggttgcagtgagccaagatcacgccactgc

SEQ ID NO: 602195 - DNA, 576 bp, Homo sapiens
ggtgccatttaccttcaccagttcagaacaacacaattatcaaaaactcaccatataacaggggttattcattatatcctcaaagagtgcactgccaagatactgtgcacagggagccacatgattccaagataaatgctaacagattttagtcacgtggtaagaaagggtggcccatgtaagaagaggttgcagggtgggccatgatcactcccaaccttttggtgaaaatacagaagtaaaattcacaggaccacagagaatttggagatcaggaaacttaccacacttcaccaccccaagataattataataccccttccatattcattcctattttaacagttataatcatagcgcatatataagattattcattttgcatttttgttattcaataatttttatttacttcttctttttttttttttgagacggagtttcactcttgttgtccaggttggagtgcaatgttgcaatctcagctcactacartctccacctcccatgttcaagtaattctcctgcctcagcctcctaagtagctgggattactggtgcgcgccaccatgccca

SEQ ID NO: 602196 - DNA, 598 bp, Homo sapiens
gctcacgcctgtaatcccagcactttgggaggctgaggggggtggatcacctgaggtcaggagttcaagaccagccagatcaaaacagtgaaaccccgttatctactaaagatacaaaaaactggccaggcgtggtggctcatgcctgtaatcccagcactttgggaggctgagatgggcagatcacctgaggtcaggagttcgagaccagcctggccaacatggtgaaaccctgtctctactaaaagcacaaaaaaatcagccaggcgtggtggcaggcacctgtaatcccagctactcaggaggctgagccaagacaatcgcttgaacccatgaggtggaggatgcagcgagccaagatcgcgccatcacactccagcccgggcaacaagagcaaaactctgtctcaawaaaaaaaaaaaagtatataacattcccaaatgccacatactgaaaattatctaaaggcatatttacttttagatttcttaaaatgttgtatttgtgatatcagatacaggtatcacaaacatctaggcccatacaccctacgtcttacaaggtcagaaaacttagctaagaatagcaattagctgca

SEQ ID NO: 602197 - DNA, 568 bp, Homo sapiens
ggatgaaaaaatcccagagaaatagatagcatttataaaaagcaatcacaacttccagaaataaaagacacatttagaaaaatgcaaaatatactggaaagttacaaaaatagaatcaaacaaggagaagaaaaaacttcagagcttaaagacaaggctttcaaattaatccaatccaaaaaagacaaaaaaaaaaagaaaaaataatgaacaaagcctccgaaaagtttgggattatgataaatgaccaaacataagaataattggtgttcctggactgggcacagtggctcacacctataatcccagcactttgggaagccgaggtaggtggatcatttgaagtcaggagttcaagaccagcctggccaacatggtgaaagctcttctctactaaaaacacataattagccagatagtactggtgtgtgcctgtaatctcagctactcgggaggctgaagcaggagaattgcttgagcctgggcggcagaggttgtagagctgagattgcaccamtgcactccagtctaggcaatagagtgagaccctgtctcaaaaagaagaaag

SEQ ID NO: 602198 - DNA, 547 bp, Homo sapiens
gatagcatttataaaaagcaatcacaacttccagaaataaaagacacatttagaaaaatgcaaaatatactggaaagttacaaaaatagaatcaaacaaggagaagaaaaaacttcagagcttaaagacaaggctttcaaattaatccaatccaaaaaagacaaaaaaaaaaagaaaaaataatgaacaaagcctccgaaaagtttgggattatgataaatgaccaaacataagaataattggtgttcctggactgggcacagtggctcacacctataatcccagcactttgggaagccgaggtaggtggatcatttgaagtcaggagttcaagaccagcctggccaacatggtgaaagctcttctctactaaaaacacataattagccagatagtactggtgtgtgcctgtaatctcagctactcgggaggctgaagcaggagaattgcttgagcctgggcggcagaggttgtagagctgagattgcaccactgcactccagtctargcaatagagtgagaccctgtctcaaaaagaagaaagaaa

SEQ ID NO: 602199 - DNA, 582 bp, Homo sapiens
tatcggatctcatgcaaactcactcrctatcaagaggatagcatccaaccatgaggaatctggccccatgactcacacgctcctacttggccccacctccaacacttgggattacatcccaacatgatatttgggtggaacaaatatccagactatattggtggggtccagggctgtgtgcaagattagctgccttcttggcctcactgaaattgtgtgtctggaagagaagctttttctctggtgtttggtgggaataggatgggtgttgcaaaatgttttctgctatgttgggccatcctttttctggtcttctggttaaggcaaataggtttttcgtcaagatttttcttttagcctgtgcctgttgctggtaccagactggagactgctgtagtactcttttaagatatatgaaagctaattagaaaactcatggaaataagtgccatgtagttcctgaagtcccaaagtcccctttgtattctgccacattcttctttctacatttcaaaatcttcctatgcttgtatgttatgtacagatacgtttacctgattatcttctggccagaacctactt

SEQ ID NO: 602200 - DNA, 504 bp, Homo sapiens
ttattgtatttatacatcaaaaatgacaatttatttatttmtttttttcattgtttctggggagaagtctgtaataattctcacattttttactctgagtgtaatttgatctttctctttggtttgtagcagacagagagaaagagacgggaaatgagagaaaaagaaacagagagatggagttatgtatcttgcttgcatttgtggattgaatgtctgcctttatttctggaaaattcttgaccattgtctcttcaaatatttcatttgctttgttccttttttcttttcctggaattacaagtacacttataacatgtatgttagattttttgatctcgcttcagagctcttggatattcatttctcctccctttttacatgcctttttaaatatttacatgcaggttggataatttatattcatctctcttatgttccatgattatttctttggctatgtaatgtcaacttacaaacctctcataataattccttatctct

SEQ ID NO: 602201 - DNA, 502 bp, Homo sapiens
attgtatttatacatcaaaaatgacaatttatttatttatttttttcattgtttctggggagaagtctgtaataattctcacattttttactctgagtgtaatttgatytttctctttggtttgtagcagacagagagaaagagacgggaaatgagagaaaaagaaacagagagatggagttatgtatcttgcttgcatttgtggattgaatgtctgcctttatttctggaaaattcttgaccattgtctcttcaaatatttcatttgctttgttccttttttcttttcctggaattacaagtacacttataacatgtatgttagattttttgatctcgcttcagagctcttggatattcatttctcctccctttttacatgcctttttaaatatttacatgcaggttggataatttatattcatctctcttatgttccatgattatttctttggctatgtaatgtcaacttacaaacctctcataataattccttatctct

SEQ ID NO: 602202 - DNA, 502 bp, Homo sapiens
attgtatttatacatcaaaaatgacaatttatttatttatttttttcattgtttctggggagaagtctgtaataattctcacattttttactctgagtgtaatttgatctttctctttggtttgtagcagacagagagaaagagacgggaaatgagagaaaaagaaacagagagatggagttatgtatcttgcttgcatttgtggattgaatgtctgcctttatttctggaaaattcttgaccattgtctcttcaaatatttcatttgctttgttccttttttcttttcctggaattacaagtacacttataacatgtatgttagattttttgatctcgcttcagagctcttggatattcatttctcctccctttttacatgcctttttaaatatttacatgcaggttggataatttatattcatctctcttatgttccatgattatttctttggctatgtaatgtcaacttayaaacctctcataataattccttatctct

SEQ ID NO: 602203 - DNA, 575 bp, Homo sapiens
acagcaatacaaaaaaaaatagataaaattagactatatcaaaataaaaaaaacctgtgcaccaaaggacacaatcaacaatgttaaaaggcaactcagagtgggagaatttttttttttttttgagacagagtcttacttgtcgcccaggctggagtacagcggcacgatcttggctcactgcaagctccacctcsccgtttcacgccattctcctgcctcagcctcctgaatagctgggactacaggcgtccgccacaaggcccggctaattttttttgtatttttttagtagagacgggatttcaccatgttagccaggatgtgctggatctcctgacctcgtgatccacccgccttggcctcacaaagtgctgggattacaggcatgagccactgcgcctggccaggagaaaatatttttaagacatacatccgataaggagttactagtctgaatatataagtaactacaacttaacgacaaaagcagatttaaaaataggaaaaggacttgaataggtatttccctaaagaagatatacaaatgttcaataagcacatgaaaagatgct

SEQ ID NO: 602204 - DNA, 569 bp, Homo sapiens
cttagtagcatagcatatatcrctgctgcttgtattggggataaatacaattgatgctatcaaacttgctgaaaattgtgcatctagaaagttattagaaatattaccaacacaatgatttttttttgtaaaaataaagcttttttcttcttcaggtttcttgaaatgtcaattttattaatctagttacaactccagtaagaaacactacactccgtgagtccatgactcaagaacaaactgagaactaaatgaataacagaagacattaagtcccattcattttgcatattacagaatggcaacttggctttactggtctttaggtggtaataacttcttttgtaatcaacaaaatagtgattcccagtgaaatgaatgcattaaagagcctgtgtcgaagctaagtatgaaactgatgtgtttactgctactgaaatacaaatatagaaatagtaagaacttttcatttattacttcctagatgggccaggtgatgcctaagactttatctgcataatttcattgactccacataagtctatgatgtagcttgtcctgaaatgata

SEQ ID NO: 602205 - DNA, 251 bp, Homo sapiens
ctgtaaacagatgtgctgtcatccaggctttgctgttccatttatagagcacaggtagagttgatttatcataattcttaagggccctcagattttcggaatgttaaatgagaattgccttcatctkgaagtcaccagttgcattagcccctaacaagagagtcagcctgatatggtttggctctgtgtccccacccaaatctcatatggaattgtagttcccatgtgtcaggggaggggcctagtgggag

SEQ ID NO: 602206 - DNA, 617 bp, Homo sapiens
tcccaccaggtccttcccattayacgtggtgattatgagagctacaattcaagatgagatttaggtggggacacagccaagccgtatcagcattaatatccaaaatatataagaaactccaagaattcagtgttttaaagacccgaataacccaatttaaaaatggacaaaggactagaatagacatttttaaaaataagacatacaaatggccatcagatatattaaaagttgctcaacatcattaaccatcaagaaaatgcaaatgaaaaccataatgagatataatcccttacctgttaggatggccattacaaaaaaaaaaattaccttttaagttttggggaggatgttgagaaattggaacactgtacactgttggtggaaatgtaagatgatgcagccactgtaaaaaaaacagtatgtagactcttcaaaaaagtaaaaaaataaaactattatccagctaaccctcacgtttcagacaggcgtgtgtatacatgcataccttggagatattgtaggttaggtgtgtagaccaccacacaaaagaaaatagcatgaaatagcaagtcacactaggttttttattgcccagtgcatatataagttatgtt

SEQ ID NO: 602207 - DNA, 587 bp, Homo sapiens
tatcatattctggagactgtgccatgtgcactcgagatcaatgtatattctgcttatatttaatggaaagttctgtaagtacattttgttaaaattgcagttaaattcctatattttatgaatgattattctgtttgatctgcacattgttgaaagtggggtattgaagttctctactgtcattgagttgttatttatttctcccttcatattcattataatttgctttatatattcagaagctgcaaagttgggtgcatacatatttacaatttttgtcttattagttaattgtgcatttatcattaaatacttaattttttctcttgtgacagctttttacttaaactctattatatctaagaatcggcacccctgttcattttggttattagtatggaatatcttcttccattgctttattttcagcctatgtgtgtcatgaagttaaagtggttatttgtagggagtatatagttgggtgttttttttwaaatttatttagccattctatgtcttgtaattgcataattcaatccatttacattcaaaggaattattgataggtaaggacttactactgccac

SEQ ID NO: 602208 - DNA, 639 bp, Homo sapiens
tgccgatgctcccagctgaataaagcccttccttctataactcggtgtctgagaggttttgtctgcggctcgtcctgctacacaataatgtgtaacaaactgycacaaaagctgaagggacatataacaataaacatttatttctcaatgtcagtggggtccagctggtctaaggtgagctttgctggaattgggcatgtgtttgcagctcagctggctcactcctatgtctttgcatgagctctcctctacatgtctcctggtcctctttctgccatcaacaggctagcctgggcatgtccttatggtgatggcagagggcaagagtacctaaggcccaatctttccagtgtctttcaatcctctgcttatatcaggcttaccaatgtctgttggctcaaagcaagctacatggacaaaccagagccagaatgggagaacgttcaaagctacatggtaaagggccaggatatggggctgggaaattacctgggcattattgcaatccacctcaaaatgtcatcaaggctctccacctgctgctggaaccagttcgtgtgaggagaggaagatggtagcatctttccaaacaataaagaccaagaaccttggcagtcttcatcctactctagcatttga

SEQ ID NO: 602209 - DNA, 484 bp, Homo sapiens
caagtttaccacgctcccctgttcctactcaataaatacttcttctactccgccaccgggaaaacagaaaaaaaaactaatttccttcccaatattaggacttagaaaagctctaggtcccgcaatttgaattttagcctaggggaatcaaaatagtaggagcattactcttgtttcctttttcaaaatcccacacctcatccttcctgcgacgccatgtcyaccaacatttgtagtttcaaggacaggtgcgtgtccatcctgtgttgcaaattctgtaaacaagtgctcagctctaggggaatgaaggctgttttgctggctgatactgaaatagaccttttctctacagacatccctcctaccaagtaagtcatgctagtggcgggcaacggtagcttttaactaaatgggaacacttatggcttggatctgtgggagtcaacaaggaggttatcatttcggtgtttcagccactcccacc

SEQ ID NO: 602210 - DNA, 568 bp, Homo sapiens
agtgacaataacatatctgatggttatatgaagatccttcyaatctcatcaccaggaaaatatgtttctgccatcaaaagcttcctgacagttccgttatgtgatgtactctgaattctttgtggttatccctcaactccactgcaccagggagctaagagaagatttttgttttagtatatctggtagtgaaaggcactcagggatcaaaggatgaaagtgataagatgcttccttggacacagtcttagatgcagtcacttcctcagagaatatggagaatccaaaagcaaaagaacttgaatgaatctttgcaaccaagacaccccagtaacatctttcagaggtgagagaagcagaatcaaatttttaaaaatgtctgaataatttaaaaatgattaccttgtgctgttatacctactacagtttttctgtgaaagtgaaaaataagtgaaatgagaatggttcaatcaaatgtcagccatttatcaaaagaacctcagggaaaccataagctcctttttctaggctgttatctagaaagggagagacaccaggagagctgcac

SEQ ID NO: 602211 - DNA, 568 bp, Homo sapiens
agtgacaataacatatctgatggttatatgaagatccttctaatctcatcaccaggaaaatatgtttctgccatcaaaagcttcctgacagttccgttatgtgatgtactctgaattctttgtggttatccctcaactccactgcaccagggagctaagagaagatttttgttttagtatatctggtagtgaaaggcactcagggatcaaaggatgaaagtgataagatgcttccttggacacagtcttagatgcagtcacttcctcagagaatatggagaatccaaaagcaaaagaacttgaatgaatctttgcaaccaagacaccccagtaacatctttcagaggtgagagaarcagaatcaaatttttaaaaatgtctgaataatttaaaaatgattaccttgtgctgttatacctactacagtttttctgtgaaagtgaaaaataagtgaaatgagaatggttcaatcaaatgtcagccatttatcaaaagaacctcagggaaaccataagctcctttttctaggctgttatctagaaagggagagacaccaggagagctgcac

SEQ ID NO: 602212 - DNA, 568 bp, Homo sapiens
agtgacaataacatatctgatggttatatgaagatccttctaatctcatcaccaggaaaatatgtttctgccatcaaaagcttcctgacagttccgttatgtgatgtactctgaattctttgtggttatccctcaactccactgcaccagggagctaagagaagatttttgttttagtatatctggtagtgaaaggcactcagggatcaaaggatgaaagtgataagatgcttccttggacacagtcttagatgcagtcacttcctcagagaatatggagaatccaaaagcaaaagaacttgaatgaatctttgcaaccaagacaccccagtaacatctttcagaggtgagagaagcagaatcaaatttttaaaaatgtctgaataatttaaaaatgattaccttgtgctgttatacctactacagtttttctgtgaaagtgaaaaataagtgaaatragaatggttcaatcaaatgtcagccatttatcaaaagaacctcagggaaaccataagctcctttttctaggctgttatctagaaagggagagacaccaggagagctgcac

SEQ ID NO: 602213 - DNA, 458 bp, Homo sapiens
gtagctctgacccttgccatcaactatgtggccctgggtaagtctctaacctctcctggcctcaagcctcttcagatataggatgaacatataattcctacatctaggagttgctgtgttgactaaatgaagtaatgcttgtgtatcagctttgcaaattacatamcccaaacaaatatatattaagattttatttgctgcaacagaagaaagtggaccatctcttggtgtttgttttgatgagacttgacctatataacacaggctcaagtatgtttgttaaagtgaatcacctgttgctttctgggccatacttgaaatgacgtgccgtgttacagtgaaccccttttgcaccgccccaagttcaggttgcccttacacaatttgggcgagatagatgaacacgcaccttcctccttcttagaaacaaaacagtgacttgggtagggtagacatta

SEQ ID NO: 602214 - DNA, 458 bp, Homo sapiens
gtagctctgacccttgccatcaactatgtggccctgggtaagtctctaacctctcctggcctcaagcctcttcagatataggatgaacatataattcctacatctaggagttgctgtgttgactaaatgaagtaatgcttgtgtatcagctttgcaaattacataccccaaacaaatatatattaagattttatttgctgcaacagaagaaagtggaccatctcttggtgtttgttttgatgagacttgacctatataacacwggctcaagtatgtttgttaaagtgaatcacctgttgctttctgggccatacttgaaatgacgtgccgtgttacagtgaaccccttttgcaccgccccaagttcaggttgcccttacacaatttgggcgagatagatgaacacgcaccttcctccttcttagaaacaaaacagtgacttgggtagggtagacatta

SEQ ID NO: 602215 - DNA, 650 bp, Homo sapiens
tcctgtgagctaagcaggtcagaaattatcattattattattttttgagacagagtctcactctgttgcccaggctggagtacagtggcatgatcttggcttactgcarcctccacctcctgggttcaagtgattctccttcctcagcctcccaagtagctgggattacaggtgtgtgccaccatgcccggctaatgtttgtatttttactagagatggggttttgccatgttagccaggctggtctcgaactgatctcaggtaatccaccagcctcggcctcccaaagtgctgggattacaggcataagccatctcacctggccagcaggtcagaaattagtaatcccatttaaaatatgagaaaactgaagcattaggtaggctaagtgacatggccaaagtcacacagttaatagggcaggatcagaatttagaatgcatgttttttcttttaaaaacaactttattcaggtataatttatgtgcaataaaattcactatttgaaacctatagttcaatgagttttgacaaatggtatatacttgtgtagccacaattataatcaataggttgaacatttctatcaccccaaaaagtcccttcacggtccttggctttaatcttcctctttccttccccaattcccc

SEQ ID NO: 602216 - DNA, 650 bp, Homo sapiens
tcctgtgagctaagcaggtcagaaattatcattattattattttttgagacagagtctcactctgttgcccaggctggagtacagtggcatgatcttggcttactgcagcctccacctcctgggttcaagtgattctccttcctcagcctcccaagtagctgggattacaggtgtgtgccaccatgcccggctaatgtttgtatttttactagagatggggttttgccatgttagccaggctggtctcgaactgatctcaggtaatccaccagcctcggcctcccaaagtgctgggattacaggcataagccatctcacctggccagcaggtcagaaattagtaatcccatttaaaatatgagaaaactgaagcattaggtaggctaagtgacatggccaargtcacacagttaatagggcaggatcagaatttagaatgcatgttttttcttttaaaaacaactttattcaggtataatttatgtgcaataaaattcactatttgaaacctatagttcaatgagttttgacaaatggtatatacttgtgtagccacaattataatcaataggttgaacatttctatcaccccaaaaagtcccttcacggtccttggctttaatcttcctctttccttccccaattcccc

SEQ ID NO: 602217 - DNA, 621 bp, Homo sapiens
tgctgggaattacaggcataagccattgctctcagccgaatgaaaagatttttgatgtactttttagccagagggagtttatgctgctgtgtggccagtttttccacatgtctgcaacagttacaatttttgacagatatcttgagaagattatagattttgatagaggcagtaactttattagcaagactgatttcatattagaatgaaatctctgggtctttttcggattacttyatgttccttaaaaagaaagacattgggccaggcacggtggctcacgcctgtaatcccagcactttgggaggccaaggcgggcggatcacgagatcaggagttcgagaccagcctgactaacatggtgaaacctcgtctctactaaaaatacaaaaaaattagctgggcatggtggtgggcgcctgtaatcccagctactcaggaggctgaggcaggagagctgcttgaacccgggaggcagaggttgcaatgagctgagatcgcaccattgcactctagcctgggcaacagagtgagacaacgtctcaaaaaaaaaaaaaaaaaaaaaaaagacattgactggtcttggcagtctttgggttttattctgaactgtgtagagtt

SEQ ID NO: 602218 - DNA, 563 bp, Homo sapiens
ctttgagccactcagagtagcgtgtagagtggtcattcaggactgtgctaacttacacttcattgtatcaaatgggagatccagtaatttatagtctattatttctggagtctggagatgactctgtataagctttgctgaagcagattttattacattagaagagaacctacctggctgcatccaacaccagaagcttttagatgctaagtaaggwggtcatagtaaaggtaacagaatgactctggaacccattaccccacccaagaaggggagtaatgaattccgggttgccctcttttcatttccctttgattttgagtaataaattccctccttacttcccagctgaacaaattgggagtctgtattccctagaaagactgttcacatacccatcagactaaattaggtgaaatctctttggccttaatgaatgttgaaggattttaaagggctaatggaaattcttctagaagtaacaattcccattctattggtgaggcagttctaaagaaagtccctgaacctcttaggttattttgtacagcaaaagaaccagc

SEQ ID NO: 602219 - DNA, 559 bp, Homo sapiens
tgtgttcgctccagtccttgtgtcaaagttcactttgagccactcagagtagcgtgtagagtggtcattcaggactgtgctaacttacacttcattgtatcaaatgggagatccagtaatttatagtctattatttctggagtctggagatgactctgtataagctttgctgaagcagattttattacattagaagagaacctacctggctgcatccaacaccagaagcttttagatgctaagtaaggtggtcatagtaaaggtaacagaatgactctggaacccattaccccacccaagaaggggagtaatgaattccgggttgccctcttttcatttccctttgattttgagtaataaattccctccttacttcccagctgaacaawttgggagtctgtattccctagaaagactgttcacatacccatcagactaaattaggtgaaatctctttggccttaatgaatgttgaaggattttaaagggctaatggaaattcttctagaagtaacaattcccattctattggtgaggcagttctaaagaaagtccctga

SEQ ID NO: 602220 - DNA, 561 bp, Homo sapiens
ctaagtaaggtggtcatagtaaaggtaacagaatgactctggaacccattaccccacccaagaaggggagtaatgaattccgggttgccctcttttcatttccctttgattttgagtaataaattccctccttacttcccagctgaacaaattgggagtctgtattccctagaaagactgttcacatacccatcagactaaattaggtgaaatctctttggccttaatgaatgttgaaggattttaaagggctaatggaaattcttctagaagtaacaattcccattctattggtgaggcagttctaaagaaagtccctgaacctcttaggttattttgtacagcaaaagaaccagcattgggttttctttgctaatagatgacagggagaatgtagacacttggaatccatggagaatccctaagttgcattttagccttcatgttatgtctccttycctaacctttttaccagagctgatcacaggaaacagcatgatagatttgcatgacctagctccctgccttctcctgccattcttttagaaagtggtgagtggc

SEQ ID NO: 602221 - DNA, 578 bp, Homo sapiens
gactgttcacatacccatcagactaaattaggtgaaatctctttggccttaatgaatgttgaaggattttaaagggctaatggaaattcttctagaagtaacaattcccattctattggtgaggcagttctaaagaaagtccctgaacctcttaggttattttgtacagcaaaagaaccagcattgggttttctttgctaatagatgacagggagaatgtagacacttggaatccatggagaatccctaagttgcattttagccttcatgttatgtctcctttcctaacctttttaccagagctgatcacaggaaacagcatgatagatttgcatgacctagctccctgccttctcctgccattcttttagaaagtggtgagtggctgcctgccaggtaaaatctgggtgacaaaatccaaagttagattcagagttataagcatagcccccacccaagttgcttccaaagaaaagaaaggaagagtgttgtgtaaaatcttgcttcyttgcctttaaattgggtacttattgagttaccacattagaatcgtgcattgtgctagttgttgtactcct

SEQ ID NO: 602222 - DNA, 436 bp, Homo sapiens
gtgacaactcacttaacaatagccattttttgttcatatgtcctaaaaatcatgaagctaggaactagtaatccatctttccactttccagctgagaagctgagaatcccaaaggtggaatgacatcttcaacattacatagctggtcctccattaccctacatttcttcctccctatgaatgatattttttaaatgctgtaatgataaaaatatgagctgtcattattattaatagtactcatttaaaacaacagactattactagcctattcattaggcraaaggaaaacaaacataaacatgaaaacatttcaattccacattacagcatgcttcatcacaatcctcaaagaaatccttagttgacaaaaggcctaatacataaagagcaatgtaagaggcaagaggccactccacatcctaaaagagcctga

SEQ ID NO: 602223 - DNA, 436 bp, Homo sapiens
acaatagccattttttgttcatatgtcctaaaaatcatgaagctaggaactagtaatccatctttccactttccagctgagaagctgagaatcccaaaggtggaatgacatcttcaacattacatagctggtcctccattaccctacatttcttcctccctatgaatgatattttttaaatgctgtaatgataaaaatatgagctgtcattattattaatagtactcatttaaaacaacagactattactagcctattcattaggcgaaaggaaaacaaacataaacatgaaaacatttcaattccacattacagcatgcttcatcacaatcctcaaagaaatccttagttgacaaaaggcctaatacataaagagcaatgtaagaggcaagaggccactccacatcctaaaagrgcctgaagtcacttcccgaac

SEQ ID NO: 602224 - DNA, 565 bp, Homo sapiens
tttgcttccacaagttttgagagtcatgaaggcaggaacacattttsagatgccagagctcaaatcccatgtcactgggacatcaacaatagtgctatggggaagactcagggtgccagctcttgagtcacaatcacagaattagaatgtggaagtagctacagaacccaaggaagccctgccttctgatagccacactcaatgcaaggctgcgtatttcaccctggaggtctctataacaggggaggccaccccctcaatagccagcttttttacccttttgcttatgttgtcaaccaatttctaaccacagcaaaataacctaagtatacctctccttgaaaacatcaaaatattttctcagcagcttttattttcttgaagacaatttcagtaaaaacaattcttgtggcttttcctaaatgaatttttttttaacttctagtgattcttactcttcgtttttaggaactctccaggttttcacttcctacattctttcaagagtatagtgactaaaactggagaataatcatttaagtctgactaataaatttagcctcat

SEQ ID NO: 602225 - DNA, 565 bp, Homo sapiens
tttgcttccacaagttttgagagtcatgaaggcaggaacacattttcagatgccagagctcaaatcccatgtcactgggacatcaacaatagtgctatggggaagactcagggtgccagctcttgagtcacaatcacagaattagaatgtggaagtagctacagaacccaaggaagccctgccttctgatagccacactcaatgcaaggctgcgtatttcaccctggaggtctctataacaggggaggccaccccctcaatagccagcttttttacccttttgcttatgttgtcaaccaatttctaaccacagcaaaataacctaagtatacctctccttgaaaacatcaaaayattttctcagcagcttttattttcttgaagacaatttcagtaaaaacaattcttgtggcttttcctaaatgaatttttttttaacttctagtgattcttactcttcgtttttaggaactctccaggttttcacttcctacattctttcaagagtatagtgactaaaactggagaataatcatttaagtctgactaataaatttagcctcat

SEQ ID NO: 602226 - DNA, 542 bp, Homo sapiens
gatgacatctgggatcatttaccagatgatccattgttacattttagtctcatagcatccaggctcattaaaacaaaatattttgcatgtcacggattgttttggctactctttagagacagatatgaatgttaaatctcagaatgctaagtatgaaagaaaccatacaggggtaatggaaaaattaggttagaattcaccttaggcaaaaactgtaaacaatccaaatattcatcaacagagcaataggtgaacaactgtggtatagtcattcattggactagtacgcacwacaaggttaaatatgttgaaagcaaaaacagtttgttgaatgaaagaagacagacatgaaagaatacatactgtatgatgtcacttatatgaagttcaggaataggcagaaactaacagaacagtaggaatgcccatggggaatggttattgaccaaaaggagtcatgagacaactgttttgttttagaaacagggtcttgttctgtcacccagaatggattgcagtgatacagtcatagctcactgtag

SEQ ID NO: 602227 - DNA, 580 bp, Homo sapiens
tttctcattttactgtcagcttccagaaaaataattttaaattttgtttccacttctgcaccagctcctcactctgcactgtctctgtctctgtctctctctccctctctttctctctcatcccaatggccttctaaatgtgaaattcagtggagacttcttcttagtccccattgtcatctgtcacatttgacttaaatgcactacrtctatttcggctaccacatttgttttcgcaccttcaaatgttattttcatttagatgcctcccaaatcattgtccccgatcttttacaaaagtgccacatctgtatttccaactgatcactgcacagcaccacacaattattctacttctataaactcatcataagacagcccatcttatgaatgaaacactgtttagggaaaatagggcatcagatttccagaactggctatttcactaacttactgagtgatcacaggcaagttacttactcccactggattttcttctacatgaaacaaagggattgggcattatcatgatgctctttatagctatacattctataatgcaatatttaaaaatgattaa

SEQ ID NO: 602228 - DNA, 580 bp, Homo sapiens
tttctcattttactgtcagcttccagaaaaataattttaaattttgtttccacttctgcaccagctcctcactctgcactgtctctgtctctgtctctctctccctctctttctctctcatcccaatggccttctaaatgtgaaattcagtggagacttcttcttagtccccattgtcatctgtcacatttgacttaaatgcactacgtctatttcggctaccacatttgttttcrcaccttcaaatgttattttcatttagatgcctcccaaatcattgtccccgatcttttacaaaagtgccacatctgtatttccaactgatcactgcacagcaccacacaattattctacttctataaactcatcataagacagcccatcttatgaatgaaacactgtttagggaaaatagggcatcagatttccagaactggctatttcactaacttactgagtgatcacaggcaagttacttactcccactggattttcttctacatgaaacaaagggattgggcattatcatgatgctctttatagctatacattctataatgcaatatttaaaaatgattaa

SEQ ID NO: 602229 - DNA, 435 bp, Homo sapiens
cactagaacacctgcttgtctccctgcgtggagagattcatgagaggccagggaccccttattcacctgctaccccatggattttctatcatctgaacctgaccattcactgcccgtgctgagaccttcccaaggaagcctcccctgctctaggtgagggtgtgtgtgatgtcagtttctctgcattttccaaaacatctacctgagcatgtctttttttttttttttttttttttttaagaaaaatatccttcagtgccttcctggtaattccctagcaaagcttatagggtaggctytcctccccgctcccactcaccagccacccccatcccatgtcctctttccacacccctctcatggtggcccctctgctgggaaaaccatggtccacatgcctcaggtaataaattcctattgctattctcgccggct

SEQ ID NO: 602230 - DNA, 435 bp, Homo sapiens
cactagaacacctgcttgtctccctgcgtggagagattcatgagaggccagggaccccttattcacctgctaccccatggattttctatcatctgaacctgaccattcactgcccgtgctgagaccttcccaaggaagcctcccctgctctaggtgagggtgtgtgtgatgtcagtttctctgcattttccaaaacatctacctgagcatgtctttttttttttttttttttttttttaagaaaaatatccttcagtgccttcctggtaattccctagcaaagcttatagggtaggctctcctccccgctcccactcaccagccacccccatcccatgtcctytttccacacccctctcatggtggcccctctgctgggaaaaccatggtccacatgcctcaggtaataaattcctattgctattctcgccggct

SEQ ID NO: 602231 - DNA, 380 bp, Homo sapiens
ccccttattcacctgctaccccatggattttctatcatctgaacctgaccattcactgcccgtgctgagaccttcccaaggaagcctcccctgctctaggtgagggtgtgtgtgatgtcagtttctctgcattttccaaaacatctacctgagcatgtctttttttttttttttttttttttttaagaaaaatatccttcagtgccttcctggtaattccctagcaaagcttatagggtaggctctcctccccgctcccactcaccagccacccccatcccatgtcctctttccacacccctytcatggtggcccctctgctgggaaaaccatggtccacatgcctcaggtaataaattcctattgctattctcgccggc

SEQ ID NO: 602232 - DNA, 503 bp, Homo sapiens
gtcttgcactagctattgggtcatttgcaattccctgctttcattaccctataaagctttgataaaaatcctttgtagggaagaggaaggattccgggaatggtggtatgtggatattagtagacactctccccagtgaaacagtaatttaactggtaaaaaaataaaatcaaaagaaaccttttaaagtatctataatttctcctaaggcatacagcaaatggagaaacatttagtcacaaagatcattaaatcatgctaagaacagcaaaagcctgtagtatttgacycacaagctgctcccattatcccacaccactgtctctctccccagctctcatctagtttcaccctggcaggggaagatcatcagcatttctcattttccccaaagcttcatactaaaggagttctaatccaggcaagtacatctgagataattgggctcccatcctccatccatcctccactcacagcatggaagttctactcaaggcagagaa

SEQ ID NO: 602233 - DNA, 434 bp, Homo sapiens
aatatacaactaatatctaatagaggacaagtgtggaataataataagagtaaacttgattaattcacatgaaggcaagaaagaagacagtaggaaaaaagaataaatagaaaacaaatagtgaatggccaatataaacaaaattatatcacaaactatactaaatatcaatagattactccatttaaaaacagaggtatcrgactatataaaaatcaaagcaaaagtttaaaatacatgctgcttacagaagcatagcttaaaaagtggttcacaaagattgaaaatttaaaaaagagaaaatatataccatgcaaatattagccagaagaaagctggaccaattacacttcacaggaaaacagaaatagactttaattcaagaagtattactaaagacaaagagaaacatcttataaaggtaaaaagttcaa

SEQ ID NO: 602234 - DNA, 434 bp, Homo sapiens
aatatacaactaatatctaatagaggacaagtgtggaataataataagagtaaacttgattaattcacatgaaggcaagaaagaagacagtaggaaaaaagaataaatagaaaacaaatagtgaatggccaatataaacaaaattatatcacaaactatactaaatatcaatagattactccatttaaaaacagaggtatcggactatataaawatcaaagcaaaagtttaaaatacatgctgcttacagaagcatagcttaaaaagtggttcacaaagattgaaaatttaaaaaagagaaaatatataccatgcaaatattagccagaagaaagctggaccaattacacttcacaggaaaacagaaatagactttaattcaagaagtattactaaagacaaagagaaacatcttataaaggtaaaaagttcaa

SEQ ID NO: 602235 - DNA, 556 bp, Homo sapiens
gaattcaattcctggatatccttgttaactttttgtctcgttgatctgtctaatattgacagtggggtgttaaagtctcccattattattgtgtgggagtctacgtctctttgtaggtctctaaggacttgctttatgaatctgggtgctcctatattgggcgcctatatatttaggatagttagctcttcctgttgaattgttcccttttccattatgtactggccttctttgtctcttttgatctttgttggtttaaagtctgttttatcagagactaggattgcaacccctgcctttttttgttttccatttgcttggtagatcttcctccatccctttawtttaagcctatgtgtgtctctgcacgtgagatgggtttcctgaatacagcacactgatggatcttgcctctttatccaatttgccagtctgtgtcttttaattggagcatttagcccatttatatttaaggttaatattgttatgtaatttgatcctgtcatgatgatgttagctggttattttgcttgttagttgatgcagtttcttccta

SEQ ID NO: 602236 - DNA, 626 bp, Homo sapiens
ttagaacataataatggattagaccctcaccaaattactaaaagtttactttgtttctattttatgttcttcttctactttaaaacaatgctaatgtcctttctttttctcttgttttggtcaattttctgtaaaacaattattcaataataaagataatataaataacgaaagtaaatacatrtaccaaattcccttttacttataataaagaatatagagtttttttgttacattggaaagttgagtgaagaatattaaactttaatttctgccatcaatttctgtactactccatttcccactgaaagcatcgagtgttccgataatatatcaattcttaacatgataaatcatggcaataataaggaaatatgacttcctttatcttccacacaagatcaaatttttatttatgtttccctctgtcaattgggtacttcacaatatgttcatagttgtgcttatattcaatggaaataaaaaatcacaccttacattttaaattttgcagtcattttctacattttgtacagtgaaatttaactaagtcctctccacttttcatgtgcctaatctttaggatctatttacattttactgcaatgtgaaaatacaagaaaaat

SEQ ID NO: 602237 - DNA, 626 bp, Homo sapiens
ttagaacataataatggattagaccctcaccaaattactaaaagtttactttgtttctattttatgttcttcttctactttaaaacaatgctaatgtcctttctttttctcttgttttggtcaattttctgtaaaacaattattcaataataaagataatataaataacgaaagtaaatacatataccaaattcccttttacttataataaagaatatagagtttttttgttacattggaaagttgagtgaagaatattaaactttaatttctgccatcaatttctgtactactccatttcccactgaaagcatcgagtgttccgataatatatcaattcttaacatgataaatcatggcaataataaggaaatatgacttcctttatcttccacacaagakcaaatttttatttatgtttccctctgtcaattgggtacttcacaatatgttcatagttgtgcttatattcaatggaaataaaaaatcacaccttacattttaaattttgcagtcattttctacattttgtacagtgaaatttaactaagtcctctccacttttcatgtgcctaatctttaggatctatttacattttactgcaatgtgaaaatacaagaaaaat

SEQ ID NO: 602238 - DNA, 626 bp, Homo sapiens
ttagaacataataatggattagaccctcaccaaattactaaaagtttactttgtttctattttatgttcttcttctactttaaaacaatgctaatgtcctttctttttctcttgttttggtcaattttctgtaaaacaattattcaataataaagataatataaataacgaaagtaaatacatataccaaattcccttttacttataataaagaatatagagtttttttgttacattggaaagttgagtgaagaatattaaactttaatttctgccatcaatttctgtactactccatttcccactgaaagcatcgagtgttccgataatatatcaattcttaacatgataaatcatggcaataataaggaaatatgacttcctttatcttccacacaagatcaaatttttatttatgtttccctctgtcaattgggtacytcacaatatgttcatagttgtgcttatattcaatggaaataaaaaatcacaccttacattttaaattttgcagtcattttctacattttgtacagtgaaatttaactaagtcctctccacttttcatgtgcctaatctttaggatctatttacattttactgcaatgtgaaaatacaagaaaaat

SEQ ID NO: 602239 - DNA, 580 bp, Homo sapiens
tagttatttccaaagacagggaatctttttcggtttgggttatagatcacagtgaaagttgccacacatcagcctgaaagcagggatgagaagaaatggaaatagcakttcctggtgaatgaattggcaaggctatatgctgccttcctgagtcgggagaaagactggagaaaacttgtataaatgaatatggatgtaattaactgatctttcttcaagattgttcaagaaaggcattttgattgtattggtcccacatggcatctatacagagtttcctggactctttttcttttaatcctatcagcccatcttatcacatgtatctattttgatcaaaataacagtttaaatacttctttcctcagaagcacacatataatgtaattgagaatgctattatttttttcgggttgagcttattacaaagcatagccccagaataacacattggaccctttagcttcatgttattcctcagatatatttgtctaaaagtacttaacaaaaatgttaaatagtacaggcttgaggacagaattctgtgactgaactctagaattctcttcaatggttgaaa

SEQ ID NO: 602240 - DNA, 519 bp, Homo sapiens
aacaagaactgaactaaattatgttgccaccttggacaaaaattgggcaaaacactggagggtaagaagctccccaacaaagaaggccatttttgtactgggcttatgacagtcacacaacactactaattggggagaartcagtttttccaaggtgttgacaggtatctggatttcggaggaaattgtaaaaaagcaggacctgggacaaatactggtcttggtttttctttgagatcaaatctgagacaacgaatctgtccgaaagctgctttctgcctggtcgtggcagagggtggccaagggggcctcagctgtgctcccaccacaaggctacagggtgtccccttgtcctgaggctcttccagacatctggctgagctttggtagctctattccaagcctggagatgccagctccgtccttggcacagaatgctagtgatttgcacaagggtgagaggccaaaagaggctaataaaatgaagacaggcaagctccatggaattagacaacagga

SEQ ID NO: 602241 - DNA, 519 bp, Homo sapiens
aacaagaactgaactaaattatgttgccaccttggacaaaaattgggcaaaacactggagggtaagaagctccccaacaaagaaggccatttttgtactgggcttatgacagtcacacaacactactaattggggagaagtcagtttttccaaggtgttgacaggtatctggatttcggaggaaattgtaaaaaagcaggacctgggacaaatactggtcttggtttttctttgagatcaaatctgagacaacgaatctgtccgaaagctgctttctgcctggtcgtggcagagggtggccaagggggcctcagctgtgctcccaccacaaggctacagggtgtycccttgtcctgaggctcttccagacatctggctgagctttggtagctctattccaagcctggagatgccagctccgtccttggcacagaatgctagtgatttgcacaagggtgagaggccaaaagaggctaataaaatgaagacaggcaagctccatggaattagacaacagga

SEQ ID NO: 602242 - DNA, 519 bp, Homo sapiens
aacaagaactgaactaaattatgttgccaccttggacaaaaattgggcaaaacactggagggtaagaagctccccaacaaagaaggccatttttgtactgggcttatgacagtcacacaacactactaattggggagaagtcagtttttccaaggtgttgacaggtatctggatttcggaggaaattgtaaaaaagcaggacctgggacaaatactggtcttggtttttctttgagatcaaatctgagacaacgaatctgtccgaaagctgctttctgcctggtcgtggcagagggtggccaagggggcctcagctgtgctcccaccacaaggctacagggtgtccccttgtcctgaggctcttccagacatctggctgagctttggtagctctattccaagcctggagatgccagctccgtccttggcacagaatgctagtgatttkcacaagggtgagaggccaaaagaggctaataaaatgaagacaggcaagctccatggaattagacaacagga

SEQ ID NO: 602243 - DNA, 519 bp, Homo sapiens
aacaagaactgaactaaattatgttgccaccttggacaaaaattgggcaaaacactggagggtaagaagctccccaacaaagaaggccatttttgtactgggcttatgacagtcacacaacactactaattggggagaagtcagtttttccaaggtgttgacaggtatctggatttcggaggaaattgtaaaaaagcaggacctgggacaaatactggtcttggtttttctttgagatcaaatctgagacaacgaatctgtccgaaagctgctttctgcctggtcgtggcagagggtggccaagggggcctcagctgtgctcccaccacaaggctacagggtgtccccttgtcctgaggctcttccagacatctggctgagctttggtagctctattccaagcctggagatgccagctccgtccttggcacagaatgctagtgatttgcacaagggtragaggccaaaagaggctaataaaatgaagacaggcaagctccatggaattagacaacagga

SEQ ID NO: 602244 - DNA, 532 bp, Homo sapiens
caacatgtttatcagaacacgtggagctgaaatgtgtcttgtgcatagtggctctcaacacgtttatgtaatccaggaaatatcatgcagctgttagtcattcgattgcttattatgaaatagaacactttgtctagttgctctcacctgccattatcttagcagtttgtgtaagggaccacacttaagaaataaacactttccacatgagaaaggaggtgtaaaatcaggctccataatcaaacaccaaggttttattgcactcttgctgtatatttagtatggtgccagagataggactgggtaaaaaaatgtgtaaggcaccacactcaatagtgtcttamcccaggggaggagatagagctattttatatatttttttaaaacccagaaaaattatatgctatgttatgtgcttctgactccacgtgaaataagaattccaggaagaaaaaatcatcttctttatagctccctatttctttatacttaagctgtatttttcacactttggaaataaagtttggatagt

SEQ ID NO: 602245 - DNA, 471 bp, Homo sapiens
catataagatcctgcagacaaataacatctagtctgttgttctaaatgtctgagactagtgaacttttattcagttcaagtttctgttgaggcccaacaggcaaagctctgttctagtgactctgagggaaacttggtgatagtagccagtacctgctctgaggggcttcaagaggagtctactcctaatagaacctgtgctgtctataartgacagcatcaagagcagggagtaggggccatgcatggtggctcactcctgtaatcccagcactttgggaggctgaggcgggcagatcatgaggtcaggagtttgagaccagcctgggcaacatggagaaaccccatctccactaaaaatacaaaaagtagatgggcgtggtggcaggtgactgtaatcacccctgctcaggaggctgaggcaggagaatcctttgaacccaggaggctgaggttgcagtgagccaaggt

SEQ ID NO: 602246 - DNA, 471 bp, Homo sapiens
catataagatcctgcagacaaataacatctagtctgttgttctaaatgtctgagactagtgaacttttattcagttcaagtttctgttgaggcccaacaggcaaagctctgttctagtgactctgagggaaacttggtgatagtagccagtacctgctctgaggggcttcaagaggagtctactcctaatagaacctgtgctgtctataaatgacagcatcaagagcagggagtaggggccrtgcatggtggctcactcctgtaatcccagcactttgggaggctgaggcgggcagatcatgaggtcaggagtttgagaccagcctgggcaacatggagaaaccccatctccactaaaaatacaaaaagtagatgggcgtggtggcaggtgactgtaatcacccctgctcaggaggctgaggcaggagaatcctttgaacccaggaggctgaggttgcagtgagccaaggt

SEQ ID NO: 602247 - DNA, 471 bp, Homo sapiens
catataagatcctgcagacaaataacatctagtctgttgttctaaatgtctgagactagtgaacttttattcagttcaagtttctgttgaggcccaacaggcaaagctctgttctagtgactctgagggaaacttggtgatagtagccagtacctgctctgaggggcttcaagaggagtctactcctaatagaacctgtgctgtctataaatgacagcatcaagagcagggagtaggggccatgcatggtggctcactcctgtaatcccagcactttgggaggctgaggcgggcagatcatgaggtcaggagtttgrgaccagcctgggcaacatggagaaaccccatctccactaaaaatacaaaaagtagatgggcgtggtggcaggtgactgtaatcacccctgctcaggaggctgaggcaggagaatcctttgaacccaggaggctgaggttgcagtgagccaaggt

SEQ ID NO: 602248 - DNA, 558 bp, Homo sapiens
tcagtgtgtcacctgaccaattcactcagctcgctctgtttgtgtgtgtgtgtgtgtgtgtgtctgtstctgtgtgtgtgtgtgtgtgtctttctctttcatccttttctacctggccctagtctatcccaacataaaggcaataatttgttacctcattaatggatctgtcctttttcttttcaaactcttccttatgttagccatgaaatctagctggggctgtgtggtttctgattccccctggcttattctttactttttcccacttttccaggctcagcagggagctgctggatgagaaagggcctgaagtcttgcaggactcactgtatagatgttattcaactccttcaggttgtcttgaactgactgactcatgccagccctacagaagtgccttttacgtattggagcaacagcgtgttggcttggctgttgacatggatggtgagtacctttctatgaaggtgataaggatccactgagtcttctggttagggtcatattcctactgcaagtggccgttactgagctgagagatgtcattgccacagg

SEQ ID NO: 602249 - DNA, 590 bp, Homo sapiens
tcccctggcttattctttactttttcctccttttccaggctcagcagggagctgctggaggtagtagagcctgaagtcttgcaggactcactggatagatgttattcaactccttccagttgtcttgaacagcctgactcctgccagccctatggaagttccttttatgcattggaggaaaaacatgttggcttttctcttgacgtgggaggtgagtacctttctatgaaggtgataagsatccactgagtcttccatataaagatcatattcctgctccaagtggccattactgagctgagagatgtcattgccacagggaggacctataggcacatgtaggttgaatgaaactctagttctacctggaagcccagacaagggatgggtcagtgagcaagactctcttcctagtctcaggccatacctgtggcgccctgatcctattctcatgacattggacctgggcagatgtgacaaattcagagaactatgattttgactcaagggtttgtagatttcctttttcactctaatttcagtgtctaaagtcctcacaaccatgaacaatctgagtatttgatgagaca

SEQ ID NO: 602250 - DNA, 590 bp, Homo sapiens
tcccctggcttattctttactttttcctccttttccaggctcagcagggagctgctggaggtagtagagcctgaagtcttgcaggactcactggatagatgttattcaactccttccagttgtcttgaacagcctgactcctgccagccctatggaagttccttttatgcattggaggaaaaacatgttggcttttctcttgacgtgggaggtgagtacctttctatgaaggtgataaggatccactgagtcttccatataaagatcatattcctgctccaagtggccattactgagctgagagatgtcrttgccacagggaggacctataggcacatgtaggttgaatgaaactctagttctacctggaagcccagacaagggatgggtcagtgagcaagactctcttcctagtctcaggccatacctgtggcgccctgatcctattctcatgacattggacctgggcagatgtgacaaattcagagaactatgattttgactcaagggtttgtagatttcctttttcactctaatttcagtgtctaaagtcctcacaaccatgaacaatctgagtatttgatgagaca

SEQ ID NO: 602251 - DNA, 590 bp, Homo sapiens
tcccctggcttattctttactttttcctccttttccaggctcagcagggagctgctggaggtagtagagcctgaagtcttgcaggactcactggatagatgttattcaactccttccagttgtcttgaacagcctgactcctgccagccctatggaagttccttttatgcattggaggaaaaacatgttggcttttctcttgacgtgggaggtgagtacctttctatgaaggtgataaggatccactgagtcttccatataaagatcatattcctgctccaagtggccattactgagctgagagatgtcattgccrcagggaggacctataggcacatgtaggttgaatgaaactctagttctacctggaagcccagacaagggatgggtcagtgagcaagactctcttcctagtctcaggccatacctgtggcgccctgatcctattctcatgacattggacctgggcagatgtgacaaattcagagaactatgattttgactcaagggtttgtagatttcctttttcactctaatttcagtgtctaaagtcctcacaaccatgaacaatctgagtatttgatgagaca

SEQ ID NO: 602252 - DNA, 590 bp, Homo sapiens
tcccctggcttattctttactttttcctccttttccaggctcagcagggagctgctggaggtagtagagcctgaagtcttgcaggactcactggatagatgttattcaactccttccagttgtcttgaacagcctgactcctgccagccctatggaagttccttttatgcattggaggaaaaacatgttggcttttctcttgacgtgggaggtgagtacctttctatgaaggtgataaggatccactgagtcttccatataaagatcatattcctgctccaagtggccattactgagctgagagatgtcattgccacagkgaggacctataggcacatgtaggttgaatgaaactctagttctacctggaagcccagacaagggatgggtcagtgagcaagactctcttcctagtctcaggccatacctgtggcgccctgatcctattctcatgacattggacctgggcagatgtgacaaattcagagaactatgattttgactcaagggtttgtagatttcctttttcactctaatttcagtgtctaaagtcctcacaaccatgaacaatctgagtatttgatgagaca

SEQ ID NO: 602253 - DNA, 612 bp, Homo sapiens
tttttcactctaatttcagtgtctaaagtcctcacaaccatgaacaatctgagtatttgatgagacagggctaaatattgcagtttttctcctagaaatcatttgagggtatttgctttaagttgattggaaaaatatggcrtaactgtttgcacaaacttgggacaaatgatattgggataacgatctactagaatagggacattttacccacagtttctgggagaaaaaccgaggaatttctatcatgaccagccttcaggcctcctgaaatatatctctcacagtgtcctattcttatgctgaggagcctgaggtccctgtgtgaggattagacagtggattgttatgtgtgtaggggaatcagcttaatgtgtctgtccatgtctgaatttattgcagaaattgaaaagaaggggaaggggaagaaaagaaggggaagaagatcaaagaaggaaagaagaaggggaagaaaagaaggggaagaagatcaaaacccaccatgccccaggtgactttcagcaattgtggatgcttaattctgtgttaacacctggaggcaacagattcagggaaaccagattgtgtttgatgtcatgttttcaacgaagg

SEQ ID NO: 602254 - DNA, 406 bp, Homo sapiens
ggtttgtagatttcctttttcactctaatttcagtgtctaaagtcctcacaaccatgaacaatctgagtatttgatgagacagggctaaatattgcagtttttctcctagaaatcatttgagggtatttgctttaagttgattggaaaaatatggcgtaactgtttgcacaaacttgggacaaatgatattgrgataacgatctactagaatagggacattttacccacagtttctgggagaaaaaccgaggaatttctatcatgaccagccttcaggcctcctgaaatatatctctcacagtgtcctattcttatgctgaggagcctgaggtccctgtgtgaggattagacagtggattgttatgtgtgtaggggaatcagcttaatgtgtctgtccatgtctga

SEQ ID NO: 602255 - DNA, 403 bp, Homo sapiens
tgcctcagcctcccgagtagctgggactataggcacgygccaccatgcccagctaatttttgtatttttagtagagatggggtttcaccatattggccaggctggtctcgaactcctgacctcgtgatccacccacctcgacctcccaaagtgctgagattacagatgtgaaccaccacaccgggtcaaaagcagtgcacattatctttagcaagctaacacagaaacagaaaaccaaacaccgtgtgttctcacttataactgggagctgaatgcgagaacacatggataaatggggttagggggcaaggacaacagacactggagcctgttggagggtgggggttgggaggagggagagcatcatgaatagtagctaatggatgctgggcttattacctgt

SEQ ID NO: 602256 - DNA, 268 bp, Homo sapiens
tgatgaatgtcaggatgctstaaacattctcccaggtagcctctattttccttgtgtctcatacctctgtctaggctatggaagatcaattctgaggacaggctgtatatacacatattgttattgttttagtcagaaactaggatggagctaggtgctgtgactcacacatataatcacagcactttggaaggcccaagtgggacgatgacttgagttcaggagttgaagaccagcctggacaatatggtgaaacccatctttacga

SEQ ID NO: 602257 - DNA, 268 bp, Homo sapiens
tgatgaatgtcaggatgctctaaacattctcccaggtagcctctattttccttgtgtctcatacctctgtctaggctatggaagatcaattctgaggacaggctgtatayacacatattgttattgttttagtcagaaactaggatggagctaggtgctgtgactcacacatataatcacagcactttggaaggcccaagtgggacgatgacttgagttcaggagttgaagaccagcctggacaatatggtgaaacccatctttacga

SEQ ID NO: 602258 - DNA, 268 bp, Homo sapiens
tgatgaatgtcaggatgctctaaacattctcccaggtagcctctattttccttgtgtctcatacctctgtctaggctatggaagatcaattctgaggacaggctgtatatacacatattgttattgttttagtcagaaactaggatggagctaggtgctgtgactcacacatataatcacagcactttggaaggcccaagtgggasgatgacttgagttcaggagttgaagaccagcctggacaatatggtgaaacccatctttacga

SEQ ID NO: 602259 - DNA, 440 bp, Homo sapiens
cttgctcactgacccatcccttgtctgggcttccaagtggaactagagtttcattcaacctacatgtgcctataggacctccctgtggcaatgacatctctcagctcagtaagggccacttgcagtaggaatatgaccctaaccagaagactcagtggatccttatcaccttcatagaaaggtactcaccatccatgtcaacagccaagccaayacgctgttgctccaatacgtaaaaggcacttctgtagggctggcatgagtcagtcagttcaagacaacctgaaggagttgaataacatctatccagtgagtcctgcaagacttcaggccctttctcatccagcagctccctgctgagcctggaaaagtgggaaaaagtaaagaataagccagggggaatcagaaaccacacagccccagctagatttcatggctaa

SEQ ID NO: 602260 - DNA, 591 bp, Homo sapiens
tacaatgctaggcgctggtagagggctaatggacatctgttgagttaaacagtatgttgaaagaacactggtttgggagtcagcagagctagattttaatactggtttatgggcagttgtcactttttctctctgaaattcagttttttcactgtccttggggcctctacagtctcctgcagctcttaggcaaagtatgaatgcaggtaaatcccacaccctcagaccctcctttgactcaaatcccccctctgacactgctggaccccttttggcagatgatttttttactactccccctacccaccccattagaattggcaggtgattcttatcccaggatcctggcttttgctcccaaggagccctgacacccaggtgccaccagatggtgctgtggactcattcttcacgggaagctggctcccgggctccccggctccctatctccccggctcctaggagaggccttctggctcctctggacagggtggrgttcctccgtggaaggctgctaggcctgggataatcctgggaggtgactcaagcctttcagaaatttccaaggcccaagcccgccctcggtttggc

SEQ ID NO: 602261 - DNA, 509 bp, Homo sapiens
agagtggaacttctggttttgtggtgaagtgcacagggttttataggctggcttgaggaggcagtgtctgattcacatagggcccaaagattggttggaccaggtgtgacatttacatagcgctggaagaagttggccacccaaccctaatcttcttcttatgcaaatgggttttctactttactcrtgccatgttgtctgctccttactgtacacgtggttagaaaggaaaagggaagatggagccaccatgttgaacatgcctatcccccaggtagccttgtcctattggcacagccgccagcagtcacctgtgcaagcttccagcttgcttatctatgtctgcagctccattttacaggctgctttttgttagaaaagaaattatttgggggctgcttttcattaaaagggaaccttaccaaggacttccttaccctaatgcctaaataatttctttttaactcctatatcaatttgtttgaagaacagatgacactttgaatggc

SEQ ID NO: 602262 - DNA, 509 bp, Homo sapiens
agagtggaacttctggttttgtggtgaagtgcacagggttttataggctggcttgaggaggcagtgtctgattcacatagggcccaaagattggttggaccaggtgtgacatttacatagcgctggaagaagttggccacccaaccctaatcttcttcttatgcaaatgggttttctactttactcaygccatgttgtctgctccttactgtacacgtggttagaaaggaaaagggaagatggagccaccatgttgaacatgcctatcccccaggtagccttgtcctattggcacagccgccagcagtcacctgtgcaagcttccagcttgcttatctatgtctgcagctccattttacaggctgctttttgttagaaaagaaattatttgggggctgcttttcattaaaagggaaccttaccaaggacttccttaccctaatgcctaaataatttctttttaactcctatatcaatttgtttgaagaacagatgacactttgaatggc

SEQ ID NO: 602263 - DNA, 509 bp, Homo sapiens
agagtggaacttctggttttgtggtgaagtgcacagggttttataggctggcttgaggaggcagtgtctgattcacatagggcccaaagattggttggaccaggtgtgacatttacatagcgctggaagaagttggccacccaaccctaatcttcttcttatgcaaatgggttttctactttactcatgccatgttgtctgctccttactgtacacgtggttagaaaggaaaagggaagatggagccaccatgttgaacatgcctaycccccaggtagccttgtcctattggcacagccgccagcagtcacctgtgcaagcttccagcttgcttatctatgtctgcagctccattttacaggctgctttttgttagaaaagaaattatttgggggctgcttttcattaaaagggaaccttaccaaggacttccttaccctaatgcctaaataatttctttttaactcctatatcaatttgtttgaagaacagatgacactttgaatggc

SEQ ID NO: 602264 - DNA, 403 bp, Homo sapiens
actgtttttgtttcaaccaacttctgagatctggaaagggaagataagaaagggctgtgtaygcagttgccagtaaagattgcttttctttccaccaaagctaaagatatttgaggaactggatataggcctgagatttagcagagctctgaggctggatgttgcaaggagaaaaaataggaagcccacagggccaagcttgggcctccttgtacctcctccactgtatacatacattttgggttcatatttttcaggctggccactactgcaggtctccagcagagtcttcacggaaggagaacctctggccttgaggtgtcatgcgtggaaggataagctggtgtacaatgtgctttactatcgaaatggcaaagcctttaagtttttccactggaattct

SEQ ID NO: 602265 - DNA, 403 bp, Homo sapiens
actgtttttgtttcaaccaacttctgagatctggaaagggaagataagaaagggctgtgtacgcagttgccagtaaagattgcttttctttccaccaaagctaaagatatttgaggaacyggatataggcctgagatttagcagagctctgaggctggatgttgcaaggagaaaaaataggaagcccacagggccaagcttgggcctccttgtacctcctccactgtatacatacattttgggttcatatttttcaggctggccactactgcaggtctccagcagagtcttcacggaaggagaacctctggccttgaggtgtcatgcgtggaaggataagctggtgtacaatgtgctttactatcgaaatggcaaagcctttaagtttttccactggaattct

SEQ ID NO: 602266 - DNA, 550 bp, Homo sapiens
tggctgggcacagtagctcacrcctataatcccagcactttggaaggcccaggtgaatggatcacttgaggccaggagtttgagaccagcctggccaacatggtgaaaccccatctctactacaaataaaaaaattagccgggcatggtgatgcacacctgtgatcccagctacgcaggagactgagacacaataatcgcttgaaccagggaggcagaggttgcaataagccgagatcacaccactgcactccaacctgggcgaggaaaaagaaaaagaatcagttccatcagagcatggattaagtctcattcaccactctagtgcctagaacattttatgtactcaacatataatagttaaatgaatgaatgaaagttagactgtaggggtgtccatgaaagtagatattagctaagttcccagagattgactcctcttttcctggttctcacacttcaagctctgttaagcctggaggagggtgttttgtctttaaaaagatacagctccaggttacccctttggaccagttcctgttcttaggtct

SEQ ID NO: 602267 - DNA, 550 bp, Homo sapiens
tggctgggcacagtagctcacacctataatcccagcactttggaaggcccaggtgaatggatcacttgaggccaggagtttgagaccagcctggccaacatggtgaaaccccatctctactacaaataaaaaaattagcygggcatggtgatgcacacctgtgatcccagctacgcaggagactgagacacaataatcgcttgaaccagggaggcagaggttgcaataagccgagatcacaccactgcactccaacctgggcgaggaaaaagaaaaagaatcagttccatcagagcatggattaagtctcattcaccactctagtgcctagaacattttatgtactcaacatataatagttaaatgaatgaatgaaagttagactgtaggggtgtccatgaaagtagatattagctaagttcccagagattgactcctcttttcctggttctcacacttcaagctctgttaagcctggaggagggtgttttgtctttaaaaagatacagctccaggttacccctttggaccagttcctgttcttaggtct

SEQ ID NO: 602268 - DNA, 550 bp, Homo sapiens
tggctgggcacagtagctcacacctataatcccagcactttggaaggcccaggtgaatggatcacttgaggccaggagtttgagaccagcctggccaacatggtgaaaccccatctctactacaaataaaaaaattagccgggcatggtgatgcacacctgtgatcccagctacgcaggagactgagacacaataawcgcttgaaccagggaggcagaggttgcaataagccgagatcacaccactgcactccaacctgggcgaggaaaaagaaaaagaatcagttccatcagagcatggattaagtctcattcaccactctagtgcctagaacattttatgtactcaacatataatagttaaatgaatgaatgaaagttagactgtaggggtgtccatgaaagtagatattagctaagttcccagagattgactcctcttttcctggttctcacacttcaagctctgttaagcctggaggagggtgttttgtctttaaaaagatacagctccaggttacccctttggaccagttcctgttcttaggtct

SEQ ID NO: 602269 - DNA, 550 bp, Homo sapiens
gtgtcccagtggggactctgtgtcggggctccaaccccacatatcccttctgcactgccctagcagaggttctccatgagggctctgcccttgcagcacacctctgcctgggcatccaggcatttccacacatcccctgaaatctaggttcccaaacctcagwtcttgtcctctgcacacctgcaggaccaacaccatgtgaaagctgccaaggcttggggctcgcacccactgaagtcatgactcaaggtgtaccttggccccttgtagccatggttggagtggctgggacacagtgcaccaagttcctaggctgtacacagcagggaggtctctgacatgccctgaagaccttttccccactgtcttggcgattaacatttggttcctcattacttatgcaaatttctgcagccagcttgaatttctccctagaaaacaggtttttcttttctaccacataggctgcaaattttccaaatttttatgctctgtcacctcttgaacgctttgctgcttagaaatttcgtctaccagatactctaaatca

SEQ ID NO: 602270 - DNA, 345 bp, Homo sapiens
gctcgcacccactgaagtcatgactcaaggtgtaccttggccccttgtagccatggttggagtggctgggacacagtgcaccaagttcctaggctgtacacagcagggaggtctctgacatgccctgaagaccttttccccactgtcttggcgattaacatttggttcctcattacttatgcaaatttctgcagccagcttgaatttctccctagaaaacaggtttttcttttctaccacataggctgcaaattttccaaatttttatgctctgtcacctcttgaacgctttgctgcttagaaatttcgtctaccagayactctaaatcatctctctcaagttca

SEQ ID NO: 602271 - DNA, 610 bp, Homo sapiens
gtgccccactacccagtaccaatttactrtattagtccattctcacactgctaataaagacatacctgagaccgggtaatttataaaggaaagaggtttaattgactcacagttctgcatggccagggataccccaggaaacttacaatcgcggtggaatgggaagcaaacgtgtccttcttcacatggcagcagcaagaagtacagagcgaagtgggggaaaagccccttataaaaccatcagatctcgtgagaatcattcactatcatgagaacagcatgaaggtaactggccccatgattcacctacctcccactgggtccctcccatgacatgtggggataatgggagctacagttgaagatgagatttgggtgaggacacagccaaaccaaatcaatgacatatttagatgaacccaaaatactgtttttcatacacatgccaagcaaagtgaatgagagggttgcatcttctatgactcttcaatctgctgtacatgttcaccatttcaatattctataaagcctttttgtgtttagcttttatttggtcaaagccttaaggtaaaggaaattattaatcacattaaatttgatattgaatgct

SEQ ID NO: 602272 - DNA, 610 bp, Homo sapiens
gtgccccactacccagtaccaatttactgtattagtccattctcacactgctaataaagacatacctgagaccgggtaatttataaaggaaagaggtttaattgactcacagttctgcatggccagggataccccaggaaacttacaatcgcrgtggaatgggaagcaaacgtgtccttcttcacatggcagcagcaagaagtacagagcgaagtgggggaaaagccccttataaaaccatcagatctcgtgagaatcattcactatcatgagaacagcatgaaggtaactggccccatgattcacctacctcccactgggtccctcccatgacatgtggggataatgggagctacagttgaagatgagatttgggtgaggacacagccaaaccaaatcaatgacatatttagatgaacccaaaatactgtttttcatacacatgccaagcaaagtgaatgagagggttgcatcttctatgactcttcaatctgctgtacatgttcaccatttcaatattctataaagcctttttgtgtttagcttttatttggtcaaagccttaaggtaaaggaaattattaatcacattaaatttgatattgaatgct

SEQ ID NO: 602273 - DNA, 610 bp, Homo sapiens
gtgccccactacccagtaccaatttactgtattagtccattctcacactgctaataaagacatacctgagaccgggtaatttataaaggaaagaggtttaattgactcacagttctgcatggccagggataccccaggaaacttacaatcgcggtggaatgggaagcaaacgtgtccttcttcacatggcagcagcaagaagtacagagcgaagtgggggaaaagccccttataaaaccatcagatctcgtgagaatcattcactatcatgagaacagcatgaaggtaactggccccatgattcacctacctcccactgggtccctcccatgacatgtggggataatgggagctacagttgaagatgagatttgggtgaggacacagccaaaccaaatcaatgacatatttagatgaacccaaaatactgtttttcatacacatgccaagcaaagtgaatgagagggttgcatcttctatgactcttcaatctgctgtacatgttcaccatttcaatattctataaagcctttttgtgtttagcttttatttggtcaaagccttaaggtaaargaaattattaatcacattaaatttgatattgaatgct

SEQ ID NO: 602274 - DNA, 553 bp, Homo sapiens
ttcagaatagcgcttcagtgtctgcacctgactcacactattaggcagttaaaagctggggaatgagctcatgtgaagagtttttccatttcagatsatagctatttttaggaacacaagctacataaatgttttaacccttttcccatccttttcctcttgctgctgtgatacaggaaggaaatcaaaatggagtgaccttgctatctggggaaagatgaaaactgcatatgcaaaagcaaacagactgagatttataacgagttgatcccttaaaagcttaggaaagaatctcaagggcacataggaaaataagcaaagggcttgatagacataatcatgacaacacaagaaggtgaagtcgggaagaggaaatggacaaggtcatcccaaattgaaataacttataaaagataaattataatatctccagaaattaactgtaaacattcctataaaatcatagatgataattttttaaaataaaagattgagtagtaagaataactaagaataaaaaattaatgagttcctagtggaaacttaaaattga

SEQ ID NO: 602275 - DNA, 553 bp, Homo sapiens
ttcagaatagcgcttcagtgtctgcacctgactcacactattaggcagttaaaagctggggaatgagctcatgtgaagagtttttccatttcagatcatagctatttttaggaacacaagctacataaatgttttaacccttttcccatccttttcctcttgctgctgtgatacaggaaggaaatcaaaatggagtgaccttgctatctggggaaagatgaaaactgcatrtgcaaaagcaaacagactgagatttataacgagttgatcccttaaaagcttaggaaagaatctcaagggcacataggaaaataagcaaagggcttgatagacataatcatgacaacacaagaaggtgaagtcgggaagaggaaatggacaaggtcatcccaaattgaaataacttataaaagataaattataatatctccagaaattaactgtaaacattcctataaaatcatagatgataattttttaaaataaaagattgagtagtaagaataactaagaataaaaaattaatgagttcctagtggaaacttaaaattga

SEQ ID NO: 602276 - DNA, 553 bp, Homo sapiens
ttcagaatagcgcttcagtgtctgcacctgactcacactattaggcagttaaaagctggggaatgagctcatgtgaagagtttttccatttcagatcatagctatttttaggaacacaagctacataaatgttttaacccttttcccatccttttcctcttgctgctgtgatacaggaaggaaatcaaaatggagtgaccttgctatctggggaaagatgaaaactgcatatgcaaaagcaaacagactgagatttataacgagttgatcccttaaaagcttaggaaagaatctcaagggcacataggaaaataagcaaagggcttgatagayataatcatgacaacacaagaaggtgaagtcgggaagaggaaatggacaaggtcatcccaaattgaaataacttataaaagataaattataatatctccagaaattaactgtaaacattcctataaaatcatagatgataattttttaaaataaaagattgagtagtaagaataactaagaataaaaaattaatgagttcctagtggaaacttaaaattga

SEQ ID NO: 602277 - DNA, 553 bp, Homo sapiens
ttcagaatagcgcttcagtgtctgcacctgactcacactattaggcagttaaaagctggggaatgagctcatgtgaagagtttttccatttcagatcatagctatttttaggaacacaagctacataaatgttttaacccttttcccatccttttcctcttgctgctgtgatacaggaaggaaatcaaaatggagtgaccttgctatctggggaaagatgaaaactgcatatgcaaaagcaaacagactgagatttataacgagttgatcccttaaaagcttaggaaagaatctcaagggcacataggaaaataagcaaagggcttgatagacatawtcatgacaacacaagaaggtgaagtcgggaagaggaaatggacaaggtcatcccaaattgaaataacttataaaagataaattataatatctccagaaattaactgtaaacattcctataaaatcatagatgataattttttaaaataaaagattgagtagtaagaataactaagaataaaaaattaatgagttcctagtggaaacttaaaattga

SEQ ID NO: 602278 - DNA, 605 bp, Homo sapiens
aaacattcctataaaatcatagatgataattttttaaaataaaagattgagtagtaagaataactaagaataaaaaattaatgagttcctagtggaaacttaaaattgaaccactgggggactttctataatgaatggcagttgaagaaaaaaatygggtaaactttatatgaatatttgagaaacacctcaagcattagcaactacataaaagttatacatttcacctgtccaagagctgttacaacagtatacaaaacatattaagcaaaattgtactatagacaattacttatatgcaattctttacttaaaatttagcagatacatttgaatagtttctaaaacacatgatcatcaaagaaggaattgagtaggaaataaagcattactgttttttactcataaagagatgaaaataaaataaattattggtcaattctttatgagatttaaattatcttagcatttatttgtttgtttttgagacagggtcttgctctgtcactcaggctacagtgcagtgacacaatcacagcgcactgcagccttaacctcccagactcaagcaatcctcctgcctcagcctcccaagtagctgggac

SEQ ID NO: 602279 - DNA, 630 bp, Homo sapiens
cagaagtaattgagtacatgggaaatgsgattgtgtttatgacaggtggagctccaagagttgaatttaacaagaaatgattgagtttgaaatcttttgccctctaaattagggacagcacaacacagaatgaggatttgggtgaagttgcaaccaccgagttccacataccagtttagaagcctcagagtataagtcattgggtatttaaggaccttacctaagctaactcagaagcattatgaaggacagtattgacattaactgccaggaatctcctaaaagagtcaagggattatacatgagtcatagaaggatacttgaagatggacaattatagtcccatcactttatggaagactatgagacccaaataagagaaatcccagtggtccacgaacttagctctggtaagtccccgataattatttaaattatttcaggttcaatatcactgattgctgtcaccattttcaaggctaatatctaatctgctttggttctgctaagatctccctgtttttttgtcgttgtttttttcctctagaaaaaacagaaaagagaactatctccagatgaatacagaagaggtggtaaaaagaatacacataacgtggctctcacatgatc

SEQ ID NO: 602280 - DNA, 630 bp, Homo sapiens
cagaagtaattgagtacatgggaaatgcgattgtgtttatgacaggtggagctccaagagttgaatttaacaagaaatgattgagtttgaaatcttttgccctctaaattagggacagcacaacacagaatgaggatttgggtgaagttgcaaccaccgagttccacataccagtttagaagcctcagagtataagtcattgggtatttaaggaccttacctaagctaactcagaagcattatgaaggrcagtattgacattaactgccaggaatctcctaaaagagtcaagggattatacatgagtcatagaaggatacttgaagatggacaattatagtcccatcactttatggaagactatgagacccaaataagagaaatcccagtggtccacgaacttagctctggtaagtccccgataattatttaaattatttcaggttcaatatcactgattgctgtcaccattttcaaggctaatatctaatctgctttggttctgctaagatctccctgtttttttgtcgttgtttttttcctctagaaaaaacagaaaagagaactatctccagatgaatacagaagaggtggtaaaaagaatacacataacgtggctctcacatgatc

SEQ ID NO: 602281 - DNA, 630 bp, Homo sapiens
cagaagtaattgagtacatgggaaatgcgattgtgtttatgacaggtggagctccaagagttgaatttaacaagaaatgattgagtttgaaatcttttgccctctaaattagggacagcacaacacagaatgaggatttgggtgaagttgcaaccaccgagttccacataccagtttagaagcctcagagtataagtcattgggtatttaaggaccttacctaagctaactcagaagcattatgaaggacagtattgacattaactgccaggaatctcctaaaagagtcaagggattatacatgagtcatagaaggatacttgaagatggacaattatagtcccatcactttatggaagactatgagacccaaataagagaaatcccagtggtccacgaacttagctctggtaagtccccgataattatttaaattatttcaggttcaatatcactgattgctgtcaccattttcaaggctaatatctaatctgctttggttctgctaagatctccctgtttttttgtygttgtttttttcctctagaaaaaacagaaaagagaactatctccagatgaatacagaagaggtggtaaaaagaatacacataacgtggctctcacatgatc

SEQ ID NO: 602282 - DNA, 658 bp, Homo sapiens
aagcatagtgaaacagaactgtgactgttcttcctggcatgaggaaataacatatgaattacaagcatgcttgagtaatgtagattgagttgatgggtagaaatgtggccccttacagcacagagatgacaaagtaaatacatttggccctcctggcagggtagaagtataatgtgttcccaaaatcacccggatatgccatcgtatagtgtattagtaaagagttcaggcttctgagacggaccacctggagtgtaacttggctctgctctttaggatgtttttaatctgtgttttctcatcttaaaactgggactatagtaatgcttacttacttcataatgtttttatgaaggataattgcttaatgtttcctactaataaacaattcaataaatactagttggtgatcgtagggaagtcctgttaagtgctctgcaagtttcccrtctctaatgcacaggtgaaaaatagctactgattcaagattgtgtcctgaagatatgttgctttcttctcatattccaccccaaattcctagaaatgataaaaaattgacaaagatggcagatggggtaacagtgaagagtgccaaggaggacttctgcagaagacaggagtggaccaaaaaatgatccacatgttttggaaccaggag

SEQ ID NO: 602283 - DNA, 586 bp, Homo sapiens
gagaaccccgctccgccgtcagtcttctgtgttgattgttgtagtgtgaaagcacaggaaacacatagtttgagtttctccctcctcatgrtgatcaagataagccagaaattcctccacaaagccatataaaaagatgcatgcagagatgaaagaaaagttaaatgatatgaaaaatagatccagatgttccaaactcatgtaacaggatgaggagttagagaggaggggagaattgagaacaagtaagaaataaaatacagatctaccaaataagatttgctgattgtgcactgcacaatttcaggggctgtcatttgaatagtaagatttgccaatgtgtagtgtacaacctactattgtgtagtatgcaaccatagtcatgagaaaataaaggaataaaaggaggatatttcacaggatctaaatgcatacatacatccttagattgcaaggtcctattaaattctgagcatacaggatgagaaggaccctcacctagattcacagtgacaaaatttgggaacaaggagaaatttctaaacatattcagggaaaatgcttatgaagaaatggaagtcaaatt

SEQ ID NO: 602284 - DNA, 580 bp, Homo sapiens
ccagcctgaccaacatggtgaaaacctgcctccactaaaaacacaaaattagctgggggtggtggtgcatgcctgtaatcccagctacttaggaggctgaggcaggagaattgcttgaacctgagaggcrgaggttgcaatgagctgagatcgcacccttgcactccagcctgggcaacaacagcaaaaactccacctcaaaaaaaaaaaaaaaaagaaaagaaaagaaaatgagctaaggagctaggcttccttatttcacaaccttggctctgtctcctatgaaaccagggcaactatttaacccctccatgtctgagtttcctcatgtataaatgaagggagcaatagtacctagcttataaggccattataaggattttaaaagttaatctaaagtgcttaggacagtgtatggcatagagcaagcactcagtaaatccattcattcaataaatgtttattgaatataggtgtggctgctgttttggctgatgagtatactaaagtcagtgaaacagacgaaatctgtggagctttcttccttgggggaggaggccaacaacaacaacgaatacac

SEQ ID NO: 602285 - DNA, 580 bp, Homo sapiens
ccagcctgaccaacatggtgaaaacctgcctccactaaaaacacaaaattagctgggggtggtggtgcatgcctgtaatcccagctacttaggaggctgaggcaggagaattgcttgaacctgagaggcggaggttgcaatgagctgagatcgcacccttgcactycagcctgggcaacaacagcaaaaactccacctcaaaaaaaaaaaaaaaaagaaaagaaaagaaaatgagctaaggagctaggcttccttatttcacaaccttggctctgtctcctatgaaaccagggcaactatttaacccctccatgtctgagtttcctcatgtataaatgaagggagcaatagtacctagcttataaggccattataaggattttaaaagttaatctaaagtgcttaggacagtgtatggcatagagcaagcactcagtaaatccattcattcaataaatgtttattgaatataggtgtggctgctgttttggctgatgagtatactaaagtcagtgaaacagacgaaatctgtggagctttcttccttgggggaggaggccaacaacaacaacgaatacac

SEQ ID NO: 602286 - DNA, 580 bp, Homo sapiens
ccagcctgaccaacatggtgaaaacctgcctccactaaaaacacaaaattagctgggggtggtggtgcatgcctgtaatcccagctacttaggaggctgaggcaggagaattgcttgaacctgagaggcggaggttgcaatgagctgagatcgcacccttgcactccagcctgggcaacaacagcaaaaactccacctcaaaaaaaaaaaaaaaaagaaaagaaaagaaaatgagctaaggagctaggcttccttatttcacaaccttggctctgtctcctatgaaaccagggcaactatttaacccctccatgtctgagtttcctcatgtataaatgaagggagcaatagtacctagcttataaggccattataaggattttaaaagttaatctaaagtgcttaggacagwgtatggcatagagcaagcactcagtaaatccattcattcaataaatgtttattgaatataggtgtggctgctgttttggctgatgagtatactaaagtcagtgaaacagacgaaatctgtggagctttcttccttgggggaggaggccaacaacaacaacgaatacac

SEQ ID NO: 602287 - DNA, 529 bp, Homo sapiens
gaaaatgggaacgaataaaattgcttgctgtccttctccctttattctccacttcttgttttttctaaatgtggggtcaaaacttccatgagggtaagaagttcagttttctgcctttccccttcatctccctatcacacatgtatactactccttaacacttaragaagataaaaaaagaataaattgtggagagggagcatatgtgaaagtaaaagattcccagacataatacgggagttaatggagaaagaaaatctctaaggaagactagaaataattgggttagggattctcgagaagtaaattaaattccccaaatatggtattctctgagaagataattttgaagaagcaatggcgtgatatccagtgaaacagcagtcctctggagcctggctgtgacttcaaggcccagttcttctggaagggcagaaaaatactttgaagaggagaaatgggcatttatataggtttataagtaccatctttattttagaaaataatcattttctacctggaattctag

SEQ ID NO: 602288 - DNA, 529 bp, Homo sapiens
gaaaatgggaacgaataaaattgcttgctgtccttctccctttattctccacttcttgttttttctaaatgtggggtcaaaacttccatgagggtaagaagttcagttttctgcctttccccttcatctccctatcacacatgtatactactccttaacacttagagaagataaaaaaagaataaattgtggagagggagcatatgtgaaagtaaaagattcccagacataataygggagttaatggagaaagaaaatctctaaggaagactagaaataattgggttagggattctcgagaagtaaattaaattccccaaatatggtattctctgagaagataattttgaagaagcaatggcgtgatatccagtgaaacagcagtcctctggagcctggctgtgacttcaaggcccagttcttctggaagggcagaaaaatactttgaagaggagaaatgggcatttatataggtttataagtaccatctttattttagaaaataatcattttctacctggaattctag

SEQ ID NO: 602289 - DNA, 591 bp, Homo sapiens
ctgatatgggtctcctgattatataatgttatttatatattaagaagagagaaaaggaatgcattagattttgatgacttacagctacacatctggcattaatggaaataaatgaaagatttcaatcaattcaaacaaggacactttgggatggaatcgggtatcgtcagtaaagaaacagacgataatccagaaactgacgataatccagaaactgactggtaagtctcatttatcagcaaatgtacacccttctgatcactgatctcttttccagagtctctctagcctggaaatccactaggtgtagcaaaggatcaagaattacctgcccaagagctctcacaagcaaatatcaaccagtactgcaactataccttttcctctataaaacctagacaaaggctgggggaaaattgagtttctgaagctgcttgagatcaaatgttccctgttcattaaaatggacagtrgctcaaggaataaagaaactcagatttgctgagctggacatgattactaaatacacaggaggcacacccatcttggactatttccccatggcttggctctcattacgtatttcctttc

SEQ ID NO: 602290 - DNA, 498 bp, Homo sapiens
acctgcctttccttttgctatttatttccacaagatagattaaactacatttttaacagtagaacatttacttatgtagaacaaaatgttcctaagctgtaaactactgtgtaatgacctgaacactctagaaagccagcttcattacatttgttttgggagtgcgcacataaaatgttgaaggaccactgtattaaaaggctattagcataatctctaggagacacaaccagaaaaccaagcatagaggctgagcagccagaaccaatactgctaccgctgtccctgccactcaacacaggccraatagtgggcagggatgctatgccaagcccctgccttgattctctctggaaactggatgtatctttgctgcctctctgctgtcacctgaatggattccctcaggaccccgtcttcatgacttcagtcttccacactgaaatcacatgcaggagcactgattggtggagtctgtgccacaatttttcctcactt

SEQ ID NO: 602291 - DNA, 528 bp, Homo sapiens
cagcatccaacatagtgaaccaaactcttcttgaaacactttcttcaacttgacttttacaaggccatctccttgtaatttttctccctcctgccaccaactcctactcagcatatttagctggcccctccttctctgttcaacttgtaaatattgatatgtgtattccaggattcagtccggaaactttccctattatccatgaatattcttataacttatttcgtctagtcatgtgcctttaaaacttattctrtgctactcatgacctctctaggactcaagcacaaggggtgtaattatcctaaaataagccaggagtttagtaagctggccaagaagagggattttccttttcccagcatgagagactgtgcctagtacagctccctgcaaaatgggtggctttctcccctaaaaaaagggaaaccctttgcatgagccccaaggactctagatgctaggcaggtgatttttccagacaatcttgtgaacatctggaacctaaatctagactgtttcacacca

SEQ ID NO: 602292 - DNA, 574 bp, Homo sapiens
gcgttggcccctcagcctggaataccccttgtcctcattgcctgcttaactcttgattttgtgaaatataaaaagtaccgagaaatatagcgatttatgttcctaataccacattcccaccacccaggactgacaactgtcagctgtatttgcgcctatttctcctcctccaaagaacaaacctttacagatagtgctcctgtctttttgtgttttttgttttgttttgctttgttttgttttgttttgttttgttttgagacagagtctcgctctgtccccaggctagagtgcaatggcgcaatctcggctcacwgcaacctctgcctcccgggttcaggcgattcccctgccccgtagtcctccccagtagctgggactacaagcgcatgccaccacacccagctaatttttgtatttttagtagagacggagtttcaccatgttgtccaggatggtttcaatctcttgacctcatgatccgcccgcctcagcctcccataaagctgggattacaggcatgagccatcgcccccggcctttttgtgttttttgtttgtttgagacagagcct

SEQ ID NO: 602293 - DNA, 546 bp, Homo sapiens
atattcataaatttttagtgtgtgcttgaaaaaatatgaatttctccatttggggatgtaggttctaggtatgttcatcacawcaggtatgttagttacattgtttaaacttctatatccttactgattttttgcctgcttgatttaaaaattatggagaaatatgtttaagtcttctattctgatggtggatctctctggttcttcttgtcattatttgcattctttgttttatgtattttgagactatgtgactgggtgaatattgattaaaagttatctgttcttggtgaacaaattccttttattattgtttagtgaccttttatctcttgtacatttttttgctctattaaagtttattttacctaatattattataggtgcatccactttcttttgtagtatttgcttcatctagctatttttatccatttacattcatcatcttgcatgttttagatggtatccatagaatatttagctatttttacttatcataattactgatatatttggatttatttcatgttatttttcctgcct

SEQ ID NO: 602294 - DNA, 546 bp, Homo sapiens
atattcataaatttttagtgtgtgcttgaaaaaatatgaatttctccatttggggatgtaggttctaggtatgttcatcacatcaggtatgttagttacattgtttaaacttctatatccttactgattttttgcctgcttgatttaaaaattatgragaaatatgtttaagtcttctattctgatggtggatctctctggttcttcttgtcattatttgcattctttgttttatgtattttgagactatgtgactgggtgaatattgattaaaagttatctgttcttggtgaacaaattccttttattattgtttagtgaccttttatctcttgtacatttttttgctctattaaagtttattttacctaatattattataggtgcatccactttcttttgtagtatttgcttcatctagctatttttatccatttacattcatcatcttgcatgttttagatggtatccatagaatatttagctatttttacttatcataattactgatatatttggatttatttcatgttatttttcctgcct

SEQ ID NO: 602295 - DNA, 514 bp, Homo sapiens
ggactccaagttcttcagctttgggactcagactggcttcattgctcctcagcttgcagacagcctattgtgggacatcatgatctcgtgagttaatactacttaataaactcccctttatatatatatrtgtgtgtgtgtgtgtgtgtgtgtgtgtgtgtgtgtgtgtatcttattggttctgtccctttagagaacctagactaatacagtgggtgagcagcatacttcatccaccacatcgttagagatcattgagttcttaatgtcaagactccttttaaaaatttcaatttttctgtgtagatgctaaattaaaaagtgtgaaactttattttttgtaaatctcaatcattacagtgatgaacaggtttggtgtggtttctttccttctctctttctttctttctttgtcctttctttccttctttctttttctttccttttctttcgtctttctgtctttctttcatccttctgtcttttttttgtctttctgtccttctttcgtttc

SEQ ID NO: 602296 - DNA, 174 bp, Homo sapiens
atcacaacttataattaaatgtagagaggaaataatatgaaatgaaaaaaatgtgcttacaaatatttctagtaaaagaaattaagcattttacctgtcaaatcaatrtagtagccacacaaaacataatattcgtgataaaaatatgcagcatgctttgagaacaatatttga

SEQ ID NO: 602297 - DNA, 448 bp, Homo sapiens
gctacagagaggagctaccttctatgctgatagctgcaggtgagggaacaaccagttgcagagatggagctaccctctctgcggagagagctgcagagatgacctgccagcagagagggagccgtcttttctagggcctcctttcaataaagctcatctttttcttgttcacccttcagttgtctgcatatctcattcttcctgtctgcatacctcattcttcctgaacgaaggatgagaacttgggcaaaggtgccayggccacagaggttttcagccagaaaatcaatgcccccaaaatcccataacaatagtatttttaaaagaatcagttataactaataataatacacattaggttttaaagttttgtgtccattaaattgtcaaagaagaaaaaaatagaaaaaatttgcttccaagtctttagattaacacaactatgcat

SEQ ID NO: 602298 - DNA, 595 bp, Homo sapiens
tctacattacctaggcatatatggcatctgtgctttttggttcagtatttctgacccatttgatgattgataattattgaaatgaaaacaaaatgttcttttgtagaactcactgactcttaagtcctagggttccagtggtgtgcagcattagagwtggaactctgcccctatttcctatctatccaatctactgtagggcaaaaggcctatacttgtgaagggctgcttgggacaaggctgctttctgtgaccttggaaagttaattagattgcccaaggattgaaatcataacctattcttcattaacttcatgctattcatgcaataatacatagaactaaattgctagtgcaagtataaaatagtagtggttaagacttctaggttgtatttaaatttcaataattgtcataactaagtttaatcataacatgaatgaagtaagaatatattgtggaagtaaaaaatgactttgaagatgcaaataatagcaataatgtgctataaaaattatatatttgactagtgatctcatacttaaaagtagaaggtaatgttttgtgctcttggagttatttaacccagggaatt

SEQ ID NO: 602299 - DNA, 595 bp, Homo sapiens
tctacattacctaggcatatatggcatctgtgctttttggttcagtatttctgacccatttgatgattgataattattgaaatgaaaacaaaatgttcttttgtagaactcactgactcttaagtcctagggttccagtggtgtgcagcattagagatggaactctgcccctatttcctatctatccaatctactgtagggcaaaaggcctatacttgtgaagggctgcttgggacaaggctgctttctgtgaccttggaaagttaattagattgcccaaggattgaaatcataacctattcttcattaacttcatgctattcatgcaataatacatagaaytaaattgctagtgcaagtataaaatagtagtggttaagacttctaggttgtatttaaatttcaataattgtcataactaagtttaatcataacatgaatgaagtaagaatatattgtggaagtaaaaaatgactttgaagatgcaaataatagcaataatgtgctataaaaattatatatttgactagtgatctcatacttaaaagtagaaggtaatgttttgtgctcttggagttatttaacccagggaatt

SEQ ID NO: 602300 - DNA, 550 bp, Homo sapiens
tcttaaagtttctgtcacgactaccgaattctgccattgtagtgcaaaagcagccacagacaaaacaaaaaccaataagtgtggctctgttccaacaaaactttgtggacactaaaatttgaatttcatataattttcatgtgttgcaaaatattgttcttctttctatttttttttcctcagccatttaaaatgttaaaactccttcttagcttgtggattgtccgaaagtagaggacgggtggaatttgacccctcagcyatagccaatcccaggtcgcagacgtgagctcagtgaggtcccaatccagatgcaacggtgacttttatccaatgaattcccagcgagcaaagcctccctagagtggaacttgacaaatagttgttgaaggactaaattacagaactgtggaggtgatggttagagacattaactcgtcagaaaaatattaagtttgcaaatgggttttatttgctctaaagtgtcattgctttttttctcccctggcgaatgttatgaaatgctaattagctcccatcacaaccacgg

SEQ ID NO: 602301 - DNA, 553 bp, Homo sapiens
tcttaaagtttctgtcacgactaccgaattctgccattgtagtgcaaaagcagccacagacaaaacaaaaaccaataagtgtggctctgttccaacaaaactttgtggacactaaaatttgaatttcatataattttcatgtgttgcaaaatattgttcttctttctatttttttttcctcagccatttaaaatgttaaaactccttcttagcttgtggattgtccgaaagtagaggacgggtggaatttgacccctcagccatagccaatcccaggtcgcagacgtgagctcagtgaggtcccaatccagatgcaacggtgacttttawccaatgaattcccagcgagcaaagcctccctagagtggaacttgacaaatagttgttgaaggactaaattacagaactgtggaggtgatggttagagacattaactcgtcagaaaaatattaagtttgcaaatgggttttatttgctctaaagtgtcattgctttttttctcccctggcgaatgttatgaaatgctaattagctcccatcacaaccacggttc

SEQ ID NO: 602302 - DNA, 312 bp, Homo sapiens
caatatctttaggtggccactatttagccyaatagagcatctgagctctcaggatttagtgtttaaacatccatgaatcagccctgaacaaaaccttcaggacccaatagtccagtctccccagcccagtggttagttcccagcctcctctttcttctccgttcagatgccagcacaagactgagcacaggagtcaatcctgactcagcctctcctcccctaggcaggagtaaaccaagggtatttcacccttttaaaaaaatggacccctttctccttcctaaaggcaacgcctgctgttcaccctgctta

SEQ ID NO: 602303 - DNA, 605 bp, Homo sapiens
agagtatataataaaatcataataaaaggtgttacctgcatccttcatttatgatacaaatgccataaatagcccgtgtgaagcaagacttcaaggcaggggaaagaaaatttcaacccaggtgggaataaaaggctcattcattgattgacatgattgtgggtggtgtaagtcatggcatccttggcaccaaaatcgtctacccaacccccaggaggctgaggcccattgacacatgtgtgactttttgcccgcccagacctaaggaagccaaaccagagcaaaggcttaagacagcccagatgagcagggccacttccacagaaaattctgcaattacaattataagtagaactactcatcatgaaaagtattccttttcccgatgagaaaatcaaagctcagaaaacataaagacattrgacccatctttcatttcctagcctagtattctctctactgtagcacatttttgaagtccttatattcccggtacctttggcattcctaaccccacccttaagttatcctgacacaattctattcttatggaaaactttttaccagtcatttacacattttttttttgagacagtctcactctg

SEQ ID NO: 602304 - DNA, 583 bp, Homo sapiens
aactacccattgtccagtgcttttgctgtcccaagcatcccctcagcactttccatatctgttcaaaccagcccaactttcaagcagcagctcccacatgtctttgcctgatggctttttccatcatcgtggagcccagtgagcttgcacagaagactggaagtgctgggagtcaacagactgagtgcctgtcagtcaactgtttggtgatcttgggggaatcagtaaacccataagactccactcattggtcaatgaataccccaactccctcacccctcgagtggggccattgtgaagtgtgttttataccagtccacgagytcccagtgggattgagttccagttgcctatagcagtcacctacttgaaaacacacactttattagcttccttgccttccccatctctcttccccacttccctactagtactcgctggaatcttctaccaaataagcagcttgctcagcgccatctctcagagtgtgcttccaggggaccccaaaccaagacatcacttcacgcttaaatacttattaagtgctattcaaatattattgttaatattcgatatttaatat

SEQ ID NO: 602305 - DNA, 563 bp, Homo sapiens
acacaacatacttctaaataacacatgggtcaaagaaaacatctcaagacaaacttttaaacactttgaactaaatgaaaatgaaaacacaacttaccaaaatttgtaggatgaggcaaaagtagtgcttaaagggaaactctgaaaaggtaaataaattcaataagcttctgcgctggccaactgtgaataaaagagaaagggtacaaattactaatatcagaaatgaaagagtggatatcactacagatatcatggacattaaaaggataataaaggaataccatgaataactctatgcccacaaattgataacctaaatgaaatggatcaattcctggaaaaacacaatctgccaaaattcacacaagaaggaacagacaatctgaaaargtctatatctattaaggaaattgaattgataattaataacctgtcaaaacagaaagcactagcccaggtaggttcaatgttgaattataccaaacattttaaaaagaaattatttcaattctctacaatatctttcagaaaatagaagtagagggaattattattaactc

SEQ ID NO: 602306 - DNA, 582 bp, Homo sapiens
gccagcaacaagtcagccttagcatccccagcacactcggtcatcagaggagagctgccacgggagctccgtaccagctggacacctgggggcagcagccccgcctggaggaggtcaggcacagagtcctatgcactgaggctggatggaagtgcagctgagggaacccagaggtccctggggccaaagccaggaccagcaggagaacacacacaataagagctagaagacctccttgctggtgggtttgtcctaaaagggagcaggcaggcgggaagagaaactcctgcaagaaaccagaacaccatctgtggggctcagggatcgggtgttgtcaggaaagaggctcttttctatttatttttaaaatcaaagttacacattcacatggagaaacaaatggtcaaataacacctaagaggctttatttcaggacacagctactctgtcccccttttctcattgtctgcccacaaaaccattttccattctatgacctgagtcacaaagaccttctgtgctgtctccctctgccagggtgctggccaccccctccrttacttgagcccttacagctatgca

SEQ ID NO: 602307 - DNA, 426 bp, Homo sapiens
tgctaaggaggctgggaagtctgggctggttgcagcaaagcagctgtggccagactgcttctctagattcctcctcactaggtagggcatctcaggggaaaggtaacakccccagtcaggggcttacagacaaaacctccatctccctaggacagagcacctgagggaacgggtggctgtgggtgcagcttcagcagatttaatcgttcctgcctgccagctctgaggagagcagctgatcctgatgagagggattctcccagcatagtgcaccagctctgctaggggacagactgcctcctcaagtgggtccctgatccccgtgcctactgactgagagagacctcccaacaggggttgacagacacctcatacagaagagctacagccggcatcaggctgtgggacaaagcttccagaggaagg

SEQ ID NO: 602308 - DNA, 426 bp, Homo sapiens
tgctaaggaggctgggaagtctgggctggttgcagcaaagcagctgtggccagactgcttctctagattcctcctcactaggtagggcatctcaggggaaaggtaacagccccagtcaggggcttacagacaaaacctccatctccctaggacagagcacctgagggaacgggtggctgtgggtgcagcttcagcrgatttaatcgttcctgcctgccagctctgaggagagcagctgatcctgatgagagggattctcccagcatagtgcaccagctctgctaggggacagactgcctcctcaagtgggtccctgatccccgtgcctactgactgagagagacctcccaacaggggttgacagacacctcatacagaagagctacagccggcatcaggctgtgggacaaagcttccagaggaagg

SEQ ID NO: 602309 - DNA, 426 bp, Homo sapiens
tgctaaggaggctgggaagtctgggctggttgcagcaaagcagctgtggccagactgcttctctagattcctcctcactaggtagggcatctcaggggaaaggtaacagccccagtcaggggcttacagacaaaacctccatctccctaggacagagcacctgagggaacgggtggctgtgggtgcagcttcagcagatttaatcgttcctgcctgccagctctgaggagagcagctgatcctgatgagagggattctcccagcatagtgcaccagctctgctaggggacagactgcctcctcaagtgggtccctgayccccgtgcctactgactgagagagacctcccaacaggggttgacagacacctcatacagaagagctacagccggcatcaggctgtgggacaaagcttccagaggaagg

SEQ ID NO: 602310 - DNA, 576 bp, Homo sapiens
gaattcctacccatctctctggtctcagctcctgatccacctcccctccaggatggcagctgctggtgtttgcttcctgcaaaacccttcttggccgggcgcagtgactcatkcctataatcccagcactttgggaggctgaggtgggcagatcacctgaggtcaggagttcgagactagcctgaccaacatggtgaaaccctgtctttactaaaaatacaaaaattaggctgggtgtggtggttcacacttgtaatcccagcactttgggaggccaaggtgggtggatcacctgacgtcaggagtttgagaccagcctgggcaaccatggccaacatggtgaaaccccgtctctaccaaaaatacaaaaattaggccaggcatattggctcatggctgtaatcccaacactttgggaggctgaggtgggagaatcacctgaggtcaggagttggtggcacgagtctgtaatctcagctactcgggaggctgaagcaggaggattgcttgaacccaggaggcagaggctgcagtgagcggagatcgcgccactgcactccagcctgggcaacagaa

SEQ ID NO: 602311 - DNA, 576 bp, Homo sapiens
gaattcctacccatctctctggtctcagctcctgatccacctcccctccaggatggcagctgctggtgtttgcttcctgcaaaacccttcttggccgggcgcagtgactcatgyctataatcccagcactttgggaggctgaggtgggcagatcacctgaggtcaggagttcgagactagcctgaccaacatggtgaaaccctgtctttactaaaaatacaaaaattaggctgggtgtggtggttcacacttgtaatcccagcactttgggaggccaaggtgggtggatcacctgacgtcaggagtttgagaccagcctgggcaaccatggccaacatggtgaaaccccgtctctaccaaaaatacaaaaattaggccaggcatattggctcatggctgtaatcccaacactttgggaggctgaggtgggagaatcacctgaggtcaggagttggtggcacgagtctgtaatctcagctactcgggaggctgaagcaggaggattgcttgaacccaggaggcagaggctgcagtgagcggagatcgcgccactgcactccagcctgggcaacagaa

SEQ ID NO: 602312 - DNA, 576 bp, Homo sapiens
gaattcctacccatctctctggtctcagctcctgatccacctcccctccaggatggcagctgctggtgtttgcttcctgcaaaacccttcttggccgggcgcagtgactcatgcctataatcccagcactttgggaggctgaggtgggcagatcacctgaggtcaggagttcgagactagcctgaccaacatggtraaaccctgtctttactaaaaatacaaaaattaggctgggtgtggtggttcacacttgtaatcccagcactttgggaggccaaggtgggtggatcacctgacgtcaggagtttgagaccagcctgggcaaccatggccaacatggtgaaaccccgtctctaccaaaaatacaaaaattaggccaggcatattggctcatggctgtaatcccaacactttgggaggctgaggtgggagaatcacctgaggtcaggagttggtggcacgagtctgtaatctcagctactcgggaggctgaagcaggaggattgcttgaacccaggaggcagaggctgcagtgagcggagatcgcgccactgcactccagcctgggcaacagaa

SEQ ID NO: 602313 - DNA, 576 bp, Homo sapiens
gaattcctacccatctctctggtctcagctcctgatccacctcccctccaggatggcagctgctggtgtttgcttcctgcaaaacccttcttggccgggcgcagtgactcatgcctataatcccagcactttgggaggctgaggtgggcagatcacctgaggtcaggagttcgagactagcctgaccaacatggtgaaaccctgtctttactaaaaatacaaaaattaggctgggtgtggtggytcacacttgtaatcccagcactttgggaggccaaggtgggtggatcacctgacgtcaggagtttgagaccagcctgggcaaccatggccaacatggtgaaaccccgtctctaccaaaaatacaaaaattaggccaggcatattggctcatggctgtaatcccaacactttgggaggctgaggtgggagaatcacctgaggtcaggagttggtggcacgagtctgtaatctcagctactcgggaggctgaagcaggaggattgcttgaacccaggaggcagaggctgcagtgagcggagatcgcgccactgcactccagcctgggcaacagaa

SEQ ID NO: 602314 - DNA, 638 bp, Homo sapiens
gggactaataataattttcagagatcataaatggtttttaaactcattttagtggcaatgttttttagaaataaaatacatacagcctttcatttttaaaatattttacttatttgtttttgcctttctgggattcagaatcatgcaaatttcaagtataattagcaaaatacactaaaatgtaaatatcttggaattttatgttaatttayaacatgtaaagtaaaaatcttaaaaataggtttatacagattaaatttagttcttagtagtctaaaagacttatttatttactttttgattgtgctggttaatctgtataaactcccatagaaaattcaaaatctttaagtatatagactctttctggaagaccaaagtaatgctcatttaaaaagtagagaaaactttggaagaagcacatatgtatgtaaacatatttaaggaaacagcagatgtctacagcctgattagtctataatggactatggttccaacagtagtcatgattttactgacaatttgggacagtacatagattgctataagaagccgaaatcctgttattatgccaattctctaaaataggaaaaggagtatataataatgaccttggcttcatgaacattctgccaaat

SEQ ID NO: 602315 - DNA, 614 bp, Homo sapiens
gcaaaaggagcaacagtcccagctctgtcrtttttctggaggagttctagcaatcatttagaagatcagcccaagacctgctccaccaactctccaatcgtgtaagaaactaattctatatattaaattttgtttgcctatattacctaaagatttattcttataatctataatggaaaattgaaatattgagtatgctgatgaaaaagattacattttcttaaacaaaagttcactcctaaatgataaattcaattataggaacaaatttaggtaggcataaaaagagaaaagtgaaaatacaattgaaaaattgaggccgggcgcggtggctcacacctgtaatcccagcactttgggaggccgaggcgggtggatcacgaggtcaggagatcgagaccatggtgaaaccccgtctctactaaaagtacaaaaaattagctgggcgcgatggcgggcgcctgtagtcccagctactcaggaagctgaggcaggagaatggcgtgaacccaggaggcggagcttgcagtgagccgagatcccaccactgcactccagcctgggtgacagagcgagactctgtctcaaacaaacaaacaaaaaagaaaaattga

SEQ ID NO: 602316 - DNA, 614 bp, Homo sapiens
gcaaaaggagcaacagtcccagctctgtcgtttttctggaggagttctagcaatcatttagaagatcagcccaagacctgctccaccaactctccaatcgtgtaagaaactaattctatatattaaattttgtttgcctatattacctaaagatttattcttataatctataatggaaaattgaaatattgagtatgctgatgaaaaagattacattttcttaaacaaaagttcactcctaaatgataaattcaattataggaacaaatttaggtaggcataaaaagagaaaagtgaaaatacaattgaaaaatygaggccgggcgcggtggctcacacctgtaatcccagcactttgggaggccgaggcgggtggatcacgaggtcaggagatcgagaccatggtgaaaccccgtctctactaaaagtacaaaaaattagctgggcgcgatggcgggcgcctgtagtcccagctactcaggaagctgaggcaggagaatggcgtgaacccaggaggcggagcttgcagtgagccgagatcccaccactgcactccagcctgggtgacagagcgagactctgtctcaaacaaacaaacaaaaaagaaaaattga

SEQ ID NO: 602317 - DNA, 614 bp, Homo sapiens
gcaaaaggagcaacagtcccagctctgtcgtttttctggaggagttctagcaatcatttagaagatcagcccaagacctgctccaccaactctccaatcgtgtaagaaactaattctatatattaaattttgtttgcctatattacctaaagatttattcttataatctataatggaaaattgaaatattgagtatgctgatgaaaaagattacattttcttaaacaaaagttcactcctaaatgataaattcaattataggaacaaatttaggtaggcataaaaagagaaaagtgaaaatacaattgaaaaattgaggccrggcgcggtggctcacacctgtaatcccagcactttgggaggccgaggcgggtggatcacgaggtcaggagatcgagaccatggtgaaaccccgtctctactaaaagtacaaaaaattagctgggcgcgatggcgggcgcctgtagtcccagctactcaggaagctgaggcaggagaatggcgtgaacccaggaggcggagcttgcagtgagccgagatcccaccactgcactccagcctgggtgacagagcgagactctgtctcaaacaaacaaacaaaaaagaaaaattga

SEQ ID NO: 602318 - DNA, 598 bp, Homo sapiens
cgggagctcttggcttccatacgtgtctcaggcagggaagcttccttcttccccacgtttcccctcatgggtgggtggattgcctagaatgagcgctaggcgaccgtgactggccttgacttccaggacaggtggtgtcccatttcctytgcacttcctgtctcattcttgagggacatcctctcctctgctcctgggtggcctgactcccttgatcttctggacgaaataaatgtcaggaaaccaaagggactgggctggggctggggctggggatggggctggggctgggtgcagccgaagttgcgtcagggctaccagggcgatggaggcttgggggtggggcgatttttgccaaaacctctttgctcctctggtaggcatgtgaaaacgtggcttgggtcaggcacagccccccatctcgacccgcaccccccgagccccaggtgttcttcgactttccttggcattgatggaaaggtcactcgtttcccccttccaccagcacatgcctggacaccaccctttgtttcgccgtcgccccgtatgcctccggcgacacacatccacaccatctgctgtggggtaggccagtgcc

SEQ ID NO: 602319 - DNA, 598 bp, Homo sapiens
cgggagctcttggcttccatacgtgtctcaggcagggaagcttccttcttccccacgtttcccctcatgggtgggtggattgcctagaatgagcgctaggcgaccgtgactggccttgacttccaggacaggtggtgtcccatttcctctgcacttcctgtctcattcttgagggacatcctctcctctgctcctgggtggcctgactcccttgatcttctggacgaaayaaatgtcaggaaaccaaagggactgggctggggctggggctggggatggggctggggctgggtgcagccgaagttgcgtcagggctaccagggcgatggaggcttgggggtggggcgatttttgccaaaacctctttgctcctctggtaggcatgtgaaaacgtggcttgggtcaggcacagccccccatctcgacccgcaccccccgagccccaggtgttcttcgactttccttggcattgatggaaaggtcactcgtttcccccttccaccagcacatgcctggacaccaccctttgtttcgccgtcgccccgtatgcctccggcgacacacatccacaccatctgctgtggggtaggccagtgcc

SEQ ID NO: 602320 - DNA, 614 bp, Homo sapiens
gcaaaaggagcaacagtcccagctctgtcgtttttctggaggagttctagcaatcatttagaagatcagcccaagacctgctccaccaactctccaatcgtgtaagaaactaattctatatattaaattttgtttgcctatattacctaaagatttattcttataatctataatggaaaattgaaatattgagtatgctgatgaaaaagattacattttcttaaacaaaagttcactcctaaatgataaattcaattataggaacaaatttaggtaggcataaaaagagaaaagtgaaaatacaattgaaaaattgaggccgggcgcggtggctcacacctgtaatcccagcactttgggaggccgaggcgggtggatcaygaggtcaggagatcgagaccatggtgaaaccccgtctctactaaaagtacaaaaaattagctgggcgcgatggcgggcgcctgtagtcccagctactcaggaagctgaggcaggagaatggcgtgaacccaggaggcggagcttgcagtgagccgagatcccaccactgcactccagcctgggtgacagagcgagactctgtctcaaacaaacaaacaaaaaagaaaaattga

SEQ ID NO: 602321 - DNA, 584 bp, Homo sapiens
ggttgtcaatcgtttttgctgctgtggatccgctttggctctgtgaaggcctggcccacgtgaggagatgcgtcggagcaattgaagtctcatccccatcctgagcggcctcttttctagcatcaaaacgaacacactgcagacgaggagaagaatcccacaggagctctttgtcctacaggagagcagcggacccacgtcagagaagatgcttgagtcttttcacggctcttctctgagaaatgaagccacaccacgatacagtcagcaagaggaarccgggaatgagagatggcaacaatccctgtccctggaacgctggcctccctggacaagccacccttttggaaccccaccccttatgcccttggcggtggcacggtgctgtatcctgcctgggctccggcctctgctctgtcctccgtcttgctctgcctcccctgtttctcaggggcctggatgcctctagctctggccaaatgccttcaacaaagatggcttcccagtccgtcagggagacatttcttcgagatccgtgtcgtgattgtttctctctccaaacctgtttctgcttgattgggctg

SEQ ID NO: 602322 - DNA, 573 bp, Homo sapiens
taaggttaggatacaagcacaagaaaggagggtagggcaaagcgtggaagaagggtggggtctgtgaggctgggttggggatcatgtctctctcccacaatgactggcttcaggatgytcccagaatgggaaaagggtagaggaccctgttctgcactgtgatttaggaatccttaggtctctacctgggacttttggggatgtttctccacttcactccatttggcttactctcccaatcaggttagacacacacacacacacacacacacacacacacacacacaccaccacacaccttagacagggaaagagtgggaaagagggaagcagaagagattatttgaagacctacttgtgcaaaaggcatgagtagttcaggcatttccatggatacccagctaaccccctaccacagggcctttcctacttacccctgttgcacagtcttccccaacactgtgtccaacacccatacaggggttatactcacaggatggcactatcgaggaagagggggctgttctgactcagcccccctaaccgcacattggccctgaagccacagttgca

SEQ ID NO: 602323 - DNA, 597 bp, Homo sapiens
ggtcctgggttgatatgacaggggtgaggaagggtcctggagggagagatcctgggggtagcagcagatgccgcagggtctcggaaaccatggcaggcactaagaagacacgtgggcttccctccacctcatggacaaggaccttcatttattcattctttcctacacttgacaaattcttactgagatcttattaggcrccaggcactgtgtttggtgctgaatattcaggaatgagcacaatgggtctggttcctaccctcctagagattacagtccagtgggagagactgacagtaaacatattaatatgttacagttgggccaagtctacaaaggatagggtatgataacatgtatgatgggtggttccctagggagaagtttccctagggagtgacagtcacccagagtgctgatgggtggaggtcttttttgccagccccctgccaagctttcgtcctggactttcctgcattcctctgcactgtccctttaagaggagcatctcttccctgagcaaaggcagttcgggcacacagcctgagcctgccaaggttgtgggccataaatcaacgctggcactcccttggcagt

SEQ ID NO: 602324 - DNA, 537 bp, Homo sapiens
agaattttgcaaaaagatagaaatatagagaacacaggagagggagctggcatagagcccagagcaaggacaactggggtgtggagcttctggggttcttcattcaggacccctagatttcatctgtcccaggcttctgggtatcaccagtagtttaaagtcaggcctcatctgggctgattctcttggctttctccttgctctcccgggatggcttatctggctgccagagtcatttgccatctctaatttgtgtttaaattaaagttcccacaaacagaggtttaatgtgctgttaccaagaactcccaggccccctgcagctctgggaagttgaaggggctggggagaagaggtcagtctgtgtgcatcccatcaaagctgatcccactggcattggacctggagtggacagcccaactaagtgtctcygtccttgctgctccatccagaatggtgatgacagggggcagggcagggaaaagcatgctcacaaagggcctgggaccaacatgcccgttcaggggctcctgggtg

SEQ ID NO: 602325 - DNA, 531 bp, Homo sapiens
gacagggaatggaggaaacaaataccctgactcctctctcccccttctcagccgggaactctattggccgagagatcagggggcccatgtgacacagtctgcagaggtcagcctccctgggcagagcagcacagagaacacagyggggcaaacataaaaccatccccgtcccatcccacccgtgagtccctgctctgataccaaagcctcctctctgctgctttattgccaccactgtcactgcctgcagccaaacagtgactgacagggaaggagagtcaagactccctcaagcaaatactccagctcacaaggaaggtgggatccaggcagagggcagcttgagggaagagggctgtgtctgaagggcagcagagcagggactgcccactcccagcatggagagacaaagagaaggaccgcactgggggtgaggatgtcaaacggtgatagtaaatgactctctttcctcagcatatgatacaaatcactgtggatctcccttcctcctcccctctctagaccgggagc

SEQ ID NO: 602326 - DNA, 531 bp, Homo sapiens
gacagggaatggaggaaacaaataccctgactcctctctcccccttctcagccgggaactctattggccgagagatcagggggcccatgtgacacagtctgcagaggtcagcctccctgggcagagcagcacagagaacacagcggggcaaacataaaaccatccccgtcccatcccacccgtgagtccctgctctgataccaaagcctcctctctgctgctttattgccaccactgtcactgcctgcagccaaacagtgactgacagggaaggagagtcaagactcccwcaagcaaatactccagctcacaaggaaggtgggatccaggcagagggcagcttgagggaagagggctgtgtctgaagggcagcagagcagggactgcccactcccagcatggagagacaaagagaaggaccgcactgggggtgaggatgtcaaacggtgatagtaaatgactctctttcctcagcatatgatacaaatcactgtggatctcccttcctcctcccctctctagaccgggagc

SEQ ID NO: 602327 - DNA, 565 bp, Homo sapiens
taacatttactggcaggttctatgtgtcaagcactgtggaaaacacatggcatgtatttcctctaattccaaataaccccctgagataagttctattattagtatccctgttttacaggtcaagaaactaaggcagagagaaaagttaagcaacttgccctgagtcacacagctagatattaatagtttcagaactcctagctgttttgcctcaaatcccacctccccacccctgctcaaagcccctccccttctaggtgggttgtttagttcctatcaccagttcttcacaaatcggctttaccccccacagcctacaaccyttgttctccaaaactcctgttgacctctgtccctttcccttcccactttctctctagaccctctgctccccacaaagtcccccaaaccattctgtccctctccctctgctccacacccaccctcccccacaactcctgctaaaacagatgaatttcaccaaaaaagaccatcagaccttccccaagcaggcccccactgtgcctgattgcacacccccaggggaggcaccacagtggctaag

SEQ ID NO: 602328 - DNA, 565 bp, Homo sapiens
taacatttactggcaggttctatgtgtcaagcactgtggaaaacacatggcatgtatttcctctaattccaaataaccccctgagataagttctattattagtatccctgttttacaggtcaagaaactaaggcagagagaaaagttaagcaacttgccctgagtcacacagctagatattaatagtttcagaactcctagctgttttgcctcaaatcccacctccccacccctgctcaaagcccctccccttctaggtgggttgtttagttcctatcaccagttcttcacaaatcggctttaccccccacagcctacaacctttgttctccaaaactcctgttgacctctgtccctttcccttcccactttctctctagaccctctgctccccacaaagtcccccaaaccattctgtccctctccctctgctccmcacccaccctcccccacaactcctgctaaaacagatgaatttcaccaaaaaagaccatcagaccttccccaagcaggcccccactgtgcctgattgcacacccccaggggaggcaccacagtggctaag

SEQ ID NO: 602329 - DNA, 597 bp, Homo sapiens
ggtgatgttaaaggcctttggttttataaaggaagcagagcatacagttttggaaaatttgcagcctgacaatgtgatagagaagaaaatcccattttctgaggataaattcaagctgtctgcagaaatttgcataagtaacaagaagctgaatgttaatcccaaaaacaatggggaaaatgtctacaggacatgtcataggtcatcacagcagcccctcccatcacaagcctgggacctaggaggataaaatggatttctgtgctgggccaggttgactgtgctgtgtgtagcctagggccttgtttctctgcgtttcagcccctccaaccatggctgaaagaggaaaacatagaactcaggccayggccttgagagtgcaagcaccaagccttggcagcttccatgttgtgttcagcctgcacatgcatagaagtcaagaactgaagtttggaaacctccacctagatttcagaggatgtttgaaaacacctggatgtccaagcagaagtttgctgcaggggtggtgctctgatggagaacctctgctagggctgtgcagaagagaaatgtggggtcagagaccctatacagagt

SEQ ID NO: 602330 - DNA, 612 bp, Homo sapiens
tctcctgcctcagcctcccaagcagctgggattaccagtgcacaccacgatggcctgctaattttttgtatttttgtagagacagggattcaccatgttggccaggctggtctcgaactcctgaccttaggtgatccacttgcatcgaccttccaaagtgttggaattacaggcaggagccaccacacccagactagaaaacattattcaatagcaaacagtagcagtatgcttgggggttttaggattgattattttcaaatctctagaaaagctcaatgcattaccttaggctataatctcagggcagagtctcatctgttaatgtggggctggtctaagggtccttccacctctcagatttatggtttcygatgttgaactgctccctgtcacccacccatcctcggttttgtttgtttgtttttacagagacgaggtctcactatattgcccaggctggtcttgaactcctggccttaagcgatcctcctgccttggcctcccaaagtgctggagttacagatgtgagcctctgtgctcagcccatccttggctgttcaagtgtagaggtaagtagtagatgtcaagtttacctccaggtaagaaggg

SEQ ID NO: 602331 - DNA, 612 bp, Homo sapiens
tctcctgcctcagcctcccaagcagctgggattaccagtgcacaccacgatggcctgctaattttttgtatttttgtagagacagggattcaccatgttggccaggctggtctcgaactcctgaccttaggtgatccacttgcatcgaccttccaaagtgttggaattacaggcaggagccaccacacccagactagaaaacattattcaatagcaaacagtagcagtatgcttgggggttttaggattgattattttcaaatctctagaaaagctcaatgcattaccttaggctataatctcagggcagagtctcatctgttaatgtggggctggtctaagggtccttccacctctcagatttatggtttctgatgttgaactgctccctgtcacccacccatcctcggttttgtttgtttgtttttacagagacgaggtctcactatattgcccaggctggtcttgaactcctggccttaagcgatcctcctgccttggcctcccaaagtgctggagttacagatgtgagcctctgtgctcagcccatccttggctgttcaagtgtagaggtaagtagtagatgycaagtttacctccaggtaagaaggg

SEQ ID NO: 602332 - DNA, 463 bp, Homo sapiens
aattctctgattccttggtgcgctgcacgtgaatgtcgtagtaaagggagagccgatcctgagccccagactgaacttttttccatctaattccatttatttccattaagattgcagcaatttggccgggtgcggtggttcatgcctgtaatcccagcactttgggaggctgaggcagatggattatctgcagttgggagtttgagaccaccctaaccaacatggtaaaactccttgtctactaaaaatacaaaattagccggatgcagtggcacatgcctataatgccagctactcaggaggctgaggcaggagaatcaattgaacccacgaggcggaggttgtggtgagccgagattgcgccattgcactccagcctggrcaacaaagcaaaactccatctcaaaaaaaaaaaaaaaaaaaagattgcagcaattcactcacatcttcaggctccacttgt

SEQ ID NO: 602333 - DNA, 459 bp, Homo sapiens
ttacaagtggagcctgaagatgtgagtgaattgctgcaatcttttttttttttttttttgagatggagttttgctttgttgcccaggctggagtgcaatggcgcaatctckgctcaccacaacctccgcctcctgggttcaattgattctcctgcctcagcctcctgagtagctggcattataggcatgtgccactgcatccggctaattttgtatttttagtagacaaggagtttcaccatgttggttagggtggtctcaaactcccaactgcagataatccatctgcctcagcctcccaaagtgctgggattacaggcatgaaccaccgcacccggccaaattgctgcaatcttaatggaaataaatggaattagatggaaaaaagtttagtctggggctcaggatcggctctccctttactacgacattcgcgtgcagcgcaccaaggaatcagag

SEQ ID NO: 602334 - DNA, 622 bp, Homo sapiens
aattatttagacataatgcaaatgtgggctggaattcatgttctgattttttgtggccttgagctaaggaaaagggacccagggaaatgggctttatatgcttgcatggcttcatggaatccccaacttccttagcttctgtgacaactcaagattgttactaaaatccactttgtattatctttaaaaaccaagggatatcatttctgcttatataatatataatattataatacatattatattatgataaaatatataatataatataattaatataataatatacaatatataatattatataatataattaatataatatacaatatatattatatattattatataatgttatataatatataatttatattatataataatacatatataatatatataaaataatatattattgttgcttgttatgaatgaggaaagaaagtggtttcttgcgayggaatctactcctggtgaaaatgctgtgaacattgtggaaagaacaacaaaggacttagaatatcccataaacttagttgataaaagagtggcagggtttgagagaattggttccaattttgatataaattctactgtaggtaaaatgctaccaaactg

SEQ ID NO: 602335 - DNA, 446 bp, Homo sapiens
aattttgagctcctgaccatgtccctagattgtgctcatatgtattttgatgtctaataagatttattctcagtgcattttttaagtgaaagtatttattgagcatctactgtatatcatgtgctgarataggcaccagtggtgcagggaacatatggcacagtctctgacctcaggtaactttcactctcatacatatgtattaggacaccaacacatgtgtgaatataagatagtatgacagatattgcaacaagtaattatttactgtaaacctattttataggattttaaacttaaactactttcaccctatttccaaaaaaaagtattgcataactttaaatagattctcagtttgaaatcatcatacaaactgcagtagcatctgctggtgaaatactgctttgtatctattagaatagtccaaacaattgggagacaac

SEQ ID NO: 602336 - DNA, 446 bp, Homo sapiens
aattttgagctcctgaccatgtccctagattgtgctcatatgtattttgatgtctaataagatttattctcagtgcattttttaagtgaaagtatttattgagcatctactgtatatcatgtgctgagataggcaccagtggtgcagggaacatatggcacagtstctgacctcaggtaactttcactctcatacatatgtattaggacaccaacacatgtgtgaatataagatagtatgacagatattgcaacaagtaattatttactgtaaacctattttataggattttaaacttaaactactttcaccctatttccaaaaaaaagtattgcataactttaaatagattctcagtttgaaatcatcatacaaactgcagtagcatctgctggtgaaatactgctttgtatctattagaatagtccaaacaattgggagacaac

SEQ ID NO: 602337 - DNA, 446 bp, Homo sapiens
aattttgagctcctgaccatgtccctagattgtgctcatatgtattttgatgtctaataagatttattctcagtgcattttttaagtgaaagtatttattgagcatctactgtatatcatgtgctgagataggcaccagtggtgcagggaacatatggcacagtctctgacctcaggtaactttcactctcatacatatgtattaggacaccaacacatgtgtgaatataagatagtatgayagatattgcaacaagtaattatttactgtaaacctattttataggattttaaacttaaactactttcaccctatttccaaaaaaaagtattgcataactttaaatagattctcagtttgaaatcatcatacaaactgcagtagcatctgctggtgaaatactgctttgtatctattagaatagtccaaacaattgggagacaac

SEQ ID NO: 602338 - DNA, 574 bp, Homo sapiens
ggattacaggcaccagccaccacgcctggctaattttttgtatttttagttgagacggggattcactgtgtcagccaggatggtcttgatctgctgacctcatgatccacctgccttggccttccaaagtgcttggattacaggcatgagccactgcgcctggycttatttatctttttgagacagggtttagctctgtcactcaggctggagtgcagtggtgcaatcatggctcaatgcagccccaacctccagggctcaagtaaccctcccacctcagccttctgagtagctgggaccacaggcatgtgccaccatacccagcacatttcttagacctctgaaaagatgctcaacaccatatgtcactaggggattcaaattaaaacaacgatgtgataccattacacatctcttagactggcttgaatgcaaacaccaacaccaaatgctggtgaagatatggagcgacaggaactcatctctatttctgctgagaatgcaaagtgggacagccactgtggaaggcagttttgcaagttcctgccagactaaacatatgcttaccatacga

SEQ ID NO: 602339 - DNA, 464 bp, Homo sapiens
atgaaaaacaaattatatcatcatctcaatagaggcagaaaaagcattttatgaaacaacacttttgataaaaacattcaacaaactatgaatcgagtggaacttcctcaatctgataaaaggcttctagctattactttttaactgtgttattttagtggttacttttatctttaacgtatgacagtctgccttcaagtgatactatacaatttcaggatcttctgtttttgtttgtttgtttgtttttttgaaggtggagtcttgctctgttgcccaggctggagtgcagtggcacaatctcggctcactgcaacctctgcctcccaggtkctagcgattctcctgcctcagcctcctgagtagctgggattacaggcgcatgccacaatgcccagctgatttttgtatttttagtagagacgtggttttaccatgttggccaggctggtctcgaactcctg

SEQ ID NO: 602340 - DNA, 404 bp, Homo sapiens
gaacatgggaaatgtacatcagaagtctcttattcaaattgataaaactgataggtaagtaaaaaaatgtgttaaagcatggaatcttaaaaagcaacttgaatgtttagtttaatttaaaacataaatttacatgatttgcgtttttaaatgtaggtctaagrcttgttctttgcatgtcatcaactgatttgagagccatacacttgtttctgcataagccacacaaataatacatagtctgtgataatttagcatagtagaatgtggcctctgagaccaggcctcctgggctgcaacccttattctcttttcttactagcatatgaaccaaggcaagttacttgacagttccttgcctcagtttccccatttgtaaaatgcagataataccagtgagtcag

SEQ ID NO: 602341 - DNA, 609 bp, Homo sapiens
aaaactctcagcaaaatcggcatacaagaaacacctcaacataataaaagccatctatgacaaacccacagccaacattatactgaatggggaaaagttgaaagcatttcctctgatacctggaacaagataaggatgcctactctcaccactcctcttcaacctagtactagaagccctagccagagcaatcagacaacagaaagaaacaaagggcatccagagctgcccccttctgcgcggtcacgctgagccagcacctgggcctggaaccaggccacagccccccagctttgcccaccacctccctaccatggacgcccgcaaagtgaacgagcttcgggcctttgtgaaaatgtgtaagcaggatccgagcattctgcacaccgaggaaatgcacttcctgagggagtgggtggagagcatgggaggtaaagtaccacctgctactcagaaagctaaatcagaagaaaataccaaggaagaaaaacctgacagtaagaaggtggaggaagacttaaaggcagacraaccatcaagtgaggaaagtgatctagaaattgataaagaaggtgtgattgaaccagacactgatgctcctcaagaaat

SEQ ID NO: 602342 - DNA, 616 bp, Homo sapiens
aatgccaaaataaacacagacagaggctcttctaagcttcctaagcaactttgaatttttttcatcaatttgtataatatactctctgcaagctttaatagagacaggacacaaaacattgtctttactcattctcatttatgtccatcagattgcgttaccttgcctggtaatgtactagaatttcctctgaattttagacaaggtgatcgtgaaatgtggtacagtctcaggtggtttagcaaacaaccttccacatcagtgcarttatctcagcctttaaaccatcagctctggattataaatttgatctgccagcttatgaacttgagtcaaagacaaagaacattatgccttgctttgaaaggggattagaagcaaaaatgaactcaagtgttaaaaaaagtactaaaaaataatgaaacaaaaaatatattatcagtacctctctaagcaacaggatatactaacatgaatacaacagcaatgttactatttgctaggatttctctctctctctctctctctctctctctctctctctctcattctctctgtttatctcttacctttcttttctttggtacactatatccttttaaactatgtttgccca

SEQ ID NO: 602343 - DNA, 336 bp, Homo sapiens
gctaaggttttcattgaggcccaatacttagttcactttgactattattccaygagtatttgaataaatatacacatattagttatcctccattaattgcttatgtcctcctaaatctcacttatgttttttcacttgatctttcatcagctgaaaaaatagtattataaattgtattttaaaaaatgcttctgaagtttttgttttctgaattttgcatacatatttaataaatatttatgacagttacttatttatagtgacctttttattgatacaaagtgcctttgtcctccttcatattttttaccaaccatgaataaaacctatttgttc

SEQ ID NO: 602344 - DNA, 336 bp, Homo sapiens
gctaaggttttcattgaggcccaatacttagttcactttgactattattccacgagtatttgaataaatatacacatattagttatcytccattaattgcttatgtcctcctaaatctcacttatgttttttcacttgatctttcatcagctgaaaaaatagtattataaattgtattttaaaaaatgcttctgaagtttttgttttctgaattttgcatacatatttaataaatatttatgacagttacttatttatagtgacctttttattgatacaaagtgcctttgtcctccttcatattttttaccaaccatgaataaaacctatttgttc

SEQ ID NO: 602345 - DNA, 336 bp, Homo sapiens
gctaaggttttcattgaggcccaatacttagttcactttgactattattccacgagtatttgaataaatatacacatattagttatcctccattaattgcttatgtcctcctaaatctcacttatgttttttcacttgatctttcatcagctgaaaaaatagtattataaattgtattttwaaaaatgcttctgaagtttttgttttctgaattttgcatacatatttaataaatatttatgacagttacttatttatagtgacctttttattgatacaaagtgcctttgtcctccttcatattttttaccaaccatgaataaaacctatttgttc

SEQ ID NO: 602346 - DNA, 336 bp, Homo sapiens
gctaaggttttcattgaggcccaatacttagttcactttgactattattccacgagtatttgaataaatatacacatattagttatcctccattaattgcttatgtcctcctaaatctcacttatgttttttcacttgatctttcatcagctgaaaaaatagtattataaattgtattttawaaaatgcttctgaagtttttgttttctgaattttgcatacatatttaataaatatttatgacagttacttatttatagtgacctttttattgatacaaagtgcctttgtcctccttcatattttttaccaaccatgaataaaacctatttgttc

SEQ ID NO: 602347 - DNA, 385 bp, Homo sapiens
cttctctttaggggattcccctggtgaatatgaatgagagttgaggaaaatttgataaytaagcaagaatagctaataaaggtctgaaccacctgctcattcaatatacttgtgactccctttcctgttcagccttaatgtcacccatatcaattccattttataataacctgctaattttcaagcacaattttaagatttgataacttggatagcacccagttgattgtgaacccttcaaatcacatagttacatggtgacaagccagacttcttaaatagataaaaatatttggcagaaggggacatagttttgttccaaaattattagttaggtgaactatgattgtcttcttggggttacttagaagcgtcaaacagcatt

SEQ ID NO: 602348 - DNA, 385 bp, Homo sapiens
cttctctttaggggattcccctggtgaatatgaatgagagttgaggaaaatttgataactaagcaagaatagctaataaaggtctgaaccacctgctcattcaatatacttgtgactccctttcctgttcagccttaatgtcacccatatcaattccattttataataacctgctaattttcaagcacaattttaagatttgataacwtggatagcacccagttgattgtgaacccttcaaatcacatagttacatggtgacaagccagacttcttaaatagataaaaatatttggcagaaggggacatagttttgttccaaaattattagttaggtgaactatgattgtcttcttggggttacttagaagcgtcaaacagcatt

SEQ ID NO: 602349 - DNA, 455 bp, Homo sapiens
ggaaacatttaaagctatggatttctcctctccctctcactgtcactctcrctctgtttgtgtgtgcacgcacatgtgtgtgcatgcatcatttagccctgctgactgatatgcctacttatttatgatcaagagccagacattgacctaagagaaaaagtctttagatgggatctccctccaaagaaattgtagttttcttctggcttagaggtagatcctcttggtccaatcaggctgaaatgccttgaggctagatttcagtttttgtggcagctggtgcatttctagtttgccttttcagctagggattagctttttaggggtctcaatgcctagggagatttctaggtcctctgttccttgttgaactccaattttgtctatccttttgctgagaggtctgcttaacttccttttagtcaggtagctccattttatgctaagcttcttag

SEQ ID NO: 602350 - DNA, 455 bp, Homo sapiens
ggaaacatttaaagctatggatttctcctctccctctcactgtcactctcactctgtttgtgtgtgcacgcacatgtgtgtgcatgcatcatttagccctgctgactgataygcctacttatttatgatcaagagccagacattgacctaagagaaaaagtctttagatgggatctccctccaaagaaattgtagttttcttctggcttagaggtagatcctcttggtccaatcaggctgaaatgccttgaggctagatttcagtttttgtggcagctggtgcatttctagtttgccttttcagctagggattagctttttaggggtctcaatgcctagggagatttctaggtcctctgttccttgttgaactccaattttgtctatccttttgctgagaggtctgcttaacttccttttagtcaggtagctccattttatgctaagcttcttag

SEQ ID NO: 602351 - DNA, 455 bp, Homo sapiens
ggaaacatttaaagctatggatttctcctctccctctcactgtcactctcactctgtttgtgtgtgcacgcacatgtgtgtgcatgcatcatttagccctgctgactgatatgcctasttatttatgatcaagagccagacattgacctaagagaaaaagtctttagatgggatctccctccaaagaaattgtagttttcttctggcttagaggtagatcctcttggtccaatcaggctgaaatgccttgaggctagatttcagtttttgtggcagctggtgcatttctagtttgccttttcagctagggattagctttttaggggtctcaatgcctagggagatttctaggtcctctgttccttgttgaactccaattttgtctatccttttgctgagaggtctgcttaacttccttttagtcaggtagctccattttatgctaagcttcttag

SEQ ID NO: 602352 - DNA, 576 bp, Homo sapiens
gaatattggttaaatggtaggaataagaaagaacattcttggcctagagagtacaaaaggaaagccatggggttggacctaaaaagaatacaaaggaagaggagagaagagtactmattgtgctatggagttgaattgggaaattttttacaaaaccaagaaataccaaacttagtgaactattgtgggaccagtgaataaagaaatattaaagcaatggaaaataatttaagtaaatatgagaagaaaaattaagaatatctgtatatttttgatcaaaggatgtaatgattaaagttacattataaattattctatctatggaattaattatggattaaaagaataaaagtcagacaaactataaacttctctcattctttattttggaacttaaagaacttatgtatctaagttaatcagatatttttatgttatttttacaaaaataatttacaaaattaattttacaaaattaatttagaaatatttttattgtctgttttctataaaaataaagtgtaagattttactacttcagatatcttttgctataagtcaatctatgtcttccaa

SEQ ID NO: 602353 - DNA, 576 bp, Homo sapiens
gaatattggttaaatggtaggaataagaaagaacattcttggcctagagagtacaaaaggaaagccatggggttggacctaaaaagaatacaaaggaagaggagagaagagtactcattgtgctatggagytgaattgggaaattttttacaaaaccaagaaataccaaacttagtgaactattgtgggaccagtgaataaagaaatattaaagcaatggaaaataatttaagtaaatatgagaagaaaaattaagaatatctgtatatttttgatcaaaggatgtaatgattaaagttacattataaattattctatctatggaattaattatggattaaaagaataaaagtcagacaaactataaacttctctcattctttattttggaacttaaagaacttatgtatctaagttaatcagatatttttatgttatttttacaaaaataatttacaaaattaattttacaaaattaatttagaaatatttttattgtctgttttctataaaaataaagtgtaagattttactacttcagatatcttttgctataagtcaatctatgtcttccaa

SEQ ID NO: 602354 - DNA, 576 bp, Homo sapiens
gaatattggttaaatggtaggaataagaaagaacattcttggcctagagagtacaaaaggaaagccatggggttggacctaaaaagaatacaaaggaagaggagagaagagtactcattgtgctatggagttgaattgggaaattttttacaaaaccaagaaataccaaacttagtgaactattktgggaccagtgaataaagaaatattaaagcaatggaaaataatttaagtaaatatgagaagaaaaattaagaatatctgtatatttttgatcaaaggatgtaatgattaaagttacattataaattattctatctatggaattaattatggattaaaagaataaaagtcagacaaactataaacttctctcattctttattttggaacttaaagaacttatgtatctaagttaatcagatatttttatgttatttttacaaaaataatttacaaaattaattttacaaaattaatttagaaatatttttattgtctgttttctataaaaataaagtgtaagattttactacttcagatatcttttgctataagtcaatctatgtcttccaa

SEQ ID NO: 602355 - DNA, 576 bp, Homo sapiens
gaatattggttaaatggtaggaataagaaagaacattcttggcctagagagtacaaaaggaaagccatggggttggacctaaaaagaatacaaaggaagaggagagaagagtactcattgtgctatggagttgaattgggaaattttttacaaaaccaagaaataccaaacttagtgaactattgtgggaccagtgaataaagaaatattaaagcaatggaaaataatttaagtaaatatgagaagaaaaattaagaatatytgtatatttttgatcaaaggatgtaatgattaaagttacattataaattattctatctatggaattaattatggattaaaagaataaaagtcagacaaactataaacttctctcattctttattttggaacttaaagaacttatgtatctaagttaatcagatatttttatgttatttttacaaaaataatttacaaaattaattttacaaaattaatttagaaatatttttattgtctgttttctataaaaataaagtgtaagattttactacttcagatatcttttgctataagtcaatctatgtcttccaa

SEQ ID NO: 602356 - DNA, 551 bp, Homo sapiens
ttccctggtaggcttcaagccaggcacatcwaaaccagcaggtaaatttgttgcactcactcatcctccctcaggagtacaacgcaatggagagaaagctccaaactcccagctcatctctagggagagaaagaaaattctagaccatatgtccaacattttgactttttgggaaggcactagaacctatctaccctgaatctaagtgctaacaggaaaggatgccagattgcatgcctgctgataaagccacagtttggactgtcactcaatcaccatcattcctcctgtgactcagtataacaagattgggagaatactctacagttcctgattcccccacagaagtgaaagagaatacagaggcacacattcagtgttcagacttcaggggagttgccaagtgattgttttctgtcttgcctgaatttaagtgctaacaggaaagctttccaggttgtggatattaagaacaaatgagttgaggcagtttgggttagcatacattcacttatcatactatccttccctggatcaatatgcaatgagtg

SEQ ID NO: 602357 - DNA, 551 bp, Homo sapiens
ttccctggtaggcttcaagccaggcacatctaaaccagcaggtaaatttgttgcactcactcatcctccctcaggagtacaacgcaatggagagaaagctccaaactcccagctcatctctagggagagaaagaaaattctagaccatatgtccaacattttgactttttgggarggcactagaacctatctaccctgaatctaagtgctaacaggaaaggatgccagattgcatgcctgctgataaagccacagtttggactgtcactcaatcaccatcattcctcctgtgactcagtataacaagattgggagaatactctacagttcctgattcccccacagaagtgaaagagaatacagaggcacacattcagtgttcagacttcaggggagttgccaagtgattgttttctgtcttgcctgaatttaagtgctaacaggaaagctttccaggttgtggatattaagaacaaatgagttgaggcagtttgggttagcatacattcacttatcatactatccttccctggatcaatatgcaatgagtg

SEQ ID NO: 602358 - DNA, 551 bp, Homo sapiens
ttccctggtaggcttcaagccaggcacatctaaaccagcaggtaaatttgttgcactcactcatcctccctcaggagtacaacgcaatggagagaaagctccaaactcccagctcatctctagggagagaaagaaaattctagaccatatgtccaacattttgactttttgggaaggcactagaacctatctaccctgaatctragtgctaacaggaaaggatgccagattgcatgcctgctgataaagccacagtttggactgtcactcaatcaccatcattcctcctgtgactcagtataacaagattgggagaatactctacagttcctgattcccccacagaagtgaaagagaatacagaggcacacattcagtgttcagacttcaggggagttgccaagtgattgttttctgtcttgcctgaatttaagtgctaacaggaaagctttccaggttgtggatattaagaacaaatgagttgaggcagtttgggttagcatacattcacttatcatactatccttccctggatcaatatgcaatgagtg

SEQ ID NO: 602359 - DNA, 475 bp, Homo sapiens
aaattgaattcaacagcactataaagtatcatccaccataattatgatggatttattcctggaatgcaagaagggttcaacatgtgcaaatcaatataatatgccacattaacaaaacaattaaaataacatgttcatctctgtagatggagaaagagcatttgacaaaattcaacattctstcgttagaaaaacacttgaaaaaataggaatagaaggaaattattccaacagaataaaggccatatgtaaaaacccacagctcacatcatattaatgaagaaaaactgaaatctcttcttctaagatcaggatcaggaacaaggcaaggatgactttatgaagtacataaagtcctagctaaaataattaagcaagaaaaagatataaaaggcatccaaattggaaaggaagaagtaaaattttctctattcacagaaaacatcatcttatatataaaaaaacccctaaagat

SEQ ID NO: 602360 - DNA, 475 bp, Homo sapiens
aaattgaattcaacagcactataaagtatcatccaccataattatgatggatttattcctggaatgcaagaagggttcaacatgtgcaaatcaatataatatgccacattaacaaaacaattaaaataacatgttcatctctgtagatggagaaagagcatttgacaaaattcaacattctgtcgttagaaaaacacttgaaaaaataggaawagaaggaaattattccaacagaataaaggccatatgtaaaaacccacagctcacatcatattaatgaagaaaaactgaaatctcttcttctaagatcaggatcaggaacaaggcaaggatgactttatgaagtacataaagtcctagctaaaataattaagcaagaaaaagatataaaaggcatccaaattggaaaggaagaagtaaaattttctctattcacagaaaacatcatcttatatataaaaaaacccctaaagat

SEQ ID NO: 602361 - DNA, 475 bp, Homo sapiens
aaattgaattcaacagcactataaagtatcatccaccataattatgatggatttattcctggaatgcaagaagggttcaacatgtgcaaatcaatataatatgccacattaacaaaacaattaaaataacatgttcatctctgtagatggagaaagagcatttgacaaaattcaacattctgtcgttagaaaaacacttgaaaaaataggaatagaaggaaattattccaacagaataaaggccatwtgtaaaaacccacagctcacatcatattaatgaagaaaaactgaaatctcttcttctaagatcaggatcaggaacaaggcaaggatgactttatgaagtacataaagtcctagctaaaataattaagcaagaaaaagatataaaaggcatccaaattggaaaggaagaagtaaaattttctctattcacagaaaacatcatcttatatataaaaaaacccctaaagat

SEQ ID NO: 602362 - DNA, 475 bp, Homo sapiens
aaattgaattcaacagcactataaagtatcatccaccataattatgatggatttattcctggaatgcaagaagggttcaacatgtgcaaatcaatataatatgccacattaacaaaacaattaaaataacatgttcatctctgtagatggagaaagagcatttgacaaaattcaacattctgtcgttagaaaaacacttgaaaaaataggaatagaaggaaattattccaacagaataaaggccatatgtaaaaacccacagctcacatcatattaatgaagaaaaactgaaatctcttcttctaagatcaggatcaggaacaaggcaaggatgactttatgaagtacataaagtcctagctaaaataattaagcaagaaaaagatataaaaggcatccaaattggaaaggaagaagtaaaattttytctattcacagaaaacatcatcttatatataaaaaaacccctaaagat

SEQ ID NO: 602363 - DNA, 480 bp, Homo sapiens
aaaatggtagttgtcagggcctggaggaaacaggaaatctggagttgctgttcaccaggtgtggagtttcagtcaagcaagataaaaacattctagatttctgctgtacaacaacgtgtatatcattaacaaaatgttctgcaaacttaaaattttgttaagatggtagatttttttgttatgtgttctttaattacaaaaatttctgtctgtatttagtttacattttagtaaggaaagacaaataagctaataagtggtaatgataaatgctgtaaggatatctagagcaataaaagaagttatggatatgggagtataattttagatagtgaagatttctgtattcaaatgccacatggaaaaaggactaaggggaatgaggagatgagtcatatggaatgcccaakacatagaagaaggcaggcagagaaaataacaaggataaagacactgaagtaaaatcatgctttctatatt

SEQ ID NO: 602364 - DNA, 401 bp, Homo sapiens
gaagtaaaatcatgctttctatatttcaaaacagcagcaaggacactggtgtgacagagaaggagtgatcaatgggaggttgcagattttgtcagagatattgtcaaggctcaggatcatacagggacttgtaaacctggaaagcactttgaattttattcagaatgagatgagaagccattgaaaagtttttaagcagataagtaaaataatmtaccttgtattttaagaggagcattctactttctctgtgggatagagaggtggaagggcaaagcttgaagcagagagagcagtgaagagtgtactgtatattcttatgtgagaaatagtggagggaatgagaggtggtcagccttaaactgccatttgctctctgtatcagggctcagggactttca

SEQ ID NO: 602365 - DNA, 414 bp, Homo sapiens
aatataggaaaaaaatccactaaatttsgtttatgagaaattcatgattcattgtataccttgatactgggcttaaagcagcaatcctaattccagatctaccttcaagtctgggtcagtgttctcaaatgctgccagtttcatgtcaggaccggcttaatattgaaggtaactgagaattgctaatgtctgactggagctgaaagaggccaaaagcagggttataactttcagaaaactgacctggtgttaacttccatcccttccatttcaaacgggaaggtatcgcaattagaaactattagcagtcttatctaataacttgtggataattctttttttttttctttttttaagagtcagggtctcactctgtcacctaggctggagtgcagtggtgcaattgttatggaa

SEQ ID NO: 602366 - DNA, 414 bp, Homo sapiens
aatataggaaaaaaatccactaaatttcgtttatgagaaattcatgattcattgtatamcttgatactgggcttaaagcagcaatcctaattccagatctaccttcaagtctgggtcagtgttctcaaatgctgccagtttcatgtcaggaccggcttaatattgaaggtaactgagaattgctaatgtctgactggagctgaaagaggccaaaagcagggttataactttcagaaaactgacctggtgttaacttccatcccttccatttcaaacgggaaggtatcgcaattagaaactattagcagtcttatctaataacttgtggataattctttttttttttctttttttaagagtcagggtctcactctgtcacctaggctggagtgcagtggtgcaattgttatggaa

SEQ ID NO: 602367 - DNA, 414 bp, Homo sapiens
aatataggaaaaaaatccactaaatttcgtttatgagaaattcatgattcattgtataccttgatactgggcttaaagcagcaatcctaattccagatctaccttcaagtctgggtcagtgttctcaaatgctgccagtttcatgtcaggaccggcttaatattgaaggtaactgagaattgctaatgtctgactggagctgaaagaggccaaaagcagggttataactttyagaaaactgacctggtgttaacttccatcccttccatttcaaacgggaaggtatcgcaattagaaactattagcagtcttatctaataacttgtggataattctttttttttttctttttttaagagtcagggtctcactctgtcacctaggctggagtgcagtggtgcaattgttatggaa

SEQ ID NO: 602368 - DNA, 414 bp, Homo sapiens
aatataggaaaaaaatccactaaatttcgtttatgagaaattcatgattcattgtataccttgatactgggcttaaagcagcaatcctaattccagatctaccttcaagtctgggtcagtgttctcaaatgctgccagtttcatgtcaggaccggcttaatattgaaggtaactgagaattgctaatgtctgactggagctgaaagaggccaaaagcagggttataactttcrgaaaactgacctggtgttaacttccatcccttccatttcaaacgggaaggtatcgcaattagaaactattagcagtcttatctaataacttgtggataattctttttttttttctttttttaagagtcagggtctcactctgtcacctaggctggagtgcagtggtgcaattgttatggaa

SEQ ID NO: 602369 - DNA, 572 bp, Homo sapiens
ccgttagctagctcttcttctgtaacagtctctttctatgtattaatcaaaactgatgcaactttttaaagaactattcctagaaactttcttccttcccagtcagawttaatgtattatttatccatttaaaggactatataagtaggacatggtttgggtatataacagcacttacggccatttactttgtggttcagtgatttctgtgtgcttctgacttgtatatactttcagcccttgtagatgtagtggtggtagttttcccaacttaaatttatctttatcatccacctttatccacagtcctcctcatgattagcacattgtcaataaatatttactaagctgaactgaaagtttttattatgcataaatactaagatgtacatgtccatggtcatgcaggacagcagaagtcctatttttttttacaagtgtatctattgctaacaattgcttcaaggtcaggagccaactcatgtattagacatgtaaatcttgtgaaaatattcatattggaaacagcatgtagcaagtgcaaacagaagtaaatatatccttaaatttat

SEQ ID NO: 602370 - DNA, 436 bp, Homo sapiens
gcaactttttaaagaactattcctagaaactttcttccttcccagtcagatttaatgtattatttatccatttaaaggactatataartaggacatggtttgggtatataacagcacttacggccatttactttgtggttcagtgatttctgtgtgcttctgacttgtatatactttcagcccttgtagatgtagtggtggtagttttcccaacttaaatttatctttatcatccacctttatccacagtcctcctcatgattagcacattgtcaataaatatttactaagctgaactgaaagtttttattatgcataaatactaagatgtacatgtccatggtcatgcaggacagcagaagtcctatttttttttacaagtgtatctattgctaacaattgcttcaaggtcaggagccaactcatgtattagaca

SEQ ID NO: 602371 - DNA, 436 bp, Homo sapiens
gcaactttttaaagaactattcctagaaactttcttccttcccagtcagatttaatgtattatttatccatttaaaggactatataagtaggacatggtttgggtatataacagcacttacggccatttactttgtggttcagtgatttctgtgtgcttctgacttgtatatactttcagcccttgtagatgtagtggtggtagttytcccaacttaaatttatctttatcatccacctttatccacagtcctcctcatgattagcacattgtcaataaatatttactaagctgaactgaaagtttttattatgcataaatactaagatgtacatgtccatggtcatgcaggacagcagaagtcctatttttttttacaagtgtatctattgctaacaattgcttcaaggtcaggagccaactcatgtattagaca

SEQ ID NO: 602372 - DNA, 436 bp, Homo sapiens
gcaactttttaaagaactattcctagaaactttcttccttcccagtcagatttaatgtattatttatccatttaaaggactatataagtaggacatggtttgggtatataacagcacttacggccatttactttgtggttcagtgatttctgtgtgcttctgacttgtatatactttcagcccttgtagatgtagtggtggtagttttcccaacttaaatttatctttatcatccacctttatccacagtcctcctcatgattarcacattgtcaataaatatttactaagctgaactgaaagtttttattatgcataaatactaagatgtacatgtccatggtcatgcaggacagcagaagtcctatttttttttacaagtgtatctattgctaacaattgcttcaaggtcaggagccaactcatgtattagaca

SEQ ID NO: 602373 - DNA, 436 bp, Homo sapiens
gcaactttttaaagaactattcctagaaactttcttccttcccagtcagatttaatgtattatttatccatttaaaggactatataagtaggacatggtttgggtatataacagcacttacggccatttactttgtggttcagtgatttctgtgtgcttctgacttgtatatactttcagcccttgtagatgtagtggtggtagttttcccaacttaaatttatctttatcatccacctttatccacagtcctcctcatgattagcacattgtcaataaatatttactaagctgaactgaaagtttttattatgcataaatactaagatgtmcatgtccatggtcatgcaggacagcagaagtcctatttttttttacaagtgtatctattgctaacaattgcttcaaggtcaggagccaactcatgtattagaca

SEQ ID NO: 602374 - DNA, 572 bp, Homo sapiens
ccgttagctagctcttcttctgtaacagtctctttctatgtattaatcaaaactgatgcaactttttaaagaactattcctagaaactttcttccttcccagtcagatttaatgtattatttatccatttaaaggactatataagtaggacatggtttgggtatataacagcacttacggccatttactttgtggttcagtgatttctgtgtgcttctgacttgtatatactttcagcccttgtagatgtagtggtggtagttttcccaacttaaatttatctttatcatccacctttatccacagtcctcctcatgattagcacattgtcaataaatatttactaagctgaactgaaagtttttattatgcataaatactaagatgtacatgtccatggtcatgcaggacagcagaagtcctatttttttttacmagtgtatctattgctaacaattgcttcaaggtcaggagccaactcatgtattagacatgtaaatcttgtgaaaatattcatattggaaacagcatgtagcaagtgcaaacagaagtaaatatatccttaaatttat

SEQ ID NO: 602375 - DNA, 521 bp, Homo sapiens
gttgacacaagcttgtgaaagacccagtatgccaggctaagggggtgggaacagtgagggacactgagggttttatggcttaaattttgacaagtgtatctacaatatagacaactaatgtaacactcctttttttttttttttttttttttttgagacggagtctcactctttcgcccaggctagagttcagtggtgagatcttggctcactgccacctgagcttcctgggttcargtgattctcctgccttagcctcctgagtagctgggactacagactgatcccaccacatctggctaattttttgtatttttggtagagacagggtttcgccatgttggccaggctggtcttgaactcctcagctcaagtgatccacctgcctcagcctcccaaagttctgggattacagggaacacttttttttaaatttttttttttgagacagagtcttgctttatcatccaggttggagtgaagtggctcagtcatagctcactgcagccttgacctcccgt

SEQ ID NO: 602376 - DNA, 404 bp, Homo sapiens
ctggtgatcgccctgtgagggcagggttgttttatacatgctgttcttcagcaccatgaacagggcctggctgttgaagatgcccaataaatatctgttgacagagaaaggttgacaggggcagacggatccaggatgactcccaaattcctggcccagtgcaaaagcctggatgatgatcccagtctgcagtatgagggccccaggagaagaagctggattgcagggaaagaagaatccagaagccatctctctgatctagaggaaacgaggctgtgcggtgtggaagggattaatgttaggaagcagaccggacttccgttcttaggacagaaaaaaatcttgtagcaggtagttcaaggctayaaaagatctgaagggacccagagatggtaagagtggaa

SEQ ID NO: 602377 - DNA, 331 bp, Homo sapiens
tttaaaaacatggatgccttgagccctgggcagccccaaggttgtgcctactgagggcacccacagaggattagaactggggcactggaaygagaggatcatcagaagcaaggcctggatgctcaaattcccaccacagtcataaaacttaagagcatctaagtcacaagcagcttttagtttctttcttaagaatccaactaatcttgtgttccaccttgtagccttctataaagtgtgaccattcacttggttgatgattaatgattcagctagcaattattaaacagaaaggaaccagaaataagaatcataaatttaaacaaaacat

SEQ ID NO: 602378 - DNA, 331 bp, Homo sapiens
tttaaaaacatggatgccttgagccctgggcagccccaaggttgtgcctactgagggcacccacagaggattagaactggggcactggaacgagaggaycatcagaagcaaggcctggatgctcaaattcccaccacagtcataaaacttaagagcatctaagtcacaagcagcttttagtttctttcttaagaatccaactaatcttgtgttccaccttgtagccttctataaagtgtgaccattcacttggttgatgattaatgattcagctagcaattattaaacagaaaggaaccagaaataagaatcataaatttaaacaaaacat

SEQ ID NO: 602379 - DNA, 331 bp, Homo sapiens
tttaaaaacatggatgccttgagccctgggcagccccaaggttgtgcctactgagggcacccacagaggattagaactggggcactggaacgagaggatcatcagaagcaaggcctggatgctcaaattcccaccacagtcataaaacttaagagcatctaagtcrcaagcagcttttagtttctttcttaagaatccaactaatcttgtgttccaccttgtagccttctataaagtgtgaccattcacttggttgatgattaatgattcagctagcaattattaaacagaaaggaaccagaaataagaatcataaatttaaacaaaacat

SEQ ID NO: 602380 - DNA, 331 bp, Homo sapiens
tttaaaaacatggatgccttgagccctgggcagccccaaggttgtgcctactgagggcacccacagaggattagaactggggcactggaacgagaggatcatcagaagcaaggcctggatgctcaaattcccaccacagtcataaaacttaagagcatctaagtcacaagcagcttttagtttctttcttaagaatccaactaatcttgtgttccaccttgtagccttctataaagtgtgaccattcacttggttgatgattaatgattcagctagyaattattaaacagaaaggaaccagaaataagaatcataaatttaaacaaaacat

SEQ ID NO: 602381 - DNA, 640 bp, Homo sapiens
tcatcaatttttacatcatggactccatgataaaaagaaagtacaggtggcttgttatcaaggctgaccattggactgtggactgcacctacatctaccaggttcttctgcatagtcccagttttaaatttttgacctgatattcatgaacacagtgctactggtcagacctttgtccaggtttaagcttcagaacataatgtcttcatgcagtgggaggcctggttagggttatgactctgccctggggcatctgccccttctgacctgraggtaaacttggcatctactacttacctctacacttgaacagccaaggatgggctgagcacagaggctcacatctgtaactccagcactttgggaggccaaggcaggaggattgcttaaggccagcagttcaagaccagcctgtgcaatatagtgaaacctcatctctgtaaaaactaaaaaaaccgaggatggtgggtgacagggagcagttcaacatgggaaactgagagctggaaggacccttagaccagccccccattaacagatgagactctaccctgagattatagcctaaggtaatgcattgagcttttctagagatttgaaaataatcaatcctaaaacccccaagcatactgctaatgtt

SEQ ID NO: 602382 - DNA, 580 bp, Homo sapiens
tactacagctttatcgggacacagcctcatcgtaagtcaaggagagtctattattaagtggcagagcccaaatttgaaactacacagtcagactgcagagcctgtgctcttaaccacttagttgtgtgacacctggcagggtatttaacttctacatgccctgttccctcatttgcaaaacacagataagtagggatgataagatattcccttcaaagaattatgttgtgtaattgagctaaggcattcaccatactcgcagtaagcattcagtagtttaggtgccctacacactggagcaaggttgaggaagggaaagggtacaatccaatgggctattaattattcaytgttactgttgataataatagttatcatgcattgagatccaactgagcattggccaccctacaaggtaaaaattatgtctgttttacagatgaagaaactgagtttcacatagattaggtaaattacctaaagccatccagttaataagtgacagaacagagctcttgttcaaacactgggcccttgactccaaagcctgcagttcccagcacccccagggtcaccaaaa

SEQ ID NO: 602383 - DNA, 580 bp, Homo sapiens
tactacagctttatcgggacacagcctcatcgtaagtcaaggagagtctattattaagtggcagagcccaaatttgaaactacacagtcagactgcagagcctgtgctcttaaccacttagttgtgtgacacctggcagggtatttaacttctacatgccctgttccctcatttgcaaaacacagataagtagggatgataagatattcccttcaaagaattatgttgtgtaattgagctaaggcattcaccatactcgcagtaagcattcagtagtttaggtgccctacacactggagcaaggttgaggaagggaaagggtacaatccaatgggctattaattattcattgttactgttgataataatagttatcatgcattgagatccaactgagcattggccaccctacaaggtaaaaattatgtctgttttacagatgaagaaactgagtttcacatarattaggtaaattacctaaagccatccagttaataagtgacagaacagagctcttgttcaaacactgggcccttgactccaaagcctgcagttcccagcacccccagggtcaccaaaa

SEQ ID NO: 602384 - DNA, 498 bp, Homo sapiens
gtggctttttggcaaggggaggtgattttgaacctggcagttgtcagccattcttccaattcactgtggattcaggagccatggaaaaatgaagaacatggagamcttcagcccaagcagaaccacagagacaggccaccggaagatggggtgacaaaaacagtgctgcagtgtgttagccacatttctttcagcagactccacttacctccacacacagacacacacacacacacacactcacatgaccgcagccacacacatatccacaacttgaaacactcccacagaaacacacatcccagcagcttcagaggctgtgtgtttctgcaggaagctcctctttggagagagcagcctggggaacacaggcagactgtacctagatatcacggagaggggcacatttcaaaaagactcacccccacaccctccaggcaggcccattcgggccatcttcatggtcaggtcccgctggagaaggaggcacttggagac

SEQ ID NO: 602385 - DNA, 498 bp, Homo sapiens
gtggctttttggcaaggggaggtgattttgaacctggcagttgtcagccattcttccaattcactgtggattcaggagccatggaaaaatgaagaacatggagaacttcagcccaagcagaaccacagagacaggccaccggaagatggggtgacaaaaacagtgctgcagtgtgttagccacatttctttcagcagactccacttacctccacacacagacacacacacacacacacactcacatgaccgcagccacacacatatccacaacttgaaacactcccacagraacacacatcccagcagcttcagaggctgtgtgtttctgcaggaagctcctctttggagagagcagcctggggaacacaggcagactgtacctagatatcacggagaggggcacatttcaaaaagactcacccccacaccctccaggcaggcccattcgggccatcttcatggtcaggtcccgctggagaaggaggcacttggagac

SEQ ID NO: 602386 - DNA, 578 bp, Homo sapiens
tatttacatacagcaggttgggggacactctttttgtagaattaagaagttacaattaagactgcattgaagcctatagtgaaaaacccaatatccagtgatgaaccctagaaaaaagctatttgtgaaaattctttgtgatgtgtgatttcatatcaaagagttaaacctttatttttgttcagaaaaatgaaaaaactttttttgtagaatctgcaaagagacgtttctgagcccattgaggccaatagtaaaaaatcaaatgtctcatcataaaagctagaaacaagctatttttgtgctttccaatgtgtagattcatttcacagagttaaacctttgcttttatacagggagttgggaacacacttttatagaacctatgaatggacatttcaragttcattgaggcctatactgaaaaaccgaatatcctgcgataaaaactaggaaaaaactgtctgtgagaatgctttgcgaggtttggcgtcatctcacagatttaaacggttgttttgattcagcaggtaggaaacactatttttgtaaaatctactatgagacatttctgagcctga

SEQ ID NO: 602387 - DNA, 533 bp, Homo sapiens
tactactaggtttccattttagagagttgaagatctgaggtctggagaagttagtgtgtagaaagttatatttaacaagtggcaagaccatgtggccaggtcagataagctgccttcagattttactcttgaacttctacaggataatgtctttttttaatagaaaaaaaaagagtgaacttagattttttttttcaaaatcatggactgtaagagttctttcaagatatgatgaaaagcaataattgtcccattttacattacctataattattgctcaccagaaattgattatcgatgcagcaaccttttacattcctctctkctttactatgcatgagggggcttcactgtaaataagaggtccaagattcagaaatatctttaacttgcaatgcttggtcacatgtatccatctgaaaaatattttgctcattagccatatggactcatatggcaaactacaaccagagacacaaaacatggaaagaagaaagggctatcagaagtcccatgtctccttacattttgta

SEQ ID NO: 602388 - DNA, 536 bp, Homo sapiens
cacaagacttctgcacaggcaaagtgaaagatcgtttctagagctgtgagataagatcatagtaaaaaagaactactaagtttttaaaggttatttcaaatgatggatttccatcttacaaatgaatgcaagyaggttgcaaggttgatggaaagtagaaaagttttctgacttgcgtgaacagaaaagaaacatcaatttgaaaggaaaacatttatttatttacttcctctacagttttcctgactgctacatttcatgagaagggattgtttatgagggtcaaggagctggaggcctggggaggagctggtgtttctgttcaagtttgagggtcctggagctggagtccaggggaggagccggtgctgccactgatgtcttagggtcgtggagctgaagatcccagaggagccggtgctgctattctagcttgagtttcgtggagctggagacccagggagaagatggtgctgctgttctaatttaaggatcgtgaaacagaagacccagaaaggagctggtgctgccgctgc

SEQ ID NO: 602389 - DNA, 532 bp, Homo sapiens
ctccagcctaggcgacagagtgagactctgtctcaaaaaaaaaaaaaaaaaacacagaaatgcagactcttagtccccaccccagacctgagggatgagagtctgcatttccataagaatccaggtgattggtgcacacagcgacatttgaaaagctagtataaatccacactggtgggaccaggagctggctgagagtaaggtaagggaagctgagtttttactaggatgaccaaccattctggttttcccaggacattcttagttttagcactcaacatcctgtgcaaaccaggatgattggtcatccctgctactgacccaaccacctctgccagcttctggggccctggtgcctaaaawtcccagtgagaagaccctggctccccgactgactaaggcctaacagtcggctgggtgtggtggctcacacctgtaatcccaacactttgggaggctgaggtgggaggattgctttgttaggaaagtaagagcataacagggccagagtaacaccattttaagttccgct

SEQ ID NO: 602390 - DNA, 448 bp, Homo sapiens
gtataaatttctgcttgaaaatacatcaggtaatcatctccctggagctatctcttctggacccctctgttctcctaccccaaactggattggttattttctaggcttccaggcctgcagaacaactgacatcatgggctctccttcycccaccatcttgggatttcctaaccctcttccttgtcagggatgcatagatgcccttttgcttctggatcccatgtcaccatcttggtttaggcccccattttgatgcactacatcctctagtagcttctgacaaagaatacatgagaggcaattttttgtgtgtgtgactgaaaatgccctcattctattattagacttcgtttgcctgaatataaaattctaggctatcagccactccccccaaaaattgtcttctggcttccagagttgtggtttgagaagttccatgttattggaa

SEQ ID NO: 602391 - DNA, 535 bp, Homo sapiens
cccaggttcaagtgattctcctgcctcagccttccgaatagctaaactacatgtgtatgccaccatacttggctaattkttgtatttgtagtagaaacaggatttcaccatgttggccaggctggtctcgaactcctgacctcaagtgatctgcccaccttggcctcccaaagtgctgggattacaggcatgggccaccgtgcccagcctattacatgttttaaggtcataaaactgctacttctggaatatttcttaaacttgcttgatttgtctaaattgagctaaagctgtaaggtctggctgctgggctccctgaaaccttgcacatatcttactgtatgactgtatttcgttttgagtctctggattctggggtttggacagatgaccatagtgaggcctgcagaaatatgcatgtcctcagtgtttggactgccagctgcaagcaagccaaacccaatatggccccatcatccctggctcagctgtgctacctggccatgctggaaggggtttgatcttccaggaattt

SEQ ID NO: 602392 - DNA, 546 bp, Homo sapiens
caggttcaagtgattctcctgcctcagccttccgaatagctaaactacatgtgtatgccaccatacttggctaattgttgtatttgtagtagaaacaggatttcaccatgttggccaggctggtctcgaactcctgacctcaagtgatctgcccaccttggcctcccaaagtgctgggattacaggcatgggccacygtgcccagcctattacatgttttaaggtcataaaactgctacttctggaatatttcttaaacttgcttgatttgtctaaattgagctaaagctgtaaggtctggctgctgggctccctgaaaccttgcacatatcttactgtatgactgtatttcgttttgagtctctggattctggggtttggacagatgaccatagtgaggcctgcagaaatatgcatgtcctcagtgtttggactgccagctgcaagcaagccaaacccaatatggccccatcatccctggctcagctgtgctacctggccatgctggaaggggtttgatcttccaggaatttgcttcacagctct

SEQ ID NO: 602393 - DNA, 534 bp, Homo sapiens
ccacaacttccgtctcccaggttcaagtgattctcctgcctcagccttccgaatagctaaactacatgtgtatgccaccatacttggctaattgttgtatttgtagtagaaacaggatttcaccatgttggccaggctggtctcgaactcctgacctcaagtgatctgcccaccttggcctcccaaagtgctgggattacaggcatgggccaccgtgcccagcctattacatgttttaaggtcataaaactgctacttctggaatatttcttaaacttgcttgatttgtctaaattgagctaaagctgtaaggtctggctgctgggctccctgaaaccttgcacatatcttactgtatgactgtatttcgttttgagtctctggattctggggtttggacagatgaccatagtgaggyctgcagaaatatgcatgtcctcagtgtttggactgccagctgcaagcaagccaaacccaatatggccccatcatccctggctcagctgtgctacctggccatgctggaaggggttt

SEQ ID NO: 602394 - DNA, 580 bp, Homo sapiens
atagtcccagctacttgggaggctaaggcaggaggatcacttgggcacaggagttcaaagctacagtgagctatgatttcacctctgcactccagcctggacaacacaatgagacccagtctctaaaaaaaaaaaaaaaaaaaaacaccaaaaagaggcaatggcaatgactcctgccccaaaccatccatagctgcagcagctgggagatgtttgagctgggccagaaggcagctgaaggagccctcattcctgcctgtcacatcctggtggaagtacaagggtcagacagcaaggagtaaatacaggctttgagagcccaggtctctaacaatgaaaacacaaaaatacacccctgggtgtgtgtagtagttcatgaccaaaggaaggccatagagaaaaaggtgagaagttaaaaacacagmaactccacaaaagagtgagttgcctttggcctctggaaccagatttagaatttcagccacactgttcttcgagatttcatgtgaacataggaagagtaaagttcaaaagctttggtttaacaggattccttttgaaaatgtttggccaaagggaa

SEQ ID NO: 602395 - DNA, 451 bp, Homo sapiens
ccccactgccccactctctctcttgctcctgcctttgccatgtgatgtgcctgctcccacttcaccttctgccatgattttaagcttcctaagcccccagaagcagatgccagtgatgtgtttcctgtttagcctgcagaactgtgagccaaggaaacctcatttcttataaattatccagcctcaggtatttctttttrgcagtgctaggacagcctaatacagaaggtcaggttagagagaaagtcctgggtagactcagaggccacagccactgttggggtgggtgaggacaggtctgaaaagattatgattttttttttttggaagccaaaataaatcattctgttgctgggttcaatctggactttattctttcagagcagaaaggggctcaaaggcaagaaattgtccttggactggaaagcagaaatgaagtaaaacaggagag

SEQ ID NO: 602396 - DNA, 529 bp, Homo sapiens
actacttatggatcctgggacccacacagagggaggctgagcaagtggggctctgggaacctactcccactttaactacaggtgttgctgccctttttgttttgtattttggatgtatgcttcaactttcacttgaagaaagtagttggagctcagtgaactttgagaactatggcatgatactatgctatttgccaagaggcaatttgtttggsaaatatatctctaactactttgaaagcattcaaagtcaaaccaagagaaagcagtttctccaactctgtttgctgggacttacagattagccaagagtggtgtaaactcaggagtggggcaaagaacccttgaaagtccacgagaccagactctagccagtggctacacaggatggacttgggtcacaaggatgctggtggtgctggccaggggtgtgggtaggatggggacagccagggtagcctaccacatgtaggtcatggaatctcctttggagattcatagtcctctccaggaaatttctggcttcttg

SEQ ID NO: 602397 - DNA, 529 bp, Homo sapiens
actacttatggatcctgggacccacacagagggaggctgagcaagtggggctctgggaacctactcccactttaactacaggtgttgctgccctttttgttttgtattttggatgtatgcttcaactttcacttgaagaaagtagttggagctcagtgaactttgagaactatggcatgatactatgctatttgccaagaggcaatttgtttgggaaatatatctctaactactttgaaagcattcaaagtcaaaccaagagaaagcagtttctccaactctgtttgctgggacttacagattagccaagagtggtgtaaactcaggagtggggcaaagaacccttgaaagtccaygagaccagactctagccagtggctacacaggatggacttgggtcacaaggatgctggtggtgctggccaggggtgtgggtaggatggggacagccagggtagcctaccacatgtaggtcatggaatctcctttggagattcatagtcctctccaggaaatttctggcttcttg

SEQ ID NO: 602398 - DNA, 583 bp, Homo sapiens
atcatgtactgaaaataatacatataactatacatacctcccaatcacatatttatattttcatcacatatgtatgtttataaacaatagttttattttatggttttatttttaaatttatataaataytggactttaatcttttgaacttgacttccactcaacatgatcttttcaaaatttattcctaatatgtagagatttcattaattttgcctcaagtatagtattccattggatgaacacttactcattttgaaaatccatccgttgatggtcatttaagatgttctaattttttgctttgagaaataatgctacagtgaacatcctatcatctgtctccttgagcaaaagtacaatcatttatttaggatgtacacttgggtttcgtgacttacaaaggcatcttccagttctccccaatcaatcaatcaatcaattactgcattaatcaatatttgctgagagcgtagtctatgaaaataaataactagacattagttcttagaacccccttgtgtttcaaccctgccgttgattcaaaataaaatcaaatctaaagacaaaaagtaagtagaca

SEQ ID NO: 602399 - DNA, 555 bp, Homo sapiens
tcagctaggcagtattcaaatattgcctcctctcccattctttctattttctctttctggaaacgtgtttatatatagatatagatggtaaagagagagaaatgtagggaattcctgtaagatgtatactgtttctccttattctattgcactttctttaattttttgtttcttatctgtttgttgtatcctgggcagtttcctcagggctatctttgaagtcactaattttaatgtttgacctacccacttgattttttaattaatgactacttttttttagacagggtctcactccgtcacccaggctggacttcagtggcatgrtcaaggttcactgcagcctcgacctcccaggctcaagagatcctccctgctccacttcccaaagtgctgggattacagacatgaagccgttgcacccacccaatgactaccttttgtattttttaaacatttaatttaattctttttcaatatgcctatttcttttcatagaaccctactatttatttatggtctttatttctttttaaaatattttattcattttaa

SEQ ID NO: 602400 - DNA, 506 bp, Homo sapiens
agaagtagccacatcctaattcttggaacttgtgaatatattgcattaagtggtaagggggaatttagtttccagacaaacttaaggttgctaatcaacaaccctgaaatggggagattattctggatttgccgatggatcccatgttatcacaatggttcttagaagtgaaagaaagagaggagagtcagagtctgagtgaggctgagagaaagattctcygccagagcctccaggaagcatcgcagcctcttctgcacctggattttagccctgtgagacccactgcaggctctgacctccagaactgcaagataatacactggctttgttgtgagccactaaatttgtggcaatttgttcatagcaaccataggaaactgatatgccctcccccaccgtttgaataggaggaaattttatactttaagccctaaaatctatgttcaaaataattttaagggtgatttaattggttttatttgtttggatatgcatccactgcc

SEQ ID NO: 602401 - DNA, 616 bp, Homo sapiens
gcccttctgccaagtttaccttcatatcccatttatccagactgtcatagcacaaattctttgaccaagccctccagccaaggatatgctatgggagcttaagcctcacatcctraaaacggtactggtgctggcttgggagtaaggctttactgggattttcatagactaattagagctcatccttttagctgaaatcaatgccccaaacctcctagctgctgcaaaatggatgactcaaagccccatgttcaatagaaagtccaacccaagcctcattaaagagcagacgacctacaatgtaaactaataaagataaataataatttagaacattataaaatgaagtaatgtgacaagagatgtttttgataatagatacttccaaaagagaaagattgcctaaagagaattgagaggttagactgtctgtgtgtctgagtgtagcagtgaccaaggaaaattatgttgtgattctagaagatggattccagtaatttaggcagaaacaaccgcagggcagagaaggattaactccaagttaggttagcctgaggagacttcccttgggcaatacctaatctttttgttgtaaattctatgcttgccaagcaac

SEQ ID NO: 602402 - DNA, 554 bp, Homo sapiens
cacccagagaggaaatggaactcttagaaactcataacttgtaacgctctatggatttatgcaagagcgtgaaatcgtctctgccttataagacatagaggactccatcagctcctcagcactaaaggagttgcccatctcactgcctctctctggcccascatttgcatccctgagaattctcagaggtgtcaagcaccgaccaggtgtcagtctaagaggtacagagagtcacatccaagccagtggcctcacaaaaaggcactggctatgagtcagtgcttcccaacacctactaggctgtaagcccagctccaacagggaatttgggagggagatagagaaggaattttctcccatctacatctccacagggtgccctgttggcccctgcagagaagggaagaagaatcaagcggcacaatttgtatgttcattcgtgtgcacactgattatttcaaaataacagcagtgcagagccttcaaatgtccatgaaggctgttaggagataaccgtcaggcttccagtggaccacatgacaagtccaatcatc

SEQ ID NO: 602403 - DNA, 537 bp, Homo sapiens
atcccgggttgctgtctggtgctcctggttgcttttcctttgtagtagctgtcatgcagagaggactatgaggattcttttcctttgggtccccttttcctttttttctcctctcatcttattttctttgcttttccttcctcatcttcttcttccgtcccttaacaccaacatttgtttttctttccccactgttaaaactgaagtactgtgggtgctattcacyacaattccatggcttgtgtttcagctgcttccgtaagacccctggctcctccaacaaggactaaggcaattgtttctgtgtaaatctaattttgaaaggggaggaagaatgcctcacctgagctcacatgtggcacccttgtggtcccctgttgggctctccttgagctctagagcttgttgtggagttccctgagaatagaactccacttctgctgcccatgccatcagtggccaccctgcaccaggtgccagctctggagactgtgagtggctgctgtgcctgggtggtgcactgtccctgtggctgcc

SEQ ID NO: 602404 - DNA, 513 bp, Homo sapiens
tttttttgtgcgtgtgaaaataaatgtatcccagtgatatgtatgattatcacattgatgattttacctcctcttgatgctgactgagagcacaaactggaaacaagagatatgtttgtcttaccattttcttgctatttgtcggtatcattaccattttctttaayccatagcttgttcgaaaagtctttttaagtcatttgcccattttgtggtggttggtttagttaaaactattatctctaaatccagagtactgacatatgtaaactgttctaacgtgctcaagcaaatgaatgactaagagatctaaattaatgtgtatattaaacattaaaaatctttacctactttcttattttttaggtaaatacaaatagaagttgtaacattttattcctacccctcaatgactcatcttgctaatcccctgggcacccacattttatttcagagaccacggctttgagtactagaaaacaaacacaagtgatttaatgggaggacaggtga

SEQ ID NO: 602405 - DNA, 520 bp, Homo sapiens
aatcaactaggatttggtcactgattggctgcagtcaatgaagtaaaagaaagaggtaaagatgagttccaggtttctgacttcagtgataacaaatatttgtccagtgaaaatgaaaggcatggatcatgattctaaccaagatagaaaataaagatattgaatttagttttggccagtctaaattggaggtccagtgtcagatgagtggtttgatatatgctgatactggaattctggagagagtcctgggcagaaattatagaactgtgctgtcagccttgagcatgtccttatttccaattgttgtaggacrtgtctacctagatattctaccatcacctgaaatccagcttaatctaattcgaactcatcagtttttcacccaagataattttcttaactctctcacaattaactgtggcactaagacacccacctctagtctctaagcagtagaggtaagcttagacttttcctcctcattgttattggtaaacttgcctattatcatgttctg

SEQ ID NO: 602406 - DNA, 520 bp, Homo sapiens
aatcaactaggatttggtcactgattggctgcagtcaatgaagtaaaagaaagaggtaaagatgagttccaggtttctgacttcagtgataacaaatatttgtccagtgaaaatgaaaggcatggatcatgattctaaccaagatagaaaataaagatattgaatttagttttggccagtctaaattggaggtccagtgtcagatgagtggtttgatatatgctgatactggaattctggagagagtcctgggcagaaattatagaactgtgctgtcagccttgagcatgtccttatttccaattgttgtaggacatgtctacctagatattctaycatcacctgaaatccagcttaatctaattcgaactcatcagtttttcacccaagataattttcttaactctctcacaattaactgtggcactaagacacccacctctagtctctaagcagtagaggtaagcttagacttttcctcctcattgttattggtaaacttgcctattatcatgttctg

SEQ ID NO: 602407 - DNA, 586 bp, Homo sapiens
agttcagggtgacaaaactagtgacactcagtaccatgcagggattcagattacagattttggagtcaggctgtctgagtttgaatcctgggactttggataagtatgcccttctgtttcctcacctataaaacaggtaaactrgttatctcatgggattattatagaaattaaagaagataatctctgtagagtgcctgctgtagttgttggtacttgataaatgtgctgtaattgtcagctaagattgctattgtttcctaatacgtagagtgaattcccattattcctggtatttatattccacaaagttgccacaaacactgagttagcaaatactgaaccattgatcctaggggaaatacagggttagtctcttgcaagcctatggtcacatttttgtcaacaaatgaatacataccgctgttttatgtgtgtttctatttaaaaacaccttatttaatatgtagtgttgattcattaacattgaactctcagctaagagcactagagcggatgacttcatgaagattatctaagacacacattttctttttaaggcacattcttgtgattaggaatgcca

SEQ ID NO: 602408 - DNA, 586 bp, Homo sapiens
agttcagggtgacaaaactagtgacactcagtaccatgcagggattcagattacagattttggagtcaggctgtctgagtttgaatcctgggactttggataagtatgcccttctgtttcctcacctataaaacaggtaaactgsttatctcatgggattattatagaaattaaagaagataatctctgtagagtgcctgctgtagttgttggtacttgataaatgtgctgtaattgtcagctaagattgctattgtttcctaatacgtagagtgaattcccattattcctggtatttatattccacaaagttgccacaaacactgagttagcaaatactgaaccattgatcctaggggaaatacagggttagtctcttgcaagcctatggtcacatttttgtcaacaaatgaatacataccgctgttttatgtgtgtttctatttaaaaacaccttatttaatatgtagtgttgattcattaacattgaactctcagctaagagcactagagcggatgacttcatgaagattatctaagacacacattttctttttaaggcacattcttgtgattaggaatgcca

SEQ ID NO: 602409 - DNA, 586 bp, Homo sapiens
agttcagggtgacaaaactagtgacactcagtaccatgcagggattcagattacagattttggagtcaggctgtctgagtttgaatcctgggactttggataagtatgcccttctgtttcctcacctataaaacaggtaaactggttatctcatgggattattatagaaattaaagaagataatctctgtagagtgcctgctgtagttgttggtacttgataaatgtgctgtaattgtcagctaagattgctattgtttcctaatacgtagagtgaattcccattattcctggtatttatattccacaaagttgccacaaacactgagttagcaaatactgaaccattgatcctaggggaaatacagggttagkctcttgcaagcctatggtcacatttttgtcaacaaatgaatacataccgctgttttatgtgtgtttctatttaaaaacaccttatttaatatgtagtgttgattcattaacattgaactctcagctaagagcactagagcggatgacttcatgaagattatctaagacacacattttctttttaaggcacattcttgtgattaggaatgcca

SEQ ID NO: 602410 - DNA, 586 bp, Homo sapiens
agttcagggtgacaaaactagtgacactcagtaccatgcagggattcagattacagattttggagtcaggctgtctgagtttgaatcctgggactttggataagtatgcccttctgtttcctcacctataaaacaggtaaactggttatctcatgggattattatagaaattaaagaagataatctctgtagagtgcctgctgtagttgttggtacttgataaatgtgctgtaattgtcagctaagattgctattgtttcctaatacgtagagtgaattcccattattcctggtatttatattccacaaagttgccacaaacactgagttagcaaatactgaaccattgatcctaggggaaatacagggttagtctcttgcaagcctatggtcacatttttgtcaacaaatgaatacataccgctgttttatgtgtgtttctatttaaaaacaccttatttaatatgtagtgttgattcattaacattgaactctcagctaagagcastagagcggatgacttcatgaagattatctaagacacacattttctttttaaggcacattcttgtgattaggaatgcca

SEQ ID NO: 602411 - DNA, 557 bp, Homo sapiens
ggcagctcattctgtccttgaccagctctaacttttacaaagcttgctaaattccaccccataggacctcgcagaagcactttaacaatttctttcaaatgacattcctgtactggaacacagctattgtgtctccttagactgaagtgtaggttaagcattctcatttcctgtaacaatttgccatatgataatagtttgattgccctcattgtccttattgccctccttggaaggtatttcagtgtttcaatatcttttttagagagtgaagcccaggactaaagctgagtatgtgagtgccaggtgaggtctgatcagggtttcagaaaaaagtgatgattatccttttcatcctaaatgctatattttgctaaatatttttagagtttatgtggcagggacaattggtgctcacacagtaaatgcacattttttaacgtttccttgtcttaagcatccagatggagtcatatgactaattmttgccgatgggtgacaggtggaaataatacaagcctcctgcaggtctgatgcgtaagaacatcccaaggaat

SEQ ID NO: 602412 - DNA, 514 bp, Homo sapiens
tcgatgggttcagcaacggagttctccactgtccactctagatgctccataagcaaagtgttttagggtcacagaggtctgggaagtgaaaaatcagtcttgaagattcacaatacaacattaacatattaaaggctctgagaaatcctgcactgaaaaacactcatttgatttcatttaatttagaagttcttaaaattatttgaccttggaaccctttcttccatgggagtaatattagtgtcacagtgaactagtttccaatggaaggctcttctagaaatgttggcccaggatartcaacagtgaaatgtccttcagtggataataatatggcagattatttttattctgatcttttcatcacctggccctgtcccagcaaggttttggagagaaataacaagccactagtatgtgtattggattgctagataccctcagatgcactgagagaagtagtcccctgtgcccggccagctctccaggatgttcctgtgtatattcccaaacc

SEQ ID NO: 602413 - DNA, 585 bp, Homo sapiens
cctgtcccagcaaggttttggagagaaataacaagccactagtatgtgtattggattgctagataccctcagatgcactgagagaagtagtcccctgtgcccggccagctctccaggatgttcctgtgtatattcccaaaccttgaggtcatcctttaggtggtgtgacagcaaatagctattgggagctgtgtgacttttgtctgtgtcattgagaacaggttctaaggaaattgaggaaaggacacaaggaggacactggaggacctcttcctagccactactgtgttctatgcttctttacagacatagacacagtacatggcataaacataatatgtggaataacagcaatcagctcaaggaaatgtgaggttgaggcaaactcactttttttgcagtcttcatattttccactattgtctactcctcaaaactcttctgtaacccctgatcaactttaccattaatratactactgatcccttgaactttgggttctcattttctgacaacagctgccttatctgctactagtttattgctctcaatacactcacataaattcaatcatgacgatcacag

SEQ ID NO: 602414 - DNA, 590 bp, Homo sapiens
ggttttgcaattattaattagggkttttgtattttgtcaggcaccttgaagtaattttaattattatgacaaacatgtagcataaatactctatgattctatatgaatttctatatgactttctctgatatctttgagtttgtggttattgcctacttaaaagaaagtttaggccatgtcactgccttcaaaaagtttaaagtcttctacattaacaatgcaccacagagcaaagacaggccagcctacgttcagaatttaaatttaaactctcatgggcctaagacaggttactaaagagaatcatgattcatattctttgttctctaaggtggaacaagtgtctagactcttgagagctggatgtcagcaggctttaacacagtgattctcagtgtagaaaaagtggtagaaagctgcctcaacgactgaaaaactgagggggaaaaagctgtctcctaaaacacaggagacccagagaagacgaggtatggcagagaccttgtggtttccatctgttcaagaaaaacttgagtaaacattttagttggtttccattccctgccccatcttggtgtttgtataccatt

SEQ ID NO: 602415 - DNA, 590 bp, Homo sapiens
ggttttgcaattattaattaggggttttgtattttgtcaggcaccttgaagtaattttaattattatgacaaacatgtagcataaatactctatgattctatatgaatttctatatgactttctctgatatmtttgagtttgtggttattgcctacttaaaagaaagtttaggccatgtcactgccttcaaaaagtttaaagtcttctacattaacaatgcaccacagagcaaagacaggccagcctacgttcagaatttaaatttaaactctcatgggcctaagacaggttactaaagagaatcatgattcatattctttgttctctaaggtggaacaagtgtctagactcttgagagctggatgtcagcaggctttaacacagtgattctcagtgtagaaaaagtggtagaaagctgcctcaacgactgaaaaactgagggggaaaaagctgtctcctaaaacacaggagacccagagaagacgaggtatggcagagaccttgtggtttccatctgttcaagaaaaacttgagtaaacattttagttggtttccattccctgccccatcttggtgtttgtataccatt

SEQ ID NO: 602416 - DNA, 590 bp, Homo sapiens
ggttttgcaattattaattaggggttttgtattttgtcaggcaccttgaagtaattttaattattatgacaaacatgtagcataaatactctatgattctatatgaatttctatatgactttctctgatatctttgagtttgtggttattgcctacttaaaagaaagtttaggccatgtcactgccttcaaaaagtttaaagtcttctacattaacaatgcaccacagagcaaagacaggccagcctacgttcagaatttaaatttaaactctcatgggcctaagacaggttactaaagagaatcatgattcatattctttgttctctaaggtggaacaagtgtctagactcttgagagctggatgtcagcaggctttaacacagtgattctcagtgtagaaaaagtggtagaaagctgcctcaacgactgaaaaactgasggggaaaaagctgtctcctaaaacacaggagacccagagaagacgaggtatggcagagaccttgtggtttccatctgttcaagaaaaacttgagtaaacattttagttggtttccattccctgccccatcttggtgtttgtataccatt

SEQ ID NO: 602417 - DNA, 542 bp, Homo sapiens
ttggaactggaacctaaaatatttctattattctttaagttctattaccaacttrctaatgatgacatttgtgggtgactttgattgacggaaaaatagcaataaagatgtgaaaagactcccattcgtggaagaataggaatgaggactgagagtccccctgtggtccttttctgatttaatcatagaattgtaggatttgataattaataaaccaatgggtgggtatcattttttaatatacaaaaagccctacacttacctgagctcttgatttaggagaccctggagaaaaatatatattgtttccaaatagtttcagagagggggctctagtttctctcaatataaccctttctggtcttaagttcctttatcaccaaatactcatttctatctaacccaaatcctgactgctgtcatttgagcccaaatccttttgttcagtaggagctagtgtaaactttttatttatagctttggaaaggtgcaggaaatatatttgaatgatttctgactgctgacaagccttaacaaccgat

SEQ ID NO: 602418 - DNA, 569 bp, Homo sapiens
cccccaccgccctgtgcctcctgactgggagacatttcccagcaggggtcgacagacacytcatacaggagagttctggctggcgtctggtggctgcccctctgggacaaagcttccagaggatggaacagccagcaatctttgctgttctgcatcctctgttggtgatactcaggaaaacagggtctggagtggacctccagcaaactccagcagatctgcagcagaggggcctgactcttagaaggaaaactaacaaacagaaaggaatagtatcaacatcaacaaaaaggacatccacacaaaaaccccacctgaaggtcaccagtgtcaaagaccaaagttggataaatccacgaagatgaggaaaaaccagctcaaaaaggctgaaaattccaaaaaacagaatacctcttctccttcaaaggatcacaactcttctcccacaagggaacaaaactggatggagaaagagtttgacaaattgacagaagtagacttcagaaggtgggtaataacaaactcctccaagctaaaggggcatattctaacctaatgcaaggaagcta

SEQ ID NO: 602419 - DNA, 565 bp, Homo sapiens
tctgctaagggacagactgcctcctcaagtgggcacccccaccgccctgtgcctcctgactgggagacatttcccagcaggggtcgacagacacctcatacaggagagttctggctggcrtctggtggctgcccctctgggacaaagcttccagaggatggaacagccagcaatctttgctgttctgcatcctctgttggtgatactcaggaaaacagggtctggagtggacctccagcaaactccagcagatctgcagcagaggggcctgactcttagaaggaaaactaacaaacagaaaggaatagtatcaacatcaacaaaaaggacatccacacaaaaaccccacctgaaggtcaccagtgtcaaagaccaaagttggataaatccacgaagatgaggaaaaaccagctcaaaaaggctgaaaattccaaaaaacagaatacctcttctccttcaaaggatcacaactcttctcccacaagggaacaaaactggatggagaaagagtttgacaaattgacagaagtagacttcagaaggtgggtaataacaaactcctcca

SEQ ID NO: 602420 - DNA, 569 bp, Homo sapiens
cccccaccgccctgtgcctcctgactgggagacatttcccagcaggggtcgacagacacctcatacaggagagttctggctggcgtctggtggctgcccctctgggacaaagcttccagaggatggaacagccagcaatctttgctgttctgcatcctctgttggtgatactcaggaaaacagggtctggagtggacctccagcaaactccagcagayctgcagcagaggggcctgactcttagaaggaaaactaacaaacagaaaggaatagtatcaacatcaacaaaaaggacatccacacaaaaaccccacctgaaggtcaccagtgtcaaagaccaaagttggataaatccacgaagatgaggaaaaaccagctcaaaaaggctgaaaattccaaaaaacagaatacctcttctccttcaaaggatcacaactcttctcccacaagggaacaaaactggatggagaaagagtttgacaaattgacagaagtagacttcagaaggtgggtaataacaaactcctccaagctaaaggggcatattctaacctaatgcaaggaagcta

SEQ ID NO: 602421 - DNA, 545 bp, Homo sapiens
ctgagtactctatattataattagggtgattacatatgttatgtcccaaatctggacacttctgagaataaaagaggttgctattaataattagcccaggacaacaggtataaattggaaagctagaatttatgagcaccttgattataaaaaatagaaactaagattgccagatgatcgagtcattaaaattaatttaattgcctttttagtgttctgccattatgactgagataaaaagtgaaattggccactctaataacagcaaacatttttgamcacttattacgtgccagacattattctgtacattttattttagaaacaggattaatccttatgatgactctgtgaagttgctatagttgtccctattttatagaagaggaaactgatacctggggaggttaagttaattgcctctggtcagaaagctagtaagtaaaagatctgggattaaaacccaggtattttggccacagaatccatgtcttagcagccaccttattctgcctctcatgcctctagcactgatgattctagag

SEQ ID NO: 602422 - DNA, 545 bp, Homo sapiens
ctgagtactctatattataattagggtgattacatatgttatgtcccaaatctggacacttctgagaataaaagaggttgctattaataattagcccaggacaacaggtataaattggaaagctagaatttatgagcaccttgattataaaaaatagaaactaagattgccagatgatcgagtcattaaaattaatttaattgcctttttagtgttctgccattatgactgagataaaaagtgaaattggccactctaataacagcaaacatttttgaacacttattacgtgccagacattattctgtacattttattttagaaacaggattaatccttatgatgactctgtgaagttgctatagttgtccctattttatagaagaggaaactgatacctggggaggttaagttaattgcctctggtcagaaagctagtaagtaaaagatctgggattaaaacccaggtattttggccacagaatccatgtcttarcagccaccttattctgcctctcatgcctctagcactgatgattctagag

SEQ ID NO: 602423 - DNA, 544 bp, Homo sapiens
agctgtttgggcagacactgagctagctrcaggagttttttcataccccagtggcacctggaatgccagtgagacagaactgttcacttccctggaaagggggctgaagccagggagccaagcggtctagctcattggatcccaccccaatggagcccagcaagctaagatctactggcttgaaattcttgctgccagcacagcagtctgaagtctgggatgcttgagcttggttgtgggaggagcatccgccattactgaggcttgagtaggcgattttctcctcacagtataaacaaagctgccaggaattcagactgggtggagcccaccacagcttggcaaagccactgtagccagactgcccctctagattcctcctctctgggtagggcatttctgaaagaaaggcaacagccccagtgaggggcttatagataaaactcccatctccctgagacagagcacctcggtgaaggggtggctgtgagtgcagcttcagcgacttaaacatttctgcttgccagctctgaagatagcagtg

SEQ ID NO: 602424 - DNA, 585 bp, Homo sapiens
agcactgctatttagcaattgtgtcactattgagagagtgtacacccattgccataatgggaccaattgtgaaataaatttaattttaattaaaagataattgattttcctattctaaactatcaaagtttgaactgtctaatatctcagaaccacttaagtggtcaacatttaggtgacaacactcaccttcaacttttaaatttttacattaaactagcagaaacaagatttttaaagaaatgaaatagtaaagaattggaatttttccctcttaattttttaaacatgcccaagacccagaagattttccataaatgctactgccaactggctgaaaggcaaatatcactgtatggaaactgtacccgttaaattcatatatttggtaaatgatgtaatttctaggttatttaattcattaaatcacaaaatgttcaacagtgtgatgggagtgcatatttgaagctggttgcctttgatctcataaagtattkgagttttataactatacacatatatttttaacagagtttatctccccagtagtctatttggtttaattgagaatattgagttgggaag

SEQ ID NO: 602425 - DNA, 543 bp, Homo sapiens
ctttgtaataataatagtaataaaaaagtttctataactcaagcatttgtccttggtatgttctaaattatttcttcagaacttttttaaaggcrggcataatggaaggcttagagattctattcagctgctttaaaatcaaaaccaaagaacagcggtggcagcacaagtctgaaaaggcattaagtcatcgaaatcgccattcagtgaaccagctttggaacagatgtcgctcccatcaccttcatccaaagaaccaaggaggggacattgactatattatgaagataataaagccaacagccttaagtcagtaatgccttcatacaaaactcttcaggcagactcactaaatggtcctgaagaccccatcatagtctttgcttgatgtaacaacatcttattttctcagcatttcagggggtgaaaggatgatggctagcattgagccctaaatcaggatacttatgctgtacctacagaaaaatgagagtagaaactcttacattggcctgcaaggctgaatggaggccacatttgttc

SEQ ID NO: 602426 - DNA, 534 bp, Homo sapiens
taataatagtaataaaaaagtttctataactcaagcatttgtccttggtatgttctaaattatttcttcagaacttttttaaaggcgggcataatggaaggcttagagattctattcagctgctttaaaatcaaaaccaaagaacagcggtggcagcacaagtctgaaaaggcattaagtcatcgaaatcgccattcagtgaaccagctttggaacagatgtcgctcccatcaccttcatccaaagaaccaaggaggggacattgactatattatgaagataataaagccaacagccttaagtcagtaatgccttcatacaaaactcttcaggcagactcactaaatggtcctgaagaccccatcatagtctttgcttgatgtaacaacatcttattttctcagcatttcagggggtgaaagsatgatggctagcattgagccctaaatcaggatacttatgctgtacctacagaaaaatgagagtagaaactcttacattggcctgcaaggctgaatggaggccacatttgtt

SEQ ID NO: 602427 - DNA, 592 bp, Homo sapiens
aatgctaatgttttgctcacccaatatcagtcattagtttatcacattagcctcagtcaccctgggaaaatggaacttggtcgggtaagcactaatgaaagacaaggtgaaagggatgttccagaacatgtgtggggagtggagatgagagtggtggtgggtaagcagagtgtcctggggtcagagccagagtgacaggcaataaaccagtctctcctggtcggaagtggggtgcacacacgcctcctggaggaagatactaaaaggaagattaggggaaaccttaatcaagcctcatctccatcatagttttgtctggggctggtcctcgttgggtctcagcaactccaataaacaagagagaagatatgaacccacatcctaacaaaaagagatggtcaaacagttccgacgcttccagaagaaacagctyaactgggaatctgaaacacacatttgccccttgccatttaagatgatccacagaaaactaggccatctctatttgacagaatgacagcaattcccacagtggctttaagttgttatttgaaaatcagattatttatttttttaaaggcaacatccattg

SEQ ID NO: 602428 - DNA, 572 bp, Homo sapiens
gcaagaatttttctgttctcgttcagtctgaaaaccaatatagaattggaaaccttgcttcacgcttccttaccccagtatctgcaaagctcaaatagcaccctataattcaaacagagaatgagatggcctgggggcgttgtgtgaacgagtcaggagccaggcaaggcagacygaattcaagcgttcctggtactgatgacaaccgttagcttccactatttctgacttttccatgcttgctatctcattatgtcacatcttgaaaatgcagcaagagaaaattccatttcagctctaataatagaaatgggtaatatttaccactttaacagattgtgctgtgttgtgaacgaaggctgcctcttcagtcacatcatatagatgaacttttttcagctatagtggagcatatgggaattagaaaactaagtatactatgggagcaatgtgattttaagaaaataatttaatctaaatcgtggtgttaaatggaaatctcatccttaaaataacgtatgttggaaaagcaaataaatgtctaaatggggggaaaggcaattttaaaatgt

SEQ ID NO: 602429 - DNA, 592 bp, Homo sapiens
catttcagctctaataatagaaatgggtaatatttaccactttaacagattgtgctgtgttgtgaacgaaggctgcctcttcagtcacatcatatagatgaacttttttcagctatagtggagcatatgggaattagaaaactaagtatactatgggagcaatgtgattttaagaaaataatttaatctaaatcgtggtgttaaatggaaatctcatccttaaaataacgtatgttggaaaagcaaataaatgtctaaatggggggaaaggcaattttaaaatgttattttaaagtatattagtggcactaaatcctactgtattgaaaaatcagatcatttcccaaacaaaagcatactatttaaatttattaatagcaatacattatattggtcaaaaatagaagaaaatgccaagatgtccttgagccacagatgaaagcaaaatgactgaattgccttctatataaaccacagccaatatagaagagcagcaagaaacagtgtgartgaagatttgaataagggtgtctgaggagaaactgtgcatcttctctacctagattttctcattattttaagtctacaattg

SEQ ID NO: 602430 - DNA, 521 bp, Homo sapiens
acctggagacagctactcatgttctggtgactgtgagatgtgatgtacaagagcaaaattaggcccacatgatagattgacattgaggacacttgagatgaacaacttcttctagtttaaacatgmgacagcccgataaatgagttaggaaaattgacagtcacttatacctgcaggcatcagcagccatctcagctaggctgctgacaaaaggtcgcagctcacctgccatggagacagccaacagtgaggctacaaataatttgttttaaaacattgtttagatacttcatactgtttggtgacagaggagtgtctgatttcctctccctcatcctctcccaccccttgactctttagctcacttgcgagtatgcacgtgccctctctttctaaaatcatgcagaagcaataaatcagccagtttaggaagacccagccagcccaacacagatcgatttcacagggaagtcgatgggctgctaatagaattacaactacctgtcaaaacaggaaaaaca

SEQ ID NO: 602431 - DNA, 626 bp, Homo sapiens
catatttggcagtatgtgatacctagacaatttggcatttacatttcaactatggtgcatttaaactacgcgggatgacataagacaaaagctaggcttctaaactttggcktttttatgactgatatttaaaataatgtaccaagaggttaatacccccacttgaaattgtctctatgtctcttcctacacacaattggtttgactgttacgactgtcaagataaattagaaaagagttgagccaattgtgcctttagacacagctttaaatatccctgccatagatgaaaaatgaaaaggttaaactggaaacttctaaggtttcctcaagccttaataacataggattctataattctatggtttaatgcagtcagatatgtttagagttctccctccccaaccatgagttccttttacatgaaatctaagtacaatggaatttccttctctgaacattttaggcaactgtgatgattccagttctaatacatgggaattgctgggacacttctgtaccagcctcaatcagatgatcagggatcacaacattggctctgtggctttgacacatttgctctctaaatcttgctcttcctatcttatttttcttctaggtcctta

SEQ ID NO: 602432 - DNA, 626 bp, Homo sapiens
catatttggcagtatgtgatacctagacaatttggcatttacatttcaactatggtgcatttaaactacgcgggatgacataagacaaaagctaggcttctaaactttggcgtttttatgactgatatttaaaataatgtaccaagaggttaatacccccacttgaaattgtctctatgtctcttcctacacacaattggtttgactgttacgactgtcaagataaattagaaaagagttgagccaattgtgcctttagacacagctttaaatatccctgccatagatgaaaaatgaaaaggttaaactggaaacttctaaggtttcctcaagccttaataacataggattctataattctatggtttaatgcagtcagatatgtttagagttctccctccccaaccatgagttccttttacatgaaatctaagtacaatggaatttccttctctgaacattttaggcaactgtgatgattccagttctaatacatgggaattgctgggacacttctgtaccagcctcaatcagatgatcagggatcacaacattggctctgtggcttygacacatttgctctctaaatcttgctcttcctatcttatttttcttctaggtcctta

SEQ ID NO: 602433 - DNA, 521 bp, Homo sapiens
acctggagacagctactcatgttctggtgactgtgagatgtgatgtacaagagcaaaattaggcccacatgatagattgacattgaggacacttgagatgaacaacttcttctagtttaaacatgcgacagcccgataaatgagttaggaaaattgacagtcacttatacctgcaggcatcagcagccatctcagctaggctgctgacaaaaggtcgcagctcacytgccatggagacagccaacagtgaggctacaaataatttgttttaaaacattgtttagatacttcatactgtttggtgacagaggagtgtctgatttcctctccctcatcctctcccaccccttgactctttagctcacttgcgagtatgcacgtgccctctctttctaaaatcatgcagaagcaataaatcagccagtttaggaagacccagccagcccaacacagatcgatttcacagggaagtcgatgggctgctaatagaattacaactacctgtcaaaacaggaaaaaca

SEQ ID NO: 602434 - DNA, 521 bp, Homo sapiens
acctggagacagctactcatgttctggtgactgtgagatgtgatgtacaagagcaaaattaggcccacatgatagattgacattgaggacacttgagatgaacaacttcttctagtttaaacatgcgacagcccgataaatgagttaggaaaattgacagtcacttatacctgcaggcatcagcagccatctcagctaggctgctgacaaaaggtcgcagctcacctgccatggagacagccaacagtgaggctacaaataatttgttttaaaacattgtttagatacttyatactgtttggtgacagaggagtgtctgatttcctctccctcatcctctcccaccccttgactctttagctcacttgcgagtatgcacgtgccctctctttctaaaatcatgcagaagcaataaatcagccagtttaggaagacccagccagcccaacacagatcgatttcacagggaagtcgatgggctgctaatagaattacaactacctgtcaaaacaggaaaaaca

SEQ ID NO: 602435 - DNA, 616 bp, Homo sapiens
tgaggtttttgccattacttttgcaccaatctaattatttcacatactctgtagtttaatggctatgaaaaatatgatatttttaaattacatcttcaaaacaattttatctggtatatacaaatactactaatttttgtatatagtttcttagacaacaaccttkatgaactttctggttacttctactgttaatagttggcaaggacattctcttgaatttcatatgtagataatcatatcatctgtgatagtgacaatttggtttcttatttttccattccccacaactcttgtttatttccatgtcttattgagctgctgtggacctccagtacaatgctgaatagaagtggtgacagcaggcatctttaaattatttctgaccttaagagaatgcttccaatgtttcaccattaaatgtgaggtttacattgttttaggtagacaccctttttttaaaggaagtccctttctatgtatcattttctaaggtttgttaacgtgaatggctgttgaacctattatgtatgctaagaagagttattttttctttctttaatatgtcaatatggtaagttacattaaattttataaagttatattattcctataa

SEQ ID NO: 602436 - DNA, 516 bp, Homo sapiens
gtaaggaaattaaaaaaaaaaaaacacatttagaggattatgcttgttctgagcggtgcataagggaaaaaactgactttttttccatattctgatttttaacagaaaagcactcatttaatagatgtagggaaactagatattgctgccttttgaacggggtaggggggtttacctggttttatgaccaggaatagtatctattatatttgcttttaaataggmatgatgtggaaataccatcttggtttgagatgcatttgaggattttaatttatggaaagtacaacatatgcaattatatttattgaatacctagatgcagtatggatatttaaattgttaaaactttatgaaaacttggaaaaggttgttcaggtttataaatagctttagtgacgcctcccctctttaaatacctgtcataccatatgaatatggtgagattagactccctaagactcttttcaggttcatttttataatgtttactttttaggttaggacaaaacagta

SEQ ID NO: 602437 - DNA, 557 bp, Homo sapiens
ttattctctaaaatacagcacttatttctcttatattttgtttatagtgaactgttagaatgaaatagaaactgctctcattgtacgagtggctttaaacatcgctatctcttgacctctccttttattcccatggacttttctaatggcctgcttaracttatccctcctccaagaaagtgtcagatttatatttcttttagttttcttgtctgccagttggagataataattactatttcaaaggactgtgaggattgaatgataattacttcagaagtgcctggcattgtttctggtacacaataaatggtagcttttgtgtataagacagatattaaagtgttaaagagaatgagaaaaaggaaagatagagttgtaagtatctcttagccttcttagtaattccccttggctttaggcatgcctcaagtttcaccatttcttccatgaacatctgtgctttgattacataaacattcttgtttcccagattagtctatccataataacatctgtgaaaagatgaggtatgtgtgcaagcataatatctataa

SEQ ID NO: 602438 - DNA, 491 bp, Homo sapiens
atgttctgtactcaatgatacttttctgaaggatgccaactttcaccactgttactcaacatagtactggaagtcctagctagagcaatcagacaagagaaacatataaagggcatccaaactggaaaggaagaagtaaaactctccctgtttgcagatgatataatcttatatttggaaaaacctaaagacaccaccaaaaactattagaactaataaacaaattcagttaagttgagggatacaaaatcaacacacaaaaatcagtagcatttctaatgtcaacagtttacaaactggaaaataaattttaaaaagtagtagtccaatttacaatagccattaataaaatcaaatacctaggarttaaccaaataagtagaagttctccgtaatgaaaactgcaaaacgctgatgaaagaaattgaagaggacaccaaaaattggacaaatattccatgttcatggattagaagaatcaatattgttag

SEQ ID NO: 602439 - DNA, 437 bp, Homo sapiens
actaactctggtagtttgctaaaaaaaaaatcaggacaggctaaaagaagatatggatataacggctgcattgtttttgctttttttgataaaccatatttcaaattcattcacagacattttcgctttcatgaatccaagatatcttctctagtttctaaaagtatatatacacatatacacacacaaggtatacatatactcacacattcacaatattaaaatgtttgggctaggtgtggtggctcatacctgtaattccagtaatttgggaggccaaggcatgaggagctagaggaggctgagttgataggattgcttgagcccaagagtttgaggctgcagtgagctatgattgyaccactgcactccagcacctggatgacagagcaatatcctatttctaaaaaaaaaaaaaaaaaaaaaaaaaaaaagtt

SEQ ID NO: 602440 - DNA, 540 bp, Homo sapiens
ggacacagatgatctgaatagaaatacattcaatgttcttgaatgggttgacattataaatatatcaattatccccaaattaatatttaaacataatgtaatctcagccaaaattccagttgaaatctttaagtcaataaatgtactaaaatgtatgcagtagaataaaggtccacaaattgttatgccaaccttaataaggataaggaaagggccataacaactttttacattttaaaaaacctgtgatattrgtgtaactaatctaatagacctatagaataaaatagaagtctcagagatagacacacgtatatatggaatttggtaaatgataaaggtagcaccacaaataaaaaaacaaaggatcatgtagtaggtactattgagaaaacgtactctccataggaagaaaataaatgagttttttttcttttttttattattattatactttaagttttagggtacatgtgcacaatgtgcaggttagttacatatgtacacatgtgccatgttggtgtgctgcacccattaact

SEQ ID NO: 602441 - DNA, 480 bp, Homo sapiens
ataaactcccacacaataacagtgggagactttaacaccccactgtcaatattagatcatcaagacagaaaattaacaagggtattcaggacttgaactcagctttggatcaagtggacctgataaatatctatagaattctccgccccaaaacaaaagaatatacattcttcttggtgccacatggcacttactctaaaatcaatacaaaattggaagtaaaacactccccagcaaatgcaaaataaactgaaataataacagtctctcagatcacagagcaaacaaattagaactcaagattaagaaactcactcaaaaycacgaaactacatggacattgaacaacctgctcctgaatggctcctgggtaaataatgaaattaaggcagaaatcaggaagctatttgaaaccaatgagaacaaagagacaacataccacaatctctgggatacagctaaagcagtgttaagagggaa

SEQ ID NO: 602442 - DNA, 531 bp, Homo sapiens
agactcaggcatataacttgtgttttagtcttattcctttgcacaaagacaaaatacatagacaggacacattgatcagaaaaccagaaataatctatttctaaaatttctaatccctgacataaatgtatsaaaatcacacaataatttaatagaatgagaattgcacacacacacacgcggcacaataaaacccaaggtaaaccaaagcacaacaaatgtccttctgaacaaaaaggttttccagacagctgagagctactcctttggatgacagaacacctcaacttctggatgaaaggtttacatgaaaatgattatgtaggacagctctctttcccttcttatgtatggtatgtctaacataatattttcttgatgatttagggttagaattatgatgtgaagatatgactgtggaaggattgatcccaggtacatgtggatgttcacccctagaatgcaatttctttttcttttattttttttagatagagtctcacactgtcacccgggctggagtgcaatggt

SEQ ID NO: 602443 - DNA, 512 bp, Homo sapiens
cacagtggctcacacctgtaatcccagcactttggggggttgaggcaggtggatcatgaggtcaagagttagagaccagcctggccaacatagtgaaaccctgtctctattagaaatacaaaaatttgccrggcatggtggcacacacctgtagtcccggctactcgggaggctgaggcaggagaatcacttgaacccaggagatggaggttgtggtgagctgagatcgcgcccctgcactccagcctagcgatagagagagacttcgtctcaaaaaaaaaaaaaagaaagaaagaaaaaaaaaattagccaggtgttcaggcacctgtaatcccagctactagggaggctgagacaggagaagcgcttgaacctggaggtggaagttgcagtgagccaagattgcgccattgcactccagctgagcagcaagagtgagactctgtcaaggaaagggaaagggaaagggaaaaggaaaagaaatcgctaactaggccgggcgcggtggctca

SEQ ID NO: 602444 - DNA, 521 bp, Homo sapiens
aagtcacgtaacctctcccagcctcagttttctcatctgtcaaatggaaagttggacacgttggcccctctgtgcccttgcaactaaggcagagaggagaagagcatgccccgtcccgctctgaggttctctcctggacctgtgaaggtgtctctgggcgcatctgaggagtggcttttcctctcccggcctcagtttctccatctgagcagagggcttgggaggccttacccatgcaggggcagtagagcaggtaaccggccgggtcccaggagcccgcrggcatccccgggagcggcagaagcagcagcaggaaagacacgctcagcggccgtgcccacgcggcggcgcccatgtcggcccgggaacccgagccagccgcggcgcacagtcggggagggaaggagggacgcgagcgcccgccccgctcccagcggtccctgcgcgccgcccgcgcaccgccccggccgctctagcccgcgggcgggcgggaccatagagatcccgcggcaccgccccct

SEQ ID NO: 602445 - DNA, 200 bp, Homo sapiens
gcgtccccccctggattcaagatgcaaagcaggaggaggaagtgggctggaaactagttcccaggcctcggggccgggaggcggagagtcaagtgaagtgccaatgtgaaatttcgggaacacctttctcaaatggrgagaagctgaggcctcacagcctcccgcaaccagagcagagaccatatagctgccctcagctg

SEQ ID NO: 602446 - DNA, 200 bp, Homo sapiens
gcgtccccccctggattcaagatgcaaagcaggaggaggaagtgggctggaaactagttcccaggcctcggggccgggaggcggagagtcaagtgaagtgccaatgtgaaatttcgggaacacctttctcaaatggggagaagctgaggcctcacagcctcccrcaaccagagcagagaccatatagctgccctcagctg

SEQ ID NO: 602447 - DNA, 523 bp, Homo sapiens
gaattcaattttcatttttgtaaatgtgaaaaaatcatattcatgtcaattaaacagaggtttactgagtactggatatcatgagctgttggaaatccaaaactgatgagagacatcatccctcatatggttatgttttttgttgttgtttgatgaaagcaaaagcagtgacagggcaagggcctaaggaagggtacgggtatggtaccttgatcttggcgcccagcatctcggcagcatccttctcccgccgcaggtcctccatctttttctctttctccttcagcagcctcatcttctcctctgcaaccaagctgtgatcctctacaatggcccgcttctcaatctccagtttttcttgctgttcccgccagtaatcatccttatcatccccttcctcctcaccctcttctccctcctcctcctcctcttccccacccccaccactgccaccaccttccctccgcttctctcgcctcttyctcctaccaatggaccgtttttccagctgggccttgagccg

SEQ ID NO: 602448 - DNA, 512 bp, Homo sapiens
ggccaacatggtgaaaccccatctctactataaaaaaaaaaaaaacaaaaattagccgggcatggtggcagacatctataatcccagctactcaagaggctgwggcaggagaatcatttgaacccaggaggcggaggctacaatgagctgagatcgtgcctctgcactccagcctgggtgacagagtgagacatcatttaaataaataaataaaagctggaggggaaaggtaggggtggctggtccagaagggtccttccagctccaagagtcagctaccagctctgacctttgattgccagtacctgggcccctcctgcccacctggcagcatcttccttctcccagcagccatggtgctgtccatcctgccggacctggaccactgggagcaggaggtcacctcctcctgcccatagctcagaatgaaagcataggtgagttgcagaggagggagcaaatatggagaagtaatagatgggcaggctgcagatgggagggagcatggcctc

SEQ ID NO: 602449 - DNA, 500 bp, Homo sapiens
tactcactgtaagaccttctcaagtcacttaacttccctgaacctcagtttccagagttgttgaatggggaataataatcatttctgtcttttagggtgttgtaaggattaaataagttaatatatgcaataacacaggactcaactttctgtgttaacactgtgttagctatgatcatccaacttacatatattttctaattatagaagtaatgagtaattsacatgatagaaaataaaaacattatagaaataagtaacataaaacttagtttgtatgcactatatatataacacatacaccaaactgttaatggtggatatctaagaaaatagaattattgtagactttctccaatgttttatgtataattttttaatgaacagctttatcatacatctacatatatacacataggtttttttctttttccttttttatttccataggtttttggggaacaggtggtattcggttacataagttctttagtggcaat

SEQ ID NO: 602450 - DNA, 500 bp, Homo sapiens
tactcactgtaagaccttctcaagtcacttaacttccctgaacctcagtttccagagttgttgaatggggaataataatcatttctgtcttttagggtgttgtaaggattaaataagttaatatatgcaataacacaggactcaactttctgtgttaacactgtgttagctatgatcatccaacttacatatattttctaattatagaagtaatgagtaattgacatgatagaaaataaaaacattatagaaataagtaacataaaacttagtttgtatgcactatatatataacacatacaccaaactgttaatggtggatatctaagaaaatagaattattgtagactttctccaawgttttatgtataattttttaatgaacagctttatcatacatctacatatatacacataggtttttttctttttccttttttatttccataggtttttggggaacaggtggtattcggttacataagttctttagtggcaat

SEQ ID NO: 602451 - DNA, 500 bp, Homo sapiens
tactcactgtaagaccttctcaagtcacttaacttccctgaacctcagtttccagagttgttgaatggggaataataatcatttctgtcttttagggtgttgtaaggattaaataagttaatatatgcaataacacaggactcaactttctgtgttaacactgtgttagctatgatcatccaacttacatatattttctaattatagaagtaatgagtaattgacatgatagaaaataaaaacattatagaaataagtaacataaaacttagtttgtatgcactatatatataacacatacaccaaactgttaatggtggatatctaagaaaatagaattattgtagactttctccaatgttttatgtataattttttaatgaacrgctttatcatacatctacatatatacacataggtttttttctttttccttttttatttccataggtttttggggaacaggtggtattcggttacataagttctttagtggcaat

SEQ ID NO: 602452 - DNA, 597 bp, Homo sapiens
tcaaacttggtatgatgactgacctcctcagtggtctattcccagtccatctctcctgcctcatttctgcttccctctctctggctgsttctctcgatctcagttctaacagttgcatctttctattcctgaagctcagacatctcttccaatttcagggctgggatcctgattgggtgcttccagatctcagtttaaatgtcacctcctcccagagcctttccctgaccccagccctaacgtgggctctgccccacccccgtactctctatctcaacactctcaacaccctgctttattttcttcctgtcactctccatgatctgggacttcctcttgttttactctccccaacgtgatggtggggatttcctgggaaagtagaaaataacgagagattgctacctataagttttcacaaaatacttgctgggaagagggatatcttgaacgagttaaatgacataagaggaaggcatgacttacatcctcaagggcaacatcgtatggtacactggctctcaaacttggccgcacattggaatctcctgggagctttaaaaaatactgtcaactgaatcccacccccacagactg

SEQ ID NO: 602453 - DNA, 534 bp, Homo sapiens
cacaccatctctttcacattttgccatttccacatcccacctgaatcactttttactctctattgttcctttaatatacttatttttaaaattccacttaatgggtttaaatattagattgctcttacgcaaggagagcaggatctttaaaaacagaaggtaactctaaatcgaaagcattaaaaacaaaacatttttttaattcttttttttcttttactttaagttccgggatacaygtgcagaatgtgcaggtttgttacaaaggtatacacgtaccatggtggtttgctgcacctatcaacccgtcatctaggtttttaagcccctcatgcattaggtattggtcctaatgctctccctccccttgctccccaccccaacaggccatggtgtgtgttgttcctctccttgtgtccatgtgttcacattgttcagttcccacttatgagtcttatgagtgagaacacatagtgtttggttttctgttcctgtgttagtttgctgagaattatggctcccagcttaatccat

SEQ ID NO: 602454 - DNA, 574 bp, Homo sapiens
ggcttcttcacatatttctccacccccattagacaactcagtcactaggcaagaggatggatcttggagtctgacagacaggcatgggttcaatttctctccaacgattatttcatctcggtgygacctcaggcatctttgctttcccagactttgttttctcattagcaaaacagacctaataaaaggactcatttcataggttttttatgaggattaattgagataaaccagataatacgcttaacaccgtggtacttgcaatgaagaaaatggtgaatggtacatacatggtaagtggtcaatacattttagtcattctattaacaagttaataatcctctccatgccttgatttccttattggtagaatggggataataaaacccccttctgggtagttgggagaagtcaagcattaataccagtgaagcacttcaaatggtgctttgcatacagcgagtgctcaataaatgttaaattcttaaaatcatcaccacgattctgaccttatggactttgaagggcagatgttgtgtctcattgctttcgtgtccacaagacctggcacata

SEQ ID NO: 602455 - DNA, 521 bp, Homo sapiens
acaaataaggccacattcacaggtactggggtttaggcttcaacatatatttttgttggggtggggcacaatttaacccataacaccctatgtctaaagtacccccaccccactctctctggtcatgatcatttcaccttatccgaagcaatcttgcttatttatgagyttagttgtgtattggctgtcttcctcactgaaggtaaactccatgagagcaagaactttgcttacctggaatgtcactatgttgataatgcccaaaatgatgcataataaacacttgtttgaatgaatgaaataaactacaatcaaacagtgaaaactatagggcaacagattttagtttaccaggaggacacgttttatataactagagcccactcaacatgaaataagttgctttttttttgaggcaataagtcccctattgtggcagacatttataccaaagctgggcaacgctttagaagagatactaaagaatggatttgcatatcagttcacaaatggattaatga

SEQ ID NO: 602456 - DNA, 521 bp, Homo sapiens
acaaataaggccacattcacaggtactggggtttaggcttcaacatatatttttgttggggtggggcacaatttaacccataacaccctatgtctaaagtacccccaccccactctctctggtcatgatcatttcaccttatccgaagcaatcttgcttatttatgagtttagttgtgtattggctgtcttcctcactgaaggtaaactccatgagagcaagaactttgcttacctggaatgtcactatgttgataatgcccaaaatgatgcataataaacacttgtttgaatgaatgaaataaactacaatcaaacagtgaaaactatagggcaacagattttagtttaccaggaggacacsttttatataactagagcccactcaacatgaaataagttgctttttttttgaggcaataagtcccctattgtggcagacatttataccaaagctgggcaacgctttagaagagatactaaagaatggatttgcatatcagttcacaaatggattaatga

SEQ ID NO: 602457 - DNA, 521 bp, Homo sapiens
acaaataaggccacattcacaggtactggggtttaggcttcaacatatatttttgttggggtggggcacaatttaacccataacaccctatgtctaaagtacccccaccccactctctctggtcatgatcatttcaccttatccgaagcaatcttgcttatttatgagtttagttgtgtattggctgtcttcctcactgaaggtaaactccatgagagcaagaactttgcttacctggaatgtcactatgttgataatgcccaaaatgatgcataataaacacttgtttgaatgaatgaaataaactacaatcaaacagtgaaaactatagggcaacagattttagtttaccaggaggacacgttttatataactagagcccactcaacatgaaataagttgctttttttttgaggcaataagtcccctattgtggcagacattyataccaaagctgggcaacgctttagaagagatactaaagaatggatttgcatatcagttcacaaatggattaatga

SEQ ID NO: 602458 - DNA, 569 bp, Homo sapiens
ttcctgttacaggtttctgacaggtgaaatygtgtgacagccctcaaatcacattacatttgtaacctcctttatgtctcatgagtctatttttaagcttagcttgaatttcttcatattttatttatttattattatgtttttgttggcccattctatccaaagggggaaaaaaggaaaaataaataaatttcagtttgggatccctttaatgtcttaactaagcctgttacaatgagatattgtattaagttggtcctgtcttaagaaagaaacaacttctctgttgaaagcgcttgctgccaggggactcattgttaccacagcagtcaactttgatttgtgtatcaataatgtcgtgtcagtagccagagggtatggcaacagggtgttccagatgcttttattggtgcttttgctggaggattatttcaaattaactttagtctcttggaagacactgaacagtagtatgctatttcccatttgtaaacaaaatggtgaataattatgggagaaaccaagacaggatgatttctaggaaatgtcacgtctgcagatcttaattt

SEQ ID NO: 602459 - DNA, 569 bp, Homo sapiens
ttcctgttacaggtttctgacaggtgaaatcgtgtgacagccctcaaatcacattacatttgtaacctcctttatgtctcatgagtctatttttaagcttagcttgaatttcttcatattttatttatttattattatgtttttgttggcccattctatccaaagggggaaaaaaggaaaaataaataaatttcagtttgggatccctttaatgtcttaactaagcctgttacaatgagatattgtattaagttggtcctgtcttaagaaagaaacaacttctctgttgaaagygcttgctgccaggggactcattgttaccacagcagtcaactttgatttgtgtatcaataatgtcgtgtcagtagccagagggtatggcaacagggtgttccagatgcttttattggtgcttttgctggaggattatttcaaattaactttagtctcttggaagacactgaacagtagtatgctatttcccatttgtaaacaaaatggtgaataattatgggagaaaccaagacaggatgatttctaggaaatgtcacgtctgcagatcttaattt

SEQ ID NO: 602460 - DNA, 587 bp, Homo sapiens
tattaagttggtcctgtcttaagaaagaaacaacttctctgttgaaagcgcttgctgccaggggactcattgttaccacagcagtcaactttgatttgtgtatcaataatgtcgtgtcagtagccagagggtatggcaacagggygttccagatgcttttattggtgcttttgctggaggattatttcaaattaactttagtctcttggaagacactgaacagtagtatgctatttcccatttgtaaacaaaatggtgaataattatgggagaaaccaagacaggatgatttctaggaaatgtcacgtctgcagatcttaatttcctccaagcactgttgccctgttcttcctttcctgttgctaatatcctcccaggaacaatactgaatagaacctgcttacagggcaattggtggcttcacagccactcaacaaaataactggagactcttctgctgtcactgtaaccacaagaagagattggaagcctggagaaactgctgaaggctaaatagaaagggacttttaaatgatattataaaatttttaaaaatgttttatatgtgatggtaaaagtcatagtta

SEQ ID NO: 602461 - DNA, 587 bp, Homo sapiens
tattaagttggtcctgtcttaagaaagaaacaacttctctgttgaaagcgcttgctgccaggggactcattgttaccacagcagtcaactttgatttgtgtatcaataatgtcgtgtcagtagccagagggtatggcaacagggtgttccagatgcttttattggtgcttttgctggaggattatttcaaattaactttagtctcttggaagacactgaacagtagtatgctatttcccatttgtaaacaaaatggtgaataattatgggagaaaccaagacaggatgatttctaggaaatgtcacgtctgcagatcttaatttcctccaagcactgttgccctgttcttcctttcctgttgctaatatcctyccaggaacaatactgaatagaacctgcttacagggcaattggtggcttcacagccactcaacaaaataactggagactcttctgctgtcactgtaaccacaagaagagattggaagcctggagaaactgctgaaggctaaatagaaagggacttttaaatgatattataaaatttttaaaaatgttttatatgtgatggtaaaagtcatagtta

SEQ ID NO: 602462 - DNA, 587 bp, Homo sapiens
tattaagttggtcctgtcttaagaaagaaacaacttctctgttgaaagcgcttgctgccaggggactcattgttaccacagcagtcaactttgatttgtgtatcaataatgtcgtgtcagtagccagagggtatggcaacagggtgttccagatgcttttattggtgcttttgctggaggattatttcaaattaactttagtctcttggaagacactgaacagtagtatgctatttcccatttgtaaacaaaatggtgaataattatgggagaaaccaagacaggatgatttctaggaaatgtcacgtctgcagatcttaatttcctccaagcactgttgccctgttcttcctttcctgttgctaatatcctcccaggaacaatactgaatagaacctgcttacagggcaattggtggcttcacagccactcaacaaaataactggagactcttctgctgtcactgtaaccacaagaagagattggaagcctggagaaactgctgaaggctaaatagaaagggacttttaaatgatrttataaaatttttaaaaatgttttatatgtgatggtaaaagtcatagtta

SEQ ID NO: 602463 - DNA, 576 bp, Homo sapiens
aacatattatattaaatttattcttacatttatcatgggttttggtgctattgtaaatcatacttttaaatataatttaccaattgtttgttgatagtatattaaaatgcaattgattttttatattaactttgttgccttgactttaataaatktattagtttttgaagctttttacagagttctcagaattttttatgttcatgataataccatctacaaataaagacagttgaaaatgttttctttctagtctgtatggcttttattacctttccttgacttattgcagtgtctagaaccccagggcaatgtgaatataaatggtgagataaaacatcattgatctatgcttgatcttaaaagaagactattcagttcttcaccattaagcatgaatagtggaaattttagatgtttcttaggtccctcttttcaggttgagaaaatttcttctatttcaattctgctgagagtttttatcataaatgattattgattttagccaaatgctttttctgcctctgtttggctgatggtatttttttcctttattcttttatatggtaaattaca

SEQ ID NO: 602464 - DNA, 603 bp, Homo sapiens
gaattcctttctttaaaatcctaatactggtaattcagttctgctctctgtttttcctgataaatctagcaacaggtttcaatttttttaatcttttcacagaaacggagaagtattgaagtctccaacactagttgtggatttgtttttccttttgcttctggcaattttgtttaatgtattttgcaactctgcttattgggtgcatacatatttagaattgtcttgccttcttaatgaacsgaacattttatcattaaaaatggcccttctttatccttaaagtctacttcaaatgatattaatgaactcactccaattttcttattaccatttgcatggcagatccttatttatcctttcttttaacttatctgaatctgcagattttaagagcgaatcttgtagatagatacagagagttttactttttatctctaaaattgtatcagggtgtttagaccatttacatttaataaaattattgatctgagtttaagtctaccgtcttgctctttatatttctattggccccacctttcttcccttccttttttctcttttcctacctcctttggattaattggatttttaaactatttt

SEQ ID NO: 602465 - DNA, 622 bp, Homo sapiens
gaattccaaatagttatatagatattttgctttcacttaggtggagcataactgcccctccataagcatgagttgtgcatagtgacttccctccaaaaaccacagtataaaggaagggtagggggttagaatggtaacttaacagtgaagaaacctgacaaaacacaacttcagccaggtgctcaaggtcagtatcacagtgataaatcatgctgatggcatgtgcctttgatatgatgtgatgaaaatgacactttacctctgtggtctttttccccaaacccataacttcagtctaatcacaaaaaacatcagtcaaacccaattcagggatattttatgaaatacctgaccattaccgctgacaactctcaaggcaaccaaaaacaagaaaaatctgagaaacagtcacagccaggaggagcctatggagacatgatractcagtgtaatgtgggaaccaggatgggagcctggaacagaaaaaaaatcaggtaaaaactaagaacatttgaataaactataaacttgaatgcacagtgatgcatcaatgttgattcatcaaaggtaacaaatacaacattctaccgtcatgtacgatgttaacaaatggggaaactgg

SEQ ID NO: 602466 - DNA, 622 bp, Homo sapiens
gaattccaaatagttatatagatattttgctttcacttaggtggagcataactgcccctccataagcatgagttgtgcatagtgacttccctccaaaaaccacagtataaaggaagggtagggggttagaatggtaacttaacagtgaagaaacctgacaaaacacaacttcagccaggtgctcaaggtcagtatcacagtgataaatcatgctgatggcatgtgcctttgatatgatgtgatgaaaatgacactttacctctgtggtctttttccccaaacccataacttcagtctaatcacaaaaaacatcagtcaaacccaattcagggatattttatgaaatacctgaccattaccgctgacaactctcaaggcaaccaaaaacaagaaaaatctgagaaacagtcacagccaggaggagcctatggagacatgatgactcagtgtaatgtgggarccaggatgggagcctggaacagaaaaaaaatcaggtaaaaactaagaacatttgaataaactataaacttgaatgcacagtgatgcatcaatgttgattcatcaaaggtaacaaatacaacattctaccgtcatgtacgatgttaacaaatggggaaactgg

SEQ ID NO: 602467 - DNA, 636 bp, Homo sapiens
ttggcttcttctaatcttcggtattaacagtctccaaaaaggcaggaaccatgggacagacacattagaaaaaggctgggggcggagagtgctttgtaaatattaacccagctgtggaggccacatgtatctttgagttatgacctgataaggcttttgagagcttttgccaacttcatgttcaagaaaaacacagaaaaaatttagctgatgatatccttgatgcaattttcctttaagcacagcctcataaataccaactatagagtccaactgaacttattggaaatttcccaaaaaccttggaaaatagacaagtgcaggtggtaagatatttactgaaatgaactgtctgtgaatgaaaaatatatgagcaaaatagatattttatctgtcattttattcacagaaagagatccwttaagtttctccatttcattctgctcctgtttggtgaaagcactttaaactagatcttcattttccttttaaaaaatcagtatggaaaataggggacttgacaccccctccccctccactctgctgccacgaaaacgaaaaaagaaaagtaaatttttttaaagcctcggaagaaacttctgaaaatacacaacatgacttgttactgaatctcaa

SEQ ID NO: 602468 - DNA, 567 bp, Homo sapiens
aaatggggatggtgtttcacyatgaaggagaatgatccaagcaggcaaaaatgacagctctacaattattcccattttacaggaaattgtctcagtaagatgaagcaattttcacacggaaacaaagctattaagtgtgagaataagaatttaaatcatgacttccaaatatccaggaacaatttagtattttaaaaacctatatcaatagatcaaaagaaaaatgacagtgtcatcataaacgctgaaagacttttgatgaaagtcaatatcttttcttgatagataatctcttctaatattaagcttaaaaagcaatgagagagacttttaagaagactttaaatcgctgctaagggacttagaagacttggggaaaaaagaataattgcatgacgtcactttttgataagtaaatctatatatttaatattatttcaggagaaatgctatcacttttttgaactagaaaatctaattctaaagttcaattaaaaatatatcgataggaacagttaggaaaattctgaaacatattctaaaagtaaaatgattaaaatgtggtgg

SEQ ID NO: 602469 - DNA, 588 bp, Homo sapiens
ttctatatgctgctggctttaaagaattttactttcctaatattattttcctgttactattgctgcataaaataaaagatcaccccaaaaattagtggcttaaatcaaccattttcatgtattctcagattgtgagggtgaggatactgaaaagagcacaaagggttagctagtcacaatgtctggggtttctgctaggaaaactagaatactggaagtgacttgatggttgacagctggaattatctggaatgtctcctttcrtgtagctgacagttaatgctgaccattagtaggaacctcagttgggtctgttggcagtaacacccacatgtggcttctccatgaggctgcttgagcttcctcttaacaaggcagcctcagggtgcttgaacttcttacatagtagcaccagattccaaatgtgaatacctcatctaacaaggcagaagatgtaggatttttatgctctatattcaaaaggcatacagaataacctccactacatcccattggttataagtaagtcaaaagcctgtccaaattcaaggaaagaaaaattaaactcttcttctggatggaggcaat

SEQ ID NO: 602470 - DNA, 588 bp, Homo sapiens
ttctatatgctgctggctttaaagaattttactttcctaatattattttcctgttactattgctgcataaaataaaagatcaccccaaaaattagtggcttaaatcaaccattttcatgtattctcagattgtgagggtgaggatactgaaaagagcacaaagggttagctagtcacaatgtctggggtttctgctaggaaaactagaatactggaagtgacttgatggttgacagctggaattatctggaatgtctcctttcgtgtagctgacagttaatgctgaccattagtaggaacctcagttgggtctgttggcagtaacacccacatgtggcttctccatgaggctgcttgagcttcctcttaacaaggcagcctcagggtgcttgaacttcttacatagtagcaccagattccaaatgtgaatacctcatctaacaaggcagaagatgtaggatttttatgctctatattcaaaaggcatacagaataacctccactacatcccattkgttataagtaagtcaaaagcctgtccaaattcaaggaaagaaaaattaaactcttcttctggatggaggcaat

SEQ ID NO: 602471 - DNA, 613 bp, Homo sapiens
atactctgtctcaaaataaataaattagttaattaaatgaatggctaaacattgaagaattattaccctatatccataacactaacccatatttttaacagtgtattagtccattttcatactgctatgaagaactgtctggcactggataatttataaaggaaagcagtttaattgacagttcagcatggctggggaggactcagggaacttacaatcatggggaaggcraagaggaagcaaggtaacttcttcacaaggcagcaggaaggagaagtgctgagtaaaggggaaagatccccttataaaaccatcagatctcatgagaactcatgccctatcacgagaacagcataggggaactgcccccgtgatccaattacctccacctggtccctcccttgacagatggagattatagggattacaggaattacaattcaagatgagatttgggtgaggacacaaagccaagccatatcaaacactgagaagaaggtatgtgttattcattaaacaatagtaagaactgatttcctcaacatacaaaaccttccaagaaatcattgaaaaagaaacagaatagaggcatatcatagacaaatgacaaaaa

SEQ ID NO: 602472 - DNA, 656 bp, Homo sapiens
gactctattatgaattcaaacattgggagagggaggagggacagaagagaaagaaagggaaggaggaagagagcgagagggggaagggaagagaaagagagaaggagtatgctccaaaggtcagtcctaaatcaggtagaacaaactaagttgctcatggtaacgaggttaagcatctgccacttcatgttccctttcttcctcagtagttataacaaagtagaaaaatcagagaggcaaatctcagcctctcaccccttttgtgagtctcctggtttctctgatgattctgcaataattagcaagagctggatgcatgcttctaaatctcatctakctggtgacccaagagatggatcccaccacatccctagccatctagaaagaaactcaccaggctctccttcctggcctgtctgaagacacagcccctgttcctcgggagggctctgtgatgtcgatttatgtagcagcagctgtcacagctcacttcagcagaaaggattgaactgtcctgaatatgtcaatcagatatcaaagataaatgaagtttgaaaaaataaaatgtacaatttatttttaaaaaatagtctttgggagacacccagaatgcactttgaaaaatctaagggaaatgtgtcatgaaaacaaatcca

SEQ ID NO: 602473 - DNA, 513 bp, Homo sapiens
tgtgggaattgagacatacatgtgggcctgcacttggtgacttcaatcatgtaatgacaaagcaggatggatgaggacgggacttgtcttagtgggtggctggtaagcaatagaaacttactgctcacagttctggaggctgagaagtctgaaatcaaggtgctggtgtattgggtatctggtaagggccccaacttttggttcatccatggcaccttctttccgcatcctccatggtgaaaggggctagctaggtctctgttataaggccgctaatcccatttataagggtttcaccctcatgacttaaycaaatcccaaaagtctccacttcttaataccaacacattggagattaggtttcaacatatgaattttagggaaacataagcattcagaccatagcaggagcccatattcatgtcttactaattcattcaacaaatatttattaaatacaagttataggccagatactaggttatgtgtaggggacacaagcaaagcagataa

SEQ ID NO: 602474 - DNA, 254 bp, Homo sapiens
tcatgtgctaatggaatagccggaggcagccttttctcttctctgagcttcacctttcaattgttacctggagttgtggccactaagttaggtactgaaaatctttgagagtatgtaggatttgggagawgttggttccattttccagaaaataaaattcatgaatgtaaaattttgatgaaaccttattagcaaatatgataaatattttaatattaaggcaaaaaataaaataaataatattaaggcagata

SEQ ID NO: 602475 - DNA, 254 bp, Homo sapiens
tcatgtgctaatggaatagccggaggcagccttttctcttctctgagcttcacctttcaattgttacctggagttgtggccactaagttaggtactgaaaatctttgagagtatgtaggatttgggagaagttggttccattttccagaaaataaaattcatgaatgtaaaattttgatgaaaccttattagcaaatatgataaatattttaatattaargcaaaaaataaaataaataatattaaggcagata

SEQ ID NO: 602476 - DNA, 590 bp, Homo sapiens
ctttgtgaaataaaatgtcaagaatgattaaaaacaaagaaaccatcttttgtctttcttagactagcaaaacttgtaacagctgcaggtgcctattgtttgagtcatagctacagttgccattttctcactttaggtttaaaaatatcactcacttctgttcaaaaacacaataaatggcaaggctgcctcctcattcagggctgctgtgtgagtagataacatgctcactttctcgattatggaagcttagtccaagagtgcaattaggaaaaaaccttaatgaacagacatggtaatgaggctgactcattctatagcaacacagaggcaacaacaacaacaaacacagctgctgagtgtgayagtgatatttcttatttgtgagcataaaacaatatataaaaaacattgtcatagatcaaagttgcagtttttcaatttttttttcttgtgtgtccatggaaaaattgcttgacatacaaaaagtcttgatgcattaaggaagttatccattttagagagacttacaaaaaaggttaacatattatataagtaatgtcccttctaatgctacttctgatcttttc

SEQ ID NO: 602477 - DNA, 536 bp, Homo sapiens
tgaaagaaaaactgttaagggcagccagagagaaaggccaggttacctacaaagggaatcctatcaaactaacagcagacctctcagtgaaaagagattaggggccaatatccaacattcttaaagaaaagaatttccaacccagaatatcatatctggccaaactaagcttcataggcaagggagaaaatgggctaaatgccccaatcaaaagacagagagtggttagctgggcatggtggtgcgcacctatagtcccagctactcaggaggctgcagcaggggaatcacttgaacccagcaggcagaggttgcagtgagctgagatcatgccactgcactccagcctgggtgacagagcgagactccggacacagagtggcaagctagataaagaaccaagacccggccgggtgcggtggctcacccctgtaatcccagcactttgggacaccgaggcgggtgatcgagaccatcctggctaacacggtgaaacccygtctctactaaaaatacaaaaaaaattatctgggtgt

SEQ ID NO: 602478 - DNA, 400 bp, Homo sapiens
tggcctggaactcctgacctcaggtgatccacccgccttggcctccgaaagtgctgggattacaggcgtgagccaccacgcctggcccaagcacaaccttttagggtcagccacctgaagtggaatcctgcattgsccacttactccctatgaatcctagggccagttagggatccctgggttttctcacctaagaaggtaagtacttccttcacaggcttgtttggaggattcaatgaaatacactcaaacttcagctcccttctaatcattctctctccctttcccagagacagtatttggagaataacagaaaccaagccttgttaggaaagtttctttcaaattagcttagagtttaacattttttttctagagccctaggaaaaaaacgcccaat

SEQ ID NO: 602479 - DNA, 596 bp, Homo sapiens
ttttgctttttaaagtttttattacagtataacatccacaccgaaaagtgcgcaaatcctccataaactccgacmgagaggcaagacaagccaggcttcccacgctcctgtcccctccaccggccctgccaagggtaaccacgtgctgggagatttgcagcacaacgcaaaggagaaggattagcgagcaccttgttccagcaaaaactggagcaagcctaaaacttcctgggaattaagtgtaaatttaagccaggtattctagtaatgttgagttcaacaggattgccattattttaactagaattcagttgagagcagagcgccatcgccgtcttccgccttagtcactcggccctgggctggctcacgcccgccccgccccctccccgcccctcccacgcccgccccgcccctcccacgcccccgcccccgtcccgctccccctaccccgacccgccctccctcgcccgccgccccacccgccgcagccctccccgcgcagcctgggagtgactcggcgttcactcgggagacgccgctctgtggcccggacaaccggtcctatgcagcgccgtccgaggcagttcgcggag

SEQ ID NO: 602480 - DNA, 596 bp, Homo sapiens
ttttgctttttaaagtttttattacagtataacatccacaccgaaaagtgcgcaaatcctccataaactccgacagagaggcaagacaagccagscttcccacgctcctgtcccctccaccggccctgccaagggtaaccacgtgctgggagatttgcagcacaacgcaaaggagaaggattagcgagcaccttgttccagcaaaaactggagcaagcctaaaacttcctgggaattaagtgtaaatttaagccaggtattctagtaatgttgagttcaacaggattgccattattttaactagaattcagttgagagcagagcgccatcgccgtcttccgccttagtcactcggccctgggctggctcacgcccgccccgccccctccccgcccctcccacgcccgccccgcccctcccacgcccccgcccccgtcccgctccccctaccccgacccgccctccctcgcccgccgccccacccgccgcagccctccccgcgcagcctgggagtgactcggcgttcactcgggagacgccgctctgtggcccggacaaccggtcctatgcagcgccgtccgaggcagttcgcggag

SEQ ID NO: 602481 - DNA, 596 bp, Homo sapiens
ttttgctttttaaagtttttattacagtataacatccacaccgaaaagtgcgcaaatcctccataaactccgacagagaggcaagacaagccaggcttcccacgctcctgtcccctccaccggccctgccaagggtaaccacgtgctgggagatttgcagcacaacgcaaaggagaaggattagcgagcaccttgttccagcaaaaactggagcaagcctaaaacttcctgggaattaagtgtaaatttaagccaggtattctagtaaygttgagttcaacaggattgccattattttaactagaattcagttgagagcagagcgccatcgccgtcttccgccttagtcactcggccctgggctggctcacgcccgccccgccccctccccgcccctcccacgcccgccccgcccctcccacgcccccgcccccgtcccgctccccctaccccgacccgccctccctcgcccgccgccccacccgccgcagccctccccgcgcagcctgggagtgactcggcgttcactcgggagacgccgctctgtggcccggacaaccggtcctatgcagcgccgtccgaggcagttcgcggag

SEQ ID NO: 602482 - DNA, 567 bp, Homo sapiens
actgtgtaatagcatatggactttgctattctaaagcagaatctaagtagaatcaaaagatttgaacaaaattatgaatgaaggaccctgacatatctactaaatagtcaccagctttcacgatagcttctgtagcatgccaggggggaagaaagccacgttctttcctcactgttcccttagggcctttgttgtaggagaatagtgggaggggctgaggttggctttgactacaagtggaaatttttgttttcctgatgagcctggcactcaggacactagacatttaactgtaggtttatgattgtcacccactctgcttttaatgccaagagtttcagaacccrgctgacctgagcagaataaagttctttgggttcaatctgcagcaatcagaattttgagaacaacaacaaaaaaaatcttttttttttttttatctggtgttgcctcagcaggatccccgaatgtacttgctggtagcttagagcatagtctatgcaggggaggagaaacagagttgcagctgtgatgtgactcattcatactatgttcttttaatggaga

SEQ ID NO: 602483 - DNA, 498 bp, Homo sapiens
ctgcagctgtgatccgccactcgcagtgtcagatgcctgctctgggaggacttccttgccctcacactgctacccactaccagctgcaccccacccacatccccatatacatgccgagtatcctcagcacctggtacatggccccctgctactctcattacatgtatctatccccactgccccgactccaaccccagatggctttttgaggccaggaactgtgtcttcttttcatgttttttccactaatatcctgcacagtgcctaaaacactgaattaatgtttattaaatgaaggacacttttgaatataaaaggtgaggacaaatcaaagactactgtaaagtaatccaacctcagattaagtatttatcctttgacggctggaagcaaaacatttctctcaatcaacagacagaaacagaagcagagatcactctgcattgctrctgaacaaaaatatacagcctctgaaggaagtgatttcttaacaagaca

SEQ ID NO: 602484 - DNA, 559 bp, Homo sapiens
atttaagaataatttgacttttcaaatgagtaactttaattatttactatgctcaagttattgtgctactgtgggaaatgtaaaaatgaaataaagaaggtcttgttgctatagtttggctgtgtccccacccaaatctcatcttgaattgtagtttccataattcccatgtgttgtaggagrgactaggtggagataattgaatcataggggtggttacccccatcctgttcttgtggtagtgaacaagtctcatgagacctgatgtttttataaggggtttcccctttccttggtttttattctctctcttgcctgctgccatgtaagatgtgcctttcaccttctgccatgattgtgaggcctccccagccacgtggaacggtgagtccactaaacctctttttctttataaattacccagtgtctttatcaggtatgtctttatcagcagcatgaaaacggactaatacacctgtcctcaccgtgcagaattcccaacttttcaaacatcacctatgatggctataagagcaacaccagcagaggaaggagtgag

SEQ ID NO: 602485 - DNA, 559 bp, Homo sapiens
atttaagaataatttgacttttcaaatgagtaactttaattatttactatgctcaagttattgtgctactgtgggaaatgtaaaaatgaaataaagaaggtcttgttgctatagtttggctgtgtccccacccaaatctcatcttgaattgtagtttccataattcccatgtgttgtaggagagactaggtggagataaytgaatcataggggtggttacccccatcctgttcttgtggtagtgaacaagtctcatgagacctgatgtttttataaggggtttcccctttccttggtttttattctctctcttgcctgctgccatgtaagatgtgcctttcaccttctgccatgattgtgaggcctccccagccacgtggaacggtgagtccactaaacctctttttctttataaattacccagtgtctttatcaggtatgtctttatcagcagcatgaaaacggactaatacacctgtcctcaccgtgcagaattcccaacttttcaaacatcacctatgatggctataagagcaacaccagcagaggaaggagtgag

SEQ ID NO: 602486 - DNA, 559 bp, Homo sapiens
atttaagaataatttgacttttcaaatgagtaactttaattatttactatgctcaagttattgtgctactgtgggaaatgtaaaaatgaaataaagaaggtcttgttgctatagtttggctgtgtccccacccaaatctcatcttgaattgtagtttccataattcccatgtgttgtaggagagactaggtggagataattgaatcataggggtggttacccccatcctgttcttgtggtagtgaacaagtctcatgagacctgatgtttttataaggggtttcccctttccttggtttttattctctctcttgcctgctgccatgtaagatgtgcctttcaccttctgccatgattgtgaggcctccccagccacgtggaacggtragtccactaaacctctttttctttataaattacccagtgtctttatcaggtatgtctttatcagcagcatgaaaacggactaatacacctgtcctcaccgtgcagaattcccaacttttcaaacatcacctatgatggctataagagcaacaccagcagaggaaggagtgag

SEQ ID NO: 602487 - DNA, 546 bp, Homo sapiens
acatggctaataagcggcagtgttcaggtttaaaccttagtttcctaatcccagatatatttccattgagtacactgttcttatccatagtgggttcagttccatattcagaggccatgtagaaggaggaggaatagccttcattcttcttgactgggtatgtgattaaataggtagtttgcccaggatattttgactttgataaagctctttattgaaggcttattcatgtcatctagtaatttaatcatcatttccagagccaagaaaacatgtaataataaaaaataaaacaaaaagctatcataaatttycaaacttggaatatgaatgactctgatccattagccttaatttacaggcctatgaattaaactttacaagagtctctctcctctggcaatgtctcatgaaatcctgtctctgggagactttgtggttggggcccagtgctttagtcctggctgcatttcccggagttcgtgtcctcttcagatttttaatttatacttatttatgatgcttctaggttaagtctctggtttc

SEQ ID NO: 602488 - DNA, 579 bp, Homo sapiens
cgccccctttcccctcccatctcccggccgtggtgcggcgcagctctctccccctccgcagtctcagtggcgagctcygggtgctgtggcccggccttggcggggcggcctccggctcaggctggctgagaggctcccagctgcagcgtccccgcccgcctcctcgggagctctgatctcagctgacagtgccctcggggaccaaacaagcctggcaggtaaagatgaagctccccaaacccaacaaccttagaacttagaaatttccctgagaaaggcaggacctacccgaggagagcttctttgaaggactttgaagaaagggatcaaacttgacactttctttcagtcctcaaagaaactaaccacccttcccataggcaattctgtgtgccggcctctgcacagtttaatattaacgacaacaatgtttgcattggaatataaatggaattctttctgcttaagcagtaccagaggggaccctctttatttttatgattgttaacagatgccattgagaaaggtatgaaacgcattcctgaaaagtctctttggcggggttactatgaaagctag

SEQ ID NO: 602489 - DNA, 435 bp, Homo sapiens
tctagaggccactcatattcctcagctcatgatcctgcattgctctggcctccgcttacatctatcagctcttcccactcttaacccgtctgcctccttcttatatgagcccctrtgattgcattggacccacctggataacccagaataaccacttcaccttaaaatccttaatgtaatcgtatttgtaaagtctcttttcttgtgtgtgggaaatattcacaggtcctggggatgaggatatttggcataccacaatgaggcagttagagatgtatgaaataccttgtaaatatctacctgagtgttggctccccctgtttgatatgaaaaacattggctttaatctttgtggagtgcttactgtgctctgggcattgtgcttatcatattagtttctcacaaaaatattctcaaatattatctctatctaat

SEQ ID NO: 602490 - DNA, 409 bp, Homo sapiens
tcatgatcctgcattgctctggcctccgcttacatctatcagctcttcccactcttaacccgtctgcctccttcttatatgagcccctatgattgcattggacccacctggataayccagaataaccacttcaccttaaaatccttaatgtaatcgtatttgtaaagtctcttttcttgtgtgtgggaaatattcacaggtcctggggatgaggatatttggcataccacaatgaggcagttagagatgtatgaaataccttgtaaatatctacctgagtgttggctccccctgtttgatatgaaaaacattggctttaatctttgtggagtgcttactgtgctctgggcattgtgcttatcatattagtttctcacaaaaatattctcaaatattatctctatctaat

SEQ ID NO: 602491 - DNA, 647 bp, Homo sapiens
ggggtcattgatatgactgagtaattcctgacccacagcagcctcccaggaactgtttgayggatcaatgcaaagttgtgtcccatggcaacatgctatgtacataaatatggacaagtacctcactagacattacaaggaaccaggtgaaaagaaaggcataagtaattgtgaatctgtcacctagtgagggaaagcaattcaatgcaggtccttcaatggtaagtcagcatctttgctttctcatagacaggaaaaataattgatttgaaatattaatatagtgggcagccatctaatctttcattagtttgtctgctctatctaagctagactataaacttctagggtaaaaaacaaaacacaaaagagaaactgagccttaaggtataatgtcatttcatcataggattctatatactctagatagactcactcaaaaagttgtttttttttcattgtagatcactcccttagagtaattatgttgacatagactctgtttctttttaggctgagggtctgatgcagttccaaaattcccagtgtagatccaggctataaataagacacagaaaatgcaatttaagtgttttgtggctgcatagtgtttaatcacacttaagtttaatagcaatgagaaaaat

SEQ ID NO: 602492 - DNA, 553 bp, Homo sapiens
aaacaacacatatcatcttatgggttagtttgtatgtagacaagactattatctgttttgtccaaagttatgacaatgtcttgtagcttgtcttctcatcaagagctcaattttattattatgtgattatttgatctgtaagaatttgtgcctaggaaaaattcaaattgatttataaacttaaagacrtatattaatatgttttaaaataatttctttatcttttaacataaaccaacaaatttatttcccctcaaaaaataaaaataaaactaaatgatttttctaaccagaaaaaaaaaacccaagaggattaacaaaaaacaaaatattttaaatagaacaaacaagacattttgcttcaaaaatataggtcaatgtgactcttcaactaatatacgcacttattttgatttccaacaagtgcttctacacaaaccacatgtaatcactgctgcaagaccatgcctttttccatcaacaaaattgtgggcatcttttgttaaagatgtctatttaagggtcagaaagaagtctttgcacaaatttatct

SEQ ID NO: 602493 - DNA, 535 bp, Homo sapiens
cagagacctcatctgaaggtcatcaacatcaaagaccaaaggtagataaatccatgaagatggggagaaactagggcaaaaaggctgaaaattccaaaaaccagaatgcctcttctcctccaaagcatcacaactcctcgccagcaagggaacaaaactggatggagaatgagtttgacaaactgacagaagtaggcttcagaaggtggataataacaaactcctccgagctaaaggagcatgttctaacccaatgcaaggaagctaagaacgctgaaaaaaggttagatgaatggctaactagaataaccagtttagagaagaacataaatgatctgatggagctgaaaaacacagcacaagaactttgtgaaggataaacaagtatcaatarccaaattgatcaagcagaagaaaggatatcagagattgaaaaccagttcaatgaaataaagcaagaagacaagattagagaagaaagagtgaaaagaaacgagcaaagcctccaagaaatatgggactatgtgaaaagacc

SEQ ID NO: 602494 - DNA, 599 bp, Homo sapiens
tacaatacacaaataatccaaatacactacaatttcaagagtagggataacagctaaggtagtacatattcctaatgttcactttcacggctgtgttacacattttggaagagaagttatgagtaagtattgggtttggtactggtggctccctttgaaactcagcatcaatcttatttgaagtctccaaactcatttattttcctattcagtcacaaatattgcagctgtaaagaaaacaaaaactagaattagaaaacaagattattacatagtcctcaaacattttacctcccttgcaattttacttcatagtttctgaaaacaacttttacataaaaaggtctctgcatggacaaattcaaatttacatacttttcatagctctttaaaacaagcttaaaatttttaaagtttagccagawattaaaaaaaaacttttgatgtatagtttcattttagataataattatatcaacaaaaatttgaatttagatacatattagaaattttagtagcaggacattcggtatagcattcagtatctaagagcagccaacctttaaaaagggcagctaaagaaaaagggggcatggcaa

SEQ ID NO: 602495 - DNA, 654 bp, Homo sapiens
tttatgataaatgagatcccttagaatttaagtatatctaagttatacctaacctcaaccattatacccaaaaccttcctgactgtccccaaaaacaacactacacagggttcaccagtcttcacatagactagaaaatttctcctgaagccagttatggccagtaatggccatgaaggctagggyttctcacattctaaatttctgtctttcaacatccaccattctttctcttggtccctgttgcttttgaggggcaaagtgaagaagctgaaaggaaattttgggaacaggtcaatggatttagagatgcatcaaggaagcaaaagggattaaagtatactcagaaagttcacagcagcaggtattccatggataagacagtataaatactgatttgataagttaaaaatattataggactgaaaacatttactcatatcattaaaatatatttgagctatttgctctagtttgtaaagcatgctgctaccaaagtagtaatttggtgtcctgcccatccaagtcaatttctcatgatgaaaacttctttggttctacatgtaacatcaccttggccagacaatttaaaagaggaatcaggaaagcatgattcatcactaagactagcaccactagcagcaaaacggttca

SEQ ID NO: 602496 - DNA, 654 bp, Homo sapiens
tttatgataaatgagatcccttagaatttaagtatatctaagttatacctaacctcaaccattatacccaaaaccttcctgactgtccccaaaaacaacactacacagggttcaccagtcttcacatagactagaaaatttctcctgaagccagttatggccagtaatggccatgaaggctagggtttctcacattctaaatttctgtctttcaacatccaccattctttctcttggtccctgttgcttttgaggggcaaagtgaagaagctgaaaggaaattttgggaacaggtcaatggatttagagatgcatcaaggaagcaaaagggattaaagtatactcagaaagttcacagcagcaggtattccatggataagacagtataaatactgatttgataagttaaaaatattataggactgaaaacatttactcatatcattaaaatatatttgagctatttgctctagtttgtaaagyatgctgctaccaaagtagtaatttggtgtcctgcccatccaagtcaatttctcatgatgaaaacttctttggttctacatgtaacatcaccttggccagacaatttaaaagaggaatcaggaaagcatgattcatcactaagactagcaccactagcagcaaaacggttca

SEQ ID NO: 602497 - DNA, 629 bp, Homo sapiens
tgatgtccacaggagaacccacctctgaggacaaagaagcttcatgtttagaactttcccagatgatgtttatgcatctcttcctataactggatctaatttgtatccttttactacaataaaactcttataagtttagtactttcctgagttctgtgaatcattctaggaaactatctaacctggccatggaaaaacctcgaatttgtagccagctagtcygaagtgggggtggtcctggggactcacaaatatgtgtcttgcgtctggagtgaggagattctaaaagggagtattctcacagactttgcagtttggcaaacttattgcagttagtgtcacgagtcttgggtggacatggcagtctggaggactgtgctgccaacctttctggctaacgctgggaacacatactaaaactacagaccagaagcattcatttctctgggacacatgccttggatgccctgaatatctggatgttctcaggaaccaatatgaattaagtaggaagagaatggagggatctttagacagtgagttatttccatcactttttcccccccaaatctcacttttgcagatctgtcttccaagctccctttacttctgaagcaacaggtatgagg

SEQ ID NO: 602498 - DNA, 519 bp, Homo sapiens
ctggagtacgatggcatgatcacagctcactgcagcctcgaactcctggactcaagcaattctcccacttcagcctactgaatagctgggaccatgggcacatgctgccatggctgaccaatttttaaaaatttttttgtagagatgggtcatgctatgctgtgtaggctggtctcaagctcctggcctcaagcagtcctcctgccttggcctcccaaaatgctgggattacaggcatgagccactgtaccaagccgaacataatttggttttaaaatgacagaattttaaagtgaatgcatgccaaatatgtatgagtggatatgtaaagaaaatctcaaatttcagttttaaatttaaaaaggaaaatggttctagcaccacatcaatgatataaacaagactactgacttgatgttctctgttatagagtcatttggacttgctggcttgcagwttgctcataacattgggcttcctctgtatctttttagacccatcctccctggaaatgagtca

SEQ ID NO: 602499 - DNA, 506 bp, Homo sapiens
aagcccacagctaacatcatacttagtgactgaaaaaaaatgactgaaaactttctacctaaaaacaagacaaggaggttatgaaagttctaagtcagggcagttagcaggaaaaagcaagaaatggcatccaggtgggaaagaaagaatgaaactatctctattcatcgatggcacaatctttcttttatacagaaatccctaaagaatccatatacaacaaaactgtcaaagctaataaacatgttcttcaaagttgcaggatacaagaccaatatacaaaactcagtgcagtgttcctgkggaactagcaatgaataatcgaaaaatttaattatgaaaacagttccatttataatagcatcaacaataaaatattaaaaaataaatttaacagaagtatgagacttgaacactgcaactatagaacattgttgaaagaaattaaagaagaactaaataaatggaaagacaccctttgttcatgggttggaagacttaacatt

SEQ ID NO: 602500 - DNA, 583 bp, Homo sapiens
aataataaaatgaaactagagactttaccaatcagaaattgccaacgaacagattctaactggagactttatcaagcagagatcaacaactaacctctaattatggtccttctattctgatcaacaaaatatattttgttgtacttctttatcagccaataaaagttcatggtccacactgctgtgctggagctctctgaacctcttctgtttccgagaggtacctgattcatggatcattcttcacttaaataaactctgttaaacttgcataatcatagctcaccgtaggctcaaacacttgggctcaagcaatcctcctgcctcagcctctcatatagctcttactacaggcatgtgccaccacacccagctaactttttaatttttctagagatggggcctcactatgctgcccaggctagcctcaaattcctggcctcaagtgatccccccgcctcagtttctgggagtatatgggtgagttatcgcayccagctcaactttgttaaatttattttgtctaaagcttttcttttaacagtgatcttcctgcaaaatgcacatatttctgaattgcaaa

SEQ ID NO: 602501 - DNA, 553 bp, Homo sapiens
actgcctgcgctgccctgggctctgattgctacataccaaaggtgcacttggtggaacgcctgctgaccaggttgctggagctactttaggctgccagttggctccaccagtcaactttttctctccagcattccactgaagatctcccctaaaattaaccatgcaaaacaagcaaacaaacaaaaaawcacaaatcagaaaaaaatggtgtgtggctccttagattattttatttgggtttaaaagcagtttatttagtcaagtggtatagtaataagaacagcagttaaaacttacagaggaatcttgccatgctgtaactaagaaagcttaaaagcatttgaaaaaaaatcatttagagtttggacctcaataagtataggaatttcctatcctctataaagaaaagtatgtcagaaaaatccaactggattcatttgttattaaaaatgcaaataaatatatcatatatactgtacacttcgattttgttgaatttaagatgcactgatgatggcactttctggatcttagagggttcagcagaatgtt

SEQ ID NO: 602502 - DNA, 577 bp, Homo sapiens
agggaacatgcatttaaaaatattgtttttaaaaaaattttaagttttattttactttcagggatacatgtgcaggtttgttatataggtaaactcatgacttggaggttttatgtacagatattttgtcacctgggtaccaagcatagaacctgatagttttttttctttccctgaatctctccctcctcccataccccaccatctgataggccccagtgtgtgttgttcccctgtatgtatccatgtatccattatttagtttcagttatattgaatacatgcaatatttggttttcygtccccacattagtctgctaaggataatggcctccagttccatccatgtttctgcaaaggacatcatctggtactttttaatggctgcatagtattccatagtgtatatgtattctttatccagtccaccatcgatgggcatttcggttgattccacctctttgttattgtgaatagtgctgcagtgaacatatgtgtgcatgtatctttatggtagagccatttatattcctttgggtatatacccagtagtgggattgctgggtcaaatggtagt

SEQ ID NO: 602503 - DNA, 503 bp, Homo sapiens
tgaattcctttctctcctttcctctttctcctttcctctcctttattttccttctcctttttttatttccctttcccttttcccttttccttctcctctcccctcctcccctcccctctcccacccttcccctttgccttcttctcccttccttttacctcctctctcctctcaattgcactcccaaataacttgactaaataaattcctcttgtaagcaacattcagatcacagggtatgactactgttatgtaaaggctgcccttggtatcaaagcggaaggttaaagagccattttcagaaattgaatctaacaacagccagataaaatgaatgctggtctcctgtggagttctttctagaaataatcttaatctaatagatactttattttaaatgtgtttctttcctttcctttcctgtktccctccctccctccctctctccctccttccttctttcttttcttcctccctctttctttcttgttcacattggcaac

SEQ ID NO: 602504 - DNA, 579 bp, Homo sapiens
ccttgctcaggattgtattttacatgtcaatttaatatttcctttggaacagaggaaatggatgaaagcctctaagtttatggtggctgagctgcccacttgaaatgtattctcaaagtgcatgcctactcacaacaaagaggcagaagagataaggggcctcttcctgctagctccttccctgtgtgggatgcagatgaatctgtgtaacaagatgggaatagaaacagaatccaccccaaactactgaggtgggcttcaaccctatgaygttagccaagaaactgtttaaatactatttcatccaatatgcaaccctttcagtggggggaacccactgaaaacataagacccctgttcaatgacgtgagagcaggtcagcgtagcagtggagtcatctacagaaggataaaagagctaagttctccttctccaaacgcttactcaagcttctctactaggtggcaactgggaccctgtatctgaggggaagagggtcctctgctcaggagagtgtttggaacttggagggtgtggaatgtgggagggagtagagccctggggaaaagagagttttga

SEQ ID NO: 602505 - DNA, 458 bp, Homo sapiens
gagaccagcctgggcaacatgacgaaaccccatctctacaaaaaatataaaaattagccagtcatagtggtgtgcacctgtagtcccaactactcgggaggctgaggtgggaggatcacttgagcccaggaagttgagcctgcagtgagccatgtttgtgccactacactctggcctaggcaacaaagggagaccctgtctcaataaataaaatataggataatgatatctgtaaattctccagtaaccagagattaatactaaatgtatactcagggtagaggagagtaagcaagagaatcacctgtaattttcaaagcagtaatattactgagagctggctgaaaaatatactaaccttcagtcatttttgagtcattgattcatattctgatttattataacctaacagtgctgtttcaaattagtacccaktgctcttagtcgcttgggtactg

SEQ ID NO: 602506 - DNA, 583 bp, Homo sapiens
aaggaggtgtgggcattagaaactatttgctcacacacacaaaaaagaaagaaatgttacattttgtctgttcgtgcaataaattcttaaccatgtctctcactggtgtgagcatggtgagggagaataaattaaagtaattttaacataggttttggtttgcaaaaatctctgggccttcccaagtattctgcaattaagatctctacacagtacttcattcagccaattaaaaagtgacctacataaaaaatgcattggggacaaatcaatgatcaaaacatcaaactaaactttcttgtcattcaataagtaggaagtagagggattagaatgtgtctgcggagtaaaagatgacttttatgaatttctatttcmccactagatattagtgatttaattctcagaaagaaacaatgctttagcttgttttttttttttttttttttagatagtatctctgtcactcaggctggagcacagtggtgtgaacatggttcactgcatccttcagcctcccaggctcaagtgatccccctacatcagccttccaagtagctggaacaacaggcatacaccacta

SEQ ID NO: 602507 - DNA, 581 bp, Homo sapiens
tttgtctgttcgtgcaataaattcttaaccatgtctctcactggtgtgagcatggtgagggagaataaattaaagtaattttaacataggttttggtttgcaaaaatctctgggccttcccaagtattctgcaattaagatctctacacagtacttcattcagccaattaaaaagtgacctacataaaaaatgcattggggacaaatcaatgatcaaaacatcaaactaaactttcttgtcattcaataagtaggaagtagagggattagaatgtgtctgcggagtaaaagatgacttttatgaatttctatttcaccactagatattagtgatttaattctcagaaagaaacaatgctttagcttgtttttttttttttttttttyagatagtatctctgtcactcaggctggagcacagtggtgtgaacatggttcactgcatccttcagcctcccaggctcaagtgatccccctacatcagccttccaagtagctggaacaacaggcatacaccactacaccaggctaaatattttttaaatttttgtaagagatgaagaatcatcatgtttcccagg

SEQ ID NO: 602508 - DNA, 549 bp, Homo sapiens
taatattgatggagtgaaataaaatatataaacctaaaaacaaggaccttggaaatttgaggatgctaattaactaaaagtaagatcatcttgagggtggaaaaatggaatamtgcattttattcaaactcttttaatccacacaatctatgaatcagtgattatcattcttactattcaaattagaaagttgattctgagaaagttccatgaccttacctaaataaacataacaaataaattgccgggctctgatgtgaaatcaagcctttttaacagcaaaggccaagccatttaatcactaagcttcttttcctttaagactcaaatcatgagatctatgttaatgcagttaagtgtagaataatcagcctaagtgtctaatcctatttattgtactaaaggtttttagttgaaaagttgttggtttttctaaaagtatctagttaggaaatacaatataaaattttgtgattcttttacataatataaatcatttaatgtaaattttgtaaattctaactgtgggtattttgttgtttcttggga

SEQ ID NO: 602509 - DNA, 549 bp, Homo sapiens
taatattgatggagtgaaataaaatatataaacctaaaaacaaggaccttggaaatttgaggatgctaattaactaaaagtaagatcatcttgagggtggaaaaatggaataatgcattttattcaaactcttttaatccacacaatctatgaatcagtgattatcattcttactattcaaattagaaagttgattctgagaaagttccatgaccttacctaaataaacataacaaataaattgccgggctctgatgtgaaatcaagmctttttaacagcaaaggccaagccatttaatcactaagcttcttttcctttaagactcaaatcatgagatctatgttaatgcagttaagtgtagaataatcagcctaagtgtctaatcctatttattgtactaaaggtttttagttgaaaagttgttggtttttctaaaagtatctagttaggaaatacaatataaaattttgtgattcttttacataatataaatcatttaatgtaaattttgtaaattctaactgtgggtattttgttgtttcttggga

SEQ ID NO: 602510 - DNA, 517 bp, Homo sapiens
ctattattttcttccagtgctcactcaccaaaggtcattcagtaaagrcgtgactgagcccagctctgagtgacttcaaagcctgacttttttaacactgtctagctgtccagatccattaaaaatacttattggcatttatgatgacctaaccatgctgcagttaccaattacctctcaaatttgtgacttaacaatatggaagtttctcattcatagtacatttccaatctcagttgctagagctatcttctcaatgtagatagttaggaacctaggcaaatgaaagcttactcttaacacgtgctttcataatcacaagagctgaataaatagaatatgatgaatcatgcaatcactctgtggcagattaaagatagttgaaatctttttcttattactttaattaaaagatggagtttagctccctttctttgaatttgggttggctttagtaacttacctggataaatagaatattgcaaaactgaacatgtatgacttccaagtcaagatt

SEQ ID NO: 602511 - DNA, 571 bp, Homo sapiens
gtctccaattttttttttttttttgcctattcagttattttgttattcagtaattcagttattttggaaattgcaacttgtcctaacatatttccctaactgagtaccagtctatgacccataaacctgtgatccatacaccctgctaagagtaaataaacattcctgatggcactctatgttctattagaatttcttaatgctgtgtcttgacttctgaactctatgatactagctttatagacactctcaatttcattcagttacatatcctaagactgcctgctgaactacgaatccctgcaatctcttcttatatggtgaatatcctatatgtcctacagatctttctaawattcattgacttgtgcccatctttaatggctgtatctattttcagttcttgtttctctataagacattcccatccctacccttaaaatgccttatctgtgtggactaagatgtatcaaagccaaattacagaacaaataatgattattatatcccaagcctcactaggctatgggtgttgtttctgtaagatgttttcctagattaaagaccttcc

SEQ ID NO: 602512 - DNA, 521 bp, Homo sapiens
tttaatatgctgtgagtaaccactagagggtagccctgggtaaccaattgcccatttgctgcttatttaagttgtcctgacacagaaagattgaaaataaaggtgggcatggggagggagggtgcagataaaagcaaggggaatttaaaagaaacttggagtgacaatgttatacaaaatgcagtacaaggagaaaagtattaaaatggacaaagttatatttttatatgtgataaaaggtatagtctactaatataaggcmattctaaacctttatgcacccagaaacatattgaaatatatcaatatataaaaatatttaaatgtttatataaaaatattgtttttcttaacatttgtaggattaaggagttatattttgcagtcttcttggtagctcttcaaaaccctagactttgccaggtgcagtggctcatgcttgtaatctcaatgaggctcaaaggcctcatgcctttgagaggcccaggacagagggttgcttgaggccaggaatttgagac

SEQ ID NO: 602513 - DNA, 521 bp, Homo sapiens
tttaatatgctgtgagtaaccactagagggtagccctgggtaaccaattgcccatttgctgcttatttaagttgtcctgacacagaaagattgaaaataaaggtgggcatggggagggagggtgcagataaaagcaaggggaatttaaaagaaacttggagtgacaatgttatacaaaatgcagtacaaggagaaaagtattaaaatggacaaagttatatttttatatgtgataaaaggtatagtctactaatataaggccatyctaaacctttatgcacccagaaacatattgaaatatatcaatatataaaaatatttaaatgtttatataaaaatattgtttttcttaacatttgtaggattaaggagttatattttgcagtcttcttggtagctcttcaaaaccctagactttgccaggtgcagtggctcatgcttgtaatctcaatgaggctcaaaggcctcatgcctttgagaggcccaggacagagggttgcttgaggccaggaatttgagac

SEQ ID NO: 602514 - DNA, 521 bp, Homo sapiens
tttaatatgctgtgagtaaccactagagggtagccctgggtaaccaattgcccatttgctgcttatttaagttgtcctgacacagaaagattgaaaataaaggtgggcatggggagggagggtgcagataaaagcaaggggaatttaaaagaaacttggagtgacaatgttatacaaaatgcagtacaaggagaaaagtattaaaatggacaaagttatatttttatatgtgataaaaggtatagtctactaatataaggccattctaaacctttatgcacccagaaacatattgaaatatatcaatatataaaaatatttaaatgtttatataaaaatattgtttttcttaacattygtaggattaaggagttatattttgcagtcttcttggtagctcttcaaaaccctagactttgccaggtgcagtggctcatgcttgtaatctcaatgaggctcaaaggcctcatgcctttgagaggcccaggacagagggttgcttgaggccaggaatttgagac

SEQ ID NO: 602515 - DNA, 521 bp, Homo sapiens
tttaatatgctgtgagtaaccactagagggtagccctgggtaaccaattgcccatttgctgcttatttaagttgtcctgacacagaaagattgaaaataaaggtgggcatggggagggagggtgcagataaaagcaaggggaatttaaaagaaacttggagtgacaatgttatacaaaatgcagtacaaggagaaaagtattaaaatggacaaagttatatttttatatgtgataaaaggtatagtctactaatataaggccattctaaacctttatgcacccagaaacatattgaaatatatcaatatataaaaatatttaaatgtttatataaaaatattgtttttcttaacatttrtaggattaaggagttatattttgcagtcttcttggtagctcttcaaaaccctagactttgccaggtgcagtggctcatgcttgtaatctcaatgaggctcaaaggcctcatgcctttgagaggcccaggacagagggttgcttgaggccaggaatttgagac

SEQ ID NO: 602516 - DNA, 581 bp, Homo sapiens
tgaattctctaatcagaccatacagatcagtcaaatatttgacttattgatttttggagaaacaagctattttgtatgcaagatatgaaaatactagaagttttcgcccttgattcagaataagcaatgagagtcaaggtcttatgcagtaaatttgaagttatgttaagtagtatatactttcaatattttaacagaagggatcatcagttttctcatacatgtagctacatatttaaaacagtattatttgcatttatattttaatttctgttttatctcatattaatttattaatacagatgtaatgytattaagaaccaaacatactattctaaatatttaaaagatctccaccacacagaattataaacttctgcggcccacatttgaacatacttcttttctgcagtctcatctctgtaaactttgctcacttaaaaaactactcatttagagctttatctccaatttctagtactttggaggctaaaaatgcagttggctgagttaccctgacctgttaaagcagtctttccattttaacttaagttcaccttaagaaacatagattatctttg

SEQ ID NO: 602517 - DNA, 581 bp, Homo sapiens
tgaattctctaatcagaccatacagatcagtcaaatatttgacttattgatttttggagaaacaagctattttgtatgcaagatatgaaaatactagaagttttcgcccttgattcagaataagcaatgagagtcaaggtcttatgcagtaaatttgaagttatgttaagtagtatatactttcaatattttaacagaagggatcatcagttttctcatacatgtagctacatatttaaaacagtattatttgcatttatattttaatttctgttttatctcatattaatttattaatacagatgtaatgttattaagaaccaarcatactattctaaatatttaaaagatctccaccacacagaattataaacttctgcggcccacatttgaacatacttcttttctgcagtctcatctctgtaaactttgctcacttaaaaaactactcatttagagctttatctccaatttctagtactttggaggctaaaaatgcagttggctgagttaccctgacctgttaaagcagtctttccattttaacttaagttcaccttaagaaacatagattatctttg

SEQ ID NO: 602518 - DNA, 581 bp, Homo sapiens
tgaattctctaatcagaccatacagatcagtcaaatatttgacttattgatttttggagaaacaagctattttgtatgcaagatatgaaaatactagaagttttcgcccttgattcagaataagcaatgagagtcaaggtcttatgcagtaaatttgaagttatgttaagtagtatatactttcaatattttaacagaagggatcatcagttttctcatacatgtagctacatatttaaaacagtattatttgcatttatattttaatttctgttttatctcatattaatttattaatacagatgtaatgttattaagaaccaaacatactattctaaatatytaaaagatctccaccacacagaattataaacttctgcggcccacatttgaacatacttcttttctgcagtctcatctctgtaaactttgctcacttaaaaaactactcatttagagctttatctccaatttctagtactttggaggctaaaaatgcagttggctgagttaccctgacctgttaaagcagtctttccattttaacttaagttcaccttaagaaacatagattatctttg

SEQ ID NO: 602519 - DNA, 581 bp, Homo sapiens
tgaattctctaatcagaccatacagatcagtcaaatatttgacttattgatttttggagaaacaagctattttgtatgcaagatatgaaaatactagaagttttcgcccttgattcagaataagcaatgagagtcaaggtcttatgcagtaaatttgaagttatgttaagtagtatatactttcaatattttaacagaagggatcatcagttttctcatacatgtagctacatatttaaaacagtattatttgcatttatattttaatttctgttttatctcatattaatttattaatacagatgtaatgttattaagaaccaaacatactattctaaatatttaaaagatctccaccacacagaattataaacttctgckgcccacatttgaacatacttcttttctgcagtctcatctctgtaaactttgctcacttaaaaaactactcatttagagctttatctccaatttctagtactttggaggctaaaaatgcagttggctgagttaccctgacctgttaaagcagtctttccattttaacttaagttcaccttaagaaacatagattatctttg

SEQ ID NO: 602520 - DNA, 541 bp, Homo sapiens
gtgccaccacacttggctgatttttttatttttatttttagtggagatgaagtcttgctatattcccaggctggtctcaaactcctgagctgaagcagtcctcttgcctgggcctccctaagtgctgggattacagacttgagccactgcgcccagcccactctgaattgttttatagccattcccaaatgttaatgaaagtccaaattgggggaaaaagagttcctgcagaaaatgatagtgtatatttacatatacatgtcttttctgtgtctcttcactttggtaattaatatrattgtggatctttgacactgattttagattacttaataaagaatgtatttaagtgtagtgcagaatagattatctttaatgtttgcaaaaagtggtacactgtttagtaatatttaggtaaaatggtaagattgccagtgtaatgggcaggttatatgtctggaaataggctcagcaggaagttaaaggaatcatggcctatactgctgacagaagataaacaacatgcactatgaaacccact

SEQ ID NO: 602521 - DNA, 602 bp, Homo sapiens
gaggggtagaaggggataggccaggaaatcaaactgactggagtttaaaaagtactttccaatctagctttttggtgcatactcagaacaatccagtgtggatggtagatggttatttatcataatccctattttacaggttggtgatggagcctcatgatgttctcattaagaaaacctaatttttctttttctttttttttttttttttttttgagacaaagtctcactctgtcgcccaggctggagtgcaatggcatgatctcagcttactgcaacctcctcctcctgggttcaagcgattcttctgcctcagcttcmtgagtagctgggactacaggcatgtgccaccacatccaactaattttttatttttagtagggatggggtttcatcatgttggccagactggtctctaactccagacctcaggtgttctgcctgcctcggcctcccaaagtgttgggattacaggtgtgagccactgtgctcaccgtgcaccagccaagaaaacctgatttttctaatgaaaaatactgcctttccctctcctcaaaagagatgaattaattatttcataagactataccatttttcaaaat

SEQ ID NO: 602522 - DNA, 602 bp, Homo sapiens
gaggggtagaaggggataggccaggaaatcaaactgactggagtttaaaaagtactttccaatctagctttttggtgcatactcagaacaatccagtgtggatggtagatggttatttatcataatccctattttacaggttggtgatggagcctcatgatgttctcattaagaaaacctaatttttctttttctttttttttttttttttttttgagacaaagtctcactctgtcgcccaggctggagtgcaatggcatgatctcagcttactgcaacctcctcctcctgggttcaagcgattcttctgcctcagcttcctragtagctgggactacaggcatgtgccaccacatccaactaattttttatttttagtagggatggggtttcatcatgttggccagactggtctctaactccagacctcaggtgttctgcctgcctcggcctcccaaagtgttgggattacaggtgtgagccactgtgctcaccgtgcaccagccaagaaaacctgatttttctaatgaaaaatactgcctttccctctcctcaaaagagatgaattaattatttcataagactataccatttttcaaaat

SEQ ID NO: 602523 - DNA, 602 bp, Homo sapiens
gaggggtagaaggggataggccaggaaatcaaactgactggagtttaaaaagtactttccaatctagctttttggtgcatactcagaacaatccagtgtggatggtagatggttatttatcataatccctattttacaggttggtgatggagcctcatgatgttctcattaagaaaacctaatttttctttttctttttttttttttttttttttgagacaaagtctcactctgtcgcccaggctggagtgcaatggcatgatctcagcttactgcaacctcctcctcctgggttcaagcgattcttctgcctcagcttcctgagtagctgggactacaggcatgtgccaccacayccaactaattttttatttttagtagggatggggtttcatcatgttggccagactggtctctaactccagacctcaggtgttctgcctgcctcggcctcccaaagtgttgggattacaggtgtgagccactgtgctcaccgtgcaccagccaagaaaacctgatttttctaatgaaaaatactgcctttccctctcctcaaaagagatgaattaattatttcataagactataccatttttcaaaat

SEQ ID NO: 602524 - DNA, 602 bp, Homo sapiens
gaggggtagaaggggataggccaggaaatcaaactgactggagtttaaaaagtactttccaatctagctttttggtgcatactcagaacaatccagtgtggatggtagatggttatttatcataatccctattttacaggttggtgatggagcctcatgatgttctcattaagaaaacctaatttttctttttctttttttttttttttttttttgagacaaagtctcactctgtcgcccaggctggagtgcaatggcatgatctcagcttactgcaacctcctcctcctgggttcaagcgattcttctgcctcagcttcctgagtagctgggactacaggcatgtgccaccacatccaactaattttttatttttagtagggatggggtttcatcatgttggccagactggtctctaactccagacctcaggtgttctgcctgcctcggcctcccaaagtgttgggattacaggtgtgagccactgtgctcaccrtgcaccagccaagaaaacctgatttttctaatgaaaaatactgcctttccctctcctcaaaagagatgaattaattatttcataagactataccatttttcaaaat

SEQ ID NO: 602525 - DNA, 542 bp, Homo sapiens
catgaagaatccaccccttgtttagcatgtagtcaagaaataactataaatatccttagaatagaacaaaagaacaaktttctttacttctctaataaacttgctttcactgtactctatggatttgccttgaattctttcttgagaaagacccaagaactctctcttggggtctggattgggacccctttccagtaacagttacacttgcaaagtacatcctgtgtccaaccactgtatatttaattgtgaaatttattaaatattaatttaaataagttgaaagacctttaaagacagggcaattcaaaaatgagtaaaattattgggttacacagtataaaaatccatcaaaaagccaaatattttactatttggggggcctctcaagtacctatttttgctagatattgtcagcacttgtttctgttccaaaacatcgtatttatactaggattggaagtagttatattttaagaacaagaaacagacacagtaaaaggttatgagatgtcagtagactaagtgctaaagaaattcca

SEQ ID NO: 602526 - DNA, 542 bp, Homo sapiens
catgaagaatccaccccttgtttagcatgtagtcaagaaataactataaatatccttagaatagaacaaaagaacaattttctttacttctctaataaacttgctttcactgtactctatggatttgccttgaattctttcttgagaaagacccaagaactctctcttggggtctggattgggacccctttccagtaacagttacacttgcaaagtacatcctgtgtccaaccactgtayatttaattgtgaaatttattaaatattaatttaaataagttgaaagacctttaaagacagggcaattcaaaaatgagtaaaattattgggttacacagtataaaaatccatcaaaaagccaaatattttactatttggggggcctctcaagtacctatttttgctagatattgtcagcacttgtttctgttccaaaacatcgtatttatactaggattggaagtagttatattttaagaacaagaaacagacacagtaaaaggttatgagatgtcagtagactaagtgctaaagaaattcca

SEQ ID NO: 602527 - DNA, 550 bp, Homo sapiens
gcgatctccctgcaccttcgcccctacaaggccgactccgggctgcgtcgcagtactcccgttccagctgctgcgcccgctaaggctccagtggtcgcggttccaagagccagcaaacgggagcctcccgcagtactctcgcgagaacakctcccgggactctccgagagccgagattttacccaatatggaacctctccgcgggcggggcttcgtgagagaagaggatgggaggagcagttctcgcgagaagagaacaataactggagaccaaaggcagaaactcccagggactgtctccttaagggcgcgaaggcggaccggggaaggaagagagaagctggcagcacacgcctcgcgcgcctcaccgtggccggcggggcaaatacctggctctgtggtggaaaacgacactgacaaatagcgtgtcggggaaagagtcaaaagatctttaactgcgagtagttaccagcagcagagcacctgctcacctgaacccccaaattccaaaaaacacttgcataaaaaagagacaagtggccgggcgtgg

SEQ ID NO: 602528 - DNA, 596 bp, Homo sapiens
aagtatttcattttaggggtttaaatgatggttcagtctccaattattcattgtttgcatataaaaatacaattgatatttgtgtgtttttcttgtatcctgaaactcctttattagttctaagaattttttgtagattccctggaattaactacattgacaatcawgtcatctgttaatagggacagttatgtttatctttttaatatgaatggcctttatgactttttattgcttgttatactagctaagacttccaatactatgttgaataagggtggtgagaatagacattcttgccttcttcctgaacatagggggaaagcattcagtcttttaccactaagtatgatgttagctgtaggatttttgttgatgtcctttattaggttagggaagttttcatctactccagtttgctgagaaatttatcatgaatcaatgttgtattttgtgaaattttttttgcatctattgataaggcccatgtggtttttctctttagatgattaatatggcaggttacattaattgatttttttgaatattgaaccagccttgcattctcagaatgagagtattcacactaagttacc

SEQ ID NO: 602529 - DNA, 596 bp, Homo sapiens
aagtatttcattttaggggtttaaatgatggttcagtctccaattattcattgtttgcatataaaaatacaattgatatttgtgtgtttttcttgtatcctgaaactcctttattagttctaagaattttttgtagattccctggaattaactacattgacaatcatgtcatctgttaatagggacagttatgtttatctttttaatatgaatggcctttatgactttttattgcttgttatactagctaagacttccaatactatgttgaataagggtggtgagaatagacattcttgccttcttcctgaacatagggggaaagcattcagtcttttaccactaagtatgatgttagctgtaggatttttgttgatgtcctttattaggttagggaagttttcatctactccagtttgctgagaaatttatcatgaatcaatgttgtattttgtgaaattttttttgcatctattgataakgcccatgtggtttttctctttagatgattaatatggcaggttacattaattgatttttttgaatattgaaccagccttgcattctcagaatgagagtattcacactaagttacc

SEQ ID NO: 602530 - DNA, 596 bp, Homo sapiens
aagtatttcattttaggggtttaaatgatggttcagtctccaattattcattgtttgcatataaaaatacaattgatatttgtgtgtttttcttgtatcctgaaactcctttattagttctaagaattttttgtagattccctggaattaactacattgacaatcatgtcatctgttaatagggacagttatgtttatctttttaatatgaatggcctttatgactttttattgcttgttatactagctaagacttccaatactatgttgaataagggtggtgagaatagacattcttgccttcttcctgaacatagggggaaagcattcagtcttttaccactaagtatgatgttagctgtaggatttttgttgatgtcctttattaggttagggaagttttcatctactccagtttgctgagaaatttatcatgaatcaatgttgtattttgtgaaattttttttgcatctattgataaggcccatgtggtttttctctttagatgattaatatggcaggttacattaattgatttttttgaatattgaaccagccttgcattctcaraatgagagtattcacactaagttacc

SEQ ID NO: 602531 - DNA, 628 bp, Homo sapiens
  misc_feature 606, 607, 608, 609, 610, 611, 612, 613, 614, 615, 616, 617,618, 619, 620, 621, 622, 623, 624, 625, 626, 627, 628: n = A,T,C or G
taaactgtattgtgtagggatacgtacactactggtaaagaaaagcaaagaaataggccgggcatggtggctcacgcctgtaaccccagcactttgggaggccgaggcaggcagatcatgaggtcaggagatygagaccatcctggctaacatggtgaaaccccatctctactaaaaatacaaaaaattagctgggcgtggtggcaggcacctgtaatcccagctactcaggaggctgaggcaggagaatggcgtgaacccgggaggcggagcttgcagtgagccaagattgtgccactgcactccagcctgggcaacagagtgagactctgtctcaaaaaaaaaaaagaaaaaaagaaaagaaaagaaattattatcataaacgccaaaataaggaatccttctgtggggagaggtggtgttgtaatcaaagacctgggtggtacttacgtaagtgtttgttttataaatattaagtaaccttgacatctattaatctattttaatgcatttttctacatgcatgttatatttcacaataaaaatggagattactaaattaattaccaaaactattactaaagtaattagagcaataacacagtnnnnnnnnnnnnnnnnnnnnnnn

SEQ ID NO: 602532 - DNA, 581 bp, Homo sapiens
cctggttcttcacgaggaaccagtgtcttcaagtcccaaagctttatggcccttaaagtttaatgggagtgcttctgttggggcatctgacactgcaggcagttaggcttcagtgatctctgctgagctgtcttttatcactcattmattatttcccaccatctaaaatgtgtggctatctcttagctgctgttattccccaccctgttctctttgttctcacagtggttttattcctttgctgccatttaagtgggggttttaggagagcacagaactaaacaaacaggttcagtttgccatgtttaatcagaagtctcattctatctttgaatatttttatgtttgtcattaaatccaatattttattgccacttagatgaatttattatacaactcagcatttgttgtactacatatttaagaaatatatactgtacttcaatattctcataaactgttgttttttgttcttttgtttttaatatcaatagcttaaggggtacatgtggttttaattatatggatgaattgtatagtggtgaagtctgggctcttagtgtagtcatcacctgagtagt

SEQ ID NO: 602533 - DNA, 592 bp, Homo sapiens
tctcttctttttagtgctatcccataccctggttcttcacgaggaaccagtgtcttcaagtcccaaagctttatggcccttaaagtttaatgggagtgcttctgttggggcatctgacactgcaggcagttaggcttcagtgatctctgctgagctgtcttttatcactcattaattatttcccaycatctaaaatgtgtggctatctcttagctgctgttattccccaccctgttctctttgttctcacagtggttttattcctttgctgccatttaagtgggggttttaggagagcacagaactaaacaaacaggttcagtttgccatgtttaatcagaagtctcattctatctttgaatatttttatgtttgtcattaaatccaatattttattgccacttagatgaatttattatacaactcagcatttgttgtactacatatttaagaaatatatactgtacttcaatattctcataaactgttgttttttgttcttttgtttttaatatcaatagcttaaggggtacatgtggttttaattatatggatgaattgtatagtggtgaagtctgggctcttagtgtag

SEQ ID NO: 602534 - DNA, 427 bp, Homo sapiens
gagagagagagagaaggaaggaaggaagacaaacatcaagaatttcaagagtctgagattgtaccctcctgttaaagctaacaagttaatctgccagagtttcacggaatctggcctgctaaatgagattcctaagccagagactagcactttaccactcacagccagcaagcagcatgagcttcacatttgcattagttcttttagaccctcaagtcctatgagaaagacacagagtggcccaggtaggtgttataggtgttataaatgtagtgggttggcatctcagttaaggaaacccaggcttagtaacttaatcctttatagtagactgcaagaaaacctgmctgacttttacccctgaggtagaaattatctttattgtaccagagagttaaaataaaaaaaaataaaaaaaaataaaaac

SEQ ID NO: 602535 - DNA, 562 bp, Homo sapiens
agtatactagctgtgggtctgtcatatatggcttttattatgttgaggtatattccttctacatccagttttctgagggtttttaacatgaagtgatgttgaattttatcaaatgctcttttagcatcaattgaaatgattatatggttgttgttcttcattatgttgatatgatgtatcatattgaataatttctgtatgttgaacaatttttgcatcactgggataaatcccatttcatcatggtgaatgatcttttaatgtattgttgaatttgatttgcaagtattttgttgaggatttttacatcaatgttcatcagggatattagcctgtagtttcttttttgatgtgtctttgtctggtttttgtatcaggataatactggcctcatagaatgagtttctgaagtattccytcctcctttatttttcagaatagtttgagaaggattggtattaagttcttttaatgtttgatagaattcagaagtgaagccattgggtcctggacttttcttcgctgggagaatttttattacatcttcaatcttgttacttgt

SEQ ID NO: 602536 - DNA, 569 bp, Homo sapiens
gaatccaaaggacaaaagctaattattgcggcgtggggaaaaaacagctctggaaggattttgggtttaagagaatgcgggagggaggcattcacgtgttaatctgacaagagagtttctaagttaaagaatgcctgaattcaatccaccagatgctgactttggataaagacattttcrtcttttttccccctataaaataatgataatcagcagggcccggtggctcatgtctgtaatcccagcactttgggaggctggggtgggtggatcacgaggtccagagttcatgaccagcctggccaagatggtgaaaccccacctctactgaaaaaaaaaaaatacaaaaattagccaggtgcagtggcgggtgcctgtaaccccagctactcggaaggctgaggcaggagaatcgcttgaacccggtgggtggaggttgcagtaagccaagatcacaccactgcactccagcctgggcgacagggtgagactatgtctcaaataataataataataataatcatcatcatcatcattcttattactaaacaaatttgtgttttcagagt

SEQ ID NO: 602537 - DNA, 574 bp, Homo sapiens
tgaggaagaatccaaaggacaaaagctaattattgcggcgtggggaaaaaacagctctggaaggattttgggtttaagagaatgcgggagggaggcattcacgtgttaatctgacaagagagtttctaagttaaagaatgcctgaattcaatccaccagatgctgactttggataaagacattttcatcttttttccccctataaaataatgataatcagcagggcccggtggctcatgtctgtaatcccagcactttgggaggctggggtgggtggatcacgaggtccagagttcatgaccagcctggccaagatggtgaaaccccacctctactgaaaaaaaaaaaatacaaaaattagccaggtgcagtggcgggtgcctgtaaccccagctactcggaaggctgaggcaggagaatcgcttgaacccggtgggtggaggttgcagtaagccaagatcacaccactgcactccagcctgggcgacagggtgagactatgtctcaaataataataataataatmatcatcatcatcatcattcttattactaaacaaatttgtgttttcaga

SEQ ID NO: 602538 - DNA, 462 bp, Homo sapiens
tctttctttctttctttctttttttttaaacaagggcttgctctgttgctctggctggagtgaatggcatgatctccgctcactgcaagcttcaccttctgggctcaagtgatcctcccacctcagcctcccaagtagctacttgtagtactaccaagtactacaggcatgaaccatcatgcccagctcctttatgtattttttgtagagacagggtttcaccatgttgagcaggctggtgtcaaattcctgggctcaagccttttgcttgcctcgggctcccaaaggcagggattatagctgtgagccaccatgctcagccttgatgttttattcttttaaaagagaaacatccattcataaataccttcttaatataargccatacaagtacagtaggataatgtgttaacctgttttgtattgctataaaggaatacgggaggctcagtaatttagtaa

SEQ ID NO: 602539 - DNA, 513 bp, Homo sapiens
ctgggttcaagtgattctcctgtctcagcctcacaagtagctgggactacaggtgtgtgccaccacatctggctaattttcgtatttttcatagagatggggtttcaccgtgtttgccaggctgggctcgaactcctgatccacctgcctcagcctcccaaagtgctgggattacggcacgagccatcatgcctggcctcttcctgttcttataaagccaccagtcccactcttgtgataacccattaatccatggatggattaacccattcatgaagacagggttctcatgatccaatcacctctttaagtccccacctttcaacactaccatattggggattaactttccagcacatgacatttgggggacccatgcaaaccatatcatggagragggacatccttgttaggtagtggtagaaagcttagtgccactattgtctgcagttacatggaaagcaaaatatgtacctaataaacttagtgatctagctatggagatgtccaagc

SEQ ID NO: 602540 - DNA, 462 bp, Homo sapiens
ctgtaatagcaggaagaaccctcactgtaacaggcttgcctctgaatttcccaggcctcattgctgcctttcattctcctcttcccagtctggaaacgtatttccacccttcttcctttgactgctttatcagaccttcagggctcagcccagggcttcctctcttattgcctatcaagttagacttaaattatctgtttctatggacctccttcatttaactctaagtttcttgaaggcaagagctgtgccatattcatctttgtattcatctgtgaatagatggtattaaatattgcttgaactgaactgarctgattgaagaattgagcctttcttgttcttaaggctttcacatttcctacttgaaagcgagcaattttttttttttgaagtgtttctctcttgttgcccaggctggagtgcaatggcatgataagcaatcttttcattgataactaa

SEQ ID NO: 602541 - DNA, 543 bp, Homo sapiens
tcaggagtccgagaccagcctggccaacatggcaaaaaattagccgggtgtggtggcgggtgcctgtaatcccagctactggagaggctgaggcgggtaaatctcctgaggtcaggagtccgagaccagcctggccaacatggcaaaaaattagccgggtgtggtggcgggtgcctgtaatcccagctactggagaggctgaggcaggagaatcgcttgaacccaggaggcggrggttgcagtgagccaagatccctccatagcactccagcctgggcgacagagtgagactccaactcaaaaaataaaaaatttaaaaaaaaattttttaaagcaatcttctcctaaggaatggtgatttctggagtaaaaactttctctgaataggagtttcccttgctcactcctgcaccagccttctctccatgaccaaattcataaggcactcagcaagactctgtgctcagagcccaattgcaacacacagtacaattatgctgaccatgccaaatactttggctttggagaatagatctattaacc

SEQ ID NO: 602542 - DNA, 543 bp, Homo sapiens
tcaggagtccgagaccagcctggccaacatggcaaaaaattagccgggtgtggtggcgggtgcctgtaatcccagctactggagaggctgaggcgggtaaatctcctgaggtcaggagtccgagaccagcctggccaacatggcaaaaaattagccgggtgtggtggcgggtgcctgtaatcccagctactggagaggctgaggcaggagaatcgcttgaacccaggaggcggaggttgcagtgagccaagatccctccatagcactccagcctgggcgacagagtgagactccaactcaaaaaataaaaaatttaaaaaaaaattttttaaagcaatcttctcctaaggaatggtgatttctggagtaaaaactttctctgaataggagtttcccttgcycactcctgcaccagccttctctccatgaccaaattcataaggcactcagcaagactctgtgctcagagcccaattgcaacacacagtacaattatgctgaccatgccaaatactttggctttggagaatagatctattaacc

SEQ ID NO: 602543 - DNA, 449 bp, Homo sapiens
taatcatacaatagagtacttctcagccataaaaagatgggggaaaaaacgctattaatatactcaacaaaatggatgactawcaagagcattatgctaagtgaaataactcagacacaagactgcataatgtatttctatactgcaatgcatatttttatttatatgaaattataaaaaaagacatgttatagtgacagaagattagtgcttgcctggggtcatggatgggggaaaggtttgagtgctaagtgtgcatggaaacttttggagtgatgaaattgaaatatcttgaatgtggtgttggttacatgactgtatccacttgtgaaaatttgatctttacatttaaaatgaatgaatttgaattttatgtattattgctagcaattcaaaagagtagttggactctcaaagttagacaaagatccctttcttctgggtgaatt

SEQ ID NO: 602544 - DNA, 573 bp, Homo sapiens
cctaggcaacatggaaaaaccccatttctacaaaaaaaccaagaaaattagctaagaatggtggcacatgcctgtagtcccagctactgaggaggctgaggtaggaggatcacccaagcctggggaggtggaggctgcagtaagttgtgatcatgccactgcacttcggcctaagtaacagagtgagaccctgtctcamgttaaaaaagacaaaaaaaaaaaaaataaacaagacccacctgtaagttatcttcaagagacccatctcacatgcaaggacacccataggccaaaactaaaggatggcaaaaaatctgtcaagcatacaggaaagaaaaaagagcaggggttgctatttttatttcagacaaaataaactttaaaccaacaactgtcaaaaaggacatagaaaaacattatttaatgatagagggttgaatttaataagaagacttagctatcctcaatatatatgcacccaacacaggagcacacaggttcataaaacaagtacttagagacccacaaagaagcttatgttatcatacaataatggtggtagacttcaacacc

SEQ ID NO: 602545 - DNA, 573 bp, Homo sapiens
cctaggcaacatggaaaaaccccatttctacaaaaaaaccaagaaaattagctaagaatggtggcacatgcctgtagtcccagctactgaggaggctgaggtaggaggatcacccaagcctggggaggtggaggctgcagtaagttgtgatcatgccactgcacttcggcctaagtaacagagtgagaccctgtctcacgttaaaaaagacaaaaaaaaaaaaaataaacaagacccacctgtaagttatcttcaagagacccatctcacatgcaaggacacccataggccaaaactaaaggatggcaaaaaatctgtcaagcayacaggaaagaaaaaagagcaggggttgctatttttatttcagacaaaataaactttaaaccaacaactgtcaaaaaggacatagaaaaacattatttaatgatagagggttgaatttaataagaagacttagctatcctcaatatatatgcacccaacacaggagcacacaggttcataaaacaagtacttagagacccacaaagaagcttatgttatcatacaataatggtggtagacttcaacacc

SEQ ID NO: 602546 - DNA, 573 bp, Homo sapiens
cctaggcaacatggaaaaaccccatttctacaaaaaaaccaagaaaattagctaagaatggtggcacatgcctgtagtcccagctactgaggaggctgaggtaggaggatcacccaagcctggggaggtggaggctgcagtaagttgtgatcatgccactgcacttcggcctaagtaacagagtgagaccctgtctcacgttaaaaaagacaaaaaaaaaaaaaataaacaagacccacctgtaagttatcttcaagagacccatctcacatgcaaggacacccataggccaaaactaaaggatggcaaaaaatctgtcaagcatacaggaaagaaaaaagagcaggggttgctatttttatttcagacaaaataaactttaaaccaacaactgtcaaaaaggacatagaaaaacattatttaatkatagagggttgaatttaataagaagacttagctatcctcaatatatatgcacccaacacaggagcacacaggttcataaaacaagtacttagagacccacaaagaagcttatgttatcatacaataatggtggtagacttcaacacc

SEQ ID NO: 602547 - DNA, 573 bp, Homo sapiens
gtgtttagcatgaatacctagcactgttctattactgtaacattcatattctgaaatcctctggaaggaaacagtaagattatatgttgatttcttcttatttaaggaaagattcattggttgaacatggttttatgttttgtgtttggagatggactgtatttagagacatctctttttcccccagaagttctgttttaaattaatgagaaattgggtgaacttattttcttgctgaggtacacagcttgaagttttggaagtaaagtatacatagtcttttctatatgggaatggtggaattttctagacttgattaaagtactgttgtttaattttttaatgagaaccttctttcccaatacttacaatgtcagtactttcaattaagttgctgtgaataattcctcctgcccattttttcttcagctttttaatttttccaagttgagttttgaatttttgatctcttttgacagcctttttttctttttggctaggactctctacataacttttktgatagttatggaaaacagtgggatagatgttcagatgttataacttctcttt

SEQ ID NO: 602548 - DNA, 595 bp, Homo sapiens
gaagctttgaagccaggcattgacttctcttctctagctatgaaagtcctagatggtagctgggcacagtggctcacgcctgtaatcccagcactttgggaggccaacgcaggtggatcacctgaggccaggygttcgagaccagtctagccaacatggcgaaacccctaaaaataaaaaaaaattagccaggcatggtggcgggcacctgtaatcccagctactcaggaggctgaggcagaagaatcgcttaaacctgggaggtggaggttgcagtgagccgagatcgcgccattccactccagcctgggtgacaagagcgaaactccgtctcaaaaaaaaaaaaaaaaaaaaaaagaaagtcctgaatggcatcttccaatagaaggctgtttcttctactctgaaaatctgttgtttagtttagccaacttcatcagtgattttagctcgaccttctacataacttcacctggaacttttatgttatgaagatggcttctttccctaaacttcatgaaccaacctctggtagcttctagcttttcctccgcagcctccttacttctctcagccttcatagaattgaagagag

SEQ ID NO: 602549 - DNA, 446 bp, Homo sapiens
tcttgtcagtaattgatagatttagcaagcagaaaatccgtagttgatgtgaacagtgctatcaatcaacttgatttaattgacatttataaaacactctatccaacaacagaaggatatgcttctctctgaagttcacatggaacatgcaccaaaataaatcacgttctgtgtcataaattattacayttaataaatttttaataatcataaaaatatatttcagatcccaatggaactaaaccagaaaccaaataatagcaaaaataactagaaaatttccaactatttggagattaaatagcacatttctaaataacatatagatcaaagtaaaagtctcaagagaaatgtaaaaagtaatttgaactaaataaagataaaaattactttaaaaagtggaagaaagtgaaagcattctttaaaagaaaatgtatagcatgaaa

SEQ ID NO: 602550 - DNA, 564 bp, Homo sapiens
ctttgaaaaacagtctggaagctcctcaaaagagtcaacatgcagttaccatatgacctggcagttccactcctaggtatttacccaagagaaataaaaatacgtggccacacaaaaacttgcacccaaatgttcatgacagtaatatccatagtagccaaaaaatagaaccaataccatgtccatcaactattaaacagttaaataaaatgtggcatcttcatagtataacctataatttggcaacacaaaggaatgaagttctgatactggctaccacatggctgaaccttgaaaayattacatcaaaagaaagcagccagtcatgaaggaccacatcatatattgttccatttatacgaagtgtccagaataggcaaatctatagtgataggcctgtgttgatcagaggctgactagggctgaggggtttggaagcaagaggagtgactgatgttgggtactgagtttcttcttagggtaatgaaagtgctctagttgtgatgatagttgctcaactccaaatacaccaaaatccatttaactgtatggtctatataggtg

SEQ ID NO: 602551 - DNA, 564 bp, Homo sapiens
ctttgaaaaacagtctggaagctcctcaaaagagtcaacatgcagttaccatatgacctggcagttccactcctaggtatttacccaagagaaataaaaatacgtggccacacaaaaacttgcacccaaatgttcatgacagtaatatccatagtagccaaaaaatagaaccaataccatgtccatcaactattaaacagttaaataaaatgtggcatcttcatagtataacctataatttggcaacacaaaggaatgaagttctgatactggctaccacatggctgaaccttgaaaacattacatcaaaagaaagcagccagtcatgaaggaccacatcatatattgttccatttataygaagtgtccagaataggcaaatctatagtgataggcctgtgttgatcagaggctgactagggctgaggggtttggaagcaagaggagtgactgatgttgggtactgagtttcttcttagggtaatgaaagtgctctagttgtgatgatagttgctcaactccaaatacaccaaaatccatttaactgtatggtctatataggtg

SEQ ID NO: 602552 - DNA, 195 bp, Homo sapiens
aaccaagcacctatgcattcggtcttttgctaccagaactacgatgaagctggtgtcctcattggatagaagtaatatctgctcaataaacattgttttatatttacaacaatggtaattacaagtatgacacaaaaaagtgacattttagggtarctttgtggcttaaaaaaaccttaataattttagtcagat

SEQ ID NO: 602553 - DNA, 462 bp, Homo sapiens
gcaggcacacgccaccacacctggctaattttttgtatttttagtagagacggggtttcaccatgatggccaagatgatctcgatctcctgaccttgtgatccaccagcctcggcctcccaaagtgttgggattacaggcatgagccattgcacacagccaagaatggagaatctttcccagtcccaattttaggggaaaaagatttaatatttcactactgagtatgagtctgttgactttttatatgkaacccaaatcagattgaagaagtttctttctcttctgagattgcaaaaagtttttgtcaaaggtaagtgttaaactttgccatatacgtttcctgcatctatgaaaataatcagagtgggagtggccaagatggccacctagaagcagcttaggtgtatggctctcaaagagagaaacagaaggggtgaaatctagagaaccccagtaagat

SEQ ID NO: 602554 - DNA, 598 bp, Homo sapiens
ttaattaattatatatttaattatttttttttgaatgggggtattgattcccaragggaggaaaacacattctgacttacatacacatggttggaaaaaaagagttaaatgacatcactacaatgtatatctgtcaaccggcaatcgaaatcatctccatgattgaaggtacatttttagtgacccacataatcacatgtaggctatctatccaacggtagctctcagtggttttgataatgcaaacaggctgtgttttctgctaaagataagtgtgtttttcttttacagacagatgttaaaatctgtatcattaaagtttatttctatttcgatgaaagattcttcataacaaagctatttttatctcactatagaaattggtgctctggtgatcaacttacagaagatactctgagggacaaatcaatacaatcaagtatttagaatatctaaattcatgtattttgttcctaagtgactggcctttgtactatgcaagttcaaggaagaagacaagaagaacgaatacttgctgtttcatagtttagaaattgatttgaaattgattttcaaaatccctttccatttaaaccat

SEQ ID NO: 602555 - DNA, 641 bp, Homo sapiens
aaaaagtaatttacaagaacattgaataaaaaagtcatattgataataatgtttgcaaatccatttttttctttaattgatcttctaaatgctaagagagattttcatcaagattgcttgattatccatttttccctcataattaaaaatttaaaaattgggagtcttcttttcttggtttgattgtaaatttaatttgaggtctgataatactgccatagttycaatgccaagcaaatttttcaaatgtttcactgcatttcagcatatatttgctatatgattgccagattcagcagcacaacacaaaacaaaaacaaaaacaaaacaagatgcccatattaaatttgaatatcagataagcaataaataatgtttaaatgaaagtatgtccaaaattatttgttctttatctgaaaatcaaatttaactggaaatcttgaattttattggtaaatcctctagtgaaatgaagttgaatggaggggaaaaaaaagtgtagctttgggaaggaaatagtggccaccagagggcaagctaaaaagatgattgtctgtgggtggaaaattgaaggttgtagggcatctgggttagatttgacagaacaggggaaaatacctgacaggattaaaatgcttatg

SEQ ID NO: 602556 - DNA, 641 bp, Homo sapiens
aaaaagtaatttacaagaacattgaataaaaaagtcatattgataataatgtttgcaaatccatttttttctttaattgatcttctaaatgctaagagagattttcatcaagattgcttgattatccatttttccctcataattaaaaatttaaaaattgggagtcttcttttcttggtttgattgtaaatttaatttgaggtctgataatactgccatagttccaatgccaagcaaatttttcaaatgtttcactgcatttcagcatatatttgctatatgattgccagattcagcagcacracacaaaacaaaaacaaaaacaaaacaagatgcccatattaaatttgaatatcagataagcaataaataatgtttaaatgaaagtatgtccaaaattatttgttctttatctgaaaatcaaatttaactggaaatcttgaattttattggtaaatcctctagtgaaatgaagttgaatggaggggaaaaaaaagtgtagctttgggaaggaaatagtggccaccagagggcaagctaaaaagatgattgtctgtgggtggaaaattgaaggttgtagggcatctgggttagatttgacagaacaggggaaaatacctgacaggattaaaatgcttatg

SEQ ID NO: 602557 - DNA, 641 bp, Homo sapiens
aaaaagtaatttacaagaacattgaataaaaaagtcatattgataataatgtttgcaaatccatttttttctttaattgatcttctaaatgctaagagagattttcatcaagattgcttgattatccatttttccctcataattaaaaatttaaaaattgggagtcttcttttcttggtttgattgtaaatttaatttgaggtctgataatactgccatagttccaatgccaagcaaatttttcaaatgtttcactgcatttcagcatatatttgctatatgattgccagattcagcagcacaacacaaaacaaaaacaaaaacaaaacaagatgcccatattaaatttgaatatcagataagcaataaataatgtttaaatgaaagtatgtccaaaattatttgttctttatctgaaaatcaaatttaactggaaatcttgaattttattgstaaatcctctagtgaaatgaagttgaatggaggggaaaaaaaagtgtagctttgggaaggaaatagtggccaccagagggcaagctaaaaagatgattgtctgtgggtggaaaattgaaggttgtagggcatctgggttagatttgacagaacaggggaaaatacctgacaggattaaaatgcttatg

SEQ ID NO: 602558 - DNA, 641 bp, Homo sapiens
aaaaagtaatttacaagaacattgaataaaaaagtcatattgataataatgtttgcaaatccatttttttctttaattgatcttctaaatgctaagagagattttcatcaagattgcttgattatccatttttccctcataattaaaaatttaaaaattgggagtcttcttttcttggtttgattgtaaatttaatttgaggtctgataatactgccatagttccaatgccaagcaaatttttcaaatgtttcactgcatttcagcatatatttgctatatgattgccagattcagcagcacaacacaaaacaaaaacaaaaacaaaacaagatgcccatattaaatttgaatatcagataagcaataaataatgtttaaatgaaagtatgtccaaaattatttgttctttatctgaaaatcaaatttaactggaaatcttgaattttattggtaaatcctctagtgaaatgaagttgaatggaggggaaaaamaagtgtagctttgggaaggaaatagtggccaccagagggcaagctaaaaagatgattgtctgtgggtggaaaattgaaggttgtagggcatctgggttagatttgacagaacaggggaaaatacctgacaggattaaaatgcttatg

SEQ ID NO: 602559 - DNA, 588 bp, Homo sapiens
ttgtagttgaagaaattctgtctaagatcttggtgtcctcgtctycctgtccacttactaggttgctgatatagtttggctctgtgatatatgtttggctctcatcttgaattgtagtcccataattcccacatgttgtgggagagacctagtgggagataattgagtcatggggcattttcctccataccgttctcatggtagtgaataagtctcacgagatctgatggttggatcaggggtttccgcttttgtgtcctcctcattctctctttgcctactgccatccatgtaagacaggacttgctcctccttgccttagccatgattgtgaggcttccccagccacatggaactgtaagctcaattaaacttctttgttttgtaaattgcccactcttgggtatgtctttattagcagcgtgaaaacagactaatccaatttccagtttcatttccacaatgagtttggggctcagtctggatgtaatatggtttgctaaagaaatatgctactctgtgggaagtttggagctcataccggttttccctgattcgtttttctcttcctcttcttctctctcatct

SEQ ID NO: 602560 - DNA, 588 bp, Homo sapiens
ttgtagttgaagaaattctgtctaagatcttggtgtcctcgtctccctgtccacttactaggttgctgatatagtttggctctgtgatatatgtttggctctcatcttgaattgtagtcccataattcccacatgttgtgggagagacctagtgggagataattgartcatggggcattttcctccataccgttctcatggtagtgaataagtctcacgagatctgatggttggatcaggggtttccgcttttgtgtcctcctcattctctctttgcctactgccatccatgtaagacaggacttgctcctccttgccttagccatgattgtgaggcttccccagccacatggaactgtaagctcaattaaacttctttgttttgtaaattgcccactcttgggtatgtctttattagcagcgtgaaaacagactaatccaatttccagtttcatttccacaatgagtttggggctcagtctggatgtaatatggtttgctaaagaaatatgctactctgtgggaagtttggagctcataccggttttccctgattcgtttttctcttcctcttcttctctctcatct

SEQ ID NO: 602561 - DNA, 622 bp, Homo sapiens
aaacactattctactctctaattctacgagaccaattttttaagatttcacatatgagtgagatcatgcaatatttgtctttctttgcctggcttatttcacttaacatcatgacctccaggctcattcatattgccacaaatgacaggatttcattaattttttagggctgaagcgtattttattgtgcaaatagcccatcttttaatacattcatccattgatggacatttaagttgattctatatcttgactgttgtaaatagagatgcaataaacatgggagtgcagaatatctctttgaaagagatttcaattcctttggatatttacctaatagtgtgattgctggatcatttggtagttctaattttcattttttgggagaacattcatactaatctccataatggctatagtaatttgcatccccctgacggtgtatgagtttgcctttctccatattttcacccgcatttgttattttttatctttttgataatagccattctcactagggtgagaattattgtgattttgatttgcatttccctgatgattagtgaagttgggcatttaaaaaatatacctattggcyattttgtatgtcttctctttggaa

SEQ ID NO: 602562 - DNA, 621 bp, Homo sapiens
tctgtgtatgtgtgtgttaagggaggagttttaaagtatctctgtattcaacaagatacgtcagcttgtaagcagcagaaacctacttaaactagcttacatgagaaaataacattataaagacataggagtgtttctacaccaagagctggaggtattgtttggtttcatgaaggattaaaatctgtaattcaaaagtagactcaggcagctgcacatcaatctgtgtctttctctctggtactgtggactctatcctgtctgacttgctttgttcctgggcatcattcttgctctggaaaacacactttccctgctcatttttttattttaatgcttaggttcaatctgctcatttttccctacagcagaagacagcttactgtgttccagcaaacaacagagcctgaccagcctctctgaatatggggcccccttctcactcacaagtattcttaacctggggtccatgtggggtttgtgaatttggataggattttaaaattacattttcatttccactaatctctaaccgaaattcagtcttttcttcaactgtgaatgtaggcagcaagccacagtggaacttgcmgaacctataaatttgtcactgtgattgat

SEQ ID NO: 602563 - DNA, 423 bp, Homo sapiens
ttctttttttaattaatagattttatttttagaacaattttaggtttatagtagaaactaacaaagcagagagaatttccatacactttcttctactctccatattctttatgattaatatcttgrattagtgtggtacattcgttataattgatgcatcaatattgacatattattataaatgaaagtccatacattagttttatattagggttcactcttgacattatacatttcatgcgtttggacaaatgcatatgtcatgtaaccactactacaatattataagaatagttttactttcttaaaaatttctgtgcttgatttattcgtcccttcccttggagactactggaaattctgatctttttacagtttttccctttttaagaatgttgtgtcattggaattatacagtataca

SEQ ID NO: 602564 - DNA, 423 bp, Homo sapiens
ttctttttttaattaatagattttatttttagaacaattttaggtttatagtagaaactaacaaagcagagagaatttccatacactttcttctactctccatattctttatgattaatatcttgaattagtgtggtacattcgttataattgatgcatcaatattgacatattattataaatgaaagtccatacattagttttatattagggttcactcttgacattatacatttcatgcgtttggacaaatgcatatgtcatgtaaccactactacaatattataagaatagttttactttcttaaaaatttctgtgcttgatttattcrtcccttcccttggagactactggaaattctgatctttttacagtttttccctttttaagaatgttgtgtcattggaattatacagtataca

SEQ ID NO: 602565 - DNA, 423 bp, Homo sapiens
ttctttttttaattaatagattttatttttagaacaattttaggtttatagtagaaactaacaaagcagagagaatttccatacactttcttctactctccatattctttatgattaatatcttgaattagtgtggtacattcgttataattgatgcatcaatattgacatattattataaatgaaagtccatacattagttttatattagggttcactcttgacattatacatttcatgcgtttggacaaatgcatatgtcatgtaaccactactacaatattataagaatagttttactttcttaaaaatttctgtgcttgatttattcgtcccttcccttggagactactggaaattctgatctttttacagttttyccctttttaagaatgttgtgtcattggaattatacagtataca

SEQ ID NO: 602566 - DNA, 563 bp, Homo sapiens
ccatgtgcagaagtgatggcctttggtaaggagtatgggactgtgactatttccccttgatgaccttgcatgaaaataaacaaacagcatttgaaaaatctcctctcctgaggtgactagaaggtgactcaacagtccatttccatgcmtcagcttgctggaggaaatggaaaggcctattccccaaagcagtgtttgtctcacagaaatagagatattatgtgtaataaattgggaaaacttgtgaaatgaaacatctgttctgcatgcttaagcaccaaggcacttgcaaaatatgaatttttactccatattccaaatgctgtgatgatgagctgagaatgagtttggaaggttcatctctttccaataaaaaggttcatcatgcctctctgacttttataattattttggaacattttagataggaaattgaaagaggagggaaagaatgatgacagaactgaagaagaattgatgaaagggtcaaaaagctaaagaactttgagaaatggattttatgtgcagtcaacaatgccttcagctaatttaaccaaatcaac

SEQ ID NO: 602567 - DNA, 563 bp, Homo sapiens
ccatgtgcagaagtgatggcctttggtaaggagtatgggactgtgactatttccccttgatgaccttgcatgaaaataaacaaacagcatttgaaaaatctcctctcctgaggtgactagaaggtgactcaacagtccatttccatgcatyagcttgctggaggaaatggaaaggcctattccccaaagcagtgtttgtctcacagaaatagagatattatgtgtaataaattgggaaaacttgtgaaatgaaacatctgttctgcatgcttaagcaccaaggcacttgcaaaatatgaatttttactccatattccaaatgctgtgatgatgagctgagaatgagtttggaaggttcatctctttccaataaaaaggttcatcatgcctctctgacttttataattattttggaacattttagataggaaattgaaagaggagggaaagaatgatgacagaactgaagaagaattgatgaaagggtcaaaaagctaaagaactttgagaaatggattttatgtgcagtcaacaatgccttcagctaatttaaccaaatcaac

SEQ ID NO: 602568 - DNA, 563 bp, Homo sapiens
ccatgtgcagaagtgatggcctttggtaaggagtatgggactgtgactatttccccttgatgaccttgcatgaaaataaacaaacagcatttgaaaaatctcctctcctgaggtgactagaaggtgactcaacagtccatttccatgcatcagcttgctggaggaaatggaraggcctattccccaaagcagtgtttgtctcacagaaatagagatattatgtgtaataaattgggaaaacttgtgaaatgaaacatctgttctgcatgcttaagcaccaaggcacttgcaaaatatgaatttttactccatattccaaatgctgtgatgatgagctgagaatgagtttggaaggttcatctctttccaataaaaaggttcatcatgcctctctgacttttataattattttggaacattttagataggaaattgaaagaggagggaaagaatgatgacagaactgaagaagaattgatgaaagggtcaaaaagctaaagaactttgagaaatggattttatgtgcagtcaacaatgccttcagctaatttaaccaaatcaac

SEQ ID NO: 602569 - DNA, 576 bp, Homo sapiens
ccaaagttgatacggcctgggtgatacttctcagactttcgagtgcctaagaatcacctgaagattccgattcagtgggttttagggtggagcctaaaatcttgcatttccaacaagctcctggtgatgctatgatgctagtccgtagacyagctaagtagcaaggagccagggacattcagattacactatgtatgtggttttgcaccctgattttttttttccttttaacctcttaaaactttttgcttaacattttacataaatgttttccctatgatattaattattctttagactcatagtttttaataaatgtgctatttagttacttggatgtgtagtgatatatttgataactaccttttgtttgaaatctaaaatgcttcctgtttttacctgtcgtaaatcatgatgtcatgagcatccctatttataaatctttgttggcttctctgcaccaaaacttgcaagcaggacagagcattccattagggaaaaaaagaaagagagagagagagaaagacagaaaagtatataaaagaagttgaaaatactgttttaaaacaaatattg

SEQ ID NO: 602570 - DNA, 576 bp, Homo sapiens
ccaaagttgatacggcctgggtgatacttctcagactttcgagtgcctaagaatcacctgaagattccgattcagtgggttttagggtggagcctaaaatcttgcatttccaacaagctcctggtgatgctatgatgctagtccgtagaccagctaagtagcaaggagccagggacattcagattacactatgtatgtggttttgcaccctgattttttttttccttttaacctcttaaaactttttgcttaacattttacataaatgttttccctatgatattaattattctttagactcatmgtttttaataaatgtgctatttagttacttggatgtgtagtgatatatttgataactaccttttgtttgaaatctaaaatgcttcctgtttttacctgtcgtaaatcatgatgtcatgagcatccctatttataaatctttgttggcttctctgcaccaaaacttgcaagcaggacagagcattccattagggaaaaaaagaaagagagagagagagaaagacagaaaagtatataaaagaagttgaaaatactgttttaaaacaaatattg

SEQ ID NO: 602571 - DNA, 576 bp, Homo sapiens
ccaaagttgatacggcctgggtgatacttctcagactttcgagtgcctaagaatcacctgaagattccgattcagtgggttttagggtggagcctaaaatcttgcatttccaacaagctcctggtgatgctatgatgctagtccgtagaccagctaagtagcaaggagccagggacattcagattacactatgtatgtggttttgcaccctgattttttttttccttttaacctcttaaaactttttgcttaacattttacataaatgttttccctatgatattaattattctttagactcatagtttttaataaatgtgctatttagttacttggatgtgtagtgatatatttgataactaccttttgtttgaaatctaaaatgcttcctgtttttacctgtcrtaaatcatgatgtcatgagcatccctatttataaatctttgttggcttctctgcaccaaaacttgcaagcaggacagagcattccattagggaaaaaaagaaagagagagagagagaaagacagaaaagtatataaaagaagttgaaaatactgttttaaaacaaatattg

SEQ ID NO: 602572 - DNA, 576 bp, Homo sapiens
ccaaagttgatacggcctgggtgatacttctcagactttcgagtgcctaagaatcacctgaagattccgattcagtgggttttagggtggagcctaaaatcttgcatttccaacaagctcctggtgatgctatgatgctagtccgtagaccagctaagtagcaaggagccagggacattcagattacactatgtatgtggttttgcaccctgattttttttttccttttaacctcttaaaactttttgcttaacattttacataaatgttttccctatgatattaattattctttagactcatagtttttaataaatgtgctatttagttacttggatgtgtagtgatatatttgataactaccttttgtttgaaatctaaaatgcttcctgtttttacctgtcgtaaatcatgatgtcatgagcatccctatttataaatctttgttggcttctctgcaccaaaactkgcaagcaggacagagcattccattagggaaaaaaagaaagagagagagagagaaagacagaaaagtatataaaagaagttgaaaatactgttttaaaacaaatattg

SEQ ID NO: 602573 - DNA, 588 bp, Homo sapiens
atctctgtcttcataaataatcttttgtaacgcttatacactgctggtgggaatgtaaattagttcagccattgtgaaaagtagcgtagcaattccttgaaaaacttaaaatagaattaccgttcaacccagcaatcccattattgggcatatacccagtggaatgtaaatcatcctgccataaaaacacatgcacatgtatgttcattgcagcactattcacaatagcaaagacatggaatcaacctatatgcccatcartagtagactgaataaagaaaatatggtacatattcaccacagaatactaagcagccataaaaaagaaaaagatcatgtcctttgcagcaatatggatggagctagaggccattatcctaagcaaactaatgcagaaacagaaaaccagatactgcatgctctcacttataagtgggagatacaccatgagaacacatgaacacaaaaagcggaaaaagagacaccatggcctacttgagggtggaggctgggaggagggagagaatcaaaaaacttcctatggagtactatgcttattacctgcgtgatgaaataatcactttgaac

SEQ ID NO: 602574 - DNA, 590 bp, Homo sapiens
taattctcagggtcagctgcaagagcccaatctaagacagttgatagcagtagtarttatatacacctgagtctgaggatgggattctggagtttgctcactcaccagtggttccatcagaatctcttccctgaagatagtctcagatgtgctcctgcagtgaaattgctaacacttttacttgtagtgaaccaggacagcatataagtagaagcgaatgcattaacttctgtgatgtatctagtatttgagagtacaggtggaaaagtaacttgaaagattgttgaattgggagggtattgctaagcaccattgatgcactaagtatagatgccaggatcaaatctattaaccaccaatttaaacccaagtgtgagagtcaaagggcctccatggaagcctttaaaaagtccctcatcactggcagccagaaggccaactgaactgaagcccaggtgcagcctgtacttatgagtggcagaatgccagagaaggttaattctcagcctgtgtaagtctccttcaagagaatcagggtcctgattggaaaaaagtgggaacatgagaattggaatggggaaacttattag

SEQ ID NO: 602575 - DNA, 590 bp, Homo sapiens
taattctcagggtcagctgcaagagcccaatctaagacagttgatagcagtagtaattatatacacctgagtctraggatgggattctggagtttgctcactcaccagtggttccatcagaatctcttccctgaagatagtctcagatgtgctcctgcagtgaaattgctaacacttttacttgtagtgaaccaggacagcatataagtagaagcgaatgcattaacttctgtgatgtatctagtatttgagagtacaggtggaaaagtaacttgaaagattgttgaattgggagggtattgctaagcaccattgatgcactaagtatagatgccaggatcaaatctattaaccaccaatttaaacccaagtgtgagagtcaaagggcctccatggaagcctttaaaaagtccctcatcactggcagccagaaggccaactgaactgaagcccaggtgcagcctgtacttatgagtggcagaatgccagagaaggttaattctcagcctgtgtaagtctccttcaagagaatcagggtcctgattggaaaaaagtgggaacatgagaattggaatggggaaacttattag

SEQ ID NO: 602576 - DNA, 590 bp, Homo sapiens
taattctcagggtcagctgcaagagcccaatctaagacagttgatagcagtagtaattatatacacctgagtctgaggatgggattctggagtttgctcactcaccagtggtyccatcagaatctcttccctgaagatagtctcagatgtgctcctgcagtgaaattgctaacacttttacttgtagtgaaccaggacagcatataagtagaagcgaatgcattaacttctgtgatgtatctagtatttgagagtacaggtggaaaagtaacttgaaagattgttgaattgggagggtattgctaagcaccattgatgcactaagtatagatgccaggatcaaatctattaaccaccaatttaaacccaagtgtgagagtcaaagggcctccatggaagcctttaaaaagtccctcatcactggcagccagaaggccaactgaactgaagcccaggtgcagcctgtacttatgagtggcagaatgccagagaaggttaattctcagcctgtgtaagtctccttcaagagaatcagggtcctgattggaaaaaagtgggaacatgagaattggaatggggaaacttattag

SEQ ID NO: 602577 - DNA, 592 bp, Homo sapiens
cactggcagccagaaggccaactgaactgaagcccaggtgcagcctgtacttatgagtggcagaaygccagagaaggttaattctcagcctgtgtaagtctccttcaagagaatcagggtcctgattggaaaaaagtgggaacatgagaattggaatggggaaacttattagacacacttaaggaccttggcctcccagcttctccggaatatctgggcctacagacgtggcccactcccttgctggaagatggaagaccttctccttgcttgaaaactataagcttcgagtaagtcaagtgtcctacaaaacaatgttggtcctgctcagaatctacccccacttctctccccgataccagacagtatgaggactaagtttcagtataatccaactgggtaagtacagtgtctgttaagggaggggaggatcatatggcaaaggcgctgcaggatctggctgacttaagccagcaggaccccagagaaaatgcctggaagtggatcccaaagatgctggatcaagaatggggaataggaagtcaggaaagggacactttgttgttatagtaatactgtgcagtgacatagg

SEQ ID NO: 602578 - DNA, 592 bp, Homo sapiens
cactggcagccagaaggccaactgaactgaagcccaggtgcagcctgtacttatgagtggcagaatgccagagaaggttaattctcagcctgtgtaagtctccttcaagagaatcagggtcctgattggaaaaaagtgggaacatgagaattggaatggggaaacttattagacacacttaaggaccttggcctcccagcttctccggaatatctgggcctacagasgtggcccactcccttgctggaagatggaagaccttctccttgcttgaaaactataagcttcgagtaagtcaagtgtcctacaaaacaatgttggtcctgctcagaatctacccccacttctctccccgataccagacagtatgaggactaagtttcagtataatccaactgggtaagtacagtgtctgttaagggaggggaggatcatatggcaaaggcgctgcaggatctggctgacttaagccagcaggaccccagagaaaatgcctggaagtggatcccaaagatgctggatcaagaatggggaataggaagtcaggaaagggacactttgttgttatagtaatactgtgcagtgacatagg

SEQ ID NO: 602579 - DNA, 592 bp, Homo sapiens
cactggcagccagaaggccaactgaactgaagcccaggtgcagcctgtacttatgagtggcagaatgccagagaaggttaattctcagcctgtgtaagtctccttcaagagaatcagggtcctgattggaaaaaagtgggaacatgagaattggaatggggaaacttattagacacacttaaggaccttggcctcccagcttctccggaatatctgggcctacagacgtggcccactcccttgctggaagatggaagaccttctccttgcttgaaaactataagcttcgagtaagtcaagtgtcytacaaaacaatgttggtcctgctcagaatctacccccacttctctccccgataccagacagtatgaggactaagtttcagtataatccaactgggtaagtacagtgtctgttaagggaggggaggatcatatggcaaaggcgctgcaggatctggctgacttaagccagcaggaccccagagaaaatgcctggaagtggatcccaaagatgctggatcaagaatggggaataggaagtcaggaaagggacactttgttgttatagtaatactgtgcagtgacatagg

SEQ ID NO: 602580 - DNA, 563 bp, Homo sapiens
agtgggaacatgagaattggaatggggaaacttattagacacacttaaggaccttggcctcccagcttctccggaatatctgggcctacagacgtggcccactcccttgctggaagatggaagaccttctccttgcttgaaaactataagcttcgagtaagtcaagtgtcctacaaaacaatgttggtcctgctcagaatctacccccacttctctccccgataccagacagtatgaggactaagtttcagtataatccaactgggtaagtacagtgtctgttaagggaggggaggatcatatggcaaaggcrctgcaggatctggctgacttaagccagcaggaccccagagaaaatgcctggaagtggatcccaaagatgctggatcaagaatggggaataggaagtcaggaaagggacactttgttgttatagtaatactgtgcagtgacataggatttgacaccctggcaatgaccctggaatgactgttagaagcttggctttcctagtatttctgtgacattaatcacattttaatcacaacttccatatctgtaaa

SEQ ID NO: 602581 - DNA, 510 bp, Homo sapiens
tttgctattgtaaatagtgctgttgaatatcaagcagctatggaatgcctccagaaagcacataggagtttgttatctgaaattcagacactgcatgcacaaatgaatggtaggaaaatgactctgaaaagtgaacaaaagaatgagaaaccaagccaagatgaacatttgcatgcatgtgtctttatggtagaatgatttatattcttcagggtatatacccagtaatggaattgctgggtgaaatggtagttctgcttttagctctttgaggaatcaccacactgctttccacaatggttgaactaatttgcactcctaycaacagcatataaatgttctcatttctctgtaacctcaccaccagcatctggttgttgttgtttttttctttttttttttttttttgactgtttagtaatagccattctgactggtgtgagatggtatcttcatagtggttttgatttgcatttctctaatgatcagtaatattgagcttttgttcat

SEQ ID NO: 602582 - DNA, 573 bp, Homo sapiens
gtgttatatgttctgtgattataagtaaaactgcctttgctatatagtatgcatagaatattttaaagttattactagaagctgacacattgttgttttctattacaaacaataaaattagtttccatttattgagggcctgtttcatgttaactgctttacaratattccttatctcatttaattctcccaacaatcctacaagaaagctaatattatcccattttatagatgaggaaattgaggcttacagagggcaagtaacttgcccaaagtcactcagtaccagcaaacggacttttccccctctccctgcccccaaataccagccccccactgcaaaaaaacaaaaacaaaaacaaaacaaaactacttctgtagagctagttgtctatttccaaatgcaaggcttaaattttaagccttggagttttcaatttaaagcctttgccatgaaatacagcatattactttataatagaaaacaaatagaaagagcctttcatgatagatacagtgaacactaaattctttcttttaggctgcatctaacaattctctccttaacccaat

SEQ ID NO: 602583 - DNA, 573 bp, Homo sapiens
gtgttatatgttctgtgattataagtaaaactgcctttgctatatagtatgcatagaatattttaaagttattactagaagctgacacattgttgttttctattacaaacaataaaattagtttccatttattgagggcctgtttcatgttaactgctttacaaatattccttatctcatttaattctcccaacaatcctacaagaaagctaatattatcccattttatagatgaggaaattgaggcttacagagggcaagtaacttgcccaaagtcactcagtaccagcaaayggacttttccccctctccctgcccccaaataccagccccccactgcaaaaaaacaaaaacaaaaacaaaacaaaactacttctgtagagctagttgtctatttccaaatgcaaggcttaaattttaagccttggagttttcaatttaaagcctttgccatgaaatacagcatattactttataatagaaaacaaatagaaagagcctttcatgatagatacagtgaacactaaattctttcttttaggctgcatctaacaattctctccttaacccaat

SEQ ID NO: 602584 - DNA, 573 bp, Homo sapiens
gtgttatatgttctgtgattataagtaaaactgcctttgctatatagtatgcatagaatattttaaagttattactagaagctgacacattgttgttttctattacaaacaataaaattagtttccatttattgagggcctgtttcatgttaactgctttacaaatattccttatctcatttaattctcccaacaatcctacaagaaagctaatattatcccattttatagatgaggaaattgaggcttacagagggcaagtaacttgcccaaagtcactcagtaccagcaaacggacttttycccctctccctgcccccaaataccagccccccactgcaaaaaaacaaaaacaaaaacaaaacaaaactacttctgtagagctagttgtctatttccaaatgcaaggcttaaattttaagccttggagttttcaatttaaagcctttgccatgaaatacagcatattactttataatagaaaacaaatagaaagagcctttcatgatagatacagtgaacactaaattctttcttttaggctgcatctaacaattctctccttaacccaat

SEQ ID NO: 602585 - DNA, 428 bp, Homo sapiens
agtcatgcaccaccacacatggccaattattttattttttgtagagatgggatctcactatgttgtccaggctggycttgaactcctgggttgaagccatcctcccgccttggcctcccaaagtgtcgattacaagtgtgagccactgcacccgcccctcattcacttatttattgacaaatgtttactgaggtattatcatatgtcaggcatttttctaggcattgggaatatagcagtgtataaacctgataatcactgccttgatggagcgtaacttctgattgtggtaagtactgcagaagaaaatgcaggctgctacaggaaccccttcaacataaagaactgtatgaaaatattgtacaaaaatatgattcaaaaatcataaatgaaattcacattatcatttacatgtaagggcagaagaa

SEQ ID NO: 602586 - DNA, 428 bp, Homo sapiens
agtcatgcaccaccacacatggccaattattttattttttgtagagatgggatctcactatgttgtccaggctggtcttgaactcctgggttgaagcsatcctcccgccttggcctcccaaagtgtcgattacaagtgtgagccactgcacccgcccctcattcacttatttattgacaaatgtttactgaggtattatcatatgtcaggcatttttctaggcattgggaatatagcagtgtataaacctgataatcactgccttgatggagcgtaacttctgattgtggtaagtactgcagaagaaaatgcaggctgctacaggaaccccttcaacataaagaactgtatgaaaatattgtacaaaaatatgattcaaaaatcataaatgaaattcacattatcatttacatgtaagggcagaagaa

SEQ ID NO: 602587 - DNA, 428 bp, Homo sapiens
agtcatgcaccaccacacatggccaattattttattttttgtagagatgggatctcactatgttgtccaggctggtcttgaactcctgggttgaagccatcctcccgccttggcctcccaaagtgtcgattacaagtgtgagccactgcacccgcccctcattcacttatttattgacaaatgtttactgaggtattatcatatgtcaggcatttttctaggcattgggaatatagcagtgtataaacctgatamtcactgccttgatggagcgtaacttctgattgtggtaagtactgcagaagaaaatgcaggctgctacaggaaccccttcaacataaagaactgtatgaaaatattgtacaaaaatatgattcaaaaatcataaatgaaattcacattatcatttacatgtaagggcagaagaa

SEQ ID NO: 602588 - DNA, 428 bp, Homo sapiens
agtcatgcaccaccacacatggccaattattttattttttgtagagatgggatctcactatgttgtccaggctggtcttgaactcctgggttgaagccatcctcccgccttggcctcccaaagtgtcgattacaagtgtgagccactgcacccgcccctcattcacttatttattgacaaatgtttactgaggtattatcatatgtcaggcatttttctaggcattgggaatatagcagtgtataaacctgataatcactgccttgatggagcgtaacttctgattgtggtaagtactgcagaagaaaatgcaggctgctacaggaaccccttcaacataaagaackgtatgaaaatattgtacaaaaatatgattcaaaaatcataaatgaaattcacattatcatttacatgtaagggcagaagaa

SEQ ID NO: 602589 - DNA, 465 bp, Homo sapiens
cataatcaatagaaaactttctattttctcaacactagtgaaacctgcttttctttggtgacaccarttgataaaactatttctgattcaatatgttgctttcccctttggttatcagtagtttaattgaatcattgactacagttttatggcaaatgtgaattctgggttgaacgaactaaattgagatgcaaataacaatttgtaacattgatcctgtgggtgaattatttcatagtcccaacaaatgtacttatgtttaccaacttgcaatacaaggtctttttaaaagtaattaatttatttttatttttatttttttaaagacagggtctcattctgtcttgcaggctgttgtacagtggcctgattatagctcactgtagcctcgaaattctgggctgaaatgatcctcctgcctcagcctccaaagtagctgagactagaggtatgtgtcaccacacc

SEQ ID NO: 602590 - DNA, 615 bp, Homo sapiens
aaatttatataattatgaatgatattaaattaaggattttagttgtcaacattttgcamctttaggcagacattttgccatggcataagggaagaataatcagagtttattactacttctctttacagtggagaagtctagcagaaattttcttaaccaagcgatcaaacttaatgtcaccacgacaggacctgctgacatcaggtgctttccaatgggatgcattgagaatggcacagtgccacctatgtggtatctttgtccaaaatatttaacttgagtctaatcactaagaagcatcatatgaatccaaatttgggatttctgaaagtggcctagatgcttcaaaaatgtcaatgtcctggagtttttttagattaaaaaaatgacgactcaacatatgtgtgattcccgattggatcctggattgagaaaccagctaggctattactggggacatttgaatatgtgctcccactagataataacgttatatcattgttaagcattcttagaataggtgttgaattgtggtcatgtacaggaatatcttgcccttagaaaataaatctaaagtatttagattatcaaaatgtttataaataactctgaagt

SEQ ID NO: 602591 - DNA, 615 bp, Homo sapiens
aaatttatataattatgaatgatattaaattaaggattttagttgtcaacattttgcaactttaggcagacattttgccatggcataagggaagaataatcagagtttattactacttctctttacagtggagaagtctagcagaaattttcttaaccaagcgatcaaacttaatgtcaccacgacaggacctgctgacatcaggtgctttccaatgggatgcatygagaatggcacagtgccacctatgtggtatctttgtccaaaatatttaacttgagtctaatcactaagaagcatcatatgaatccaaatttgggatttctgaaagtggcctagatgcttcaaaaatgtcaatgtcctggagtttttttagattaaaaaaatgacgactcaacatatgtgtgattcccgattggatcctggattgagaaaccagctaggctattactggggacatttgaatatgtgctcccactagataataacgttatatcattgttaagcattcttagaataggtgttgaattgtggtcatgtacaggaatatcttgcccttagaaaataaatctaaagtatttagattatcaaaatgtttataaataactctgaagt

SEQ ID NO: 602592 - DNA, 478 bp, Homo sapiens
tcttaccacaataaaataaaatcagaatcaataataaaagatttaccctttggaaataaaaaatgaaattttcaataaaaataggaaattttagaattacagacaagttggaaatatgagaaaaatgtctttcaagaattgtgggctgagtgcggtggctcactcttgcaatcccagcactgttgaaggccgaagtggacagatcacttgaggccaggagttcgagaccagcctggccaatatgacgaaaccccatctctacaaaaaatacaaaaaattagctgggcatggtggtgtgcacctgtaatcccagctactcgggaggctgaggmaggagaatcacttgaaccccgtaaggtggaggttgcagtgagctgagatggcaccactgcactccagcctggcagcagagcaatactctgtctcagaaaaaaaaaaaaaaagaattctgaaacttagccagagcaacattatgtag

SEQ ID NO: 602593 - DNA, 562 bp, Homo sapiens
gagagagctaagaagagtcctccttagctcagaaaaaatttgggagactggcctcaaaagtcccccagtctgaatttaattgttaatttattttaatttattaataaaaataacaattaattttagttataaagtataaaaacatgtttcttatttcatctctcaactgatttaaaatgaagttgtgtgaaatactatgttyataaatatattgttgggccagaacatatagaaatgtaatatatttgctaataacagcataaaggagtgtgggagcaagttgaatttggctaaggaaatgacaccagataatgacttgaatcgatggaacatatgtagaaaaccaaaaatggtaaataataaggttaacataacaaactctatgtgtacaggcctgtgcttaatgaccggggtatattccgagaaatgcatttttaggtaattttgttgatgggcaaacatcatggagtatacttacacacacctagatggtatagtctactacacacttaggcaatatggcataccctattgctcctaggctacagacttgtacagcatg

SEQ ID NO: 602594 - DNA, 622 bp, Homo sapiens
aatataccatatttctttatccattcatcttttgatgaacatttgggttgtttctagtttttggctaatgtgaatatgctgctatgaacatttatttacaagttttgtgtggacatatgttttcttttctcttgtrtatacacctagaagtggagttgctgggtcgtagtatagctttatgtttaatttttttttattgatatggtgtattcgttgatttttagattttaaaccaccttgcattcttggatgtaaatcccacctggtcatggtgtataccttttttatatattgctggattttatttcctaggttttttaaaaagaatttttacatctatattcttaagagatattggtctatagtttccttgtgatacctttgtcagcttttggtatcaaggtaataattgatatcactaaatgagtaggagaatattcccttttctttctttatttttggaaaagtttgagaattggaattaattcttctttaaagggaaaactcgctagtgaagtaatttggtccttggcttttctctatgggaagttttatggttactaattcagtctctttacttattataggtccatttagcttttctatttctttttaagtcagt

SEQ ID NO: 602595 - DNA, 515 bp, Homo sapiens
tttggttggttttatttatttaatttgagacagaatttcactcctgttgcccaggctagagtgcaatggtgtgatcccagctcactgcaaacctctgcttcccaggttcaagtgattctcctgactcagcctcccaagtagctgggattacaggcacacaccaccacgcccagctaatttttgtatttttagtagagggggtttcaccatgttggccaggctggtctcaaactcctgacctcaggtgatccgcccacctcagcctcccaaagtgctgggattacaagtgtgagccaccatgcccagcagcttttggttggttttaggaaaaagataaattactttttaaaacccctgatgttggtacctctctacctcccatgccttatctctcacatagttccattcccaaccttctatcccaacctcttcccrtgattcagccaaacagcacatgtatgtttctcaaatgtaccctgtgctctctcatctgcagacattcacacatgtcatct

SEQ ID NO: 602596 - DNA, 515 bp, Homo sapiens
tttggttggttttatttatttaatttgagacagaatttcactcctgttgcccaggctagagtgcaatggtgtgatcccagctcactgcaaacctctscttcccaggttcaagtgattctcctgactcagcctcccaagtagctgggattacaggcacacaccaccacgcccagctaatttttgtatttttagtagagggggtttcaccatgttggccaggctggtctcaaactcctgacctcaggtgatccgcccacctcagcctcccaaagtgctgggattacaagtgtgagccaccatgcccagcagcttttggttggttttaggaaaaagataaattactttttaaaacccctgatgttggtacctctctacctcccatgccttatctctcacatagttccattcccaaccttctatcccaacctcttcccgtgattcagccaaacagcacatgtatgtttctcaaatgtaccctgtgctctctcatctgcagacattcacacatgtcatct

SEQ ID NO: 602597 - DNA, 503 bp, Homo sapiens
tgtgaatgtctgcagatgagagagcacagggtacatttgagaaacatacatgtgctgtttggctgaatcacgggaagaggttgggatagaaggttgggaatggaactatgtgagagacaaggcatgggaggtagagaggtaccaacatcaggggttttaaaaagtaatttatctttttcctaaaaccaaccaaaagctgctgggcatggtggctcacacttgtaatcccagcactttgggaggctgaggtgggcggatcacctgaggtcaggagtttgagaccagcctggccaacatggtgaaaccccctctactaaaaatacaaaaattagctgggcgtggtggtgtgtgcctgtaatcccagctacttgggaggctgagtcaggagaatcacttgaacctgggaagcagaggtttgcagtgagctgggatcacaccattgcactctagcctkggcaacaggagtgaaattctgtctcaaattaaataaataaaaccaacca

SEQ ID NO: 602598 - DNA, 387 bp, Homo sapiens
cctcaagatctgcttctgggaaactcaacccaagacccacaagtgaaattactcaaagaaaagtttcaatattacatctactttcagctgtcctgcaggcatataaattcagcctagcagcttctaattcctcccactgaggcagaaatcattttaaaaaccaaccttgctacagggcacagtggtgcattcctgtagtctcagctacctgaagctgaggtgggaggattgctygagcccaggagttcaaggctgcagtgagctatgagtgtgccactgcactccagcctgggcaacaaaggagaccctgtctcatttggaaaaaaaaaaaaaaaaaaaaaggccaatctagccatatgcagaaagctgaaactggatcccttcctt

SEQ ID NO: 602599 - DNA, 387 bp, Homo sapiens
cctcaagatctgcttctgggaaactcaacccaagacccacaagtgaaattactcaaagaaaagtttcaatattacatctactttcagctgtcctgcaggcatataaattcagcctagcagcttctaattcctcccactgaggcagaaatcattttaaaaaccaaccttgctacagggcacagtggtgcattcctgtagtctcagctacctgaagctgaggtgggaggattgctcgagcccaggagttcaaggctgcagtgagctatgagtgtgccactgcactccagcctgggcaacaaaggagaccctgtctcatttggaaaaaaaaaaaaaaaaaaaaaggccaatctagccatatgcrgaaagctgaaactggatcccttcctt

SEQ ID NO: 602600 - DNA, 615 bp, Homo sapiens
ggacaatacctggctttcccaggcagaggtccctgcgaccttctgcagtgttttgtgtctctgggtacttgagattagggagtggtgatgactcttaacaagcatgctgccttcgagcatttgtttaacaaagcacatcctgcacagcccttaatcatttaactctgaggtgacatagcacatgtttcagggagcacagggttgggggtagggttacagattaacagcatctcaaggcagaagaattgttcttagtacagaacaaaatggagtctcttatgtctacttctttctacacagacacagtaacaatctgatctctctttctyttccccacattatcaagtcaaacatcctctcttctgtgaaggcttctctttgtgcactgccctcctactccatccccagtcccagtaccctgcagaataaaatgtttctatctctgtctccttagctttgtgtccatacatagatattgaaaggaagtctgtggaacttgtgtctgccttgtattactactgtggaagggacaataaatttattaactcatatttttaaaatatgcatacatactgtatttaacctaagacttttttcatattttaaagactggaa

SEQ ID NO: 602601 - DNA, 596 bp, Homo sapiens
taacagtgtatttttaaagcccctatcccatggaacttggagccagagaaaaattgtataggtcagttcactaggaataggtccactatgaggacctatcttttatttttcttttttgagacagtcttgctgtgtcgcccaggctggagtgcagcggtgtgattatggcttatggcagccttgacctcctgggcaaagtgaaccttgcacctcagcctcctgagtagctgcgactacaggcagtcagccaccacattatctaattttttattttttgtagygagagggtctcaacatgttggccagactggtctctaactcctgggctcaagtaatcctcccaccttggtctcccaaagtgctgggattacaggcatgatccactgcacccacccctgaaaacatactttatataaaccattattttgtttactttatgggaaagatagtctttaaaaaaataaataaataagaaccatttcctcccagattataaaggtgaattatgcttattgtggaaacttctgaaaatacaaggaaatatatagaaggaaaaaaaaaacaccccttacccagatatttaaaaactgaagctt

SEQ ID NO: 602602 - DNA, 596 bp, Homo sapiens
taacagtgtatttttaaagcccctatcccatggaacttggagccagagaaaaattgtataggtcagttcactaggaataggtccactatgaggacctatcttttatttttcttttttgagacagtcttgctgtgtcgcccaggctggagtgcagcggtgtgattatggcttatggcagccttgacctcctgggcaaagtgaaccttgcacctcagcctcctgagtagctgcgactacaggcagtcagccaccacattatctaattttttattttttgtagtgagagggtctcaacatgttggccagactggtctctaactcctgggctcaagtaatcctcccaccttggtctcccaaagtgctgggattacaggcatgatccactgcacccacccctgaaaacatactttatataaaccattattttgtttactttatgggaaagatagtctttaaaaaaawaaataaataagaaccatttcctcccagattataaaggtgaattatgcttattgtggaaacttctgaaaatacaaggaaatatatagaaggaaaaaaaaaacaccccttacccagatatttaaaaactgaagctt

SEQ ID NO: 602603 - DNA, 415 bp, Homo sapiens
gtggtggcaggtgcctgtagtcccagctactccggaggctaaggcaggagaatggcgtgaacccatgaggctgagcttgcagtgagccgagatcatgccactgcactcaagcctgggcgacagagcgagactccatctcaaaaaattaaaaaataaaataaaataaaataaaataaaaatattaaataaataaataaataaataaaaaatacaaaaattagctgggtggcgtgcacctgtagtctcagctactcggcaggccgaggcaggagaatagcttgaacctgggaggcaraggttgcagtgagccaagactgcgctacagcactcctaactaggcgacagagtgagactccatctcaaaaaaaaaggaattgttggaggcacttcccaacattgaaagcacaaagtataa

SEQ ID NO: 602604 - DNA, 415 bp, Homo sapiens
atagcaccactgcatttcaggctgggtaacagactaataccttgtctcttagaaaaaaaaaaaaaaaaaactaaaaactcatcttggtggtcaatacataggggtactcgtgtacttttctacaatgtaaaaacatctctaaaaataaataagwcagctccagtaacttaagagatttgttaaaacagaaagtctgttatgggaattgcccaaagataatctttttattgtcttacgcaatagactttgttctgtctctaaaacaaaatgcaatatattaaatatgaaagacagaacagaggcatatgaaacccactcagatcaggacttaaaatggtactggtatttcagaagcaatctagttagtgtaatcagtcactgtgattcctatatatgtcctatatgtgttaggact

SEQ ID NO: 602605 - DNA, 547 bp, Homo sapiens
gcttcactccagtcccctctcctgcagctcagagatgtctttgtttctaaggcacgcagatagaagccatcagacagcttgtattacatgtctggaaaaaactgtttattattcacccatctctgctacaaataaatttcaataaccttgactctgtaaaaacagtttaaccccaaaagaagataaacactgtaaacttccttcatttttatttatgtatttattattattattattattattattattattattwttattattttgagatggagtctcactctgttgcccaggctggagtgcagtggcgtgatctcggcccactgcaacctccacctcccgggttcaagcgattctcctgcctcagccccctgagtagctggaattacaggcatgcaccactatgtctggctaatttttgtatttttagtagagacagggtttcaccatattggccaggttggtctcgaacccctgaactcaggtgatccgcccaccttggcctcccaaagtgctaggattacaagcgtgagccactgtgcccggc

SEQ ID NO: 602606 - DNA, 602 bp, Homo sapiens
gaagcttggggggatcaaagggatctgaagctgggtggggtccgcccttacacagctgggctttgtgtgtgcatgtgggtgtgtgggtgggggtattgttgattctacactcaaacagatcyacgccggggctgtttaggagggtgactttgagagacatgaaagcactgagggggaaagacagagaaaacaaagacagagagaagctgagagagccagggagcagcttgagacatggggagggagggggaggagtaggagggaaggcgacagacacaactcaggagcaggagaggaagctaagttacagagacaacatgctgagagagcagaggagaccctccaggcaagggcagactccttgcaggggcaggctgggggcccccgctgcctgctgggtcaggctggtgaatctggtcatggttccgccccccagattcactccctaggtgtgtttgtttactggttcctcactgtcttgctcaaatgctccaactctacaaatcccgggatctcggggtgcagatcacctctcccagattcctgagcctgtgtctggccatgggcacctccagcatcttcctctgcgtgctgttcctctg

SEQ ID NO: 602607 - DNA, 529 bp, Homo sapiens
agcactttgggaggccaaggcaggaggatcacttgaacctaggagtttgagaccagcctgggcaacgtagtgagacccagtcactacataaaaattttttaaattcgccaggcatggtggcacgtgcctgtatacccagctactcactgggctaaggcaggagaattgtttgagcctgggaggtcaaggttgcagtgagttgtaattgagcccctgcattccagcctggatgacaaagtgagactgtagtctcaaaaagaaaaaaagaaaaaaaaaaaaaaggagagagagagagagagrgaagcaacttggactttgattaccaatggatatctgtcttaaaggcactgtatttttccatttttttaaattcacaaggaccttgggtcccttgaatttattctgtatatttatgtaaaccagcatatagccattgttgttggaggcctacattcttctgattttaaataacatgatatatgtcatacatacagttgattcttgaacaacataggtttgaactgtgcgg

SEQ ID NO: 602608 - DNA, 411 bp, Homo sapiens
ttggcaaggggccggggctacagagggaatggcttccggtacagagccttggacacaagcctggtgttgtgtgttttctcagatgcggcatttgtccatttggcatccattaatcacagggccgaactaacagctacattgtttctatcttccctgccctccagaacctgcctctgaaccacctccttatctaactctcacaccacaagctcatgtcccctgccctcagtcaccaagggccaagcrccaaacaagtagggagagccgaggtcccagagcccaccggaattactcagactgaccaggcccaagctatttccccgccctgccctgcctttcccctggaaacccctggaaaggctctgaccttggcttgcctggctcgtgtctgctcctgaccagccctggagc

SEQ ID NO: 602609 - DNA, 574 bp, Homo sapiens
attaacatctcctcaaaatgtttaatgttctctttagtgactactgaagaaaaattttaaatgtgttttaagaaataaaaatgggccgggtgtgktggctcacacgtgtaatcccagcactctgggaggctgaggcgggtgggtcacctgaggtcatgagtttgagaccagtctgaccaacatggtgaaactccatctctactaaaaatacaaaaaattagccggatgtggtggtgggtgcctgtaatcccagctactcgcgagcctgaggcaggagaatcgcttgaacccagaggcagaggttgcagtgagcttagatcccactattgcacttcagcctgggcaacagagcaggactccatctcaaaaaataaaaataaaaaataaaaatgaataccttttctgaaaggaaaaaaactaaacttattttgctaattgcagcaactgattttaaccttacaataatcttgacatttaaattacaatcaggcttttaagactcctacattctagctgagctattagctagctttattgcttatttagacacattgatattatttcttcaattcct

SEQ ID NO: 602610 - DNA, 483 bp, Homo sapiens
cttccctgcaatgttctcacacaacttgtgccaaattctcaagctgcagtgaagtaaatcggatcccacttgtgagtgaggaaattatakatggtgccttctccaagatcagagcatataggggaaaaaacaactgtctaatctgggaaggtgggagtaccaccctgtcctggaaaacaaaggttgttcaaccacccccattggagcagggaaggaatatctctatagacccaattggcaggaaaggatacacatcacgccccacagggcctctatttgtgtcccaactgggttcgtttttgtttgtggccacaagtgggaagaatcccacccctaaccactcccagcacccagtctcagctccccagggagcccactgttcttttagaagtagctttcccttacatatcaaaatcttggaacaggagtgaatgtatgttgaccacccttgcccctccaggggccgcgtctataaccccataa

SEQ ID NO: 602611 - DNA, 607 bp, Homo sapiens
taaatctagcaaattatgcacagaatccatacgtgaaaatctgtaaaactctaatgaaataaatcaaaggagatataaataaatggagagatatgatattctatgtgcactgattagaagactaaatattgttaacatgccaattcttcccaatttggtgtacacattcaatgcaatctcaataaaattccagcaagctattttgtaaatatcaaccaactgattctaaagttcatrtgaaaatgtaagagatttagaatagctaacacaataccaaagaagaacacagttggagaattcacactacttgatttcaagacttaatataaagctacagtagttaagaccttattatactggggaaagaatagacacatagaacgatggaaagaatgtagagcccagaaattgaccaacacatatgtagtcaacttatctttgacaaagaagcaaagaaaattcaatggagaaagaagagccttttcaacaaatagtctagaacaattagatgtccatgcaaaaacaaaaaaaacaaaacaaaacctggagagaaaaattacatctttcacaaaaattaactcaaattgcattatggacctaaatgtag

SEQ ID NO: 602612 - DNA, 597 bp, Homo sapiens
tttgggaaactctccagggcattgccctgggcaaaaatttcttcagcaataccccamaagcacaggcaaccaaagcaaaaatggacagatggggtcacatcaagttaaaaagcctcctgcacaagaaatgaaaaaatcaacaaagtgaagagacaacccgcagaatggaggaaaatacttgcaaactacccatacgacaaggattaataaccagaatatataagaagctcaaacaactctacagagaaaaatctaataatctgatcagaaaataggcaaaagattttaatacacatttcttaaaagaagacatataaatgtcaaacaggcatatgaaaaggtgttcaacatcacagatcatcagataaatgcaaatcaaaactacaatgtgatatcatttcagcccagttaaaatggattttatccaaaagtcaggcaataacaaatgctggtgaggatgtggagaaacaggaactctcgtacacagttggtcatacgaactagtacaaccacgatagagaatagtttggaggttcctcacaaaaactaaaaatagagctaccataccatctggcaatcccactgctctatatgtac

SEQ ID NO: 602613 - DNA, 608 bp, Homo sapiens
aggcatctgaaacatgctaactacaagtgtaacctagcacagccccagttgtggtggctacagtgtaaaactccttctgtttgagaaaaccaaagccaaaaataaaaagactttgtcatgcaccttaaggtgccaagtcaaccccaatgggatagagccactaaaaggctctttagatycccgagttcaggcctaaggttctggacagcaattttggacctgccctggaccaaaagggaacccccttcccttaaaacttagtttcaggcctggcagcattcaccccaagctaactgaagaagcccttaggctttaaagtgaacatcagtagtagcctgtcagaccactccccacccccatgggccagtaggatggtgccaacaaggagaggctcctctgcctatggaaaggggaagaaaaaatgggaagaactttatattgtggtttgagtgccagcttagccatagtagaatagaacatcaggcaaatttctaaggtttttaactgcaatccctggccactagagagcatctctggatctgctttgggcctagaggacctcaccaccctgaagagccagcctggctggccttgccatgtgctgattt

SEQ ID NO: 602614 - DNA, 555 bp, Homo sapiens
tcaaatgctacaggctgagggaaatatttggaacacatatatctgacaaaaatttgtatccagattattttaaacaacactacttaatactaagataaacaatccaatgtaaaaataggcaaaagatttkaacattttacaaaagaagcacatgaaagaagtgcaatattgttaacatgagggaaatacaaattaaagccaatatgagataccactacaagcccattagaatggcttaaattaacaacaacataaactaatgaagacaaaacactgacaatattgtttgtgaagatatagaggaagtagaactctttttttttttttgagacagagtcttgctctgtcgcccaggttggagtgcagtggcatgatcttggctcactgcaagctctgcctcctgggttcatgccattctcctgcctcagcctcccgagtagctgggactacaggtgcccaccaccacgcctggctaattttttgtatttttagtagagacggggtttcaccatgttagccaggatggtctcaatctcctgacttcgtgatccgccc

SEQ ID NO: 602615 - DNA, 555 bp, Homo sapiens
tcaaatgctacaggctgagggaaatatttggaacacatatatctgacaaaaatttgtatccagattattttaaacaacactacttaatactaagataaacaatccaatgtaaaaataggcaaaagatttgaacattttacaaaagaagcacatgaaagaagtgmaatattgttaacatgagggaaatacaaattaaagccaatatgagataccactacaagcccattagaatggcttaaattaacaacaacataaactaatgaagacaaaacactgacaatattgtttgtgaagatatagaggaagtagaactctttttttttttttgagacagagtcttgctctgtcgcccaggttggagtgcagtggcatgatcttggctcactgcaagctctgcctcctgggttcatgccattctcctgcctcagcctcccgagtagctgggactacaggtgcccaccaccacgcctggctaattttttgtatttttagtagagacggggtttcaccatgttagccaggatggtctcaatctcctgacttcgtgatccgccc

SEQ ID NO: 602616 - DNA, 569 bp, Homo sapiens
taacatatttgagtaccaacctgtgctaagaatgatgctagtcactcacatccatagctcatgccaacccaggaagcatgaggacctgcagcagcatcagtaacattctccaggcaacaagcatcagagtcttggagtctggtcctgctttattctccgtttctcatgaagaatttcagtgaccgtctgcacaagggaagcaagttagacccaacctagtgaagtgatggctttgtttcatcaacttacctacatttccaagtcagaattggatagtcacttctttcttttatatttaaacacttcctttctctcatctcagattcttcatcatagccctgaaattcacttatgcgggagcctacagctgaatctctgttgtgtaatggtcctttattctagtatttaatcttttcatctcacctacatacyacagtgttatggaacatcggggcaatcccttctaattgactagtaaggaggatttcatttcatcccttggtaatcacatcctgggtttattcacccttctaataattctattagaatgtttataagatgacgtgctt

SEQ ID NO: 602617 - DNA, 517 bp, Homo sapiens
ccgggtgagagcgggaggggcggtggcgggcagaagcacacgccagtcgcgtcaggggggttcttccgcctcctcaggcgcggctcccccgagagaggctccggccgcccccgccgtccgctcgagctttgcgccgcgcctgaggcgcttctgtgctgagrctagatcctttctgaagtcgaaaacagcaccgtggggtgtgaggctggaacgcggctcctaatacgcccgagtacggtcagtagcttgcgagcggcgatcgatgcagagagattgcgaggtagctgccgcagcaggaacccaagcgaacacgtccaaccgcttcccctccctcgtagaactctcccacccgccgccggccccaatatggcgtcaataacaacgccgccgattcaaatccggcgggcctcagagcgcttgcgcacgggggcgggccaaaccggggatgcattttgggagttgtagtttttaggtaccgggaggaatcggcttgaaaggcgggaagggaggagtcaca

SEQ ID NO: 602618 - DNA, 588 bp, Homo sapiens
ccgggtgcatggattcaaggtctgatgaaaaaacaagaggatctggtgatgaactggacgtggggaggagaggaaggggctgagacccctcctcagatcctggctgcctcaccaggatggatatggattctgtcacagagctgggcagctggaaatgtcagggaggacagaatcatgagtgtggttttagaggacactgggtcggaaatscatttgacccacccagtgggcacatcaggcaggctgttggacagatagtttagagcctggaggaaagccctaggcacatgtgtgtgtttgagagtcacagtacagaggtggaacttggagccacggtcgcaggtaaaaccactgaggcaagtgagagtgagaggaatggaggttccctgactggacctgaaagccaatgtgtaaaccctcagtccataggagacagagaaggagcagcccggggaggagactgtgggaacgctggaccataacatcaagagaaaaccattttccaaagagaaaggacttctgggtaaagatggtgggttaatcaccaatgttcaccatttctcccactgcaggttccaaccaaaatgc

SEQ ID NO: 602619 - DNA, 524 bp, Homo sapiens
tcagctgcaaaacatatccccactttttctgagctttcatctgagtcaatttataaacaaaatgggccgggcgcggtggcctgtaatcccagcactttgggaggctgggtcgggcagatcacaaggtcaggagatcgagtccatcctggccaacatggtgaaaccccgtctctactaaaatacaaaaaattagctgggcgtggtggcgcaagcctgtagtcccagctactcaggagactgaggcaggggaatcgcttgaacctgggagacaaaggttgcagtgagccgagatcgcaccactgcactccagcctggcaacagagcaagaccccatctcaaataaataaataaataaataaacaaatgttacataatatcatgtcaggaagtgataggtgctcagtgataaaaatacagcaggaaaagagagggctgggggcgtgctgtgctgctttagctaagccagtgaggaaagamctgcctgagactggaaagagaggctggaaggaggtgagggagggagg

SEQ ID NO: 602620 - DNA, 637 bp, Homo sapiens
tttgacttaatgtcaaatagtgtcattggtcttgatgaaagttatttaaaagaaaaagtgaaattgtccataaaagcctgcagttataaccagaagtatctgggttaggtgaagctacaagttacaagacagtcttgtcccagattcctaggaagaaggggattggcttcaatcctacatgctttgcttaagattgatttatctcaaataagtattgagatgcatttattaccacctactayctatcagctgcttagccctgtaaacttctataagcatgcccaaaagtcacctcctcagtgaagccttccccggcttcctcaggttgcctcttctgcattcctatgacattttattcacctgtctatcacaagactctccagtttatgtatttctaataataaagtaaccttaaggaagctgtgacccatgagggtcaatgaccaagaccttggagaagtgatgtgtgcaagatgcacagttctgcagccagaacgatgtttgaaagcacctccatttgctactttcaaaagaacataaagagcgtaatggaaattcatcatgtttggttgcctggccccatttccccttcataaccatgacagttttgattcaagggcttgccctcctccattta

SEQ ID NO: 602621 - DNA, 637 bp, Homo sapiens
tttgacttaatgtcaaatagtgtcattggtcttgatgaaagttatttaaaagaaaaagtgaaattgtccataaaagcctgcagttataaccagaagtatctgggttaggtgaagctacaagttacaagacagtcttgtcccagattcctaggaagaaggggattggcttcaatcctacatgctttgcttaagattgatttatctcaaataagtattgagatgcatttattaccacctactacctatcagctgcttagccctgtaaacttctataagcatgcccaaaagtcacctcctcagtgaagccttccccggcttcctcaggttgcctcttctgcattcctatgacattttattcacctrtctatcacaagactctccagtttatgtatttctaataataaagtaaccttaaggaagctgtgacccatgagggtcaatgaccaagaccttggagaagtgatgtgtgcaagatgcacagttctgcagccagaacgatgtttgaaagcacctccatttgctactttcaaaagaacataaagagcgtaatggaaattcatcatgtttggttgcctggccccatttccccttcataaccatgacagttttgattcaagggcttgccctcctccattta

SEQ ID NO: 602622 - DNA, 595 bp, Homo sapiens
aggagaacttgcccagggttatgcagatcctttcaccccttgaactggcccagttcaatgctttcccccaggcctttgcacatgaagttcctcttggccaagatcactcccaaccctatcctgactttctggttcagagagcagtgagctcccttgtcaccatacagatctctgttgacatgctttcttcacagcaagggcgctataccgaagcctgtctttgcccacacttttcagccttgtttcattttttcatggcrcttggacaatcataattgtgctatgtattatatgagtttcccttcctgtttttggtcagccttcctcattagagtgtaagctccacttacactctaatgtaaaaaaagtaatttttgtacttttttttttttttagtagagatggggtttaatcccgttggccaggttagtctcgaactcgtgacctcaaatgatctgctcgctttggcctcccaaagtgctgggatcacaggggtgagccaccatgcctagccaagatcaacctttgaaccacaccagtctgggggcttattccagctctgccccttaccggtactgccacctcatcctcacca

SEQ ID NO: 602623 - DNA, 332 bp, Homo sapiens
caaaagcacagctttggggaaaaaaaaaacccaaaaaactgatggaggcactttcttaagcagattggaggccctgcaccctgctaggggctgggtccccaccctggaagcctatatttagatatctgagagtgaaacaggagggaaagaaacaaaatgaagaaaacttctgtaagcctcagtttcctcgtgcaaaatgtggacgttaatagtatctccttacctcggggtcaccacrgtattggataaaataatgccagtaaaaggtgtcccagtatcagagaagatggccattactcaaaggcttgctctagcaaatgtcaagctacaga

SEQ ID NO: 602624 - DNA, 620 bp, Homo sapiens
tttacattttgtaaacactagaattggtaaaaaacattttaagttaaataatgaatttattatgtttgagctttatctgcccaaatgtctttccacttgaatttctatgaagttcttatttacatgcatgtattttggaacacaaacaatatagcaagagtcacyttttcatgtgattgggaattatgttcttaaagtaatttgggaataacacatataatgccatcagtagtatatacttcctttctctcatttgctctacacatcttgaaagagagatacagtgtaagagtactacacaaaccacatcacagggtgaaatgcaaaatcataattaatgcttttatgtaatgagaatgcaatgtttcatttataccattctagaatgtaggtgtcttccttgagcatcctgaaagagattgtattgtcagcgtcccacaggaaaaataaagaataataatatggaagtgcacttggcagtttcttcatctgatcgataaggcatcatgaggttaagtgacttctatcaggaggcttatggcttattcttctgcatataacctgactctagagccagtctttagatccattatataagcaatccctccttttactctata

SEQ ID NO: 602625 - DNA, 620 bp, Homo sapiens
tttacattttgtaaacactagaattggtaaaaaacattttaagttaaataatgaatttattatgtttgagctttatctgcccaaatgtctttccacttgaatttctatgaagttcttatttacatgcatgtattttggaacacaaacaatatagcaagagtcactttttcatgtgattgggaattatgttcttaaagtaatttgggaataacacatataatgccatcagtagtatatacttcctttctctcatttgctctacacatcttgaaagagagatacagtgtaagagtactacacaaaccacatcacagggtgaaatgcaaaatcataattaatgcttttatgtaatgagaatgcaatgtttcatttataccattctagaatgtaggtgtcttccttgagcatcctgaaagagattgtattgtcagygtcccacaggaaaaataaagaataataatatggaagtgcacttggcagtttcttcatctgatcgataaggcatcatgaggttaagtgacttctatcaggaggcttatggcttattcttctgcatataacctgactctagagccagtctttagatccattatataagcaatccctccttttactctata

SEQ ID NO: 602626 - DNA, 629 bp, Homo sapiens
ttgtgaaaaatgttaaagaaatttgagaatttagattttcttatgtatccatcacatagagatgttgcaattttgagataaatagtaaaattgaaacaatgtaatcatgtattttatattgaatcaaagttttctttcttggcatgtaattcttaaattattatagacaatatggtctgtattttaatacacaaaaatgttttttaactttgcttktggcaaaaatatttggattggtagagttttattttcccttaagtattcaattacttacttcacatctgtataatttgggatttaaagtgctatgaacatgattttaattttctagtaggtctgcaattgttcttaaatgtaacatgaaatagttgttccagatgatctctcagttacttctagatttaactttctacgagtcaagtgtagcccagataatgagacatgttttctctccatccaggaggctttctagccatacagtagtatcaattttatagaagaagaatgagttacaccattgttagatgtacgttctgtatattaaaatagcattaaaagaaaaggtaaagagtcaccaaaaaaaggcaacataaaggttaaagtgttattatcttacatatgtgtgtatg

SEQ ID NO: 602627 - DNA, 683 bp, Homo sapiens
cagtaagtgtcgtctggtgcaggcagagtcatgggcagaagggcagaagattcctgggacccctgttttcttgccttcctgtggagtggatcagacagatgcagatgggcaaatctagagactccacctcttagttgttctttccttggaaggaaagcatragggtagcattaaggttggggttaatcatttgggtttgagcgctatgcagtcagagtttaggtgctaagtgcatcagggaatgctggaaacaccagttgtgtagcacttgaagagtttgggagaaactgagatcatacacaggcctcctgttgaggggaggggaagctattagttctggctagcaagctgaaaagaacattttggtcattcaacagacaatcttgcttatttcttcacgttgatgtttactaattagcaggcatcgtaccatttgatttgtctatattatctcatgtattacgcataagatccttatgcagtcttattgtcattttatggttcagcaaatggaagcacagagtactttatcctttttcccactaactgaatatgttctaaattggagtacagagagtttgaatagaggaataacaggcactggaaagttgaggtcttgatttggaatagtgactttgggaaagcaaggcattgataaattttatagacatggcaaaagttaa

SEQ ID NO: 602628 - DNA, 610 bp, Homo sapiens
ggttttataaaagagtacctgtaagtttttagtttctgtgtggaagattttttcagagagaatacagatagccttcttgtattagaattttgtcatatgtggtttgaaactgttcattggagctgaggaattttgttacgtttgttttaactagatatgattaacaaaatgaccatagcaagagcatgcattgaaatgagagaagttacgtgtgtttgtgtctagtttgggtaatatgattcattcttaagaattcttcaaactttattataatttttggaaataacaagtttgtcagttgattaaaccagtgtcttgttcataggcgaccttacgcaattatatagcagaccaaatgtttgtgttgttagtgttccttttccacccctaaattatagaaggactaagagtaacactccatacagaaactcagtaactaaataaccatattgcaactcagtaacaagataatgaattatgctgactttttagamtagttctgtcccaagaagaactctgaagatgattcagccttctgcatctggatctcttgttggaagagaaaatgaggtatgcactatatggctaaaatggggtactggtgatacag

SEQ ID NO: 602629 - DNA, 590 bp, Homo sapiens
agtggcctttttttttatcccgtttgtcccattccgcctgcttctcctgatctgtattataaaaaaccgaggttgccaagttcaatagggtctaagttttgctctgggcctaaggcggacttttgaagtttttttctaatgtctgcagttgactgagtgataaacttatcctttaagattagttggccttcaatagagtcaggtgacagagaggtatgcttcctcaatgcctcccttagtctcaccagaaaggcagtaggattttcttcctttccctgtgttatagtggacatcattgcataattcataggcttcttcctagttttccttagtcctagcacacaagttagcaaatgtctgcggcaccaatttccatgttctgattctgtgtcccaatgagggtctacactgggaactgcctgctggcctgtggggaattgttctctttcctctgttgtcatcctatcattgacctgactgrgataccagagatcaccaaactcttcgggctgcagttatggcgacacttctctcatttggggttagtgtctgatttagcagtaacattatatctctccacatcagatcaa

SEQ ID NO: 602630 - DNA, 590 bp, Homo sapiens
agtggcctttttttttatcccgtttgtcccattccgcctgcttctcctgatctgtattataaaaaaccgaggttgccaagttcaatagggtctaagttttgctctgggcctaaggcggacttttgaagtttttttctaatgtctgcagttgactgagtgataaacttatcctttaagattagttggccttcaatagagtcaggtgacagagaggtatgcttcctcaatgcctcccttagtctcaccagaaaggcagtaggattttcttcctttccctgtgttatagtggacatcattgcataattcataggcttcttcctagttttccttagtcctagcacacaagttagcaaatgtctgcggcaccaatttccatgttctgattctgtgtcccaatgagggtctacactgggaactgcctgctggcctgtggggaattgttctctttcctctgttgtcatcctatcattgacctgactgagataccagagatcaccaaactcttcgggctgcagttatggcgacacttctctcatttggggttagygtctgatttagcagtaacattatatctctccacatcagatcaa

SEQ ID NO: 602631 - DNA, 588 bp, Homo sapiens
atacttgagaagggcgttaagcatgaataaacaattcaaatgcaaaatgagtaacaatttacaagaaaaattgccctgtactccaaaaaacatagaggtcatggaacacataaaggctaaggaactgttccacattaaagacaactgagaacaactaaattcaatgatcctgtactctagagggggggatctaaaacaagctaccaaggatactgggacaacaaaacgaatatggatgataaagagtatcaacattccctgagtttggtaattttactctagttatatgaaatattcttgtacttggaacatatgccgaagtactaaggaaggggtaaggaagcacaaagtgtgcaacaaactcaaatagctcacaggtataagtgtacagagaaaatgaaaaaaatgtggcaaaataataaaaatgagggtaaagattacacaacagctttcatattactctggyaacttttctaaattattccaaaataaaaacgtaaacaatggctgccaaaatgcctaacttggtgaacataagtgtaattcaatatggtaaattaattcaacatggtaaattaagagcatagg

SEQ ID NO: 602632 - DNA, 575 bp, Homo sapiens
ccatcctcaacaaaacacccggatggagtcgcacttcccgagtctcgtcagcctctcagagtcaggctgggcgcgkgacagagccgaactagcgacctgggcgggccaaaactgcggaagtcggcggagagtgggcgagggtaggggcggagcaaagaaggaaaaggaaagtgtgtgttggagattggaagattcttatttcgattcttataattagttagtcctgggggtcggccccgcggtatcctgcggcaacaaacctagaactcaattcgacacctggaatttaaacggcgtgcgggagcagatgtctcatgttagtgctacttgcctctgtccccaccccgccacgtgcgcaggcagggagggcggtcctcaagcttcgaacaaggtcaaagacgttgttcagacgttgctgctgtggcttaggagaggagcagcccagtctgactcgtggatttttacccactgctgtcagaacacactttctgttagaatcccccaagacctcagacctacagcctgccccttaggtggttcactgtcttcatcgaaacgtttgccgccgagtcgca

SEQ ID NO: 602633 - DNA, 575 bp, Homo sapiens
ccatcctcaacaaaacacccggatggagtcgcacttcccgagtctcgtcagcctctcagagtcaggctgggcgcgtgacagagccgaactagcgacctgggcgggccaaaactgcggaagtcggcggagagtgggcgagggtaggggcggagcaaagawggaaaaggaaagtgtgtgttggagattggaagattcttatttcgattcttataattagttagtcctgggggtcggccccgcggtatcctgcggcaacaaacctagaactcaattcgacacctggaatttaaacggcgtgcgggagcagatgtctcatgttagtgctacttgcctctgtccccaccccgccacgtgcgcaggcagggagggcggtcctcaagcttcgaacaaggtcaaagacgttgttcagacgttgctgctgtggcttaggagaggagcagcccagtctgactcgtggatttttacccactgctgtcagaacacactttctgttagaatcccccaagacctcagacctacagcctgccccttaggtggttcactgtcttcatcgaaacgtttgccgccgagtcgca

SEQ ID NO: 602634 - DNA, 567 bp, Homo sapiens
gtccttgcttccagagctcccaagatggttgtgggccacttccacaatggtggcaggccacttccaagatggtggcaagcctcgtgttctcttacctggggttcttggcctcacggattccaaggaatggaatcttgggccatgcggtgagtgttatagctctattagaagacatgggtcacggaagagaaccgtggaacccagtgactagtgttcagcttgattaggatgaacccaggcacttagctgtgcaggaacaatggcaagcctttagcctgattgggagtggcaatggacacctcgctggatcaggagcacagcggacaccctgctggatccggagggatgggagtcagtggygggtctgcagtggcaggtctgcggtggcgggtctgcgatggcggcaaacagcagtggtggatggcgagcgaaagctcagctcgagccataacaaacatggaccagaagagtgcagttacaagatttaatagagtgaaatagagtgaaaacagagctcccacacaaagagaggggacccaaagagggttgctgttgccagcttgaacg

SEQ ID NO: 602635 - DNA, 567 bp, Homo sapiens
gtccttgcttccagagctcccaagatggttgtgggccacttccacaatggtggcaggccacttccaagatggtggcaagcctcgtgttctcttacctggggttcttggcctcacggattccaaggaatggaatcttgggccatgcggtgagtgttatagctctattagaagacatgggtcacggaagagaaccgtggaacccagtgactagtgttcagcttgattaggatgaacccaggcacttagctgtgcaggaacaatggcaagcctttagcctgattgggagtggcaatggacacctcgctggatcaggagcacagcggacaccctgctggatccggagggatgggagtcagtggtgggtctgcagtggcrggtctgcggtggcgggtctgcgatggcggcaaacagcagtggtggatggcgagcgaaagctcagctcgagccataacaaacatggaccagaagagtgcagttacaagatttaatagagtgaaatagagtgaaaacagagctcccacacaaagagaggggacccaaagagggttgctgttgccagcttgaacg

SEQ ID NO: 602636 - DNA, 494 bp, Homo sapiens
ggttaagtactgagctctgagggcttgcctgctgggttcaaatctagttctgccaatcctaggctttgtgtctcagttttctcatttgtaaaatggggattataatagctcttactccaggaggttatctcaaggattaaatgagttaaaacatgcaaagcattcagaatactaatagaaaaatagaaagtgcttgagaactgcttgctatttttgttatattaaatgaaaattgcaatttgtataggtaaagcagtgtctacagtatgatgccttatatggtttggctgtgtccccacccaaatctcatctcaaattgtagctcccataatccccttgtgtcatgggagggacccggtgggcagtaattgaatcatgggggtgggttttttccatgttgttctcatgatagtgaataaatctcacaagatctgatggttttataaagggcagttcccctgcatacctkcccttgcctgccaccatttaagatg

SEQ ID NO: 602637 - DNA, 655 bp, Homo sapiens
aataatattttgttatagcggcccaaatgtgctaagaccatttgctaagaagctggaaatgtcctccattgtaacaggatggaaaataaaggacatgacagctacagatgcaagaatgtttgtagtttggtggaagagaaataattttataaccaatatctttagttatttcataactaatacctttcaatgaagtaaaatgtaagatcattaaccaagattaaggggagaagttgtgatggggatgaatttgaaaaagttaaaaaaagtttatatattctactttcaattccttttctccagtttcctcttagatcccctttttttatgtcaccaaaacccctttttccaaggttcctgaagtcctctgcattgcaataaacccagtcctgagttgagatgacagcaacagaacttgagatagttgctcacaccctcctctttgatatattttcctttagaggattttaaaacttcattatctttctggtttttctttatcctccttttttaataatcatttcttaagctcctttgstgggtcatcttcttcttcccaaactggtaatgttgggatgctctagtcatgagtcctcaaacttctcattcctctctatattcattcctttggtgatctcaccctgttttatgttat

SEQ ID NO: 602638 - DNA, 453 bp, Homo sapiens
gaacacattccagaagttgagtctattattatttactttattatttcagatgtataattgtttttattttcatacagactcctacaactcttccaagagcagctggtcgagaaaccaaatatgtaagtacctttataattatacacactgcttttcaaatgggtgcctgtgtatgctttagagagaacactattatacagtaatttaaatagaattaattgtttttttataagttgaagggtaggatgatatgattgcagatacagaaaatcaggttatgtcagagataaaacatcagrtaagcttatcaaataaatttgtccttaagtgaggtctagttggattagtttagctaaatagaactgccacacctgcttcctgattttctagttatcaacacttagatgacattttcatttttgtaatggtttattatgcttatagaatagtcaa

SEQ ID NO: 602639 - DNA, 567 bp, Homo sapiens
atggtaaatttagtcctagagtaaaatgactgtttaagaaagaaggatgttcagccaggtgcagtggctcaagcctgtaatcccagcactttgagaggccaaggcgggtggatcccctgaggtcaggagttcgcgactagtttggccaacatggcgaaaccctgcttctactaaaagtacaaaaattagccaggcatggtggtgtgcayctgtaatcccagctactcaggaggctgaggtaggagaatcacttgaacccgggaggcggaggttgcagtgagctgagatcgtgccattgcactccagcctgggcaacaaagtgagactccatctcaaaaaaaacaaaggaaagaaagaaaaagaaagagagagagagaaaggaaggaaggaagttagttcaagacaaaccagaaagcccaagcatgtcatgaacaatctgtataagtcacaagaagaagatttataaaaaacaaaacaaaacaaaaacttttatatgatcaagttgcctatgattaaagggaaataataatggtctttctagaggttgggtttgatgttaaaaaaaat

SEQ ID NO: 602640 - DNA, 542 bp, Homo sapiens
aagaatcctagaagaaaacctaggaagctcattctggatatcgactttggaaaagaatttatgactaagtcctcaaaagcaagcacaacaaaaaaaatgacaagtgggacctaattaaatttaagagcttctgcacacacagcagaagaacctatcaacagagtaaacagacaacctacaamataggagaaaatatttgcaactatgtatccaacaaaggtctaatatccagaatctataaggaacttaaacaattgaacatgcaaataataataataacccattaaaaattaacccctttaaaatgggcaaaagacatgaacagacacttctcgaaagaaggcatacaagtggccaaaaaacattaaaaaatgctccacatcattaattattagagaaatgcaaatacaagccacaatgagaaatcatctcacaccagtcagcatggctcttattaaaaagtcaaaaaacaacagatgttggtgaggctgcagagaaaagggaacacttatacacagttggtggaaatgtaaattagttca

SEQ ID NO: 602641 - DNA, 542 bp, Homo sapiens
aagaatcctagaagaaaacctaggaagctcattctggatatcgactttggaaaagaatttatgactaagtcctcaaaagcaagcacaacaaaaaaaatgacaagtgggacctaattaaatttaagagcttctgcacacacagcagaagaacctatcaacagagtaaacagacaacctacaaaataggagaaaatatttgcaactatgtatccaacaaaggtctaatatccagaatctataaggaacttaaacaattgaacatgcaaataataataataacccattaaaaattaacccctttaaaatgggcaaaagacatgaacagacacttctcgaaagaaggcatacaagtggccaaaaaacattaaaaaatgctccacatcattaattattagagaaatgcaaatacaagccayaatgagaaatcatctcacaccagtcagcatggctcttattaaaaagtcaaaaaacaacagatgttggtgaggctgcagagaaaagggaacacttatacacagttggtggaaatgtaaattagttca

SEQ ID NO: 602642 - DNA, 620 bp, Homo sapiens
taatgttattgaagcatgtctgtcttcataaacactttgtaaaaaaaaaaaaagtgtacaatgataacataattattattaggcatgtaccatttccagaattcactgtaagttctacagagatgcaccagagctgtggatactttagctggtggggttcgggcagctgggactcactgttgcaatggtcacaaatgccctaatcattgagtcccaaatgtctagttgaacttaatgcttaataacatctatctacccagagggcaacaaaatgtttgttcctggcttgcgaggccactgatattttcatttttttttcctacagaactattggcctgaggcccctggaaacattgcttcattgcttggccttataagaatttacttgacctattttgtggaagcacatttaccccagtcttaraggtttttccatgcaaaagagataaatgaaaatttttactgctaagtttcattcacctgagccaatcacagctactgaaatgaccaggttggtaaatgctgttttaatggaaacaggctctccacaggtccagatggggtaggtccatgcctcaaaaatgaaaaattctctttttagctccttagctggattactg

SEQ ID NO: 602643 - DNA, 524 bp, Homo sapiens
acagcaaagtcgctcattccaccatacgttaagttgtatgtaaaaatgtacaaagtgtctagccatacttgtctgatgggtgagattccacaaaatacccagcaaagggacaataaattcggggttgcaggttcttcaccagccgagccttgtagttcargagcttcttcctttctgttttaatgaattgggctttccattcctctgaaatgacaggatttagattagagtctcctctgctggaaaaatcacagaaaaacacatgttctagcagattggaactctttcaggagataaaattgataggtaactaaggcagaaatagaacaaggctccatgtcattagtggaggatttccccggagtttttatcttggaaatttcaattggttactaggaaaatgttaccaagccagccaaaggcactgagctttctccttgtatatggcaattcattcggaccctagctgaatacacagggtaggatgcataatcgtagttggtgtgcatgcacattttaagggc

SEQ ID NO: 602644 - DNA, 524 bp, Homo sapiens
acagcaaagtcgctcattccaccatacgttaagttgtatgtaaaaatgtacaaagtgtctagccatacttgtctgatgggtgagattccacaaaatacccagcaaagggacaataaattcggggttgcaggttcttcaccagccgagccttgtagttcaggagcttcttcctttctgttttaatgaattgggctttccattcctctgaaatgacaggatttagattagagtctcctctgctggaaaaatcacagaaaaacacatrttctagcagattggaactctttcaggagataaaattgataggtaactaaggcagaaatagaacaaggctccatgtcattagtggaggatttccccggagtttttatcttggaaatttcaattggttactaggaaaatgttaccaagccagccaaaggcactgagctttctccttgtatatggcaattcattcggaccctagctgaatacacagggtaggatgcataatcgtagttggtgtgcatgcacattttaagggc

SEQ ID NO: 602645 - DNA, 532 bp, Homo sapiens
atgttaaaagtgtagaaaacatatagttgaatgttgttttttgatacaccctggcaatctcttttaattggtgaatttaaaatattcatatttaaagtgatattcatatggttggattgatgaccttcgtatttgttactgttttctattcgttgccttggtctttgcttctatttttgtcttccacactttttctgtcttttgtggttttatttggagattgtatgtgatttcattttctatcctttcttagcatgtcaattatacttcctcttttttttagagtaaaactcttattggtggttgctctagactttgcaacatttaaaactattccaagtccactttcaaatagtattataataacacttcacagacagtgtacatatttataacaaaatactcataattcctctaatgctttatgtcattgctgccattcttttcacttgtacayaacaatgcatgagtatgtatgttaggctgtttttaatacctgagactgggcaatttataaataaaagagatttat

SEQ ID NO: 602646 - DNA, 604 bp, Homo sapiens
catacatgttaaggattgttatgtcttctgacataacagaagacataacaatcttttgcgtaatgtcattgtgtaatgccattatcatttatcattgtgtaatgccattattaatccctcatatttctcattttaaagtctgctctgtattaaattaatataactactcctgctttttttgattggtattagcatggtgcatttttttcattaatttacttttaatctatatgtgcctttatatttaaagtggttgcagacaacataggctttgtcttattttttgatccactctgacactctctgtcttttaagttatcattttgacctttgatgttcaaaatgatcattgatataattggataaatatccaccacattttctatttgttgcctttgttcttggttcctattgttgtgttccactcttttctgccttttgagattttaattgagcattttatataattctgttttatctcctttcttggcatgtcagtttcatttctttttttgactctaatgtttgctctatagtttgcaatacacatttacgatgaatccaagtctacactcaaatartgttatacctctgtacatgtaat

SEQ ID NO: 602647 - DNA, 562 bp, Homo sapiens
atattaagtttcttgacctaaattatcaaaattgtacatttccattgcaaagaaaataaaaatctaaccatacagaaaagtcaaatacccaatcagcaaattttgttcatattaaatttaatcacattttaacctctctcatgtagactgtggcaaaagccttctgcccaggctccctgtctcctctcatgcccttaactttctaatctgcacacagcagccagagtgatctcattcaaatataagtcagatcatgccattttcatgctcaaaacattcccatggctttctattgcatttaaatggaatctaaagctcttcctattactgacaaatccctgtataaacaaccctctcctgctcttcttcttcttcaccttatgctaaaaacatgcacctctttttatttcttcagagctcrtccacactttcctggtccagggtctttgcacttgctaaccccgtgcttggatgttctccccacaggtattggcttatcccctctcattcagatccctgctcaaagaggctcccttacctagaacagcagttactatcactc

SEQ ID NO: 602648 - DNA, 562 bp, Homo sapiens
atattaagtttcttgacctaaattatcaaaattgtacatttccattgcaaagaaaataaaaatctaaccatacagaaaagtcaaatacccaatcagcaaattttgttcatattaaatttaatcacattttaacctctctcatgtagactgtggcaaaagccttctgcccaggctccctgtctcctctcatgcccttaactttctaatctgcacacagcagccagagtgatctcattcaaatataagtcagatcatgccattttcatgctcaaaacattcccatggctttctattgcatttaaatggaatctaaagctcttcctattactgacaaatccctgtataaacaaccctctcctgctcttcttcttcttcaccttatgctaaaaacatgcacctctttttatttcttcagagctcatccacactttcctggtccagggtctttgcacttgctaaccccgtgcttggatgttctccccacaggtattggcttatcccctctcattcasatccctgctcaaagaggctcccttacctagaacagcagttactatcactc

SEQ ID NO: 602649 - DNA, 602 bp, Homo sapiens
tacatgtacagaggtataacactatttgagtgtagacttggattcatcgtaaatgtgtattgcaaactatagagcaaacattagagtcaaaaaaagaaatgaaactgacatgccaagaaaggagataaaacagaattatataaaatgctcaattaaaatctcaaaaggcagaaaagagtggaacacaacaataggaaccaagaacaaaggcaacaaatagaaaatgtggtggatatttatccaattatatcaatgatcattttgaacatcaaaggtcaaaatgataacttaaaagacagagagtgtcagagtggatcaaaaaataagacgaagcctatgttgtctgcaaccactttaaatataaaggcacatatagattaaaagtaaattaatgaaaaaaatgcaccatgctaataccaatcaaaaaaagcaggagtagttacattaatttaatacagagcagactttaaaatgaraaatatgagggattaataatggcattacacaatgataaatgataatggcattacacaatgacattacgcaaaagattgttatgtcttctgttatgtcagaagacataacaatccttaacatgtatg

SEQ ID NO: 602650 - DNA, 536 bp, Homo sapiens
ccatttgcttccatgtctcaacatgtctaattgaggattctgatgaatttatgttggtcatttgatgtctcaaaagatattttttcaagatatgataatagattgtcttcttctacatgatcttgcagcaaatcttgaacaactctatggaattaacagaacatctatgttcactccaccatgcataacacactcaggttatcttttatgtcaaatatatataccttttatgtaatgttccacaatgtggacagaatgatgagaaggctaacaatcctattataaaagaacttcttgtctagtggaagaaacactaatataaacatttagtcacaatacgaggtgcttggtattttattaaatacaacaataacagccttgcctctgggggtggagaacacttcctagagtaggggacatttgagatgttcttagagaattattagaaatttattaggtgaaaaatraaaacatggagaaggacatttggatctgaagtcatgaaaaataccaaaaggaaatggtcatacaaaaga

SEQ ID NO: 602651 - DNA, 642 bp, Homo sapiens
cctaaaataaaccagaaaaatcagagggccttagggtgggagggagcaggaggagtaagagttcaggtttatggtctatttctgtttggttagctctttggctttttgaataaaaaacttcccagggattttaaggtttaaagtcttcattatctctaattttaaagggtcatttatgctgataattcttaaatctcaactggaataagaaattcactcrttatctcaatataaatgtcatcttggtaaagtgcattacataaaatcaaagtgtcttaactctgacacaccagatcagctgagttaagacaatggcaaccagtgaagcggcctattttgagtgtagttttccttcatatttttttatctatgtctcctttcgaaaaatataaaagtctcacagacacagttatttgaaataccactaacgcaatgaaaaacaaatcaaacactgggaatgtttgcttttattttttcccaaactacacattctcgtttccccattctgacatttccccaaatctaccacctcctcccaggactgtgtgatccctattgataaccagtaattgttttcatgtaatcagaaaatctgatctctaatctcaagcactgttttaacttagctgcctcctgtgcttg

SEQ ID NO: 602652 - DNA, 642 bp, Homo sapiens
cctaaaataaaccagaaaaatcagagggccttagggtgggagggagcaggaggagtaagagttcaggtttatggtctatttctgtttggttagctctttggctttttgaataaaaaacttcccagggattttaaggtttaaagtcttcattatctctaattttaaagggtcatttatgctgataattcttaaatctcaactggaataagaaattcactcgttatctcaatataaatgtcatcttggtaaagtgcattacataaaatcaaagtgycttaactctgacacaccagatcagctgagttaagacaatggcaaccagtgaagcggcctattttgagtgtagttttccttcatatttttttatctatgtctcctttcgaaaaatataaaagtctcacagacacagttatttgaaataccactaacgcaatgaaaaacaaatcaaacactgggaatgtttgcttttattttttcccaaactacacattctcgtttccccattctgacatttccccaaatctaccacctcctcccaggactgtgtgatccctattgataaccagtaattgttttcatgtaatcagaaaatctgatctctaatctcaagcactgttttaacttagctgcctcctgtgcttg

SEQ ID NO: 602653 - DNA, 561 bp, Homo sapiens
atgttcagtgaacaagagagataaccttaaactctgaccaccggtgagccaggcagaacagagccatatttctcttctttcaaaagcaaatgggagaaatatcactgaattcgttttctcagcaaggaacatccctgagaaagacaatgcgcccctgagggtgggcctctaaaatggcccccttgggtgtggccatcttctatggtcgagactgtagggatgaaatgagccccagtctcccatagggctcccaggcttattaggacaaggaaattcccacctaataaattttggtcagatcggttgctctcaaaccctgcctcctgataagatgttatcaatgataatggtgcccgaaacttcattagcaattttaatttcrccccagtcctgtggtcctgtgatctcgccctgcctccatttgccttgtgatattctattaccttgtgaagtacatgatctctgtgacccacaccctattcgtacactccctccccttttgaaaatccctaataaaaacttgctggttttacggctcagggggcatcatggaacctacca

SEQ ID NO: 602654 - DNA, 557 bp, Homo sapiens
ttaatatgttatttaagaagcaggtgtacaataacttgaagaaacgtaagttcaaagcttacatgaaataattacaaaatgtaaataatcacaaagccttaaagcaagcctcaaaaaatttcaaagattcagtattataaatacaatgttttctgttcatagtagaattttgattggatttaaatataaaagaaggtataaaaaagcagaaaatatatttccatataactcatgagtcaagttatcaaaatggacatttgaacatacttagaattgaatgataataaaactatcaaataacaacttcatgggatataataaaatttrtaatgtcaactattataaaaatttttgaaaattcaagatagacatccaatttaagaaataaaggaagcatacagtcaagtaaattatgaataataaaacaaattattaagattaaaaggagattctcaaaatgaaatttgattcagtaaaaagaccattgtcttcagtaaaaagacctatgttttcaagttgaattgaaagccaaaacatattttaactatattttaaac

SEQ ID NO: 602655 - DNA, 557 bp, Homo sapiens
ttaatatgttatttaagaagcaggtgtacaataacttgaagaaacgtaagttcaaagcttacatgaaataattacaaaatgtaaataatcacaaagccttaaagcaagcctcaaaaaatttcaaagattcagtattataaatacaatgttttctgttcatagtagaattttgattggatttaaatataaaagaaggtataaaaaagcagaaaatatatttccatataactcatgagtcaagttatcaaaatggacatttgaacatacttagaattgaatgataataaaactatcaaataacaacttcatgggatataataaaatttataatgtcaactattataaaaatttttgaaaattcaagatagacatccaatttaagaaataaaggaagcatrcagtcaagtaaattatgaataataaaacaaattattaagattaaaaggagattctcaaaatgaaatttgattcagtaaaaagaccattgtcttcagtaaaaagacctatgttttcaagttgaattgaaagccaaaacatattttaactatattttaaac

SEQ ID NO: 602656 - DNA, 559 bp, Homo sapiens
tccacaaccatgccaatacctttttttttttttttgccttttttataaaacccattccgactggtgtaaaatggtatgtcgttgtggtttaaatttgcatttctctgatgatcagtgatgttgagcatttttttttcatttttcttggccacttgtatttcttctttttttttttttgagaaaaatctgattatgtcctttgcccaatttttaatggggttgctcatttttttccttttagtttgagttccttctagattctgaatatccatcaattgtcagaggcataatttgcaaatgttttctcctatcctataggttatctgcttattcttttggttatttcttttgctgtgcaraagctttttactttaattaagtctcatttatctattttttgttttgttgcatttgcttttttgggtctttgtcattaattctttgcctaggtcaatgtccagaagtattttccctaggttttctcctatgatgttgatagtgtcagctcttatgtttaggcctttaatccatcttcagttaatttttgtatgtggtgaca

SEQ ID NO: 602657 - DNA, 576 bp, Homo sapiens
ttgtagggtttctaatgagaagtctgttatgagtctgattggtttgcctttataggtaatttgacccttttctctagctgcatttaaaatgtttttaaatcttgaccttggatagtatgatgactatatgctttggtgattttcattttatatagtatctcataggcgttctctggatttttcttatctgaatgttcacctgtttaagaagattagaaaaaatktattgaattatttcctcaaatgttttccaggttccttactttttattctctctcaggagtcccaataagttgtaagtttggttgctttgcatatcccatattccttgaaggctttgttcattttttgaaattatgtttctttatttttgtgagactgggttagttcaaaagacttgtcttcaagctctgagtttcttctgcttcgtctagtctattagtaaagctttccattgtatttggaaatttcttgagtgaagttttcatttccagaagttctgattgatttcttaaaatattcatctcttccttcatttcctggattgctttcttaatttgattttgttgattttca

SEQ ID NO: 602658 - DNA, 587 bp, Homo sapiens
gtgactcaagccaatgtgttcttaatctttgttaactgtgaggggctctctgttgttaggtgacgggatggacagtggagtgctcagtgccctcagcttccttttcattgggggtgggtgaggcgcagcttggcagagttacacccactggcttgctcacagacatccagtgatgagcacaggcaccagccccaacagcggagggagctccttgtgaggtaagctgaggtctctacgaagggaaagagggctacactggctccacatcctagaagggcaggaacatgatctgtttccctaccacatccctgtcccagggcttgtcactcttagttcagatgcacactgcagtctttctacagaccacagtgttactgagagccacagaaaacacctgttttgtgattctccgtggaagtggtattggggtggaacttcttcactcagcctcatasaaacagctttatggcttgcctgttctctgacatggtaacactgctgtgtactgtggtgggtggggggagggctccaactatcagcccatgtgggtaggtgttagttgtggttgcatcagctggttgtgttgg

SEQ ID NO: 602659 - DNA, 580 bp, Homo sapiens
gttggcctaatagtttctctcatttaactttccagacttttcttaattgctcatcaccaaaacctttattgcttttaagaattcctttggggttaaatatcccaactttctgtttaaaacaaaaaagtctgctctcttatctttggaattatctgttttaatggcttgactctttccattaaaaaaaaataagcaaatgagctactgatctgaagctaaggtcaagaacagagtcccacttctcttagagtgacacatgtggcacataaacgggggctgggcaaagtggtggtctctggtattcctgacttgcctcttccagagtaaattctccaactgataaatgaattaaagtgatgtcaatcaaataccaattttactcctccaagctagagtagagcctttgctatatgttttagtatgagagaggaaaggtgttttagagcttttggctttgcttgcctggaatttaacctgtggkacacagagctgaggtggatgagaaatgttagtgacctgcccctccaagtgttaattattagcccattactagatgttggggataaagggcacaacattt

SEQ ID NO: 602660 - DNA, 604 bp, Homo sapiens
tatattgcattgttttatctgcagaataattttaatacacatatgaataaaactacacattcaataatttcataaatgtagttttaatagttcttaaaatggctatatttctcaattartcttttcctaaaggttttcagtcctgctataatttttctcttttttcagtcctgtttcaatttgtattccattttttcttccaaatatggcaaaaaataagacaaataagtaataaaactacagctaattttttaataaaatatcaccactcctgtgattaaaatacactgtatatttatatattttaagtaccaattaacactattgcctttccatttcaactttgccaacaatattgatgattttagaaatggctcaaggaaactttatgtgaaaaagagttgctctatgtggttgactctgaataaatttttcccactcccttttgaaagcttcactaacaagatataaattctccattttcgatatcttactggctagtcttgtgtttttgttactgaatgtactatattttatacgtgatataacagattcagtactagtgtttaattttctaatattgagtgtttttcctttctgcttt

SEQ ID NO: 602661 - DNA, 537 bp, Homo sapiens
aatttttactaacagatttgatatgatggtaaagaaagatattaaaagaaaggctaagttgaaatatgtacattagcagatgtttgtttattcagttgccagtaatttctaaaattaaataactttatttttaaataattccaagtgatgcatattatttcttttaaataattagaaataattgtttttgattgacaaattatgattatatacatctataggatacaatgtgatgttttgctatatgtatacaatgtggaatgaataaatcaagctaacrcatatatcgcctcgcttacctttgatttttttatgatgagacatttgaaatttactctcagttattttgaaatatatagtacactattattgactacagtactctgctgtgaaatgtatctcaaaatctgtttcacctgtctgaaatattatgcccttttatcaacaactctccttttcctctctctctaatcccccagcctctggtaaacatcattctactttttacttctatgagtttaactttattagattcca

SEQ ID NO: 602662 - DNA, 537 bp, Homo sapiens
aatttttactaacagatttgatatgatggtaaagaaagatattaaaagaaaggctaagttgaaatatgtacattagcagatgtttgtttattcagttgccagtaatttctaaaattaaataactttatttttaaataattccaagtgatgcatattatttcttttaaataattagaaataattgtttttgattgacaaattatgattatatacatctataggatacaatgtgatgttttgctatatgtatacaatgtggaatgaataaatcaagctaacacatatatcgcctcgcttacctttgawttttttatgatgagacatttgaaatttactctcagttattttgaaatatatagtacactattattgactacagtactctgctgtgaaatgtatctcaaaatctgtttcacctgtctgaaatattatgcccttttatcaacaactctccttttcctctctctctaatcccccagcctctggtaaacatcattctactttttacttctatgagtttaactttattagattcca

SEQ ID NO: 602663 - DNA, 537 bp, Homo sapiens
aatttttactaacagatttgatatgatggtaaagaaagatattaaaagaaaggctaagttgaaatatgtacattagcagatgtttgtttattcagttgccagtaatttctaaaattaaataactttatttttaaataattccaagtgatgcatattatttcttttaaataattagaaataattgtttttgattgacaaattatgattatatacatctataggatacaatgtgatgttttgctatatgtatacaatgtggaatgaataaatcaagctaacacatatatcgcctcgcttacctttgatttttttatgatgagacatttgaaatttactctcagttattttgaaatatatagtacactattattgactacagtactctgctgtgaaatgtatctcaaaatctgtttcacctgtctgaaatattatgccyttttatcaacaactctccttttcctctctctctaatcccccagcctctggtaaacatcattctactttttacttctatgagtttaactttattagattcca

SEQ ID NO: 602664 - DNA, 561 bp, Homo sapiens
atgtatgtccaaaagtgagataactggattatagggtacttcagttttcacttttttgacgagtcttcataccattttccataatgactgtatccaygtatattctgaccaacaatatataagagttttcctcatatcctctccaatatgtgttatctttcatctttttgatgacagccattctaacaggtatgaagttatatcttgtggttttaattttcatttccctaatgattactgatgcagagtacttttttatgtaactatttgccaattttatgtcttcttttgagaaatgtctattcagtttttttgcccacttttcaattatttttttttcttgctattgaagtgtttgagttcctgtgataggctgttcttgtgttgctataaagaaataactgaatctgggtaatttataaagaaaagaggtttaattgctcatggttctgcaggctgtacaggaaatatagtagtataaatttaatataatataaatatatatttatatgatttaatataatataatatctagtttcagcatatacatctttaggaaca

SEQ ID NO: 602665 - DNA, 556 bp, Homo sapiens
agcttgctatcaggttccaaaggaaatgaatacttactcatatccagagtgattatggaagactttgcagaggacattgaatttgtttgatagcgaagaatagctactcttttaagaaatagttggagggggaaaaagaaggctcttcctgattatattttcaaagaaaggtccatttacctgttagtctcttctagaacttattttacaacgtagtttgaaaagcatacacacaggcgcgcacgcacacacacacacacacacacctgtaatatgggatygttttaagagttaaatgagaaaagaatataaaacttttagtgctgcattttggcacatgggtagaaatatataaatctgagttcatgctattattttttgttattatatcagaagaaaacatctttctgtgttttccaatcaatatttggaatgtttccttaatgttcagaagtttatttggttagtaatattccatgctaaaagtataaagcaggcatcgtataatggaagcagagatctagaagacaattccaaatcctctgtgaaacagctg

SEQ ID NO: 602666 - DNA, 556 bp, Homo sapiens
agcttgctatcaggttccaaaggaaatgaatacttactcatatccagagtgattatggaagactttgcagaggacattgaatttgtttgatagcgaagaatagctactcttttaagaaatagttggagggggaaaaagaaggctcttcctgattatattttcaaagaaaggtccatttacctgttagtctcttctagaacttattttacaacgtagtttgaaaagcatacacacaggcgcgcacgcacacacacacacacacacacctgtaatatgggattgttttaagagttaaatgagaaaagaatataaaacttttagtgctgcattttggcacatgggtagmaatatataaatctgagttcatgctattattttttgttattatatcagaagaaaacatctttctgtgttttccaatcaatatttggaatgtttccttaatgttcagaagtttatttggttagtaatattccatgctaaaagtataaagcaggcatcgtataatggaagcagagatctagaagacaattccaaatcctctgtgaaacagctg

SEQ ID NO: 602667 - DNA, 592 bp, Homo sapiens
cataaaaaataatttgataaaaactggtgaaacactcaggagataagttttaataaagcttcatactcagagaatgtggatcagtgtttttcaaactacaagttgaaacctttattggatttgaaatcaatctagactggcataacaagtattttttataaaaaaaattaaaataaagaatattacagtgcatcacatgcaaacytgcacatgttttgcttcataaaggtttcttttcctaatacgtacatatgcacattaagaaatgaaaaaaattgatttttttctgttgctatacatcaaatagtttgaaaggaagtaaacaaaagtaagtagaaaacatttgtaggaaatccagaaaatacaacttcctcttagtaggggtatctatgagatcaacattatcactgtaggataagaattatagttgcgtcatatatctgtttctggactgggagccagcggagcctcaaggacagaatatttaccatgagagtagcatgggggagtgtagagaacaagaaacgaacaaaaataacaaaagcaacacaagctcccactgaacattaaactataaattaaaattacaatt

SEQ ID NO: 602668 - DNA, 600 bp, Homo sapiens
taaacaacagctattccagggagaaatgaaacagaaggaaagaggtaatattttaaccataatagaaaatatcttcttgacttggagacaaagtgtgcagagggaaaaaataactaatttatcagctgttawaagacataaaactaatgcctacccttgtgtactcacacattggtgaattattgaactcttctggcaaacaaaaaattcttatatgtttccaggcagaaagaacaagttatctttcagattataatcaaattggtattggacttttcatctgtgccactggaagctagaagatggtggaatactttcggcagaacactaaacttaacagcaacacaagaaccatactcagtcaagaattaattccttgctaagaataaggaaaaatatttggggttatttaagagtttagagagtagattatcagttatttatcactatgacaatcactcgggtgcctacataaaagtcattcacaccccattcttattttcctgcctgaaacttagaggctataaaagctaagaactcaattcgtcaatttatctagtaggtaatgatgtccatattacatggttctaacaaataaga

SEQ ID NO: 602669 - DNA, 552 bp, Homo sapiens
taatattttatgatctgcaaaagatactgttaaaagaatgaacagacaagcttacaactgaaaaaatattgaaaatcaaagagtttaataaataatttctatctggaatwtacagaaaacactgaagactcaattatttaaaaaaatctaacaggccgggtgtggcagctcacacctgtaatcccagacctttgggaagccaaggcgggcttatcacatggtcaagagatggagaccttcctggccaacatggtgaaaccccgtttctactaaaaatacaaaaattagctgggcatggtggcgagtgcctgtagtcccagctactggggaggctgaggcaggagaattgcttgaacccaggaggcagaggttgcagtaagccaagatcatgccactgcactccagcctggcgacatagtaagactccatcacaaaaaaaaaaaaaaaaaaaaattcaaacaaacccccaaaatgaacaaagtattttaatggctgcttcaccaagaagatatatagatggcaaataagcaatgaaaagatgctaagcatcac

SEQ ID NO: 602670 - DNA, 611 bp, Homo sapiens
attatttaaaaaaatctaacaggccgggtgtggcagctcacacctgtaatcccagacctttgggaagccaaggcgggcttatcacatggtcaagagatggagaccttcctggccaacatggtgaaacccygtttctactaaaaatacaaaaattagctgggcatggtggcgagtgcctgtagtcccagctactggggaggctgaggcaggagaattgcttgaacccaggaggcagaggttgcagtaagccaagatcatgccactgcactccagcctggcgacatagtaagactccatcacaaaaaaaaaaaaaaaaaaaaattcaaacaaacccccaaaatgaacaaagtattttaatggctgcttcaccaagaagatatatagatggcaaataagcaatgaaaagatgctaagcatcactattcattagaaaaatgcaaattataactacaatgattacaactacatatttattaatatgtctaaaattaaaaaaacaagtgtcacaggatgtggaagaactgcttacaaaatgctacaatttgaaaactcttacattcttaaaacattaaatatgtagctaccatgtgacccagtcattctccttctaa

SEQ ID NO: 602671 - DNA, 611 bp, Homo sapiens
attatttaaaaaaatctaacaggccgggtgtggcagctcacacctgtaatcccagacctttgggaagccaaggcgggcttatcacatggtcaagagatggagaccttcctggccaacatggtgaaaccccgtttctactaaaaatacaaaaattagctgggcatggtggcgagtgcctgtagtcccagctactggggaggctgaggcaggagaattgcttgaacycaggaggcagaggttgcagtaagccaagatcatgccactgcactccagcctggcgacatagtaagactccatcacaaaaaaaaaaaaaaaaaaaaattcaaacaaacccccaaaatgaacaaagtattttaatggctgcttcaccaagaagatatatagatggcaaataagcaatgaaaagatgctaagcatcactattcattagaaaaatgcaaattataactacaatgattacaactacatatttattaatatgtctaaaattaaaaaaacaagtgtcacaggatgtggaagaactgcttacaaaatgctacaatttgaaaactcttacattcttaaaacattaaatatgtagctaccatgtgacccagtcattctccttctaa

SEQ ID NO: 602672 - DNA, 611 bp, Homo sapiens
attatttaaaaaaatctaacaggccgggtgtggcagctcacacctgtaatcccagacctttgggaagccaaggcgggcttatcacatggtcaagagatggagaccttcctggccaacatggtgaaaccccgtttctactaaaaatacaaaaattagctgggcatggtggcgagtgcctgtagtcccagctactggggaggctgaggcaggagaattgcttgaacccaggaggcagaggttgcagtaagccaagatcatgccactgcactccagcctggcgacayagtaagactccatcacaaaaaaaaaaaaaaaaaaaaattcaaacaaacccccaaaatgaacaaagtattttaatggctgcttcaccaagaagatatatagatggcaaataagcaatgaaaagatgctaagcatcactattcattagaaaaatgcaaattataactacaatgattacaactacatatttattaatatgtctaaaattaaaaaaacaagtgtcacaggatgtggaagaactgcttacaaaatgctacaatttgaaaactcttacattcttaaaacattaaatatgtagctaccatgtgacccagtcattctccttctaa

SEQ ID NO: 602673 - DNA, 645 bp, Homo sapiens
caaattaattatactgaatatacagtatgcacatttttggggggtctagcttcttttactcaccataattagagatttatccacgttgttactcatatcaagaattcatctattttttcccttctccttcttccttctttctctccttccttctctacttttctttctgctttactttctatcttgctttttctttttccctctttctccctccctccttccttctttcttttttctttttctttctttttcttttttcttcttttattttcttttttaattttttaaatgtatgtcttcctgcttttctttccatttggcttgctctctgtcttttcagttgtgttcaatagcaggtagacaaatgcatgcatatagtaactgctcccttgttacctatcttgctaagatttaaaatggaatgtttggtaataaattctaaatcattttttatgcttccattgtgttgattgccattgtgatgactatatagtttttaattggttaatacatgaatttatgttaataaattatgtgtgttgtcaccatatattacttggraaaatcctcatttgatttgctatattattattttgctttctgtttttttttttcttaaaactgacattttacagagaaataaag

SEQ ID NO: 602674 - DNA, 505 bp, Homo sapiens
gggagtggtttaagttaagatacatggacttgacagtgccctagcaatagtctgactatatttcctcataggtaaaagctaggtgtggagaaatttttaacaacccaggtgtttacctaaatggcaagggcacatatgaaggacacagtggtgctgctgaaataaggatatccaagaaatcactctggactattgtatccaaatacgtttttgaaagctatttaaataataaaaggatgaagwctgtcagaaacactaggatacttaaaaacagtttaggcatgcaagtttaagtttaggtatgttacaggaagtaaaaattattttgttttccagtaattacttaactgtattctactagagttgaaatcacgttaagtgatatggaaatattaatctaaaaaatttgacaggtgtcaaataactatagcatcttctccatatttatgtccaatgagaagttaacataagaaatgcttcattagtgtgcccttgtagtcattgt

SEQ ID NO: 602675 - DNA, 505 bp, Homo sapiens
gggagtggtttaagttaagatacatggacttgacagtgccctagcaatagtctgactatatttcctcataggtaaaagctaggtgtggagaaatttttaacaacccaggtgtttacctaaatggcaagggcacatatgaaggacacagtggtgctgctgaaataaggatatccaagaaatcactctggactattgtatccaaatacgtttttgaaagctatttaaataataaaaggatgaagtytgtcagaaacactaggatacttaaaaacagtttaggcatgcaagtttaagtttaggtatgttacaggaagtaaaaattattttgttttccagtaattacttaactgtattctactagagttgaaatcacgttaagtgatatggaaatattaatctaaaaaatttgacaggtgtcaaataactatagcatcttctccatatttatgtccaatgagaagttaacataagaaatgcttcattagtgtgcccttgtagtcattgt

SEQ ID NO: 602676 - DNA, 548 bp, Homo sapiens
gtcaatctgagtaaaattgaaagtttaaatcagaaaggatattcgaaagccttgaaacaatcttcatttctcaattatatattagatgactttagttttattaggttatgactgtgttccagattgaatagtatatttaatggaagagagactgggggctatcaagcacagataacattctgaataaggaaagtttattgcctctgccgctttatcttctttcatttctgtctctttattttcccaccacccactcaatatagagaggcaatcattgttttcattttgattttgaattaagagttccaaaactcttgattactgttagttctacttcataaggaacacttcaatgaccgtagttttcttatcattatttggacatcgtgttgtagtatatgtatatgcctttggcatcattaatgtgccccagaaaatatgccagagcctcatstcatataaatgtattaatctctaataatttcaaaggatgaagatcttaaaagttaaaagcaagaggagagcaagacagtactatgttgattcac

SEQ ID NO: 602677 - DNA, 567 bp, Homo sapiens
gtcttccatcttaaactaaacaacaacaacaaaactttcttcaatcccattcaacctacaatttctgtyctaagcattttttctggttttaataggcaaaaaaaaaaattcagatgctttgactccactttacctctcttgactgcctccttgaattgatccttaactaggattttttttccattattatataaacctacttttgttgaaactcaccaatggtcaccccattgctattctaatgtcacctcttaggcttcagctcacttgacttttggtgagatttgacacagctgatcattcccttctctctgaaataatctcaccaattggctttcatcgtattctcctagttatgttcctgtcttacaggctctattccaatctctctgctggatatctctcatctttctcaactgtaaaatttgtagtattctagggaacaacagatctatattattctttattcctgctcatttcttaagtaatattcctaatgtaatattatatttttacagcaatctttatgttcactattctcaaatagtatctgtagttctaaagttt

SEQ ID NO: 602678 - DNA, 567 bp, Homo sapiens
gtcttccatcttaaactaaacaacaacaacaaaactttcttcaatcccattcaacctacaatttctgttctaagcattttttctggttttaataggcaaaaaaaaaaattcagatgctttgactccactttacctctcttgactgcctccttgaattgatccttaactaggattttttttccattattatataaacctacttttgttgaaactcaccaatggtcaccccattgctattctaatgtcacctcttaggcttcagctcacttgacttttggtgagatttgacacagctgatcattcccttctctctgaaataatctcaccaattggctttcatcgtattctcctagttatgttcctgtcttacaggctctattccaatctctctgctggatatctctcatctttctcaactgtaaaatytgtagtattctagggaacaacagatctatattattctttattcctgctcatttcttaagtaatattcctaatgtaatattatatttttacagcaatctttatgttcactattctcaaatagtatctgtagttctaaagttt

SEQ ID NO: 602679 - DNA, 576 bp, Homo sapiens
gtgtatgtgggcattaatggtggattagttggagtaactacaattatgcagctttctcactagagataatactttttcatgytgtttatatcatattccacaaatctcaaagtttatctaaattgaatggtaaataaaatgcatttttataatatttgatcattgttcttgggcagaacagccaaaaataatcttttcatttggagaccttgctagaaaggttttcaaatcacttaacttttaaaagtaatatcaaaagattattgtctcaattactagattttttaaactgtcaactttatgagaataattgagatttactttgataaatatcctttaatgataaatagattgccctccactatgtattaaaaagcaacttgtttcctttggactaaatttttatggtaaaatgcaaataattttatttcttttaatttatgatatcattaccatatcttgttacataaaatgacaatgagaaaaaacactcctgctgctgcaatctgtgctgaaaagcttcctcaaaatatattgtccctgttcctatctgtagttttagctataggaagtagg

SEQ ID NO: 602680 - DNA, 540 bp, Homo sapiens
ggacctggtgggaggttactggatcaygggggcagacccctcatgaatgatttagcaccatccgcttggtaataagtgagttctcgctcagttcagagttctggttatttaaaggtctggcacatccccacctcactctcctgctccctctctcaccatgtgatatgcctactccctcttcaccttccaccatgattatgaacttcctgaggcccttaccagttaatttgctggtgtgcataaatgttttgggaagtccacatgaacagtgactagactaagccaaaattataattgacctcatattatgattcttcccccactgtaatgcaaaacttgctatggtttgcattacttgaaattcccccatctcctgcccacccaggttcccataaaataatgctaaatgttgaaatatgaactggtctacacagactccaaaaactatgcaagaaaacatggaaactaattacaatcgtacagaatccatacataaaaagtgacattgaaatggggaaataaacattcaagacaagcaca

SEQ ID NO: 602681 - DNA, 363 bp, Homo sapiens
gaacagtgactagactaagccaaaattataattgacctcatattatgattcttcccccactgtaatgcaaaacttgctatggtttgcattacttgaaattcccccatctcctgcccacccaggttcccataaaataatgctaaatgttgaaatatgaactggtctacacagactccaaaaactatgcaagaaaacatggaaactaattacaatcrtacagaatccatacataaaaagtgacattgaaatggggaaataaacattcaagacaagcacagtaggctccagaatctacaccacaccttagaatcaggtggagatttcacaaggaaaggaaaagactgtgggttgccagggatgaag

SEQ ID NO: 602682 - DNA, 311 bp, Homo sapiens
ccacatattctttataatatgggagattcagacagattgtttctatagcaagtcttgtcaaacactgaaaaawattataatctaacagaaattttttcagataaaagagaaggaagcttcacatgcctttattttttatttatttattcttttaaatgaggctggtgtaacactgttacaaatatcaaaccagtaagatggaataaatttaaaaaaaacctgtagggcaatcttatttaaaaatatatgtaaaaatggaatggggctcaatctgtattcaggaagccctgataagggacaactgtcacact

SEQ ID NO: 602683 - DNA, 311 bp, Homo sapiens
ccacatattctttataatatgggagattcagacagattgtttctatagcaagtcttgtcaaacactgaaaaatattataatctaacagaaattttttcagataaaagagaaggaagcttcacatgcctttattttttatttatttattcttttaaatgaggctggtgtaacactgttacaaayatcaaaccagtaagatggaataaatttaaaaaaaacctgtagggcaatcttatttaaaaatatatgtaaaaatggaatggggctcaatctgtattcaggaagccctgataagggacaactgtcacact

SEQ ID NO: 602684 - DNA, 655 bp, Homo sapiens
aaattacatgagaggttaacacctaattataaaacagggtttgtgtttgatgattttgtcyaactgcagattagtgtaagtgttctgggcctgtttaacataggctaggctaagctatgatatttagtatgtcaggtgtattaaacacattttcaacatgatatttccaacttacaatatgtttattgggatgtaagcctattgtaaatcaagcagaatctgtaatttaattgatgtataacaaataaagttatagagaaatggtcctaaggattattacatccacccactaatttttaaatcacttaaggcacaagattaagtaagtttccataatcactccaaaatttggtggcagagctggaactggtattatatcctttaaatatttattatttactatgtgtgtagcactttgttatattatttctcttatcaatgctaaatgatagagtgatcattaacatttccatttggcagatcaggagaatgtgacattggcttaagcaatctgagcagtttggaaatatagtgtgacatgtgtaatttatagatcatgtaaaggatatctccttttagttatttgcttcgtgttttatcagtgacctactgtggaaggccaggtctcactaagacaggcctctgtaacaattgt

SEQ ID NO: 602685 - DNA, 655 bp, Homo sapiens
aaattacatgagaggttaacacctaattataaaacagggtttgtgtttgatgattttgtctaactgcagattagtgtaagtgttctgggcctgtttaacataggctaggctaagctatgatatttagtatgtcaggtgtattaaacacattttcaacatgatatttccaacttacaatatgtttattgggatgtaagcctattgtaaatcaagcagaatctgtaatttaattgaygtataacaaataaagttatagagaaatggtcctaaggattattacatccacccactaatttttaaatcacttaaggcacaagattaagtaagtttccataatcactccaaaatttggtggcagagctggaactggtattatatcctttaaatatttattatttactatgtgtgtagcactttgttatattatttctcttatcaatgctaaatgatagagtgatcattaacatttccatttggcagatcaggagaatgtgacattggcttaagcaatctgagcagtttggaaatatagtgtgacatgtgtaatttatagatcatgtaaaggatatctccttttagttatttgcttcgtgttttatcagtgacctactgtggaaggccaggtctcactaagacaggcctctgtaacaattgt

SEQ ID NO: 602686 - DNA, 565 bp, Homo sapiens
catgagaggttaacacctaattataaaacagggtttgtgtttgatgattttgtctaactgcagattagtgtaagtgttctgggcctgtttaacataggctaggctaagctatgatatttagtatgtcaggtgtattaaacacattttcaacatgatatttccaacttacaatatgtttattgggatgtaagcctattgtaaatcaagcagaatctgtaatttaattgatgtataacaaataaagttatagagaaatggtcctaaggattattacatccacccactaatttttaaatcacttaaggcacaagattaagtaagtttccataatyactccaaaatttggtggcagagctggaactggtattatatcctttaaatatttattatttactatgtgtgtagcactttgttatattatttctcttatcaatgctaaatgatagagtgatcattaacatttccatttggcagatcaggagaatgtgacattggcttaagcaatctgagcagtttggaaatatagtgtgacatgtgtaatttatagatcatgtaaaggatatct

SEQ ID NO: 602687 - DNA, 543 bp, Homo sapiens
gttaaatattaaaagctgagagagacagtgaccttttacaaacgctgggatataacaaaagccccccaagagttttgyccaggcctttgctgggccttggagccttcctcacaagataatgcaggaattcttaacaggacccatttgggattaaacaagtttattgggggtctgaagggactccacaaacctccatgattttgcaggagacaagataagggtattcaccccagcatctggacccattaagattaaataaatttactgaggctccagaggaaggtcttcaggactcatatcttagttatagattagaataatttaatcacttatatcttcagatgaatgcacacttacatgtagacatatagattaaaaggtacataagcgctggtaaacattgtaattttgagttgctctggtgataatttccatgccttctctttgtacctggctgcagaaataaactcccttctttttcagtttatctgcatctcgttattcggccacgagaaaaagcagcccaaccctcgatttggttgg

SEQ ID NO: 602688 - DNA, 527 bp, Homo sapiens
gttaaatattaaaagctgagagagacagtgaccttttacaaacgctgggatataacaaaagccccccaagagttttgcccaggcctttgctgggccttrgagccttcctcacaagataatgcaggaattcttaacaggacccatttgggattaaacaagtttattgggggtctgaagggactccacaaacctccatgattttgcaggagacaagataagggtattcaccccagcatctggacccattaagattaaataaatttactgaggctccagaggaaggtcttcaggactcatatcttagttatagattagaataatttaatcacttatatcttcagatgaatgcacacttacatgtagacatatagattaaaaggtacataagcgctggtaaacattgtaattttgagttgctctggtgataatttccatgccttctctttgtacctggctgcagaaataaactcccttctttttcagtttatctgcatctcgttattcggccacgagaaaaagcagcccaa

SEQ ID NO: 602689 - DNA, 543 bp, Homo sapiens
gttaaatattaaaagctgagagagacagtgaccttttacaaacgctgggatataacaaaagccccccaagagttttgcccaggcctttgctgggccttggagccttcctcacaagataatgcaggaattcttaacaggacccatttgggattaaacaagtttattgggggtctgaagggactccmcaaacctccatgattttgcaggagacaagataagggtattcaccccagcatctggacccattaagattaaataaatttactgaggctccagaggaaggtcttcaggactcatatcttagttatagattagaataatttaatcacttatatcttcagatgaatgcacacttacatgtagacatatagattaaaaggtacataagcgctggtaaacattgtaattttgagttgctctggtgataatttccatgccttctctttgtacctggctgcagaaataaactcccttctttttcagtttatctgcatctcgttattcggccacgagaaaaagcagcccaaccctcgatttggttgg

SEQ ID NO: 602690 - DNA, 543 bp, Homo sapiens
gttaaatattaaaagctgagagagacagtgaccttttacaaacgctgggatataacaaaagccccccaagagttttgcccaggcctttgctgggccttggagccttcctcacaagataatgcaggaattcttaacaggacccatttgggattaaacaagtttattgggggtctgaagggactccacaaacctccatgattttgcaggagacaagataagggtattcaccccagcatctggacccattaagattaaataaatttactgaggctccagaggaaggtcttcaggactcatatcttagttatagattagaataatttaatcacttatatcttcagatgaatgcacacttacatgtagacatatagattaaaaggtacataagcgctggtaaacattgtaattttgagttgctctggtgataatttccatgccttctcyttgtacctggctgcagaaataaactcccttctttttcagtttatctgcatctcgttattcggccacgagaaaaagcagcccaaccctcgatttggttgg

SEQ ID NO: 602691 - DNA, 535 bp, Homo sapiens
gatattgtacatatttgtcaattttggattagctttttccaaactaaatataagcttcttgagtgttagacatttatctgtcttgtttgctaawatgaacttcatcacctagcagctggaatactgaactgctcagtaaatattggttaaagataaaatgaatggatgctgaatattatgtctaccatgtagtcagtgtttttattacaccatagttctctttaatatctagatcacctttgcaaaatattattagcacaatgttatagaaaataaaatcaagaagctaaggaccttgctcaaggcaacactaaaaaataataatagtgataacaattagcaagtgtaatcttcacaccatggactttctctttccaatgcccaaattcatttctttgtatcatgctgagatacaaattaaatacaaagaatttaacaattttctgataattttacaatctaatttaatgttggattttggtctttgtcattgttacaaaagaacaaatcctatggctaaagatcttgaaaccca

SEQ ID NO: 602692 - DNA, 535 bp, Homo sapiens
gatattgtacatatttgtcaattttggattagctttttccaaactaaatataagcttcttgagtgttagacatttatctgtcttgtttgctaaaatgaacttcatcacctagcagctggaatactgaactgctcagtaaatattggttaaagataaaatgaatggatgctgaatattatgtctaccatgtagtcagtgtttttattacaccatagttctctttaatatctagatcacctttgcaaaatattattagcacaatgttatagaaaatmaaatcaagaagctaaggaccttgctcaaggcaacactaaaaaataataatagtgataacaattagcaagtgtaatcttcacaccatggactttctctttccaatgcccaaattcatttctttgtatcatgctgagatacaaattaaatacaaagaatttaacaattttctgataattttacaatctaatttaatgttggattttggtctttgtcattgttacaaaagaacaaatcctatggctaaagatcttgaaaccca

SEQ ID NO: 602693 - DNA, 535 bp, Homo sapiens
gatattgtacatatttgtcaattttggattagctttttccaaactaaatataagcttcttgagtgttagacatttatctgtcttgtttgctaaaatgaacttcatcacctagcagctggaatactgaactgctcagtaaatattggttaaagataaaatgaatggatgctgaatattatgtctaccatgtagtcagtgtttttattacaccatagttctctttaatatctagatcacctttgcaaaatattattagcacaatgttatagaaaataaaatcaagaagctaaggaccttgctcaaggcaacactaaaaaataataatagtrataacaattagcaagtgtaatcttcacaccatggactttctctttccaatgcccaaattcatttctttgtatcatgctgagatacaaattaaatacaaagaatttaacaattttctgataattttacaatctaatttaatgttggattttggtctttgtcattgttacaaaagaacaaatcctatggctaaagatcttgaaaccca

SEQ ID NO: 602694 - DNA, 557 bp, Homo sapiens
ttaatatgttatttaagaagcaggtgtacaataacttgaagaaacgtaagttcaaagcttacatgaaataattacaaaatgtaaataatcacaaagccttaaagcaagcctcaaaaaatttcaaagattcagtattataaatacaatgttttctgttcatagtagaattttgattggatttaaatataaaagaaggtataaaaaagcagaaaatrtatttccatataactcatgagtcaagttatcaaaatggacatttgaacatacttagaattgaatgataataaaactatcaaataacaacttcatgggatataataaaatttataatgtcaactattataaaaatttttgaaaattcaagatagacatccaatttaagaaataaaggaagcatacagtcaagtaaattatgaataataaaacaaattattaagattaaaaggagattctcaaaatgaaatttgattcagtaaaaagaccattgtcttcagtaaaaagacctatgttttcaagttgaattgaaagccaaaacatattttaactatattttaaac

SEQ ID NO: 602695 - DNA, 455 bp, Homo sapiens
tgattatcataaattacacacaaatatagttaacaactgttttaatagcaytagactgaatgaaagcaatacacttttcagaggtcattttatactacatgttttgataagacaaaaggaactgtgcataacttatacagctgcctaaacaaagtatttacatcccacatactcttgtattttttaacatcttatgtgcaagtatgtatttatcaaatattaggaagactgagaacccatattatttgtgcatttgtgcttccatgtgtgttttttttcttttacacatgatattctggtatattgaatgatatcacattttactatattgtatttgaatgatgagttaaccactcaaatttttatttttattttttggagtagtgtctagcaggaaatatgttcacactatagctgtatggggtagatattacccattaaaggagaagataaga

SEQ ID NO: 602696 - DNA, 455 bp, Homo sapiens
tgattatcataaattacacacaaatatagttaacaactgttttaatagcactagactgaatgaaagcaatacacttttcagaggtcattttatactacatgttttgataagacaaaaggaactgtgcataacttatacagctgcctaaacwaagtatttacatcccacatactcttgtattttttaacatcttatgtgcaagtatgtatttatcaaatattaggaagactgagaacccatattatttgtgcatttgtgcttccatgtgtgttttttttcttttacacatgatattctggtatattgaatgatatcacattttactatattgtatttgaatgatgagttaaccactcaaatttttatttttattttttggagtagtgtctagcaggaaatatgttcacactatagctgtatggggtagatattacccattaaaggagaagataaga

SEQ ID NO: 602697 - DNA, 455 bp, Homo sapiens
tgattatcataaattacacacaaatatagttaacaactgttttaatagcactagactgaatgaaagcaatacacttttcagaggtcattttatactacatgttttgataagacaaaaggaactgtgcataacttatacagctgcctaaacaaagtatttacatcccacatactcttgtattttttaacatcttatgtgcaagtatgtatttatcaaatattaggaagactgagaacccatattatttgtgcatttgtgcttccatgtgtgttttttttcttttacacatgatattctggtatattgaatgataycacattttactatattgtatttgaatgatgagttaaccactcaaatttttatttttattttttggagtagtgtctagcaggaaatatgttcacactatagctgtatggggtagatattacccattaaaggagaagataaga

SEQ ID NO: 602698 - DNA, 597 bp, Homo sapiens
tgatctgcctgcctcggcctaccaaagtgctgggattacagatgtgagccactgtgcccggccaacaacaaaatcttaacaagcattcccattacatgaacagaacgtaagaatcaaagagcagcaattagtaaacaaggggcaggctgcctagatatcctctatttgccccaccaagtgcactgtctacatttctcccttcttcccaacctcaycttgtgcccgaacagattctcactgcctatcactacctgagcaggaggctgatgctataggattgcatccactggcttccttaactgctgacttccatttgagtgtgtccagtaggaggcattacagtatatcgggtagtgagaggagactgatgtcagggtttgtactcctcccaccatctttctgctagatctccacaggttgactgaatagagattctctggtgttcatctgtctcctagatcatcagttgcttactccttcatcaccaaccacagccagcctactttgtggaggcccctggggttttaccagataaatgtgactagtcacaagaccagactctgacttgtccagtacatctggtatcagaaaaacacc

SEQ ID NO: 602699 - DNA, 590 bp, Homo sapiens
ataaaaatatatattatatgttttctattatgtattttatgtaattgtatactatacagttgtgtaattatatataatatatatcttacatatataaatatatatagagagaaattaggtatatatcctactttcactcatttttttcmaattttatttttgttattgtttaatctttgtaactttgaggagtacataactcttaaaaaaatttcagcacccacactatctcttacttttctctactttgtaaggtgacccttcccttcaactcttctaacttcccttcctaaattctgtcaactgaacttttattttctgaattgtgaatgctgatgataggtcatttttctgaaaccataattttaaattttatgtgtattgtctgtagttcatttatgaaatttaatgtcagtaagtattgcttatatcttggtggacatgcaaatactatactttgcagagccaggaatattagttgttacatttttttcttatatcacttatctgggattttaattgctttatatttgctagtagtattggaaatatacacataaacacacatatgtgtgtgaatatatgtatat

SEQ ID NO: 602700 - DNA, 587 bp, Homo sapiens
ctgggattttaattgctttatatttgctagtagtattggaaatatacacataaacacacatatgtgtgtgaatatatgtatatattatgctttgctacagtttcccttataaataaatattttcctcacaacattcttccaggcttttgcatcctcctacatcaaattaaatgaggtaacatctaggcctgttgcacagtggcatcctagaacttgactccttgccctcttcagttagttatcttgtttactggaattgaccaaatttagcgttcactcctgttatagactctaagaaatgtagaaatacatgagaatttcatcaagctaataaccactctgaaaacaattaggctgttttgtaaaaatttaaatgtacacctaccatataattcagcattctcctaggtgtttcctcaataaatgagatatgttcatacaaggacttgcacatgaatgtttatagcagcttttgcataatagccycaaactgaaaacaactcaaatgtcaaacagttaaacagacatacagtggcatagccataaaagagaatactactacataataaaaatgaagtgaactcttt

SEQ ID NO: 602701 - DNA, 429 bp, Homo sapiens
agtctcaaagtgtttactttctcaacaacaacaacatttatctgtgttctagttcagcaacccatggtaaaataccaattgttttttctagcacagaaaatagttatcaatgagctaggaaatctctcagttttctatctctaattttagctgcatccattctcccttcttcttcagtttttttttttgttgttgttgttatttcaatatgtttttggggaasaggtggtggttagttacatggaaaagttctttactgttgatttctgagattttggtgcacccatcacctgaggagtatacactacctaatgtgtagtcttttatcccttgccccactcccaccctttccccagagtcctcagagtccattggatcatccttagacttttgcgtcctcatagcttagctcccacttataagtgagaa

SEQ ID NO: 602702 - DNA, 583 bp, Homo sapiens
gtaaatggatattttgttgtttttgttttttaatattttattttatttttcaagtttcagagtacatgtgcaggatgtgcaggtttgttacataggtaaacgtgtgccatggtggtttgctgtacctatcaactatcatctcgrtgttaagcccagcatacattagctcttttccctaatgtactttcaaaaataaatctcccctccaggcacagtggtttacacctgtaatcccagcactttgggaggccaaggcaagaggatcacctgagttcggggagtttaagaccagcctggccaacatggcaaagctccgtctctcctaaaaatataaaaattggccaggtgcggtggtgcaggactgtagtcccagctactctggggactgaggcaggagattcgcttgaacctgggaggtggaggttgcagtgagccaagatcgacctattgcactccagcctgggtgacagggcgagactccatctcaaaaataaataaataatatctgtataaaaatttctgtacattttttgtgaagacatgttttcatttctcttgagtaagagatcttggttggatcata

SEQ ID NO: 602703 - DNA, 469 bp, Homo sapiens
gcaggaggtatcactaaggaaactgcgtatgtagaaagggcaataagggaatactatgaacaacaacacatagtacaacagaacaatagtaaatttgtcaatttagaagaaacagatcatttccaaaacacagctatcagaaaacccaatatgaaataggtaatttaaatatccctacaactattatggaaatttaacttataaatttaaaaactccctcaaaatgttctccagaccagatggcttaaytggagaattctaacaaaggtttaaagaattaatgccaattccacaaaatctctccagaaaataggagaggaagggatactacaattcattttttgaagctagtattaccctaatagcaaaaccagacaaagacaatacacacaaaagaccacaacccccgggctggcgcggttgctcacgcctgtaatcccagcactttgggaggccgaggcaggcagat

SEQ ID NO: 602704 - DNA, 334 bp, Homo sapiens
ggggcactaagttaagaatttgccatttaaaaagtaaatttggtttcakatggctctgtttttgtcttctacctatccacactcattagtagatttttataaacctggagggaatttgtactcatgctgaacaataaggttaaaaggttaagcatatataaagattctaggaaatagtaagattttcttcatttgcccagagaaacaagtaagtatggtactcatggcttctgtttagtaaagtgtgtttcccaatgtaatgatgtctaaccagaacaattcaaggaaccatcagaagaatagggaaacgacattgaatttaagttctaaaatt

SEQ ID NO: 602705 - DNA, 334 bp, Homo sapiens
ggggcactaagttaagaatttgccatttaaaaagtaaatttggtttcagatggctctgtttttgtcttctacctatccacactcattagtagatttttataaacctggagggaatttgtactcatgctgaacaataaggttaaaaggttaagcatatataaagattctaggaaatagtaagattttcttcatttgcccagagaaacaagtaagtatggtactcatggcttctgtttagtaaagtgtgtttcccaatgtaatgatgtctaaccagaacaattcaaggaaccatcagaagaatagggaaackacattgaatttaagttctaaaatt

SEQ ID NO: 602706 - DNA, 600 bp, Homo sapiens
tctagttgctccacatgtttccaacactcgtttttttccccccatctttttcatttttccaattctggtgggtacaaagtagtgtaccgtaatgattttactttatatttccccaattaatgaagttgagtactttttcatatgtatattggctgtttggttattttcttctgtgaagttccggttcacttctttggcccacttttctgttagcctgtcatttcctttgatttgtgggagttctttatatattcaaaatatgagttcttcattgatgatgrgtattgcaactatttcttcttctatgaggtttgtctttttactctcttaatagtgcttttaatgaacagaagtttaagtctttaaagtagtctagttcatcatttatgtttagtgctttttaattcttgtttaagaaatatttatctacttcaagaatgttttatcttcttagtttttcttcaaaagcatttttgctttacctttagatttaaaatttcagtctgtatttacatattatggagttttgcagtgcttttggactcagtttgtatctggagacagaaaaaatgaggtggacttaggccgatgaccgtaatt

SEQ ID NO: 602707 - DNA, 594 bp, Homo sapiens
ggccacatgatatcagtatgctgctaaatttggtcattgtgttaagttagtatttaccagatcttcccattggaaagataccttgttccctttgtaaaaaaaaaaaaaaaaattatctactttgatacttttcaaatatctttttgaccaacaatgtttcacccagtatattttagcatgcatcagtggcccttgtctgagtcaattattacactggtggtaattttaccattccttctacatttattagctgtcatgttttgatgaagaactttccctattcccaacacatgcatctttttaaaaatttcatttttaatttaatgtgttatcaattactgttactatttttaggcttatgttgtctcaaatttaatgtattatcaattactgttattatttttaggcttatattgtcccacatttggccattggatgacccctcagaatggttcctttgtttgcaccagtctttgagcactgactgttctgcactggtggagcatgatacttagaaaccaaaaatgtgggcactaagtgtgctcataaktactatagtgtcattgcttcttacaatggccttttcacagtgga

SEQ ID NO: 602708 - DNA, 586 bp, Homo sapiens
aagcaggaccgtatagaaatagtacgtattaaaatagtcagtgtattaactattctgtgcctggtctctacaatccctttattatgcatctagcatttggaaacacttctatcaggactccagatactcctcggccttaattagctcaggtagacagaatgtgggcaagtagttagggcgaggagaatgacaatgaaaataagtaaaactgttccttgagtttgctttgagagatacccagaactgacatttcagacactcgcatttttaaaaattaatgttttctcacctttgtgttctaaaagtcycttctatttattgtatctcagaatttaattcttcacttttttacatgtgtttttgtttatagcttctgctggcactataggaagggtaaacaactatttactgatggtgcttccaattttgctgttacatgactcaaacaaactgggttttatgagatctttttagaaaaatactaataaattattcattttcaaatattatctctaatagtgtgcataggatcttaatatggccacactttggttacataagtcatgattaagcagaatatacagtg

SEQ ID NO: 602709 - DNA, 593 bp, Homo sapiens
acattgcatagcaggcagtatgaaactaatccttgagagaaaggaaacaaaataagcctgtacttgccccaacttctgtcttaaagcagttttcagataacagtacaaggagggaaagtcaagcaaagcacaggtggtctttgctgagttgagacaaagattagggtacasgtatgcttaagtggttgggatttataaatccgactaccatggagcaaagagctaaagaaagatctccagaaatctacgtagatattcccttggctttgggctcaatactaaattgtgcctgcttatggtgaaacttaaagagactgaggaatgaatgactgctggggagctgtaagccaaaaaggtcccagaactcacacagagctgagagacatttgtgttctgaccagccagtgtggacagatcttgttgatatccagaactttcagtagagactctggaaaaatcaaatcttagtggtaggactaaaatagcccttagaataaaatgtaagataaagacccaacctagcaggcttataaacaaggcttgaaaggaataaggtgactgccgctaacttaactacctcacagaaaccagac

SEQ ID NO: 602710 - DNA, 517 bp, Homo sapiens
caagtaaaaccagtcaaaagartagtgaaaataaattccttccccatacatagatcattttggtctggtcaataattcaactgtcttagataacaaaactgtaaaataaaaacttttaaaaagcaattttaaagattgttgctggaaagtaagttttttagtttacattgaacagaaataggcaaatgtctcatattgcaggtggcttaaaaaaaacaatgtattctgttctaaatatgcttatgattgtcactgagtaaaaatcttgttatttaccagtttatacatagaacattataggagatagtcttttcatttaggagaaggtcaccatcattaattttacaactgatgattttataataggtccttctggttcttcatggtcattattgaagtataatgcattgaagatatggcctgtacaaaggcagaacagggatgttaattagaattctgacaagcctactccaataaaatgatgagattatttgtaattgatgtcacaatcaattac

SEQ ID NO: 602711 - DNA, 553 bp, Homo sapiens
tttcctaagctaaatctccccctacccccttgtttttytactacctcagtgaaccctgaaaaacaatttgagttgacatgttcttggtaaatgacacagaggacaccatgggctactgtggagttttgtcatagatgactccaaatgttaatgctcactaaaaattcacatcttgtaaaagttctgcttatattattataccatcaatcttttaaccaggtgataacttttacagaaatcatcattttaaatactctgaatgaaggccaacaaaatgaccaaggcatataacagactaactgtaagggcaaagattagcttcaatatctgaacaactcacatatgccttttaagcataataaaatgcatcatttcatactgccctttgatcaggcaaccaacaatttggctatgtctatcctgtagggtttcatgaacttttctcctgttctggagcttcactttccatagctattctgcaaatgatcctaaagggatcttcaaacaaatttttcctttcctagttgatcacactttttatttaatttcatct

SEQ ID NO: 602712 - DNA, 462 bp, Homo sapiens
ccaatgtcctcacaaccgagctgcaatccgtcatttacagaaaaattgtgttttctccctgttaagaaaattttaaatgaaagaatttgagcatttaactagcatattctgtcggtttttgaggtgacctatgtcagaacacgtgtgtccaggatgttgttcaagttaagggagatamagcagttgtctgataatagattaatttttacatttaaacaattttttaaatagattgggttttgctatgctgcccatgctggtctccaactcctggcctcaactgatcctcccacctcagcctcccaaagtgctgggattacaggcctgcaccactgcacctggactgatgacaaattatatccaggatggtgattattagaatgatgttctttctcatctcttcacaaacactagtcacccatgactatttactttatggaaaacaaactctaaaagagcccc

SEQ ID NO: 602713 - DNA, 627 bp, Homo sapiens
cacccacttcttgcatttttttccattaagaaggttttcaagctgtctggcttcaatttcctgatttaactattaagtatggggccatatctggtcatgtaagaacaatacatctcaaaaatatcatgctgacttttattaaagaaaatcaagttacagaatggtgtttaccttaaatgataacatttatgtaaagctttttttaaaaaggggatcctacaaagaatttgtggaccccatctatcagcacagccagggtacgggcttctggcaggaaaggtgcccttcaacacacaaactctggaattagtggctacctctgggacaggaggggaagaattatatttatagctaaaacagagaggtagaatatgggtactaattatattggtctctaygcctttcttcatgtatgaaatacaggcctaccttagagatacctcaagttcacttccagaataccacaataaagcaaatatcacaataaagtaaaaacaaatttttgtttccctgtgcataaaaggtatgcattatattgtagcctattaagtgtgcaatagccatattttaaaaaaataatgtacacatcttaattaaaaacttttattgttaaaatatgctaataat

SEQ ID NO: 602714 - DNA, 610 bp, Homo sapiens
actcctgtaatcccagcactttgggaggccgaggtgggcagattgctggaagtcaggagttcaagaccagcctggccaacatggtaaaaccccatctctattaaaaatgcaaaaattagccaggcatagtggtgcatgcctgtaatcccggctactttggaggctgaggcacaagaatcacttgaatccagcaggcagaggttgcagtgagcctgagatcgaacgactgcattccagcctgggcgacagagcgagactctgtctaaaaaaaaataaataagtaaataaatgaaagtgtcactgatgccaactgtccataagacagtcaaggcagaccatcaagaartggctgcaagaatattctacattcaaagacatctcaaaagtaactatctattcacataaacagtttaatacaactcaatccaattcttgccaattctaaacaagaaaagactggcataaaatataaatcttctccccaatcaaggccaacaatgaaattaaagaaaaaaaactctcacatgagtacagtctgtattatttatagaaacaactttcatatccatttcaagttacttaaattcaaaacttgctaataatagaaaca

SEQ ID NO: 602715 - DNA, 529 bp, Homo sapiens
gtaaaggacagcccaccacctggaggcccttagtcatggcttcaacaaggtcctgtgccaaaatggtaaatggcaatgctgagtcaaggttggagcctaaaccctacatcttcccccggtgaagggtcctgccctagaaagaactttcccctaagtctcttctgccaattcagggcagaaagtaatggtcagccttggaacgctgctgactcgcaccctgggagcttctaaggggccctgttcaccagggtgaaggcgcctctctctcactgcccacacacccttctccagctcaaagggccttttcaaasggattagaggtgtgcttcaaaatcttcattaagtaatttaataatgtgtgtgtccagtacttcagtccccaaacagaaaggaatgtgcccaggagccggcaggcagagccacattcttcctgttaacctgttatggtggcgggcggtgctcgggccaagtcctcagaggctttcccagcctcagagaatcgggctctcgttttcaatttccaacttgg

SEQ ID NO: 602716 - DNA, 644 bp, Homo sapiens
caagaccattttcaagatctagtaagaaagttggtgaaaaacgacaaccacataatctgtgtcacaaagacagataaaatactttccagtttatctggtcacctctcactgaaaacagggatgctgcttgacacacacaaagattttcttggtaacaatatcgaataccatgactggcagctccctctgagaaaaatggtaggtgaaatagaaagctaacctatctaatgtttgtttcccttctttttctcattaaataaaaaagccaatattacaaatactaactctgtctttcagagactagagaatgttaactctatttcagaaacctgaagataaggtcttcccttagaaatctgccaatggttttatggttttcatcaaggaaccagtggcctggttgaaaacttagcaacttgagagaccttaagtctctcaaaggatataaaatcccattttgtcagaaataccagacttkttcaacaaagatgttcagttttttaaaatatgaataacatttgagttcttatctcacgtctgatttcttaattattcagtttaattagttgctatttaataatgctaaaactaatcaataaaaagaaaggggaaactgtaatgttgctgtctccaccattatttaa

SEQ ID NO: 602717 - DNA, 504 bp, Homo sapiens
gtactctttctttttgagacagagtctcattctgtcacccaggctggagtgcagtggcgctatctcggctcatcacaacctccaccccctgagatcaagtgattctcgtgcctcagcctcccaagtagctgggactataggtgcacaccaccaagcccagctaatttttgyatttttagtagagatggggtttcaccatattgctcaggctggtctcgaactcctgacctcaggtgatccacccacctcagcctcccaaagtgctgggattacaggtgtgagccactgtgcccagccagtacctactctttttgattggcttctttcactcagcataattatgttaaaatccatccatgtttttgtatatatcaatagcttattcctttgattgttgagtagtattctaatgtatatacagtacagtcatgcatcacttcacaatggatacattctaagaaatgcatcattagattattttctcatgcgaacttcatagagtgt

SEQ ID NO: 602718 - DNA, 510 bp, Homo sapiens
atggagtcatatactatgtactctttctttttgagacagagtctcattctgtcacccaggctggagtgcagtggcgctatctcggctcatcacaacctccaccccctgagatcaagtgattctcgtgcctcagcctcccaagtagctgggactataggtgcacaccaccaagcccagctaatttttgtatttttagtagagatggggtttcaccatattgctcaggctggtctcgaactcctgacctcaggtgatccacccacctcagcctcccaaagtgctgggattacaggtgtgagccactgtgcccagccagtacctactctttttgattggcttctttcactcagcataattatgttaaaatccatccatgtttttgtatatatcaatagcttattcctttgattgttgagtagtattctaatgtatatacagkacagtcatgcatcacttcacaatggatacattctaagaaatgcatcattagattattttctcatgcgaact

SEQ ID NO: 602719 - DNA, 438 bp, Homo sapiens
ccactggttattagcagttgacctctgtgcaagcttcttaacctccctctaagtctcggtttttcatcaataagatgggaataatcatataatacctcatagagttgtgaggattaaatgagataatgcttgtgaaatgcacagcasaacatagctgtcacaaatctctactgtccaggattcatcaagaaatttctctgcaatttccctattaatagtttctcactgcttttccatgccataaaaactaacaatgagccagtcacggtgcctcatgcctgtaatcttggtgggaggatcgctagagcccaggagttcgagagcagcctgggcaacaaagtgaaaccctttctctacaaaaaatttaaaaattacctgggcttggtggtgtacacctgtagtcccagctacttgggaggctgaggtgggagaatcacc

SEQ ID NO: 602720 - DNA, 531 bp, Homo sapiens
aaccaacaaacaaaaaaacccaaacaataaatggttaagatggtaaattttatgttatatatattttactacaacatatttacattggaaaaggaaaacatcggctatcacgacatttcaatgagggaaaaaatagtcttttcaacaaataatgctgggaaaattggataaccacatgcaaaagaatgaagttggaccctttcctcacacttatacaaaaattacctcaaaatgagtcaaagacctaaatgtgaaagctaaactattaaactcttagaagaaacataggcataagtctttgtggccttggattaagcaatagtgtcttrgctattatgccaaaagcacaaataacaaccacaaaaaaatacataaattggacatgatcaaaattacaacttttgcccttcagaggacagcatcaagaaggttaaaaaaaaaaaacctacagaatgggagaaaatattagcaaatcatatatctgataagggacttgtatccagcacatataaataacttttacaactcctt

SEQ ID NO: 602721 - DNA, 410 bp, Homo sapiens
cccaagggagttgaaggtgaggaaactagcagtgagccactggtcaacagtgtgcaaactgtgaagatctctgctggggtatttgaagcttacctcaaaaaggagtcccaaggctttgtgtaaaacattgtctactcatagtattactgcagattcctcctaagaacctactagttaaaattttgtgtgtgtgaggttgcaggaaaagagcacaatattagagcagaaaagataagagactcaaatagaaatggaaaatttttttaaatcttctttctcactttctattactcctttctttcttgggtttcatgtcttctttcttcctttgcctctctttcccttttctggcctgcratcacctcgctctgtcatgtctggtcacaagatgtttcagtaagcagcttgtg

SEQ ID NO: 602722 - DNA, 576 bp, Homo sapiens
ccaacctaggaacactataaagtgaagaaaatttgtctttagtgtctccagcctcctagccagttgccctcccctgctaggagtttacctcttcccatccagctacctaggaactgcatatctacttgcccaagcagaacctgcctttggaaaaatacctgataaattcatttacactcctacataaaccactgacaagscttctgaggttactgttcttttactgagaagcacttattttgttaacagaagacaaggtggaagactatatcagtattggattgaatagcgtagtcccaaaatttgcttccccccaacctcagaaggtgaccttatttggaaagagggcctttgcagatgttagttaagatgggatcatactggactggggggaccctaagtccaatgactggtatctttataaaaagatcatgaaagacacagagacagagaaaagacagctgcacgaagagatggaaattggagtgacgcagctgaggaatactaaggattgcctgcaacaccagaagctagggacaggcaagaaaggattcttccctagagcctttagacact

SEQ ID NO: 602723 - DNA, 484 bp, Homo sapiens
cttgcggtaggcacagagtggattttccttataatgaagactgtgtgcaccaacgagggaaacagaatgtgcatggaacggrtgtgaagtgaacttggtgatcaccttaacagtccatgcagttgttctgaagtaaaagaactgtttcttaaaaaataaaaacagtatatgcagcaccaacaataatggcaatcagttgatatttgcaaatactttaaaaaattaacaatcagttttatactctccctcctttagaaaataaggcatacgtgttgacgtcatttttgtgttttgtaattaacacatgagaagatgatgcaaggataaacaatatttgtacactcccaggcctcagtttctttagcttcgaaatggtggtgtctggtgtcgaggtgttggtgatgatctttaaagggatcttccagttaatcatcagtagtgaattaccatggtgtgccacccagacaccccttcaagactgaga

SEQ ID NO: 602724 - DNA, 612 bp, Homo sapiens
gatgtaattcattatttaagccatctggtcctgggcttttctttgtgggaagattttaaattactaatccaacttacttgcttgttataggtctattcaggtattctatgttttcttgagtcagttttggtaatgtgtatatttctatgcatttgtccattytacctaaattatctgacttgtttgcataacactgttcagaatattcccttgtaatcctttaatttttgttaagtagtgatgttcttctttcattcctgatattggtcatttgtatcttcttcccttttttcttggtcattctagctaaaagtttatcagttttgttgatctttttgagccaacttctggtttcattgatttttctctattattttctactttctattgtattaatttctgctctaacccttactcctttttattgcttgtgttgggcttaatttgctctttcttaatgtggtagcttagatcattgacttgagacctttcctttttccctaactaggcagataaatttctctctaagctctgcttaaattgcatccttcaaatagtgataattatggtttggtttccattcattaaatttttgttgtgatttttttcttt

SEQ ID NO: 602725 - DNA, 464 bp, Homo sapiens
catttctaccaatcagatgccaccaaagacctcccctctggtagccggctggggtagggaggcaggggaggcctgggagggaacagggcaggagactcatctctgaggccactttcacagcacagggtgtcattggtgaactcagctccagccaagataaaaggctcatatcgtttctctttaaagcatgagcagcaggtaggaagatgcctaccttgtagatgccatgttgccccggctggtttcgaaaggaagatgcctacctgmtgctcatgccttaaaaagcaatgatgtgtatgaaaataataacaactaccaaaacatgcattgagaatggggcatgggctgggccatccataagcacctcattcagtcttcacaaccacacttggagggattttctattatgatcttccttttacagaagaggaaacagactcagtaagcaaggggaatggcccaag

SEQ ID NO: 602726 - DNA, 586 bp, Homo sapiens
atatatgcctttgggcagaaagattcaacatcaaaaagattatcttaaatgagaatccaccaaaaatattaatgcttgtttttttccyatgtaagacaaattgattctaaaatttatgcagagaaaaagaattaaaataaccttggggttcggggacaacaagggatatatagttctaccagatattaaaacttacaaagcctcaataattaaaacagtattaatcctagtgcataaagacacgaaagaccaagacctgaatttaaagtccagaaacagagacaatacatatgagaatttggtaaaagtggcatctgtagtggctataaaaaaaaaaatgggccgagcgcagtggctcatgcctgaaatcccactgctatgggagaccgatgcacgtggatcacttgagctcagtacttcgagagcagcctggacaatatgatgaaaccctgtctctatgaaaaaatacaaaaaattggccaggcatggtggcacgtgcctgtaatcccagctactcgggaagctgaggcacaagaatcacttgaacctggaaggcagaggttgcagtgagcagagatcacgccac

SEQ ID NO: 602727 - DNA, 586 bp, Homo sapiens
atatatgcctttgggcagaaagattcaacatcaaaaagattatcttaaatgagaatccaccaaaaatattaatgcttgtttttttcctatgtaagacaaattgattctaaaatttatgcagagaaaaagaattaaaataaccttggggttcggggacaacaagggatatatagttctaccagatattaaaacttacaaagcctcaataattaaaacagtattaatcctagtgcataaagacacgaaagaccaagacctgaatttaaagtccagaaacagagacaatacatatgagaatttggtaaaagtggcatctgtagtggctataaaaaaaaaaatgggccgagcrcagtggctcatgcctgaaatcccactgctatgggagaccgatgcacgtggatcacttgagctcagtacttcgagagcagcctggacaatatgatgaaaccctgtctctatgaaaaaatacaaaaaattggccaggcatggtggcacgtgcctgtaatcccagctactcgggaagctgaggcacaagaatcacttgaacctggaaggcagaggttgcagtgagcagagatcacgccac

SEQ ID NO: 602728 - DNA, 593 bp, Homo sapiens
tatagtcaatatagatgcttcttaaaactatcatggctgaatttatccctattcccacaaacatcgacaaagcagagctggttacaatgactaccaaatcaaattacttgaaaaacaaaccaaactctgctctttctgtaatttaagtgtgtcaagtaggaaggttaatttgatatgtcatgtgatcaccaacaaatactctgttaaacatttcacttggagaaaagttttaagattaaccatacactttacatcatattacataagaaaaaaaactaacctataaagcgtattcactaaaatggaataaaatggaggttacaaatttccatttctatgttaacactatacaaatttataataaacttgataaaacctgttacaacccattttgattactcacacracatattaaatttacaactttaattgtggctactttccatgctactgtatcctatgttctattgtactgtacatcaaaaaccatagctggccagccacagtggctcatgccagtaatcctaacactttgggaggcaaaggtaggagggtcccttgaggccaggagttgagactagcctgggcaacat

SEQ ID NO: 602729 - DNA, 582 bp, Homo sapiens
tatgtacaattattatgtatcaataaaaaattaaaaaatcaaacaataaaaaatattacaattgtttcaaaatgggaaaaacatttgaacagacacctcaacaaagatacacagatgacaaataagcacatgaaacaatgttccacatcatgtcattaygaaaatgcaaattttaaaaatgggaaactattagatacctatatatctattacaatagctaaaaatccccaaaattaataaaaccaaatgctagagaagatgtataccaataggaacctcagttattgctggtggaaatgcaaaatggtacagccactttggaagacagtttgctagtgtcttacaaaactaaacactgttttaccatgtgatcaagctgtggtactcttaggtatttcacccagttgagatgcaacctgtgtccacaggaaaacctacacatgatgctgtcagcagcattactcctaattgcccaaaacaaggtgtcattttaatagacgaatggaaaaactaactgtggtacatctacataatagaatattatttagcaataaaaataagctatcaaatcatgaaaagatg

SEQ ID NO: 602730 - DNA, 588 bp, Homo sapiens
gcaaagggcagatgttcagctcaggaatgacctgtgcttctgcagcagcgggcacccagtgtgttggctgctaaatgaaccaaacagaaagaattacaatctggggagcccaagttcagggaggcttgctgcagctttgagaaaaatggggtcatggtgctggaaggtccagggccccctctgtattagtccrttcttatgctgctaatgaagacatacctgagactgggtaattcataaaggaaagagatttaattgactcacagttagctgaactgtggggaggcctcaggaaacttacaatcatggtggaaagggaagcaaacatgtccttcttcacatggtggcagggagaagaagaatgagcaaaagtggaaaaatccccttataaataatcagatctcttgagaactcatttactatcatgagaacagcatgagggtaactgccctcatgattaaatgacctcccacttggtcactcccacaacacatggggattatggtaactacaattcaagatgagatttcagtgaggacacagccaaaccatatcaacctctgtagagatctgggccactaagacatc

SEQ ID NO: 602731 - DNA, 588 bp, Homo sapiens
gcaaagggcagatgttcagctcaggaatgacctgtgcttctgcagcagcgggcacccagtgtgttggctgctaaatgaaccaaacagaaagaattacaatctggggagcccaagttcagggaggcttgctgcagctttgagaaaaatggggtcatggtgctggaaggtccagggccccctctgtattagtccgttcttatgctgctaatgaagacatacctgagactgggtaattcataaaggaaagagatttaattgactcacagttagctgaactgtggggaggcctcaggaaacttacaatcatggtggaaagggaagcaaacatgtccttcttcacatggtggcagggagaagaagaatgagcaaaagyggaaaaatccccttataaataatcagatctcttgagaactcatttactatcatgagaacagcatgagggtaactgccctcatgattaaatgacctcccacttggtcactcccacaacacatggggattatggtaactacaattcaagatgagatttcagtgaggacacagccaaaccatatcaacctctgtagagatctgggccactaagacatc

SEQ ID NO: 602732 - DNA, 588 bp, Homo sapiens
gcaaagggcagatgttcagctcaggaatgacctgtgcttctgcagcagcgggcacccagtgtgttggctgctaaatgaaccaaacagaaagaattacaatctggggagcccaagttcagggaggcttgctgcagctttgagaaaaatggggtcatggtgctggaaggtccagggccccctctgtattagtccgttcttatgctgctaatgaagacatacctgagactgggtaattcataaaggaaagagatttaattgactcacagttagctgaactgtggggaggcctcaggaaacttacaatcatggtggaaagggaagcaaacatgtccttcttcacatggtggcagggagaagaagaatgagcaaaagtggaaaaatccccttataaataatcagatctcttgagaactcayttactatcatgagaacagcatgagggtaactgccctcatgattaaatgacctcccacttggtcactcccacaacacatggggattatggtaactacaattcaagatgagatttcagtgaggacacagccaaaccatatcaacctctgtagagatctgggccactaagacatc

SEQ ID NO: 602733 - DNA, 588 bp, Homo sapiens
gcaaagggcagatgttcagctcaggaatgacctgtgcttctgcagcagcgggcacccagtgtgttggctgctaaatgaaccaaacagaaagaattacaatctggggagcccaagttcagggaggcttgctgcagctttgagaaaaatggggtcatggtgctggaaggtccagggccccctctgtattagtccgttcttatgctgctaatgaagacatacctgagactgggtaattcataaaggaaagagatttaattgactcacagttagctgaactgtggggaggcctcaggaaacttacaatcatggtggaaagggaagcaaacatgtccttcttcacatggtggcagggagaagaagaatgagcaaaagtggaaaaatccccttataaataatcagatctcttgagaactcatttactatcatgagaacagcatgagggtaactgccctcatgattaaatgacctcccacttggtcactcccacaacacatgkggattatggtaactacaattcaagatgagatttcagtgaggacacagccaaaccatatcaacctctgtagagatctgggccactaagacatc

SEQ ID NO: 602734 - DNA, 203 bp, Homo sapiens
ttatagggtacatggctgcacactgatttagtgttgcttatcagcttgaaatgatcttctctccctcatcgggtttggagctctctgaagcagagactggcctattcagaatcttggaattctcagctcccaactcaatacctagcatgtaatatgygctcaataaatgtctactgggtgaataaatgactgccttaatgaat

SEQ ID NO: 602735 - DNA, 596 bp, Homo sapiens
cacatctgtaactgatgtatagtggatcatggtccattacatagaattcccacttaggttttccacgttaaaatcttggggaagcagggccggtggttcacgcttataatcccagcactttgggaggctgagatgggaggatcgcttaaaactaggagttcaagaccagcctgtgcaaggtaatgagaccttgtcgctgcaaaaaataaaaaatcagctggtcatggtagagtgtgcctgtagtcccagctactcagaggctgaggcaggaggattgccattgcactccagcctgcatgaccctgtctcaaaaaagaaaaaaaaacacaaagtcttggggagatagtggcagtgcaaaagtcatttgcaaaagaacatttttttcattcagmatctctcaagcctatcagaatttgcctgcttttgcaagaaaaagattcattttgctcagattcatctcattgttaaataaatcttctcttttctttctttcttattctaaagtggccccaatctcctctttctccctgatctgtttttaagaagtagatcatcaacctaacagccacatttgaaatgcatccataaggtatgaa

SEQ ID NO: 602736 - DNA, 600 bp, Homo sapiens
tgataagattaaaaagcaaaacaaaaagctattgagaaggcagaatggaaggacttggtggatttgatgtagagactaaggaagaaggagcagtcagaygttgggcagcctgggtggatggagaacagaggtacagttaagaaaaacaaggattgagagggaggtggaagggggcaggagagcgatggctttcctttgaaacatgtgggactttagaaggctgtgggccttttgggtcaagatctccaatgtacaatcaggaatacagaactggagctcagaggagagggagttctggaaatgcagattttaaaatcagccacctggctgggtgcagtggctcacgcctgtaatcccaacactttgggaagccaaggtgggtggatcacccgaggtcaggagttcaaggacagcctgaccaacaaggcgaaaccctgtctctactaaaaataaaaaattagcctggcgtggtggcacatacctgtaattccagctacttgggaggctgaggcaggagaatcacttgaacccgggaagcagaggttggaataagccaagatcacaccactgcactccagcctgggcgacagagcaagactc

SEQ ID NO: 602737 - DNA, 600 bp, Homo sapiens
tgataagattaaaaagcaaaacaaaaagctattgagaaggcagaatggaaggacttggtggatttgatgtagagactaaggaagaaggagcagtcagatrttgggcagcctgggtggatggagaacagaggtacagttaagaaaaacaaggattgagagggaggtggaagggggcaggagagcgatggctttcctttgaaacatgtgggactttagaaggctgtgggccttttgggtcaagatctccaatgtacaatcaggaatacagaactggagctcagaggagagggagttctggaaatgcagattttaaaatcagccacctggctgggtgcagtggctcacgcctgtaatcccaacactttgggaagccaaggtgggtggatcacccgaggtcaggagttcaaggacagcctgaccaacaaggcgaaaccctgtctctactaaaaataaaaaattagcctggcgtggtggcacatacctgtaattccagctacttgggaggctgaggcaggagaatcacttgaacccgggaagcagaggttggaataagccaagatcacaccactgcactccagcctgggcgacagagcaagactc

SEQ ID NO: 602738 - DNA, 600 bp, Homo sapiens
tgataagattaaaaagcaaaacaaaaagctattgagaaggcagaatggaaggacttggtggatttgatgtagagactaaggaagaaggagcagtcagatgttgggcagcctgggtggatggagaacagaggtacagttaagaaaaacaaggattgagagggaggtggaagggggcaggagagcgatggctttcctttgaaacatgtgggactttagaaggctgtgggccttttgggtcaagatctccaatgtacaatcaggaatacagaactggagctcagrggagagggagttctggaaatgcagattttaaaatcagccacctggctgggtgcagtggctcacgcctgtaatcccaacactttgggaagccaaggtgggtggatcacccgaggtcaggagttcaaggacagcctgaccaacaaggcgaaaccctgtctctactaaaaataaaaaattagcctggcgtggtggcacatacctgtaattccagctacttgggaggctgaggcaggagaatcacttgaacccgggaagcagaggttggaataagccaagatcacaccactgcactccagcctgggcgacagagcaagactc

SEQ ID NO: 602739 - DNA, 554 bp, Homo sapiens
atcaggcaaccagcaattgactaggtatggcatgtatcagtgtatccaccaggcggtactgaggcttcatttctttgcttatttgaaaataaggtggaaaatggcacaacagcctgacctgatttgcaatgtgtcccttagagcttaggctagccattcagtcttttccttttctaggtaactaacagtggctggactatggctttgaatatgggtcacagatgagtaagccttcctcaactggttctgcttcctgttttccatatataggggccccattttttccttttcaagtccacacagcattgcctccaatgggtgtgagcattccttaccagcattcagatgctgaacatttttaacagcctacgggaaacagtgttttaggcagctcttttcaaacactgagtttcttcagctgtggaagagaatgtccttcccaaataagaattaaaaaaaatgcccaatataagcaattgaatagcgctggagttatttttargaaaccaggtcactcactacaggaaatgatcgtgttgccaatgcgttaaagc

SEQ ID NO: 602740 - DNA, 573 bp, Homo sapiens
gcctgatttgcactacaatttccagaatttttttccctgtacgtgactggtggaggcactagctagtctttgctacaagaacattatgagatttacatatgcacaactctaaactaaattagttcctccaggacaatttactgagctttttaacaccaccgtcaagcactgttgcaaggacagataataggggctcagataatatctgataaatgaataaatgggtccttttgctctcccgggactgggctagagcacttgactaaactgatgtgtgaggtagcaatttgtgtacagaagtcatgagttttgaggaaaaagaaagaaacatgttctctaaaaactgcagtcattggtcaagaatacgagtctacttgtgatttcatacaaataatgggtggacagtgagctatgaaatttatgaatactctaagcaaaggttggtcagcatacgtgctaaacaggaaatcctgataagtaggaatagtgcaagccacactrcaacttttatcatattaggttggtgcaaggtctaccagatgtgtcttgccttcccatgtgtaaggtcaacca

SEQ ID NO: 602741 - DNA, 424 bp, Homo sapiens
aaagcaactggaatagaggaaaaagaacagtaaagaaacgacatggaaggtagcacaagaaaagaataagrcagccagcaggtaagaagctaaagtggttacgagtaggagctttcagccgcacatatgtgggttgaaatttttctctaaaatcaggttggtggctgggtgcagtggctcacgcctgtaatcccagcactttgggaggccaaggtgagaggatcacttgagcccaggaattcaagacctgcgtggatgaaatagtgaaaccctgtctctacaaaaaaaatagttaaaaaataataaaataaaatggggttggcaaggtctaccttgaagatttaatgagataatgtgtggaaagggcttagcaaggtcctaacatgtgcttgggtagttctgaagccataaccacagacttgaa

SEQ ID NO: 602742 - DNA, 593 bp, Homo sapiens
gctacctgtttttactgatgcattaatttctttcactgtgtaatcagtgttttctttttcttttttgtgataatgtgaaaaattaaattttctctagcggtttgtttttataagaatatagtatgccttatataatractctatttctctgattatcatttgtttatttattactataatcaatgttgaattcaatgatttccacttaaccccagccttccctctactacatgattttgtttgatttttgctatttttcttagtattaatatttatataattaaataaacctaaatttgttggtttatcagcactggtgcttggctataggatataaggaaatctctaaacctacagtattttcctctttctatcccctttatctctgaaattttgttatttatatagtatttctgttgtcaagaattatttctttatctttggtatccattagctctactggaatatgtctcagtgttgataatttgataaaatgcttttcctagaataagaggtgccatttaagatttagacccaagccttctattaattctggatctcattaatctatcatttgtatttgttatttttct

SEQ ID NO: 602743 - DNA, 566 bp, Homo sapiens
agacctcatttataaaaattaattagataacatcttaggtttcctagtccatggaagtaaatgttctaaaaatgtaactattaggttggtgcaaaagtaaatgcagtgtttgccatttaaaagtaatggcgaattatcctcagcaaactaacgcaggaacagaaaaccaaaaaccacatgttctcctttataagtgggagctgaacaatgagaatacatggacacagggaggggaacaacacttactgggacttgttggaggagggcagaggtgggagagcattagggaaaacagctcatgcacatggggcttaatacctaggtgacaggttgacaggtgcagcaaaccaccctggcacacgtttacctatgtaacaaacctgcacatcctgcacatgtaccccagaactttaaaaatttatataaataaataaataaaagtaatagcaaaaactgagattacttttgcaygaacctaataatgtttatttttaaaaacaatacatgtaactagcaacctcttgtgctgtcatgtataagcttttaaaaagaatattttgagtgca

SEQ ID NO: 602744 - DNA, 455 bp, Homo sapiens
tattaacaaaataggctcgaaaaaatcctaaaaagtgagttccctatttttctatctaccttcctggtctctttctttacctcctgaatagtttgcatgggttcccagatgcggacactggtttaacctcagcaagttgtaactctcattaaagtgattcaactgttctgctctttgcttccagaataattaagaatagcaatgtccagatgctctcctaaccagttcccacattagcatyttccccgttctctgaaaaaaaaaaaaaaaaaaaaaaaaggtgaccttttgacctgattcattgggaaggctgttgtgaacttcctgggtcagagtcgcctggggtcagttacattaatagccatctaaaccttcctctaaaccttcctgggaattgtaaaaacctcccagatccatgacaataatgagctttaagcgtccttcttctcatttcc

SEQ ID NO: 602745 - DNA, 455 bp, Homo sapiens
tattaacaaaataggctcgaaaaaatcctaaaaagtgagttccctatttttctatctaccttcctggtctctttctttacctcctgaatagtttgcatgggttcccagatgcggacactggtttaacctcagcaagttgtaactctcattaaagtgattcaactgttctgctctttgcttccagaataattaagaatagcaatgtccagatgctctcctaaccagttcccacattagcatcttccccgttytctgaaaaaaaaaaaaaaaaaaaaaaaaggtgaccttttgacctgattcattgggaaggctgttgtgaacttcctgggtcagagtcgcctggggtcagttacattaatagccatctaaaccttcctctaaaccttcctgggaattgtaaaaacctcccagatccatgacaataatgagctttaagcgtccttcttctcatttcc

SEQ ID NO: 602746 - DNA, 455 bp, Homo sapiens
tattaacaaaataggctcgaaaaaatcctaaaaagtgagttccctatttttctatctaccttcctggtctctttctttacctcctgaatagtttgcatgggttcccagatgcggacactggtttaacctcagcaagttgtaactctcattaaagtgattcaactgttctgctctttgcttccagaataattaagaatagcaatgtccagatgctctcctaaccagttcccacattagcatcttccccgttctytgaaaaaaaaaaaaaaaaaaaaaaaaggtgaccttttgacctgattcattgggaaggctgttgtgaacttcctgggtcagagtcgcctggggtcagttacattaatagccatctaaaccttcctctaaaccttcctgggaattgtaaaaacctcccagatccatgacaataatgagctttaagcgtccttcttctcatttcc

SEQ ID NO: 602747 - DNA, 551 bp, Homo sapiens
ttccaggaatttatccatctcgtctaggtttttctagtttatgtgcataatggtgttcatagtagccttgattgatcctctgtatttctgtgttgtcagttgtaatctcttccgtttcatttcttatttagcttatttggattttctctcttcttagttaatcttgttaatggcctatgaattttatttatcttttcaaaaaaaacagctttttgtttcatttatcttttgtgatttttttgtttcatttagttttactctgatattggttcttttcttcttctgggtttgtgattcccctcttaaggagtacttctaagaagtgtgggcctcagcccagcgctttagagtccttctttagaaggtaaaaaygcagttctttaagtaattttaatgtacccccaagttagaccatactgcctgtacattttatagactcatttgttcataggaaacaccaagataatttagaaacaaagagaattactggaaattgcaaatgagtagtacccacatcaatgaggtttcatattggttccagtcacttccat

SEQ ID NO: 602748 - DNA, 573 bp, Homo sapiens
gctcctcggaatgacctttttsagttatcgtggtgaaaacaagaagcccttagagaaacttcattcttaaaacaagcacataaaacaagtgcatgtgatgctggcacagtttgggtgaaaacatagattgtttgcagaatgtctacagcccattcctttctcctgctcttcctttcactacagctcccagcctgacagtcttggggaaatagacatgaggcttttcaacaaacaatcagtacgtgaccaaacttggcaacacatgctctgcctctgtttgtgacagaggcttgcagaatactcagctgtacctgtagaggagctcctctctgatgtccttggaaagtttccgtgtccctttcatggtgtccctaaccactgagtactttccaggctgcactatatagtctttgtatatttaattcagatttctctgaaatttgcatatcttcagaaatttttacttagcttgtcacttagcatgcatttatagtctgtaaagacaggcttgtggagggggagagaggaaacttgtacatcatatgttcagaggaagatttccacattcgttct

SEQ ID NO: 602749 - DNA, 582 bp, Homo sapiens
ttttttgttttgtcagaattgtgttttttaaaaagtaaaacctcgaattggaataccttaacttgggtcaagcactctctaattcaactatttgtcccatgactttcttttgccaatagtcccagcttctgcacacatttatgtacatgcctgacctctaaatatctatgtgttttcgacttctgagaaaaaatattgaacatgtatttacagctatccattcagttctgcctgataccctttgaagcagactgccccctgccccagagattcagtgttctacatgcttstttgggagatatcagtctcagatggggatggttaagagaaggtattgtaagccaggtagatttaaatatcccaaatctgccagttctcctagttgtgtgatcttaagcatgacaccctgcatctctagacctaagcttgttgtcagagttacatgaattagtacgtatggagcacttaacccagaggctggtatcagcacttaacccagagagtggtatgtttaagtgtaagtaccacttaaacagtagctgtaattatggcaaagataattatgacacccagatatacatc

SEQ ID NO: 602750 - DNA, 537 bp, Homo sapiens
aaatatcccaaatctgccagttctcctagttgtgtgatcttaagcatgacaccctgcatctctagacctaagcttgttgtcagagttacatgaattagtacgtatggagcacttaacccagaggctggtatcagcacttaacccagagagtggtatgtttaagtgtaagtaccacttaaacagtagctgtaattatggcaaagataattatgacacccagatatacatctgattctgtccttctcttcataccttcatatttcytcatgtccaatttcctgctcaccactaaattcaccatttctgtctccaccccagtcttttgcattcggaggcaaaatttaatgccttttctgtagtctccaactcaattacataagctagaactctggaagttatccttgatgtctccttctcgctcatggagtaaatctaataaatcatccacctatgacaatttaaccctcaaatatttctcagatctagtttcttgtctctatcaggtattgatcatactgcttacagtattatcaatcc

SEQ ID NO: 602751 - DNA, 595 bp, Homo sapiens
aaagatgcctctcctgaaggctgtgatttccaactatccctttagagcaatgccaggcaattagcagttattacttgcagcccaggagaggagacgtatatggaagccaccagggaatgcctggcagctcaaaggcagcggcggcattaacttggttcctttcatgtttatacaggtttaaccaaatagataaatttaaagtgtgatcaaaatttaaaactttagtgttttaaagacattagcaagaaagtaaaaagacaatcacagaatgggaaaaatatttgcaaaccatatatctgataagagtcgggtatccagaatatctgaagaactattacagcccaataataaaaagacaagtgaccaatttaaaaatgggaaaggatttaaatactttttccccaaaatagactttttttatgtatcttcccaaagatatatatatacacacagcttttcccaaagttattatatatgtgtgtgtgtgtgtgtgtgtgtgtgtgtgtgtgtgtgtgtrtatacatgatacagctgcttctcccactcccatatcatcaccataaccatttttgaatgttacaaaatttaccaagat

SEQ ID NO: 602752 - DNA, 595 bp, Homo sapiens
aaagatgcctctcctgaaggctgtgatttccaactatccctttagagcaatgccaggcaattagcagttattacttgcagcccaggagaggagacgtatatggaagccaccagggaatgcctggcagctcaaaggcagcggcggcattaacttggttcctttcatgtttatacaggtttaaccaaatagataaatttaaagtgtgatcaaaatttaaaactttagtgttttaaagacattagcaagaaagtaaaaagacaatcacagaatgggaaaaatatttgcaaaccatatatctgataagagtcgggtatccagaatatctgaagaactattacagcccaataataaaaagacaagtgaccaatttaaaaatgggaaaggatttaaatactttttccccaaaatagactttttttatgtatcttcccaaagatatatatatacacacagcttttcccaaagttattatatatgtgtgtgtgtgtgtgtgtgtgtgtgtgtgtgtgtgtgtgtgtatacaygatacagctgcttctcccactcccatatcatcaccataaccatttttgaatgttacaaaatttaccaagat

SEQ ID NO: 602753 - DNA, 456 bp, Homo sapiens
aataaaaatatccattacaattctaaattagtgaatacagtaatttaattttcagataacacagcctcccttctgatggcataatgaggggttactacatggtttcctcttcagcgaagttacttatcctcaatgaatagtaatatacaaatgacaggaggagaggatagattgcmgagaattagcgtatcagccctctcatttcctgatgtgtgtaagtttgaggaaccccaggtttaaccccacatcagtggaagtgtgggaaaggacagacccagacaggaacaggcactgttcgagtacactgttatcaaagacagtggttctcaaactcagagggcatcagactgccagggggaacatgttaccaaccagactcccccagacacatctccagatattgactctgtggcttaggggtgtggcccaaaaatctgcatttttatcaagcacccc

SEQ ID NO: 602754 - DNA, 456 bp, Homo sapiens
aataaaaatatccattacaattctaaattagtgaatacagtaatttaattttcagataacacagcctcccttctgatggcataatgaggggttactacatggtttcctcttcagcgaagttacttatcctcaatgaatagtaatatacaaatgacaggaggagaggatagattgccgagaattrgcgtatcagccctctcatttcctgatgtgtgtaagtttgaggaaccccaggtttaaccccacatcagtggaagtgtgggaaaggacagacccagacaggaacaggcactgttcgagtacactgttatcaaagacagtggttctcaaactcagagggcatcagactgccagggggaacatgttaccaaccagactcccccagacacatctccagatattgactctgtggcttaggggtgtggcccaaaaatctgcatttttatcaagcacccc

SEQ ID NO: 602755 - DNA, 633 bp, Homo sapiens
atactatttgagccaaaatgtacactcctgtttatttactccagagaaacccatcatatatattagaatactcaatccatctttctggtagccggcaactaagtgtttattactagaaaatggataaaggacacactggaagaatgcattagaatattccattgcagccagaagtaatgacttaaatagacatgcagcaacatggatacatctaaaaattcagtgctgagtgaaaaaaataagaaatggaatttgagcaatgacgtagtatcatttgtctggattaaaatgtataaagatgcaagcaaatattacaattttttagagatacatatatacctgatatatattaaacaaaatggaatgagtgcctctgcaggaggaaggaaaatgggaatggggatgggggtgaagagaaaaaaatatattaaacaaggatgagagcttctgtgagcctgtggagatagcatgcgatgacaaagaagcaggattaactcaactgtgtgcccttgaggttcaaagaggaatatatgaatccagcctccctctttttagccttttatctgaattgcttamagctcctaagaattttctgtgttctatcctctgccatggaaattgggaaacagttcc

SEQ ID NO: 602756 - DNA, 638 bp, Homo sapiens
aatcatttactatattattagaaatttccaatgtttttgtaactataaataatgctgaggtaagttatccctttaataaggtgagaatgtttcttattctaattttatgcattttcctttattgaccctattgagtgtttctgtaggaaaagagaccaggtaccatgttaattattgaatctcatcatctgggtaagcgtctyacatctactgagccatttatgtcaaaggaacaatgacggggacaataataatgagcatgcatctttggctactcattaatgccatctgctcagtaaaactttaatgagcttacacttttgatctgtgaaagtgcttttaattacagttcttttctttgcctctttgctttttgattctaccaaactgctggatcctttgaacatactgtccattctttgtagtagcaaatgagctctctggctttgagctgttttaaacatgacagtagaaaaggggtgattaaaaaccaaatatctctctaagctttggatgtagtgctgaatataagatgaatgttgtagaggttaaaagttcccattatctacttgattaggagacaattcacaaaatatttgaacaatagaattgcttaaggactacaaatgaaaacaaaa

SEQ ID NO: 602757 - DNA, 589 bp, Homo sapiens
aggtaatatgcccatttcacagatgaggaaatcaaaacttagagagatcaggaaatcacccaaggctactcagttagcaagggatggagctatgatctgaatccaggtctgtccaactctagagactgtccaacagagccaatgttgttttcccaggcctcaggagctcagttaatattgggaaggctctagtcaagatctgcactggcaaagcagatctcccatgactttatatatcctctttcaacttttttaaaggatacaaataaaagtttattatataaaatcgagccttcatatttcacagtttggcaaggctaacgactagatcatgttgtaagtccttaacgaaaattttacccttcccattcccaactattaaaatggcctaatcaaawgttacaaaaaacgaagcaaagtaccactataaacaacaccaagtgctttaaagacaactattccaaatgtattttttaaaatttagcagactttgttagagcagttttaggttcactgaaaaattgggtggaacctgcagagagttctcatatatcccttctcccatacacacagtctcccccactaagaa

SEQ ID NO: 602758 - DNA, 527 bp, Homo sapiens
ccagtttgtcttcactataccctcactagtctctgtactagttggtcacaatctcaaagccaaggattctaagcctggtatctgtgaacttggatgggaaaaacattataccattattttcattcacttctgactgaaatttagcatttccttccattatgaatctaggcaacaaatcacagtggttttagctgaacctgtaactttgtcactaatagaaattacagataatttcatatcacattagaattgtggcaaatgagttaaaatactatttatgttcacctaytacttcaaattatggtagtattagacccagtattagatctcattattaatatgttaattaaaagtatgtaaaatattatataaaatttgtttttaaaatatttgatcattatatttcaatatacttgttttccttgtattttattgaatgcatgtttaagcagttttctgagaagggatccacagagttcaccagactaccaaagagactggggcaccaaaaaggttaagaatacctt

SEQ ID NO: 602759 - DNA, 572 bp, Homo sapiens
tttttttttttaactaatgtaattgaaaaatctgctttgacttaagaaattccttctttgtatctgaatatcaaattcattctagcttctccttgttttcctttacaaagaacaatggaaaggaatagacagacatgattctgagaggaggcaggcatcctgggaaagayagaggatgggctcaaagattcttttctgatgaaatttcattgcattttaaaagaactgcagatacaggagtttgtaattttcccagacagctgcatggggacatgaatgactgtgacaaatacatttttggcttcacaagatgagctgcttcccaactgattattcttgtaacctccttgaaccctattaacccctagcaaagggtaattattgactggtaggcaggaatggggatgttcaattgaccaccagaaccttaccaagatgaccatgacccaacaagcaaaaggaaatgttttctcaaccttggatctgttgcctcccacacctgttcccttctgtcgtctctatgcccttgcatatctcttttgcgaggtagacaattcaattatactaacatt

SEQ ID NO: 602760 - DNA, 593 bp, Homo sapiens
gcttactttgtagatacaaacagacagataaataaaatatgtaaaagttgtaattgatgcagtgaaggaagcaaacaaggggaatgaggtaggactaggaaagagagacctattttaggtggaatgggaagagaaggcctctctgggaaatattattcaagctgaggaccaaagcatgctccaggatcagagggtgccagtcatctgtggaatggtggtagggtagaaagtggttctggaaaagagaatgcaaatgtgggcaagaccatgggatatctgaggaactgaggtagaaattagtaagcttgtaggttgaggctgaaggaagaaaaaaaaggcagggttaataccaacatttctggctttgaatctctaaacagatagaatttactgagatggggaaacttgggagtgggtacagatgagtttgtagggaaaaaaaaatcaagagttccattgtactatgataatttccagacatctatgcattgcacaaatggagacatcagttaggttgtaggatatatgaatctagaacctagaaaaaaggyctgaaatagaaacatacatttgggagttatcaggatacatgt

SEQ ID NO: 602761 - DNA, 584 bp, Homo sapiens
aagttcaatgctctcagactaatagataatgagttctacatttgaaatgttagcaattaattatgacctaaaaatcaataatccttcaaatgctaagattctatgatgattttataaatatctgctgattgatgggattgagttccagaaaaatcctgggaaaatagattcagtctataattccattactctctaatctattcttagaaattagcccaatatttattcttcacaccttttctagaccatatgttgcatataaatagaaaaaatgayagctgaaccaattccccaggtaccatcagccactttagaatgtctgagatgtgtgttgttggttgataaccatccatttcactcttgaacaagtttgtttaattgggttttgttcatgttgatgtccatccactttcctaagaaatctatcagattccaactgttctttcttaattaatttttttagagacaggatcttgctatgttgcccaggttggagtgcagtggttattcacaggcattgttatagctagctcactgcagcccccaactcccacgctcaagagatcctctcgcctcagcctccc

SEQ ID NO: 602762 - DNA, 584 bp, Homo sapiens
aagttcaatgctctcagactaatagataatgagttctacatttgaaatgttagcaattaattatgacctaaaaatcaataatccttcaaatgctaagattctatgatgattttataaatatctgctgattgatgggattgagttccagaaaaatcctgggaaaatagattcagtctataattccattactctctaatctattcttagaaattagcccaatatttattcttcacaccttttctagaccatatgttgcatataaatagaaaaaatgacagctgaaccaattccccaggtaccatcagccactttagaatgtctgagatgtgtgttgttggttgataaccatccatttcactcttgaacaagtttgtttaattgggttttgttcatgttgatgtccatccactttcctaagaaatctatcagattccaactgttctttcttaattaatttttttagagacaggatcttgctatgttgcccaggttgragtgcagtggttattcacaggcattgttatagctagctcactgcagcccccaactcccacgctcaagagatcctctcgcctcagcctccc

SEQ ID NO: 602763 - DNA, 506 bp, Homo sapiens
ggtttgacaatcattttcaattaactaaacttattctcacttttttatggtgacattttcttttgaatggcacatctccactcaaagaataacttctttctgtaatrgttgctgtccttcttaaggcattgcctcttaaattctttaagattctttaagaatttaagattcttacattattttttcttcagagacactaggttatcttgctttctttgaatgaaattattgaagacacttactggagcaaaaaaaaaaaacaaaacaaaaataaaaagcaaaggaaggatccatgaaattttaaggaaatgtggattaattgcaaaatatggataatacaaaacacagtacaattagatgacaaaaaaaacctaaaaactcagtaacagcataaaatcaaaacttctctaagttccagttttttcatctctaaaatgagataatattccctaggggattttcaaggatgaaatgaagtcatatatatatagccacataagcttggc

SEQ ID NO: 602764 - DNA, 597 bp, Homo sapiens
cagtaatctgcaccagccatgcccagcacacatcattttcagatgataaccccaaagctttgccaagtcttggaatctttctgaaaagatggtattccctatatataattttatccttaaagtctatttttgttggactgcctacttcacagagttactggaagaatcaaatgtgatgaggtacacgaatgagctttgaaagtgaagtgttaaacaaacataagatgtcattattgcttctaataattctttagaaattggtaattaacatgttctgcggctgataattacatcaccaaataaatgtgaaccagaatggtcagtttcccatattatcctattccccaaacattctggrtcaaacaaagttgaactgaaaatatataaattgaaagcatataactatattgctatttttgcttccttctcagtaatgtatgtttcaaggaaacaatttcaatattgttagagggcaaaagctaacaaaggagacagcctgaggagtcttagtaaatttttctttacaaggcacattaaccaaagatgttagaagttgcaagagatctcatgagtccacgtgaacaatttactaataaa

SEQ ID NO: 602765 - DNA, 569 bp, Homo sapiens
ttgacagctttcatttaggacaaaggtgaaataaacttacttagtttggggttgttgttgtaacctctccttctctatctggccatcaaaatagggagtgagctggatgcaggatttggaagactaatatcatccatctttttcacagatgttttccaccctagcctttacaagcaaggataagtctagaaggtccatgaaggcaaccagaaattctttcatatcttttctaatataaaagcctttttaactaaacatggtaagacactgatcttgatccatatgggctcctaktatctatttctagagatctgttttagcacaaggtaccaccctccttgtacacaggtgtcttcctgaaacatctttttggagaaataataatcaaaaaagtctaaactgcaaaatagggcaaagggagagacaaaatttcatgcaatgacaagatgccagatgcctttggaaggactctgggggacagaaaatgaatgaattccttctcctggacagagagacagttctagaaatattttccttctattggagattgcagtctagagatctggctt

SEQ ID NO: 602766 - DNA, 300 bp, Homo sapiens
caaggactctgtggacctttcctttgatgtgtgagtattcaaagaatccttttgccccctgcagccccttctgtctcttgctaaagacaattgtctttagttatcactgcgagggagctttccccatgccagctggaatcttgggaggcaggacacgactccrgatcctcgggctgaatagggaagccaatgctatccctgcccgctggagtctggcgactcctgcccttgtcccaaaccacacgttttcccgcctcccgggaagcacccaaatctcttccacccttccttagagctagc

SEQ ID NO: 602767 - DNA, 602 bp, Homo sapiens
tagaagatagtttattggacaaaatatccaagtatgaacagacagatgagaaaaataacaagaaaaagaggggaaaacacattaataaaatttaaaaaataaatctctgcttacctccttcctttactctcctttccaaaatctgaatccaaacgtcatcytccatccatgcctttctccatctctcccctccccccttctctctcaatcctgtctgcaccattagaataatcatgtctgtaccttattcatcctaggttccttcagaaccactctaactttgcattttctttatttaaaaaaaaatgccataagcatctcttcgtcttagggcatttgactttgggtactcttctcttccgaaaaattagttattgtttaacctggtaaatgtgtttaaaaataatttgtagatgaagagctatcttctttcactttggtattatgtttgacactctcctcttaagccccgtcaagggtaagtgtgtgtctttgtatctgaagttgtcacatatacaaactttacagtctaattgtctaactttacaagttagggttttctatttccctttctgctgaggtggcaactggaaaagaagcca

SEQ ID NO: 602768 - DNA, 452 bp, Homo sapiens
ccttattctgggcacaggatcttagcttcctcatccccaaactggagaagataataatgatcatcatcagggttgttgtgatgattaaatagaatatgtgggaaatgcttacatctttttcatgctcaatagagaaccatcctagacacatgggaacagcagcattcacccagtgtaatttacagctgagctgtcttgagaacctagcctccctacctaccgwgtgaccccagggtctccttttaatctgcacggcaaactacaagtctcttagccggcaataagttgacagaaccttggaagaagaacagaacaaggccgaccccacaagctgcatgaacactttggaatttgctggcatctctcagtctcctctagggaccccatagtcatggcaaaagcagaagactgacatttacatatagatttacctttcttaagtctagctgatg

SEQ ID NO: 602769 - DNA, 638 bp, Homo sapiens
ttctgatatggcaacctactgcatgtacataaagctgagcatagtcaggtcctacatattggccacacaatataagagtgaccattaggacaacaaccaaggctagaaaagaatttaaaataagaattttatagtatattaaaatggtttaagttctttttctttaaaaaaaggggggaaaggcagtgtgccatggctcatgcctgtaatcccagcgstttgggaggccaaggtgtgcagatcaccaggtcaagagattgagaccatcctggccaacgtggtaaaaccccgtctctaccaaaaatacaaaaattagctgggtgtggtggcaggtggctatagccccagctacttgggaggctaaggcagtagaatcgctcaaacccaagaggcaaaggttacagtgagtcgagattgtgtcactgtactccagcctggcaacagagcaagactccgtctaaaaaaaaaaagggaggtgggggaagcctagaaaacagatataaagtatgtaacatgatctcaaatagtattgatgtatgttatgactagaaggggaatacaacatttcaacagtgattatctctagttgaagaaattgcaggtgatttttttcccttatgcatacatttatatgtttt

SEQ ID NO: 602770 - DNA, 576 bp, Homo sapiens
ccaagtttctttactgcgtgcctctgcgtacttccacttgcctctctgcacttcctttgtccattcattaaacagggatgaaaacatagattcctaaaggactttcaacttttcaggtgacagtcattaggtgccaacataaaatgaacacaaactgcagagtgtgtgcacatcttccccaagaatccctgagtggtctctgagggctccaacttcagggctcmtttaatatccccttttcccatttatatgcaatgcttcatatttctcccgatcaatgcgccctgagagaaagttctattctctgaggtgtactaattacacctgctaattgctaaatcaagctactgtatcaacacagtttagtttgagtcaattcctaatattgccccattatgataatgtttggaggaaaaaaatgtctacatttctctcattcaatttaactcccttttttgtttaatgttgcaattaatttctttgtgtgtgcatgtataatgtacctttggatagcagctattatgccaggtattattgtctttggttaaaatcttaagcagttggaatcatgccagt

SEQ ID NO: 602771 - DNA, 515 bp, Homo sapiens
atccttactatgttgtatttgttcattccacaaaaatttcttaggcaaaacaaccattgactttatgagccttaaatggcctttgagcaactttgcttttgagagtcgccatgggaatccatggcaaatccacagcaaactggattttcaggtctcatgtcttagcagcctgactacatccaacttctagttgcagcatctastcccccttttggtgacatttatcactttaggacaatgatactagctaatcttcactgaagacttactatgtgccagccacattctaaatgcttcacatttggcttgtttgaatctttcaaaaacctgatgaggtagcactactattattcctattggggacaagaagaaggcacagagagactgagcaacttgctgaagttcacaaagcaggtcagcggcagaccctcaaagtcggactcctgagccaatgcatgttactattgcacaccctgcctctcactggagaggcttactgtctctctagagaaggg

SEQ ID NO: 602772 - DNA, 515 bp, Homo sapiens
atccttactatgttgtatttgttcattccacaaaaatttcttaggcaaaacaaccattgactttatgagccttaaatggcctttgagcaactttgcttttgagagtcgccatgggaatccatggcaaatccacagcaaactggattttcaggtctcatgtcttagcagcctgactacatccaacttctagttgcagcatctactcccccttttggtgacatttatcactttaggacaaygatactagctaatcttcactgaagacttactatgtgccagccacattctaaatgcttcacatttggcttgtttgaatctttcaaaaacctgatgaggtagcactactattattcctattggggacaagaagaaggcacagagagactgagcaacttgctgaagttcacaaagcaggtcagcggcagaccctcaaagtcggactcctgagccaatgcatgttactattgcacaccctgcctctcactggagaggcttactgtctctctagagaaggg

SEQ ID NO: 602773 - DNA, 603 bp, Homo sapiens
acaatggtgcatacacataagctatcagctggggtagattcaggcccagccatgatgtccctgacacgtctttggcccccaaagcatgccagcttaccctgggatatgccattttgtgtaggaaagcagatgaggacagaggtcttgtctagcacyacttggagaagcaaaatgaagtgcagagccctgccactgacattatgacaggggtgggatggacagtgccattcctgtacctttctatttttaatgttccatttctacacttcttgcctgattttaattaagctccacttcaaatcactgcctagagagaagactttaacattatagaaaaacacaagtctgggagagctcatactacatatgctgcttgctttcccttcccgaggcttctccctggttttaaaacatcaagtcctgctctggagtggataatatgtgggcagcaaaaataacacatcccagaatagactttttcccccaccaccttcccagagactgggggctctagagacaaaagtaataaagagggccttttgtcatgtaactcgaggtgagggaaggtgagagattgaacactttcagtataaaaattacaag

SEQ ID NO: 602774 - DNA, 668 bp, Homo sapiens
agttacttaaactctgtgtttctcagcttcctcatctgtgaagtgggattatgttagtagatatgtcatacatttgtgatgaagattaaataaaataatagaggtgacatttaaagtagtgccctgcaggttagggcttcactgccctgtgtcctctgctctgggatgcctaggtgattctaccacagcctccctcgctctgtgacttgctggctttgaatgatttatagctaagactccaagacactcccgaagctgagaaatggaactcttaacattcagggatgtggccacagaattctctccagaagagtggaaatgcctggaccctgcccagcagaatttaaatagcgatgtgttgttggagaattacagagacctggcctccctrgatctggtcacctgtctggagcaaagaaaagagacctacaatttgaagatagatgagacagtagccaaaccccaaatttaaagaacgagtgtccaaccttttgacttccccggccatattggaagaagaaacattgtcttgggccacacataaaatacactaacactaatgatagctgatgagctaaaaagaaaaagggtttgtgtatagttttcatgatatttgtaccacagataagcaaaaaagtcctctcattcaaagggttggttggacacca

SEQ ID NO: 602775 - DNA, 668 bp, Homo sapiens
agttacttaaactctgtgtttctcagcttcctcatctgtgaagtgggattatgttagtagatatgtcatacatttgtgatgaagattaaataaaataatagaggtgacatttaaagtagtgccctgcaggttagggcttcactgccctgtgtcctctgctctgggatgcctaggtgattctaccacagcctccctcgctctgtgacttgctggctttgaatgatttatagctaagactccaagacactcccgaagctgagaaatggaactcttaacattcagggatgtggccacagaattctctccagaagagtggaaatgcctggaccctgcccagcagaatttaaatagcgatgtgttgttggagaattacagagacctggcctccctagatctggtcacctgtctggagcaaagaaaagagaccyacaatttgaagatagatgagacagtagccaaaccccaaatttaaagaacgagtgtccaaccttttgacttccccggccatattggaagaagaaacattgtcttgggccacacataaaatacactaacactaatgatagctgatgagctaaaaagaaaaagggtttgtgtatagttttcatgatatttgtaccacagataagcaaaaaagtcctctcattcaaagggttggttggacacca

SEQ ID NO: 602776 - DNA, 590 bp, Homo sapiens
aaaggccttggcttttgctttgcttctgaaaaataagccaggttgtagccctggtcattgtgagcactaaccttctccaaatgtggtccttgggcctcttcatggatgcatatgtgcgagttattctaggtgatctcttgttaaagagttttattttaaatcccagctaatctgtgcgactccctggattggtctgatctctcgatacatcttagttcaggyctacagcgagctgcaaaaagacagtgcaaacacttttgctgtttgtctccctctttccctttcttccaatcaattctgttccatcaggaacccctcatctcttctgcataaagaggtatataaataaaaacaaaataaataaataaaagggctgcgtgagttgctgattctccctatagtgacagcgctaaggcagtttaaagaggggagtgtgtgggtgtctgcacgggcagtgcctcagtgcttcgctgtttgttttgagtgcctctgggtatttttagaatctgtagggagaagctgagctgcactggatgactgttatgctcccaatgacaccctgggcttaaagaaacaggattcacagtgac

SEQ ID NO: 602777 - DNA, 554 bp, Homo sapiens
gagtaagttacttaaccctctgagcatcagtgggtatagtagtgaacccatccactgggctcatatgagaactgaatgaggctatgtcacataaagcacttagcacagttcctggcacactgagctgttatcatcttyatgatgtcagcttcctagctgctggcactctcatcacccaaaagatcagtggtaatgctttggtttcaacaacacagtacagctacagatgagccagcctgtagccctgtcagtctggtggtggtcactgaatagagactcaagggaatcatccatcttaagggtgtttggagctgtaagatacaagctgagttcattcactcttcttgttaacacacattagcaaaagagaagtcagggagttctatttttacctcactctcttagctgatgagaaaaaagatattacttcacagaaatctcaattcagactgagagcttggtctaaatataatccattctgcaggcagaaatcgtctcattaggtagagggctcgggaaggctgaaacagtggatagccatgcttactgcctga

SEQ ID NO: 602778 - DNA, 618 bp, Homo sapiens
ctgagagagctggagctcccaaggcccaccctttggctgcctaaattaagactcccggggttcccacactctttttcccaatggcagtggagggtcttgggaaaactgtctggagggaatgccccgagtcctcctcccagtatctgttcaggcttggcacccttaggacctccccttctggaagattcagcagtgcatgtgtatgcttggagagggagggtggataaatgtgrcatgaatctatttggaaggttttatacatcttgaagtctcaactttaggtgtttcaggggggtattaagcacaccagggcttaaatcatagaatatttcaaaatagccacctttttccaagcacctatatacctatatgttccagcactggtcaaatgacagatgactatcgttacaaccgtccaagataggtgctatcatacctactttatggtgggagtctatgaggaacctgaagctctgagaggccaagtcattaatccagtaagtatctggtcctagattcaaacatctctatcctccttcttggtgccaggtgtcccatgtgaaggtttgggtcagagtgtggtgctagcaggtggcagaagcccaagatgcatcatca

SEQ ID NO: 602779 - DNA, 618 bp, Homo sapiens
ctgagagagctggagctcccaaggcccaccctttggctgcctaaattaagactcccggggttcccacactctttttcccaatggcagtggagggtcttgggaaaactgtctggagggaatgccccgagtcctcctcccagtatctgttcaggcttggcacccttaggacctccccttctggaagattcagcagtgcatgtgtatgcttggagagggagggtggataaatgtggcatgaatctatttggaaggttttatacatcttgaagtctcaactttaggtgtttcaggggggtattaagcacaccagggcttaaatcatagaatatttcaaaatagccacctttttccaagcacctatatacctatatgttccagcactggtcaaatgacagatgactatcgttacaaccstccaagataggtgctatcatacctactttatggtgggagtctatgaggaacctgaagctctgagaggccaagtcattaatccagtaagtatctggtcctagattcaaacatctctatcctccttcttggtgccaggtgtcccatgtgaaggtttgggtcagagtgtggtgctagcaggtggcagaagcccaagatgcatcatca

SEQ ID NO: 602780 - DNA, 579 bp, Homo sapiens
atggtggtttgctcaaaatgctctggttttaaagaatgggagagaatagagactcccttttatcactctgggcttctttcacccttttcctcttcttccctgtggctttctgctggtgagaatggctaaagaaggtcccacggcccttgaagctcttctgtaaccatgatggagcattctccagtcccctcctaaaggaaaaagactgatctgttcaactgagcccttccttcctcccttggcaattttcaagctccctcctttctatcacctccttttgccccagcccttgaacaaaccccagccccaaccctagggtctaactttttttttaagtaaactcctcctacccacccaccagctacaggcagcaggggagtcctggttttctcatgatgttgcagcaaaggcctgaggyccacactctgtctcccacgtgccttcagccacgtgtggagggatcaaagacacatcaaaacgggtctccaaagcctcaacctgctgctcagtcaccaccgggatctgccccattgctctgggtggctgtgatgttggtgtccacagatggggggacacacc

SEQ ID NO: 602781 - DNA, 641 bp, Homo sapiens
ggtctttgtcccaagttgctggcacatagctaaaacctttgggtgactttggtgtgcgaatgagatgaccagtggctgggggcccctagatagcttcaggatggggactgctcaccagaaagactaaggattagaactttcagtgccacccaccaaattccagggaggggagaggggctggagattgtgttaatcaccaatggtcaatgatttaatcaatcatacctaataatgtaccctccataaaaatccctgaacaatggggtctgaaaaacttcaggttggtgaacacatccaggtgctgggagggtggcccacccagagaggcatgaaagctccgagcccttccctgataccttgccctatgcatctctttcacttggctgtttctgagttgtatcctttataataaactggtaaatatcagtaaaatgtttccttgtgttctgtaagctgctctagggaattatkgaacttgaggagggtgttgtggaaaccccctgaaattagaaattacagcctgtcagtcagaagtaccagagacaacctgggacttgtgactgacacctgaagtgaaggcaacctcatgggactgagccctcaatctgtaggatagccatagcccaggtggatagcatcag

SEQ ID NO: 602782 - DNA, 500 bp, Homo sapiens
actctttttttaactgtggatttctaatttaactgcattatagtcagaagatgtgattgttttatcaagagggtsaatttttataaatatccaaagtgtgtttgaaaataatgcataatcactttgttaggtgcagagttctccatttatctaatttgaccaactttttaattatgctattgaaatcctgtatatccttatgtttttaccagcttaatctatttccttataaatattccttgtaattctcttggttttgctttataaatactgaggttatcctaagaacatacaaatctgttacttcttgcaggattgttcttttcttattgcaaatgttctttcttttttttttctttttttttttttttttgagagggagtctcctctatcgcccaggctggagtgcagaggcgcgatctcagctcactgcagcttctgcctcccaggttcaagtcatgttccttcgtcagcctcctgagtagctgggactacagttg

SEQ ID NO: 602783 - DNA, 500 bp, Homo sapiens
actctttttttaactgtggatttctaatttaactgcattatagtcagaagatgtgattgttttatcaagagggtgaatttttataaatatccaaagtgtgtttgaaaataatgcataatcactttgttaggtgcagagttctccatttatctaatttgaccaactttttaattatgctattgaaatcctktatatccttatgtttttaccagcttaatctatttccttataaatattccttgtaattctcttggttttgctttataaatactgaggttatcctaagaacatacaaatctgttacttcttgcaggattgttcttttcttattgcaaatgttctttcttttttttttctttttttttttttttttgagagggagtctcctctatcgcccaggctggagtgcagaggcgcgatctcagctcactgcagcttctgcctcccaggttcaagtcatgttccttcgtcagcctcctgagtagctgggactacagttg

SEQ ID NO: 602784 - DNA, 598 bp, Homo sapiens
actttctggtgatatttccagctcatcaattttctcttcaattgtgtttggtctagagttcccattcaatttgatctattgaatttttagatttcatttatcattgttcttatttctaggatttcaagttgattcttttccatattcacctagtgatattttatttctgcctttttaaaattactttttattcatcttttaaataagtttttctttccttgatatctttgaccatccaaagaagtaatggctcaatacaatagcagctatttttgatsatgtagcagccctaggcaggtgaacagctgtcctcagaagagtcattgaggccaagatggacagatcacctgaggtcaggagtttgagaccagcctggccaatacggtgaaaccccatccctactaaaaaaatacaaaaattagtgaggcatggtgccatccacctgtagtcccagctactcaggaggctgaggcaggagaatcgcttgaacctgggaggcagaggttgcagtgagccgcgattgtaccactgcactccagcctgagcaacacagtgagactctatctcaaaaacaaaacaaaacatttgtcaattttgg

SEQ ID NO: 602785 - DNA, 521 bp, Homo sapiens
tgggctggaagactcaatattattaagatagcaacactctctaagttgaggtagagattcaatggaatctgtcaaaaccacagctggataaagttgcaagatacacaatcaacatacaaaaatcactaacatttctatgcactaacagtgaastatttgaaaaagaaatcaagaaaacaatctcatttacaatagttaccaaaaaaatacttaggaataaatttaactggaaaggtgaaagacctctacagtgaaaactataaaacactgatgaaagaaaatgaagaagacacaagtaaatgacatgatatcccatgctgatggtttagattaattaatactgttaaaatatttatactactcaaagtgagctatagattcaatgcaaaacctatcaaaattccattgacatttttcacagaaatagtaaaaacaatcctaaaatttggagccacaaaagacccagaatagccaaaacaatcttgaggaaaaaaaataataataattctgaaggcatcata

SEQ ID NO: 602786 - DNA, 521 bp, Homo sapiens
tgggctggaagactcaatattattaagatagcaacactctctaagttgaggtagagattcaatggaatctgtcaaaaccacagctggataaagttgcaagatacacaatcaacatacaaaaatcactaacatttctatgcactaacagtgaagtatttgaaaaagaaatcaagaaaacaatctcatttacaatagttaccaaaaaaatacttaggaataaatttaactggaaaggtgaaagacctctacagtgaaaactataaaacactgatgaaagaaaatgaagaagacacaagtaaatgacatgatatccyatgctgatggtttagattaattaatactgttaaaatatttatactactcaaagtgagctatagattcaatgcaaaacctatcaaaattccattgacatttttcacagaaatagtaaaaacaatcctaaaatttggagccacaaaagacccagaatagccaaaacaatcttgaggaaaaaaaataataataattctgaaggcatcata

SEQ ID NO: 602787 - DNA, 521 bp, Homo sapiens
tgggctggaagactcaatattattaagatagcaacactctctaagttgaggtagagattcaatggaatctgtcaaaaccacagctggataaagttgcaagatacacaatcaacatacaaaaatcactaacatttctatgcactaacagtgaagtatttgaaaaagaaatcaagaaaacaatctcatttacaatagttaccaaaaaaatacttaggaataaatttaactggaaaggtgaaagacctctacagtgaaaactataaaacactgatgaaagaaaatgaagaagacacaagtaaatgacatgatatcccatgctgatggtttagattaattaatactgttaaaatatttatactactcaaagtgakctatagattcaatgcaaaacctatcaaaattccattgacatttttcacagaaatagtaaaaacaatcctaaaatttggagccacaaaagacccagaatagccaaaacaatcttgaggaaaaaaaataataataattctgaaggcatcata

SEQ ID NO: 602788 - DNA, 635 bp, Homo sapiens
tcatgcatttacagttaattgatttttgacaaagtatcaagaacaatgaggaaagaacaatttcttcaataaatgatattggaaaactrgatattcacatgcaaagaaagaaattaggccaatagcacaaggaacaaaagcaaaaatagacaaataggattacagcaaactaaaaaatatccttcacagcaaaggaaacaatcaagagtgaagagacaacctacaggatgggagaaaatatttgtaaatcatacatctgataagagattaatatccaaaatatataaggaactcagcttaatagctaaaaaacaaataacctgattttaaagatggacaaaagacctaaatagccatttctcaaaagaagacatacaaatggccaaaaagtatatgaaaaaaatgttcactaggactgaacatcaagagaaatgcaaactaagaccacaatgagacctcacacctgttagaatgactattatcaaaaagatgaaagataaatgttggtgaggacgtggagaaatgggaatctttgcacactattgttgggaatgtaaattactacagtcattatggaaaacggtatggctatttccccaaaaattaaatctaaaactactgtatgatccagcaat

SEQ ID NO: 602789 - DNA, 635 bp, Homo sapiens
tcatgcatttacagttaattgatttttgacaaagtatcaagaacaatgaggaaagaacaatttcttcaataaatgatattggaaaactggatattcacatgcaaagaaagaaattaggccaatagcacaaggaacaaaagcaaaaatagacaaataggattacagcaaactaaaaaatatccttcacagcaaaggaaacaatcaagagtgaagagacaacctacaggatgggagaaaatatttgtaaatcatacatctgataagagattaatatccaaaatatataaggaactcagcttaatagctaaaaaacaaataacctgattttaaagatggacaaaagacctaaatagccatttctcaaaagaagacatacaaatggccaaaaagtatatgaaaaaaatgttcactaggactgaacatcaagagaaatgcaaactaagaccacaatgagacctcacacctgttagaatgactattatcaaaaagatgaaagataaatgttggtgaggacgtggagaaatgggaatctttgcacactattgttgggaatgtaaattactacagtcattatggaaaacggtatggctatttccccaaaaatkaaatctaaaactactgtatgatccagcaat

SEQ ID NO: 602790 - DNA, 572 bp, Homo sapiens
acccagggccaggacacaggctccctcagccttgcttcaacaaaagcacctctgctcacagtatttatagctttcaagtacaatttttgcctaggaaaaaaaaagttatatgtctaaacattaggatatagacattctatgccttcagaatgcagtcattttaacttggagaaaactttaagtaatactcatctcccacttaaaagaattttaatagagagcctaaagaatgattggctttgagtgatggagttacctggtgagcccttccagattaaaattctacaaaatgcatgcctttggtgacttgctatctagtattagaaaccagattaaagtttggacaaatctgctgtagataatgagtttgatcttaaaatgcttgatctgtagctgttcttcctgaaaatcattatctagcaaggccagaattttttggtaatctaagtgttcacctcctaatttatctactctggaagttcccatcttagtatgtttgacrgtgcacagctattcttatgtgggacccaatatgtgaatgaggaaagtgacctattgtgagtcatattcct

SEQ ID NO: 602791 - DNA, 552 bp, Homo sapiens
gcaaaatgatgtatgcccataagtcagccttaaaaaggaaggaaattctgacacatgctacaacatggatgaaccatgagtaccttaggctaagtgaaataagccagatgcaaaaggacaatactgtatgattccacttatatgaggtacctacaataggcaaattcatagagacagaaagcagaatattggttgtcaggagttaggggtagggaggaawgaggagtttgaatttaataggtataaagtttccattttgtaaagacacacaaggctggcaggagtcgaccctggtatgatctttctggagggttgtgtgggattatgtatgaagagccttatactgtgtctgtacatgccctctgtgccctcccacacaacaattccgctttttggcctttcacccttagaaacaatcatagatgtccacaaggtgtatctgtaaggatgaacatctgtttataatatcaaatgatcagaaacaaatgtataaaagtggggcatagtaaaataaagtattacactacctatctatatacaattaacgtaaaa

SEQ ID NO: 602792 - DNA, 573 bp, Homo sapiens
agcaaatactattaataactcattattttaaacggatgacaacttcacaatgattgcataaacaaacaaacatgcaaaaagaaaactaaaaaaattctacactaacttcatctttttgctttttaacttcttgttgtgtctctttatgtcttattgtactatgtcttgaaaagttgttgcagttattatttttgattggttcatcattgtctttctacttaagacaagagtagcttacacaccataattacagtgtagtagtattctgtgcttactattaccagtgggttttgtaccttcagatgatgtcttcttgctcattaacactcttttctttcagattgaagaactcccttgarcatttcttacagggcaggtctggtgttgatgaaaaccctcagcttttgtttatctgggaaggtctttatttctccttcatgtttgaaggatgttttccctagatatactattctaggatgaaagtttttttccttaagcactttaaatatgtcatgccactctctcctggcttgtaagcattcctctgaaaagtcggctgctggatgtattgga

SEQ ID NO: 602793 - DNA, 403 bp, Homo sapiens
atactattctaggatgaaagtttttttccttaagcactttaaatatgtcatgccactctctcctggcttgtaagcattcctctgaaaagtcggctgctggatgtattggagctccattgyatgtaatttgtttcttttctcttggtgcttttaggatcctttatcctcaacctttgggagtttgattattagatcccatggaatagtcttctttggtttaaatctgcttggttttctataaccttcttgtacttgagtgttgatatttttctctaggtttgggaagtactctgatattatccctttggataaactttctgcccctatctctttctctaccacctctttaaggtcaataacttcaatttgccctttggaggttattttctagatcttgtaggtg

SEQ ID NO: 602794 - DNA, 417 bp, Homo sapiens
attctttttaattatttaaatctcctggttaaatttatctgatagaactctgaattccttctctgtgttatcttgaatctctttgagtttcctccacacagctattttggattttctgtccgaaagatcacatgtctgtgtttctccaggattggttcctggtaccttatttagttcatttcatgaggtcatgttttcctggattatcttgatgcttgtagacaggtgttcaytggtgtctgggcattgaagagttaggtatttattgtagtctttggagcctgggctttttttgtgcctatccttcatgacagggcttcccagatattcaaagagacttggaccccaagcccaacaatactgtggttctttcagattcatggaggtaccaacttggtggtcttggataagatctgg

SEQ ID NO: 602795 - DNA, 538 bp, Homo sapiens
gttgggaggggtagaaaaagtagatggaaattaactgaaactggcaagaagtgagagggaccagtggccctccctgtcagctgttctctgtcattcaatgccctgcatccatagagaagagatacaggtagcatggtgccttcacccataaatcaaaggctcctccgcaactcatagatgtctccgtgtaagggcagggagtagagtctttatacaaagatccctgggtcccaggagaaaataagttgtagttattctcactcctataaacttccttgacaatcaacrtgctgtataaagtagcagcatagcacagtgtggtggtagagggcatgagtattggggccagagaacctaggttcaagcctcgtctctgccactttgacctgcaagaccttgggcaggttggtgaacctctctgagcctcagctctctcatctgcaaaatgagggtaataatagtgtcttcctaaaagttgtatttgttttaaatgaacaagtatgtataaagtacctggtcgatagcacgtgctacgtta

SEQ ID NO: 602796 - DNA, 538 bp, Homo sapiens
gttgggaggggtagaaaaagtagatggaaattaactgaaactggcaagaagtgagagggaccagtggccctccctgtcagctgttctctgtcattcaatgccctgcatccatagagaagagatacaggtagcatggtgccttcacccataaatcaaaggctcctccgcaactcatagatgtctccgtgtaagggcagggagtagagtctttatacaaagatccctgggtcccaggagaaaataagttgtagttattctcactcctataaacttccttgacaatcaacatgctgtataaagtagcagcatagcacagtgtggtggtagagggcatgagtattggggccagagaacctaggttcaagcctcgtctctgccactttgacctgcaagaccttgggcaggttggtgaacctctctgagcctcagctctctcatctgcaaaatgagggtaayaatagtgtcttcctaaaagttgtatttgttttaaatgaacaagtatgtataaagtacctggtcgatagcacgtgctacgtta

SEQ ID NO: 602797 - DNA, 558 bp, Homo sapiens
ctttttcagtgttcaggggaaggggtgccagggactggaatttggtgacctgtggttctagtgtggagtcagggtggagactccgcactggggaagtctgcaggggtgatttcagcagggcagtatgaagatgcagggtgcacggagagcacagcagacagctgaggtggaatggagccaagaagtgatctggaaacaaccatgactgggggatgacactgactctgaggtgtcctgctgcaggtgggggtgggagaaagagcggccttccactgagggagccgagggaagtggggtctcagagggatctaggatcaccttttggtcaggaggtgtgggaaacactcagaaaacagcaaccagyttggtgggtttgattttctaaaatcgtgtagacgcctacaattgtgtaactgatcatgtgtccctttaggtgctggggctggagacagctttgcagctaaatttggggcccacctctgcgaagtacatagacctttatgggtttcctgcgttcattttcctcctgcccttttctaccattattttccatttgcc

SEQ ID NO: 602798 - DNA, 440 bp, Homo sapiens
gttttctacttcttgagtcagttttggaagtttgcatttttcttggaattttcytattttatatatgttatctacttactattgtataattgctcatattattctcttaaattatttttatttctgtaaagttgatagcagtgttctctcttttgaattactaaaatcactgctaaatgaattacaaaatcattcctgattttagtaattgagtcttctttatttgttggtcagtttaatgtaaagatttgtcagttttgttgatcttttcaaaaaaccaacctttgttgtccttgattttctttatgtgtctctatttttatttaattagtgctttattaatcaaggttctaatctttaatattttcttccttctgtttgcttttgttttttctctttttagtttcttaagatattcatttgagatccttccttttcaa

SEQ ID NO: 602799 - DNA, 440 bp, Homo sapiens
gttttctacttcttgagtcagttttggaagtttgcatttttcttggaattttcttattttatatatgttatctacttactattgtataattgctcatattattctcttaaattatttttatttctgtaaagttgatagcagtgttctctcttttgaattactaaaatcactgctaaatgaattacaaaatcattcctgattttagtaattgagtcttctttatttgttggtcagtttaatgtaaagatttgtcagttttgttgatcttttcaaaaaaccaacctttgttgtccttgattttctttatgtgtctctatttttatttaattagtgctttattaatcaaggttctaatctttaatattttcttccttctgtttgcttttgttttttctctttktagtttcttaagatattcatttgagatccttccttttcaa

SEQ ID NO: 602800 - DNA, 619 bp, Homo sapiens
aagtgtttgttaaattgaacagactgtgcaaaccatccatattgctgtgagatttttgacattctgaagaactgaagccccaaacagtctcacattgtttaactggcattagagctattgatataaccaatgaaagaaaaggtaaagctatgttgataagtaggacatttctgggtttttaatccttccccaaagttcatgaaaaagaaaaccagtgggcagatgttaccccaggtgggtgacaggcacccctttctctgccagtgattctaaggaagatgggatggaataagacctttttgcttctcctggtgtgtgttggggggggtgtcccctcctgcagggacctcgtgtggcttagcctatagctcctgctgcttaaactatgrctggtctattcatcaagttaagctttttttttttttcagagagtgtctcgctctgttgccccggctggagtgcactggcacgatctcagctcactgcaacctccgcctcctgggttcaagcgattctcatgcctcagcctcctgagtagctgggattataggtgcacaccaccatgcctggctaacttttgtattttcagtagaggcagggtttcgccatgttggccagg

SEQ ID NO: 602801 - DNA, 499 bp, Homo sapiens
gggattgctggattgaatggtagatctacttttagttctttaagaaatcaccatactgttttccatacaggttgtactaatttacattcccactagcagtgtgtaagcattcccttttcaccacatccatgccaacatctattgttttttgactttttaataatagctattcttacaggggtaaagtggtatattactgtggttttaatttgcrtttatatgttggttgaccatttgtatgtcttttttttgagaaatgtgggttcatatcatttgcccactttttgttgggattatgtttttgttcttgttgaattgtttgaattccttgttgattctggatattagtcatctttcggatgcatagtttgcaaatattttctcccatttggtgtgttgtttgtttactctgatgattttttttttctgtacagaagctttctaatttaattaggtctcatttatttatttttgttttagttgaatttgcttttggggt

SEQ ID NO: 602802 - DNA, 588 bp, Homo sapiens
accctttctctttttccttgctcttttggactcccattgagcatatgctggtatgcttgatgatatctgacaagtatctgaggctctattcatttttctttttgtttctcagagtagctgatctcaattracttattttcaagtactctggttctttcttctgcctgcttagatctgctgttgagcccctctagagaatttttcatttcagcaattgaactgttaaactccagaatttttatttgcttctttttaataatgtccatctcttcattgtttttctctatttgttgaggtgttgttttgaaacattcctttagctctttagacatggtttccttcagttatttgttcatatatataagtaaacacatgtataagtttattacgcacactgaacatatttctcttttgcaatttaatctatatagagtttaactttcagtgcttgagggaggtaacatcacatggtattgggccatcacattttcaaagggaaattactctttttccttaaaagtactttaaaaaatgtgtgaaaatacaaatgggtctgctgaattacaatggatattttagaatgagaaa

SEQ ID NO: 602803 - DNA, 588 bp, Homo sapiens
accctttctctttttccttgctcttttggactcccattgagcatatgctggtatgcttgatgatatctgacaagtatctgaggctctattcatttttctttttgtttctcagagtagctgatctcaattgacttattttcaagtactctggttctttcttctgcctgcttagatctgctgttgagcccctctagagaatttttcatttcagcaattgaactgttaaactccagaatttttatttgcttctttttaataatgtccatctcttcattgtttttctctatttgttgaggtgttgttttgaaacattcctttagctctttagacatggtttccttcagttatttgttcatatatataagtaaacacatrtataagtttattacgcacactgaacatatttctcttttgcaatttaatctatatagagtttaactttcagtgcttgagggaggtaacatcacatggtattgggccatcacattttcaaagggaaattactctttttccttaaaagtactttaaaaaatgtgtgaaaatacaaatgggtctgctgaattacaatggatattttagaatgagaaa

SEQ ID NO: 602804 - DNA, 619 bp, Homo sapiens
caaaaaacatttctcagaaaccctctttacttgtatagcttttgtgtttttatccttgttctttatcctcaataccttctgcttttacattgtaaacttaccgtcttcacggtttttggctttcartgctaacctttgtatttttaacttttaaatctcatagacatctaatcttttacgtatctattattatcgcattattccaaactcttttaaaataataattatatttaaatattttagtcctttcaaaagtttttcttccctaacctttcaaaaatcttctccaaatttcctaccttgtggatattattttacccaagtgtttttattctgttagcccccttttccttaatgtctaggataagcaccatctttggaagcacggcctcaagatgatgacatggaggggactcacacttacaggtaggggagcttcaggtctgccggccctctcctccctccttgtcacccctcaacctctgggctgccctttgggctcataacaatggatctcagagcccaaggaggttgggcttccactctgggggactctggaagctcctgggttaactactctcagggctctggttttctccatgtagataaaatacttgat

SEQ ID NO: 602805 - DNA, 619 bp, Homo sapiens
caaaaaacatttctcagaaaccctctttacttgtatagcttttgtgtttttatccttgttctttatcctcaataccttctgcttttacattgtaaacttaccgtcttcacggtttttggctttcagtgctaacctttgtatttttaacttttaaatctcatagacatctaatcttttacgtatctattattatcgcattattccaaactcttttaaaataataattatatttaaatattttagtcctttcaaaagtttttcttccctaacctttcaaaaatcttctccaaatttcctaccttgtggatattattttacccaagtgtttttattctgttagcccccttttccttaatgtctaggataagcaccatctttggaagcacggcctcaagatgatgacatggaggggactcacacttacaggtaggggagcttcaggtctgccggccctctcctccctccttgtcacccctcaacctctgggctgccctttgggctcataacaatggatctcagagcccaaggaggttggrcttccactctgggggactctggaagctcctgggttaactactctcagggctctggttttctccatgtagataaaatacttgat

SEQ ID NO: 602806 - DNA, 452 bp, Homo sapiens
tgtgatgaaagtcttcacttggttgtcaatcttcttgttagccaagaacattccctttatccctgctacctgggaaaaattgacatggctgaaaaatacatcaatttgagaagggatatatttgtttactttttaaaaaaagaaggctgtcaaagtcagctgagagcacttgycttggaggaaagaaaggttgacgatgggggaaggaggtggctcaaggtataatgacttcctaggctactggacaaacaacaacagattggtgatccttatcatatgggggtcacaacaggagtttgataggggtttcttattacccctaacataggctgacaggagcccgcagttgccaagagataaattctcatggtttcagctctgttgcttggtaagtaataataaataaataggggctacttctattgtatgctagtgtagcacccagatctcac

SEQ ID NO: 602807 - DNA, 593 bp, Homo sapiens
gtatcagactcaggattattaacccacaactctgcggcttcacagctcatgctcttaatgcctacctcaattatcaagctatctgcaggcttgggcagttgaaagaggcagttaaagctcctgaaccaattactgttgctttatttctatgtaagatctctctgttaagccaccagaatacacggaacataagaggacagcttttaaatttaaataaatggtgatttccctaaatcatcaaatactccctactttgtttttataacatggttgttctcagcctaaacagatgctattaattatttggctctgaaaatatgattgtctcctcccttctatatgttaggtaagaagtagtaattagtaatttgtcaaactattacaaaagcaaataattgtgcattayatttttcttgtgttttggagtttatcaaacacattcatgcatattttaccctgcttgcaactgtaacagctcaggaaaactggagggcagtgaggaaaaggactgaaacatgttgagtaatgcattccaatgctgcatgtacattacctcatttaatactcagaataaccatggaataattatcatt

SEQ ID NO: 602808 - DNA, 593 bp, Homo sapiens
aaaacaaaacaaaacaaaaacaaaaacaaaaacaaaaaacagtttattcccaagagtgcgcataagatgaggatatggtctccatttccacatcccccttgaacaacagcagcatgtcattacattgaggataattctttttttaaggtgcaaatcctgcaagtcaactacttcatttattagtyaatcaaagaaacaacaatttatttcaatgctcaagaggaaaaaaacaaaacaaaacctggctctgttgtatttattgagttaacatgttcatttctctgacagaccttcctaagagattatcagaggtaatttgaacaacactcagttttccttttacatagtgatgttatccaattctcatctaaggcacaacttaagtgttgtaaattcttgtcttactggagaaaaaaaaaacaaacacttaagccaaatcaagaacaacaagaacttaaatgtatccatacacagacatacatacagttctggataattaccacagtcattaatctctcagcagctgaaaataacaaccacgaacatagctatagttctttcaagttaatagtgcaactcagtgtgtgttatta

SEQ ID NO: 602809 - DNA, 510 bp, Homo sapiens
cttttcaatggggtctcttgagaatctggttttcttttaaaaggaaaaataaaaaaaataaaaaacaatagggggtacaaaaggaagttgttcagtacattcaccttttagtactagttttcagggaaatgacatarattcctgctcttccgctatggatagagggcccactatgggctgagttcacacacatagtttcaggtgaaattaaaaagggtctcttttcagtttagttatggttgcagtagaggtgagaggttctttccactgtttaggtttgtcctgggcctgtgcaaaattatatctccagctaaagccaagtttcagctccagagcagaaaaatgtttttattaaaataagagacatcgtatttgaagagcaaagtcaccaagtgaaagcagctctgatggaagaagatggagtgtttcagtccagagcagttcatcccagtgtcctttggggcctcagctctattgcctaacttacatttggaagcactttaatttctg

SEQ ID NO: 602810 - DNA, 510 bp, Homo sapiens
cttttcaatggggtctcttgagaatctggttttcttttaaaaggaaaaataaaaaaaataaaaaacaatagggggtacaaaaggaagttgttcagtacattcaccttttagtactagttttcagggaaatgacatagattcctgctcttccgctatggatagagggcccactatgggctgagttcacacacatagtttcaggtgaaattaaaaagggtctcttttcagtttagttatggttgcagtagaggtgagaggttctttccactgtttaggtttgtcctgggcctgtgcaaaattatatctccagctaaagccaagtttcagctccagagcagaaaaatgtttttattaaaataagagacatcgtatttgaagagcaaagtcaccaagtgaaagcagctctgatggaagaagatggagkgtttcagtccagagcagttcatcccagtgtcctttggggcctcagctctattgcctaacttacatttggaagcactttaatttctg

SEQ ID NO: 602811 - DNA, 532 bp, Homo sapiens
cactgctggtgcaatgtagtgtgaacagtgctgagaatattccatgactcttatttgccccccrtcctggaccccgctgtctcctcctctcagcctgggcctctctgtcaagagcatgtccatccctgtttgattctctctctgtggttcccaggaccctttgttcatagacaagcctattgatttccacttttttttttttttaagtcatggagccatcacatacttaatatactatccttcccaagggcattggaaatacaaataaacgtggatggctcagacctaacaaagacagtaaagttgttcagaatgatggaaaattaacatgtggggtggcccacaagagcaaatgcaatttgctgcaagtaggttggggtgggcggcattctgtgaggcctcccgtgttatctgaaagtttcactgcatttcttggtatactaaatctgcaggctcagtcctaaaacagtatctcagaccagaagcacaaagaacctcaaattatgaacttgatagttggaaggagtcttag

SEQ ID NO: 602812 - DNA, 532 bp, Homo sapiens
cactgctggtgcaatgtagtgtgaacagtgctgagaatattccatgactcttatttgccccccatcctggaccccgctgtctcctcctctcagcctgggcctcyctgtcaagagcatgtccatccctgtttgattctctctctgtggttcccaggaccctttgttcatagacaagcctattgatttccacttttttttttttttaagtcatggagccatcacatacttaatatactatccttcccaagggcattggaaatacaaataaacgtggatggctcagacctaacaaagacagtaaagttgttcagaatgatggaaaattaacatgtggggtggcccacaagagcaaatgcaatttgctgcaagtaggttggggtgggcggcattctgtgaggcctcccgtgttatctgaaagtttcactgcatttcttggtatactaaatctgcaggctcagtcctaaaacagtatctcagaccagaagcacaaagaacctcaaattatgaacttgatagttggaaggagtcttag

SEQ ID NO: 602813 - DNA, 532 bp, Homo sapiens
cactgctggtgcaatgtagtgtgaacagtgctgagaatattccatgactcttatttgccccccatcctggaccccgctgtctcctcctctcagcctgggcctctctgtcaagagcatgtccatccctgtttgattctctctctgtggttcccaggaccctttgttcatagacaagcctattgatttccacttttttttttttttaagtcatggagccatcacatacttaatatactatccttcccaagggcattggaaatacaaataaacgtggatggctcagacctaacaaagacagtaaagttgttcagaatgatggaaaattaacatgtggggtggcccacaagagcaaatgcaatttgctgcaagtaggttggggtgggcggcattctgtgaggcctcccgtgttatctgaaagtttcactgcatttcttggtatactaaatctgcaggctyagtcctaaaacagtatctcagaccagaagcacaaagaacctcaaattatgaacttgatagttggaaggagtcttag

SEQ ID NO: 602814 - DNA, 609 bp, Homo sapiens
attaagaaatgaaaaaatataaaagaaaatatctatgtattattacaaactcaccctaaaacctacccggaatagcataattgttgagggtttggagagtgggtgagtaaggggaaaacttctgggtgatattgataagtattctttaaagattttcaagaccagcattctgaaacaaattcataacctggatcagacagaaggacttttctggaagaagagaattaagcatctggacaatttttataaacacccacctctggctccagagcggtgagcttgctgctgatggtttttggctgggcatgagcagtctgaagagaagcgcactgttatgaaggtcaggctagccctgwgcagaggaggaggaagaaggctttcttgctaccacatcttgcagcaaaggcatgatcagtttgtttgagtgacaaagccaggaggaggttcagaagttggagacagtgtccaacttcctcccagtgaggggaaacaagtcctcgccttgagttttccccttcagaggaagacacacactcctccccaggtacagcattccactgatgggtggaagccctggcccttctcagccaaggccttaacagcaagcat

SEQ ID NO: 602815 - DNA, 588 bp, Homo sapiens
tggcatttacaccctctatattggaagacagcaggggaggagaggtttgggttggcagctgagttagatgtgcctatcacagaagtcatcaagatttcttgctccttaaaccactggcacaagcatcacctggagctttttagaaatgcagattataggtgctactccagacctattgaatcagagactgctgtttaacaagatccccaggtgagttgtgtgtacattaatgtttcagaggcacttcctagatcagagatctgcaaactacagcctgtgggccaaatccaggctgtgtttgtaaagctttgttggaacacagcatgtttatgtgtttatgaattgtcagtggctgtgtttgcactatgtagtggttaatattgagtgtgaatttgattggactgaaggatgcgaagtattgttcctgggtgtgtctgtgaggatgttgccaaagaagattaacatttgagtcagtggactgggagaggcagacccaccctcaattttgggtgggcaccatctaatcagctgctggmgtgaccagaataaaaagcagacagaagaacgtggaaagactagactggctga

SEQ ID NO: 602816 - DNA, 583 bp, Homo sapiens
atgatatttcctgatgtagatgagggtgtactgcagtaggctaatggcctccaaagatattcatgtcctaatgtctggaagctatgaaaatttctgtcttagttcgttttatattgctataaatgaataccacagactgggtaacttataaagaaaataaatttatkctttgaaagttctggaggctggtatatgaaggtaccagcatctggtcttcttgctgcattatcttgtagctttcttgctgtgtcatcccatggtggaaggaagaaagggaagagagtgtgaaagagggaggggaaaggggccgaactcatccttttatcagaaacccactcctgcaataactaatttattctaatatgaaagcattaatccagtcatgaagtcagagccctcatgacctaattacctcttaaaggtctacctctcagcgctgttttattaggaataaagtttccaacacatgagttttggggggacacattcaaaccacagcaggtattttataagacaaaagggatgctgcagacgtgattaagttaaggattcagggatggggagatatcctggattatctagg

SEQ ID NO: 602817 - DNA, 479 bp, Homo sapiens
ttgaacgaatatttcataaaagacgtaagtgggcaataaacacattttaaaatgataaacattagacatctgagaaatacatattaaaaccaaattgaaatattactacacatccactaggactgacactatcatgtgttggcgagattgcgaggcaattggaatttcatttattattgcttggatgataaaattgtacaaccactttggcagattattataatcataatgtgttaggcctttctcatgttgctgtaagtaaatatgtgagaccgcataatttacaaggaaaagaggtttaattagctggtggttccacrggctgcacaggaacgatgctgtcatctgcttgacttctggggaggtgtcaggaaacttccaatcatggcagaaggggaagggggagcaggcatgtcacatggctggagcagcaagagagagagaaaggggaggtgctacacacttttaagcaaccagat

SEQ ID NO: 602818 - DNA, 479 bp, Homo sapiens
ttgaacgaatatttcataaaagacgtaagtgggcaataaacacattttaaaatgataaacattagacatctgagaaatacatattaaaaccaaattgaaatattactacacatccactaggactgacactatcatgtgttggcgagattgcgaggcaattggaatttcatttattattgcttggatgataaaattgtacaaccactttggcagattattataatcataatgtgttaggcctttctcatgttgctgtaagtaaatatgtgagaccgcataatttacaaggaaaagaggtttaattagctggtggttccacaggctgcacaggaacgatgctgtcatctgcttgacttctggggagrtgtcaggaaacttccaatcatggcagaaggggaagggggagcaggcatgtcacatggctggagcagcaagagagagagaaaggggaggtgctacacacttttaagcaaccagat

SEQ ID NO: 602819 - DNA, 479 bp, Homo sapiens
ttgaacgaatatttcataaaagacgtaagtgggcaataaacacattttaaaatgataaacattagacatctgagaaatacatattaaaaccaaattgaaatattactacacatccactaggactgacactatcatgtgttggcgagattgcgaggcaattggaatttcatttattattgcttggatgataaaattgtacaaccactttggcagattattataatcataatgtgttaggcctttctcatgttgctgtaagtaaatatgtgagaccgcataatttacaaggaaaagaggtttaattagctggtggttccacaggctgcacaggaacgatgctgtcatctgcttgacttctggggaggtgtcaggaaacttccaatcatggcagaaggggaagggggagcrggcatgtcacatggctggagcagcaagagagagagaaaggggaggtgctacacacttttaagcaaccagat

SEQ ID NO: 602820 - DNA, 622 bp, Homo sapiens
atactagaggtaggaggttggtgactctcccaagtctttttcttccttaggtaatctacttcagccccagtagttctgactgtaccttcatatctgctattcctgtttcttataaatgtatgtttatttttattagtagctaattcccctttactatttaacacattgacattgaattttccctgttcaaattactggtataattttgcctcctgatgggaccttgattgatataataaggatgcaaatatttattattaatagattgttctgtgttagttatttgagattaacaattgttcctgctttttctaattattttccccaccccatcataataaaatcagatgaatcactcggtcttctttaccttagaggaaggatgcaccaggacaaaaagtataattaaaactaaatttgctgtgccaaactgcttaatctatagcaagctgcaaaagatttctaatatagattaaaaggctgtagaattaacacaaggttaaagtattcccttataccctacatatgccaactctcagtctagataaaaatgttaccttttgtttaagataaaaagtacagaaagaaaaggatgagggaaraaatggaactgtgccccaag

SEQ ID NO: 602821 - DNA, 486 bp, Homo sapiens
ctagcatattataaagttttaggaggaggttgtaggaatgcctgatttgcaggcagtctgttagacacacaagtgacaatctggacttgtaattggtgtctgaggtcagggatagtcttgtgggactgaaccgttaacctgtgggataggcattaaatccataaagttagtgtcagaattgagttagactgtaggatactcaatcagtgtccactaagaattggagaatcacttggtgtggcaaaacccccacacatctggtgtcagctttaaaaaattgacaagctttaaaaaatgtcgccagatwcttaaacaacaaaaatcgaaggccttccccctccccaataatattgcaatctttggagagatttcatcagattttttgtatgactttatgctttcaaaaacctctccctgtaaatcattgtgcatttttacatcttccataaatacaaaaggatttaaacaaattattactctatacct

SEQ ID NO: 602822 - DNA, 559 bp, Homo sapiens
acattatggataaaatcttcaatacttggttgtgaaagaaaacagacaaagtgcaataactccgggaccatgagttgtcaagtgggagatctgtatatmtacatatgtatgtacatatctatctatccatttatctatctatacattcagcttcattgaaagaatgtgaatgaattgaataaatgaatttaacttaaaggataattatccattgggagggaaaagaggtaaatatacaagagtgagaataaataatctatgatgtaaaatcctgaggaaagagaagagatataatacaaagcaaaaagtgggaagattatcctgggatagattaatacaatttaccagagttcctgtgattttaatatttgagtcatctttgaattcattggttttgcttttgtttttctagtatgaagcaatccaaacacctggtttccacatgcacaaaatgtattttacttacaggtatttctatttccatgcttgtctgttgtttatatttgcttttccgtgataatttcggctaactgagttaatgaagcttagtgaatcatgc

SEQ ID NO: 602823 - DNA, 577 bp, Homo sapiens
gatatattcaacatattttatagtctatgattttgaatattacttttgttcaacactacctatttagcaaatgcattgtgtttgattcttccattcatttattgcaaacaatgcaatataatccctttcttttgtttcttactgcagtcatttctactacttcagaaaatggaaaggaaatattaaaaaaaatcaccttatttttcccaaactgtctggaatgaaggatcaccttattcttcccaaacatgaatgaatatacactgaatgatcccaaggtcatcatagtatactatttaraaatgtgtgctgaaaagtcaagcaggactaaatttaaatgccaactaccacaaaccaactggaaatatttacaaaaaacaataaatattttcagatgtgattttatgcaagaatgtgttgtaaacactttagataaataagagtcaattttcctgtgatgaggtcgctgaagttaggtctcttccaaacctccatggaaaccaacaactgctgagctctcaggcagccaaccttgtatgaggctgagatgaaggactgagacaccggcccagtaagt

SEQ ID NO: 602824 - DNA, 505 bp, Homo sapiens
gatggtataattccttacacctgaatctgagggtctgagaaccagggcagtccacagtgtaaaattcagtccaagggccagaggagctgggatgagatgttctagctcagtcactgagacagggaaagagaagtgacttcttcctttttccacctttgttctatttagctttcaagggattggatggtgccyactcacactggggagtacaatctgctttactcaacctaaagattcaaatgccaatctcctccaagaacactgtcacagaaatacccagaaataacgtttaatctcagcaccctatagacagtcaagttgatgagtaaaattaaccatcacaatgtctgaaattacattatatatataatatatgatatatatacattttttactgtgctttgattattaggccacagagacatttattttaagttgactctgagaaacttttcagtctattctttgatctcacatgacattgacaagggccagatgatctatg

SEQ ID NO: 602825 - DNA, 636 bp, Homo sapiens
ggatggtgcctactcacactggggagtacaatctgctttactcaacctaaagattcaaatgccaatctcctccaagaacactgtcacagaaatacccagaaataaygtttaatctcagcaccctatagacagtcaagttgatgagtaaaattaaccatcacaatgtctgaaattacattatatatataatatatgatatatatacattttttactgtgctttgattattaggccacagagacatttattttaagttgactctgagaaacttttcagtctattctttgatctcacatgacattgacaagggccagatgatctatgtattcagttatattgtaatttacctttgggatattttagtggttttcttttatttttaatttgcatagctttaaaaacatgtaatttaaggtttaaaggaaaattaatctagaagaaggagacaaattacatttatttttactatgtatgtgttaaaaaagacaatatatttttggatagaaactataatacattctaagttgtttataaagtatggtactaatatatattaagtagaaaaaagtcaagaaaaatagtttttacattttttaatacatgtttctctgtaatctcaaattatttgacatttta

SEQ ID NO: 602826 - DNA, 636 bp, Homo sapiens
ggatggtgcctactcacactggggagtacaatctgctttactcaacctaaagattcaaatgccaatctcctccaagaacactgtcacagaaatacccagaaataacgtttaatctcagcaccctatagacagtcaagttgatgagtaaaattaaccatcacaatgtctgaaattacattatatatataatatatgatatatatacattttttactgtgctttgattattaggccacagagacatttattttaagttgactctgagaaacttttcagtctattctttgatctcacatgacattgacaagggccagatgatctatgtattcagttatattgtaatttacctttgggatattttagtggttttcttttatttttaatttgcatagctttaaaaacatgtaatttaaggtttaaaggaaaattaatctagaagaaggagacaaattacatttatttttactatgtatgtgttaaaaaagacaatatatttttggatagaaactataatacattctaagttgtttataaagwatggtactaatatatattaagtagaaaaaagtcaagaaaaatagtttttacattttttaatacatgtttctctgtaatctcaaattatttgacatttta

SEQ ID NO: 602827 - DNA, 498 bp, Homo sapiens
ctatcaagagaacagtgcaggaaagacccgcccctatacttcaatcayctccctctgggttcctcccacaccacgtgggaattgtggcagttacaattcaagatgagatttgggggggggacaaagtcaaacaatatcaggtatccatatgatttgtttgggccaatggaaggtgtgtagaagaaagaaaatgattagtaccaagctgaacacttaatagctattgcctgttctcatttgcacctataatggttctgccatttgctgtgagaatgcatgtactaggaaggtgttagtcaaagagataaaggagacatttgaggtacatctgtatctaaatgtcatccctgcttctggccaacatgtgagtgagaaaatactaattttgtttgttgccagccaatgagattttgatgccgtttgctatgaacattattgcagtaacagttgaactccaatcaatttctcctttagctaaattaaccagccatgataaca

SEQ ID NO: 602828 - DNA, 536 bp, Homo sapiens
tttgggccaatggaaggtgtgtagaagaaagaaaatgattagtaccaagctgaacacttaatagctattgcctgttctcatttgcacctataatggttctgccatttgctgtgagaatgcatgtactaggaaggtgttagtcaaagagataaaggagacatttgaggtacatctgtatctaaatgtcatccctgcttctggccaacatgtgagtgagaaaatactaattttgtttgttgccagccaatgagattttgatgccgtttgctatgaacattattgcagtaacagttgaactccaatcaatttctcctttagctaaattaaccagccatgataacacattcttctatctatatttgaacatgggtatattgaaaaacttacagtgtgttaatatgtgtgtgtgtgtgtgtgtaagagaaagctgagtctttgtccatgcattgctatgctgcttttcccttcatacactgagaaagcasccactcacttttgcaatgccacattcacactctttagaatattttacataa

SEQ ID NO: 602829 - DNA, 554 bp, Homo sapiens
atcttttgggttgtggtttcctccttcaatccaattccatctacttttcttaattcaggtatgtcttataatttatggtccacctaggaccaccagtgcactccttgtttgctgatatttccatggagttattctttgtttttgtatttttttttagacagggtcttgctctgttgtccaggctggaatacagtmgcatgcgatcatggcttactgcaacctcaacctcccaggctcaagcagttctcccacctgagcctcctgagtagctgagactacaggcatgccccactgtgcttggctaattgttttatttttgtggagacagggtctcctcatgttgcccaggcgggactcaagtgaccctctcaccttggtctcccaaagtgctgggattataggcatgagccaccgtgcctgaccacatttgttctttcaaaagtatcttttctgtcatttctaaggatcttgcaaaggaaagtgaggctagcacagcttctcaatctgccatctcctgaatatttctgttattatttgaactcttaaaaacatgt

SEQ ID NO: 602830 - DNA, 537 bp, Homo sapiens
ttagggcctaactgtgtagtctagaagtgcaacacattggtgctattgagagttaaaagtcagaactcatgatggagcctcggtcatgaaasagcccaaggcaggcagttgcccccagaatgataagacaacgtaaagagagaaaaagtagcttgaagctattcttgaaaagtcagtcagggagagaagcaatctaaagggaaagaagagtaggaataaaggtatagaggaatctgtagtaatttgagaaacagagcagagctgcatgatgtgcagggccaagacaggggtgcatgggacggggagttacgagctgcagaggggagaggtaaattaagcacggtttttgcaagctatgctgaagatcttagaagggccaacggacaacagtgaaagattttaagcaggaaagaaacatggacaccatcagactggtgtcagaaaccctgtaaagagaaactagaattccagaaatccaaagacaaagccaggagattctaaagatagagagagtaagaagaacaaggagaagtgggc

SEQ ID NO: 602831 - DNA, 520 bp, Homo sapiens
aaagagaaagagaaaagacacacagagagagagacagagagaacaggaaaaaataaacctaattcatcaccatttgaaacagctatttggaaaatggtaattaaaggggaagaatcaaacagttatactgtctttcctttaggaactgaattttagggtgactggaaagctccttaatgaaagaaaaccctgttttacctgtgtgccctttgacttgaatctcttgcataccttaggagctcaacaaatgtgtgttgattatggatgaatgcggaccacttggtaggaagtagccatgagtaactcacatcctgagtgatagccttggaaaaatagamctaggaatcacggccaggtcagcctgtgaagaaccaaactgcccatctcttattggcctacacttaagaaacagttcatattttaagtattaggtttgcttcatctacagacgatagcatttgagagactgtatgagtaagaactgttggctggaagcaacaaaaactgcttctgattaact

SEQ ID NO: 602832 - DNA, 556 bp, Homo sapiens
ctccctctgcctcacctgcctccagcttggagggtagtccactcatttgcgcttgatctctcaacccccagtccacctgtcctgagtgtgcatgttgcttctctgatgatggcatttgtcaatcctatttgacatcattctgcctttgccctttgtcctctttgcgtttctgattaatctgggcaatggccatcaaataagccatatagagccaaaataacactatataacaagaaccctaaaacctcactggtattccacaataagtgcttaatattcgagctstctttcatcatcttcctgggagcagtggcccaacccaggaatctcattctcctggtggtggcaaaggtaccagagaacaaacagaaacaagtctgattgtctcctgccgtgcaggcttgttggtaggactctcagagtcccaggtggtattatccagtgcatataaacagccaaagacaagctgaataagtatgttggatggcaaagcctttgtaaaagatttatcggcccctgcagaaacagcttttaaatcacccaagacctgtaattg

SEQ ID NO: 602833 - DNA, 571 bp, Homo sapiens
agggggagcattaggagaaataacaccatggcatgtgtatacttatgtaacaaacctgcatgttttgcacacktaccccagaacttaaagtattaaaaaaaaaaaaaaaagcatcacagcacatagaacccttctcatgattgacatctctgttttgccctggtgctgcagctctctgactccggcaggaggaagttatctgcctttaaaggcccattcagttaaagtgggctcacctggataatccaggctaaatccaggataatctccctatttaaaaatcagcagtaacactgctgtgggttgaattgtgtctcctgaaaaggtatgttaaagttataaccctggtactcatgaatgtgactttatttgtaaattgagcctttgcaaatgtaatcaagttaagacaaagtcagatgaggagtaggtggaccctgaatccaatctgactggtgtcctattaagaagaggaaaagacccagcactttgggaggccgacgtgggcggatcacctgaggttgggagttcgagaccagcctgaccaatatggagaaaccccgtctctactaac

SEQ ID NO: 602834 - DNA, 571 bp, Homo sapiens
agggggagcattaggagaaataacaccatggcatgtgtatacttatgtaacaaacctgcatgttttgcacacttaccccagaacttaaagtattaaaaaaaaaaaaaaaagcatcacagcacatagaacccttctcatgattgacatctctgttttgccctggtgctgcagctctctgactscggcaggaggaagttatctgcctttaaaggcccattcagttaaagtgggctcacctggataatccaggctaaatccaggataatctccctatttaaaaatcagcagtaacactgctgtgggttgaattgtgtctcctgaaaaggtatgttaaagttataaccctggtactcatgaatgtgactttatttgtaaattgagcctttgcaaatgtaatcaagttaagacaaagtcagatgaggagtaggtggaccctgaatccaatctgactggtgtcctattaagaagaggaaaagacccagcactttgggaggccgacgtgggcggatcacctgaggttgggagttcgagaccagcctgaccaatatggagaaaccccgtctctactaac

SEQ ID NO: 602835 - DNA, 571 bp, Homo sapiens
agggggagcattaggagaaataacaccatggcatgtgtatacttatgtaacaaacctgcatgttttgcacacttaccccagaacttaaagtattaaaaaaaaaaaaaaaagcatcacagcacatagaacccttctcatgattgacatctctgttttgccctggtgctgcagctctctgactccggcaggaggaagttatctgcctttaaaggcccattcagttaaagtgggctcacctggataatccaggctaaatccaggataatctccctatttaaaaatcagcagtaacactgctgtgggttgaaytgtgtctcctgaaaaggtatgttaaagttataaccctggtactcatgaatgtgactttatttgtaaattgagcctttgcaaatgtaatcaagttaagacaaagtcagatgaggagtaggtggaccctgaatccaatctgactggtgtcctattaagaagaggaaaagacccagcactttgggaggccgacgtgggcggatcacctgaggttgggagttcgagaccagcctgaccaatatggagaaaccccgtctctactaac

SEQ ID NO: 602836 - DNA, 617 bp, Homo sapiens
cgataaagtaaacagacaacctataaaattagagcactatcttttttgttgtaactgattttggtttctaatgtcaagtagttttgcaatatagattgagggtaaatgtttatctttctcctaaatctataaattccttaataattggcataatcaatttttatatatttttccatattactggatctcacacaactttttttctgtactccaattgtcagactacaaatgctccacctatctttcccataaatcacttaatcaagtgaaaatatgtattactatgaattawgcatcgaggaactttttctaatacatttgtataaatcctgaaaatattaataaatctgatatatagccgctgtcttggtgctattggtgtacatattacttgtatagaggaacctagaagtatatattcatttatatgcttggtttctagaatgagagatttagcaagcagggtattaaataatcttaatagcttgcaatttgaatacatcaaaagatacattttttcatgtaacctcagaaaatatcagggtacatagcctgtatcactctagaagatagatacctaaccgagaatataacaaaaacttggagagaaatatgct

SEQ ID NO: 602837 - DNA, 617 bp, Homo sapiens
cgataaagtaaacagacaacctataaaattagagcactatcttttttgttgtaactgattttggtttctaatgtcaagtagttttgcaatatagattgagggtaaatgtttatctttctcctaaatctataaattccttaataattggcataatcaatttttatatatttttccatattactggatctcacacaactttttttctgtactccaattgtcagactacaaatgctccacctatctttcccataaatcacttaatcaagtgaaaatatgtattactatgaattaagcatcgaggaactttttctaatacatttgtataaatcctgaaaatattaataaatctgatatatagccgctgtcttggtgctattggtgtacatattacttgtatagaggaacctagargtatatattcatttatatgcttggtttctagaatgagagatttagcaagcagggtattaaataatcttaatagcttgcaatttgaatacatcaaaagatacattttttcatgtaacctcagaaaatatcagggtacatagcctgtatcactctagaagatagatacctaaccgagaatataacaaaaacttggagagaaatatgct

SEQ ID NO: 602838 - DNA, 617 bp, Homo sapiens
cgataaagtaaacagacaacctataaaattagagcactatcttttttgttgtaactgattttggtttctaatgtcaagtagttttgcaatatagattgagggtaaatgtttatctttctcctaaatctataaattccttaataattggcataatcaatttttatatatttttccatattactggatctcacacaactttttttctgtactccaattgtcagactacaaatgctccacctatctttcccataaatcacttaatcaagtgaaaatatgtattactatgaattaagcatcgaggaactttttctaatacatttgtataaatcctgaaaatattaataaatctgatatatagccgctgtcttggtgctattggtgtacatattacttgtatagaggaacctagaagtatatattcatttatatgcttggtttctagaatgagagatttagcaagcagggtattaaataatcttaatagcttgcaatttgaatacatcaaaagatacattttttcatgtaacctcagaaaatatcagggyacatagcctgtatcactctagaagatagatacctaaccgagaatataacaaaaacttggagagaaatatgct

SEQ ID NO: 602839 - DNA, 611 bp, Homo sapiens
agtaaatatctaactacagttatacaaaatagagaaaaaaacaattatttgttggtgttagagcaccatatttattataaaattacatgatatttgaggtcagataaatgaataagggggaaatagaaattatgatgtttacattattttagccaggaattatattaaaatatatagtttccaaacataatacttgcttaattatgcctactaaaaagtctttgtctggtggcagttagaatacacaggaaatactgaaatttagatgtccagtgaattagctgtgtaattttgaaactatcccttaaccactcaggatctgttttctcatctgtaaacactttaccttggaccatgtaaccttagaatcraaagtttataaaagaaatgaggaaactccaagctctttaatatacaaaatgtgaaatagacaaaaattatatttcttaagaattgtagaaatttagaagcacataaatattcagcaaaatatgtggccaaattcctgacaagcaaactctggtgtatttgttcatcagcctaaattaaactgcaattgtacccaaaacagccttatatgtctatgagcttctgccaatatgcagttggat

SEQ ID NO: 602840 - DNA, 611 bp, Homo sapiens
agtaaatatctaactacagttatacaaaatagagaaaaaaacaattatttgttggtgttagagcaccatatttattataaaattacatgatatttgaggtcagataaatgaataagggggaaatagaaattatgatgtttacattattttagccaggaattatattaaaatatatagtttccaaacataatacttgcttaattatgcctactaaaaagtctttgtctggtggcagttagaatacacaggaaatactgaaatttagatgtccagtgaattagctgtgtaattttgaaactatcccttaaccactcaggatctgttttctcatctgtaaacactttaccttggaccatgtaaccttagaatcgaaagtttataaaagaaatgaggaaactccaagctctttaatatacaaaatgtgaaatagacaaaaattatatttcttaagaattgtagaaatttagaagcacataaatattcagcaaaatrtgtggccaaattcctgacaagcaaactctggtgtatttgttcatcagcctaaattaaactgcaattgtacccaaaacagccttatatgtctatgagcttctgccaatatgcagttggat

SEQ ID NO: 602841 - DNA, 494 bp, Homo sapiens
ctcttcagatgattctgatacatagccagagttgtgaaccatgggaataataaaagagagaaataaaaagtatatacatagagaaatatatatattcacaaggggcaagaagaacagaataaataaaaacagaatgaagagaaaagagtgtataagattgtaaaaaatgttgattcwgctaactttttgtttgtgttgactgtgctgacaagatgagcacattacagagggaagtagagtgtagagccttccactaggagtgattaggttattctataaaatatagtgacagtctgaatgccatattattctactttgtgaaacagcttaaccttaggtctatgttctcccagatcatcatttatacttacataactatacatcaaacacaatcttatttaaaccttaaacagtcctttgaggagtaagcattcttacactcattttttttatagatatgtaaactgaaacccagagcatttaattaacttgcc

SEQ ID NO: 602842 - DNA, 614 bp, Homo sapiens
gatctgtataatcacaaaataatttgactacattcattctcagcataatggcacctcctttcctcaaacatctggaaggaaaaacaatgaaaaattatgcmtgaattattctgagtctgaaagaaatgacaaagagtaggataaaacaaggtaagtttggagtgaaaatagtatgaaaaagtggagaaatgtgaatgtcgatttaaaagtgcacatttaaactttattaaaaatgacaggcttttctaaaaacaaatggaatctaggggggattcagagcaaaatggcagaatagaaggctccctcgattttcccctgcataaggacaccaagttaacaactatctgcacataaaaaaacaccttcataaaaaacaaaaatcaggtgagcacacagagtacctggttttaccttcctatcactgaaagaggcactgaatagatagcaaacacagttgtgattgccaatgccacacctccccaacaccaggcagccacagcttgcagagagtgtctcttgagcactgagggagaacgaacatagcaattttgaaacactgaactcggtggtgtcctattagagcagaaaggaaaaccgggagcattgaaactgac

SEQ ID NO: 602843 - DNA, 503 bp, Homo sapiens
ttctcctggaacttgtccaaaatcatcaaggggatatttgtataaatccataagatccacagcattactgagtttggggtgctccctaaagtagatacagcttattatatatacagataacacccaagtcctttcaaacattggaaaagccttcccaagaaagatgctaaaaataagcccagatagcaaggactgtaataaatacccaactcttcaatgccaagacaccagagaacatctactggcatcagaaccatccaggaaaacatgacctcrcttaactaaacaaggcaacagaaacaatcttggagaaacagagatctgtggcctttcaagtagataattcaaaatagctgtgttgagaaaaattcaaagaaattaaagataacacacagaaaaatttcagaattatatcagataaatttaacaaagtgattgaaataaaaaaaagaatcaagcagaaattctggaggggaaaaatacaatcggcatactgaagaatg

SEQ ID NO: 602844 - DNA, 631 bp, Homo sapiens
gtgaatcgacatatataccctataattcatcatataataagttgatttagattttattttatgtaagtttttagaagatcacctgtttcsattcgaaaatttaatccccaactttgtctaggtagcacatttcaggacagccctgcgaaatggtattttagttgatgttgacatgtatgtactattttctatagttaatgaattaaaatggaatattcttttgtctgccttattcactcctttttgcagttttctcaaggacattctaagagaactaaaaatcggtactggaatactggtattagatcatcagaacacggtcctctgagaatctcaataggctatgaatattatcaagtgcccttgagtcagtcatctcatacaaatgaattagaaatgaatttgtcactacttccccaattagagtagatattcaaggattgattgcaaaattatgagaatagaaatccagtttttgtgtagtacagctgcaaatagtttattttaagatttctgtccctggagatactcctcatgccttttctattatttcttttttctcaataatgatttagttcatcaccttcaaagcaatttgacctttgctacctccacccgccattgttatctg

SEQ ID NO: 602845 - DNA, 326 bp, Homo sapiens
cattagatgcatacatatttacagttactrtatctacttgataaattgctctttttattatataatgaccttgtttgtctcgtttcacagtttttggcataaaatctattttatataatagagacactcctgttctcttctcgtttctatttggacagaatacctttttctatccttatactcttattctgtgtgtatctttaaaagtgaagtgagtctctgtaggcagcacataattgggtcttatttttttattcagccaatctatgttttttaattggagaatttaacatttacattcaaggtaattattgacatgtaaggac

SEQ ID NO: 602846 - DNA, 326 bp, Homo sapiens
cattagatgcatacatatttacagttactatatctacttgataaattgctctttttattatataatgaccttgtttgtctcgtttcacagtttttggcataaaatctattttatataatagagacactcctgttctcttctcgtttctatttggacagaatacctttttctatccttatactcttattctgtgtgtatctttaaaagtgaagtgagtctctgtaggcagcacataattgggtcttatttttttattcagccaatctatgwtttttaattggagaatttaacatttacattcaaggtaattattgacatgtaaggac

SEQ ID NO: 602847 - DNA, 537 bp, Homo sapiens
gttggggaagttctcctgggtgatatcctgaagagtgttttccaacttggttccattctccccatcactttcaggtttggtcttttcacgtagtctcgtatttcttggaggctttgttcattccttttcattaytttttctctaatcttgtcttcatgctttaagtgtatcttcagtatctgatatcctttcttccacttgatccattcagctattgatacttgtgtatgcttcaagaagtattcgtgctgtgatttttagctccatcaggtcatttacgttcttctctaaactggttattctagttgcaattcatctaaccttttttcaacgttcttagcttccttgcattgggttagaacatgctcgtttagcttgaaggagtttgttattacccaccttctgaagcctacttctgtcagtttgtcaaactcattcgtccagttttgttcccttgctggcaaggagttgtgatcctttggaggaggagaggcattctggtttttggaattttcagcggttttgcactggtttctc

SEQ ID NO: 602848 - DNA, 537 bp, Homo sapiens
gttggggaagttctcctgggtgatatcctgaagagtgttttccaacttggttccattctccccatcactttcaggtttggtcttttcacgtagtctcgtatttcttggaggctttgttcattccttttcattactttttctctaatcttgtcttcatgctttaagtgtatcttcagtatctgatatcctttcttccacttgatccattcagctattgatacttgtgtatgcttcwagaagtattcgtgctgtgatttttagctccatcaggtcatttacgttcttctctaaactggttattctagttgcaattcatctaaccttttttcaacgttcttagcttccttgcattgggttagaacatgctcgtttagcttgaaggagtttgttattacccaccttctgaagcctacttctgtcagtttgtcaaactcattcgtccagttttgttcccttgctggcaaggagttgtgatcctttggaggaggagaggcattctggtttttggaattttcagcggttttgcactggtttctc

SEQ ID NO: 602849 - DNA, 539 bp, Homo sapiens
ggacattcctgtatctttttaaaatctctgtcaaatgtatatgtttctgggagggraaaaaaaatcccttggcaataagaagtttactcacacatcactgttggttgtgtacacactgtaattcagtgactcgatggccatccagcgcactgggagccttccctggagagaacaaagtgagatttcacttaactgggacagggtctttaagaggctctcagcctgcctgagctgtggctccacaaatgattgctgggtagactcagaaatcattgctttgtgtatgtcccagctacatgtgttttcaaatttcaaaacatgcaaatagtataagtcctatttatctttcggggtccagcagcgttatatgaatggaagtgtgagtgtgcacgcatggtagtcggtcattccttattcaccttatagccctcagaggcactccgaggtttgaaaggggagacaggcatagacactgagtgagaatttaactgtattaataatatggaaaagggaagcagggtggaaaagggaaactgggg

SEQ ID NO: 602850 - DNA, 612 bp, Homo sapiens
ctactggactccacacagacttgaaagagtggcacagacagagaaatggcaacacatatcatctatctgtcatcttgacactaaatgaaggccttagaaattctgttattccacaaacctgtacttactattcttgatgctgggaagaatggaaagcttctgagggctggcatttatatagtgcttacaatatgkcaggcattgatctagtctcttgtatatattaactcacttcctcttcatagcaatctttctgtaagtgctgaggtctggagagattaagtgacttagccatggtgacactactgttaagtagaagaaacaagattcaactcctggcagtctggctctgtagtccatagtcttagtgtcatgtggtctgtccttgccctaaatttatggagcagcaggcaggtcagtgtatacatgagaaaatgtgctaataacttttagtagacaaagtattatagggatttggggaaaagtggaatcacattccattcagggacacgggcaggatgagaaagagatgccttgaggttttccacatgtgaagatgacaggcaccgcagcatcactacattctcactcaaactctaaagggcacaggct

SEQ ID NO: 602851 - DNA, 572 bp, Homo sapiens
aagtcttaataatcctcccttagaggaggctttcaaaatcctccggcaaaattctggtgttttctgagctggacctsggtactcgactgctaaaattaaatcatggtccttttccaaaaatggtagcctgcaaagagggccctaattcttcatccctccctgtatccctgactctttgtcatttcagtttgtagtgccctctcactctgatactaggctcagctacttaactggcttaggttgataaaatgaagcagaagtgatagtgtacaattctgagcctaggttgcaaagagcctcatgtctacatctcatgtacatgaaatgtagatggcagtggtacaaaaaaatagaaacacatgaggctcctggcaacctaagctgagaattgtacactatgaccttatactaccttagcctgctatagtataaggaactgagcaaagttgccccagccaaggccagcctactaagcctatagccaggcaacaccatatatgtaaggaatcccaaccaaggtcaatacatccatctaatcaacacagctgacttagactcacaagctataaatg

SEQ ID NO: 602852 - DNA, 589 bp, Homo sapiens
gcgttatggcccatttcttaaaaaggggcagctggaggctgggcgcggtggctcatgcctgtaattccagcactttgggagattgaggcaggcggatcacctgaggtcagggagggatagccttaggagaaatacctaatgtagatgacaggttgatgggtgcagcaagccaccatggcatgtgtatacctatgtaacagacctgcacgttctgcacatgtatccaagaacttaaagtrtaataaaaataaataaataaataaaagagagacagaaagagagagagaaaaaaatggcagctggaaaagaatcaagagccatggacatatatgtccctttatgtctcatccttcagccctatatctactccaaatttcaaattacatccaaataatgcatttttctctttctctcttctttgaactaataataggaaatgtgatgttatctcacaatgctgaaaaataaaggagttaaaacttaatgctgaaaaaaaaagtagccaaacagcctttcagaaagaatagagcagaggctccacgacaatgagtacagctgtggtccgtggcttcttgaaagagttctgctg

SEQ ID NO: 602853 - DNA, 589 bp, Homo sapiens
gcgttatggcccatttcttaaaaaggggcagctggaggctgggcgcggtggctcatgcctgtaattccagcactttgggagattgaggcaggcggatcacctgaggtcagggagggatagccttaggagaaatacctaatgtagatgacaggttgatgggtgcagcaagccaccatggcatgtgtatacctatgtaacagacctgcacgttctgcacatgtatccaagaacttaaagtataataaaaataaataaataaataaaagagagacagaaagagagagagaaaaaaatggcagctggaaaagaatcaagagccatggacatatatgtccctttatgtctcatccttcagccctatatctactccaaatttcaaattacatccaaataatgcatttttctctttctctcttctttgaactaataataggaaatgtgatgttatctcacaatgctgaaaaataaaggagttaaaacttaatgctgaaaaaaaaagtagccaaacagcctttcagaaagaatagagcagaggctccacgacaaygagtacagctgtggtccgtggcttcttgaaagagttctgctg

SEQ ID NO: 602854 - DNA, 589 bp, Homo sapiens
gcgttatggcccatttcttaaaaaggggcagctggaggctgggcgcggtggctcatgcctgtaattccagcactttgggagattgaggcaggcggatcacctgaggtcagggagggatagccttaggagaaatacctaatgtagatgacaggttgatgggtgcagcaagccaccatggcatgtgtatacctatgtaacagacctgcacgttctgcacatgtatccaagaacttaaagtataataaaaataaataaataaataaaagagagacagaaagagagagagaaaaaaatggcagctggaaaagaatcaagagccatggacatatatgtccctttatgtctcatccttcagccctatatctactccaaatttcaaattacatccaaataatgcatttttctctttctctcttctttgaactaataataggaaatgtgatgttatctcacaatgctgaaaaataaaggagttaaaacttaatgctgaaaaaaaaagtagccaaacagcctttcagaaagaatagagcagaggctccacgacaatgagtacarctgtggtccgtggcttcttgaaagagttctgctg

SEQ ID NO: 602855 - DNA, 565 bp, Homo sapiens
ttattcaatttatttatggttaaaatttttcaataagattcttgctcaatatcattcatctttgtakttggagcagtgcatgcaaaagcacacagatgcatatataaatgcaaagtgtataccaaaatatatgcatgcataaaagtgtgtctcataaatatgtaagcatgcatgtatagcatgatgtacatagtatttctatgcgtgtgtgtataaatgcatgtgcatatatggatgtacacatgtataaaggtaatgcatgtatcacacagaaatatatgcattgtatatgtgaaatatataccatattcagttgatcattatttgcatattctgtgtttgcattctgtatcacctactcattaatatttctttgtcaccccaaaatcagtagttgcaacaccttcacagtcatttatggacattggcagagctttgaaaatttttgattgtctgacacacacattcccagctgaagtagaacaaggcaatattctgccttctttattcagctctcgttctgtaaataagtgtcatttttgcagcccacttaatgccacgtttt

SEQ ID NO: 602856 - DNA, 580 bp, Homo sapiens
tttaccatgcttatatcttttttaatgtgctatgtgtttttatggaacagacaagaataatcattaatttcagagaatttcttgtatcttttagtcgtgcctagaagcagtaatgacaagaaaacaatttagagagtaggaacagaaaaataggccacacgcggtggctcacgcctgtaatcccagcactttgggaggccgaggcaggtggatcacgaagtcaagagatcgagaccatcctggccgacatggtgaaactccgtctctactaaaaatacaaaaattagctgggcgtggtgttgtatacctgtagtcccagccactcgggaggctgaggcaggagaattgcttgaacctgggacacaggttgcagtgagctgagatcgcgccactgcactccagcctggtgacagagcaagattctgtctcaaaaaaaaaaaggggggggggggagtgggggaaggaacacaaaaatggtaagcttactgtaataatagtaataagccctgtaattgataccttaaggggaaagtaaccctggtatagtacaaataytaaattattatgtttatgaagggtc

SEQ ID NO: 602857 - DNA, 551 bp, Homo sapiens
tcatatgtgcttctcattagaacaaaagaggttctttctacatttgattgggtccaggttatctcaccaagagaaaatttgtgtgtgtgtggggtgggggggggggtatggctcaaattcagtcattatgtgtgaacttgatttataccagatttgtatatcttgctgccaatttttctatttctgctttttctgatgaaatatacccaatgttaaacaagttaatcaagtacaacaaatctagccaccaattacctgttcgtggcattgctatatgcacagtttcaccagtgtctggcgtggaatggaggatacctgtatattcatgtatgccyatataggcccttcctgtgtacaaacagtagagcaagttaactttaaatatgttaaaattatattacgctgctttgtttctaaagattctcgagatatggatgttcctctgatcatatcattcattatacaaaatgatttcattttatgatgaacttacactcctctccagagaatcttttacatcctctgctttgttaagaatactcatttcagaa

SEQ ID NO: 602858 - DNA, 541 bp, Homo sapiens
cccttgtaagttggattcctaggtattttattctctttgaagcaattgtgaatgggagttcactcatgatttggctctctgtttgtctgttattggtgtrtaagaatgcttgtgatttttgcacattgattttgtatcctgagactttgctgaagttgcttatcaaagtaaagccgatttatatttctaacaagatagttggtcaatttcgcttttgacaagaaaatgtccaaggaacatacggacttagagaaagaagagcatgagaaaggagcatattcctggctagacctctcttccacactctaatagaaaactctatcaaattagtattgactttgtgtaggacctctcataccttatccagataattctgggggcttacaaccaaagcaggctaaaagactttgtttatttgtacatcaatggtcaaactcaaatctctgtgctcttatctctccaatgcaagtaaggattaaccaaaagcatgtgaacaagtgaaaatttaaaaaaaacaaaggagcaagagagtttgtgccag

SEQ ID NO: 602859 - DNA, 591 bp, Homo sapiens
atgtttatgtccttgaaacagataagaatttggtgggataataattacaaccagcgtgatttaataaactgttttaagaccagaagacaaaagaaatgagtgtcatggggatttagggtacagattattttgtcacccaggtaaatgtgttgaaaagaacaaaaaacagaargagcaggaaatttcaaacttggcacattggctcatggatatgaaaagatgttttcttgcattgaagctccaggagctaaagttgtttcaattattctattcaaaacaagtcaccacacctgaagtccagttacagaagtagggaaaaaaggaaagaacaagagtacataaaaaagaacatctattattgccaatgttttagtccattctcttgctcctataaagaaataactaagactggataatttataaagaaaacaggtttagttggctcacaattctgcaggctgtacaggaagcaaagcagcttctgctactgggaatgtctcaggagacttacactcatggtggaagatgaagggaaagcaggcatcttacatggctggagaagaaggaagagagagggaggagaagctacac

SEQ ID NO: 602860 - DNA, 591 bp, Homo sapiens
atgtttatgtccttgaaacagataagaatttggtgggataataattacaaccagcgtgatttaataaactgttttaagaccagaagacaaaagaaatgagtgtcatggggatttagggtacagattattttgtcacccaggtaaatgtgttgaaaagaacaaaaaacagaaagagcaggaaatttcaaacttggcacattggctcatggatatgaaaagatgttttcytgcattgaagctccaggagctaaagttgtttcaattattctattcaaaacaagtcaccacacctgaagtccagttacagaagtagggaaaaaaggaaagaacaagagtacataaaaaagaacatctattattgccaatgttttagtccattctcttgctcctataaagaaataactaagactggataatttataaagaaaacaggtttagttggctcacaattctgcaggctgtacaggaagcaaagcagcttctgctactgggaatgtctcaggagacttacactcatggtggaagatgaagggaaagcaggcatcttacatggctggagaagaaggaagagagagggaggagaagctacac

SEQ ID NO: 602861 - DNA, 352 bp, Homo sapiens
tggagatatgggcctggagtggagtcatgggcctggaggtggagttaygggcctgcagtagagatatgggcctgaagtggagacatgggcctggagtggagatatgggccaggagtggagatatgggcctagaggtcgatatctgggcctggagtggagatatgggccaggagtggagatatgggcctagaggtcgatatctgggcctggagaggagatatgtgcctaggatggagatacgggcctgggtgtggagatatgggactggagaggatatatgggcctggagtggagatatgggactggagaggagatatggacctggagtggagataagggcctggattggaga

SEQ ID NO: 602862 - DNA, 616 bp, Homo sapiens
tggctttctgtgagcatgagatcacatagaaaatgtgaaagcccgctgaatcctccagcacggatcctggaatagagaaagtgctctgktcatcgcaaaaaaaaacttgcccactcacccaaatcccccacctcacccctacttccaatcacctgtggagattcagatagaccatggggaggaaacattaatactccttggagtgagtccagatcttggaatcagagatcagcgacagcactagctcctgttcccctttcctactaattcacaggaggacaggtggtattgaagcaatagatggtggagggggtggtccttcccccagcctctcgggtagaacagcagcctaacatgtgtctcccgagatcacaaagagcagcacatttcacacgggcttcaacactattttctggctgtttgacataagagaatcttgcttcgctatttttaatcgtgatttcacctttgtttcctttccttggtgaatgcaatttgtttgactcaagaatgctgtggatgtagaaatcctaaagcacattcgctgtgtatcaatcccagtgcagtcttcccagagaagactctaaacaaatcctggactgcacctgggcctatg

SEQ ID NO: 602863 - DNA, 616 bp, Homo sapiens
tggctttctgtgagcatgagatcacatagaaaatgtgaaagcccgctgaatcctccagcacggatcctggaatagagaaagtgctctgttcatcgcaaaaaaaaacttgcccactcacccaaatcccccacctcacccctacttccaatcacctgtggagattcagatagaccatggggaggaaacattaatactccttggagtgagtccagatcttggaatcagagatcagcgacagcactagctcctgttcccctttcctactaattcacaggaggacaggtggtattgaagcaatagatggtsgagggggtggtccttcccccagcctctcgggtagaacagcagcctaacatgtgtctcccgagatcacaaagagcagcacatttcacacgggcttcaacactattttctggctgtttgacataagagaatcttgcttcgctatttttaatcgtgatttcacctttgtttcctttccttggtgaatgcaatttgtttgactcaagaatgctgtggatgtagaaatcctaaagcacattcgctgtgtatcaatcccagtgcagtcttcccagagaagactctaaacaaatcctggactgcacctgggcctatg

SEQ ID NO: 602864 - DNA, 616 bp, Homo sapiens
tggctttctgtgagcatgagatcacatagaaaatgtgaaagcccgctgaatcctccagcacggatcctggaatagagaaagtgctctgttcatcgcaaaaaaaaacttgcccactcacccaaatcccccacctcacccctacttccaatcacctgtggagattcagatagaccatggggaggaaacattaatactccttggagtgagtccagatcttggaatcagagatcagcgacagcactagctcctgttcccctttcctactaattcacaggaggacaggtggtattgaagcaatagatggtggagggggtggtccttcccccagcctctcgggtagaacagcagcctaacatgtgtctcccgagatcacaaagagyagcacatttcacacgggcttcaacactattttctggctgtttgacataagagaatcttgcttcgctatttttaatcgtgatttcacctttgtttcctttccttggtgaatgcaatttgtttgactcaagaatgctgtggatgtagaaatcctaaagcacattcgctgtgtatcaatcccagtgcagtcttcccagagaagactctaaacaaatcctggactgcacctgggcctatg

SEQ ID NO: 602865 - DNA, 616 bp, Homo sapiens
tggctttctgtgagcatgagatcacatagaaaatgtgaaagcccgctgaatcctccagcacggatcctggaatagagaaagtgctctgttcatcgcaaaaaaaaacttgcccactcacccaaatcccccacctcacccctacttccaatcacctgtggagattcagatagaccatggggaggaaacattaatactccttggagtgagtccagatcttggaatcagagatcagcgacagcactagctcctgttcccctttcctactaattcacaggaggacaggtggtattgaagcaatagatggtggagggggtggtccttcccccagcctctcgggtagaacagcagcctaacatgtgtctcccgagatcacaaagagcagcacatttcacacgggcttcaacactatttyctggctgtttgacataagagaatcttgcttcgctatttttaatcgtgatttcacctttgtttcctttccttggtgaatgcaatttgtttgactcaagaatgctgtggatgtagaaatcctaaagcacattcgctgtgtatcaatcccagtgcagtcttcccagagaagactctaaacaaatcctggactgcacctgggcctatg

SEQ ID NO: 602866 - DNA, 579 bp, Homo sapiens
tgtggaaggaagaggctctgcctcaaatgctgggaatgaggtggggagaatgacaagacgactgtggagagacggagagcacactgggtacacaggaaactaaggagcaacaaggagtgtgtgtttgacactcacagccattggattcacctcggggtagccaggaatccctacatgattaatagtgactgacatgaaaataagggaggcccaggtgcrtaactggaatctaggagactgtggaaaaggcaattcccgccccactggtgaaatgtggtgctgatttagaccctaactgggtgaagcagatggatataagctatgcttgtgaggtggaatcattggctggaaaggcttgctgggtatgattttcctagttgtctaatcctcgcttaatttctttctgagctttattcctactacacataaatcaatacctggcaaaggagtgacagatatatgaggggtggtggaaatgaagggacctattatagcataatatacaagtctgtgaacggtggctcacgcctgtaacccagcactgcaggaggccaaggcgggtggatcacatgaagtcag

SEQ ID NO: 602867 - DNA, 411 bp, Homo sapiens
tatgcaattgctatgctatttttttttttgagacagtctcactctctcacccaggctggagtgcagtggcgtgatctcaactcactgcaacctccgccttccaggttcaagcgattctcttccctcagcctcctcagtagcctcccctaggattacaggcacgtgccaccctgcacagataaatttttttgtgtgtgtatttttagtagagacggggtttcagaatgttggaccagctggtcttgaactcctgaccttgtgatctacccagctcagcctcccaaagtgctgggattacrggcgtgagccacggtgcccagcttcactatgccatttcatgcaaggggcttgagcatctgcagattttggtatctgaatggggatcctggaaccaatcacccaggtatagtg

SEQ ID NO: 602868 - DNA, 414 bp, Homo sapiens
tctcttcttacttggatgccttataattctttctctttcctgatggctctgtctaggacttcaagtactatgttgaataggatggtgagagtgggcattcttgtcttgtttcacttatgaagggaacttcttccagcttttactcattcagtatgatgttggttgtgggtttgtcayaggcggctcttattatattgagttatgtttcttcaatgcttagcttgttgagggcttttaacatgaagaaatgcttagtaaaaagtatgttctacatgtgtgttgagaagatcatgtggtttttgtttttagttttgtttaggtgatgaatcacatgtattgattgtgtatgttcaaccaaccttgcaccctaagaataaagttgacttgatcatggtggattcactttttgatatg

SEQ ID NO: 602869 - DNA, 614 bp, Homo sapiens
taacaagtaaatgcataaacaaattgtgatatgtttatacaatagaatactacttggaaacaaaaccaaaaaaactactggtatgtatagcaacatgaatgaatctcagaaaccatatgttgaacaaagggagccagaaacagaagagtatctgccatgctgttcattcattaaaaattcctggataggcaaaactaatctacagtggtgaaaagcagtggttgcctggagctggaggttggaggattgagtgcaaaggggcaggaaagggttttgggggataaaaatgttcaatatcttattgtgctgatagttacatgggtgtctatatctgtcaaaacattagcactttgagaggctgaggtgggcagatcatttgaggtcaggagttcaagaccagcctaatcaacatggtgaagcccatctctactaaaaatacaaaaaattagccaggtgtagtggcacacacctgtaatctcagctacatgggaggctaaaacacgagaattgcttgaactcaggaggtggaggttgcagtgagcccagatcataccactgcactccagyctgggcaacagagcagtgagactttgtctcaaaaaaaaaaaaaaaat

SEQ ID NO: 602870 - DNA, 488 bp, Homo sapiens
gtaggtctgaactgatcatatgaatcctttaaatctgggtcagagacactggagtcagacagatccagagcatgggaaggatcaatgcattattggtggctttaaagatggaaagggtcacatgagaagaaaataggtagactgtaggatttgagagcgacccctggctgacaaccagcaaggaaatggaaagtcagggggccttagaatcaactgaactragaaaatgaattcatgaccacatgagcttgaaaggggatgctgagctcctgcccacagcctgactaacactttgattttaggcttgtgaaaccctaacagaaaaatcagttaagtctgactggacttctgacttacagaaatgtgtgataataagtcaatattattttgatctactgactgtggtaatttggcatgcaacaatagaaaactgatgtaatgctctcaatcatataaattggtaacattattttaaataaggaaagtga

SEQ ID NO: 602871 - DNA, 488 bp, Homo sapiens
gtaggtctgaactgatcatatgaatcctttaaatctgggtcagagacactggagtcagacagatccagagcatgggaaggatcaatgcattattggtggctttaaagatggaaagggtcacatgagaagaaaataggtagactgtaggatttgagagcgacccctggctgacaaccagcaaggaaatggaaagtcagggggccttagaatcaactgaactaagaaaatgaattcatgaccacatgagcttgaaaggggatgctgagctcctgcccacagcctgactaacactttgattttaggcttgtgaaaccctaacagaaaaatcagttaagtctgactggacttctgacttacagaaatgtgtgataataagtcaayattattttgatctactgactgtggtaatttggcatgcaacaatagaaaactgatgtaatgctctcaatcatataaattggtaacattattttaaataaggaaagtga

SEQ ID NO: 602872 - DNA, 586 bp, Homo sapiens
tgggaagggccttgatattctgaatgtctaacaagctcccagatgatgctgatattgttggtccatgtgtcacaatctgatgacgtagaatggcagggagacttgtgaaaatttttaatatatggtattttcatataattcaaatggtacatgtgaacactgaacatttgtaaatgaagagattaattaaagatgtaatactaataaacgctttaaatgaaatagttattctccatacagatatcctggcacgagaacaatatgggcaccttgaggaacatcttcatatcttaagataaatccataccaaatgagaaacaggagtcattctgacctaacacttgctttttatgttctggctggaatgtgttggtgagggaatgagtgttttagaaaaggatataattatacctcatgctaaatgacgagttaatgggtgcagcacaccagcatggcacatgtatacatatgtaactagcyggcacattgtgcacatgtaccctaaaacttaaagtataataatataataataatatagtacaatattaaactagaaattttccattggtataaaaaaaaaagaaaa

SEQ ID NO: 602873 - DNA, 577 bp, Homo sapiens
gtttcactattctaggagtttctcttgttatctttttcatatgaattttagaataatcttatttatacctaaaaataatgctgtcattttgacagagatttttcttggattttttaaaataggtataccagctaggggagaatttaagtctttattatgttgggttttccaaaatataaatagtgtgattttctttgatttatttcaccagctttttgtagtatttttcttttctgaaggtcagttatatatattttttgttagatttatacatattttattttttcagtgattgtaaactattgttaatgttttgtatatgtawgtttaatgctagtatatagtaataaaatcaatttctatatgtttatctgagttttttaaataagcaatgatgaattaattcaaatttttctgcattaatataatcatatattgtttctttcaactgtcaaatggtagattactttgattgattttcaaatatcaaaccaatgttgcatccttgtaataaacaccacttacgcatggtgtataattatttttatatattgctaaattctatttgctagtattc

SEQ ID NO: 602874 - DNA, 581 bp, Homo sapiens
atatgtttggtgctcatgaacaaatatctatgaaacacagaatggagtaccaaatgagaaacaacatacaataatttttgttttgtgtggctgaaattttagtatagaagacaaactatgaagataaaggtaaaaacaggcagatcaagaaaatgatgagtggtgttctatagagattgtttaggaaaggatcctagacaatatttcacctaaacagagacttrcattaagtaaagtaatttgtgataacattgggaaagatcacattaagcagagggaagagattgagcaaagcattgaggcaggaataagcttagtgagtccatggaacagcgcatagataggctagtatggttggaatggagagagccaaaaggaaagtgaaaagaaatgacttcaaaaaagaagtcagaggtgagattatgcaacacctttttggtgataatgaagaatggattttattttgacattagacaattttgaatatggaagtgatgcagtatcttttttataggtaagaacctagtagctgtatggagacaaataatagcagtaggtgatgaatgtgagcaagatatttg

SEQ ID NO: 602875 - DNA, 543 bp, Homo sapiens
taaaacagtgctatccaatagaaatatatgaaatacatgcataattacaatttttctagcagccacattagaaagcagcagtgaaattagcagcatttcatttaacccaatatatacaaaatatttcaacataaaaatattaaaagatgattaatattcctttttggactaattcaatataggcaatgtgtggtgttctataattacagcacacctgaattcagcctagtcgcattctaaaaggcttcacaaccacatgtggtgagtggctaccattgtgagcagtgcgggtctagcacagccaccatctgtacaatcagcaaagacatctctgactgtaaatgggaatctgcagcaccttaactaaggttatctatacacatcccagtgtgrctcaaattcagatagtggggggagacaggagtaagacttccattttcttatatgtcctgtgggttacctgattttaaaagatttgggacatttaacaattagtgtcttctctcctttggtatccctcatgacagctataaataagaaaga

SEQ ID NO: 602876 - DNA, 465 bp, Homo sapiens
agtagcaaaaggctggcctcactgtttatgggtagttgtgatggtggccatcttagtgtcagaggctatcaaaataatacaaggaaaggatctcattgtctggactactcatgatgtaaatggcatactaggtgccaaaggaagtttatggctattagacaactgcctgctcagataccaggcactacttcttgagggaccggtgcttcaaatacgcatatgtgtggccctcaatcccgccacttttctcccagaggatggagaaccaatcaagcatgactgccaacaaattatagtccagagttatgctmcccaagaggatcgcttagaagtccccttagctaatcctgaccttaacctatatactgatggaagttcatttgtggagaatgggatacgaagagcaggttatgccatagttagtgatgtaacaatacttgaaagtaagcctcttcccccagggac

SEQ ID NO: 602877 - DNA, 199 bp, Homo sapiens
tagctatttgttttggtcgtctcacaaatctatcatctgcagatttatttagcaagtctgaaaaattcatactttcattgcttgtctactcagtcttcgagggatcatgtaagaattaaatttaggaaaaacaattagmaagataagagatgaatggattctccacacgctgaataatagataccagatggcttttgag

SEQ ID NO: 602878 - DNA, 635 bp, Homo sapiens
cataaagctcctctagtggaaaagacatacataaacctgtttatcttgtttttacatttaatttgcaagcctcttgaaggaaaggaccacttttcatcctgcggtacaagagagattcccaggaatgcctcttaacatgaccaatgccctgtatctttatttatatttatgtttaaaactgactgtgtatttgcttctaggactcttaagattttcagtgaacagttgaatcttaaacccttcttgggggatacaaaggaaatgaagagggtgaagcctgtgttcaagaagcggccaggatggtgcccaaatctagggatttacaggtcaagtcatggcttgcactttatttcaattattctgtagagtcactccttcaaccagccgtgctgacttcacaccttttgcactagtgccaaggccagactcaataacttttccacttacgtagctttatctagcagttaacaaacatggatttatccttggaaaatcatttcaratgaaagtttctctgtttaaaattattccaaatagataaagtcacaagtttctcctaatacacataaatataacttgatttcccaaaacaaaaaaatagaacactttaaattcacaaaggtactatggctact

SEQ ID NO: 602879 - DNA, 601 bp, Homo sapiens
gttgaattatggctgctgtgattggctgagaatgaactatttgttatgagaagattatagtcggcttctacatccagttaagctatagttcactatgtacacagaagcctgcaagcagaacttaacatatgtaaggaggcagctttaggctaaacttaatttaacacaatgaatgtttgtggaatgagcttcactggactccctaaactgatgaaaacatctgttttatcattcaaattctagaagggttttttttaaccaaaataattaataagcagttactaagcattaactacatgcacaaaagctgagtgctaggggttggggaaaataagtaacatgtattaaatgttactgtgtgccagtcactattctagattctttaataagtgaattaatgcatgcaacagctttataaggagctagtattattattcccrtgttatgagggaaattgcagcacagagaagattataagctcgataatgccactacttgaactctctaatgtcaggataaataaattaaaatgaagtaaaatctctgctttcagcagtctcataaagagacatgtacataggtatctatttcacatgcaaac

SEQ ID NO: 602880 - DNA, 720 bp, Homo sapiens
tgctaagccttgggcattgtagctaatcatttagtaacattgaaaggctccttttatggaggcttccccatcatcaatgaactcattttatataaatatttagctaggcaataaactggacagcctatattactcaacatcagcctcaaaagaccctcccgattttatatacacagcatcctggtagagtaatagattttacacgcatgacatggttagcggtaaatacaccagggtaggtcaaaccctgtttggttctctgcttttaactgtcttgggctttgtgtgtttctttaatcagttggatgatttagataaacaaaatrtattagtctttgtaagtataacatgccttgaactttttccagatattcattcccattcatcatcataatagttgctcccccttggccatcattaagattagaaatgtccttgaaccatttaatgatattccacaagactggacagacttttcatgccttgatgaattgcgatcactcagcttagaccaatgaaattggatatcctttaatgtgcctgatgactttaaggaatttaggaaaagcagtgctgcagcatcaaaatggcttcacagaataaccatccatttggggaaagatgcatggcttatgtaaaaattgatgaatgagttagatctaatctaatagctaactgcaatgagtattatttatttgttcatattgctaaatatggttt

SEQ ID NO: 602881 - DNA, 383 bp, Homo sapiens
ttgtccaaatgcttgtcacattggttcacactgaaaacagctttaaaatcacctcgcataaaatgtagtaatgtcataagacttctcagaatcctatgaatataacttcaataatattactcaagcatctatatgtttaaagacagacttaatcagtcttttgagtactgattggttttgratttccatacttttattttaattttgagacgtcttagttccaaggctgaaacaacttaattgcttttgcaacagaattccctacctttgatgggaagccaatgacagagactcctcagagggctgagttgttctgcctgtctgagccacttttattcaattattttacatctagagctcacaattttcctctgccatttccg

SEQ ID NO: 602882 - DNA, 515 bp, Homo sapiens
ctgtataaaaagacaaagaaggccgggcgcagtggctcacttccataatcccagcactttgggaggccgaggtgggtggatcacaaggtcaagagatcaagaccatcctggccaatatgataaaaccctgtctctactaaaaatacaaaaattagctgggcgtggtagcgcacacctgtagtcccagctactytgaatgctgaggcaggagaatcacttgaacctgggaggcggaggttgcagaccactgcactccagcctggcgacagagtgagactccatctcaaaaaaaaaaaaaaaaaaaaaaaaagacaaggaaaatcttgaaagaaaccaaaggaaaaagcaccttacctaaagaagaacaaggataaggattacagtggacttctcatcagaaccataaaagcaaaaagagaatgaaattgctatgatttgagtatgtccactccaaaatttatacgttgccagtgtgagatatgtgtgtgtatatacatatatatatatgagggcat

SEQ ID NO: 602883 - DNA, 584 bp, Homo sapiens
gagaaaggcaacacctgagtgcttaattgagataacagaagtactgaacgaatctcagtaattagagccatcacaaatgagatgcctagaaaatattaaatagcatggtctaacagtgtattatattgcaggaatgaaccctgctataatgacgtataggtttatcacattttgaaacataacctaatttttgctgtttattttcagtttacagtaaacatttttattttaaatgcaatattctgagactataacttgttttattctgcataatcatcataacctcaattaagactctattttcaratttaatttgccataaatggtcatctgaaagtctcaaccaaaatcaaagtcattttaggaaggagtctgagaacaaggcaatcctgcagcactaaacatttccttctaggatttctctagtctagggattagtaaaataggcaaaattgaaattataccattattcaattcactcagtacttctgttatctcagttaagcactcagatgttaccgttatccctactcttctttctctctctgttttagaatagttacttttcctagatattgtacaat

SEQ ID NO: 602884 - DNA, 584 bp, Homo sapiens
gagaaaggcaacacctgagtgcttaattgagataacagaagtactgaacgaatctcagtaattagagccatcacaaatgagatgcctagaaaatattaaatagcatggtctaacagtgtattatattgcaggaatgaaccctgctataatgacgtataggtttatcacattttgaaacataacctaatttttgctgtttattttcagtttacagtaaacatttttattttaaatgcaatattctgagactataacttgttttattctgcataatcatcataacctcaattaagactctattttcaaatttaatttgccataaatggtcatctgaaagtctcaaccaaaatcaaagtcattttaggaaggagtctgagaacaaggcmatcctgcagcactaaacatttccttctaggatttctctagtctagggattagtaaaataggcaaaattgaaattataccattattcaattcactcagtacttctgttatctcagttaagcactcagatgttaccgttatccctactcttctttctctctctgttttagaatagttacttttcctagatattgtacaat

SEQ ID NO: 602885 - DNA, 594 bp, Homo sapiens
ataaacagggagcaaaagatagggaataactgggagttcctactaaaagagggtggtcaaggaaggacttgatggaaaagtgacacttgagtcctgagctgggggaataaaaggaccagctctgcaaagaactcaggagagccagtcaggcagacggaatcacaaacaccaaagccttgagataggaaggactttggcatgactaagggatggaaaagagactggagaacagtgtgtaaggaagaaagtggcacatgaacttgcagaaaaaagcaaggattttgcaggtcatgataaagaatatggctgttctaggattggtgaggaagcagccattgaagagcttctaaatgatggctccatctgatcagtggakaatgagagggaagaacatagatatgttagaaaatttcacaataattcaggtaagaggtgatgggatgtggaccagggtagagaagagtggatggatgcaaggcacagttctgagacagagccaacaggatatgctgttggattgcatttcagagttaagaagtgaagagtcaaagacagcttccagtttcacaagggtagagttcatgtcagtggatt

SEQ ID NO: 602886 - DNA, 594 bp, Homo sapiens
ataaacagggagcaaaagatagggaataactgggagttcctactaaaagagggtggtcaaggaaggacttgatggaaaagtgacacttgagtcctgagctgggggaataaaaggaccagctctgcaaagaactcaggagagccagtcaggcagacggaatcacaaacaccaaagccttgagataggaaggactttggcatgactaagggatggaaaagagactggagaacagtgtgtaaggaagaaagtggcacatgaacttgcagaaaaaagcaaggattttgcaggtcatgataaagaatatggctgttctaggattggtgaggaagcagccattgaagagcttctaaatgatggctccatctgatcagtggataatgagagggaagaacatagatatgttagaaaatttcacaataattcaggtaagagrtgatgggatgtggaccagggtagagaagagtggatggatgcaaggcacagttctgagacagagccaacaggatatgctgttggattgcatttcagagttaagaagtgaagagtcaaagacagcttccagtttcacaagggtagagttcatgtcagtggatt

SEQ ID NO: 602887 - DNA, 594 bp, Homo sapiens
gtataaaatgtattatgatctaatgagggtaattagcatatctatcacttcaaacatttatcatgtctttgtgttgggaacttcaaaatcttttcttctagctgtttgaaaatatacaatagattattagtaactatattcagcttatattgctacagaacactagaacttattcctttcatctaggtataattttgtatctgttaaccaactcctccttatcttcttctctccattttaccctttccagactctaataatcacaattttactctctacttctgagctcaacattattttagctcccacctgagtgagagcatgcagtatttatgtttttggacctgacttatttcacctaacaggatgtcctcctgactcatctatgttgttccaaatgacaggatttcattcttatggctaagtagtattctattgtgtatttgtgtgcrtgtgtgtgtgtgtgtgtgtgtgtgtgtgtgtgtgtatgtaatgtatgtatgtatatggcacattgtctttactcacttaagttgattctatgtcttggctattatgaacagtgctgcaataaacatggaggtgcagatatct

SEQ ID NO: 602888 - DNA, 571 bp, Homo sapiens
catttgctgatgtgctattgccctaagtctcccccaccccatcctaacagcttttaataccctaaagtttcttactagtgtattacatttttaaaggaagagttcttggctgtgtctccagaagagactgcacagagtcactgacccacaaatgtccttcttaaattaatactgattgtttgtctcatcaatccataagacacgtttggtttgttctagttccaacatttccttctcaccaaaatttagattcctttccctagagactttagttgaaactctaccccatattatatctaattcataacaaaccctctcagtgcaatctgggatttaacaattagctaagatccatatttcaaaaatatgtaagttgatggaataattcagtagtctcccagacttgaaatttaaatctgagcagttgaactagactatcattgactgggttcttttgaatgccaatggaattaggrgcctctatttgtacatgccctcaaatgaatggtttggggttggtttgctcttggttctctagttctttatttatgatgttaggttgttaatttga

SEQ ID NO: 602889 - DNA, 594 bp, Homo sapiens
aagtagcagcatacaaaatcaaagaggtggtcaactgggaaacacacaccaaaatagaagaaatatagcaaagccagccgctccagcatttcagcaagaccccactccctgtatcctgggttataactcttcctgagtattgctggcctttcttataagggtgattggaacaaggaacctagctgtattcatcttcttacctctacagcagcatttaagttccaagactagaaacttaatatttgatgaatgaatgaacaaaggagtgaawagaatggcaaataacatgaaagaagatagcaggagagttagaacaggagaggacaagacgacgacaaaagtttccgttgtttccaccaagagcaacacaactttgcctgagagcctgagcaagttttcttcacacctggccatcatacagtgtttttacagacaaaagatcagcactgcttccctctgttttcttcccctgcttccctccctttcttttcaaactaggaaagtttgtataagtatgttactgcacagaccactgggcaaatggccaactgtcctctggggaaaagccaaacctgattctcattttaaagcgat

SEQ ID NO: 602890 - DNA, 594 bp, Homo sapiens
aagtagcagcatacaaaatcaaagaggtggtcaactgggaaacacacaccaaaatagaagaaatatagcaaagccagccgctccagcatttcagcaagaccccactccctgtatcctgggttataactcttcctgagtattgctggcctttcttataagggtgattggaacaaggaacctagctgtattcatcttcttacctctacagcagcatttaagttccaagactagaaacttaatatttgatgaatgaatgaacaaaggagtgaatagaatggcaaataacatgaaaraagatagcaggagagttagaacaggagaggacaagacgacgacaaaagtttccgttgtttccaccaagagcaacacaactttgcctgagagcctgagcaagttttcttcacacctggccatcatacagtgtttttacagacaaaagatcagcactgcttccctctgttttcttcccctgcttccctccctttcttttcaaactaggaaagtttgtataagtatgttactgcacagaccactgggcaaatggccaactgtcctctggggaaaagccaaacctgattctcattttaaagcgat

SEQ ID NO: 602891 - DNA, 594 bp, Homo sapiens
aagtagcagcatacaaaatcaaagaggtggtcaactgggaaacacacaccaaaatagaagaaatatagcaaagccagccgctccagcatttcagcaagaccccactccctgtatcctgggttataactcttcctgagtattgctggcctttcttataagggtgattggaacaaggaacctagctgtattcatcttcttacctctacagcagcatttaagttccaagactagaaacttaatatttgatgaatgaatgaacaaaggagtgaatagaatggcaaataacatgaaagaagatagcaggagagttagaacaggagaggacaagacgacgacaaaagtttccrttgtttccaccaagagcaacacaactttgcctgagagcctgagcaagttttcttcacacctggccatcatacagtgtttttacagacaaaagatcagcactgcttccctctgttttcttcccctgcttccctccctttcttttcaaactaggaaagtttgtataagtatgttactgcacagaccactgggcaaatggccaactgtcctctggggaaaagccaaacctgattctcattttaaagcgat

SEQ ID NO: 602892 - DNA, 634 bp, Homo sapiens
tattataaattatggagccattacaaaccatgttttcagccgggcgyggtggctcacgcctgtaatcccaacactttgggaggccgaggagggtggatcacgaggtcaggagttcaagaccagcctggccaacatagtgaaatcccatctctactaaaagtacaaaaattagctgggcgcggtggcaggtgcctgtaatcccagctacacgggaggctgaggcagaagaattgcttgaacccgggaggtggaggctgcagtgatcccagattgcacaactgtactccagcctgggcgacagagcaagactctatctcattaaaaaaaaaaaaaatgtggtgacactgaacaaaataaggatataaaacaatttggaaaaccaaacggggttattgtacattgtcttccatgtactctcctgcacttaccaaattttcttcagtgaacatagacttattttatatttagaaaaaagcaataaacatttacaccaaaaaaaacctctcagcattcacagacaatcaaaacaacctgtagaaatgccactaacagtatctttgaaagccaaaccatcacactattctttgtattgcagttacccagaatgccacagagattttcatatgaaggagac

SEQ ID NO: 602893 - DNA, 483 bp, Homo sapiens
ggggggtcaagcacagtggctcatacctgtaatcccaacactttgagaaaycaaaacaggaagactgtttgagccaaagagtttgaggccagcctgggcaacatagtgagacccccatatctaaaatttcttttcttttttttttttttttttttggaaattagccagatatggtggtgggcacctgcagtcctagctactggggaggtggaggtgggaggatcacttgagcccaggaaatagaggctacagtgagctgtgaatacgccactgcactccagcctaggtgacaaagcaagaccctgtctcaaaagaaaaagaaagaaagaaaaaaaatgaaagaaaaatggaaaaaaaacctttaaagaaaactgataaggaaaatataagaaaagaaaggaaagggaatcaacaggtataaactgccctcaacctctagtaagtgaggatccttattattactttacacataaggaaaatggg

SEQ ID NO: 602894 - DNA, 643 bp, Homo sapiens
gaggtccaggcagattaagaaatgactagtgaggggaggacatagaattgaaacttctagtcctgaccttggtcctcttttcaccatatcatagcttttagtatattcagctctctcttgaaataaaatttgcctatctgcaactctcacttggtggtattatttctgatctctagatttaaacagaaaaaaaaagttcctattggtttgtttgtgtgttgcatttcaaacagaacttgaactggctaataccttatgtaatggcatctsttcttcaagctaagcatagtcatttctttcaagcaggaaggtccaaagaagtgaaaaaacagagatgtggaggaaagattcctaatacactttccttccaggaggactcagcaggaacactctctggcttcctgggcagcaaatccaaccaggaggatcttaattaagagtcttgctttaagtgtatatagatttaaattttaaaaaagaaagatatgtgtgtgtgtgtatatatatgtatatatacacacatatatatatatatatttaagtacatttgctcatgtatggttgctgaaatgaaaataccatcatgggccatgcacagtggctcacacctgtaatcccagcactttgagaggccaaggtgggc

SEQ ID NO: 602895 - DNA, 643 bp, Homo sapiens
gaggtccaggcagattaagaaatgactagtgaggggaggacatagaattgaaacttctagtcctgaccttggtcctcttttcaccatatcatagcttttagtatattcagctctctcttgaaataaaatttgcctatctgcaactctcacttggtggtattatttctgatctctagatttaaacagaaaaaaaaagttcctattggtttgtttgtgtgttgcatttcaaacagaacttgaactggctaataccttatgtaatggcatctcttcttcaagctaagcatwgtcatttctttcaagcaggaaggtccaaagaagtgaaaaaacagagatgtggaggaaagattcctaatacactttccttccaggaggactcagcaggaacactctctggcttcctgggcagcaaatccaaccaggaggatcttaattaagagtcttgctttaagtgtatatagatttaaattttaaaaaagaaagatatgtgtgtgtgtgtatatatatgtatatatacacacatatatatatatatatttaagtacatttgctcatgtatggttgctgaaatgaaaataccatcatgggccatgcacagtggctcacacctgtaatcccagcactttgagaggccaaggtgggc

SEQ ID NO: 602896 - DNA, 553 bp, Homo sapiens
acatcaagtgtatttgtgcggcatggggtatggaaagtggataggagagaatgtaaagagaatacttagcaaggactacaatttgaattgagcttgagaggaaactatagtttcaggaaaagcgagaatagcactgcattgcaggctaattttagaaaaaaaaaatctataacctagataagttactgttgcaaccyacctaggttaaaaaatttagcgtgtaaagcccattaagaacattctggaagttgtcaaactattgtcagaaaacttcatgaagaaaccagggaataatttctgcctttaaaagtagtcagggggttgggcatggtggctcacatctgtaatcccagcactttgggaggccgaggcgggcgaatcaccaggtcaggagttcgagaccagcctggctaacatggtgaaaccccgtctctactaaaaacacaaaaaaaattaactgggagtggtagcggtcccctgtaatgcagttactcgggaggctgaggcaggagagtcgcctgaactcggggggcagaggttgcagtgagccgac

SEQ ID NO: 602897 - DNA, 546 bp, Homo sapiens
tgggcaaagaattttcgtgtaagaccacaaaagcaaggcattgcaagccataatagctgaatgggattatatcaagctaaaaaccttttgcacaaaaaaggaaacagtcaataaaataaagacataacttaaatgggagaaaatgtttccaaactatccatctgacaaaagattaataaccagaatatataagaagctgaaatggctcaatagcaaaaagataataatctaattgcaaaatgggcaaaagatcctaaatgacatttctcaaaagaaaacatacaaatgaccaaaagtatattttttaaaaaaatgcttaacatcactaatcatcagaaaaatgcaaatcaaaactacaatgaaatgttttaccctagttaaaatggtatttataaaaaaataaagaatattgatgctagtgaggatgtggagaaaggggaacccttgcacactattggtgcaggtacaaattagtatagccactgtggataactgtatgaaggttcctcaataaatgaaaaaatmacaactaccttaggatccagc

SEQ ID NO: 602898 - DNA, 476 bp, Homo sapiens
gtgttactgattggactgccaccatcttcaggactgcctcaggaattggtgaaggctcgagtctgtagatgggaatcatcatctgtagaaagttgggaaagacattgagcagaggaaataagacagtgacagacaacatgtagagcttgctagaaagggaaaataattcatataagggcaacatagttgaagcaaaagggaaaagactgataattacttatacayaccattatggccatacctactataaaatataaaaatacttccttactagttggcacatagcagctctactaagtcctcaaagtgtcctcctttccttaccctgccacctcttagtccctcctgagatggtctagcatagaaggcctcttggaccctgcttcagccactgtccattctggttgctaatgctcatgcatcatcagttattccatattttgctatgttcctgagaggcttaacctacattgtgg

SEQ ID NO: 602899 - DNA, 537 bp, Homo sapiens
ggaaagttttcagccatgatttcttcaaatattctttctgctcctttatctcctctccttctgtgagatgatttttaaatgatctaaatgctttaaaaacctttaatggtctaactgggagtaaaatgtgcagaacactaggcccaccctgcctaggtcctgaagctgcccatggagcccccggggtctgaggagggcaacagtgaargcaagcttaaagcattcactgccacgggagccaggggttggtcacttattacttggtcctttctcaccttaagagtaggatagaggtgtccagagctcagctcatcagactgatggggcctctcacatatccccagggcagtggaagggggattggacactggcaggaagactgggaaaccccaaaacagagggagaaggtgctagaagccaattctgaatgtcaacaaagggcagtccatccttgtggggtgaggctgtgcctaggccatggtctagtcatggtctagccatggtccggccaatgtcagcactgaaccaagaaggatt

SEQ ID NO: 602900 - DNA, 537 bp, Homo sapiens
ggaaagttttcagccatgatttcttcaaatattctttctgctcctttatctcctctccttctgtgagatgatttttaaatgatctaaatgctttaaaaacctttaatggtctaactgggagtaaaatgtgcagaacactaggcccaccctgcctaggtcctgaagctgcccatggagcccccggggtctgaggagggcaacagtgaaagcaagcttaaagcattcactgccacrggagccaggggttggtcacttattacttggtcctttctcaccttaagagtaggatagaggtgtccagagctcagctcatcagactgatggggcctctcacatatccccagggcagtggaagggggattggacactggcaggaagactgggaaaccccaaaacagagggagaaggtgctagaagccaattctgaatgtcaacaaagggcagtccatccttgtggggtgaggctgtgcctaggccatggtctagtcatggtctagccatggtccggccaatgtcagcactgaaccaagaaggatt

SEQ ID NO: 602901 - DNA, 571 bp, Homo sapiens
taccatcttctcaacaacccccatcctctccctggtcactagcaggggccccacaaccctccacactcagctcctgcagatggtggggcaacccggggtccaagtcytgccttgtaagtccaggaccatggtgcctgcctggaactccatctccctctgcactcttatcctgggcaagaactctggggccagaggggctggaccctgagtgacaacatcactacttatcagccgccatcttaagcaagccaccttccctctctgagtctcagtttcctcccttgtaaaatggagatactaatacccttctacctacccgaggtcaccgttgagattagttgagatacaatggctaagcccttggcacatgaggtgtgctcaggaattgttaactactgctctggtcatggagggttatggccacttcagcctgtgctacctctaaatgggccccatgattccctctgtctctgcctccacttgttagcccttgagccatgctttctggaaccttcaccctgacaagatgacaaagagaagccccagggagggacttgggtttcttgactct

SEQ ID NO: 602902 - DNA, 571 bp, Homo sapiens
taccatcttctcaacaacccccatcctctccctggtcactagcaggggccccacaaccctccacactcagctcctgcagatggtggggcaacccggggtccaagtcctgccttgtaagtccaggaccatggtgcctgcctggaactccatctccctctgcactcttatcctgggcaagaactctggggccagaggggctggaccctgagtgacaacatcactacttatcagccgccatcttaagcaagccaccttccctctctgagtctcagtttcctcccttgtaaaatggagatactaatacccttctacctaccygaggtcaccgttgagattagttgagatacaatggctaagcccttggcacatgaggtgtgctcaggaattgttaactactgctctggtcatggagggttatggccacttcagcctgtgctacctctaaatgggccccatgattccctctgtctctgcctccacttgttagcccttgagccatgctttctggaaccttcaccctgacaagatgacaaagagaagccccagggagggacttgggtttcttgactct

SEQ ID NO: 602903 - DNA, 571 bp, Homo sapiens
taccatcttctcaacaacccccatcctctccctggtcactagcaggggccccacaaccctccacactcagctcctgcagatggtggggcaacccggggtccaagtcctgccttgtaagtccaggaccatggtgcctgcctggaactccatctccctctgcactcttatcctgggcaagaactctggggccagaggggctggaccctgagtgacaacatcactacttatcagccgccatcttaagcaagccaccttccctctctgagtctcagtttcctcccttgtaaaatggagatactaatacccttctacctacccgaggtcaccgttgagattagttgagatacaatggctaagcccttggcacatgaggtgtgctcaggaattgttarctactgctctggtcatggagggttatggccacttcagcctgtgctacctctaaatgggccccatgattccctctgtctctgcctccacttgttagcccttgagccatgctttctggaaccttcaccctgacaagatgacaaagagaagccccagggagggacttgggtttcttgactct

SEQ ID NO: 602904 - DNA, 630 bp, Homo sapiens
acctgttggccaatctcccccatcccgccttccttccccagcacatagtaaccactattatactctctacttctatgacatcagctttttaaagtccgcaaatgagtgagatcatgtggcatttgtctttctattttttctatttgtcttcctattcttgttatctttgatcacatccttgtgatcttccaggcctcagtcccaatgtatcaaactcaggcattgggctccatctcgaatccttcgctctgacaagctcccaagtcgattattccatgttgagttgatagagcctacaggctgccctggggtcatcaatacaatttattaggctagtgctagaaaggggcatgggggaccacacagctctcttgggcatggggtccagtaagcacttgcacaattgtggggaggaacartctgagattctcctgcttagacctgggagggcctggtcggggagactgaaactgagaagaaggctgaggccagacccgccttcctcctctggcgctctctgagggcacctggcctggctgctttctcttgggaggggaatgtgggtatcccaccacacttcaggctggagttcttagagcctgttctggttccaaaaactgtctgatccat

SEQ ID NO: 602905 - DNA, 630 bp, Homo sapiens
acctgttggccaatctcccccatcccgccttccttccccagcacatagtaaccactattatactctctacttctatgacatcagctttttaaagtccgcaaatgagtgagatcatgtggcatttgtctttctattttttctatttgtcttcctattcttgttatctttgatcacatccttgtgatcttccaggcctcagtcccaatgtatcaaactcaggcattgggctccatctcgaatccttcgctctgacaagctcccaagtcgattattccatgttgagttgatagagcctacaggctgccctggggtcatcaatacaatttattaggctagtgctagaaaggggcatgggggaccacacagctctcttgggcatggggtccagtaagcacttgcacaattgtggggaggaacagtctgagattctcctgyttagacctgggagggcctggtcggggagactgaaactgagaagaaggctgaggccagacccgccttcctcctctggcgctctctgagggcacctggcctggctgctttctcttgggaggggaatgtgggtatcccaccacacttcaggctggagttcttagagcctgttctggttccaaaaactgtctgatccat

SEQ ID NO: 602906 - DNA, 630 bp, Homo sapiens
acctgttggccaatctcccccatcccgccttccttccccagcacatagtaaccactattatactctctacttctatgacatcagctttttaaagtccgcaaatgagtgagatcatgtggcatttgtctttctattttttctatttgtcttcctattcttgttatctttgatcacatccttgtgatcttccaggcctcagtcccaatgtatcaaactcaggcattgggctccatctcgaatccttcgctctgacaagctcccaagtcgattattccatgttgagttgatagagcctacaggctgccctggggtcatcaatacaatttattaggctagtgctagaaaggggcatgggggaccacacagctctcttgggcatggggtccagtaagcacttgcacaattgtggggaggaacagtctgagattctcctgcttagacctgggagggcctggtsggggagactgaaactgagaagaaggctgaggccagacccgccttcctcctctggcgctctctgagggcacctggcctggctgctttctcttgggaggggaatgtgggtatcccaccacacttcaggctggagttcttagagcctgttctggttccaaaaactgtctgatccat

SEQ ID NO: 602907 - DNA, 599 bp, Homo sapiens
taaaaatgaaatcaatttggagaaaaacctcaatccaaaaaaaggcaagmagagaacaaaaggcagatgggacaaacaaaataaatagcaagatggttggtttaaatttaactatattgagaattacattaaatataagtgataaacatttaattgaatggcagagattgtcagatttgataagaaagcaatgctcaatgcaccattatcagtccattgtctcttagttctaagtcctccctacattgtcctgtttgtaatactgtaactgttctcccttgccatctggaattatatgaagctttatcagtacagggcactggagaaatactttagtcttttttttttttaaatagtatgtattgatcattcttgggtgtttctcggagagggggatgtggcagggtcatagtactttagtcttcagtattctctttttcctttagttggtaaactcctgttataattaataattttttttacatattccctgttaaaactactgtgttgtttctgtctcctgtttggactctgactatatggaattgataccagaagtggtcccagaagataaccccaccaagataagatttggagat

SEQ ID NO: 602908 - DNA, 512 bp, Homo sapiens
tgcaccaccatgctcggctattttttttttatttttagtagagacagggtttcrccacgttggccaggctggtctccaactcctgacctcaggtgatccgcccaccttggcctcccaaagtgctgggattacaggcgtgagccacggcgactggccgctttgttcctctttgaaactcaggttatttggttgcctttctggtgagctcaagaaaagttacgattttgtagtttattcaacttcttctcattgttaggaaaggagtggtggtctttgcagctaagcaaatgcagaaacctataccaactattactgtaataggattgtaggcaatgctaattctctatattatataattatgtaacatttgaatttttacatgtgcattttggttttataaatagaaaaaagacaatatgtgtaagagaaacagaatcagtagaatatatatgtgtgtgtgtgtgtgtgtgtgtatatatttataccatatacataagatatatatgatacaa

SEQ ID NO: 602909 - DNA, 584 bp, Homo sapiens
gaggtccaggtactggcattgttaaattcaatgcttgggtcacctctggattcattttcacagtcttttagcttttggtcatatgacattgtatttttcctgccacatgactagtctttttggctaaatgtaagacactcgttaaaaatatttagcaatgaattgaggcctactagcacgttatcttgctgyagaaaagatgggagtctatttctggggaatgggcaggggtcctagcacacctagacaccctccataccatccgcaattgaggttatcagtgaggttcagtccctacaaaagtcagggtgtttcctgtccacctctattcctggcgtgtgactcttctgggtcccaaccaaagccagtggacttcagtaggggtcaccttcactagcagaccctcagtctacttgttttccatctagtcctccacatggtgcaaaagctgctctgcttctttgcatctcagttagtcccttctgaaattcagtgaggaaactgagggaaatgagccccaaatgtgaggctgaccctcgtcctgggttccttcttctccatcttggcctcatgtctctttattg

SEQ ID NO: 602910 - DNA, 518 bp, Homo sapiens
aagaccgtttgtcaagaagggaagcagaagggggacgagagggtcttgcaggcagagctggaatcgacttccactctgcttcttgcaagctgtgtgatgctaggtgaaatttctccttcctctggagcctctattttcttagatttggagcagggtggtcacactgaccttgtagatttctgagaatcagagacagcacatgaaaagcctggaggccattctcttaagagtagctgtgactcatgtgtggacaatgggcttttcatgcttctgtttctctctgtttatctgatgcaaggaacatgctccggtgatgatggtgagggaggaattagratagacatagacacccctgtgtcagaaacatgcttctttattactgggttatgactctgtcttcccagggacaggcccccagcctgcgtacatttgcagacagagtggcgtgtggggatagcagtttgtccccacgacttttcttcactcccctgctgttggcaggactcagttgaagggag

SEQ ID NO: 602911 - DNA, 561 bp, Homo sapiens
agccccttctctgccccagtgcagggcttggccttagcacacggtcagtctgtgctggggtgaagtgatgaatgagtgagtggttgagtgataatgcatcatcagatctgtcttttccacatgtctcyatctccacccagaaccagttttctcatccacaaatgggcatttgaggctgggtgctcctaaaccctacaaaattcagagctggcacagttggggactgaccttccttgatctcacctcactttctgtatctataaaatggggtacctttctctaagagtaaaaaggaggcctggcatagggaaagaaactcagctcgagcatccagaacatccatcttgctctcaaatacctaatacaggggaccatgttttctgctataattggtattggagctggtaccatttattaaaggtaattcagttacaaagcttcaattattaaaactgtgtagtaaacgtgtatatatggacagacaaatagaagaggaagtccagatgtagacagaaatccatacagaaatagagaatgggacaaaggaaacatctcaatgca

SEQ ID NO: 602912 - DNA, 589 bp, Homo sapiens
ggatgtcaacggtgactctaaggtccctaagttgtttggtttcttttgtttctttgttttgagacagggtcttgctctgttgcccaggctggagtacagtggcgtgatcttgattcactgcagccttgatcctctgggctcaagcaatcctcccattttagcctcctgagtagccgggactacaggcacatgccaccatgcccagctaatttccttcttttattctttctttctttctttctttctttctttctttctttctttctctttctttctttctttctttcttttcttctctctctctctttctttctttctttctatctttcttttragacgggtttcatcatgttgcccaggctggtcttgaacagctgagctcaagcaatcccctgcctttgcctctcaaagtgctaggattacaggcgtgagccaccgcagccagccacctggccccaaaggcagcttcatcccttcaggtcctccactctcagccaattcattcagccactgagacagtcattttgcatttgttggaagatgttaaattgcaactgcatgctcaggccaagactctggtgatgcacag

SEQ ID NO: 602913 - DNA, 596 bp, Homo sapiens
agctgttcctgagttgggggcctcggaaattcgagctgagccacacgctgccggcaggcaggagaggacctcttgaaagccacttctaaggccctggcctggcctcgccagcagccccaggattagctctgcagacttctctgagtcctggacatctgcagcctggaatccccctccctctctcgcagccccatggggcagcccctgtgacaagggaagggagaacagacagctgtgacctggaaggggggctagaagggcctctggctggcctaaaactcagagattgggacagagcaatggtgcaggagcygactggggcctcattccagaaatgccttcccctttctccatcttgtgagcctgaaagagatgggggtgagggaaaaataaaaggcaataacatctgcacaggcccaccaggcaccagggaggtgctgggtgctgtacctgatgcttaccgccatctcaaagttggtcttattacttctagccttcatttgagaagacaggctcagagaggttaggtaaattgcccatagtgacccggtaagttagtagtagtgtcaagacagaaggaaacccagaactaggtc

SEQ ID NO: 602914 - DNA, 633 bp, Homo sapiens
gcagtcatgtctccttagcctcctcttggctgtgacagtttcccacaccttccttgcttttgatgactttgactattttaaggagtgttggttaggtattttgtagaatgtccttcaattgggatttgtctgatgtatttcttgcggttagaccaggcttgtgtgttcttgagagaaagaccatagagatgcattatatcaagcttacatactatcaacatgacgtatcactgatgtgcaactttgctcamctggccgagatcgtgtttgtcaggtttatcctctgtaaagtcattctttctaccccacactccaccgctttccacactgtattcatcacaaggaagtcactatgcgcagctcacgtttaaggactggggagctatgttctacatccttgagggaagagtatttccacaaattatttgagatttttctgaacaggagatttgacttttctcccctgtttatttattaaatcattatttatatcagtatgagctcacaggtatttattttgtactttgggttataatccaatactactttatttacttgctcaaattgttccagctttggctattaggagttctttcagtatggcagtttgacacatacccattattgtgggtg

SEQ ID NO: 602915 - DNA, 572 bp, Homo sapiens
gtgggatggagtaaaaagctaatgccagtgctcaatccaccaatttcaactggaggtatccgcctttcctttcatagaggttcagacttgagctccctcaggttgaggttggtagagcccgcatcagtaaagtcacggcaactgtgactccaaatctctctccctgcacctgtcccagtaaagctaggttccaaccctctscccttagggctttgaaggccctaacctattgagaagggagaggaattggctcaacattctgaaatggaggccccagagtatggtggtgtctggatatggctcagcctggagaaaagacactgatggggggacacggaaaaggggcaaagttggcaggaaccccaagaatacacttgaaactaaatacttctccagtccctgcttgtcacctccaccctcatttcctaacaaatagtgcctcgcagcagaccttctggaggaaacaacagaggtgataaagattagggttagatagagtccataaagaaatgactcatcattaaatggaatcctctccctctgcccacccctcacagcctcggcctttaact

SEQ ID NO: 602916 - DNA, 611 bp, Homo sapiens
cactatgttgcccaggttcttctcaaactcctaactcccagtgatcttcccaccttgaccccttcagagtgctgggattacagggctgagccaccacatctggccccagaactcttgttaatgtcttctttttttccccttttaaatttaggattgaattaaatttattcatttatgacttcttcttaaaataagacatgccccaataccttctactagctggatattttttctatttaaagtcctttaattattttcttcaaaattatttctaaccccttagtctctctctctctctctctctctctctctctctyttttttaaagagtctcactctgttgcccaggctgaagtgcagtgctgcgatcttggctcactgcaacctctgcctcctgggttcaagcaattctcatgcctcagtctcccaagtagctgggattacaggtacgtgccaccacaccctgctatttttttattttttagtagaggcagggtttcaccatgttggcaaggctggtcttgaactcctggcctcaagtgatccacctgcctcggcctcccagagtgctaggatgtcaggcatgagccaccgcacccggcctaaccactt

SEQ ID NO: 602917 - DNA, 611 bp, Homo sapiens
cactatgttgcccaggttcttctcaaactcctaactcccagtgatcttcccaccttgaccccttcagagtgctgggattacagggctgagccaccacatctggccccagaactcttgttaatgtcttctttttttccccttttaaatttaggattgaattaaatttattcatttatgacttcttcttaaaataagacatgccccaataccttctactagctggatattttttctatttaaagtcctttaattattttcttcaaaattatttctaaccccttagtctctctctctctctctctctctctctctctctcttttttaaagagtctcactctgttgcccaggctgaagtgcagtgctgcgatcttggctcactgcaacctstgcctcctgggttcaagcaattctcatgcctcagtctcccaagtagctgggattacaggtacgtgccaccacaccctgctatttttttattttttagtagaggcagggtttcaccatgttggcaaggctggtcttgaactcctggcctcaagtgatccacctgcctcggcctcccagagtgctaggatgtcaggcatgagccaccgcacccggcctaaccactt

SEQ ID NO: 602918 - DNA, 508 bp, Homo sapiens
tggtcatgagcaacatcaaagacatcaaagataaatcaagccaagacagggtcagaatacatcagtaagggaagaatggcagacaaggcaaatgtgggcctgtccttagaggtggggcctccaataagcttcccaaggaatcttgctcaaccaagggcagttgttgccttttgcttggggcaacctggttcttcccagtgtatctttgagctgatctctccgaatttcaaagagcccatgcctgctcaggccatctctattcatgttggatgactgtctctcttataaactctgggcagactacgaatcagtccttaggggctaggagaggagaggagaggatatgctggatgatcactttctgcaagtctccagaacctcctgttgacttctgtgtgatggtcaacytgagacgtcttgttcagtgcaaatgaatgtgttctttttggctgacacatttagtaggaacaaatgaatgtgaaagagtaggagatgctataaggtaggg

SEQ ID NO: 602919 - DNA, 598 bp, Homo sapiens
caccagcacagctgttgctcagaagggaccaggagggctggttgccccagaaaaggaaagatattctccaagaacagtcctgggagaagcattttgttgtgtttttgcaaggaygtggggatccaagttttgtctattaaaggaaaggaatggccctgttctgtttgtgtgttcagagcgcacggctgtgctcagagatgttcgtgcaccctgcggtggtatttttccattctcttgtttagaacccctgggcatttagacacatgtcctgcacacagctcagcatctgtgatcacatggtggtttagaactgaggtcttggttctaaaccaaggaaagattcaagtgtctgtcccttgctgcttccaggccaggccagccagctcttgagaagtgtggctccttcaggtccggatgggtggctccctcattcaacagacatatactggacacctgctatgtgcaggtactgtttcgagcacttggactgcatgacgcaacaaaacaaaactccttgccttcccttgtggggcatacattggaggggagtttagccctcagcaggagcatgcctgttttctttctcactggctaccgt

SEQ ID NO: 602920 - DNA, 428 bp, Homo sapiens
ctaggttaaatgtccaaacctaagaataattggtgttcctgaggaagaagagaaatctgaaagtgtggaaaatatatttgagggaataatcgaggaaaactttcccagccttgctagagatctagacatccaaatacaagaatctcaaagaacacctgggaaattcatcacaaaaagatcatcacctargcacataatcatcaggttatctaaagacaaagaaaagaatcttaagaggtctgaggcaaaagcatcaggtaacctataaggaaaagcctattagattacaaaagatatctcagcagaaaccctacaagctagaagggattggaatcctatatttagtctccttaagcaaaacaattgtcaggaaagaattttgtatccagtgaaactaagcttcctaaatgaaggaaagatatagtctt

SEQ ID NO: 602921 - DNA, 428 bp, Homo sapiens
ctaggttaaatgtccaaacctaagaataattggtgttcctgaggaagaagagaaatctgaaagtgtggaaaatatatttgagggaataatcgaggaaaactttcccagccttgctagagatctagacatccaaatacaagaatctcaaagaacacctgggaaattcatcacaaaaagatcatcacctaggcacataatcatcaggttatctaaagacaaagaaaagaatcttaagaggtctgargcaaaagcatcaggtaacctataaggaaaagcctattagattacaaaagatatctcagcagaaaccctacaagctagaagggattggaatcctatatttagtctccttaagcaaaacaattgtcaggaaagaattttgtatccagtgaaactaagcttcctaaatgaaggaaagatatagtctt

SEQ ID NO: 602922 - DNA, 616 bp, Homo sapiens
tcttcgtcacctgcacacaaacactcaacttcagataaaagtctttctctatgaaattcactctagagattttggaatagcaattgttccatcacatgcatagacataaattcagrgacacaacatgaaaaataaagaaatatggcaccaccaaagggacataataactctcaaataacagacctcaatgaaaaaaattcacaaatattcaaaaaaggaattcaaaataattaccttaaagaaactcaatcaggagggtggctggcaagatgactgaataagaaaagctccagtcagcagctcccagcgagatcaatgaagaaggtaggtgatttctgcatttccaactgaggtacctggctcatctcactgggaatgtttagacagtaggtgcagtgcatggaggctaaactgaagcagggaggaatgttgtctcaccttggaagcccaagggattggtgaactccctcccatagccaaggaaagccttgagggaatgtgctgtgaagaacggtgcactctggcccaaatactgcagtttttccatggtcttcacaacccacagaccagaagattcccttcagagcctacaccaccagggccctgggtttcaagc

SEQ ID NO: 602923 - DNA, 616 bp, Homo sapiens
tcttcgtcacctgcacacaaacactcaacttcagataaaagtctttctctatgaaattcactctagagattttggaatagcaattgttccatcacatgcatagacataaattcagggacacaacatgaaaaataaagaaatatggcaccaccaaagggacataataactctcaaataacagacctcaatgaaaaaaattcacaaatattcaaaaaaggaattcaaaataattaccttaaagaaactcaatcaggagggtggctggcaagatgactgaataagaaaagctccagtcagcagctcccagcgagatcaatgaagaaggtaggtgatttctrcatttccaactgaggtacctggctcatctcactgggaatgtttagacagtaggtgcagtgcatggaggctaaactgaagcagggaggaatgttgtctcaccttggaagcccaagggattggtgaactccctcccatagccaaggaaagccttgagggaatgtgctgtgaagaacggtgcactctggcccaaatactgcagtttttccatggtcttcacaacccacagaccagaagattcccttcagagcctacaccaccagggccctgggtttcaagc

SEQ ID NO: 602924 - DNA, 632 bp, Homo sapiens
cataggctcaaaataaagggatggaggaagatttaccaagcagatagaaagcaataaaaagcaggggttgcaatcctagtctgtgataaaacagacattaagcaacaaatatcaaaagagacaaagaaggccactacctaatggtaaaggtgagaggtgaagccagctggacttctgggttgggtggggacttggaaaacttttctgttttacaaaaggattgtaaaatgcaccaatcagcgctctgtaaaaaacacaaatcagtgctctgtagctagctagaggtttgtaaactggaccaatcagcacactgtaaatggaccaatcagtgctctgaaaaatggaccaatcagtgccctgtaaaatggaccaatcagcactcggtaaaatggaccaatcagcaggacatgggtggggacaaataagggaataaaagctggccacctcagccagcagaagcaaccctctaaggtctccttccatgatgtcaaagctttgttctttcgctctccacaataaatcttgctgctactcacttttttggtctgcaacacctttaaaagctctaacactcaccacaaaggtccacagcttcatttctgaagtcaacaaraccacgaacgcaccagaag

SEQ ID NO: 602925 - DNA, 540 bp, Homo sapiens
cctcggcctcccaaagtgctgggattacaggtatgagccatcgygcccggcctggattccacttcttcatggaaggagtggcaaagagttggcagccatctttaactcaccaaatctggggagtttacgggtatgggacccagtaggtgcccaataaatatttcttaatgaatgaataagtaaactgcattgccagaactggctgggctcccccagttcatgccttttcacccagatcccaggcctgtccagcatccccttggacaaactgagacttcacttctgacccagcttcacattgcagcagtagggtggtgggtgaattcctacccccagcctggcatgggtgaggcaagacggggatgaaggccttaagagtggggatcccacagcagggcatgggttggagcttcctacaaatgagccacacttgggggcagggagcctgggctgccctgggcccaattccatttcatggagttggagaaaatgctttttttttttttttggaacactagaggcagagagcaatccgggttg

SEQ ID NO: 602926 - DNA, 593 bp, Homo sapiens
tttctatttttttgttttccttttcttgatttattttttaacttcacatgatttagaaatttacaaaatatataaagggcatatagggtgaagtctccctgtaactcctctttcccatccccccatgttctgactgtccctaacacagtgactggyttttgttgttgttgttgttattgttgagacggagtttcgctcttgtcacccaggctggagtgcagtgcatgatcttggctcactgcaacctctgtctcctgggttcaaggattctcctgcctcagcctcctgagtagctgagattacagctgcattccaccatgcctggctaattttttgtatttttagtagagatggggtttcatcatgttggccaggctggtcttgaactcctgacctcaggtggtccacccatctcagcctcccaaagtgctgggattacaggccagtgactggtttcttaagttgcctcttatctgcctataccacaagtacaactattaatatataagcaaatacacatgtatattcttattgttctgttttttaacacaaagataaaggattccacaccctgttgtatacttagctctttt

SEQ ID NO: 602927 - DNA, 601 bp, Homo sapiens
gaaatacgtcagatatgtttataaccataagaaagtaaattactgaaaaagatatcacaatcctaaatatttatgtacctaatagcagaatatattctatttgaactattcaaaaatattaaagtggaggraattctttccaatccctttggtagggccagaaaccagaaacctgataccaaaaccagaaaaacaggcattaccagataagaaaagaatagtctgatatcccccataaacataaatgctaaaatccttaacaaaatttagctaattggtccaaacatacataaaaagaaaatacattatgggaaaatgtggttcactatagcaataaatggttggtttactattcagaagtctatcaatgtaattcaatatattaaaaaaattaaaaaaataaacatgatcatctcaataagtgcataaaagtatctgacaaaaatccaacatccatttgtggaaagtgctctcagcaaagtagaaaaagaagaatatggtaaaacttcctcaacctgataaaggtcatttacaaaatttgaaagtgatattacagttaatggtgaaagaatgaatgattttccctaagatcagaattaga

SEQ ID NO: 602928 - DNA, 595 bp, Homo sapiens
gataagatctataatatgtttgtagatgcttgcaagttttctccgtagaaataggacaatatagaaacaagacaatccctataatactttttttttcttagttttatgtgctacttgggaccttgatacaatgttgaataaaagtggtgttagcatacacttttgtcctttcactggtcttagaggaattattttagactttttatagtcatacttcttctgtgctggagttgtttttattgttgtttgtatttttgtagtaaccttttccaaagttaagggagatgtccttacccctagctttccagaataataaattatgagcaaatgttgaattttgtccaatactatcaatttcactaacggatttttaaatttgaaataaacattaaaattctgaaatgaatctaatttgagcataatatgtttattttatatatttatatattaaattgtataatactgtttttagrcgtttgtatttatgataatgaatctgattacttaatttgctatctcttactgtccaagtttgtcttagtattatggtttttccatactacaaattggaaaatatttcctcacttttaattct

SEQ ID NO: 602929 - DNA, 606 bp, Homo sapiens
attatttcatcagataaatgtattaaagatattttctatcttgaatttttattttctgagcactatctatgaggatcagaagctttacatttgaattaagtctaatgtatttttgttgttgagttgattctgttattggtttcatagcatagaagtcttcatgtattcagagattttatttctgatgtcttcttctacacattttatagttttggtttttggacttaggtctatggtttagtttatattcacttttgtcaaatatcaattgtccacagatgtgtgggtctatttcaggattttttaatgttttccaatggcctatgtggacataatgcaaaattgycttgattcccaggaaaggtgacgtaacatatataattatttacagatgtccccacttcatagtggcgacttctcatgaaatggatccacctgaaagactagaaatcaacctggtcactcagtagtcagtcactggactgtcaggtttatgtattacctaaagtaccctggacacttcattcccaattcccatagtaatttgtaccctactttgttaaatttattttttcagtacattttaaaaagggccagaaagtgttg

SEQ ID NO: 602930 - DNA, 564 bp, Homo sapiens
aggctttcagatgaaaattctgctgtcatccatattggtgaactcctataggaaatgtatctctttgctctaactgctttcaagatttatctgcggaatgtcttgtgggctgtggttacagtatcactttagtttgcagwacctccatggtgctatttcatctgtttggtttatctagtctactgggactcccactggtccctgtaggtgctgcctgaggcagcggaaggacattccccaggccaggcctccaggtgccaccaggtggagtagagaaactggtgatgaagtgatctttctccatttgggctgctgtggctggagaatcctctttgtcagtgatgactggcttctcagtgtctcttggtgaagcagggaagtatctctccctgcagacaaaggaactatggcactatggtgattttatgacttcttaggaattaggcatgcacacacacacacacacacacatacaaacacacacacaaacacacacacatatctcagagagtgaaaaaataaatgatgctttagtgatattcatggcagccagggcaactgaca

SEQ ID NO: 602931 - DNA, 576 bp, Homo sapiens
cccatgttcattgaagcagcattcacaataaccaaaatatgtaaacaacctaagtgtccaytgagggatgaatggataaagaagctgtagtacatatacacaatggaatattatttggccctgaaaaagaacaagatctcaccatttgccacaacatgggttagcctaggagatatgctatgtcaaatgagccagacacataaagaaaatggttgcatgatctcatttatatgtggaattaaatatatattatatatatatatacatacatacatacatacatacacagaaatagagagcaaaacagtggctaccagaggcaggggaaaagaggggagatgtagctcaaaggacacaaaatggcagctgtaggatgaatgactctcaagatctaaggcacagcatgaggaatataagttgtaaaactgtactgtatataggattcatgctaaataaggagcttttagctgttctagccatcaaaaaaggtaactatgtgacacaatagataatattaatttgcctaattttagtaactgttttctctccatgtgaatctcgtaacattatgttgta

SEQ ID NO: 602932 - DNA, 576 bp, Homo sapiens
cccatgttcattgaagcagcattcacaataaccaaaatatgtaaacaacctaagtgtccattgagggatgaatggataaagaagctgtagtacatatacacaatggaatattattyggccctgaaaaagaacaagatctcaccatttgccacaacatgggttagcctaggagatatgctatgtcaaatgagccagacacataaagaaaatggttgcatgatctcatttatatgtggaattaaatatatattatatatatatatacatacatacatacatacatacacagaaatagagagcaaaacagtggctaccagaggcaggggaaaagaggggagatgtagctcaaaggacacaaaatggcagctgtaggatgaatgactctcaagatctaaggcacagcatgaggaatataagttgtaaaactgtactgtatataggattcatgctaaataaggagcttttagctgttctagccatcaaaaaaggtaactatgtgacacaatagataatattaatttgcctaattttagtaactgttttctctccatgtgaatctcgtaacattatgttgta

SEQ ID NO: 602933 - DNA, 576 bp, Homo sapiens
cccatgttcattgaagcagcattcacaataaccaaaatatgtaaacaacctaagtgtccattgagggatgaatggataaagaagctgtagtacatatacacaatggaatattatttggccctgaaaaagaacaagatctcaccatttgccacaacatgggttagcctaggagatatgctatgtcaaatgagccagacacataaagaaaatggttgcatgatctcatttatatgtggaattaaatatatattatatatatatatacatacatacatacatacatacacagaaatagagagcaaaacagtggctaccagaggcaggggaaaagaggggagatgtagctcaaaggacacaaaatggcagctgtaggatgaatgactctcaagatctaaggcacagcatgaggaatataagttgtaaaactgtactgtatataggattcatgytaaataaggagcttttagctgttctagccatcaaaaaaggtaactatgtgacacaatagataatattaatttgcctaattttagtaactgttttctctccatgtgaatctcgtaacattatgttgta

SEQ ID NO: 602934 - DNA, 596 bp, Homo sapiens
cttcttggtatattatggacatttttacttcactatgtaaaccagacaggaggttttcagagatgcagaaagataactgcatctttctgtggaatgttagaggaactttatatttcatatccaggaaggagttyggttgataatccaattcctgtgtttccatcaatgtcatatgcactttctcctgactacatattaaccagacaatgtgttgtatctcatgatatctgattaaaataatgtgaacacttctatttaacaataatagtttcaattgattccttcaatattggttacattttactctataatttttaaaaaaaaatgtattctggctccaccatttgtacataaactgaaaatgtgaagatcattcaaagcagcatggaagaggaaataattgaggttaatacgggagtcctgcaaataagttttctcctcattaagtagaaagatctacaacaggttaaatggacatatcatgaatacccttttggaaaaatctatcctaaaaaaataaatactacctgtattagcctgttctcacactgctaataaagacatacccaagactgagtaatttataaaagaaagag

SEQ ID NO: 602935 - DNA, 650 bp, Homo sapiens
gctgggcgactgagaagcatcacccacttccccagaaccttttttacgtggagtgaaaactttaaggggctgtccagctaaacctccaacctccagatcccatgccaatttctctgcttctgcaaaaggacttcaagtgaaagacatctgcagctgtgaacgggggtaaaaccctccctgccccaggccccaagcaaggatttccctagcggggaggaaggtagaatcgagagacctctaaccctgggagaggagggagggaaatctccgaggaccagggttatgcaacaacacaagggaagtacctgctggttctggggttggggaggaagatccctactgcccaagagccagcacagacacaaggcagagctagactgccwcggggctggggtcaagaacactgagaaggtgcagctcgcagctcctgagggtagggcttaccccaaatggaggaaagatcagagtggacttctgaaagctgatgatagagctgaaacaccaagaaacctctgtcacctgaggcccaactgctaagcacaatgcagcagcaatccactgctgaacaaacttaaatcctgtggtgctttgcaggtaaggaaagcaacagtgacctgcacatccaactcaactgatgagactgagccaaa

SEQ ID NO: 602936 - DNA, 573 bp, Homo sapiens
ccctgggagaggagggagggaaatctccgaggaccagggttatgcaacaacacaagggaagtacctgctggttctggggttggggaggaagatccctactgcccaagagccagcacagacacaaggcagagctagactgcctcggggctggggtcaagaacactgagaaggtgcagctcgcagctcctgagggtagggcttaccccaaatggaggaaagatcagagtggacttctgaaagctgatgatagagctkaaacaccaagaaacctctgtcacctgaggcccaactgctaagcacaatgcagcagcaatccactgctgaacaaacttaaatcctgtggtgctttgcaggtaaggaaagcaacagtgacctgcacatccaactcaactgatgagactgagccaaacatctaccataatggccttagagaagaagagatatgcccatatttgactatgaataaaatttacttcagtctctaccatttaatctatacagtatcatagagtcaataaaaattataagaaggatattaagcaatgatggagaaaaaaatcaagtgtcaagaga

SEQ ID NO: 602937 - DNA, 573 bp, Homo sapiens
ccctgggagaggagggagggaaatctccgaggaccagggttatgcaacaacacaagggaagtacctgctggttctggggttggggaggaagatccctactgcccaagagccagcacagacacaaggcagagctagactgcctcggggctggggtcaagaacactgagaaggtgcagctcgcagctcctgagggtagggcttaccccaaatggaggaaagatcagagtggacttctgaaagctgatgatagagctgaaacaccaagaaacctctgtcacctgaggcccaactgctaagcacaatgcagcagcaatccactgctgaacaaacttaaatcctgtggtgctttgcaggtaaggaaagcaacagtgacctgcacatccaactcaactgatgagactragccaaacatctaccataatggccttagagaagaagagatatgcccatatttgactatgaataaaatttacttcagtctctaccatttaatctatacagtatcatagagtcaataaaaattataagaaggatattaagcaatgatggagaaaaaaatcaagtgtcaagaga

SEQ ID NO: 602938 - DNA, 501 bp, Homo sapiens
actgagaagcatcacccacttccccagagccttttttacatggagtgaaaactttaaggggctgtccagctaaacctccaacctccagatcccatgccaagttctctgcttctgcaaaaggacttcaagtgaaagacatctgcagctgtgaacgggggtaaaaccctccctgccccaggccccaagcaaggatttccctagcggggaggaaggtagaatcgaaagacctctaaccctgggagaggagggagggaaatctccgaggaccagggttatgcaacaacacaagggaagtacctgctggttctggggtcaggggaggaagatccctactgcccaagagccagcacagacacaaggcagagctagactgccacggggctggggtcagcccaaatatacctwatacccaaatatacctaatacccaaatatacctaaatatacctaaatatacctaaagaggtatattttaccaagtataaaatatgtcacatcaaac

SEQ ID NO: 602939 - DNA, 548 bp, Homo sapiens
gtggagtactcctaaaattctggctactcgggaggctgaggttgaaaaattgcttgggcccaggaggtcgaggctgcagtgagctgtgattgcaccactgcactccagcctgggtgacagagtgaaacactgtctcttaaaaaaaaaaaaaaaaaaaagaaaagaaagaaaaaaacggaaagtaattagcgtaagagtaatgaccataagtaattagcataagtagacataatttcagaatgtttacaaggaaattgtcatatattattgagtatttacaaaatgatgtatggtttgaaggaaaagagaaaaacagcagggtattaaataactaaatttaaaaagttattttcattaagcaccattcaactttgatcctaatacctgagtttcatcagtcccatatttaatttttattttatrtatataattatgatattacaccttatccttacaagcacaatcagtggactattccctgaaacttctggtctcaagcaatcctcctgcctcagacgccagactcccgagtagttggaagtataggt

SEQ ID NO: 602940 - DNA, 581 bp, Homo sapiens
acaatgcaagttcgtcctggatgtggatcccactgatgttctctggcaatgcttgactgcacagagctttgctgtgtgtagtctctcattcccgagggtctctcctgccttttttaggatgtggcagtagacactagagagcatcattgccacgtggctcttctgtctggcagtgcaatgacccctccttgaccaaactttagtcaggttcctctgagtccttttctcaacaaggcctggtccttgcccgaccgagtccagtgcsagcagagacctgctaagcgtatcccctaagaccccaccaagctcctgttcctccaccccgatgtctaatccagttcccctgagtggtattccacccactccctcaccctgcccttggctttccatccacccttgttcctgccatattggagtcgcgtcctcccctgttgtgatggtctcgaatagagtcttccttgctggcttaaccaagtgtcaggatcactttttacagcagtgactctacagttataatcactgggcgattttctagatcaaaatgtttctagactataagcatgtttatctgcccaaagtca

SEQ ID NO: 602941 - DNA, 534 bp, Homo sapiens
gagctttaagaattccataatgctatctacgtagctgttttcttaaactttgagggtgggttggggggttatcccacaacttgagtgacatcattttgtatttatcgataagatgaacaattggcctggagcaaatgtccaattcttattctccagcgaatcaaagaaatctatttgaatatgactttaaaaaattttccccatcaatacatacaattaaccaagaaaataagatccaactttaggaatctgtagaggatatataaacatctttgttttaaaaaaatggtttgaaaactttgagctaacattctctagctgtgcagaataggtaacaatgaatatttgctcagtgaataaatatataagtggtctctttgtacaagagattttggcattaatatgatctattttaataatctyactcagtttcccttaattttgctgtctttgataatgttttgttccctagaaaaattcctaagcattcaaaccgatgaggctactttgtacatagcaagtcttttttgcaag

SEQ ID NO: 602942 - DNA, 598 bp, Homo sapiens
aatttgggttttattctggagcagttgggccttgatcagtttttagcaatgctgtgatggtatgaaattggaattagaatttaaaggattggcagtagrtaagactgaatggtaggagatcggttaggggaaggatgtagctggaaagtcaggcaagggaagctgaaggcccccaaccaaggccacggatgccgaggatggagaggagagaaggagctctgagaattagtgaggagttcgatggatgggctcagagctgactggacaaaacattgcacccttcagttgtggaactagggactctccaagtcagagcgcccactctcagctccatcactcaagcctcccacacaactttcttctgtcctttcgcttctcacttgcctttttccttttccctctttcccatcttcctgagtaaagctaagttatttattcagagtggctttcaatctagaaacttcagaatactgcttagccccttcctttccctcaaccccacctggtcactgtcgtttattgacgtcacttgggagtttcccaaatctggctcctttctgtcaaaccaaccctgctgctctgaccaggcctcagttta

SEQ ID NO: 602943 - DNA, 566 bp, Homo sapiens
cctcctccttcctcttagaattyagtttaaagacaaacaaacagacaatatgtgaaggtatgtgcactctttgttgaaagtcataatacaaatatgatcctgagaaaggtgattttggagaaccaaaattggtaaattgcacacatttgtgagaatgcaaaggtgactttagcactaatggactgtccagttaaggggtggctgagggataggatgggttgttattgaaatctggcaaatctctgttggtgaagtgttttggaactcccaggaatttgtgaagctcccaggctaaatcgggaaaggggtgggggaagcagggaggtccccagcacacctgtataacttggcctacattgatctgagaagacctcctttgtattagcctgtttttatgtgctgataaagacatacccgagactggacaatttacaaaagaaagaggttgggttccaagatggccgaataggaacagctccagtctacagctcccagcatgagcgacacagaagacgaatgatttctgcatttccaactgaggtaccgggttcatctcactggggact

SEQ ID NO: 602944 - DNA, 604 bp, Homo sapiens
agtggccggggaggcatcccaatcatggcaggtgaaaggcacgtctcacatggcagcagacaagagaagagagcttatgaaggaagtctcccctttttaaaaccatcagatctcatgagactcattcactatcatgagaacagtgcaggaaagaccttgtccccatgattcaatcacctcccaccgggttcctcccacaacacatgggaattgtgggagttacaattcaagatgaaatttgggtggggacacagccaaaccatatcaggtattaaatgcctgctgtgtaccagacatcacgtwaacacctctcaggccatggggcttacagtttagagggaaagtccgaggctaaacaaaattcacacaaccaaataattacccttctgtgaagggatatggggagaaaggacaagatattagtgcaggaagcctaaccccagctggaggtcagggaattttttactgagaacattgtattatttcatcgctgtacacaaattcagttgtatcttcacttttaggctttctgagctggaagccacgctgcttggcgatgggaatctaagcaggaccatgtgtggctgctaccatatgaagcaac

SEQ ID NO: 602945 - DNA, 566 bp, Homo sapiens
ggattgtagaagatggtggggtgggtagctcagaggtcatgatgagaaagaagcattgcagaaatgggtttcttgagcaaacagtcgaggaggtgctgggcagagtggatgccttcagattttggagatggtgcagatgctggtgatgacaagtgctagggtctcccttttgggtgtgagttactgagggaaaggtagatggagcatccacctggatgctgaagatgccaggaatgaaagacaggaaaggggtggccaggaacactgtgagccaggaaccaaagtcttcactgaaccaggaagagtgatgtggaagaatgacaggaactggcagggmagagggtgccatgcccagtggcatcaatttaaggagtactgaaggttttgtaggatttggaaggagcaatggggaaccaggaaggcatcagctttacttcctggctctgagggactccaggtgtgaaagaatgagcagccaacacttgagagagctcctagaactgtgtttcagttaaaaacgaaagacactgatgctgtaagagtgtatggcgatgcttgtgggaatt

SEQ ID NO: 602946 - DNA, 524 bp, Homo sapiens
agggcggtaatgtgaactcccaaatttgtaggcaagacagacagaagcatggctgccctgtggacctcacttgtgcctggtgtctgaaatgacagcagtctccttggggaccttgccctttcacttgggcctgtgctaactccaggtggcatcagaattgaactgaggccagatgtggcgcctcatgcctgtaatcccagcactattggaggctaaggtgggaagactgtttgaacccatgagtttgagatcagcctgggcaacacagaccctgtctctacaaratataaaattagctggacatagtggtgtgtgcctgtggtctcggctatttgggaggctaaggtgggaggactgcttgatccctggagattgaagctgcaatgagccctgattatgccaccatactccagcctgggcgagaaagcaagaccctgtctcaaaaaaaaaaaaaaaagaaaaaaaaagaattggattgaattgcaagacacttaattggtgttgaagaattgctggcagaacac

SEQ ID NO: 602947 - DNA, 598 bp, Homo sapiens
cagcatctgggggatgattgctcatttcaaataattcaaacaaattaaatgtaagccacagttctttgctatgttacagcaattatatccctttgatacagttgttacatggcaggtgaatacatttttttaagaaaaaaaaatttcaaactgggatcaaaaaaattaccctgaaaccgcatctaattgtctattgtcgctgattccaccgtggttgcagtgatgccattatcrtgagagtattcaagttttaactctgtatgtgtgtgcctgcacatgcgtgagccagcataaagatgaaatgaatttatgtttttgtgcatatgctaatgagaccctgtgatgaagtggtaagcattcttgtactatagacctgggatctaatcatgactccgcaattaactggtttggtgatcttgggtgagataactactgtctctgaacctcaagcttcttcatctgtgaatgaaattatcaactgccctgccaacctcaaatccaaatactctgaagttgatgggtattcagaagagcctctcatactataaagtagcagcatcactgcttggtttttaattttttttttttttttaatttt

SEQ ID NO: 602948 - DNA, 598 bp, Homo sapiens
cagcatctgggggatgattgctcatttcaaataattcaaacaaattaaatgtaagccacagttctttgctatgttacagcaattatatccctttgatacagttgttacatggcaggtgaatacatttttttaagaaaaaaaaatttcaaactgggatcaaaaaaattaccctgaaaccgcatctaattgtctattgtcgctgattccaccgtggttgcagtgatgccattatcatgagagtattcaagttttaactctgtatgtgtgtgcctgcacatgcgtgagccagcataaagatgaaatgaatttatgtttttgtgcatatgctaatgagaccctgtgatgaagtggtaagcattcttgtactatagacctgggatctaatcatgactccgcaattaactggtttggtgatcttgggtgagataactamtgtctctgaacctcaagcttcttcatctgtgaatgaaattatcaactgccctgccaacctcaaatccaaatactctgaagttgatgggtattcagaagagcctctcatactataaagtagcagcatcactgcttggtttttaattttttttttttttttaatttt

SEQ ID NO: 602949 - DNA, 355 bp, Homo sapiens
aaaacatcctaaatgaaatgttgtacattatgcactgacattttccctccatgcatgtctttctctcctccaccaatggatattatgggctgtttgtgcagaggctgacttccagccattgattctgtttgagaaaaaccaccgtcttgtctatagatcagtgtttgtacaggttgagcatccctaatctgaaaatctgaaatccaaaatgctcccaaatccaaactttytgagcactgacatgatgaccacaagtggcgaattccacacctgacctcatgtgatgacttgcagtcaaagtgcagtcaaaactttgtttcatgcacaaaattatctaaaatattgtataaaatta

SEQ ID NO: 602950 - DNA, 538 bp, Homo sapiens
atttctgtgaaatctatacattaaattagggagaactgacagctttatgaaattgagtcttccaaacaagaacaagtgcatcctttcttttgttcaaggctatttatatcatctttcatgaaagtattttagcattccacatataggttttggacatkgttcattaagtttgtacatagatattttctttttactatcataaatggagtcttcctttccatttattttctaacgtttgcctgcctatatattggctattgatttttttagggtttctaaaattttttaaattgatgaataataattgtacatactaatggggtacaccgtgatgtttctatacatataaggtgcagtgatcagatcagttagcctacccatcatctcaaacgtttatcatttctctgtgttgggaacattcagtatcctccttctagctatttgaaactatataacattatcgttaactattgtcatcctatggtagaacactagaacttattcctcctatctagctgaaattttgtttcctttatca

SEQ ID NO: 602951 - DNA, 595 bp, Homo sapiens
caatctccccgtgatgccactgggtcattcccatctcagttaccataccttggcccaacctgccatcatctgttgccccagatactgagaaagctattagctgttatctttgcacccattccaagagtcctctaggaacttctccatgctgtagccagaagggtttttcaagataaaaatgttttttacatgaccctctccactattttaaaatccttctgtttttatctccccctttcctttttttctttttcttgagacagcctcattctgtcacccaggctggaatgcagtggcacagtctcagctcaatgcaatctccacctcccaggttcaagcggctctcctgcctcagcctcytgagtagctgggattacaggtgcccaaaaccatgcctggataatttttgtatttttaggagagacagggtttcaccatgttggccaggctggtctcaaacaactgacctcaagtaatcccaaagtgctgggattataggcatgagtcactgtgcctgacctctcccttgcctcttaaaaagcaaaagcctactcatgacctctccgtgggctacctcttgtctcatgtggctgtg

SEQ ID NO: 602952 - DNA, 487 bp, Homo sapiens
tattgtacctagggtggacacattcctcctcttactttcgggwctgtcctactctgtctgtggagtagccgtattttcaccactttactttcttaataaacttgcttttactttgcactgcagactcaccctgaattcttccttacgcgaaatccaagaaccctctcttggggtctggatcagaatcgctttcctgtaacaactggggccagaaagaagaaacaatagaaaaactgatgagttcacatgatgtgacttcagattaaggatttaaacacagggaacttcattatcctgcccattgaagactaaacctgtcctgttcaggaagttaggctatctctctcctggttcctcagagggcagagaactgctcagtttgggtttgggtttggtaagcctgggtgaccccactatgatttgtctggtctgttgcgatcgcaggagtttagtccaaaataatggcctcaaattttgttgaacaatc

SEQ ID NO: 602953 - DNA, 487 bp, Homo sapiens
tattgtacctagggtggacacattcctcctcttactttcgggtctgtcctactctgtctgtggagtagccgtattttcaccactttactttcttaataaacttgcttttactttgcactgcagactcaccctgaattcttccttacgcgaaatccaagaaccctctcttggggtctggatcagaatcgctttcctgtaacaactggggccagaaagaagaaacaatagaaaaactgatgagttcacatgatgtgacttcagattaaggatttaaacacagggaacttcattatcctgcccattgaagactaaacctgtcctgttcaggaagttaggctatctctctcctggttcctcagagggcagagaactgctcagtttgggtttgggtttggtaagcctgggtgaccccactatgatttgtctggtctgttgcgatygcaggagtttagtccaaaataatggcctcaaattttgttgaacaatc

SEQ ID NO: 602954 - DNA, 619 bp, Homo sapiens
gtattcgtttcaagtccagggccccccaggatcccaagcatggggtccctgggattgggggcactgcctccagcctgggctgcatgttttatattttctctgtttattcccttgatgagacttattactatctgtaattatgcatcctttgtttatgtgaatattggtttcctccagtaagtcacactctctatggaaacagcagcttcatttgcacccttcactgccacaccttggctgccatgatggcacgcagrgaaggcaggtgctgctggatgctggggacatgagaaccttgctctcgaagaggaagatcctgcctctcttcaccaaattcttacatccccatttccataagctgcgtcattgtctctgctgaccctcagcttctcggcctatccttgttgccctggctcctggggccagcagggctggtggctgcaggaatttatgagggcatgtacctgtgaagagcgaacagtggtagtgcctgatggccaatttttgagatgcctaaaagctttctcagggcgcctgggcatgaccattaggaaaggagcatgcattatgaagagtgtggtccttttctagctcagcgagatttacttccccaggtgga

SEQ ID NO: 602955 - DNA, 606 bp, Homo sapiens
gagaaggcaggtgctgctggatgctggggacatgagaaccttgctctcgaagaggaagatcctgcctctcttcaccaaattcttacatccccatttccataagctgcgtcattgtctctgctgaccctcagcttctcggcctatccttgttgccctggctcctggggccagcagggctggtggctgcaggaatttatgagggcatgtacctgtgaagagcgaacagtggtagtgcctgatggccaatttttgagatgcctaaaagctttctcagggcgcctgggcatgaccattaggaaaggagcatgcattatgaagagtgtggtccttttctagctcagygagatttacttccccaggtggagctggtaaaagcacaagcaccctcgataaaccctgaggagctcaggtggttgcccagggagtggagcctggtgaggacatttccctggagatcaggcaccggaatgtctgcttcctagcttttctgggagtaggggatgcagaaagcagaagtgaatggaacaagttccttatgacctttcaccatttggcaaatgtgtgtgatagaatatgcagaagaatggaccaggcaaggtggttcat

SEQ ID NO: 602956 - DNA, 625 bp, Homo sapiens
tcatgcacatcatttaggactgcaccaaatgtggccacaagccgaaatcaaattagttgaagaaaaagcagaaaagtcttggcttctgtaacagagatgtctacagggagacctgtttgggatttgacaatattcaggccttaaacaaatgatagtaccaaaggctctattgtatcttccttcgagctagtgtttcttggaccatctgatgtctcccactcccacaccactaggtccagaggaaggaagaaagctttctcttttcctgagctccggcaaccattttattacatttctttgactctcatcggtttacctgacagtttcaaagcccatcactaggtttgagggagatgagatacacagaggttcaatttaatccaattgattccatgcgtggagataattctggggtctattyccccaaactgaaaagcaggagtgggtttcctaaagaaatttggatttcttttgttaccagcggtgaaagagtggatgttggtcagctaacaataattgctctgtaattggagctccagcacctgggggtttcatgaatagatttaaggagtctcaaaactgctttgagattgtgtcaaaaatgcataaaagaaaatatgcatat

SEQ ID NO: 602957 - DNA, 590 bp, Homo sapiens
atcctccaaattctatctctagtgatatttctaaaacacaaattggatctttcatgagttaacaatcatcagtggctttcatttgctttcagggtgaagctcaatgccctacacgattctgctcctacccagctttctagatagtggtgttgagggcccggttctggggccaggaggatttgggttcagctgtactaacagtgctggaaccttgaggatctttacatctttatgcctcaatgttgtcacttaaaaaaatgagataaaataaatcctactttgttgatttgctctgagaattaaaagagaaatcagaggcttaagggtctgggctattaacttaaaatgtgtgatttagattggcctccagaagagtttcagggaaacctgctataactggtgctaagacaatytgtcttcatagagtgttgagctgatggatggggctggaggcactcatctcctggacgtagacctgaaacatcgaggcttagattccggccccagtcatggcagaaaggaggccaggattccctcagaagatgcactctggggattagggtaggatattgaggttctgttacgaccca

SEQ ID NO: 602958 - DNA, 593 bp, Homo sapiens
ttgaaaaaaggggcctgatctaatgctgatggatgcagtagagaaacccagtgagccctgtctatctaggtcattcacggactctctgagcatgcatttctttctcctgggtgtggggcaggagtctctctggaaatggggttctcatgacctataatcaaacagggtaggtcagacaatttctttatggtcaggttttacacagaaatgcagggagtagggggtgggagttagaataatattttaaggttttatggctggctttggggaaaagggattctagtttccatgactcaccttgaggaaagggattctagtgtctgtggccagcctctggggagaatggggctgagagacaggggggccggaggtcagaggaaaaatgtttgcttctgaggccttcattttggggtattattttctaagtcccaacagtctggtgtgtrttctgtcaatattcaccctcctttgcttgtgacgctggcatgcaatagtactaagtaaatagtcccatattttaaaacaataacacatttgattgcatgactcatcctaaattggattgcagattccagctctatttcctgacctga

SEQ ID NO: 602959 - DNA, 442 bp, Homo sapiens
gtgttagagtgcagttccactgggacatttctgagcagtttgaagagaagataaaacttcagtgctacattttatgaccctgttgcctttcactaaaatgaaggcattactatattacaggtatacttaggccttgaactacatacaaaggatttttactgtattttaatttaaayattgctaaaactacaaacaacattataaacagagaagtctataaggttgtacaaaaacagaatgcgggtgtaaaataccctttgtttaaaacctcagattggtcaaaatctctttttgatgttttcatattctcagatttggggtatggaagactccatgtcctacactagctgtgtacaacttggaaatattaattacagttcagacttttttcttttactttaatggaagccttatgtatgtgagattttccaaaaatgtgaga

SEQ ID NO: 602960 - DNA, 503 bp, Homo sapiens
tctttctatttgaagttaaaagacgaagcaatcggagttttaaagagagaaacaattcctgggatagcattaggatcattggataactgtgtcttgctctttgcttctgacgggcgtcctcattttgtacgtgtgcacacccattttactaatgagtttcgagttgatcttcagcgtggggctccacagacaatgtgacatatctcccaagccaggtaaaataacatggagcaaacataaacagataaaactaaaacacagaatgtaaaggtagattcaaagttgtagctcacacttgcatgtctctctgtccctttctccctgtcttctttgtgctrttttgctttcgaacaaccatggaatgggatgcccaattttgagtcattgtatacaatgaattctaaatcagttcctaaaatctgttttatttttatggaaaattgttgtgtctgtgactgccaacaaaaaggtttatttgcatatttcaaaagaatcctgaaagc

SEQ ID NO: 602961 - DNA, 431 bp, Homo sapiens
aactgtgctgatttgacaattaaaaaggactgacacaaagaagaacttagaaagtttttagcacaccaagaataactgacctatcttagaagcttccagaaagagaagattaaatttccattacttataaaagaaaactcagattgatgtagtttctgatttctcatcagcaacagtgaaggactttcttcagcaatcctttctgctagaagtctgtagaaattcgtgtcrcggttctaagggtaaaccactgaacccagggttctataatctcaagaatcatttgagagggtaaaaaatgatgcatctcatttgagattataaaaggatacggctattgcaagaatatcaaaaaataattgtggccaggcataaggcaataagaatcagcagcacctggaggaaactaaagaatgtacaggccccactaa

SEQ ID NO: 602962 - DNA, 431 bp, Homo sapiens
aactgtgctgatttgacaattaaaaaggactgacacaaagaagaacttagaaagtttttagcacaccaagaataactgacctatcttagaagcttccagaaagagaagattaaatttccattacttataaaagaaaactcagattgatgtagtttctgatttctcatcagcaacagtgaaggactttcttcagcaatcctttctgctagaagtctgtagaaattcgtgtcgcggttctaagggtaaaccactgaacccagrgttctataatctcaagaatcatttgagagggtaaaaaatgatgcatctcatttgagattataaaaggatacggctattgcaagaatatcaaaaaataattgtggccaggcataaggcaataagaatcagcagcacctggaggaaactaaagaatgtacaggccccactaa

SEQ ID NO: 602963 - DNA, 288 bp, Homo sapiens
tgatgtagtttctgatttctcatcagcaacagtgaaggactttcttcagcaatcctttctgctagaagtctgtagaaattcgtgtcgcggttctaagggtaaaccactgaacccagggttctataatctcaagaatcatttgagagggtaaaaaatgatgcatctcatttgagattataaaaggatacggctattgcaagaatatcaaaaaataattgtggccaggcataaggcaataagaatcagcagcacctggaggaaamtaaagaatgtacaggccccactaaa

SEQ ID NO: 602964 - DNA, 458 bp, Homo sapiens
aggagactagacctctgtgatggtactgagaggttmccaagggccagaggtccccagggatataaatatacacagataaaatttttctagataaatatgctatttggtttgctatggttgtggaactatgaggttttcctagctttctcttctgtggttatgtaactttataaaaaaaggactttataattaaaaatggaacagattattctagactttaagaaataattgaccaaagttaattaccatgtttataacagccacacctgctgtatcatgtggttgccaagaatgatcttaaaaatataaaaatgcatctgctaccatgacttgatagaagtggcttggaagcctgcaggttagtgacatcactccacttcgtgagctcttcgatgagaggtgggttggctggaggtgggtttattccctggaggaactttcgtgctgagatgaggact

SEQ ID NO: 602965 - DNA, 489 bp, Homo sapiens
aaaagctcatgaggagactagacctctgtgatggtactgagaggttaccaagggccagaggtccccagggatataaatatacacagataaaatttttctagataaatatgctatttggtttgctatggttgtggaactatgaggttttcctagctttctcttctgtggttatgtaactttataaaaaaaggactttataattaaaaatggaacagattattctagactttaagaaataattgaccaaagttaattaccatgtttataacagccacacctgctgtatcatgtggttgccaagaatgatcttaaaaatataaaratgcatctgctaccatgacttgatagaagtggcttggaagcctgcaggttagtgacatcactccacttcgtgagctcttcgatgagaggtgggttggctggaggtgggtttattccctggaggaactttcgtgctgagatgaggactaaacgccttttcttgctcct

SEQ ID NO: 602966 - DNA, 551 bp, Homo sapiens
cccctgtaaccagtgcgaggctgccgagacaaggytcattccatcgctgggccaggccagagttaccgactgctcagttattgacacctccttatttctgtccatccatgagatggattgttgtagatttggtgaaaagtgttcagtgaagaaagtaaatcaaattgctttagtttacatatgagataatgcacgtaaaaatgcccttatctatgaaattctaaacagatacaggaaattatgattcttctgattaaacactagcttactgctactatgagatacatatacagacagctatagacaggaagatagtcactgtgtatatattgagcacaacccactatataggagaataaaaatatattataccatgttataactaaatgcaaagataccttagcattcaagaatcgcatattcacttgatgacagtttcttctagaaaactgaagtagaatggaataacatgactttttatatatttttcagattaaaaagttaaatatgtttattctaattacctgattacttgctctcccacccctgcc

SEQ ID NO: 602967 - DNA, 486 bp, Homo sapiens
cattcatatcattccaaactaaatcagagtcgagggctgggggggaaacactcagggtaaatagcacctgctcctagaattgcattttacacaagcgtggctgagaccagctttacctggtagctgctgagatgacctgtgacctattgctcacttatcagaacttgccagctccccaaagcatctctagtgccagtgagcttygtttcaaaacagtaggtaacacttctctttctaataaatccccagcctcccctttgttcttggggcatcctgaagaccacccagttgaccttgataccctgacttgcagtgctgtgattgccaaataaaacattcaatccagagacttgtctctatattttattttgacttcaactatatcaactggacttgagccctgcaaaagccagtctatattgtgttttatttataaaacctagccctttcatatgcatttaagctcttcagggatattgtctaaat

SEQ ID NO: 602968 - DNA, 585 bp, Homo sapiens
tgctggcaatgcatccacactacgaccatcgacataagaaccttgcctttcyttgaatttgtcacgtgtatttacaagtctgtacttgggcactgtcctttctttaaacacgcatttacataaattaattaaaataaacaactttaactgtccttctgttaaataagcactatatggtgctataatttctatgtttttcaaactctaggaagccaagagctattttattcacagtgctcactttttatctacaaaaagcctggcctatactgagggctcaatagaggtttgatgtgtcaatcaaaacctgaagaccatttgggtatctgagaacccacctcgacccatacaacagaggtgccattgggctgtcattgaaatgttttctttcatttaataagaaaggcattttttcacatctcctgaaacaatattttacattgtattaaaaataaatatagatataggtttacagccgagtcttgaaaaacaaggtggtaggaatcctaatcaccctcctgcatcgtcaaagatacaacttttgaatccacaaagacgttactgctaatagctactgttgaccca

SEQ ID NO: 602969 - DNA, 585 bp, Homo sapiens
tgctggcaatgcatccacactacgaccatcgacataagaaccttgcctttctttgaatttgtcacgtgtatttacaagtctgtacttgggcactgtcctttctttaaacacgcatttacataaattaattaaaataaacaactttaactgtccttctgttaaataagcactatatggtgctataatttctatgtttttcaaactctaggaagccaagagctattttattcacagtgctcactttttatctacaaaaagcctggcctatactgagggctcaatagaggtttgatgtgtcaatcaaaacctgaagaccatttgggtatctgagaacccacctcgacccatacaacagaggtgccattgggctgtcattgaaatgttttctttcatttaataagaaaggcattttttcacatctcctgaaacaatattttacattktattaaaaataaatatagatataggtttacagccgagtcttgaaaaacaaggtggtaggaatcctaatcaccctcctgcatcgtcaaagatacaacttttgaatccacaaagacgttactgctaatagctactgttgaccca

SEQ ID NO: 602970 - DNA, 627 bp, Homo sapiens
ccaatcttcctgaagctcagctctgatcacgtcagtctctggctccagaatggcacatggctccccatcatctctgtgccccattccttcttgatcaatcaaggctcttcatgatctgaccacactttctgccaccctcccactgctcatacagcccccctgcccgacatgctctccaccatcaccctgacacaagcccctgccaagttgtacatgacaccctgtctggcccagctcaaatgtcgccgtcttcagataccacccccacccagaccagaattaaactgggcttctctgcacagccagacaatttgtttcaacaatctttctaagtagcataataagtattttaagggctcccatttaaactgtactatgagggaaatagtcttattactcccattttatagatgrggaaactgaggcttggagaaaggaagacttgtttaaggacacacagctaatgttactgtgaggattcaagtcagggaagtctgactccaacccccacactcttaaccaccacccctaagtcaaacagatagaagttcaactcctatctctgccacctcctggctgtgtgaccttgggtgagtcacctaaccacccaaggggtcaggacaagct

SEQ ID NO: 602971 - DNA, 555 bp, Homo sapiens
cagtgtgtgtgcagcctctataagctggctgaaactggcttaaggtctgcaattgctcatcagaaaagaatgtttgtaaggcctgtcctctgtccaatcagaatagtagtggtctggattgcaaattggagttaggataatttgcccaatagctcctattgttagggagtttagcaagagtgtggattttcttacaggaatttagaaattcgcaaggccagctgggccctaagctctcaatccataggtaaaatttttttttctttttttttttttttgagacggagtcttgctccatcacacaggctggagtgcactggcatgatctcagctcactgcaacctccgcctcctargtacaagcaattctcctgcctcagcctcctgagtagctgggactgcaggtgtgtgcctccgtacccagctaattttgtatttttagtagagacggggtttcaccatgttggccaggattgtgttgaactcctgacctcgtgatccacccacctctgcctcccaaagtgctgggattacaggcgtgagccacctcacctgg

SEQ ID NO: 602972 - DNA, 437 bp, Homo sapiens
accccttcttggggtctgggtctggacccctttccagtaacacattcatcaccatttgctatttttacagcatgaccctgtggctgaaccaggtcaagagtaaggaagctgtcctatccccagccatccccaagttctgtctaactgaatggatrtgcccccatccccctccgtctgttgtctgattgatctgtcatgtaacatcctctcctgcccttcctgggaaacgtttacagcaatttagtacagtctctgtgttctgcatttttcaagaccctctgcaaattgccaacacttaccatttccatcttcccttccctttttctccacacatgccctgtaattcagctcgagagtaacgcttgctctttcccgaacacacactgagcttccctccgtggagaagttctgctcctgctctggccataggtgaattc

SEQ ID NO: 602973 - DNA, 589 bp, Homo sapiens
gcccagcacttttggaggccaaagcaggaggatcgcttgagcccaggagtttgagactagtctgggcaacataatgagaccccatctctacaaaaaattaaaacaactagccaggcatggtggtacacgcctagtagtccagctactcaagaggctgaggtgggaggatcacttgagcccaggagtttgagactagtctgggcaayataatgagaccccatctctacaaaaaattaaaacaactagccaggcatggtggtacacgcctagtagtccagctactcaagaggctgaggtgggaggatcacttgagcccaggagttcaaggttgcagtgacctataatcgcaccactgcattccagcctgggtgacagagaggccctgtctctacaaaaataataataataataatgataataaagaatgctgctccatgcctctctgcataggacaagtcccctgtcatttggccccaaatgttcttctaaagagccatggcacatgggtaagcaaatttcagaaagcctttcttaacgagatggcatttgaactggggtttaaaaaacagaattgagaatgtggcagtgg

SEQ ID NO: 602974 - DNA, 556 bp, Homo sapiens
gccttccgcggtccttttgggacttccctctgcaacctcccctagtgccgtggatacctctaaacatactcatgccaagttttcaaagttcccagccgctgtcggattccctaaaagtctcggtgggaaaactgcactccaagttagggggcaaaaggcggcagtttagaggggaaaatcgtactgaagagccctcttcccaggatggccacactcgggctggactctyctgctgcagttgagttaacctggccagagctgggcagaagtgaaaaaaagcgcggaacgtgctcagggagtccgcaaatacacgcccgctggggacagcgctcccggagccccgcggcccggccggccagccgcctctgggggcctcggcgcgcagccctgcccgcggcgcgggggagcgcatgtgccgcccaccgccgcgcaggtggcgggagcacagcctgcctgtccccgcgttctctggcgcaccaggcgggacccgcgcgccgggagctcctccaccccctcactccatcccctgggcccgggacactgaaaagggggaaat

SEQ ID NO: 602975 - DNA, 595 bp, Homo sapiens
gccaatggggacgcgaagctcgcgggctatttaaatagccccgccccttctttcaccctccctctcccgagaggcgtcgcctccgccgcgcgtaggtttcaagacccgggaattcttggaggcatgcgaagagccgcgaggtgccaaaggcgaagaggtcatcgctagtaagaatgrtctgaccaataccccgatctgaagctttctcttttaccatcatttaaaaggcctaagttgatgctttaactaaataaaaataataacagcgattaaatcactatactgccagaactgaggaagaaaagaaaaatgatagcttttccatcccttccttagtttctcttattgatgtaatgtaggcgtttagcggacacgtggctttccacggcagctgctggaagttgggacacaccctccggggaggctactcacaaactgaccacagagagggccacatgtaacccaagccagcgtcctgagggtttggggtcggatgtgttgacttctctgttcatttgtgctttggtttggcttcttaagctagcacccaaaagaaagagggtgtaatcagacgatatattagaaaaggcgtccc

SEQ ID NO: 602976 - DNA, 649 bp, Homo sapiens
agatggcatgatgtagtccacaagatctccagcattagtatttttacccactttcccacataytgcagggcctgttctgggctagaaggtaggtttttcaaagccctgagtccctgggcactgggccttatggtgccctgggtcctgtgctcttgtaggtgggactttctggcaagcataacatttcattctaaaacaaatacatggagagttggcttgctgtgggtacaattagtcactttctcagaatgaggagcaaagggctaattgtgctgcaagtggacaattgctactgtaattattagcctctgtacccccccacacaaaacataattgcacatgcggacgaggagagcttaggctgtcttcttgcaattccgcccatgaggcttctcattgttaagctcaggtttttttccactttgtatctgtcacagttggttgtgcttttccatgattgtcttttttcactctgtaaaatataaatgcaaaagcagttttttaaaagtttctcagaacaatttaaatactgaatcagccctctagttatttggtttgtgttaaatgtaacttgagtatttacaaaggcaagtttctggctgatgtttatggaatcacataaaagaatgaagcaagaaacgtcccctca

SEQ ID NO: 602977 - DNA, 559 bp, Homo sapiens
gaaccaggcccccacatccactcaacctccccatggcagcccatgcgtaccccagacstctccaagctgaatgagccaagcagtgagaaggtgaggaagtccactgagacttaaccagaagaaggagaagaaaaagaattcaccagctttcaaaagaaaagagaatgaggaggagaagcctgcatgcttcagtagtactactcttagccatgggtgagatgagcccccaccagggccccacactttagagagtcctgtatgttgattcacctgtgtctgttaccaacaaatgcaaaaaatacaaacatatgactagccatccaggggtagggagtgatctgtggccaggcaaatctggaatcaagtcctctgaccaaaccattaaaacatccagacaataaaaaccatactccgagccagaggatagcctgtgccaggaccctagaaggctggaggaacaggctgttccgggaccccaaggccctgaggctgcattcttgaagccaatggccttcaaagatatattcctcaaatgaaaaggtatggttgattgagtaag

SEQ ID NO: 602978 - DNA, 511 bp, Homo sapiens
aagtttctcagaacaatttaaatactgaatcagccctctagttatttggtttgtgttaaatgtaacttgagtatttacaaaggcaagtttctggctgatgtttatggaatcacataaaagaatgaagcaagaaacgtcccctcagctctcagtatctgctcctccctataatctgtgcttttctcaaagtctccaagaaaaggagttgcaaggcctctcagggcaacttcatttcagtgttacgcctctaaccttaaaatgyccaagcatggtatacccccaaactcactcaagatttcaagggtcatcatggtggctgtaagtcagttgttactttctctggatatgatggaaccaaatttgttttacctaggtttgtagccggaaaccatcatgaaaggtaaattcatttgttttaggtttacatgtgaagttttcacatgaactggtttttgaagcagctgatatttctcacaagggatgtggccagagtccactcagcttcacttca

SEQ ID NO: 602979 - DNA, 511 bp, Homo sapiens
aagtttctcagaacaatttaaatactgaatcagccctctagttatttggtttgtgttaaatgtaacttgagtatttacaaaggcaagtttctggctgatgtttatggaatcacataaaagaatgaagcaagaaacgtcccctcagctctcagtatctgctcctccctataatctgtgcttttctcaaagtctccaagaaaaggagttgcaaggcctctcagggcaacttcatttcagtgttacgcctctaaccttaaaatgtccaarcatggtatacccccaaactcactcaagatttcaagggtcatcatggtggctgtaagtcagttgttactttctctggatatgatggaaccaaatttgttttacctaggtttgtagccggaaaccatcatgaaaggtaaattcatttgttttaggtttacatgtgaagttttcacatgaactggtttttgaagcagctgatatttctcacaagggatgtggccagagtccactcagcttcacttca

SEQ ID NO: 602980 - DNA, 511 bp, Homo sapiens
aagtttctcagaacaatttaaatactgaatcagccctctagttatttggtttgtgttaaatgtaacttgagtatttacaaaggcaagtttctggctgatgtttatggaatcacataaaagaatgaagcaagaaacgtcccctcagctctcagtatctgctcctccctataatctgtgcttttctcaaagtctccaagaaaaggagttgcaaggcctctcagggcaacttcatttcagtgttacgcctctaaccttaaaatgtccaagcatggtatacccccaractcactcaagatttcaagggtcatcatggtggctgtaagtcagttgttactttctctggatatgatggaaccaaatttgttttacctaggtttgtagccggaaaccatcatgaaaggtaaattcatttgttttaggtttacatgtgaagttttcacatgaactggtttttgaagcagctgatatttctcacaagggatgtggccagagtccactcagcttcacttca

SEQ ID NO: 602981 - DNA, 511 bp, Homo sapiens
aagtttctcagaacaatttaaatactgaatcagccctctagttatttggtttgtgttaaatgtaacttgagtatttacaaaggcaagtttctggctgatgtttatggaatcacataaaagaatgaagcaagaaacgtcccctcagctctcagtatctgctcctccctataatctgtgcttttctcaaagtctccaagaaaaggagttgcaaggcctctcagggcaacttcatttcagtgttacgcctctaaccttaaaatgtccaagcatggtatacccccaaactcactcaagatttcaagggtcatcatggtggctgtaagtcagttgttactttctctggatatgatggaaccaaatttgttttacctaggtttgtagccrgaaaccatcatgaaaggtaaattcatttgttttaggtttacatgtgaagttttcacatgaactggtttttgaagcagctgatatttctcacaagggatgtggccagagtccactcagcttcacttca

SEQ ID NO: 602982 - DNA, 464 bp, Homo sapiens
gctttttcttcataactgatgttccacaagtttccatctgttatcatttcctttctgtttgaagaacttcttatagcaattcttttcaagcaggtttgctgacaaccaattctctgtgtctcttcacttgggaatgttttgatttcacttttgctcctgaagaagtttgctagatatagaattctgggttgatggttattttctttcagcacttgaaaaacattctgactcttccttctggcctccatggtttctgatgagaaattcactgtcattaatatcgttatcyatgactgcttttaacatactttctttgtgtttaattttcagaaatttgtctgtctatggatttctttaaatttaccctgtcttggatttgcttcacttcttgaatctgtaagtctatgtctctcacaaaatctgggaagtttcgtgtcattatttcataaaatatttgctcactt

SEQ ID NO: 602983 - DNA, 559 bp, Homo sapiens
gaaccaggcccccacatccactcaacctccccatggcagcccatgcgtaccccagacgtctccaagctgaatgagccaagcagtgagaaggtgaggaagtccactgagacttaaccagaagaaggagaagaaaaagaattcaccagctttcaaaagaaaagagaatgaggaggagaagcctgcatgcttcagtagtactactcttagccatgggtgagatgagcccccaccagggccccacactttagagagtcctgtatgttgattcacctgtgtctgttaccaacaaatgcaaaaaatacaaacatatgactagccatccaggggtagggagtgatctgtggccaggcaaatctggaatcaagtcctctgaccaaaccattaaaacatccagacaawaaaaaccatactccgagccagaggatagcctgtgccaggaccctagaaggctggaggaacaggctgttccgggaccccaaggccctgaggctgcattcttgaagccaatggccttcaaagatatattcctcaaatgaaaaggtatggttgattgagtaag

SEQ ID NO: 602984 - DNA, 559 bp, Homo sapiens
gaaccaggcccccacatccactcaacctccccatggcagcccatgcgtaccccagacgtctccaagctgaatgagccaagcagtgagaaggtgaggaagtccactgagacttaaccagaagaaggagaagaaaaagaattcaccagctttcaaaagaaaagagaatgaggaggagaagcctgcatgcttcagtagtactactcttagccatgggtgagatgagcccccaccagggccccacactttagagagtcctgtatgttgattcacctgtgtctgttaccaacaaatgcaaaaaatacaaacatatgactagccatccaggggtagggagtgatctgtggccaggcaaatctggaatcaagtcctctgaccaaaccattaaaacatccagacaataaaaamcatactccgagccagaggatagcctgtgccaggaccctagaaggctggaggaacaggctgttccgggaccccaaggccctgaggctgcattcttgaagccaatggccttcaaagatatattcctcaaatgaaaaggtatggttgattgagtaag

SEQ ID NO: 602985 - DNA, 546 bp, Homo sapiens
gaataaccacatgcagaagattaaagctggattcctaccatttaccatatacaaaaatcagatcaagatgtattaaagacttaaatataaacccaaaaccataaaaaccctggaagacaagccaggtaataccattttggacataggaatgggcacagatttcatgatgaagacaccaaaagcaaytgcagcaaaaacaaacattgacaagtgagacttaattaaacaagagcttctgtacaacagaagaaactatcaacagagcaaacagacaacctatagaatgtgagaaaatatttgcaaactatacatctgagaaaggtctaatatccaaaatctataagaaacttaaacaaattgagccaaaatcaaacaaccccattaatgcttagctctcacctacaagtgagaacatgtggtattaggttctgttcctgtgttaattcacttagcataatagctgccatccatgttgcttcaaaggacatgatttcattcattcttatggctgcatagtattccgtgtagtttcctgacattttaatg

SEQ ID NO: 602986 - DNA, 606 bp, Homo sapiens
ccaactcatccacagatatcagggtataaatggatacatcccctttgaaaagctgattgacattttctactataagcagaacacatgcgtgcctggtgacccagcaattccactcctaggtatgcacccaacagaaatgcgtacacacagccatcaaaagacgttcaaaaatgtttatggcagcatgatttgtaacagactgaaactggaaacatcctaaatggccagcaacaggagtggatgaattaattgtggtatagtcacactaaggattctgtacagtaacaaggatgaaaattagccaggcatggctaattttattaactgtatagttagttattaattagtagttattagtgattatgaactatagttgttgactatatagttatagttattaactatagttgcagatgatgtcaatgacttgtggacasatagcatctacagtgtggaatgctgaacaaaggaatcattcctatattattcactgtatagttaataatagccatgctgtacattaggtctccagaactttttcatctgcaagtttgtacctttcggccaacattgccccatttcccctacccctcaccgctggtataa

SEQ ID NO: 602987 - DNA, 606 bp, Homo sapiens
ccaactcatccacagatatcagggtataaatggatacatcccctttgaaaagctgattgacattttctactataagcagaacacatgcgtgcctggtgacccagcaattccactcctaggtatgcacccaacagaaatgcgtacacacagccatcaaaagacgttcaaaaatgtttatggcagcatgatttgtaacagactgaaactggaaacatcctaaatggccagcaacaggagtggatgaattaattgtggtatagtcacactaaggattctgtacagtaacaaggatgaaaattagccaggcatggctaattttattaactgtatagttagttattaattagtagttattagtgattatgaactatagttgttgactatatagttatagttattaactatagttgcagatgatgtcaatgacttgtggacagatagcatctacagtgtggaatgctgaacaaaggaatcattcctatattattcactgtatagttaataatagccatgctgtacattaggtctccagaactttttcatctgcaagtttgtacctttcggccracattgccccatttcccctacccctcaccgctggtataa

SEQ ID NO: 602988 - DNA, 598 bp, Homo sapiens
ctttctgtgtgatggctagatggataaagcaactttggtacaacagtgcccccttatccacgttttcactttttacagtttcagttaccctgcagtcaaccatagtatgaaagtattaaatagaaaattccaaaaataaacaattcataagttttaaactgcgtgatgaaatcttgtactgtcctgctctgtcccacctgggatgtgaatcatccctttgttcagcattccacattggagatgctacctgcccagttgtcatcaacatcgtctgctcttgacatccaaccactaacatacttatggctcagtgatgcagaatccaccaaagcagatgaagtgggcttgtatattaaacacgcaawgggctgctctttacattcacaaataagaatcatctccctgacttatttcacttagcataatgtgccccaggtccacacgtgctgtcacaaacggcaggagtgccctctttttaaaggctgaataatattctgttgtttatatctatagtagtcccccttatcctccccattgttctttttcaaaaaaattcgataaattatgatagctttaaaatatatttaacatcaagctt

SEQ ID NO: 602989 - DNA, 577 bp, Homo sapiens
gccatccatttcaattctcatcttttgttttcaaagagagcttccagtgttttaaagtttgaaaaccactcatctagttttattccctttttactcaaataaggacactgaggcacagaaagtgaaggagacttgctcagggtcacacagcgagccggggattaatatgcaaatggatctcatgtttccagaatcccaggccagtctccttctgctgcatagtacagaaggtgatgccatcccaatatwttagacatggaatggcaggcttacaggcggaaagttcacttccaacaaggactccaaaatgtaatgcacaatgtgagcggtgtgaaagtgtgccttaaaagttgggatgagtcttgataagagtccctgaagcctgtggattggcaacatctgcctttacatagttttgagatgaccctgagtagcagcaccgtggagtagagaggggaccaaggagggccaggtgccctgagctctgctcctctttcagaggccttcaggccttgggcaagtagcttctcctctcagagcctggtttcttcatctgctaaaggcagggacattaaca

SEQ ID NO: 602990 - DNA, 361 bp, Homo sapiens
gaccaaggagggccaggtgccctgagctctgctcctctttcagaggccttcaggccttgggcaagtagcttctcctctcagagcctggtttcttcatctgctaaaggcagggacattaacacctgtcctgccccatctcccagagttgggatcaagctttatgaacttaaaggactgtgcatagtaagggmtctcaattcttattttaaaattgtaatcacctaaggatctatttttttaagataagatagcaaatattctcctttcttttttcattaaaaaagaaaaaaaagagagccttactcttgggtgaggtcaaaatgtttgtaggtaaaatatattctactacaatctaattcca

SEQ ID NO: 602991 - DNA, 539 bp, Homo sapiens
ctgcatcattgtctgaaggctctccccacctactcctactccagcaccctttctccttcacaggtgtttctcctaatacatctcttgcacattggaccctatcctggtgcctgcatcttggaggccccaccctagcagaagtagagtgtcagagagcaggcagtagaatgatgggctttggggccccacttcctcactgactggctgtgttaaggaggcttccatcccaagtgggacacgtggaatgtgggacattgatagtccttggcacaaggtggtggcccaactgctgaaaatttcacaagtggtgacttgggaaaatgtcccagtggagaataacaccctggatggtacaatagtacacatacttgaaggaatagagggaacaaggccaacaagaactgtggatttggctgggtttgacaaaggtgtgacaccctgcagagggatagtgagaaattcagggcatttaacaaacmgttaaaggctgaatgtgagagcctgagctgcccctttggtagagcacaaagaaatcatta

SEQ ID NO: 602992 - DNA, 463 bp, Homo sapiens
gctgagtgccttaaaacaaacacatttcttttctacagttttggaggtcagaggcccaaagggggctaagatcaaggtgccggcagggctgcattctttctgaaggctctcaggagactcattttcttgccttctccagttcctagtggatgctggcactccttggctgtggccctttccaacatcatcaaagccagaaatggtgggtcaagtcctcctcacatcgaatcacttcagtctgcctctgactcttctgtttccctcttccacacttaaagacccacctttaaattggcccamccggataatccaggctaatctccttatcttaaatctccttatctcagctgtttagcaaccacaacctccctcccaccaccttgccatgtaacatcgtacggttctgggggtgaggacgtggtggacatcactgtggggccatcactctgcccctggcagcaga

SEQ ID NO: 602993 - DNA, 590 bp, Homo sapiens
ggttcagcataaaccacattgtttgtacagttcaggcacagtgagccactctcatcaattctgagaagagtggaacccccctgaaatctaagtccccagataccagcccarggccaaccttgccagcaggcctttctgaggatatggtcgcaggcctgccgtgttagctgttttctatacaacaatgaaacaccccaaacatcacccccagggaacagctcttatgaagataacccataacatgagcaatgtgtccttgacaccagcaggacatttctagtccctactatccccaagggctcattccagcatggcactggagtgctcaacgtcatggctgccaccacaggcaggaaggacagcgtggcaggcaggggtggaagagtccaggttcaaatcctttctctgccacgtcccagtcttggcctcagtgtcttcttctttaaaatgggcacaggaatctattcccttcccagcccactcctcaaaggctgttgtgaggaacaattgcaagaccccttacaaactgtaaaagacctctgcagagggacttgaggactcaggcagggtgtgctgtccttaggcatctc

SEQ ID NO: 602994 - DNA, 538 bp, Homo sapiens
caaccatccaagggctaaccagcaggtaagacagtcacccagatgcacatggtcacaggaggcagtactgtggggtgagcaaaaacagtaccagagggagactcaaatgcccaggggtctcgctgccaaccacttgagcttgggcaagttgctaatcatttcctttttatctgcaaatgaagatgatgaccgcagcctcgcatccttggggtgaagggagaaaatggatgtgactgtgttattaactgtgtggatctgtacaaatgaaagggatcaatattattattatagtgtgtggtgatttgtccccctacctcgtcaattatatcgatcattgatggctggaatgaaaaaatcttcccaaatccctctgagatttctttaaagttaatggtgctagggaaagaaaggatatcaagtcattccccaggaycccatctgcttgtattaaaaagcacataaccaaagattttaataatcaacacactgaacagccctgataatttatgctaatagtcacgttatgatgtggaacaag

SEQ ID NO: 602995 - DNA, 464 bp, Homo sapiens
gaattcagtatgtatttgctaataattacaagccacagtgctggaataaggagtctatcaggtggagagaacagaaatgcatacagaagtcagtgaatgttcagaggtatgcctgaagcaataggttggtgagggaggtcatggaaagctacagagatgacacctgcactgagtcaggtaaaaaggggtctttgggggccatattcactttccatcctgcagcrcagaataggagaggactcactcaaggtcacacagctcttcagggcagagctggggcaagcacccaagtttctcggtatgtcagcccagagctctttcttatacatggttggccttcagtttaaatgggtcccactcctggtgctctagaaatggcctttgcagaatctgatcttccgctcctgcctgttcacaggccccatcatggtaactggtcacagccagctttctgatgcagtaat

SEQ ID NO: 602996 - DNA, 452 bp, Homo sapiens
gtgctggaataaggagtctatcaggtggagagaacagaaatgcatacagaagtcagtgaatgttcagaggtatgcctgaagcaataggttggtgagggaggtcatggaaagctacagagatgacacctgcactgagtcaggtaaaaaggggtctttgggggccatattcactttccatcctgcagcgcagaataggagaggactcactcaaggtcacacagctcttcagggcagagctggggcaagcacccaagtttctcggtatgtcagcccagagctctttcttatacatggttggccttcagtttaaatgggtcccactcctggtgctctagaaatggcctttgcagaatctgatcttccgctcctgcctgttcacaggcccsatcatggtaactggtcacagccagctttctgatgcagtaatctcttcctttgtgatctgaattctg

SEQ ID NO: 602997 - DNA, 559 bp, Homo sapiens
tatcctctatcaatatcttctatcatctatcaatatcatctatcatatattcatccatctattatctgtctatataatctatccgttcatccatcatctagtatctatrtcagctatcatccatctatattatctatgtctatctattatttacctacccattcatttattatctatctattcatttattcattcattcatctctatcacctgtctatccattcgtctatcaatcaatcaacatctgtctattcatctatttatcatctatcatctatctatctatctatctatctatctatctatctatctatctatctaatctatccactccctgcaccatcttgcccaccctcgtgtcttccattaaccccatgtgatgactctccagagtgccagatgtattaatccacctacctacgtaacttctccacttgatgccctgcagggatttttctcacataatgagtctagaagcaggcagtgtcttgcattgactcagcagcttaagcatgtcctagctgaagtctctggttctcttagcctttcccttgtggtt

SEQ ID NO: 602998 - DNA, 495 bp, Homo sapiens
accttctgaattggcatggggaatgtccactccagcacccccaccaaaaaagaggttaacagcagatgttggcaaggatgtggggaaataggcaggagaaggcttctaaacagagggaacagcatgatcaaaggcacaggggtgggaaattgctcaytggattcagggaaaggagtggcctaggggtggcgggatcactaggtgtgtagagggaggaattttgaggtacgcacagccctttgtggtttccaaggccctttcacgctcttctcataaccacagcatgagatcaatattttttaatgcttattttacagaaaaagaaactgaggctcagagagcagaagctacttttctagggtcatatggctgggaatcagcagggctgagatttgaacccaaatctatctgtgcttttcctgataccacagagctttagaggctgtatgactgaccatacctagaaacctattttgcattttcctaatgacaaag

SEQ ID NO: 602999 - DNA, 468 bp, Homo sapiens
atgccagcctctgaggcatttggtcccctcacctcctggacacaaatagaaaactcrctgagtcctgcttgcatttacacaccgagctggtcttgtgatgtctccccttagcatggctttgttcaatgtccctctgcttgtcacagtgccacttattatgctctgtctagactgcctaacaaggccgggtgcagtggctcacacctgtaatctcagcactctgagaggctgaggcaggcagatcactggaggtcaggagtttgagaccagccttgccaacctggtgaaaccccatctctatgaaaaatacaaaaaatagctgggcgtggtggcgcatgcctgtaatgccagctacttgggaggctgaggcaggagaatcacttgaacccgggaggcagaggctgcagtgagccgagattgtgccactgcatgagagagtgacagtgttgcaacagtgagagagactct

SEQ ID NO: 603000 - DNA, 468 bp, Homo sapiens
atgccagcctctgaggcatttggtcccctcacctcctggacacaaatagaaaactcactgagtcctgcttgcatttacacaccgagctggtcttgtgatgtctccccttagcatggctttgttcaatgtccctctgcttgtcacagtgccacttattatgctctgtctagactgcctaacaaggccgggtgcagtggctcacacctgtaatctcrgcactctgagaggctgaggcaggcagatcactggaggtcaggagtttgagaccagccttgccaacctggtgaaaccccatctctatgaaaaatacaaaaaatagctgggcgtggtggcgcatgcctgtaatgccagctacttgggaggctgaggcaggagaatcacttgaacccgggaggcagaggctgcagtgagccgagattgtgccactgcatgagagagtgacagtgttgcaacagtgagagagactct

SEQ ID NO: 603001 - DNA, 564 bp, Homo sapiens
ccccctttccaactgatccttctcagtgtccttcccaggatcttccttctctgttcatcccctaaatgttgacagccccacctgctgtccctcctccttctctgyctgggtaatctcagccacccttgggctcctgtagccatgggacaccatcacctctgaacctgcatctccaacccaatctctctctctctggagctccagaggcccttcttggccctctctagcaaattccaaaatgttacatatgtatgattccatttatataacatttatgaaatggtaaaattttagatattgaagacacattagtggttgctggggagggcaggtgctgggatggaggtgggtgcagtcataaaagggtatattaatttcttttttattaattttttattcccataggttattgggaaacaggtggtgttcggttacgtgagtaagttctttggtggtgatttgtgagattttggtggatccatcacccgagcagtatacactgcatccaatttgtgctcttttatccctcaccaccttcccaccctttctctctgagtccccaaa

SEQ ID NO: 603002 - DNA, 564 bp, Homo sapiens
ccccctttccaactgatccttctcagtgtccttcccaggatcttccttctctgttcatcccctaaatgttgacagccccacctgctgtccctcctccttctctgtctgggtaatctcagccacccttgggctcctgtagccatgggacaccatcacctctgaacctgcatctccaacccaatctctctctctctggagctccagaggcccttcttggccctctctagcaaattccaaaatgttacatatgtatgattccatttatataacatttatgaaatggtaaaattttagatattgaagacacattagtggttgctggggagggcaggtgctgggatggaggtgggtgcagtcataaaagggtatattaatttcttttttrttaattttttattcccataggttattgggaaacaggtggtgttcggttacgtgagtaagttctttggtggtgatttgtgagattttggtggatccatcacccgagcagtatacactgcatccaatttgtgctcttttatccctcaccaccttcccaccctttctctctgagtccccaaa

SEQ ID NO: 603003 - DNA, 552 bp, Homo sapiens
ccaagatgagcccgttagagcccattcttcagttctttggtaatttagaattgggacgccggagacagccaccctgtggatggctggacttgtcacatagaaacatgacacttggggtgtccatgttctaccacgtacagggaggaacaggggatgttcattcaaagacaggagatcggagtccctctgcagagggaagcagacaagagctgaagagggtgccttgctttcctattggctttccacttcctgtttctagtccttctggagatgtggcccaatttagcccctggatttcatgagattccttgtaacaaatctcctcactgccactccctgtcctccagctagctgagaaagatttctattatttacagtgsggactttgagccatggcctgcctaagccctgggtgccctggggaggtttgtgtgctacccttccagggttcagcacagggagggtatgcaaagggtcctttttaatcttggactttgaccccactcctgtcctgtatcctgtcagtctgtaaaatgcaggagtgggcctgtc

SEQ ID NO: 603004 - DNA, 602 bp, Homo sapiens
agaagagtctgtaggctcgggcagggcagaaccaaggggactggggccaggaggaaggctggaaagaggagcccaatcccagtcctctaggtggtgatctgcggcacagcaggatcaaaagaggaacagaggccaagggcacaggacatctgggatccaggcccaacttgttcatggctcactgtttgctgttgagcaggccccttcccctctctggacttgtttccccacttgtaaaacaagaactagctggcctctaagatccccctccagccctggaattctgtgggttgatgagaaatctcccatagttagcaactgctcctgcacaaacccacagtcacatgaagatgcaagcagattgttctgtattcacttgggaattaataccctgagtcagtctcttttccaccaagtgcttgcygttgccttttcagatctccacaccagagccacgagttccaggtagctctacatttgacacaatttctcaccatgccaaagaaatctcttctcccaggccacagccaaatggaaccatctgcaccatgaagctgaagataaagccgcagaaagattgctgtattgtgagtggagaagag

SEQ ID NO: 603005 - DNA, 602 bp, Homo sapiens
agaagagtctgtaggctcgggcagggcagaaccaaggggactggggccaggaggaaggctggaaagaggagcccaatcccagtcctctaggtggtgatctgcggcacagcaggatcaaaagaggaacagaggccaagggcacaggacatctgggatccaggcccaacttgttcatggctcactgtttgctgttgagcaggccccttcccctctctggacttgtttccccacttgtaaaacaagaactagctggcctctaagatccccctccagccctggaattctgtgggttgatgagaaatctcccatagttagcaactgctcctgcacaaacccacagtcacatgaagatgcaagcagattgttctgtattcacttgggaattaataccctgagtcagtctcttttccaccaagtgcttgccgttgccttttcagatctccacaccagagccacgagttccaggtagctctacatttgacacaatttctcaccatgccaaagaaatctcttctcccaggccacagccaaatggaaccatctgcaccatgaagctgaagataaagccgcagaaagattgcwgtattgtgagtggagaagag

SEQ ID NO: 603006 - DNA, 414 bp, Homo sapiens
acatactgggtttgaggtgtttgtgaagatgttacaatgacctttgggaatcggttttgaagtttaagagcatgatctggacgacaaacttagttttggaagtcagcatcatattggtggttaagttaagccataaaagtagatgaaattgctcgaggagggtatgtagagtgagaagtgaagagaatttaggcaagaatcctccagaacaccaagatttaagagacaaatagaaggggtagctagagaggtgtggtactgtgttgtcacagaagactgtttcaagatggaagggatgactctaaatatttaccccaaaragaatacatttattcacataaagacctgtacatgaatgtttatagcagttttatttcataattgccataaactgaaaacaacaaatattcctca

SEQ ID NO: 603007 - DNA, 592 bp, Homo sapiens
ccaaaaaacatacttatgtcctaatccctgaaacctgtgaacatgacattatttggaaaaagagtcttcgcagaggtaattattgtaatccccaatgttggaggtaggacctggtaggaggtgattggaccacgagggtggatttctcatgaatagtttagcaccatgtccttggtgctgttcttatgttagtgagtgagttctttcgagatctggttgtttaaaagtgtggcacctcccctccccgcttgctcctgctttcaccatgtgaagtgcctgctctttctttgccttccaccatgattgtaagtttcctgaggcctccccagaagccgagcagatgccactatgctttctgtacagcctgcagaatggtgagccaattaaacctcttttctttataaattacccaatttcaggtattyctgtataacatagcaagaatggattaatacagatcttgagatgagatcattcttgatttaatccaatgtcagatatccttataagagaagtgcagagggagatttgagacacatgagagaaggtcatgtggaaatggaggcagagattggagttctcctgctacaag

SEQ ID NO: 603008 - DNA, 622 bp, Homo sapiens
ttttagttgttttaagtcactcagcataagagtactttgttgcgcagcaacagataaataacagaaggcctaacctagaacaaaacacagaaactctagtgatgagtattaagactgaagcaagcaagaaagttattttgccaaaacatcctaggaattggtctgaactccccaggaagatagctatatgacactcayggaaaagggttaatggaaaggagctgtgagctaagtggggagatgtcctagaaggtcccaggatgacatatgtgagccagtagactaaatctcaccaaatgcagcagccaatttaattaccctttgggtaaacttactcattattatcaccaaaacttcagaaaaggctgtttaaaatgacagcttggtttctccttttgtgaagaggggaaaaaattgtttcgtgatggggagaagatattgaaggacagaacattacagtatctcatgaataaagacttgggaccccagctacaggtaatagccatgtcagttataggtggccaagcagtggttcaatatgtctactggtagtgagaggggaagccagctggacttactgggttgagtggggacttggagaacttttctgtcttacaagagg

SEQ ID NO: 603009 - DNA, 622 bp, Homo sapiens
ttttagttgttttaagtcactcagcataagagtactttgttgcgcagcaacagataaataacagaaggcctaacctagaacaaaacacagaaactctagtgatgagtattaagactgaagcaagcaagaaagttattttgccaaaacatcctaggaattggtctgaactccccaggaagatagctatatgacactcacggaaaagggttaatggaaaggagctgtgagctaagtgggragatgtcctagaaggtcccaggatgacatatgtgagccagtagactaaatctcaccaaatgcagcagccaatttaattaccctttgggtaaacttactcattattatcaccaaaacttcagaaaaggctgtttaaaatgacagcttggtttctccttttgtgaagaggggaaaaaattgtttcgtgatggggagaagatattgaaggacagaacattacagtatctcatgaataaagacttgggaccccagctacaggtaatagccatgtcagttataggtggccaagcagtggttcaatatgtctactggtagtgagaggggaagccagctggacttactgggttgagtggggacttggagaacttttctgtcttacaagagg

SEQ ID NO: 603010 - DNA, 622 bp, Homo sapiens
ttttagttgttttaagtcactcagcataagagtactttgttgcgcagcaacagataaataacagaaggcctaacctagaacaaaacacagaaactctagtgatgagtattaagactgaagcaagcaagaaagttattttgccaaaacatcctaggaattggtctgaactccccaggaagatagctatatgacactcacggaaaagggttaatggaaaggagctgtgagctaagtggggagatgtcctagaaggtcccaggatgacatatgtgagccagtagactaaatctcaccaaatgcagcagccaatttaattaccctttgggtaaacttactcattattatcaccaaaacttcagaaaaggctgtttaaaatgacagcttggtttctccttttgtgaagaggggaaaaaattgtttcgtgatggggagaagatattgaaggacagaacattacagtatctcatgaataaagacttgggaccycagctacaggtaatagccatgtcagttataggtggccaagcagtggttcaatatgtctactggtagtgagaggggaagccagctggacttactgggttgagtggggacttggagaacttttctgtcttacaagagg

SEQ ID NO: 603011 - DNA, 389 bp, Homo sapiens
gtcaggcctgagcttttgcatttcgaacaagctcccrggagatacccatgctgctgtccataaactataatttgagtaataaatgtatacagcacatgtaagagtgattactcacgaggacataaagaaataaaatattggaatggacattactagaagcctcaaattcctacaattaaaaaggtgggaactcagtcataaatatttggatgttattacaagtatgacttcatttcatattaatagactggttaaacctagaagaacaatatacaacatatagaagagattagggattttgaagtcaccagtggcttcagatctgtgttcttgttctaaatatgtctatatttatttaaggctatatcatgaatagtcctgttttaata

SEQ ID NO: 603012 - DNA, 607 bp, Homo sapiens
cagtttcactttcatctccaggtaatctgaagattaaaccatgagttatgttgtaactctgtgtcaggtgagcagccatgctagatataagaacagtgatcaacgtatgagaaagacaaataagaaaataaaagtaatttacggttataatcaagtaaaatttcaacaaatttaatacaatgtgacgcagtggtgtaaataagagacagaatagatggcaatgaggcataggtaatacatagttcaccacaaataattgtaattaaaatgactcttagaaggccaatttttggttttctgcttcctactcatttctttgctgattataatcagtatccttacattttatcttgcatcagttaatcacaacagtctcatttcattattatgtggggcatgcattaaaatactctgaattatagtaactggcagatgggaccctgttgatcctaaatgtcactccactccaccatgagcttatcttccctacctccacgttgctattccaccatgcctctcatatgaggtgaactaactcaaaactcttggttggttcaaaaattgtggcttttggtcatgrattatcaagtacaacaaggtgtttaag

SEQ ID NO: 603013 - DNA, 585 bp, Homo sapiens
tttccagtgttggatggaattgaaagtagtggtggaaataaaattataagctttttgctatgttgtttcattggttataaaacatgaattagctgattttgaaatttgaagtaacattaaaaattaaaaataaaagtgataccaaaaatatctcccaacagtcggaagatgtttcacttagatgatggcattcaattgaaaatgctgaaataactatttcccaagggcacacagtgagtaacatacaaacctgggaccaaactttgtgtaccacactgccttctcgttatgtttcccataagatttcttggttgaccattatgggaattcatacttcttcattatagataaggctctgtcaataattgcaattatcagcattttgccctcagggacttgagatattaaataagaagagcatttkttacatccatgactagagccatcctttgtgacattcatttcataaatatctagcaactattgttctcagttggaataaccaacaatatccagtatataaaaatgaataatagtttactagctttaaattcaaagtttactgaagttcatgaaaatatgaca

SEQ ID NO: 603014 - DNA, 498 bp, Homo sapiens
tacattgaaattccagactttaccrctatacaattcatctatgtaaccaaaaaccacttgcaatcctaaagctcttaaagatttttaaggaccctccaagctgttttccatagtagttgtattatttacattctcacgacaagtgtacgagggttctcttttctccatatccttgttgagtatttgttattgcctgtcttttggataaaagccattttaactgggataagatgatatttcataatagttttgatttgcatttctctgatgatcaatgatttggagcaccttttcatatgtctgccattgagaaatatctatttagattttttgctcatttttagtcagattattatattttttcctatatagttgtttgagctccttatgtattctggtcattactcccttgtaagatgtgtagtttgcaaatattttctcttattctgtgcgttgtctcttcacttttttttcctttgctgtgcagaagctctacct

SEQ ID NO: 603015 - DNA, 603 bp, Homo sapiens
tgcatgtgtgtgtattgttttaagttttctgggtctatctctgccctccaatcttatttttttaactaacagtttcaagtttgtcattacagagattctatccaggttgtcaggaaagcataagaggaaccrttgaacttcaaaatgctaatccattctcaggaaatgaagcagcatagtatattgaaataattactgtactctgaggtagtcggtacaggtataattccaaatctgtgactatagagaagtacacatcacccctgtcttcaggttcttatcagtaaaaggaagatacaactacaactagagagaaaggaaaaaaaatatatcatttctaagctctggctaagatagggaaagtttatgattcaaatacatttgtgggttaatgttcattaagattttgaatagcttacacaggaagttttcatagcaaatttgagaaaatgaatcattatatgatctaagaaagtatgcttccatttctatattaacttatatcaaattcacattacattagataaattataaatggttcaaatatatatgtgtgtgtgtatatatatacacacacatcaaatagatatgtgtgtgcatata

SEQ ID NO: 603016 - DNA, 603 bp, Homo sapiens
tgcatgtgtgtgtattgttttaagttttctgggtctatctctgccctccaatcttatttttttaactaacagtttcaagtttgtcattacagagattctatccaggttgtcaggaaagcataagaggaaccgttgaacttcaaaatgctaatccattctcaggaaatgaagcagcatagtatattgaaataattactgtactctgaggtagtcggtacaggtataattccaaatctgtgactatagagaagtacacatcacccctgtcttcaggttcttatcagtaaaaggaagatacaactacaactagagagaaaggaaaaaaaatatatcatttctaagctctggctaagatagggaaagtttatgattcaaatacatttgtgggttaatgttcattaagattttgaatagcttacacaggaagttttcatagcaaatttgagaaaatgaatcattatatgatctaagaaagtatgcttccatttctatattaayttatatcaaattcacattacattagataaattataaatggttcaaatatatatgtgtgtgtgtatatatatacacacacatcaaatagatatgtgtgtgcatata

SEQ ID NO: 603017 - DNA, 619 bp, Homo sapiens
atatatatatatatatatatcttagattctctttcttccccccatttaaaaataattacctaaagaaattgccttttcccatttgtctacaaaaaagaatttaagaagactttctaaaagtatttgagaataaatctcacaggaactacagaaaagtgcaatgtggagtaaaaaaatcaacaaagaaaaaaatcatcaggaaagatacaaaaactacttttaatgtatgagaaatatttttcacatcatgatgagattaggcagtatgaccaacatcctttagattactgaaatcactggctattttcacttgaaaacataaaataattttcttcccaattatttgayactgtagacatcaacaaaaataggtaggtcctttcaaagattagtaatcatcattattaagaatttaaagatgatcaagatcaatttcccaatactaattacaattaaacaaacaatcttgaagaatatgaaagttgggaaaaatactaatatttaccattcattaaataactacaaaattaaaaaagaacataaaaaagttctttctctaggaaaaaatgatgtgttctacctagtcattgcattttatgagggccacaaatagattttt

SEQ ID NO: 603018 - DNA, 615 bp, Homo sapiens
ctactataggttttgttccttgtgtttttcatgagggttacctaaaacttcttatagttaaaacggtttaagttaataacaacctaactcaaatcacatataaaaactatattttccctcctctacaaacasacttcatgttattgatgtcaaaatttacctctttttgtattgtgtatccactaacacatttttgtgatcataattattcttaatatatttgtcttttaacatttccacaaagatgaaaagtaaattatgcatcattgtcacagtattacattattttgtttttgtctatgtatttacctttaccactaagatttacattatcatatgcttttatgttgctatttagtatcctttagtttcagtttgagaaactcccttaagtacttcttataaggcaggtctagtagtgaaaaccttcagttttgtttgtctgggaaagtctttatctcttcttcatttgtagataatagttttgctgggtttagtattcttggttggcagtttatttctttcagcttttgaatatatcatcccactctttactgtcccgcaaagtttctgctgaaaaaatatgctgatagtattatgggtgggattccctga

SEQ ID NO: 603019 - DNA, 590 bp, Homo sapiens
agaattctgaattctttccctgtgatatcttgaatttctttgagtttcctcaaaacggctattttgtattatctgtctgaaaggtcacatatctctgtttctccaggattggtccccggtgcttatttagttcatttagttcatttggtgaggacaagacctggatggtcttgatgtttgtggaagttcgttggtgtctgagcattgaagagttaggtatttattgtattctttgatgtctgggcttgtttgtacctgcgttcctttccaggaaggctttccaggtattcaaaaggacttgggttgtgatctaagccatatctgcattagagcattccccagtgcactaacactgtggtagaggtactgccttcgtggtcttggataagatccggaagaattctctggattaccggcagaaactcttgttctctgcccttcctttctcccaaacaaacggagtctctctctctctctctctctctctstgtgtgtgtgtgtgtgtgtgtgtgtgtgtgtgttgtgtgtgtgtgctgaactgactggagctgggggtcaggtgacataagcacacctgtggccaccaccgc

SEQ ID NO: 603020 - DNA, 610 bp, Homo sapiens
gaattctctggattaccggcagaaactcttgttctctgcccttcctttctcccaaacaaacggagtctctctctctctctctctctctctctstgtgtgtgtgtgtgtgtgtgtgtgtgtgtgttgtgtgtgtgtgctgaactgactggagctgggggtcaggtgacataagcacacctgtggccaccaccgctgggactgagctgggtcagacccgaagccagaacagcactgggcctcacctggggcctgctgtaaccactgctatgctacggcctgtgttcactcaaggccttagggctctgcaatcagcaggtggcaaagcaagcacagcactgctttcccttcagggcagtgagatctcccaggccccaggcaagtctagagatgccatctaggggccggggactggagtcaaaaatcttagaaatctacctggtgttctattctactgtggctaagctagcactcaaccacatcacagagtccttcccattcttccctcccatttccacaggcagaagagccttatcccatggccaccactaccacaaggcccaggaggagtactgccaggctaacatcaatgttcacttaaggcccaagatct

SEQ ID NO: 603021 - DNA, 500 bp, Homo sapiens
gagggaaaggaagggatggagtggtggagcagctattactttgcaacagtaccctatagttttcaatgggttttccctagacaggtgagtctgatgaactgaaaccaggtcatgtgcccaagacctcactaccagaagggctgagaaagtgggtactgccctttccacttctcctctcctccaagactcttggggtggagaattccccaaatataaaaaggagttttagatagtgggtctccaataaaagaaaacatcttcctccaactcagctcattgcagagtatagctttcccaaagaagctggcaaaaatcctccamccaggcccaggtgacatttttcacctctctagctccccagatcctagaagcagggccatctcccaccaagcacctaccacatttccatcctgctcctccacatgccattacaggcaaaactttgaggcagaaaaacacgctgaaaatcagcctgcaaatggaaccctttcatgttgccc

SEQ ID NO: 603022 - DNA, 525 bp, Homo sapiens
gtgggtctccaataaaagaaaacatcttcctccaactcagctcattgcagagtatagctttcccaaagaagctggcaaaaatcctccacccaggcccaggtgacatttttcacctctctagctccccagatcctagaagcagggccatctcccaccaagcacctaccacatttccatcctgctcctccacatgccatwacaggcaaaactttgaggcagaaaaacacgctgaaaatcagcctgcaaatggaaccctttcatgttgcccgtgatcggcagctaggaaggtgagatcagatatggaagtgtttgatgaggttaagcccatttccaaccctttattctggcgtttaaaaccatcatctgttttaagaagtgaagggctttaatgtgcagggggtagagaaagaaccgggctcttactccatggagagcaccaggaggcagaagctgtggaaagttctggaacttttttcctctgactccataagggggagaagcccctacctgctgagctttaaaaat

SEQ ID NO: 603023 - DNA, 543 bp, Homo sapiens
aaaaaaaaaaaaaaatactagttaagttgctaccacattcaaatscataaaagcttcagtgctgcggttcttagtcccagtgttccctagcgcataaaaggaaggcgtgagtgtgagtgtgtgtgttcacacccatgtgtaatgagccattgtaataggaatctaagtacctcttacaagagataaagttcctagagccctaaatccagatctctaaacctcaaatcgtctcaggagttcccttattataccaaaccatcttccaaatttaaaactgagctaaagtcatttcgagtgcctaacagcccttctgaaaccgagaaagtatgtcacaaaaagcctcgagcaatactttctctaaacgactcccaggcaagtcaaacacggtattcttttgaagctatcacagtctgccttgtacctttgtagagatttcaccctgcacaactccagggggcaccattcacatagaccccagtgtaaatgacatactctagagttgtgcagtgcacgccctgcacagctgtacatgaaggccctact

SEQ ID NO: 603024 - DNA, 579 bp, Homo sapiens
gagcacagctaccaactccaaggttcccctggtcactaagtgccaagatgccttgcaatcaagctccttgacccactgcagttttattctgaaatccatcaaaatagctgcccagactgagttcacccctataagcttaaacatggacttggcrtggagtctcttgttgagccagtttgcaactgttggtgtttgtgggaaatagaaagaccaacccttcccagtttgccttggcctttcctggttttagaattgaagtcctacatcccagggcaactcctccattccagtaccaccaggactgctggtcctcttagtggggaaattattaaatggcccgccccaggcccctcccttgtgaattttatttcctgggagctgatgaccatgcaggagagacacctgtggttctctcttctggacccctgaccttcctaccaggagccagaagtgatcatggctgccctccaaaggttcttaactaagcacgagaggaacagttcttccccttgttcgggtacagttctcagtacctggttaaagagcagcccaaatctcacagcctgggtgttaagatct

SEQ ID NO: 603025 - DNA, 642 bp, Homo sapiens
actgcattctggacagaacggggtctgggcaggtttgtttctgaggattagcacgggaatgaaggggtttccttgttgttacaaacagttcaggagtgataactaatgtatcctttcccatattaaccaatgtatcctttcccacattaactaatgtatccttttccacaatgcatcagtgtttcagtgtttttcttcaccaagaattatgctgtatttaaaatacaaagccaggccaggtgcagtgactcatgcctgtaatcccagcactttgggaggccaaggcaggagaattgcttgacctctggagttagagaccagcctgggcaacatggcagaaacctcatctctataaaaaatacaaaaattagccaggggtgtcccagctactagggaggctgagatgggaggatcatctgagcctggggaggttgaagcagcagtgagccatgactgtgccactgcactccagcctgggcaacagaataagaccctatctcaaaataagtaaataaaatttaaaaataaatgaaacccacagtgatckccttttcatggggaatctgaaataaagccaaattcatagaagcagagagtagaatgctgtttaccagaggctgggacatgggggagagatgttgg

SEQ ID NO: 603026 - DNA, 522 bp, Homo sapiens
acggtggctcacgcctgtaatcccagcactttgggctaccaaggcgggcagattgcctgagctaaggagtttgagacctgcctgggcaacatggtgaaaacctgtcactacaaaaaaattttaaaaaaattagccgggtgtggtggcacacccctgtagtcctagccacctggggctgaggtgggaggatcacttgagcctgggaagttgaggctgcagtaagctgagattgcaccactgcaatccagcctgagtgacagaccaagcccccatctctgaaaaataaataagtaaataaaataaaataatcaaaataaaaktcttctaggaaataatggagaatgttacacattttaaaaaaattattatctaattttttttatacagaaagggtttctctctgtcatacaggcaggaatgcagtggcacagtcatagctcactgaagcctcaaactcctgggcttaaaggatcctcttgcatcagcctcaagtacctgggactacaggcaggtgccaccatg

SEQ ID NO: 603027 - DNA, 522 bp, Homo sapiens
acggtggctcacgcctgtaatcccagcactttgggctaccaaggcgggcagattgcctgagctaaggagtttgagacctgcctgggcaacatggtgaaaacctgtcactacaaaaaaattttaaaaaaattagccgggtgtggtggcacacccctgtagtcctagccacctggggctgaggtgggaggatcacttgagcctgggaagttgaggctgcagtaagctgagattgcaccactgcaatccagcctgagtgacagaccaagcccccatctctgaaaaataaataagtaaataaaataaaataatcaaaataaaattcttctaggaaataatggagaatgttacacatttwaaaaaaattattatctaattttttttatacagaaagggtttctctctgtcatacaggcaggaatgcagtggcacagtcatagctcactgaagcctcaaactcctgggcttaaaggatcctcttgcatcagcctcaagtacctgggactacaggcaggtgccaccatg

SEQ ID NO: 603028 - DNA, 337 bp, Homo sapiens
atctgattattggttagccagtgatttcctgtcatccacaaaaaaagaggaaatagtaagagaaaagtaaatactaggtgaagtgctttgagccaaagggagtccatataagaagtgatggatggctctgttgggatcccggcagtagtgcatgatgatgttgttgtataaatacgtcagctcctttaccctcgggggactctgaagcatgtgtttttcatgggcccctagcgtgctcatgygggattaagtttcagttgcctactgtggtaattggcttgagaagcctatctttattaattttctcctcttccttgacttatttctcttctcccct

SEQ ID NO: 603029 - DNA, 579 bp, Homo sapiens
tacctgtgttctcttcattcccttcytccctacaaaataaactatgtgagtttgaattcttgtttcaggattcaagtttgctcctggggaaccaaattaagactaaagaatatgtattctctttcttctcatttggcgttgagacattttaaagcctcaacaattttccctatataagcagttccaattatttgtgcctgacttataaaaagtaggtaatgagaaaattaaggcttgcagacaaatcttacacaattgcagcagaatatctcagaaatgtgcccaattctgagacagaaagaaaagaaaaaaaatcccacatctttattatggtttcccaatgcctcttcaaagcgcattaagtaggtgtaatcctcgcccctcccatacgatagtgggcagaccccatgacttttactagccaagataataatcaaaactccaccttatctttaatggcaaaccttcctccagttggagtgtgctttgggctgtccaccggtggtgggaaagagaggaaaggtatgggcggtgtcttctctccactttgtgccatttctcttttcttctcccatctca

SEQ ID NO: 603030 - DNA, 615 bp, Homo sapiens
tttagtattaagtgaagttattctatttctttgaaaattttggtaaatattacagtattttagtaggtaaactcttcttctttttaccatattggatatctgaattttattcttttcttcacaaagaaaattatgagtttaaaatcatccttttgattggaaactttttgagacttatttttgtagcacaagaagttgcagtaacaaaacttagtaaatactttgcgaatgggtaatgtgaaatctgaacttgcttagtaatgaacacaattcattcccattgaacaattagcggattaggagtaaactgagtcacttctatagagcactgattaattcttaactgatatattgatctacatgaggcgtctttatttatttttaatttgttagcattcctcttttgatgtatcaatctgcatgcgtgtatattatttaaartttcttaacattaatctgtttgctattagaggcaagttgctttggcagatgccattctcattaataaaacagacttggttcaaaagaagatgtaaagaaactaagagcgacaattaggtacgaaatgataagtgtgttaagtgcctacagatcccatgttgtatacacagaata

SEQ ID NO: 603031 - DNA, 610 bp, Homo sapiens
aacagtcattttgctgactgttctggagactcccattccttttgaaaacaaagatggacttttcaaatgaggttatagttcaggggctttgttttgaattattttgtaagacctgaactaataaaagccctatacagagagacattcggtagctattattattggttatctttaatgtgtacaatgctttgagcatgatggctcaaaattactattcttagtatttataagttctactgacattagattttgaatctgtcatctcagttcatatagtatatattataaattgaatcaataaagctaaggctcattaggagattatttgccatgattaatgattgtggaagaaagaaattcatattttttccacatatttcatcttattttaatartaatgtccttaaactttactataaaaaaatataatgtctccatgtggaaggtaggtattgttgcgtagtgttaaagatcacagaccttggaatctgcttgggttctaatccttggtctgtttctcattgtcttcttagggagcttatttacccttttaaagcctcctctgtaaaaggcataatgcctatcataagtttgctttgagtattacatg

SEQ ID NO: 603032 - DNA, 541 bp, Homo sapiens
ttattttattttattttttttgagatggagtctctctctgtcgccaggctggagtgcagtggtgcaatctcagctcactgccacctctgtctcctgggttaaagtgattctcctgcctcagcctcccgagtagctgggactacaggcgtgcgccaccatgcccagataatttttgtatttttagtagagacagggtttcrccatgttggccaggatggtcttgagctcctggccttgtgatccacctgcctcggcctcccaaagttgctgggattacaggcatgaggcaccatgcctggccaaaaaatgttttttttaggaattaggaaggcacttttgtatggactctattgcaactcatgaaaaatacttgaaaatgcttctgttattagttaactttgtttaatgtttattatctgcaatgcagttaaaactcaatattttaaaaataaaggtaaacatatggtctttatcctcatgtattttaagttatctgtgaaaataagtgtgcttaacttctcaactgaaatattaaactgta

SEQ ID NO: 603033 - DNA, 541 bp, Homo sapiens
ttattttattttattttttttgagatggagtctctctctgtcgccaggctggagtgcagtggtgcaatctcagctcactgccacctctgtctcctgggttaaagtgattctcctgcctcagcctcccgagtagctgggactacaggcgtgcgccaccatgcccagataatttttgtatttttagtagagacagggtttcaccatgttggccaggatggtcttgagctcctggccttgtgatccaccygcctcggcctcccaaagttgctgggattacaggcatgaggcaccatgcctggccaaaaaatgttttttttaggaattaggaaggcacttttgtatggactctattgcaactcatgaaaaatacttgaaaatgcttctgttattagttaactttgtttaatgtttattatctgcaatgcagttaaaactcaatattttaaaaataaaggtaaacatatggtctttatcctcatgtattttaagttatctgtgaaaataagtgtgcttaacttctcaactgaaatattaaactgta

SEQ ID NO: 603034 - DNA, 541 bp, Homo sapiens
ttattttattttattttttttgagatggagtctctctctgtcgccaggctggagtgcagtggtgcaatctcagctcactgccacctctgtctcctgggttaaagtgattctcctgcctcagcctcccgagtagctgggactacaggcgtgcgccaccatgcccagataatttttgtatttttagtagagacagggtttcaccatgttggccaggatggtcttgagctcctggccttgtgatccacctgcctcggcctcccaaagttgctgggattacaggcatgaggcaccatgcctggccaaaaaatgttttttttaggaattaggaargcacttttgtatggactctattgcaactcatgaaaaatacttgaaaatgcttctgttattagttaactttgtttaatgtttattatctgcaatgcagttaaaactcaatattttaaaaataaaggtaaacatatggtctttatcctcatgtattttaagttatctgtgaaaataagtgtgcttaacttctcaactgaaatattaaactgta

SEQ ID NO: 603035 - DNA, 552 bp, Homo sapiens
tcgtgctgtttttttggaattagcaactccatttcctacattctgcacaggtaccaatggatttagtatttacacaaactactacctttattttaaaaaactcactcaaaaaccctgatgaargggtcctcattatttaattcattctttcgtggattctcagcaataagaatatatgtaacacatacaatgtactcactacacagggccaggtacttttgcctgagtcacctcattttatcttttgacttactcttcacaacaatcctggggagtgaagataactatttcattttataaattgcggaaaataagggtcaaaaaaataagctacccagagccaggaataaaactcaaaaccaaagtaaatctgttctcttaaaaaaaaatacaaaagaaagcttggcttatctttaactgaataagcatgtgccaagaggagaagagttcttagcgatgagaatgataggataatgccctctttggctttagtaagggggacatcatcatgtattgaatattaactttaggatttatttttcttctttatct

SEQ ID NO: 603036 - DNA, 552 bp, Homo sapiens
tcgtgctgtttttttggaattagcaactccatttcctacattctgcacaggtaccaatggatttagtatttacacaaactactacctttattttaaaaaactcactcaaaaaccctgatgaaggggtcctcattatttaattcattctttcgtggattctcagcaataagaatatatgtaacacatacaatgtactcactacacagggccaggtacttttgcctgagtcacctcattttatcttttgacttactcttcacaacaatcctggggagtgaagataactatttcattttataaattgcggaaaataagggtcaaaaaaataagctacccagagccaggaataaaactcaaaaccaaagtaaatctgttctcttaaaaaaaaatacaaaagaaagcttggcttatctttaactgaataagcatgtgccaagaggagaagagttcttagcgatgagaatgataggataatgccctctttggctttagtaagggkgacatcatcatgtattgaatattaactttaggatttatttttcttctttatct

SEQ ID NO: 603037 - DNA, 652 bp, Homo sapiens
ttgtggcctaaagctgcctccttacatattttaagtttaccctaaaggtttcccagtacataaaaaactatatttcaacttgatatgtaaaacttgatatgtaacctactcttgtaacaagtagtgagtctcagccaatcacagcagctgaacttcagccaaccacaggcagccaactcttcaaaccaggttcaaataaggcaaatgctcagctgtaaccaamcctactctggttctgggggctgcctaattcacagatcattctttactcaattaaactctaaagttttcctttcaacatgtataattttcacatcacgaaataataatcttctttaatttttttccaatgtattaaaaatgtaaaaaccatttgcaggctacacaataaatggtagcaggctatggattcccaactcctgatctaagctaatataatatactgttttcttaagcagagttaatgaaattttgcaaaattggatcctccttgctcttttaaactcagtttttaaatcactcaccattaaaacaatcctggaccctcaaagggttaggtaccactgtgccaattaccacagtgctaatattcagaggaagatctgaagctgagaagcgtaaacttttttcccaaggtcactaatacttggcc

SEQ ID NO: 603038 - DNA, 652 bp, Homo sapiens
ttgtggcctaaagctgcctccttacatattttaagtttaccctaaaggtttcccagtacataaaaaactatatttcaacttgatatgtaaaacttgatatgtaacctactcttgtaacaagtagtgagtctcagccaatcacagcagctgaacttcagccaaccacaggcagccaactcttcaaaccaggttcaaataaggcaaatgctcagctgtaaccaaacctactctggttctgggggctgcctaattcacagatcattctttactcaattaaactctaaagttttcctttcaacatgtataattttcacatcacgaaataataatcttctttaatttttttccaatgtattaaaaatgtaaaaaccatttgcaggctacacaataaatggtagcaggctatrgattcccaactcctgatctaagctaatataatatactgttttcttaagcagagttaatgaaattttgcaaaattggatcctccttgctcttttaaactcagtttttaaatcactcaccattaaaacaatcctggaccctcaaagggttaggtaccactgtgccaattaccacagtgctaatattcagaggaagatctgaagctgagaagcgtaaacttttttcccaaggtcactaatacttggcc

SEQ ID NO: 603039 - DNA, 652 bp, Homo sapiens
ttgtggcctaaagctgcctccttacatattttaagtttaccctaaaggtttcccagtacataaaaaactatatttcaacttgatatgtaaaacttgatatgtaacctactcttgtaacaagtagtgagtctcagccaatcacagcagctgaacttcagccaaccacaggcagccaactcttcaaaccaggttcaaataaggcaaatgctcagctgtaaccaaacctactctggttctgggggctgcctaattcacagatcattctttactcaattaaactctaaagttttcctttcaacatgtataattttcacatcacgaaataataatcttctttaatttttttccaatgtattaaaaatgtaaaaaccatttgcaggctacacaataaatggtagcaggctatggattcccaactcctgatctaagctaatataatatactgttttcttaagcagagttaatgaaattttgcraaattggatcctccttgctcttttaaactcagtttttaaatcactcaccattaaaacaatcctggaccctcaaagggttaggtaccactgtgccaattaccacagtgctaatattcagaggaagatctgaagctgagaagcgtaaacttttttcccaaggtcactaatacttggcc

SEQ ID NO: 603040 - DNA, 377 bp, Homo sapiens
tttgctttttccctcgtctgtgatgctcacactcatcctccctatcccatcagcaacctctctagtatgtttgatatgtgtccttaaactttatatcttggccgggggcgcggtggctgtaatctcagcactttgggagatggaggtgggtctatcacttgagcccaggagtttgagatcagcctgrgcaacatagtaagatttcatctttactaaaaataaaaaacaaaaaaatttagccaggtatggtggcctgtgcctgtaatcctagctactcgggaggctgaggtaggaggatcacttgggcctgggaggtcaagactgcagtaagctgagatggcgccactgcactccaggctgggcaacagagtgagacc

SEQ ID NO: 603041 - DNA, 423 bp, Homo sapiens
atacaaaggcaataattaaatattatatttatataaaatacctactagtacaaacttaaaaagagaaagtaaaagtcaaatgcttctacgacttcagactaagaaaaagaacttttgaggttgaatgttcctgaaatttttcttttcatrcaactacggacatgacttcaaaagttgatgttactaaaaatgtaagatatgaaagatatttgaagactcagagaaggtggattttcattttaacaagtcacatatatattctagatatcctcttattcataactaagagagtcaaatcagatgaaagaatctaaaaatttccctttgactgtgttaagtagaagtagtagaggcatattggccaaatcttgagtgtttgcaaattgactcttaaggctataggctggcacaggtcattgaagc

SEQ ID NO: 603042 - DNA, 538 bp, Homo sapiens
agaattctcaacttcactgtgtcagaggatatgaagtaaacaaatattcatctctacatttgccagtccctgtggacttaggccagatagtataaataatagtcacaaaaggagtatgaatgggataagaagccacttctagtctgagacaattaagagtagtagtgccttctctgcactctcacccctcattctgacagctgaagtgaaggactcccaacttctggaactgcccaatgaaagtagccttgtgtgagtgttagctggcctgctttggtctgggatgcaagtagaaataaactcctstcatattaagccactaagactttagggatatgttgctgtagcatagcctaatgtagcctgattactgaacgagccaccccatcaactgaatctatgtatatactaaaaacattttaagatatgcaaggtctcaaaagagttcactcgatgcacactttttctcaggaagctactagaggatgtgctccacaaaaaataaaggtataaattatgaaagaggaaaacataggat

SEQ ID NO: 603043 - DNA, 538 bp, Homo sapiens
agaattctcaacttcactgtgtcagaggatatgaagtaaacaaatattcatctctacatttgccagtccctgtggacttaggccagatagtataaataatagtcacaaaaggagtatgaatgggataagaagccacttctagtctgagacaattaagagtagtagtgccttctctgcactctcacccctcattctgacagctgaagtgaaggactcccaacttctggaactgcccaatgaaagtagccttgtgtgagtgttagctggcctgctttggtctgggatgcaagtagaaataaactcctgtcatattaagccactaagactttagggatatgttgctgtagcatagcctaatgtagcctgattactgaacgagccaccccatcaactgaatctatgtatatactaaaaacattttaagatatgcaaggtctcaaaagagttcactcgatgcacactttttctcaggaagctactagaggatgtgctccacaaaaaataaaggtataaattrtgaaagaggaaaacataggat

SEQ ID NO: 603044 - DNA, 377 bp, Homo sapiens
ttttcttttgagagatgctagatatatacrttttttaaaaataaaattatcctgattttaacaacattgccttattatataaaacataccttggagggtgtgggtaagacacaatgtccttgaaattatatttcactgggttaatgaaattggctccggaagaaaataattttaaacagcaaaccaaaaagtgaaggccttcaaaactaacaaaccaaaggaaaacaaaacaaaatgacaacaagaaaaaaacaaagaaacaaaacccctggaccttaccatttttctaaggcatgttgacatgataaaatcaaaattgctttgtgcttataaggatcaaaggtatgcttatgactttataaattcagagaaaatta

SEQ ID NO: 603045 - DNA, 376 bp, Homo sapiens
tttcttttgagagatgctagatatatacgttttttaaaaataaaattatcctgattttaacaacattgccttattatataaaacataccttggagggtgtgggtaagacacaatgtccttgaaattatatttcactrggttaatgaaattggctccggaagaaaataattttaaacagcaaaccaaaaagtgaaggccttcaaaactaacaaaccaaaggaaaacaaaacaaaatgacaacaagaaaaaaacaaagaaacaaaacccctggaccttaccatttttctaaggcatgttgacatgataaaatcaaaattgctttgtgcttataaggatcaaaggtatgcttatgactttataaattcagagaaaatta

SEQ ID NO: 603046 - DNA, 376 bp, Homo sapiens
tttcttttgagagatgctagatatatacgttttttaaaaataaaattatcctgattttaacaacattgccttattatataaaacataccttggagggtgtgggtaagacacaatgtccttgaaattatatttcactgggttaatraaattggctccggaagaaaataattttaaacagcaaaccaaaaagtgaaggccttcaaaactaacaaaccaaaggaaaacaaaacaaaatgacaacaagaaaaaaacaaagaaacaaaacccctggaccttaccatttttctaaggcatgttgacatgataaaatcaaaattgctttgtgcttataaggatcaaaggtatgcttatgactttataaattcagagaaaatta

SEQ ID NO: 603047 - DNA, 376 bp, Homo sapiens
tttcttttgagagatgctagatatatacgttttttaaaaataaaattatcctgattttaacaacattgccttattatataaaacataccttggagggtgtgggtaagacacaatgtccttgaaattatatttcactgggttaatgaaattggctcyggaagaaaataattttaaacagcaaaccaaaaagtgaaggccttcaaaactaacaaaccaaaggaaaacaaaacaaaatgacaacaagaaaaaaacaaagaaacaaaacccctggaccttaccatttttctaaggcatgttgacatgataaaatcaaaattgctttgtgcttataaggatcaaaggtatgcttatgactttataaattcagagaaaatta

SEQ ID NO: 603048 - DNA, 589 bp, Homo sapiens
tcatctttatcacgttacaacgttcgtaaaagcttgttaggacttttgttcttcttcagttttagaaaagtggttaatccaaggaccaatgtgactttgatgtactgacctggaaagttaaagatggaatcactcaattactattctttttgtaaatttctaaacaccataaagcatttaatgaactggaattgataggtgaactgtgtcattttaataagcataatgtaatcacgtcatattttgttttgtttgcaggcagaaatttagataaggatatccttaaacagctgtttatagctactgtgacagaaacagaaaagcagtggacaacacrtttccaagaagatcaagtttgtacataacactagaggcatttcttatcaaaaggattggataataaaaataagtttctactgggtatatttcaagcatttatttattactttagttacgaattccaatatactttaaaatggtatttgttttacagcatacataaaatgtagcaaatcagtactgtaaaacatttaacattcatacagttatatataatatccttttttttaaagaatggtatttcacaaaa

SEQ ID NO: 603049 - DNA, 589 bp, Homo sapiens
tcatctttatcacgttacaacgttcgtaaaagcttgttaggacttttgttcttcttcagttttagaaaagtggttaatccaaggaccaatgtgactttgatgtactgacctggaaagttaaagatggaatcactcaattactattctttttgtaaatttctaaacaccataaagcatttaatgaactggaattgataggtgaactgtgtcattttaataagcataatgtaatcacgtcatattttgttttgtttgcaggcagaaatttagataaggatatccttaaacagctgtttatagctactgtgacagaaacagaaaagcagtggacaacacgtttcmaagaagatcaagtttgtacataacactagaggcatttcttatcaaaaggattggataataaaaataagtttctactgggtatatttcaagcatttatttattactttagttacgaattccaatatactttaaaatggtatttgttttacagcatacataaaatgtagcaaatcagtactgtaaaacatttaacattcatacagttatatataatatccttttttttaaagaatggtatttcacaaaa

SEQ ID NO: 603050 - DNA, 589 bp, Homo sapiens
tcatctttatcacgttacaacgttcgtaaaagcttgttaggacttttgttcttcttcagttttagaaaagtggttaatccaaggaccaatgtgactttgatgtactgacctggaaagttaaagatggaatcactcaattactattctttttgtaaatttctaaacaccataaagcatttaatgaactggaattgataggtgaactgtgtcattttaataagcataatgtaatcacgtcatattttgttttgtttgcaggcagaaatttagataaggatatccttaaacagctgtttatagctactgtgacagaaacagaaaagcagtggacaacacgtttccaagaagatcaagtttgtacataacactagaggcatttcttatcaaaaggattggataataaaaataagtttctactgggtatatttcaagcatttatttattactttagttacgaattccaatatactttaaaatggtatttgttttacagcatacataaaatgtagcaaatcagtactgtaaaacatttaacattcatacarttatatataatatccttttttttaaagaatggtatttcacaaaa

SEQ ID NO: 603051 - DNA, 516 bp, Homo sapiens
taggtcatttctagtctcatattcacataatttaaatcaagactttactcagaattttatttattgccgaaggacctacacatcttaaggtatcattcctaacatctctcatcaaatccaaatccaactcataaatgtatgacataacatatgcttaagtatccaaactaccaattcattttgcaatctctgaatatatgctgattacaaaagaatgagtttaattatgcctaaggaattcaaccagttacccrccacatatatagagctcaatgatggggcccagcttaataacacttaaatttcttaatgattattacttttgaaaaagtaagaaaatttcgactggtttttaaaaaggtgaaaaagggaaagagaaagggagaaaacatagtcgcttaactaagaaagtttctaatgtattttaaatgaaggcatatcactgcccaaaagtgttcaggtaaataaagtaagggaggagtgtttaattcttatcttcaagagaaaataaaagca

SEQ ID NO: 603052 - DNA, 516 bp, Homo sapiens
taggtcatttctagtctcatattcacataatttaaatcaagactttactcagaattttatttattgccgaaggacctacacatcttaaggtatcattcctaacatctctcatcaaatccaaatccaactcataaatgtatgacataacatatgcttaagtatccaaactaccaattcattttgcaatctctgaatatatgctgattacaaaagaatgagtttaattatgcctaaggaattcaaccagttacccaccacatatatagagctcaatgatggggcccagcttaataacacttaaatttcttaatgattattacttttgaaaaagtaagaaaatttcgactggtttttaaaaaggtgaaaaagggaaagagaaagggagaaaacatagtcgcttaactaagaaagtttctaatrtattttaaatgaaggcatatcactgcccaaaagtgttcaggtaaataaagtaagggaggagtgtttaattcttatcttcaagagaaaataaaagca

SEQ ID NO: 603053 - DNA, 516 bp, Homo sapiens
taggtcatttctagtctcatattcacataatttaaatcaagactttactcagaattttatttattgccgaaggacctacacatcttaaggtatcattcctaacatctctcatcaaatccaaatccaactcataaatgtatgacataacatatgcttaagtatccaaactaccaattcattttgcaatctctgaatatatgctgattacaaaagaatgagtttaattatgcctaaggaattcaaccagttacccaccacatatatagagctcaatgatggggcccagcttaataacacttaaatttcttaatgattattacttttgaaaaagtaagaaaatttcgactggtttttaaaaaggtgaaaaagggaaagagaaagggagaaaacatagtcgcttaactaagaaagtttctaatgtattttaaatgaaggcatatcaytgcccaaaagtgttcaggtaaataaagtaagggaggagtgtttaattcttatcttcaagagaaaataaaagca

SEQ ID NO: 603054 - DNA, 588 bp, Homo sapiens
ggctttgtgcacatcagacttatttttattttctcacctctttaatatgataatcattcaatcataaatagtgaattatcactctaaaggaaaaggaaacacaaaacatagataattccaaaatcacttgcccaaaaaaaatttacttgtaatctgtgtagaactagaagtaaaattatatactctatggcattactaattattcctcacactatttatttagtactgtataaaacctgggtcttaggaaaaatttttcctaaataataaattaaaacttgcttttgacagaaattggttcagtaccaaaccacataccctgattagtatgccacaacgcaagaaaaagaaaactgacagcaaggaaartatttgatttttgaaagcatcacaggcccagttagtgacagggctgtctaaaagaatgagtgtaggagaaaaacaaggataatcaaactcattccaacgtctaaagctgtccacctactctgccaagatgtggtcccccaagcatcactcggtgtcaacaatgaaatacctgtcagctgtttacagtgattactcatgcaagatatagcaagggccaca

SEQ ID NO: 603055 - DNA, 591 bp, Homo sapiens
tgccaacaaattggaggacctagaagaaatggataactttgctgctactcagatacattttatttcaaaaacatacactaaggtgttgctgttggatctttccaaaaacatattcacacagaactttcagtcacactgagccatatttgaacaatctttcaaggtcagctctggcataagctaacattataccatttaactcagaaatttctktagtatttgattaatgggtttatgtttgatatgtaatgtaattttctaatgctaaatcaagtggtaattttgttggtcaagttgatttagtggcttgggaagaaagcttttaatgttcccctaatttttcttacctttgacatgatccttcacatgtcttattttgcttagtgatttttctttttttttttttttttgagacagggtcttactctaccacccaggcttgagtgcagtggtgcgatcacagctcattgcagccttgacctcccagactcaagctattcttccaccttagcctcccaagtagctggtactacgggcacatgccaccaaacttggctaatttttgtattttttgtagagacagagttttgc

SEQ ID NO: 603056 - DNA, 591 bp, Homo sapiens
tgccaacaaattggaggacctagaagaaatggataactttgctgctactcagatacattttatttcaaaaacatacactaaggtgttgctgttggatctttccaaaaacatattcacacagaactttcagtcacactgagccatatttgaacaatctttcaaggtcagctctggcataagctaacattataccatttaactcagaaatttctgtagtatttgattaatgggtttatgtttgatatgtaatgtaattttctaatgctaaatcaagtggtaattttgttrgtcaagttgatttagtggcttgggaagaaagcttttaatgttcccctaatttttcttacctttgacatgatccttcacatgtcttattttgcttagtgatttttctttttttttttttttttgagacagggtcttactctaccacccaggcttgagtgcagtggtgcgatcacagctcattgcagccttgacctcccagactcaagctattcttccaccttagcctcccaagtagctggtactacgggcacatgccaccaaacttggctaatttttgtattttttgtagagacagagttttgc

SEQ ID NO: 603057 - DNA, 591 bp, Homo sapiens
tgccaacaaattggaggacctagaagaaatggataactttgctgctactcagatacattttatttcaaaaacatacactaaggtgttgctgttggatctttccaaaaacatattcacacagaactttcagtcacactgagccatatttgaacaatctttcaaggtcagctctggcataagctaacattataccatttaactcagaaatttctgtagtatttgattaatgggtttatgtttgatatgtaatgtaattttctaatgctaaatcaagtggtaattttgttggtcaagttgatttagtggcttgggaagaaagcttttaatgttcccctaatttttcttacctttgacatgatccttcacatgtcttattttgcttagtgatttttctttttttttttttttttgagacagggtcttactctaccacccaggcttgagtgcagtggtgcgatcacagctcattgcagccttgacctcccagactcaagctattcttccacctyagcctcccaagtagctggtactacgggcacatgccaccaaacttggctaatttttgtattttttgtagagacagagttttgc

SEQ ID NO: 603058 - DNA, 591 bp, Homo sapiens
tgccaacaaattggaggacctagaagaaatggataactttgctgctactcagatacattttatttcaaaaacatacactaaggtgttgctgttggatctttccaaaaacatattcacacagaactttcagtcacactgagccatatttgaacaatctttcaaggtcagctctggcataagctaacattataccatttaactcagaaatttctgtagtatttgattaatgggtttatgtttgatatgtaatgtaattttctaatgctaaatcaagtggtaattttgttggtcaagttgatttagtggcttgggaagaaagcttttaatgttcccctaatttttcttacctttgacatgatccttcacatgtcttattttgcttagtgatttttctttttttttttttttttgagacagggtcttactctaccacccaggcttgagtgcagtggtgcgatcacagctcattgcagccttgacctcccagactcaagctattcttccaccttagcctcccaagtagctggtactacrggcacatgccaccaaacttggctaatttttgtattttttgtagagacagagttttgc

SEQ ID NO: 603059 - DNA, 391 bp, Homo sapiens
agtgctaaaaaccaagtgggccctcaataaatatttttgtgaatttatttatttatttattttattttttgaggcggaatctctctcttccgcccaggctggagtgcrgtggtgcagtcttggctcactgcaccctccgtctcctgggttcaagggatttctggctaatttttgtatttttagtagaaacagggttttcaccatgttggccaggctggtctcgaactcctgacctcaaatgatccatccaccttggcctcccaaaatgcggggattacaggcgtgagccactgcacttggccagccctcaataaatatttattttctacgtgaaatggggaatctaactatgctacatggtaatgaggcagctgactttcttggaagcaga

SEQ ID NO: 603060 - DNA, 635 bp, Homo sapiens
atattaacatacctgccctctactgtcttttgggtttctgtttcaatgtaagctaatsagagatagcacccttgacagccctatataatactatagccagaagtccctaactttatattgattcctatttacttcaccctgctataattttctggatcacatatgttgcttttaacattttccatattatctattttcccactgtatgtaaagcccaaggacttttcactgctatatcccaagaacctaaaataaatctggcatgtggtaagcgtacagataaatatttgttgcattaatgaatggagaataatgaatgcatgatgaatggcttttctgggagaaataccttgaaggggggcaagagctgagagaggaatatcagacgggagactcttctagtcaagtgttgatagagtcttggactaggctagagccaacagaaatgaaaattagtcatttggtttgagatactttttggagggaggatgaacagaatatgcaggtgcgctggaatatggacaagaggcgctggggtcaatagccttcaaaaatggcccaaatggcccttgtcttttggcattgtgcgcctttttgtgagtcccttccacactgaacgatgcagatctgggtaa

SEQ ID NO: 603061 - DNA, 635 bp, Homo sapiens
atattaacatacctgccctctactgtcttttgggtttctgtttcaatgtaagctaatcagagatagcacccttgacagccctatataatactatagccagaagtccctaactttatattgattcctatttacttcaccctgctataattttctggatcacatatgttgcttttaacattttccatattatctattttcccactgtatgtaaagcccaaggacttttcactgctatatcccaagaacctaaaataaatctggcatgtggtaagcgtacagataaatatttgttgcattaatgaatggagaataatgaatgcatgatgaatggcttttctgggagaaataccttgaaggggggcaagagctgagagaggaatatcagacgggasactcttctagtcaagtgttgatagagtcttggactaggctagagccaacagaaatgaaaattagtcatttggtttgagatactttttggagggaggatgaacagaatatgcaggtgcgctggaatatggacaagaggcgctggggtcaatagccttcaaaaatggcccaaatggcccttgtcttttggcattgtgcgcctttttgtgagtcccttccacactgaacgatgcagatctgggtaa

SEQ ID NO: 603062 - DNA, 419 bp, Homo sapiens
tgctcattaacccatcaacaccagagagaagaggtattgctggacatggtcctatcatctgggggataagtactggaggagatgtgaaagagagggtgatggggcttctraggtaagacatggaaaattgtgaagatatttgtgtcccttatggacactcaccaaatggtgacctaggcagaggaggattttaataacaggatgaccagttctgtggatgtcaatgagtggctttcccccagccattcctgtcattgtccaatgggctcatgagccaagtggctgttacggtttagatgtttgtctcctccaaatctcctattgaaatgtaaccctcagtgttaccggtggggcccagtgaaaggtgtttgggtcatgggggcgagtccctcatgaatgggttagcaccacgtcctcga

SEQ ID NO: 603063 - DNA, 472 bp, Homo sapiens
atcagcataaaacttgaacagtgtatctagatcatggttgccatggttgccttgacacaatgaacatctgtatcaagatcatattttcttggtgggacagagagaagcacaaggcgggactcacatttacagtaatccttgttttccagggaccatacaacacagtttgtctagagctgttcatcttaagtttgttatcccaccataattataaatagaacctcctttttctctcaagaatatcccactttggatgataatttctrtgactacccattaagaatatttaataactatagaaaactgcttctctatattttttgtatgtttgaaacattttataacaaaaatatcttttaagttatcacctacacagaatatagctgccaaatgctcctactctgctattctaaccatgaatccctctggggccccttcctcctacggcgcttgtgaggatgaaatgaaataa

SEQ ID NO: 603064 - DNA, 472 bp, Homo sapiens
atcagcataaaacttgaacagtgtatctagatcatggttgccatggttgccttgacacaatgaacatctgtatcaagatcatattttcttggtgggacagagagaagcacaaggcgggactcacatttacagtaatccttgttttccagggaccatacaacacagtttgtctagagctgttcatcttaagtttgttatcccaccataattataaatagaacctcctttttctctcaagaatatcccactttggatgataatttctatgactacccattaagaatatttaataactatagaaaactgcttctstatattttttgtatgtttgaaacattttataacaaaaatatcttttaagttatcacctacacagaatatagctgccaaatgctcctactctgctattctaaccatgaatccctctggggccccttcctcctacggcgcttgtgaggatgaaatgaaataa

SEQ ID NO: 603065 - DNA, 533 bp, Homo sapiens
gtatggttattttagcatgtaatcaatataaaataataagatattttacattctttttttctagtctttgaaatttggtgcatattttacacttatggcacatctcaattcagactatccacatttcaagtgctcagtggctgcatgtgcctggtggctaccatattggacagcacaggtctaaggatttcattcctgccacaagtccaaactcctagctttaattttgagtgtttttaacaaactggcctctgtttatcattctttcttctagtacttccccaaggatgattgtaccctcagcactcaagaccgcttgcggttyccctacacactttttgttcaagctgtttcttttacctggaatgctgtctttgcaccttcttcctggacctggttcactcttgttgcctaggctggagtgccatggcgcgatcttggcacactgcaacctccacctccccggttcaagtgattctccttcctcagcctcccgagtagccgggattacaggcatgcaccaccacgcctgg

SEQ ID NO: 603066 - DNA, 536 bp, Homo sapiens
ctcctgggagtccgagagctcactcccttccaccccacttagcctcctggtttcctgtggtggctctgctctcacaactcatgcttttcctcccattggagggcctattccttcacgttttcctgcagccaacaaatatttacccagtagtgctcgtgtgcaaggcagtgtgggaatctctatatatccagccacggataaggcaacatacctctccacctggagcgcacattctggcaggagagaaagacctaaataagcaatagatgattagttcttcaataacagttgtgacaagrtctattgataatattttgtaatcactaatattcatataaaccgtgcaccaccattgatttgagtgcattaactcacacttcatgagcaggcactgcggtcatctcattttatagatgaggaaactgaggcaacagaaaggctgagagacctggcctagtgacagagccaggattcaaagccatagatcatggtcatgggttatgtaggttattactgcatctgttcaggggagatag

SEQ ID NO: 603067 - DNA, 536 bp, Homo sapiens
ctcctgggagtccgagagctcactcccttccaccccacttagcctcctggtttcctgtggtggctctgctctcacaactcatgcttttcctcccattggagggcctattccttcacgttttcctgcagccaacaaatatttacccagtagtgctcgtgtgcaaggcagtgtgggaatctctatatatccagccacggataaggcaacatacctctccacctggagcgcacattctggcaggagagaaagacctaaataagcaatagatgattagttcttcaataacagttgtgacaaggtctattgataatattttgtaatcactaatattcatataaaccgtgcacmaccattgatttgagtgcattaactcacacttcatgagcaggcactgcggtcatctcattttatagatgaggaaactgaggcaacagaaaggctgagagacctggcctagtgacagagccaggattcaaagccatagatcatggtcatgggttatgtaggttattactgcatctgttcaggggagatag

SEQ ID NO: 603068 - DNA, 595 bp, Homo sapiens
actgggtcacatggcaagaccctgtctctacaaaaaaatacaaaaattagccaggygtggtggtgtgtgcctgtagtctgagctactgaggaggctgaggtggaaggatctattgagctggggaggtggaggttgcagcgaactgagatcatgccactgcactccagcctgggtgacagagcaagactccaattcaaaagaaaaaaaaaatagtggctatattaactgaaaaaaacaaaacataaatctatgcccccactatcatcaaaagcacaaagccctgatgattttataagggaattgaaccaaaacttcaaaaacttgataacattaataacatttaaactctttcagggaacaggtaaatgatgtgagcatgatattgacatcaaaatttaataacattttcaaagaaaactttagatctttcatattcatgttcatgcaaataattataaaaatcctacgtaaaatgttgccaaacaatttagcacatgttaaaagaataaacatcctgattaaaggtgtttatttcaggggcatgatgataggtcaatcaaaggaaattattaacatatctaagggaagaacacat

SEQ ID NO: 603069 - DNA, 608 bp, Homo sapiens
gttctataacaaaagatctaacatttatgtcacggagttcaagaaggagagaagaaagaggaagggcctgaaaagttatttaaggaaatagtgcctgaaattttcccaaatttgaagacagacagaaaccctcagattcaagaatctgagtgaaccccaaagaggataacaaagataacatagtagaacctcttcagcacctagatcttggtgaagagttattagacttgaaaccaaaagcatgtttcataaaataaataatttgatacattggatttcatcaaaattttaaatgtttactctttgaaagatcctattaagatgatgaaaagacaagctacagactaggaaaaaaatctgtaaaacatgtatcctacaaaagacttgtatttagaatataaatgaacttmaaatgcaacagcaaaaaaaattattagaaagtagacaaaatacgtgaagacacaacttattgaagagtatatacatataacaagcacatggaaagatgttcaaccttattactcattagagaagtataaattatgaccacaatgagttattagtatacacctattataaaaatcaatataaaaaaaatagtgacaaca

SEQ ID NO: 603070 - DNA, 608 bp, Homo sapiens
gttctataacaaaagatctaacatttatgtcacggagttcaagaaggagagaagaaagaggaagggcctgaaaagttatttaaggaaatagtgcctgaaattttcccaaatttgaagacagacagaaaccctcagattcaagaatctgagtgaaccccaaagaggataacaaagataacatagtagaacctcttcagcacctagatcttggtgaagagttattagacttgaaaccaaaagcatgtttcataaaataaataatttgatacattggatttcatcaaaattttaaatgtttactctttgaaagatcctattaagatgatgaaaagacaagctacagactaggaaaaaaatctgtaaaacatgtatcctacaaaagacttgtatttagaatataaatgaacttcaaatgcaacagcaaaaaaaattattagaaagtagacaaaatacgtgaagacacaacttattgaagagtatatacatataacaagcacatggaaagatgttcaaccttattactcattagagaagtataaattatgaccacaatgagttattagtatacacctatyataaaaatcaatataaaaaaaatagtgacaaca

SEQ ID NO: 603071 - DNA, 483 bp, Homo sapiens
gggggagtaggtcagtgggtacaaagttacaattagaaaggaagaatgagttctggtgttctattgcacagtagggtgactatagttaataatatactattgtatatctcagagtagctagtagagaggaatttcaatgctttcaccacaaagaactgataaatgtttgaagtgatggaaatgctaattaccctgatttgataattacacaatgtatacatgtatggaaacatcacattgtactccctaaagatgcataataattatgtgtcaatgagagaaaaaagaaaaactgtgtgtctgggaggtgcagggtggggttgggtagcaaattcctgtacatcaattcacagaacatgaggagtaagaggagatgacataatgtgatcctgtacattcattattcacatatcaagtattaattattgaatatacgttatrtgacaggtatgtttctagccatcatttaactataattatgaa

SEQ ID NO: 603072 - DNA, 574 bp, Homo sapiens
taattagatcccatttgtcaattttgkcttttgttgccattgcttttggtgttttagacatgaagtccttgcctgtgcttatgtcctgaatggtaatgcctaggttttcttctagggtttttatggttttaggtctaacgtttaagtctttaatccatcttgaattgatttttgtataaggtgtaaggaagggatccagtttcagctttctacatatggctagccagtttttccagcaccatttattaaatagggagtcctttccccattgcttgtttctgggaggtttgtcaaagatcagatagttgtagatatgtggcattatttcagagggctctgttctgttccattgatctatatctctgttttggtaccagtaccatgctgttttggttactgtagccttgtagtatagtttgaagtcaggtagcgtgatgcctccagctttgttcttttggcttaggattgacttggcaatgcaggctcttttttggttccatatgaactttagttttttccaattctgtgaagaaagtcattggtagcttgatggggatggcatcgaatctataaa

SEQ ID NO: 603073 - DNA, 574 bp, Homo sapiens
taattagatcccatttgtcaattttgtctttygttgccattgcttttggtgttttagacatgaagtccttgcctgtgcttatgtcctgaatggtaatgcctaggttttcttctagggtttttatggttttaggtctaacgtttaagtctttaatccatcttgaattgatttttgtataaggtgtaaggaagggatccagtttcagctttctacatatggctagccagtttttccagcaccatttattaaatagggagtcctttccccattgcttgtttctgggaggtttgtcaaagatcagatagttgtagatatgtggcattatttcagagggctctgttctgttccattgatctatatctctgttttggtaccagtaccatgctgttttggttactgtagccttgtagtatagtttgaagtcaggtagcgtgatgcctccagctttgttcttttggcttaggattgacttggcaatgcaggctcttttttggttccatatgaactttagttttttccaattctgtgaagaaagtcattggtagcttgatggggatggcatcgaatctataaa

SEQ ID NO: 603074 - DNA, 390 bp, Homo sapiens
tataccttggggacctgagagtgaattatatatggggacaaggagtttactgttttgccctagaaaggaatacagataattcttggggcacaaggtgaatctttagcatcgatgccctcatatgtcccatttcrgtagagctgtggtgaatctttgtggaacctagtgggaatggccaaattttgatagaaaagagaaccagaaagcaggccgaggtggcaaacttcaatgtaagactataagctccctcaagggcagtactctcatctttagtccctagtgacaagcaagatgttttgataaatgtgatccatgtttgtgctcagaaaatgcatgtttgaatggagggactcctgggagccatcttggctgctggaggtgagcttgagc

SEQ ID NO: 603075 - DNA, 414 bp, Homo sapiens
taaggcaaccaaatagtctaaattttatagggccatccttcagactagaaatggtggttttttagccagagtttctattccttctgtataccctcttccacccccacagtgctggtgtcacagctataccataaatacttgttaaaattacattagaaatcataagccaagaaaatagtgcatcttagaattttgtccattgtggcacttytgtcaaagtatctgttttatgtttagaagcaggagtcaaatcctaactagtgtatcacccaagccatttcttaaatgccatatgactctcaacacattatggtggtttgtctccattagccccatttgtctcttattccagctctctacctgggttctatgactggatcataacttaaagtagaaacgttcctgggaggggca

SEQ ID NO: 603076 - DNA, 544 bp, Homo sapiens
gcagtggcacgatctgggcttactgcaacctccgcctcccaagttcaagtgattctcctgcttcagctggagattataaattaagtgtaacaatgcagcttgaagtaggaaagcgagaaaataagccaacccccccccccagtagcagaagagaaaaagctgaatcaaatgaagactaaaactaacaaaaactaacagaagaaaacaattaaatgaagactttaaaacataaaattattaacaagtcagtttattaaaaaggtaaaattgwtaaactgctaactagtcagggagagaagacctaaatcagaagtgaaaaggacgttacaactgatatgaaacacaacatcagagacctggagacacagcctaccaagactgaatcaggaagtagaaaacctgaacagaccaataatgagtaatgagattgaatcagtaataagtcttccaacaaagagatgcccaggactggctggattcatagctgaattctaccaaatgtacaaagaactagtatcagtgcttttgaaactattcaaaaaac

SEQ ID NO: 603077 - DNA, 549 bp, Homo sapiens
tgcagcaacgtggttggaactaagggtcatcgcgttaatgttctcatttatttatgggagctaaatattaaaacaattgaatcatccatggagacagtagaatgacagttaccagaggttgaagtatagaaggagggagaagtgaggatgattaatgggtttaaaaaaatagaataaggtctagtatttgatagaacagcagggcgattatggtcaatttgtgtacacttaaaaataagtataacttgattgtaacacaggttaaatgcttgaggtgatggrtaccccatttactgtgtgattacgcattgtatgcctgtatctgaacagctcatataccccataaatacatatacctactatgtaccacaaaattaaaatttttaaaaagacaacatacataaaataggggacacagttacacagtagaagatcaaaagacaatacataaataccatcaattatatgctgacaactctgcaaatttaaacaaaaagggtaaattcctagaaaaagacgacttagaactgaaacaaaataaaaaagctc

SEQ ID NO: 603078 - DNA, 509 bp, Homo sapiens
gcagtatttaccagtcctgatgccaaatctagtgaaatattatgcaaaaacaaaattgtaggcatattacccttataaacatagatgcaaaaatcttaawgttagtaaattaaatccaagagtatataaaagtgcttattggggatatacaaagatcttttactgtcagaaagctcgtaaacataatctgccacatcccacagattaacagaaaaaccaaatattgagagaattctccacagatctcgtttctgcacatcttgtgagcagaagctcccatggcatatattccaaactaacttttcaaggatcactgtatagaaaatagccttcaaagatagtgtctccttctgaagcagatggcagatttttttacagttcaatataataaatatgatgtctcacttcagagcaaatgttagacaggtctgcttcttagcccattttaaaagattcagaattccttggctgtgatacaatccactacatgtgcagcatccacctagcct

SEQ ID NO: 603079 - DNA, 567 bp, Homo sapiens
tcatgtcatgggtgagggaattttttcatatagctggattattttaaccttatgagaaacaattttaatgcctacctcacaccacacccaataatgtcacatgaattaataattcacctgttttctactgagggtttaagaagctttattttttgagcctgggagttaagaaaaacctaakacacaaaaatattgactgaaggaaaattaataaacttcattaaaattcacttcatgagctgtcaaaagttaagagaaattatgaattgatatctttgcaatatatactgaaaatatgcaaagaatatgcaaagaagtcctacaaataaggagcaaatggacaaaagacataaatgggcatttactgaaggtgaaacaaaaccaataaaatatgagatttttattggtgataaaatgccatctcattgtgatcttgacttgcattttgatatccattcaactggcaaaaacttaagtctgacaatgccaagagttgggaaagctgtgattctgtaagatttcttatatcttatgaacaataacttgagaagataacattaataccat

SEQ ID NO: 603080 - DNA, 576 bp, Homo sapiens
agaggacagtacagcacccaggaagtggcaagagcagagcctttaccacaccaagaccagagggtcaaggtaacacagctgtgtaccagggtttggtgggacctggagcaaggaaagtggccacctaacaagctgtggctcttgaggaatgacactgccaaaaccatgcccagaaggaagatggagggataccccaactgccatgtccttctaacctctgatttcctgcccatgcctcccattggcctaacccaaccagaagactgatggcacagtagcccaggtgatgcaatctgtaaagttcagcctcctagacacagaaggawgtagaggagaaaacgtgcacaggaggtttgttatggaccgcatgtttgcatcctccattccccaatttatattgaagacctaactcccaatgtggtggtatttggaggtaattggatttagatgaggtcatgagggtggaacccatgatgggattaatatccttagagcaagagagattagtctcttcctcccatgggaggaaaaagcaactttgtaagttaggaagagggccctcaccaggaagaaaat

SEQ ID NO: 603081 - DNA, 535 bp, Homo sapiens
ccaactcccattggtcattagttgaggactcctagtgtatgtgttaatccactgttgcaggataaaggaagtcctcaggctgagaagcaggtgctggtgaatgggagtcaggccagcatgccctgaagtgggaggggctgaagaagcctgggcagggtaccagcagtgtctgctacacacaaccacagacctttggccctctctaccattatttagagggcctggatggaatgagygccctggatgacacagaagggcactgggtgattatattggaccagaacagcaggaggacataactcgttgagtatcctgatatgagtcaaggacactgcactagagactttacagcaagatgttactgagcaccttacttatgttcaaatgtaagaactcaggattatgaagaagcaggaagctagagtcctagacgctctggtctgagcctggtctcctgtggtcatgtttaaacagttcatacctgagtgtctcttttacaggggatttcatgtgtttggaaggattctttctccta

SEQ ID NO: 603082 - DNA, 516 bp, Homo sapiens
tgatgtggggaggcacagatctcttagtgttgacattgtgctccaaagcaagtgtatgactgaccaggcctaggtcgatccacatatggttgataggatctgccttatgattccagcagtcatagcaggaataaggtactctcctagctaagtggcgcctgaaactcccataataggaaccggtctggtcagtccagcacaaaaggctgagtgagtgtgcatcataaagggaggaatgggaggaaaattgtcgaaacccactccattggagtgcatgttaaakaattttaagaaaggttttggaggagattatggagttaaactgacccccaaaaggttgagaactctgtgaattagaatggccttcttttaatacagggtggccagctgaaggaacaatagatagggaagcaattggccatgtatttagggtggtaagtggggtcgaggatagccttggtatccagatcaatttacatacattgactcctggttaaacgtggtccagacttgccc

SEQ ID NO: 603083 - DNA, 631 bp, Homo sapiens
atcctaactgggacccaaatgaggcaggggagctccaacacctgcaaaggtaccgagagcactcttaaatggaatgaaagcyggtgggaataaggccatgacaataggaaagattttagaggtcctacaaaaggctaatgaaagcccaagtcagttctacaagaggctctgtgagacatactggctctatactctatttgatccggaggctgttgaaaatcagcacatggtgagtacttcatttgttggccaggtacaaggtgacattaagcaaaagcttcaagaattggaaggtttcgcaggcataaatgctactgagcttatagaggtggctaccaaggtatatgtcaactgtgagcaagaggaaaagaaggaagctgggcagaggcttaagaaaaaggctgagctattggtggcagccctggctgaaagagagactggcattgtgaggggacgcagtcatggtcatggaagaggtcaggctagaccaagatttgaaggccagattaggctggagagggatcaatgtgcactatgcaaaaaggacactggaaggatgaatgtccagagaaagataaaggaaatagccatgaccagggaatttggctagagccaccagctgccagccatt

SEQ ID NO: 603084 - DNA, 631 bp, Homo sapiens
atcctaactgggacccaaatgaggcaggggagctccaacacctgcaaaggtaccgagagcactcttaaatggaatgaaagccggtgggaataaggccatgacaataggaaagattttagaggtcctacaaaaggctaatgaaagcccaagtcagttctacaagaggctctgtgagacatactggctctatactctatttgatccggaggctgttgaaaatcagcacatggtgagtacttcatttgttggccaggtacaaggtgacattaagcaaaagcttcaagaattggaaggtttcgcaggcataaatgctactgagcttatagaggtggctaccaaggtatatgtcaactgtgagcaagaggaaaagaaggaagctgggcagaggcttaagaaaaaggctgagctattggtggcagccctggctgaaagagagactggcattgtgaggggacgcagtcatggtcatggaagaggtcaggctagaccaagatttgaaggccagattaggctggagagggatcaatgtgcactatgcaaaaaggacactggaaggatgaatgtccagagaaagataaaggaaatagcmatgaccagggaatttggctagagccaccagctgccagccatt

SEQ ID NO: 603085 - DNA, 582 bp, Homo sapiens
cctttctgtcaaggaggtgcattattggaggataggaagtcagcatgagattctatacctcccaaactgctcagtccccttgctwgaaagagacttactccaaaaactacaggcacaaatttccttcaggccacaaggaaacatgtccttaaacttcagtcagccaaaggctgtggtgttaaccctcacactcccaaaggccaaggagtggaggctatatgcagaagtaccacttaagcccaagactgtcagaacctcttaaaatatatgagctaattgttaaaatacctggagtgtgggcaaaggacaacccgcctgggctggctgtaaatcaggcactagtcctagtagagctaaaatcaggagcctccccagtatgagttcgccaatacccagttttcatagacggcatctgaggtgttcaaaagcacacagaccagcttttcaagcacggaatcataattaaatgcagatcaccttggaacattcctttattgccagtgcagaagccatctggtaaatataagccagtgcagaatttgcatgctataaaccgggtcatggagacaatccacccagtag

SEQ ID NO: 603086 - DNA, 480 bp, Homo sapiens
cacaggcgatggggagccacagggtttaccgtctaagacccttaacctctctattccatcaaaacaactaataggtyttagactggcacttcttgttttcagtggtagaagtagagattagaagttaaaaataactggaagcagaatctgagctcattgccttgtccttagaagtctgaggcaagggaggatgggacagtgctattccttggtgatcttgaaccaagttactgcctccctgaccaccaaccctaccccttactccccacccccatcttcttatctgtgacagtggcatttcccattcagcccttaaaaaaaaaaaaaaaaaaaaaaaaaaattggttcattgagaaacctttgctgactcatgtactaaccaacacttccacctagtgggaacctttggaaatcatctcacaggatcaacacccctcttccccgccacccactgcacagcttctataaaagacagaaatg

SEQ ID NO: 603087 - DNA, 533 bp, Homo sapiens
agggtattggctattaccattaccaggacatcatccccaccccctgcccctaccgtctcccctcactatcagcagttgtcatcaactggctctcttacatattcaatgttctatgaagasaaaagttttctgctctacagtccaaaggctgatgaaatatttctattggagaaaatcatccctacttctaattctacttatttctataccccaacttctatccacttttttcaaacctagggtcagaagaacaatatttctattgcaactttggatgaagttccaccaaagtgagttgtgcttcttctcttttccagtgcttaattctgagacatggccaggtttgaggctgggtaggagaaaaacaactagagagccaagtctcactgctttgttcctcactttgagaaaagggcagatgattcaggatcctctgatctggactccaggcatcattcttgatggatttctagacccaggaattgccttggacatcatccacttgctgtatgctatgttcagcctggaacaga

SEQ ID NO: 603088 - DNA, 485 bp, Homo sapiens
gtgtttccctgttcatagacttcagaggattattctggagaaagtccacatttatggcagggcatttaagtaagacccactgcagtctgactcctcagtcctccaacttgtctcctgctctacaccagtgctccactatgtatggggaacataaccctccccaaaatactgtgtacattcttggccacaggccaaacttaatccctatgcctggatttcaccgtgaaggcttcaacatgtcagctcaaatgctatcgcctttgaggttttctagaccatctcctccctgccccagttcctctaccaatcagaattcattgctgtctcctctgtctacatagactctsttcctctattgttgtgccagtcattacagtgcccttgcctgtcactcacactagactcacagctagttcactagtggtcatgttcacttctgcttaccccacagggccttacccttataaggggctcaaaactggaat

SEQ ID NO: 603089 - DNA, 494 bp, Homo sapiens
cctgtcactcacactagactcacagctagttcactagtggtcatgttcacttctgcttaccccacagggccttacccttataaggggctcaaaactggaattgggtttaagctgggctgggggttggctgccagttgcaggagggattttacaactaaggaaatgcttcgagccggagccttaggtacagatgggtctggaatgtttggtaaataawgggcaggccagtgtggctggaactgatggttctgatgatgctaggaagactaagttgttggggtcaaggatttcaaaggacactggtggacaggcttaagggtctggacctcatcctttaggcagtaccctgtgttttcccaagttctgtctatttcagatgtctatttttctgtcagaccattcactgcaagtatctttccagaaatcatggttctgtggcaaagtgattctgagtagggttgtgacatggagaaaggcgtgattggggaagcatg

SEQ ID NO: 603090 - DNA, 586 bp, Homo sapiens
gctctggcctgctcatatttctaccactaactaccacaaaaaacaaaatgcaactctttctccaaaatatgtagttmtggggttttaaacatgaaggagtttaaaactgaggcagttttaatagaagtcaaagaggaacagaatggaaaaacagagtggaacaagaggaatggaaatattaagataatcactaagaatacatcttcaaaagagctcatcaagtattgaacttctaagatgacatgcacttagatatatactggtgacatttctgtacctcaaagataaagagaattttaaaagctttcagagatgcaaaattttttccacaaaggaacaagaatcaaaaagacataagacctcatccaattctggaagctaaatgacagtggaaaaatgccctcaaaaatctgagagaaatggctatagaatccctgggacaaaaatatcaaatcaagtataaggaagtataaagatgatgtggtagggtaggtcctttgagaaacattacaagacagggttatgtgtgcaagaaatttattagagcaaacacctgtaaagatacgaggccaggataggctcagca

SEQ ID NO: 603091 - DNA, 555 bp, Homo sapiens
aaagcggaaacccttgataaaaccatcagatctcatgagacttagtgactaccatgagaagagtatggggaaaactgcctccatgattcaaatcatctcccaccaggtccctcccacaacatgtgggaattatgggagtataattcaagatgggatttgggtggagacacagagccaaaccatatcagtgtgatttaaatagatgtttatgagtaattttatctgcctctgaattgtttgttcttagccagtttgcttctgattccctgccattaattcttggaatatgtatacagaggacagtcacataaagaaccttctggcctgtttttatctaatgctggtagcagaatcctaaaagataatcacagattaaagccaaaactcattcccagatataagcaccaagtgtcattctagaaaacaaagaaactttagattatgaagttttatctattttgattgctttgtctgaaggagagccatgaccaaatgatatagagtggatactgctgtcartcatccaagggcataaaaggaagagaaggggatgaa

SEQ ID NO: 603092 - DNA, 546 bp, Homo sapiens
atctattttgattgctttgtctgaaggagagccatgaccaaatgatatagagtggatactgctgtcaatcatccaagggcataaaaggaagagaaggggatgaaccaacacygaatgctattcttttagagtagttgtattgggttgtctacgtattgggtaggtcagccatgcaagcaaatatatgaaggcttaggatcaaaacctgagctgttaataaaaaatgcatctatttgaggggagaaaaaaaggggatagaaggaaggtaggggctctcaggactgagaaggggatggtttggctagaacctagaggagacctcttgtgaatgcacacagacttcagattctagaagcaatgatatacagtatccaatatcaatttttttcctttctgctttgtgaccatcttctattactctaaagctttcaggaagatacaccatagcctaagtctaattgtaagaaggaaagatgcagtggccagacttggccaaaacgagtgtgataagagtagcaacagccagtagaagcaatgtgtagatag

SEQ ID NO: 603093 - DNA, 546 bp, Homo sapiens
atctattttgattgctttgtctgaaggagagccatgaccaaatgatatagagtggatactgctgtcaatcatccaagggcataaaaggaagagaaggggatgaaccaacactgaatgctattcttttagagtagttgtattgggttgtctacrtattgggtaggtcagccatgcaagcaaatatatgaaggcttaggatcaaaacctgagctgttaataaaaaatgcatctatttgaggggagaaaaaaaggggatagaaggaaggtaggggctctcaggactgagaaggggatggtttggctagaacctagaggagacctcttgtgaatgcacacagacttcagattctagaagcaatgatatacagtatccaatatcaatttttttcctttctgctttgtgaccatcttctattactctaaagctttcaggaagatacaccatagcctaagtctaattgtaagaaggaaagatgcagtggccagacttggccaaaacgagtgtgataagagtagcaacagccagtagaagcaatgtgtagatag

SEQ ID NO: 603094 - DNA, 546 bp, Homo sapiens
atctattttgattgctttgtctgaaggagagccatgaccaaatgatatagagtggatactgctgtcaatcatccaagggcataaaaggaagagaaggggatgaaccaacactgaatgctattcttttagagtagttgtattgggttgtctacgtattgggtaggtcagccatgcaagcaaatatatgaaggcttaggatcaaaacctgagctgttaataaaaaatgcatctatttgaggggagaaaaaaargggatagaaggaaggtaggggctctcaggactgagaaggggatggtttggctagaacctagaggagacctcttgtgaatgcacacagacttcagattctagaagcaatgatatacagtatccaatatcaatttttttcctttctgctttgtgaccatcttctattactctaaagctttcaggaagatacaccatagcctaagtctaattgtaagaaggaaagatgcagtggccagacttggccaaaacgagtgtgataagagtagcaacagccagtagaagcaatgtgtagatag

SEQ ID NO: 603095 - DNA, 562 bp, Homo sapiens
gttgcatccacattttagttattgtgaataatgctgctatgaatatgggcatacagatatctctcttagatcctgctttcagtttttgggtgaaagtggaattgctacatcatatggtaattatatcttcaattttttgaggacccaccctactggctttcacagtagtagtaccatttatattcccaccaacagcgcgtaaagatcccaatttctccacatcctcaccaacgctgttattttttgttttttktttttttttgacagtagccatcctaatgggtgtaaggtattatctcattgtggttttaattttcatttccctaatgtttagtgatgccgatcatctctttaggtgcttactggccatttgtatatcttctttggagaaatgtctattcaaatcttttgcctatttttaaaaatctggttgtttttcattgatttttatgatgactatcttaaactatttgtcagatcattctaacatctctgtcatattgatatgagcatttattacctcttttcactcagtttgagatcttggtggttggtatgatga

SEQ ID NO: 603096 - DNA, 562 bp, Homo sapiens
gttgcatccacattttagttattgtgaataatgctgctatgaatatgggcatacagatatctctcttagatcctgctttcagtttttgggtgaaagtggaattgctacatcatatggtaattatatcttcaattttttgaggacccaccctactggctttcacagtagtagtaccatttatattcccaccaacagcgcgtaaagatcccaatttctccacatcctcaccaacgctgttattttttgttttttgtttttttttgacagtagccatcctaatgggtgtaaggtattatctcattgtggttttaattttcatttccctaatgtttagtgatgccgatcatctctttaggtgctyactggccatttgtatatcttctttggagaaatgtctattcaaatcttttgcctatttttaaaaatctggttgtttttcattgatttttatgatgactatcttaaactatttgtcagatcattctaacatctctgtcatattgatatgagcatttattacctcttttcactcagtttgagatcttggtggttggtatgatga

SEQ ID NO: 603097 - DNA, 646 bp, Homo sapiens
ttactttttatattctctctggtttctgattcccacataggaaatgtccatttttataactcacaggcgtgaaattgcagagttcttctcctagaggccacctggccctccctaggtgccsactgtgtgttatagggatgtcactaaggggtctggtggtgcccgacagggatgttaatgaaagcccaaaagactgatagcagacagatccagaggtaggatggagagactgaaaggccaggcccagacatacttagagaatacagaaagaagccagcggccaggacacagcagcaaggtcagcagccagctccaataaagaccttggtgcattcaggctgctatttaaaaacaaacaaacaaacccttagaatgggtaatttataaacaatagaaggttatggctcacaattctgaaggctaagatgcccaagatcaagctgccactagatccggtgtctgagagcctgttcctcatagctcaaatgatggaagagcaaaagggcatctccatcctcttttataaagagctaatcctgttcataagagaggaggcttcatgactcagtccttttccagatgcctcccctctacctttgaactggggatttcatttcaacatacgaaatttgaggaaacacaaaca

SEQ ID NO: 603098 - DNA, 646 bp, Homo sapiens
ttactttttatattctctctggtttctgattcccacataggaaatgtccatttttataactcacaggcgtgaaattgcagagttcttctcctagaggccacctggccctccctaggtgccgactgtgtgttatagggatgtcactaaggggtctggtggtgcccgacagggatgttaatgaaagcccaaaagactgatagcagacagatccagaggtaggatggagagactgaaaggccaggcccagacatacttagagaatacagaaagaagccagcggccaggacacagcagcaargtcagcagccagctccaataaagaccttggtgcattcaggctgctatttaaaaacaaacaaacaaacccttagaatgggtaatttataaacaatagaaggttatggctcacaattctgaaggctaagatgcccaagatcaagctgccactagatccggtgtctgagagcctgttcctcatagctcaaatgatggaagagcaaaagggcatctccatcctcttttataaagagctaatcctgttcataagagaggaggcttcatgactcagtccttttccagatgcctcccctctacctttgaactggggatttcatttcaacatacgaaatttgaggaaacacaaaca

SEQ ID NO: 603099 - DNA, 377 bp, Homo sapiens
aactctgtctcaaaaaaaaaaaaaaaacaaaaaaaagcagggtcgggcgccaggcgtggtggcttttgcctgtaatcccagcactttgagaggcygaggcaggcagatcaccttaggtcaggagtttgacaccagcctggccaacatggtgaaaccccatgtctacaaaaaaatacaaaaaaattagctgggtgtggtggcaggtacctgtaatcccagctacagctactcgggaggccgaggcaggaggatcgcttgaacccaggaggtagaggttgcagtaaaccaagatcatgccattgtactccagcctgggcgacaaaagcgagactcctcttcaaaaaaaaaaaaaaaaggatagggaaagttatgtttta

SEQ ID NO: 603100 - DNA, 537 bp, Homo sapiens
caattggggatatcggatctatattatctgtcaatatttgccatgatgcatatttgtacggagattgtaaatgtgataaaggatccagtgctagaagttcccatcctaagtgatagaagaatttaatgttactcggaaccagtattttaggaagcactatgtccaagcccctaaagttgctcctcctcatgccctaaactcaggccaagaaaccaactaagagtcctgccagattcagtctatccatcctaagtggaactgaggaacttgaaacaacacttcatgggggcagggagakcagggtctgtctttggacccattggactcagactgccttaagctatatgtcacttatctggcccctgttctggagaatcaagatcacattgagtctctctgggcttcagcttggaccttaaatctgtggcctcttatggctccccagtatacatttccagtaaatgaacacagaattccttgggcaaagaattgatggaatacttgtacacttgtggtggcattccagagctaactttc

SEQ ID NO: 603101 - DNA, 556 bp, Homo sapiens
cggccctgatgacacttaatcaccatatgttgacagaaaggggcacttttttgctgaatacaagtaagaactttaataggtggggaaacatttaagtggaccagacaacatcaggaagccagaaagtttcccagcactacaggagtccaagtagatgtatgataatatggagaggatttcagccttcaaacagaactgagtaagccttaggtcttgccttggagacccaagttctataaaagatgacagtaaagcccaagtgaagggatgatcacatacaayttgtatgaagagggtggaatctagagaggctccaaggagctggtgacattcttggatcaagttcatatgtcagatggcttcttccctgaggttgagtcctctctagaaggctcttcaagcctcatacatacaaaaaaaaaaaaagtttttatccttctctcccccatacccagttttcctgataaatccagacatatctaaacttagcagtggacagagcttgaacagtcctcagttggtcttcaggccccttgcaaacagacctctggcatac

SEQ ID NO: 603102 - DNA, 633 bp, Homo sapiens
ggggaggggtgtgtatgtgtgtcacccacattatcaaagaaaacgtgtttgttatagaaagaaattttacctataaataaatacaaaaatcacctatgatcctattgatcacagataactactgtgtacattttsatagcttatcttttctctagatcttcttggatttgaatgtgagcaggtgtgtttcttcagactcattcttttcattctttgatcttttgtatccagctcttcaagaatgcctttgctgaattttccagtttgctcattcattcctgtgttcattctgcttctcaagttttttcttcttgtaactatatattgtttaattttcaagagccctaattagggttttttcttggtttattttcaagattgaatatttatcccaataaggatattccctctgctttttaaaagaattatcttctgttatcactgttccttctcctcctcctttcattcttctatttggggaagtagttatctttctttcatgcttcttccttaaatgtttgttgattcttggcggtgtactcatcttagtgcctgaggtctctgttggcctgcccggcaatgttgtttgtgttgtgtttctgtttgggttgctccaaggttgtggagaagggg

SEQ ID NO: 603103 - DNA, 633 bp, Homo sapiens
ggggaggggtgtgtatgtgtgtcacccacattatcaaagaaaacgtgtttgttatagaaagaaattttacctataaataaatacaaaaatcacctatgatcctattgatcacagataactactgtgtacattttcatagcttatcttttctctagatcttcttggatttgaatgtgagcaggtgtgtttcttcagactcattcttttcattctttgrtcttttgtatccagctcttcaagaatgcctttgctgaattttccagtttgctcattcattcctgtgttcattctgcttctcaagttttttcttcttgtaactatatattgtttaattttcaagagccctaattagggttttttcttggtttattttcaagattgaatatttatcccaataaggatattccctctgctttttaaaagaattatcttctgttatcactgttccttctcctcctcctttcattcttctatttggggaagtagttatctttctttcatgcttcttccttaaatgtttgttgattcttggcggtgtactcatcttagtgcctgaggtctctgttggcctgcccggcaatgttgtttgtgttgtgtttctgtttgggttgctccaaggttgtggagaagggg

SEQ ID NO: 603104 - DNA, 528 bp, Homo sapiens
gtgtgtaggatgcttcaaacaaaagccccctggttttaagtccttatgtggtctcctacccctgggggctgggctggtcactgaggagctgtagggtggctgttgcccctctgtcacggtgcccagattatagcaggtgaggccttgaccctttgctcgcagtcagttctgagccccctgaactgtgccactaggaaagaaaaagcaggggggagaaaagatgagaggaaagatcctttctttagaggttagagcagagggaactcagtggcccagaggggaaggcaggctagagacagcccaaggaccatctttgcccactggctgcccgggaaagcaaaggtagcttgccactgggaagaagactctcatctcctctcctcccacccccagcatccaagtmctcttgttgggccctgacccatgctgaggcaccttcatggccttgatggcatctccccagaagggaggctgcccctctgacattgacatgtctggggcttagagtatgatgcgaagtgggaagct

SEQ ID NO: 603105 - DNA, 591 bp, Homo sapiens
acctatgtcatacctgtctgtcatggcctaggagttgaagagcaaatcagaatggtgcgctaattctctagaccacctctccctgccctacactattgaactggagcagatgcttgggcagcgagacagaattgaatgagtacagcaggctgactagcaccaacttgcaaaatgataccacagccctgaaacaccagatctccagagttctagatagttggtgtgttgttccacgatcaggcctgggtgattgtactgatctggcagcaagaaaaaagtggaaaggtggtggatggtgacttaggacattgctggagccttggcactgaggtaggctcaggcaaagttaccattgatggcaggcccagtstgggtttccctgtacctgaaaccgatcatctgctatagttcatctggcagataggcatgggatttttggaccttgaagccagttcattgtttctggtcttgagcagtgtgaactagacagcagctgtctacagctcagatggtaggtctggttcatgtggctccaggtgcccaaaaggcctgcatgataaatagaaaggcagcagccacagactacatgca

SEQ ID NO: 603106 - DNA, 606 bp, Homo sapiens
agtagcaatggaagttaattcagtctgaggatgactaggctgacataattgaatctcaagtttgaaaggataccttctagctcccaagtattaggaaaagcattttggctctgaactaatgggactaagcaagtgtccacatttgaggggactttatcaaataaaggtgagtcactgtctaacctgaatttatgcagcagtgtttctgtatcttaagtgatacaccaacaactcttgtaattcaagaaggccaatgagaagcagtaggtatccattaccttttcttaagggaccggaattgactttaacaggtactagtctgtgacaatgacttagttctagggagtcaaaggcagggagaartcagtcacaaacaactagaaaccataggggaaagtgctgtgagatgacaaccttatctagaggggttagaagtgaaacttcagaggtgtactattaagtaaattttggcctttccagctcatatctatggactggaagttgtctggctaagaggccagtaatatgttagataccttgctcttacggctgggatttccctggattcagattataacaaactgggcatccttaagtcaagaggca

SEQ ID NO: 603107 - DNA, 428 bp, Homo sapiens
tgactcttcattggctataacttccatcctctaaaagtgcccagtgctctgaaagagtgctcctaagttttgcagtctggccttttgagaggaacaccctcaaaatcaaagcctggagatattctctgggctcctggtgccacttgcttgttagttctttcagcttcttgggaygtaatcacttttctcctattcagtgctagcactgggattgaatcttagttatcagcctggcatccagaaaaggatgccttcttataggacagctgtttgcattgtagggtagaagccttggcagcatcttcctgcacgggggaagtctagcttctaatagaggtggatcacctctataggctgatgcttcagggctgacaagctacagttcttggctgtgtacacttagatgtccccaggtttttccaagtggg

SEQ ID NO: 603108 - DNA, 587 bp, Homo sapiens
ggtttttcgttttttgaggaaggaatataacatcttttgacacgtctgcctgagatgtaatgttgtcatggtctttaggcaataggaagctgtctcttatttgggtttttctttttaaacatggggaagaataactwcttctccaaacccagaaagtttctgggaagaatctgggaattcgaggcactcaagtgttcaccaaactgtacctatcctgagtcttagggtcttaccttctctctgttgagatgacagtatctcctaatgtcaaatacgcagtctgaatatgcagccttgacaagtctctcatgctagatacaatgtcttttgtttttctgccatctttacagtcaagtcttcagcctgatgtttcagtctgatctgtcacttagccatgggcaatgaaactccttaaagtcgctgagaatttctggctttcactgcaggtcctaagttggtagttggctaacttgagcctgctgttctttcttcaagttttctaagtcagtttaagaagtcaagctcttctatgcttttcattgccccatatcattcagatgctagagccactgtgttatcctgtgctt

SEQ ID NO: 603109 - DNA, 612 bp, Homo sapiens
cacttgtgcatttatccatcaactcccactccccactggtagagagatgccctgaaggtattaagactcctcacttccaggctgtgagtgcgtatgtgctgatctgacctctggcttcagaggaccctgaggtagaaagcacagacatacatagcttacttgaggccagacacagtcagcatgagtctacrcctgcatacacctatccaaagcatctgccactggaaatggcagtgagtaagggggatgggaggggagttggtcagactgaaacatgcctgtaacagggaaagaagtaacgatgcaactggctcaatattgccaaacccttccctgaaactctgtaatccatgcctctgatactttattcaagaagagggaagaaatgatctgccagttcccctcttccataaatcagacactaactccatgcaaaattatctttcctatacatcccacttacagacatgggcactgagcagcgatctggagcatcctatgccctagtctgaattagggaaatccagggcaggagttgaggcaccagcacaaatacaatgcaacctgctactcagaaagggatctgaaatgtcacaggtgtcagatacatgc

SEQ ID NO: 603110 - DNA, 622 bp, Homo sapiens
ctcagcagtgttggtagttctaggaaaccttgctgagccacacaaaggtactcatgatcaaccttctttcgtatagcctcattctgtcctttccagaagtgttctatttcttatgttctatagttctgggraatctgtctcccattgcagagacattactatgcattctatgctgtgacctgaccctgttaactaaaacttctacctgactttaatcctgggtgttaagatagtacaaaataacacatcttggttagctgcctgggctggccactggctgtctcctggacatgcaatgaaggcctggatttaagattacttctgttaataactaagaatcaagcctgcagggacaggcattccttgcatcacccatgtgagctttcacagaacaagttcaacatggtccatgaaaggtctctggggctttctaccagcatctatctcagcagtttagttgctattcatgatagcttggtttagaaacttgtcctctatgaagttcaaataatatgatacaagaattactgttcaaagcaagaatgtccaaagtagctgacttttatactgttcatctgttggcataaaccattgaaggtcaattcttgttaggtcttaaaag

SEQ ID NO: 603111 - DNA, 391 bp, Homo sapiens
ggcttgtacttacagttgaggccagccatgagtcttccaaagaatgggaaatgatcattaaggtatgtcatctagctttcagggatgggtgtttgaccctggttgcaaacatataaagccagctcactattgtttttgcccacatgagcacttcaaaacgtcgtagttactgtcaaactagattctaagtagaactccaattttgggagctacggtaatcaaggctggtttgtattggccaaamgctggaatgtactacactcaagggatggtctactctggcagaattatgcttggcattatatgggttggagtaatggattttcatactcgtttcactttcatcttagatgagtggtaacaagctcttatcactttaaacagacccaaa

SEQ ID NO: 603112 - DNA, 610 bp, Homo sapiens
agtgaatttagtgagggaaagggtagagaagcacttattagcaaaaagacgtacataagctgcttagaaacagaggtcattggttccagaggttcagagccagagttgtcagtttatcagtggagacgcaagtgttcttcaaatatttcatctgaattattgcagtcctaaagaatatctagtaataaacctaatcaaaggagatgtgtgaaggatgcaaaagggtttcttgtggggtttttagaaagcacttggaaacaggttcttatctcagacatgttaaacctgagcctttctcctttgttccttcccagttctctctctttctgcgtctgataaaagtagtttgatacttgtatctgagactttcatatttctccctttgatcaagttctttctccaaaagcattgtkgataagctagctttagtcaggttgtaagtgtccctcagcattgggaaggacctttccaagttggtctagtcccatgctagaggggacaaacagctgaaagtcagtgatgtgttttagacagattcgagaaacaaggaggccagttgctctcaggtttactttgtctgaatttcattgtttaaatttttactttgtac

SEQ ID NO: 603113 - DNA, 589 bp, Homo sapiens
gtatcttaactagccctttatgtttgaagttgttactgatacttggatttaagacttaattccacatggtctacattttctccccccgcctgcctcctttgattacatttttgtcccattttattttaatgggtttgaatattccagtaatggagaaatacagtaaacactaatggtatcagtaccttagagctctatctaaatctaacatttaaagtttgcctcataaggttttaatatcaaggttatctctagccagtgggagtctctgcaagtagacaagattctggaatcagattattcactcatcagctatctatggcagcaagaccacaatgcagatgtcaaatggagtaataactcccagcatactgtagtgatcgttcttgaattttggtrcatatgagaatcacctgaagaacttggtgaaaatataaatcagacactgttgctttacccagcctgggcctctgtcttattggcacaccaggtgactgctcggagtctgagaatgtctgtattaaagcatcatgattgagatttctcccctgtggagaatgaggatgacagagctggaagaggatgtaca

SEQ ID NO: 603114 - DNA, 502 bp, Homo sapiens
caactgatcttagaaaaagtagggaaaggacaccctatccaacaaatggtgctgggaaaattggcaagccacatgtggaagaatgaagctgaatcctcatctctcttctacaaaaatcaactgaagatggatcaaagacttaaatctaagacctaaaaccacaaagtctagaagataacatcagaaaaacccctctagacatttggcttaggcaaagacttcatgaccaagaacgcaaaagcaaatgcaacaaraacaaatatgtggcacttaaactaaaaagcttctgcacagctaaagaaataatcagcagagtaaacgagactacccacagagtgggagaaaatctttatatatctggcaaagcactaatgtccagaatctacaaggaactcaaatcagcaagaaaacacaaatcccatcaaaaggtgggttaaggacatgaataggcaattctcaaaacatgatgtactaacgaccaacaaacattatgaaaaaatcc

SEQ ID NO: 603115 - DNA, 506 bp, Homo sapiens
gaacacttctacattgcttgtgggaatgtaaactagtataaccactgtggaaaacagtgtggagattccttaaagaactaaaaatagatttatcatttgatccagaaatcccactactgggtatctacccagaggaaaactcattatacaaaaaaaaaacttgcacatgcctgttcataacagcacaattcatgattgcaaaaatataaaaccagcccaaatgcccatcaccaagtgggtaaagaaaatgtagtgtatatatacaccaccaaatactactcagccataaaaaggaatgaaataatggaaactgcagcaacctggatgcaaytggagaccattatcctaagtgaagtaactcaggaatggaaaaccagacctatgttcccactcacaagtgggagcttaagctatgaggatgcaaaggcataagaatgataccatggactttggggactagggaagggtgggagcggcatgagggataagactccacacggagttca

SEQ ID NO: 603116 - DNA, 497 bp, Homo sapiens
gtcaatcaggtggaagtagatactagcaattagaggctgcatagagatgtaaagatagggcatatgtaggtaaggagggtatataaagtggttcatgattgagatgaccccatgtcttcagaccctgcttttggggaaagtgaggctgaggctagcatgcaggtagtctattaggaacacarcaagagtgagggagcaagaaataaggaaagacaaaggtgctttgagttagcctccactgtgacaactgcctgcctcatcccacagaaactccaggaaaggtcttgagaaaaacttgaggaaaggtctcaaagctatgcaacaagaagaaaagaagcatttacccagaggctttattgccctccccccggatcaagtgttttcaagtgtgactccttgggctttctggtttatacatgggagtgcagtgcaggttgccacgggcatctatgcagcaatgtcagagggtccagaagaaggtgctgcatggggaagag

SEQ ID NO: 603117 - DNA, 633 bp, Homo sapiens
ggtaggtgttgtaacaccgttgccagtggctggctggaattccaaaccagtaggtcttatcctgtgaggtgccatggaagtggggcctgcagaccatcgctactcagcccccttcctaggggtatgtacagaggtccaacctcctgccttacctgagttgcatttgcctttgccgaggagcccagagctggaatatgtaaagcttctgggtctccatgtatgcctaaggagctgttctatcaagattccacacagctctgcrtgtcagactgaaggcccttgtggagtgggttcgtgaagggatcgcctggcccaaaattgcaaaaatctgtgggagaagtgtgggttcccagggttgcacattcactcacttgaggggagtttcccttggctctgtgtcactcctgggtgggccatcatcctgccctgctttttctctattctccatgggtcaagctgtttgtctgatcagtcccgctgtaagtacctggatgtttcagttgaagatgccatatttacttgccccttttgttcctctctgtgagagccacatactgtagctgtttctagtcagccatcttggccccctcacctaacttcttacataggataatagtaatgaatccaaaaaca

SEQ ID NO: 603118 - DNA, 447 bp, Homo sapiens
ccctgtgtcagcatcggtccctccatggggagctattaatgggggaattgccctgctagagctaaagtggtgccctggccaaatttggttctctgacagtagcaacaagggaaaccattgctgtagctccaggttcctgcccttttgaaggcagggagtctgattcaagtgcttgtggcatggtcacatctctcccatgaagttggggaggtgaaatcaatggctcattcaactgaactagcaaagtattgtcatccttctcctgtgattccactaatacaaaattgtttgcattaacattccattgtaccatgattttgcatttttctgtaacagcttttgtcaaagcaacacaaaacattgtacataaggaatttcattcaatttttstttcttacacaacaggtgtaactacaagatggcattataattaaggaaaacattttc

SEQ ID NO: 603119 - DNA, 483 bp, Homo sapiens
ggaaaaatggatcctaggatttcttggctccttaaaaattgtgtggcctaacttctctgagcctgtttcctcacctataaaaaaaagtggaaataataaggattagaagagatgatgtacaggaaagtgattatataggtgtacaaaaattatatgtgtgtatatgtatataatagcataataattatatttaataaggagcacttaatataagccaggcatctgccaagtgctttttatgaattatgtctttaaatcttcacaataatcccacagagtactaatatcaccttcaattacaatgagtagtaaactgaggcatggagaggcaaagcaacttgtcccagctcacaycatacttaagtggtggggccagcatttaatcctgactcaggaacctgcctccatcctgtgtgctcctccttcccatacataagatgcattatgtaggaaaggacaaaggaaaactaaaaacagagctga

SEQ ID NO: 603120 - DNA, 539 bp, Homo sapiens
cacctataaaaaaaagtggaaataataaggattagaagagatgatgtacaggaaagtgattatataggtgtacaaaaattatatgtgtgtatatgtatataatagcataataattatatttaataaggagcacttaatataagccaggcatctgccaagtgctttttatgaattatgtctttaaatcttcacaataatcccacagagtactaatatcaccttcaattacaatgagtagtaaactgaggcatggagaggcaaagcaacttgtcccagctcacaccatacttaagtggtggggccagcatttaatcctgactcaggaacctgcctccatcctgtgtgctcctccttcccatacataagatgcattatgtaggaaaggacaaaggaaractaaaaacagagctgaacgtgcaaggaaagacctagcagcagacgtgctataaaggaaatagctgaggttgattatggagcctccaagggaacttttcatcttttccaggttgacttcaaagatgcctcagttactgcaaaac

SEQ ID NO: 603121 - DNA, 560 bp, Homo sapiens
aaacctggtttgcctgcagaggccttgcctggggaatttgaggaggcagcagctaaacccaggcctgccgggacagatggcagctgtgcaggcagaaaaaaaggtgaaagaaccagagatggtcatgggagttggcaagtcctggctctttagattaaaaccttggttttaattaattctaacttaaagacaaggtaaaagggctctaaaaggacaactcagacaggagcagagccttggaatatttcaaaatgaaaataattgctgctttctgccgcctcttaaatttgatacagtaaatatttcccacgtctatctgaaakgtaatcatccattcatagacattcattagaagcatagctctgggcttgcacgaagcagttactcaaaaatattagcagactgatcacatcagaaatgaaattttgaagagcaggttgttaatagctagggggagactttggagcctcaccccaccccacctggcaaaccagaaccaaggccttgatgcactttcctgtctttggtttgcatctaaagcaaccaggatgatgatggcc

SEQ ID NO: 603122 - DNA, 588 bp, Homo sapiens
catgggagacttttcactttgttctgtactaagaaaaattcttctgccttgggatcctgttgatctatgaccttacccccaactctgtgctctctgaaacatgtgctgtgtccactcagggttaaatggattaagggtggtgcaagatgtgctttgttaaacagatgcttgaaggcagcatgctcgttaagagtygtcaccactccctaatctcaagtacccagggacacaaacactgcggaaggccgcagggtcctctgcctaggaaaaccagagacctttgttcacttgtttatctgctgaccttccctccactattgtcctatgaccctgccaaatccccctctgcgagaaacacccaagaatgatcaattaaaaaaaaataaaaaaaaaaagaaaagatatggctgtgttcaaataaaactttatttgcaaatccaggcagtggcccagacttgatccatgggccacagctcaccagcccctgctgtaagaccttaatttcctagtctatgggatgagaataatgaccatgcccacctcattgagtggctttgtggattaaatgataccatgttaatacttagc

SEQ ID NO: 603123 - DNA, 588 bp, Homo sapiens
catgggagacttttcactttgttctgtactaagaaaaattcttctgccttgggatcctgttgatctatgaccttacccccaactctgtgctctctgaaacatgtgctgtgtccactcagggttaaatggattaagggtggtgcaagatgtgctttgttaaacagatgcttgaaggcagcatgctcgttaagagtcgtcaccactccctaatctcaagtacccagggacacaaacactgcggaaggccgcagggtcctctgcctaggaaaaccagagacctttgttcacttgtttatctgctgaccttccctccactrttgtcctatgaccctgccaaatccccctctgcgagaaacacccaagaatgatcaattaaaaaaaaataaaaaaaaaaagaaaagatatggctgtgttcaaataaaactttatttgcaaatccaggcagtggcccagacttgatccatgggccacagctcaccagcccctgctgtaagaccttaatttcctagtctatgggatgagaataatgaccatgcccacctcattgagtggctttgtggattaaatgataccatgttaatacttagc

SEQ ID NO: 603124 - DNA, 588 bp, Homo sapiens
gccaaacgctaggatttggtgggcaaggtcccagagaagrgaaatccacaaggaggtgcacctacaaatctacattaaaattccttcttagatcctttgccaatcgctaagctgttcatgcacaaagtgatcctaaaggaggcctaggagaaaagagccactggaatgctagagagctgaagatctgttagagactgcacagcattaggaagctagtaattagaggttgataccaggtctgagcagagcaaacttagggtttatctttagcttttagttaagacctcagaaacaccattcgctaggattttgactcatgccctaagagcagccaacaccctggaagtaaggaaaggtatctactctaacaaagcctaaagccaagtctcaacagtatcaagatgatcctctggtactttaactgcctgccagaacaaaactcaacgctcttcaaagatggaaaacatgacccagagcttctacaaggcatcatccagactagccagtaaagaaaaaaaaaaaaattagtcacagaaaaatgcaggaaaaggtgataaacatcaagagaaaaggcaacaactgggagac

SEQ ID NO: 603125 - DNA, 589 bp, Homo sapiens
ttctaaatgaggatgttctaaaagttaatataatcgtgtttcatatgtccaaaacactagcagaaaagattaagcagggacatgagagagagaaaacaaagccaaatcaaacttcttgaaatgaaaactaaaatgtctgaagagaaraataactgaatgggattaacagcattttaaacactgcagaagtgatgattagtgagtcaaacacataacaatagaaaccatctaaaatgaaggagaggaaacaaaaactgaagaataagttaagcaaacataggacatcttcatgcagcctgatatacatgtaattggagtccctaaaggagaagatggagtggaaatgggagaaaaacaacttgaagaaataatcaccccaaatttccaaatttgattttttaaaatagaaaaactatacatctaagaatctcaatgatccctaagcacaatgaatatttttaaaaattaaaaccgaggcacatcataattaaattgctgaaaactagtgattaaaaaaaaatcttaaaagcagccagagggaggaaaaaacacgttatgtacagacaaagaaagagtagagtaatagcag

SEQ ID NO: 603126 - DNA, 558 bp, Homo sapiens
tcagtcttcccgtctcatgtgccagctaggcccttctgcttctgctctgggggagtctgcaggggtagaaagaggcagaatctctccctctgggggaagggttacagagagaaggctttgagaaatcagaacctgaaaatcaagttcaagaattccctgtragtcccatgtgcaaccaccatgcaaagcactttatataatgctttcattcaattccccattccaacccccaaagtgagagagagaaaaataattaccccaatttttcaggtgaagaaactgagacacaaagatatgaagaaacttgcctaaggtcaaacagctaacaagtggtggagctggcatttgagccagaggtcatgtcctgacatatatggtcatgtatgggggctccatgcaggcctccatgagcgttgcactgactgtcctgagaaatgcctctgcctgctttttgcacttcaaaatcacagactagcctggaagggttctggcagttttctggcccacccagaagatgctgactcaaaacaaatttttttaatgtctagaacctgttac

SEQ ID NO: 603127 - DNA, 597 bp, Homo sapiens
gtgcgctcctctctgaattctggcttctttgcaggctttcggttatccctctgtcacctatttgctgctcagttagtggcatgctaggccttcctgctacacgttgacttgaacactaggtggcagcctgacccatatcttgctggggtaactcggccctctgccgggatgggaaccgagactcgaggcttccaccccagctacccttacagctgccacactgccttttctttcatggctgttggcagcagagagccaagaaaggctccccgttgctaaacacaggccgaagccttggagatgaagggagatttgagctgatctgaagtcagctcttctaccagctggggcttcctttgtagaacaaagacttgagacagcctttggtggagggtgaaagaagctgaggcctgggcggtggcsgaggacttagcatggtggtgaccttttagcccagaaggctgctttgccgactgggcctggagtttcctgtggaccctgtggcccagaggacctgctgggatcccattgcattggaggatacaggctgatgtttacctttctctactgactcctttccctcaacatgcaagcatg

SEQ ID NO: 603128 - DNA, 597 bp, Homo sapiens
gtgcgctcctctctgaattctggcttctttgcaggctttcggttatccctctgtcacctatttgctgctcagttagtggcatgctaggccttcctgctacacgttgacttgaacactaggtggcagcctgacccatatcttgctggggtaactcggccctctgccgggatgggaaccgagactcgaggcttccaccccagctacccttacagctgccacactgccttttctttcatggctgttggcagcagagagccaagaaaggctccccgttgctaaacacaggccgaagccttggagatgaagggagatttgagctgatctgaagtcagctcttctaccagctggggcttcctttgtagaacaaagacttgagacagcctttggtggagggtgaaagaagctgaggcctgggcggtggcggaggacttagcatggtggtgaccttttagcccagaaggctgctttgccgackgggcctggagtttcctgtggaccctgtggcccagaggacctgctgggatcccattgcattggaggatacaggctgatgtttacctttctctactgactcctttccctcaacatgcaagcatg

SEQ ID NO: 603129 - DNA, 546 bp, Homo sapiens
tacagctgccacactgccttttctttcatggctgttggcagcagagagccaagaaaggctccccgttgctaaacacaggccgaagccttggagatgaagggagatttgagctgatctgaagtcagctcttctaccagctggggcttcctttgtagaacaaagacttgagacagcctttggtggagggtgaaagaagctgaggcctgggcggtggcggaggacttagcatggtggtgaccttttagcccagaaggctgctttgccgactgggcctggagtttcctgtggaccctgtggcccagaggacctgctgggatcccattgcattggaggatacaggctgatgtttacctttctctactgactcctttccctcaacatgcaagcatgatcaagcctttcccattttaaagtaatyttccaacttacctctcctttcatcatcctctctctttggccttaccatcttagcgaaatttattgaaaagttatctttgctctctctttcttcatcacctcccactcacttgttagcctacggcattc

SEQ ID NO: 603130 - DNA, 610 bp, Homo sapiens
aacacccacatccacttcatagccatgtctaatcaattctacccccttaaaaacctctcaaatctctccccatccctagtccaactcccctgcccaggccaagtctccattctctttttcctgaataaaggcaacagactcctatttgttctccctgcatttgttcctgccccttcaccactgcattgtcctcactgcagacagtgtcctttataaagcgcaaagctaaacaagtcatttcatttgtaagctcaaaacccttcggtgccctaagggtagtgtccagacactgttgcaaggcccaaaagaaccttcctgacctgactctgcccacattctccagccacatagcttagcaacctccacctctccccaaacacacactgtctctctctccccaactcccctctatccaccctcatcaaaagtgttcctgggaatcctatgctctgccttccaccgcaccttcrgtctgaactacttctttggctgcctcctttttctccattgaggctcagttcaagaattgtcaactttctaatcctaattctgtgctgggtgccccttccctgtgccttttggttaaagtactcagtgttgtgattgtgtg

SEQ ID NO: 603131 - DNA, 334 bp, Homo sapiens
accacagacatatttttttaagccatgacctgatctttctcacttaactggttctggcattctgcctctcctctagggttttgctatcagattaatctgttgatttctctgctctacacactyacataagcacctaggtggatgtgggcctgcaggtggctctgctgttatttgtggtatctgttgaaaccaatcagtttatccagcttggtggcataccacaagtgctaagcccacacttcttcagaggaaaatttggccatcaaatggaggcacctttcattccccctacacagaatggcaaccctaacctctcccaagacccaagaactaa

SEQ ID NO: 603132 - DNA, 571 bp, Homo sapiens
gagcccagaacatgaaggattagccatgaaccagagatggaaagttttgcacacagcaagaaaatgtcaggagacattttcagtcaatgtatgtacacaytccttcaagacaaggaatatttgaaataatagtatctgaactaattgagtctaataggagaaagagaagagaaaaaggacattgaaggcagatggagttgccttcaatgtcaggaggcatgcagaaaaaggaaagtttctaaaaatatcacaagaagctaaaaaatgatcattattttctctaaaagtagaatgaggttggcgttggacttatagctcatggaaagtgataatagtttagaacagttactgagggtgaaaaaacatgttgcggagaagctagtgttgaatgacttcctctgtgtgtagtcagtagtggtggttagatggtaatactgatccaaaatgggtactctgtgcagccagtatcatataaagatgcaggttaaaaagtaaaggatattggtgagagcagatggaggatttcttttttcatcactttgatccttgtgttcatagagatattatacca

SEQ ID NO: 603133 - DNA, 585 bp, Homo sapiens
tcattattttctctaaaagtagaatgaggttggcgttggacttatagctcatggaaagtgataatagtttagaacagttactgagggtgaaaaaacatgttgcggagaagctagtgttgaatgacttcctctgtgtgtagtcagtagtggtggttagatggtaatactgatccaaaatgggtactctgtgcagccagtatcatataaagatgcaggttaaaaagtaaaggatattggtgagagcagatggaggatttcttttttcatcactttgatccttgtgttcatagagatattataccaggtctgccatattatctgtgacaaacttgtgccatcaccatcataacacctttctaagtctgggagatagatttccccaaaagccttcctatattgttctggatttgaatttgccagtgaggggggaaaaaacttgtgtcatatttagaaggtgggagcaaagargaagctattattcttaggaggtcaaggagggcagaagtggtagcttctagaaatcctccacagtaactttttctatagaatctggaggcctacaaacctatctctctgcccctccca

SEQ ID NO: 603134 - DNA, 578 bp, Homo sapiens
tctctgcccctcccacattcacataatctctaatttctacatgaaatctcttattcccatagtagtcatggtggctgtcttctcctgaccaaaaccagatatgtatgtcgggcctagtgttgatgtggctgtcctcaccctctttgaaagcaaagaaaaaacaaaatctaattattctgaccttcagtcaactctatttttcttggcaatgttgtttggaaaaacatctggaaatacctcagacrctattgccttgggtttcttggatttcatcacccaaaaatacttccttcattcttaggagcaggcttcttcttgggttccttcattcccacagtgctcccacataactggatactatcatctcagacagaacctcagctttcttggcagcacttttgaataggagtccaccaatgaataccggatgtggatatatcatggggttcaccctggctcctcctaaccccttcctaagtagtgattcaccatgatcatactcaggtgtttagacagcaagaaggttctttattagactgctcggaatgtcatgcctcaggtagtgcaggctccaaagc

SEQ ID NO: 603135 - DNA, 578 bp, Homo sapiens
tctctgcccctcccacattcacataatctctaatttctacatgaaatctcttattcccatagtagtcatggtggctgtcttctcctgaccaaaaccagatatgtatgtcgggcctagtgttgatgtggctgtcctcaccctctttgaaagcaaagaaaaaacaaaatctaattattctgaccttcagtcaactctatttttcttggcaatgttgtttggaaaaacatctggaaatacctcagacactattgccttgggtttcttggatttcatcacccaaaaatacttccttcattcttaggagcaggcttcttcttgggttccttcattcccacagtgctcccacataactggatactatcatctcagacagaacctcagcwttcttggcagcacttttgaataggagtccaccaatgaataccggatgtggatatatcatggggttcaccctggctcctcctaaccccttcctaagtagtgattcaccatgatcatactcaggtgtttagacagcaagaaggttctttattagactgctcggaatgtcatgcctcaggtagtgcaggctccaaagc

SEQ ID NO: 603136 - DNA, 521 bp, Homo sapiens
gcatatgagactcccttttcaagttgaaaagtgggtttggtggagatgtggatcaaaccacagctaacctctgtgtttcttaggataggggccacggaatctatatttaaattaacatctaaagggccttcccttaactaccattctcaaaatagagatccagcctgccttatgactcacaaccccatttgacaagcagctcagcttagactccagattgctgggttgtggaactaataggtgagggaaccagtcytacagcaagcaagtcctaaacttggctggtatgtacctgcctcaacttgcctctggctttacacaaagacctaatttggttgggctttgcttcaggtgaactgcagctcctagtagccttgagaagctggctggagaaagaaacagctgaaattaatatgtcaactttacatttaggcagaggaaagctttaaagctgcagagtatccactcacagaagaccttcagtcaacaaatgtctccctgctacttagaccaagctggaa

SEQ ID NO: 603137 - DNA, 595 bp, Homo sapiens
cataacacttttctctcttcggagttgccttccactccaaagtcctggcaggagacagatgacttcccacagacacccttgaccaccctgtcgaccttctcagctaagagccagaaagkatcccaattttgccatcaattagctataagaccttgggaaagtcactttggttcttgaggcctcagttgcctcatctataaagtgggaacaatgatggtttttcgtctattcaggaatcaaatttttttttttagcagcagctatatgctaggctttgggaacacagaattgagcagagacatgtcccctgatctcatgaaatatagagttaattagaaaagacagacattaagacttaacattagtgccagagctataaaaggagaaacaggttcctatggaactactggaagagaatctcacccagccatgactgttctcccagagataccatgggcattcaattaaacagtgaatataaaagtgctccttaggctgtaaagtgctgtgtgaatatgtgctatcctctcctgggtgtttttgcttgtctcactcaaagcttgggaagtcagaatatgagaaagataaaaaggaa

SEQ ID NO: 603138 - DNA, 593 bp, Homo sapiens
acatagcccttctgccacctcagttttagactcctgaccttcaggcctgtaagagaataaaatttttgtcattttaaggcattaagtttatggtaaactgctacagtagtgatagaaaactaacacaccaagcaaaaacctagagctrgagccagagtagtaaagggtgaatgtgtgaaaggcaaggttgttcttctgaggacaaattgattttatatcaattcatgctggcttataagcataaaggccaaagaaaaacagcaaagaaaatgcaaagactcagggaatattgctcccataagcccttctggggaatctactagagaatcagcgcacatacatacacactaaacccagaatcacagaactgtttggcatacaatctgatgatgcacatttaaatatattccactgtagaactaagactacataatgtggataaaggtgacagaatagcatttcatgttatatgcactgaaaatttaaatacaatacagctaacaaaaaaatgaagggagaaagagaaagcatacagaaagtagaatgagctccctgattgtcttaatataagcatatgcttacaaggaaaaact

SEQ ID NO: 603139 - DNA, 551 bp, Homo sapiens
gcagttagaaagaaagaggcagaaataggactaaacccaggtcctcggactctcaactcagtgtcaggtcaaacctcacagataagaaagggcaccagagtgtatgaagatccatccaaaggggctggggaggaagccgtagaaagtggtccttccacttctcacctccagccttaacaggaagtctggccatgaaaatatggagaagacaccatctcagcatccatgttcctaggaccttgcaagaataggaagattatgagtgaccattcctttcaacagttaaggtttgacagatgtgtctatgactcaagaaggatgttctctcaaagtagttcagagcccagaggcctaagagaggggccctaaacccctgtttaagcattcatgtaacattcaaggcaactaggctgctccatctcaggcccaccccctccatctcctgtagggacttactgrccatccttgacttttaaagtttgcacatagaggcttctttcaaaaaatgtgcacgttattttagacaagagggaaaatttgtggaaaataca

SEQ ID NO: 603140 - DNA, 562 bp, Homo sapiens
ttttataaaaggaaaaaaaaaaccaggctaagaaactaaaaagtggaataattaaatatgcaatggcacctccattcagtagaattctttactaccactacaaatgatgttgaaaagttgaagactatttaataatctttaaaaacctaattttcttttactatgtgaattagtccattttcacgctgctgataaagacrtacctgaaaagttccacatggctggggaggcctcagaatcatggcgggagttgaaaggcacttcttacatggtgacagcaagagaaaaatgaggaagaagcaaaagcagaaacccctgataaacccatcagatcttgtgagacttattcactatcacaagaatagcacaggaaagaccagcccccatgattcagttacctcccccgggtctctctcccacaacacatgggaattctgggagatacaattcgagttgagacttgggtgaggacacagccaaaccacatccctatgtaaaaaattaggtaaaataaactgtatattgtatacagaataattccaatattatataaaaatatgtg

SEQ ID NO: 603141 - DNA, 562 bp, Homo sapiens
ttttataaaaggaaaaaaaaaaccaggctaagaaactaaaaagtggaataattaaatatgcaatggcacctccattcagtagaattctttactaccactacaaatgatgttgaaaagttgaagactatttaataatctttaaaaacctaattttcttttactatgtgaattagtccattttcacgctgctgataaagacatacctgaaaagttccacatggctggggaggcctcagaatcatggcgggagttgaaaggcacttcttacatggtgacagcaagagaaaaatgaggaagaagcaaaagcagaaacccctgataaacccatcagatcttgtgagacttattcactatcacaagaatagcacaggaaagaccagcccccatgattcagttacctcccccgggtctctctcccacracacatgggaattctgggagatacaattcgagttgagacttgggtgaggacacagccaaaccacatccctatgtaaaaaattaggtaaaataaactgtatattgtatacagaataattccaatattatataaaaatatgtg

SEQ ID NO: 603142 - DNA, 562 bp, Homo sapiens
ttttataaaaggaaaaaaaaaaccaggctaagaaactaaaaagtggaataattaaatatgcaatggcacctccattcagtagaattctttactaccactacaaatgatgttgaaaagttgaagactatttaataatctttaaaaacctaattttcttttactatgtgaattagtccattttcacgctgctgataaagacatacctgaaaagttccacatggctggggaggcctcagaatcatggcgggagttgaaaggcacttcttacatggtgacagcaagagaaaaatgaggaagaagcaaaagcagaaacccctgataaacccatcagatcttgtgagacttattcactatcacaagaatagcacaggaaagaccagcccccatgattcagttacctcccccgggtctctctcccacaacacatgggaattctgggagatacaattcgagttgagayttgggtgaggacacagccaaaccacatccctatgtaaaaaattaggtaaaataaactgtatattgtatacagaataattccaatattatataaaaatatgtg

SEQ ID NO: 603143 - DNA, 564 bp, Homo sapiens
gtttatgtgtgcattttggtggggaaaggattaacagaactgctttggtcggatttttaaagaggtttatcactattcacaaggaaagacaaagttaaattttatctatgtcttaccttgaaacattatctctaaaaacaaactttattcatatgaactgtttatccaataaagggtaggaataaataggcatatttctttttttttttttttttttgagacggagtcttgctctgtcacccaggctggagtgcagcggcacaatctcagctcactgcaacctccgcttcccaggttcaagcaattctactgcttcagcctccsgagtaggaaggattacaggtgcccgccatcatgcctggctaatttttgtatctttagtagagattaggtttcaccattttggccaggttggtctcgaactcctgtcctcagatgatccacccgcctcggcctcccaaaatgctgggattataggcgtgagctaccgtgcctggccaaaataggtatatttcaaaacaggaagataaacagttggattgccaagacatagttaaagggaat

SEQ ID NO: 603144 - DNA, 597 bp, Homo sapiens
gtaaatgcaccagtcagcastctgtaaaaacgcaccaatcagtgctcagtgtctagctaaaggattgtaaatgcaccaatcagcactctgtaaaatggaccaatcaacactctgtaaaatagaccaatcagcaggacatgggcggggacaaataagggaataaaagctggccaccccagccaacagcggcaacccacttgggtccccttccaggctgtggaaggtttgttctttcgctcttcaaatcttgctgctgctcactgtttgggtcagcactacttttataagctgtaccactcactgcgagggtctgcggcttcattccagaagtcagcgagaccacgaacccactgggaagaacaaacaactccggatgcgccacctttaagagctgtagcactcaccacgaggtctgcggcttcattcttgaagtcagcgagaccaacaacccaccagaaggaataaattccggacacaagagcaagagggaaccacttagcagagaactgtcgtgatcacattcgcatatttacaagctgctgctgctgggcagagaaacaacatgaggcaggggacccagtgcatgcttgagggcta

SEQ ID NO: 603145 - DNA, 597 bp, Homo sapiens
gtaaatgcaccagtcagcactctgtaaaaacgcaccaatcagtgctcwgtgtctagctaaaggattgtaaatgcaccaatcagcactctgtaaaatggaccaatcaacactctgtaaaatagaccaatcagcaggacatgggcggggacaaataagggaataaaagctggccaccccagccaacagcggcaacccacttgggtccccttccaggctgtggaaggtttgttctttcgctcttcaaatcttgctgctgctcactgtttgggtcagcactacttttataagctgtaccactcactgcgagggtctgcggcttcattccagaagtcagcgagaccacgaacccactgggaagaacaaacaactccggatgcgccacctttaagagctgtagcactcaccacgaggtctgcggcttcattcttgaagtcagcgagaccaacaacccaccagaaggaataaattccggacacaagagcaagagggaaccacttagcagagaactgtcgtgatcacattcgcatatttacaagctgctgctgctgggcagagaaacaacatgaggcaggggacccagtgcatgcttgagggcta

SEQ ID NO: 603146 - DNA, 597 bp, Homo sapiens
gtaaatgcaccagtcagcactctgtaaaaacgcaccaatcagtgctcagtgyctagctaaaggattgtaaatgcaccaatcagcactctgtaaaatggaccaatcaacactctgtaaaatagaccaatcagcaggacatgggcggggacaaataagggaataaaagctggccaccccagccaacagcggcaacccacttgggtccccttccaggctgtggaaggtttgttctttcgctcttcaaatcttgctgctgctcactgtttgggtcagcactacttttataagctgtaccactcactgcgagggtctgcggcttcattccagaagtcagcgagaccacgaacccactgggaagaacaaacaactccggatgcgccacctttaagagctgtagcactcaccacgaggtctgcggcttcattcttgaagtcagcgagaccaacaacccaccagaaggaataaattccggacacaagagcaagagggaaccacttagcagagaactgtcgtgatcacattcgcatatttacaagctgctgctgctgggcagagaaacaacatgaggcaggggacccagtgcatgcttgagggcta

SEQ ID NO: 603147 - DNA, 597 bp, Homo sapiens
gtaaatgcaccagtcagcactctgtaaaaacgcaccaatcagtgctcagtgtctagctaaaggattgtaaaygcaccaatcagcactctgtaaaatggaccaatcaacactctgtaaaatagaccaatcagcaggacatgggcggggacaaataagggaataaaagctggccaccccagccaacagcggcaacccacttgggtccccttccaggctgtggaaggtttgttctttcgctcttcaaatcttgctgctgctcactgtttgggtcagcactacttttataagctgtaccactcactgcgagggtctgcggcttcattccagaagtcagcgagaccacgaacccactgggaagaacaaacaactccggatgcgccacctttaagagctgtagcactcaccacgaggtctgcggcttcattcttgaagtcagcgagaccaacaacccaccagaaggaataaattccggacacaagagcaagagggaaccacttagcagagaactgtcgtgatcacattcgcatatttacaagctgctgctgctgggcagagaaacaacatgaggcaggggacccagtgcatgcttgagggcta

SEQ ID NO: 603148 - DNA, 543 bp, Homo sapiens
tcattccccaactatttctatttggcaatatcagaacttcagtaatactaatagtgtatttctgtcattgaaatgctactcttaatgtttatcttatgctttccttaaactcctcctggttctgaccttggtgagctyacctggccagttagagctggagcaggtgcttggtgaccacagctacctatttacattgcttgaatagggactgctttggtaatgcccagaaagctgaataagtggaaaagatgttcgcaggggtttaggggtggcacatctggatctactgaaaatttaacatagctttcttgatgggcaaatcaatttttttcactctgtactctgtcatgaagaaattaacacgattttagaaaaatctgtgctgacatttgacactgactttctcatttactagatatactacgaaacagtgaagaaacacttccccttaaccagctaatgctggtcagactccaacaattagttattttagaaaataatttttaaaaaagttttctaaaaaagggagctactggccaggca

SEQ ID NO: 603149 - DNA, 609 bp, Homo sapiens
gaatagaattcagaatatggacaggaacgaagattgtcaagatttgggaaaaagctgaaaccaatcccaggactctaaagaatacaataaatcaatataggaaataaaagatgaaatggccattttaagaaagaaccaaagtgaactgataaagctgaaaaattcacttcaagaatttcataatataaccagaagtattaacagcagaatcaacgcaaactatcgtaaggacaaaaaaccaaacaccgcatgttctcactcatagttgggaattgaacaatgagaacacatggacacaggaaggggaacatcacataccagggcctgttgtggggtggggggaggggggagggatagcatttggagatatacctaatgttaaatgacgagttactgggtgcagcacaccaacatggcacatgcacatgtaccctaaaacttaaaagtataataaaaaaataaaaaaataataataaaaaaaaaaaaaagmatcaacctggctgagaaaagaatctcagagttcaaagaccagttctccaaaataactgtcagacaaaaataaaaagaaaacaataaagaagaatgaacaaaacctccaagaaatgtgaa

SEQ ID NO: 603150 - DNA, 503 bp, Homo sapiens
taattggagtccctgaagaggaagaattaggactgaaaatatttcaagaaacaatgggcaaaacaccctaaatttgatgaaaaccatataaaacagatccaaaaatctcaacaaacttcaagcacaaaaacatgaagaaaacaacatcaaggcatattgtaaacaaactgttcaaaacccatgaaaaagagaacatctttaaggcrgccagagaaaaccgacacactatgtacaaagacccaaagataagaacagtagattttccactagaaaccattcaagctagaaattactaaaacagcatctttaaatatttaaagaaaaaaaatgccagcttggattctgaacaaagcaaaaatatttatcaaaagtataggtgaacaaaaaccaaaagaattcacaaccagcaaacctccactacaataaatgttaaaagaagtccttcaggcagaagaaaaaggataccagattaaaatgaggatctgcacaaagaaataaagaat

SEQ ID NO: 603151 - DNA, 503 bp, Homo sapiens
taattggagtccctgaagaggaagaattaggactgaaaatatttcaagaaacaatgggcaaaacaccctaaatttgatgaaaaccatataaaacagatccaaaaatctcaacaaacttcaagcacaaaaacatgaagaaaacaacatcaaggcatattgtaaacaaactgttcaaaacccatgaaaaagagaacatctttaaggcagccagagaaaaccgacacaytatgtacaaagacccaaagataagaacagtagattttccactagaaaccattcaagctagaaattactaaaacagcatctttaaatatttaaagaaaaaaaatgccagcttggattctgaacaaagcaaaaatatttatcaaaagtataggtgaacaaaaaccaaaagaattcacaaccagcaaacctccactacaataaatgttaaaagaagtccttcaggcagaagaaaaaggataccagattaaaatgaggatctgcacaaagaaataaagaat

SEQ ID NO: 603152 - DNA, 587 bp, Homo sapiens
cccaaatttataaaataattactactaaaactaaaaaaaatgacatatgacatagactgcaataaaataayagtgggagacttcagtaccccactgacagcactagacaggtcatgaagacagaaagtcaacaaaacaacaatggacttaaactataccctagaacaaatggacttaacagatatttacagaacattctacccaacaactacagaatgtacattcatcagcacatggaacattcttcaaaatagagcatatgataggccacaaaagaagtctcgataaacttcagaaaattgaaattatatcaagtactctctcaaactacagtggaataaaactggaaatcaatttgaaaaggaaccctcaaaagcaggcaaatacatggaaattaaacaacctgctcttgaaagattgttgcatcaataatgaaatcaagatagaaattaaaaaattgtttcaactgaataacagtgacacaacctatgaaaagctttgggatacagcaaaagcagtgcctgcatcaaaaaattggaaaaaggacaaacagacaatctaaggtcacacctcaagaaactagagaa

SEQ ID NO: 603153 - DNA, 414 bp, Homo sapiens
ttgtatatagctctcctcttcctctctcccattcttctgttcctttcctcttttgtcttccacctctctctctatttcattacccccacagacttatatttgggatccccagagcattgcatcagttatccagtagacatctattatgtatcagacataatgctggatcactgttatcttggatggtcagaggaaaaaactttctaaggcaggcgaaacttgaacaataataagctaagatagtcttattgaagtttcttgaagcaaaacaaacaaatgttgctgaggtctggactaattcctccgggacttattgttcctccttcttttacattctttctagtccaaagtgaaatattagatttgtagaayagattttgattatatttagaattttctcaatataataaatat

SEQ ID NO: 603154 - DNA, 602 bp, Homo sapiens
agatttaatgactgccctgctgggttttgaacttgcatcaggcctctagcccctttcttttggaaagtttctcccttttggaatgaaaatgtttacccaatgcctacaccctcattgtatcttagaagtaaataacttgttttgattttatggcttcaaaggtggaagtaactcatctccagataaaaattaggactttggacttttgaattaatrctggaattagttaagactttgggaaactgttgggaaggaattattgtattttgcaatatgagaaggatatgaaatttgggggacaagaggggaccagacaagaggtatttagatcatggggatgtatgtcttcatgtatgtcttgggccccatggtgataagtgagctttcactcagttcacacacgatctgttggtttaaaagtatatgttacctccccctggccagccattctttctcccttgctcctgctttcaccatgtgaagtgctgcttccactttgtcttttgccatgatttcaaacttcatgaggcttccttagaaaccaagcagatgccagcaccatgcttcctgtatagcctgcaaaactgtgagccaattaaatc

SEQ ID NO: 603155 - DNA, 565 bp, Homo sapiens
ctgcactgcataagccttcaaaaggaggccctccttgggtattccaaacattttatcaagccacaagatcctcttgtttcaagcaagaagcacctacaaagaaaaagacagtttctgtaagacacttggattttgggtttgttagttcttttggggtgaatttttaatgttaacagaaaaaccaaactaccttggtggaattgggtgccaggaggcattaaataaatggattcaagtaagtacatttgcaataccctagaatggtacattctctcaggtcctttgctttgggtttttcagagagattcagaatacgtttctacrtttatttaaagtagaatgttaaggccaagatgaagagaatcaattctaatcagcttttgaagtagaaacaggacaggatcaatcttgcagcactcaacagactatctcccatttggaactaaagatgcagaacataaaacattccattagatccctattttatttcatttgtggccacatgagtctgtctaatcctgaccacagaatcagaatgttgaaaagactttgaaggttcatcgaa

SEQ ID NO: 603156 - DNA, 631 bp, Homo sapiens
ttaataatcagaggtatacacatttttaaaaaataatacagtgacataaccctttagatccattaatggacaaacattggaaagttggataatgccaagtgttggagggtttgggggtgggrgtaataggaatgttcatgactgttggtggacactgatacagccatccagaagacaatctagagtttcttggtcaaatcaatatagctatgcaccatgcccctgcactttagctcctgggtatccatccctaagacattttgaacatccaaaaggagacaagtttgaggatgatgatggaatctggtgtgcatggttggagagtgaataaacaaaatgtggtagatgcacttactccttgaacaacctaccacccagccactagaaaaggcaggagcccagatgtatatagaatcatagatagatcttaaaatccagtccttaaaatccagatgtgtatagaatcatagatagatctgaaaatccaggcacaatgggtcacacctgtaatcccagcactttgggaggctgaggcaggcagattgcttgaggtcaggagtttgagaccagcctgatcaacatggtgaaaccccgtctctactgaaagtacaaaaattagccgggtgtggtg

SEQ ID NO: 603157 - DNA, 631 bp, Homo sapiens
ttaataatcagaggtatacacatttttaaaaaataatacagtgacataaccctttagatccattaatggacaaacattggaaagttggataatgccaagtgttggagggtttgggggtgggagtaataggaatgttcatgactgttggtggacactgatacagccatccagaagacaatctagagtttcttggtcaaatcaatatagctatgcaccatgcccctgcactttagctcctgggtatccatccctaagacattttgaacatccaaaaggagacaagtttgaggatgatgatggaatctggtgtgcatggttggagagtgaataaacaaaatgtggtagatgcacttactccttgaacaacctaccacccagccactagaaaaggcaggagcccagatgtatatagaatcatagatagatcttaaaatccagtccttaaaatccagatgtgtatagaatcatagatagatctgaaaatccaggcacaatgggtcacacctgtaatcccagcactttgggaggctgaggcaggcagattgcttgaggtcaggagtttgagacmagcctgatcaacatggtgaaaccccgtctctactgaaagtacaaaaattagccgggtgtggtg

SEQ ID NO: 603158 - DNA, 650 bp, Homo sapiens
actggcaatcatcgcattccaccccctaaccccactttcatggttcactttcctgagtgacttttaggtatccaaacaaagagtgtccagggtttaacttacatgcttgttgaactcttgtggacatgaggggaaactaaagatcctgaagagtgagaaaagaccctttcatttgtacttaaggaaaatgaagcaggaaggataaaatggctctcttttagttttgagatttcccttgccagggmccttgactaccttagaaagcatccctcttaaccctatgtcttggcttcccacaccagcatctgaactgcagggaaacttcatttggccaactgctccctcccacttcattccaacttaaaaaaataaaaaagctgttttcccctgaaagaaacaaagttgaggaaatcatccatgccatatgcacatattggtcagcgctcccttccatctgctctggggttgctcagcgcgccccttttctaaagaaactcattgaggcaggtgtgtggtgtgtttggtgcctgtgtgtgtgtgtgtgtgtgtgatgtgatgtgtgtgtgtgtagcgttcatttctgtcagacacccccccatccaattaatagtcttgagcaattaataagtgtcgtctgacttgacccaaag

SEQ ID NO: 603159 - DNA, 613 bp, Homo sapiens
ggattggaaagaaacttctaaataatttacacctcaaaagaatagggaagaatttatagttacaagttttctaaaatacgtgcttaaaaaatgggaatcagaggcctagtgtcaggtaaaataatattctaaacatcagtccggttgaggggaatattaagactatctttgtcatctacagttgataagtgctagactttgtctagtcatagaatggytcctcttcttctgtttgtaatacgcacacttcatagattacatggataagcattattattatccattgccctccaccatctgtttttctaaagctaagtggtatctttaattgtacctgaggagaaacctgctatatataatgggtatgcaagtgaaagctaagtacaacaatacaaacctgtagaagaatgcttaatagagccatctcatttttcctctctatatcccttctggcttcatcccttggacttgtgatttctggttgatacattcagatgtgtctctgcattgtcttgaataatcttctgtttctgattctactacctgactttctcttgcctatcagttaatgcagagaatctgattcctggatgaacatctttattaatgaaaa

SEQ ID NO: 603160 - DNA, 640 bp, Homo sapiens
cattagcatagcacttcagagtttatgaaatccctttcaaaatatggtcacctttaattgatgccttggtggtaggtgacggaactttttatgttcacttataccacaagaaaacttttctcatatcttyaatcaacttcttcattctgtttttactaattccaatagtaaagtaagagctgatacccctattatgcaaaacactgtagtttatgtggacagaccgcaactgctttaaatggttatttagggtactcagctcactggtgctgaattacaaggttttccctcctctgttttcctgttctgtgacctcaggtttgtaatggacacaaagagttgtgttggcgtttagtgcctggggcagtgccaccaacatggagagctgtcatgatatctttactcctttgatccctttcctccagcctaaagaagggagggaaagaagagggggccaatatgctactttgatctctaattctctgtggacaaccgcttttctccatctctttttcagaacatacctactgactcccttggggctagtttggtgaattgcagaatttcagcattagaagaaactgtagagatttcacattcagctctctcattttatagattcacaatgattaaaatgact

SEQ ID NO: 603161 - DNA, 640 bp, Homo sapiens
cattagcatagcacttcagagtttatgaaatccctttcaaaatatggtcacctttaattgatgccttggtggtaggtgacggaactttttatgttcacttataccacaagaaaacttttctcatatctttartcaacttcttcattctgtttttactaattccaatagtaaagtaagagctgatacccctattatgcaaaacactgtagtttatgtggacagaccgcaactgctttaaatggttatttagggtactcagctcactggtgctgaattacaaggttttccctcctctgttttcctgttctgtgacctcaggtttgtaatggacacaaagagttgtgttggcgtttagtgcctggggcagtgccaccaacatggagagctgtcatgatatctttactcctttgatccctttcctccagcctaaagaagggagggaaagaagagggggccaatatgctactttgatctctaattctctgtggacaaccgcttttctccatctctttttcagaacatacctactgactcccttggggctagtttggtgaattgcagaatttcagcattagaagaaactgtagagatttcacattcagctctctcattttatagattcacaatgattaaaatgact

SEQ ID NO: 603162 - DNA, 640 bp, Homo sapiens
cattagcatagcacttcagagtttatgaaatccctttcaaaatatggtcacctttaattgatgccttggtggtaggtgacggaactttttatgttcacttataccacaagaaaacttttctcatatctttaatcaacttcttcattctgtttttactaattccaatagtaaagtaagagctgatacccctattatgcaaaacactgtagtttatgtggacagaccgcaactgctttaaatggttatttagggtactcagctcactggtgctgaattacaaggtttyccctcctctgttttcctgttctgtgacctcaggtttgtaatggacacaaagagttgtgttggcgtttagtgcctggggcagtgccaccaacatggagagctgtcatgatatctttactcctttgatccctttcctccagcctaaagaagggagggaaagaagagggggccaatatgctactttgatctctaattctctgtggacaaccgcttttctccatctctttttcagaacatacctactgactcccttggggctagtttggtgaattgcagaatttcagcattagaagaaactgtagagatttcacattcagctctctcattttatagattcacaatgattaaaatgact

SEQ ID NO: 603163 - DNA, 617 bp, Homo sapiens
taactgaaaaaatatatagaaatatagaaacttttttagaatgtagtacataattgtgaatcttcaaacaataaatcccataaatattttttaaaatattgaagaaattttactgagcactatttctagaattgtagaattcttctgttcacttttataagaaatgactcccaaaagaaaaatagtaaaaaaattctaaatatatgttcatgtttttaatcctgaaatccagaaattttgggagccctaagttttaaaaaattaatttggtatcaaaattgaccagaactgacakgaagttatttatagtctttatttatttgagttattatgaatattcatttatttcactacagaaatgttaatgtgttcaatgacgatcaagccccaggctctactgagcattctacataatgtacagtatattgcatttaaaattttgcaaactcctgaattacaaaatacatttggctccatgtttgaggtaagggtttgtggacctgtcgatggattatatttctgaagtgggttatagttttttggaatctaaagagaatacatcacattcagaaaaaaaactgaggattgttcactgaataatattttttaaatggagc

SEQ ID NO: 603164 - DNA, 446 bp, Homo sapiens
atgaaccacagtcaatctcaaatcctgaaaacaggacactctcctggcactacctcccgaaaaagagctacttgttcgaggggaaaaaaataactctgcaattatccaacacaagacaacttcttgaatccagctcacctaagctatttttttttcctactctgagagcaaaatgaatgctgcaagcagtcagagtactaatggtcttcccccagccccccattktttcccttcctccccccttgaaacctgaagcaagggactggagagacttcaggagcctctttacgctatcacttcacaggctagaaggtgacagcttcgccagggactaatgcagtccgacataattgaatgtggcctggagcaaagcagctgcctgcagccactcttgattgtagctgtcatcaggtagagcctgctgcaggaaaatacattccagtgga

SEQ ID NO: 603165 - DNA, 538 bp, Homo sapiens
tgaccccatataccatgtactcaaacttaaagaaaaagatatggaaaattgaactattatctgctgaattctaacagcagtatagataataaaactggattttttttgaattctaaaatatcccctttaaggtccatataaytgagatatgctaccatatctcttaaatgtcttgaggtagctactgatctctctaatacatgaagcaaatttaggagaacttagattatttattttttccctaatagaagggaaagtaatatttattagttcactgtgtgtgtcttaggcattttcatgttttattttctttgatattctcaccagcccttcaatgtaatctatgctgcttgacaatattaaactagaagttagatagtattaagttctcagttacaaattcaagatttcccatctttgctgttcatagagaatcaatagtatctatgggctgacctatttaaagaacagactctacataattataggattttactgtagaagtaaattgctgcgaacacgcgtattctaatatttt

SEQ ID NO: 603166 - DNA, 620 bp, Homo sapiens
gtccttatagcagcataagaacagactaatacaatgtcattagcaagataaagaatttccataattggaacacaagaagcaccattccccaagctctatttagttacatttctgcccaactgtcagacttcagctgttccttgcctcactccattgttgtgattttaagaatgcagaatttttagcttcctcttccttagtttacttgtatcttyatataacataattcatatcatacagcacatataatatatatttctattaagtacaaactttcaaaaaacgtaaccacatatttttatctttaccatatttgaatacattttatttctcattaaaattcttgattttcctcttttagtatcataaaattccttttttaaaaaaatattgtttttcatctgcacaagatgaggatgccctctctcaacacttctattcattatagtattggaagttctggccagggcactcagacaagagaaagaaataaagtttattcaaataggaagagaggaagtcaaattttctcgtttgcagatgacctgattgtatatttagaaaaccccatcgtctcagtccaaaactgataagcaacttcagcaaagtagcaggataca

SEQ ID NO: 603167 - DNA, 588 bp, Homo sapiens
gctcttaaaggccgagccgtatacaaagtaagtaactttaaagatgagaaacctatgtaacaaggtaagacatcgatcacaggacaaagataagggtgctgagackaaaggagaatatatttcctttggaatgtgagatggagtcagtacacttaataagttgtgctctttatctgcttttgtaatagtaaagtgtatgtgtagtaaagtgtaatttgtaatagtaaagtgtatgtatgatcgggtattgttatcctcccagggtaattcagtacatggtcaccatttcatatagcattgctaggtatatgtgtctgtttgtgtgaaagctgttagtattaatattagtattattttagttttgcctccctgaaggaatgtgataagttccgagcccacaaaatacacagggagcagttacagcaaaatacttctcgttacaagacattattccattcacccagtaattatctattcaatcctaatgtgtggcaggctctacaccaagtgtgacagatagtgaatcaaactaaacaaaaaaaatccctgttttagtacagcttattaccttatggagtttggtaatta

SEQ ID NO: 603168 - DNA, 509 bp, Homo sapiens
taggctgagttattacttactattctagagctaagaaaaccctaacagaagttaagtgacctgagcaatcacttacctgattagtcatggatccaggatttgaacagaggcaagtgggcccaagaggccatgctcttgaaataatggcaatgaatarattgccattattctctgggtgagaaaaatggtccattgatcccaatgttaaaacactgagagtaaggcaagtagtattttatgtgaaaacatcattgtctttattttattgtgcttaaaaaatccctcataaccagattcccattatctagatttatgattttgatctattttacttgtatctctagtttatgttactacttggtgtagtccatatcataaattttccactcacaaaggtgatttatttatcctaaaaatatcttctttgaatttcatggttttggtcctgcatgtaaaatttagggatttggtgaaaaaatctaattgatcttattcatggcttttatata

SEQ ID NO: 603169 - DNA, 573 bp, Homo sapiens
gtgctgatgaagggataatggtggtgatggtgatggtgataatgatggtggtagttgtgctggaggtggtggtggtgatgtggtagtggtggtaatgacggtggtggtgatgtggttgtggttgtggtgtttttggtcatggtgagggtggtggtggcaatgctgttggttttggtggtgactttcagagtaaaagtaaaaagtgtgtcctgtttctttttggctatgatctttcagtcatgacataaacaagaaagaacaaataaaattcgtgaccagaatcaggggagattcatatttatttaggtcaattacaagcaattatatgcaatctaaagcagagtctaacaagtatattggagttggggctgggatttggttcaatatagaattaattaattatgatttatctgacttcctgctgcttcagtggaaattccttggatagcctgtgtagtgaagaagtaagccttccaatgtctacaaatagaaaatagcaagatagacaaacacacamacacacacacacaagcaggtacacccgcacatatacacatgcatgcccatattcac

SEQ ID NO: 603170 - DNA, 660 bp, Homo sapiens
ctatctatctatctatctatctatctatctatctatctrtctgtctatctatcatcatctctgtctgtctgtcgatcgatcgatctatctatctctatctatcatctatctatctatcatctatctatcatctaactcacatatcttctcccagtctagcacttacctttttactgtattaattttttctttttgataatcaactattcttaattataataaagtccaatttatgaaccttttgtgattagtgcttttgtgtccttttaaacaaatcttttactctctcaaggttctgaacatattctcttatgttttcttctaaagggtcatattttagccttcatattgagcttataagatttctcaagctaaattgttttctaaattttttttttcaaagagaaaacgtctctctctgtcatccaggctggagtgcagtggtgcgatcatagtgcactacagccttgaactcctggactcaagtgatcctccctcccccgtctcccaagtagctaggactacaggtgcatatcaccatgtccacctggccaattaaaaacaatttttttaaaaaaagacggggtcttgctacattgcccaggctgatctcgaattcctggcctcctgcctcagcctcccaaagtgctaggattacag

SEQ ID NO: 603171 - DNA, 587 bp, Homo sapiens
aaagttcaaatccattcagtaggtcagttaaaattatctcaacgtggtctcaatttacatcttctaccaaaatcttattaattctgttacataaacttatactttgagagattaatttgttgtgaattaaaattttatgtgcacatgacttttctctctckattcattcctggaatgtcttccatgacctgtttatttattttagatttcctttttttctttttctttttttgagacaggatcttgctctgttgcccaggctggagtgcaatggtgcgatcacggctcactgcaacctctgcctcccatgctcaagtgatcctcccgcctcagcctcccgagtagctggtactacaggtatgcaccaccatgcccagataatttttgtattttttgtggagaccagtttctccatgtttcccaggcttgttttgaactcctgagcgcaagtgatctgcctgtcttggcctcccaaagtgctgggattatagatgtgagtcactgtgcctggctatttgagtttttcttatttcaaattttattttctgttgtgaagtcacccagggctactcaggccacagagatct

SEQ ID NO: 603172 - DNA, 655 bp, Homo sapiens
atttaggatccttcttggttttgaccctgacaacctgagaaaaaggatcagctgttttgamagttcactaagacttcagaaagaaaaagtattgagaaaatctttaaataattttgggatccatttttggtgaaccagttggctaaatcaatgtttaagaggtagaccaatgagaggaattggtttcattgattgattgattatgtgatgcttgaaggttgagagaattgatttagaaaataaagtacatataagtgagagaagtattacattgcatatactggatgagaaatgaactcatatgaagaaaattctaactaaaggtgctaggttgattaccatcccactggttctgcctgttaattttttaaacaataaaaatttaattcttcaaatcacatttcaattttgtcatcatggttacattataggatacttgataaatgaagagaataaacatttttgcagctgataacaaacataactcaaacataggtcacatagtctagcctctgattcaaggaactagagctgagaagtgactcatgtataagaagtcacatcctagttttcctgttgttggtggaaatgtgccctgactgtctcacaaggatgttggagagactcaaaggaaggaaatgcctttgaaaactgt

SEQ ID NO: 603173 - DNA, 608 bp, Homo sapiens
ggaccttgttgtccatatcactatcaccatttttgtcaaagccattcaacaaatctctagtaagttccaaactttgccacatctttctgtcttctgagccatccaagtctctaggaagttccaaattttcctacatttccctatcttcttctaagccctccaaactattataacctctgcctgttacccagttccaaagtcgcttccacatttttggatatcattacaacagcaccccactcctggtaccaatttaccatattagtctgtactcacactactaataaaggcatagcagagattgggtaatttataaaggaaagaggtttaattgattcagttccacatggttagagaggcctcacaatcatggcagacggtaaatgaggagcaaagtcaagtcttatatggtggtaggcaagacagcatgtgcagatcttttataaaactatcagatctcatgagattaactcawtgtcatgagaacagcatgggaaagaccctctcccattattcaattaactcccaccagttcatgacacttgggaattacgggagctacaattcaagataagatttgggtgaggacacagctaaaacatcagact

SEQ ID NO: 603174 - DNA, 681 bp, Homo sapiens
ttatttatttatttatttatttatttattatcagaaatgagtgttagatgttgtcacatgcttttgtctgcatttattgaggggaccgtggcatttttaatcattagtcttatattaggtaaattacattgatagaygttttttaaaaaaatttgaatgaatcttgagttttcaggacaaaacccacttaaaggggatatattttctttttactgtgttgaatttagttttctagtatttagttaaaagttttgtatttgtagtcattaggaatattggtctgtagttttcctttcttatgcagtttttccagtttggtatagggcaataaccttgtcttaaaatgagttgcagtttcccccttcacttgtattctgaaaggcctttttgaaattggtattatttctttctccaacatgtaatagaatatgtcaataaaactatctgagcctggaggtttctcttttggaaggctttaaactataaattatctttctttaatagacataacaatatccaggttatttaatcttcagtaattttcttatcatttgaggaatttatgtaacgcctctatgttgtcaaatttatgggcataaaattgttcccaatattcactttgtggtacacagaattcctaacacagaatagcccccagtgacaaacggcatataaaatttc

SEQ ID NO: 603175 - DNA, 632 bp, Homo sapiens
aactctgttaaacatttaggtaagaaaaaaataacaattttacacaaatgctttcagaaacccaggaggaagaaacacatcccagtgcattttatgaagtcagcctgatcctgatactaaacttgacacagacatttcaaataaagaaaatgaaaacacgagtcatgttaagttgattttctttccccatcactaacaggaaggcaggagggcctgagtttgcgggtagggagtgcgggctagcttgctggtagggctacaacatcaaacttgtatgcagttcccaactgcacatggaagaaaatgaagcccaatctggccttcaggttactacaagaccttgaaagaagcctgaggtgggtgaagaaatgtagaaaaattaacttacaaggtaaaacacctgattggctgagtaaacattattgtcaaacactttgagaactctatgatttataaaactagtacttacagragagttatttgcaattatgctatgccagcaatggttgattttactggtcatctgaacaatccacatggtggacattgaaaataaataagataattgagtgataattcaatcaggacacaaatggaaaaaatgatgaaactcctgaatagaaacaaaccaa

SEQ ID NO: 603176 - DNA, 632 bp, Homo sapiens
aactctgttaaacatttaggtaagaaaaaaataacaattttacacaaatgctttcagaaacccaggaggaagaaacacatcccagtgcattttatgaagtcagcctgatcctgatactaaacttgacacagacatttcaaataaagaaaatgaaaacacgagtcatgttaagttgattttctttccccatcactaacaggaaggcaggagggcctgagtttgcgggtagggagtgcgggctagcttgctggtagggctacaacatcaaacttgtatgcagttcccaactgcacatggaagaaaatgaagcccaatctggccttcaggttactacaagaccttgaaagaagcctgaggtgggtgaagaaatgtagaaaaattaacttacaaggtaaaacacctgattggctgagtaaacattattgtcaaacactttgagaactctatgatttataaaactagtacttacaggagagttatttgcaattatgctatgccagcaatggttgattttactggtcatctgaacaatccacatggtggacattgaaaataaataagataattgagtgataattmaatcaggacacaaatggaaaaaatgatgaaactcctgaatagaaacaaaccaa

SEQ ID NO: 603177 - DNA, 537 bp, Homo sapiens
cacatttttacgtccaacaataagtataaaacatcacagttttatgaaagctttcagggaagatttgaaagttaagggtgaattcttggaaatatatgccaatttgtatgaaaaaataaatttgctatgaaatttatgcctttttttcttctgctgtgaatttgcatagattttatagaggagtcatatgataaattaacagaagagaatgtaataatcagtattccattttcaataataattacacccttgtccatcttagggaaggttcttgcctgccaaattatttatctttgcatgtatgaaayacagcaatccagtgtgcttaatttcctacagagctttagaaatgaaactgacacaaggcctcttctaccaatgaataaaaaagttttatttgacttttccattttacaagtaggatcagctaatctttgctttacaatataaggtcataaaaatttaaggaattggatcgggttgtaatgcatattggtttttggtaactttataggtgcttctcaatagatctggaac

SEQ ID NO: 603178 - DNA, 452 bp, Homo sapiens
aaagccctttcactgcatatttagaacagcaactagtaaaatttgcttttacaaaatggatacacaacaacataagttaaggctatgacttcttaattaaatgaatgaaagctttaattcatttagtgatttacaaatgcatttcttaagtggtgattgctgttaggttttcttgtgtccattgttaatttcatttaaaggtgatgtatctttgcattcaaaaaatgataaattattatcttcaacagaatctaagaacaaaaggcagaagaataagccagtagatagacattttggaagagaaactgaacttaacayaaatagcaagtttcatttaagccaggaagaggaaatcatgctgacaatcaaacttttaagcctccctgatttttttttaatcaagtacctggaatggaaaagatcccatctcaatggttttacatatttcacct

SEQ ID NO: 603179 - DNA, 565 bp, Homo sapiens
ttgaattttgccaaatatttaaagaatatatcataccaattttactcaaactattacaaaaaactgaagaggaaacgataccaccaaacttactttatgaggctagtattaccaggataccaaatctagacaaggacacacacacacacacatgcacgcacacaaacacacagaaaactacagttcaatattactgacaaaggtaagcaataagcctcaaaaaatattagcaaaccagattcaacaacacattaaaaagatcattcatcatcaccaagtgggatttatcagaaggatgaatccacatactcaaatcaataagcatgatacataattaagggaatcaacaaaagcggcatgattatttcaatagatgcaaagcattctataaaagtcaacatttcttcatgctaaaaactctgaacaattaggtataggtaaaacacttygaaataataaagattatttaaaacaaacagaagctcacattataccaaataagaaaaaataaatatcttttctcataatctggaataagacaagggtgcctacttttaccactttt

SEQ ID NO: 603180 - DNA, 552 bp, Homo sapiens
ggaaacaaaaaagccaaaacaatgagattaaaatcttcaatcaaaaagctagagaagtcacaaactgaaaaaaatatttgaaatcacatatatggctgggcacatataatatatataattacacgcctgtaaycccagcactttgggaggccaaagcaggtggatcatgaggtacagaagttcaagaccagcctggccaagatggtgaaaccccatctctactaaaactacaaaaattagccaggcgcagtggcaggtgcctgtaatcccagctactcaggaggctgaggcaggacaatcgcttgaacctgggaggtggaggttgcagtgagccaagactgcgccactgcactccagcctgggcaacagagtgagactccatctcaaaaaaaaaagaaaaaagaaagaaaatcacatatatgatcaagtatttacatctagaaaatataaaggactctcaacactcaataataagaaaacaaacaacccagtgaaaacacttgggcaaagttgaacaaatgccttaccaaacaggatacacagacagcaaat

SEQ ID NO: 603181 - DNA, 561 bp, Homo sapiens
aatgaactatcatgaattgagcactacctctgtttcttatcaacaaaggagactacggaaaagaagagtgactaagatctctgaagaagggaaaagctagatgactgggccacaagaggaaaaaaagcagcaagacaggtacaattgtttctggtccctcaagccagaaggtcctatcattatgtgaatactggaaacgggtggactccacctgtcctgagtggggaattcttccagtgcagcactggctgataaggagtgatttccaagtagcattgattgtgttctttaaaagctaggaattgataaagcagcagtgygtgggaaatgagatttaataatctggatctcagctcttaggaacagttgctctcttagagcagcaggccgcctgtcaatctcgtattctgaaggtcctgagtttgaacatcagacaaggtacagcttttgccgctctttccgttaagggaaatgaaataggtgtgataaataatggaacacaaatgctatgagataatgatttcaagacagtccaaatattagcttaaaatttaaaaatga

SEQ ID NO: 603182 - DNA, 561 bp, Homo sapiens
aatgaactatcatgaattgagcactacctctgtttcttatcaacaaaggagactacggaaaagaagagtgactaagatctctgaagaagggaaaagctagatgactgggccacaagaggaaaaaaagcagcaagacaggtacaattgtttctggtccctcaagccagaaggtcctatcattatgtgaatactggaaacgggtggactccacctgtcctgagtggggaattcttccagtgcagcactggctgataaggagtgatttccaagtagcattgattgtgttctttaaaagctaggaattgataaagcagcagtgcgtgggaaatgagatttaataatctggatctcagctcttaggaacagttgctctcttagagcagcaggccrcctgtcaatctcgtattctgaaggtcctgagtttgaacatcagacaaggtacagcttttgccgctctttccgttaagggaaatgaaataggtgtgataaataatggaacacaaatgctatgagataatgatttcaagacagtccaaatattagcttaaaatttaaaaatga

SEQ ID NO: 603183 - DNA, 561 bp, Homo sapiens
aatgaactatcatgaattgagcactacctctgtttcttatcaacaaaggagactacggaaaagaagagtgactaagatctctgaagaagggaaaagctagatgactgggccacaagaggaaaaaaagcagcaagacaggtacaattgtttctggtccctcaagccagaaggtcctatcattatgtgaatactggaaacgggtggactccacctgtcctgagtggggaattcttccagtgcagcactggctgataaggagtgatttccaagtagcattgattgtgttctttaaaagctaggaattgataaagcagcagtgcgtgggaaatgagatttaataatctggatctcagctcttaggaacagttgctctcttagagcagcaggccgcctgtcaatctcgtattctgaaggtcctgagtttgaacatcagacaaggtacagcttttgccgctctttccgttaagggaaatgaaataggtgtgataaataatgkaacacaaatgctatgagataatgatttcaagacagtccaaatattagcttaaaatttaaaaatga

SEQ ID NO: 603184 - DNA, 409 bp, Homo sapiens
ttaagcccaaaaagtaagtaaggaagaggtttggaattagatatttgttgtatgaatgartgggctaaagtgcaaaagaacgggcagaataactgagctggtacagagggaaaaaatcacatttaaaatctaaaaatatctgcttcttagttcaggctttcccacttagcagctttggcaccttaggaacacttaacttatctgagcctctgttacttctaaaaagtgcatgaagtgcagactaagacatagtttttttggcaaaattcagtcagactacatcaagtaaactccctaagtctcctagtataattcatggcacaaaaaattggggaaaaaacagggaggatatgattataagttcagtttatgttttttgttgagtgaatgtctccagtcatatagatgc

SEQ ID NO: 603185 - DNA, 409 bp, Homo sapiens
ttaagcccaaaaagtaagtaaggaagaggtttggaattagatatttgttgtatgaatgaatgrgctaaagtgcaaaagaacgggcagaataactgagctggtacagagggaaaaaatcacatttaaaatctaaaaatatctgcttcttagttcaggctttcccacttagcagctttggcaccttaggaacacttaacttatctgagcctctgttacttctaaaaagtgcatgaagtgcagactaagacatagtttttttggcaaaattcagtcagactacatcaagtaaactccctaagtctcctagtataattcatggcacaaaaaattggggaaaaaacagggaggatatgattataagttcagtttatgttttttgttgagtgaatgtctccagtcatatagatgc

SEQ ID NO: 603186 - DNA, 409 bp, Homo sapiens
ttaagcccaaaaagtaagtaaggaagaggtttggaattagatatttgttgtatgaatgaatgggctaaagtgcaaaagaacgggcagaataactgagctggtacagagggaaaaaatcacatttaaaatctaaaaatatctgcttcttagttcaggctttcccacttagcagctttggcaccttaggaacacttaacttatctgagcctctrttacttctaaaaagtgcatgaagtgcagactaagacatagtttttttggcaaaattcagtcagactacatcaagtaaactccctaagtctcctagtataattcatggcacaaaaaattggggaaaaaacagggaggatatgattataagttcagtttatgttttttgttgagtgaatgtctccagtcatatagatgc

SEQ ID NO: 603187 - DNA, 409 bp, Homo sapiens
ttaagcccaaaaagtaagtaaggaagaggtttggaattagatatttgttgtatgaatgaatgggctaaagtgcaaaagaacgggcagaataactgagctggtacagagggaaaaaatcacatttaaaatctaaaaatatctgcttcttagttcaggctttcccacttagcagctttggcaccttaggaacacttaacttatctgagcctctgttacttctaaaaagtgcatraagtgcagactaagacatagtttttttggcaaaattcagtcagactacatcaagtaaactccctaagtctcctagtataattcatggcacaaaaaattggggaaaaaacagggaggatatgattataagttcagtttatgttttttgttgagtgaatgtctccagtcatatagatgc

SEQ ID NO: 603188 - DNA, 478 bp, Homo sapiens
agcaatgtattttcccacagttctggagttgagaaatctgacgtcaaggtgtcagcgggtttggtttttgctgaggcctctccttggcttgcagatggctgccttcttgctgtgtgttcacgtgattgtctcttagtgtgtgcatttgtctggtgtctctgtctgtctttttaaaaggacaccagatatattggattagaactcatcttattgacctaatttttacttaattgcttctttaaatatcttgtctccaaatgggttgcattctgtggtactcagatttagggattcaacatatgaattggggggaacacaaatcagccaatatcacatgaattctttttctagcaaagaaagcatccattctattaggagtcttcctttacttaatagaaaaccagcagaacagtactatgtttatacaaatrtaaattaatttacttattcctgtatgagagcactcatatgtgtgtgc

SEQ ID NO: 603189 - DNA, 556 bp, Homo sapiens
tgttggccatctgcatatcttctttgaagaaatgtctgttcaaatcctttgcccatttttaaatcagattatgcatgttttgctattaaattgtaggaatttcttatatattttgaaaattaatccattatcacatatatggattgcaaatattttctctcattttatagattgccttttcattctgttgattgtatccttagctgtgtagaaktttgcttggtttttgtttttcttgtttgtttttagtttgatatagtccaacttgcctattttttgcttctgtttcctgtgcttttgatgtcatattcaaaaagtgattgcaaatagtaatatcaaaatgatattacctcactcttgttaggatgttgattttcaaaaaaccaaaagataaatggtgaggatgtagggaatttggaacctctatacactgtacattgagaatgtacaatgatacagcaactatgaaaacagtatggaggttcctccaaaagctaaaaataatagaattaccaggcgatccagcactcttatttctagatacatatccaaaaca

SEQ ID NO: 603190 - DNA, 439 bp, Homo sapiens
cctcctttttttttttttttttttttttttaaattaagagacagggtgtctcaatgttgcccaagctggagttcagtggctagtggctattcacaagaacgatcatcgcacactacctcaaactcctgggatcaagcaatcctcctgcctcagctttccaagtcrctgggacaataagtgtgtaccacagcatgtcagctctctctctccttcttgacctaaagcctagcataaaattagctaagtagaatgtttccaaagatgcctgcatcagtatctcccatcccacataatttctgtttgattttgccattcacccataaaatggtgggatctacctcccctccttgcaaatttgagctggccctctgatcctgtctaagatctgaagccagatattaaggtacttcattaatttccatgtttgtcctctatgcaa

SEQ ID NO: 603191 - DNA, 493 bp, Homo sapiens
tttcaggttctaggtggtgttaagcctgcagatgcaccgaagtcaagaattaacgttcaygaacctccgcctagatttcagaagatgtatgaaaatgcctggaaatccaggcaaaagtttgctgcgggggggaaggggggccctcatggataacctctggtagggcagtgtcaaagggaaatatggggttggagcccccacacagagtccccactggggtactgccaagcagagctgtgagaaaagggccaccatcctccagaccccagaatggtagatccactgacagcttgcactgtgtgcctggaaaagctgcagacactcaatgcagccagaaggggggctgtaccctgcaaagtcacaggggcggggctgcccaagaccctgggaacccacttcttgcatcacctagatgtgacacatggagtcaaaggaggtcattttggagctttaagatttgcctgctgggttttggacttgcatggggcctgta

SEQ ID NO: 603192 - DNA, 493 bp, Homo sapiens
tttcaggttctaggtggtgttaagcctgcagatgcaccgaagtcaagaattaacgttcacgaacctccgcctasatttcagaagatgtatgaaaatgcctggaaatccaggcaaaagtttgctgcgggggggaaggggggccctcatggataacctctggtagggcagtgtcaaagggaaatatggggttggagcccccacacagagtccccactggggtactgccaagcagagctgtgagaaaagggccaccatcctccagaccccagaatggtagatccactgacagcttgcactgtgtgcctggaaaagctgcagacactcaatgcagccagaaggggggctgtaccctgcaaagtcacaggggcggggctgcccaagaccctgggaacccacttcttgcatcacctagatgtgacacatggagtcaaaggaggtcattttggagctttaagatttgcctgctgggttttggacttgcatggggcctgta

SEQ ID NO: 603193 - DNA, 493 bp, Homo sapiens
tttcaggttctaggtggtgttaagcctgcagatgcaccgaagtcaagaattaacgttcacgaacctccgcctagatttcagaagatgtatgaaaatgcctggaaatccaggcaaaagtttgctgcgggggggaaggggggccctcatggataacctctggtagggcagtgtcaaagggaaatatggggttggagcycccacacagagtccccactggggtactgccaagcagagctgtgagaaaagggccaccatcctccagaccccagaatggtagatccactgacagcttgcactgtgtgcctggaaaagctgcagacactcaatgcagccagaaggggggctgtaccctgcaaagtcacaggggcggggctgcccaagaccctgggaacccacttcttgcatcacctagatgtgacacatggagtcaaaggaggtcattttggagctttaagatttgcctgctgggttttggacttgcatggggcctgta

SEQ ID NO: 603194 - DNA, 493 bp, Homo sapiens
tttcaggttctaggtggtgttaagcctgcagatgcaccgaagtcaagaattaacgttcacgaacctccgcctagatttcagaagatgtatgaaaatgcctggaaatccaggcaaaagtttgctgcgggggggaaggggggccctcatggataacctctggtagggcagtgtcaaagggaaatatggggttggagcccccacacagagtccccactggggtactgccaagcagagctgtgagaaaagggccaccatcctccagaccccagaatggtagatccactgacagcttgcactgtgtgcctggaaaagctgcagacactcaatgcagccagaaggggggctgtaccctgcaaagycacaggggcggggctgcccaagaccctgggaacccacttcttgcatcacctagatgtgacacatggagtcaaaggaggtcattttggagctttaagatttgcctgctgggttttggacttgcatggggcctgta

SEQ ID NO: 603195 - DNA, 289 bp, Homo sapiens
gggagttcccctgcacgtgctctctcctgcccaccatgtctgactaaattttgtatttttactagagacggggtttcactatgttggccaggctggcctccaactcctgatctcgtgatccgtccaccccgacctcccaaagtgctaggattataggcataagccaccacacccggcctcttttttttctttttctttttttatctggagactgagttwtgcactcgttgcccaggctggagtgcaatggtgcgatctcagctcactgcagtctccacctcagcaggag

SEQ ID NO: 603196 - DNA, 524 bp, Homo sapiens
tttgagagattttattgatattcacttctatttttttaytgcattctgttctgaaagtgtgcttggtatgatatctaattctttgaatttattgagacttgctttatgactgaccatgtggtcaatattagaacatgttctgtgtgaaggtcagaagaatgtatattctgtggttgctgggtggagtgttctttggatgcctattagatacatttggtctagtgtcaagtttaagtcaagtgtcaaagttaagtttctttgttagagttctgctttgataatctgtctaatgctgtcactggggtgttgatgtcttccactatgaatgtgtggctaaataagtcttttggtagataaagaggaacttgttttatcaatctgggtgctccaatgttgggtgcatatatatttaagacagttagttatgtcttcttgttggattatatcctttatcattacgtaatgcctttcttaattattattggttttaagtctgttttatctgatacaagaatagtgattct

SEQ ID NO: 603197 - DNA, 616 bp, Homo sapiens
cactaaaatgctaattagacaaaaacaggaggtaaagaaatagccaataatctattgcctgagagcatagtgggagggacaatgatggggatataaacccaggcattcaagctggcaatggctaccctctttgagtcccctccctttgtatgggagctctgtcttcwccctattaaatcttgcaactgcaaaaaaaaaaaaaaaagaaagaaaatgaggcttctgagtgatggtggagaacagtggctggaagaatagaacatctacatgtatcagtgatttcttctgcattctctatatctccctggagcccttctgatatgaattaatctctctccctccctctctctctctctctccctcactctctctcctctctggcacagtttttttgttccaagaatttaagttactattccctcatcttttagaaatgtaaagtggtacctggtgaggcctgttctgcatcctagaaggaagcaagcagcacactgcatcttagaaggaagcaagcagcacactgcttcccactgtgacccacagcaggtcatttaggccatgctccccatctgacatttgtacctggagtagttgttgtgtcttcatgtgacaggca

SEQ ID NO: 603198 - DNA, 512 bp, Homo sapiens
agtggtaaattagatgtgtaaataggcacattaaaatagttatcgtaactatattccacatgtttaagaagatagaaaatggatttttcaattcaataagtgaaaaaaaagtagagaaaagattgaacacgttatatgatgacactaaagacataaaaaagatccaaacaaacttcaacagatgaaaaatacaatgtctaagataarataataatggataggactaaaatcagattaaatactgcagaagaaaagattagtgaacttgaagacacagcaatcaaaactattcaaaatgtgacaaagagagaaagattgaaaaaaaataaagagagcattattgaactgtgggatagcattaagtagcctaatactgtggtttggctttgtgtccccaaccaaatctaatcttgaattgtaatccccatgtgtcaagggagagacctagtgggaggtgattggatcatgggggtggttttccccatgctgttcttgtgatactgagtgaattc

SEQ ID NO: 603199 - DNA, 487 bp, Homo sapiens
gaattcataaattatacgagtggtaaattagatgtgtaaataggcacattaaaatagttatcgtaactatattccacatgtttaagaagatagaaaatggatttttcaattcaataagtgaaaaaaaagtagagaaaagattgaacacgttatatgatgacactaaagacataaaaaagatccaaacaaacttcaacagatgaaaaatacaatgtctaagataaaataataatggataggactaaaatcagattaaatactgcagaagaaaagattagtgaacttgaagacacagcaatcaaaactattcaaaatgtgacaaagagagaaagaytgaaaaaaaataaagagagcattattgaactgtgggatagcattaagtagcctaatactgtggtttggctttgtgtccccaaccaaatctaatcttgaattgtaatccccatgtgtcaagggagagacctagtgggaggtgattggatcatgg

SEQ ID NO: 603200 - DNA, 567 bp, Homo sapiens
tttaaggactgttgagattgtgaatatgagttttccaattagcataaacacaggtgtattttaaacgcttcagtccccagcagttctgtcactataggctctacctttgaagctttgttttgatcatttttttggctccaaaaagaattttcttttttatgctgttattctatattttgcttctttgatgtggggctcgactgccatgttgcagaagcasactttccaagcttaagaaaaaaacaaacaattctcaccacctacatatctggcttcattgaacagtttctttccttccaattaatccaaagagagttaagatgcattgcttcctctattcatcaaggtgattgtcaattgaaaaggggaaaaaacagcaaatgaagctaacactcttcagaaactctcagcaaagaaaaaagaaagaaaaaaagaaaagaataaaagccaggaagagacgaaactctttagaaggcatctagaatttagaatgcattttttaattatcctggtagaatgtccaatgttttaatgtatatttaagacgaaagaataaaaaaacattgt

SEQ ID NO: 603201 - DNA, 419 bp, Homo sapiens
aaagtcctggttgaggtcaattggcagcaaagtrgacttgaaaacctgctttttgttgtaaactactggaaaacgcagaaattgaatattcactttgctgactttatcattcactttggacatttctatttagaagaagtgcataagaaccacactaaaaatacgaagtctttttaaacgctcattggcttctgacaaatgcaagcaatgtcaaacctgtattttaagatgttatctatttaaacattctttccccttttcattctaattgttttcgtatagtttaaattattgcagaagtttcactgaatctctgacagcccaaaccagctgtgtttgctggtaagggtgaagatagaaacaatatttactagcaaaatcaaaatcagactttagagggaaaaaatcaatcggcagca

SEQ ID NO: 603202 - DNA, 552 bp, Homo sapiens
acctaattgtggctaatgagaaataagcaaaagcttgttatgtggattctgagaatacttttatcttcctgatataaataatacactttgctgttctctcctattcccagacttcttccttccttcagtgtgcacctgatgcctggggttaagacagccaccagagggaaaggctgagagaatttcaraaccattgagatatggaaccattgagaatttcagaaccattgagatatggaaccattgagaatttcagaaccattgagatatggaatttactctataatatagagtaggaatatactctataatagcaacttcccacaagacatcttgttatatgagaaaaataaatctctatttgttaaggccactgaaaagtaggctcactctgtcacccaggctggagtgcagtggtacagtcttggctcactctgcctcctgggttcaagcgattcttttgcctcagcctctcaagtagctgggactacaggtgcccaccaccacgcctagctaattttttgtatttttagtagagacagggtttcaccg

SEQ ID NO: 603203 - DNA, 591 bp, Homo sapiens
aagaataggcctttagtcatagtttgttcacttggtagcacaagttggttgtggatgcaagagtgtggccaaagtcaagaaaagcttccatgagaatcgcttacttatgtgggatttacaaataaagacataataaaaaatgcagtaaagccataggttttatggctggctttggagaaaaggggttctagggkttctgtctactatgacccactgttgtggaagagagattctagtttccatggccagccttatgggagaatagaactgagagacaagaggactggagaaggtcagagaaaaatgtttgtttctgaggctgcagctgaggctttcatttgggggttttgttttctgatccccagaactatcctacactgtaattgcctatttagttgtctgagttccctagttagacgctgtgctccttgaaggctgtgagtagtttttaaatactattttactcaattgcaattgcttaatatctggcacacagcaggccctctacaaatatctatgcatgaaagaatataattttcatcactcattccattctgaaatgcacacacacacatacacacactgatgaat

SEQ ID NO: 603204 - DNA, 591 bp, Homo sapiens
aagaataggcctttagtcatagtttgttcacttggtagcacaagttggttgtggatgcaagagtgtggccaaagtcaagaaaagcttccatgagaatcgcttacttatgtgggatttacaaataaagacataataaaaaatgcagtaaagccataggttttatggctggctttggagaaaaggggttctagggtttctgtctactatgacccactgttgtggaagagagattctagtttccatggccagccttatgggagaatagaactragagacaagaggactggagaaggtcagagaaaaatgtttgtttctgaggctgcagctgaggctttcatttgggggttttgttttctgatccccagaactatcctacactgtaattgcctatttagttgtctgagttccctagttagacgctgtgctccttgaaggctgtgagtagtttttaaatactattttactcaattgcaattgcttaatatctggcacacagcaggccctctacaaatatctatgcatgaaagaatataattttcatcactcattccattctgaaatgcacacacacacatacacacactgatgaat

SEQ ID NO: 603205 - DNA, 591 bp, Homo sapiens
aagaataggcctttagtcatagtttgttcacttggtagcacaagttggttgtggatgcaagagtgtggccaaagtcaagaaaagcttccatgagaatcgcttacttatgtgggatttacaaataaagacataataaaaaatgcagtaaagccataggttttatggctggctttggagaaaaggggttctagggtttctgtctactatgacccactgttgtggaagagagattctagtttccatggccagccttatgggagaatagaactgagagacaagaggactggagaaggtcagagaaaaatgtttgtttctgaggctgcagctgaggctttcatttgggggttttgttttctgatccccagaactatcctacactgtaattgcctatttasttgtctgagttccctagttagacgctgtgctccttgaaggctgtgagtagtttttaaatactattttactcaattgcaattgcttaatatctggcacacagcaggccctctacaaatatctatgcatgaaagaatataattttcatcactcattccattctgaaatgcacacacacacatacacacactgatgaat

SEQ ID NO: 603206 - DNA, 591 bp, Homo sapiens
aagaataggcctttagtcatagtttgttcacttggtagcacaagttggttgtggatgcaagagtgtggccaaagtcaagaaaagcttccatgagaatcgcttacttatgtgggatttacaaataaagacataataaaaaatgcagtaaagccataggttttatggctggctttggagaaaaggggttctagggtttctgtctactatgacccactgttgtggaagagagattctagtttccatggccagccttatgggagaatagaactgagagacaagaggactggagaaggtcagagaaaaatgtttgtttctgaggctgcagctgaggctttcatttgggggttttgttttctgatccccagaactatcctacactgtaattgcctatttagttgtctgagttccctagttagacgctgtgctccttgaaggctgtgagtagtttttaaatactattttactcaattgcaattgcttaatatctggcacacagcaggccctctacaaatatctatgcaygaaagaatataattttcatcactcattccattctgaaatgcacacacacacatacacacactgatgaat

SEQ ID NO: 603207 - DNA, 606 bp, Homo sapiens
aagtgacttttctctggttatttatgcaatataggtgacaatcttatttggttttctatttgaatattctgtaaaagctgaataacaactccaaaatacgacacaaacatgcagatacatatacaaacacttactgtattttattcaattagtaagtgtgttcacttaaattcacacacaactatacctataggcatgcccacatatacacacacacacatacacacacacatacactgtttctcattcttatttcctttatctgtacttggtttagttatggctgttttttgcctctaacacttttattttaaaaagaaaattaaaataggttattgggatcaaagatatargctttttgttactttgaatgatttttgtaattcagaatatgcatttgttatttcagttcttatttttataattattggtagagttcatctaattaccctataaatccctggagaaaggtggcccccatatactttatttcttggttatatgtataaaaatcagtaggcaatgtaaaaatgtttttgtgtgaatttatgtgagttataattctaattctatgtcaatattcacctcagattaccacatgaaagc

SEQ ID NO: 603208 - DNA, 606 bp, Homo sapiens
aagtgacttttctctggttatttatgcaatataggtgacaatcttatttggttttctatttgaatattctgtaaaagctgaataacaactccaaaatacgacacaaacatgcagatacatatacaaacacttactgtattttattcaattagtaagtgtgttcacttaaattcacacacaactatacctataggcatgcccacatatacacacacacacatacacacacacatacactgtttctcattcttatttcctttatctgtacttggtttagttatggctgttttttgcctctaacacttttattttaaaaagaaaattaaaataggttattgggatcaaagatataggctttttgttactttgaatgatttttgtaattcagaatatgcayttgttatttcagttcttatttttataattattggtagagttcatctaattaccctataaatccctggagaaaggtggcccccatatactttatttcttggttatatgtataaaaatcagtaggcaatgtaaaaatgtttttgtgtgaatttatgtgagttataattctaattctatgtcaatattcacctcagattaccacatgaaagc

SEQ ID NO: 603209 - DNA, 606 bp, Homo sapiens
aagtgacttttctctggttatttatgcaatataggtgacaatcttatttggttttctatttgaatattctgtaaaagctgaataacaactccaaaatacgacacaaacatgcagatacatatacaaacacttactgtattttattcaattagtaagtgtgttcacttaaattcacacacaactatacctataggcatgcccacatatacacacacacacatacacacacacatacactgtttctcattcttatttcctttatctgtacttggtttagttatggctgttttttgcctctaacacttttattttaaaaagaaaattaaaataggttattgggatcaaagatataggctttttgttactttgaatgatttttgtaattcagaatatgcatttgttatttcagttcttatttttataattattggwagagttcatctaattaccctataaatccctggagaaaggtggcccccatatactttatttcttggttatatgtataaaaatcagtaggcaatgtaaaaatgtttttgtgtgaatttatgtgagttataattctaattctatgtcaatattcacctcagattaccacatgaaagc

SEQ ID NO: 603210 - DNA, 606 bp, Homo sapiens
aagtgacttttctctggttatttatgcaatataggtgacaatcttatttggttttctatttgaatattctgtaaaagctgaataacaactccaaaatacgacacaaacatgcagatacatatacaaacacttactgtattttattcaattagtaagtgtgttcacttaaattcacacacaactatacctataggcatgcccacatatacacacacacacatacacacacacatacactgtttctcattcttatttcctttatctgtacttggtttagttatggctgttttttgcctctaacacttttattttaaaaagaaaattaaaataggttattgggatcaaagatataggctttttgttactttgaatgatttttgtaattcagaatatgcatttgttatttcagttcttatttttataattattggtagagttcatctaattaccctataaatccctggagaaaggtggccmccatatactttatttcttggttatatgtataaaaatcagtaggcaatgtaaaaatgtttttgtgtgaatttatgtgagttataattctaattctatgtcaatattcacctcagattaccacatgaaagc

SEQ ID NO: 603211 - DNA, 630 bp, Homo sapiens
tgtacttggtttagttatggctgttttttgcctctaacacttttattttaaaaagaaaattaaaataggttattgggatcaaagatataggctttttgttactttgaatgatttttgtaattcagaatatgcatttgttatttcagttcttatttttataattattggtagagttcatctaattaccctataaatccctggagaaaggtggcccccatatactttatttcttggttatatgtataaaaatcagtaggcaatgtaaaaatgtttttgtgtgaatttatgtgagttataattctaattctatgtcaatattcacctcagattaccacatgaaagctcagtcaccaactatgcctcatactgaaatacccactgattaaatcagttgacaaccagctcctatcgtacattcaaatcaccaggatcaatagartattttcttattatccagattctcaatccgctgcttctactcacaaacttcttccccacgataaacatacacacacacatgcacacacacatagacatctcccagataaattcttatggccataccaaggtaatcccactgcttccatttattaaataattgaaaatatttaagtgagaaaaatggttgtg

SEQ ID NO: 603212 - DNA, 630 bp, Homo sapiens
tgtacttggtttagttatggctgttttttgcctctaacacttttattttaaaaagaaaattaaaataggttattgggatcaaagatataggctttttgttactttgaatgatttttgtaattcagaatatgcatttgttatttcagttcttatttttataattattggtagagttcatctaattaccctataaatccctggagaaaggtggcccccatatactttatttcttggttatatgtataaaaatcagtaggcaatgtaaaaatgtttttgtgtgaatttatgtgagttataattctaattctatgtcaatattcacctcagattaccacatgaaagctcagtcaccaactatgcctcatactgaaatacccactgattaaatcagttgacaaccagctcctatcgtacattcaaatcaccaggatcaatagaatattttcttattatccagattctcaatccgctgcttctactcacaaacttcttccccacgataaacatacacacacacatgcacacacacatagacatctcccagataaattcttatggccataccaaggtaatcccactgcttccatttattaaataattgaaaayatttaagtgagaaaaatggttgtg

SEQ ID NO: 603213 - DNA, 525 bp, Homo sapiens
gtggtccaccggaggactccctacattcttcctccattacctcactgcctccggtggctgctgggataccggaggactcgggtcccggctcgactcagtcctccagccgcccggggaatacctctagttcttcccggccgccgccgccgccgccgccccgccgcttcctcctccgcctgccggcctccttcgccccgtcccgtccgcgcagcgcgtccggcccgcccgcaggccagcttctctcgggagcccccacccaggcgcatggctccatgaagcaagaggaggaggcagagcgcgagaggtcccgtccgccccagccgcgtctgggccaggakaaaaggtgggaaactcgggctgcgccgcacccttctccccgctgccgggccaggcctccctcggtccgccgccgccttgcccgccgggcctgttctcgccggggcgggcggcggggccgggaagagaccccgcggtcctggggcgagggtccgggggcagcgtgggggaggggtcccgggcggcggg

SEQ ID NO: 603214 - DNA, 525 bp, Homo sapiens
gtggtccaccggaggactccctacattcttcctccattacctcactgcctccggtggctgctgggataccggaggactcgggtcccggctcgactcagtcctccagccgcccggggaatacctctagttcttcccggccgccgccgccgccgccgccccgccgcttcctcctccgcctgccggcctccttcgccccgtcccgtccgcgcagcgcgtccggcccgcccgcaggccagcttctctcgggagcccccacccaggcgcatggctccatgaagcaagaggaggaggcagagcgcgagaggtcccgtccgccccagccgcgtctgggccaggataaaaggtgggaaactcgggctgcgccgcacccttctccccgctgccgggccaggcctccctcggtccgccgccgccttgcccgccgggcctgttctcgccggggcgggcggcggggccgggaagagaccccgcggtcctggggcgagggtccgggggcagcgkgggggaggggtcccgggcggcggg

SEQ ID NO: 603215 - DNA, 364 bp, Homo sapiens
ttcaaaaagctgtgggacaggagggaatggggatggtattcagtggtaccacatccaagcaagtcttgtatggttaaaacaaatcaatataataacatgaaattttacacagaaacctatctgattataaactgtatgcttaccatartcaacactgatgtacattgttttaaaaatacttaatagtgttctttgtttaaccaaataatagaggtattaactagtttcctagtgctgccaaaagaaattgctacaaaatttgtggcttaaaatagtaaaaaaagaaaaaaaaaatctcaattatagaggccagaagaccaaaatcaaggtggaggcagagccatacatcctctgacggctctag

SEQ ID NO: 603216 - DNA, 562 bp, Homo sapiens
ctattataacatagagacaactactttattatctttttagaaacttttgcaactactttagtttcttcctaattttataaattaatctatctcaaaaaacttkgcccaaaagacttagtaatagctgtcaacttcagaaaaactaaaactttaaagatgacttttagaaggaaaatgaaatacagaaataatgtatctcatttgcacttaattaaaaataatatgaattgtcactatttcctatgaaaacatctcatgccaatttcttttattaagcttggatttaaaagataatttagttgaaactggtagaatcttagtaaaattataacaagaaatttttatattatacatataatatagaataatcatatttaattccacttgttagtctattctgattctttagcaggttgattcataatttgccaacttgggtcagaaatattttctattcttagcttttgctgtcagcagagataataataatatagaacctgaacaacaaaggattgtgtattgtttcaatttaattaaagttgattccctgctttaagagaga

SEQ ID NO: 603217 - DNA, 562 bp, Homo sapiens
ctattataacatagagacaactactttattatctttttagaaacttttgcaactactttagtttcttcctaattttataaattaatctatctcaaaaaactttgcccaaaagasttagtaatagctgtcaacttcagaaaaactaaaactttaaagatgacttttagaaggaaaatgaaatacagaaataatgtatctcatttgcacttaattaaaaataatatgaattgtcactatttcctatgaaaacatctcatgccaatttcttttattaagcttggatttaaaagataatttagttgaaactggtagaatcttagtaaaattataacaagaaatttttatattatacatataatatagaataatcatatttaattccacttgttagtctattctgattctttagcaggttgattcataatttgccaacttgggtcagaaatattttctattcttagcttttgctgtcagcagagataataataatatagaacctgaacaacaaaggattgtgtattgtttcaatttaattaaagttgattccctgctttaagagaga

SEQ ID NO: 603218 - DNA, 661 bp, Homo sapiens
caaaggatcacaccagctccctagcaatggatcctaaccaatataaaaattttgaaataacaaataaagaatttaagatatgagttgtaaggaagctcaatgagatacaagagaaagttgaaaactaacataaggaaatcagaaaaataattcaggatattaatgaaaaatttacaaaagagatagagattaaaaaacaaaaaccaaatagaacttctagaaataaaaatttattgaaggaactataaaatatagttgaaacttttagcaaaagactagaccaagcagaagaaataatttcagagcctgaaggccagtcatttgaattaacctagtcagacagaaatacagaaaaaataaatttttaaaaatgaacaaagactttgaaaaatatagaattacataaagttaccaaatatacaatatatagacattcctgagggagaagaaaaaaaattaaaagcttggaaaacctatttgagggaataattcaggaaaacttccctggtcttgcyagagaattagacatccagataggagatgctcagagaacacctggaagatgctttacaagagaaacctcataaaggcatatcgtcatcagactatccaaagtcaatgtgaaggaaaacatcctaaaagcagcaagagagaaatgtct

SEQ ID NO: 603219 - DNA, 524 bp, Homo sapiens
acaagaccagcactacaagaaatgcttaaagttctaaacatggaaatgaatggacaatactcctcatcataaaagcacattaaagtgaaaaactcacagattatataaagcaattacataattgagactaaaaagcaactgggtaacaattatcatgacaggaacaaaacatcacatatcaatattamccttgataataaatggagtaaatgttccacttaaaagatacagattggtgctgggtatgatggcttacacttgtaatctcagaacttcggtaggctgaggcaggagaattgcttgagaccaggagtttgagaccagcatgggcaacagagtgagaccccatctctgtaaaaaattaaaaagagaaattagccaggtgtgatcatgctcacctgtaaagaggctgaggcaggacaatcacttgagcccaggagtttgaggctgcagtgagctataaatgcattatggcactctagcctgggtgacagagtgagactgtctcaaaaaaaaaaaaaaaa

SEQ ID NO: 603220 - DNA, 522 bp, Homo sapiens
taatctacttaaacaaaaatcctgccagccaagaattttgtatcctgctaaactaagctgcataaatgaaggagaaataaagtttttcccatacaacaaatgcaaagggaatttgtcaccacaagaccagcactacaagaaatgcttaaagttctaaacatggaaatgaatggacaatactcctcatcataaaagcacattaaagtgaaaaactcacagattatataaagcaattacataattgagactaaaaagcaactgggtaacaattatcatgacaggaacaaaacatcacatatcaatattaaccttgataataaatggagtaaatgttccacttaaaagatacagattggtgctgggtatgatggcttacacttgtaatctcagaacttcggtaggctgaggcaggagaattgcttgagaccaggagtttgagaccagcrtgggcaacagagtgagaccccatctctgtaaaaaattaaaaagagaaattagccaggtgtgatcatgctcacctgt

SEQ ID NO: 603221 - DNA, 562 bp, Homo sapiens
ccacaccgaaacacattcatcgagggagctcagaatggcttttttattacaagtaagagaaaacacttggatgtagcataaaccaagagaagtgtttttttctctgaayaaagggttccaaatgggcttaaaaaggactagggggactcaggtaatggcatgctctctccctggcttctgcttctccctgtgcatctttgcatctttccctcttttgcacaccagcttcctctgcttcctggtctcttgactacccaagcattaagaatcatgtgtcctaaagatggctgcacagaaatcagaaactctccaatgggatcaattggaaactcctgtggaaatgagtctttctgtctcagatgcccatctctggtccaatcaactaaacttggggagtgggtcccgtggtacaatatggccactgggatagatgcaagatcatgatggtctgggaagaccccctgaaagtgaccactacctaccccaatacttaagccaaacctacttcttgctaagggaaaagtcagcgtagttgaagtgtgtggagagaaaaaaatatcct

SEQ ID NO: 603222 - DNA, 562 bp, Homo sapiens
ccacaccgaaacacattcatcgagggagctcagaatggcttttttattacaagtaagagaaaacacttggatgtagcataaaccaagagaagtgtttttttctctgaacaaagggttccaaatgggcttaaaaaggactagggggactcaggtaatggcatgctctctccctggcttctgcttctccctgtgcatctttgcatctttccctcttttgcacaccagcttcctctgcttcctggtctcttgactacccaagcattaagaatcatgtgtcctaaagayggctgcacagaaatcagaaactctccaatgggatcaattggaaactcctgtggaaatgagtctttctgtctcagatgcccatctctggtccaatcaactaaacttggggagtgggtcccgtggtacaatatggccactgggatagatgcaagatcatgatggtctgggaagaccccctgaaagtgaccactacctaccccaatacttaagccaaacctacttcttgctaagggaaaagtcagcgtagttgaagtgtgtggagagaaaaaaatatcct

SEQ ID NO: 603223 - DNA, 562 bp, Homo sapiens
ccacaccgaaacacattcatcgagggagctcagaatggcttttttattacaagtaagagaaaacacttggatgtagcataaaccaagagaagtgtttttttctctgaacaaagggttccaaatgggcttaaaaaggactagggggactcaggtaatggcatgctctctccctggcttctgcttctccctgtgcatctttgcatctttccctcttttgcacaccagcttcctctgcttcctggtctcttgactacccaagcattaagaatcatgtgtcctaaagatggctgcacagaaatcagaaactctccaatgggatcaattggaaactcctgtggaaatgagtctttctgtctcagatgcccayctctggtccaatcaactaaacttggggagtgggtcccgtggtacaatatggccactgggatagatgcaagatcatgatggtctgggaagaccccctgaaagtgaccactacctaccccaatacttaagccaaacctacttcttgctaagggaaaagtcagcgtagttgaagtgtgtggagagaaaaaaatatcct

SEQ ID NO: 603224 - DNA, 587 bp, Homo sapiens
cacccaggaactgcttgcagacagcacaggaaagggtcagcactgctgggcaaggtgaggtctccagaggatgctctcactggggaaaagggtctcacatgcaactcggcatatggcttttggtggtacttctgtaattgtcaaggtcatagattctcatggggataggaagctggacacatcaggagctctgggcagggctggagggctggacaatgagtctttttccccacaccatctcacatcccttggtaatgactgtggggttaaatggctttcaggatcttttccaggctgtgtaggagatcgttgattagttgcatctggcacagatatsggggaggagagggtaagtatgtgtgctaatgtttgtcatccttggcttaagagggcactgccctgcaggtccatagtgtacccaacaagggggttgcccccagcttcatcatgcacccagtgaaggcaccttcagggacttctgcaagaatcctgtgcttccaccagctgacttcccaggaagcccaagaacaagaaacaagaacagtgtagaagctggcggaacaacaatgtcatttccatttgagatc

SEQ ID NO: 603225 - DNA, 587 bp, Homo sapiens
cacccaggaactgcttgcagacagcacaggaaagggtcagcactgctgggcaaggtgaggtctccagaggatgctctcactggggaaaagggtctcacatgcaactcggcatatggcttttggtggtacttctgtaattgtcaaggtcatagattctcatggggataggaagctggacacatcaggagctctgggcagggctggagggctggacaatgagtctttttccccacaccatctcacatcccttggtaatgactgtggggttaaatggctttcaggatcttttccaggctgtgtaggagatcgttgattagttgcatctggcacagatatgggggaggagagggtaagtatgtgtgctaatgtttgtcatccttggcttaagagggcactgccctgcaggtccatagkgtacccaacaagggggttgcccccagcttcatcatgcacccagtgaaggcaccttcagggacttctgcaagaatcctgtgcttccaccagctgacttcccaggaagcccaagaacaagaaacaagaacagtgtagaagctggcggaacaacaatgtcatttccatttgagatc

SEQ ID NO: 603226 - DNA, 268 bp, Homo sapiens
tgtttcaaaggtcccaaggcaaactttttaataattgtggtcccactcaatagtcawgttcacttactttatgggtacatttgtggcatattttaaaatgtgaagttgagtgcatttcacttgaaaaccaaaggcatgtaatgacaacatgttatagaggaaaaattattgatttgtgtaaataggcagatcttgtttgtattctagctccatcacttactagttttgtgatatgggcaatttatatcctatctgagcctgtgtttcc

SEQ ID NO: 603227 - DNA, 268 bp, Homo sapiens
tgtttcaaaggtcccaaggcaaactttttaataattgtggtcccactcaatagtcaagttcacttactttatgggtacatttgtggcatattttaaaatgtgaagttgagtgcatttcacttgaaaaccaaaggcatgtaatgacaacatgytatagaggaaaaattattgatttgtgtaaataggcagatcttgtttgtattctagctccatcacttactagttttgtgatatgggcaatttatatcctatctgagcctgtgtttcc

SEQ ID NO: 603228 - DNA, 268 bp, Homo sapiens
tgtttcaaaggtcccaaggcaaactttttaataattgtggtcccactcaatagtcaagttcacttactttatgggtacatttgtggcatattttaaaatgtgaagttgagtgcatttcacttgaaaaccaaaggcatgtaatgacaacatgttatagaggaaaaattattgatttgtgtaaataggcagatcttgtttgtattctagctccatcacttactarttttgtgatatgggcaatttatatcctatctgagcctgtgtttcc

SEQ ID NO: 603229 - DNA, 608 bp, Homo sapiens
aatgaacttaaggccaaaattaagaagttctttgaaacgaatgagaaaaaagatacaacataccagaatctctgggacacaaccaaggcggtgtcaagatggaaatttacagcactaaatacccacaacaaaaagttagaaatatttcaatttaacaacctaacatcacaactaaaataacaaaagaaccaacaaaaaaccagccccaaagccagcagaagacagtaaataaccaaaatcagagctgaactgaaggagattgaaacacaaaagtattcaaaagatcaatgaatccaggagttggctttttgcaaaaaaatcaataaaatagaaacactgccagctagactaataagagagaaaatccatayataacacaatcagaaacaatggaggagatattaccactgactccaaagaaatacaaataactatcagagaatattatgaatacctctatgcacacacaagaaaatctagaagaaatggatacattcctggacacatacaccctcccaagactgagccaggaagaaattttgaatccctgaagaggccaatagtgaatgagctctgaaactgaatcagtaacaaatagcctaccaaaa

SEQ ID NO: 603230 - DNA, 495 bp, Homo sapiens
acctcagcacaattggtacaaaacctgggccracggtttcctagtttcctggttgttgccttaagcttctcgcccatcaggtaccttcctgcccttttcatagcctgtcatcatcatcccataaaactgtttcaactcctacagctctggacaggctgcttttcattttggtgggtccctccaatacctccacttgccctgtttttctccagccacatccttggcctcttccacagtccttaggtaaatgcttggaagaataatttaaatatttttattctaccatggtggctctagtttctcagggcgtagtaaaatggctttttaggatcggtctaatcagatcctcatttcttttcccttcctagatttttgaaacatgaatccttcactcctcctggctgccttttgcctgggaattgcctcagctgctctaacacgtgaccacagtttagacgcacaatggaccaagtggaaggcaaagcacaagagatt

SEQ ID NO: 603231 - DNA, 495 bp, Homo sapiens
acctcagcacaattggtacaaaacctgggccaacggtttcctagtttcctggttgttgccttaagcttctcgcccatcaggtaccttcctgyccttttcatagcctgtcatcatcatcccataaaactgtttcaactcctacagctctggacaggctgcttttcattttggtgggtccctccaatacctccacttgccctgtttttctccagccacatccttggcctcttccacagtccttaggtaaatgcttggaagaataatttaaatatttttattctaccatggtggctctagtttctcagggcgtagtaaaatggctttttaggatcggtctaatcagatcctcatttcttttcccttcctagatttttgaaacatgaatccttcactcctcctggctgccttttgcctgggaattgcctcagctgctctaacacgtgaccacagtttagacgcacaatggaccaagtggaaggcaaagcacaagagatt

SEQ ID NO: 603232 - DNA, 495 bp, Homo sapiens
acctcagcacaattggtacaaaacctgggccaacggtttcctagtttcctggttgttgccttaagcttctcgcccatcaggtaccttcctgcccttttcatagcctgtcatcatcaycccataaaactgtttcaactcctacagctctggacaggctgcttttcattttggtgggtccctccaatacctccacttgccctgtttttctccagccacatccttggcctcttccacagtccttaggtaaatgcttggaagaataatttaaatatttttattctaccatggtggctctagtttctcagggcgtagtaaaatggctttttaggatcggtctaatcagatcctcatttcttttcccttcctagatttttgaaacatgaatccttcactcctcctggctgccttttgcctgggaattgcctcagctgctctaacacgtgaccacagtttagacgcacaatggaccaagtggaaggcaaagcacaagagatt

SEQ ID NO: 603233 - DNA, 495 bp, Homo sapiens
acctcagcacaattggtacaaaacctgggccaacggtttcctagtttcctggttgttgccttaagcttctcgcccatcaggtaccttcctgcccttttcatagcctgtcatcatcatcccataaaactgtttcaactcctacagctctggacaggctgcttttcattttggtgggtccmtccaatacctccacttgccctgtttttctccagccacatccttggcctcttccacagtccttaggtaaatgcttggaagaataatttaaatatttttattctaccatggtggctctagtttctcagggcgtagtaaaatggctttttaggatcggtctaatcagatcctcatttcttttcccttcctagatttttgaaacatgaatccttcactcctcctggctgccttttgcctgggaattgcctcagctgctctaacacgtgaccacagtttagacgcacaatggaccaagtggaaggcaaagcacaagagatt

SEQ ID NO: 603234 - DNA, 579 bp, Homo sapiens
  misc_feature 494, 495, 496, 497, 498, 499, 500, 501, 502, 503, 504, 505,506, 507, 508, 509, 510, 511, 512, 513, 514, 515, 516, 517,518, 519, 520, 521, 522, 523, 524, 525, 526, 527, 528, 529,530, 531, 532, 533, 534, 535, 536, 537, 538, 539, 540: n = A,T,C or G
  misc_feature 541, 542, 543, 544, 545, 546, 547, 548, 549, 550, 551, 552,553, 554, 555, 556, 557, 558, 559, 560, 561, 562, 563, 564,565, 566, 567, 568, 569, 570, 571, 572, 573, 574, 575, 576,577, 578, 579: n = A,T,C or G
tgaatggttttcaataccagaagcacaggaaggggaaacagttccaggaacgcctgcttcctgagatccccacatctgtggactggagagagaaaggctacatgactcctgtgaaggatcaggtgagactgtgttaggttcagacctcccatcaccccaggaaagccaagaagcaattgacatttgtgctatggtagactgtgcagcaacatgcagttcactttttaaaggagtatttagctacatgagctaaatactcatgttgttaaaagtcttgctgtgtgtgtgtgtgtgtgtgtgtgtgtgtgtgtgtgkatatcagcttttttattctcttttcagggtcagtgtggctcttgttgggcttttagtgcaactggtgctctggaagggcagatgttttggaaaacaggcaaacttatctcactgaatgagctcaatctggtagactgctctgggcctcaaggcaatgaaggctgcaatggtggcttcannnnnnnnnnnnnnnnnnnnnnnnnnnnnnnnnnnnnnnnnnnnnnnnnnnnnnnnnnnnnnnnnnnnnnnnnnnnnnnnnnnnnn

SEQ ID NO: 603235 - DNA, 556 bp, Homo sapiens
ggggtttccccttataaaaccatcagatctcgtgagacttattcactattatgagaacagcatgggaaagacctgcccccatgattcaattacctcccatcaggttcctcccacaacatgtgggaattgtgggagttaaaattcaagatgagatttgggtggaacacagccaaaccatatcagtagtcaagcatgaaactgggctctaagccatacctgctctaccagtgrttcactaggaggaacagtgggtggccttctggctcttctagtaacaaatgtgcagatctcatgtcagctgcccagtggttgtgtctgacccaactcttgattgaagcaaaatatgacaaacgatctataaggacaaaggaaaattgttttaataaagaaaaaattcacatttttctttaaagtgatcagacatacatgtaatttcaatactgaaaaagagccttagagatcatgtttatctcacccacaatgtttgcaacccagccaagttacagggcaaagctatcagggccagtttctggagcatcttccccagctgctggtg

SEQ ID NO: 603236 - DNA, 556 bp, Homo sapiens
ggggtttccccttataaaaccatcagatctcgtgagacttattcactattatgagaacagcatgggaaagacctgcccccatgattcaattacctcccatcaggttcctcccacaacatgtgggaattgtgggagttaaaattcaagatgagatttgggtggaacacagccaaaccatatcagtagtcaagcatgaaactgggctctaagccatacctgctctaccagtggttcactaggaggaacagtgggtggccttctggctcttctagtaacaaatgtgcagatctcatgtcagctgcccagtggttgtgtctgacccaactcttgattgaagcaaaatatgacaaacgatctataaggacaaaggaaaattgttttaataaagaaaaaattcacatttttctttaaagtgatcagacatacatgtaatttcaatactgaaaaagagccttagagatcatgtttatctcacccacaatgtttgcaacccagycaagttacagggcaaagctatcagggccagtttctggagcatcttccccagctgctggtg

SEQ ID NO: 603237 - DNA, 581 bp, Homo sapiens
catgtgccatgctggactcttacgtgcccttccctagtcgttgctaaaaccatcttttcgacataaaatgacaaaaatggcaactgtgaaattttataataaaagtagcccatgttagcaagaagattgggaagattcccaaggtaaatcccttaactgtgcaggttgggtcctagatttgatacagttagaatttatgcagcacccaacatatgcaggttatcaccatggtggaagagacaggccctkacctcaaggagctggaactgttagggaaagggaggtaatgagggagggtttccggggggaagggaaagacaatatcaaccagagcagccagtcactaagggaaggtgaagaggtgagcatcttagcagagactagcatgtcagtaaccctgagaaatgactgcagtgagagaccctgcagagtgattaggtccaggtgttgggtgatgaagcttgctaagcggagtgtttgaacataggggaccactggagagtgcaggaacagaccgttctggttctcctctattactgtaaaacaaaccacccagaaactcagtggctttgtagaaacat

SEQ ID NO: 603238 - DNA, 581 bp, Homo sapiens
catgtgccatgctggactcttacgtgcccttccctagtcgttgctaaaaccatcttttcgacataaaatgacaaaaatggcaactgtgaaattttataataaaagtagcccatgttagcaagaagattgggaagattcccaaggtaaatcccttaactgtgcaggttgggtcctagatttgatacagttagaatttatgcagcacccaacatatgcaggttatcaccatggtggaagagacaggccctgacctcaaggagctggaactgttagggaaagggaggtaatgagggagggtttccgggrggaagggaaagacaatatcaaccagagcagccagtcactaagggaaggtgaagaggtgagcatcttagcagagactagcatgtcagtaaccctgagaaatgactgcagtgagagaccctgcagagtgattaggtccaggtgttgggtgatgaagcttgctaagcggagtgtttgaacataggggaccactggagagtgcaggaacagaccgttctggttctcctctattactgtaaaacaaaccacccagaaactcagtggctttgtagaaacat

SEQ ID NO: 603239 - DNA, 581 bp, Homo sapiens
catgtgccatgctggactcttacgtgcccttccctagtcgttgctaaaaccatcttttcgacataaaatgacaaaaatggcaactgtgaaattttataataaaagtagcccatgttagcaagaagattgggaagattcccaaggtaaatcccttaactgtgcaggttgggtcctagatttgatacagttagaatttatgcagcacccaacatatgcaggttatcaccatggtggaagagacaggccctgacctcaaggagctggaactgttagggaaagggaggtaatgagggagggtttccggggggaagggaaagacaatatcaaccagagcagccagtcactaagggaaggtgaagaggtgagcatcttagcagagactagcatgtcagtaaccctgagaaatgactgcagtgagagaccctgcagagtgattaggtccaggtgttgggtgatgaagcttgctaagcrgagtgtttgaacataggggaccactggagagtgcaggaacagaccgttctggttctcctctattactgtaaaacaaaccacccagaaactcagtggctttgtagaaacat

SEQ ID NO: 603240 - DNA, 651 bp, Homo sapiens
agaacaggggtcagcaaaccatagccagctttggcctgaagcctgattttgtaaataaaatgttaatggaggagatcaggtgcctacagggtcatattgctggagatgtggagtgaccgatcaagatcaacatattttggttcatttggatgatcgacttaacagagagcttccatatttttatctatttaacatttctttggtgccagggcatgacattttctttgttatagagaaatawtaaagaaaaaaaagaatgcacagggagttaatatgaaatattgtgttctcaccaagtgaaggccaaaaggcttcattacaggatgtgcaaaggaagcctctgtgtaacttacatagggacaagtggtggaagcagccagttactgcaaagcacactgccaacaggcgggtctcaggagagtctgcatgtggacagggggcgccacttcctcacagcggaggggagtgactgttctgcctttgttccattatattaatattgtcatttgaattttatgaggtctctgcatttgttgatctgcaagtttctttaggttttatggttgcaaggtatctacatgcctacattctttatatctagttttaaggttacatataattaatatatataatacttaattaaaaattaaa

SEQ ID NO: 603241 - DNA, 651 bp, Homo sapiens
agaacaggggtcagcaaaccatagccagctttggcctgaagcctgattttgtaaataaaatgttaatggaggagatcaggtgcctacagggtcatattgctggagatgtggagtgaccgatcaagatcaacatattttggttcatttggatgatcgacttaacagagagcttccatatttttatctatttaacatttctttggtgccagggcatgacattttctttgttatagagaaataataaagaaaaaaaagaatgcacagggagttaatatgaaatattgtgttctcaccaagtgaaggccaaaaggcttcattacaggatgtgcaaaggaagcctctgtgtaacttacatagggacaagtggtggaagcagccagttactgcaaagcacacygccaacaggcgggtctcaggagagtctgcatgtggacagggggcgccacttcctcacagcggaggggagtgactgttctgcctttgttccattatattaatattgtcatttgaattttatgaggtctctgcatttgttgatctgcaagtttctttaggttttatggttgcaaggtatctacatgcctacattctttatatctagttttaaggttacatataattaatatatataatacttaattaaaaattaaa

SEQ ID NO: 603242 - DNA, 651 bp, Homo sapiens
agaacaggggtcagcaaaccatagccagctttggcctgaagcctgattttgtaaataaaatgttaatggaggagatcaggtgcctacagggtcatattgctggagatgtggagtgaccgatcaagatcaacatattttggttcatttggatgatcgacttaacagagagcttccatatttttatctatttaacatttctttggtgccagggcatgacattttctttgttatagagaaataataaagaaaaaaaagaatgcacagggagttaatatgaaatattgtgttctcaccaagtgaaggccaaaaggcttcattacaggatgtgcaaaggaagcctctgtgtaacttacatagggacaagtggtggaagcagccagttactgcaaagcacactgccaacaggcgggtctcaggagagtctgcatgtggacagggggcgccacttcctcacagcggaggggagtgactgttctgcctttgttccattatattaatattgtcatttgaattttatgaggtctctgcatttgttgatctgcaagtttctttaggttttatggttgcaaggtatctayatgcctacattctttatatctagttttaaggttacatataattaatatatataatacttaattaaaaattaaa

SEQ ID NO: 603243 - DNA, 250 bp, Homo sapiens
ctgacacgctgtcctctggcgacctgtcgctggagaggttgggactctggatgcgtgcggggctctggcctaccggtgacccggctagccggccgygctcctgcttgagccgcctgctggggcccgcgggcctgctgatctctcgcgcgtccgagcgtcccgactcccggtgccggcccgggtccgggtctctgacccacccgggggcggcggggaaggcggcgagggctaccctgcccccgtgcgctct

SEQ ID NO: 603244 - DNA, 198 bp, Homo sapiens
cgtgcggggctctggcctaccggtgacccggctagccggccgtgctcctgcttgagccgcctgcyggggcccgcgggcctgctgatctctcgcgcgtccgagcgtcccgactcccggtgccggcccgggtccgggtctctgacccacccgggggcggcggggaaggcggcgagggctaccctgcccccgtgcgctctc

SEQ ID NO: 603245 - DNA, 198 bp, Homo sapiens
cgtgcggggctctggcctaccggtgacccggctagccggccgtgctcctgcttgagccgcctgctggggcccgcgggcctgctgatctctcgcgcgtccgagcgtcccgactcccggtgccggcccgggtccgggtctctgacccacccgggggcggcggggaaggcggcgagggcyaccctgcccccgtgcgctctc

SEQ ID NO: 603246 - DNA, 297 bp, Homo sapiens
cgcctgctggggcccgcgggcctgctgatctctcgcgcgtccgagcgtcccgactcccggtgccggcccgggtccgggtctctgacccacccgggggcggcggggaaggcggcgagggctaccctgcccccgtgcgctctccgctgcgggcgcccggggcggccgcgacaaccccaccccrctggctccgtgccgtgcgtgtcaggcgttctcgtctccgctgggttgtccgccgccccttccccggagtggggagttggccagggccgatcgactcgctggccggccggcccgcct

SEQ ID NO: 603247 - DNA, 297 bp, Homo sapiens
cgcctgctggggcccgcgggcctgctgatctctcgcgcgtccgagcgtcccgactcccggtgccggcccgggtccgggtctctgacccacccgggggcggcggggaaggcggcgagggctaccctgcccccgtgcgctctccgctgcgggcgcccggggcggccgcgacaaccccaccccactggctccgtgccgtgcgtgtcaggcgttctcgtctccgckgggttgtccgccgccccttccccggagtggggagttggccagggccgatcgactcgctggccggccggcccgcct

SEQ ID NO: 603248 - DNA, 297 bp, Homo sapiens
cgcctgctggggcccgcgggcctgctgatctctcgcgcgtccgagcgtcccgactcccggtgccggcccgggtccgggtctctgacccacccgggggcggcggggaaggcggcgagggctaccctgcccccgtgcgctctccgctgcgggcgcccggggcggccgcgacaaccccaccccactggctccgtgccgtgcgtgtcaggcgttctcgtctccgctgggttgtccgccgccccttccccggagtggggrgttggccagggccgatcgactcgctggccggccggcccgcct

SEQ ID NO: 603249 - DNA, 583 bp, Homo sapiens
ccgagagcatgccactgcgctcctgtctgggtgacagagtgagaccctgtctcaaaccaaaaccaaaccacaacaaacaaaaaacaaacatttcttactctaaatgagtcagaaaaatgaaaacattttcaccagtgattttgtttgtggtgktgttttaataggcatgagtaggctacaactgattcgtgtttttccttgaaatcccaggccaagaaattatttgattctagacctggagagtctcacacatctgtaaacatttcttgcttaaaaatctagtctttgattgtcttacgcagtataaaatggaatttaaaaaatattctttgtacattcttacacctatatttgtttgtcttttgtaaggctctttctttaactgatattttatgtgcttaagtaatgtcaaacctctccaatattgtttgcaagtttcaaaaaaatggtgtgattctcttggcaacttgctatgtgtatttctagtatggcaattataatttgtaatgagtgttttgcaatattagatatttgggaaaaattccagaaagttcaaagaacaaatcagaaataaacaagatta

SEQ ID NO: 603250 - DNA, 435 bp, Homo sapiens
ctaatgaatagactgttcatatgcaccacagacatttctttttaaaatacacaattgaaaaaacgcaatttgagacatagtatttgtttccaaatttggggaagatatagtggaaattcttgggacatatgcccaggccataaacctgttcccctcttaacttcttggggaacatccyatgcccatctgctggggtggtccctaagggccatatttttctacaggctaaagaacagtatgtgctgctagtagccagggatccctcctcttgacagcacttgatccccaacaaatcagttcacaaccctgcatctcatcaattaccttagagagaattaagtctgttagcaaggatgcatagaaaaaggaaaagtcaatacttcacatttaaattactaaataattttttaaacatatagaataaataattgtttg

SEQ ID NO: 603251 - DNA, 296 bp, Homo sapiens
ttaaaaggacaaaaaactacatttacatcctaagaacttggaatcagaatcaaaattaactccaacgattatgcatgaaatgtttaaagaaacaaaagacaataaaaatgagcagggaacaaatgactccaaatatgacccaaggtgtgtctatgaaagagacctttaaaatgtgttcctcattaataagtaaaaaacggttgcactcaccayagaaagctattgaattgaataactgccatacaacagaccagatgttcacacagaaaaatggatgggactgaaaaacacagtgc

SEQ ID NO: 603252 - DNA, 582 bp, Homo sapiens
ctcagctagagatcattgccaaggctgttattttaaaagcaagcctagtaatcagtactttgyttcctgttcttaagcaatctcagaagacaaaccaagtaggggtcatttctattccattgggttaaaagaaacctcagaatggaacacattgtaaggtaatgtttacaggttaaatttattgaaactaagtaactgagatagaaagttgtcaattgaaaaatatctctgtattactgtgtaggtcaaaaaagaccagagtaaacatcaaattaaataagcagcttgatttctgagcaaagtcccttcccttcttgctttctgagcaatgggatgaatccccctttgtgcatccctttctgagactgggcagggcagtctcgtgaattcctccgcatctggctgcctttaggagagagctcctagatagatgcttaccttacttattgctgtgagtaggagtttttttgtttgcttgtttgtctttctctttagtgaggtacactacaaaagaaagacttcttaccatgatagtaaggactgaaccttcctagatagctccctttattaatttgtagaagg

SEQ ID NO: 603253 - DNA, 253 bp, Homo sapiens
gaaaattaagatttttaataatattttatatggtgttctgccctcataaaaactgaataaacaagaatttggccttctaccgaggactcacgccctctgtaataagtamcagatgctgtgcttggttgtcccatctttgggaaaatgagatattcaaggctgtcagtcccagtgtgagatgggctcagatgccttcgcctgttgagtctttgggtgtgcttttaatggtctctctgcctcttccttaggtgtc

SEQ ID NO: 603254 - DNA, 519 bp, Homo sapiens
cttaatggaaaaatttaaagtgaaaagatctaagagggaaataatttttctgaatagtagattccctgatgtttcagaacaaattttagcaagcgtaatacgcgcacacatgcacacacatacgcacaatgaacacatgtgcttacagcatatgtgcccgcgtgagcaagtccacacacacacacgctcgcacacacatgtgcacacaggcacacaaaaactgagaaacgctcctccagagcctctaaacaatctcaaggaaaaacatttctattagcatgattttagtgacacgatataaggatttttttgtctctttttctgtaataatttcatacctccakctgagatctgtgcattcaaatctcagaggaaggtggcacacaagagtagttaagattgcccccggtttctccttctatctcctgtcctccttcccattgcagagtcttttgtggcattctccaaaaatcaaatagaaaacactacatgtgtcgacatgacataacctgtgatgag

SEQ ID NO: 603255 - DNA, 616 bp, Homo sapiens
ctacctgcctggggatgaatatgaagtgggttccacagggcttctacccatctagcatctttccttacaaccaagtaaccaagaaaccaagtaaggtagttctttggtccatggcaagggcttgtcaagaatgccartatgccatcacaagtcatttgaatatagcagaatcttctaagttcccttcttgcctgtgcagggctagtaaatctgtctcctctgtgctgttccatgacagaaaatgggacaggtacgcagcagatttatagaaatggggttttggaacttgaacagtagtgttttattctatttcttagttatttgtccctaatttaaacagtaaacattcaaattttgacacaatttaaacatatcaaccttccatacaataaatctcctttcctcgactgccattattatgtaaatgaaaatcatgtttatacatgtagataataattgcaatgcagtgtgttgcacactaaatacaaatctttattgtaaggacatgatgggagcaaattagaggtctttccaccagacagtgaacacaaacagggaagagatttaggcctttgtaggctcatcctctcttactgtgcctaatacagagtttgta

SEQ ID NO: 603256 - DNA, 445 bp, Homo sapiens
ctcatcctctcttactgtgcctaatacagagtttgtaatcaatacacttgaactgagtgaacacatgaatacataaacaaatcttcaaggtaaactctccctttatatcctacttaatgtctattttcagacttaataacaacagctaacatctgtacagtgcttgtaaaaatcactttcaactccaattaactcattttatttttaaaaaaccttgtagtttatttattattatcatttaatgggtgcrtaaaatagactaagaggtactcaaatgactttcccaaaattatatctttagtatgtgtcacacagagaatttaaacccaagttgtcttattctaattactatcaatgttagaggttgctaatgaacgactatcctaaggggaaccagaaaagctttttggggttatgtaatctttattcatacaaactgcacagc

SEQ ID NO: 603257 - DNA, 436 bp, Homo sapiens
tcttcacattccttgttgatttagtggtttatttagtcagaaaagccagtattcaatcgcagctcttttacacaggactgtgtatgtcactttgggctagccatttaaactctgatatccttaatgtgcttatcaataaaatttctaaagaataactgaagagaagtatataaagttgctagctaggtgtggtargtattcagtacattttgaattttatctgcttttaaggtgtgaatctaacttttgtgattccatctctttttgtctggcatatgaatacattagcttgattttcctgacatgatacagttcaaattctgtgagccattaccatggctgtcattgaccagggatccagtcatgacaaagtttcctcaagaatctcctctccacctcactccttccccaggctacaataagatcgatgttaggt

SEQ ID NO: 603258 - DNA, 557 bp, Homo sapiens
taagttgcagaatagtagacatcattaatccattgttaggcattatttgtcttgttgcagattgggctcctgggaaggcagaccctgggataaagacagcatagaggacttttgttaaggagagctcttggtatcaacacctgtggaagcaaagggaagaaatggaagcagaattgggctggggagaagttggaatgtgatacagtctcagtgaaaacctcagcaaacctcagagggagctctgaagctggcatggtcttgcacctgaagttggggaaaaggtctaggtcttcagagcctcatatcgatgcatcattggaggtaaacaataccagaatggaacatgagattgagaaaggtgactcttcaccggtgtttgctggcaaacttggcgactaaatcctccatatctgaagaagacgcagcagtgcatcagagtgtctgccattaagaggcttttttkgggatctaaaatctcttacttcaaggggttgatgacctatagttaggggcaggttgttaccgtgtctacattttactgataataccagttttta

SEQ ID NO: 603259 - DNA, 546 bp, Homo sapiens
gaaaatggatgaagaataccatggctgaagcagggagaggaggcaacagagactaaaaagtagaatgaggttagagaaggacggcagaaaaagggcttaatgagaaggaggaggaggccagtaaagatgaggatgagtactaagacaacactagctaatgttttcaaccattttgcactagttacatgggctaggttgtacaatagtaacaaagtctccaaaattttgtggtttaaaacaacactggtatagttctcactcaagcttaatgtgtgtttttgattaaytgagtgttctgttccatactggcctgcctctgagacccttgatgagtgggcaccatttgggacattgccagtcattgtggaaggagaaaagaaggcatggcaaattacattctacttcttaaagcttttgacaagaagttaacacatatgacttccactcttattggcccaagtcaggcacatggccacacctaataagaggatgatgaagggcaatccaattatattcttgggagagctgaagtgtttggtggacccc

SEQ ID NO: 603260 - DNA, 587 bp, Homo sapiens
ttaatgtgtgtttttgattaattgagtgttctgttccatactggcctgcctctgagacccttgatgagtgggcaccatttgggacattgccagtcattgtggaaggagaaaagaaggcatggcaaattacattctacttcttaaagcttttgacaagaagttaacacatatgacttccactcttattggcccaagtcaggcacatggccacacctaataagaggatgatgaagggcaatccaattatattcttgggagagctgaagtgtttggtggaccccccaaatgatatctatctgccacacttcagttggattatctcatttaacctcataatgctctgagatccttttcattcccactttataagaaaaccaaatttagaataggtaagtaacatctggtttacagaggttaggatacagacatgttaatgacrggccacagtctgaactcagagaataaatgctgaactcttagttataccacctgcactgcccatatccgggatctcaactatgttccaaagcaacaagaaagtatttaaatgtttaaagagaagagtgggatttccattttaagaaata

SEQ ID NO: 603261 - DNA, 605 bp, Homo sapiens
aaaataaataaataaataaataaataaataaataaataaataaacaagataactagcttggtagagaactgaagggatgggggtaacatatcacatagaaattgatagaaatgatgcggggaggtaatcaaataaatggatttaaagtcattcttgggaccaagctgagtttagaaaccttggacgtggagtggttatcaatctgaatctctggtgggaggacagtagagagggagaaaataggttggaaaatgtatccagggtttgggtttcctctgataattaagacagaagggctggaccacagaagagttgatgttaagaatatgggttacccatattatttgggcacacatgagtggctacagaaggaagaaaaactaggagccttttgataaattaaggggaaatgaaaagagcaataacaatgtgagaattacacagatagcatcgattgggtgtctttgtgtgccaggtgctgtgttgcataagcaacgacctcagagactgatattactycctttgttcagctgaatcattttagccttagaaagataagtagttttccttgcaaaaatcattgatttacaagtaagattaaattc

SEQ ID NO: 603262 - DNA, 585 bp, Homo sapiens
tatcaaatgatcttcttttatttgagcaactttctctgctctgtagtgtacacagttgaaaatgacttgcctcagttcccgaaattttacatctgccccatttcatatactcacctatcttgagacaaagtttttcagcttccttgaaaaaggagcacttgtgaggcagatgctcaccataagatcatactgtacaaagtgaatgctaagttaaaggaggcagtggtgatgagaaacagttccctgagaagtgggaatatccttcttacaggggtctatgcctgctgtcttggaaatacatacttaaaatttttaagcttttatttcagtaagaatttgcctaacaccctcaacctacctcctctcatattttgtgctaaagttcttacaaaagtgcttaacggctagaaattagaaaataaactggtgtctactagaaagccaaaatgaacatactcaagagtcccaaacaagttagaayttatatttaaacttcctagagactatatttgttcctacaatgcctttggtagttctcaattctagcaacatcctaactacctagaaaatgaaaagcgttaggtg

SEQ ID NO: 603263 - DNA, 545 bp, Homo sapiens
gtgaccttcctcctctttagaagattgaaatgtaacagagctgcacttctctcatttagagaatgtgatttgttcagtttgtgtaaaaagccatgcagggcagggatctcagggagtgccagacgctccactgtgakcttgcaggagagaagcagtcagtgtttccggaatcatctgatcctgctgagttggatgctggccacagagagccccagtcagaggtggaaagatccaacatgttctttatgccatccacatacactactagctcagggtggtggcaaacccagctatcaagtctgcatactcaaattggtaccttaccaatgcccaaattaagagaacattcaattaaagagcccaataacttctagcataacattatgacatccgaacaattgttaacatatcttgcttgaatttatggaaagaataaaaacaggtgacatctcaatcaccctaaattgaatttactcaatttgtattgttgctgttagagacattaatgaaggtgagggtaatgtgaactatggtgtgtagcggtg

SEQ ID NO: 603264 - DNA, 545 bp, Homo sapiens
gtgaccttcctcctctttagaagattgaaatgtaacagagctgcacttctctcatttagagaatgtgatttgttcagtttgtgtaaaaagccatgcagggcagggatctcagggagtgccagacgctccactgtgagcttgcaggagagaagcagtcagtgtttcckgaatcatctgatcctgctgagttggatgctggccacagagagccccagtcagaggtggaaagatccaacatgttctttatgccatccacatacactactagctcagggtggtggcaaacccagctatcaagtctgcatactcaaattggtaccttaccaatgcccaaattaagagaacattcaattaaagagcccaataacttctagcataacattatgacatccgaacaattgttaacatatcttgcttgaatttatggaaagaataaaaacaggtgacatctcaatcaccctaaattgaatttactcaatttgtattgttgctgttagagacattaatgaaggtgagggtaatgtgaactatggtgtgtagcggtg

SEQ ID NO: 603265 - DNA, 545 bp, Homo sapiens
gtgaccttcctcctctttagaagattgaaatgtaacagagctgcacttctctcatttagagaatgtgatttgttcagtttgtgtaaaaagccatgcagggcagggatctcagggagtgccagacgctccactgtgagcttgcaggagagaagcagtcagtgtttccggaatcatctgatcctgctgagttggatgctggccacagagagccccagtcagaggtggaaagatccaacatgttctttatgccatccacatacactactagctcagggtggtggcaaacccagctatcaagtctgcatactcaaattggtaccttaccaatgcccaaattaagagaacattcaattaaagagcccaataacttctagcataacattatgacatccgaacaattgttaacatatcttgcttgaatttatggaaagaataaaarcaggtgacatctcaatcaccctaaattgaatttactcaatttgtattgttgctgttagagacattaatgaaggtgagggtaatgtgaactatggtgtgtagcggtg

SEQ ID NO: 603266 - DNA, 562 bp, Homo sapiens
gtgtctggctccaaagttcaagcatgtcttgcttcattacctccttcattaacatttatttaaccttgaagtcagatggaaagtatctcaaaaataaatttattttatcaataaaggatggatgaatatgtaaataaagttggtaagctttctattcctgctgatggagtaaatgggtgatatgaaggaaattggatcgggcatggctcccaaatttctagtatagacaaaaattggatagtattggtactgcaagagggagcagaacaaagcagttagtggaggggatgtgtgcagtggctgcttgtccttcatgccctgggcctgtcttaacctgtgagtctttctttttgccatcgcctcctatactctgctccaggctcctgtcagtgcatcctgctgtcacttccaaatgacagtacattttgttccttctgcctggaaaggcctccctgcttctctcaatccatccaccaaactataagcatgtcatttagacctaagattttcatgaagaggaagttttytgtcatcccccaccacccaccacgagtcccataga

SEQ ID NO: 603267 - DNA, 585 bp, Homo sapiens
tggtactgcaagagggagcagaacaaagcagttagtggaggggatgtgtgcagtggctgcttgtccttcatgccctgggcctgtcttaacctgtgagtctttctttttgccatcgcctcctatactctgctccaggctcctgtcagtgcatcctgctgtcacttccaaatgacagtacattttgttccttctgcctggaaaggcctccctgcttctctcaatccatccaccaaactataagcatgtcatttagacctaagattttcatgaagaggaagttttctgtcatcccccaccacccaccacgagtcccatagatggggttcccagtatgagcttctaggaaagccagtgaaagtaacctccattggatcaagtgtcaccttgtgttgcaatcactccactcattwtttatcttcactttgatctgcaagcaccttggcagttttgctgactgttttgttcctataccctaaaagaaaatatggaaaaaactatataacataaatgcacccagactgaactctaaactggcacacacaatagagacatctaagaaattaagaccatgtgttcctgaacatc

SEQ ID NO: 603268 - DNA, 630 bp, Homo sapiens
atatgcttggggattgattccaggatcccctgtagataccaaacttgaaggctactaaagtctcttatacaacaaggtgtgttatttgcctatagcctacacatatcctcctatatactttcaatcattcctgaattacttataatacctaatacaatgcctacacatcacttcattagcgtggatttgatatatttggcatatggcaaattcaagtttcgttttttggaacttggtggagttttcttttccaaatattttctatccatagttggttgaatccatggatgcagaacccatggatatggaggaccaactgtactttggagccaatactgtgcttgaaatgaggtggataaatggcttttagctaaacctttaaaacaatctctccctgaatgatctgcctgactgctcaaatcccctaaaatgcatggcagcctgccctgcttgccttgccatcgctagttgcattagcctgggcaggctgcaaaagggggtgtagggcaagcctctctctgggaaagactaaggmaataggtcatctttccagtttaagctgctagttctacacacatggagttgcagatatatgtattctcactgctctgaccaagcaaagaaagagtg

SEQ ID NO: 603269 - DNA, 512 bp, Homo sapiens
tggcttttagctaaacctttaaaacaatctctccctgaatgatctgcctgactgctcaaatcccctaaaatgcatggcagcctgccctgcttgccttgccatcgctagttgcattagcctgggcaggctgcaaaagggggtgtagggcaagcctctctctgggaaagactaaggcaataggtcatctttccagtttaagctgctagttctacacacatggagttgcagatatatgyattctcactgctctgaccaagcaaagaaagagtgacttttcataatgactcacaggctataaataactgtacctacctctctctgtcatcatctatgtataaaccctacgtagattgattaaaaaataataacccttggcaaaggagtcttccagtttttctgctactgggaattaagaagacaggagtagcattaaagcatgcttgtccctattctgcgaggccatgcctctgtgaaaaggcctcacagacaacaacaatagcaatgacaactac

SEQ ID NO: 603270 - DNA, 531 bp, Homo sapiens
ctctgggaaagactaaggcaataggtcatctttccagtttaagctgctagttctacacacatggagttgcagatatatgtattctcactgctctgaccaagcaaagaaagagtgacttttcataatgactcacaggctataaataactgtacctacctctctctgtcatcatctatgtataaaccctacgtagattgattaaaaaataataacccttggcaaaggagtcttccagtttttctgctactgggaattaagaagacaggagtagcattaaagcatgcttgtccctattctgcgaggccatgcctctgtgaaaaggcctcacagacaacaacaatagcaatgacaactacaacatgaayatttatggagcacttaaaatacaaagctctttataggtgcaaagtcatttagtcctttcaacagtgctgggaccattattaaccccagttgcacttgagaagattagggcacagagaaactaaagtataagttcaagttcaagaaaaagtaaatggtcacaggcag

SEQ ID NO: 603271 - DNA, 531 bp, Homo sapiens
ctctgggaaagactaaggcaataggtcatctttccagtttaagctgctagttctacacacatggagttgcagatatatgtattctcactgctctgaccaagcaaagaaagagtgacttttcataatgactcacaggctataaataactgtacctacctctctctgtcatcatctatgtataaaccctacgtagattgattaaaaaataataacccttggcaaaggagtcttccagtttttctgctactgggaattaagaagacaggagtagcattaaagcatgcttgtccctattctgcgaggccatgcctctgtgaaaaggcctcacagacaacaacaatagcaatgacaactacaacatgaatatttatggagcacttaaaatacaaagctctttataggtgcaaagtcatttagtcctttcaacartgctgggaccattattaaccccagttgcacttgagaagattagggcacagagaaactaaagtataagttcaagttcaagaaaaagtaaatggtcacaggcag

SEQ ID NO: 603272 - DNA, 594 bp, Homo sapiens
ggatgaaagatgaaagcttagttggtaagtggagagaggaacagtaggatgtttcagacacagcaaacagcatctgtagaacccacagtgggaaagagagcatgtaatattaaagaaacttaaagtcattcagcatagragtcatacaatgggcatggctgggagattgcaggaagtggcatgatcatctttgtattttagaatggctttgttctgtggagaatggattggaaggggatgacctttggtcaatattagtaagctgttacagtagctttattgtttatcacatttccctgccgagtcaaatggcattgaatactctgagagatgtttaggaacattggaatcaactggatttggggattgcaagtcagatgagagagaggaggaggtgtcaaagatgactcatacgattgcaatttggtcaatggatggatggtgatgtcattcatcaggaatagggggatgggacaatatggaaggaggatgataatttcaacttggctatgttgagtttgaggtgctagtgagacaactgaatgtaaaaaagaagtaacatgccctctggttggcacactctcactatggaga

SEQ ID NO: 603273 - DNA, 594 bp, Homo sapiens
ggatgaaagatgaaagcttagttggtaagtggagagaggaacagtaggatgtttcagacacagcaaacagcatctgtagaacccacagtgggaaagagagcatgtaatattaaagaaacttaaagtcattcagcataggagtcatacaatgggcatggctgggagattgcaggaagtggcatgatcatctttgtattttagaatggctttgttctgtggagaatggattggaaggggatgacctttggtcaatattagtaagctgttacagtagctttattgtttatcacatttccctgccgrgtcaaatggcattgaatactctgagagatgtttaggaacattggaatcaactggatttggggattgcaagtcagatgagagagaggaggaggtgtcaaagatgactcatacgattgcaatttggtcaatggatggatggtgatgtcattcatcaggaatagggggatgggacaatatggaaggaggatgataatttcaacttggctatgttgagtttgaggtgctagtgagacaactgaatgtaaaaaagaagtaacatgccctctggttggcacactctcactatggaga

SEQ ID NO: 603274 - DNA, 594 bp, Homo sapiens
ggatgaaagatgaaagcttagttggtaagtggagagaggaacagtaggatgtttcagacacagcaaacagcatctgtagaacccacagtgggaaagagagcatgtaatattaaagaaacttaaagtcattcagcataggagtcatacaatgggcatggctgggagattgcaggaagtggcatgatcatctttgtattttagaatggctttgttctgtggagaatggattggaaggggatgacctttggtcaatattagtaagctgttacagtagctttattgtttatcacatttccctgccgagtcaaatggcattgaatactctgagagatgtttaggaacattggaatcaactggatttggggattgcaagtcagatgagagagaggaggaggtgtcaaagatgactcatacgattgcaatttggtcaatggatggatggtgatgtcattcatcaggaatagggggatggsacaatatggaaggaggatgataatttcaacttggctatgttgagtttgaggtgctagtgagacaactgaatgtaaaaaagaagtaacatgccctctggttggcacactctcactatggaga

SEQ ID NO: 603275 - DNA, 480 bp, Homo sapiens
taagcattctaaatgcggttgctccttttaatctaaaaaaattacacttgaaggactgggagatttttcttcaataattcagcttttcttgtcacattgagagatcaaactactgtaatcatggaaaggaatcccaggagttgaaaataaataaccgatggatatcaggacttttccttagggccaagaaagtgggaggggaggcttcaggcacagtgaaactgggcatctttaacggtyagctgaaccctctctaagaccaggttataatggtcatatccattaatcaacttgccacgtaagttggcagaatgtactcatactgccagtgccgagcaactccacagtatcttgaatattggtaaaagagaagataacttactttcccaagcaactctcatgtgtcaggtacttgtcatcaatggtatttgtttgatattttatttaaccttcaaaataaccttgtggtttgtgaatttg

SEQ ID NO: 603276 - DNA, 480 bp, Homo sapiens
taagcattctaaatgcggttgctccttttaatctaaaaaaattacacttgaaggactgggagatttttcttcaataattcagcttttcttgtcacattgagagatcaaactactgtaatcatggaaaggaatcccaggagttgaaaataaataaccgatggatatcaggacttttccttagggccaagaaagtgggaggggaggcttcaggcacagtgaaactgggcatctttaacggtcagctgaaccctctctaagaccaggttataatggtcatatccattaatcaacttgccacgtaagttggcagaatgtactcatactgccagtgccragcaactccacagtatcttgaatattggtaaaagagaagataacttactttcccaagcaactctcatgtgtcaggtacttgtcatcaatggtatttgtttgatattttatttaaccttcaaaataaccttgtggtttgtgaatttg

SEQ ID NO: 603277 - DNA, 603 bp, Homo sapiens
ggtcttgaacttctgggctcaagcaatcctcctaacttggcctcccaaagtgctgaaatcacaggtgtaaaccagtgtgctcaggcattgccccaaccttaaagaagtaaaacaatgacaagaacaacaaataagtcataacagttctattcagatatcaatagtgttcttttatccaatgtaaagccttatacaaatagaacatgatatattttttggatttttttgccttcctccattctctgaacaaataaaaaaggctactgagatctagcactagaaaragccttattcaggagatctgtaatattacagtattttattgagtataaatgtctttatttcagaaaaataaacgtttgttgaatttataagatcacagaaattgaaatatgagagaaactgaaaatgcatgtatatattccccaatgtttataataaaaattatcatctgaattttttaggtttagtgagtatcatttaggttgtggaaccaacctaaaatggacttcatgcattaacagttttaaaatattcagacttttgtacagcacatttacatatgggtctatcagattagccaaaatctcactaggaacattt

SEQ ID NO: 603278 - DNA, 603 bp, Homo sapiens
ggtcttgaacttctgggctcaagcaatcctcctaacttggcctcccaaagtgctgaaatcacaggtgtaaaccagtgtgctcaggcattgccccaaccttaaagaagtaaaacaatgacaagaacaacaaataagtcataacagttctattcagatatcaatagtgttcttttatccaatgtaaagccttatacaaatagaacatgatatattttttggatttttttgccttcctccattctctgaacaaataaaaaaggctactgagatctagcactagaaagagccttattcaggagatctgtaatattacagtattttattgagtataaatgtcttyatttcagaaaaataaacgtttgttgaatttataagatcacagaaattgaaatatgagagaaactgaaaatgcatgtatatattccccaatgtttataataaaaattatcatctgaattttttaggtttagtgagtatcatttaggttgtggaaccaacctaaaatggacttcatgcattaacagttttaaaatattcagacttttgtacagcacatttacatatgggtctatcagattagccaaaatctcactaggaacattt

SEQ ID NO: 603279 - DNA, 617 bp, Homo sapiens
atatgaaattatctgactgacatttccttaattattgtcaaagagcttgttcctgatttctacaaagtcatatgtgattatcaaaaacaggtcatagacctcctagtttcttttttggcatgtaaagagctcagcagttattgctgttatcctcccaaaaagaacaaagtgaaacaaaatgaacaagtcttcttagagcctttggaaaatggaagtcacagggcaaactgctaccttaaaaactgcagagaaagataaatacagttatagattacagggagcagaagccattgctgragtcagaaacaagttaaaacacttcaacatcacttgactaacagttggacactgggtgtggacaagcttgaaatataaaaacttctgcaggaccagccttagaaggatccccatgatttcataagttttccttccataaacctctagaggttatcatggtgaagatgaggaaaatcccctaatgcatctggcaggggaaaagaaaaagttttcatttaaaatatactcagaatgttctgttctccttaacaaaggcctttccccagagaaaactattgtaccagaacctaaccaccatgagaaatacccaattacagctt

SEQ ID NO: 603280 - DNA, 618 bp, Homo sapiens
acctaaccaccatgagaaatacccaattacagcttcctctaacattcaacattggagggaaatacctaatttgaaacctctctagcttgtctcatgtaaggggaggggtgtgggraaaaaaaaaaaaagctaaaaatcacttgtgaaggacccacctctggggctcaagcccactagaggattgagctctcatcatagaataataaaacactttctttcctgcacaccttaccacacataaacagggatcctacacaataacaggagaatagaaacaaaaaaccacatgtttcagaatttatttagaaagaagtctctagggaagtccaaggacaacagggaagacaaaaacaagggcatcagaaggaaattttagcctctgacacctgtaactacagttaacattaaacaaaaactgactgctagctacaggaaaaaaacttacttaaaaactcacactaaaggcttacttatgtcaatcccttttacctaatatgtcatgtctagcttttcacaagaaaactacaaggtatgctaaaaagaaaaagaaaaaaaaattaaatctgaagagacaaagggagaatcaaaatcaaactcagatacagcagagatttttaa

SEQ ID NO: 603281 - DNA, 383 bp, Homo sapiens
catcaattactaaaaaacattcacaaatatgataggtattaatccagatatctcaaaaatcactataaatataaatagcctaaaccaattaaaagcaattgtcraagtatatttttaaaaacaagatgaaagtatatattgtctttaggaaactcactttaaatataatggcgtgggtgccataaatggtggagtaagatataccatgctaacacttatccaaaataatatggtgtgactatattaatttcaggtaaagaagacagaagacgtcagtgcaagaaaaaaatatcagggataaaaaggagcattatataatgataaggaagtcacctttccagaaaacataccaatttttaaaatgtatgatgcctggaaaccca

SEQ ID NO: 603282 - DNA, 383 bp, Homo sapiens
catcaattactaaaaaacattcacaaatatgataggtattaatccagatatctcaaaaatcactataaatataaatagcctaaaccaattaaaagcaattgtcgaagtatatttttaaaaacaagatgaaagtatatattgtctttaggaaactcactttaaatataatggcrtgggtgccataaatggtggagtaagatataccatgctaacacttatccaaaataatatggtgtgactatattaatttcaggtaaagaagacagaagacgtcagtgcaagaaaaaaatatcagggataaaaaggagcattatataatgataaggaagtcacctttccagaaaacataccaatttttaaaatgtatgatgcctggaaaccca

SEQ ID NO: 603283 - DNA, 574 bp, Homo sapiens
tataatcctgattaataaaaaatttgtcaagatgtgaactgacttgagaaaggaggagactacaatagaatccatgattcgcaaactgttaaaagtggggtaaaatgatatattccagaaaattataaaatcataatatagcttcaactccacagaatataaattttacataagaagatcttccaaaatttttctgtataatgtcaaataaatataggcaggtattattttaaacctkgaaagaaattataagaatttatcccccagtgaactaaaactcagtgaagacagcaaagagtccaagaatctctagaggcatgaagggtagacagcgccccaagagaggatgcctcactgtagctgctcttagcgatgggataaagaacattttcttcattctctgggcaactgagaataataggactgctaacccaaatcagtttgtattgactgcagtttacacttttctctgaagtgagatgtaaggacccattcaacttctgttattttgccactgttataatcactaattaagacctaatacagccattctttatttccttatgtgtataat

SEQ ID NO: 603284 - DNA, 629 bp, Homo sapiens
tgcaatgtcattttttgaaaatattctttcaccattgaattatgttggcatctttgtcaaaaccaattggccacataagtttcgaatattatatttcagaacgcttttatctgttgcaattatttatttgtctataattaggccaataccatatgccttgattactacagctttataagaaatcttgaaataaagtcatgagattccacaactttgttctcttggctacaggaacgttgttttggctactgtagatcttttgtatttccataaaacatttagaattggcttgtcaayttctgtgacaagaacaacaaaaacaaaaatgcttcctgagattttaatagcattgcaatcaatctgtctatcatcttggggagaattgacatcttaataatatcaagccttctaatccataaacatgttatatctatttatttagatcttcttttaagcttttcaatgtacaagacttgtgtgccttttgttaaattgatctctatgtattttacatgctttgatgctattgtaaatgacatttttgtttcaatttttctttgttgctgtaaaatgatgtacatttatttttgtatctctctcctataaccttgtatcctgaaattttccta

SEQ ID NO: 603285 - DNA, 591 bp, Homo sapiens
agtcatggaccatggtcactgtcctatataaacagaaagatgaagacaagacgaggataattaacagagaaactgctgggttctacggatacaaagtcttgatgagatggaagaattgtttaggtagatacaggttaagaaaggacctaggagtataaatggtagtggctacagagtgaaatgtttgtttttgaattattgtcattttcgtgataagctacaaggtatgaccttggtaatagaggctgagttctactgtgccaaatcattggtattgagaaggacagagactgggtgaataaaatacttacgtgcctattgattttttcttcatgagtgatgtcaatcatagtgatagtaggaagaatgggaggctgacagccaaggactaaatcagaatcagaaaacacaggggcatcagcaccacagaaggtaaattagaaggcatcactgccacaggaaagctcagaagcacctgagtttgtttctctagctgattaatttgggccttaccacaatttcacargcttatgtccccagtaaatcctaaagtcatagaatgtcttttgatgataaatctgtaatcgcaat

SEQ ID NO: 603286 - DNA, 583 bp, Homo sapiens
cccagcacgttgaggggccgaggcaagtggatcacctgaggtcaggagttcaagaccagcctgaccaatatggtgaaaccccatctctaggaaaaatacaaaaattagttgggcatggtggcgtgccactgtagtcccacctactygggaggctgagacaggagaattgcttgaacctgggaggtggaagttgcagtgagcccagatcacactgctacactgcagcctcggggacagagttgtctcaaaaaaaaaaaaaaagtagatataaacgtctctctctctctctctctgtgtgtgtgtgtgtgtgtgtgtgtgtgtgtgtgtgtgtgtgtgtgtgtatttttccaaatgaactctggtagacgtatttcatttattaaaatgatataatctgcacttaagaaatgcagataaaaatattagccccttggtttctcatgtcttaagaattttgcacagatttggttcctacagcttgtctgaaattcaagccaatgtgtaattgcttttcagtggacctataattttttaccaatttgctcttctaacatgggattaatttccaggtatagtttgtgat

SEQ ID NO: 603287 - DNA, 583 bp, Homo sapiens
cccagcacgttgaggggccgaggcaagtggatcacctgaggtcaggagttcaagaccagcctgaccaatatggtgaaaccccatctctaggaaaaatacaaaaattagttgggcatggtggcgtgccactgtagtcccacctacttgggaggctgagacaggagaattgcttgaacctgggaggtggaagttgcagtgagcccagatcacactgctrcactgcagcctcggggacagagttgtctcaaaaaaaaaaaaaaagtagatataaacgtctctctctctctctctctgtgtgtgtgtgtgtgtgtgtgtgtgtgtgtgtgtgtgtgtgtgtgtgtatttttccaaatgaactctggtagacgtatttcatttattaaaatgatataatctgcacttaagaaatgcagataaaaatattagccccttggtttctcatgtcttaagaattttgcacagatttggttcctacagcttgtctgaaattcaagccaatgtgtaattgcttttcagtggacctataattttttaccaatttgctcttctaacatgggattaatttccaggtatagtttgtgat

SEQ ID NO: 603288 - DNA, 583 bp, Homo sapiens
cccagcacgttgaggggccgaggcaagtggatcacctgaggtcaggagttcaagaccagcctgaccaatatggtgaaaccccatctctaggaaaaatacaaaaattagttgggcatggtggcgtgccactgtagtcccacctacttgggaggctgagacaggagaattgcttgaacctgggaggtggaagttgcagtgagcccagatcacactgctacactgcagcctcggggacagagttgtctcaaaaaaaaaaaaaaagtagatataaacgtctctctctctctctctctstgtgtgtgtgtgtgtgtgtgtgtgtgtgtgtgtgtgtgtgtgtgtgtatttttccaaatgaactctggtagacgtatttcatttattaaaatgatataatctgcacttaagaaatgcagataaaaatattagccccttggtttctcatgtcttaagaattttgcacagatttggttcctacagcttgtctgaaattcaagccaatgtgtaattgcttttcagtggacctataattttttaccaatttgctcttctaacatgggattaatttccaggtatagtttgtgat

SEQ ID NO: 603289 - DNA, 561 bp, Homo sapiens
atacaaaaattagttgggcatggtggcgtgccactgtagtcccacctacttgggaggctgagacaggagaattgcttgaacctgggaggtggaagttgcagtgagcccagatcacactgctacactgcagcctcggggacagagttgtctcaaaaaaaaaaaaaaagtagatataaacgtctctctctctctctctctgtgtgtgtgtgtgtgtgtgtgtgtgtgtgtgtgtgtgtgtgtgtgtgtatttttccaaatgaactctggtagacrtatttcatttattaaaatgatataatctgcacttaagaaatgcagataaaaatattagccccttggtttctcatgtcttaagaattttgcacagatttggttcctacagcttgtctgaaattcaagccaatgtgtaattgcttttcagtggacctataattttttaccaatttgctcttctaacatgggattaatttccaggtatagtttgtgatacctgtctgcatgttatctgtgttgattctcaaagaaaactgtgattatgattttttaaaataacagaaactt

SEQ ID NO: 603290 - DNA, 585 bp, Homo sapiens
agtattatgcagttgactgcaaagagcaagaaaatgaatccctagggtaaatgtaactttctacctcctcccccacctcaagaaattgctgcctctttttattgccccaccaagcagaagaccactggtaaatgtccttagacatccagctcagaagctattgagttcaccaraggcttttgtagtgaggccctagtgcacagccagcattagccacatacaactatccagaaataaagatcatatccttgtccttgaggggcttttgagaaatgggtatgtgcatttttggtacaagaccatgcagttatggaaaaggtgcaaaaggaatgcagaagggaagcttgggaagaattttcaggcttaatagtatttattctgagcttttagggatcggtgggcagattaacttgctagggctgctgtaacaaagcaccacaaactggtggctcacacaattcttttgttttccagttcttatcgaggtattagcagacttggtttcttctgagggctgtgaaggggtaactctttcttgcctctttcttagcttctggtaattggctgtcactctttgatgttcct

SEQ ID NO: 603291 - DNA, 520 bp, Homo sapiens
cctttcttagtccatctgggctgcataacaaagtaccctacactgcatagcttataaacaacaggcatttatttgtcagttctggaggctgggaagaccagggtcaagatgccagtaaattgggtgtttggtgaaagctcagtctctgcttcataaatgatgccttcttgttgtaccctcacatggtagaaggggcagggagcttccttgagtttattttataagagcagtaatcctatctgtgagggtggagccctcatgacttacccacttcccaaaagccccacctcttaatatgattccatagggcattaggtactaacatatgcattttgggggcacaccaatattcagaccatagcagacgctatactcaaataaggtcatatgcatatagctactggagtcattacttcaacatcttttggaagacaaaattcaatccataacagtgggagtttcaagyagaaaaagggaaggtgcttctagcctgaataacacagtgtaaaagacatggagc

SEQ ID NO: 603292 - DNA, 642 bp, Homo sapiens
taggctggagtgggcagtggtgcaatctcagctcactgcaacctcagcctcccgggttccagcgattctcctgtctcagcctcccgagtagctgaagctgcaggtgcatgccaccacacccagttaatttttgtatttttaatagagacggggtttcaccatgttggcccggctggtctcagactcttgacctcaagtgatctgcttgcctcagcttcccaaactgttgggttacaggcatgagccaccctgcccagcccaatgttgttttgtttttcagatgaagaaaaatgtttttctctctcatcacgccaagtgctacggcattcagaagacctttgataggtcctatggtatctgttctcttgaagagatcctgggaaaaatgaaagaccaaacattacgactgagcttgcctgaaactgaaacttggtagattgaagagactgagacataaggagtggggacctatgtgtttgtctcgggtaaggatgtataaycccctacctccatgagtgcccaaggcaagaaagactacccggaggagcaacgtgactaccaggatgctgaaggagctaccttctgcatgggtgtcagctatgtcagatgagaggcactcatagctttctccaggtagacatt

SEQ ID NO: 603293 - DNA, 647 bp, Homo sapiens
attcaggccttctaactcagtggcattcaggaagttatggtgcagtttgcaggatatataaatcagtgcctgggttatcratcatgaaaacgttcaagtctattgcatgttttacaaaacaaaagctatgatatattaaactataatttacaaagttctaaaagcattttgtaagtcaacgcttgcccatctatcaggacacagtgtatgccaacagatactgcaatgtcattgatccaaacaaaaaggaaggtctcttaaagatgtccttatttaatctgtgagtgactcctagacaccataggagaagccaagtttaggagggagcataaaagcacacgagaactggggatatggaatattgccgctcaaacatattaagagctgatgttttaaaacatatatatcaattttaaaacatttatgacagaatacagctcatataatactagaatgatattatactgaattacttgactaggtggaatactactttaacgtgtcataatcaggaggagaaaataccatttgggagaaaatatctgtcttctaaaagactgggaatattggacttatttccttaattaaaaaaacttccattaggtccagtgaaatgaaatgctcttttcacaggaaaatattctgta

SEQ ID NO: 603294 - DNA, 647 bp, Homo sapiens
attcaggccttctaactcagtggcattcaggaagttatggtgcagtttgcaggatatataaatcagtgcctgggttatcgatcatgaaaacgttcaagtctattgcatgttttacaaaacaaaagctatgatatattaaactataatttacaaagttctaaaagcattttgtaagtcaacgcttgcccatctatcaggacacagtgtatgccaacagatactgcaatgtcattgatccaaacaaaaaggaaggtctcttaaagatgtccttatttaatctgtgagtgactcctagacaccataggagaagccaagtttaggagggagcataaaagcacacgagaactggggatatggaatattgccgctcaaacatattaagagctgatgttttaaaacatatatatcaattttaaaacatttatgacagaatacagctcatataatactagaatgatattatactgaattacttgactaggtggaatactactttaacgtgtcataatcaggaggagaaaataccatttgggagaaaatatctgtcttctaaaagactgggaatattggacttatttccytaattaaaaaaacttccattaggtccagtgaaatgaaatgctcttttcacaggaaaatattctgta

SEQ ID NO: 603295 - DNA, 582 bp, Homo sapiens
tgataaaaatatatgatggaataaataagtaaatgggagagaagagacaacccctttgtgatagaatcccaaataacttatgtagatacttaaccataaggaaagaagaccgtaactccccactccttaagagtgggctatgcataatcacttycttccaaagagtattctatgcaaaaggagagagaagaaaagggtaactttacagtggagaagcttggcaaatattacctcagacagatgataaggtaaacttcaataataataaatcatattgtagcgtgtatcttgatatgacataataaaaatggcactttaaaaatttctacagaaaaccagtaaaccccatgtaatcataagaaaagaatcaaattccaataaaggggcatcctccaaaattctttaccagtactgatcaaaactgtcatggtcatcataaaaagaaaaaatcaacaaactgtcacaggtaaggggaacctaaggagacatgaatattagatgtaatgcggtacctgggattagaacacaggcagcaatcaggtgaacactcaaaaaatcagaataaacaatagcaattgtgag

SEQ ID NO: 603296 - DNA, 582 bp, Homo sapiens
tgataaaaatatatgatggaataaataagtaaatgggagagaagagacaacccctttgtgatagaatcccaaataacttatgtagatacttaaccataaggaaagaagaccgtaactccccactccttaagagtgggctatgcataatcacttccttccaaagagtattctatgcaaaaggagagagaagaaaagggtaactttacagtggagaagcttggcaaatattacctcagacagatgataaggtaaacttcaataataataaatcatattgtagcgtgtatcttgatatgwcataataaaaatggcactttaaaaatttctacagaaaaccagtaaaccccatgtaatcataagaaaagaatcaaattccaataaaggggcatcctccaaaattctttaccagtactgatcaaaactgtcatggtcatcataaaaagaaaaaatcaacaaactgtcacaggtaaggggaacctaaggagacatgaatattagatgtaatgcggtacctgggattagaacacaggcagcaatcaggtgaacactcaaaaaatcagaataaacaatagcaattgtgag

SEQ ID NO: 603297 - DNA, 582 bp, Homo sapiens
tgataaaaatatatgatggaataaataagtaaatgggagagaagagacaacccctttgtgatagaatcccaaataacttatgtagatacttaaccataaggaaagaagaccgtaactccccactccttaagagtgggctatgcataatcacttccttccaaagagtattctatgcaaaaggagagagaagaaaagggtaactttacagtggagaagcttggcaaatattacctcagacagatgataaggtaaacttcaataataataaatcatattgtagcgtgtatcttgatatgacataataaaaatggcactttaaaaatttctacagaaaaccagtaaaccccatgtaatcataagaaaagaatcaaattccaataaaggggcatcctccaaaattctttaccagtactgatcaaaactgtcawggtcatcataaaaagaaaaaatcaacaaactgtcacaggtaaggggaacctaaggagacatgaatattagatgtaatgcggtacctgggattagaacacaggcagcaatcaggtgaacactcaaaaaatcagaataaacaatagcaattgtgag

SEQ ID NO: 603298 - DNA, 596 bp, Homo sapiens
aatatccaatgagggtgtgtccactgcctctgtaagagaaggacctcttcaaggtctcatgccttctctagagaaccccttgttctgtctttgataattcatcacattttcttaaaaaattctggggcaaattttggcctttcttttcaagctttggaattgggtattttcttgtccatcccttttttttattacctgtctgaggtaaatttacattaacaacaaccacaaaaacaatcctgtatttttctctatggaaattaaatgtgatattataaatgtaaatattatccactgatagatacacaggttctaactatttttgagccttagtgagatagacgtacagccatcaattttgtaaagacttgtgttcaagtgaaagaatgacaggtgaccagataaagactgggttagaaggactggaaaacaagccagcaatttggaagagaaatcagagataaatggtyatccaccttatttgacggtgaggtcatgaaactagtgttatgtgtagataaggtataagttttcacaaagacaactttcaatagaaaatattttctaattcatttccaacaatgagagattgtgtt

SEQ ID NO: 603299 - DNA, 566 bp, Homo sapiens
gactgtgaaggagtagtgtcttctttgtggtttttgccaaagaaatgtatgagtgtttacatttggggagggatggagttttgcttttgatgtaatacgtattttaaactttataattctctaccttttgttcaaaggtagagaattattattattattaattttttttccttttctacaacagttttagcataacacatacaaaggattataaaattgtaaagccgagtgtatcttagacatcatgcaatataatctcttgattttagaaatgaattggtatccacagcatttttgataagtaattttacagattatgcakaaaaaaatcttctaaagcacttgtattttaagtaatttttgtgcttaatttagattgctttaatacctgtgctttaaaaaattgttggccgggtgcggtggctcatgcctgtaatcccaacattttgggaggctgaggccagcagatcacttgaggccaggagttcgagaccagcctgggtaacatggtgaaaccctgtctctactaaaaatacaaaaattagctgggtgtggtggcacatgtt

SEQ ID NO: 603300 - DNA, 547 bp, Homo sapiens
atgtttatcagtgtaaacattaaccttgatctcctggctaaggtagtgtttgtcaggcttctccactactttctccctacctttttattttattctttttggaagacagtcacaatgtgcagtccatacttgagtgggaaattatgccccctctctgagggcagagtatctacacagttatttggaattctagtgcatgagatatctgatttgtttcttctttcccagtgatttatttattcagtcatttatttacatcagtatagattcctggatgtttattttctactttgggctataatttaatacctctttattttgttgctcaaattcttctatctttgaccattgggagcactttcagttggttcctgtgccccttaaacatactcccattattataggttttacaatttgttttgagcatttggttgcttttctagcactacaagatactcyagactcatttgtatgtttcttgccccagtcctggaatcagccatttcttcaagaagcgtggttccttttactggggaatcgtattaga

SEQ ID NO: 603301 - DNA, 563 bp, Homo sapiens
atggtaaaaccccgtctttactaaaaatacaaaaattagctgggtatggtggcacgtgcctgtagtcccagctactygggaggctgaggcaggagaatcgcttgaaccagggaggtggaagttgcagtgagcagagatcgctccactgcactctagcctggcaacagagtgagagtctgtctcggaaaaaaaaaaaaacaaaaaaaacacaagctgcttaaaaggtgatttaaatttaatgaatttctagacaactttctttaaactgaagtcttatctagctaggctttgtcttggccttggcccttggccatcagaactccccattaactagtctccccattcccagggctgagaagttgggcttttttggatgttcacttttttgagatgttgctaatgaagcctgaggcagctgctcccagctggagagaaggtctgaacaactgggaccccaaaagattttttcagggaccagagaagtgtctcttccacctcagctactttaccctctgatctgaatagtcaggtgtgggagcagcagtgctgagtacacagagaag

SEQ ID NO: 603302 - DNA, 486 bp, Homo sapiens
cagcagtgacagtgagaattgccacaattagggtattcatctcattatgatgatgtggctgttcagatggtatgcagagcatcatgggacactgaagatcagaaacgctgcagaacaagatgatgaaagaagagggtggtttgaacaaaacccaggcatggaccattcccttaaycacacctggctaagggttctgatggcttagggactaggaattggaaacaataccagacacagttctgctgcatatcagtattggtttgttaagtatattttctcataagtttatgtttgactgtttcataagctactgagctcattcagcagcaagagttcagttgatttcaaacccctttgttatattcataaatttcctggtaaagaaatttcttcagcaatctctatagaagtacttagatagggtggaatatttagaatgagggctgtaattagaattatagaccccccaactgagggctataatta

SEQ ID NO: 603303 - DNA, 628 bp, Homo sapiens
gacaataatgaaaaagcagcagcctcctttatagaacagtgccagactcaaacttctttctacctgggcagagttacatattgttaccttaacaatttttttcaataggctctgtccccaggtaacaaattaccttcccttcgctgttctttctgctcctccactaatcaccactataatctgacaaacttaaaattttgaaagtgatttaacttttaaactcagctctagagttttttttctagaaacagaaacttccagatgtagatcatttatttaaatgacatattcctttaaattgatagggagccaactcacaatccccaataatggaaactaggtacagcagacataacctaattccaatgatgatgaaagaagctcatttgcattctctttatcaaactttcaccagagttacagtatctgagagaactggtttaagcttcatcctcttttatttatcttaccgtwtctctagtgagaggacgaatgagtcaccggagtcaggcaatagggaaaggagatccagggagaagaaaaccacataatcccttaactggataatcacctctgagtcaataaagttgaacatgctttctccttggttttaaggctaatttagaaa

SEQ ID NO: 603304 - DNA, 640 bp, Homo sapiens
aatatttagaatgagggctgtaattagaattatagaccccccaactgagggctataattagaattctggatgacaataatgaaaaagcagcagcctcctttatagaacagtgccagactcaaacttctttctacctgggcagagttacatattgttaccttaacaatttttttcaataggctctgtccccaggtaacaaattaccttcccttcgctgttctttctgctcctccactaatcaccactataatctgacaaacttaaaattttgaaagtgatttaacttttaaactcagctctagagttttttttctagaaacagaaacttccagatgtagatcatttatttaaatgacatattcctttaaattgatagggagccaactcacaatccccaataatggaaactaggtacagcagacataacctaattccaatgatgatgaaagaagctcatttgcattctctttatcaaactttcaccagagttacagtatctgagagaactggtttaagcttcatcctcttttatttatcttaccgtttctctagtgagaggacgaatgagtcaccggartcaggcaatagggaaaggagatccagggagaagaaaaccacataatcccttaactggataatc

SEQ ID NO: 603305 - DNA, 561 bp, Homo sapiens
caaagaccctgtggcctacaatgccaaaaatatttgctatctgaccctttacagaaaaagttgctgactgttacaatgtggtgtgatgagaagaaaaagaggtatgtccatagtcaacagcccacagaggaaaggatgagctccaaggaacactctcacagagcaggaagtacttaagccgtgcactgagtgagcagaggaccagtcagatagcagcagtaaagccaaaaggacatcaggaaaaggttggaggtgagaaatcaatagggycctcctgaggatggctaggtaatggaggagtggaagaacaaaggtgtggtgggaaataaggccaggagggagaaagggcaggtctcagtaggccatgataggccatgctgaattcttttatgtcagcagtggaaattcatcatggggttttaagaagaagaggccacggatagaaaatagatggaaaagacactagtataaaatccaattccgattctattgcaatgatctaagcaagagataatgacaggggggaaaaaaaagcagtggtagtgggaactgagaggagga

SEQ ID NO: 603306 - DNA, 561 bp, Homo sapiens
caaagaccctgtggcctacaatgccaaaaatatttgctatctgaccctttacagaaaaagttgctgactgttacaatgtggtgtgatgagaagaaaaagaggtatgtccatagtcaacagcccacagaggaaaggatgagctccaaggaacactctcacagagcaggaagtacttaagccgtgcactgagtgagcagaggaccagtcagatagcagcagtaaagccaaaaggacatcaggaaaaggttggaggtgagaaatcaatagggtcctcctgaggatggctaggtaatggaggagtggaagaacaaaggtgtggtgggaaataaggccaggagggagaaagggcaggtctcagtaggccatgataggccatgctgaattcttttatgtcagcagtggaaattcatcatggggttttaagaagaagaggccmcggatagaaaatagatggaaaagacactagtataaaatccaattccgattctattgcaatgatctaagcaagagataatgacaggggggaaaaaaaagcagtggtagtgggaactgagaggagga

SEQ ID NO: 603307 - DNA, 598 bp, Homo sapiens
gatccagagcttcaggactggtggtggagatttgcagttttaaataaggtagccctgttaggtcttattgagaagttagcatgtaaacagacttaattgaacgggtgaagcactagtcatgcataaatctgggaaaggaatgttctacgcaggggaatagccagggtaaatgtcytaaagcaagagcatgcttgggatgttggaggagcagcaaggaggccactgtgactggagatagtaggcaatagcaatagcagataggaggtcacagcaatagcagaagtcaatcctggaggatcttctggacttctgggccatcagagatttttgggtgcatgagcaggatgatctgcctcatattttaaaggaactcctctggctgccttgtcgagtagactgtggtggggtgtcttcatttcccagaactgctgtaacaaagtaccataaactgggtggcttaaaacaacagaaatttattctctcacagttctggaggccagaagtccagaatctgttgggaaactgcattctttctggccagcagagtcccccttcagtaaaccaaattcactaagaaattgtaaaaagtcgacccaaa

SEQ ID NO: 603308 - DNA, 586 bp, Homo sapiens
tcatttaacaagtaaagatctcctttcctatgaaccttactttccagtgagaggagatgggcaatataaaataaacataaattgtatgatactctagaagggaataggtgctatttagagagagaaaaaggagagcaggataagggggatccagagcttcaggactggtggtggagatttgcagttttaaataaggtagccctgttaggtcttattgagaagttagcatgtaaacagacttaattgaacgggtgaagcactagtcatgcataaatctgggaaaggaatgttctacgcaggggaatagccagggtaaatgtcctaaagcaagagcatgcttgggrtgttggaggagcagcaaggaggccactgtgactggagatagtaggcaatagcaatagcagataggaggtcacagcaatagcagaagtcaatcctggaggatcttctggacttctgggccatcagagatttttgggtgcatgagcaggatgatctgcctcatattttaaaggaactcctctggctgccttgtcgagtagactgtggtggggtgtcttcatttcccagaactgctgtaacaaag

SEQ ID NO: 603309 - DNA, 603 bp, Homo sapiens
tttttctggttgcaggcatgcctagtctaagtttttgacaccagtagtctctggtgtcaatatattatctagtcactatgtagtggccactattactggcatctggtttgaaatcttcaaaccagatctcaagcatgaggaagsctcatgggattgaaaattgttccagttgtttttcacttttatttgatatcttaattttagaattgctttagtataagatactgatataaaaattatggaatattagttatttactcagcaaatatttctaagcaactgattttcaagatggtaaggacacacaatgaacaatgtggacacaaaaagtccctgttcttgcataaccttcattctagtgggtggagacagaaaattaacataatgtgtagtaaaatatatagactttcagttggtggttagtactacagaaaaaaataagataaggcagtaaaatgatgtgggcagttttgggggctggggcagttttaaatagggagatcaggaaagacattaaggagaggttactggagccaagacttaaggaggtaagacaatcacataaatatgacagacaagcatttcaagcagcagaacagcaag

SEQ ID NO: 603310 - DNA, 600 bp, Homo sapiens
tttatctcaggtatgttaaaggactgagaaaacaggataaagtcactgaccacagctgatagtgtaaaggccagagccaagtgaacaacctatcactggaagaactgcttgtctcagacaaagagtcagagtgagtgtgaacagtgggagatgatatagtgggctgcagagagatgggtaacagaagggcatggttttctatctttgtatgggaatatcatttgcatgttttaatgtagtttccagatcattgatgtacaaagtggagctctgtacggagcattgtggattgcaatggaacatttgaactccactttcccaggagccagatcaacacctggttactcccacctacacctccccaagtcaagcagcagacaccgatatctgaacaggcrtgtttccaaaggtctggcttgttccctactgggtccccagtgtttagcacaatgccaggtacatcatagccactcagtacatagttgttgagtgaatgaatgttgaatggactccacagcctcacagatttgcaggaaaaggttcatcaactcaatatgacaggtgaaggatcctctcatgtttctgcacctgttggactgg

SEQ ID NO: 603311 - DNA, 600 bp, Homo sapiens
tttatctcaggtatgttaaaggactgagaaaacaggataaagtcactgaccacagctgatagtgtaaaggccagagccaagtgaacaacctatcactggaagaactgcttgtctcagacaaagagtcagagtgagtgtgaacagtgggagatgatatagtgggctgcagagagatgggtaacagaagggcatggttttctatctttgtatgggaatatcatttgcatgttttaatgtagtttccagatcattgatgtacaaagtggagctctgtacggagcattgtggattgcaatggaacatttgaactccactttcccaggagccagatcaacacctggttactcccacctacacctccccaagtcaagcagcagacaccgatatctgaacaggcgtgtttccaaaggtctggcttgttccctactgggtccccagtgtttagcacaatgccaggtacatcatagccactcagtacatagttgttgagtgamtgaatgttgaatggactccacagcctcacagatttgcaggaaaaggttcatcaactcaatatgacaggtgaaggatcctctcatgtttctgcacctgttggactgg

SEQ ID NO: 603312 - DNA, 638 bp, Homo sapiens
caaaaggaagaatagttatgtgagggagcagaacggatggcagtaagtccagatgtcaggcaagtgaaggagtcaaggataacttccaaggtatagagcctgacataccaagggaaatattttattattaacaaatgtagggtaatttagaggaaaagcagattccaagagaaacsatttggtgagctatcaagctagatctaccttgcaggaagaagagatacatggttagaggtatattttaagagttactggcatagaggagctaaggctaatcatttagtgttcctgcagaatgaaagaatacatatttaggatagcagaagtaagagtgttagggttttcctctaatgttggagacaagaagctgaccctagatagcaaatgagaattgggataattatgcccaagaatccaaggaagagatgttttaagctggccggaaaagtcaacagtatagaatgtagcagagtgtttaaaggaaataatggatgacaaaaaaaaaataccatctaatacaattattagctaaaatttctttttttaaaaaagtttaagttttttttttcttttctttgtttttttttttttttgttgagacagagtcttactttgttgcccaggctggaatacagtgg

SEQ ID NO: 603313 - DNA, 613 bp, Homo sapiens
cattttttccttcctttataaaatcattttctttctcccttccttcccttccttccttcctttttctttttctttctttcttttcattccttcattccttccttttttttttttttgagagaagtctctctcttgtcccccaggtttgagtgcaatggctttttctctgctcactgcaacctccaccttctgggttcaaatgattctcctgcctctgcctcccaagtagctgggattaaggcgcctgccaccatgcccagctaatttttgtattttttagtagagatggtgtttcaccatgttggccaggctgatctcgaactcccgacctcagatgatccaccygctttggcctcccaaagtgctgggattacagacgtgagccactgcacccggtccctccctccttcctccctcctttccttccttccttccttccttccttccttccttccttccttccttccttccttccctccttctgtctctctctctctctctctcatctctctctagttttggaactgcctattctaaccctttataactttcctgttgagtttttggtaagttttaaaaataaattttaatgagaattttatagatgcataac

SEQ ID NO: 603314 - DNA, 561 bp, Homo sapiens
ctgtaagactcgtccagtttttgggcaggtaaaaggcagaacttgaattatgtaaacgaaaaataaaatgctargcccccccaccgactgaatgaaccacttcttggccaataggatcccaaagaaacctgacaaactagttcaggctttgatgggaagtgggagaaaatcttcaaatctatacatgcaacaaaggactaatatccaaaatctgcaaagaactcaaacaaatcagaaaaaccaagcaaaacaaaaaaacaaacaaacaatcccatcaaaaattgggctaaggacatgaatagacaattcttaaaagaagatatgcaaatggctaacaagcatagggaaaaatgcttaacatcactaattatcagggaaattcaaatcaaaaccacaatgagataaccccctacttctgtaataatggccataataaaaaaatcaaaagataataaatattggcatggatgtggtgagaagggaacacttttacactgttggtggaaatgtaaactagtacaaccactatggaaaacagtgtggagattccttaaagaacta

SEQ ID NO: 603315 - DNA, 561 bp, Homo sapiens
ctgtaagactcgtccagtttttgggcaggtaaaaggcagaacttgaattatgtaaacgaaaaataaaatgctaggcccccccaccgactgaatgaaccacttcttggccaataggatcccaaagaaacctgacaaactagttcaggctttgatgggaagtgggagaaaatcttcaaatctatacatgcaacaaaggactratatccaaaatctgcaaagaactcaaacaaatcagaaaaaccaagcaaaacaaaaaaacaaacaaacaatcccatcaaaaattgggctaaggacatgaatagacaattcttaaaagaagatatgcaaatggctaacaagcatagggaaaaatgcttaacatcactaattatcagggaaattcaaatcaaaaccacaatgagataaccccctacttctgtaataatggccataataaaaaaatcaaaagataataaatattggcatggatgtggtgagaagggaacacttttacactgttggtggaaatgtaaactagtacaaccactatggaaaacagtgtggagattccttaaagaacta

SEQ ID NO: 603316 - DNA, 561 bp, Homo sapiens
ctgtaagactcgtccagtttttgggcaggtaaaaggcagaacttgaattatgtaaacgaaaaataaaatgctaggcccccccaccgactgaatgaaccacttcttggccaataggatcccaaagaaacctgacaaactagttcaggctttgatgggaagtgggagaaaatcttcaaatctatacatgcaacaaaggactaatatccaaaatctgcaaagaactcaaacaaatcagaaaaaccaagcaaaacaaaaaaacaaacaaacaatcccatcaaaaattgggctaaggacatgaatagacaattcttaaaagaagatatgcaaatggctaacaagcatagggaaaaatgcttaacatcactaattatcagggaaattcaaatcaaaaccacaatgagataaccycctacttctgtaataatggccataataaaaaaatcaaaagataataaatattggcatggatgtggtgagaagggaacacttttacactgttggtggaaatgtaaactagtacaaccactatggaaaacagtgtggagattccttaaagaacta

SEQ ID NO: 603317 - DNA, 571 bp, Homo sapiens
agttcaggctttgatgggaagtgggagaaaatcttcaaatctatacatgcaacaaaggactaatatccaaaatctgcaaagaactcaaacaaatcagaaaaaccaagcaaaacaaaaaaacaaacaaacaatcccatcaaaaattgggctaaggacatgaatagacaattcttaaaagaagatatgcaaatggctaacaagcatagggaaaaatgcttaacatcactaattatcagggaaattcaaatcaaaaccacaatgagataaccccctacttctgtaataatggccataataaaaaaatcaaaagataataaatattggcatggatgtggtgagaagggaacacttttacactgttggtggaaatgtaaactagtacaaccactatggaaaacagtgtggagattccttaaagaactaaaagtagatctaccgtttgatccagcagtcccgctactgggcatctacccagaggaaaagaagtcattatacgaaaaagatacttgcagattcatgctttcagcagcacaattcgcarttgcaaaaatatggaactggcctaaatgcc

SEQ ID NO: 603318 - DNA, 602 bp, Homo sapiens
ttattattttatttcatattatttcagagttattagttcattagggagactaaaaatgtctaatttactaaacaaggtatttgttaaatactcctaagtggcaagcactgtgytatgtacaaagcatacaatgatgacaggagacagatgaggtctctgatcttatgcagcccactgtctagggggaagtagataattattaatcacataaataagagctcaattgcctcagtcatcagtgcacaaatcagaaaggtgtcataaacacacagaggagaagtgtttaacctattcagggagatcagcaaagacctcctcaaagaaattaagaaattaccttggaggtgcaatctgtaccatgagaataaatttcctaagagaaacagggtttgggtgggaggaaaaggggtaacagttgggggactgcatgtttaggagcctagtgagggacaaggtggagttttggggtagtgaaaggtcaacgcagagcacaacacagagaataatgtgagatgggaccatggaggtggggagaggacaggctagccaaggcttagtaaagccatggtacagattctggatggcagccaatgaagacttca

SEQ ID NO: 603319 - DNA, 620 bp, Homo sapiens
aaggtggagttttggggtagtgaaaggtcaacgcagagcacaacacagagaataatgtgagatgggaccatggaggtggggagaggacaggctagccaaggcttagtaaagccatggtacagattctggatggcagccaatgaagacttcataaaaagtgaacagacttgatgtttgaaaagaacgctggctgcgatgcaggggacaaattggataggattcaaaaccagttgcaggagaacaagtagagggtgccataggaatcagagggtgagggacaaacatagcttgtcctagcaaagaggtgaagaatgtgggggttcagtcaggctggtgggaaaaattttagttttaatagccacaaaccctcttggaaggcctgagagtttgcataacttcrgtaataaatcaggctgaaggcagcctagtacccttactttagttaaataaattagagtagaaacaaaggaatgtggggagtttctctaactaacttgtttactcatgtggtcttaagattaacctttgttctactgtgggtgcttaaatgcattctactcaggaagtccacaatgtcagttaccctctagtggtgttgactcaagcctttgtcaattaat

SEQ ID NO: 603320 - DNA, 538 bp, Homo sapiens
tatgtgtcagtgtattttattcattcattgttgggtcagggtctgcgggtcagacccccacaaagaaaatggaaagaagaaggcctattttaataaatttagaatttacttaaagataaacagtttcttcctcattttatttctctcaaacaccaaggcttcagaatagcctttctttattgataagatttatgtaactgtccttgacggtgcaaattcagaggacctacctagtgtcaaactatctgttatatcaccattttccaaactacattccactcagcaattgtatatcacaaaatatatgcaccataaaaacagtccaggtgatacaacctttgggaaactgcacagtaaatcccyctttgtatacagacagcttcaaggtagccttcagtaaagcaaaatgcatttgatccgaaactagttgtcttctgcttggttggtttgttttggaaaccttcattaaccttcttgaaaacccatgaatacagttttgaaaatagcaccataataatttatctcaagttcaatgaga

SEQ ID NO: 603321 - DNA, 408 bp, Homo sapiens
gttctgtcttatgcatggcctgctccgtgtctgtgcactgagtttatcttgcttggtttccctgagcacaggctgctcatagccagtggcccttgtgtcctggataactgcatggattacattgttcccagaaccaagtcaggaattytgaaatctttgctcctttctgtttgtacctgagactctcatggttctgaaaaaaaaaaaaaaaaaaaaataaaaaaaaaaaaaaaaaaaagccaatatgcacaactaatttcagggtttattttctcaaggcatttaagcaaggctggccatgtggggtgaagtcctttctctgccacactggggcctagtgatgaccgcagagggtagactgagcagagggatgctggcggtgtttctctctggagctaaatacgttgc

SEQ ID NO: 603322 - DNA, 614 bp, Homo sapiens
gtgggtccaagagaagccctggacagaggtcacagtggccacagggatttttgcctgacaaagtggcactgaaggaatcctgtgtcatttctgggatcttgtccgggatctgcagaagggtaagttcaaacctatgactctttacygtcattctgaggcttcttgtcttcagattttttttttccaaaagcagatgaaacaccaggcctctgttccccagttaagagtgagtagtgtggcttccaggtttacaagactcagaggagaggtttgctggggaggactttgtcaatcccccatcacccttgggtgttgggaatgttggctttgtttcaattcagtttccattcatggaggtctagctgtcacatgggatcagaataaggtcctaggacaactgaaggtatctggccaaggccacaccttggtgctatccaaaggctctcagaccagctccagtccccaacaacctgttatggtattggcaccaagactgatgatcttcatattgcattttctttcttttgagaatgccatggctgctacccctctttacatacaatgtaagagtgttgctgcaaaccacagagataatattactgaagagagtaagc

SEQ ID NO: 603323 - DNA, 508 bp, Homo sapiens
catttctgaaaggatactgagattatccaatttcaaataaggaacatcagaatagaacaactgtgtgaggtacagactgagattgcttttgtgtagcaaacagcacagtggccacagagccagcatctcacaaggttatttagtagctttaaaatacagtcgacacttgaacaacagaggtttgaattgcaygggcgcacttacgttcagtgtgtgttctgcccctgccactcctgacacagcaagaccaactcctcctcttcagcctactcaacgtgaggatgatggggataaagacctttatgatgatacaccttcacttcatgaatcgcaaacacttttctcttccttatgacttttaaaacctgttctttactctagcttactttatggtaagaatatagtataaaatacatgtaacatataaaatatgcattaatttgttgtttatattaaaggcaaggcttccagtcaactgtaggctattaatagttaactttgggggaat

SEQ ID NO: 603324 - DNA, 523 bp, Homo sapiens
aaatctaggcagagaattccaagcctcaactctcacactctgtgtacccacaggcttcacaccatgtggaagctaccaaggcttacagcttgcatcctttgagcaaccctagtacctgggcttctttgagctatggctggagctggagtggctgagatgcagggagcagtgccccaaggctgcacaggggagtggggccctgggtcttgctcatgaaaccattcttccctcctaggcctccagacctttcatkggaggggcttccatgaaggtctctgaaatgccttcagggcctttttcccattgtcttggctattagtacctgccttccttctagttatgcagatttctgtagcctacttgaagtcctcccctgaaagtgggttttccttttctaccacatggccaggctacaaattttccaaacttttacactctgctccccatttgaatataagttttagttttatgtcatttctttgctcacaaatatgagcataggctgctagaagcagccaggccc

SEQ ID NO: 603325 - DNA, 602 bp, Homo sapiens
gtcacgcatcacataaggatgcttcaaagacagaccataagattataatagaactgaaaactttctagcctccagtactgtactaagatttcagtgcaacatattaactgttctgtgtttggatatgtctacgtacacaaatactttgtgttacaactgcctacagtattcagtgcagtaacatgctatacaggtgtgtagcctaacagcaataggctataccatagagcctaggtgtgtagtaggctatgacatttaggtttgtgtcagtacaatctatgatgattgcacaatgacaaaattgcctaccaatgcattttttagaatgtatccctattgctaagcaatgcataactgaatttggtgtacaatgtgatgtcttgatatatgtgcatacattgtaaattgactaaattaagcttgaatatatccatygcctcatatatttatctttttttgtggtaagaacacttaagatctgccttcttggcaatttttaagtatacattattaacaatggacaccatgctgaaaaataagacctccagaacatagtcctcctgtctacctaaaactttgtacccttttattaacacctcccc

SEQ ID NO: 603326 - DNA, 539 bp, Homo sapiens
atatgtaagtgagatcatgtgacatttgtgtttctgtgttggacttattttatccaacataatgtctttcatgttcatctgtgttatcacaaataactggatttcattattttccaaggctgaatggtattccatcatttatatagaccacattttctttattcatttatctcttgatagatacttgatagatayagatacctcttgaagacactgattttgtttcattgggatatatacctaggagtggaattgctggatcatatggtagttctattttcagttttttgagaaacctccacgctgttctccatagtggttgtgccaacagtgtatctcctggctctcgtcgtcatgcaatgttgaagaacacagactctggagccagacccatctcacactcatgaacactatgaattcagccatgttgttggcgtcacagtgcttgctctagtgttctttctgtaagatgagaatgacaatggtacctactcttatgggaggtatgaggattaagcagattaacttacatgaggcac

SEQ ID NO: 603327 - DNA, 603 bp, Homo sapiens
ttagcttatatacatataattatgtttggagtgtttagtctgttagttttcttctgtttcatattgcttttggaggtgaaagaattttcatcagcggaaatgttataatttgccttttttcagagaatctttatatgaagtcgctttgattttttcccactcataggcatttgtggacasgattcctagttcaaaaacctcttctccatcagtttagtaaaccacagtttattaaatggtgatgctggtattggtaaaaggggagaggttggtgtgttgtgtctgaaaattaagcacttcttcctataccttctttctctgcctgacacatctctgacaggtaccactccttgtcaatatgaattctttccaagaagcagtgtttcctggaagctacaaaatccagtgctgctcactttttaaattgccaccctgtggccactcacagcccaacatttagcagattagactcagtgttggagttttcttagagtgattgctctacacttcattttagtttcttactcttctcttctatttttcctggaatctctgaagactcaactatcctgttctccaaagctaatggcttgcaatggtgat

SEQ ID NO: 603328 - DNA, 643 bp, Homo sapiens
tttgcttttgagttcaggtttgattgtgtagacccacaaaagggatttctgtttcacaccttggaaaactctgtgcagaggtacgtattgtaccattagtttatgatgattggtagcattgtttatatcatgtttatgtgtctaatttcttcaattaaattggcagtcttcctgtttataaagactgtggcttatgcttctttgtacctcataacactactcacattgtcctatctgctgcatacaaggtacaatttcaaataaaaatgaactactatttatccagaacttttmatatgtaatctacagaggggatacaaaagaaacagtgtattagtctgtttttatactcctgtaaagaactgcttgagactgggtaatttataaaggaaagaggtttaattaattcactcttcagcatggccctggaggcctcaggaaacttacaatcatggccaatggcgaaggggaagcaaggcatcttcttcacaaggaggcaggaaggacaagtgccaagagaagcaggaagagctcctataaaaccatcagatcttgtaagaactcactcactatcatgagaaccacccccatgaccccatgattcaattacctccacctggtttctccgttgacacatgaggat

SEQ ID NO: 603329 - DNA, 506 bp, Homo sapiens
accatctactgtcttttgtaccaattataagatagaaagggcccacacatgctacaagccctcttttctcttattccatatccaggattcctaggttttgaaaggtaaacacggccacagaaactcctctgctttctccagctcctgggtttatcctgcaagtgcacttgcacagacagattacagaagggtaaggcatggtagtgagacacacaaagaagacctgtaacccagatggttacagagctcaaaggactccacgaagattcacaaggaaactggggccyctctgcttaaaaacgtagtgattcaccttgctcttggggtaagcaaagagcaccatccatttcctagaaggccctctgccccagcccctgccttctcagcctctcttttgccttcactcctcaccctgagagtcatcatgtggtgttctcctgctcccgcagggcactgtgccccatcctgctggagatctttgcaaagcctagtcttccttcctaact

SEQ ID NO: 603330 - DNA, 506 bp, Homo sapiens
accatctactgtcttttgtaccaattataagatagaaagggcccacacatgctacaagccctcttttctcttattccatatccaggattcctaggttttgaaaggtaaacacggccacagaaactcctctgctttctccagctcctgggtttatcctgcaagtgcacttgcacagacagattacagaagggtaaggcatggtagtgagacacacaaagaagacctgtaacccagatggttacagagctcaaaggactccacgaagattcacaaggaaactggggcccctctgcttaaaaacgtagtgattcaccttgctcttggggtaagcaaagagcaccatccatttcctagaaggccctctgccccagcccctgccttctcagcctctcttttgccttcactcctcaccctgagagtcatcaygtggtgttctcctgctcccgcagggcactgtgccccatcctgctggagatctttgcaaagcctagtcttccttcctaact

SEQ ID NO: 603331 - DNA, 560 bp, Homo sapiens
ggcttcatttgatttgcaaggggctggccctccatcatgttttctgattgactgattggctctggytttgtacatcccaagcaattttccaagaatctcttcctttctcctacggaaaccacagtttctccttatattgtagtaactaacattgaggggtttggggttggaggtgcaaatctggtcatagcatttaaaaagaattgtagtagtactgaagaattctactgttaaataaaatttatgggaagccatgcttttagactgagctcctgcactaggccccaacagaacagaccaaaccaaaatggagtcactctgatgatagtttcttttgctgtgaagaagctctttagtttaattatatcccatttgtcaatttttgcttttgtttcaattgcttttggcgtcttcaccatgaaatctttgcccatgcctgtggctgcatagtattccatagtgggtatgtgccacattttctttatccagtctactgttgatgggcatttaggttccattccatatctttgctattatgaaatgtgctgagatgaacacac

SEQ ID NO: 603332 - DNA, 560 bp, Homo sapiens
ggcttcatttgatttgcaaggggctggccctccatcatgttttctgattgactgattggctctggctttgtacatcccaagcaattttccaagaatctcttcctttctcctacggaaaccacagtttctccttatattgtagtaactaacattgaggggtttggggttggaggtgcaaatctggtcatagcatttaaaaagaattrtagtagtactgaagaattctactgttaaataaaatttatgggaagccatgcttttagactgagctcctgcactaggccccaacagaacagaccaaaccaaaatggagtcactctgatgatagtttcttttgctgtgaagaagctctttagtttaattatatcccatttgtcaatttttgcttttgtttcaattgcttttggcgtcttcaccatgaaatctttgcccatgcctgtggctgcatagtattccatagtgggtatgtgccacattttctttatccagtctactgttgatgggcatttaggttccattccatatctttgctattatgaaatgtgctgagatgaacacac

SEQ ID NO: 603333 - DNA, 472 bp, Homo sapiens
tgtctgcttaaggtctctgatttatatgggcacagtatggggtgcgtggctggccagagtgatctcggaaaatgcaacatttgggcatgaaaacaggagtgcctgttctcacttaggtccgtgggcacaggcccaagggtgcagccctacctgggaccccacccctctctacccagcacttccctgcccccctcccatatcaataggattatgcagtaggtggtgatggggtgttgtgaccttttgaaactcttaagagatgtgygtttatcagaagagaactatggggataatgaatcctgggatctgaaaccctaaatttaatagactttacagagggtcttaggtatatctggcacgaacaaatgtcttaagtggtagattaaatggtgggcagtgtgaaatgatcgatttcttcatttgcttggtaagaaaactagcacaacccttacatagttttgctgaatccaaa

SEQ ID NO: 603334 - DNA, 504 bp, Homo sapiens
tttctcttgttaatctgtctttttattataggtgcctccaccgttaacmttgtgttgaataagaataaagatattatttcttccccctatacagggagttgaaagatttgataaataagaattgtgtgctattttggtgggctctctgccaggcagtggcaagtaaagcatgaaggtagtgtgccttcttcccagacatagcatgacagcatcagaggacctctccagacttacactggaattcatgaaccaacatttggagatggtgttaaggttcctcatgtgatttaatgcacttgaagccttcttatttctctgcagtcaacttcttcctcagtagaggcacattaatcctttggcagaaacccagttcctgtcatagtgatttctttaattttaccttcatgtccttgacattacaacctttattttgatttgactttatttttatttataaaagatatttaaatatttataattattttgatttcccagtcaattctt

SEQ ID NO: 603335 - DNA, 408 bp, Homo sapiens
gaattctagcggcgctttctcccgctctmgcctccgcgctagcgccctgctgcttcggggcggaagtagcggagccgggctcggcccccttaaagggacagggactgctgcaacctacggggtgtacttgggaacgaggggtgaagcggcccaggtgagggtgagtagctgtgtcggagcgccacttccccaaggtcaggtgccgaggctgggagggtcggctaacggttccgagcttggttgtgctagagtgcttaatgagtttgatgctactaagtataacggagtggctgcacagaatgattgagccgcccgcgggaatcaactgcgcgtgctgctcgctgattctcgctcggacactggggctggtcctgtctgcacccaaatccccctcccacgaccgcgccg

SEQ ID NO: 603336 - DNA, 592 bp, Homo sapiens
atataatacatatatatggatagaattgttaaaatgagcatatattacttttgaataaaaaaattaaaacataaaataagcacaataacaaatgcactatacattaacaatataacattgctatgatttcacaagcatcaaattagaatgcacaaagaggaggacagaatcatttggcatacatgtgaaaaattcataytttttaaagatcaagggtaaataaattttcatgtggtctttttatccaaaaacaggtagggctaatactattaagccaattctaaagacaagaaaactggaacataggaagaactcagaattttatcagataaatttaacaaagatattgaaataattaaaaagaatcaagcagaaattctagagttgaaaaatgcaggctgagcacggtgtctcatgcctgtaatcccaacactttgggaggctgaggtgggaggatcacctgaggtcagaagttcgagaccagcctggccaacatggtgaaacctcgtctctattaaaaatacaaaaattagccaggtgtgatggcgtgcctgtaatcccagctattcaggaggcagaggaaggaaaatcg

SEQ ID NO: 603337 - DNA, 590 bp, Homo sapiens
gaagaaaatggttaacatatagaaataaaagcgtacatataaaaagcaaataaaaatatttaaaagtgaaaaaaaaaaaagatctgaactacttaaagataagtaattcatgtgcagagtgaattacttacacgtccctgcacagacttcastgggtcgcttatgctgctttctcggcctggaaaatctctctttcatttgcctccctccacactgaacattctcattttcagttcaaaactttcctcttctgtgcagcctgtcctgacaatccctggcagcattaaaagcaccttcacttggttcccattaacttcattacagtcattaccactttaaattgtaattgtttgtttgcatgacttcccactacaaagtaaactctgagagcacggctgtgtttgcctaccatctttgatcttaaatacacatcataatgcttggtacttggtaccctcaatagatacctgttcaataagttgcacaaataaattataataaccaaaattgaactgaagaagttttaaagtaaaggagaagcctttatgtgcacagtagtcagcaatgcttcaaatgccagcagggagcta

SEQ ID NO: 603338 - DNA, 524 bp, Homo sapiens
agactattaaattcctctatccaaaggcgtgggccttctctatttatgacatctgtattattctcttctatgttctttattagagttttacattttctttacagaggtcttgtgtacttttggtgaggttaacttctagacactttgtagtatctagtttgttgatactgtgactggtatttttcttttttcaaaataacattttcttgttgagttttgttagcacagagaaattatttttaagattgatcttgtatctggcaattgtgttggttcttctagacagatgatcatatctacctagaagacaatttmatcactggttttccaatccttatctttcttttcttttacttcacttgtaacattgatctcttgtactaagttaaaagtaatagtgaagatggaatgcattatccttcataggtgtgaaagcttatcagctgttccttctgtgccaattgttattattatatattatgtaatttatttacatgcattttaacaatttatatataattact

SEQ ID NO: 603339 - DNA, 594 bp, Homo sapiens
acaaccatctccatacagtccttgtttgcttcagagtcactggtatttgtggttggtaccamactgaaaggaaacagataaaagaccagaaatcagatgtatcatggcctgaataaagatgattacatattttcttgcaattactctcagatatacactatgtcaagaaaaactggaggcagaaaatcacagagaaaaaagtaccatgactgtcaacaaactcagtataaagagccccatgaaggaagctggtcaaatgttgctcttatattttagggaagtaaatcaaatatagccaggcgataccagagaaacaaatataatccttatttgggatttttttccagaaaaaatcatttactgagttcctgactgtccaattcctccttccactttaagccagttatatgtcacaactagagagagaccattgacttttgactaccaccctccaatgaccactccattttccactgctccttctccaccagccagacaatttaatcacccatcttcttcaataactctgtcttgtggttactgtcatcccgaaatagctcactattttataattatttatcatccatttctgtc

SEQ ID NO: 603340 - DNA, 528 bp, Homo sapiens
ccattgacttttgactaccaccctccaatgaccactccattttccactgctccttctccaccagccagacaatttaatcacccatcttcttcaataactctgtcttgtggttactgtcatcccgaaatagctcactattttataattatttatcatccatttctgtcttatatttggctatrccatagtcacctttgcaactatgttcagcacactattgaccatgtagcagggctttttgtgagtttattaaatgaatagatttggatcaaaaaggaaaatgccattttcaagtgctctgtgtaaatatatatgtacatataaacacatattgttactcactgaaccgtcttttagaaattgaaatctatagattaattgttatctgcacatagggctctttggcttgttcttgattataagcttgttgattttaggcacagttttaaagttatttctttttcatatgtttccagtgaagtgttagcaatatgtgaatttgaattgaactaaacttaattaagaaca

SEQ ID NO: 603341 - DNA, 609 bp, Homo sapiens
ctagtagatgtgaattagtatatcattgtggttttgatttgagtttccctaatgactaatgaagttgaacatctttttatttgcttattggccatttatatatctactttggagaaatctctattcaagccctttgcccattttaaaattgagttgtttgtctttttgctgttgagttgcagaagttctttatatattctggatattaaacctttattggatatgtgattcaccaatattttctccmagtctgtaaaaggttacacttttaaaagctttcctcataatattctttgatgtttacaattttaaaaattttgttgaagaacaatttattgatttttttcttttgttgtacatacttttagtgtcatgccaaatccaaggtcatgaagatttatccccatgtttctgtctaagaattttctggctttagctcttatatttaggttgttcatccatttcaagttaatttttgtatatggtgtgaggtgggggtgaaactttattctttgacatatagaaatcaacttgttccaccaccatttgttgaaaagaccattctttccccaataaatggttttggcacccttctcaaaataaattact

SEQ ID NO: 603342 - DNA, 574 bp, Homo sapiens
aaatcattgcaaatcgctagacaaatggaatggtcttagcatcataatattaatttatgtggcatatgcggtataactttcatctgcagagcatctcagattaaaatgacttacaggattaaaraatagttggggcaggctgagaaagagccagtctagaagacaaatgcaccaaatggatatcgataagcttaacacagggatcacttcaccacactactgggcgccagacaactcagaggtgaaataccatggctattaactgctagagcagtgtctcaatttaagaaagagaataaagaaaaatagcctgctcataaatagtgcacaaggggattttagaaggcacagtacagtgaatacaattagaatcacttgggagaactgtggagtttcatctcatgcgctttagccttttctccctaactatgctatttcttaaaagcaagatgcgggtgttattttttaatatatcctcttttcaccataacaactcaaagacacacattcacagtatacatacacatacgaggcagtgttcaagggtacctgccagccattcggtcaatgaacg

SEQ ID NO: 603343 - DNA, 634 bp, Homo sapiens
tgtaatcagaaaaaattgtaaacatgttcaccaacaggagaatggacaaattccttgaggtaaatatgaagacaatgaaatactatacaacaaggaaagtaaataaaccttcatgtgtcaacatggataaatctccaaaacaaaatattgcatgaataaaagcaagatgcataaagatatatacyatatgataaaaatttatacaaagtttggaagcaagcaaaagactactttatattcttacaaatacacacagagaatatgtagagtaatggcataaaaacctgtaggggacgataaatataaaattcaggaggatcattaactcttgagaatgcagggtgggtagtgggtatgaagtcaaggagggctacataagaagcttcaactaaatctacaatgttttatcaaccaaaaaaatggaagtaaatttgggggaaatgttaaaatttgttaaggctgggagaaggctatatggatgttaataatttacttcttatatttttgtatatatttgaatatgtttatggccaaaaattataaagtttcaaaatctgtaattttagtccctgggctcatcacacggtctggcacaagcttccaccctccccagttctcatgcatggctcatcaa

SEQ ID NO: 603344 - DNA, 600 bp, Homo sapiens
ttctaaaagaaaatatgactattgtatacttccttaagatatttaatggctctgcagagaatttggaaaaaatcctaatttcctagcataacctaaaggctcttcctgatgtgagttcaccttgggtttccttctcacctcctcgatgttgagcttgagccacactragtgcccccagccccttgaatgccgcggaagtgctctccaatcttgtacatgctgttttacctcctttatgtctccccctccttctctccctgagaatctgctcctgactctgggttaaatgtccattttaagggcatccacatcttctggtacttctcttttcctggctgcaatcatattgcattataactgcccttttacttgcctgttaggtaagaagccttgaggtccttgagggaagagttggtattttatttgtcttaatatatctccaacacccagtacaggaggtacagcaggttaactcaatcacttttggtgtgtaatgaatgaataagtatctcagtattacataagagtgtatcaaggattcagatatggagagaagggggcagtggatacttactgttcctggttcgcaatcaggcagaa

SEQ ID NO: 603345 - DNA, 539 bp, Homo sapiens
cgagtcactaaatactatcaaagctgccttctgagggtccccctactttcattccaggcttactccatgaaaacattcagatcgtgtgactcccttactttttaacccctctagcagcttcctttgcatttagatttgaggtctttataatggtctgtgaggtcttgccatgatcaggcttctgccttccaatccagactccggtcaccgttttctccttcattkgctgcattccagacactttagtcttctttcagtttctcgagtgctcaggtctctttctcacttctgcatctcctcttatggtgctcttccctctgcctggaatgccttccccttgccctttgcatgactgattgcttttgttgtttcaggtcttagcttgggctgccctggacacactttctggtgggaccctccatggcactccatcactgcatgtttttcactttcttcatagcatttctcaccatctgtaattatgaattcatcttttgatttacttgattgctacttttcaatccttaccagttgaataa

SEQ ID NO: 603346 - DNA, 593 bp, Homo sapiens
agagcaaactgagactaagagaggtcagtcttcctcttcaaggtcatgcagatgataaggggatgatatggtttggctgtgtccccacccaattctcatcttgtagttcccataatccctatgtgtggttggagggacctgrtgggaggtaattgaaccatgggggtggttcccccatgctattctcgtgatagtgagagtaagttcttatgagatctgatggttttatagggggcttcccccttcactcaggtctcattcttccccttcctgccaccttgtgaggaaagatgtgtttgtttccccttccgccatgattataagcttcctgaggcctccccagccatgctgaactgtgagtcaattaaacctttttcctttatgaattacccagtctcgggtatgtctttattagcagcgtgagaatggactaatacaatggatggccaagttttgaactttaatcttgcggtcttccaagacatgagaaattaaactgtaagctaacagttattgcatacttatctcttgtgtcagacactgggttaagcacttttcatgggttagattattcaatctttacagtaattcat

SEQ ID NO: 603347 - DNA, 593 bp, Homo sapiens
agagcaaactgagactaagagaggtcagtcttcctcttcaaggtcatgcagatgataaggggatgatatggtttggctgtgtccccacccaattctcatcttgtagttcccataatccctatgtgtggttggagggacctggtgggaggtaattgaaccatgggggtggttcccccatgctattctcgtgatagtgagagtaagttcttatgagatctgatggttttatagggggcttcccccttcactcaggtctcattcttccccttcctgccaccttgtgaggaaagatgtgtttgtttccccttccgccatgatyataagcttcctgaggcctccccagccatgctgaactgtgagtcaattaaacctttttcctttatgaattacccagtctcgggtatgtctttattagcagcgtgagaatggactaatacaatggatggccaagttttgaactttaatcttgcggtcttccaagacatgagaaattaaactgtaagctaacagttattgcatacttatctcttgtgtcagacactgggttaagcacttttcatgggttagattattcaatctttacagtaattcat

SEQ ID NO: 603348 - DNA, 601 bp, Homo sapiens
gaagggagacagtggtaagttaaagatgtatattatcartcttagaaccaccactaaattaacaccgcagagactcatagttaaaaagccaaccatgttatggtagataacatgggatcataagggatacttaactaatcccaatgtaaggttgatggatataaactttatcgtgattgtgctaatggcttcatgagtatatacatataacaaagcttaccaaactgtaaactttatgtacatattattgtatgccagttttcccttataaagccattaaaaagttaaggtgggtctaactactcactgtatctgaaataaaattttttttaagcaataaaatgttccatagttcacattaatgtgccagaaattcaactccataattttggagaataaattagaattgtagaagaatggtatttaaaagagctagaagatatcttagaagccatctagtcctccttcctcatttcatttatatggaaatgaaggtccagataaataatgtgagttaccccaatttattaccaatcatccaagatgagaataaacaataataaaaaagtaaatgcttacttaatttgtctttttttgtgaa

SEQ ID NO: 603349 - DNA, 596 bp, Homo sapiens
ttgtggtggcctggctccactcacccgttagggccctaaatattttactgctttctaaatgaaactccctcccataaacataggaaagactctgttatcataatacacatttacctgaaacactctaaactattatctctaaggccctgtgcatttgtaaacctgttatcttgctgaggtccagagaggaggcagcttatggatatctgtgtaggagcagagagtaggcttgttgggcaagatgggggacccaggttggggatgggggctggtggtgagccaggtgtgaagaaggggcttgatgggagacatcagcagagccttgatgctcatgtccttcctgcttttggtagcttagtaagaatttagctcagttgaattagctcagtggcaggatgaattgacactagctgctgatctcttcagtcctaaagctctcrttgtcatacagtcaactagatattcctcagccccctttttctgtaaatatttagaacatcatggagtatgttatttctattggtgccctttctacaatatacctggctgtgctcaacccagaaacccctatccaggaggcaaacagatgagagcct

SEQ ID NO: 603350 - DNA, 514 bp, Homo sapiens
ggtctgctccaatctctagttgcctcagaatttttagtacctggaggaatcaccaatgaaggctgcaaaacaggaaagatggcagtctgcctcttcctctgagagctccatcccaaggaggtatggacttctttctggcctgaaaaaacctgtaggaggtggctgatgaccccaggagggtcccacccaatcaggaggaatgagattggggacccacatataaaagtagtctggccaagtttttatatagcagctttgctgtactcaggktctacttcagcccctggtcactttggatactctgaagcccaaaggttggaacagctaagtcacccaaacagcaaagatggtggcctgcccctccttctgggagctctgtctcaggtaggcctgaaatctctgtcagctggaggacattgatgggggtagccagagaccctggttgggaggctccacctggtgatgaggaatgggttcagggactcacttaaaaaagtagtctggcaatgttttt

SEQ ID NO: 603351 - DNA, 438 bp, Homo sapiens
ctctgttctagttagtcacagaggtcagattacattaactgcttctaccacatcagcatgagctctggaaattccaaaaggactgaaccagcaacaacaacatccaggctcaaggcaagatccagatagatttggatgaggaatcccagggcagttkgttggccagagtgaagccacataagactcctgaaccgggcctataatcaaatccaggaggagtgaagctaatcaaaacagcaaatagaagtgaagactgctaaccagaaggttgataccaacacatttctgcaaagcaagcataggctatgacagtgagagaaaggaaaagcagcaagttttaaaaattgaaagagtgagtgggagtagaaagggaggtaaatgcattgacatggtcaagggtctgtaacatagaagcaggctgtaaggatgtctcagggg

SEQ ID NO: 603352 - DNA, 646 bp, Homo sapiens
tattttatgtcatcaagttcattatttttctttggaggtagttttattcttcaggtacttaagtatttgactgtgagctttgattttcttaaggatatcagctactctgtttggtaatgaggagacactggtcaaacagtagtctgttggtcctggcaagttgaaggagactgaagagggtatctcttaggatggaaagccccaagtgccacaaattcacagtcaattctgtttgctatcatcccttcccttcccccaccgtcaataggagttttaggggagagtttctttttaagttattatttcatatttcatggatttcatgtcttcctctgtcatttyctccaagctcagtttggggaaccagcagtctgtgttagttcaccattttgtccaaaactgaaaactctttggttttgatcatcacctccttattttgtgagcagggtagagactcaaatatcctctccttaaagtcctgatgaatggcaacataagtaatgatcctttcaaatataaaggtcacaatagttgatttttaaaaaattgtatttgaaatatgaaacagctgtctccaagaaaagagagcaaagctttgttttttcctttttggactctgagatagcagtgtggtctgctttggagc

SEQ ID NO: 603353 - DNA, 533 bp, Homo sapiens
gaaaaccccatacacccctaaatctccsctcattttatttcatctcattgtaaggggcttgcttattcaacttatcaaggacacagacatggctaaaatgtcagcatccatctaacttatttcacttgtgatccaaaatgatattgaaactctgctctcctgagagatgaaaagttggtgggttattgcatttgttggtttgttgcttaaaaatgattaattgtgttcagagctcctcagctgtttctcttgccctagtgctgaggtagtgaactgggatgggggctgggggaagaaacaaggcaagggaggcaggtcagttttgctttcattgacagtgaaagcagttaatagtttatggagagcaagctcccttgctaaactttgctgccagtactgccgctgcggtgagatgatgtctggggccaaccctttgttggagggggcaggatgatggggcaaataatgacaagggggctccctccttccgtttattatccacagtttcaaaaaagtgaatgcaagagaaagag

SEQ ID NO: 603354 - DNA, 533 bp, Homo sapiens
gaaaaccccatacacccctaaatctcccctcattttatttcatctcattgtaaggggcttgcttattcaacttatyaaggacacagacatggctaaaatgtcagcatccatctaacttatttcacttgtgatccaaaatgatattgaaactctgctctcctgagagatgaaaagttggtgggttattgcatttgttggtttgttgcttaaaaatgattaattgtgttcagagctcctcagctgtttctcttgccctagtgctgaggtagtgaactgggatgggggctgggggaagaaacaaggcaagggaggcaggtcagttttgctttcattgacagtgaaagcagttaatagtttatggagagcaagctcccttgctaaactttgctgccagtactgccgctgcggtgagatgatgtctggggccaaccctttgttggagggggcaggatgatggggcaaataatgacaagggggctccctccttccgtttattatccacagtttcaaaaaagtgaatgcaagagaaagag

SEQ ID NO: 603355 - DNA, 639 bp, Homo sapiens
tgagatgatgtctggggccaaccctttgttggagggggcaggatgatggggcaaataatgacaagggggctccctccttccgtttattatccacagtttcaaaaaagtgaatgcaagagaaagagaccataatggggaaaatttgacatcatagcctggtgatcccagtgaggctggtgccttctgtccctgcctcttgcttctggagcaaattaggcttatatgaggctcagaatctcccaagaaccgagaagtgcagtacattttcctgaaagtcayggtgacaggtgggaatgtggccaaacaccccacaccattcgttcatcatctcttttaacaggctgctgctgtgcaaggttctcaggggccaactcgtgctagccagctccccagcctctctgacttcctttaggaggctggctattttgccttgcctgaccttggggtgtggtggaggagagaatttcaaataagtgaatcaacttcatcagaaagcctgcttagtgttttattttgtgctacatgtgaatagtaagctcatttcatttccacagcaattctttatttaaaggtaggtataattttctctgttttacaggatatataactgaggtccaggaagttaagtaaattccctaa

SEQ ID NO: 603356 - DNA, 616 bp, Homo sapiens
tctctgtctgagcagcggcccatcgaatccccggtaaaacatattttcctacggtaatgattttatgggcccataagtcatgaatttattatgatctcagcccttgctgctgattgctgtaaaatgcaaagtaattaacagcgagcggtagcagttattcccacctggtaacgtgttccttcgttcgctgatgggtttgattaaagtaatgactaaagagtgaagcccggctgtaaaatattagcatgattattgctgtatcctaaataagaaacaaaactaatgggtatggtctgagaaattaaaaaaatacacacacaatccttcctctccccccactcccatctcccttaagcaattgttatggctcatttaaggtgtgtcttccttcccattaaataatgtatggattccaaggccagaggctggctagcagagcmtatcacacagttctcataacgtttaaagtgctggtgttaagttatttccttttctcttcgatgtgcagaatggagcttggatgggggtattatttgagctaaagcctacagagctgctaaaaggctttctcccactctacatgaggcaggggtctttggttagggctaccccaacc

SEQ ID NO: 603357 - DNA, 504 bp, Homo sapiens
aagagacttagaagaaccccagaagggcaagtacatacaaaatcaagggcaaaagtctgaagattgaaacatgagaaaaaagaaatgcaaatgtaggaagactagaaaygagtttcaaaaatatctgtacctgttggaactttggttaaaatcaagaaggtaataggaatacttgaagagtcttacacttagcttatgttatcagttgcagagatactgtgtgtgtgtgtgtgtgtgtgtgtgtgtgtgtgtacttgagcacacatgaattcaactgtggtggtctctcctcttaacaaagactagttccttcaaacatgtccaggatcccattctttcttactactgtaaagtctaattttcttctctcttcatcatgattaatctccccctttcttactgcattattcctcagtttgaacgcatgtggtagtattttccaagttaaaatcaaaaagcaaaaccttctcatgactccttgtctctctccagccaatgactcaa

SEQ ID NO: 603358 - DNA, 581 bp, Homo sapiens
cacctgcagtctcctttgctgggtcctctatgctggctctctgagtgtgggtgtgctctagggcttagttctgggtcctgttttcatctctccctacgcttatttcctaggtgacctcctctatcccctgtggctttaagcatcatctgtatgctgatgacttaccaatttatgtctccagtccagaaatmtcctctgagattcagactcatatctatctaactggctacttgacatctctacttggatatctcataggcgtctctaaagaaacatggaaaaatagcattttctcttttcctcccaaacctgtttctttcccagaatatcatgtctccatagatgatggcaccttcaatgcagttgctcaagtctaaagccctcagttcattgacaaaatctgccacatctatcacattaattcatttgttcaattagcagttagagttgatgttcattgtgtgtggcaattatattctataaagtcactgtgaacactgatttagcgaatactgaaccattgctcttaaagaaaacacaggttaggtgcctttgagcctctggttacaatgtttacatcg

SEQ ID NO: 603359 - DNA, 609 bp, Homo sapiens
gctaggaatattatctcccttattcctcacaagagccctgtgaggtagacaccaaaattatctctattttatagatggaagaacccgaggctcagaaaagttaagttcctaggccaaaatcactgctaactgggcagtaggtaaaagaggggtggtagagaggcagatggatcagcatatttgagaccccttaaaataaatttctgatctggagttacaggaaatctctcattgcccagaccctgccttattgaaggttatttttctgactatacacaccgtcagttttataacataagacatgcagaggacacaactcattcgatgaaattttgttttccactccacttttcaaaagcttgtatttttcataattgaagagtaactgctatagttattgatcatgataaaattaacatwtttttctcaattagattcatatcagagcacctctcaaagctggctctcaaagaatctgctcactttacacctgcctctgaagggaataaggaaaaaacatgctacatgccctcccttctgttcaaagagaagccacatttgtcccgcacactaatcaaagaaatgtgctaccatcttgcccaatttgag

SEQ ID NO: 603360 - DNA, 607 bp, Homo sapiens
ctttttaatagtcatctgactgaagacaaatggactgcttgagtaggtagtaaaccccagtccttaaaggggttggaaagccattgtctgkaatgctggagagaatattattgtagttgatcagctgacggtcttagagtttttcaggctgtgacctgtggaccaactgcatcaaaatcatctggagatgcttgcagggcagtgggattagttgtggtggccctagcatgcttgttgaaaaccatttcttactttacaccccagccttagatatagatggtatgggggatgcagcatggagaatctctgagctttagaattctgacacagatagtctctaaggtggttttatgccttcatattttggtcttgtgatctcataattatctatttattagtcaacaaatgtttttgaaaactatcagtcaatgttattggctttggagattttgatgaattaatttcatgtgtcaattggctaggctatggtacccgactacttactgaaatactaatctaagtattctcgtgaaagtattttgtatatgtagttgatatctatgttcagtttacttcaagtaaaggagattatacttgataatttcgt

SEQ ID NO: 603361 - DNA, 430 bp, Homo sapiens
tctcttactttggggccttatcctagatcgtcacaaacataccaagcatatggtgtgatataaatgcttctactttccccagtaaatttatctctttttgttgctgtaaaatttgaaattattttctaattttgatgttaaaattatttataatgggtgatttttgacaagtacatttaaacttaggaattctcatgggatcagaaaatcttaaaatttttttggggggtgaatactaaattgaacaattaatgaaattgaygtaatgttacatttgtggatgttcaattaaacacctacttttaattttacactttcatttcatatttggagccaatttattttgttttgctttgtttttcaggcccaagacatttccataggcctttgaaaagctttcaagctggaggtctcctgcctttcgacagag

SEQ ID NO: 603362 - DNA, 608 bp, Homo sapiens
gatacccactgtgagctctttgtgggcgaaggccctccttgccttcgtctctatgtctctagctctgagcacagcacttggcacatggtagggcctaaagcaatgaagtaactggttggaaaccaaggacccttccttaagtactgattttgggtccttttcaacattgtctagccaagccaggaaagactgcatgcccagttaatgtccaagaagtcataatgaacagtcacccaccctagggcatccatcttccttcaaatgtccccaaatcatgagtcatcagcttcaagttctaccactgtcatagatgttttaaaaaccaagataaagaagcaagagtgcaagtatgaataaatacctccagtagtaaaagtgaaacaaatcagtatcacttctcagtgtccagagatgcttaataggcgaagatcactgccagataataaaaaatgtgtttagcaggcagggagggcaaatgtaagctttaggagtgaatatyccaactgctcttttcatctcagaatgatgtaaatgttcctagcattagatgatgaatataagtctgtattcacaggatttgattctgaaagtggtagttttgctccctg

SEQ ID NO: 603363 - DNA, 322 bp, Homo sapiens
aatctaaataccctggttttcctttggtgttttgacatttggcttttgcttgtattcattagcatcttacccaggggaggaagaactcaaatcagtctctttggatattggcgaaaataatttagtaraggcttcagttgggaaaaagttggaaaccacttatttaaatgacatttgagactatttgtggattaataatgatagaacattgaacaaaaacgttatacaaaatgtgtaaattatttcagatgctttagagtacatggtttctggaattagggaggttgttcaaaatgatatgtaaaagtcattgatatcaata

SEQ ID NO: 603364 - DNA, 593 bp, Homo sapiens
cctcagtgaagacattcagggtataagggaatttgttaatcaaggaattgagactctagagagcatagggcaagggcttcggagaagtgtgatgctagcacttgtatcagggaggaagaaacacaaagctatttaggaatcaggaaaaagaaaaggatgatcattagtaggacctcagttggagaagagagagtcatgtggctgtttgccaaggtaagaggtcccaacagtcttctagtctgagcggtgaggtgctgcttggccccacaggatgaaagtgaggctgggtctctgggtagtgatagcacgaaggagctcttctatgtgcaggtgtgatctctgtgcagagacaaggctgtatgggtgtcacatgctctgagcttttgaggctacacaccagagatgtggggctgggttctgacagtaaagttttgctaaaaaacaacccgtgtcacctttatgcataaaacccttcacayggcaccacatcatcttcatcctaaagtgaaattgctttaacacagtttacaggaccatcaaacatctggctccagcctccctctccagacttctgccccttccttaacaaatca

SEQ ID NO: 603365 - DNA, 475 bp, Homo sapiens
atgacagataccaggattccataccacagttcaacaatcctataaatatctctttcttcttctggaaagtgtgtctgaccaaaacatatgaagcaatgtggcaggctagtaaaagagaatagaggtttaaatgtcagctgaaacaatgytcatttccttaaaaaaaaaatcatttgcacagctcttcaagccaccaaatggaacctcttgcagtttgaagttcatccagaaaacccttttgcaaaatatttgctgaaacactgtaatgtaggaatcgtaagggattaaggcctgttgggtttctcctcccccacacctatcttccctaagctgacttctgcagcccagaatcttaaatccctgtgtctcagacccagattccaaaatcaacatattgcttcccactgccactaaaaactaaaatattactgaaatgtctcacttctaactaaaatctgcctaactgagcagacca

SEQ ID NO: 603366 - DNA, 560 bp, Homo sapiens
catgaaaatcagggtgatgcgtgaagtgagatgggacctggggtgggggaaggatttattttgtatttatttatttatttgtttgtttgttttagagacaggatctagctctcttgctcaagctggagtgcagtggtatgatcaaaactcactacagcctgcaactagtgatcctcctgcctcagctatagctaaaactataggtgcacaccaccatacctggctaattttctttctttctttctttcttttttctgacagagtctttctctrtcacctaggctggagtgcagtggcgcgattttggctcactgcaacctccacctcgcctgttcaagcagttctcttgcctcagcctcccaagtagctgggatgacaggcgtgagccaccacacctggctaattgttttgtatttttagtagagacggggtttcaccatgttggccaggctggtttcgaactcctgacctcaagtgatccgcctgcctcagcctcccaaagtgctgggattgtaggcatgagccactgcgcccggccacctggccaagtttttaaagtg

SEQ ID NO: 603367 - DNA, 628 bp, Homo sapiens
atcagtgtggaagcaagttgaatttgtaccccaaggaatttcaatgcttcgattcccttgtctgtacaattttctctttcctactcaagtgaatatgaaaagaaggcagataattagattgttacaaagtttgaattttgctatgattgagaaagaagaacaaggtgaaaaaagttgaagactgtggcaaagagagttgtccaaatgaaagtccatgaggtctaattagatagggatggaagtgaatatgggcaaaggctcacagataataaagcagtaaagtcaagacactggacatcttcataaggcagaaaaacaagtatattgagtataaaacaggcagagagctagaagcaaaaagatgaakaattgagtgatgtttgaatttaagatttttaaggtactacagttctgggtgggctttgatcatgggtggctaaaatggagtgaaagtaaagttgaaagtatagttgaggaggtcaaataatttaagttaggtgctcagagtgtttctacttccagtaagatggagtagacataattttccctagtcctcttccaaagtacaactaaaaaaccatatatatatcatacatatatatacaccatatatatctatatatacatc

SEQ ID NO: 603368 - DNA, 472 bp, Homo sapiens
aatttaaactattttaagtttgctaatgaatcacatctgcatagggatgtcttctgtaawtttaaatattttaaataaaacttctcaagtatcatctcacatactggtgaaaaattaatattaccaaaagcacaatttaaacatatttagcatagttttatcatccacagaatacagtacaatcttttagtcaaattactcaatctttccacagttaagccaagccatttatataaatatgtctgtgactgtagtcattaattaattcaaactgcctaaaattgggcactgtgttttctgaacctaccatttattgtttgaaattggtgtcaccattcactaaattatctttgtttaggactgccccttccaaggcctgtagcttccatcgttcacaatgtgcataggaaatgtaatttcctccaagaatctgccactggctcctatttgccacaaataacatgttgtttat

SEQ ID NO: 603369 - DNA, 601 bp, Homo sapiens
tctactaaaaacataaaaattagctgggcatggtggtgcacacctgtaatcccagctactcaggaggctgaggcagaagaatcacttgaactcgggaggtggaggttgccgtgagccaagatctcaccattacactccagccagggtgaaagagcaagactctyaaaaaaaaaaaaaaaaaatccaactacacctttggaatatagttgaggaaacacagaataatcaaatttacatctcttttatcataggatttgaagttatataacagtaaagctatgtgtggccctttagtaggaaggaggtagctatgattatgcacagtcatgtaatacttatgagtaaaatttccccacaatttctcctatctctaaaacacagatcctaatacaaatgtttcaaatctgttactagtttttaataaagtaacatttgtaaggtatctgtcatattggaagtacatagattttaatattttctctaattaaaaacgtatataaatataaattattacaaatgctgaaaagattagttgcacagatgtctctgttttccctcaggtttattatttttgtttaatttcaccaaaaataatctgtcg

SEQ ID NO: 603370 - DNA, 601 bp, Homo sapiens
tctactaaaaacataaaaattagctgggcatggtggtgcacacctgtaatcccagctactcaggaggctgaggcagaagaatcacttgaactcgggaggtggaggttgccgtgagccaagatctcaccattacactccagccagggtgaaagagcaagactcttaaaaaaaaaaaaaaaaaatccaactacacctttggaatatagttgaggaaacacagaataatcaaatttacatctcttttatcataggatttgaagttatataacagtaaagctatgtgtggccctttagtaggaaggaggtagctatgattatgcacagtcatgtaatacttatgagtaaaatttccccacaatttctcctatctctaaaacacagatcctaatacaaatgtttcaratctgttactagtttttaataaagtaacatttgtaaggtatctgtcatattggaagtacatagattttaatattttctctaattaaaaacgtatataaatataaattattacaaatgctgaaaagattagttgcacagatgtctctgttttccctcaggtttattatttttgtttaatttcaccaaaaataatctgtcg

SEQ ID NO: 603371 - DNA, 601 bp, Homo sapiens
tctactaaaaacataaaaattagctgggcatggtggtgcacacctgtaatcccagctactcaggaggctgaggcagaagaatcacttgaactcgggaggtggaggttgccgtgagccaagatctcaccattacactccagccagggtgaaagagcaagactcttaaaaaaaaaaaaaaaaaatccaactacacctttggaatatagttgaggaaacacagaataatcaaatttacatctcttttatcataggatttgaagttatataacagtaaagctatgtgtggccctttagtaggaaggaggtagctatgattatgcacagtcatgtaatacttatgagtaaaatttccccacaatttctcctatctctaaaacacagatcctaatacaaatgtttcaaatctgttactagtttttaatraagtaacatttgtaaggtatctgtcatattggaagtacatagattttaatattttctctaattaaaaacgtatataaatataaattattacaaatgctgaaaagattagttgcacagatgtctctgttttccctcaggtttattatttttgtttaatttcaccaaaaataatctgtcg

SEQ ID NO: 603372 - DNA, 627 bp, Homo sapiens
acaacaacagccaaaaccactcttgtcatcaagggagtctgtgcacacaggtgtgtgctctgtggatttgtgctgtgtgtgtgtgtgtgtgtgcatgtgtgtggatgggcaaraaaatttctgattctgcagtgaaaggcatacaaatattttgcctcactcttgccttccctagcctcaacctttttgtcccagaactggggtttgaatataaatgacagactttgaccttttgtttattgagaggttaacatcaaaagactttgatccaatcctattagactgaccaatagctctgaggttggttaaatgcaaatgattgattagctgatgatatcactcatgcttacattctcctcactaattaatccttgaacatttcatcctaaatattattcactggttgaccaggatgtgtttagaaaatattctctaagtgagtcaaggtgcaaacctaaaatacagcaaataacttcctttggaggaccactgctaggatatctcattttttacaaacttgctatatttcttcaagaggaggaaactctggcaccagaggtgaatctcccagacttgtgggaatgcatcatgtctaaatgggctctggcccatttctcacattgggtt

SEQ ID NO: 603373 - DNA, 627 bp, Homo sapiens
acaacaacagccaaaaccactcttgtcatcaagggagtctgtgcacacaggtgtgtgctctgtggatttgtgctgtgtgtgtgtgtgtgtgtgcatgtgtgtggatgggcaagaaaatttctgattctgcagtgaaaggcatacaaatattttgcctcactcttgccttccctagcctcaacctttttgtcccaraactggggtttgaatataaatgacagactttgaccttttgtttattgagaggttaacatcaaaagactttgatccaatcctattagactgaccaatagctctgaggttggttaaatgcaaatgattgattagctgatgatatcactcatgcttacattctcctcactaattaatccttgaacatttcatcctaaatattattcactggttgaccaggatgtgtttagaaaatattctctaagtgagtcaaggtgcaaacctaaaatacagcaaataacttcctttggaggaccactgctaggatatctcattttttacaaacttgctatatttcttcaagaggaggaaactctggcaccagaggtgaatctcccagacttgtgggaatgcatcatgtctaaatgggctctggcccatttctcacattgggtt

SEQ ID NO: 603374 - DNA, 627 bp, Homo sapiens
acaacaacagccaaaaccactcttgtcatcaagggagtctgtgcacacaggtgtgtgctctgtggatttgtgctgtgtgtgtgtgtgtgtgtgcatgtgtgtggatgggcaagaaaatttctgattctgcagtgaaaggcatacaaatattttgcctcactcttgccttccctagcctcaacctttttgtcccagractggggtttgaatataaatgacagactttgaccttttgtttattgagaggttaacatcaaaagactttgatccaatcctattagactgaccaatagctctgaggttggttaaatgcaaatgattgattagctgatgatatcactcatgcttacattctcctcactaattaatccttgaacatttcatcctaaatattattcactggttgaccaggatgtgtttagaaaatattctctaagtgagtcaaggtgcaaacctaaaatacagcaaataacttcctttggaggaccactgctaggatatctcattttttacaaacttgctatatttcttcaagaggaggaaactctggcaccagaggtgaatctcccagacttgtgggaatgcatcatgtctaaatgggctctggcccatttctcacattgggtt

SEQ ID NO: 603375 - DNA, 593 bp, Homo sapiens
ggcactctattaagcaccagaaaacaaaaaataaataaaaatatgctgaagcatcgcagaatttgagataaaacaactctgctgtcatagatctcagccaaggaaacggaaaagtaaggaaagatcggatgattacacaagcttgttatacaggcctgtagctagactgaggcaggttagaacaaaccttcaggataacgataagagtagcaggtaatgtttaaacctgtactgatgtactaactactgtgttaagtactttgcatgtgttattgcatttaatcgtcatagcaactcaaagaggtaggtcttattattctcttttacagatgagaaaactgaagcacagagaggtcaagaaacttgtcaaatgttacacaatgagtgttatatcatggctgcaaaccagtgcggtctggcaccagaccttttgtttttagctttaaacctctttgaaatgacttgttaagckccccttctaccagctgaagcctattttctctttcaattaattaatcatgaacaagcagctgctgaatgcaagccacctacctttctgggcttggggaaggggaaaacaacaaggcctgaac

SEQ ID NO: 603376 - DNA, 354 bp, Homo sapiens
ttcttcttctctccttctttagtctatgagcttcccaaagacagagtttctgtttagttttcttctctattggaaaacctagggcaatatgtaccaataaataaaactttgacaaatatttattgaacatataaatgaaaactgcattttattaatagcaattttccatattagatatctggcctccccaayaggaagcagacagattttggagctatccaatgaatgaatgaaaacaaaaatcaagtaatcaggacgtattgatcattactatgggaaaaagtgtcaaagatgttttctgacttatgtgactgtattactggaggtgtcttgagatgtaaactataggataaa

SEQ ID NO: 603377 - DNA, 354 bp, Homo sapiens
ttcttcttctctccttctttagtctatgagcttcccaaagacagagtttctgtttagttttcttctctattggaaaacctagggcaatatgtaccaataaataaaactttgacaaatatttattgaacatataaatgaaaactgcattttattaatagcaattttccatattagatatctggcctccccaataggaagcagacagattttggagctatccaatgaatgaatgaaaacaaaaatcaagtmatcaggacgtattgatcattactatgggaaaaagtgtcaaagatgttttctgacttatgtgactgtattactggaggtgtcttgagatgtaaactataggataaa

SEQ ID NO: 603378 - DNA, 506 bp, Homo sapiens
cagcttttgacaggccttggcaacttacagatgaacctaggtgaactttcctcattaccgtgctctccaccctgggagaagctataactttattgccataatatgtgacctatgtgctggcataatgactcagtgtatctgtgcaatgggacccctcctctacatgcaatgatgtaccctccccactctccatcaccccataaaacccttctgtcactttctctcagggagacattgcttcggagaatactcccagtgttttccttacttgtgccaactaaataaaactcctattcatcaaaacytgaattctcatggaggtcatttgttagttgccaggtgaatgaccttgtgttttggggggctacagccaggatttgagttgaggtctgtccaactcaaaggcatgtgcacatccaacctgcaacgcacttctctccttatgaagaaataaaaacataagtagctataatatagaatagaacataaagacattaagtagctat

SEQ ID NO: 603379 - DNA, 588 bp, Homo sapiens
tctgtgagtgggtcatcagctggcctagcttcctggtgaggtggtttattccctttctatctgaatgattagtgcttggcagtagctttttgagtgtcgggaagctcatcattgtgctttttctatgtaaagaactgctgcagcttgaggtttctttggttactagaggcctccacagcatctcttctctcccatttagacatagttccctaaactgggccccccgggatgggatccagactcacattttcgggtagggaatagcacaggttgggaaagagactaaaagggcttctagctagatagtccttttaactaagccctcagaggtatctcattccatgtcatagtaccaccaggaaaatttcttaaagacattgaaatgggcaaaatgttacttggtgtccttttgatattaatargacctgtgtgttgtcttgaggatccttccagggttatctgattatacgggggcctgtgccttttattgtctttcactgttttgcaattctgtagagagagagagaggtaaacctgtagacaccagatagtgatgcaaatgattcctgatcatagaaatgcaaatgg

SEQ ID NO: 603380 - DNA, 561 bp, Homo sapiens
gtttattcatttattcaacaggcaaatactaagaaccttttaacgtaccaagctctgtgctaggtactgaagacaaaatgatgaatcataaggtccttgccctagattagctcagagtctaatggatttatttgctgtacctcccaagagggttatgtggtctttttatgcttgccccagaagaatgaattgatgactgtggaatttcagacatcggttacggtccaggaatgaagatatttcacatgtgtggtggtagtggtgggggtgggggtgttttacccaaagtcccccagatccctgcagacagtgcagactattggttccatctccccagtaggccaatcctgctttagsgggagcaagaaggctgtggccttgcaaataggggagggctttgtgggtgtttgtcacagccccagtttcatgacttactgataacttttggtaaaatagttagcttgtccaaactttgacagtttcctctgtaaaatgagaatgcaaagatctactttacaatgtcattgtgaaaattaaacacaataacctatggaaagttct

SEQ ID NO: 603381 - DNA, 494 bp, Homo sapiens
ggggtgggggtgttttacccaaagtcccccagatccctgcagacagtgcagactattggttccatctccccagtaggccaatcctgctttagcgggagcaagaaggctgtggccttgcaaataggggrgggctttgtgggtgtttgtcacagccccagtttcatgacttactgataacttttggtaaaatagttagcttgtccaaactttgacagtttcctctgtaaaatgagaatgcaaagatctactttacaatgtcattgtgaaaattaaacacaataacctatggaaagttctgtgcattgcttagcatttgatgggcgttccctaaccattactttccatccccacaatagacaaactctaacctgcagctgtggttttgtgacctgttaatttagttcagtacattcatctgttactcttgtctgaggtgttcttggaaggggatgccaaccaccatgacaccagctctgattggttgactccattaa

SEQ ID NO: 603382 - DNA, 494 bp, Homo sapiens
ggggtgggggtgttttacccaaagtcccccagatccctgcagacagtgcagactattggttccatctccccagtaggccaatcctgctttagcgggagcaagaaggctgtggccttgcaaataggggagggctttgtgggtgtttgtcacagccccagtttcatgacttactgataacttttggtaaaatagttagcttgtccaaactttgacagtttcctctgtaaaatgagaatgcaaagatctactttacaatgtcattgtgaaaattaaacacaataacctatggaaagttctgtgcattgcttagcatttgatgggcgttccctaacyattactttccatccccacaatagacaaactctaacctgcagctgtggttttgtgacctgttaatttagttcagtacattcatctgttactcttgtctgaggtgttcttggaaggggatgccaaccaccatgacaccagctctgattggttgactccattaa

SEQ ID NO: 603383 - DNA, 541 bp, Homo sapiens
tatatatctatctatcgagagaaattttaaggaattggctcatgtgattgtgggtgctggcaagtctgaaatctgcagagtaggctggcaggctgcaaattcaggtaagagttaatgctgcagtcttgagtccaaaatctaaagggcaggtcagcaggctgcaaattcaggcaggatttctatgttacaatccagaagcagaattccttcttctccaagaagccttggttttctgctyctaaggctttcagctgaagtcctttatcttccccacagtgattgcctctgaccatttgtacaccctggaatcctccatccatcctcactgacttcagaaaagcttacatcctatcttattgagcagatggaggcaaaaaacagagagctgtttccactcctaacattttcaatatctatcagtgtgagccatttattgggtgttctacattacaattatgtccagagaaggaattggatggggtactgttcctgctgctgtgatcatggtgttcccaatcagttaccccagtcaagtcagcca

SEQ ID NO: 603384 - DNA, 476 bp, Homo sapiens
tagttcctagtggattgagaactatcattctaaatagtctctgaacctcagtcattcattctcatctagaaagatgctgctgaatctcccaatttggggtggcaggaaatgtcttggattgtctgtcattataactatggcaatagatgcaatagaaaaagaatcaaagctttaaatagatgcacatgaaaaaataactataagggaatactacaaacaagtcttcataaattttataacatagacaaaatggtttgaatttgtcaaaaaacacaaactaccaccacctactcaayttgaaatgaataatttcattattcctaaaactatttttaaaaaccttggattcataatttaaaaactcccaaaaagacacctctaaaaccagatggttttgctggagaatactatccaacattaaagaaaaattaacactaaatctacactatttctttcagataacaagaggatggaat

SEQ ID NO: 603385 - DNA, 656 bp, Homo sapiens
catgagaaaaatgattactgcatgaggagaatgaatgatgtgagctccatgacgaagagagagttgccctagaatagagagagtttctgggccacagaacagagaggaaagtctgctagagcttgtggtctccctgagtttaggaaatggtactggaagtcggaggtttgggggaactgaggcaactagaggttacagactaaagaagaggaagctgcaaagacagagaactctagaaacttaaaaaaggtttatcctttagtaaccagctggctactttaccagtacatgagcgtgagaagaaagtaaccgaagctgagaaaagaaccactcaaaatgaagagagtagttcctgtccccccagttaaaatggaatgcctcataattcataaggcatgagctagagtactaaaaaggattgccttattattaggagaaaatcagcttaacagcaagacatgagaggatcaaactgttttctagtaacttacctatgtcttaagagaaatctcaaaaacagtcatatggacaacaacaacaamaaaaaatactcagcatccaaaagggaaaatttacagtgcttggcacccaatcagtttactagacccgcaaagaggcaggaagatatgacccactatggggagaaaagttaatca

SEQ ID NO: 603386 - DNA, 543 bp, Homo sapiens
atttttttcacatcaacttagaaccataaagaggagtgatagtatccagtactggatagggagggagcaaatggtcctctcttagatggttaatgcatgcgtaggctgctccagtccttcggagatgtttgcagtatttatcaaagtttaaaataggcaaacagttcaacttaatatttctactttggctatttttaagattggaaaacactggccatgtgcacaaaatactggccatgtattgtttgtaataataaaaaaataggaacaataacaatagaaatcctaaacactcccttgctgaagaagaatacaactccaaaccattaacttcacctcaaaccattaatagtgattactttgggagggaaataggattgagagggtagagtagggggaaaggaagcttttgcttcttaatctatgtacacatctgtrttagtgctctccaaagaaacagagccaataggagatacatatatacagccttcataattgagtgagccaattcccataatatatttctctctctccatacacata

SEQ ID NO: 603387 - DNA, 575 bp, Homo sapiens
ccaaacgactaaactgaagctaagtcaatcgtgctagcccatttccttgtcagtgattgcttcagaggcaagttggaaaagtttacrgcaaagatacgtaaggagaggcagacttgggaatgggaaaaaacgagtctctctcccccactcaacatgcataaggaagtgcattgccttacctctgcaggcagccattttgttttcatgacataagctagagcagagacagtcaatgaagtatagaaataatctggatatctgcaattgggaaagaacctgtgtacctgatgttactgagttactaaaagactggctctgcctctgtatgatctgatatggggttccataatggaatagctaagagaactggctaaggaactatgttttcagttcagattttggctctaccaccaattacttaggtgaccacaggcaagttacttaatcctactggaccataattttccatctctaatatgagaataatgatagtatttcccctacagggttgtgatgaggattaagtaaatatttttaaggctgttggtatctggcacagggtaagcactatataa

SEQ ID NO: 603388 - DNA, 577 bp, Homo sapiens
tgagccatttacaagcctaactcatataagtctcctacgtttggtcctcatcctctttctctaaccagcttctgactgaagaggaggtgaggccaccaggtggaaggaggttttggaatgactggtggaaggccaagtattcagagtcaactgcattggacaggaatgtaaaatagagatgagcttgcgttgtgctaactccctgagaattggggatttatctgttaaaagaggtcatgtttctcatgttttcttaactgataaacttagcaaaaagaaaagtgatgccccttaactagacactgttcagtttagaaagaaacttagagttgctctctggaattttgcctttagcaaaattagtaatgaggtgatagatttgcttgtttgcttctatatgacacacaagaatacaggcgaaaatggccatatttctttgttgaagtcaaatcccagcacccaccatcactccagcttttatttgactctctacaagccccacaggacatgctcckttttgctttgaggaggaaatgccttttagggagtatgtctgtgcattcaggaaacagtcata

SEQ ID NO: 603389 - DNA, 639 bp, Homo sapiens
  misc_feature 624, 625, 626, 627, 628, 629, 630, 631, 632, 633, 634, 635,636, 637, 638, 639: n = A,T,C or G
agctgcttacagactccaaagaagtcattcaccttgaggaatttatcatggctcacctatggcatctgcctttaaagtctcaaaatctggattttgtcagcaccacaacagtggaactaatgatctggggttgaatcattttaacccaatctaagagagactaatgtaaaagccaaaggccaagcaatttgttaacatgatgagaaatagaaatgtcacatgaaccagagctctcaaacagatatgactaaagcattctcgcctgtagacaaatctacatgaaacgccaaaagagactccaaaggcaaaagactaaagaacaattccttgtcttgaatgattctcagaaataattgatcaagcgtgttcactttttgttgccaatgtccacgatccctgaatcccaaccttctagtgaggaaagctttcrcacaacggcaacccaagataatttcatccacccaggcccctctcccccgtgttgagttcagtagggagaggagaatgggtaagtgtggattctggctgtcttacactccaggggctgtccccatcagctagggtaagtcagacatgactggttttgactagaacaagtttctgccaaagctgtcctatatcaannnnnnnnnnnnnnnn

SEQ ID NO: 603390 - DNA, 564 bp, Homo sapiens
ttcaccattagcaagatgggcataatcacccctaacttatggtgctgtgacaaggcatgttagtagagcacttgsaatacagttggtgcgtaagcagtaataattatgttgttaatatcatcatcgtcatgttaccattttacacaggaagagatcaaagccttcttccaagtttttgtggacatgtgattttcttgtcccagttgaatttcccttttctggtggtagccccctagttatcctcttccccaaaatatagtgtggatggaataactctattgccagctccaagcatggctacaaaatccatttctgaagctattcagggtactccaaatgcccggatgcaacaatcagttcttagaaaggcatgtgaaccaatccaagccaaaaatatgcaatcctctgacgttactggaaactgttagaaaaaggaggtatggtctggacttaaactcaagaaaatataaacacagcattgtgtgggaacactagaaacaggatggctgagaccaacaaaaaacacagaggtgagaaacagaaagacattactctgacaacagt

SEQ ID NO: 603391 - DNA, 564 bp, Homo sapiens
ttcaccattagcaagatgggcataatcacccctaacttatggtgctgtgacaaggcatgttagtagagcacttggaatacagttggtgcgtaagcagtaataattatgttgttaatatcatcatcgtcatgttaccattttacacaggaagagatcaaagccttcttccaagtttttgtggacatgtgattttcttgtcccagttgaatttcccttttctggtggtagccccctagttatcctcttccccaaaatatagtgtggatggaataactctattgccagctccaagcatggctacaaaatccatttctgaagctattcasggtactccaaatgcccggatgcaacaatcagttcttagaaaggcatgtgaaccaatccaagccaaaaatatgcaatcctctgacgttactggaaactgttagaaaaaggaggtatggtctggacttaaactcaagaaaatataaacacagcattgtgtgggaacactagaaacaggatggctgagaccaacaaaaaacacagaggtgagaaacagaaagacattactctgacaacagt

SEQ ID NO: 603392 - DNA, 546 bp, Homo sapiens
ttcatatgtggaaacctgaccaccaagatgattgtattagcaggtgaggcttttggggggtgcttaggtcatgagggctccaccctcttgaatgagattagtgtccttataaaagggctggagggagctagctaggtcctctgcccttctgtcttctgtcatgtgaggacacagcaataaagcaccatcttggaagccaagagcagccttcaccagacactgaatctgctggcactttgaccttcgacttctctgcctccagaactgtgagaaatacatttttattatctataaattgccgrgtctgtggcattttgttagagcagcagggatagactaagatagtccttcaataaatatttttaattgcctaccacatgccaggcatcatctaaagtgctataagagaaaaatagaagaaaaagctttgcttcaaaagctattcacaaataacccttgctcagggcagagtagatcataaataccatgacacagaaaccaacaaggctgaggttctgttcctgccccagacggtgactgagcaag

SEQ ID NO: 603393 - DNA, 594 bp, Homo sapiens
ctcaggaaggggaacctggagacccggataggggtgaagaacttcggccacagcctgtgacccaaagatcatctacatagttaaaacattgagattgcactcaatcagcatttttccaatctatttcaccacggacatgttttatattatactgcattgttgatgggataccaatgggcctcatgagatataatgcatgcttagattaaagtagacatctaaaaatgatcttgcaaacgaatcgctgcaaggaattatggaaattacctttgatttatgtacaaatttaaaattgtatgattaaacaaaaaatgacaaattggagaaatcaactgctttatattttattaaagacacaaasaacagcatctcacaaatacatgctaaaattataaatcatataaatgaaataatatacaagtataaacacataaaaattcacataaatatatatgaatacatataaatatataagcatacataaatgcttgttgaaattataaatgaagacatgacaaagaccactgatcaccaaatagatgacacatatcacttcagtggttcttgaatttggcctaagcatcatgagctgat

SEQ ID NO: 603394 - DNA, 588 bp, Homo sapiens
gaagctttgctggttcagaaagcgacaagaaagaaaactcttaacattgtgatggccacagggaataagagaggagatacagttccatcctgagacacacattacagagttttcccactgtcttggccactggaatcagagtcctccaggggcaaactttctgagacaagaagctcacacaccaccacttctccatggccacagaatggcactagataggtgggctagtagctctctgagcctttttattacagagtaggggaagtctaataacgagagcttgctggttcttccagggtggactttataaattatggaaagaatacatctagtaaagcaaaaaactggaagcacaaaaactgcctggagcgacagatagcataggcctgggaatgaggaaacatgagttctagtctcagctctttcagwaatgactgtgaaatttcagtctcttggcctcagtttccagacctttaagatgggcttgcctagatggtgtttcaggctttgccaattctcgagctgatgagtgacatcttcaaatatcttcaaccccaggatgagactcacagcagggaatttggagga

SEQ ID NO: 603395 - DNA, 628 bp, Homo sapiens
ttacaatgtgtatatataacacagtattttatctgttcacctgttggtggacattttgacggtttctaatttggtctattacaaataaagatgctatgaacattcttgtacaagtcttcatatggacatatattattattactcttgaaaaatacctagaagcagaatggcccaattctatggtgcaagattaatctttttaaaaaattgctaaagtatttgccaaaatagttgtaccatcttaattcccatcagctgtctatgagagtttcagktgctccacatacaaacacttgagatggtcaatctttttgattttggacaatctaatacatatgtagccatatcacaatatagttttagtttgcatttttcttaatgactaactttattttctttttatatgcctattttccatcttttccatctcctaaggtaaagtgtctactcaaatcttttgccttttttaaaaaaaattgttttcttcttattaagatgtaagaattctttatacattctggatataagttctttataaatttggaatttataaatatcttcactatgtcaacaatgactttcaaagaacataatttcctaattttgataaagtccaaattatgttttt

SEQ ID NO: 603396 - DNA, 628 bp, Homo sapiens
ttacaatgtgtatatataacacagtattttatctgttcacctgttggtggacattttgacggtttctaatttggtctattacaaataaagatgctatgaacattcttgtacaagtcttcatatggacatatattattattactcttgaaaaatacctagaagcagaatggcccaattctatggtgcaagattaatctttttaaaaaattgctaaagtatttgccaaaatagttgtaccatcttaattcccatcagctgtctatgagagtttcagttgctccacatacaaacacttgagatggtcaatctttttgattttggacaatctaatacatatgtagccatatcacaatatagttttagtttgcatttttcttaatgactaactttattttctttttatatgcctattttccatcttttccatctcctaaggtaaagtgtctactcaaatcttttgccttttttaaaaaaaattgttttcttcttattaagatgtaagaattctttatacattctggatataagttctttataaatttggaatttataaatatcttcactatgtyaacaatgactttcaaagaacataatttcctaattttgataaagtccaaattatgttttt

SEQ ID NO: 603397 - DNA, 604 bp, Homo sapiens
gaattctttatacattctggatataagttctttataaatttggaatttataaatatcttcactatgtcaacaatgactttcaaagaacataatttcctaattttgataaagtccaaattatgtttttcttttaacaatcactcttttggtggtttatctaggacacctttgtctaactcgagatcaccaaaaattcctcctatattttcttctagaagggttacagtttactttagatcttacattaagatctgtgatcaattttgagtttactattaaagactcttacgctttgtcctgggaagcagttatgtttctyggaagcagtttaatctcttgagtactggctttaagctttgttagttggaatcagagcaacatgtaatctaattttgcccactactgaggcaaaacctttctgaatactcttccaggacttcgtaagttccaaggtttcctctctgggtgatgacgggaatagaaactatttctggctctgtatgagctctgagccttgttttttcccgctaatgtctttaaatcattcctttcctgacctcaagtagtttcctcacaatcatacattgatcaataatcagctgaa

SEQ ID NO: 603398 - DNA, 573 bp, Homo sapiens
gccgagatgtgctagtttcatcaycaggattttctgtggtacagaacatgtctaagcatgctggggactgccagcagcggaagagatccctgtgagtcagcagtcagcccagctactccctacctacatctgcactgcctcccgtgactaattcctttagcagggcagattagataaagccaaatgaattcctggctcacccctcattaaggagtcagcttcattctctgccagtcagagctaaaaatagaaattgtgtaggagacaaaccttgttaattccctagaaatacattaagaggatagagtggaattttttttctctgcaatcttgcatttttttaatggctctttttttttttcctgataaaaacctttggtaggtagggaagttatgttttcaggggtaaatgtgctacttttgtcttctaaattttgctcttttttgactggtctagtcaagtgacagcccgattattttgctactccttaaaagtactattctgtctcttggagtatggttgatggcaattccagttaactgctgtgcagctctcatctcattgtgcacaca

SEQ ID NO: 603399 - DNA, 563 bp, Homo sapiens
tttgtgttgactaagctccacagtgacattccaaggagttctggtgtccctccaaatattctaggctgcccttttaacctgatactgataccctgtccactctactgtttaaggggctatttaaaaatttggctttgtaaarcagggagcaaggcagaaagccttcaaagctttagcagttggcgtggcaaggaacagaaaagcagcattttacagtatcaaataccagaagtagccctcataaccactaactttgtagtgctcttccttcactgtggcgaagtgctgagcatgttacatgcattacattactgaaaccaaggccctgtgacgttccagtgagtccaaggtgctagctggtgtgagtacagctgtgggctctaatctatgctttgcttcaaagtccacgcatgcaaatcctgggcaactccctgagtttccaaggcaactcagccaactcatccagaggtaactagcttccaataactgtataagctcactcccatcatttggtaggttggtaggtcaatcagttcaatttatttttatttttatttattttt

SEQ ID NO: 603400 - DNA, 694 bp, Homo sapiens
tgcttaactttgctttttaataatcccttggaaacctagacatgacatccattattagattttcaaatttatttttatttttagcataatacgtatatttatgtaaaatatagagataatacaagtgaattttcatattgagaataaaataaaaatatttgagatagagacactatagagaaagcattatgtatgacattggtatgtgtatgagaagtggtaaaaacaaaacaaaacacaaagtgcagacgcagtgtacattttttctcttctgaaatgttatcgaacatgataaatatgaccacaaatatgataaaaatgttactctccaaaaatgttrtcaaataagactctgtatgcctcagttgcctcagactcactttcttctactgtaaaattcacattcagaaccttatccatcccgtcgaaactgtaggtgcaatcttataactgtgtgttaacaaatcagctgactttatttgaagattgcattttttaataaatttttttatttcatctttactgctgccatgacaatgaatttattaaaatcttctcccaaatgatttaaatttcagacttatctagtatattggaaaaagtttttttctcaattaaaaattatgagagaggaggaggaaagtggtaatgatgtgcagaggtctatgtctgtgtttgtgtgtttctctccatg

SEQ ID NO: 603401 - DNA, 694 bp, Homo sapiens
tgcttaactttgctttttaataatcccttggaaacctagacatgacatccattattagattttcaaatttatttttatttttagcataatacgtatatttatgtaaaatatagagataatacaagtgaattttcatattgagaataaaataaaaatatttgagatagagacactatagagaaagcattatgtatgacattggtatgtgtatgagaagtggtaaaaacaaaacaaaacacaaagtgcagacgcagtgtacattttttctcttctgaaatgttatcgaacatgataaatatgaccacaaatatgataaaaatgttactctccaaaaatgttatcaaataagactctgtatgcctcagttgcctcagactcactttcttctactgtaaaattcacattcagaaccttatccatcccgtcgaaactgtaggtgcaatcttataactgtgtgttaacaaatcagctgactttatttgaagattgcattttttaataaatytttttatttcatctttactgctgccatgacaatgaatttattaaaatcttctcccaaatgatttaaatttcagacttatctagtatattggaaaaagtttttttctcaattaaaaattatgagagaggaggaggaaagtggtaatgatgtgcagaggtctatgtctgtgtttgtgtgtttctctccatg

SEQ ID NO: 603402 - DNA, 518 bp, Homo sapiens
ccattcttttcttcttctcccttcttctctctctttttgctttatgtatttccagtacttagcatggtgtctaatataacttagatgtgattgttaagtgaggaatgccttgagagcacgtgagaaattgttaaaaacttctgtcagggagattatgtatttcatttttattgatttaattttttcaataggtaataaatgtgggaggtatgcagaaatcagaaaatattctactcaccaagaatgtggcaagttacaaccaccaaatgaaaatagaaacagaatagaaataycaagataagggacaactaagagactaaggaaatatgacaggtgatgtacaaaattttttgtatttatttgctatactggtgcaaaaataaaaaaaaatggttctctcactcttgccctagtatatcatctattagttggcaccagccccaaactaaaaacatgttttattagtttcttatgttcctttcagaaattatgtaaattcaatcaagtataaatacaat

SEQ ID NO: 603403 - DNA, 518 bp, Homo sapiens
ccattcttttcttcttctcccttcttctctctctttttgctttatgtatttccagtacttagcatggtgtctaatataacttagatgtgattgttaagtgaggaatgccttgagagcacgtgagaaattgttaaaaacttctgtcagggagattatgtatttcatttttattgatttaattttttcaataggtaataaatgtgggaggtatgcagaaatcagaaaatattctactcaccaagaatgtggcaagttacaaccaccaaatgaaaatagaaacagaatagaaatatcaagataagggacaactaagagactaaggaaatatgacaggtgatgtacaaaattttttgtatttatttgctatactggtgcaaaaataaaaaaaaatggttctctcactcttrccctagtatatcatctattagttggcaccagccccaaactaaaaacatgttttattagtttcttatgttcctttcagaaattatgtaaattcaatcaagtataaatacaat

SEQ ID NO: 603404 - DNA, 561 bp, Homo sapiens
actgacatcttacatggcaggagcaagagggtgaaagtgaggtcccccacactttaaacaaccagatctcktgaaaatttactcagtatcttgaagacggaatgaaaggggtggtgctaacccattcatgagaaagccaccctcatgatccagtcacctctcacccggccccacctccaacattggggattacaaattcaacctgagatttggtgagataacagatacaaaccgtattatttggcctctggcccctcccaaagcttatatgcctctcacattgcaaaatgcaatcatgccttcccagtagtcccccaaagtcttatttcagcactgactcaaaagtccaaagtctaaagtcttatctgacacaaggcaagtctcttctacctatgagcctgtaagaaaaacaaaaacaacaacaataaaaaagaaactagttacttccaaaatacaatgaggttatagacattgagtaaacattcctattccaaaagggcaaaatcagccaagagaaaggagtgacaggccccatgcatgttcaaaacccagcagggcagt

SEQ ID NO: 603405 - DNA, 596 bp, Homo sapiens
cctgacatgcccgctgggtggtctggactttgaacaatggctcctcccatctggaaccctctgctattttgcaaacgtttcaatggctctgctgaaagccaggaaacaacagctggtgaataatctcattttatattaatagagcagcactgacctatccaggtcccttaatacttcacgaaacagaacatcctttctttcccagggcaaggaagggaagtctcagccataccacattacagcatgagtaggggccctgaagaagaatgaacagaaagagttttttcttgcaaacccacctcactggactttttcagatgaggattaagttaagctaaaggagatggaagagaatatctgcattaaatccctggactttacctatgcaaagaaataaccagaaagtaagaagattcttgccccagccttgcctctgtcttctgtatgtgcagctctttctgtgaaatcaaggtagagatgtccaagttaagtgacaatctgaaagataaatatggactatttttaataccagggctagctggtggwttaatgttagtggagtcaaataaaacagaatgtgacaacaccaccagtta

SEQ ID NO: 603406 - DNA, 516 bp, Homo sapiens
tactaaaaatacaaaaattaactcaatgtggtgcctcatgcctgcaatcccagctacttgggtggctgaggcacaagaatcacttaacccaggaggtagaggctgaagtgatcttagatcacaccactgcactccagcctgggcaacagaacaagactctgtccaaaacaaaaacaaaaacaaaacaacaacaacaacaaaaaaaatatggtgttctatggtgttccrgcagggggaatgaatggtgtaggtttctattccatcatcttactctgccagaatttttaaatatatgtatataaaagcatagaaattgctttctcactaagaagaacttctagtgttttgtcacgtttggtctattttgggaatatagattacattttctgccatttatcttggattctttatattgaatatattctccttactgttaagatatgtcactaaaaataactctatgatggttaattttatgtgtcaacttgagtgaaccatgggatgcccaggtatttg

SEQ ID NO: 603407 - DNA, 612 bp, Homo sapiens
cagggataatttgacttccttctttccaatttggatgcccttcctttccttttcttgcctaattgctataagacttccagtacaatattgaatacaagtggtaaaagtaggtgttcttgttccttcagtatgatgttaactatgggtttgtcatatatggcctttattgcattgaggtatgctccttctgtatctaattttttgggagtttttaatcatgaagggatgttgaattttgtcaaatggtttttctgcatctattgaaatgatcctatcatttttgtctttgattctgttaatgtggtttatcacatttattgatttgtgtattttsaaccattcttgcatccctgagatggatcccacttgatcatagtgaacttttaaatgtgtggttggattcagtttgctagtatcttgttgagaattttcgtacctgtttatcgaggatattggtctgtagtttcattttcttgccgtgtccttgtctagttttgaaattggtaatgttggccttgtataatgagtttgcaagtattcctgcttcttcaattttctagaatagtttgaggaaaattggtattaatttttctttaaatatttgttagaatt

SEQ ID NO: 603408 - DNA, 531 bp, Homo sapiens
cgaaaccccgtctctactaaatacacaaaaaaattagctgggcatggtggcaggcgcgtgtagtcccagctacttgggaggctgaggcaggagaatcgtttgaacctgggaggcagaggctgcagtgagccgagatcacgccactgcacgccagcctgggcaggcaacagagcaagactccgtctcagaaaaaaaaaaaaaaagaatgtctttttaaaaactcctcattgccatacacttgcatatatagaactgttaactgattcattcttcctcataaaattgtcaagtgaaaaaattacaaatagttcacatccttctcctttaaaactattttccaattatttttattgtagaaaatgtcaaatatatatactagaaagaatagtgtaatgaatacttctgtactcagcatttggcttcaataatggccaactctgtctcactatctcccatctactaacaacccaaattattgtgaagcaaatmtaagatttcatatcattaatatttgtatatattccagttccc

SEQ ID NO: 603409 - DNA, 399 bp, Homo sapiens
ctccagcctggtgacagagcgagactctgtctggaaaaaaaaaaaaaagaaagaaacaaatagaaagaactctgggctgyctggttttctcctttcttccaaccaccatgcttccttctttctttcttcctctttctggcttttctttctagctataatggtttttgtttttttttttttaacttttttatatgttatgggaaaacacaatggattcattcacaaacaaaattagttatgcagaaccaaacatgcaaccaaagcacgccagagagacaggattccggagcagaacttaccccacgctttaggctcctgaagcagtggattttgggtttggaggtcatgaactcgttgaagcgatgggagaggggttccttttgctgcttgggagactgg

SEQ ID NO: 603410 - DNA, 590 bp, Homo sapiens
accctctcggtgatgcctacaggatcccatggaaacgtcatccttttatcgtgagcatttggcatcttactcagtttccctggactcaatcttccatccacgtgagtgtatcctacatttccctctagtcttttttcctttcctttctttacttttgccccatgtccctaggactggcccacaattcagactggttaccaagtacctagtgtataaaatagtaccctttactctccctgtgagctgccttgcctgatctcggccacatctgaagaatcaacatacatataacctttaggttggcttacatttgcmgtcatttaacccccaggtccctcaccccaagcttgtgagctgggtggggtccatactacaagcaaatattatctaaataaacagaacttggccaggctcagtggctcatgcctgtaagtaatcccaacactttgggaggctgaggcaggaggatcacttgaggccaggagttcaaggctagcctgggcaacatagtgagatcctatctctaccccccccaaaaaaacaggaaataataataaataagaaatttacaaaattaaaaaattagctgg

SEQ ID NO: 603411 - DNA, 535 bp, Homo sapiens
catcttggcctcccaaagtgctaaaattagaggcatgagccagcatgctcagccctataatctttttcaaatgaattaatgaatgatgacttatctgggtacctgaataagtcattactagaaaaccatagagaacaaagagtaccttaaaatgatgataatgtttgtcagtagctgactgggtaaggaagtagaatattgctagattttagatttgctataaagaataaaaatgagcaaaaactgagaatgcatgagaaggaatcaaaatgttaaacagtgctacctaagccacatcaaaactacctagaagagcttttaaaatgacagattcttataaacggccaagtgcagcggctcacacctgtaatcccagcactttcggaggccaaggcagggggatcgcttggactcaggagttcaagaccagcctgggtgacatagcgagacamcatctctacaaaaaatgcaaaaatcagcctggtgtggtgttgccggcctgtagtcccagctacttgggaagttgaggtaggag

SEQ ID NO: 603412 - DNA, 587 bp, Homo sapiens
agcaatactgaagcaggagttcagagaaggaagaaattaaaagaagctggtggtagtggtaaggggctggcagaaaatgggacggggctgttgggtaaagtgtagacagtctgggtcttgaaagcttgagtagtggcagaaattaggtaagtcaggagggacaggcaggggtcatatgatattgggttgtggtgtgagcaataataactcaaggctgttcttatgggcaggaaggataccagtttggatggagaggaaagtttgtgtaaaagagtagtaggagaggaactggaaaaaacagaacatttggaatgttagactagaggttttcagtttttttaaactatgcaagcaacacagaagacattccagcagtaaaaagaytcaaagaataaagattaagtgaataaacccctcaatgctcccttctctcattcaagtctcttttggaggcaacactgttagtaattaggtagataaccttctgccaggctaaagacctcatgtaacaggcaatagggaatcactagaacttctggagccagggatggtgtccaaatcgggaatagtcagcagaggtgagcaga

SEQ ID NO: 603413 - DNA, 544 bp, Homo sapiens
cttgtcaatttttgtttttgttgcagttgcttttgaggacttagctataaattctttgccaagactgatgtccagaatagtatttcctacgttttcttctgggagtcttatagtttgtggtcttatatttaaatctctatcttgagttaatttttgtatatagtgaaagatgggtgttcaatttcattcttctgcttatagctagccagatatcccagcaccgtttactgaataggaagtcctttccccattgtttatttttgtygactttgtaaaagatcagatggctgtaggtgtgcaggtttatttctgggttctctcttctgttccattggtttatgtgtctgtctttgtaccattaccatgctgttttggttcgtgtagccctatagtatagtttgaagtccagtaatgtgatgcctgcacctttgttctttttgcttaggattgctctggctctttgggctcttttttggttccatatgaattttagaattacttttctctaattctgtgggaaatgacattggtagtttgataggat

SEQ ID NO: 603414 - DNA, 607 bp, Homo sapiens
tgtggatcgcttgaggtcaggagtttgagaccagcctggccaacatggtgaaaccgtcgtctctactaaaaatacaaaaattagccaggtgtggtgacgtgcgcctgtaatcccagctactccggaggccaaggtgggagaatcacttgaacctgggaagcggaggttgcaataagccaagatcgcgccgctgcactccagagcaagactgcctcaattaaaaaaaaaaaaaagaaaaaagaattggcctttacarccttgcctgtttctgtgggcaagggaaagagagggaacccactatcagtgaagcatctcctgtgtgtgagatgctttgctcattactttaagcacatgatcccattgaaacttgccaaggatatcatgtggcaggaaatcattgtatggttcaggagagattgataatacccagggtaccacagtaaaggctgaagcctagattctaacttaagcttctctttgccccctacctgggcttttcccactctgtttccaggcttcctgcaccatgcttccatgcctttcctccacagtgctcttgcgaattgacacagtgagattgtttacatgaatgctccccctccccaaa

SEQ ID NO: 603415 - DNA, 607 bp, Homo sapiens
tgtggatcgcttgaggtcaggagtttgagaccagcctggccaacatggtgaaaccgtcgtctctactaaaaatacaaaaattagccaggtgtggtgacgtgcgcctgtaatcccagctactccggaggccaaggtgggagaatcacttgaacctgggaagcggaggttgcaataagccaagatcgcgccgctgcactccagagcaagactgcctcaattaaaaaaaaaaaaaagaaaaaagaattggcctttacaaccttgcctgtttctgtgggcaagggaaagagagggaacccactatyagtgaagcatctcctgtgtgtgagatgctttgctcattactttaagcacatgatcccattgaaacttgccaaggatatcatgtggcaggaaatcattgtatggttcaggagagattgataatacccagggtaccacagtaaaggctgaagcctagattctaacttaagcttctctttgccccctacctgggcttttcccactctgtttccaggcttcctgcaccatgcttccatgcctttcctccacagtgctcttgcgaattgacacagtgagattgtttacatgaatgctccccctccccaaa

SEQ ID NO: 603416 - DNA, 582 bp, Homo sapiens
tttgcagattaggaaagagtggctaagaaaggttaatttccttttttaaggacacacatctaatacgtgcctgagctgtctttcagattctgaatctaatatctactggcttactatactgacttgtgtgtgttatgtgatattcagaccaaggtggaaaaggcttgtggatgctgtagcataaagtgaccatttgaaaaaatactgacattctgaatgattccagagaaagagttgacattacacaagaaacacttgatgggacgaagagatttagcatttaggagagatttaaaattgaaccactctagctgtcatcaaatattgaagatctgccatgtggaaggcacttttarcagtccatttggtgatggcaagttcagtgcaatacaagggagatagtttttaaaattcgacatgttcaacaatgaatagatttcttcaaaaagtaacatgtttcttattactagaggtgttcctgccctatgaactttaattttgtattcttctataaaaagtgattctcttatttaaaaatgttgctaatttttcactgtcaaagtactctttcttgctaccagc

SEQ ID NO: 603417 - DNA, 593 bp, Homo sapiens
aaaaaaaaaaaaaagaatctcttgccagaagaattgccgttaggtaaatttgatgttagattaaaaaacaaaaaagtcatgtcttcttatcaaaggtatgtgacttttttgtttgattgtgggcacagaaaatgtttttatttgttgtgggcacagaaaatgggctctggctaaattaatgagaaagacaggaaagagtagaggaaaggatatatttggaaagaaaatggggatataaaaagaaacaaaagaaaagaaaaaagccagacttcttaagggaaaggtaaaaaggacagttcagagaaccaaaaggccagcattaattatcattctcttttcttctatcatgcatcaacaccaacaattttctgtctctgtgtcactttcctcaagattcagattcctggggaacagggtccagttgctcacatttggtcactatcctatctggcctagggccgacagaataccttcatttacagtcctagtttggactgtagaagtgggacagtttacatgaaaattcaagaaaccatcacaaaaagaaggaatgatggctcctgaacaaacrcacaacagatgtccatttcact

SEQ ID NO: 603418 - DNA, 620 bp, Homo sapiens
taatcttgtcttctcactttatttcattaagttgatcttcaatcactgatctcccttcttccacttgatcgattaggctactgatacttgtgtacacttcacaaaattctcatggtgtgtttttcagctccatcaggtcatttatgttcttctccaaactggttattctagttagcaattcatctaacttttttcaaggttcttagcttctttgcattggattagaacatactcctttagctcctttattacccaccttctgaaggctacttctgtcaattcgtcaaactcattctctgtccagttttgttctgttgcttgcgaggagttatgatcctttggaggaaaagaggcattctggtttttggaattttcagcctttttgcgctggtttctccccatctttgtggatttatctacctttgttctttgatgttggtgaccttcagatggggtctttgagtggtcatgccattcctttctgtttgttagttttccttctaacattcaggcccctctgctgcagrtctgctggagtttgctggaggcccactcctgaccctgttttcctgggtatcaccagcagaggctgtagaacagcaaaggttgctgcctattct

SEQ ID NO: 603419 - DNA, 636 bp, Homo sapiens
ggaaatcctcaattacatttctagtatttcayctatgagtactaacatggaaaatttgcaaagggcactgaaatttaaaaatggaaatgtggaaacatttgtaatatgtatgtaatagcatatgtaatagcataaagtttatatacctatttcatattacatatgtaacagcataaagtttatataaaaggaaatccaaaataccaaaggatacccaccacactgataatcatcactacctctggataatgatgcaactggaagtggtgaacaagtaaatcatgagttgtaaccatagcagaattcttttgtttgtttttaacataagtatatttaggcctcatttatgtaattaaaataatttttaaggtctaatagtatctcagttatcaataagagaagcattatatttaacatagtaatggaaatcctggccatagcaattcagcaagagaaagatataaaggcatccaaattggaaaggaagaagttaaattgtccctgtttgcagacaacatgatgattttatatatggtaaactctaaagatgacacaacacacacacacacgcacaaacaccactgttagtactaataaacaaatacagtaaactgcaggatacaaaatgaacacaca

SEQ ID NO: 603420 - DNA, 606 bp, Homo sapiens
gactttcctggggctgttttacagttaactttttaatctataagtagaaagagcacactctaaaataaaaattaaaagtgtagtatagtaaatacataaatcagtagcttagtcatttattaccattatcaactattatgtactgtacataaatgtatccactatacttttatactactggcagtgcagtaggtttgttgacaccagcatcaccacaaacacatgagtaatatgtgtttgtgactttacaactgctgcagtgtcacttggtgataggaatttttcagctccattataatcttatgggactatggtcatatatggtccatcactgaccaaaagtccttatgtggtacacaactatactttaacatcttatagttgtatatcattttacataatagaaaagatatataatcttatttaatttgcatagtgatctggtgatatggaaatgattacacccattttatcrtaaaaaacaggttcagagaggttagattcctggcttaaagccaaagacccaacagcgcagagccagaaccaatgtattgtgatgacagggaaaaaaaatctttccctttataccagtttacaatccaacat

SEQ ID NO: 603421 - DNA, 500 bp, Homo sapiens
gagatgagcagaagagggcatgtccgggaagtgacaagcacacttgaagagaaaggggaggatttgtacactggtgtttttgtttttgtttttgtttttataaggaaattgggattgactgagacaggcccctaggagaagcagtgagctagctacrtactcctacctatatcttcttgttttgggattaatttaacatggaagatatgatggtaacttatattgctataatgtttttaggttttcacaaccattttggaatattttatttgaacctcccaatattcctataggataatgatggactgttgttcctcaatcatgcagagcaaacagaggcttacagtataattcagttagtgcaaaatgaaaccagaacccagaaccccaaaccaggcttccaaaatccagactctgccatcggatgacaggaccatgtctgaaacatcctgtggactcaagggatcgactcccatcctgagtccggggctactcatgtc

SEQ ID NO: 603422 - DNA, 587 bp, Homo sapiens
tgggttgaagaaagctctgaactaaggtaacaactccgcatctggaggttctggtttttatttctacatgtgcacgggagacaataattctcataaagattaatcactccacaagtgttttgaatcagaaaataatgaagaacagaacctgggttctggcttcggaatttgctacagcccatccaagggttgttcataagctgtattcttagaggatcattgtgctaattccattagaactaatttttcttttctttgaaaactgcattgtgcattatcaggctgaaatctaacagaactatgctgtcaaacattctgtacagcaaacaatgatgtagaaacatcagagtaatctctaaacaagaaattcttgggattctgcagatgaagagtgaggtgcccagtgtaggaagggactgacttatcccattcttgacttgttagcccctgacatggagaagttaagctccagagctttttcagtgcaaaatactccattttcattaattccttggaatttgtgatacatgggatataagttgcatgtgcacttytgcatgtctgtgttgtgcatgtatgtgcattgt

SEQ ID NO: 603423 - DNA, 587 bp, Homo sapiens
tgggttgaagaaagctctgaactaaggtaacaactccgcatctggaggttctggtttttatttctacatgtgcacgggagacaataattctcataaagattaatcactccacaagtgttttgaatcagaaaataatgaagaacagaacctgggttctggcttcggaatttgctacagcccatccaagggttgttcataagctgtattcttagaggatcattgtgctaattccattagaactaatttttcttttctttgaaaactgcattgtgcattatcaggctgaaatctaacagaactatgctgtcaaacattctgtacagcaaacaatgatgtagaaacatcagagtaatctctaaacaagaaattcttgggattctgcagatgaagagtgaggtgcccagtgtaggaagggactgacttatcccattcttgacttgttagcccctgacatggagaagttaagctccagagctttttcagtgcaaaatactccattttcattaattccttggaatttgtgatacatgggatataagttgcatgtgcacttctkcatgtctgtgttgtgcatgtatgtgcattgt

SEQ ID NO: 603424 - DNA, 571 bp, Homo sapiens
taaaaattctaaaatctggcaacactgactacagaggcccagaatggtaatgctattaraactaaatggctgctgcctgttcacaggatgctttgccacgtgcctcaccactgtctagtgcctcatatttagccttcctcacctctttccattgtgtgtctggcctctgtaagcatttgaatttgtgtttgttgattttgtcatacagtccacttgtggttgaggcttctggctactcatcatcagagaagggatatggcttcttgactttggttgagtcaggtcccatctcagagagctggtccttagtacaaagttggtcataagctgacatcttatacctcagttattgaaaaccccaatacctctgatatgttccatttttgcttctttgattagagtagatctcatcattaatgggtagtttggtttattccttggtattgtgaaatgagagacataaacatcttgtatgtattgtttgctacatgcttgttcattgcatttggaaccaattttgtaaccacaataaccatttatagaagagtagatggccgggtcagggggtgag

SEQ ID NO: 603425 - DNA, 574 bp, Homo sapiens
tagggaaatcttagccctggaagtgggaaagggraaagtgttcctggcacaccacagcctgccattctaattaaccctgagctaactccagtgatggctaaatccccaatttcattggcttagaacaaagtttagtttttgattaaagaacaacgtaaggtgagtccttggcaaacagccttccacacagtgtttcagagatccaggctctttctatattgtggttccaccatccccagtgcctcagatccttcattccagccagtgatggggattgaaagagagcttggaagatgacaggaaggttttcatgggccaggtcaaagtgacacacatcactcccatccatgttcctatgcccaggtctgaggctgtgtgaacccactttgatagcagggcagctgcttcctggtcacaactctgtagaagggaagcctgaatctttggtaggtagctggtttctttgctaccaaatatagtgaatgagcttcaagagatggttttggagggttccactgtctaaaccactcccccatttccaatgatcactaccatgccacacaatttaagtcgg

SEQ ID NO: 603426 - DNA, 574 bp, Homo sapiens
tagggaaatcttagccctggaagtgggaaaggggaaagtgttcctggcacaccacagcctgccattctaattaaccctgagctaactccagtgatggctaaatccccaatttcattggcttagaacaaagtttagtttttgattaaagaacaacgtaaggtgagtccttggcaaacagccttccacacagtgtttcagagatccaggctctttctatattgtggttccaccatccccagtgcctcagatccttcattccagccagtgatggggattgaaagagagcttggaagatgacaggaaggttttcatgggccaggtcaaagtgacacacatcactcccatccatgttcctatgcccaggtctgaggctgtgtgaacccactttgatagcagggcagctgcttcctggtcacaactctgtagaagggaagcctgaatctttggtaggtagctggtttctttgctaccaaatatagtgaatgagyttcaagagatggttttggagggttccactgtctaaaccactcccccatttccaatgatcactaccatgccacacaatttaagtcgg

SEQ ID NO: 603427 - DNA, 582 bp, Homo sapiens
tgcctattcattttggggtaggcatgtcttcctttgagtgtcaataatctggggatgaggarcctgtgcattgtgtatgaagggatagcaaagaccctgggcagaagagaggaagggaataatattgtgtctgaaggggttttgaaaggaatgtcaccttggagaattatgtaaaatgagagtttccaaaggaaaagaagcctgcactttacctacaatatttctgtgcttgcattcacattatattaaagtgcaaaagttgttaacattttgcagttttttttcacttgaaaatcatttaaataataacctagataatgtattctctgggaacatgcttgagaagcacccaagatgtgttgcttctggggagaatcttaggaaattatgggttagcatacatatgcttaaaaaagcacagttcttaaaaagcatagaggcatctcgtatagaatataagaccaccaccagaggaaataaatttagaaactgttgacagtttgtgcctctgggtaacgggagtagaggaagacttaaacttcttattttggctctactgtctggatcttcaaaaaattttta

SEQ ID NO: 603428 - DNA, 582 bp, Homo sapiens
tgcctattcattttggggtaggcatgtcttcctttgagtgtcaataatctggggatgaggaacctgtgcattgtgtatgaagggatagcaaagaccctgggcagaagagaggaagggaataatattgtgtctgaaggggttttgaaaggaatgtcaccttggagaattatgtraaatgagagtttccaaaggaaaagaagcctgcactttacctacaatatttctgtgcttgcattcacattatattaaagtgcaaaagttgttaacattttgcagttttttttcacttgaaaatcatttaaataataacctagataatgtattctctgggaacatgcttgagaagcacccaagatgtgttgcttctggggagaatcttaggaaattatgggttagcatacatatgcttaaaaaagcacagttcttaaaaagcatagaggcatctcgtatagaatataagaccaccaccagaggaaataaatttagaaactgttgacagtttgtgcctctgggtaacgggagtagaggaagacttaaacttcttattttggctctactgtctggatcttcaaaaaattttta

SEQ ID NO: 603429 - DNA, 582 bp, Homo sapiens
tgcctattcattttggggtaggcatgtcttcctttgagtgtcaataatctggggatgaggaacctgtgcattgtgtatgaagggatagcaaagaccctgggcagaagagaggaagggaataatattgtgtctgaaggggttttgaaaggaatgtcaccttggagaattatgtaaaatgagagtttccaaaggaaaagaagcctgcactttacctacaatatttctgtgcttgcattcacattatattaaagtgcaaaagttgttaacattttgcagttttytttcacttgaaaatcatttaaataataacctagataatgtattctctgggaacatgcttgagaagcacccaagatgtgttgcttctggggagaatcttaggaaattatgggttagcatacatatgcttaaaaaagcacagttcttaaaaagcatagaggcatctcgtatagaatataagaccaccaccagaggaaataaatttagaaactgttgacagtttgtgcctctgggtaacgggagtagaggaagacttaaacttcttattttggctctactgtctggatcttcaaaaaattttta

SEQ ID NO: 603430 - DNA, 586 bp, Homo sapiens
acagtgaaagaaactatcaacagactaaacagacaacctatggaatgggagaaaatattcagaaactatgcatccaacaaagatccactatccagaatctacaarcaatgtaagccatttaacaagcaaaaacaaaataacccaatttaaaaaaatgacaaaaggacatgaacagacatttctcaaaagaagacatacaagtggcaaaaaaaaaaacacatgaaaaaatgctccacatcactaatcatcagaaaaatgcaaatcaaaaccacaatgagatcccatctcacaccagtcggaatgtctattattaaaaaataaaaaaaaaaaacagatgctggcaaggctgtggagaaaagggaatgcttacacactgttgttagaatgtaaattcgttcagctactgtataaagcagtttggagatttctcaaaggacttaaaacagaactaccatttgacccaacaatcccattactgggtatatatccacaagaaaacaaatcgttctactaaaaagacacatgcacttgcacgtgcatcacagtcctatcacaacagcaaagacagaaactcaacctaggtacc

SEQ ID NO: 603431 - DNA, 586 bp, Homo sapiens
acagtgaaagaaactatcaacagactaaacagacaacctatggaatgggagaaaatattcagaaactatgcatccaacaaagatccactatccagaatctacaaacaatgtaagccatttaacaagcaaaaacaaaataacccaatttaaaaaaatgacaaaaggacatgaacagacatttctcaaaagaagacatacaagtggcaaaaaaaaaaacacatgaaaaaatgctccacatcactaatcatcagaaaaatgcaaatcaaaaccacaatgagatcccatctcacaccagtcggaatgtctattattaaaaaataaaaaaaaaaaacagatgctggcaaggctgtggagaaaagggaatgcttacacactgttgttagaatgtaaattcgttcagctactgtataaagcagtttggagatttctcaaagracttaaaacagaactaccatttgacccaacaatcccattactgggtatatatccacaagaaaacaaatcgttctactaaaaagacacatgcacttgcacgtgcatcacagtcctatcacaacagcaaagacagaaactcaacctaggtacc

SEQ ID NO: 603432 - DNA, 569 bp, Homo sapiens
gttagctttgcttttgaaattaacctatcaggtgctgatctctgtaattaaagaatcctaattcataattctctgaatcactgaatttggcaggcaaatgccagtaattttcatttcacaacacagtgcctcagacagtaataagccagaacaaaacacatgcaggtttaatcaggtaacaaagcatgtcaaatacttatcctgaaataagggagtctggcgcatgaagtgtgaacctctgaaaagttccttaggggatgttatagtctctgatctgtaccttttcacagcttctacttacacctttcagattaaaaaaagtctcacctgaaaaggcatcagtattcaaaacaaatcactctcagtgggacttctgggagccaaaggtacaaacacacacatgtgtgtgcacttctgtaccacagtgcacaggtgcacacatgcacaagcatgtatataaacacaaatatagrtgcagactgaataaagagtacttgaagagtagcctttgtttatgttcatgtaattttgcttcaaataccagaagaagaaaaaatatgctgtgttat

SEQ ID NO: 603433 - DNA, 458 bp, Homo sapiens
atgtttaaaaaggaaaagatttgtcaatttcaaaatatgtaattcaaagaaaaggtgggatttgaaaaaacaaatcaactggacttctaaaggaaacaatgcctggcacatggatgarctcagtagatacttgttgattgaaaggttctcagcacctcagaagaaagtaatggctcactctgttttagttgactctttaaaaatacaaaatacataaatattttaccatcatactggcaaactctatgactaaaaataaacagaaggaagagaaagaaatggggctggttgggtagtggtgcccatgggttgcaatgacaaaattagcatcaaggaaggaagtccaagcatccacatctgcggcctagagcaggctgtcaagatgtctggtaggacaaaagatccttcaacaaaggttaggccacaaatcagagcacagagcagtgtgacgggcctcc

SEQ ID NO: 603434 - DNA, 458 bp, Homo sapiens
atgtttaaaaaggaaaagatttgtcaatttcaaaatatgtaattcaaagaaaaggtgggatttgaaaaaacaaatcaactggacttctaaaggaaacaatgcctggcacatggatgagctcagtagatacttgttgattgaaaggttctcagcayctcagaagaaagtaatggctcactctgttttagttgactctttaaaaatacaaaatacataaatattttaccatcatactggcaaactctatgactaaaaataaacagaaggaagagaaagaaatggggctggttgggtagtggtgcccatgggttgcaatgacaaaattagcatcaaggaaggaagtccaagcatccacatctgcggcctagagcaggctgtcaagatgtctggtaggacaaaagatccttcaacaaaggttaggccacaaatcagagcacagagcagtgtgacgggcctcc

SEQ ID NO: 603435 - DNA, 613 bp, Homo sapiens
atctaccctcctctccaacctatccccctcttcttctggatgaaaacccacatcaataacgcaagttcaaggtaggcatccagtacagtgtagcttacttgcgctttacttccactgagctatgctcaagtgaagtgcaatccagagacaaacagacaacattccctgaaattcttccctagatacagaacatcatcaaattgccattttttcatccagcagtgtaggccaccagattctatcccagtccatagatgttggagcagaatacaaaaatgaggggatcttatttgcatgactgtttggggaacacagtttctgctttgtctccttaagggggaagaagcaagagtccattatgaagactctttccaatatgaagctcctcaaatggtgtgttgtttttttctcttagcaagatgtttggaaaaacaatctttgttaggattcaggaaacaacttttttaaactttgaagtgaagactaggtgcttatttcctctggccctgaccatggtcaacacacgcyatcaaaacaagccttagtaggttaccagaagagatacatgggcatggagagaaataactacagaaaggaacgtcacttggtgaaa

SEQ ID NO: 603436 - DNA, 481 bp, Homo sapiens
tgcctgcagggcaagtttatgggccggtgtcctactataggcaatggctaaaagaatcccttagagctgtgatcctgtaatggtactttaatgggattggtttttaaagttccataggagttatttgtaaagtcctgtccattctgacagcagtcactagagggctcacagagacgcctttcggggctgccctctagaggcggagctgagaaaggtggtgctaagccgtccrgcagctcagagccatggagttgattggggaattgatgggtctcccaagacctcagaggagtaatcttgggaatgtaaatgttggtggagcgtctacagacaatgtatgagtcattcagaggatggcgcttggagcagttctatctgtgctgcccaatatgtagccacgagccacgtgctgttattgaacatttgaaatgtgtccagtccaaactgggctgtgctctaagtgcaaaatacacactgtatc

SEQ ID NO: 603437 - DNA, 481 bp, Homo sapiens
tgcctgcagggcaagtttatgggccggtgtcctactataggcaatggctaaaagaatcccttagagctgtgatcctgtaatggtactttaatgggattggtttttaaagttccataggagttatttgtaaagtcctgtccattctgacagcagtcactagagggctcacagagacgcctttcggggctgccctctagaggcggagctgagaaaggtggtgctaagccgtccagcagctcagagccatggagttgattggggaaytgatgggtctcccaagacctcagaggagtaatcttgggaatgtaaatgttggtggagcgtctacagacaatgtatgagtcattcagaggatggcgcttggagcagttctatctgtgctgcccaatatgtagccacgagccacgtgctgttattgaacatttgaaatgtgtccagtccaaactgggctgtgctctaagtgcaaaatacacactgtatc

SEQ ID NO: 603438 - DNA, 554 bp, Homo sapiens
attggtcattcagcagcatgttatttaatttttatgtatttgtacagtttccaaagttcatcttattattgatctctagttatattccattgtgatcaggaaagatacttgatattctgttgatttttaaaaatttgttgagacttgttttgtggctaacatgtggtctattttggagaattttccatgtgctgatgagaagaatgtgttttttgtggttgttggataaaatgttctataaatatctgttaggtccatttggtctactgtgtagtttaaatccaatttttttgttgacttttcctgtctagatgatctgtctaataccgaaggcggggtgttgaaattcccagctattactgtattagggtctatctccctccttttagatctaataatacttgctgtatatgtctgggtgctccagtgttgggcacatatatatttagaattgttatatcctcttgctaagttgatccctttatmaacttatattgttgataaacaattatattgtgaccttatgttgataaacattatattgtgaccttacg

SEQ ID NO: 603439 - DNA, 465 bp, Homo sapiens
aaaaaatatgggattatgtaaagaggccaaatctatgactcactggcatccctaacagagagggagacaaagcaagcaacttgaaaaatttatgtgacgatatcatccatgaaaatgtctccaacctgtctagaaaggccaattttcaaattcaggaaatacagagaacccctatgagatactataaaagaagatcatccctaagacttacagtcaacagattctccaaggtcaaaatgaaagaaaaaatattaaaggcaggtagagagaaggagtaggctacctacaaaaggaaccccatcaagctagcagtggacctttcagcagaaaccctacaaaycagaagagattgggggcctaccatcagcatttttaaagaaaagaaattgcaaccaagaatttcatatctggccaaactaaacttcataagcagagaagaaattagaaccctttcagacaagcaaa

SEQ ID NO: 603440 - DNA, 321 bp, Homo sapiens
gaaaaacattccatgttcatacacaggaataatcaatactgttaaaatggccatactacctgaagcaatttacagattcaatgctattcctttcaaactaccaatgacattattcacagrattagaaaaactattttaataagtttggttccatatgaaaatagtttttaatatggaaaactatttcatagggaaaaactattttcatatgaaaccaaaaaagagcccgaatacccaaggcaattctaagcaaaaagaacaaagctgggggcatcgtgttacccaactttaaactatactcaggctacagtaactgaaaca

SEQ ID NO: 603441 - DNA, 619 bp, Homo sapiens
ggaagttaccacattgccatcaggccccagagaagcaaagggaagagagcagctgcagagaatagaaagaagggaggcacggtgatttgccagatatcccaatgcaaacccaagaaggcccttgaaacgaagggagggatggtatctatgagaagaacaggatgaatcctgcagacaacggagctgtgaacagctcaggcacagagactcgagaatcccggagatgcccagtgaaaaytgtgtctccctgacaaatactggtattttgatgactgcatagttggagatataataattatcaagttttatttttaaaaaacactgaagtttattttacatttttaaagctatattattagcacacagaacccaccaaagttggagaaaggatagatgccaccaacaggctgactcaggagctgagctaaaatgcagggacatagactttggccttggagtacccgagaggattcctcctggactccttttgcagggattttgtgatcattaccctcctcagccacattgacacgggatgaggggtcactaaagttaattatttctttcccttgcctttctgtcattgcagattttattaccttaaaatctgagataccaa

SEQ ID NO: 603442 - DNA, 619 bp, Homo sapiens
ggaagttaccacattgccatcaggccccagagaagcaaagggaagagagcagctgcagagaatagaaagaagggaggcacggtgatttgccagatatcccaatgcaaacccaagaaggcccttgaaacgaagggagggatggtatctatgagaagaacaggatgaatcctgcagacaacggagctgtgaacagctcaggcacagagactcgagaatcccggagatgcccagtgaaaactgtgtctccctgacaaatactggtattttgatgactgcatagttggagatataataattatcaagttttatttttaaaaawcactgaagtttattttacatttttaaagctatattattagcacacagaacccaccaaagttggagaaaggatagatgccaccaacaggctgactcaggagctgagctaaaatgcagggacatagactttggccttggagtacccgagaggattcctcctggactccttttgcagggattttgtgatcattaccctcctcagccacattgacacgggatgaggggtcactaaagttaattatttctttcccttgcctttctgtcattgcagattttattaccttaaaatctgagataccaa

SEQ ID NO: 603443 - DNA, 610 bp, Homo sapiens
cctgattttccatggtgcatagggtagtccagacaatttaatacttgttttaaacagaaatattctatcccatccctcctacccaacaaactcttctaaggaagtaccatatgtacccagatataaraagacattttattaatatgaatttgctggtataaattgaaatttattatgagttcaatcaatgaaaataatgagactagctttccaaacatgagagcgaattagaaatttggggttaggaatgacaatagttctcttatcctcagtattgagtcatttctccacttgtttcagttttacaatatttggaatacactggtccagtagataggatagggagacttccaagatggtctctgcctcagtccgctttgcatttctatagcagaatgctatagattaaataatttataatggacagaaatttattggctcacagttctgaaggctaggaagtccaagatggaggagccaatatttggctaggacctttctgctgcatcatcccatggcagaaggcagaagggcaggaaagagagaaaagagggctgaacttgcccttttataatggcagtaatcccacccgtgagaacagagccctcac

SEQ ID NO: 603444 - DNA, 614 bp, Homo sapiens
aactctgcatgtctaactcccaagaagaattctccttgggacttctgttaaaaccagcaactctcgtggagtttgtgacacactamgaacaaaggcttacaaagatagctggaagaagagtggcacttcctttggagaaacccacatttaaaatgccatcttctaaacgcaatcttccctccacctctatcttcgattttgacattgatagagaagctttcaagaaagcagcataactcagttagatgaagctactaatttgaaggaacaatacataatgaatggcacttatgtgtggtgattgtaacagcaattgtcttctgccatttttctccctgagacattttatcttgtctttctcctcctttttgtattgttaaggactattgcaagtatgtgtgtgtgcatgtgtgtgtatgtttgagagagagaaagactatgaaaagaagaagaaagagtgaaagagaagaattgtcttggaagagaaaagggtataggaagagatgaaccatgactacagctgtgtctggaggaaataagaaaatctagactgttttagagggaatgaactttcccccatgttctgggtgtctggtcaataggatgaatgaaaa

SEQ ID NO: 603445 - DNA, 614 bp, Homo sapiens
aactctgcatgtctaactcccaagaagaattctccttgggacttctgttaaaaccagcaactctcgtggagtttgtgacacactacgaacaaaggcttacaaagatagctggaagaagagtggcacttcctttggagaaacccacatttaaaatgccatcttctaaacgcaatcttccctccacctctatcttcgattttgacattgatagagaagctttcaagaaagcagcataactcagttagatgaagctactaatttgaaggarcaatacataatgaatggcacttatgtgtggtgattgtaacagcaattgtcttctgccatttttctccctgagacattttatcttgtctttctcctcctttttgtattgttaaggactattgcaagtatgtgtgtgtgcatgtgtgtgtatgtttgagagagagaaagactatgaaaagaagaagaaagagtgaaagagaagaattgtcttggaagagaaaagggtataggaagagatgaaccatgactacagctgtgtctggaggaaataagaaaatctagactgttttagagggaatgaactttcccccatgttctgggtgtctggtcaataggatgaatgaaaa

SEQ ID NO: 603446 - DNA, 580 bp, Homo sapiens
ccagaagatagaaagacctggtttctagtcttggctccgaaagtgattccccaggtgggtcgtaaggaatggtrtgatacttgcaaggctctctcctttgcaccacattcagagcaatctaaatcttctccctatctccacagccatgactttgtctaagtcacgttgctctcttatctgcgccacccaactgtcttccagctcatctgtctgcttcattctcattccttccaacccattcctctccatgcaactgtcagaatatatttacaggagtaaatcaaggcatgccactctctacttaaatcccccacagcttttccctgcccacctttaccccctcatctcttgtttgtaccatctgtccaagacacacctgccactcttatcttttgtcagttcttaagccaaactccttcttgcttttttttctctgtctagaacactcttcacccagttttcccaaatcactcttgagttggtaggtaataaatagtagttaaaagtaaatgagtaaatgaatgaataaatcaaccccaattttattatttgctctttgtcatacttcatgttaaatatc

SEQ ID NO: 603447 - DNA, 636 bp, Homo sapiens
tcctctccatgcaactgtcagaatatatttacaggagtaaatcaaggcatgccactctctacttaaatcccccacagcttttccctgcccacctttaccccctcatctcttgtttgtaccatctgtccaagacacacctgccactcttatcttttgtcagttcttaagccaaactccttcttgcttttttttctctgtctagaacactcttcacccagttttcccaaatcactcttgagttggtakgtaataaatagtagttaaaagtaaatgagtaaatgaatgaataaatcaaccccaattttattatttgctctttgtcatacttcatgttaaatatcaggtcctaagatattttctaactattttaacaaaaggaatcattccccatattctcacatacccattttatattcttcttggcacttaccacaatctatagtctttcttttcttttgttgtttctgctgttcacttgtttattacgtgtcttttccatctgaatttaagctccctgaaggcagggatcatttgtgtctttttcagcattatattctcaatgcccatcatggcaaaatccctagcacaaagttggtttgcaataaatattttttgaagcaaatgaataaatgaatg

SEQ ID NO: 603448 - DNA, 332 bp, Homo sapiens
actctctacttaaatcccccacagcttttccctgcccacctttaccccctcatctcttgtttgtaccatctgtccaagacacacctgccactcttatcttttgtcagttcttaagccaaactccttcttgcttttttttctctgtctagaacactcttcacccagttttcccaaatcactcttgagttggtaggtaataaatagtagttaaaagtaaatgagtraatgaatgaataaatcaaccccaattttattatttgctctttgtcatacttcatgttaaatatcaggtcctaagatattttctaactattttaacaaaaggaatcatt

SEQ ID NO: 603449 - DNA, 614 bp, Homo sapiens
agttggtttgcaataaatattttttgaagcaaatgaataaatgaatgaactaaagttctaccatatttatcccttatctaatggccttcaaaggctctccatagcttgtaagagaaagactggattctttgtgtaatctagagatgctaccttgatgcaatttctcttgtcgagtgttgaaaaattgtttgcattttcagttaagccatattttcttagcctccatatgtmtgcccttccctgcacctcttgacaacacacgctctgctattgtagtatataatgccaggacaagtatccctgggagcatgtaacacatgtgacacaaagtgcttgactgaaatgttagcccctaccttatctgaacataatcctcttgactaacttctatttgtccttcaaaactcaactcatgtgcccattccactgggaagtcctttgattcctttgtcctctctgtctgcccttccctgtacctctaggtaaaacatgctgccttctgttgtagcacacaccacacactcaagtaggacgtttccccaactagagagtttgtttcttgagggccaagcttgtttcttattaccctgtttctttgttgcctagtatgtagt

SEQ ID NO: 603450 - DNA, 415 bp, Homo sapiens
gaattctgaccagtgaaatgtgcgtataaatgccttgtgtttcctccctgatgaggggtaacacatcattgagagctgcggggkcatcttcctctctctcttcctgaaacagcaaccctggagatatggacttttcttctaacccactgacattttgtgatctatctgctagtgcagcaaaacataggttatccttcctggagccatactctgtgtccagctgaaggtagacagcttaaatttgtagctaaccagacctagcaagcacctgtgtttccctctagtatgtctgctggatctcagcaattagataaaactctaagaacagcaaccatgtctcacacccccctcataggacctaacatagtgttgaacaaagattcattcaatgtgaaataggtttgaagaaagcctc

SEQ ID NO: 603451 - DNA, 612 bp, Homo sapiens
tgaaaccccatctctactaaaaatacaaaaattatccaggcgtggtggcatgcacctgcagtcccagctacttgggaggctgaggcaggagaattgcttgaacccgggaggcagaggttgcagtgagytgagattgctccactgcactctagcctgggtgacagagtgatactctgtctcaaaaacaaacaaacaaacaaacaaaaatcaccaagggctaatgatttaatcaatcatgcataggtaatgaacctccaagaaaaacccttaaatgtcgaagttctgaaagtttccagggtgatgaacacactatgcgtctgcgaaggtggtgcacccagagagggcatggaagcttgttggcaccacccctgaatcccccaacctaccacccctgagtcccccataccttgccctctgcctctcttccattgggctgttcctgagttatatcctttataataaactggttaagtgtaagaaaagtgttttcctgagtcccctgcgcagttctagtgaactctcaaacctgaggaggcggtcatgggaaaccccaaatttgcagtcaaggtggacaaaagtacaggtggtctggggacctgggacttacaacag

SEQ ID NO: 603452 - DNA, 627 bp, Homo sapiens
taaagcagggcatgtctaaaacaatgtggccatttgatgaagggcactcgaaaatgtatgattgagccaatcacagatactgaggaaacttgaggccaggattttgaggctgcagtgtgctacgattgtgcctgtgaatgaccactgcatttcagcstgggaaacatggcaaaacctcatctcttaaaaaaaattaaattaaaaatgtattatggaaaaccatggtgcattgctgtcttcaataataaaggactagagcaaggatagaggcttagatttaaactttgtttgctccaacccttgaagatacatagaagcagaattcaatacaacataatttttagccatatttagagaatccaaaaatgaagcaggctcatttggaggcagtgagtcccttattactggaaatattcgagcaggaatttcagtagccactgagcaatggaaatgttagtttcttcaaccctgaaattttattaaatgtgtatcagcaaatcgcaggtgtaccacttacctcattcttgagtagcacttaacttctatgggcctcagttttctctcatttaatggactgaggggtgataataacttacaaagctgttagaaaaattaaaatgaagttaa

SEQ ID NO: 603453 - DNA, 627 bp, Homo sapiens
taaagcagggcatgtctaaaacaatgtggccatttgatgaagggcactcgaaaatgtatgattgagccaatcacagatactgaggaaacttgaggccaggattttgaggctgcagtgtgctacgattgtgcctgtgaatgaccactgcatttcagcgtgggaaacatggcaaaacctcatctcttaaaaaaaattaaattaaaaatgtattatggaaaaccatggtgcattgctgtcttcaataataaaggactagagcaaggatagargcttagatttaaactttgtttgctccaacccttgaagatacatagaagcagaattcaatacaacataatttttagccatatttagagaatccaaaaatgaagcaggctcatttggaggcagtgagtcccttattactggaaatattcgagcaggaatttcagtagccactgagcaatggaaatgttagtttcttcaaccctgaaattttattaaatgtgtatcagcaaatcgcaggtgtaccacttacctcattcttgagtagcacttaacttctatgggcctcagttttctctcatttaatggactgaggggtgataataacttacaaagctgttagaaaaattaaaatgaagttaa

SEQ ID NO: 603454 - DNA, 647 bp, Homo sapiens
tattttccctcatgaccctcatttgaggtaaactgttgtgggctcaattgtgttatcttctttttttctttttctttcttttttttttttttggaggcagagtcttgctctatcycccaggctggagtgcagtggtatgatcttggctcactgcaacctccacctcccaggttcaagcgattcccctgcctcatcctcctgagtagctgggattacaggcgcctgccatcacgcccagctaatttttgtatttttagtagagacagggttttgccatgttggtcaggctggtcttgaactcctgacctcaggtgatctgcctgcctcagcctcccaaagtgctgggattacaggcatgagccaccaagcccggcctgtgttatcttctttataggtcatgcatcctctagtctgtcacgctctctttatgtgacaaagctttgcatttctttcctctgagcatgccccacttcctccagttcagttttcaagggtgaggtccagaccagaacatgaagcgcaggtgtggatctgaataggcaactatctccttcactcagaaggacatgcttctatgacttcattatcttttccagcaggtacctcatgctcttcattcatgtggaactttgttttgattagactgc

SEQ ID NO: 603455 - DNA, 647 bp, Homo sapiens
tattttccctcatgaccctcatttgaggtaaactgttgtgggctcaattgtgttatcttctttttttctttttctttcttttttttttttttggaggcagagtcttgctctatctcccaggctggagtgcagtggtatgatcttggctcactgcaacctccacctcccaggttcaagcgattcycctgcctcatcctcctgagtagctgggattacaggcgcctgccatcacgcccagctaatttttgtatttttagtagagacagggttttgccatgttggtcaggctggtcttgaactcctgacctcaggtgatctgcctgcctcagcctcccaaagtgctgggattacaggcatgagccaccaagcccggcctgtgttatcttctttataggtcatgcatcctctagtctgtcacgctctctttatgtgacaaagctttgcatttctttcctctgagcatgccccacttcctccagttcagttttcaagggtgaggtccagaccagaacatgaagcgcaggtgtggatctgaataggcaactatctccttcactcagaaggacatgcttctatgacttcattatcttttccagcaggtacctcatgctcttcattcatgtggaactttgttttgattagactgc

SEQ ID NO: 603456 - DNA, 647 bp, Homo sapiens
tattttccctcatgaccctcatttgaggtaaactgttgtgggctcaattgtgttatcttctttttttctttttctttcttttttttttttttggaggcagagtcttgctctatctcccaggctggagtgcagtggtatgatcttggctcactgcaacctccacctcccaggttcaagcgattcccctgcctcatcctcctgagtagctgggattacaggcgcctgccaycacgcccagctaatttttgtatttttagtagagacagggttttgccatgttggtcaggctggtcttgaactcctgacctcaggtgatctgcctgcctcagcctcccaaagtgctgggattacaggcatgagccaccaagcccggcctgtgttatcttctttataggtcatgcatcctctagtctgtcacgctctctttatgtgacaaagctttgcatttctttcctctgagcatgccccacttcctccagttcagttttcaagggtgaggtccagaccagaacatgaagcgcaggtgtggatctgaataggcaactatctccttcactcagaaggacatgcttctatgacttcattatcttttccagcaggtacctcatgctcttcattcatgtggaactttgttttgattagactgc

SEQ ID NO: 603457 - DNA, 638 bp, Homo sapiens
ccacacttgaaaaacactggtttaatacttagcatgatcttctggctcaagagcttttggaactcattgacatttgagaggcatacaccactaaataattccatatccctatgtcccccaaactcaatcacctttttcatgcagctggagtaacatggttttactttacattctttgtccggaacatctcacttatattttggaacagactgtggaagagggaattcatttctmgtctgatcagctgagaatgagatatataactgtccagttgcctcaaacctttctagaaaggtctgaaaattatgtatacccacctctccccacgcccattaaaaatacattaaaagatcttttcaggtttttaatacttttaatgggtaactggacgtaaagacatcagtagagaatgcaaaattaagaaacttgtgcagaatcctgtgctttgggtttgtttacaagaaagagatgaaagttgaaaggaagcagagagggctacatcactgccacacaaagatagaccccaggcctgtgtgtcccctgcagacagcatttcaactcacataagcaggtttctgggcaactgtatgttcttctttcagacaactttctagtggcatatgatcttttgtgatcta

SEQ ID NO: 603458 - DNA, 574 bp, Homo sapiens
gtaattcaaaaaagtgaagaacataagtaaatgtaattatgtaattagaaaatacagtttaaatgcacatttcttccccttccttctatttatttattttaattttactttaagctctgggatasatgtgcagaatgtgcaactttgttacataggtatacacgtgccatggtgatttgccacacctccttcttttaactgattttaaaagaaatggtttacaacaatatgaacataattttattgttatgcctgtatgtatatgaatgtaacatacttgacaataacagcacaaagtaggtcagtggaaacaaaggtgtattagagcaagaacatgacactgaatggtaacttgaatccacaggaacaaatgaagagaaccagaaatggtaaagaagaaagttagtctaactttacagccagtctaacgaactctataaatatgtacttgctctcctttcatctcttattttctataaaaaaacacaaaaatttattaaatgacaattgtaacaatgtattattgagtttataacatataaagatttatttatagcaccaatagcataaaaga

SEQ ID NO: 603459 - DNA, 486 bp, Homo sapiens
cgcaaatacagaggatttttcttatttttttaatcctctataatattgtgattatattagaggctgaagaatgttccttaaaggaatcaatgaagatatcacaactgatcattgccttgacttctctcctggatgaaatccatgaaatagcctagatggacgcctccatagaagctttgggagcactttttgtcagtcttaggaaacawccaggtaaatgggaaaaggtatattaagtatgggtccatagaagggcaaatgtgtaaatgaaagtacctgaagtgaatgtgcctctgggagagactaagtgctgttttagatgaattttaaaaaacaatcagaaatgcggaaaagtactgggaagagctgccagcgttgtcaggtctctgctactctttccaatagggctccaccaaagcaaaaggggtaactgcaaaccagtaaacaaggttaactgtccaggctgttcactctggtttgcaaaga

SEQ ID NO: 603460 - DNA, 605 bp, Homo sapiens
gcttgaaacaaatgaaaaaatcgaacatcttactaaagaaataaaacatatgaaaaagaaccaaatgggaaattaagcactgaaaaatacaactaaaatgtaaaacttaataaacaggctcaaagtcagaatgaaggaaacaagaaagaatatgtgaacttcaaggtagaacaatagaaattatccacttttaacaagagagataaagtaggctggaagaagaatgattagagccttactcctgtaagattataacaaaagctcaaatgtttgtgtcataggactcctagaaggagaggggaaagagggcaagaccaaaaaagcacctgaggaaatagtgaatggaagctccccagatttggcaaaagacataaactatagattcaacaagctgaataaatataaaatagtataaacccaaataatcataaaccaagacatagtcaattttctgaaaactaaagacaaaaatcttgaaagmagcaagaaagaaatgactgcctatctatagaagaaaaagaatttgaatgactgcagatttcttactaaaaattatgagacagaaggaagtggcatatttctcaagtgctgaaagagctgccaac

SEQ ID NO: 603461 - DNA, 605 bp, Homo sapiens
gcttgaaacaaatgaaaaaatcgaacatcttactaaagaaataaaacatatgaaaaagaaccaaatgggaaattaagcactgaaaaatacaactaaaatgtaaaacttaataaacaggctcaaagtcagaatgaaggaaacaagaaagaatatgtgaacttcaaggtagaacaatagaaattatccacttttaacaagagagataaagtaggctggaagaagaatgattagagccttactcctgtaagattataacaaaagctcaaatgtttgtgtcataggactcctagaaggagaggggaaagagggcaagaccaaaaaagcacctgaggaaatagtgaatggaagctccccagatttggcaaaagacataaactatagattcaacaagctgaataaatataaaatagtataaacccaaataatcataaaccaagacatagtcaattttctgaaaactaaagacaaaaatcttgaaagaagcaagaaagaaatgactgcctatctatagaagaaaaagaatttgaatgactgcagatttcttactaaaaaytatgagacagaaggaagtggcatatttctcaagtgctgaaagagctgccaac

SEQ ID NO: 603462 - DNA, 605 bp, Homo sapiens
gcttgaaacaaatgaaaaaatcgaacatcttactaaagaaataaaacatatgaaaaagaaccaaatgggaaattaagcactgaaaaatacaactaaaatgtaaaacttaataaacaggctcaaagtcagaatgaaggaaacaagaaagaatatgtgaacttcaaggtagaacaatagaaattatccacttttaacaagagagataaagtaggctggaagaagaatgattagagccttactcctgtaagattataacaaaagctcaaatgtttgtgtcataggactcctagaaggagaggggaaagagggcaagaccaaaaaagcacctgaggaaatagtgaatggaagctccccagatttggcaaaagacataaactatagattcaacaagctgaataaatataaaatagtataaacccaaataatcataaaccaagacatagtcaattttctgaaaactaaagacaaaaatcttgaaagaagcaagaaagaaatgactgcctatctatagaagaaaaagaatttgaatgactgcagatttcttactaaaaattatgagacagaaggaagtggcayatttctcaagtgctgaaagagctgccaac

SEQ ID NO: 603463 - DNA, 663 bp, Homo sapiens
ggtgtgccagcactgtgcacatgagaaatgggcactataggactgctaagtaaatagttaaacaatgttgagtaaatgacatcagggctgccctggtagctttgagtgacagasgcagatgagagggttggtagtcatggattgaaggccaggaggatttcctgaatttctctgcctaaggctcatggcccatgggcacttggccaccctaggcaggctcagagcaagcacctcttttcacctgaaaaagtttttggctgttgaacccccagcatgatttcctagcagtgcctctgtatactttgctcactcatatccacaaccagaacttatccatctactctggtatactaggagagtagcttccttccctagctctgggtttgcctcaagaatggcagagttgaaatagatctatcagaaacactttctagagggctcatgaaagaagggtgcttgttctccccaaccttcagaaagcaaaagcactttgatttcacctgaattaaaaataaattctaatgaaatacctgatacgaatgtaaaagtatcttttggaaaaattcactccatgctttgaaattaattccaaggcacacttacatttatctttgatttagaaaggagaaaattgctttcctttttgttctttaaaatttatgt

SEQ ID NO: 603464 - DNA, 615 bp, Homo sapiens
tacatttatctttgatttagaaaggagaaaattgctttcctttttgttctttaaaatttatgtaactgtaacggagaaaattagagtacatgaagtatagaaattgaatcataatccagtgcaatgcatttccttttccagaaagtcaaatgtcatttgcatttgagctgatgagccttttttggtatccttataaagactttttcccctttcttcctctgataktcttcaaattaaatttttgtcatttgaataactctagttattttccttttatgcaggctgtgctattatagtaatcaggttgtctgagacataagtaggtcacatgaatgtatttcaaaatagaatttggtgctcacaaagaatcatatggaaattacaggggaaacaaaatgtaggcattcgatgatggtagtgaaaacctgagatagcctaaagttgaacatgagccactgagtttagaaatggggggagggacattgctgactttcccgacagcaatgaaggtatttctttataaagtcttctgagcgttaaatgagctttaggccaacttttttttctgctaataattggtgtgtgtgtatatatatatatatatagagagagaga

SEQ ID NO: 603465 - DNA, 615 bp, Homo sapiens
tacatttatctttgatttagaaaggagaaaattgctttcctttttgttctttaaaatttatgtaactgtaacggagaaaattagagtacatgaagtatagaaattgaatcataatccagtgcaatgcatttccttttccagaaagtcaaatgtcatttgcatttgagctgatgagccttttttggtatccttataaagactttttcccctttcttcctctgatagtcttcaaattaaatttttgtcatttgaataactctagttattttccttttatgcaggctgtgctattatagtaatcaggttgtctgagacataagtaggtcacatgaatgtatttcaaaatagaatttggtgctcacaaagaatcatatggaaattacwggggaaacaaaatgtaggcattcgatgatggtagtgaaaacctgagatagcctaaagttgaacatgagccactgagtttagaaatggggggagggacattgctgactttcccgacagcaatgaaggtatttctttataaagtcttctgagcgttaaatgagctttaggccaacttttttttctgctaataattggtgtgtgtgtatatatatatatatatagagagagaga

SEQ ID NO: 603466 - DNA, 597 bp, Homo sapiens
taatctctctaatagtgatatccatatgcagacagagacagattgagtagtcaaaaatgctttagctaaaccaataactcactcagcatttataggttgaaattaattataggagaaattggttcctgtctttttataacttaagtggaaaaatataatcttctataacaaatgttatagcgtaagtggttggactattcaaccctataactcagcagttatataccttggaaggtctattttttatcaccttaaatactagtaaacacagacgctttataaagtgataaccaggagaagatgctgtacatttgtaatctttagaactcagccccacttggctggctgccaacaatgcttccaacttattgtgttttcatggccacaggaatgtaaacattccataacctcttcttccttgtcattcctagaagagcaatttgaaggcagtattaataatgcttcaygtatatatccccacagggttactttctctttctttgcaagtcctcatgctaaatactgtcataactcactaatctataaccaaggtcagtaaagatttaaagaggatcctctttgattctacattggaca

SEQ ID NO: 603467 - DNA, 583 bp, Homo sapiens
ggtctggggtctgtttatcagcaacttctccagaaagatggcctgactttggagggtatgctgcatggcacatctaggaactgggaatcatgcagccaagagggtgcagaagtagcagggggatcgtgctctctggagcaatgtctatgagctgatgactgacagccaaggtgtcccctgccctgagtgctatgatgctgcattagaacccagtgccatgcagaaccccaaaagagaaragaaacattagaatacctgggattaaggagttagaaatcaagttgcatgaaataaaaattttaaaattatatttctttcatttctaagtttttcaatgagttttattcccatcaatcagtcccttctcagtcagtccttgttacctccccgcccctgcagagtcaaccattaatgtaatttctaatgccataaattagctttgactttttcagactttcctattaaatggcattgtgttatctgttctccttcatgtctggcatctttttcacaggatgtcgttaagtttatcccatgttgctgcatgcattagaacattgtggttctcactgccaagtagaat

SEQ ID NO: 603468 - DNA, 505 bp, Homo sapiens
tcagttctgctctgatcttagttatttcttgtcttctgctagcttttgaatgtgtttgctcttgcttctctagttcttttaactgtgatrttagggtgtcaattttagatctttcctgctttctcctgtgggcatttagtgttataaatttccctctacacattgctttaaatgtgtcccagagattctggtatgttgtgtccttgttctcattgtctatcattcttttttgcatcccagactgtccttctggaatcattttccttttttttgaaggaaataatttcaaagttcttttgaagtaagtatcttggtatcagactctcccattttctaaatttataaatattttatcttacttttattcctgaataacagctatacagtacactggattctaagttgaattattttttctccacacttggtaattattctttcattgtattttaacctccttttttttgttgggaagtctgttctcattttaccgtgatgggttctt

SEQ ID NO: 603469 - DNA, 385 bp, Homo sapiens
ctgggtcaaatggtacatggatttaaaagttttacagatatggccaaagtgtcctctaaagggttgccatgctccctgacatcacatgtaggacttcttgacttaacccacagatgcacctttgcagctttgtcagttttatcagcctctactattactgggtctagctttctttctcttcaccaatgtcctctttggcagctggtccagcaaaccttatgcttgtgcatgctaaaattacaccaaaggcaattaatgaccactgtgttaaccarcacagtctgtcaattaacaaatgcttaaatgacatttttgtttactttcttgatctcattggtaaaagtggtggctttttccttggtataaaatggtgtttaaaaatgaa

SEQ ID NO: 603470 - DNA, 567 bp, Homo sapiens
agcacttaccatgtttaaggcattrgccatgtgctttacctacatcatctcatttagctcctcaataagtgttacatcattcacacttcaaaaatgaggaaactgaggaacagagaggtcaagtgacattctaaaagtcacacagctggtaaatgatactcatctttcttttattgttttttctgggccagatatgttatttctagtttttaataagtcttcacattcagcattatattattggacccagtgatttttaagatcctttcagttcaaatagtctataaatctgagcaatagcatgagcacacagcatacccaagcatcgaagagaaaacatagcaatattttctctttctcctcctattttgtttccttgatttcctctttctccatcttctttttttgatagaatctgattcatgaggtatttttaaatttgctattatatgcacaaccctagattccttgtgatagtggtggcggtgatggtagtaggaggaggttgggtaccaaagaagaaaaaggaagttactagacactagtatgttacatgaaacagatggc

SEQ ID NO: 603471 - DNA, 608 bp, Homo sapiens
agcacttaccatgtttaaggcattggccatgtgctttacctacatcatctcatttagctcctcaataagtgttacatcattcacacttcaaaaatgaggaaactgaggaacagagaggtcaagtgacattctaaaagtcacacagctggtaaatgatactcatctttcttttattgttttttctgggccagatatgttatttctagtttttaataagtcttcacattcagcattatattattggacccagtgatttttaagatcctttcagttcaaatagtctataaatctgagcaatagcatgagcacacagcatacccaagcatcgaagagaaaacatagcaatattttctctttctcctcctattttgtttccttgatttcctctttctccatcttctttttttgatagaatctgattcatgaggtatttttaaatttgctattatatgcacaaccctagattccttgtgatagtggtggcggtgatggtagtaggaggaggttgggtaccaaagaagaaaaaggaagttactagacactagtatgttacaygaaacagatggcttatgatgtgaattatgacaagacatgaggcatgaagatct

SEQ ID NO: 603472 - DNA, 446 bp, Homo sapiens
tcacaactgagaaatgattgagctaggatttggactcagatctgtctgattttaaaagactactcttaaccaccaaggagccttcctctgtattgtcttctccaataaccaatctgagctctgctcaccctttgtccttttttttttttttggagatgsagtttcgctcttattgcccaggctagagtgcagtgacacaatctcagctcactgcaacctccacctcctgggttcaagcgatcctgctacctcagcctcctgaatagctgggattacaggcgcacgccaccacgcctggctaatttttgtatttttagtagagatggggtttcaccatgttggtcaggctggtcttgaactcctgacctcaggtgatcggcccacctcggcctctcagagtgctgggattacaggtgtgagccaccatggctggccgtctgtgccat

SEQ ID NO: 603473 - DNA, 552 bp, Homo sapiens
aagctgtcattttagatttcagtcaaataggagtagaataagatgttagagatagaaggggctgccatgaccatctcaacaaatttcttattgtttagtggggtaamctgagacttagagaggctcagagaggggaagggtcttgtccaagcacacacaggcctagtgtagaaatctctagtccagggcttttttcactacttcttgttctctgcatttatctcattttccatctgatttccctcttaccagcagggcctccaaactgggaccaccaattcatcaacctgcacttgctgaccagcccctgagagtctcacattggaccagttcccaagctctccctggggtggctccaggacttaactacacacagtacttcccaatgcacagctgcagggggcgccattcacaccgtggtctctccggggtctggacctgtcagggcttcatgaaaatgctcaggacacatccctaaggaagcccctgggctaccgcactagggcatatttttacacttggcagagtcatcttcccactggaaagcgagta

SEQ ID NO: 603474 - DNA, 596 bp, Homo sapiens
ttggtgcctcaggagctacacaagcctgaaccacctgctacttaccagatgtatgagcttgggccattcccttaccccatggggggttcgcagtttccaacatgtaaaatagcagtcatagtgccaacttcttcacattgtaagtgatgaataagatagcatgacaactgcctgcctggtccacatgggagctgggccactgttctgtcctccctttcatgctgccactcccatgatgctggcagatgtgaccaatgytcctgcctgttcaggtgatgatggctatgaggaaacaaagaacacagctgctcactggtttccatgctgatgctcccaggcagccacttctccccttagttcgggattgtttttaaattttttccattttgggtaatatttagtctccacatgatcattcttagagatctttattgagtacaagtgtatggggcaggaaacaatggggaggattttaggttttccatggttcagtggagaagtagccctcttcccatcagcaaacactatttttatccttaggagtcctgttgttattctctgtgcacgttggaggaagtcagtttgagagagaaaac

SEQ ID NO: 603475 - DNA, 552 bp, Homo sapiens
aagctgtcattttagatttcagtcaaataggagtagaataagatgttagagatagaaggggctgccatgaccatctcaacaaatttcttattgtttagtggggtaaactgagacttagagaggctcagagaggggaagggtcttgtccaagcacacacaggcctagtgtagaaatctctagtccagggcttttttcactacttcttgttctctgcatttatctcattttccatctgatttccctcttaccagcagggcctccaaactgggaccaccaattcatcaacctgcacttgctgaccagcccctgagagtctcacattggaccagttcccaagctctccctggggtggctccaggacttaactacacacastacttcccaatgcacagctgcagggggcgccattcacaccgtggtctctccggggtctggacctgtcagggcttcatgaaaatgctcaggacacatccctaaggaagcccctgggctaccgcactagggcatatttttacacttggcagagtcatcttcccactggaaagcgagta

SEQ ID NO: 603476 - DNA, 498 bp, Homo sapiens
ccaaggattcatacaggtacccttcatttgtgaggacaaattaggggaaatacttttcacatacataaagactaggttctagactcataaccaaccctcaaacattcaagggcagaatagcctgctatagaagattccagctccctgtgcctctgcatttttttgttttcttgactgctttatagttctttcagaagtgagtagcagaaaaggaagaggaaagatttaaactaacagctgaaataagtttcaaagcatttttttctttttgtcttacctacttccactttttttttttttttttttttttttttttttttttttgagacagagtctcactctgtcacccagactggagactggagtgcagtrgtgcaatcttggctcactgcactctccacctcccagcctcccaggctcaagcgattcttctgcctcagcctcccaagtagctgggattacaggtgcacgccactaccacccagctaatttttgtat

SEQ ID NO: 603477 - DNA, 567 bp, Homo sapiens
aggagaataaggggtggcactctgggaacaaatttccgtgttgccctggggayctgctgctctgtagggtcctgatggaaccaggcccagaatggcatgggcagaccgagctttcctggccccagaagagccagcttccaaccctcctttgaacgggcaggtcctccttctctgctgtcaggcccctgaaagccctgaagaccacaccctaagagggaagcatggctgctccccactgcattgggcctgggcgcccaggagcacagcagcagcccttgagtagagacattcagtcctctgctgctgtggccccttaatcagtgaccccacttccccagcccccctacaacttgtgcttgcccagagcctgctttctcctcttccctcctctcctaggactcctggctgagccagcacagaaatcccagtccctcccttgcttccattctcctcttctgccccatcttagaccttctcccaggttctacgtgaacagcctgggtgtcaaaagaacccacttctgcactgtcacccagagcaggcagccattcgtccttactgaagctt

SEQ ID NO: 603478 - DNA, 567 bp, Homo sapiens
aggagaataaggggtggcactctgggaacaaatttccgtgttgccctggggacctgctgctctgtagggtcctgatggaaccaggcccagaatggcatgggcagaccgagctttcctggccccagaagagccagcttccaaccctcctttgaaygggcaggtcctccttctctgctgtcaggcccctgaaagccctgaagaccacaccctaagagggaagcatggctgctccccactgcattgggcctgggcgcccaggagcacagcagcagcccttgagtagagacattcagtcctctgctgctgtggccccttaatcagtgaccccacttccccagcccccctacaacttgtgcttgcccagagcctgctttctcctcttccctcctctcctaggactcctggctgagccagcacagaaatcccagtccctcccttgcttccattctcctcttctgccccatcttagaccttctcccaggttctacgtgaacagcctgggtgtcaaaagaacccacttctgcactgtcacccagagcaggcagccattcgtccttactgaagctt

SEQ ID NO: 603479 - DNA, 567 bp, Homo sapiens
aggagaataaggggtggcactctgggaacaaatttccgtgttgccctggggacctgctgctctgtagggtcctgatggaaccaggcccagaatggcatgggcagaccgagctttcctggccccagaagagccagcttccaaccctcctttgaacgggcaggtcctccttctctgctgtcaggcccctgaaagccctgaagaccacaccctaagagggaagcatggctgctccccactgcattgggcctgggcgcccaggagcacagcagcagcccttgagtagagacattcagtcctctgctgctgtggccccttaatcagtgaccccacttccccagcccccctacaacttgtgcttgcccagagcctgctttctcctcttccctcctctcctaggactcctggctgagccagcacagaaatcccagtccctcccttgcttccattctcctcttctgccccatcttagaccttctcccaggttctacgtgaacagcctgggtgtcaaaagaacccacttctgcamtgtcacccagagcaggcagccattcgtccttactgaagctt

SEQ ID NO: 603480 - DNA, 597 bp, Homo sapiens
gggcttggagcaggtgctgctttaccacagtgggaggccccatgcacctctgtgccatctagccaagctgaagcagggctgtaactggccaaacatctcacggctcttgctagagagagctcaggtgtaaaagcatgcctttcatctacctcccaaggccgagcaccttaccttctagtctctggaggaattatattttctttgcttttgccctaggtccatccaccgggctctctcccttcacctggctaagatggtgccaagagacttgctcctctgtgcacctctttcttgcctgtgtgtcctgcctayagccacagcatcttctggtatcagagtctcctgcagaccccagccttggtcctttgtctatctgtctctcccaatgggctctttccttggtttccttctgcctcttccctaggtcccccagccagtgtcttgagttcttctgctgtgctgccctcctgcccgtccatcttcctccactggcccatccttgaagcattttccttctttctgttcttgccttgtctcccttccctcctcaggcctgcactgctccactcccacctggtccaggtatgcccagggaac

SEQ ID NO: 603481 - DNA, 597 bp, Homo sapiens
gggcttggagcaggtgctgctttaccacagtgggaggccccatgcacctctgtgccatctagccaagctgaagcagggctgtaactggccaaacatctcacggctcttgctagagagagctcaggtgtaaaagcatgcctttcatctacctcccaaggccgagcaccttaccttctagtctctggaggaattatattttctttgcttttgccctaggtccatccaccgggctctctcccttcacctggctaagatggtgccaagagacttgctcctctgtgcacctctttcttgcctgtgtgtcctgcctacagccacagcatcttctggtatcagartctcctgcagaccccagccttggtcctttgtctatctgtctctcccaatgggctctttccttggtttccttctgcctcttccctaggtcccccagccagtgtcttgagttcttctgctgtgctgccctcctgcccgtccatcttcctccactggcccatccttgaagcattttccttctttctgttcttgccttgtctcccttccctcctcaggcctgcactgctccactcccacctggtccaggtatgcccagggaac

SEQ ID NO: 603482 - DNA, 557 bp, Homo sapiens
ttcccacctgcaggtcacagatgatggaagccgctgtattcaagtagggctgggccgtttatttatggctggcatgggcagggtctgttctgatgagctgttctgatgtgctgcgcctagcagacattaaagattttcaktattttccctgcttctagaccctgtaagtgctttgtgtgcagaagtttttccctacttgtcccagttttgtagttctttctagcgttgagttaaaggagtcacagagaacaaatattttctctcttggtactttctcttcagtctcctgttaaaaccagctgtttgcttgtttatttatttagtcttcccccaaaaggatctgtggtgacttccaatatacacatgagataaaaatgataaataataggtgagaaaactgggggaaaggagaaggaaaaatatggctagaaagctaagttgaggcccagaataagtttagtgctcagagttatatgctgtgaggtcatgtacacttggttagagttggcagcaaatcctgccctgtgcttcctagcagtcacagcaaagagggaaat

SEQ ID NO: 603483 - DNA, 368 bp, Homo sapiens
ttcctccttccactttccacttcaggcttaggggtggtaatgacaccctgcttgtctaaccttggggtactgcacttccctcaagggaaacctttataggtagtcattttaataaacacttttcaaatgtagtaatgagtgtacattacttgtctcctgcagggaacctgactgatacagggttatttctaacacaaagacagggactccatctgataagggacaccctcttcaggttgattagatgaagaggctttggggtatgtttggagttttgtgggttatattacagaasggtaattatacaactgtgtttttagaagcactcagattgctctcagtgcaaaatcctttaacacatgcagttg

SEQ ID NO: 603484 - DNA, 557 bp, Homo sapiens
ttcccacctgcaggtcacagatgatggaagccgctgtattcaagtagggctgggccgtttatttatggctggcatgggcagggtctgttctgatgagctgttctgatgtgctgcgcctagcagacattaaagattttcagtattttccctgcttctagaccctgtaagtgctttgtgtgcagaagtttttccctacttgtcccagttttgtagttctttctagygttgagttaaaggagtcacagagaacaaatattttctctcttggtactttctcttcagtctcctgttaaaaccagctgtttgcttgtttatttatttagtcttcccccaaaaggatctgtggtgacttccaatatacacatgagataaaaatgataaataataggtgagaaaactgggggaaaggagaaggaaaaatatggctagaaagctaagttgaggcccagaataagtttagtgctcagagttatatgctgtgaggtcatgtacacttggttagagttggcagcaaatcctgccctgtgcttcctagcagtcacagcaaagagggaaat

SEQ ID NO: 603485 - DNA, 489 bp, Homo sapiens
gtggctggacccaaggggctgagagtccagaaagtgggaacaagaccacttccacccagggaaagaggggaaaatagtttcactggctgagtcagaacaggtccacccatcattccaatctaggtagggaaaggacttggtaaggagcagcctggaaaggctagagtaacaggggctagggacagggaggagaaaggagccacctgaggccctgggcaggctacttggtgctccactgagcccacgmtctttaaatttggactccatatttgcgggagaggtgagaccatctactaagtgaggggaggaaagagaagggtttgctgttcccctgtcctcctggccacttcagctccagcaacctagaacctctgcctcagttgtagcaaaaacagaagccttgccttccccgggtaaggatcaggtgttcttgttagaccatgccctttgggggtcttaccttctactccaaggagaaaacacaaaata

SEQ ID NO: 603486 - DNA, 615 bp, Homo sapiens
acaattattagttttgcttaaggcgtttttccctgcaacattgcgatgttaattgaagacmaaaaagtgataactaatttttgaaagattgtgaagtcatataacctttgccctcccaccatcttgatgagaattattgcttaatgcgtgaattgatttaacaaatgtgcactggcttccttccaatgtcagacaatctgccaggtcctaagacaatgttgggggcataatgaaaatgctaaactgggtgtttgtggaaacgtttctctacccaattgaatgtgaatctccatccaaggaaataatatcaggaaagcttttatacaggtgctttgcctctaagctcaaagacataaaactatctctcttgggctcaaataagataagaatctatactcttctttttcctttacctgaagttagaggagaaggagaaatgggcatagcacttcaatcctctgagaattccaaatggctgaaatgtctggttatgtcagggcatacattaaagtgctgtacctccaagtaaaactcagaaaaaaacctctctcctccatcctatagagaggctacctgaactccaataagttaaggggtgaaaaatactaaaactgg

SEQ ID NO: 603487 - DNA, 615 bp, Homo sapiens
acaattattagttttgcttaaggcgtttttccctgcaacattgcgatgttaattgaagaccaaaaagtgataactaatttttgaaagattgtgaagtcrtataacctttgccctcccaccatcttgatgagaattattgcttaatgcgtgaattgatttaacaaatgtgcactggcttccttccaatgtcagacaatctgccaggtcctaagacaatgttgggggcataatgaaaatgctaaactgggtgtttgtggaaacgtttctctacccaattgaatgtgaatctccatccaaggaaataatatcaggaaagcttttatacaggtgctttgcctctaagctcaaagacataaaactatctctcttgggctcaaataagataagaatctatactcttctttttcctttacctgaagttagaggagaaggagaaatgggcatagcacttcaatcctctgagaattccaaatggctgaaatgtctggttatgtcagggcatacattaaagtgctgtacctccaagtaaaactcagaaaaaaacctctctcctccatcctatagagaggctacctgaactccaataagttaaggggtgaaaaatactaaaactgg

SEQ ID NO: 603488 - DNA, 615 bp, Homo sapiens
acaattattagttttgcttaaggcgtttttccctgcaacattgcgatgttaattgaagaccaaaaagtgataactaatttttgaaagattgtgaagtcatataacctttgccctcccaccatcttgatgagaattattgcttaatgcgtgaattgatttaacaaatgtgcactggcttccttccaatgtcagacaatctgccaggtcctaagacaatgttgggggcataatgaaaatgctaaactgggtgtttgtggaaacgtttctctacccaattgaatgtgaatctccatccaaggaaataatatcaggaaagcttttatacaggtgctttgcctctaagctcaaagacataaaactatctctctygggctcaaataagataagaatctatactcttctttttcctttacctgaagttagaggagaaggagaaatgggcatagcacttcaatcctctgagaattccaaatggctgaaatgtctggttatgtcagggcatacattaaagtgctgtacctccaagtaaaactcagaaaaaaacctctctcctccatcctatagagaggctacctgaactccaataagttaaggggtgaaaaatactaaaactgg

SEQ ID NO: 603489 - DNA, 556 bp, Homo sapiens
tgacccataatgaggagaatactcagttaatagaaactgactcaaaattgacacagatgatatcattagtagacaaggacattgaaacagttacactatattccatgtatttaataagctagaggaaaaattgaatatgttaaatagaagcatggaagatagtttttaaaaactaaatcatacatctaaagatgaaaactataatgtgtgagataaaatactggagaggwttaatgaaactagacattgcagaagaaaagattagtaaacttgaagatacagcaataaaaactaccccaaataaaacacagatttaaaaggctgggaaaaaagtgaacaaatagagcatcggtgatccatggcttcttacatatagttccaatgtttttaacagataatctgcttcctacttgatctgctatatcatactgtgcttgcctccaaggattcttctgtcagccatcagagggcgctctgctgccaaagtaggaggcacaggcgaaggctgagttctggtaactagtcaccacaataattgaaaaaaattctggcctac

SEQ ID NO: 603490 - DNA, 556 bp, Homo sapiens
tgacccataatgaggagaatactcagttaatagaaactgactcaaaattgacacagatgatatcattagtagacaaggacattgaaacagttacactatattccatgtatttaataagctagaggaaaaattgaatatgttaaatagaagcatggaagatagtttttaaaaactaaatcatacatctaaagatgaaaactataatgtgtgagataaaatactggagaggtttaatgaaactagacattgcagaagaaaagattagtaaacttgaagatacagcaataaaaactaccccaaataaaacacagatttaaaaggctgggaaaaaagtgaacaaatagagcatcggtgatccatggcttcttacatatagttccaatgtttttaacagataatctgcttcctacttgatctgctatatcatactgtgcttgcctccaaggrttcttctgtcagccatcagagggcgctctgctgccaaagtaggaggcacaggcgaaggctgagttctggtaactagtcaccacaataattgaaaaaaattctggcctac

SEQ ID NO: 603491 - DNA, 607 bp, Homo sapiens
gcaacgaattgtcatggagactagttttcctgagagaaacacaatctagaaattttgtcctcttcatgtgggagtagggagcaagcctgggatactggtgccctctagtggtaaggaacaatttgctattttaggaaagctcacccgggatggttgaggagatggactttgcaatcagaagtcctttatttgtttaaagtcacccagctaaaaagcaaaagagcttagtgctctgccagtgccttgcagaaccaacagcaacaatttctgagtactctgaggaaacagactagaatgtgttgaaaacatgtccatcttaaaaataaaatgggcaaatgtcaaccacttcagccagtgatgcttaactggcatgacattgcataaccaaggacttctttctggaacgttcccctttctcaatcaactatgtgttcccaaagatttatgtctatcagacaagttgcatttatgrtatattttttcttttcttcccctttttttaggaatgaaaaaagcatttagttgtcagtcaacatttgtgattagagtaagaaatcccagtgctaagatgctgtgctgaattaattccagtccaaagcaaagacac

SEQ ID NO: 603492 - DNA, 605 bp, Homo sapiens
cagaagcaattggaaggtttgctaaagctcagtttgcagggctctgtccccagagtgatgcaggaggggcagggagggcatttctgacaggttcccaggcaatgctggtgttcccggaccagggaccacactttgagcatcattggtaaattgattattgttaggaatcatgctttgtctttcttctacaaacctgcacaagacattatctcaattcaaaaagatactttttattttgttgacctcaatagagggaactcttcacccttcaacgccttgaagaaaaaacaccatttgaagggggaagcactaatgttaggaagaacctctggaggaggtggtagatgttgccgtagttaacctcgaatcaccagctccggaaaatacaattccactttttaaggaaacttgctgaaactagtacagaatagcagccttttgtgtaaatttcaattatgtaaatttgaaaaaggagatataaaacatatgaacaagtctcacatgaaagccaaatttgtaataacacaccttcccttaaaaaaaaaaaaaaaaagcccacaaagctggattcctaacagtaaacwgtcacttggtgggtaagagag

SEQ ID NO: 603493 - DNA, 554 bp, Homo sapiens
cagaattcaaattggcttatttgaggaaactcaaagaaattcaaaataacatagagaaggaagtcagaatcctagcaaatacgtttaacaaaaaaattgaaataattaaaaagaattaagcagaaattctggagttgaaaaatgcaatggacatgttaaaggatgcatcagaatctcttgatagcagaattgatcaagcagaagaattagtgagcttgaggacaggctatttgaaaatatagtcagaggagacaaaagaaaaatacaataaaaaaagaatgaagcacacctataagatctagaaaatagcctcaaaggggaaagtctaagggtttttggccttaaagaggaggtagagggaaagataggagtagaacgtttattcagaaggataataacagagaacttcccaaayctagagaaggatatcaatattcaagaacaagaaggctatagaacaccaagcagatttggctccaggcatttaataatcaaactcctgaaagtcaaggacagacaaagaaaggatcctaaaagcagcaagaggaaagaaa

SEQ ID NO: 603494 - DNA, 628 bp, Homo sapiens
tttgtccgacttgcatcagtttactgggtcctcctatgagacacttgaatgaaaagttctccagagctagaaatagatatttttagatatttttcttcctagtaaggaaattggttttttgatgacaagaaaatcatttctatgtaatggagattttcccccaaggaattttaaataaataacacttaaagccacatttagtctgaaatttttcattcggtcatcttccaatctgggtgagtcatgacagaaaaaaaatatgtccttcaccaacttaygcagacatttcttcagaataagcatgacctagatttcaggaggtcaagtaactaggaggtaaagtaactaatcaatatattggagaagaaagtcaaatatacaattgttaaactactttgtgtcatctgtctttgtgacataggtctgaattagacttttcaaaacatttgaaaatttcagataataatgaattagaaagctaccagaaagcaaatacggatcacaaattactcttttccaaaagacacaataatggaacagccacccaaaattgaatgccaaacacatttagtactaacattcaaaactccaaatgtcagatggtgatataatcccacatccacgtact

SEQ ID NO: 603495 - DNA, 527 bp, Homo sapiens
agaaatattttattaagtgaatctatcatgctgacatacaaattgatattgcactacactgcctcccttgaccactcatttataactcaaaactctttaatacttttctatttatctgcagatagcatttgaaaaacacatcggaaaatcayatttgaaattacattccatgtggagtgcttattattgatggccataacttttactatacagatcttcaaatgtgattctaattttatttgtgtggctatagatgtgtttccaacactctggctctcagtgccttgaccaccttctccaccaatggccttctcctctactccacttcaaccactcactcacatggccatagcctcaaacttgtcattaccaatgtttgcagacctaccatatctcaatttctagccatctctctcctttcttctcaatctccaacatcttgtcacctatccacacactgaactgataatcttactgcctatttccctaaaaactagaagttgcccttgatcttcttctcaatacag

SEQ ID NO: 603496 - DNA, 632 bp, Homo sapiens
gagagagagagtgtgtgtgtgtgtgtgtgttctactggtgaagctctcattgttaaactaaaataggcctaagggtgttgatgcaaaaagaaggtatgtgcactggacttacagaaagaaacaataattcttggcaagaaaacagaagtcttgcatctatgaaaacattttgatcagctgagatcaggctgatttttargttcaaaataccatcttcacccacaaaatcctaaaaattttagccaaaaaggggtaaggtttatgtttaagaaaaaaatagaactactttgtggatcctggtctgccaaacctggttcatttgttcattcattcaacaaatcgtatggagtgtctctatgccaggcactcttccatgcaataaggacactcagaataatgaacaagactaataagaacctaatttgtcttgaaaattaaatgtaaaattaaaatgtaaattaaaatttacattttacaagaggattttttatcatctttgctgaaaattcccccaaatatctctaaaaagtagtggcaatctacattttctatttcttttcttctttcaatatttttttctctctctctcgccaattttaatgcaatttgtaaatatatttaagagagagaaa

SEQ ID NO: 603497 - DNA, 632 bp, Homo sapiens
gagagagagagtgtgtgtgtgtgtgtgtgttctactggtgaagctctcattgttaaactaaaataggcctaagggtgttgatgcaaaaagaaggtatgtgcactggacttacagaaagaaacaataattcttggcaagaaaacagaagtcttgcatctatgaaaacattttgatcagctgagatcaggctgatttttaggttcaaaataccatcttcacccacaaaatcctaaaaattttagccaaaaaggggtaaggtttatgtttaagaaaaaaatagaactactttgtggatcctggtctgccaaacctggttcatttgttcattcattcaacaaatcgtatggagtgtctctatgccaggcactcttccatgcrataaggacactcagaataatgaacaagactaataagaacctaatttgtcttgaaaattaaatgtaaaattaaaatgtaaattaaaatttacattttacaagaggattttttatcatctttgctgaaaattcccccaaatatctctaaaaagtagtggcaatctacattttctatttcttttcttctttcaatatttttttctctctctctcgccaattttaatgcaatttgtaaatatatttaagagagagaaa

SEQ ID NO: 603498 - DNA, 632 bp, Homo sapiens
gagagagagagtgtgtgtgtgtgtgtgtgttctactggtgaagctctcattgttaaactaaaataggcctaagggtgttgatgcaaaaagaaggtatgtgcactggacttacagaaagaaacaataattcttggcaagaaaacagaagtcttgcatctatgaaaacattttgatcagctgagatcaggctgatttttaggttcaaaataccatcttcacccacaaaatcctaaaaattttagccaaaaaggggtaaggtttatgtttaagaaaaaaatagaactactttgtggatcctggtctgccaaacctggttcatttgttcattcattcaacaaatcgtatggagtgtctctatgccaggcactcttccatgcaataaggacactcaraataatgaacaagactaataagaacctaatttgtcttgaaaattaaatgtaaaattaaaatgtaaattaaaatttacattttacaagaggattttttatcatctttgctgaaaattcccccaaatatctctaaaaagtagtggcaatctacattttctatttcttttcttctttcaatatttttttctctctctctcgccaattttaatgcaatttgtaaatatatttaagagagagaaa

SEQ ID NO: 603499 - DNA, 405 bp, Homo sapiens
cacctccaccagaacaggcactggtatccatggctgagagacccatagatggttcacatcacaggactctgtgcagacaacccccaataccagcctggagccaggtagactcgctgggtggctagatccagaatacagacaataatcattgcagtttggctcacaggaagccacatccataggagaagagggagagtcatcaaggggacatcccgtgggacaaaataatctgaacaacagcygttagccctagaccttccctctgacagagcctacccaaatgagaaagaaccagaaaactaatcctggtaatatgacaaaacaagctcttcaacatccccctcgcacccctcctcccccagaatcacactggttcaccagcaatggatccaaaccaagaaaaaa

SEQ ID NO: 603500 - DNA, 553 bp, Homo sapiens
aatgtacctgtgacattttattcctttcttcttacccagtttgacctaatttcaatgtctcctaatcagattactagaaatagtgaaataatattttcattaattctatgatgaacaaggaggggaggagaaagattatccagaccttagacaaatttaaacaggagtctgtgtgatgcattagaaagctctgggaagaagcctggaatttgaaggaaaaaaattttgagcacaggagataagataagttagatatatgaaactttagataaaaagaaggatattatctaaggagtgttttattttcaccaaaaacaagagataaggaacaacctcctgcaacatgcttaaacttcagagggagtaaacaatggcttaaatagaaaaggtgaacctaacactctttccttttgtggaaatccatggccttacgattaaatttcaatgatttgtctggaggtakgtgtgtacttaagaaattttatgtttcttaatctcctgtgctttttcctttaaggattctaatttgctgttcttggtttaaataacctgg

SEQ ID NO: 603501 - DNA, 621 bp, Homo sapiens
actggctgggtgcggtggctcacgccagtaatcccagcactttgggagtctgaggcaggcggatcatgatcacaagggatcgagacaatcctgtccaacatggtgaaatcccgtctctactaaaaacacaaaaattaactgggtgtggtggtgcgcccctgtaggcccagctactcgggaggctgaggcaggagaactgcttgaacctgttaggcagatgttgcagtgagccaagattgtgccactacactccagcctggcaacagaacgagactctttgtataacaactaccatgattaacgagaatcaattgtaatgctataaagccagtttcactcttcacatctctcttatcatgagtagttctamtgttaacgcatgcttcagtttaccatttttaaatcttgtaatggtaaactgttacacaaaagagatgttagtggtgttttctgtgagccagccttaatatatcccaatgaactaggagctagatttcctggtgcatattttgttcaatctccaagtaaaaccagtttctttctttttctgattaaccatagaattctccaggccatataatttatcatttaaaaatatatagccttatgtctattctaatg

SEQ ID NO: 603502 - DNA, 644 bp, Homo sapiens
aacattaaaaatttactattatatgaattaaaaattatagaaaaaacaaagaaggagaagaaatatctaaatcactacaaaatgagaaatttcgatgataccaatgtggtgtgagatgagggagagaggaacaaaaatagatgtgagtgagaccatgctgtggtatttatgtggttcaggagcaatacatagatattgataagctcaataaattgaaaaaaaccttaaatgtggtccttaatgaatatatatgagagatcagaagattacaagtagaatacaaaattttcaaatgacggaatttaacaaatatcttaagatacaataaatagaaaatagaaaacagtttggtaaaataaactttatcatagcaaagtggccctcagtaaaagtgtgaaatctaatgttttggtttttaaaacagttccagaaatataatgttgtatttttwaaaataagataataggatactgaaaagttgaaaataatgaaaaagatgtacttaccaccaaattataccccaaatacatccagggtagcaaagtagcatttttagaaaacccagacaacatagattttacgggagaaagtatcatatgaggtagaaaagaatgttatacttttgtcaaaggcacaataaaata

SEQ ID NO: 603503 - DNA, 644 bp, Homo sapiens
aacattaaaaatttactattatatgaattaaaaattatagaaaaaacaaagaaggagaagaaatatctaaatcactacaaaatgagaaatttcgatgataccaatgtggtgtgagatgagggagagaggaacaaaaatagatgtgagtgagaccatgctgtggtatttatgtggttcaggagcaatacatagatattgataagctcaataaattgaaaaaaaccttaaatgtggtccttaatgaatatatatgagagatcagaagattacaagtagaatacaaaattttcaaatgacggaatttaacaaatatcttaagatacaataaatagaaaatagaaaacagtttggtaaaataaactttatcatagcaaagtggccctcagtaaaagtgtgaaatctaatgttttggtttttaaaacagttccagaaatataatgttgtatttttaaaaataagataataggataytgaaaagttgaaaataatgaaaaagatgtacttaccaccaaattataccccaaatacatccagggtagcaaagtagcatttttagaaaacccagacaacatagattttacgggagaaagtatcatatgaggtagaaaagaatgttatacttttgtcaaaggcacaataaaata

SEQ ID NO: 603504 - DNA, 644 bp, Homo sapiens
aacattaaaaatttactattatatgaattaaaaattatagaaaaaacaaagaaggagaagaaatatctaaatcactacaaaatgagaaatttcgatgataccaatgtggtgtgagatgagggagagaggaacaaaaatagatgtgagtgagaccatgctgtggtatttatgtggttcaggagcaatacatagatattgataagctcaataaattgaaaaaaaccttaaatgtggtccttaatgaatatatatgagagatcagaagattacaagtagaatacaaaattttcaaatgacggaatttaacaaatatcttaagatacaataaatagaaaatagaaaacagtttggtaaaataaactttatcatagcaaagtggccctcagtaaaagtgtgaaatctaatgttttggtttttaaaacagttccagaaatataatgttgtatttttaaaaataagataataggatactgaaaagttgaaaataatgaaaaagatgtacttaccaccaaattataccccaaatacatccagggtagcaaagtagcatttttagaaaacccagacaacatagattttacgggagaaagtatcatatgaggyagaaaagaatgttatacttttgtcaaaggcacaataaaata

SEQ ID NO: 603505 - DNA, 572 bp, Homo sapiens
gaataggaactatgaggtcccactgccccactatagatgcatagctctttcctttgttacaaaactggaaatatgatactgmttattatgttagggagccaggaaaattctcaaagatattattaaaacacatgaaaggatacatcttatagctggtcagttgttatggataaatgtttgtagctctcaaaatctatatgttgaaatcctaatgtccaagatgatgatagtaggatgtggggcctttgggaggtaattaaatcataagagtagcgccctcatgaataagattagtgcccttataagagaggcccaagagagctgcctttttttctttccgccgtgtgaagacatgagacatcagcagtctgcaaagaggaagagggcctcgctcagcctccagacctgttcttagaatcgtctgttctataattctttgttatagcagcccaaagtgactacaacattggttatattagagtaattcaagagtcatctttacttaggagcaaaaatatttgatgtgttaaataaagaaagtatacatccgttgttctgacaccaggcaaatt

SEQ ID NO: 603506 - DNA, 572 bp, Homo sapiens
gaataggaactatgaggtcccactgccccactatagatgcatagctctttcctttgttacaaaactggaaatatgatactgattattatgttagggagccaggaaaattctcaaagatattattaaaacacatgaaaggatacatcttatagctggtcagttgttatggataaatgtttgtagctctcaaaatctatatgttgaaatcctaatgtccaagatgatgatagtaggatgtggggcctttgggaggtaattaaatcataagagtagcgccctcatgaataagattagtgcccttataaragaggcccaagagagctgcctttttttctttccgccgtgtgaagacatgagacatcagcagtctgcaaagaggaagagggcctcgctcagcctccagacctgttcttagaatcgtctgttctataattctttgttatagcagcccaaagtgactacaacattggttatattagagtaattcaagagtcatctttacttaggagcaaaaatatttgatgtgttaaataaagaaagtatacatccgttgttctgacaccaggcaaatt

SEQ ID NO: 603507 - DNA, 482 bp, Homo sapiens
atgtggggcctttgggaggtaattaaatcataagagtagcgccctcatgaataagattagtgcccttataagagaggcccaagagagctgcctttttttctttccgccgtgtgaagacatgagacatcagcagtctgcaaagaggaagagggcctcgctcagcctccagacctgttcttagaatcgtctgttctataattctttgttatagcagcccaaagtgactacaacattggttatattagagtaatycaagagtcatctttacttaggagcaaaaatatttgatgtgttaaataaagaaagtatacatccgttgttctgacaccaggcaaattaaaacatgggaaagtgctgaggatcaagtgttccaggaactggaggttgctgcggagatcccagccctcactccacatcatcatgaacagcaggattttagatttacttttgtcccatgttgcgaccattttgcacaatagtta

SEQ ID NO: 603508 - DNA, 575 bp, Homo sapiens
tacttaggagcaaaaatatttgatgtgttaaataaagaaagtatacatccgttgttctgacaccaggcaaattaaaacatgggaaagtgctgaggatcaagtgttccaggaactggaggttgctgcggagatcccagccctcactccacatcatcatgaacagcaggattttagatttacttttgtcccatgttgcgaccattttgcacaatagttacacctgccaatgtaactactaaagagtgactgtgaggcacacactawggcaaaagcaaatgaattatcagaatggagccatagatcagccaggcattgatgcatccagtagtcatactccttttcttctaaagtctgtgtgttttctggattaccccttacactcctaaaactggtctcccacttctgaaaccacagtctttacagactaaagtcaatgacttaattgccagagctaagggccttttcagttttctttgcatgttcttgttttcacattataattaatcattttgtgtctatttgttaaatgcctgccttaccacaggaaaataggtggtttcataaggacatatcac

SEQ ID NO: 603509 - DNA, 575 bp, Homo sapiens
tacttaggagcaaaaatatttgatgtgttaaataaagaaagtatacatccgttgttctgacaccaggcaaattaaaacatgggaaagtgctgaggatcaagtgttccaggaactggaggttgctgcggagatcccagccctcactccacatcatcatgaacagcaggattttagatttacttttgtcccatgttgcgaccattttgcacaatagttacacctgccaatgtaactactaaagagtgactgtgaggcacacactaaggcaaaagcaaatgaattatcagaatggagccatagatcagccaggcmttgatgcatccagtagtcatactccttttcttctaaagtctgtgtgttttctggattaccccttacactcctaaaactggtctcccacttctgaaaccacagtctttacagactaaagtcaatgacttaattgccagagctaagggccttttcagttttctttgcatgttcttgttttcacattataattaatcattttgtgtctatttgttaaatgcctgccttaccacaggaaaataggtggtttcataaggacatatcac

SEQ ID NO: 603510 - DNA, 575 bp, Homo sapiens
tacttaggagcaaaaatatttgatgtgttaaataaagaaagtatacatccgttgttctgacaccaggcaaattaaaacatgggaaagtgctgaggatcaagtgttccaggaactggaggttgctgcggagatcccagccctcactccacatcatcatgaacagcaggattttagatttacttttgtcccatgttgcgaccattttgcacaatagttacacctgccaatgtaactactaaagagtgactgtgaggcacacactaaggcaaaagcaaatgaattatcagaatggagccatagatcagccaggcattgatgcatccagtagtcatactccttttcttctaaagtctgtgtgttttctggattaccccttacactcctraaactggtctcccacttctgaaaccacagtctttacagactaaagtcaatgacttaattgccagagctaagggccttttcagttttctttgcatgttcttgttttcacattataattaatcattttgtgtctatttgttaaatgcctgccttaccacaggaaaataggtggtttcataaggacatatcac

SEQ ID NO: 603511 - DNA, 425 bp, Homo sapiens
gaagcacagtgaatacctagggacaaggggaagccatagctaatccaagatatcagcaagccgcctgaggtgtagtttagcttgaacttggaggttattcctaaggaacaagtcaggaaaaggtttcatttcctgaaggaccaagagacgtaatgcaaagagctctagcagacccmgggtttgaagcagaatacaaataaaaatcatgcatctcgggtgccagccttaagggaacctgggctgggctccctgactcctgcacatccaggaggtttgtgctgtttgtatgctaaccttacatatgtttgtaaagaaagaagcaaaaacagtatatcttgatgtaattttgtaaatgaatcactgttaagaattgcaggcctggcatggtggctcatgcttgtaatcccagcactttgggaggccaa

SEQ ID NO: 603512 - DNA, 629 bp, Homo sapiens
atgaattctattactccaattaggtcttggttgtttgaaaatagtacatcattttttctaccaagtgaataaattcttgtaaggcaataattgaatcttacaatgagcagtgggggaggggggcagcggaatcactaccttgaaggaactatcatttcttccatttcttttttcttcacaattagttacttttagaagtttaatagattattactaataaaaggtttattagtaatctgtgtgggkgcttgatcatggatgtatatctcttctgaaaagctaattaatgaattgtcccttttcagttgatttcataggtggctttgactcttatggctatcaagggcctcagaagacatctcatttacaactacagcctatgtacatgtaagtattttacttggaaggtactcttctggggtactaaagataatcaagtaactgtatcacgatacaaaattgatggcatgcagcttttgttcagttatatttttccagtattttttctattaatattgtcttggctgggataattttaataacatttttccatgaatttttcttatttgacttataagaaatgccatttctaaagttatatttagtcttacataagtatcacctacatg

SEQ ID NO: 603513 - DNA, 629 bp, Homo sapiens
atgaattctattactccaattaggtcttggttgtttgaaaatagtacatcattttttctaccaagtgaataaattcttgtaaggcaataattgaatcttacaatgagcagtgggggaggggggcagcggaatcactaccttgaaggaactatcatttcttccatttcttttttcttcacaattagttacttttagaagtttaatagattattactaataaaaggtttattagtaatctgtgtgggtscttgatcatggatgtatatctcttctgaaaagctaattaatgaattgtcccttttcagttgatttcataggtggctttgactcttatggctatcaagggcctcagaagacatctcatttacaactacagcctatgtacatgtaagtattttacttggaaggtactcttctggggtactaaagataatcaagtaactgtatcacgatacaaaattgatggcatgcagcttttgttcagttatatttttccagtattttttctattaatattgtcttggctgggataattttaataacatttttccatgaatttttcttatttgacttataagaaatgccatttctaaagttatatttagtcttacataagtatcacctacatg

SEQ ID NO: 603514 - DNA, 616 bp, Homo sapiens
taaaaattaaaactaaattgtttacttattttgcctatagtctttgagaaattcatatatactcttttaaacactagatggcactagaaatgtatcataataaattgtttcatcaggaggaattattaattttatgacctcctaagatggtgtgttctttggttatatatttttgaacatttaaaataatttaactatttccactagtacctttrattactgaaataagtaatgaggtttccaaactgtagaaatacataattcataattaaaatttttcaaagtattattttagtggtccatagatattgccacacctcaggtttcctcatcttatgagattgcttccctttaagttcatcaaaaagaagacacatgctctacaaatagaaataatgagtaggttcctgaattgtttactaacctgattacccatgaggcatgaatcatctgaacacactggaaaaagatttaaattcttgacacatattacttccttcaagaaagatagcataaaacgaatgatatgccactatatgaggacattaatgacaaatttttcatcaatttaagaaatatttacaattagtcactgagtaagataattggaaatgcc

SEQ ID NO: 603515 - DNA, 606 bp, Homo sapiens
tgaattaaaatggtctactcattatagtagagtgaaatgtatcagatgtatagtagagtgaaatgtatcagaagttgtattttttaatagttaacagatgcagatcctggttccacgggattttaccaaactcacaacctatttaattgagaactccagaagaaagaatcctttctttacagtatatatacacatagttgatctattagttttgtcctttttatgcaactacattgttgtgtgcatttcacatcacagtgtgaagaaacatcctgaagttattcacagtgacttcaatgaacaacacattagtatactttttacacaggggacagaagtaaaagccggcttgatcatttacaaggctttcaccatgccgctgagatgtcaaggactacaagttgatcttcagcytcttaaaatatggcctcgaagcctttcatgtcttcagacaactccagcattttgactgatgggagctggtgtgtgtttgtgtgcagtgggagagaggacacaatcccgaacctgacacagcctgtgcttggagcagcctgcgcctgctgccctcaatcatttaggtatatacaatgaacctcacctgaaaca

SEQ ID NO: 603516 - DNA, 568 bp, Homo sapiens
cgtgctcacgtgtgtgtgtgtgtgtgtgtcagtgttgtatgtagaggctttgcatttgttttgttaatacgtgtatgtatttaaactcagttgcttcttgctcttcatgaaatgcaggaggccactgcgaaaaaagttctttgaaaggtccatgggctgacatactgaagtcatctgtattattttgacctgagagagagaaaagaygtttttagtcaagggggaaagtgacaggtgcctgctgctcaccaccttttctcacctttccaagcacaagagcaaacaaacaaacaaacaaaaaagaagcccaaattgggttttaaatagataattttcctccttttctttttattcatggcaattgcagggatagagaggccagttttggtcatttagaatctatttccagggacaactgaaatgaatatgtacttctgtacaattaggctgccaaaaagaatgcaatgtttacaaatgttgtgtgatatattataggatattcttatattgctggaagcccaatcagatctctacttgctctgacagtcacataggtctctggtagtca

SEQ ID NO: 603517 - DNA, 563 bp, Homo sapiens
gtctcagtgtgttgcctgggctggttgcgaactcctggtggcytcaattgatctttgcacttcagcctcccaaagtgctgagattacagacctgagccaccgcactccactgaaaaggaaacatttctaaaggggtcatcacatttcagaggcaaatactcctatttagaattgttctggtcttttgcacactatcatcttggagggggtgtatgcacacgtgtgtgtgtctgaagtaaaaacccattggatttgtttttttgaagtgttaggaaagaaccgagtacacgtttttggtagtgatacataccgttttgtctccggccctgcgagagagagaaatgtacacacacgtttctacattcttttccctgggtacagaaactccacatctgaccacagggaagccaaaatgtaccgtgtaaattttactccttggtacatctgattagtaataaggaagtgtgtatttctagcctcacagcaggcttgtgagtcctcagacgtcattataatattgctgaattgctagcagccctctctaattagtcatgccaagagaa

SEQ ID NO: 603518 - DNA, 631 bp, Homo sapiens
aaattagggcttcttagaaaatggttgaatccagtctgggtcaggaaacatacaaaattagcatagaacaaattttgtcaatgtgatgagcaggactatcaaaaactaatagtcatgaacaaagatccccatttttcccaaatgaggcagtctgagcttcaataaagtaaagcatgttagtaaattaaaaccatcraccaatttaaatccatgagttcagttttggatattatatttgttacttcttattaagtaacaaattaccccccccccatttagtaattatttatctcacagtttcaaggctctattgggacatattgggacagagtctgctctgaattttactcatgtggctattgacaagccttgggtagccactagttgttggttgaagacatcagttctttgccacatgggtttctccatagggcaattcatagcatggtagctgacttctatcatggctagtgagggagagagcaagacaatgtgacgatgacagaagacacaggcttttggtaacctaatctcaaatatggcctccatacttggccatattctttttactaaaagcgaatcatttgggccagcccacagattaaacgagggcagaattattgggggccgt

SEQ ID NO: 603519 - DNA, 618 bp, Homo sapiens
attaaaaaacaaaaacaaaaaacctctcaaagctcaacaggtaaccaaccaaccaatggaactagaaaatgggcaaaagaaatgaaaaaatatttcatggaagaggatatacacatggcaaataagcacatgaaaagatgttcaatactattagccattagggaaatgcaaattaaaaccaccatgaaatcttattatacatctaaaatttaaaattgtgatactttcaaatgctggtgagtatggagagttttcatacattgcttgtgggaatgtaaaatgacagcacctttggccatttcttaaagtacacatgtaacaaccacaggacccagcaactacacattggacatttatatgagataaatgaaaactcatctacacacacacacacacacacaacctgtacgcaaatgtttacaacagctttattcttaatagctacaacctggaaacaacccaggtatccttcacgcttaaactgtggtacatccataccatggaacaccatatagcaattaaaagaaacaaactgctgatacaarcaatgacttggatgaacataaatactgtacgagcatcttgcaagatgttaccactggggaaactggagaaagg

SEQ ID NO: 603520 - DNA, 577 bp, Homo sapiens
tttcttgtttctctttaggtaaatgggaatgatgttcgtgtcgggggccttggccttgagcggaacatgcayggcagcattattttctctgaagtatcaaatccataaggaaaggtggctgctgccaccacaattgtgctcagagctgtagcagcagcagctactgttggttccgggcactgtttgtgagcgcttcatcattaaccatcaccgcaaccccatgtggaagagactgcaaatgaccccattttacagacggggaaatttagggtcgtcaaactgcagcaactttcccaagatcacacggactaaagatctgagtggtattttcactgtgtggcttgaatacgtgtgaaaactacattccctcctctgtgatactgactttaagtgttaactcatcctggggagcactttgcatcaatagaaggaattctcatcctacttgggatccaggtcctcttctcaatctggatccattactattcttaaagctcccccaatcttccagtctcaaagcacattcttaatgctttggctctcggtgagctgggatgatggtggagaacggggctat

SEQ ID NO: 603521 - DNA, 577 bp, Homo sapiens
tttcttgtttctctttaggtaaatgggaatgatgttcgtgtcgggggccttggccttgagcggaacatgcacggcagcattattttctctgaagtatcaaatccrtaaggaaaggtggctgctgccaccacaattgtgctcagagctgtagcagcagcagctactgttggttccgggcactgtttgtgagcgcttcatcattaaccatcaccgcaaccccatgtggaagagactgcaaatgaccccattttacagacggggaaatttagggtcgtcaaactgcagcaactttcccaagatcacacggactaaagatctgagtggtattttcactgtgtggcttgaatacgtgtgaaaactacattccctcctctgtgatactgactttaagtgttaactcatcctggggagcactttgcatcaatagaaggaattctcatcctacttgggatccaggtcctcttctcaatctggatccattactattcttaaagctcccccaatcttccagtctcaaagcacattcttaatgctttggctctcggtgagctgggatgatggtggagaacggggctat

SEQ ID NO: 603522 - DNA, 577 bp, Homo sapiens
tttcttgtttctctttaggtaaatgggaatgatgttcgtgtcgggggccttggccttgagcggaacatgcacggcagcattattttctctgaagtatcaaatccataaggaaaggtggctgctgccaccacaattgtgctcagagctgtagcagcagcagctactgttggttccgggcactgtttgtgagcgcttcatcattaaccatcaccgcaaccccatgtggaagagactgcaaatgaccccattttacagacggggaaatttagggtcgtcaaactgcagcaactttcccaagatcacacggactaaagatctgagtggtattttcactgtgtggcttgaataygtgtgaaaactacattccctcctctgtgatactgactttaagtgttaactcatcctggggagcactttgcatcaatagaaggaattctcatcctacttgggatccaggtcctcttctcaatctggatccattactattcttaaagctcccccaatcttccagtctcaaagcacattcttaatgctttggctctcggtgagctgggatgatggtggagaacggggctat

SEQ ID NO: 603523 - DNA, 607 bp, Homo sapiens
tgtggacaactgtgaaggggggccagaggcgggggcccagcccctgctacctccgcagcttactgtctcatctcaggtgcagtgctccacatggccactgccaccaggcagtgtgaccctggatgcaatcacaggagtggactccagggccaatttcttttccatttcctccttcactgccatttttgaaccaacaggagaaaaacatgcatagaaggctttatcttagaaagaaacaaacacataaatggggaagggggargaaggaaggaacgacaggaaagttagaaggaagaaaagggggggcatggagggaggaaggaagagaagaagggaaaagagagaaagggagagttaattttcattgattattttagtcattaaaataataaagaaagtcacattaaataagacacacaaattaaaatacttaataactatgcttctaattttcccattatttgtgacttttgttataaattgcaaccctaagtggttaaggtagctgtaaacacccagcctttcctttgtttcttctgtgattttttcctttagactcacatgttccctgtagacattgatttatttccctgaggtgaacaccatc

SEQ ID NO: 603524 - DNA, 607 bp, Homo sapiens
tgtggacaactgtgaaggggggccagaggcgggggcccagcccctgctacctccgcagcttactgtctcatctcaggtgcagtgctccacatggccactgccaccaggcagtgtgaccctggatgcaatcacaggagtggactccagggccaatttcttttccatttcctccttcactgccatttttgaaccaacaggagaaaaacatgcatagaaggctttatcttagaaagaaacaaacacataaatggggaagggggaggaaggaaggaacgacaggaaagttagaaggaagaaaagggggggcatggagggaggaaggaagagaagaagggaaaagagagaaagggagagttaattttcattgattattttagtcattaaaataataaagaaagtcacattaaataagacacacaaattaaaatacttaataactatgcttctaattttcccattatttktgacttttgttataaattgcaaccctaagtggttaaggtagctgtaaacacccagcctttcctttgtttcttctgtgattttttcctttagactcacatgttccctgtagacattgatttatttccctgaggtgaacaccatc

SEQ ID NO: 603525 - DNA, 467 bp, Homo sapiens
aattccgtcggttgactccagctttcccctagctgtgcacttagagggtttagctgcgcgttccaagccagctggtgcccagggctcccctgtttccatctgctgagtgcgggcacctgccaggcrgccatcagcacccgagggcctggaggtgggaagggctttgtacccactgagcggccccttcagggctgcaggctccctggcttcaggtctctgtgatatgagcagacagagggaatctgggagcaagctcagacatgctgtgctctcctcggacctgtgtgtttctaggtggcctgactcacagggtaagtttgaggagtgaatgaatcctatggactaatgtttgtaaactgtgtaaaaagcaccttgcaaggtaagcactaaagaagtgttttcagaatgaagaagtaaaataggaggaaagccttcttgcattattattattattataacataaacac

SEQ ID NO: 603526 - DNA, 533 bp, Homo sapiens
aatgatatgtacaatataaaatttattacttgggtcacaaaaaattaatgatatattaattatttgaggacttctttataatttatatgatcagaataaattggtcctacaaaagatagaaaggtccaatgtttaaatgtttatatgtgccagaggaagaggaatctaaatggatgtacaaatgaaaggtctctcagtttcactttaaccaggtttgggtgaatatactagaaatatgaagaaacaaatcaggaaaagaaagaacaaaaatgtttgtgcatagaatgcacataactatgtcaaggtcaggattttcttttcagctacatactgtatrcagtaaagtggaagaaagctaaatggcaatactggagtcatccctgtgaaaatagtacttacagcggttacacagtagttactatacattcattctcttgcccatcagttaattacatcaccctttaagatagacgtataatgtaattagagatttgaacagttcacagccagatcacttaaagtaacattgttaa

SEQ ID NO: 603527 - DNA, 533 bp, Homo sapiens
aatgatatgtacaatataaaatttattacttgggtcacaaaaaattaatgatatattaattatttgaggacttctttataatttatatgatcagaataaattggtcctacaaaagatagaaaggtccaatgtttaaatgtttatatgtgccagaggaagaggaatctaaatggatgtacaaatgaaaggtctctcagtttcactttaaccaggtttgggtgaatatactagaaatatgaagaaacaaatcaggaaaagaaagaacaaaaatgtttgtgcatagaatgcacataactatgtcaaggtcaggattttcttttcagctacatactgtatacagtaaagtggaagaaagctaaatggcaatactggagtcatccctgtgaaaatagtacttacagcggttacacagtagttactatacattcatyctcttgcccatcagttaattacatcaccctttaagatagacgtataatgtaattagagatttgaacagttcacagccagatcacttaaagtaacattgttaa

SEQ ID NO: 603528 - DNA, 574 bp, Homo sapiens
ttgcagtgagctgagattgcaccattgcattccagcctgggcaacaaaggtgagactccatctcaaaagctcagcgtcattagtcatcacagaaatgcaaaataaaaccacaacaacaaaccactaggcacccttcagaatgtctagaaaagaagcaaactgaccacagcacatgttggtggggatgagagcaatgggaacacactgctggtgggaatgcaaaatggtgaattcacrttggaagatggtttattcactcatcagttgatagagctttggattgtttttactttttggttatgaataatgctcctgtaaatatatgtgtacaaatttttgtgtatgtttctaatcctcttgagtatataagtaacatttctgggtcatatggtgactccatgtttaagttttggggaactttcacactgctttccatagcatctgccacattctgtatttccacaagacaagaattggagttccaactttccataccctcatcaacacttattatctttttgatcatagtaagctggcacgtatgaagcaatatctcattgtggatttgatatgc

SEQ ID NO: 603529 - DNA, 427 bp, Homo sapiens
actgtcttgtttattttagctttgtagtaagttttgaaatcaagaaatgtatcgtccaacttcttttacaagattttcttggcagttttgggtctcttgcatttccatatacattttaggcttaccttaaaatgtctacaaaaaagccagctgggattttgatagcatcaaatctggggcattttcccatcttaatactattcagtctcttgttctgtaaacagtgaatgtctttttatttttytaggtcttctttaattgttttcagtaacattttatagttcttagtgtacaagttttgcatttattttgttaaatttttatgctattgtaaatgtaattggttttgaattttatttttagatagctcattagtagtatatagacataaaattgatatttgcttgtatcttgaaacagggcagaa

SEQ ID NO: 603530 - DNA, 633 bp, Homo sapiens
ttcaacctacttatgtcatttgaaataaagtatatcactgcagacagcatatagttgaatcatgccatttttattcatcctgccaatatctatcttttgactagagcatttaattcattcatattttatgtagttatttataaggtctggtttacatctgccattttgctaattgttttctataygccttatgtcttttgggttcccatatcttatcattactgtttccctttgtgctaaatgtatattttctagtgtacaattttaagtcccttgtttcttttagtatattgtttgagttatggagttattttcttagtagttgaccgaggattaccattagtatcttaaaatcatctagtttggattaataaccaattaattctaattgacacaaaactttacttctttggagctttatcctcccccatttatgggggtattattctataaatggcattcttacagaatgcatgtctatcatgacagatctataattggtgctttatgctatttccttttaaatcagataggagaagaaaggtccaactaaaaaatactttttatgctgtgttttatatttagctatattacatttactggtggtactttagaaaaaaattctttatttgg

SEQ ID NO: 603531 - DNA, 633 bp, Homo sapiens
ttcaacctacttatgtcatttgaaataaagtatatcactgcagacagcatatagttgaatcatgccatttttattcatcctgccaatatctatcttttgactagagcatttaattcattcatattttatgtagttatttataaggtctggtttacatctgccattttgctaattgttttctatacgccttatgtcttttgggttcccatatcttatcattactgtttccctttgtgctaaatgtatattttctagtgtacaattttaagtcccttgtttcttttagtatattgtttgagttatrgagttattttcttagtagttgaccgaggattaccattagtatcttaaaatcatctagtttggattaataaccaattaattctaattgacacaaaactttacttctttggagctttatcctcccccatttatgggggtattattctataaatggcattcttacagaatgcatgtctatcatgacagatctataattggtgctttatgctatttccttttaaatcagataggagaagaaaggtccaactaaaaaatactttttatgctgtgttttatatttagctatattacatttactggtggtactttagaaaaaaattctttatttgg

SEQ ID NO: 603532 - DNA, 538 bp, Homo sapiens
gtgtttcactggctaggggatcacagagcacagaggtctttgacatctcttatcacccaaagtatgtggctcagcaccgtgcttataggacactctcaatacattttttgacagtgatggcaaaagattggatttccacacccaggtctctccctggtttgttcagagcctggagtatttatttaccctcactcctcaaaatggaccaattcattcttgtcataaacgtaaggtttgcgggacttmctctggcaattacttaaggctatcattcattctgcagaaatcgctttgtaaatcagcttgattatttggctcagtttatatttgaaaattttgatatggaggaattcattgcccaaccaaagacatacgccctattcaaatgcacagacaaatgcagacctcagaaaacaaaacaaatgcactccctataccgttcctttagatcactggtctccgattccaagctttagtggaaataatgaaatgtcagccctcgcatgccacaaaattcaaatcacaatgaaaaagaggg

SEQ ID NO: 603533 - DNA, 515 bp, Homo sapiens
ttcattgcccaaccaaagacatacgccctattcaaatgcacagacaaatgcagacctcagaaaacaaaacaaatgcactccctataccgttcctttagatcactggtctccgattccaagctttagtggaaataatgaaatgtcagccctygcatgccacaaaattcaaatcacaatgaaaaagagggaaaggctgtttgccgtttgcttcaatatatacagaacaccaaacagtgatctggacaccagcaatttatgacgaggcaaggaaacaaacaaacaacaaacacaaatccacaggtgggtttattttttaaagtcccttcacaacagcggcaaacagccttgggcagcaggaaaccttcagacccgcttctcatcctgcgtgagtcctggaggcgggaacgtggctggttgaggttcaaagacctgcgctctaattaccagcataattagaataagaacatgttgctcactccagaggggcccgccccgcgcctctgctgctctgggag

SEQ ID NO: 603534 - DNA, 506 bp, Homo sapiens
gaattcattgcccaaccaaagacatacgccctattcaaatgcacagacaaatgcagacctcagaaaacaaaacaaatgcactccctataccgttcctttagatcactggtctccgattccaagctttagtggaaataatgaaatgtcagccctcgcatgccacaaaattcaaatcacaatgaaaaagagggaaaggctgtttgccgtttgcttcaatatatacagaacaccaaacagtgatctggacaccagcaatttatgacgaggcaaggaaacaaacaaacaacaaacacaaatccacaggtgggtttattttttaaagtcccttcacaacagcrgcaaacagccttgggcagcaggaaaccttcagacccgcttctcatcctgcgtgagtcctggaggcgggaacgtggctggttgaggttcaaagacctgcgctctaattaccagcataattagaataagaacatgttgctcactccagaggggcccgccccgcgcctctg

SEQ ID NO: 603535 - DNA, 614 bp, Homo sapiens
agcacattatgcctggataagactcaaagagcagcttaatatcaggttctctggggctgtaatcatcggttcaggatggagcagacacagccgcagcaaggcctctgtgcagcccccggyttaaaacacatcaacgcatccgtgggcacttttgtgagttaaagctcaacttacacatctgcctgtatccataggaaatgaatgaaaataaacaaacaaattccttgcattcaacgcagcgtaagaaaaatcacatcctgttccccagtagctgaggaaagccggctcacgagagtatacagggagaagaggccagcattgtgtggctgccagcaaagctcacttgtatgtcaaatgcagcgcttttcttagcccattatgtattttttttttcttgaacactcctgtgtctactgggatctcctgtttttattgttttgggatgagattttaaaaacaccatttaatgtagcctgtgtgctcttgttcattaaaccaaaaagaaaccctggatcacggcacaggagactctcctccccgttctctagggatgcgccctcatggggaaaccctcttttctcattatttttgatggtgtgctctaacaagacgat

SEQ ID NO: 603536 - DNA, 614 bp, Homo sapiens
agcacattatgcctggataagactcaaagagcagcttaatatcaggttctctggggctgtaatcatcggttcaggatggagcagacacagccgcagcaaggcctctgtgcagcccccggtttaaaacacatcaacgcatccgtgggcacttttgtgagttaaagctcaacttacacatctgcctgtatccataggaaatgaatgaaaataaacaaacaaattccttgcattcaaygcagcgtaagaaaaatcacatcctgttccccagtagctgaggaaagccggctcacgagagtatacagggagaagaggccagcattgtgtggctgccagcaaagctcacttgtatgtcaaatgcagcgcttttcttagcccattatgtattttttttttcttgaacactcctgtgtctactgggatctcctgtttttattgttttgggatgagattttaaaaacaccatttaatgtagcctgtgtgctcttgttcattaaaccaaaaagaaaccctggatcacggcacaggagactctcctccccgttctctagggatgcgccctcatggggaaaccctcttttctcattatttttgatggtgtgctctaacaagacgat

SEQ ID NO: 603537 - DNA, 614 bp, Homo sapiens
agcacattatgcctggataagactcaaagagcagcttaatatcaggttctctggggctgtaatcatcggttcaggatggagcagacacagccgcagcaaggcctctgtgcagcccccggtttaaaacacatcaacgcatccgtgggcacttttgtgagttaaagctcaacttacacatctgcctgtatccataggaaatgaatgaaaataaacaaacaaattccttgcattcaacgcagcgtaagaaaaatcacatcctgttccccagtagctgaggaaagccggctcacgagagtatacagggagaagaggccagcattgtgtggctgccagcaaagctcacttgtatgtcaaatgcagcgcttttcttagcccattatgtattttttttttcttgaacactcctgtgtctacygggatctcctgtttttattgttttgggatgagattttaaaaacaccatttaatgtagcctgtgtgctcttgttcattaaaccaaaaagaaaccctggatcacggcacaggagactctcctccccgttctctagggatgcgccctcatggggaaaccctcttttctcattatttttgatggtgtgctctaacaagacgat

SEQ ID NO: 603538 - DNA, 478 bp, Homo sapiens
ccgttgtgtgtcgcagcctctccccgccatgcctaagtgtgagcgaacggctgtgggtcacagtgacactgtcctcgtaacacatcctgacaaagggtgggaggtggtgcctccctgtaggaccagggggaaaggactgggccaggtgcatttctttctgcccctggtgctcatcccctgagggcctctctgtgtcccactgaggagatactggaccacccccaggtgtgtggatgcccaccccacattctgtcctctcattccttgtctagcttgttctctctcctttctcatcttcaaacaaatggttttcttttcttttaaaaaggcttctttataatattgtgtccactggwctcactggctaactgtgggtgtttctggggaggcctgccctttgcagcaggtctgcagtcctggtgtgcacctcctctggccttctgaggtcagccccctctgctgacttgaaggggaaggt

SEQ ID NO: 603539 - DNA, 621 bp, Homo sapiens
gctaacctttccaaatcgtaaaattccagctattttggcatttggatgagtgacacattttggggtggtacacttctctatgacccttcaaaccacarcttgtggacaattactccttctccattttatgtcagccagcaaaaatgtttgccaaaatgatcagaacagctgttcatttttgcttgtcagggtagtggcttgccagggaatccctgtcccagttgggttcttcctgggagaaatatttacataatttgttcctattctgggatggggtgccctgtgtgttttagcctaccagaagtttactatgtgctaatggtgtggtgtggctataaaaaaaaaaggggtgtggcatggggaaagaaaagaaaatttgaacataaacttagccaaatccatagatagaaaaagcacaggaagttgtttcactgtgctctgaaatcttaactcacatctggggatttgtacagattattcggggcatccacatttagagaagaatgctgacaagtcaagggcatcctgagaggggagaggtgaaaactaaaccaagagtaagagaagactaaagaagcacttggtggctgcttgcaaaggttggaaaggctgtcaccaaga

SEQ ID NO: 603540 - DNA, 615 bp, Homo sapiens
accctctgactctcagatctcagtgatcctttgatctctccttcatgttgcaccccaatattctccgttgtcagaaccatgagaagatgacttatcatacctttgtagattgtgatggaaaaccatggcttcctagtaaagtgccactgggaagactagcctttcctctgcaggattttcttccatctcctctcaaaaccagaacctttcttcccaggtgcaggacaaggaaaaaatgctcgatggcagaattgattttataccaacacaaaagttgtgtgtgttgaataagtgctttccatatggaatgtgcccatatgcaacaacgagtttgtgtttaaataaacttagagacacagatatacaataacaagacatatgtttcatactgcatataggcatatacataaataccctattaagaattcatttgaggtggtgaaatacttctgttctatgggattgcatcagactcaaagtaatctttatttaaatgatatgaaacaaggtaacatgagaactgctgtggwttttttggacacagcagtagaaaccagagatggacaaggtcatttaggtcattcggcaccttaagtttcttggcagagaggttct

SEQ ID NO: 603541 - DNA, 547 bp, Homo sapiens
ctgggtaatttatgaagaaaaagggtttaattgactcacagttccmcatggctagggaagcctcaggaaatgtctaatcgtggtggaaagggaggcaagcatgtcttaccacagagaagcaggtgagagagagagagcgaaggggaaagtgccacttttaaaccatctgatctcctgagaactcacaatcatgagaacagcaagggggaagtccccccgccatgatccaaacacctcccaccaggcccctcctctgacacttgaagattacaattcaagacaagatttgggtagggacacagagccacaccatatcaagtaccttgtattcttttgagaatttcatgaaataataaaaatgcatgatgcatttagcatattacctggcatacagatgaagcctaattaatgtaataaatattttttagaagaaaacagtgaaaacattaaaaagttacattaaaaaatactatgagggttttggatgaagaacacattgaaagaagacttttctggtataagaaaatagcagaagtagaagtacaat

SEQ ID NO: 603542 - DNA, 652 bp, Homo sapiens
ttcaaatttcccatttcccatttacagttttttaaaatctggaacccaattaagaatgtmacatttcaaagatttatgtcatttttgtttaattaataataatttctcacctttattttttgtctttcataatattatcatttcaaaagagtccaggccagttgtttttcagaatgtcaccttcgtctccaaatttccccagactatataaactgctgatatttggtcacttttgacctataaaaacaaattcttatgattcaacataataaatagttgatacagcctatctataccagcaaggtatagagccatataatagcattttcattattagtggttttattaaatttaataagtggttaatgttaatatctactcgagttttccattgaaaatttgttatcttactttgtaattaataatctctgaagtgggctgggcatggtgactcatgcctgtaatcccagcattttggaaggcctaagtgggtggatcacttgaggtcaggagtttgagaccagcctggccaacatggtgaaaccctgtctctactaaaaatacaaaaaaaaaaaaaaaaaatcagccaggcatggtggcacacacctgtagttctagctacttgggaggctgaggcacaagaatttcttga

SEQ ID NO: 603543 - DNA, 543 bp, Homo sapiens
tgtagtcccagctacttgggggctgaggtggaaggatagcttgagcttggggaggtcaaggctgcagtgagccttgagcctcatgagcataggattctggtggacctatgaggtgcgagaactcaaaagagtaataaagttaatataagmcaaacgtacatctatgactgagttagtggagtcatagtgttgccactgtactgcagcctgggcaacagagtgagaccctgtctcaaaaaaaaaaaaaaaatcatttcatcaaaagtgaattcattaaaaaagtgtaccaagaatacattcattggccaggcacgatggctcacacctgtaatcccagcactttgggaggcagaggtgggaggattgcttgagcccaggagtttaagaccagcctaggcaacatggtgaaaccctgtgggactgagaggctgcttggttgagaggtgggaggatcacttgagcccgagaggtcaaggttgccgcaccactgcactccagcctgggtggtagagcaagatcatgtctcaaaaaaaaaaaaaaaaa

SEQ ID NO: 603544 - DNA, 597 bp, Homo sapiens
gaattccttaaacccgggaggcggaggttgcagtgagccaagattgtgccactgcactctagcctgggcgacagagcaagactccgtctcaaaccaaaaaaaaaaaaaaagaaaaagaaaaagaaaaaagaaagaacttccttaatkttttgaagagactattctgtatccattttataattttgtggccactgaaaaaggtatattaaatcacagacacagtgaatgtagtaagtggtagtttaaaatgttaaaatgttaaatcacgcctgtactcccagcactttgggaggctgaggggggaggatcgcctgaggttggcagttcaagaccagcctggccaacatggtgaaaccccttctctactaaaaatacaaaaattagccaggtatggtggcacaaatctgtaatcccagctactcgggaggctgaggcaggagaatggcttgaaccctggagggggaggttgcagtgagctgagatcaagccactgcactccagcctggacaacacagtgaaactgtctcaaaaataaaataaagtgttgaatttttacaagtcgttgttcctattctaatttttgaatgcaaccacagc

SEQ ID NO: 603545 - DNA, 597 bp, Homo sapiens
gaattccttaaacccgggaggcggaggttgcagtgagccaagattgtgccactgcactctagcctgggcgacagagcaagactccgtctcaaaccaaaaaaaaaaaaaaagaaaaagaaaaagaaaaaagaaagaacttccttaatgttttgaagagactattctgtatccattttataattttgtggccactgaaaaaggtatattaaatcacagacacagtgaatrtagtaagtggtagtttaaaatgttaaaatgttaaatcacgcctgtactcccagcactttgggaggctgaggggggaggatcgcctgaggttggcagttcaagaccagcctggccaacatggtgaaaccccttctctactaaaaatacaaaaattagccaggtatggtggcacaaatctgtaatcccagctactcgggaggctgaggcaggagaatggcttgaaccctggagggggaggttgcagtgagctgagatcaagccactgcactccagcctggacaacacagtgaaactgtctcaaaaataaaataaagtgttgaatttttacaagtcgttgttcctattctaatttttgaatgcaaccacagc

SEQ ID NO: 603546 - DNA, 590 bp, Homo sapiens
tgtaagaagaagaacagaaatggatccatttttgacttgaaacttttataaaaatagctgtatttaataatgttttacttatcatgggtacattttttttaacttgtgttcataaggtagattcattcagcaaaagagtaaccggtactagaagagaagtaagaaattcatggctgagttaatatagttaaactrtatccgtctgaaactctttctctctgaggaagcttttaaaattatttttttcatttttccagaccttttttcttgatctctgtattttcctctaaagcgaagactatcaatgacattcttaaactttgaaagatttaggatgaagggaatatttacttatattttagaaatagtgcaattttggagactgagaagtctctcaggttattatcatcaatgtagaacttaccagagatgactttggctttctaaagcatctaaaataagctatagtatgcccatgttcctgcagcattggacttacataatttcaaatgttaataatacctttcatggatgcctttacaggtatgcataaacaaaatatctcatttttttaaatcattctgccctcc

SEQ ID NO: 603547 - DNA, 590 bp, Homo sapiens
tgtaagaagaagaacagaaatggatccatttttgacttgaaacttttataaaaatagctgtatttaataatgttttacttatcatgggtacattttttttaacttgtgttcataaggtagattcattcagcaaaagagtaaccggtactagaagagaagtaagaaattcatggctgagttaatatagttaaactatatccgtctgaaactctttctctctgaggaagcttttaaaattatttttttcatttttccagaccttttttcttgatctctgtattttcctctaaagcraagactatcaatgacattcttaaactttgaaagatttaggatgaagggaatatttacttatattttagaaatagtgcaattttggagactgagaagtctctcaggttattatcatcaatgtagaacttaccagagatgactttggctttctaaagcatctaaaataagctatagtatgcccatgttcctgcagcattggacttacataatttcaaatgttaataatacctttcatggatgcctttacaggtatgcataaacaaaatatctcatttttttaaatcattctgccctcc

SEQ ID NO: 603548 - DNA, 590 bp, Homo sapiens
tgtaagaagaagaacagaaatggatccatttttgacttgaaacttttataaaaatagctgtatttaataatgttttacttatcatgggtacattttttttaacttgtgttcataaggtagattcattcagcaaaagagtaaccggtactagaagagaagtaagaaattcatggctgagttaatatagttaaactatatccgtctgaaactctttctctctgaggaagcttttaaaattatttttttcatttttccagaccttttttcttgatctctgtattttcctctaaagcgaagactatcaatgacattcttaaactttgaaagatttaggatgaagggaatatttacttatattttagaaatagtgcaattttggagactgagaagtctctcaggttattatcatcaatgtagaacttaccagagatgactttggctttctaaagcatctaaaataagctatagtatgcccatgttcctgcagcattggacttacataatttcaaatgttaataatacctttcatggatgyctttacaggtatgcataaacaaaatatctcatttttttaaatcattctgccctcc

SEQ ID NO: 603549 - DNA, 597 bp, Homo sapiens
gaattccttaaacccgggaggcggaggttgcagtgagccaagattgtgccactgcactctagcctgggcgacagagcaagactccgtctcaaaccaaaaaaaaaaaaaaagaaaaagaaaaagaaaaaagaaagaacttccttaatgttttgaagagactattctgtatccattttataattttgtggccactgaaaaaggtatattaaatcacagacacagtgaatgtagtaagtggtagtttaaaatgttaaaatgttaaatcacgcctgtactcccagcactttgggaggctgaggggggaggatcgcctgargttggcagttcaagaccagcctggccaacatggtgaaaccccttctctactaaaaatacaaaaattagccaggtatggtggcacaaatctgtaatcccagctactcgggaggctgaggcaggagaatggcttgaaccctggagggggaggttgcagtgagctgagatcaagccactgcactccagcctggacaacacagtgaaactgtctcaaaaataaaataaagtgttgaatttttacaagtcgttgttcctattctaatttttgaatgcaaccacagc

SEQ ID NO: 603550 - DNA, 385 bp, Homo sapiens
gtcattttattacatgtgtaaattcttgtgaccactaccactatcaaaatatctaacacttctagtgaagtgtaaaaatcttatctcgttggaagtctctttacccatccttgtttatataattttaaaaatttttcatttaggtattgataaccatttcgatgttacagtttttgattcaaaagtcaaacataatttagaaaactcaagaagaaaaatctgttgtacttaytcatatttttgctctttctgttactcttacatttttctgatgatttcaggccccttattcattttatgtttcaagaactttttgcttttctttagggtaggtctgtttgcaaccaattcttaatttttcttcttctgagaatttatttaattc

SEQ ID NO: 603551 - DNA, 385 bp, Homo sapiens
gtcattttattacatgtgtaaattcttgtgaccactaccactatcaaaatatctaacacttctagtgaagtgtaaaaatcttatctcgttggaagtctctttacccatccttgtttatataattttaaaaatttttcatttaggtattgataaccatttcgatgttacagtttttgattcaaaagtcaaacataatttagaaaactcaagaagaaaaatctgttgtacttattcatatttttgctctttctgttactcttacatttttctgatgatttcaggccccttattcatttyatgtttcaagaactttttgcttttctttagggtaggtctgtttgcaaccaattcttaatttttcttcttctgagaatttatttaattc

SEQ ID NO: 603552 - DNA, 374 bp, Homo sapiens
taggtccttgaggctctgttctttttttttttttcattttcagtctataytccctctggtctttggattagtaaatttttaatgtcctattttcaagttcacttattcttttctctatttcctccattaccctattgagccatcaagtattttttaaagtttcaattatatttttcggtgccaaaatttctatttgtctcttggcatcttctatttctttgtaaagctttccattgtttcatttgttccagcatattcgcaattgctcattaaaacatttttatggtggtggctttaaaatccttgtgaataaatctaatttatgtgttatcactgtgttggcatgtgttatctcattcaagatgagatttttt

SEQ ID NO: 603553 - DNA, 374 bp, Homo sapiens
taggtccttgaggctctgttctttttttttttttcattttcagtctatactccctctggtctttggattagtaaatttttaatgtcctattttcaagttcacttattcttttctctatttcctccattaccctattgagccatcaagtattttttaaagtttcaattatatttttcggtgccaaaatttctatttgtctcttggcatcttctatttmtttgtaaagctttccattgtttcatttgttccagcatattcgcaattgctcattaaaacatttttatggtggtggctttaaaatccttgtgaataaatctaatttatgtgttatcactgtgttggcatgtgttatctcattcaagatgagatttttt

SEQ ID NO: 603554 - DNA, 597 bp, Homo sapiens
gaattccttaaacccgggaggcggaggttgcagtgagccaagattgtgccactgcactctagcctgggcgacagagcaagactccgtctcaaaccaaaaaaaaaaaaaaagaaaaagaaaaagaaaaaagaaagaacttccttaatgttttgaagagactattctgtatccattttataattttgtggccactgaaaaaggtatattaaatcacagacacagtgaatgtagtaagtggtagtttaaaatgttaaaatgttaaatcacgcctgtactcccagcactttgggaggctgaggggggaggatcgcctgaggttggcagttcaagaccagcctggccaacatggtgaaaccccttctctactaaaaatacaaaaattagccaggtatggtggcacaaatctgtaatcccagctactcgggaggctgaggcaggagaatggcttgaaccctggagggggaggttgcagtgagctgagatcaagccactgcactccagcctggacaacacagtgaaactgtctcaaaaataaaatwaagtgttgaatttttacaagtcgttgttcctattctaatttttgaatgcaaccacagc

SEQ ID NO: 603555 - DNA, 451 bp, Homo sapiens
atttagctatcatttcaaagaagaaaaaagttgcatttgcaaattatttacacaagcacaaatttttagagaaagaaatactagagaaagaaaaacatagaggaaaataggtggtgaaaaaattctttggaagtgcaaaagaaagaaaacgtttattggcaatgacacatgattattaatccccatgtctaagtaaatttggggtctttacccttgctatagtttggacatgggttattctctccaaaattcatgtcgaaatttaatttcccatgtaaggtgttaggagatcktgctttgaagaggtgattaggtcattaagacaaattaataactttctggtgaaactgggttatttttcatgataatggattagttctcataagagccggtcattctaaagaaagttgcctcttttataaagcaatgatttgcctgatttccattttgt

SEQ ID NO: 603556 - DNA, 451 bp, Homo sapiens
atttagctatcatttcaaagaagaaaaaagttgcatttgcaaattatttacacaagcacaaatttttagagaaagaaatactagagaaagaaaaacatagaggaaaataggtggtgaaaaaattctttggaagtgcaaaagaaagaaaacgtttattggcaatgacacatgattattaatccccatgtctaagtaaatttggggtctttacccttgctatagtttggacatgggttattctctccaaaattcatgtcgaaatttaatttcccatgtaaggtgttaggagatcgtgctttgaagaggtgattaggtcattaagacaaattaataactttctggtgaaactgggttatttttcatgataatggattagttctcataagagccrgtcattctaaagaaagttgcctcttttataaagcaatgatttgcctgatttccattttgt

SEQ ID NO: 603557 - DNA, 451 bp, Homo sapiens
atttagctatcatttcaaagaagaaaaaagttgcatttgcaaattatttacacaagcacaaatttttagagaaagaaatactagagaaagaaaaacatagaggaaaataggtggtgaaaaaattctttggaagtgcaaaagaaagaaaacgtttattggcaatgacacatgattattaatccccatgtctaagtaaatttggggtctttacccttgctatagtttggacatgggttattctctccaaaattcatgtcgaaatttaatttcccatgtaaggtgttaggagatcgtgctttgaagaggtgattaggtcattaagacaaattaataactttctggtgaaactgggttatttttcatgataatggattagttctcataagagccggtcattctaaagaaagttgcctcttttatwaagcaatgatttgcctgatttccattttgt

SEQ ID NO: 603558 - DNA, 451 bp, Homo sapiens
atttagctatcatttcaaagaagaaaaaagttgcatttgcaaattatttacacaagcacaaatttttagagaaagaaatactagagaaagaaaaacatagaggaaaataggtggtgaaaaaattctttggaagtgcaaaagaaagaaaacgtttattggcaatgacacatgattattaatccccatgtctaagtaaatttggggtctttacccttgctatagtttggacatgggttattctctccaaaattcatgtcgaaatttaatttcccatgtaaggtgttaggagatcgtgctttgaagaggtgattaggtcattaagacaaattaataactttctggtgaaactgggttatttttcatgataatggattagttctcataagagccggtcattctaaagaaagttgcctcttttataaagcaatgwtttgcctgatttccattttgt

SEQ ID NO: 603559 - DNA, 494 bp, Homo sapiens
ttctggtgaaactgggttatttttcatgataatggattagttctcataagagccggtcattctaaagaaagttgcctcttttataaagcaatgatttgcctgatttccattttgtttctctgccttgctgtgacatagcatgtggctctcatcagaagctcaacagatgccaatgccatagtcttggactttccagccaccagaaccataagctaaataaacctttttttctttataaattacccagtctcargtgttgttacagcaacacaacacagaccaagacaacactacacctgtaatacgtaatattttgaaattagattttagcttaggaacaatacatacccaataaagtggaactcagaagacatcacttaagaattgttaaataagtgccatctttttgtttttatactgaaaaacaaatgtatcgattctcaattattttctccctaatgtaacaataataacataatattgtattttccaaa

SEQ ID NO: 603560 - DNA, 494 bp, Homo sapiens
ttctggtgaaactgggttatttttcatgataatggattagttctcataagagccggtcattctaaagaaagttgcctcttttataaagcaatgatttgcctgatttccattttgtttctctgccttgctgtgacatagcatgtggctctcatcagaagctcaacagatgccaatgccatagtcttggactttccagccaccagaaccataagctaaataaacctttttttctttataaattacccagtctcaagtgttgttacagcaacacaacacagaccaagacaacactacacctgtaatacgtaatattttgaaattagattttagcttaggaacaatacatacccaataaagtggarctcagaagacatcacttaagaattgttaaataagtgccatctttttgtttttatactgaaaaacaaatgtatcgattctcaattattttctccctaatgtaacaataataacataatattgtattttccaaa

SEQ ID NO: 603561 - DNA, 593 bp, Homo sapiens
tttatttcttttttctggatgtaccagtatatcaattcacttacttaaggtttaaggccatgtaggttgctgtccatttttgataattataaaaaagaactctgataaacaytcacatttttatgtgatataaattgtcacatcattgggataaatacctagaagaatgatagctgaagtacgtggtgagacgatatttagatttgtaagaaactgccaatctgtcttccagcgtgcagtaccatttttaaaattcccttcagcaaacagctactattgctctacattttcaccagaatttgtaatacttcggttcatggatttaagccattttaactaatgtgtggtagtatcacaattgttttaatttgtgtttctctaaagaaaaaaaaatactgagcatatttttatatgccagttgccatgggtatttcgggggcaggggtgaggtgtcttttcagattctatgcacatttgtaattggtttgtttgctttcttattattcagttttcagagttatttgtatgtttagataccaatactttattagatatatggtttacagatattttcttctagtttgtggcttgtc

SEQ ID NO: 603562 - DNA, 593 bp, Homo sapiens
tttatttcttttttctggatgtaccagtatatcaattcacttacttaaggtttaaggccatgtaggttgctgtccatttttgataattataaaaaagaactctgataaacactcacatttttatgtgatataaattgtcacatcattgggataaatacctagaagaatgatagctgaagtacgtggtgagacgatatttagatttgtaagaaactgccaatctgtcttccagcgtgcagtaccatttttaaaattcccttcagcaaacagctactattgctctacattttcaccagaatttgtaatacttcggttcatggatttaagccattttaactaatgtgtggtagtatcacaattgttttaatttgtgtttctctaaagaaaaaaaaatactgagcatatttttatatgccagttgccatgggtatttcgggggcagrggtgaggtgtcttttcagattctatgcacatttgtaattggtttgtttgctttcttattattcagttttcagagttatttgtatgtttagataccaatactttattagatatatggtttacagatattttcttctagtttgtggcttgtc

SEQ ID NO: 603563 - DNA, 593 bp, Homo sapiens
tttatttcttttttctggatgtaccagtatatcaattcacttacttaaggtttaaggccatgtaggttgctgtccatttttgataattataaaaaagaactctgataaacactcacatttttatgtgatataaattgtcacatcattgggataaatacctagaagaatgatagctgaagtacgtggtgagacgatatttagatttgtaagaaactgccaatctgtcttccagcgtgcagtaccatttttaaaattcccttcagcaaacagctactattgctctacattttcaccagaatttgtaatacttcggttcatggatttaagccattttaactaatgtgtggtagtatcacaattgttttaatttgtgtttctctaaagaaaaaaaaatactgagcatatttttatatgccagttgccatgggtatttcgggggcaggggtgaggtgtcttttcagattctatgcacatttgtaattggyttgtttgctttcttattattcagttttcagagttatttgtatgtttagataccaatactttattagatatatggtttacagatattttcttctagtttgtggcttgtc

SEQ ID NO: 603564 - DNA, 582 bp, Homo sapiens
ccgttcctggtccttccatctttctgcttagtcatatttaacttgtgtttatttcttcatgatcagaatatgtgtctttctcaactatcatatgtatgttctaggtagaaaggagaaaaacaagaatttatgttgttctgtcaaattatagaaagtttatttgataataaatcaactgttaaaaagtaccccttaaaagtatagtaagtatacaatattaaaagaaagcatgggactttgcacaattgtgaaatctattgagaattttgtaagtttttaaattttgatctgtgctgtcatttattaattcagtcaaaatttgcttcaaaaacacatagttgtcagaatatgtaagtgccttagaagagtgcaatctataagtaaaataattctgawtattcatctgaaatagtttgaaaaggttttgaaaatctactgtctctcttatttcttgtaatcaacatatttctcaataggaaaattcaccatttgccatcaaaatgtattgtctgaaacttccactggaaccttcatatggcaaaatatttaggcattctgaggagatgcaaagtttgctaagca

SEQ ID NO: 603565 - DNA, 599 bp, Homo sapiens
aattcattgttgctgaaagataccttgaaatatgagctataatgaggggcactagaggtacttggctttaaaaagacayaggtgcagtggcatgatgttagttacatagcctttgaagccatgttgtatgaaagagcagttggatattgacgttggctacgaaaaccaatgggtaggcatttagattttggttcagtagaaaatctgaaccatctatcgattaagctctcaaaaactaaatagactgctgcctcctaaataaaatatgtctcccaccatggaaatgtcaagctagggtcacaattcaagtaatgtaaatatgaatctaatgacttccaagatgcttttccaacttaaagtgttagacaagtaccttttaaaacagtataccatttgaattacctgcaaccattttaatatttctgagagggttttttttgtgtgtgctccttctttcatcacatggagagttattttgccttttagggtaaaatataaaaacaaatgcacgtcacaatatgatgtggcaaacgttacccagaagccttagtgatgttgttgcgatggtattagcatgcacagagtatgcaactcgcagc

SEQ ID NO: 603566 - DNA, 537 bp, Homo sapiens
aagtcattataaagctggattttaaaccaaatgtagtgctggctgctgtctgaacttacctaaaacatacactatattttaaaaagaaggctgagagtcacagaagtaaaacaaataaattccaaagttggtgttttatattatcatttatctgcaataagtgataattgatattccaaaaatatactttgctttgaattcaaattgtttattttgaacaattagtgagttcatctctgcacatgcctaaagaagataaatcaataaataaaagaataaaaattaaaactctatataataaacacttgatttcttagtcctgatttctcttttattatgaagaccagaagcagaatgttattctattttacctaaaaatatatatatgatctttagaaactccttgtcagcaatcatctatctgtgtgtgggtrtatatatatatatatatatctcatacaaacaatatgtatcacatttatatgttatcaagcacaatcatataataaactcacaaatgtccaactccaaaactag

SEQ ID NO: 603567 - DNA, 204 bp, Homo sapiens
aaaatatatatatgatctttagaaactccttgtcagcaatcatctatctgtgtgtgggtatatatatatatatatatatctcatacaaacaatatgtatcacatttatatgttatcaagcacaatcatataataaacycacaaatgtccaactccaaaactagaaaattattaatagcttgtactactcctgtgttcttcccca

SEQ ID NO: 603568 - DNA, 375 bp, Homo sapiens
cctgcataagatgcaataaacrtggctacagtcatgttaagggcagaggctcactggggtaagtggcagggctgaagcaggtggagagggagcaacctcacatcccacctgcagtctggattctgtcccaatcacacactaaagaagagcccttgtcaaggttaccagcaacctccacattggcaaaccctaaggccccttgccagtgctcaccttgcgtggcccatctgccgctgcccatgccgctgatggcttcttcctggtggaaccactgcccccctctgtcatgcagtcggctctggttctcctcccacctctctgaccattccttctcaggctcctttgcgtgcccctcttcattcctcagggctctgt

SEQ ID NO: 603569 - DNA, 362 bp, Homo sapiens
caataaacatggctacagtcatgttaagggcagaggctcactggggtaagtggcagggctgaagcaggtgsagagggagcaacctcacatcccacctgcagtctggattctgtcccaatcacacactaaagaagagcccttgtcaaggttaccagcaacctccacattggcaaaccctaaggccccttgccagtgctcaccttgcgtggcccatctgccgctgcccatgccgctgatggcttcttcctggtggaaccactgcccccctctgtcatgcagtcggctctggttctcctcccacctctctgaccattccttctcaggctcctttgcgtgcccctcttcattcctcagggctctgt

SEQ ID NO: 603570 - DNA, 362 bp, Homo sapiens
caataaacatggctacagtcatgttaagggcagaggctcactggggtaagtggcagggctgaagcaggtggagagggagcaacctcacatcccacctgcagtctggattctgtcccaatcacacactaaagaagagcccttgtcaaggttaccagcaacctccacattggcaaaccctaaggccccttgccagtgctcaccttgcgtggcccatctgccgctgcccatgccgctgatggcttcttcctggtggaaccactgcccccctctgtcatgcagtcggctctggttctcctcccacctctctgaccmttccttctcaggctcctttgcgtgcccctcttcattcctcagggctctgt

SEQ ID NO: 603571 - DNA, 591 bp, Homo sapiens
agaacaagactccatctcaaaaaaagaaaaaatttttgttgagcacctacytatgagtcaagcaccagggatacaaagtcaaaacccactctccactcttgggtcactctgtttaatagaagagatgggtaatggcaacaccaccagagagaagcagcctgggactgggggaactcaggggaggcatgggaggtgaggcctgaagggagttttgaagaatgggcgggtggtggcctgacatggccatgggggagtagggtggtggtagaaagaatggtggaagctgtgcacattctagatattttaggagattggtgactggatgtgaggcatggggaagagggaagtatcaaggacatgaccttgacttctggcttgagcaactgaagagaaggggacccctgactgagccaagagcacaggaggagtggacttgtggggggcggaggaggctgtttccatctaggagctgagttgcctgtgagacaccagtgggtctctagaaacaggatctaaagccctggaaagagacgtaggctagaggcaatgatgtcaacagaggggcactattcattctctccgtccaagtgt

SEQ ID NO: 603572 - DNA, 591 bp, Homo sapiens
agaacaagactccatctcaaaaaaagaaaaaatttttgttgagcacctacttatgagtcaagcaccagggatacaaagtcaaaacccactctccactcttgggtcactctgtttaatagaagagatgggtaatggcaacaccaccagagagaagcagcctgggactgggggaactcaggggaggcatgggaggtgaggcctgaagggagttttgaagaatgggcgggtggtggcctgacatggccatgggggagtagggtggtggtagaaagaatggtggaagctgtgcacattctagatattttaggagattggtgactggatgtgaggcatggggaagagggaagtatcaaggacatgaccttgacttckggcttgagcaactgaagagaaggggacccctgactgagccaagagcacaggaggagtggacttgtggggggcggaggaggctgtttccatctaggagctgagttgcctgtgagacaccagtgggtctctagaaacaggatctaaagccctggaaagagacgtaggctagaggcaatgatgtcaacagaggggcactattcattctctccgtccaagtgt

SEQ ID NO: 603573 - DNA, 559 bp, Homo sapiens
agtaactcatactttccctagagctcttgcaagaaagaactattgagaaagtagcccatctgaaagtacatttcctgctgtttatctgcytccagaactggctgaagtttactttttggttctccagagacctagcttcttccaatgtggtctatttaatctcctgtcatgtgggaaattatattcaaaatctccatgatcctctgtccatagtaagttatgcatgtagtgagaagtacatgccacaaggtcttgagattatatctgcaatgtgttgctgctggctgttgatcaagataggctgggagaagatcattttcaggtgtgaaaaactgtcacctttatcaaataattcttcttgcatatttcccaagacgttgtagcctgtctaaacttgggaggttaattttgtagcattcattatgaccgaaaatgtagttcacacaatcatgatgctctctttattaggtgttactgttaaacaatattaaaatacacacaatgtggctggtcttttgtaagctacatggcatgtttacttctttgccaggtttcttaa

SEQ ID NO: 603574 - DNA, 579 bp, Homo sapiens
cacatagccaactgtttcaaaacttgtctagtaaattctgtgctgttgttttcacagggagaaacatgcacatgtatattacttttttttttctgttgaatcatactcttggaataaayttttttcagtgaggtttttggttccaaaaagtataaacattttggtgatctttagtaagttgtattgctttccaaagaagtgataggaattatacttgccaccccaacagtgaaagaattgcaatttaatttcaatgtaaaagaggatgctactgttgctattatattttctattataatgaaaaccgttaaagatttaaatcaagctggattgtctttcaggagctgctgttaaatgaacaccttgatattttcgttcttggagagaaatgagccaaggaggaagaccatctaaaaaaaaccactagacaatttgtgctcactggagtggtctctgctgggcaaaaggtctttagaatgactcgtggattttctggcaagtggcaaaccatacaagtgctatgtcaggccagggagacaggtgcagccctgtcagtgtcaaagaagaacactggtagca

SEQ ID NO: 603575 - DNA, 579 bp, Homo sapiens
cacatagccaactgtttcaaaacttgtctagtaaattctgtgctgttgttttcacagggagaaacatgcacatgtatattacttttttttttctgttgaatcatactcttggaataaacttttttcagtgaggtttttggttccaaaaagtataaacattttggtgatctttagtaagttgtattgctttccaaagaagtgataggaattatacttgcyaccccaacagtgaaagaattgcaatttaatttcaatgtaaaagaggatgctactgttgctattatattttctattataatgaaaaccgttaaagatttaaatcaagctggattgtctttcaggagctgctgttaaatgaacaccttgatattttcgttcttggagagaaatgagccaaggaggaagaccatctaaaaaaaaccactagacaatttgtgctcactggagtggtctctgctgggcaaaaggtctttagaatgactcgtggattttctggcaagtggcaaaccatacaagtgctatgtcaggccagggagacaggtgcagccctgtcagtgtcaaagaagaacactggtagca

SEQ ID NO: 603576 - DNA, 389 bp, Homo sapiens
gagatgctgttaatctgtaaccctacccccaaccctgtgctggcagagacatgcactgtgttgactcaaggtttaatggatttagggctatgcaggatgtgctttgttaaacaagtgcttgaaggcagtttgcttgttaaaagtcatcaccactctctaatctcaagtacccagggacamaatacactacacactacggaaggctgcagggacctctgcctaggaaagccaggtattgtccaaggtttctccccaagtgatagtctgagatatggccttgtgggaagggaaagacctgaccatcccccagccagacacccataaagggtctgtgctgaggaggattagtaaaagaggaaggcctctttgcagttgagataagaggaagg

SEQ ID NO: 603577 - DNA, 389 bp, Homo sapiens
gagatgctgttaatctgtaaccctacccccaaccctgtgctggcagagacatgcactgtgttgactcaaggtttaatggatttagggctatgcaggatgtgctttgttaaacaagtgcttgaaggcagtttgcttgttaaaagtcatcaccactctctaatctcaagtacccagggacacaatacactacacactacggaaggctgcagggacctctgcctaggaaagccaggtattgtccaaggtttctccccaagtgatagtctgagatatggccttgtgggaagrgaaagacctgaccatcccccagccagacacccataaagggtctgtgctgaggaggattagtaaaagaggaaggcctctttgcagttgagataagaggaagg

SEQ ID NO: 603578 - DNA, 550 bp, Homo sapiens
tcacttttgttctccaggtggtctgatcttctactccttctttttccatgttttgtttttatcctcactgagcgccagttccagatttattgcttacaattctttcatgctccttcctttgtatggaagcattcctcaaattattcttagttgtatttaccaactgttttctgttgaaattctgactaatccagaatataaaactttttagagtccagtcattctttgccatgttctgtttccccccatctctgtggctatgaaaacatgtatcaaatattttacctgactcgcaggaaggggaagtcccactgctttgcctgttttggataggtagcatcagttaaactaaacctttcataaactactgatacatcagtggtttcttgttacatagaatgaacagtattcaccagaataayatcctgactagcaaacacatcaattgccactcgatgttctaagtgttatgagtaaaataaaaactgaataaagattttgccctcaggatgtttatgttctcctacgtgagaaagataattaaaaatac

SEQ ID NO: 603579 - DNA, 550 bp, Homo sapiens
tcacttttgttctccaggtggtctgatcttctactccttctttttccatgttttgtttttatcctcactgagcgccagttccagatttattgcttacaattctttcatgctccttcctttgtatggaagcattcctcaaattattcttagttgtatttaccaactgttttctgttgaaattctgactaatccagaatataaaactttttagagtccagtcattctttgccatgttctgtttccccccatctctgtggctatgaaaacatgtatcaaatattttacctgactcgcaggaaggggaagtcccactgctttgcctgttttggataggtagcatcagttaaactaaacctttcataaactactgatacatcagtggtttcttgttacatagaatgaacagtattcaccagaataacatcctgactagcaaacacatcaattgccactcgatgttctaagtgttatgagtaaaataaaaactgaataaagattttgccctcaggatgtttatgttctcctaygtgagaaagataattaaaaatac

SEQ ID NO: 603580 - DNA, 450 bp, Homo sapiens
agtatatcctacacttaaaatatactgataaaataatttgtaatttctaaagacctcataatcatacaatcaatatttataacagatttctcttcattttgttatctataaatctgtatttttgttttyagttacaaccatgacatccccagaaagcttttctatacagagaagtggctctgaaactgttatcaacatctaaacttttgtaaaaattgaaactattgtaatttcaatttacctgaagaatgttttcttttgatgtatttgaactgagtatccctgtgattgacaggatgaaatgtttatgaaatagatcaatattgctcattgtgatattcatcattgaataattatatttttattttgtcaattctgagttatttggaaacaaaaatccacagaatgttaccttatataaatatgttaatacattcttgattattaata

SEQ ID NO: 603581 - DNA, 450 bp, Homo sapiens
agtatatcctacacttaaaatatactgataaaataatttgtaatttctaaagacctcataatcatacaatcaatatttataacagatttctcttcattttgttatctataaatctgtatttttgtttttakttacaaccatgacatccccagaaagcttttctatacagagaagtggctctgaaactgttatcaacatctaaacttttgtaaaaattgaaactattgtaatttcaatttacctgaagaatgttttcttttgatgtatttgaactgagtatccctgtgattgacaggatgaaatgtttatgaaatagatcaatattgctcattgtgatattcatcattgaataattatatttttattttgtcaattctgagttatttggaaacaaaaatccacagaatgttaccttatataaatatgttaatacattcttgattattaata

SEQ ID NO: 603582 - DNA, 446 bp, Homo sapiens
cacattttgggggaataggggaatacaaatattgagtctgtaacactcttgtaaagtgwtatttgtgttgagttattcaaagtcttatttaaaggtagattgagattagttaaaaatgtgtattgcaaactcacataaatcactaaaactgttctaaagtataactgacatgctaggagaggaaatgtaatgggattattttaagtgtcaattaaaacaatagaaataagaaaaagagtgattgttgggaggcaaagaataaatgatatgaatagaaaatagttataaacataataaataccagcccaacttttttaccacccaataattactttaaatgtgcatgatctaaatataccaatttacaagacagctgttgtcagagaaaaacaaaataagacatctagttaacaatctttttctttctttatttaataaacctgaac

SEQ ID NO: 603583 - DNA, 446 bp, Homo sapiens
cacattttgggggaataggggaatacaaatattgagtctgtaacactcttgtaaagtgatatttgtgttgagttattcaaagtcttatttaaaggtagattgagattagttaaaaatgtgtattgcaaactcacayaaatcactaaaactgttctaaagtataactgacatgctaggagaggaaatgtaatgggattattttaagtgtcaattaaaacaatagaaataagaaaaagagtgattgttgggaggcaaagaataaatgatatgaatagaaaatagttataaacataataaataccagcccaacttttttaccacccaataattactttaaatgtgcatgatctaaatataccaatttacaagacagctgttgtcagagaaaaacaaaataagacatctagttaacaatctttttctttctttatttaataaacctgaac

SEQ ID NO: 603584 - DNA, 446 bp, Homo sapiens
cacattttgggggaataggggaatacaaatattgagtctgtaacactcttgtaaagtgatatttgtgttgagttattcaaagtcttatttaaaggtagattgagattagttaaaaatgtgtattgcaaactcacataaatcactaaaactgttctaaagtataactgacatgctaggagaggaaatgtaatgggattattttaagtgtcaattaaaacaatagaaataagaaaaagagtgattgttgggaggcaaagaataaatgatatgaatagaaaatagttayaaacataataaataccagcccaacttttttaccacccaataattactttaaatgtgcatgatctaaatataccaatttacaagacagctgttgtcagagaaaaacaaaataagacatctagttaacaatctttttctttctttatttaataaacctgaac

SEQ ID NO: 603585 - DNA, 592 bp, Homo sapiens
aataaagagaatttatttccaagaaatgcaagagttttatgtattttgcatttaaaaattaagtacagttcaatgagtgttttgatttaaaaaaataaaaatgaacagaattttaaactacacttatgatgtagccatgtggccaaratactaacaatctgacttaaaatatatcttcatctaattattccttctgtgcaaaagatgaattggatttgttgggaaggatgctttgaaagcatgaatttaattttccttcttccagggtatctatttcttccatcattgtaagtaggaattgcttgctcacatgcaaaaatgcaaacactggtttttaagtgctatctggaagaaatactagaatacatatattctacatacatataatatttacaatacatattcaagatatctatagatacataaaaataaacatttaatgaaaattgaaaatattagaaaggcctaaggtacttcaggtaggtaatctcatttatttttacaggaaaaggatatttcccaataacattaaagcttatataaaatttgataattggttaagtcaagcttctaataagtggtaaataaagat

SEQ ID NO: 603586 - DNA, 592 bp, Homo sapiens
aataaagagaatttatttccaagaaatgcaagagttttatgtattttgcatttaaaaattaagtacagttcaatgagtgttttgatttaaaaaaataaaaatgaacagaattttaaactacacttatgatgtagccatgtggccaaaatactaacaatctgacttaaaatatatcttcatctaattattccttctgtgcaaaagatgaattggatttgttgggaaggatgctttgaaagcatgaatttaattttccttcttccagggtatctatttcttccatcattgtaagtaggaattgcttgctcacatgcaaaaatgcaaacactggtttttaagtgctatctggaagaaatactagaatacatatattctacatacatataatatttacaatacatattcaagatatctatagatacataaaaataaacatttaatgaaaattgaaaatattagaaaggcytaaggtacttcaggtaggtaatctcatttatttttacaggaaaaggatatttcccaataacattaaagcttatataaaatttgataattggttaagtcaagcttctaataagtggtaaataaagat

SEQ ID NO: 603587 - DNA, 571 bp, Homo sapiens
acattcactcgccattcactcactgacttatccagagtaacttttagtcttcaagctccatttatggtaagttcccaatatagacgtaacattttycatcttttacgctgtacttttactatacctactctatgtttagatacgtttaaatacacaaatacttgccgttatgttacaattgcctacatgttcagtatagtcacacgctgtacaggtgtgtagcctaggagcaataggctatatctcatatagcctagatatgtagcagactatgttgtcaaggttttgtaaacatctatgatgtttgcataatgacaaaattgcctaataatgcatttctcagatcatatcagtattactgtcacatgattatacatatttaatttctactggtgaaatattattattcatattgaacagaattgaaactctagctctattacttatctctcctagttaaagccaagctttttccaacagattggaaaactatatgctactgagaaagttactgctattggagttctaaaatacatacgtatgtctcttagctctcaaaattattttgtaa

SEQ ID NO: 603588 - DNA, 571 bp, Homo sapiens
acattcactcgccattcactcactgacttatccagagtaacttttagtcttcaagctccatttatggtaagttcccaatatagacgtaacatttttcatcttttacgctgtacttttactatacctactctatgtttagatacgtttaaatacacaaatacttgccgttatgttacaattgcctacatgttcagtatagtcacacgctgtacaggtgtgtagcctaggagcaataggctatatctcatatagcctagatatgtagcagactatgttgtcaaggttttgtaaacatctatgatgtttgcataatgacaaaattgcctaataatgcatttctcagatcatatcagtattactgtcacatgattatacatatttaatttctactggtgaaatattattattcatattgaacagaattgaaactctagctctattacttatctctcctagttraagccaagctttttccaacagattggaaaactatatgctactgagaaagttactgctattggagttctaaaatacatacgtatgtctcttagctctcaaaattattttgtaa

SEQ ID NO: 603589 - DNA, 608 bp, Homo sapiens
aaaactatatgctactgagaaagttactgctattggagttctaaaatacatacgtatgtctcttasctctcaaaattattttgtaatatcatatgcccaaatacaaaaatataagtgcccaaatatttagacttgtatagtcaatgagtataattaagtcttgacactaagtaatattcaaagagggaagtttgctctttattttcctaattgccatgggcaaccatcagttatttacttcatttcctttcaatagttcttgctctcagcaagtcgggatctctcagagagaaagattcatagaggcctgagaaaaacagaagaatctagggacaaatgtaaaaccatcttcctaattacaatccatttattagatacaccatcctaaattttgtcctaaagaataagcagggctcatattctatttcttatattttttgagggacgatttcagtgtaagcaacaaagcagtggaaataatttcaaatgctagaatagttttttgagtaaaatctggtcctactaatgatttaagagctggaacacaacttcttgcagatctagagctggatcctagtccaagtgttcctggaagggatggggtaagg

SEQ ID NO: 603590 - DNA, 608 bp, Homo sapiens
aaaactatatgctactgagaaagttactgctattggagttctaaaatacatacgtatgtctcttagctctcaaaattattttgtaatatcatatgcccaaatacaaaaatataagtgcccaaatatttagacttgtatagycaatgagtataattaagtcttgacactaagtaatattcaaagagggaagtttgctctttattttcctaattgccatgggcaaccatcagttatttacttcatttcctttcaatagttcttgctctcagcaagtcgggatctctcagagagaaagattcatagaggcctgagaaaaacagaagaatctagggacaaatgtaaaaccatcttcctaattacaatccatttattagatacaccatcctaaattttgtcctaaagaataagcagggctcatattctatttcttatattttttgagggacgatttcagtgtaagcaacaaagcagtggaaataatttcaaatgctagaatagttttttgagtaaaatctggtcctactaatgatttaagagctggaacacaacttcttgcagatctagagctggatcctagtccaagtgttcctggaagggatggggtaagg

SEQ ID NO: 603591 - DNA, 608 bp, Homo sapiens
aaaactatatgctactgagaaagttactgctattggagttctaaaatacatacgtatgtctcttagctctcaaaattattttgtaatatcatatgcccaaatacaaaaatataagtgcccaaatatttagacttgtatagtcaatgagtataattaagtcttgacactaagtaatattcaaagagggaagtttgctctttattttcctaattgccatgggcaaccatcagttatttacttcatttcctttcaatagttcttgctctcagcaagtcgggatctctcagagagaaagattcatagaggcctgagaaaaacagaagaatctagggacaaatgtaaaaccatcttcmtaattacaatccatttattagatacaccatcctaaattttgtcctaaagaataagcagggctcatattctatttcttatattttttgagggacgatttcagtgtaagcaacaaagcagtggaaataatttcaaatgctagaatagttttttgagtaaaatctggtcctactaatgatttaagagctggaacacaacttcttgcagatctagagctggatcctagtccaagtgttcctggaagggatggggtaagg

SEQ ID NO: 603592 - DNA, 608 bp, Homo sapiens
aaaactatatgctactgagaaagttactgctattggagttctaaaatacatacgtatgtctcttagctctcaaaattattttgtaatatcatatgcccaaatacaaaaatataagtgcccaaatatttagacttgtatagtcaatgagtataattaagtcttgacactaagtaatattcaaagagggaagtttgctctttattttcctaattgccatgggcaaccatcagttatttacttcatttcctttcaatagttcttgctctcagcaagtcgggatctctcagagagaaagattcatagaggcctgagaaaaacagaagaatctagggacaaatgtaaaaccatcttcctaattacaatccatttattagatacaccatcctaaattttgtcctaaagaataagcagggctcatattctatttcttatattttttgagggacratttcagtgtaagcaacaaagcagtggaaataatttcaaatgctagaatagttttttgagtaaaatctggtcctactaatgatttaagagctggaacacaacttcttgcagatctagagctggatcctagtccaagtgttcctggaagggatggggtaagg

SEQ ID NO: 603593 - DNA, 555 bp, Homo sapiens
gtaaggtgaaaactgctgaaaaggaaaagaaaccaagaatgaccccttcccacagcctacagatgaaagaggtaggggagaaaacatatctgrattatattttaattaaaatatagaaattcatattataatttctgaaataaaattgtggtttacaacataatataactatctgttaaataccaataaccaaaagaagtcatgaaagctgctagatttttttacagatctggaaacttttcctgaatacatatttaaagaactacagaagacaaaaatgaaattgcattgaatgacaattagagacaagtttgttctttcgaaaaaattggatatttgctttgtaattttcaccaattttattttcctgaattatttctatttttaatgtagaaacaaaagtatctgagatgggtctaagatatcagagaattatctgtatttgtattgagatatatcaaaatataatgttaatatgatttgtcactgaactatatgataactcagtcgtacttctgtcttttaaaattggctacagttaaacttcaatctgtc

SEQ ID NO: 603594 - DNA, 555 bp, Homo sapiens
gtaaggtgaaaactgctgaaaaggaaaagaaaccaagaatgaccccttcccacagcctacagatgaaagaggtaggggagaaaacatatctgaattatattttaattaaaatatagaaattcatattmtaatttctgaaataaaattgtggtttacaacataatataactatctgttaaataccaataaccaaaagaagtcatgaaagctgctagatttttttacagatctggaaacttttcctgaatacatatttaaagaactacagaagacaaaaatgaaattgcattgaatgacaattagagacaagtttgttctttcgaaaaaattggatatttgctttgtaattttcaccaattttattttcctgaattatttctatttttaatgtagaaacaaaagtatctgagatgggtctaagatatcagagaattatctgtatttgtattgagatatatcaaaatataatgttaatatgatttgtcactgaactatatgataactcagtcgtacttctgtcttttaaaattggctacagttaaacttcaatctgtc

SEQ ID NO: 603595 - DNA, 555 bp, Homo sapiens
gtaaggtgaaaactgctgaaaaggaaaagaaaccaagaatgaccccttcccacagcctacagatgaaagaggtaggggagaaaacatatctgaattatattttaattaaaatatagaaattcatattataatttctgaaataaaattgtggtttacaacataatataactatctrttaaataccaataaccaaaagaagtcatgaaagctgctagatttttttacagatctggaaacttttcctgaatacatatttaaagaactacagaagacaaaaatgaaattgcattgaatgacaattagagacaagtttgttctttcgaaaaaattggatatttgctttgtaattttcaccaattttattttcctgaattatttctatttttaatgtagaaacaaaagtatctgagatgggtctaagatatcagagaattatctgtatttgtattgagatatatcaaaatataatgttaatatgatttgtcactgaactatatgataactcagtcgtacttctgtcttttaaaattggctacagttaaacttcaatctgtc

SEQ ID NO: 603596 - DNA, 555 bp, Homo sapiens
gtaaggtgaaaactgctgaaaaggaaaagaaaccaagaatgaccccttcccacagcctacagatgaaagaggtaggggagaaaacatatctgaattatattttaattaaaatatagaaattcatattataatttctgaaataaaattgtggtttacaacataatataactatctgttaaataccaataaccaaaagaagtcatgaaagctgctakatttttttacagatctggaaacttttcctgaatacatatttaaagaactacagaagacaaaaatgaaattgcattgaatgacaattagagacaagtttgttctttcgaaaaaattggatatttgctttgtaattttcaccaattttattttcctgaattatttctatttttaatgtagaaacaaaagtatctgagatgggtctaagatatcagagaattatctgtatttgtattgagatatatcaaaatataatgttaatatgatttgtcactgaactatatgataactcagtcgtacttctgtcttttaaaattggctacagttaaacttcaatctgtc

SEQ ID NO: 603597 - DNA, 622 bp, Homo sapiens
aaaggttaacactgaacttgcataatattcagtcatgaaaatgcatttgaatacatttgtttagcaatgctaacatagcaatcttcagaagttgcccagagatatcttttgaggtttcatattatgttaaacatgcaaaagcataaaaacagggaaaaaggaaatggtataacaataaaaaggtttaaaatgatgaggaatattcatttgcttccctgattaaaattaagttatataattatatagataccaatatattagaattgttatatacaatctaatttaaggcataagagataagtgtgttcaaggggwgtagcgaaaaaagtgctcttaatttttctttttgattttttgctgtggttagtgttaatacatgtatattgaatggatatcttatttttaaacaacaaaaccttatttcaacaacaccaatctacatatacctgatattttatataatgcactaatgaaagcattgtgatgttaaaattagcattgtagaaaggaaattgataaatgtaactagcaaacattaattttgggggatgaatattttctaatctatttctgaaaaactattacttggttatactaatttatttgagggtaccttcccctg

SEQ ID NO: 603598 - DNA, 622 bp, Homo sapiens
aaaggttaacactgaacttgcataatattcagtcatgaaaatgcatttgaatacatttgtttagcaatgctaacatagcaatcttcagaagttgcccagagatatcttttgaggtttcatattatgttaaacatgcaaaagcataaaaacagggaaaaaggaaatggtataacaataaaaaggtttaaaatgatgaggaatattcatttgcttccctgattaaaattaagttatataattatatagataccaatatattagaattgttatatacaatctaatttaaggcataagagataagtgtgttcaaggggagtagcgaaaaaagtgctcttaatttttctttttgattttttgctgtggttagtgttaatacatgtatattgaatggatatcttatttttaaacaacaaaaccttatttcaacaacaccaatctacatatacctgatattttatataatgcactaatgaaagcattgtgatgttaaaattagcattgtagaaaggaaattgataaatgtaactagcaaacattaattttgggggatgaatattttctaatctatttctgaaaarctattacttggttatactaatttatttgagggtaccttcccctg

SEQ ID NO: 603599 - DNA, 406 bp, Homo sapiens
tttttctacatatgtataaacatatatacatttttaaaataygaattatttctcttcactgtatatttgtatgcagaaatatctataatgcatacctaatagcactgctgaattatatacttgcttgagttgcataatgttgcagccctacaggtacatatttttatttacacaacttggatgattttcattcagtgaaacaatttattaatttattccttccatgtcaatgtacgtagagctttattattattttccatggttttcagggtattccataacacagacacatcaccatttattctttctgtagtagacatttaggggatttaaaatgtttacattataaatactgacaatttagtaattagtgtcttagagaatttattccaagttaaaaacaaaa

SEQ ID NO: 603600 - DNA, 505 bp, Homo sapiens
taagttaattacagaatcaaatttttccctttcatttcaatctgtttttaagttttacatgattccactttcaggaaaaagcaattaaaatacagactggctttggtaagagtgatatatatttttatgtttcagaccagcatgttgtttcatgctgatgttaaaagataatggttgatatcagataaatrcccacacatacacacaaacacaaactaacttggggtccaataaaataagactgggtggttcacatatttttccattagtgcaaatattttacagagataattttctttgataaaatctgtgttcttaaaactgattaacacatagtccttactagaaactctttacaaaaaaaaaaaaaaaacaacaacaaaaaaacaaaaatgagagtgcaaaaattgagagaataagtcaaaggagaaagagaagttctcccataactgaaattcattgtacctgtacattaatcaaagaacaaaattgactgtcatgtgat

SEQ ID NO: 603601 - DNA, 493 bp, Homo sapiens
agaatcaaatttttccctttcatttcaatctgtttttaagttttacatgattccactttcaggaaaaagcaattaaaatacagactggctttggtaagagtgatatatatttttatgtttcagaccagcatgttgtttcatgctgatgttaaaagataatggttgatatcagataaatacccacacatacacacaaacacaaactaacttggggtccaataaaataagactgggtggttcacatatttttccattagtgcaaatattttamagagataattttctttgataaaatctgtgttcttaaaactgattaacacatagtccttactagaaactctttacaaaaaaaaaaaaaaaacaacaacaaaaaaacaaaaatgagagtgcaaaaattgagagaataagtcaaaggagaaagagaagttctcccataactgaaattcattgtacctgtacattaatcaaagaacaaaattgactgtcatgtgat

SEQ ID NO: 603602 - DNA, 505 bp, Homo sapiens
taagttaattacagaatcaaatttttccctttcatttcaatctgtttttaagttttacatgattccactttcaggaaaaagcaattaaaatacagactggctttggtaagagtgatatatatttttatgtttcagaccagcatgttgtttcatgctgatgttaaaagataatggttgatatcagataaatacccacacatacacacaaacacaaactaacttggggtccaataaaataagactgggtggttcacatatttttccattagtgcaaatattttacagagataattttctttgataaartctgtgttcttaaaactgattaacacatagtccttactagaaactctttacaaaaaaaaaaaaaaaacaacaacaaaaaaacaaaaatgagagtgcaaaaattgagagaataagtcaaaggagaaagagaagttctcccataactgaaattcattgtacctgtacattaatcaaagaacaaaattgactgtcatgtgat

SEQ ID NO: 603603 - DNA, 505 bp, Homo sapiens
taagttaattacagaatcaaatttttccctttcatttcaatctgtttttaagttttacatgattccactttcaggaaaaagcaattaaaatacagactggctttggtaagagtgatatatatttttatgtttcagaccagcatgttgtttcatgctgatgttaaaagataatggttgatatcagataaatacccacacatacacacaaacacaaactaacttggggtccaataaaataagactgggtggttcacatatttttccattagtgcaaatattttacagagataattttctttgataaaatctgtgttcttaaaactgattaacacatagtccttactagaaactctttacaaaaaaaaaaaaaaaacaacaacaaaaaaacaaaaatgagagtgcaaaaattgagagaataagtcaaaggagaaagagaagttctmccataactgaaattcattgtacctgtacattaatcaaagaacaaaattgactgtcatgtgat

SEQ ID NO: 603604 - DNA, 596 bp, Homo sapiens
atgattccactttcaggaaaaagcaattaaaatacagactggctttggtaagagtgatatatatttttatgtttcagaccagcatgttgtttcatgctgatgttaaaagataatggttgatatcagataaatacccacacatacacacaaacacaaactaacttggggtccaataaaataagactgggtggttcacatatttttccattagtgcaaatattttacagagataattttctttgataaaatctgtgttcttaaaactgattaacacatagtccttactagaaactctttacaaaaaaaaaaaaaaaacaacaacaaaaaaacaaaaatgagagtgcaaaaattgagagaataagtcaaaggagaaagagaagttctcccataactgaaattcattgtacctgtacattaatcaaagaacaaaattgactgtcatgtgatttgactcatgctraaatgtccctcacaatgaaaataatctcttttattggcccctcacagtgtttaaaatttttcaccatttaaaaaaaaattgacttaaaatacttcatcttctgacatttttgttcacaaaaatagtaaaagtaaag

SEQ ID NO: 603605 - DNA, 597 bp, Homo sapiens
ttctgacatttttgttcacaaaaatagtaaaagtaaaggaaaaaggtagataatataccaactttgcagggtattgcaggaagttcagagagggaaagaaagaggaactataaatagttatcataaattacagctaaatattttagtttagcataaagagggtatgatgaatgtaaacaacatcacatatagttcaaagtagagttgtggaattacttttccatgacaatgtttaagaattgtacagctttgctgttatctagtgatgtgtccccacccaaatctcaccatgaattcccatgtgttgtcagagggacctggtgggaggtaattaaatcatgggagcaggtctttcccatgctgttctcatgatagtaaatttcatgtgatctgataattttataaagggaagtttccctgcacaagctctcttctcttgyctgctgccatgtgagacatgcctctcaccttctgcaatgattatgaggcctccccagccacatggaactgtaagatcattaaacctctttcttttgtaaattgcccagtcttgggtatgtctttatcagcagtataaaaacagactaatacagtaaa

SEQ ID NO: 603606 - DNA, 597 bp, Homo sapiens
ttctgacatttttgttcacaaaaatagtaaaagtaaaggaaaaaggtagataatataccaactttgcagggtattgcaggaagttcagagagggaaagaaagaggaactataaatagttatcataaattacagctaaatattttagtttagcataaagagggtatgatgaatgtaaacaacatcacatatagttcaaagtagagttgtggaattacttttccatgacaatgtttaagaattgtacagctttgctgttatctagtgatgtgtccccacccaaatctcaccatgaattcccatgtgttgtcagagggacctggtgggaggtaattaaatcatgggagcaggtctttcccatgctgttctcatgatagtaaatttcatgtgatctgataattttataaagggaagtttccctgcacaagctctcttctcttgtctgctgccatgtgagacatgcctctcaccttctgcaatgatwatgaggcctccccagccacatggaactgtaagatcattaaacctctttcttttgtaaattgcccagtcttgggtatgtctttatcagcagtataaaaacagactaatacagtaaa

SEQ ID NO: 603607 - DNA, 387 bp, Homo sapiens
aaaaataagtttttttttttaaagcaggactgtgagaattttaatagagtctagattggtgaataaaaaagaatagaatatcccaaaaagtgyatattaatgctcaaaccagtaaagaaatatgagttaccactttgtggaaaaataacatgggtagattcatatgcccctactgcgtgtaagattatttttaaagagattaaagcattaaatgtagaaaataaaaccacaaaggctctagaagtaaacataggacatttcctttataacctttaagtggttaaggtataagtaattataactaaaagtctagaagctaaaagattaaaaaatgggtatatgtgaatacagtaacaataacttcatgaaaaaatattgtaaacattc

SEQ ID NO: 603608 - DNA, 474 bp, Homo sapiens
aagtaaaatggcctaaaaatcaattctaggataggctttctttctttctcgaagctttaatctggggatgatgacagtgataatggtatttcattatacacataaagtaagagagaaaaacgtaataaaacaagatataaaagatgaatttaaacaatggattgtgaaagccttgctgyttgcttctgtttttaaaaatattttgctattttttcttggctgctgccgttactacagttgtagtctgcacagaatgaagccttaatcacacagtcatgctgaaacatgtttacaaaggtaaaattaatgggtttatcttaagcaagatgtctttctatggcatcattaatatgctttagattttttaaataaatgtgtttttattcttccagtacatcagaattggaattggagtcatgtcaagatgttctcactggcaaagacaggaggaggttaaaatagctccttgtaggg

SEQ ID NO: 603609 - DNA, 572 bp, Homo sapiens
actgctaactcctttaaagccattttggagtcggccaggcagaatatgactcaacctagcttggaaaatgaggaaatagtgacaaatgcagaaagaccatctgaaccctaggcattctcctctaacccagctactccatacaatgagtgttaggatggtgattaaaactgagggagaccagtcttggtaaacagcaccacccaggacacgtgaatacaccaacttttatggaggaggaaggcaaacaaagggtggcagaatccagttatttcctaaggagtccttcattctaaacacttctggtgggtcaatcttgagcctgattttagtgccatgtattcttaatcagcataataaatcttactaggaaaaaataggcctcaaaggaattcaatgactctaaaataaaatacatgtatatcraagacaaccagatttacaaaaattaacaatagtttaaaatatgtgaccatatgtggtggtttacatctgtaatcccagcactttgggagtccaagacaggagcattgcttgaagctaggagtttgagatcagctcgggcaaccaagaga

SEQ ID NO: 603610 - DNA, 572 bp, Homo sapiens
actgctaactcctttaaagccattttggagtcggccaggcagaatatgactcaacctagcttggaaaatgaggaaatagtgacaaatgcagaaagaccatctgaaccctaggcattctcctctaacccagctactccatacaatgagtgttaggatggtgattaaaactgagggagaccagtcttggtaaacagcaccacccaggacacgtgaatacaccaacttttatggaggaggaaggcaaacaaagggtggcagaatccagttatttcctaaggagtccttcattctaaacacttctggtgggtcaatcttgagcctgattttagtgccatgtattcttaatcagcataataaatcttactaggaaaaaataggcctcaaaggaattcaatgactctaaaataaaatacatgtatatcaaagacaaccagatttacaaaaattaacaatagtttaaaatatgtgaccatrtgtggtggtttacatctgtaatcccagcactttgggagtccaagacaggagcattgcttgaagctaggagtttgagatcagctcgggcaaccaagaga

SEQ ID NO: 603611 - DNA, 572 bp, Homo sapiens
actgctaactcctttaaagccattttggagtcggccaggcagaatatgactcaacctagcttggaaaatgaggaaatagtgacaaatgcagaaagaccatctgaaccctaggcattctcctctaacccagctactccatacaatgagtgttaggatggtgattaaaactgagggagaccagtcttggtaaacagcaccacccaggacacgtgaatacaccaacttttatggaggaggaaggcaaacaaagggtggcagaatccagttatttcctaaggagtccttcattctaaacacttctggtgggtcaatcttgagcctgattttagtgccatgtattcttaatcagcataataaatcttactaggaaaaaataggcctcaaaggaattcaatgactctaaaataaaatacatgtatatcaaagacaaccagatttacaaaaattaacaatagtttaaaatatgtgaccatatgtggtggtttacrtctgtaatcccagcactttgggagtccaagacaggagcattgcttgaagctaggagtttgagatcagctcgggcaaccaagaga

SEQ ID NO: 603612 - DNA, 560 bp, Homo sapiens
ggattaaatatatggtataaacagcagaagggttaaatttgaggagtgctcattagtgagatggaagataatgttcaaataataacaaatttttttttaaatttagaaaactagacttcacatgtactgctgatgggagtacagactgatgcaactatccagagagcaatgtggagtgaaatgaaatccaaacctatgaaccagcagtcctactcttgatccacatggcaaataaacttaagtttaaactcatgaaaggataygatatccagtagagacaattgttgttgcagggagttggaaggaggcaaagaatctatcactgtaatacacacacacacaattgtttataaaaatggaatacaggccaggtgtggtggctcatgcctataatcacagtgctttgggaggccgaggcgggcagatcacaaggttaggagtttgagaccagcctgtccaatatggtgaaactccatctctactaaaaatacaaaacttagccaggcgtggtgacacgcgcctgtagttccaggtactcgggaggctgaggcagaagaatc

SEQ ID NO: 603613 - DNA, 560 bp, Homo sapiens
ggattaaatatatggtataaacagcagaagggttaaatttgaggagtgctcattagtgagatggaagataatgttcaaataataacaaatttttttttaaatttagaaaactagacttcacatgtactgctgatgggagtacagactgatgcaactatccagagagcaatgtggagtgaaatgaaatccaaacctatgaaccagcagtcctactcttgatccacatggcaaataaacttaagtttaaactcatgaaaggatatgrtatccagtagagacaattgttgttgcagggagttggaaggaggcaaagaatctatcactgtaatacacacacacacaattgtttataaaaatggaatacaggccaggtgtggtggctcatgcctataatcacagtgctttgggaggccgaggcgggcagatcacaaggttaggagtttgagaccagcctgtccaatatggtgaaactccatctctactaaaaatacaaaacttagccaggcgtggtgacacgcgcctgtagttccaggtactcgggaggctgaggcagaagaatc

SEQ ID NO: 603614 - DNA, 560 bp, Homo sapiens
ggattaaatatatggtataaacagcagaagggttaaatttgaggagtgctcattagtgagatggaagataatgttcaaataataacaaatttttttttaaatttagaaaactagacttcacatgtactgctgatgggagtacagactgatgcaactatccagagagcaatgtggagtgaaatgaaatccaaacctatgaaccagcagtcctactcttgatccacatggcaaataaacttaagtttaaactcatgaaaggatatgatatccagtagagacaattgttgttgcagggagttggaaggaggcaaagaatctatcactgtaatacacacacacacaattgtttataaaaatggaatacaggccaggtgtggtggctcatgcctataatcacagtgctttgggaggccgaggcgggcagatcacaaggttaggagtttgagaccagcctgtccaatatggtgaaactccatctctactaaaaatacaaaacttagccaggcgtggtgacacrcgcctgtagttccaggtactcgggaggctgaggcagaagaatc

SEQ ID NO: 603615 - DNA, 506 bp, Homo sapiens
tagaatattttggcataaatatggaatattaactgtggtcatgtcattatctgggtctgtttggttcagacccagatcataccattaagtgatccataggggactggaaataagcatcagaggagcagtcatggaaccatatttatcttggggccctacaagcagcctcacacagggtcttgcaatcataggagcttccacatcagttgaaggggcacatgctctcagaacatcagcctgggtattaatgagtcctactgctggttcaaaatctgaaacccactgtttagcagaataagtaccagatcatttcaaaaatagtgtcaaaaattccatttcagccagatatcaagagccaccaaggagtttcytgaattgtaaccctcctgcagcagctgtaatcatacaaatgggaaatttgcattggctcccgcaacccttgtggggtttgtttgtagatgggaggtgattactgaagtgcaacagcatcttcacctgcactttct

SEQ ID NO: 603616 - DNA, 568 bp, Homo sapiens
ttgcagcctaccactgcacatgtgagcctggatacactggtgtgaactgtgaagtggatatagacaactgccagagtcaccagtgtgcaaatggagccacctgcattagtcatactaatggctattcttgcctctgttttggaaattttacaggaaaattttgcaggtgagcataaagtccatatgaagcttggtctttgaagctatactctgcatcactgttcttgtcaaattggaaagctctctcctcaaggtatacatatatactgtgctgaacagggtgacactggtagcttctgtcacaatttggtcatgttcagatgggatctcacttaccaggatattctacaggtcagaaaggtagtgttttaaaatcagaytttcagcaaaatattttctcagtcatctgtgtgaaaatatgtctcatgaactgtagccccagggtctaacagtttcaaggcctctggaaacaaatgcatttacaataaatgcaaaagctgaaatgtagtattgttagggaaggcatgacttctattgctaaaataatgccttgagctatttcaggcag

SEQ ID NO: 603617 - DNA, 578 bp, Homo sapiens
tatcaacaagcatactgctttgtatcacactgcaaatgaaaaataactttccactcattttctcatgctgtttttacataattaactggaggttgaaaatctaaaaatattgctattyttcccgacatgaaatagttaagagtgatatatatatatatatatatatatatatatatatatatatgtgtgtgtgtgtgtgtgtgtgtgtgtatatgtatatatgtatatatatgtatatatgtgtatatatgtatatatatgtgtgtatatatatgtgtgtgtgtgtgtgtgcacgcgcgcacatgtgtatgtgtgggtgggtgggtgtgtgtgtgcatatgcgtgtgccagggttttaatagggcttaacaacaaaaagcttcagtcccccactttccctaggttttgttgtggtgattttgccttgcttagggccatccatctgttaatgtcgacttgtaatacagctaagctctcatgcttgttcactagtatagttgaggtgtctgtgagtctcatgaagacacacagaaacatacacattataactgctagactaagccacgcatggctaatat

SEQ ID NO: 603618 - DNA, 526 bp, Homo sapiens
gtacttgtacttgtttgccttgactatgtcttgtatgataaaatttccaccagccatgcatacacacacacacacacacacacacacaccacagaagtactrgtactgatcttcctgaatcgtgatctctttctgtgaaagtgtcactgtgagtaaacactgtggtatccaagtaaagttgcatgtactctggcaagtaatcctctagttggcattctaaagttgattacaaccctaattgttcttattattggtttacattgtccctgccaaagctagccatagttcaacctggttctaaagaggggctgttttacctaaatgacagaaatttacactaactcctctggaccaagcttctaaaacatagcctatatttacttgaataaaaactaattccattttgctgcgtttttcagatttaacattaaactaaacagggctatgtctctatgtttggccatgcctccttttttgtgtgcgtacgtggcaagtgggtttttatcaccctcccttttgcaaaata

SEQ ID NO: 603619 - DNA, 526 bp, Homo sapiens
gtacttgtacttgtttgccttgactatgtcttgtatgataaaatttccaccagccatgcatacacacacacacacacacacacacacaccacagaagtactggtactgatcttcctgaatcrtgatctctttctgtgaaagtgtcactgtgagtaaacactgtggtatccaagtaaagttgcatgtactctggcaagtaatcctctagttggcattctaaagttgattacaaccctaattgttcttattattggtttacattgtccctgccaaagctagccatagttcaacctggttctaaagaggggctgttttacctaaatgacagaaatttacactaactcctctggaccaagcttctaaaacatagcctatatttacttgaataaaaactaattccattttgctgcgtttttcagatttaacattaaactaaacagggctatgtctctatgtttggccatgcctccttttttgtgtgcgtacgtggcaagtgggtttttatcaccctcccttttgcaaaata

SEQ ID NO: 603620 - DNA, 538 bp, Homo sapiens
tgtacttgctaataaatctgtgttccaatagccaagcataatttctgaaatgttgaggtagaatgactttcaaaagccaaattttccaagacaagtgacatcaagtctcaggtaaattgaagttttcttcttcctgggatattgtcatttttttaaactaattttccagcaagaatttgtttttctgtatattcatggattaagtcaccaatcatgtattcagtcacacagtggatatttatttaacacatactatgtgacaaacactctgctaagaccttgggatagaacagcaactaaggcggctattttacttttgaaaatttrtataaaatcttagctccaagatctctatagtgcagcttataatgttgaaattgtatgtaaacaatttttaattttcccttattctttccctcaccttccaaaatgtaaaacttgcacgtatgggtcagagactaatcactaggctcaaaatgaaagggggtgaggtagtggggcaaggccagcccaaggtataaaggaaaacaaagatttc

SEQ ID NO: 603621 - DNA, 592 bp, Homo sapiens
ctaataaatctgtgttccaatagccaagcataatttctgaaatgttgaggtagaatgactttcaaaagccaaattttccaagacaagtgacatcaagtctcaggtaaattgaagttttcttcttcctgggatattgtcatttttttaaactaattttccagcaagaatttgtttttctgtatattcatggattaagtcaccaatcatgtattcagtcacacagtggatatttatttaacacatactatgtgacaaacactctgctaagaccttgggatagaacagcaactaaggcggctattttacttttgaaaatttatataaaatcttagctccaagatctctatagtgcagcttataatgttgaaattktatgtaaacaatttttaattttcccttattctttccctcaccttccaaaatgtaaaacttgcacgtatgggtcagagactaatcactaggctcaaaatgaaagggggtgaggtagtggggcaaggccagcccaaggtataaaggaaaacaaagatttcttccaagaaaaacagctccttatccctttggataccaagcatagctgagacattttgttttc

SEQ ID NO: 603622 - DNA, 591 bp, Homo sapiens
gtgcagatggtcgtgctttctataccattgcctactgttttttttcttatgattgctaaaatttatgcatttgatctttcataaaatgtcaataatttgattatgtgtttctttaaatataaacagaaaagcaagttttaaattttaccatcactttaaaaagaacaaaaaaaggagagaaagcctgtattaagatcaatagtccgaagaacagcaaacagaattaggtatgaaaagtagaatgataaacagcgatttatgcttttacttcacttaaaatcaattctattgacakgtccaatgtaaaataaagtccaacatatttatttgatgaacccagaaaactaaaagtgggaaaaaagataaaaatgtctcctattggttattggaggagctgggcaaagaacaagatctgttgtcaatcaagataaaaggattaggacatatttatgggaccattggggccattcagtcttcttaattgggtattttagttgaatacaaattgcttatttatgtgcaattatttatagtatgggatggattacttgaagcttattgttatttgcttaaagtcaattaatttaatta

SEQ ID NO: 603623 - DNA, 424 bp, Homo sapiens
tatttgcatcatgtattagagttagcaacaaaaaagagacatgaattcagaagtacttataagaaagaaaaatagcacattatacattttttaaaaatcatttttccctatttgaagttttgtctaataaaatgttctcccctttgacctaaactgtagtttttcttcttttttattgtttcaytctgtctgaacctctatttcagcatagattttcctatgggaactgagataaaaaattagaggagaaaatgaactttgagtaatcccatcattctttagctcagaattctcttccagaaggctctaatgtgactcaccattctccagtaaaacctggccggcacatacattttaattcagtctggaactctgtgcagttgcctccattgtagcaagtgagatttgtcttctcattcccaca

SEQ ID NO: 603624 - DNA, 569 bp, Homo sapiens
ttcacttttactactctcataattttaattttatgtaatcttatgactctattatattttctttccaactaaaatatattgaaaagattaagtctaatggaacaagatactcttgagagtacagctgataaattgctctgagtttgcctttaggactttaatcatctctgtatcrtaccaagatttaaacatttacaactcaccttaaatacaggtgtgcttattatggtaaagttccccaaagaaaaggtgaagtacaaaagtgattaggtatatcgtggtttttacccagatcagaagacatgatttcagtgtgctcagcagagttagtaaatatatttatatagcattatagaccatagtcttcatttcagagttggagaattttggagattttttattttaacatttacttaaaaacatgtaatgaaacacttgttgctctttttttccctaaattcccaactccaaacctggttgaaacacacacacacacacacacacacacacacacacacacacacacacatagtaaaaaacaataagatcaaaggaattgatttatttaa

SEQ ID NO: 603625 - DNA, 384 bp, Homo sapiens
ctacttggagaggcatttctaatagccctcagggaatcaaaataatgaagtagaataaacatggacttggagtcagactatgacactgacttttatattaatcggagctttgatactaggctatgagaacttgggtaaattagctaatttatttaagctgaaatttcttataaagtagaaataataaagcctatgaaacaattatttttgtgtgaaccaaatgagataactataaatgcttggagcatgctagtcattcaaaggagtttcaccaacttttttgtasatagcataagtgaacttggataaatattacttgaataaaaatatataaggcatacttattgaatttataggcaacatgaacctgttaaaaataatgac

SEQ ID NO: 603626 - DNA, 384 bp, Homo sapiens
ctacttggagaggcatttctaatagccctcagggaatcaaaataatgaagtagaataaacatggacttggagtcagactatgacactgacttttatattaatcggagctttgatactaggctatgagaacttgggtaaattagctaatttatttaagctgaaatttcttataaagtagaaataataaagcctatgaaacaattatttttgtgtgaaccaaatgagataactataaatgcttggagcatgctagtcattcaaaggagtttcaccaacttttttgtacayagcataagtgaacttggataaatattacttgaataaaaatatataaggcatacttattgaatttataggcaacatgaacctgttaaaaataatgac

SEQ ID NO: 603627 - DNA, 571 bp, Homo sapiens
gctgtcttgggagacagtatgtttcctgacattgaagctgtgcagatttagagagaatcatcattcagcatggatattatcatcgaaatttaagaaaaggtatgytatgtatttcaatggcctctagtgattctcccagtcctaagattctatcataattttaagtaaagaatatgccgcatgcataatttctaagtagagaatttataagtggaaaatatgctgaatataagagttgacattttcataaattcataattttgtcacagtttaaaaaatctgtaaaaagggaagagcagtaacttctttagaaggccactaataaggattaaatgaggcaattgttcatagcatgtggttccaggtcataggtgcttatcaaatgttgcttgtcttgccataattcactaactctatttttatttgcttaaaaacatagttagatttcatcatgtccacaatttttctccgtattgattaccattaaattttacttttctggaggtcagtccctgtacgtgacctcaactatgcagaacataatcaagaacgaagatgtgtcctaaaagtg

SEQ ID NO: 603628 - DNA, 518 bp, Homo sapiens
cgataaatttttattgagtttatatgtgtgagacactgggtatgcacagatctacaagtctaatttaaatttaggtttgatccttacaggagtatctgaaattctctcagggactttctgattaattatttttggtagaagaaaattctaaaagactctgtcactactttcacagccagatttacccaagtctaaaatagtgattaaaaattccatcatggattttaagcaccaaaaaaatgacaggcaggtctcaatcgttttagaggtttattttgccaaggttaaggacwttccccaggagaaagcacaaatacaggaacatctgtgatctgtgccttttgcaaagagagtttttgaggacttcagtatttaaaggggaaagagccagcaggaggggaaggagaaaagaaagaaaaaaaagggaaatgggaaggtaggcaatgagggaagaagttacattcttgtgaggctttgattagtgcccagtgaattcacattttgcgtgtgaagagtgg

SEQ ID NO: 603629 - DNA, 472 bp, Homo sapiens
ttgccttgataccaaagccaaagatgctacaagaataaaaaaaaaaccctacagaccaatattaattaattattaacattgatgcaaatatcttcaacaaaatagtagcaaactgaattctgcagcatattacaaagattatacatcatgaccaagtagagtttatttcttctgcaaggatatttcaacataagaacactgatcaatgtaatatacaacatcaacaaactaaaggaaaaaattcataagatcatctcaattaatggagaaaaagcatttgacaaagtttaacaygcttttatgataagaactgttgacacacttggaatagaaggaaattcccatataataaaagccataaatagaaacccacagtgaacatgatattcaatagtgaaagaataaaagcttttcctcaaagatcagcgccaaaacaaggatgcacattttcaccagttgtattttacattgt

SEQ ID NO: 603630 - DNA, 589 bp, Homo sapiens
aatggaaccttgccctcaacagcaccggagtctctcccttccagttgagccctttaccactttttcaaaaagccattttgaaatgtggaagtgaatgctgaagtacatgaagccacagttattgctgtgtttagggggccatgtcactgctgggcagactgttagcatataacttcagcatctcaaagcacctagcagtccctgaaaggctgctaatgcctggaggcaggcactcacttcatttcaatagacttcccattcctgaaccacttagagatgggggaagcctttcttgaatgacttactgcattttcagagaatatggccagggaacaactaagttactttccttcataatctgattcagtctatatatattccagcaaaattctggctatcagccttctaatgtggtcctgaaactgtgtgtgtgtgtgcatgtaagagaccgagagaggctgttttctatcgaaaagttcaaactatcatgtacttattttatccagtaattcmattttttcacctttgactaaaccatctcagaattgcctgtcttgcagttctttagcttttgcttacctggttcaca

SEQ ID NO: 603631 - DNA, 428 bp, Homo sapiens
gtcttttacccccaaaaagagagattaaagacacaaggagaaagagaaagggagagcttgattctccatcaatgtacattttacttcttcggggccacatctgcacacatggatgatgattatcagttgcagtcacttatgtgrcaaaataatattatgagatatatatttcttgccaaatccctttggcagattatattttccaaagatggccacaccaatatacactatttcatatgctcacaaagtgacatgaccaaaactccccatccagacacagggttaatattccctccccttgaacacaccagtggatctttgcaattgccttaactgacaaaagaatgttgggtgattgatggggtctctcataaagggcaatatggcttccatctggttctctctctctgtctcttttctctctttct

SEQ ID NO: 603632 - DNA, 428 bp, Homo sapiens
gtcttttacccccaaaaagagagattaaagacacaaggagaaagagaaagggagagcttgattctccatcaatgtacattttacttcttcggggccacatctgcacacatggatgatgattatcagttgcagtcacttatgtgacaaaataatattatgagatatatatttcttgccaaatccctttggcagattatattttccaaagayggccacaccaatatacactatttcatatgctcacaaagtgacatgaccaaaactccccatccagacacagggttaatattccctccccttgaacacaccagtggatctttgcaattgccttaactgacaaaagaatgttgggtgattgatggggtctctcataaagggcaatatggcttccatctggttctctctctctgtctcttttctctctttct

SEQ ID NO: 603633 - DNA, 611 bp, Homo sapiens
attcagttctcagttgctgtttatggggtaattatctcactaggttgaaaggcaaatgccaggcttactcagttttatgcagacagtaacctggggcctgaacacatgcccactccagttccctacacccttcctgaacccacaagtgtgggctaggcacctctcctcttgtcagtcatgctctctgtggattcatcaccactggaacacttagcatacttgcctgtcacctccacatgactgttaggtccccattgctcaacaatggttgtcatatgataggcactcaatggttattgaatgaaggaattcattgaatgattaattgacagaacaaattaacaagatattttttaaaaaaagagtatttgccatgtttctgctaggcatgagtgtctgtgagcattcataaatgacttgcaaagttccaatgcargaaagatgattgttgaaaatagacccctctccttattttttagatataattcaaatgccaactttgtggttttgtctgttttgtctgtgtgatcataagaaagtcacatttctttctgaggctcagcttctttatctgtaaagtgagaagatactactattagctagaatttatt

SEQ ID NO: 603634 - DNA, 272 bp, Homo sapiens
gtggtgagcacctgtaattccagctactttggaggctgaggcaggagaatcgcttgaatccaggagccacaggttgcaatgagctgagattgcatcactgcactgcagcctgggcaacagagcaagactccattaaaaaaatctgacattaataataataaatacttattaagttattactaggtgaaaggcattgctgtatgcattttawacatactgtctcatttagctagcataaaatagcaatgaagtaggtactattcctccatttt

SEQ ID NO: 603635 - DNA, 579 bp, Homo sapiens
aatccaaccctgcatgaagtgtcagcaggaaatctgagcctccagcgagacatttattcctcaaagagaaaagccaatcgcaagctctgcactaagactttcaggcttctcaagccctcccgagtgccgagtgctcagtcagaaaacacttttccccttagaacatcccatcactaagtcctctctgctatatacttgcttttctctgccccaagcctaagcatgcctcttcagaaccctactgggggagctacatacagaagaatatgcaaataatcatccatttgggccagtccacagtctctgggcctctgggccatgctgtttcactaaaggacccacagaagggcctgaagagctgaccagtggccagggtggtgcaggtggttattaagatctctgcactataaaaacacatcctgcttgcttttccattgtactggcctcgcttcgacaataagagcaggaatccacagccactttactccttcctaagcagactcacatattccccacacagaggcacatttgaccctctttaccattttaagatraacgtatacatgcttagtgcaatgc

SEQ ID NO: 603636 - DNA, 587 bp, Homo sapiens
tatttattttttgcattgcttttcattttctccctgtttctggctggatctgtctcaagaacttgctctagtatttactatcatacaagtcagctggataataaaattatctcagtttttgttggcctaaagttatttagtttgctttattttttaaatgattttttaccgggatggaatcctaggttaacagtttattttcttcaaaagtttaaataaataacttgaagcaattttttaactttgaataatttgttagcttccatttttctttagagtagtcgcattagttttattttggcttctgtctgcttttaagattcttttttctttggtttgtggcaattgtactatgatatggctaggtatggtatgttttatatgtatcctagtagagagttgtagtgcttctggactctgggtatctttcgttatttttggagacttcttagccattatcccttcaatcatggcttctctagcagaaattttattgacaggttctaaatgtacatactgtttggcctatccaccayattccatatttgtcttatgctgagattttcttctgctttatttttcagagt

SEQ ID NO: 603637 - DNA, 577 bp, Homo sapiens
ttataaattacccagtctgaagtattttgttatagtagcacaaacagacaaagatagcagctttttagctaggtcttccttattcctttgcctgtcccayggctaacttctttttctttcttttttttttttctttgagacggagtcttgctctttcacccaggctggagtgcaggggcatgatcttggctcactgcaacctctgcctccctggttcaagcaattctcccgcttcagccccttgagtagctaggattacaggtgcacgccaccacgcccagctaattttctgtatttttagtagagatggggtttcaccatgttggccaggctaatctcaaactcctgacctcaagtgatccacccacctcggcctcccaaagtacagggattacaggaatgagccaccaagcccggcccactaacttctttttctagcttctcaacaagtaagattgagtaagtctgagaatgggaccgtgtctagaatttattccttccagtgggttcttggtctcactgacttcaagaatgaagccacggacctcgcagtgagtgttacagctcttaaaggtgg

SEQ ID NO: 603638 - DNA, 558 bp, Homo sapiens
acaagcttttaaaactgaaaagttcctactggctcctgcctggcggctccagcccgactgggggccggggcctccctgcactgtggggtcacgagtgcccctggacagctcccgagcgccctccgacccgcatgctcagcgcagccccgcggcggcgcgccacgggcagagcgggctcagcgggggacggaagctcaccctgcgaccgggaacccgcaggctcgctccgcagggccgcggctcctctccgtgcaggtgctgggcccgcgggggcggggcgtccacacggtccgcgccgagacccaagcggggaaaaakctaagagcggcgcggggcaggtgccacagggagcctccgccccaccgcgcgagcagcaagtctgcggcgcttgacacctgcactgcgaatgccaggccgcagcccgggctcccaagacgcgaatacgcgcgcctgctcgtgacgtcttttttgcggtcttcccgagagccagcagagggcgccgccagatgtttacggaagccgatagtccttgctcagcggcaccccgtccttccggct

SEQ ID NO: 603639 - DNA, 558 bp, Homo sapiens
acaagcttttaaaactgaaaagttcctactggctcctgcctggcggctccagcccgactgggggccggggcctccctgcactgtggggtcacgagtgcccctggacagctcccgagcgccctccgacccgcatgctcagcgcagccccgcggcggcgcgccacgggcagagcgggctcagcgggggacggaagctcaccctgcgaccgggaacccgcaggctcgctccgcagggccgcggctcctctccgtgcaggtgctgggcccgcgggggcggggcgtccacacggtccgcgccgagacccaagcggggaaaaatckaagagcggcgcggggcaggtgccacagggagcctccgccccaccgcgcgagcagcaagtctgcggcgcttgacacctgcactgcgaatgccaggccgcagcccgggctcccaagacgcgaatacgcgcgcctgctcgtgacgtcttttttgcggtcttcccgagagccagcagagggcgccgccagatgtttacggaagccgatagtccttgctcagcggcaccccgtccttccggct

SEQ ID NO: 603640 - DNA, 622 bp, Homo sapiens
gtgatttgctaattgtgacaggggaaaggatcccaaacttagatctgtgaaactgacagatgactggttacaaaggtcagacaaagtaaagcactggcttatattgttttctttgtgttcccgaaacagttcagttagggatggactttcacactgggaaaactscaaattatcatttttaaaaatgtaattcttggcactttgttcaactaaagaaacacttccaacttcagtttctttactagcatttaaattatcaacagtcatattttccaacaagctagttaagcacaaaggattatctgaacttcctaaactgtcctgtactggaatgttttaaaaatcagatagtgaattactttgaatatatgaagaattattcagtgttgtgctctttatcattatggactttaaatctggtatttctttgaatgcagaatcatctttggaagcacattcagatggatgaagtctcaacaaatcagcatctaggttctttgaaagcagactttccagactgtctgtagatgacaatctgactgatggctgactttcacaggaatctcttgacatatcaggaattaagttagctagtgaaagttcttttgttaacctacatgat

SEQ ID NO: 603641 - DNA, 561 bp, Homo sapiens
gaagctcattaatgtaaaaacaatcatgaaaggatgatgttgaaatacatatacagagtagaacagagagcccagtggcagtgctggggctcatgggccttggtgtgttgcagaggtgaaacactggacgtggccccatgcattgacctgggacaactggctcaccatggtggaaaaaatcaaattagatctttgttgccacacaaatcacaaaaatggggtccagattgagtacatgcctaaacatgaaaaaaaaaaatcaaaactgaaataaggctaaagaaaacaaagaatacatgagtctcataaataggagtgtgttgaaaagaaacacaaacaatacaaaccatactaagaaatgtcttttttttcaaggcagctgattagatgcatttcaagcatgcctcatccacttaaaagaaccaaaatgctatgtagacaatcacactttgaatacattatccaagayagaacacagcagttcaacagaaaagcaaaagaaaactccacaatctaggaagaaggaaaacaggcagcctgcatggcccggacgggctggga

SEQ ID NO: 603642 - DNA, 607 bp, Homo sapiens
tatgtttgttttttctttattgggaggctggtgggggagagatggcaggaggaaagctgctttcctgatataattatcatccatttccacttgtaaactgctaacagggaggtaccatatcactttagctgtttttcattctttcaatgtatgtttaaatcctggtcatgcaaatacagagaacttcaggaaggtgaagcagttagttatatagaaaatcaatgacaagtaactttttaaaaaatgttaaaaagggcacactggctcacacctgtaatcccagcactttgggaggccraggtgggaggatcacttgcgcccaagagtttgagaccagccttgacaatatggcaaagcctcatctccacaaaaaatacacacacatacaaattagccaagtatggtggtgtgtgcctgtaggcccagctacccaggagattgaggtgggagaatcacctgagcccaggaggtcaaggctgcagtgagctgtgatcgcacaaatgcactctagcctgggtgacagagtgacaccctatctcaaaagagagttaccagagactttagcaaggtagtaagaaatgagttacctttaaaattcttaggtgta

SEQ ID NO: 603643 - DNA, 615 bp, Homo sapiens
tgtaccatttttcattcccaccagcaatgaatgagtgcctgttgctccacaccctcaccaattaataatgtaaggtttttgtttgtttgtttgttttgctttttgatcttagtcgttctaataggtatgtagtgggatctcattattgttttaacctccccacctttttgataccacgacttctcctcatccttcaaatctgcacacaagcagacttcctcctttccttaaggaggaaacctcctctagctccctaattaagcaggctgggggtctgtcacaatgctctgaagagcatccttgacatctctcagttcagaccaagtactgatcacaacgttgaacagctggagacctggatccccctttccaggagcacctcacacatagaaagtatgtaatacgtgcgtgtttactgaatgagtgagacagagaggcattgaaagcatgtcagtaataaaaattgaatacacataacgtacaaattgccaccttcgactaaactccttccttctgcttgtgccttgtgcacgcatccccccaatactgatratgttccgctacagagaaagcaccacgatatgcagcccagggcagcaatgcaaaatgaactcg

SEQ ID NO: 603644 - DNA, 511 bp, Homo sapiens
acaactatctcatgcaggaaagagatggccagtacaaaccatctggaataataacttaccccaagaagtgctgacgtcttctccatctcctctttgttcacctgaatggcrtggctttccatcactgtgattcgaaacccaaaccagatcatatttgcattaatgtatctttttactaaagactaaaatgcttcgctccctgatgaggacaataatgactgcaactgccatttactcagcacctgctgcatgccaacctctgcacaggatctgtcaggatccctgtgtcatacaggcaaatgggcgcattgacagagctggcctttgagtgggagtgggcgaggggaccgcactggccagcctggcccttcccacactgtgaatgccccctggctgacgtggtgcccatcaggacctgcggtcaaaggcaaaggcagaagagagccctgcatcagttcttgcaggaaggttctcaaggttataaggacagcaaaccagaatgagagacaac

SEQ ID NO: 603645 - DNA, 511 bp, Homo sapiens
acaactatctcatgcaggaaagagatggccagtacaaaccatctggaataataacttaccccaagaagtgctgacgtcttctccatctcctctttgttcacctgaatggcatggctttccatcactgtgattcgaaacccaaaccagatcatatttgcattaatgtatctttttactaaagactaaaatgcttcgctccctgatgaggacaataatgactgcaactgccatttactcagcacctgctgcatgccaacctctgcacaggatctgtcaggatccctgtgtcatacaggcaaatgggcgcattgacagagctggcctttgagtgggagtgggcgaggggaccgcactggccagcctggcccttcccacactgtgaatgccccctggctgacgtgktgcccatcaggacctgcggtcaaaggcaaaggcagaagagagccctgcatcagttcttgcaggaaggttctcaaggttataaggacagcaaaccagaatgagagacaac

SEQ ID NO: 603646 - DNA, 577 bp, Homo sapiens
tggcctcccaaagtgctgggattacaggcctgagccactgctcacagcaaggcatccaaatttaaaggaagaagtgaaattatttttctttgcagttgataacgatcttactgttggaaaaaccgaaagacgccaccgaataacaattagaactgataaataaattcagtatagttgcaggatacaaaattaagacaaaaaaatcagaagtatttctatatgcgaacagtgaacaacttgaaaaagaaataaaaaagtaatcccatttacaagggctacaaataaaatgaaatacctaggaattaacttatccaaagaagtgaaggatctttataattaataccatgaagcwcagatgaaacaaagaggacacaaaaattcaagatattccatgctcatcaatcacaagagccaatattgttaaaatgtccatgctacccaaaggaatttacagattcaatgcaaaataccaatgacatttttcacacaaatggaaaaaaaaataattctaaaaggtatatggaatcacaagtgactcataatagccaaacccatcctgatcacaaggaacaacact

SEQ ID NO: 603647 - DNA, 375 bp, Homo sapiens
cccctgagtagctgggattacaggtacatgccaccaaacccggctaacttttgtatttttagtagagatggggtttcgccgtgttgtcaggctgctctcgaactcctgagctcgtratctgcccacctcagcctcccaaagtgctgggattacaggcataagccactgtgcccagcctagaggctattttttaaactgtaatatttgtgtggtactcattaatttttttgcacctgctaaatatatacatggtgtattaaaatcaatagaagttcaaggaatagaactcagaattatttacttcttttctgatctaactaccaatacatgtcaccttacattgacgtttttaatgtgaaaatttaggaagaagca

SEQ ID NO: 603648 - DNA, 375 bp, Homo sapiens
cccctgagtagctgggattacaggtacatgccaccaaacccggctaacttttgtatttttagtagagatggggtttcgccgtgttgtcaggctgctctcgaactcctgagctcgtaatctgcccacctcagcctcccaaagtgctgggattacaggcataagccactgtgcccagcctagaggctattttttaaactgtaatatttgtgtggtactcattaatttttttgcacctgctaaayatatacatggtgtattaaaatcaatagaagttcaaggaatagaactcagaattatttacttcttttctgatctaactaccaatacatgtcaccttacattgacgtttttaatgtgaaaatttaggaagaagca

SEQ ID NO: 603649 - DNA, 375 bp, Homo sapiens
cccctgagtagctgggattacaggtacatgccaccaaacccggctaacttttgtatttttagtagagatggggtttcgccgtgttgtcaggctgctctcgaactcctgagctcgtaatctgcccacctcagcctcccaaagtgctgggattacaggcataagccactgtgcccagcctagaggctattttttaaactgtaatatttgtgtggtactcattaatttttttgcacctgctaaatatatacatggtgtattaaaatcawtagaagttcaaggaatagaactcagaattatttacttcttttctgatctaactaccaatacatgtcaccttacattgacgtttttaatgtgaaaatttaggaagaagca

SEQ ID NO: 603650 - DNA, 244 bp, Homo sapiens
cgacaaggatacccactttaaccattgttattcaacatagcactgaaagtcctagctagggcaattaaacaagagaaagaaataaagggcatccaaattggaaaggaagaagtaaaattatcttggtttgctgatgatatgatcttatacttggaaaaacctaaggaccccayaagaacactcttacaactggtaaacaaatttagtaaaattgcaggatagaaaataaacatggaaaaatcag

SEQ ID NO: 603651 - DNA, 439 bp, Homo sapiens
gctactgtaaacgcatttagatcccaactaggagttttcttttacaggccaataagccccttggtaattgtattccaatgagataaggaagctaaattattagatcataccaatatattatcatattattataaaaatgacactatcattgagacacattcatacataaatataatatgcaaataaggcacattatatgtgtcatacactatgtgtgtgggtgctgtgtgtgtgtatatatacacatatrcacaaatactggatattttaacacaaggaagaaatttaaaacgtgtaccttaacaaaatgcaaaacatagccactaaaatggcaatatgtatcccttatgattgtgtagaataaacagtcatcacattcacattcccaaagaagacagggcaaaagatgaagaaagataggctaaattgcaagtggata

SEQ ID NO: 603652 - DNA, 577 bp, Homo sapiens
tggcctcccaaagtgctgggattacaggcctgagccactgctcacagcaaggcatccaaatttaaaggaagaagtgaaattatttwtctttgcagttgataacgatcttactgttggaaaaaccgaaagacgccaccgaataacaattagaactgataaataaattcagtatagttgcaggatacaaaattaagacaaaaaaatcagaagtatttctatatgcgaacagtgaacaacttgaaaaagaaataaaaaagtaatcccatttacaagggctacaaataaaatgaaatacctaggaattaacttatccaaagaagtgaaggatctttataattaataccatgaagctcagatgaaacaaagaggacacaaaaattcaagatattccatgctcatcaatcacaagagccaatattgttaaaatgtccatgctacccaaaggaatttacagattcaatgcaaaataccaatgacatttttcacacaaatggaaaaaaaaataattctaaaaggtatatggaatcacaagtgactcataatagccaaacccatcctgatcacaaggaacaacact

SEQ ID NO: 603653 - DNA, 577 bp, Homo sapiens
tggcctcccaaagtgctgggattacaggcctgagccactgctcacagcaaggcatccaaatttaaaggaagaagtgaaattatttttctttgcagttgataacgatcttactgttggaaaaaccraaagacgccaccgaataacaattagaactgataaataaattcagtatagttgcaggatacaaaattaagacaaaaaaatcagaagtatttctatatgcgaacagtgaacaacttgaaaaagaaataaaaaagtaatcccatttacaagggctacaaataaaatgaaatacctaggaattaacttatccaaagaagtgaaggatctttataattaataccatgaagctcagatgaaacaaagaggacacaaaaattcaagatattccatgctcatcaatcacaagagccaatattgttaaaatgtccatgctacccaaaggaatttacagattcaatgcaaaataccaatgacatttttcacacaaatggaaaaaaaaataattctaaaaggtatatggaatcacaagtgactcataatagccaaacccatcctgatcacaaggaacaacact

SEQ ID NO: 603654 - DNA, 577 bp, Homo sapiens
tggcctcccaaagtgctgggattacaggcctgagccactgctcacagcaaggcatccaaatttaaaggaagaagtgaaattatttttctttgcagttgataacgatcttactgttggaaaaaccgaaagacgccaccgaataacaattagaactgataaataaattcagtatagttgcaggatacaaaattaagmcaaaaaaatcagaagtatttctatatgcgaacagtgaacaacttgaaaaagaaataaaaaagtaatcccatttacaagggctacaaataaaatgaaatacctaggaattaacttatccaaagaagtgaaggatctttataattaataccatgaagctcagatgaaacaaagaggacacaaaaattcaagatattccatgctcatcaatcacaagagccaatattgttaaaatgtccatgctacccaaaggaatttacagattcaatgcaaaataccaatgacatttttcacacaaatggaaaaaaaaataattctaaaaggtatatggaatcacaagtgactcataatagccaaacccatcctgatcacaaggaacaacact

SEQ ID NO: 603655 - DNA, 632 bp, Homo sapiens
ataaattattttgtgaaaaatatccttagcaaggatcagtattattgtcagtgtgactttaaaattctaaaggcatgccagaaagagggctacataaaattcagcagtttccagatcatacacagtacagagattctcatacccacttaatctcagcacgcatctccacccctacttccttcccaatggtatgtggtcttgaaaacacaaatgttcacgtttcctgaagctgagctgcaaaggaaaagtctcctcccaagaggcagagctgtaggcttttggtgcccccgaaattgttcactacagtacaacataatgtgacactcaccacaattagccacrgggaaacagtctttttttcacctctgatgtcatataatagatttgagatcacatcagtgagcaatgttatctacaagtatttttggaagtcttgttaaaagagccacgatactgcaagcctaacttgaagtgtaaatggtgaatgcttctctatatctcatcttgaccactactttactgaagagtgaaaaatgacagatgcaaattatttttcagaaagtagacatttccactggtagttcttcctcctaagtgatcttttcttctctctcatgctctaccccctttct

SEQ ID NO: 603656 - DNA, 632 bp, Homo sapiens
ataaattattttgtgaaaaatatccttagcaaggatcagtattattgtcagtgtgactttaaaattctaaaggcatgccagaaagagggctacataaaattcagcagtttccagatcatacacagtacagagattctcatacccacttaatctcagcacgcatctccacccctacttccttcccaatggtatgtggtcttgaaaacacaaatgttcacgtttcctgaagctgagctgcaaaggaaaagtctcctcccaagaggcagagctgtaggcttttggtgcccccgaaattgttcactacagtacaacataatgtgacactcaccacaattagccacagggaaacagtctttttttcacctctgatgtcatataatagatttgagatcacatcagtgagcaatgttatctacaagtatttttggaagtcttgttaaaagagccacgatactgcaagcctaacttgaagtgyaaatggtgaatgcttctctatatctcatcttgaccactactttactgaagagtgaaaaatgacagatgcaaattatttttcagaaagtagacatttccactggtagttcttcctcctaagtgatcttttcttctctctcatgctctaccccctttct

SEQ ID NO: 603657 - DNA, 623 bp, Homo sapiens
aaccattctccacttggcttccagttgttcttagcaaaagtgaagtcaatttcagtaataaatgttaacttatttcctacggagctcatttaattatttaattttcttaacacgatagaaaaggaggaatgggaaagagtgacttaaaggagaaaaattaaatggcaataaaatcaaaacaattcatgcaactgattaaacggtttgaggttttgactcaactaagggtcatttttaaatatgatactttcggactttaaaaagagtctgaaaaccagcagcatgcttttttaaggacaatccagttggccgggcgcggtggctcaygcctgtaatcccagcactttgggaggcccaaggcgggcagatcacgaggtcaggagatggagatcatcctggctaacactgtgaaaccccgtctctactaaacatacaaaaaaaaaactcagccgggcgtggggaagggcgcctgtagtcccagctactcggcaagctgaggcaggagaatggcgtgaacccgggaggcggagcttacagtgagccgagattgcgccactgcactccagcctgggctacccagccagactccttctcaaaaaacaaacaaacaaacaaacaaacaa

SEQ ID NO: 603658 - DNA, 623 bp, Homo sapiens
aaccattctccacttggcttccagttgttcttagcaaaagtgaagtcaatttcagtaataaatgttaacttatttcctacggagctcatttaattatttaattttcttaacacgatagaaaaggaggaatgggaaagagtgacttaaaggagaaaaattaaatggcaataaaatcaaaacaattcatgcaactgattaaacggtttgaggttttgactcaactaagggtcatttttaaatatgatactttcggactttaaaaagagtctgaaaaccagcagcatgcttttttaaggacaatccagttggccgggcgcggtggctcatgcctgtaatcccagcactttgggaggcccaaggcgggcagatcacgaggtcaggagatggagatcatcctggctaacackgtgaaaccccgtctctactaaacatacaaaaaaaaaactcagccgggcgtggggaagggcgcctgtagtcccagctactcggcaagctgaggcaggagaatggcgtgaacccgggaggcggagcttacagtgagccgagattgcgccactgcactccagcctgggctacccagccagactccttctcaaaaaacaaacaaacaaacaaacaaacaa

SEQ ID NO: 603659 - DNA, 533 bp, Homo sapiens
aattacaccttttttaaaaaattaaatacttgggtaatttctataaaggaggcaggaaaaggctcaggacagtgctaaggtcttcagacctgcttcagcctggggccggggaggctcaggggggctgacctgttgctgtgttctgtctgagggtaaggcaggacctgtggcatttatccattgatcaatcagacccactaaggtcttggccttagtaaacgttcagtaaacagggagatattggtagattcattgaatctcatccttgagtggaaacttctgcttcatctgctttcaactttctcccacactccttcacagccagacagccccagatttggccactgctgattgcagagcaagaatgccctccagccctccacctggccacacctactcaggcaggtttaagggtcccctctcacctctcagggctgccatttctctatcctctgtccccagcatgatcgatcattgcctcctcttgtgcccacartaggttgcattgacctggcatctctatcatagcattt

SEQ ID NO: 603660 - DNA, 577 bp, Homo sapiens
tcatttgacttaacccaagtgtagagtctctgcttccattttccccagatggagagtggagtctgggtctagacacctagagagggccatggggaaggaaataagagtctctgtcttagatttggatgggctgagagggaccaactgcaaaggacattaggcttttctctcatcccctgtatcatcttcctcacatgaagaaatttccacgggtgctttctaaggagccacattcctccaggcacaagagtagacagacatcacgttgctgagacattggctcacctgttcctgttgccctcagagggccagcagaaatctgttgctaaagctggcttttggcactagtgcttcaacattttatgtgcttaaaattccatctgtgcatrttcagacatgaccagagtgcttgtcatttctagttcagctcagccctcccagggcttgggcttggaagaagaaaggtttcctccctctccctcgtatacctactctgcttagcaagtaactccatctgccccagacttgcagcctgggacttgttgacaaacttgggcagtttcattattcccaccca

SEQ ID NO: 603661 - DNA, 583 bp, Homo sapiens
ggattacaggtgccagctaccatacccagccagtcctttcttccttcctcccttcttttatattttaatgtccaaattgaggtataactaacatggtaaaaaaaaaataccctttttaggcacatcgttctgtgaattttggaaaacacatatgctcatgtaaccacccccaaaatcaagtcatagacattctcatcatcccaaggggtcattgtgccttttcctctacctagtmtctggcaaccaatgatccattctccttccctggaggtttgctttttggagactgtcacatgaatggaatcctataggacgtagcgttttgagtggccttctttcacttagcatgagattcattcatgttgttgcacatgttagcaatgtgtttgtttatggccgaggagcattccattgcatgaatgtataatagtttgtttctgcatttaccagtggatggatagttgtattatttcaagtttttgatgattattaataaagccactgtaaatatttatctgcaggtatctgtgtggacatatgtgttttcatgatcttgggtgaatacctaggagtgagattgctg

SEQ ID NO: 603662 - DNA, 632 bp, Homo sapiens
ctttcttccttcctcccttcttttatattttaatgtccaaattgaggtataactaacatggtaaaaaaaaaataccctttttaggcacatcgttctgtgaattttggaaaacacatatgctcatgtaaccacccccaaaatcaagtcatagacattctcatcatcccaaggggtcattgtgccttttcctctacctagtatctggcaaccaatgatccattctccttccctggaggtttgctttttggagactgtcacatgaatggaatcctataggacgtagcgttttgagtggccttctttcacttagcatgagattcattcatgttgttgcacatgttagcaatgtgtttgtttatggccgaggagcattccattgcatgaatgtataatagtttgtttctgcatttaccagtggatggatagttgtattatttcaagtttttgatgattattaataaagccactgtaaatatttatctgcaggtatctgtgtggacatatgtgttttcatgatcttgggtgaatacctaggagtgagattgctgggtcataagtgaatgtttaactttataagagaaagctttcccaaaaascctgtgccattttgcatttccatcagcaatgcacag

SEQ ID NO: 603663 - DNA, 636 bp, Homo sapiens
gttttaaaagtcaatacaattagctgcagtgatttaaaacaaaaatctgttgagtttgggtggcagtacatcttcccagggagaggtaaagggtaaagatcattttttttyctctgtatctccttcagaaatacccagcaccaaataaaagttagttgcaggtagcaatagcaatagaaatgtttgctgagggtttgctgtgtactaagtgtgttgtaaacattggcttatttaatcctcacactgattctataatgttgggaatagttgccatcattcccatttcacagattggaaatggaggcacagagtggtaagtcaaccacctgaggtcacggagctggtaagaaacaggcagtctggctctaaaacccacgcttcactatgctgtctttcaactgtaaagtctgcaagccttggctgaatgagtgaatgaatgaatgatggagaaagtgagaggatgagacagtgcagacagctcgtccaggccatgaaatcagaagtgttttcccttgagactcagagagaaaagtcaaagtggaaaagtgggccctctgaacagttgcatgaacacagcacaaatgtcaaaagagaacagataaggaggaacttgttttgaatatatcttaatattgg

SEQ ID NO: 603664 - DNA, 636 bp, Homo sapiens
gttttaaaagtcaatacaattagctgcagtgatttaaaacaaaaatctgttgagtttgggtggcagtacatcttcccagggagaggtaaagggtaaagatcattttttttcctctgtatctccttcagaaatacccagcaccaaataaaagttagttgcaggtagcaatagcaatagaaatgtttgctgagggtttgctgtgtactaagtgtgttgtaaacattggcttatttaatcctcacactgattctataatgttgggaatagttgccatcattcccatttcacagattggaaatggaggcacagagtggtaagtcaaccacctgaggtcacggagctggtaagaaacaggcagtctggctctaaaacccacgcttcactatgctgtctttcaactgtaaagtctgcaagccttggctgaatgagtgaatgartgaatgatggagaaagtgagaggatgagacagtgcagacagctcgtccaggccatgaaatcagaagtgttttcccttgagactcagagagaaaagtcaaagtggaaaagtgggccctctgaacagttgcatgaacacagcacaaatgtcaaaagagaacagataaggaggaacttgttttgaatatatcttaatattgg

SEQ ID NO: 603665 - DNA, 608 bp, Homo sapiens
aaagtatttagaaaaactaacttatggagactgcttgctttgccaagagaaatgagagaaccctattttattacccttgtgagtcatctattttcttggttctgcaaaaaaaattgttatgaaactcatcaaatattacttaggaataaaaccagtgtttgtgattcatctataaaacaaattaattcacacaattcagtataatcttgacatcacggtgctgcaaaacaaggcgttgtcattgaaaatctgcctgttttcaggtatcagttgtttatgcagaagcctttctggaccctctcttgagctttgtttcagctcagaataagaaactcaggccgggcacagtggctcatacctgtaatcccagtgttttgggaggctgaggtgggcagatcacttgaggtcaggagttcaagaccagcctgtccaacatggtgaaaccctgtctttactaaaaatactaaaattagccaggsgtgatggcacgcacctgtggttccaggtactcaggaggctgaggcaggagaattgcttgaacccaggaggtggaggttgcagtgagctgaagtcacaccactgcactccagcctgggtgacagagcaag

SEQ ID NO: 603666 - DNA, 594 bp, Homo sapiens
ttcctttgggaacccactacttggacatattggaggaagcctgatattgatccatattcttttctgaggacaaagagcctagcatttttttgcatctttttttacttcacctgtgaaacaagttcacatttttcacatcttaatggagcttccttttccaagaaaagtgattaacatggatatctttaaaatcataacaacttgggttcccctcctatcacactgggaacttgaggaagatgtgtgatgtgtttacagcaggggtccccagcccccagtccatggactgttaggaactgggccaggcagygggaggcacatggtgggcaagcaagtgaagcttcatctgtatgtacagtcactccccatcactcatattaccacttgagctttacctcctgtcagatcagcagtggcattagattcttatgggatcatgaaccctattgtgaactgcacacgtgagggatctaggttgcatgctccttataagaatctaatgcctgatgatctgtcactgtctcccatcacccccagatgggaccatctagttgcaggaaaacaagctcagggctcccactggttctacattat

SEQ ID NO: 603667 - DNA, 507 bp, Homo sapiens
acatgcaatgtgcttgaatcatccccaaaccatccctccacccttgtccatggaaaaattgtcttccacaaaaccagttcctggtgccaaaaaggttggggacctccaagttacaggatacaactgtttttattatcatagcagacacttactactgtttttcatcctgctttatatatttttattaatttaatcctcacgacagtgctatagggtggatactccccactttatagatgaagacactgagctactaaacgccaggctggctctggggtcaactctcttaaccactctaccagcctgtctctcaaaatgaaaagcaattcatttgttttattcccctttgtttttatactagaaaaatgaaatgcaatatctccttccaaaccttctggaaaatttggatattaaatcttctcaactcaaggaaagggaaactagtttcactttggggaagatttttgggtctaatggkctatcaactccagtgtgagagtactggaa

SEQ ID NO: 603668 - DNA, 620 bp, Homo sapiens
aaaatttttaataaagagttttaaaaagtgggtatattttgcactttctactttctgcagcttaagttgtatgagctgagtagaagtagattctgggggttaccatacttaaccaattacccaaggacawtaactggcacacctgttcacatttacccttttatggcttgaactcagagccaataaaattacagtttacccagttcattttcataatgcatcgattgcttttaataatacattttcttccaagtgtctgagtggactggggataatggtcacttcagtgtcagagtccacaacttaaaggaaaagccaatccgattctcttttacttaagaggcctgacccctaggagatggtggcctttgtgcctggcctgtttgctttctggttttagtgcaggtttgctagagtgcttactgctctgtgtaagcacggtagcccctcggccctagcagagcattgaggagaaatgtggtggttctgtgcactcccagagcagtgtctcaggtcattaagtggtcactgaggagggctggcttgggtcacttttacgatataaagtagctgtgacctggagcctgtgaatacaggagttttccaaagtgacgtggaca

SEQ ID NO: 603669 - DNA, 542 bp, Homo sapiens
gttgcagcattttggtttatctgtcctgttrtaaaccgtggtaatgtcttctcatgatcttctggaaacagttctgaggtcacatcttctttttggaggtgctctggtagagggactgagccccagcctaggatttggctgctccatgtcctggtcctgccccgcttactgtggagcttcacgttgatggggaagttgctttctttcaatgggccatagtctcttaatctggaaaatgaagatcacaacatctgggataagagttgtattagcttcttgttgctgctctaacaaattaacatgtactggatgggttggagcaacataacttgattctctcatggttccagaggccagatgtctgaatgcagttagtttcaccggccaaaatcaaggtgttggcagaccccccaactccaccctctgcccctggaagtcctagagaagaatccacccctgcctttcccagctcctggaagctgccagcattccttggcttgtggcttcatcccttttctctctgcctccatggtcgcattgcc

SEQ ID NO: 603670 - DNA, 566 bp, Homo sapiens
ggttctttagtccattagtaaagatgggcaaccatcaccactatctaattccagaacattcatcaccaaagaaaaccagtgttcttcagtcaccctccattcctctctctccccggtacaaatctatttttgtccttatggatttgcctataatgggcaattcatataaatggaataatataatakgtattgagttctttcacttgccataatgttttcagggttcatccatcttgcagcatgaattatcactttatttcttttttactgctgaaccatatttcattgtgtagatgtgccacattttgttatcccattatcagttgatggacatttggaaacatatttggctattaggaataatgttgctatgaacgtttgtgtacaagtttttatgtggctgtaggttttccattctcgtgggaacacacttaggagtggaatcattaggtcatatggtaactctgtatttaaccttttgaagagctacctgattgttttgcaaagtggctgcaccatgtaatattcccaccagcagtgtatgagggttccaatttccttgcacg

SEQ ID NO: 603671 - DNA, 624 bp, Homo sapiens
ggttttacagctttagctcttatgtttgggtctttaatccattttgagttaatttttgtatatggtgtgagataaaggtctcctttattcttttgctgtgactgtcatcatcctagtgccattctttgaaaagactattttttcccattaaattgtcttggcactcttgttggtttttttctggactcttgattccatttcagtgatctatgtgtctgtctttatgccagtactactctgcctcgattaccayagttttgtagttaagttttgaaatcagaaagtttgagtcctccaacttttatactgctttattctgaatctcttgcacttccatgtgcattttaggatcagcttatcaatttctgcaaaaaaaaaaaaagcagttgggattttgatagtgataaaaagacttattttaaatgaagaataatgcagagatcatgacttgatcactgccattacatttatcataaacaataagaaagcagaataattgtggagtgtgaatgtagtcagttggtgagtttgagtgaagtgagttggggagtgaattataaagcatgcttacaatcagggaggtctgggctcctccagggtgctccaattactggaatgatttgg

SEQ ID NO: 603672 - DNA, 541 bp, Homo sapiens
acctttgatgggtgcacttgcctcactgcctccaatttcctgacacagaatctgaaaagcaaataatctgagtgattttgagatcccacagctggcttmtagcacagacatcatgctattttcctttcgctgatgtttcagatttctgtattttaaggactggcaaaaacttttataaaggcgaatggctaggaggaatatagcaaatgattgccaatttttttgttttagcaagtaaatatattaagaagccataaccatgatctgatgtcagcacttcttataagaaaaggacacttatgactattttaaagtcttttgaatagcctaaatttagctccatgcactactttctatattttcctaccttctgttattttaagacaagatgggataaacattgccaaaggccactctttgtcctcaggatgatgtttggctactgctgagctatacttataattcaagaaggaggagcatttctctaatgatagtgatgttgagcataaaaaatatacctgttggccatttgcgtatcttc

SEQ ID NO: 603673 - DNA, 532 bp, Homo sapiens
tgggtatagatccccaggaaatgaaatccatataccaaatatctgcactctcatgcttattataacattattcaaaatagccaaggtataccctgagtcaacctaagtatccgtaaatggaagaatggattgaaaaatgtatatatrcacaatggaaagttattctgtcataaaaataatgaaattctgtcatttgtgatgacatgtatgaacctggaagacatgatgttaagtgaaataaataagacagaaagtcaaatactgcataatctcacttatatttgaaatctaaaaaaagaaagatctcatagaaatagacaatagaacagtgtttaccagagactggggagagaggaggaaggacataatgatggggggactggtcaacaggtacaaagttacatttagataaaaggaataagttctggtgtcttattgcacagcagtattactataggtaataatgtgtatttcaaactagctagaagagaggattgtgaatgttctcattacaaagaaatgataaatgttt

SEQ ID NO: 603674 - DNA, 532 bp, Homo sapiens
tgggtatagatccccaggaaatgaaatccatataccaaatatctgcactctcatgcttattataacattattcaaaatagccaaggtataccctgagtcaacctaagtatccgtaaatggaagaatggattgaaaaatgtatatatacacaatggaaagttattctgtcataaaaataatgaaattctgtcatttgtgatgacatgtatgaacctggaagacatgatgttaagtgaaataaataagacagaaagtcaaatactgcataatctcacttatatttgaaatctaaaaaaagaaagatctcatagaaatagacaatagaacagtgtttaccagagactggggagagaggaggaaggacataatgatggggggactggtcaacaggtacaaagttacatttagataaaaggaataagttctggtgtcttattgcacagcagtattactataggtaataatgtgtatttcaaamtagctagaagagaggattgtgaatgttctcattacaaagaaatgataaatgttt

SEQ ID NO: 603675 - DNA, 623 bp, Homo sapiens
cttgagctgtgaattacaatggcaggttcaaaaggccttcagccaacttgagttttgcagtcaaattagatccaattagaagtcagcctgtagaatgtgagccattactaaatttttaaaaatgagctttgccactttctggactgtggctgtagaaatatctggagttttaatgatcttctctgtctattaaaggatctgatagacatgaagttttataaggtaaggacccaaaatggatcaggtttttaatgccagaattccattaggcctgcaayaaatgatagagtcaatctatttagcagacatattttttaggtggtgaaaactaagtaaagtaataagaccttttaaatttaatgtttattccagaggctgatgattcaaaagaaaatctttcttagtatgatggtaatttgtttttctgctgtatttttcttcagagacctggttacttttctctcttccctgagggcaatagtgcactttttgctcttatattatgttgctttatgggaaataggtgggaagcccttgctggcactttttctagactgaattctctttaattctgttaccagggcctgggggatgaagcgaatccctcagacagcccttcacat

SEQ ID NO: 603676 - DNA, 426 bp, Homo sapiens
gatttttgtgtacggtgtaagatgacagtccaattttattcctttgcatttggaaatccakttttcccagcattttttattgaagggattgtcctttccccattgtgttcttttggtacccttgtcaaaaattagttgactatatgtttggattcatttcttgaggctctctatacactttctctgttctatgggactgcttttatgtcagtatcatactgttttgatcacaatagttttgtaatatgatcttaaatcaggaagtataatgtccacaattttgttttttctttttcagaattgttttgactattcagggtattttgtgtttccatatgaattataggattgtttttctgtttctgtgaagaatgccattgggattttgatagggattgtgttgaatatgtattttgttctgggtag

SEQ ID NO: 603677 - DNA, 565 bp, Homo sapiens
agccttgtgctggaagtctttggtgtcaggctctgtccttctgataaccatcctgcatgtgtagcccctctttctcctcctctttgtgctctcagcaggcactgagttgaagcaactttaaggctgattccaatgttgctcagagagctcagattcttgccaatcacacaggtgttgagttttttgagaccctcttaccctgggcagggtccattccatcagcttcctgagatgggcttgcaggaggagaaggggaaatctttggttttccttagtgtggtagcatcttcctttagataagggtgctttgcttatagccataagatcaggcacacatgcctttaggtttattggagaatatggaataaaattttaaacctcagagatcaacagtttagaggcgttgaagccaaaggtatttaatggctyatcaatattctttaaacaaaatcttagattgggtctttctatattgctcaggctggtctctaactcctgagctcaagtgatccttgcacctcagcctcctgagtagctgagaccataggtgtgcaccattgtacct

SEQ ID NO: 603678 - DNA, 648 bp, Homo sapiens
ttcatcacaaggttccacttaagaaaccaaattgcagtcttagtggcatagtggtttggtgattttcatccaataccaaatgtaagggctggagatgagtctggctgacacagtcactgtttagaagctggagtgaaaccttggaatttcatctggaaaaagttgtacttctccaggaaacagagtgggttttggtacacagagaccctaaaaactgaaatgaaatggggctcacttccttgtgactctagcccccatcatatgtcccgcagatgtgagaccaagtacttgaaaatatttgaagtcaatggattatttacaacaggaaagcacagattttacccaagccagaccttaagaatttcagtccatctttcccagttacctctccatgaagtcggtcagttgggctttcaaatgggcagcaatttaagactgttcgtgaatcatgacatgaaacaaacatttagaagataggctttgggtagggagaggtggaaaagtacagatactttaccttgtsaagaattaaattgttattcattttccttcttttattcatcaggacattgggctcaagggacttgcaattgtaaagagtaattatgatggtagctcatatttgctgaacatttttaagtgccagga

SEQ ID NO: 603679 - DNA, 566 bp, Homo sapiens
ctggcccctgctctctcagatctcacaacaaagtgagggtgacagatattaggcaaataatcacatgaataagtgaccatctgcacactgatagaaagagaagagggtctccagggtgtgcatgctgtgtgcatgtcagagcaggctttcttctgaggaagagactcctgagctaagatatgaagagtgagagtctgttgggtgatggttgggaggaggttttggatgtgcttttggtggagcaggtccctgttcctgatagagggaatgctgtgcgcagaggccacatgaagggattagcatggtgcatgggaagaaatacacctgggccagagaggctgggtttctgagtgtgagaaggtgagtggaaccacagggatcagcggggtagccagagcccagcgataggcttggatgaaagatttagtctttatctttagggccactgttggttctacactgggaaatgatacgattaagtttgcattttaaaaagatcactccwgtttcagtgaagagaacagattttcaaaaggccagagtagattcattcaatcattcattca

SEQ ID NO: 603680 - DNA, 584 bp, Homo sapiens
tcatcaacttgcagcttaagttccaacatatgaattttggaaggacatatacatttaagccatagtaacatccaaattttaccaacattctgttaatgcatgttaacatgcataattcagccaatttcaggatgagattctgcactgggttttcagcaatctcagctctgcagctgcagaggttaagggtatttttcaggacacaaaagaagctttcaggtcatttatgtggytcttgagctagcaatttgaatttctaagatgcatcattctctttcgccactttgtccagcaacattaggagtaaacagccaactcattatattaataagatatgcaaaaatgttcagaagtattacatacacagttacccagctccttgttttttataagtggtcgattaggagtattcaatagaggtatttagtgtatctctattgacagatcacatcgtagactatcagtgttctccttagtactgaaaatagagtcattactgtctatacatctaatcagtatattcattttctaggtggtagaaatttgatctccactgtcagtacatctgagtaatattctgttat

SEQ ID NO: 603681 - DNA, 584 bp, Homo sapiens
tcatcaacttgcagcttaagttccaacatatgaattttggaaggacatatacatttaagccatagtaacatccaaattttaccaacattctgttaatgcatgttaacatgcataattcagccaatttcaggatgagattctgcactgggttttcagcaatctcagctctgcagctgcagaggttaagggtatttttcaggacacaaaagaagctttcaggtcatttatgtggctcttgagctagcaatttgaatttctaagatgcatcattctctttcgccactttgtccagcaacattaggagyaaacagccaactcattatattaataagatatgcaaaaatgttcagaagtattacatacacagttacccagctccttgttttttataagtggtcgattaggagtattcaatagaggtatttagtgtatctctattgacagatcacatcgtagactatcagtgttctccttagtactgaaaatagagtcattactgtctatacatctaatcagtatattcattttctaggtggtagaaatttgatctccactgtcagtacatctgagtaatattctgttat

SEQ ID NO: 603682 - DNA, 513 bp, Homo sapiens
agtgctgggattacaggcgtgagccactgcacccggcctactgttccaacttttaagtgtgtcttcctctccttcagattcaggccctttggccaaggatagtgacaactgattaaggcataacaggcctctgtcaagctgctaatcaagttatggggcagtagggaccaacatgcatgatgccagcagcagcccaggaatctacccacaggttaacctcagactcttaggaagacgctggggcgcaggataatacaaggaagagggaaaggatagtgagaaggacctatgtcactccttatgtaattttccctagtgttgtccaaaaagagtgtagacagggtttgtaaaaatatgcacctgaaaaaccatgagtgcctttatctgttgtttaaaatttactttcaatttttttggtaacaactttattgacatgtaattcctatactccacartttactcactgaaagtatgcaattagatggttttagaatattcattcacagagttgtt

SEQ ID NO: 603683 - DNA, 571 bp, Homo sapiens
tgaagagtagcctgacaatattttcagagctactgatgggttgatgtaacccaagattgcctgtggtagagaatactgcagactagggtttggccaattttttttcagtcaggggccaggtggctaggacagagttttggagcagatgagggttttgacgccccctctcttccgcccttccatgactgagtgtctcaacctggaggtgcgggtggggctgtgtagaggctccctgaggaacgcaggaggttgttgagctgttgattggcctgaggtggcttgaaggatggaaatttacaagtcggccaagagccttctctctgccaaggactgattcagagttcagggattaagcctctggcatggggattaaattgggatctcacatgcacagatcccacgggcaccagatgctgggctgggtctggcacacgcactgttggctctgagaagctcctcaaccccttgtgggcatcaaagtaaagaaagaagtgagtggtcccccttttctgcrtttagccttgatctgagatgagaacattcattggaaacaaccaaggagcatgaagga

SEQ ID NO: 603684 - DNA, 517 bp, Homo sapiens
tggcttgtcgctgcactcatttggacataacccatgaaaaccatctttttttttttttaattatactttaagttttagggtacatgtgcacaacatgcaggtttgttacatatgtatacatgtgccatgttggtgtgctgcacccattaactcgtcatttaacattaggtatatctcctaatgctatccctacccccaccccacaacaggccctggtatgtgatgttccccttcctgtgtccatgtgttctcattgtttaattcccacctatgagtgaaaacatgcrgtgtttggaaaaccatctttaaagtctccactggttatgtcaaacatgttcaaaaatgactaaaagaagatagtgtatctgaagttggtattttgtcagcaggtccccatgctttacggatcgcatggtttttgtaagatggtggctgggcactggaggcagggctggatcccaggggtcaacaacgacgcagcagccttcctatggctgtataatgtgccatggccggg

SEQ ID NO: 603685 - DNA, 455 bp, Homo sapiens
tttttttcatatgaaatagaaaatcatttatttacagtatttgtttattttttctaggacaaagtgtaatttaatttaattgaatgccttttgtttatgttatgttattttatttattttattttaagttctggggatacatgtgcaggatgtgcaggtttgttacacaggtaaacgtgtgccatggtggtttgctgcacctatcaacccatcacctacgttttaagcccagcrtccataagctatttttcctaatgctctccctcccctgacccccctccccagcaggccccaatgtgtgttgttcccctccctgtgtccatgtattctcattgttcagctctcacttataagcgaaaacatgcagtgtttgattttctgttcctgtgttagtttgctgaggataatgacttccagctccatccatgtccctgcaaaggacatgatctcattct

SEQ ID NO: 603686 - DNA, 485 bp, Homo sapiens
ttatcacgtctaatccttaattttacaaatggggaaactgaggcacagtctttgtacaagctacttctctctcccttagtgagcttgtcaattctcttctatgaattgcttttagctaaaggattagcaagtaaaactatttttttttttttttttttttgctgtggctccagatggggtccaaagaggagtttcacagtctcttctgtctcttctctgggttttatggagacttactttaatttacccttatgtgttagcctcttacgaaactgcgtctaccttaaaagggcacaggaaagggtgaaaagtatttttaaaaggctaaataaccacatagaagtcatgtaagttgacgcawgagccggcgaatggaatgatgatgtggccttggaggcctgatgggtcctcccgttggcatggtcccttctgctactggcgctcctgtgcctgcaatccaaacatctggggcctggccaagggga

SEQ ID NO: 603687 - DNA, 544 bp, Homo sapiens
ataaccacatagaagtcatgtaagttgacgcatgagccggcgaatggaatgatgatgtggccttggaggcctgatgggtcctcccgttggcatggtcccttctgctactggcgctcctgtgcctgcaatccaaacatctggggcctggccaaggggataccgggggctcgaggaacatgaggagctaagaggtgacctggggtcccggacaggcaggcaatgaggatgtgtggagttgagtacacgtcagggtgggggactgactgcccataatacatttaaaatggtgcatttcaattggtgtttgccaattcctagttgtggctgtttgggggaggctcaagaaaatgttttcacagcccttggggatcctgtaatgagaatcatgtgtaaacggaaygttgacgaagccacacctggggcacattggacccacgacagacactgatgtgggaaaagagccggtaccttttgaacctgacccattttatgagaagatgcatatcaaaacaaacaaacaaagcaacaacaagaacactgtgga

SEQ ID NO: 603688 - DNA, 520 bp, Homo sapiens
ggtacacaccaccaggcccggctaatttttttaattttttttttttttgcagagatggggtctccatatgtggcccaggctggtcttcacctcctgggcttaagtgatcctcctgcctcagcttcccaaagtgctgggaytacaggtgtgagccacttcacctggccggcctatcgttattttaagtgtatgatgcaataacctagatttgcaaggggcggctgtaaactttcttgcaatttcagtctcccgtaatagaccagatactccgtgaaaacagccttgaataacagtgccctgggacccagaactaagaagtcctgtttttcctgtcagggaatgctttattcttgatgacatggagtctttaagcctagcctttattcaggcaggaaagcagatgcccagcagcctccataaagtcaacaaaaatgaacttcgtctgctattgttcattgctccagtccttcccagaacaatgctacatatttttttctctttaaaggaccaacttttctga

SEQ ID NO: 603689 - DNA, 636 bp, Homo sapiens
taaaaatagaattaccatttgacccatcaatcccattactcaatatatatgcccacaaaaaaataaaycattctacttaaaagacccatgtatttgtatgttcatccctgtgctattcacaatagtaaagacatggaaccaacctaggtgcccatcaatgggtggattggataaagaaaatgtgctacatatacaccacagaatactatgcaaccatcaaaaagaatgaaataatatctttgcagcaacatggatgcagctggaggcctttatcctaaatgaattaatgcaggaacagaaaaccatacattccatgttgtcactcataagtgggagctaaatatttggtacaaatggatataaagatgggaacaatagacactgacgactattaaaagggggaagaagtaagtgggcaaagatttaaaaactaactgttggtcagccatagtggctcatgcctgtagtaccagcactttgggaggccgaggcagatggatcactgaggtcaggagtttgagaccaccctggccaacatggcaaaaccccatctctactgaaaatacaaaaattagccggccatggtggtatgtgcctgtaatccacctactcaggaggctgaggcaagagaattgc

SEQ ID NO: 603690 - DNA, 532 bp, Homo sapiens
tttatctaataccatgcactctagtatatgagatccaaccaagagtttcagtccttgggttgcacatatgatgattttacagctcccaaaatagtgatcctaaggtcgtgagtaccatgagaactacttgaaagctcatttgtgtcattggagtgttatacctagtatgggttttgggggcaagtacttaggtgatatactgctaagtacaattcacccagggttggacgaagataagtttgtgataggagtagccaattatttcctttgcaggcccaccaggttccctcccactcttctttttttctgtgaaggtaagtttgtgtggcctaatccaattccaggtggtgttaataggagcatatactattacattcaaacaagtttacatgctacccactttgcattcagcacctagattaattaaattggtatgtgttgagggaagtcagggaccccgaatgragggaccagctgaagccatggcagaagaacataaattgtgaagatttcatggacatttattagttcc

SEQ ID NO: 603691 - DNA, 525 bp, Homo sapiens
agacaccacattctagaagaggttgytcatgtcttagagtattattctccctgagatataagaagcatgatgtcctaattagctctttgatagttttcccccccaggaatgccttaggcctgtgaattggtgaatggtgtacaacacatcactgactagaaattgactagcaactcaggaaagctaagctagtcattgtacttagcttttattttaccttttcaccccagcctccctgatattttgtaataacaacataggttcaggccaaaatatatatcttattttgggaacattaaaatcattaggaattgagtgaagaatagctattaagattgttaactggtaatttatctgtgtaaattcctactaaccctctgaaagtttgaaaaaatggggcacagtggagacataggcttgagtgcatatcttttagtagttgtggagtgagtcgcttcagatttagtgaaagattgcccatacagatagagctggagaagtcatgaaaacaaagaacatgttttt

SEQ ID NO: 603692 - DNA, 436 bp, Homo sapiens
cttctttatatatttggtagaattcagctgtgaatccatctggtcctgggattttgtttgttgaaagaccttatttctgatttaattttgctactcataattggtgtgttcagatttttcatttcttcctgactcaatcttggtaggttgtatgcttctagaaatgtatccatttccttgaggttttccagtttgttagtgtatagttgctcctaatagtctctgatgatcttttgtaattttgattttctttctttcttttcttttctattttcttttctttcccatttctgagtttgtttatttgggtcttttctcttcttttcttgattagtctagctagaggttagtcaattttgcttgtcttctgaaaaaccaactktttgcttcactgattctttgtattatatttttagtctctatttcatttaattcc

SEQ ID NO: 603693 - DNA, 548 bp, Homo sapiens
gaattcttaatagggacagcaccccagcctggacttcaaacctgaagaccaaccccattttgacataaacaatgtgttctgttgtttcatctccaagagcagcttctttggagggtaggttagggagatactcagatgctaaatcttctgcaaaataggctacctaaagcctctgaatcaccaggatctgaataaagcagatgtttaacctggttggggggacatattttcaagaactggatgtattcaagtaaaagcttgacacctagtaaggaggctataggattcttgtctgaagaggtgatccagcaagatgacctcaaaattctaagtaccctgaawgtaagtacctgagagactaagccctgtgtaaacctagggaacagcctgcaaaagaaaaatgttacacaggtcccttgaggattaacaacagttgaataacaggatttctttttccagtttctttatttctaggcctgtgcccagttcttactaactgaaggcaaatttttcaacctctctgaatggcagtgtcctttctctgtaga

SEQ ID NO: 603694 - DNA, 548 bp, Homo sapiens
gaattcttaatagggacagcaccccagcctggacttcaaacctgaagaccaaccccattttgacataaacaatgtgttctgttgtttcatctccaagagcagcttctttggagggtaggttagggagatactcagatgctaaatcttctgcaaaataggctacctaaagcctctgaatcaccaggatctgaataaagcagatgtttaacctggttggggggacatattttcaagaactggatgtattcaagtaaaagcttgacacctagtaaggaggctataggattcttgtctgaagaggtgatccagcaagatgacctcaaaattctaagtaccctgaaagtaagtacctgagagactaagccctgtgtaaacctagggaacagcctgcaaaagaaaaatgttacacaggycccttgaggattaacaacagttgaataacaggatttctttttccagtttctttatttctaggcctgtgcccagttcttactaactgaaggcaaatttttcaacctctctgaatggcagtgtcctttctctgtaga

SEQ ID NO: 603695 - DNA, 415 bp, Homo sapiens
atttataatgagcagttggtaatgagttgccctatgtgcttgtcgcaagcagtcacagagatgagccctattacttgatattcaggaacaaaggtacctgaacattctgataattatctcagcatacttgaggtttccttttttaagtgttcgaggttataacaagagacagccaaggacctacaagacagttgacttgattttgcacagtgtaacagcgcagttgcattctggccactttgaccttatagctcccaaatgatgagtttgtcatctttatgaactcatgacaggataataagcttgaagacctgctgtagttagatatgggctttaatccttcccakgcaccagtcagctgaacaaaagcataagccaaacatcctgtttaaactgtagaataaccagatattcc

SEQ ID NO: 603696 - DNA, 563 bp, Homo sapiens
tttgttactgctattgttcccacactcacaatatggtatggatccccatcttgcactctcatttcttcaacccacattcaatctcccattttgaccttgcctctggtcaggtaagaagtagcagacatatcttacattttggcactaattttgcaggggaagagagggagcagagaggtattttgctgaatctcacttgttgtgtgacccccagaagactccctgagatgcctaagtttctttcatttgatctttgaacaataccttaaaaagtaatattattcctttttttctttttctttctctttttttttttttggacagagtctcactcttgttgcccaagctggagtgcagtggcgcgatctcagctcactgcaacctccgcctcctggttcaagggattctcctgcctcggcctccagagtagctgggactacagrtgtgtgccaccacgcccagctaactttttgtatttttagtagagatggggtttcgccatgttggccaggctggtctcgaactcctgacctctggtgatcagcccgccccggcctcccaaa

SEQ ID NO: 603697 - DNA, 593 bp, Homo sapiens
cagcggccagtgcctgcggagtgtctccccttctcctgctccctctctatctttctcacccctgtcctctcacggctacaggttcttgaccacttgtctgggcactgctcctgtctcctggagctcaggctggatggagtctctcccctagttcaggtaagcgtcccctcagccccctcccgccagcgtcccccagctccttcacttgcctgagcccgtccgtggacactcccctgcgggtccgaccaggctgacccttgagcaccctgggtcagcaggaaggaaagaccccgagagcgcaggaccaccaagagaggccgggccacctcctccgccgtccgctgacttctaggggctgggccggcgcacagcaagggggttggaggtggggtcgccctctcccacgcggctgggtttccaggcggtgtcctgggccgagccgcttggagatcctagatcagcatgtgggtgggaaagggcgccccgtcctgggcccccccgcccctgcgcgcagagcagagacgcgcagacccgctcccactcckcttggctcccttggagcagccccggcggcggcagcgatgggctgggag

SEQ ID NO: 603698 - DNA, 562 bp, Homo sapiens
gccgggttagagcaagggactggggcatcctggtcatagtcagggccttggaccccaaattccagagaaacaaatcagtagattgaacaggcaacaaagctgagctgcagtccagaaagaaaggccagggcaggagcctgaaacatgggaaccctgtgggggcgtccggcgacaccttgctccaggtcccagcccacaccagtggaatccattttggagaggcttggccgggcgagtgcaaaaggccccattccagacactgttcccagccgctctggggtctgcagggcctggcttgtctccggtccgggtctcctaacccaggagggcactgacataggggcagcaggcaggaygggagggcagggcatgggcagccgctcagactttgcctcagcattcctcagccccccgggtccccggcttcagcttctccagggtcctgctcacggtggacaggctgctgcgggctcctgggggagagaacagggacgaggactgcctccgtagacaggtccccatggagttgtcagggtcagaggaactcagagggacccaaggc

SEQ ID NO: 603699 - DNA, 598 bp, Homo sapiens
taatatgtccagaacaatttggtgggagaaaaggaaacttggagaacttgcgttatctgatttacttatgataaggctacagtaaataaggccttttttaaaatcagcataaggatagacattcagatcaatacaaaagaaaaaataagaagttgagaagtagacccatggacatattttcaactatttttaaccatgttattgatttaatagtgaaagaattattttttcaccaaatagcaatgaaaccactctaattcaaaatagaaaaataaataatcctcaacaattaccactcagcacttacaaaatttaactatgattgtgtcatcatttcaaaagtataaaattcacttttaaaaaacacaagaaatatttgtgaccttggagtaggaaaaaaaaaattagatagttccccaaatgtacaactttcgaaaaggcattctaaagactgggagtcaaacagaatgtataataaacycttataaaacaataataagacagcaactctttcttcagaaagtcaataataagactttctgaagacagagaaaaaaaacttgagtgtatattatatgagaagatatacaaatgtcca

SEQ ID NO: 603700 - DNA, 594 bp, Homo sapiens
atatatttttgtttgcactgctattttgcagagtgcttccagaagctgtgaagtctgataattattgctataccatttgactttgataaaaataattctagaaagcaaaggattttgtgatcatatatcattttagtctaaaagaaatattctgtcctctaagagaaagataattaaaatgaaaatctttaagtaccccagaaaaactgttaggttataaaaacttttcttcaatctgtttaagttttatgtgcacactgccatttagggagaaaacaaattttcccccaaattattttgttttatttctcatttgtttatttgtttgatcctagtgaaatacttctacatatatttcatagtgcttgtctaaagatcttatatgcatgtaagattaagttagggcctggaatrcagactgggttaatttttgttgcaatgaaacacatattttctaaaatctatgtttccattaattagaatataacatatatacagcatatgactatttaccaagcatttttaaaaactgtgactcaattatcctcaaaacatctcaagaaaataagtttagaataataaaaatattaacct

SEQ ID NO: 603701 - DNA, 444 bp, Homo sapiens
atattttcttatcttctgttttctttatttctagaagagttcttggcacatactaggcattcaataaatatatgtttaaaaacaagtgaataaaaagtaaataaatgtgcctccattcctcttgcaatggaactaaaattmaattagtatgtcagagtaacaaaattggcaaattaggcacaataaagagaatataaggagtacttatagtatggaaggtgcagatttaaagatcaatatcattagacaaacttggtgaagattaaactggtaggaaaaatgttcctctgtcatcagcaagcttttattcaaatgttattttctcttacagtttcaagtagttgtatgtgtcatttctatacacaatgatgtccatagacagagaaaggacccctggatgtcttgtgtttctttcttggggataaacaatccccctttagatgt

SEQ ID NO: 603702 - DNA, 385 bp, Homo sapiens
ttcttagcttgctctataggttcatggcaatcccaaatatgccagaaagttattgtgtagatattaacaaattcattctaaatttatatagaaaggtcacccaacacaatactaaagcaacagagcagagttggtagactaactcatttcaagacttactacaaagttataagaatcaagacagcacaatattgaggaaagaatgaggacacagatcaatggagtaggataaagagaacagacatagactcacgcaaatataakcaaatgaactgtgacaaagatccacagccaattcaatggagaaaggatagtgtattcaacaagtcatgctgaaacaaatagatgtccatatccaaaaaatgaggcaagacacacagcatac

SEQ ID NO: 603703 - DNA, 613 bp, Homo sapiens
ggaccttatttgggaacacagttgttccaggtacatttagttaatgtgaggtcaaactgcagtagggtgggtcctactcaaatatgactcatggcctcataaaagagcgaaatttgaacacagataaagacacgaggcaaacagcatgtgaaggtgaagatagagatttgggtgaaacttccataagccaasgaatgccaaaggttaccagcaaaccaccagaatccctcagagagaaccaaccttgccaaccttttaatcttggactatagcccccagaagggtgaggcacaaactttctgttatttatgccaccctgtgttgtgctactttgttaggacatccataggaactaatacagtgcctattaccaacgcattgtcttctgtagagctggattagccttatttgaaattcccatactttgctaattcccatactttgctaagtttacctaatccattcttcaacaatttaaattactgctatactgtgattgttttcttaacatttttgaccttatctttgtaaatagttggtttctatgatataatcatctctgacctctactacaaatttatttttcttataacttaattattaggacatagtt

SEQ ID NO: 603704 - DNA, 531 bp, Homo sapiens
  misc_feature 329, 335, 400: n = A,T,C or G
tttatttttaaaaaaaactgaaaagaagataatagtattttttcttgctgttattaacctaaatgttaacatgggagtataattgtatataaaaatatcttaaaagctggattatttgatttaaacaacatttgcattaatttaaaaattacaagaaaatcaattctgtattatacaaagcaatatttttaaaagatgttaatttatatcattgattataaagatcaaataaayttaagttacatttaagcattattctttgccctaggtttctattctaatcaaaatacagtagattatcatgtttgcagattatttgagaattcacntgctgnctataattgttaattcaaaataaatgctcatgagcttttgtgctcatttgcagtcagggtggtanagtatttgagtcacatgatgcacactttcctagccgagacagactaagaccacacgctaccttacttttttttcagctgttatattgaaaaaaagtcttatttgaaatctattcaaccttttaggtttttt

SEQ ID NO: 603705 - DNA, 595 bp, Homo sapiens
tggttaattaaaaaatagaaatatattaatggattggtgtcattaaataaaggttcacttttagctaacaaaacaaattattttattaaaactcaagccattattgcaacatccatgaaaccaaacagaacatagaatgttagaaatctagattaagaaagaggaacaaaaaaaaataatttttgataaagtgttccttgagttcagtttgctctgaaattgtatttaacataactcttgcaccaacaggaagggcacatgatgtcaaggtctatgttctgactagtaactcacacctattttgtgaattagaatatataaacacaatattatggattataaagttagcatcctaatattattaattgtataaagtctttacttaaaagaygttcacattaccgtcactattgtatgacaaattctatgttctcagagtatctagctattcaccaagcccattttgtcttcgtcatggagagttggacttcattttccagcctcctttgtagttagttttggccaaatgactgaatcctccctaatgggaaatgagcagaagtaatgtgtactgaaactacttatgcttttccta

SEQ ID NO: 603706 - DNA, 578 bp, Homo sapiens
attttattttctgacttagcaaaatggctgcacctttctaatgaaaaagtggataaatttgctaacagtcatctgggtctctaacaaaaatatggtaaatattttcatataattttgactttgacattactgtagaattttggagtgtctacggatttaaaagaaaattcttattgttgagaaaaatctctccattttcatagatcatagaattttcatcctggaatgatcccagaaattatttaggtgcataattttagatatgagagcatagaaactagaagaggttaagtaatatatttgaagtaatacaaacaagataatgatggatagtattggggactgattttctgyctgcaggtctcatcaaatgccttttctatagtgcaacaatattttcccaaattgttcattaggaagtgccaaaagagagtggaaaatgagaattatatctaatagagtaaattgaactgaggtcaagttaaaaatcagtcttgatggaggaattagtttgcttgatttgcaggattctatattaagctgtccatttcttagtgatataatgatgaacggaaaca

SEQ ID NO: 603707 - DNA, 578 bp, Homo sapiens
attttattttctgacttagcaaaatggctgcacctttctaatgaaaaagtggataaatttgctaacagtcatctgggtctctaacaaaaatatggtaaatattttcatataattttgactttgacattactgtagaattttggagtgtctacggatttaaaagaaaattcttattgttgagaaaaatctctccattttcatagatcatagaattttcatcctggaatgatcccagaaattatttaggtgcataattttagatatgagagcatagaaactagaagaggttaagtaatatatttgaagtaatacaaacaagataatgatggatagtattggggactgattttctgcctgcaggtctcatcaaatgccttttctatagtgcaacaatattttcccaaattgttcattaggaagtgccaaaagagagtggaaartgagaattatatctaatagagtaaattgaactgaggtcaagttaaaaatcagtcttgatggaggaattagtttgcttgatttgcaggattctatattaagctgtccatttcttagtgatataatgatgaacggaaaca

SEQ ID NO: 603708 - DNA, 578 bp, Homo sapiens
tttagtggtgatgaactccctcagtttttactgacctgggaaaatgtttttcttttcagtattaaaggacakatttggtggttatagtattcttggcagcagttttttctttatgtgttttaaatatatcaacccattctttctcggtccacatagtttctgtgagaaatcctctgacagttttgtgagagttcccatgaatgtgatcacttctacctctgctttcaaaattctctccatctttgattttggtcaatgtaattataatgtgccttgatgtagatatccatatgttttactgatttggggtctttcagattcatgagtctgaatgttcatttctctctcaagatgtgggaagttttctgcattatgtgtttaaataatatttcttctgctttgtctctcttctctttttagactcctataatgtatgccttgttgcaattggttgtgtcacataagtgccataagctttcttcacaatttttcagctttttttctttttcttctctgacagtctaaattcaattgatctgtctttgaattcactgattctttcttcttttgatcaagtt

SEQ ID NO: 603709 - DNA, 578 bp, Homo sapiens
tttagtggtgatgaactccctcagtttttactgacctgggaaaatgtttttcttttcagtattaaaggacagatttggtggttatagtattcttggcagmagttttttctttatgtgttttaaatatatcaacccattctttctcggtccacatagtttctgtgagaaatcctctgacagttttgtgagagttcccatgaatgtgatcacttctacctctgctttcaaaattctctccatctttgattttggtcaatgtaattataatgtgccttgatgtagatatccatatgttttactgatttggggtctttcagattcatgagtctgaatgttcatttctctctcaagatgtgggaagttttctgcattatgtgtttaaataatatttcttctgctttgtctctcttctctttttagactcctataatgtatgccttgttgcaattggttgtgtcacataagtgccataagctttcttcacaatttttcagctttttttctttttcttctctgacagtctaaattcaattgatctgtctttgaattcactgattctttcttcttttgatcaagtt

SEQ ID NO: 603710 - DNA, 621 bp, Homo sapiens
ggctagtaacctgtcccagcaattctccagtttagttgtctttccttttatctggtctctgcacttcacattcctacttcagaatgctcttcacaaagaaggccaaatgatatctaagtgtgtgtgtgtttgtatgtgtgtgcacacatatgcaggtgtgtgtgtgtgtgtgtgtgtcatattcagagtattatactcctctggttaccagaattcaaatttcacaagaatgaaatccaatcttctagaataaacagaaggctctgtgtggtttgatctttggctactattttaatctttcatgcataaatcacactgttttttaattcttcatataactctctgctttgaatatctctctccaaatggctagatcctctgtacccttcaaattttaacggtaaaataatctccttaggattttttcttatcatccaaactaaagagatgtttctcggttgttctatatcaattatttgtcatggcaaatgtcataattaaaacttatttttaattgtttgtacttttttccctaaaagcataaatagtrtatggtttggtttttggtaaatacatagagtgaaatatttcacatgtaatagttttttaataaacatttat

SEQ ID NO: 603711 - DNA, 626 bp, Homo sapiens
tagtaattttataataaagaaagacaaatttgaggtattttggccacaagtgttctcctgaagaatttcttctaattctccctttattttatatatatctaaaaattggcacccacaaaacatggaagcaacactctagaattaatcatagaaacattttatttcaagaaagtaagaactccaaagtgaacataacacttcaactccaactatctgtcaacaaaaagagtcaaactctgcaaaattttttaagagttttattctgagccaaatatgagtgaccatggcccatgacacaaccctcaggaggtcctgaaaacatgcacccaaattggtcggsgtacagcttggttttatatattttagagagccatgcgacatcaatcaaatacatttaataatacatggatttgattcagaaaggtgggacaactcaaagcgcagggggtggggggacttccaggctataggtaaatttaaacattttctggtttatagttggttgagtttatctgaagacctgggatagctagaaaggaaatgttcaggttaagataaaagattgtagagaccaatgatcttttgaggtattatagtggctgcccttagacacaatagatgacaag

SEQ ID NO: 603712 - DNA, 606 bp, Homo sapiens
ggctgaccaattacttctggctctcarttgtgcatttctactctctcttcccttagtgtactcttttttttttttattgagcctggtagattcatgtccaaaatgctccaaacatggatgggattatataaagtttgcgtcagccctctggagaccaactataaatctattatgggcgaataaaaaatttcttcttgagtttttaacaagaaattttgttctaatataaaatatgctttcctataagaaatttctcctcctgagaaatttttattaaagcatctcgatgtggattgtttccaaacttggctaaacatcggaatattctgcgaacattttgttgtccacttactaatttttacctccaagtaattctattactattcttgttgagaataataagaaatcacgtggtgtaaaggagcagaatatacagcctggcctcagcagtgtttgaaaatggtaagtgggtcgggtgtggggtggctgactcctgtaatcccagtgtcggtataaaaatgctctagaaataaattctcagtgctgcaaagtgaaaccagcactcaggcaaaagttttctctcaaacgcaatttacttctgcagaa

SEQ ID NO: 603713 - DNA, 606 bp, Homo sapiens
ggctgaccaattacttctggctctcagttgtgcatttctactctctcttcccttagtgtactcttttttttttttattgagcctggtagattcatgtccaaaatgctccaaacatggatgggattatataaagtttgcgtcagccctctggagaccaactataaatctattatgggcgaatamaaaatttcttcttgagtttttaacaagaaattttgttctaatataaaatatgctttcctataagaaatttctcctcctgagaaatttttattaaagcatctcgatgtggattgtttccaaacttggctaaacatcggaatattctgcgaacattttgttgtccacttactaatttttacctccaagtaattctattactattcttgttgagaataataagaaatcacgtggtgtaaaggagcagaatatacagcctggcctcagcagtgtttgaaaatggtaagtgggtcgggtgtggggtggctgactcctgtaatcccagtgtcggtataaaaatgctctagaaataaattctcagtgctgcaaagtgaaaccagcactcaggcaaaagttttctctcaaacgcaatttacttctgcagaa

SEQ ID NO: 603714 - DNA, 608 bp, Homo sapiens
tatgaacatcagaagtgggtagaaacagtttcataggtaatgtgttattttcagggctattataaacatgtgttactatcagagctataaaaactgtttcagtggatttttyggcaaaccttgcaagccagaagagaataggatgacatagtcaaaatactgaaagaaaaaaagcctgtccactaagaatgatttatccacaaagctgtcattcagaaagggagaaataaagacttttctagaaaaacaaaagctgagagatttcatcacaactagacctgcctcagaagaaatactaaaatggaaactaaagttgaagtacttcaagtggaaattaaaggatgctaattagcaacatgaaaatatgacactgtaaaactccttggtaaagggaagtatagagttaaattcagaatgccataacactgtaatgtaatgatggtgcataaaatcatttttaactctaagagttaagagtattaaaaaaactatagttacagtaatttgttaattgatgcatgatataaaaagatataaattttaacatcaataacaaaatgtgtgagaggatagaggagttaaagtggagagcttctgtataagatcaa

SEQ ID NO: 603715 - DNA, 608 bp, Homo sapiens
tatgaacatcagaagtgggtagaaacagtttcataggtaatgtgttattttcagggctattataaacatgtgttactatcagagctataaaaactgtttcagtggatttttcggcaaaccttgcaagccagaagagaataggatgacatagtcaaaataytgaaagaaaaaaagcctgtccactaagaatgatttatccacaaagctgtcattcagaaagggagaaataaagacttttctagaaaaacaaaagctgagagatttcatcacaactagacctgcctcagaagaaatactaaaatggaaactaaagttgaagtacttcaagtggaaattaaaggatgctaattagcaacatgaaaatatgacactgtaaaactccttggtaaagggaagtatagagttaaattcagaatgccataacactgtaatgtaatgatggtgcataaaatcatttttaactctaagagttaagagtattaaaaaaactatagttacagtaatttgttaattgatgcatgatataaaaagatataaattttaacatcaataacaaaatgtgtgagaggatagaggagttaaagtggagagcttctgtataagatcaa

SEQ ID NO: 603716 - DNA, 592 bp, Homo sapiens
tggattggaagaattaacgttgttaacatgtccagtctacccaaataaatatacagattcaacacaactgcttcctactgctaggaggaatcccaatgacattcttcataaaagtagcaaaatggtcctaaaattcatatggaaacataaaagaccccctagaaacaattctttgggaaaaaaatattggagtcactatacctcctgatttaaaattatattaaaagcctacagtaattaaaacagtatgatgctggcttaaaacagacaaataatccagtagaacacaatagagagcccagtgataactccaaacacacagtcaactaatttttgacaagactgccaagacggcacaatgaggaaagagtagtctcttcaataaatsatgttgagaaaatcatattttcacatggaaaagaataaaactggacacatatcttattccatacacacacacacacaggaaaactcaaaatggatgaaagaccgaaatgtaagactagaaactataaaacttctagaagaaaacatagaagaaaagctcttgggaagtgatttttatatatatatgttatcactacaaatgctc

SEQ ID NO: 603717 - DNA, 590 bp, Homo sapiens
ggaatactggcggtagctggccacacagcttaaatactgtgtagactgtcactatatccaagcttgatcaaagcactgccatgattacaggaagcagagtagaacaacgaaatgtcataattgcactgaaaagcacagacaaatatggtaccagcctctgacagkggggaccagtggtaagtgtgaatgtgagatgtgtctacaatagcagaactagagtttataaaaaaagatctctgaaaatttagcactgctgaggacagtgatagaaagatagaacactatctagaagtcctcaaaggcaggttcagtacataagaggatactaatgccactcttatagtgaaagttcaggtcttgatgtgtgtgtgggtgtgtgtgtgtggtgtttggcttgattttatttcccttctcagatgaactattggccctgtagcatggttgccaggtgattgtagggttaattttgtgactgtgacacaataacttgttctgccagttactgccctctcaagaactctcactaactgtagcagttagcctagggatgcaccccagggattcaggtctctggcaccttaagtcaactc

SEQ ID NO: 603718 - DNA, 590 bp, Homo sapiens
ggaatactggcggtagctggccacacagcttaaatactgtgtagactgtcactatatccaagcttgatcaaagcactgccatgattacaggaagcagagtagaacaacgaaatgtcataattgcactgaaaagcacagacaaatatggtaccagcctctgacaggggggaccagtggtaagtgtgaatgtgagatgtgtctacaatagcagaactagartttataaaaaaagatctctgaaaatttagcactgctgaggacagtgatagaaagatagaacactatctagaagtcctcaaaggcaggttcagtacataagaggatactaatgccactcttatagtgaaagttcaggtcttgatgtgtgtgtgggtgtgtgtgtgtggtgtttggcttgattttatttcccttctcagatgaactattggccctgtagcatggttgccaggtgattgtagggttaattttgtgactgtgacacaataacttgttctgccagttactgccctctcaagaactctcactaactgtagcagttagcctagggatgcaccccagggattcaggtctctggcaccttaagtcaactc

SEQ ID NO: 603719 - DNA, 590 bp, Homo sapiens
ggaatactggcggtagctggccacacagcttaaatactgtgtagactgtcactatatccaagcttgatcaaagcactgccatgattacaggaagcagagtagaacaacgaaatgtcataattgcactgaaaagcacagacaaatatggtaccagcctctgacaggggggaccagtggtaagtgtgaatgtgagatgtgtctacaatagcagaactagagtttataaaaaaagatctctgaaaatttagcactgctgaggacagtgatagaaagatagaasactatctagaagtcctcaaaggcaggttcagtacataagaggatactaatgccactcttatagtgaaagttcaggtcttgatgtgtgtgtgggtgtgtgtgtgtggtgtttggcttgattttatttcccttctcagatgaactattggccctgtagcatggttgccaggtgattgtagggttaattttgtgactgtgacacaataacttgttctgccagttactgccctctcaagaactctcactaactgtagcagttagcctagggatgcaccccagggattcaggtctctggcaccttaagtcaactc

SEQ ID NO: 603720 - DNA, 576 bp, Homo sapiens
cttaccctgaatttttcaatatgattsgctctgagttcactgacaagaacccttattagaatgagccagaagcagatttgacagaagaggccaaagcaatgtgcccataaatgtagagagagaagtgatgaggctacaagtcaaggaatgcctatgaccatcagaagctagaagagacaaaggaggtatttgcaccaggacttcatgaagtgtagccttgcacaaactttgatttagaccttctggcctctataaccatgagagaatacattaccattatttaaacctacctagtttatgatactttgttacagcagccacaggaaactaatagagccaagaaacccaaattgtagctgccacaatgctgacaaggataactagaacacttcatggcagaatttagcctattagaaaaataaaatagattaaaaatgtttttatggaatagcaaatgtgtatggaacaattagcacgtgtctggcagtattgtaagtactcatgttacttcatcccttcatggcaaaatgacttgaagtatacaatcttcagtgcaaatgaaggaattgaggcaga

SEQ ID NO: 603721 - DNA, 576 bp, Homo sapiens
cttaccctgaatttttcaatatgattcgctctgagttcactgacaagaacccttattagaatgagccagaagcagatttgacagaagaggycaaagcaatgtgcccataaatgtagagagagaagtgatgaggctacaagtcaaggaatgcctatgaccatcagaagctagaagagacaaaggaggtatttgcaccaggacttcatgaagtgtagccttgcacaaactttgatttagaccttctggcctctataaccatgagagaatacattaccattatttaaacctacctagtttatgatactttgttacagcagccacaggaaactaatagagccaagaaacccaaattgtagctgccacaatgctgacaaggataactagaacacttcatggcagaatttagcctattagaaaaataaaatagattaaaaatgtttttatggaatagcaaatgtgtatggaacaattagcacgtgtctggcagtattgtaagtactcatgttacttcatcccttcatggcaaaatgacttgaagtatacaatcttcagtgcaaatgaaggaattgaggcaga

SEQ ID NO: 603722 - DNA, 336 bp, Homo sapiens
aatacctactaccgcaaaaacacacttaagtacatagcctacagaccctataaagcaactacacaatagaaaacacaaaacaatcaggtaacaattttataatagtattagaaacttacatatctacattaactttgaatgtaaatagtctaaatgcctcacttaaagggcacataatggcaagttgcattaaaaaaacacccatcaatctactatcttcaagagactcatctcacacttaaagacatccatacactcaaagtaagtggttggagaaagatctatgatctacatggaaaacaaaaatgarcaggggtcactgttcttgtatcacaa

SEQ ID NO: 603723 - DNA, 514 bp, Homo sapiens
acaaaaatgaacaggggtcactgttcttgtatcacaaaaacaccgattttagaccaacaacagtaagaaaggacaaagaagggtattaaacagtgatataggattcagttccacaagaagacttaactatcctaaatatgtatgcacccaaaatcggagcacacaaattcaaaaatcaagtacttctgacctataaaaagatgtagaaagccaaacaataatagaggggracttcaacatctcactgttagcattagacagatcatagaggcagaaaactgactaagaaatttggttattaaacttgacacgtgaccaattagacctagtagacatctacagaattctccagccatcagccacagaatatacattcgtcttatctgcacatggaacatattccaagattgaccacattcttggccataaagcaagtctccattaattaaaaaaatcaaaataataccagccatactcttagactaaagtggaataaaaatagaaatcaatagta

SEQ ID NO: 603724 - DNA, 460 bp, Homo sapiens
caacaaaaacaaaacttaaaaagtggggcctatttaaacttaaagcttctgcacagcaaaataaactataaacagagtaaagagacaacctacagcatggatgaaaaaatttgcaaactcttcatctgatgaaggtctagtatccagaatctataaggaccttaagaaggaactataagaaggcgtacaaggtgtcaacaaagatgttaaaaaatacttcacattattaatcatcagagaaacacaaatcaaaaccacacgatactacttcacaccagtcagaatgtctgtyattaaaaaggcagaaaacaacagatgttggcacttagaaacctaaagaagatttttttcttggttccttatattttgatatcttatatttaaacctttaatccatcttaggttaatttttgtacatggtgaaacataggagtccagtttcattcttctgaatatggct

SEQ ID NO: 603725 - DNA, 273 bp, Homo sapiens
ttctacgggagccaagatggccatggagtggagctgagcaacatcacccagcagcctgaggagcccctgtgcaggtgtgatgcagggyccaggggactgtcattggaaggagaagtggcttcccaggaaagaagctgagggagctaatcctgagcctgggaaccctgtaaaaaaattttaatttaaccttaccttgacaagaccgggcacggtggctcacacctgtaatcccagcactttgggaagccgaggcgggcagatcacttgaggcca

SEQ ID NO: 603726 - DNA, 666 bp, Homo sapiens
tgtgctgtgctgacttcttctagctgccgagggctctctgccagccaacaggctagaagaagaaacccgagtgtcagatcagatgggctcacagtaatcagagtggctgggtttggacggcaaagcaccaggcaaaatgtttcccatccctgccagagctgtccaattctagattacactgaaagtacatgtccagtacatgataatgtgcagtagagagaactgtaaaacctactcactcattttaaaactctccatttatatattttgggggagggatgtggaacctagtcaggtctgaactttctcacgttgctatgaattgagtgtatgagaggaagtgtgtattctttggctggagtcatagagagactgttcttagcatatgactcacctcattagttgtgctgaaatctgttgtcaggaatccacaagaagttcttcatatttattttgtgtttcggatagcagattctgttacgaaagaagtacccttcaccctacactttctctttggtttggtttttatttgcatcctgagcaaagggatttttgatcaatagacctcattcctttgttcctttgtgactttacagtgaatctctttatctggttttagacctcacttactagttcctttgtgasttatgatgaaatatatctgca

SEQ ID NO: 603727 - DNA, 476 bp, Homo sapiens
gggtctcactttgttgcccaggttggcaaagatttcctgattggcaattggttgaaagagttgttattatctaaaaacctggaatcaacagaaaggagtgtctgggttaagataagggcttgtaaagactagagttcttattatgtatatgaagtcttatgggtaaccactcccagaggcaataaatggcaaatgtttcctttagacatcctawaaaggttctagactctcagccaatctcttcaggatcagaaagtgacctggaaagagaagggaatcctctatagaaagtaaattttccccacaagagacaactttgtaggaccatttcaaaatatgttcaaggaatctttattttattttattttttttgagatggagtctcgctctgtcacccaggctggagtgcgatctcggctcattgcaagctccgcctcctgggttcacaccattctcctgcttcggcctcccaagta

SEQ ID NO: 603728 - DNA, 598 bp, Homo sapiens
gttattcctgttgcttttataattcacaaatgtcttggctgattttatatgtatatttaacctttcagatgcattatagtattttttgttttgatctcttcttccaaaaacaaagcatattgaccttttgatgtcatagcaatgtatttatagattaattttggggaaaatgattatctttgaaatggtgagttttgtttacctacactcataatgtcttttatgtccctctgttaatttttatcttctcattctatgtatttcttttgaaaacatgcacatatgaaataccacctgcagattacctccaggggcaactggagattcttaatctcacatctgtaggcagtcaaaagttgaaaycgtgaatcttatacttctatccagtccacaggtgaaactgtagcaggacgagccacagacaaaactcctcacacaccgagttaaagaaggaaggggttggccgggtgcagtggctcacacctataatcccagcactttgggaggctgcggcgggtgcatcacgaagtcaggagattgagaccatcctggctaatatggtgaaaccccatcttcactaaaaatacaaaaaaaaaaa

SEQ ID NO: 603729 - DNA, 598 bp, Homo sapiens
gttattcctgttgcttttataattcacaaatgtcttggctgattttatatgtatatttaacctttcagatgcattatagtattttttgttttgatctcttcttccaaaaacaaagcatattgaccttttgatgtcatagcaatgtatttatagattaattttggggaaaatgattatctttgaaatggtgagttttgtttacctacactcataatgtcttttatgtccctctgttaatttttatcttctcattctatgtatttcttttgaaaacatgcacatatgaaataccacctgcagattacctccaggggcaactggagattcttaatctcacatctgtaggcagtcaaaagttgaaatcgtgaatcttatacttctatccagtccacaggtgaaaytgtagcaggacgagccacagacaaaactcctcacacaccgagttaaagaaggaaggggttggccgggtgcagtggctcacacctataatcccagcactttgggaggctgcggcgggtgcatcacgaagtcaggagattgagaccatcctggctaatatggtgaaaccccatcttcactaaaaatacaaaaaaaaaaa

SEQ ID NO: 603730 - DNA, 612 bp, Homo sapiens
ggctgcgtgcagtggctcacgcctataatcccagcactttgggaggctggggtgggtggatcacctgagggaccagcctggccaacatggtgaaaccccgtctctactaaaaatagaaaaattagctgggcgtgatggcaggcgcctgtaatcctagctactcggaaggctgaggcaggagaatcgcttgaacccgggaggcagagtttgcagtgagccaagatcatgccattgcactccaggctgggcaacaagagttaaactctgcctcaaaaaaaaaaagaaaaaaaaaaaaagaaaaattatatttaatatcactatgattttttttccaaataaacttaaataatttacataaagaaaatgctcatcttttaagttcacagtttcatgaggtgtgacaaatatatatacctgtttcaatcttttgtcctatactatttgctttccagcttccaacattttttatcttgtctatccttcttatacttgattcctatccttgtggatttatgcacttctaaaattatcatttamtctgagtttactggggacaaagagaagatgaaagcagatgtgtttgctcaatccaccatctttacttgaaagttt

SEQ ID NO: 603731 - DNA, 456 bp, Homo sapiens
tctggtgatcctgatgagatggaagcttgagtgagatctgatgcttatgatttaaatggaacatttcttagaggtcatgagcatcttaggatcacaagattcaaattggactacagtgttttgaatatagtggayggaggaatgccttcaacgtggaggctatattaacacataagagtgcttctatgggaaagacctcttgtaaatctaataaatgtgggaaagcctgtaatgagtcagctactattgctcaagagctaactcaggtagggaggaaaacttttgaacgtcatgtatgtgggaaaatattcagtaagaagcataaagtcactgaacataagaaaatacactcaggaaagaaaccttataaatatagtgaatatgagaaagccttcattagccaatcatgtgttacaaaacatcagagaacacatacagaagagaaaccctatccat

SEQ ID NO: 603732 - DNA, 599 bp, Homo sapiens
caactttatgtcttgatatcagggcagagaacccaaaataaatacattgaggaatctacagtatattgaaagaagaatacaatatagccatgacattaaagataggcacctggtgaggataaacatctcagtcaaagcctgccttacagtgaagggtcacaagaggttgggcatgggctctagtttttctttcttcagggttgtgctggcatgcacttcctctcttagatctggaactatcagtgtgtgcacagaacacctcagatccaatcctgtagtgtagacctagcactgagatgaataaatagacctgtggagttaaggagacaacacttatttaaaagacccttgtcttttagatgcttataagtgacagaaattgcatttattattgctcttgttgcctgtgcttttgaggtcatattcagaaaattattgcyctggccattgtgttggagctttctctgcccacccccccctttttttttttttgcttagtcattttatagtttcatgtcttacttttaagtttttaatccattttgagttgatttttttttaaaaaaatatttcttgaaacaagttctggctttgtcacc

SEQ ID NO: 603733 - DNA, 599 bp, Homo sapiens
caactttatgtcttgatatcagggcagagaacccaaaataaatacattgaggaatctacagtatattgaaagaagaatacaatatagccatgacattaaagataggcacctggtgaggataaacatctcagtcaaagcctgccttacagtgaagggtcacaagaggttgggcatgggctctagtttttctttcttcagggttgtgctggcatgcacttcctctcttagatctggaactatcagtgtgtgcacagaacacctcagatccaatcctgtagtgtagacctagcactgagatgaataaatagacctgtggagttaaggagacaacacttatttaaaagacccttgtcttttagatgcttataagtgacagaaattgcatttattattgctcttgttgcctgtgcttttgaggtcatattcagaaaattattgccctggccattgtgttggagctttctctgcccacccccccctttttttttttttgcttagtcattttatagtttcatgtcttacttttaagtttttaatccattttgagttgatttttttttaaaaaaatatttyttgaaacaagttctggctttgtcacc

SEQ ID NO: 603734 - DNA, 489 bp, Homo sapiens
attgcttgaaccaggaggcggaggttgcagtgagctgagatcgggtcactgcactccagcctggtgacagagcaagactctgctcacaaaaaaaatatatgtgtgtgtgtgtgtgtgtgtgtgtgtgtatgtatgtatgtgtgtgtgtgtgtgtgtgttaaaagtatatttatataatgtgtgtatgtggcttaagaataaaacacccaactatagaacgtgaccagtaactgggaagctttgtgtactcctttcctggtcatgtacctcacccttcccaccagcagtaccctctttgctgtattttatgctaatcattcttgctgttctacgttaatttactgtctgtgtacctctaaatattttgtwgtgtaacaatatattgttttgaatgtttctgaccttttatatatgttaccgtgactggctgtcttcactcagcctttttttaaccattcaagtttatttatttttattatggtaaaatat

SEQ ID NO: 603735 - DNA, 542 bp, Homo sapiens
tatctgaggctaggaataaaaacaacaatcatgaaggcattaaatgaaacaatcctcagagctcacatagggttaggaacagtttctggttttgctagccacagtggaaaacctaacaattcacaaaacatcagagtacttacatgaattttgcctcartagtagggaaaatttagccctagactaaatagctttctgaatccaccaagcaaagattaaaagcaagacctaaaataaacaaattgtttccaagtaacctaattgcattccagaacaaagttatagaatgatcacattaatccaaagatatacagcatcaccagataaaatcacagtgcctggcactcaatcaaaaattagaaggcatgaaaggaagcagaaaaacacaagccattaggaggagaaagacaaaaaagacgtagagatgttaaagatgatagaattagtggctaaggacaataattgttatttcatatatgtccatataaatagatcaagattaaacatcttaagtagagacatggaatatataaaaaagaccc

SEQ ID NO: 603736 - DNA, 599 bp, Homo sapiens
tcttaagtagagacatggaatatataaaaaagacccagatcaaatagatagagatggaaactcaatgttctgagatgaaaaatattttggatgggattaatgacagattaggcattgcaaaaaaaattagtgaactttaagacagcaaaagaaactattcaaaatgaactatggaaagaaaaatgactgaaatgaaaaggaacagagccctggaacaaattcaagtgactaaatatgtttgcaattggaatccctaaagattaggatgagtaaaaaaatatatttgaagaaataatgamcaaaaaatttccatatataatgaaaactataaacacatggacacaaaaaaactcaatgaactccaagaatagaaaacatgaagaaaaccacaccaaggtacataaaaatcaaattgctttaaaccaatgatgaagagacagtaaatattaaaagtaaccaaaggaaaaagatacagtacattcagagaaacaatagtaaggttgaaagcagatatgatcacaaacaatagaagccagaagacagggaaacaacatctttaaagtacagaaagaaaaaaacaattgccaatgtagaatagt

SEQ ID NO: 603737 - DNA, 533 bp, Homo sapiens
gagttttccagccatggaattagagtccccttctgtagctgccaccagcttgagccccttgtgaacacttgagggaaaataactgagtagggtgatgatgaggtactgttgttttgaggttttttacrtagtgctttggatttttttaaggtactgttctctgttacaaaatttatgcattttttatttttaaaagaatgtcaaaaagaaaagaaatgtacaaattatactcttcccttactcttacctaatggtgaaagtctgaatgaatgttcttccctataagatcaggaataaagcaagggtcactatttctctccaacattatcctggagtgtctagccaagtataatagctcaagaaaaagggataaatgttgttcataccagaagagaagaatcaaaactttcttgatttgcaattgacatagttttctattagaatatcctgtagaaactttaaatagctaccagaactactgagcaagtttagcaaggctgcagaatacaagaagagaatacaaaaatgaatta

SEQ ID NO: 603738 - DNA, 590 bp, Homo sapiens
taaagatatgaaaggcctgtacaccaaaactacaaaacatggccgagatttctgaaatctggccaggcatggtggctcacacctttaattccagtactttgggaagctgaggaaggcagatcacttgagcccaagagttcaagtccaacctgggcaacatgacaaaaccccatctctacaacaaaatacaaaaattagccaggcatagtggcacatgcctgtactcctagctacttgggtggctgaggcaggaggatctcctgagcctaggaggttgaggctgtagtgagccatgattacaccactgcactccagcctgkgttgacagactgagaccctgtctcaaaaatatgtatattataaataaataaaaagacttctaaaatcttaaagatctaaataaatgggaagctataccatgttcatgaattgagagattcaatatttttaatatctcattcttccaaaatagatatataaatccaatgcaattccaatagtgtttttttttcaaatgccttcaaaaattcagatgaaaatgcaaaggacctagagcagccaaaaaactttgaaaaaaaatgttagaggac

SEQ ID NO: 603739 - DNA, 623 bp, Homo sapiens
aaatttgataagaacaatgagagttttgatatttaaaccaagaccacttctctctcctcattgaccaccagttcagcaagacagaaattccaccccagacaggtgcagccaagaacacagggctccctctgcccccagcaaccagtcagtgggccatcctccttggaggggcaggacatcagcattctcatccagttcccagctacctgttgctgagactgagttctaggcaagtatgcccaagggatgggcttccttctcccatccagtccccactggtggaacagaggcttggccttgggcatggcaccactgagaattctgtgtctctcattttccctgccctagttcataaggtgatggttcaatgccaggagaggcaagatgagaagacccaaaaccactgtcccccctccacctcatgatcagctccttaagtagggatatcactcaaagagaagcacaccattatcacaaaccccagctccagagccctggatcagatatttcgcctggaagaagaagcaaatctaaaagtaaatrgcacctaatctcatcccaaagcaattgattttatttgcaatagagcatgaagaagtttaaacctaaggatgcactcaaga

SEQ ID NO: 603740 - DNA, 511 bp, Homo sapiens
atggcacctaatctcatcccaaagcaattgattttatttgcaatagagcatgaagaagtttaaacctaaggatgcactcaagaacaatgaaggttgtggtgaaaggcatttggaaagatattggtagatttgttgaagatttgtgcataagagagctggagaaagagatagatagaagtagccctcctagggtcaaaacaaataycaaacactgaccacaggaactattccttcgaaggagatgaaatttgattggctaagtctgtagatcgatttatgccccagggcattgttgaaaacaataatgcaattagcccccagtttgtagagtttagcagctgggtgcagtctagggtagagacagctaaagagagctctgtcaaaaccactgtcatcccagaatgactgtggaaatacccaaggctgcccaccctaggagtaacaccaggggtttaacactgtgtttgtgtgtgtgtgtgtgtgtgtgtgtgtgtgcacgcatatgtgtgtg

SEQ ID NO: 603741 - DNA, 505 bp, Homo sapiens
gctgggcatggtggctcatgcctgtaatcccagcactttgggaggccaaggcaggtggatcacctgagtgcaggagttcaagaccagyctgggcaacaagatgaaacccatctctaccaaaaatacatacaattagttgggcatggtggtgtgtgcctgtgatccctgctacttgggaggctgaggtgggaggatcacttgaacctgagaggcagagattgcagtgagccgagatcatgccactgcactccaacctgggtgacagagtgagaccccttctcaaaaaaaaaagttataaataggagagaataaaagggagtaagatttaaatgactcaccagaactggtaaaataatgacatcagtagattgtgataaattacataatacccaaagcaaccattaaaaaaagctatgcaaagaggtacactcaaaagtactatagataaataaaaatggaattttaaaaaatgttccaaaacccacatggagcaaggaaagaaaca

SEQ ID NO: 603742 - DNA, 505 bp, Homo sapiens
gctgggcatggtggctcatgcctgtaatcccagcactttgggaggccaaggcaggtggatcacctgagtgcaggagttcaagaccagcctgggcaacaagatgaaacccatctctaccaaaaatacatacaattagttgggcatggtggtgtgtgcctgtgatccctgctacttgggaggctgaggtgggaggatcacttgaacctgagaggcagagattgcagtgagccgagatcatgccactgcactccaacctgggtgacagagtgagaccccttctcaaaaaaaaaagttataaataggagagaataaaagggagtaagatttaaatgactcaccagaactggtaaaataatgacatcagtagattgtgataaattacataatacccaaagcaaccattaaaaaaagctatgcaaagaggtacactcaaaastactatagataaataaaaatggaattttaaaaaatgttccaaaacccacatggagcaaggaaagaaaca

SEQ ID NO: 603743 - DNA, 505 bp, Homo sapiens
gagcattcactcaatattgctaggacagcaccaagccatccatgagggagccacctccatgacccaaacacctgccactagcccctcctcatttcacatgagatttggagggkacacacatccaaaccgtatcactctgttttcatttatcttaaagaatttcttgacttctgccttaactttgttgtcccaaaaatcattcaagagcaagtagtttaatttccatgtaatcgtgcaattttgagagatcatcttagtattgatttctatttttattccactatggtccaagagtatgattggtatgactttgatttttttaatttattgagacttgccttgtggccaagcatgtgactgatcttggagtatgttccatgtgtagatgagaagaatgtggttgatgagtggagtattctgtagatgtctatttgttccaattgatcgagtgttgaatttaattccagaactttttttgttagttttctgcctcagtgatctgtct

SEQ ID NO: 603744 - DNA, 507 bp, Homo sapiens
cactctgttttcatttatcttaaagaatttcttgacttctgccttaactttgttgtcccaaaaatcattcaagagcaagtagtttaatttccatgtaatcgtgcaattttgagagatcatcttagtattgatttctatttttattccactatggtccaagagtatgattggtatgactttgatttttttaatttattgagacttgccttgtggccaagcatgtgactgatcttggagtatgttccatgtgtagatgagaagaatgtggttgatgagtggagtattctgtagatgtctatttgttccaattgatcgagtgttgaatttaaktccagaactttttttgttagttttctgcctcagtgatctgtctaatgctgtcagtgggttgttgaagtcccccattattattctgtggctaagtctttgtagatctgtacttgttttataaatctgggtgctccaatgttgagtgcatatctgtttaggatagttaagtcttcttgt

SEQ ID NO: 603745 - DNA, 575 bp, Homo sapiens
gtgccatgcaaccttgtttgatacatgagaaaaaaagggtctggccacaaaagttaagtgatatatgtcggttaggtgccaatgcatacaagtaaaccaaaacctccaagctgacaatacgaattaagaggaccaatagcccctattgatgacctcatgagaggctccaaccaaccagattagttttattggttaaatggtataggaaacattcataataattggttatgggaaaaattcttttgttttatgggtaataataggtataacacaaattaaagtgctaaaagaacatttgggagaaattcaaaatatgtctattattcttttttsaagatctttgattcttccctcctatgatccttgattctttatttttttgtgttacagatcagcggagcatcactggctgtgtggggctccctccagtaagtaggtctaggaccttagccgcatctgctgctcatcccacatcttgacaaaagtacacaagaacctctagtgcttccatgtctccaaatgccatctccattacacttcaaaatgcacccccaacctaggatgattgggctgtc

SEQ ID NO: 603746 - DNA, 575 bp, Homo sapiens
gtgccatgcaaccttgtttgatacatgagaaaaaaagggtctggccacaaaagttaagtgatatatgtcggttaggtgccaatgcatacaagtaaaccaaaacctccaagctgacaatacgaattaagaggaccaatagcccctattgatgacctcatgagaggctccaaccaaccagattagttttattggttaaatggtataggaaacattcataataattggttatgggaaaaattcttttgttttatgggtaataataggtataacacaaattaaagtgctaaaagaacatttgggagaaattcaaaatatgtctattattcttttttcaagatctttgattcttccctcctatgatccttgmttctttatttttttgtgttacagatcagcggagcatcactggctgtgtggggctccctccagtaagtaggtctaggaccttagccgcatctgctgctcatcccacatcttgacaaaagtacacaagaacctctagtgcttccatgtctccaaatgccatctccattacacttcaaaatgcacccccaacctaggatgattgggctgtc

SEQ ID NO: 603747 - DNA, 576 bp, Homo sapiens
aaattcccccttcttccaccttttttttctactcgggccctcaacggattggatgatgcccaccacattggtgaagggagatcttctttagtcagtctactaatcttttcaggaaacaccctcacagacacacacagaaataacattttagccgggcatggtgtctcacgcctgtaattccagcactttgggaggccgaggtgggtggatcacgaggtcaggagttcaagaccagcctrgccaaaatggtgaaaccccatctctactaaatatacaaaaattagccaggtgtggtggtgggtgcctgcaatcccagctactcgggaggctgaggcaggagaatcgcttgaacccgggaggcagaggttgcagtgagccaatattatgccactgcactccagcctgggtgacagagtgagattccatcttaaaaaaaaaaaaaagaaaagaaataacattttaccagctatctgggtgtcccttagctcagccacattgacacataaaatgaaccatcacactgcataattctctcaaagtcatggggtcagaggcctgactcatgtggtaggtcct

SEQ ID NO: 603748 - DNA, 603 bp, Homo sapiens
ccccatctctattaaaaaataataataataaataaaaaaataagccaggtgttgtggtggatgcctgtaatcccagcaactcaggaggctgaggcaggagaatcacttgaacctgggaggtggaggttgcagtgagccaagatcgcatcaatgcactgcactccagactgggtgacagagcaagactctgtctcaaaaaaaaaaaaaaaaaagaaagaaaagwaaagaaaaagaaaaaagagaagaaaagaaaaagtccagaggcagaagaggacaaataaaaggcatatgatctgaggcaaactctactccccctcctcctttggcttaatcccttagagatgggtcctttaataataatcctacctaacaatgctgccttctacgggagtagcctgtgaataaccatcttcctggggccatgttggtttctgttctacttccagtgctgagcttttggccccaatcaaatgtcgtcatcacgtggacccttggacacacttttagaagaaaggaccccaacttgtgttcagaaaacctggtctattccacttaggcccttaccagctgtatgatcttggataagtcactctttctccccga

SEQ ID NO: 603749 - DNA, 603 bp, Homo sapiens
ccccatctctattaaaaaataataataataaataaaaaaataagccaggtgttgtggtggatgcctgtaatcccagcaactcaggaggctgaggcaggagaatcacttgaacctgggaggtggaggttgcagtgagccaagatcgcatcaatgcactgcactccagactgggtgacagagcaagactctgtctcaaaaaaaaaaaaaaaaaagaaagaaaagaaaagaaaaagaaaaaagagaagaaaagaaaaagtccagaggcagaagaggacaaataaaaggcatatgatctgaggcaaactctactccccctcctcctttggcttaatcccttagagatgggtcytttaataataatcctacctaacaatgctgccttctacgggagtagcctgtgaataaccatcttcctggggccatgttggtttctgttctacttccagtgctgagcttttggccccaatcaaatgtcgtcatcacgtggacccttggacacacttttagaagaaaggaccccaacttgtgttcagaaaacctggtctattccacttaggcccttaccagctgtatgatcttggataagtcactctttctccccga

SEQ ID NO: 603750 - DNA, 603 bp, Homo sapiens
ccccatctctattaaaaaataataataataaataaaaaaataagccaggtgttgtggtggatgcctgtaatcccagcaactcaggaggctgaggcaggagaatcacttgaacctgggaggtggaggttgcagtgagccaagatcgcatcaatgcactgcactccagactgggtgacagagcaagactctgtctcaaaaaaaaaaaaaaaaaagaaagaaaagaaaagaaaaagaaaaaagagaagaaaagaaaaagtccagaggcagaagaggacaaataaaaggcatatgatctgaggcaaactctactccccctcctcctttggcttaatcccttagagatgggtcctttaataataatcctacctaacaatgctgccttctacgggagtagcctgtgaataaccatcttcctggggccatgttggtttctgttctacttccagtgctgagcttttggccccaatcaaatgycgtcatcacgtggacccttggacacacttttagaagaaaggaccccaacttgtgttcagaaaacctggtctattccacttaggcccttaccagctgtatgatcttggataagtcactctttctccccga

SEQ ID NO: 603751 - DNA, 516 bp, Homo sapiens
tacaccgtgggagttctccatgggcaggttcctgcgttcctcttcaacatccaatggagattagaaacttactacctgtccccctaacagctcagacatgggcacaggacctgggcccaactaactggacatttcccctagaaatatgaatctagaggagagtaatgcagagatgcatgtcagttagggatgatttcctatggccatgaagtttagagcttccacrtaatggcaaatgacccatgacagtgtggaagggattgtccaggatgggaaccccagagatggcctctagctggactgtacatggatggggtcttggctatctcctccctccctgcctggtagccaggccattttctccagctttaccattgattctgtgaattatcagatgaccttcccttcaataccttttctgcttaagtagccagaattcatctctgttgcctgcagttgagaattctgagtgatgcaataattcataacataaatgagctgtttagaacctgcaca

SEQ ID NO: 603752 - DNA, 593 bp, Homo sapiens
atggccccaacaaaagagcaaaagtatttttctctctctctcccaaagttctctagtgatagcaagtggcctgtggcagcagccccagartagtggcaggcgttgtccaggtggcaaccccggaggtgaccattctaaccacagattggctctgcctggttccatgccatcctgtggctgtggccaggggtggcactctgggggaagttccactggaggctccactagaacacaggaaatagggggttggggtgactggaaggaacaaaatggatgctgagcagacaaaactaagacatctattctgggtaccaaccactgcttcatgttatagtacagtggttcaaaagtatacattgtgggccctcaggttcccttgggggtccaaaaggtcaaagctattttcatactactactaagacgttatctgtctttttcactgggttgatatttgccctgatggcacaaaaggagttatgggcaaaaccgctggtgccttagacaaatccaggcagtggggaaagagctatgctagtgatcactgtgttcttggcccccacacacccagggtgaaaaagaaatccaactgcacc

SEQ ID NO: 603753 - DNA, 626 bp, Homo sapiens
cccacagcctgggaagtccaggtgagttgggttacaaacacagctgcctctgctcagtggagatccagcaggtctgcgcctgtgtgtcccggtcttgagatggtctttctcctggggctgcttgtcttattgcctctctggctatacccccagccccacagataacttttccatcaccttctttcatttgcttctccccccaccatgttcctggaaacgtctagctcctaaagaaatggctttaggctttacaaggtataatcatttgcttcccacagctaatctacaccagggagaaaaggcccatttcacagctcttttgggaaattgtggggagagaaagcacaaaccaaatgaactcccaactcactgaaggcttccaatcacagaattttagaactctaaacccagtaaaacyctaaatccttcccccttttaaccactattcctaattttgagtatattcttccatattgaccatgtaaacaaatacaccctgtagtcagggtggtttgttattcctagatgaaaatggaagcctaatcaatgtgtacttctgaattggcttgactatatagaaggtcatcctcactattaccaccacagtccacattcatgaagcgact

SEQ ID NO: 603754 - DNA, 573 bp, Homo sapiens
caggcccgcaccaccacgcctggctaatttttgtatttttagtagagatggggtttcaccgtgttggccaggctggtcgacagcatcacattttaacaaggaaggtgtaaaatattaagaaactatatttaaaaacgaatatttaggagaatgcctcatagagtcagtgtttattttgtatgtatatgtacattgtgcctttgttttattaaactttgtatggaattttttaagcgtacaggargggattaagttgcagggactataaagtgaggaatcagtacaattgaatggctgtgtggctgtaaaagcattgcttaaatatgactgtctcaacatattttattgtgaagaaatctttacatttgtgaaagctcagcatggttatgatgcattctccaaatcattctaccttgaagaaaactattgtttgttgctttctcataagcatcaaatagactgttagtgtttcttagttaactagcaaacattgagtgattatccatgggctgtattgccctgtaccaaatgtctgctaaaaacagagtaagatggattgatgccttatttgaa

SEQ ID NO: 603755 - DNA, 496 bp, Homo sapiens
gcaagtgtttcctaaagcagcagcctcaggtctgctatgttatttcttttctgcgtggcttttaaacctgaaaccccttcctttcctgtttgtgcagctttgyagggtaggaaaatgttatataaaagttggacctcacctccactttaggcattgccactgctctgttgcacttgagccctgtaagctgtgtgttctatcacagtattaactaaagctgatatccccagtaggcttaaaactgtaggatttctgcacagagatccgctgttggtctgatgggcttccctttgtaggtgacctgtcctttctctctggctgcccttaacattttttccttcattttgaccttggagaatctgatgattatgtgtcttggggttgatctactcgtggagtgtcttagtggtgttttctgtatttcctgaatttgcatgttggcctgtcttgctaggttggggaagttctcctggataatatcctgaagtgtgttttc

SEQ ID NO: 603756 - DNA, 623 bp, Homo sapiens
gatgttcatcaatgtctgggcattgaagagttaggtatttattctaatcttactgtctaggctggattgttcctatccttcttgagaaggttttccggatgccccaacatctttacttatttttgtttttgccttctgtctatatttcccattccatatattttcctatatgcctttgaacaagtcacttaatctctctggagtacttcagtttcctcatctttaaaacagaacccatcttactatattgatgtgaatgtaagttacttgacatatgggatatattttaaagagcacatagcacctagcaaatattctatgaatgttaactattattgtcattataatccttctgtgatgcttttccttctttacacatttactaaacttctatcaagttctgaagtgcagggttacaaagttgaatagcacaggttccttgcttccaaagaaactcaaaatgtggtcaatactaagaaagttaactgcacagggtgatctgggatcacattgaagcagacatctaacaacatctgaactgatttcttatgaatgagaaggaattagccaaaatgggggctaaataaaccraatgatggagacaggaagtaaattccaggaag

SEQ ID NO: 603757 - DNA, 655 bp, Homo sapiens
tcattatttgcaaatcaaaacattatagctataaaagatagttttccctttcaaagagtggatgaaatacaacattttcagataaactgtcaaggagttaatagtaaaatacctcctcctttctttcctcctcctctccctcacctccttctttttttcttccattttcttttctttcttccttacctctctaactagctccttccctcccctctcctccattctcttacaacatgagataacacatcattgtcagaatgtggttgtgcatcactgtaaaaggaggaagttgtaatcacgtctgcataccaygagcacacattattttctgttttgacagtttgtttctgcactctcagacctaacatgtgcagagtcacatttcctaggatgctctgtattgctagtggtacctgtttatctgggatgaaaatgaagccttcagtatgtgccttatatagactgtattagcaggtctcctgttgtttaatcaaaaaaattttcaaatgaaatgtactctacctagatgaccagttaattcaatggaaattcggataaaaaagtcacaaataagctgcagtaagaatcaggacacttaggaagtatatttcttttatatacctcaaggaagatacctgtgtatatctgcaataaa

SEQ ID NO: 603758 - DNA, 655 bp, Homo sapiens
tcattatttgcaaatcaaaacattatagctataaaagatagttttccctttcaaagagtggatgaaatacaacattttcagataaactgtcaaggagttaatagtaaaatacctcctcctttctttcctcctcctctccctcacctccttctttttttcttccattttcttttctttcttccttacctctctaactagctccttccctcccctctcctccattctcttacaacatgagataacacatcattgtcagaatgtggttgtgcatcactgtaaaaggaggaagttgtaatcacgtctgcataccacgagcacacattattttctgttttgacagtttgtttctgcactctcagacctaacatgtgcagagtcacatttcctaggatgctctgtattgcyagtggtacctgtttatctgggatgaaaatgaagccttcagtatgtgccttatatagactgtattagcaggtctcctgttgtttaatcaaaaaaattttcaaatgaaatgtactctacctagatgaccagttaattcaatggaaattcggataaaaaagtcacaaataagctgcagtaagaatcaggacacttaggaagtatatttcttttatatacctcaaggaagatacctgtgtatatctgcaataaa

SEQ ID NO: 603759 - DNA, 655 bp, Homo sapiens
tcattatttgcaaatcaaaacattatagctataaaagatagttttccctttcaaagagtggatgaaatacaacattttcagataaactgtcaaggagttaatagtaaaatacctcctcctttctttcctcctcctctccctcacctccttctttttttcttccattttcttttctttcttccttacctctctaactagctccttccctcccctctcctccattctcttacaacatgagataacacatcattgtcagaatgtggttgtgcatcactgtaaaaggaggaagttgtaatcacgtctgcataccacgagcacacattattttctgttttgacagtttgtttctgcactctcagacctaacatgtgcagagtcacatttcctaggatgctctgtattgctagtggtacctgtttatctgggatgaaaatgaagccttcagwatgtgccttatatagactgtattagcaggtctcctgttgtttaatcaaaaaaattttcaaatgaaatgtactctacctagatgaccagttaattcaatggaaattcggataaaaaagtcacaaataagctgcagtaagaatcaggacacttaggaagtatatttcttttatatacctcaaggaagatacctgtgtatatctgcaataaa

SEQ ID NO: 603760 - DNA, 577 bp, Homo sapiens
gaggcatatggctttaattatcaagtatatgctgaggatatgcagagctacagcttttttcctgacttttctaatgaagccagttcctaacagcaacatttgccagaatattttgttgtattatgacattaaacatgggccagcagaggtctggctaattgagaatgatacctttccccttccaactgcttatttactttccacgaagctaatttagttcagttataaaatgaaacctcataatacagtgtaaatgagtttgttcacatratatcaattgctaggatggggaaaatcctaaaaataaataaacaaaaattccaaaaaagttattttagaaaaattaataaatgcagctttgttgcttttatttactacctgcaagactggaaatgacatagagtaattgtttttcttccttcttttaataattggcaagcattatttgtaattagtgggtaaattgcttataggcaaagacttgctaaagagctttaaaatcataattttatttcatttcactggaaaatagaattatttcttatgtgaagtgataaaatgttttaaacttttataa

SEQ ID NO: 603761 - DNA, 564 bp, Homo sapiens
ttatacaatcccttcaatgtttttttttttttcaggctgcaaaagaagtcactcttcctcttactacataggagtggcttagtccatagatgaataatggacactaaagttatcaaccgcacctgtctgtacagggtctgaaatttgaccttaaccaaagaaattggaaattttattttctataaaagtataacaaattgttagctctcatatttgcaggaagtgagccaacgtgttttgagggctacctgcatgcaaagcactgtgataaccagtttttaggaggtgaatctacttgttgaccttttacacaggcattagcatgatcaatatgmtacaaattacctgcatgttaaggagcatgaggcactgctccttccaatatacaacaaattcagatatataataacaggcagccgggccagaaatgggtagggaatgttctatacgagtttcgtataaattgattgtatatacagtaaagcatgactgattttgcacaaaatctctgtaaaattataaagtcctgccctgcttatggcagtgagttgctgtttatacact

SEQ ID NO: 603762 - DNA, 530 bp, Homo sapiens
caagaatatcaaataatccacatcaaattttcaaasagccagacatgatatgttctcaattcccaggccacgtttattattaaatgatgttctagccctttgacaatacctgctattagaaccagggcttgggtggtggtggaacaggccacagtggcatagacaagacctgggaattcaggaagttttccttggtcaggagaagtctgcggctgggacaagtatgatgtagtttggatgtttgtcccctcgaaatctcattttgaaatgtaattcccaatgttggaggtggggcctgatgggaggtgattgaatcatggaggcagctccctcatcaatagcttagcaccatccacttggtgataagtgagttcttgctcagtgagtttgcatgagatctgattgtttaaaagagtctgagacctccccccacctttctcctgctctcaccatgtgacataccttgcctgctcctgctttgctttcctccatgactgtaagcttcctgaggccctcaccagaagccaagc

SEQ ID NO: 603763 - DNA, 530 bp, Homo sapiens
caagaatatcaaataatccacatcaaattttcaaacagccagacatgatatgttctcaattcccaggccacgtttattattaaatgatgttctagccctttgacaatacctgctattagaaccagggcttgggtggtggtggaacaggccacartggcatagacaagacctgggaattcaggaagttttccttggtcaggagaagtctgcggctgggacaagtatgatgtagtttggatgtttgtcccctcgaaatctcattttgaaatgtaattcccaatgttggaggtggggcctgatgggaggtgattgaatcatggaggcagctccctcatcaatagcttagcaccatccacttggtgataagtgagttcttgctcagtgagtttgcatgagatctgattgtttaaaagagtctgagacctccccccacctttctcctgctctcaccatgtgacataccttgcctgctcctgctttgctttcctccatgactgtaagcttcctgaggccctcaccagaagccaagc

SEQ ID NO: 603764 - DNA, 581 bp, Homo sapiens
gaattctagggcccacacaccgccagttccttcccattctaccatagctgatgctctctggaaagcaccatcttgtagcaggagtcsaaccagcacaaaaatagagcattaaactgccaaagctaagagccctcagggagtccatttcactccccctcccccgcacttccccccaacccccaccggccacctccaccagaacaggcactggtatgcacggctgaaagacccatagatggttcatgttaaaggactctgtgcagacaatccttagtaccagccaagagctgggtagactggctgggtggctagatgcagagagagacaaaaatcactgcagttcaggtcaaaggaagccacatccataggaaaagggggagagtgcaacatcaagggaacaccacatgggacaaaagaatctgaacaacagccttcagccctagatgttccctctgacagagcctacccaaatgagaaggaactagaaaaccaaccctgataatgtgacaaaacaacgctcttcaacacccccaaaaattcacaccagttcaccagcaatggatccaaaccaagaagaaatc

SEQ ID NO: 603765 - DNA, 581 bp, Homo sapiens
gaattctagggcccacacaccgccagttccttcccattctaccatagctgatgctctctggaaagcaccatcttgtagcaggagtccaaccagcacaaaaatagagcattaaactgccaaagctaagarccctcagggagtccatttcactccccctcccccgcacttccccccaacccccaccggccacctccaccagaacaggcactggtatgcacggctgaaagacccatagatggttcatgttaaaggactctgtgcagacaatccttagtaccagccaagagctgggtagactggctgggtggctagatgcagagagagacaaaaatcactgcagttcaggtcaaaggaagccacatccataggaaaagggggagagtgcaacatcaagggaacaccacatgggacaaaagaatctgaacaacagccttcagccctagatgttccctctgacagagcctacccaaatgagaaggaactagaaaaccaaccctgataatgtgacaaaacaacgctcttcaacacccccaaaaattcacaccagttcaccagcaatggatccaaaccaagaagaaatc

SEQ ID NO: 603766 - DNA, 542 bp, Homo sapiens
actctaaggtcacatctcaaggaactagagaaacaaggacaaaccaaactgaaacccagcagaagaaaggaaataaccaagatcagagcagaactaaatgaaattgaaacacacacacacacacacacacacacacacacacacacacaatacaaaagataaatgataaaaaaaagctggttctttgaacagatgaaattgatagatcattggcaagattaaccaagaaaagaagagagaaaatccaaataacttcactaagaaatgaaacaggagatactacaattgacacactgaaacgcaaactatcatcaaggctactatgaacaccttttcacacwtaaactagaaaacctagaagagatggataagttcctggaaaaatacaaccctcgtggcttacatcaggaagaatttgataccctgaacagaccgataacaagcagtgagattgaagtggtaatttaaaaattaccaaaaactgggcgaagaatatgaatagacacttctcaaaagaagacatttatgcagccaaaagacac

SEQ ID NO: 603767 - DNA, 542 bp, Homo sapiens
actctaaggtcacatctcaaggaactagagaaacaaggacaaaccaaactgaaacccagcagaagaaaggaaataaccaagatcagagcagaactaaatgaaattgaaacacacacacacacacacacacacacacacacacacacacaatacaaaagataaatgataaaaaaaagctggttctttgaacagatgaaattgatagatcattggcaagattaaccaagaaaagaagagagaaaatccaaataacttcactaagaaatgaaacaggagatactacaattgacacactgaaacgcaaactatcatcaaggctactatgaacaccttttcacacttaaactagaaaacctagaagagatggataagttcctggaaaaatacaaccctcgtrgcttacatcaggaagaatttgataccctgaacagaccgataacaagcagtgagattgaagtggtaatttaaaaattaccaaaaactgggcgaagaatatgaatagacacttctcaaaagaagacatttatgcagccaaaagacac

SEQ ID NO: 603768 - DNA, 661 bp, Homo sapiens
aatcaaggccactatgaacacctttatgcacataaactagaaaacctagaagagatggataaattcctggaaaaatacaatcctcctatgttaaatcaggaagaatcagataccctgaacaaaccaataacaagcagtgagattgaaatgataattaaaaagttaccaacaaaaaaaatccaggactagatggattcacagcagaattctaccagacattcaaaaaagaattggtaccaatccttttgacactattttacaagatagggaaagaaggaaccctccttaatttattctctgaagccagcatcaccctaataccaaaaccaggaaagggcataaccaaaaaagaaagttacagaccaatatccttgatgaacatagatgctaaaatccttaaaatacttgctaaccaaatccaacaacatatcaaaaagataatccactctgttcaagtgggtttcataccagggatgcagggatggtttaacatacacaagtcaataaatgtggtacactacataaacagaattaaaaacaaaaatcacatggtcatctcagtagatgcrgaaaaagcatttgacaaaatccagcatgactttatgatgaaaactctcagtaaaatcagcatacaagggacatactttaatgtaataaaagt

SEQ ID NO: 603769 - DNA, 583 bp, Homo sapiens
acatgaacaaatggaaacacatcccatgctcatggatgggtagaatcaatattgtgaaaatgaccatactgccaaaagcaatctacaaattcaatccaatccctatcaaaatgccaccatcattcttcacaaaattagaaaaaacaattctaaaattcatatggaaccaaaaaagagcccacatagccaaagcaagacttagcaaaaagaacaaatctggaggcatcacggtatctgatttcaaacctatactataaggccatagtcaccaaagcagcatggtactggtacaaaaataggcacatagaccaatcgaacagaatagagaacccagaaataaacccaaacactcacagtcaactgatctttgacaaagcaaacaaaaacataaagtggggaaaggacacccttttcaacaaatggtgctgggataattggctagccacatgtaggagagtgaaactggatcctcatctcttacctcaagatgaattaaggacttaaacctaagayctgaaatataaaaattctagaaggtaacattggataaacccttctagacattggcttaggcaaggatttc

SEQ ID NO: 603770 - DNA, 583 bp, Homo sapiens
acatgaacaaatggaaacacatcccatgctcatggatgggtagaatcaatattgtgaaaatgaccatactgccaaaagcaatctacaaattcaatccaatccctatcaaaatgccaccatcattcttcacaaaattagaaaaaacaattctaaaattcatatggaaccaaaaaagagcccacatagccaaagcaagacttagcaaaaagaacaaatctggaggcatcacggtatctgatttcaaacctatactataaggccatagtcaccaaagcagcatggtactggtacaaaaataggcacatagaccaatcgaacagaatagagaacccagaaataaacccaaacactcacagtcaactgatctttgacaaagcaaacaaaaacataaagtggggaaaggacacccttttcaacaaatggtgctgggataattggctagccacatgtaggagagtgaaactggatcctcatctcttacctcaagatgaattaaggacttaaacctaagatctgaaatataaaaattctagaagrtaacattggataaacccttctagacattggcttaggcaaggatttc

SEQ ID NO: 603771 - DNA, 562 bp, Homo sapiens
cactttcttaaaaattcaacaatgcttcctctgagtttatgtcagaggaatgccttttacttaagggtattttctcttctcaacaatgaaactccctgacgatgttgtctacatttccttgctccttttcccaacctcactgctatgctgccatacttctacccacgctgctcccacacaccacacyttagatattgttttttctaaagttactgatgacctgaatctatagacactttgctgcattttctgtaatgtataaaacatatgacacagctgaccctcttgaaattttcttcccttggtttctgttctcttacttttcttcttctgactgttccttctctattattttgcaataatcttttcctcagcatgcttcttaaatgtgttcctcagcatgcttcttaaatgtgttctcttctctttcactccacaatctctccttacagagtctcatctattcctatggctttaattaccatctacatgccagtgactttaaaatctgtgtgtaggacaagcttgttttccagaggttctgactagaataaattactac

SEQ ID NO: 603772 - DNA, 562 bp, Homo sapiens
cactttcttaaaaattcaacaatgcttcctctgagtttatgtcagaggaatgccttttacttaagggtattttctcttctcaacaatgaaactccctgacgatgttgtctacatttccttgctccttttcccaacctcactgctatgctgccatacttctacccacgctgctcccacacaccacaccttagatattgttttttctaaagttactgatgacctgaatctatagacactttgctgcattttctgtaatgtataaaacatatgacacagctgaccctcttgaaattttcttcccttggtttctgttctcttasttttcttcttctgactgttccttctctattattttgcaataatcttttcctcagcatgcttcttaaatgtgttcctcagcatgcttcttaaatgtgttctcttctctttcactccacaatctctccttacagagtctcatctattcctatggctttaattaccatctacatgccagtgactttaaaatctgtgtgtaggacaagcttgttttccagaggttctgactagaataaattactac

SEQ ID NO: 603773 - DNA, 562 bp, Homo sapiens
cactttcttaaaaattcaacaatgcttcctctgagtttatgtcagaggaatgccttttacttaagggtattttctcttctcaacaatgaaactccctgacgatgttgtctacatttccttgctccttttcccaacctcactgctatgctgccatacttctacccacgctgctcccacacaccacaccttagatattgttttttctaaagttactgatgacctgaatctatagacactttgctgcattttctgtaatgtataaaacatatgacacagctgaccctcttgaaattttcttcccttggtttctgttctcttacttttcttcttctgactgttccttctctattmttttgcaataatcttttcctcagcatgcttcttaaatgtgttcctcagcatgcttcttaaatgtgttctcttctctttcactccacaatctctccttacagagtctcatctattcctatggctttaattaccatctacatgccagtgactttaaaatctgtgtgtaggacaagcttgttttccagaggttctgactagaataaattactac

SEQ ID NO: 603774 - DNA, 619 bp, Homo sapiens
gtgcaaatatctctttggcattctgcctttagttcttttggatacatacccagaagtgagattgctgggccatgtggcaattgtctttttaattttttgcagaactgccatgctgttttacataccaactgcaccattttacatttccaccagcagtgctcaagggttccagtttctccacatcttcagcaacacttgttattttagcccttttttaatagtagccactttcgtgggtgtaaaagktattaaaataatttagacttcagtgccttttgccatacacaatacatagcaactactttatgaaagcttatggttgagatgtattaaaaatgtatattttcataatgtgtttgctttataaagttgatgttagagatcattaatggagcctatgatctgtgctttaggataaaataagacatatcttagggaaaaaaagactatctctgctttgaaggaattctcaatttggtgagcaaaacatctataacaaccaactaaatcatcatatgataagtgttacaagggaagaataaataacatacaatgaaaatagaaaggtaagtgtgactcactttgtgaaagagttgaggaagaagaggttacagagaaa

SEQ ID NO: 603775 - DNA, 559 bp, Homo sapiens
gaaccttaaaaacattatgccargtaaaataagccagacacaaaaggacaaatactgtatgatcccacttatgaggcacctagaaaaggcaaattcataaagacagaaagtagaatagaggtttagtggctcggagtagaggaaatggtgagttattatttaatgggtatacagtttcaatatgggatgctaaaaaatttctagagatagaaaatggtgatggttacagaatatcacgaacttcatgctgctgaaatacacacttcaatgtggttaaaatgatgagttttatattaagcatatttaaccacaataaaaatattaaaattaaaagtttttaaggccttggtttttctttgacatggcaaatttgagggactggggagcatcccatgtccaccaaatctcctcattttctctcccagttataatgctggaacatattgttatgggtacttcttctgttatccactaaacctcttcacctcttcaaattcttttttttttttttttttgagacagagtttcactcctgtttcccagactggagtgcaacggt

SEQ ID NO: 603776 - DNA, 554 bp, Homo sapiens
cacatatgacatttttgcttatattttattgccagaatttattctcataaccatacctagctacagggaagactgagaaatgtggtctttattttacatggccatgtgcccagataaaattcagagttatctttctacggaagaagaggaaaaggaatttgaggagtctatttgtcctccaaggacccttttggttccttagactcaggacagagacaggatgaatggctaactctgtcccttccctaggtccacagactaactctgtccctctgggttctagctctcagtcagggttcatggaaacagaaccaagcagagttcctccccctaatgactatggtagagctgacccaagcaagagacccctgccttttttgctttgagccactsttaggttctgcttgcctttaacagaaaggctctcctctgaaggaaggcaacccaggcccatgttaccacattatccatgtgggaaggacaaaaagcaatgcaaacagagatgggttaagagacagaagcagtaactgtccatcaacagatgaatgaatttt

SEQ ID NO: 603777 - DNA, 577 bp, Homo sapiens
  misc_feature 193, 194, 195, 196, 197, 198, 199, 200, 201, 202, 203, 204,205, 206, 207, 208, 209, 210, 211, 212, 213, 214, 215, 216,217, 218, 219, 220, 221, 222, 223, 224, 225, 226, 227, 228,229, 230, 231, 232, 233, 234, 235, 236, 237, 238, 239: n = A,T,C or G
  misc_feature 240, 241, 242, 243, 244, 245, 246, 247, 248, 249, 250, 251,252, 253, 254, 255, 256, 257, 258, 259, 260, 261, 262, 263,264, 265, 266, 267, 268, 269, 270, 271, 272, 273, 274, 275,276, 277, 278, 279, 280, 281, 282, 283, 284, 285, 286: n = A,T,C or G
  misc_feature 287, 288, 289, 290, 291, 292: n = A,T,C or G
atacagacattggggcctccaatgggatcgcctgccacaccattctatttccactgctaacgagggcttcataagcctttgatacagtctgatctttgaaacctttccaaatctcctcaagcttatgctaaatcctatttggaacttttttttccttgcctgctagctcccaggggcttaagaaggccacttnnnnnnnnnnnnnnnnnnnnnnnnnnnnnnnnnnnnnnnnnnnnnnnnnnnnnnnnnnnnnnnnnnnnnnnnnnnnnnnnnnnnnnnnnnnnnnnnnnnnattacgaattcgagctcggtacccttcaggcttcttaatcgagaggctattccaggcaccgtagctaggagagaaggaaagcagagcctcattcagcagagcaagtctgtgggtagggggctgcaagggtttggaagcgtcagaggtgcaaaatgcagagtgtgtgtgttggcaggggctgggggaaggcggaatcaggagccactggggtgaaaccycagcgtgttcgcacttagttctagccgcggcacggagggaggcaggcgacaattaacaaaaccatcc

SEQ ID NO: 603778 - DNA, 570 bp, Homo sapiens
attgttttcagtcaaattcctgaaaaacattgtctgggatagggattcttataaaaatcatttattgaggaagtgctcacagaaataaagagaagcagccaggctctgtggcttatgcctgtaatcccagcactttgggaggctgaagcaggaggattgtttgaggtcaggaattcaagaccagcctgggcaacatagcaaggcccctgtctcttaagagagagagagagagagaagcaagcaggataggataggagagaatctcaagaaatggtggtctttgtatcagcctggcctcatccagagctctggagcacaaattggtcatcccttgaggcaagaggccagactttttataccccrtgtcagtcactggcctctggatgggggagcagggatgcattgccaatactctcatggcaagggggctccatgtttggttaatggcaattctctcaagaaaagagctaccatgggccaggcatggtggcttatacctgtaatcccagcactttgggaggccgagacaggcggatcacgaggtcaggagattgagaccatcctggctaa

SEQ ID NO: 603779 - DNA, 570 bp, Homo sapiens
attgttttcagtcaaattcctgaaaaacattgtctgggatagggattcttataaaaatcatttattgaggaagtgctcacagaaataaagagaagcagccaggctctgtggcttatgcctgtaatcccagcactttgggaggctgaagcaggaggattgtttgaggtcaggaattcaagaccagcctgggcaacatagcaaggcccctgtctcttaagagagagagagagagagaagcaagcaggataggataggagagaatctcaagaaatggtggtctttgtatcagcctggcctcatccagagctctggagcacaaattggtcatcccttgaggcaagaggccagactttttataccccgtgtcagtcactggcctctggatgggggagcagggatgcattgccaatactcycatggcaagggggctccatgtttggttaatggcaattctctcaagaaaagagctaccatgggccaggcatggtggcttatacctgtaatcccagcactttgggaggccgagacaggcggatcacgaggtcaggagattgagaccatcctggctaa

SEQ ID NO: 603780 - DNA, 570 bp, Homo sapiens
attgttttcagtcaaattcctgaaaaacattgtctgggatagggattcttataaaaatcatttattgaggaagtgctcacagaaataaagagaagcagccaggctctgtggcttatgcctgtaatcccagcactttgggaggctgaagcaggaggattgtttgaggtcaggaattcaagaccagcctgggcaacatagcaaggcccctgtctcttaagagagagagagagagagaagcaagcaggataggataggagagaatctcaagaaatggtggtctttgtatcagcctggcctcatccagagctctggagcacaaattggtcatcccttgaggcaagaggccagactttttataccccgtgtcagtcactggcctctggatgggggagcagggatgcattgccaatactctcatggcaaggsggctccatgtttggttaatggcaattctctcaagaaaagagctaccatgggccaggcatggtggcttatacctgtaatcccagcactttgggaggccgagacaggcggatcacgaggtcaggagattgagaccatcctggctaa

SEQ ID NO: 603781 - DNA, 550 bp, Homo sapiens
ctaaaagtcattgtttgtattatatttttttcatattttttagaactattttatgtgttctttttcttcaggccttttttttttttttttttaacaayagagactttctacatttcccaatgataatgccttaaagataatacttggtgggatagcaacaacttggtaatcacgtaagtaagaattgtcttcattttgactttcagcatgtagcacagactatgactcaacaattactattttttccttaaaaaagttaaattaatgcatgagaaggcataaaagatagcactgagaatgtgatttttctcaaactcgccgttgccatttttatggaatagaatcacccacatataatttaattttaaagaaatcatagtctagagaattttgtatagcaaaaagcacaggtattcagaatgcttctgaacttaagcaatctaagtatttacatgtaaataaagaatctgctttaggagattggaattgactcaataaacccattgccagttctgtcgtgtggaaggaaattatagtaactcagttgttg

SEQ ID NO: 603782 - DNA, 550 bp, Homo sapiens
ctaaaagtcattgtttgtattatatttttttcatattttttagaactattttatgtgttctttttcttcaggccttttttttttttttttttaacaacagagactttctacatttcccaatgataatgccttaaagataatacttggtgggatagcaacaacttggtaatcacgtaagtaagaattgtcttcattttgactttcagcatgtagcacagactatgactcaacaattactattttttccttaaaaaagttaaattaatgcatgagaaggyataaaagatagcactgagaatgtgatttttctcaaactcgccgttgccatttttatggaatagaatcacccacatataatttaattttaaagaaatcatagtctagagaattttgtatagcaaaaagcacaggtattcagaatgcttctgaacttaagcaatctaagtatttacatgtaaataaagaatctgctttaggagattggaattgactcaataaacccattgccagttctgtcgtgtggaaggaaattatagtaactcagttgttg

SEQ ID NO: 603783 - DNA, 614 bp, Homo sapiens
agtatggaattcagctcactctaccataactctattgactctttacttctagtggcagcaaaaacaacttgttcttgtgtacagcaaacagatttataacttaaaagaacaccagtaacagatatgttgagaaccaaagtgtcaatttcatagtttttttcttcatgaaattgcacttacagtccatctgataaattgcattctcagtgatataaagaaaaatgtaagattcaatagagtatcactgagccctagcaatagcagaataaatataaaacctctgtcaaaagtatatwgtttgaaacttattttctctgtcttaacagctccctgaattaaattgatgctttaaaatagcagaaagaagagacaaaaagatgattgtctttgataggaaatgaaagaacattctcttttcttaaaaacatcatggagtcatctactcttatgtaacctttttaattgaaaaatttagaacaaaatttagatctattttgagtattaaatatgtacaacatatatcaatatcaatcttagtgctaatgaagaaggaataagttacacactctccttaaaacagtatgttgaaatatgtgtatatatgtatgtatata

SEQ ID NO: 603784 - DNA, 614 bp, Homo sapiens
agtatggaattcagctcactctaccataactctattgactctttacttctagtggcagcaaaaacaacttgttcttgtgtacagcaaacagatttataacttaaaagaacaccagtaacagatatgttgagaaccaaagtgtcaatttcatagtttttttcttcatgaaattgcacttacagtccatctgataaattgcattctcagtgatataaagaaaaatgtaagattcaatagagtatcactgagccctagcaatagcagaataaatataaaacctctgtcaaaagtatatagtttgaaacttattttctctgtcttaacagctccctgaattaaattgatgctttaaaatagcagaaagaagagacaaaaagatgattgtctttgataggaaatgaaagaacattctcttttcttaaaaacatcatggagtcatctactcttatgtaacctttttaattgaaaaatttagarcaaaatttagatctattttgagtattaaatatgtacaacatatatcaatatcaatcttagtgctaatgaagaaggaataagttacacactctccttaaaacagtatgttgaaatatgtgtatatatgtatgtatata

SEQ ID NO: 603785 - DNA, 540 bp, Homo sapiens
atgatgatgatgataatgatgatgatgatgattagttgatatttcagttraggttctcttggcacattgcatagatatcatccccgtattttcttttattgttattccccgacatctctatataacttacctggctatttccatgaatttttttgaaaaattaaactctttattttccaagggcacaattgctagtggtttcctaagaaagagacacatatggtggatcctgatatatctgcaaatgtctttctttgcttctcatattggcacgataatttggctaggtatacaattctaagattaaaaatctttttactcagatttttaaaatcattgtcctatattttttctggcttcaagcattgctgcagagaaagttaattctttcctttacctgacttctctgaacgttttcaaaatcttattatctggagtattttgatacttcctaattatattcttaggtacacagttattccttctggttgaaagacatatgtgttagattttagaaattattatcctactaatacatcc

SEQ ID NO: 603786 - DNA, 540 bp, Homo sapiens
atgatgatgatgataatgatgatgatgatgattagttgatatttcagttaaggttctcttggcacattgcatagatatcatccccgtattttcttttattgttattccccgacatctctatataacttacctggctatttccatgaatttttttgaaaaattaaactytttattttccaagggcacaattgctagtggtttcctaagaaagagacacatatggtggatcctgatatatctgcaaatgtctttctttgcttctcatattggcacgataatttggctaggtatacaattctaagattaaaaatctttttactcagatttttaaaatcattgtcctatattttttctggcttcaagcattgctgcagagaaagttaattctttcctttacctgacttctctgaacgttttcaaaatcttattatctggagtattttgatacttcctaattatattcttaggtacacagttattccttctggttgaaagacatatgtgttagattttagaaattattatcctactaatacatcc

SEQ ID NO: 603787 - DNA, 587 bp, Homo sapiens
tatatgtgtgtatgtgtatatatatgcatacatttatgtacttatgtatatatgtttgtatacttttgatacatgcctaaatgtaaaatcactaggtcaagaattttagggattttgaggtatgatacatgaccaactgctttttcggaaaagttataaaaatgtaccatcatatgaccacacatctcttacagagttactgatacttgtcctcaacactcaacctagtctttatcaatttaatcagcaaaaatcctatcacttcccattttatctttcagttttatgtaattttttacacaaagtgttacaatttttgtataattattgtttgtctttacagtttctcaggtaattttgtctttccaaaacacatatttaaaatcccttcttattttattatttcagatttcacatgtgtatctatttcatgaggacttcattttgatgtaagatatgcatttgrtatctaaacttgcaatttccaaatgatcaacagttgacccatgatttttaaatttttctctacttctctaattctctcagtaaaatcaattttatattcttttaaaaatttaaacagaatc

SEQ ID NO: 603788 - DNA, 653 bp, Homo sapiens
caaatgatcaacagttgacccatgatttttaaatttttctctacttctctaattctctcagtaaaatcaattttatattcttttaaaaatttaaacagaatctagccttccttttctacatgagtgatctaccttagtggtgtttaatcttaggagaactaaattgttttgtatagggttccctttacaattctgcaataaaacttacatttaatatagctacttcacatgtaatttctaaaaattagtaaaattgtatacttactgtaaaataaaaaagaagagtaattcatgttaaaagtgtctatatatgcatacatattcatatgtttaatgttcaggcatgataaccctaatagccgtaatgamgttgataaagttttacagttgctcataatgaataagatgggtatgagaagtgaaacaatatttaacacccacacacaaacacacctgccacccccgccccccaacacacgcagtcttccttgttcatggtaggtattttctatagagtttctgagaatactgaattagtgaatactgaattattgctcctaggagaagtacagagttagggtcctgcaagcctctggccacaacattttcattaactgaaatgcatttgtttcatacaggtttgtttcccaaca

SEQ ID NO: 603789 - DNA, 653 bp, Homo sapiens
caaatgatcaacagttgacccatgatttttaaatttttctctacttctctaattctctcagtaaaatcaattttatattcttttaaaaatttaaacagaatctagccttccttttctacatgagtgatctaccttagtggtgtttaatcttaggagaactaaattgttttgtatagggttccctttacaattctgcaataaaacttacatttaatatagctacttcacatgtaatttctaaaaattagtaaaattgtatacttactgtaaaataaaaaagaagagtaattcatgttaaaagtgtctatatatgcatacatattcatatgtttaatgttcaggcatgataaccctaatagccgtaatgacgttgataaagttttacagttgctcataatgaataagatgggtatgagaagtgaaacaatatttaacacccacacacaaacacacctgccacccccgccccccarcacacgcagtcttccttgttcatggtaggtattttctatagagtttctgagaatactgaattagtgaatactgaattattgctcctaggagaagtacagagttagggtcctgcaagcctctggccacaacattttcattaactgaaatgcatttgtttcatacaggtttgtttcccaaca

SEQ ID NO: 603790 - DNA, 589 bp, Homo sapiens
tggttttggtgaggtcactcagctggctttgtgtctgggatggattgtgacaactgaggcaacttaacactgctccatatgttttatccttcaggggctttgtcctggccttctctcatgggaaggaaaaggaacaagtgcaggccagccccatttgatacagtgctcttcccatctccctgcatccactggccagaacatgtcagagtgagataggcctttgatatgaaggtgaagggcatggttacaaggktttgtgctggggtgcctagttaatctaaaaaaaaaaattaatgtgcattttgtttgcagtaactgagtttgtggactagcatgcatttgcaaccaatgtcacttcaactgtattttaaaggattttggacacatttgttttcaaataatatcagatccatgatgaagaaaaattaatgaaagtcataatcggtattttgggaaagacaaaaacattcagagaaaaacaaacaatataatagtcttcatcttaaaacaattagatcaagtaattatattgatcctgagagatttgatgtgagagcttgtatttaattctgctaccctggttaaaggt

SEQ ID NO: 603791 - DNA, 559 bp, Homo sapiens
aattttccaacagatgacatatacagtgatttgtgacttgggtttttgagagtctaggtaagcatgatagagggccactacgaatgacctgggaataaatgacgcaaattaaaagctttctgcagtactttggactttggaggtcttgttgcagcacagacttaggtagatgcagtggctgcctctgaacaggggatgctaagtaacaaacactggggagctcagctggcaagggttaaagctggcatttaaacacagacttatcacaggccctggctcagaagggcaacactgtactgcttcccaatgtgtaacaagtatcttctcattatggacattttggatacttgtattaagttttgtttctaatayagcttctatcaatcactttgcaatgaaggttgtcatgcctatcagtattgtaatacttgagattatttatataattcccagaaatgaagtaagtgggtcaaaagatttgaacaattctgagactttttgaaagtttaatcaaattcatttctaaaaagtctctctcctcattttaatttcaaccaac

SEQ ID NO: 603792 - DNA, 588 bp, Homo sapiens
aaccactcgttcaatcccttgcaaattgttgacctttacaaaattgaaggcaattctctagtcaagacgaagtataaacagagggtgtaagacagcccctgatttcagtgagtttgtcatcttgtggaggaatcatgacacatgcctagtattaataatgcaaggcaaagatcattatgtaamtttttaagagtaaaaaacatgagctttttgagtttagaggcagaaaaataaaaaacaaatctaatggttctctctgctaacataataatgccctgttgtactatttgtagcttggcattttgccctccaaaaagtcagaattattcatgcactatgtcttatagagtaaatcgtgatatagttgagagaactgggaatggaactatctctaataattatgtgcttgctccttctagaagcacacattttatctagtacttctaattatatggtagtgatgtgtaagtattgctaattacagggaaatgcttctcatgcatataccattttcttggttttcagttaaaaaaaaaaatgaccaccagggtgagaaatagatgcttcaaggcagtagattgctgccaa

SEQ ID NO: 603793 - DNA, 588 bp, Homo sapiens
aaccactcgttcaatcccttgcaaattgttgacctttacaaaattgaaggcaattctctagtcaagacgaagtataaacagagggtgtaagacagcccctgatttcagtgagtttgtcatcttgtggaggaatcatgacacatgcctagtattaataatgcaaggcaaagatcattatgtaactttttaagagtaaaaaacatgagctttttgagtttagaggcagaaaaataaaaaacaaatctaatggttctctctgctarcataataatgccctgttgtactatttgtagcttggcattttgccctccaaaaagtcagaattattcatgcactatgtcttatagagtaaatcgtgatatagttgagagaactgggaatggaactatctctaataattatgtgcttgctccttctagaagcacacattttatctagtacttctaattatatggtagtgatgtgtaagtattgctaattacagggaaatgcttctcatgcatataccattttcttggttttcagttaaaaaaaaaaatgaccaccagggtgagaaatagatgcttcaaggcagtagattgctgccaa

SEQ ID NO: 603794 - DNA, 620 bp, Homo sapiens
taaatgaaccatctttccaactacaatatacagggaaaagcttattttgtattttttatgtaacatagctccaacaacatattataataaatggttgcttaatcatatagtaataaatactattgatttgtttatgatagttatagcaatatcatgtgattgctatggtttgaatgtgtcctgtccaaaatttgcaaataggatttggtgcccttataaagggcattgatagagggagtttgttctctcttccccttctgccttctgccatgagagaatgcagcaagaagggcctcaccagatgatggtgacttaatcttggactcccagcctccagaactgtgagaaataaatttttcctttataaattatccatttacaggtgttctgttatagcagtacaaaaaaaactaaggcagtgatactaaagagttgcatatttaggattgctctttaaagaatcactaatatctagcagacagaagccaaatcttgttcatcttttacatatttatagtatcatttgcttgttgaattgttggctcttaaaagttctggagttcatggttgcatatgagatacttctaataaraaatatattgtggtgaaacaaatgcaag

SEQ ID NO: 603795 - DNA, 574 bp, Homo sapiens
tggccattttaataatactgattcttttgatccatgaacttggaatgttttttcatttctttgtgtaatctgtgattacttttagctgttttgtagttctctttatagacatctttcacttctttagttacatgaattactaagtattttattttattttggctatttaaatgggattgcattcttgatttggctctcagtttgaacattattggtgtatagaaatggtattgatttttgtacattgattttgtawcctgaaattttatattatttgttatttatcagtgccaagagccttttggctgagtctttagggtctcctagggataggacaatattatccatgaagagagatagtttggcttcttctttttttgttttgatgccttttatttcttgctcttgcctgatttgtctagctagcatttccagcatgatgttgaatagtagtggtgagggtggacatccttcacttattctagttctcaaggagaatgcttccagtttttgaccattcattattatattggctgtaggtttggcattgatggttcttattgttttgaagtat

SEQ ID NO: 603796 - DNA, 611 bp, Homo sapiens
gttggttttacattaaaaaaaaaaaaatctttcagtgaaatgtactgcactgatagagtacaagataagtatgatttccataaatgtagagaaataatttgacaaagttcaacagatattcataataaaaactctcaacaaactaggagtgtaatagaatattgcatgacttgtagagtactgcctcaacatttgctaactatttaactctggatatttgatagacatttccactgtaggcattagagtcttcrcattctatacagaaacattttcactatttattcaagttatttagtagtataagatgcctttaaaaatttttaaatgtaggtaagaccataatataattatatgcatttcctcagatttgtccattttctcaaaagttttacatttgatatgaatttgttatgatatcctctttttataatgcataaaacatctacaataatgtcacagcttttactcttgctattgtttatttgagccatttctctctctctctctcttgctttaaatccatcttgcaagtaaactgtaaaattttttaggctttttaaagaactatatttcattttgttaattatctttattttatcccatttatt

SEQ ID NO: 603797 - DNA, 462 bp, Homo sapiens
catttatttaataagctcctttatacactcatttattattattcacaagttaattatcagtagagattcactacctgtcaatctttccactgtgactctccagctgagtagcccacggtaaactaagtgtagacagaaccacacaagctactgacccctaaagacctaaaccagtgccactcaaaatgccatctgcaacctgctttttaccaatctgcagtgaaatatgtctagaaattgaatgattctaaatttttgtagtagtttgacagagtagtttatgcctgttaaatctcctaagttgttaagacttatgttttaggacttttaaatttcacttttcctgtacctttttatatttgatgaaagtattggttccagatgattggaaacaaaacaaaattgatctyttatcacatataattgaagatgcactgactcagagcaaacagcaaagacaac

SEQ ID NO: 603798 - DNA, 468 bp, Homo sapiens
ggtacgtgcctttttcctctccggtcaaatgcctatgagcctaatcttttctgaccacatgtattttaaaaagttgggggaagggatgccttaaatgcaaatcccccacttaggctccgaactccataaggaaaccccatgtcacatttctaagatgggcatatgtcatactacatggaagcgtcggaaacaagaaaactaaagataactggggtttgtgcaaccacagcagctgcttgcctctccagattccatatatcacctacaaagagacaaattcaggtttacaaattcttcctataaattcytcctcaaattcaggtttacacatatagcacaaaaaacaaagcaatttcaaggtttctccacacacgaactgtttggctgctgcccctctagtctgcctggatgcttcacggtttacctgtcatcatcttttctcatcaatggtaacaggtttttgtgccc

SEQ ID NO: 603799 - DNA, 359 bp, Homo sapiens
acagtaagtacaaatgtcctctcagcttgagtcaaaatcactggcaaggcacatgaaaccacaggttgccaagcaatcacttstgagtcagtaggcagggcatttccaacaggtttccagatgatgctgatgcagcttgtctggggactgccctttggcaccgaggctgggtgttgaagaagatcacctaccttctggtgaccttgggaaagtctgtgtgtgtgtgtgtgtgtgtgtgtgtgtgtgtgtgtgaaaaatagagactgatatctagagactgatttctagagtgaaaataaaatgcttccccaataaggggcagagtacataaaagacaagtcttattaacaacagatcgg

SEQ ID NO: 603800 - DNA, 455 bp, Homo sapiens
aggacagaataaattacctgaactttttacctgaagtatccaaacagctgagccagaagtgggttagttcatttttgctattcgctgtgcttctgtagatgcaggttattttcatacatggtcaagcaaaccacaacatagcacaagttcagctgttttaataatccactgggctttttacacaatagattcagctgtagggtgtccagatagatcaagtggacaggctttagcagaatgcacagagtatttcttctgagcctttctctggttagtttagttgtgcattatagatgaagctagagtctcatggatctttaacaaagaggtttttacatttcaaaaactgcatttgtttatttaacaataaaataaacattaataagtggrtgtcctcatttatccaaggagagaccagaaaagaataatcataaattgtagctgaagggatttag

SEQ ID NO: 603801 - DNA, 225 bp, Homo sapiens
tccctcttttctaatataaacacataaagctctgtttccttctaggtaactgatttgrgatcttccctcttttctaatacaaacacataaagctctgtttccttctaggtaactggtttgggatcttccctcttttctaatacaaacacataaagctctgtttccttctaggtaactgatttgggatcttccctcttttctaatacaaacacataaagctctgtt

SEQ ID NO: 603802 - DNA, 225 bp, Homo sapiens
tccctcttttctaatataaacacataaagctctgtttccttctaggtaactgatttgagatcttccctcttttctaatacaaacacataaagctctgtttccttctaggtaactgrtttgggatcttccctcttttctaatacaaacacataaagctctgtttccttctaggtaactgatttgggatcttccctcttttctaatacaaacacataaagctctgtt

SEQ ID NO: 603803 - DNA, 374 bp, Homo sapiens
ctctgtttccttctaggtaactggtttgggatcttccctcttttctaatayaaacacataaagctctgtttccttctaggtaactgatttgggatcttccctcttttctaatacaaacacataaagctctgtttccttctaggtaactgatttgggatcttccctcttttctaatataaacacataaagctctgtttccttctaggtaactggtttgagatcttccctcttttctaatataaacacataaagctctgcttcttggtaactgatttggtatcttccctcttttctaatataaacacataaagctcttgtttccttcttggtaactggtttgagatcttccctcttttataatataaacacataaa

SEQ ID NO: 603804 - DNA, 374 bp, Homo sapiens
ctctgtttccttctaggtaactggtttgggatcttccctcttttctaatacaaacacataaagctctgtttccttctaggtaactgatttgrgatcttccctcttttctaatacaaacacataaagctctgtttccttctaggtaactgatttgggatcttccctcttttctaatataaacacataaagctctgtttccttctaggtaactggtttgagatcttccctcttttctaatataaacacataaagctctgcttcttggtaactgatttggtatcttccctcttttctaatataaacacataaagctcttgtttccttcttggtaactggtttgagatcttccctcttttataatataaacacataaa

SEQ ID NO: 603805 - DNA, 357 bp, Homo sapiens
gcccatagcctagttggaaatacaaacaggtaaataaaatctgcaaaagtgcaaatctgcagaagtgtgatcaatgctacactacacaggcacaaatttatatatgtgtgtgtatatatgtgtatatatatacacatgcatatatgtgtgtgtatatatacatatacatatatatgtgtgtatgtgtgggtgtgtgtgtgtgtgtgtgtgtrtatatatatatatatatatatatatatatatgccacataggtaacccaaaaaaagaacaaaagagaatgataaattctacctcaacaggtctgagaatctcttgtaggtgaagagatcttggagtagtatcatgaacaacaaata

SEQ ID NO: 603806 - DNA, 625 bp, Homo sapiens
ataatattaagaaactgattaacgctcatacatgcatttacacttgttactcacttttaaaagctttcatactttggtatatcattactaatttattaacaagttttttcgttgtggtggactgccccaaattatttttaaaagaggcagaaaatacataagttaccaattaattaccttagtttagaagattaaaaattgttaatagtctgcctatcaactgcaacaaagtagtcaaggaattggtatgactgattatagttgattttaaaatggaagaaagatgtgataatgattttggtaataataatatgtaacattactgaacacttacrgtgtgatacacatttttctagacactaaaccagatccaattactcatcccatgaatttttaagagaaagtgatatgaaactttaagatcaacatttatttctccttttaaaacaaaccaataagtaaaacaagcctgttaacttcttttctgtccaacaaatcttttgttttcatgtaaaaataattttaaacttacatgtaaaatgacatattttattgcttttaatgataaatacaggaaaaaagttggaaaactatctttatcataaatgcctattaagcaaaggga

SEQ ID NO: 603807 - DNA, 629 bp, Homo sapiens
gttcatagtaaaattgagaagaaggtataaagggtaatattatatgtattattctagaactaccccatctttttttttaaacagctgcatagtatgtcattctatgaatgtaccatattttatttaaccaatggcatattatcctggttactaaagctgcataaaaaactactccaaaacttagtcctgtgaaataccatcttgttgcgctcactctgtaggttaggaatttggtcagggcataatggggatgacttgtctctgattcatgatgtctgagacctctgctggggagatccagcagctgaggtgactcaataactggggaatggaatcattggtggtattttcactcacawgcctgttggttggtgctggctgttggccagagcacctacctgtccatgtggccggagcttcctaacaacatggccccttcagggcagtcagattttttacatggtgacccaggactctaaaggcaagtgtctcaagagagagaggcagaaactgtgtggctttttctgacctagtgatggaagtccacacagtgcggcctattggtcacagtagtcacaaactacctagaattcaagagaggggactggatgagagaagtgtcaaagaat

SEQ ID NO: 603808 - DNA, 525 bp, Homo sapiens
gcaactatatatttacagacacaacgagatataagggcatagactgaaagtaaaaagacagaaagtgatgccacacactaatttctgtttatatatgaataataagaaagcccagcaaacacttgagaaagactgtctaaataagtaggctggaaatctgtgtcagtacaaacccagggctaagacagctgtgtcctacctgtagatctttcttttcagaagtacgtgtgtttatgggcagaggatgctgtcaggcaggtctggagctgaggatcgctgcgtgaagcacagcgtcatcgagaatgcaagacagtcatcatcwggatgaaggtaaagtgacatttactgacaaggtgagagaggcgatgacaccaaagtcatggcaggcagttacctatagaaaatccatctgaccattatgctctgtgctttttaatgctggttgcaaagataaattgggtcagcaacacccatgataagaagtcactgagcatttaaaggcagtgagcaacatattggacttgt

SEQ ID NO: 603809 - DNA, 537 bp, Homo sapiens
cctgaaactccaaagttattttgcataataattactaattgagatgcaaagtattaaactaatgttttcatatatcctttttgcacatacgcttgttaatattarcacttccatttgtaatatacagagtggtcaataaaccatgcaatacagcatgctagattttataacctctcaaggacaggggctatgtcttatttgtctttgagttcctcaccactagcaaaacaggtgcttaataagtgctagaactggccattgataaccaattctgatttccttaagctggtgcatatcactttgattcttataattttctctcacattatctttgatttaaagtctacatttaagtgtagttttcattccaaattggtcagagtaaaaaagtaccttctcatatttgaaagaacaccatggtattgtaaagatatcactgtccattaataagatatttgtcggaatttaaagaggaaaaataaaagatacgactaaagtaatttccctggcactcttctgaaatagttcagaaaatca

SEQ ID NO: 603810 - DNA, 507 bp, Homo sapiens
gtgctggtccccccgctatttgataatattccaaagcaaaatacccatgctaccgatgactrggaccccccagctcagtcgcttgggctagtttttcctgtagtctttcaggattggaagtagagtggagttgtcaggtcctgttacaaaagtagactaactggaactgtagacttttttctttaaacctaacagaaggaaaagattggtgaatcaaaaactagcataaaaactgcaaaaaacctctgggaaaatagacggtcatgaagtccatatatgggaaagaaatgtagcccagaaatttctaggcatatgaaaagcacaactgtaaaactaagatgttttagatggaggagagctgagagtgacagctgagagtcgtagatgctgccttggaagagtgtccacgctaccctggacaggggcctgcctgcccacccagtgaccatggcagggcagagaaaaagcaacgtcagcccagtatcttctccagccagtggggtggct

SEQ ID NO: 603811 - DNA, 507 bp, Homo sapiens
gtgctggtccccccgctatttgataatattccaaagcaaaatacccatgctaccgatgactaggaccccccagctcagtcrcttgggctagtttttcctgtagtctttcaggattggaagtagagtggagttgtcaggtcctgttacaaaagtagactaactggaactgtagacttttttctttaaacctaacagaaggaaaagattggtgaatcaaaaactagcataaaaactgcaaaaaacctctgggaaaatagacggtcatgaagtccatatatgggaaagaaatgtagcccagaaatttctaggcatatgaaaagcacaactgtaaaactaagatgttttagatggaggagagctgagagtgacagctgagagtcgtagatgctgccttggaagagtgtccacgctaccctggacaggggcctgcctgcccacccagtgaccatggcagggcagagaaaaagcaacgtcagcccagtatcttctccagccagtggggtggct

SEQ ID NO: 603812 - DNA, 507 bp, Homo sapiens
gtgctggtccccccgctatttgataatattccaaagcaaaatacccatgctaccgatgactaggaccccccagctcagtcgcttgggctagtttttcctgtagtctttcaggattggaagtagagtggagttgtcaggtcctgttacaaaagtagactaactggaactgtagacttttttctttaaacctaacagaaggaaaagattggtgaatcaaaaactagcataaaaactgcaaaaaacctctgggaaaatagacggtcatgaagtccatatatgggaaagaaatgtagcccagaaatttctaggcatatgaaaagcacaactgtaaaactaagatgttttagatggaggagagctgagagtgacagctgagagtcgtagatgctgccttggaagagtgtccacgctaccctggacaggggcctgcctgcccacccagtgaccatggcagggcagagaaaaagcaaygtcagcccagtatcttctccagccagtggggtggct

SEQ ID NO: 603813 - DNA, 610 bp, Homo sapiens
tgttgtgcagtttcaccacccagcccccaccatggacaacctctctgctcctggggaaataggtgtatctttctctactggcctgggatggttggtccaaggcaatcatgagatggcttattctctctgccataaaggtagaatcaggatgataaaaaagagaggaaacatgaatcaagtactctgtataacttagtttaagattgtttctttcatgaaatggtagatattgcagggacagcctgggagaaaaagtcagaaaaatagttcccttctaactcctgcccatattatcagcacactcagaattgtagaayaaagagtgttgtggttactgcttctgaccgtctttagagtctaatacatggtctcacaccagccaagaacaccggtttattccagaattgggggccactgcctcactcttgccatccatctggaaaaaggtttttggagaatctctaatctaacttctgcatactcagaacagagttccgcttcatccaagcacaggcatgactgtcctaacctcatgtcacctcacattggccatcgtggccaggaaagaacgctgagttgatgtaatattcaacacaaatctttcttagtg

SEQ ID NO: 603814 - DNA, 557 bp, Homo sapiens
gatacaaaatttgtatactacataattcgtacactcttttaagggaggcacatataggattaaccagcacatgagctgaccaccttaacagctaaaatcacaagggaaaagatcgctgtagaacatggtgcctagtgagaatcaggagacttgcgtttattcctgtctgttctgactcatatcctggatctaggcccgttatttttcacaaagtgtctttcaggtaaattaaacaagtatgtatcagcaaactggagcatgaatatagtgggaaaatcacagaatttggaatcacaagacacaggtttgcctccagactctgttaatcactagctgggtgaccttargctgcttaactttcaagcttccatctgtaaggtggagataatataaagaggcctcctctaattttcatgcaaggctttggtgaaaaagcagtgagatgatgagtctgaatcattttgtaaagttttaagatttatttagatgagagtgattataatttacttagcactatgtgagactctgggtaaagcaaaagacctttgagacatttc

SEQ ID NO: 603815 - DNA, 423 bp, Homo sapiens
gcacaggtttagagctttacaaatttcttttgggttcttctttatttccatctcttatggacttctcatcttggccttgctcttgtggtcactgttctcgtyctgatcagctgacactatttgtaccacgaggcccaaacaactttttgttttgggtcctaaatcctaagattaggcaggatctttcttagtttgggtttcagatgcacgcctctgggattcggataaaaattgttatcatgcagatagattagtgcccctgggcactatttggggcacagaaagtccctaactagcaacttcttcttgtaacccaagctaaacttctgtatctccctcttgtcttacccactgtttcctagagcttctaggattctagaagcttcttcacagtttcactttttatcactcaacagtctggtt

SEQ ID NO: 603816 - DNA, 598 bp, Homo sapiens
tagtgttcttttcatgacatcagaagagtttagttagctttttcattgtttcattttgtagttcatactttttgggttttaaggattaagagtgtttactcgtaaagaactttgagatgcatatggaaattactgctatctgatattacttatacgtgggaagcaggaatagaaacaggagataggaaactgaaaayaacaaaacctccaccccaagggctaagcattgtcataataagtaatgaacaactgagacatttagctgcctccttggcctctcaatttggatgtctccgatgggcatccctaaccttacaccgtcacactaggactctgggttgcactcgctcaccccccacctttccttatcccagtaaatggtcctaccatctatccagatacacagcttaaaaacttaggagtctctttccattatcctgcctttgcaaaagactcaccagcattctaataagtctacctaataatctatcctaattttacctgcaaaatatactttttgacctaatctgcctacttctctttctccactgccatctctgtactctaagccactaggactcctgcctgaattaccaca

SEQ ID NO: 603817 - DNA, 598 bp, Homo sapiens
tagtgttcttttcatgacatcagaagagtttagttagctttttcattgtttcattttgtagttcatactttttgggttttaaggattaagagtgtttactcgtaaagaactttgagatgcatatggaaattactgctatctgatattacttatacgtgggaagcaggaatagaaacaggagataggaaactgaaaataacaaaacctccaccccaagggctaagcattgtcataataagtaatgaacaactgagacatttagctgcctccttggcctctcaatttggatgtctccgatgggcatccctaaccttacaccgtcacactaggactctgggttgcactcgctcaccccccacctttccttatcccagtaaatggtcctaccatctatccagatayacagcttaaaaacttaggagtctctttccattatcctgcctttgcaaaagactcaccagcattctaataagtctacctaataatctatcctaattttacctgcaaaatatactttttgacctaatctgcctacttctctttctccactgccatctctgtactctaagccactaggactcctgcctgaattaccaca

SEQ ID NO: 603818 - DNA, 613 bp, Homo sapiens
ctatttatttgcttgtcatctctctgtttacgtgaatgtgagctccataaaagcagatacttttcctaagacagtgcatggcacatagtatttaaatattaagcatgaaataaagatttctggaataaatgaagaagcaaatgcagaggcctttgggaacacatacaacataaaaagaagaggagagaacaattatgactacctagtagacttccttattaccttagttatcttggcaagggcaagaaattgcccaaatatagatcatttgggggctaacaattctgacaaagtagggctttatagaagttgaaggtaaagctagttaatttgaggactttccctagacasagccctttctctaatatcctagttaataataatcatccatctttacatgctaacagtgcatcagggaggactatgtcatggtggtggtagtaaataataatgataaaaaataacacaatcaaatacttacatggtgcttactgtgctccaggcactatcctaagtgctttatacagatgagctcacttactcctcacagtcaccctatgagtttgtgctattattatcactgtttgctgatgagaaagtggaagcacagaga

SEQ ID NO: 603819 - DNA, 613 bp, Homo sapiens
ctatttatttgcttgtcatctctctgtttacgtgaatgtgagctccataaaagcagatacttttcctaagacagtgcatggcacatagtatttaaatattaagcatgaaataaagatttctggaataaatgaagaagcaaatgcagaggcctttgggaacacatacaacataaaaagaagaggagagaacaattatgactacctagtagacttccttattaccttagttatcttggcaagggcaagaaattgcccaaatatagatcatttgggggctaacaattctgacaaagtagggctttatagaagttgaaggtaaagctagttaatttgaggactttccctagacagagccctttctctaatatcctagttaataataatcatccatctttacatgctaacagtgcatcagggaggactatgtcatggtggtggtagtraataataatgataaaaaataacacaatcaaatacttacatggtgcttactgtgctccaggcactatcctaagtgctttatacagatgagctcacttactcctcacagtcaccctatgagtttgtgctattattatcactgtttgctgatgagaaagtggaagcacagaga

SEQ ID NO: 603820 - DNA, 613 bp, Homo sapiens
ctatttatttgcttgtcatctctctgtttacgtgaatgtgagctccataaaagcagatacttttcctaagacagtgcatggcacatagtatttaaatattaagcatgaaataaagatttctggaataaatgaagaagcaaatgcagaggcctttgggaacacatacaacataaaaagaagaggagagaacaattatgactacctagtagacttccttattaccttagttatcttggcaagggcaagaaattgcccaaatatagatcatttgggggctaacaattctgacaaagtagggctttatagaagttgaaggtaaagctagttaatttgaggactttccctagacagagccctttctctaatatcctagttaataataatcatccatctttacatgctaacagtgcatcagggaggactatgtcatggtggtggtagtaaataataatgataaaaaataacacaatcaaatacttacatggtgcttactgtgctccaggcactatcytaagtgctttatacagatgagctcacttactcctcacagtcaccctatgagtttgtgctattattatcactgtttgctgatgagaaagtggaagcacagaga

SEQ ID NO: 603821 - DNA, 608 bp, Homo sapiens
ttatacaattcattttatatttttgctgttatctctattaacctttcaagtggcatcatgactccaaaataccatgctgtacattttcctcattgaattttactcatgacatggcctttatgaaagaggatagttttgctattcccattgtacagattaagatacttcaaagcagagattgagcaactcaattcatatatcatgttggcactactgtcaaaatactaatgtgtaatgcataggaaattatttttctattccagaggtatactgtcttgttgcatgataattacatcttttttcatctctgttaayatcaaccatacagttaaacaagtattagttttaatataaatgatttgaatatttacattagagaaatgaaaatatcaactacgtgagactcaatgcatcagacagttaaaacttgttttatgactctagaagtttcaggaaatggaatttaaatggcagtaaaactagggaagttatatggctggcctggcaagtagtatatttcctttcacaggccatattatacaaaaacaatgcatatctggttagaaatataacaacagatttaattcaaaataatatcaaaaatataa

SEQ ID NO: 603822 - DNA, 623 bp, Homo sapiens
aggctgtaatcaagggttctttgagctccccacaaaccgatccttgattttctgaggaagcttgtggcctagagcagacagctgaaactatggtgcttggtgaaaagcaagtgaaaaaaamaactactactttattacttaccttttcccagtcatcttgcagatttcagattttctaccctttccgttctcagtaactgaccggccacctttgtggcatcagccccaccacttctcctgaggtccaagcctgtctccatctccatatccaacagctgtcctctctctgccattttcctgtactgagttctaatattatctttccctcatccatgttcctatatcaagaaaaatgatctcctttaaacaccaaaccagaatttctcgttcttcgaaagagtctatccatccatttatgtatgttagtgtatttctaggcagctaaaaaataaatgtaatctcagagtagaagtgcaatagaatggaaagagaatggtacccggagttagaaaaagggggctacacccagctccatctttctgcccatttgggcactgtcagctctaagtgaagtttctgtagtctgggcagttgcagacctccactgctggacaagggaaaga

SEQ ID NO: 603823 - DNA, 645 bp, Homo sapiens
atctggtaatttagcctacaaataaactgcattctgacagacacgttagttggtttaaactgagtcaactacaactatgaggtgaatggcatgagtctctttcaccctgtgctgaagaggctggattttatctataatgggcctcccttcaactgtttccctgttattcaagtactcacacagcctctgactcaggcagcctctcgactgaaaacggcgactaatccagtccactccacatcctggactgtcactcacccccacgccacagaaacctgtttctttctcataagctgtggataaggtggaatgtgtaaactactccctgataccaagtttccaggtaaaaagcactgtcaaagttgacactattttccttaaaacatttaaaaacccatacttttacatgcaaaatcaatataaaatcatcagtaacttggtcttttttttggttaaggtttattgcttyagtctctttcaaagaattttttgatacttaaacctttacagaaaaatttataaagttccacagatatcaacaattcataaattccaaggggcttttggatagttttttttaatcactataaaaaatttcacttcccatttaaaacaaaaaaaaacacaaagtgcacacacgtacac

SEQ ID NO: 603824 - DNA, 481 bp, Homo sapiens
gcttttggggttatatccaagaaatcattgcccagactaacatcataaagatttccccctatattttcttctagtacttttacagcttccaggtcttatgtttcagtctttaatccattttgagttgatttttgtatrtggtgtgagataagaggcatttcattcttctgcatgtggatattaagggaatttttataaatggaagattaaaggactagccaaccagaagtgtgattatgatcactattaactggacaaagtgacacctatgactttattcttttcccatattctagactagggtttattacaccaaggcccattaaaaatgcttggcagagtggagggaggaaggtggtgccttgtcacatgtccttcgggaattaaatttggtgatgttttcaagtccatgataatcttaaaaaatgagtaggtctttttttggaccaactggatggtgcgttctagggaagcacgatgc

SEQ ID NO: 603825 - DNA, 481 bp, Homo sapiens
gcttttggggttatatccaagaaatcattgcccagactaacatcataaagatttccccctatattttcttctagtacttttacagcttccaggtcttatgtttcagtctttaatccattttgagttgatttttgtatatggtgtgagataagaggcatttcattcttctgcatgtggatattaagggaatttttataaatggaagattaaaggactagccaacyagaagtgtgattatgatcactattaactggacaaagtgacacctatgactttattcttttcccatattctagactagggtttattacaccaaggcccattaaaaatgcttggcagagtggagggaggaaggtggtgccttgtcacatgtccttcgggaattaaatttggtgatgttttcaagtccatgataatcttaaaaaatgagtaggtctttttttggaccaactggatggtgcgttctagggaagcacgatgc

SEQ ID NO: 603826 - DNA, 570 bp, Homo sapiens
cagccgagtcaaggcgaggagaacctcagggccgtcttggtcacaccgagcccatcaggccctcctggtgcagccagtgtctgctgagaacctgcagtgggctgtggggctcgcggtggttctgacagggctgctgggcccgctgttgacagcagctctcccatttacyaaggctttgatttttgcaggccctgtgctaagccattcacagagactatcttgttttgcatttctcgtgattatttcatttaggcatcactattattggcacacaacagatgaggaaacggggccatcaaagtcacacgggggtggacagcagagctgagattcaaagccacgcctgatggcaaagcccatgtgcaaattcacgctggtcacaaaagggctgtgagagcagaccccaagctcatgacaagatcagcgtgacccatggtcagcccccctgcacccctgggtttccacagaactcatctatggcagcctgccctgggacactgattgctttaggttcgtcctagacaaagctcttcaagctttcatgctttaatgtggacacaggcatcacct

SEQ ID NO: 603827 - DNA, 418 bp, Homo sapiens
  misc_feature 385: n = A,T,C or G
ccaggagttggtggctcacacctgtaatcccagcactttgagaggccaaggcgggtggatcacttgaggtcaggagttcaagaccaacctggacaacatggggaaaacccgtctctactaaaaatacaaaaattatttaggcatggtggcgctcgcctgtagtcccagctacttgggaggctgaggcaggagaatcatttgaacccgggaggcggaggttgcagcgagccgagatcacgccactgcactccagcctggrtgacagagtgactccatctcaaaaaaaaaaaaaaaaaaaaagaatcagcaatgttccaaataaaaagtcattaaaaaattatcctcataggttcatttagtctcacataattaattctgttctggntgatgtaaggaaagcagtttaataaagctatca

SEQ ID NO: 603828 - DNA, 452 bp, Homo sapiens
ggtagaagaggaaaactgtggctccatactccacctgttaatcctgaagagctgctgaaaccatcagtctgagtggagaagtggcaagcgggaggggctggatcaagtcaatgggcacgtgacagtggtttctcttgaaaacacctgtcacagccttacccatgggtggctatgagatccctgcccaggggcaccttttgagttttgggaaaaatgaggacaaagttttgctacagaggcaggtgcgtggcatttgttcactctggggacagggaatggggaggcgatggcgtggatggtgtggtcagctgtgaaatgctgatctcaatttgttttgtttrctgaaagggaaaaacaacaggcagagggaaacttcaaagtattatgatggcaacactcttaactttcttttatagattttgaaaaggttgtagtttgaaataatttcaaac

SEQ ID NO: 603829 - DNA, 618 bp, Homo sapiens
atagttaaagctccagtggggaaaaactcagaattcaaaacyacaaaatccacaaggaaatcacccatgatgagcaagtcggcacacaaaacacacaagagactgggtccccaaggacctgaatataggaggatctgaaaatgattacacacttcaaaaagactaggacgtcacaggaggaccttaaagaaaagaataaggtattatgagaaaaaacagatgtgaaaaaaaattagggaaacagaagccactctcacctctcacctcctccccacaaaagataaatctaaaatataaagacgtacacaagttgatgtaaagagatggaaaaaaatcagagaaatactaatcaaagaaagctgttgttgctacattcatgccaaataaatagacctcgaaggcaaaaaaaggcagtattagggataaaatcaatagaatacatgaatatcatatttatatgtaacacaatggcatcaaaacacagaaagcaaaaattaatagaattacaagagaagtggaagcatccagacatatatttaattttcagcatataactcagtaactgatagatcaaccagacaaaaaataatataaaaaataacaagtttatttctgaat

SEQ ID NO: 603830 - DNA, 646 bp, Homo sapiens
cggcacacaaaacacacaagagactgggtccccaaggacctgaatataggaggatctgaaaatgattacacacttcaaaaagactaggacgtcacaggaggaccttaaagaaaagaataaggtattatgagaaaaaacagatgtgaaaaaaaattagggaaacagaagccactctcacctctcacctcctccccacaaaagataaatctaaaatataaagacgtacacaagttgatgtaaagagatggaaaaaaatcagagaaatacyaatcaaagaaagctgttgttgctacattcatgccaaataaatagacctcgaaggcaaaaaaaggcagtattagggataaaatcaatagaatacatgaatatcatatttatatgtaacacaatggcatcaaaacacagaaagcaaaaattaatagaattacaagagaagtggaagcatccagacatatatttaattttcagcatataactcagtaactgatagatcaaccagacaaaaaataatataaaaaataacaagtttatttctgaatggacatatataccttgcatttaatatttagagaatatacattcttttccattacatttaaagtatttacaaagtaattgtgtactagatcctatatgaaatattcac

SEQ ID NO: 603831 - DNA, 447 bp, Homo sapiens
ttatcttttaaaattgttcaggaccatctacttaagctgagccatatgtgagactcagcaattccactcctgaataaaagaaattcaaacacatgttcatcaaaagacatggactagaacgttctcagcagcattatttccaacagtcaaagacgggaactacccaaatgcccatcaacyatagaatgggtaagttatggtgcattcacatactgtaatctaataaagcagtttgaatgaatgaaccagaatgacatgcaacaatatggctgaatctctcaaatgatgttgaacaaaataaacacaaaaagtacatttgtatgactattattatatagcatgtacttttctggatatatatcatactttaatgtaattgaaacagtacttaaaaatctacccaccaaaaacctacaggtgaagtgtatgaaatctttaatgactcct

SEQ ID NO: 603832 - DNA, 489 bp, Homo sapiens
aatgataggaactctcatgattgacagggcrgatctgcctcctggtgcacatctcagatgataccaaatggctgttgctgggggaggataaagagagaaacaattttcacagccacagaatgttaccaagtgaggatgtgcagctaaactcactttaaccaaatgctgcgaaagtaactgaaagcacgtgtgagtatcgctgagccactctgggtgtcagtagcttctttccttgcaggcaaaacacagaggtgataatcaaccagttaacaccgggcagcccaatgagatgaggaggcagttaaaagaagagcaccaaggactcctgggctttgctgccaaatgtcccacttggcttgtaccaacaagcaggattcattcacactgggcttcaccttagttctgcttctaaaatagatggaaattttacagaaatgcctaatggaaagttttatccccaagtttgtgttgtggtatataacagaattc

SEQ ID NO: 603833 - DNA, 490 bp, Homo sapiens
taatgataggaactctcatgattgacagggcagatctgcctcctggtgcacatctcagatgataccaaatggctgttgctgggggaggataaagagagaaacaattttcacagccacagaatgttaccaagtgaggatgtgcagctaaactcactttaaccaaatgctgcgaaagtaactgaaagcacgtgtgagtatcgctgagccactctgggtgtcagtagcttctttccttgcaggcaaaacacagaggtgataatcaacyagttaacaccgggcagcccaatgagatgaggaggcagttaaaagaagagcaccaaggactcctgggctttgctgccaaatgtcccacttggcttgtaccaacaagcaggattcattcacactgggcttcaccttagttctgcttctaaaatagatggaaattttacagaaatgcctaatggaaagttttatccccaagtttgtgttgtggtatataacagaattc

SEQ ID NO: 603834 - DNA, 570 bp, Homo sapiens
gaaactccatctctactaaaaatacaaaattagcygggtgtggtggcgcatgcctgtaatcccagctactcgggaggctggggcaggagaactgcttgaacccaggaggcagaggttgtagtgagctgagatcgtgccattgcactccagcctgggtaacaagagtgaaacttagtcaaaaaaagaaagagaagaaagaaagaaagtgagagagagggagagagaaaaagagagggagggagggaaagaaaggaaagaaagagaactaggaaatgctcagaaaaaactgtcagatgaattctgtatatagactttccaaagctaatttgatgggctcagctttggggccacgatgttcaccaacgttgtggattctctgggcctattgggctctgagagataggccccagcacaagactggcacatagtaggcccacaggaaatatttaaggagtgtgaatggataaatggatttggatgcaacaagtctgaattgtggatgcaaatttgattaaatatgttctttattttatttatttattttttttttgagacggagtctcgctctgt

SEQ ID NO: 603835 - DNA, 570 bp, Homo sapiens
gaaactccatctctactaaaaatacaaaattagccgggtgtggtggcgcatgcctgtaatcccagctactcgggaggctggggcaggagaactgcttgaacccaggaggcagaggttgtagtgagctgagatcgtgccattrcactccagcctgggtaacaagagtgaaacttagtcaaaaaaagaaagagaagaaagaaagaaagtgagagagagggagagagaaaaagagagggagggagggaaagaaaggaaagaaagagaactaggaaatgctcagaaaaaactgtcagatgaattctgtatatagactttccaaagctaatttgatgggctcagctttggggccacgatgttcaccaacgttgtggattctctgggcctattgggctctgagagataggccccagcacaagactggcacatagtaggcccacaggaaatatttaaggagtgtgaatggataaatggatttggatgcaacaagtctgaattgtggatgcaaatttgattaaatatgttctttattttatttatttattttttttttgagacggagtctcgctctgt

SEQ ID NO: 603836 - DNA, 570 bp, Homo sapiens
gaaactccatctctactaaaaatacaaaattagccgggtgtggtggcgcatgcctgtaatcccagctactcgggaggctggggcaggagaactgcttgaacccaggaggcagaggttgtagtgagctgagatcgtgccattgcactccagcctgggtaacaagagtgaaacttagtcaaaaaaagaaagagaagaaagaaagaaagwgagagagagggagagagaaaaagagagggagggagggaaagaaaggaaagaaagagaactaggaaatgctcagaaaaaactgtcagatgaattctgtatatagactttccaaagctaatttgatgggctcagctttggggccacgatgttcaccaacgttgtggattctctgggcctattgggctctgagagataggccccagcacaagactggcacatagtaggcccacaggaaatatttaaggagtgtgaatggataaatggatttggatgcaacaagtctgaattgtggatgcaaatttgattaaatatgttctttattttatttatttattttttttttgagacggagtctcgctctgt

SEQ ID NO: 603837 - DNA, 570 bp, Homo sapiens
gaaactccatctctactaaaaatacaaaattagccgggtgtggtggcgcatgcctgtaatcccagctactcgggaggctggggcaggagaactgcttgaacccaggaggcagaggttgtagtgagctgagatcgtgccattgcactccagcctgggtaacaagagtgaaacttagtcaaaaaaagaaagagaagaaagaaagaaagtragagagagggagagagaaaaagagagggagggagggaaagaaaggaaagaaagagaactaggaaatgctcagaaaaaactgtcagatgaattctgtatatagactttccaaagctaatttgatgggctcagctttggggccacgatgttcaccaacgttgtggattctctgggcctattgggctctgagagataggccccagcacaagactggcacatagtaggcccacaggaaatatttaaggagtgtgaatggataaatggatttggatgcaacaagtctgaattgtggatgcaaatttgattaaatatgttctttattttatttatttattttttttttgagacggagtctcgctctgt

SEQ ID NO: 603838 - DNA, 603 bp, Homo sapiens
attagtgatggacaccaggattcacttctttgatgaatgtctgccttgtttttaacattaaaaccagtaaagcttacctgtttcatataatcgtaaaggagaatattttaaaaattaagcctggctggccactgtggctcacgcctgtaacgccagcactttgggattacaggtgggcaaatcacctgaggtcaggagttcgagaccagcttggccaacaaggtgaaaccctgtctctactaaaaatacaaaaattagccaggcatggtagcgagcacctgtaatcccagctactcaggaggctgaggcaggagaattgcttgaacccgggaggcagaagttgcactgagcaagatcataccactgcactccagcttcggtggcagagtgagactctggctcaaaaaaaaaaaagaaaaagaaattaggttctacatggtggttcaagcctgtaattccaacastttaggaggtcaaggtgggaggatcacttgggaccaggagttccagaccagcctgggcaacatagtgagacccagataattaattaattaaccctacagataattaattaattaacatactgagtgctctgaggaattc

SEQ ID NO: 603839 - DNA, 603 bp, Homo sapiens
attagtgatggacaccaggattcacttctttgatgaatgtctgccttgtttttaacattaaaaccagtaaagcttacctgtttcatataatcgtaaaggagaatattttaaaaattaagcctggctggccactgtggctcacgcctgtaacgccagcactttgggattacaggtgggcaaatcacctgaggtcaggagttcgagaccagcttggccaacaaggtgaaaccctgtctctactaaaaatacaaaaattagccaggcatggtagcgagcacctgtaatcccagctactcaggaggctgaggcaggagaattgcttgaacccgggaggcagaagttgcactgagcaagatcataccactgcactccagcttcggtggcagagtgagactctggctcaaaaaaaaaaaagaaaaagaaattaggttctacatggtggttcaagcctgtaattccaacagtttaggaggtcamggtgggaggatcacttgggaccaggagttccagaccagcctgggcaacatagtgagacccagataattaattaattaaccctacagataattaattaattaacatactgagtgctctgaggaattc

SEQ ID NO: 603840 - DNA, 598 bp, Homo sapiens
ctgggggtgtcagaaagagacagtgtgaaaggcacttgattaaaatgtgtaaatcctactgccctgaaagaatctgattttttacaayagccacaaaatactaagtagacagaggcaaaggtctaacttcatttttctattgaaggtattaattagggctgttactaacagtggtggcattgtgaaagagtcagaggattccagccaaacaggacttttcaggggctttgaacaaggtttaaagtatgtccctgcaggggaaaggaagctgtctgtagcatccctaccagcacgttcctctgattgttctcagttcatgtgagtccacagaggacataaaccgagtgagctggtaacagatgtaatgaaagtactccaggcctcagtaagaagagtcagaggggtggcattggtgcctgaataacagcatttgtgtagctagattagaacaaagcagggactggggaactcttcctgcaattctcaacttacagtttggggaatgaaggtattagtaactgaggtgaggctgaggcagtggaaacatagctcaggtggagagaattgtgcatgatcaataaatagagaacggctaatt

SEQ ID NO: 603841 - DNA, 598 bp, Homo sapiens
ctgggggtgtcagaaagagacagtgtgaaaggcacttgattaaaatgtgtaaatcctactgccctgaaagaatctgattttttacaacagccacaaaatactaagtagacagaggcaaaggtctaacttcatttttctattgaaggtattaattagggctgttactaacagtggtggcattgtgaaagagtcagaggattccagccaaacaggacttttcaggggctttgaacaaggtttaaagtatgtccctgcaggggaaaggaagctgtctgtagcrtccctaccagcacgttcctctgattgttctcagttcatgtgagtccacagaggacataaaccgagtgagctggtaacagatgtaatgaaagtactccaggcctcagtaagaagagtcagaggggtggcattggtgcctgaataacagcatttgtgtagctagattagaacaaagcagggactggggaactcttcctgcaattctcaacttacagtttggggaatgaaggtattagtaactgaggtgaggctgaggcagtggaaacatagctcaggtggagagaattgtgcatgatcaataaatagagaacggctaatt

SEQ ID NO: 603842 - DNA, 560 bp, Homo sapiens
tctgattgttctcagttcatgtgagtccacagaggacataaaccgagtgagctggtaacagatgtaatgaaagtactccaggcctcagtaagaagagtcagaggggtggcattggtgcctgaataacagcatttgtgtagctagattagaacaaagcagggactggggaactcttcctgcaattctcaacttacagtttggggaatgaaggtattagtaactgaggtgaggctgaggcagtggaaacatagctcaggtggagagaattgtgcatgatcaataaatagagaacggctaattttcaaattggtgatgctgctaggagggcgtgaaggagactaagacaggaaaaacatccttgtggacagcattggccaagacttcacggcggagacagagcacagctggggcttggaggagagagagctctatgctgatggagggaaggagcctattccatatgtgagaaagaaggggggggagcactcccraccaagtcaacaggcatagactgcgggggccaatctgtctgcagctgaatgtggtgaggagtggcagac

SEQ ID NO: 603843 - DNA, 533 bp, Homo sapiens
cctgcccacatccttgagggcaagtcttctttactttactgattactgattccaatgccagtcttttctggaaacaccctcacaaacgcacccagaaataatgctttatcagccttctggggattctttcacccaatcaagttgacacatcaaattaataggaattacaaatattttctcacagtctggcttgtcttttaaattttttaatatttttcttttttgagacagggtctcactctcttgcccaggctggagtacaatggtgcaatcacagcttastgcagcctcaacctcccaaggtcaagcaatcctcctgcctcagcaccacccccacccagtagctgggactacagacacacagcaccacacctggttactttttgtattttttgtagaggtggggttttgccatgctccccaggctggtctcgagctcctgagctcaagtggtctgcctgcctcggcctcccggagtgctgagattacaggcatgagccaccactctcagcccagttttataatatttttta

SEQ ID NO: 603844 - DNA, 517 bp, Homo sapiens
ctggtttcaaccctgaaagtcccatatcctgagatacccttcattcctgggtcagtcagacacctggtcccccaaatgtactgcctcccagttgtactgtgtgtcgttgactgttgctttgctcttgccagtttcttatctagaatgagcgattaccttatcattgccttgaattcctcatgggacccgcacagacgcttgtacccagtagatgctcatgaagtgggtatatgcataaatgttggtacctcttcctctgtagacagcactgaaatacagatcactgaaatgactgactcaagagccatatgacagcaccaaggttaggcsgattcccatgtcttgggcccttgtttccttcttggttataaaaggtcttatagtgccctctggtggtgtcaggaagctgtctaatcccctgaattacaaggcagaaatcatgccttctcttctgtattcagtgcgagtcataagaagaccattactactaatgtcagtgcctgtgaactggacttga

SEQ ID NO: 603845 - DNA, 588 bp, Homo sapiens
tttctcttgtgcccgagatgaaaaatcaagcagcctcatgactgttggtcacctccgggtcataaaaatctcacaatcacatcaagtttaaaacaaataaaacaaaccaaaaaaccccactcactcccacaatgaaaatacacagtttcaygtaatagtcaaaataatcttgctttaaaattgaggctcttgatattgacagaatgtgtctgattacgtccttgttcttttttttccccctcacaggaatgttgcagctattctaagggctttgcacgctcatgtgaattttaaattcagctagtcagtcacacacacacacacacacacacacacacacacacagagtttggattttgattggaggtatttttgaatctggacattgtaatggtgttatttgttcccttgccttagtgaggttatcatgcttattagcacaaggggcgggtttccaagcatttacctagacaagctgtgaccccctgtcatgtgtacaaagctcttgttggcctgactgtgccactcatcatcagctgtttgtttttttaagataatagtctattttttagagcacttttaggttta

SEQ ID NO: 603846 - DNA, 588 bp, Homo sapiens
tttctcttgtgcccgagatgaaaaatcaagcagcctcatgactgttggtcacctccgggtcataaaaatctcacaatcacatcaagtttaaaacaaataaaacaaaccaaaaaaccccactcactcccacaatgaaaatacacagtttcacgtaatagtcaaaataatcttgctttaaaattgaggctcttgatattgacagaatgtgtctkattacgtccttgttcttttttttccccctcacaggaatgttgcagctattctaagggctttgcacgctcatgtgaattttaaattcagctagtcagtcacacacacacacacacacacacacacacacacacagagtttggattttgattggaggtatttttgaatctggacattgtaatggtgttatttgttcccttgccttagtgaggttatcatgcttattagcacaaggggcgggtttccaagcatttacctagacaagctgtgaccccctgtcatgtgtacaaagctcttgttggcctgactgtgccactcatcatcagctgtttgtttttttaagataatagtctattttttagagcacttttaggttta

SEQ ID NO: 603847 - DNA, 525 bp, Homo sapiens
ctgcctgcctgcctagatctgtagaaccaagtctcattcaggtcaaggatcaagtgcttgaaaggaactgaaactcattcayagggtcagagcgggtggtggcagacaggaaacattagagaatgtcaggcaaggcaggggctctccccggtatttctcccaatggccccattgtctctcctctctgccatttgtttcctttctctccaacccctggacccataccctctgtgaggctcttagtttctgctcccgcataacatcagcttgcgtggagaggccgctacactggctctggaatcggtgcttagtggctcagggctcacgtctcttgctttcttcagcagaggagcctgggagttgcatctcctaacacggcgggagagggaggagccccttgacttagagtagggaaacttcctgtcattcctaatgagactcaccttattgtcttgggaaaagaaacttaggacatttcaagcctcagagtgtaggcaagaggcaaagcaaaggcaggaaccaggg

SEQ ID NO: 603848 - DNA, 525 bp, Homo sapiens
ctgcctgcctgcctagatctgtagaaccaagtctcattcaggtcaaggatcaagtgcttgaaaggaactgaaactcattcatagggtcagagcgggtggtggcagacaggaaacattagagaatgtcaggcaaggcaggggctctccccggtatttctcccaatggccccattgtctctcctctctgccatttgtttcctttctctccaacccctggacccataccctctgtgaggctcttwgtttctgctcccgcataacatcagcttgcgtggagaggccgctacactggctctggaatcggtgcttagtggctcagggctcacgtctcttgctttcttcagcagaggagcctgggagttgcatctcctaacacggcgggagagggaggagccccttgacttagagtagggaaacttcctgtcattcctaatgagactcaccttattgtcttgggaaaagaaacttaggacatttcaagcctcagagtgtaggcaagaggcaaagcaaaggcaggaaccaggg

SEQ ID NO: 603849 - DNA, 442 bp, Homo sapiens
tgctcaggagcaggaaggaggcaagagttcattttggaggtgaggaataaggaggagggcagcccaaggaaagttgcgctttgaaggagcaaaaaggaaccaggaggcagaaggacacaggaagcctagtgctgttgttgacaataggtgctcattaaacttctggtcaattaactggaagagtaaggaaaagacgaatggaaggcaaaagggggcccactctggaatgtggatttcaaatgttccctattgcctatgcttttccctgcagctgagagcagctgcctttggctytgctcctggcttgggccctgtggttcttggggaggtacgaatagagcaggggagccaggagccctgtatcaaacaggcgagagtcttgcatcttcctttctgatgcattctagaagtgatgagaaagcatcttcctccactcccagtc

SEQ ID NO: 603850 - DNA, 442 bp, Homo sapiens
tgctcaggagcaggaaggaggcaagagttcattttggaggtgaggaataaggaggagggcagcccaaggaaagttgcgctttgaaggagcaaaaaggaaccaggaggcagaaggacacaggaagcctagtgctgttgttgacaataggtgctcattaaacttctggtcaattaactggaagagtaaggaaaagacgaatggaaggcaaaagggggcccactctggaatgtggatttcaaatgttccctattgcctatgcttttccctgcagctgagagcagctgcctttggctctgctcctggcttgggccctgtggttcttggggaggtasgaatagagcaggggagccaggagccctgtatcaaacaggcgagagtcttgcatcttcctttctgatgcattctagaagtgatgagaaagcatcttcctccactcccagtc

SEQ ID NO: 603851 - DNA, 395 bp, Homo sapiens
atgaaatcctggcaataaggaaaaacaaactgcccccaaatattgtagaacaaaacgcaactttttcaaaatagaaataacagtaaacacatacatcgtagccttttgagcacctatatatgtcaggaatattatgttttctcttttaagctcacaagtgccttataattagtctcattttagagaaatactgagccttagagagccctatataatacaagtcctgtgacccggaaattgcagacttagtagtccacatcggcttgctcattccccaaagcctctgcccttaaacactgtatatccactgtcttctacttagtacctaatccacacacagtagatcaagggaagcctygaaaaaatgagtgtggcgtcagacatttcctgtagtg

SEQ ID NO: 603852 - DNA, 545 bp, Homo sapiens
gcagccaacaatgggtagaaacacctacagaactatggcgagccttgggggatgggcgcctatggccttgctccactgcagccattcccatgcgactctgggctccacacaggctggagttctgtctctatcaactctctggacagttctccctgccagctcagatgtcgctggggattgtggggtctcccacagctgggatcctggaggtccacagcaagagtaggccactccatgcctaggtcactcacccacccctaggagctgctcaaggccaggaacgagaccagctacttggcaaccctgtgaagagttcccagtttccttctgtttcagcccagggtctgcatcctccctctgtccactcccartgctttatttccaaagatccgtttggagtgtgccagtctacttggtctggtctctctctatgggagaagctcttcctggctgcatctagtcagccatattggctgtcccccagagtataaatttttaacaaacaaaagttgtatggatttataaattttaattttataaattta

SEQ ID NO: 603853 - DNA, 445 bp, Homo sapiens
tatatcttactggtagatatatccttatatcagaatatattgcttttcactttcatgtttactttttatttgctatagtataataacaccagctttctttggtctttatcataatgtcccacatgtttttactcccttttttagattttatacattttttatgttctttgctttagggtggctattttcaattaaaacattttaaaattattyattcttctcttgctattgaactcatccattgaatttacctttccagtattatatttttttccagttttaaaacttccatttgattaattcagttctttggttatatctccatcatttacttgattttcttaaatatattaattatagttattttaaaatctgtgtctgttaactcctatatgtatttatttttttaattgttccctttggtatctttggcaatttcagtagt

SEQ ID NO: 603854 - DNA, 605 bp, Homo sapiens
catcttcagattaaacattttcttacacggttttccccaggcccaccctgtctgtcactctcctctcgtctgtcagtgccccttcactgtgtgtttgtatcaggggtggtctgagaacactgggatgtccacctagagcacagctgagtggtacctgggcagcgtgagaggccagatcacagaggctttcacattcacgccatcatttcctttttgtgttgctcttgcacacatcatatagtgactctctgcctccatttccttgtctttttttttttttttttttttttttttttttttttttgagatggagtcttactctgttgcccaggctggagtgcagtggtgcratctgggctcactgcaacctccgcctcccaggttcaattgattctcctgcttcagcctccagagtagctgggattacaggcacatgccaccacacccggctaatttttgcatttatagtagagatggagtttcaccatgtaggccaagctggtgttgaactcctgacctcaggtgatccgccagcctctgcctcccaaagtgctgggattacaggtgtgagccaccatacctggcctcattttcttatctttaaa

SEQ ID NO: 603855 - DNA, 585 bp, Homo sapiens
aaattgttgaaaatgacatgtcatcatcttcagattaaacattttcttacacggttttccccaggcccaccctgtctgtcactctcctctcgtctgtcagtgccccttcactgtgtgtttgtatcaggggtggtctgagaacactgggatgtccacctagagcacagctgagtggtacctgggcagcgtgagaggccagatcacagaggctttcacattcacgccatcatttcctttttgtgttgctcttgcacacatcatatagtgactctctgcctccatttccttgtctttttttttttttttttttttttttttttttttttttgagatggagtcttactctgttgcccaggctggagtgcagtggtgcaatctgggctcactgcaacctccgcctcccaggttcaattgattctcctgcttcagcctccagagtagctgggattacaggcacatgccaccacacccggctaatttttgyatttatagtagagatggagtttcaccatgtaggccaagctggtgttgaactcctgacctcaggtgatccgccagcctctgcctcccaaagtgctgggatta

SEQ ID NO: 603856 - DNA, 605 bp, Homo sapiens
tgatcccagcactttgggaggcctaggtgggtggatcacctgaggtcagaagtttgtgaccagcctggccaacatggtgaaacccccatctctcctaaaaatacaaaaaagttagctgggcgtggtggctggtgcctgtaatcccagctactcargaggctgaggcaggagaatcgcttgaatctgcgagtcggaggttgcagtgagccaagatcacgccattgcactccagcctgggtgacataagtgagactccatgtcaaaaaaaaaaaaaaaaaaaaaaggaaaaaagaaattacaaaacataaaactcgataataaaattacagatttacataggatagtactggggaagctttgtttcttgagccacaagtaactactggctgagttgaattaggagataggcaagtttcctaaaatgaagttatctgtcagtcggttgcccctacacacttttgataaatccctctcccttttaaaattacagtaaaaaaaaaaaaaaaaaagcactgagaaaaaattatgaggacaagaagcaggttctgaaatcccaggccaagatatatttggctttagtgtttaacacggtggacaagtttaga

SEQ ID NO: 603857 - DNA, 528 bp, Homo sapiens
ataattttgagggctaggcacagtggctcatgcctataatcccagtgctttgggaggctgagatggggagataacttgagcccaggagttccaggctgcagtgagttgcgatcacaccactgcactccagcctgggcaacagagtgagactccatttctaaaaawcaaaaaaggaatcataattttgaatatatatcccaggcatgtctagtgctggtgaccaaggtctaaactactttcccacaaatcagacttttcaactgcctgcttttatatctaccattgattattgtcattactattattataatttataaattcctagttcagggcttgaactaggagtaagcagaatgacatgaccatacatagagctcaccttttccattaaccagatgagttggcctttggggagtgcatagagaaaacttctggttgtggtcactcctctttgtctgtgggaagaaaaggacaagaaatgtctcctcgagcaccaagatggtatagagaaagacaagacttctgctg

SEQ ID NO: 603858 - DNA, 528 bp, Homo sapiens
ataattttgagggctaggcacagtggctcatgcctataatcccagtgctttgggaggctgagatggggagataacttgagcccaggagttccaggctgcagtgagttgcgatcacaccactgcactccagcctgggcaacagagtgagactccatttctaaaaaacaaaaaaggaatcataattttgaatatatatcccaggcatgtctagtgctggtgaccaaggtctaaactactttcccacaaatcagacttttcaactgcctgcttttatatctaccattgattattgtcattactattattataatttataaattcctagttcagggcttgaactaggagtaagcagaatgacatgaccatacatagagctcaccttttccattaaccagatgagttggcctttggggagtgcatagagaaaacttctggttgtggtcactcctcttwgtctgtgggaagaaaaggacaagaaatgtctcctcgagcaccaagatggtatagagaaagacaagacttctgctg

SEQ ID NO: 603859 - DNA, 535 bp, Homo sapiens
cgacctctgcctcccaggcttaagcggtcctctcacctcagcctcccaagcagctgggactacaggcatgcaccaccgcacccagctaattttttttgtttttttgtagaaatggggtttggctttgttgcccacactggtcttgaactccttagctcaagcaatctgcccaccatagtctcccaaagtgctgggattacaggtgtragccatggcacctggccaaaaaaccttttctgttcatactccagcacactgccctataagtaactttaatcattactgagcatctaatatatactaggaactgttctggacacataaattatctcattgaattcttgcaacaatcttatcaggcagttatcactatcctcattttatagattaggaaattgaggcaaagagaaatggaaaatttaaatacaccaaaacccaggtctccctacctctggtttgacttatatcacgttatgtactaaacactggaagactgaatttccttcatcatcagaaaaataagctttcactcacc

SEQ ID NO: 603860 - DNA, 434 bp, Homo sapiens
cttctttttttttttttttttttttttttgagacagagtcttgctctgttgcccaggctggagtgcagtggtgcgatctcagctcactgcaacctccacctcctcggttcaagcaattctcctgcctcagcctcccaagtaygtgggactacaggtgtacatcaccatcctaccaagtagctgggactacaggtgtgcatcaccacgcctggctaattttcttttctttttttttttttcttaactacaggtgtgcatcaccatgcctggctaattttctttttttttttttttaagtagagatagggttttgccacattggccaggctgatctcaaactcctgacctcagatgatctgtctgccttggccttccaaaatgctgggattacacgtgtgagccaccacacccagctggcttactttatttttaag

SEQ ID NO: 603861 - DNA, 376 bp, Homo sapiens
tttccaactcagaattttttatatcwgtcaaactgtcatggtaaaacaggcatttttaaatataaaagttgtcaaaatgtattttccattccccctttctcccgtagttactcaaggatgggttccaccagtacaaaggagtaaacaaagatccaagaatcaagaaaacgttgtagaggagacaaagagaagccccagaaacatgaggaagagacagctgtgtaccaactggtggaggcagtgcatccatacagggcaaaaaaaggctgcaggcatgactttttaggaagatgctcaacaaaatacttgctgagaaaaaaaaaaacaaaacttagaaatgctggttccaaaacatgtgcttttgtttgtttgtttt

SEQ ID NO: 603862 - DNA, 592 bp, Homo sapiens
attccattatatcttgggaataactaacttattttttattttacaggctcacagatgaaagggacttgccttgtctcaaatgaaacttcggacttcrcacttttgagttaatgctggaatgagttaagactttgggggactgttgagagggatgattgcattttgtaatgtgagaaggacatgaaatttggaagggtcaggggtggaatgatatagtttgaatctgtgtccacacctaatcttaaatcaaatcacaatctctagtgttgaagatggggcctggtgggaggtgactggatcatggggaaggagttctcatgaatggtttagcaccattatcttggtgttgttctcatgatagagttctcacaagacctgtttgtttaaaagtgtgtagcacctcccaccttgctctcttttggtcctgctcctgctttgccttctgtaatgagtaaaagctccccgaggcctccccagaagcagacgctgccatgcttcctgtacaacctgcagaactgtgagccaattaaatctcctttctttataaattacccagtctcaggtatttctttatagcaatgcaagaatggac

SEQ ID NO: 603863 - DNA, 592 bp, Homo sapiens
attccattatatcttgggaataactaacttattttttattttacaggctcacagatgaaagggacttgccttgtctcaaatgaaacttcggacttcacacttttgagttaatgctggaatgagttaagactttgggggactgttgagagggatgattgcattttgyaatgtgagaaggacatgaaatttggaagggtcaggggtggaatgatatagtttgaatctgtgtccacacctaatcttaaatcaaatcacaatctctagtgttgaagatggggcctggtgggaggtgactggatcatggggaaggagttctcatgaatggtttagcaccattatcttggtgttgttctcatgatagagttctcacaagacctgtttgtttaaaagtgtgtagcacctcccaccttgctctcttttggtcctgctcctgctttgccttctgtaatgagtaaaagctccccgaggcctccccagaagcagacgctgccatgcttcctgtacaacctgcagaactgtgagccaattaaatctcctttctttataaattacccagtctcaggtatttctttatagcaatgcaagaatggac

SEQ ID NO: 603864 - DNA, 573 bp, Homo sapiens
tgggttttgctgtaaactcttttagcatcatttcacttttgaaactatctgcatgtattgtttttattaagttttatataacttattttttaagttacttgaaaaataaaaactggaagtaggaagactatcacaaacatacccccagtaaccccatctgggatcataattgaggtcaaccttagacgaccagtcagcagtttccagaattcccaccctccctgggctacttggtcaagctctttcccagggtctctcactgctcattattccagagacttgaatttgcttagagcaactaggcgttgtcttacagcctcttgcccttctcgattctctcatactaatgtttaccttacatgcctcaatgcaaagagtcttctccttgtgaagacaaatgcaaaacaccagttgaaaacttccgttctccctattagctattcgtaaaaccccatcggtctgaggcttttcaactcgttctgacactttcttctctttaacttttttttgaaaactttagttaaggtagggatctgacctgcgggcamttggtttcctcctttgtgtccttgt

SEQ ID NO: 603865 - DNA, 500 bp, Homo sapiens
tcgagttagggaaactcttcgtctaggagagcctcttgtaaggtgatccgtctcctccttcctgccaggctcagaggccaccagcacagatggctagtctaccagctccccaggggagcctcctcactgcagtcctctgcgactccacactgcaccagtgtcagggactgtctaggagcaaagaggaggcctgagaggccgccaggcgaggaggtctcacagagcccagggcacggccacttcagagccttttggccttgctcctytcaaacgccctgggacttggggtggaggtggtgggtaggtcatggtaaaccaaggacttggtggttgcatgaaagcaagggacttgaaccagttcctgagctggttccattcctccttcacccacccagcaggctttcagggtgcctggcattatgctaggggtagaaggacaaactggatcctccgggagtttgcagccttggcagaggagctgggctgaagtttagtgaagg

SEQ ID NO: 603866 - DNA, 488 bp, Homo sapiens
tgctgtgtcaaaagtcctggctgtttccaggagaaaaaaaaaaaaaagcatgcccaatgttactcacacatacaattgttttgaatccacttgtctgcctaacttcaaagaaagtctttgttgacaaattagtcctcagtagtttttcacttggcctataaagtsattctagctgtggagacactgaaaaggtggcgtcagggcattctccacacatctttcatctccatcgagagtggatactcgagcttcctgttttagagtctgagacataattgctggggggaagtgacggatggattgcacactggctctgaggaagctgcacatgcatcaatgtctcatgaagctttttggtttttgggtttttttttgaaaagataaaactaggaggaacagttgtttgtgtagttttattttcaaaatgctcctaacgttgaataaaaagataaggactttaaaaataccaccatgacaattctgatggt

SEQ ID NO: 603867 - DNA, 488 bp, Homo sapiens
tgctgtgtcaaaagtcctggctgtttccaggagaaaaaaaaaaaaaagcatgcccaatgttactcacacatacaattgttttgaatccacttgtctgcctaacttcaaagaaagtctttgttgacaaattagtcctcagtagtttttcacttggcctataaagtcattctagctgtggagacactgaaaaggtggcgtcagggcattctccacacatctttcatctccatcgagagtggatactcgagcttcctgttttagagtctgagacataattgctggggggaagtgacggatggattgcacactggctctgaggaagctgcacatgcatcaatgtctcatgaagctttttggtttttgggkttttttttgaaaagataaaactaggaggaacagttgtttgtgtagttttattttcaaaatgctcctaacgttgaataaaaagataaggactttaaaaataccaccatgacaattctgatggt

SEQ ID NO: 603868 - DNA, 488 bp, Homo sapiens
tgctgtgtcaaaagtcctggctgtttccaggagaaaaaaaaaaaaaagcatgcccaatgttactcacacatacaattgttttgaatccacttgtctgcctaacttcaaagaaagtctttgttgacaaattagtcctcagtagtttttcacttggcctataaagtcattctagctgtggagacactgaaaaggtggcgtcagggcattctccacacatctttcatctccatcgagagtggatactcgagcttcctgttttagagtctgagacataattgctggggggaagtgacggatggattgcacactggctctgaggaagctgcacatgcatcaatgtctcatgaagctttttggtttttgggtttttttttgaaaagataaaactaggaggaacagttgtttgtgtagttttattttcaaaatgctcctaacgttgaataaaaagataaggmctttaaaaataccaccatgacaattctgatggt

SEQ ID NO: 603869 - DNA, 570 bp, Homo sapiens
aagaaatgtacatttcccaactatttaactgagagaaggatattatcaaatagattggaacttcctgtcccaatctatttggcaataaccttatctccgttaaatattgccttaggaaattgcctgaaaagcttgtaacaaccaaagataaaaatcaatttttggtgaaatagtcacatccatatgctgaggcaggaccctgcaaaggccaaaataacactgccaggtgctgagcttggtccatgtgttaggcagctagttgaatttaccaggtaaatgaataatttgtggaaaagattgtcacttgccagaagtgtttgcatgaatttgaggatggagaatttcccatacaccacttgcctccccagattctgtgaacaagaagagattatttaaatgcaacgtgakagttgaggcatcttagtgcttgtgggcctgttactgagcaaaggatccccaagtagtacaggaagttaattctgtcaccactacactaggaaatcccagggctaaggcaataaaatgcattgtatttggtcagtatacaaattgcttcaaaaaggagaaaaa

SEQ ID NO: 603870 - DNA, 525 bp, Homo sapiens
aggctgcaaattttcaatatttttacattctgtttatcttttagttataaattctctatttaagccatttcttgtctctcacatcttattgtatgcagttaaaagtagccacatacctccttcaatatctgccttaaaaatgtcttctgtcatatattctagtcctaaactttgccttccatagagccctcaggcatggacacaattcagccaaattctttgctactttatcacaaggatgagctttattccaatttctagtaccttattcctcagttccatctaagacctcatggaaagtctttatatttataccaatattttgattatgaccacttaagtaattactaagaagtttcagactttccctacgtttcatttcttctgagtcctcagcagaattgcccttaaggctccactcctgacaatctaggctttttctagcctggttctccaaattctttcaacctcttctcattacccagtttcaaastcacttcaggtatttgttatagcagaagcccc

SEQ ID NO: 603871 - DNA, 531 bp, Homo sapiens
cttaaaacctagatgatgtgttgataagtgcagcaaaccaccatggcgcatgtatacctatataataaacctgcacattctgcaaatgtatcccagaaattaaaaaaaaaaaagagaaatggttcaagtggacatctttgttttataacctgattttaagaggaaagcatttagtctttcaatattaaatattaggtatgatgttaactgttgaatagttgacacagcttttaaawcttttattctataagttatctctgtgtgtgtgtgtgtgtgtgtgtgtgtgtgtgtgtgtgtcttgtgtgtctctgtctcttctactctctttccctgttctgtcccatccccacaccttactcactcactgattttctctgcatatttttctccccctgagggtaaacctttgcctgaagtagtaagtgaaaatagaatggtagctggagaaagctaactggtacagttcttctacacatttgcaattaatccttttcttttagattttatcctgactcacgtctacctccccca

SEQ ID NO: 603872 - DNA, 531 bp, Homo sapiens
cttaaaacctagatgatgtgttgataagtgcagcaaaccaccatggcgcatgtatacctatataataaacctgcacattctgcaaatgtatcccagaaattaaaaaaaaaaaagagaaatggttcaagtggacatctttgttttataacctgattttaagaggaaagcatttagtctttcaatattaaatattaggtatgatgttaactgttgaatagttgacacagcttttaaaacttttattctataagttatctctgtgtgtgtgtgtgtgtgtgtgtgtgtgtgtgtgtgtgtcttgtgtgtctctgtctcttctactctctttccctgttctgtcccatccccacaccttactcactcactrattttctctgcatatttttctccccctgagggtaaacctttgcctgaagtagtaagtgaaaatagaatggtagctggagaaagctaactggtacagttcttctacacatttgcaattaatccttttcttttagattttatcctgactcacgtctacctccccca

SEQ ID NO: 603873 - DNA, 531 bp, Homo sapiens
cttaaaacctagatgatgtgttgataagtgcagcaaaccaccatggcgcatgtatacctatataataaacctgcacattctgcaaatgtatcccagaaattaaaaaaaaaaaagagaaatggttcaagtggacatctttgttttataacctgattttaagaggaaagcatttagtctttcaatattaaatattaggtatgatgttaactgttgaatagttgacacagcttttaaaacttttattctataagttatctctgtgtgtgtgtgtgtgtgtgtgtgtgtgtgtgtgtgtgtcttgtgtgtctctgtctcttctactctctttccctgttctgtcccatccccacaccttactcactcactgattttctctgcatatttttctccccctgagggtaaacctttgcctgaagtagtaagtraaaatagaatggtagctggagaaagctaactggtacagttcttctacacatttgcaattaatccttttcttttagattttatcctgactcacgtctacctccccca

SEQ ID NO: 603874 - DNA, 606 bp, Homo sapiens
ttatctctactcaagtcagaaggcttgtcagtgttgaggayggagctggcaatactggcccaaagctggtcccctgagcaaagaaaaaaagtcccgggatgggggatggagttgcatcccagtcctcctcagactcaaggcataactgaatgcttaggaccagagaggactgatgggagtttattaaaatttacagggtagaaaacttgctgcaattaaacaaataagaaccagaagtgacaagctggagttgaaaggggattggtaaacaggacagttgcttatttacattggccaaggcaggccacctgttggaatcattaaaacctaatgtatgaaattagaagttagaccagattctgtaaaatactgagaggcaaaggaaggctggagcctgaaagggcaggctgcatttggaagttggaaggttggcattaagaaataagagctgtagaaaaacattactgtgtacctattatgtacaggacgtggtgctagtaattaaggggtaggaaaaaataggaaaggtagaaaagaacaagaatagccacaaaggaaagtgtttctcattttagctgaattaaaaagtgattttaattcctatag

SEQ ID NO: 603875 - DNA, 606 bp, Homo sapiens
ttatctctactcaagtcagaaggcttgtcagtgttgaggatggagctggcaatactggcccaaagctggtcccctgagcaaagraaaaaagtcccgggatgggggatggagttgcatcccagtcctcctcagactcaaggcataactgaatgcttaggaccagagaggactgatgggagtttattaaaatttacagggtagaaaacttgctgcaattaaacaaataagaaccagaagtgacaagctggagttgaaaggggattggtaaacaggacagttgcttatttacattggccaaggcaggccacctgttggaatcattaaaacctaatgtatgaaattagaagttagaccagattctgtaaaatactgagaggcaaaggaaggctggagcctgaaagggcaggctgcatttggaagttggaaggttggcattaagaaataagagctgtagaaaaacattactgtgtacctattatgtacaggacgtggtgctagtaattaaggggtaggaaaaaataggaaaggtagaaaagaacaagaatagccacaaaggaaagtgtttctcattttagctgaattaaaaagtgattttaattcctatag

SEQ ID NO: 603876 - DNA, 606 bp, Homo sapiens
ttatctctactcaagtcagaaggcttgtcagtgttgaggatggagctggcaatactggcccaaagctggtcccctgagcaaagaaaaaaagtcccgggatgggggatggagttgcatcccagtcctcctcagactcaaggcataactgaatgcttaggaccagagaggactgatgggagtttattaaaatttacagggtagaaaacttgctgcaattaaacaaataagaaccagaagtgacaagctggagttgaaaggggattggwaaacaggacagttgcttatttacattggccaaggcaggccacctgttggaatcattaaaacctaatgtatgaaattagaagttagaccagattctgtaaaatactgagaggcaaaggaaggctggagcctgaaagggcaggctgcatttggaagttggaaggttggcattaagaaataagagctgtagaaaaacattactgtgtacctattatgtacaggacgtggtgctagtaattaaggggtaggaaaaaataggaaaggtagaaaagaacaagaatagccacaaaggaaagtgtttctcattttagctgaattaaaaagtgattttaattcctatag

SEQ ID NO: 603877 - DNA, 387 bp, Homo sapiens
ggaatgaggaggtagggaaagagggaaaaaaagtaaattttggtttaaacatttctcccggaaagcattttggcaagaaatgtacatttcccaactatttaactgagagaaggatattatcaaatagattggaacttcctgttccaatctatttgscaataaccttatctccgttaaatattgccttaggaaattgcctgaaaagcttgtaacaaccaaagataaaaatcaatttttggtgaaatagtcacatccatatgctgaggcaggaccctgcaaaggccaaaataacacagccaggtgctgagcttggtccatgtgttaggcagctagttgaatttaccaggtaaatgaataatttgtggaaaagattgtcacttgccagaa

SEQ ID NO: 603878 - DNA, 571 bp, Homo sapiens
caagaaatgtacatttcccaactatttaactgagagaaggatattatcaaatagattggaacttcctgttccaatctatttgccaataaccttatctccgttaaatattgccttaggaaattgcctgaaaagcttgtaacaaccaaagataaaaatcaatttttggtgaaatagtcacatccatatgctgaggcaggaccctgcaaaggccaaaataacacwgccaggtgctgagcttggtccatgtgttaggcagctagttgaatttaccaggtaaatgaataatttgtggaaaagattgtcacttgccagaagtgtttgcatgaatttgaggatggagaatttcccatacaccacttgcctccccagattctgtgaacaagaagagattatttaaatgcaacgtgatagttgaggcatcttagtgcttgtgggcctgttactgagcaaaggatccccaagtagtacaggaagttaattctgtcaccactacactaggaaatcccagggctaaggcaataaaatgcattgtatttggtcagtatacaaattgcttcaaaaaggagaaaaa

SEQ ID NO: 603879 - DNA, 571 bp, Homo sapiens
caagaaatgtacatttcccaactatttaactgagagaaggatattatcaaatagattggaacttcctgttccaatctatttgccaataaccttatctccgttaaatattgccttaggaaattgcctgaaaagcttgtaacaaccaaagataaaaatcaatttttggtgaaatagtcacatccatatgctgaggcaggaccctgcaaaggccaaaataacacagccaggtgctgagcttggtccatgtgttaggcagctagttgaatttaccaggtaaatgaataatttgtggaaaagattgtcacttgccagaagtgtttgcatgaatttgaggatggagaatttcccatacaccacttgcctccccagattctgtgaacaagaagagattatttaaatgcaacgtgatagttgagscatcttagtgcttgtgggcctgttactgagcaaaggatccccaagtagtacaggaagttaattctgtcaccactacactaggaaatcccagggctaaggcaataaaatgcattgtatttggtcagtatacaaattgcttcaaaaaggagaaaaa

SEQ ID NO: 603880 - DNA, 547 bp, Homo sapiens
tgccaggcattgtactaggtgcattatatagatatcacaaacacctaaatttaataaatataattcacttggctaagcgcattagatatgtactgtataatgaaactacggcctcatagaatgttactactggcagtgttaagagttaaatctccatctgtttcgttcttctatgtcatgaaatctcctgttacagaacaaatgccaatcttgtgttttcctttcacccacttctgtacaaaactgagggagatggcayaactgccagccataggaatatgtagttatcaaaaaagttagtcagagacactccctgaagagtcatttcaatacgtaatagagtagatttagatacaggaaacactgacgctagaagagatcttagaaaccatagagaaaactgatgatcagaaaggttaaactacttgcaagtgtccacttgttagttagaaagtgggaacttcaataataaatcagagcttcttgtacactgtgagcctctcctattatatgtgtcagaagtgttaattcaatattaaacaagaaa

SEQ ID NO: 603881 - DNA, 547 bp, Homo sapiens
tgccaggcattgtactaggtgcattatatagatatcacaaacacctaaatttaataaatataattcacttggctaagcgcattagatatgtactgtataatgaaactacggcctcatagaatgttactactggcagtgttaagagttaaatctccatctgtttcgttcttctatgtcatgaaatctcctgttacagaacaaatgccaatcttgtgttttcctttcacccacttctgtacaaaactgagggagatggcataactgccagccataggaatatgtagttatcaaaaaagttagtcagagacactccctgaagagtcatttcaatacgtaatagagtagatttagatacaggaaacactgacgctagaagagatcttagaaaccatagagaaaactgatgatcagaaaggttaaactacttgcaagtgtccacttgttagttagaaagtgggaacttcaataataaatcagagcttcttgtacactgtgagcctctcctattatatgtgtcaraagtgttaattcaatattaaacaagaaa

SEQ ID NO: 603882 - DNA, 381 bp, Homo sapiens
ttcaggtctgattggtccatcgctgtttattgtgtccatagctgtgtactgtgtcataggcataagaaggtgaatatgtccccctaatatccagaatgaacaaggaattaaaatcatcaagaaaaaaaagagarataatcccattaaaaagtgggcaaacaatatgaacagacatttctcaaaagaagatatacaaatggccaacaaacatatgcaaaaatgctcaacatcactaatcatcagggaagtgcaaagtaaagccatattgagatgataccacgtcacaccagccagaatggctatcataaaaagtcaaaaagcaatagttgctggcacaaatgtggtgaaaggtgaatgcttatacactgctggtgggaatgt

SEQ ID NO: 603883 - DNA, 596 bp, Homo sapiens
aggcccacctagctgataggctcacctagctgataggctccacgctatgcttgtggaaccaggatccaggcctgcacccatggaacaaggctccaggcttgcccacacagagcaaggcaccaggtcttcccatgtggacccagacactagcccagccctgtggacacaggagccaggcctactcactgacagaggcatcagaccaacccacctgaggactatagtaccaaacctacccatggaccctaccatctggcctgctcagaacttctggatgggttgactgatgaagagcttttcctgccaaagccagtcttcaaagattggaagaagtgcctacttcttcaaatgtgcagacacgaatgcaaarccacaggatcataaataatcatggaaacatggcaccaatagcggaacaaaagaaagtgctagtagccaacactaaagagatggagatctgtgaaatgccagacaaagaattccaaatacttttcttagtaagttcatcaagctataaaagaacacagaaggacaacttaaaaaacaggaaaacaatacatgaacaaaattagaagttcagcaaagatgtagaaacc

SEQ ID NO: 603884 - DNA, 604 bp, Homo sapiens
ataaattccaaatttgccactgactcactgagggaccctgggcaaatcatgtaagcttcttcaagtctcaatttcctcagctgtaaataagtagattgaaatagattagctgtcaggcctatttcgattatatatatatacactttttagtaagtttctgcaaataattgtggaaacrtcaaaaacgcttatctaccaagctgaaggtgaaaagtgaaggctgtcaacatccaggttcaaaatcagcttctttagtgaattagtagaataatacatgagttacaccgtgatcaagatttctgtgacccggaaaaataccctaggtggtggcgccagttatattattcactctgcccaccacaaaatactcaaccatgataaggtaataataatggttagaaacaatcttaaaatcaagcacatcctaaatgtaatgtagtatcctacatcaggtctcagaacagaatgaggaaatagtggaaaaactggtgaaactcaaattcttaacagaattgtaccaatatcaacttcttagttttagtttgtttgttttgttttgttgtgagacagagtctcactttatcgcccaggctggagtgcagtg

SEQ ID NO: 603885 - DNA, 609 bp, Homo sapiens
ttgccatgttggccaggctggtctctaactcctgacctcaggtgacccgcctgccccggcctcccgaagtgttgggattatgggcatgagtcactgcacccagcctgtattattttatatcataatgaaagaaatgaaaataaaaaagaacctgttttgcaggcagaggctacaaaaactttgaacaactagtagaaatggtttaagttaatttctaaattctgagaagatagaaggactaagcccccattcctaactcctctcctcttctcaggagtataaacatgagcctaaagtcagaatcatcaagatatcaagttctttagggaaagaataggtgctgaaggaccaggcagagggaaaggtttgctttgccactccttaaggcactgagacaggatctgagatttcacagttctctaagtgagcttaaaaaagtggaatcctgtggtttcccttcagaaaagggaggamtgtgtctgctcctggaagtggacattagcagggcttcccataaaactctgttaactgctgcggacttagagtagaggttgcacaggtgaactcagttgctgccacacctcatggtctgaggaagccggcccttct

SEQ ID NO: 603886 - DNA, 335 bp, Homo sapiens
tttcctatgcctgtctttactttaatctcttaatcctgtcagctgagaaggatgtatgtcacctcaggaccctgtaataattgcattaactgcacaaattgtacagcatgtgtgtttgagcaatatgaaatgtgggcaccttgaaaaaaagaacaggataacagcaattgttcagggaayaagagagataaccttaaactctgaccactggtgagccgggcagaacagagccatatttctcttctttcaaaagcaaatgggagaaatatcactgaattctttttctcagcatggaacgtccctgagaaagagaatgcacacctaggggtaggtct

SEQ ID NO: 603887 - DNA, 335 bp, Homo sapiens
tttcctatgcctgtctttactttaatctcttaatcctgtcagctgagaaggatgtatgtcacctcaggaccctgtaataattgcattaactgcacaaattgtacagcatgtgtgtttgagcaatatgaaatgtgggcaccttgaaaaaaagaacaggataacagcaattgttcagggaacaagagagataaccttaaactctgaccrctggtgagccgggcagaacagagccatatttctcttctttcaaaagcaaatgggagaaatatcactgaattctttttctcagcatggaacgtccctgagaaagagaatgcacacctaggggtaggtct

SEQ ID NO: 603888 - DNA, 335 bp, Homo sapiens
tttcctatgcctgtctttactttaatctcttaatcctgtcagctgagaaggatgtatgtcacctcaggaccctgtaataattgcattaactgcacaaattgtacagcatgtgtgtttgagcaatatgaaatgtgggcaccttgaaaaaaagaacaggataacagcaattgttcagggaacaagagagataaccttaaactctgaccactggtgagccgggcagaacagagccatatttctcttctttcaaaagcaaatgggagaaatatcactgaattctttttctcagcatggaacrtccctgagaaagagaatgcacacctaggggtaggtct

SEQ ID NO: 603889 - DNA, 543 bp, Homo sapiens
gtgatctgaagtttttatgtcaggatctgattctagtgacacatatcttaactaagactataaaaaccttactttttatccagtcagttccaagttaattcaaactgattgtcacaatgctttacataatactaaattatctatatacaaacataaatgcatgatttttattctctttaaaattcaccatttaaatggaatataattatatttarattaatcttaattaagatttagtgtatttttcagtggggaattaatagaatgggaatttgagccctagttctactatcttgtttttataacctacttttttgatcccttattttgtcacctttaaaatggcaatgcctactttatgagttgttctaaggattacatgagaagacatatgaaaatgtactataaatagaaaataagatgctagctataatctcaagcgatttttatatcaattttttcttttgtttttgttttcttattttacaggataatgaattggaaaagatcacaaggaggttcaccatggagctagcaaaaaag

SEQ ID NO: 603890 - DNA, 629 bp, Homo sapiens
tccatttagcaagtttgcttttggcagtaaagccccacgtgcaggaagacaaacagctgctcactyattatccaaagtatactttgtaagaattagggcatcaaaaattggatcctaagcaccaatatatattaaagttcagtacaacttgtagtgtttaagtacaagaaataaaaattgagcctgaacttttggcatatagtgggaagaaattaggtttaccgctgttaataattcagagtgcttaggaaaatcggtttttatttacttatgttaaaaatactaagggttctgtaaccattaaaaactaaaatactaacctgtagatgttgaaaaaatcctagacactagtctctgccacgtgactgttcttcttttctatttattttacccaataattaggcttttacaatgtaagtaataaagagaaaaatctctagtatcactttagagcacattgattcataaatagcccataaattttgtactcagcaacccataaaatacacatgcatgattcacataatcaaatagtaacgaaagttacaaaatgaaaagtgaagcagctctaccccaagtccttcccccaatataaccatgaacagtcttaaatctaatgccgctgtcta

SEQ ID NO: 603891 - DNA, 629 bp, Homo sapiens
tccatttagcaagtttgcttttggcagtaaagccccacgtgcaggaagacaaacagctgctcactcattatccaaagtatactttgtaagaattagggcatcaaaaattggatcctaagcaccaatatatattaaagttcagtacaacttgtagtgtttaagtacaagaaataaaaattgagcctgaacttttggcatatagtgggaagaaattaggtttaccgctgttaataattcagagtgcttaggaaaatcggtttttatttacttatgttaaaaatactaagggttctgtaaccattaaaaactaaaatactaacctgtagatgttgaaaaaatcctagacactagtctctgccacgtgactgttcttcttttctatttattttacccaataattaggcttttacaatgtaagtaataaagagaaaaatctctagtatcactttaragcacattgattcataaatagcccataaattttgtactcagcaacccataaaatacacatgcatgattcacataatcaaatagtaacgaaagttacaaaatgaaaagtgaagcagctctaccccaagtccttcccccaatataaccatgaacagtcttaaatctaatgccgctgtcta

SEQ ID NO: 603892 - DNA, 425 bp, Homo sapiens
gtatgaatcactggttaactagaaatttaaaatgaaaatgtttcttctttagcccaggcaatatcacttgcattcatttctatcccctccctgtccctgttctgttggctctggggcttcttccactaagctggtactttctttatagctcctcctgtgcttccattcactaaacctttattggttcatakcctacagaaaatgcctgtggtgtgagaggtaatttgtgaaactgcttctcttcactgtttagcagttgagctctctaaatgggtgtagctgggaaagaaaacttaactttacaaacaagaattcctgggttccatccagcggaacatgtcttttgttatacacacacagtttctgactcatgtcattccatgacttatgataaaatggacattttgtttacacttgtgtggaag

SEQ ID NO: 603893 - DNA, 580 bp, Homo sapiens
attttagtgtttaaacaattttttttttcttttttctttttttttttgaggaaaggtctggctctgttgctggggtttagtgcagtgacctgagcgtagctcactgcagcctgcaactcctgggctcaagtgactctcctgccccagcctcctgagcatcttcgactacaygcacatgcccccacgcccaactcaatttttttttttttttaagatacaaatgattcatcttaatattatttacagtttttttttcccttttctgtgggctttatctgactggaaattctttttaaattttttattttttaaattgacaaattgtagatatatatttatgaggtacaaagtaattttatgatttatgaatacaacattgcataattaagtcaagctgattaacctgttcaccactggaaacaattgcaaataattatcattttttctggtgaaaacatctgaaatttactcagtgattttgaaatgtgcagtactttttgttgttgttgtagaaatgaggtctcactatgttggccaggctggtttcaaactcctaagctcaagtgatcctcccacctca

SEQ ID NO: 603894 - DNA, 604 bp, Homo sapiens
agaattctttaaaagagctctccctggggctcccattacttacttgtgactcccagtggaaatcgtacccagcccctcgagaggggctgaatctgttgggagtgggagggtagaaaaaatgctgcagcttcttgtgggtatccttcacacacaaacacccagtgccccaagcactgtgcagtcaaacatcaaccccactcagactttcctccttgggattgagaagcaatggattatagagaaagaaaggtggattagcactccaaaactttgaagagtaattgaccaagacccccaaagccaaagctgtggscatccccacttccagtataccctgtaccaacacgtaatggctactagatacaggggcactagtacctacctgtctgcttggctacctgccctctttgcagaagtggtgaagggaatcactcaacctcagaaagggaaaatggctttctcattttcagattgaaagaggttggcagtgggtgaggagaatagcaggtaaggatctcttttaatatacccatttgaagccaaaacctctgtttagacatccggtctacaaaactggtgattattcattgcaaaagtttgtgaa

SEQ ID NO: 603895 - DNA, 521 bp, Homo sapiens
actgcagccttgaactcctgggctcaacgcgatccaccctccttagcttcctgagtagctgggactacagatgcatgccaccacacctggctaattttttttttttttttttttaatagagacagagtctcactgtattgcctaggctggtcttgaactcctaggctcatgcaatcctcccacttcagcctcccaagtagttgggactacagacatgtgccactatgcttggcagtaccattttcatcacatcatattaaggggacatactgtcaatatgactaatcrgtgttgctattgaccttgatcatctggttgaggtagtgtttgtgtatttctttactacaaagttactcttttttctcctctgtttacatactgtactctttggaaggaagttacatatgcgcagcctacacttaaggcatggggagttatgatacccctcctcaagggcaaagtgtctatataaattatttagatttcttctgcatgggagatttgtctcttcttcctcattt

SEQ ID NO: 603896 - DNA, 521 bp, Homo sapiens
actgcagccttgaactcctgggctcaacgcgatccaccctccttagcttcctgagtagctgggactacagatgcatgccaccacacctggctaattttttttttttttttttttaatagagacagagtctcactgtattgcctaggctggtcttgaactcctaggctcatgcaatcctcccacttcagcctcccaagtagttgggactacagacatgtgccactatgcttggcagtaccattttcatcacatcatattaaggggacatactgtcaatatgactaatcggtgttgmtattgaccttgatcatctggttgaggtagtgtttgtgtatttctttactacaaagttactcttttttctcctctgtttacatactgtactctttggaaggaagttacatatgcgcagcctacacttaaggcatggggagttatgatacccctcctcaagggcaaagtgtctatataaattatttagatttcttctgcatgggagatttgtctcttcttcctcattt

SEQ ID NO: 603897 - DNA, 555 bp, Homo sapiens
ggtgttgttgcttgtaggccatctcagctgacagagccagaaaatgtatgtatttatactaccctgtatatatccacatatctataaatatttctatatgtatccatctgtatctaattaagctaaacatgagtttatattgatgtattcggttccagttgaatcactacatggatgattctaacttcctgcccttgcttatctraaaactcctgctccaatagtgagaaatctgtctcctaccatcagccacccatttacttaatcattctactctagcatacatgtaaggtactcccacagttttaaaaattggtggcttggctatgaaacacaagcaggtctctgtaattttacctaggctcagatcccagacctgctcaagtgaaggacttgatctcagtccttaaatatttgaagccagtgattaactgtcaaattacagctgcatcatagcccacacccagctcagttacatattggattgactcagactcccttctagtgtcctaacagaaaaattgtcgtgtctttttctggaagtaaaatattact

SEQ ID NO: 603898 - DNA, 308 bp, Homo sapiens
taatcattctactctagcatacatgtaaggtactcccacagttttaaaaattggtggcttggctatgaaacacaagcaggtctctgtaattttacctaggctcagatcccagacctgctcaagtgaargacttgatctcagtccttaaatatttgaagccagtgattaactgtcaaattacagctgcatcatagcccacacccagctcagttacatattggattgactcagactcccttctagtgtcctaacagaaaaattgtcgtgtctttttctggaagtaaaatattacttaatttaataagtaa

SEQ ID NO: 603899 - DNA, 308 bp, Homo sapiens
taatcattctactctagcatacatgtaaggtactcccacagttttaaaaattggtggcttggctatgaaacacaagcaggtctctgtaattttacctaggctcagatcccagacctgctcaagtgaaggrcttgatctcagtccttaaatatttgaagccagtgattaactgtcaaattacagctgcatcatagcccacacccagctcagttacatattggattgactcagactcccttctagtgtcctaacagaaaaattgtcgtgtctttttctggaagtaaaatattacttaatttaataagtaa

SEQ ID NO: 603900 - DNA, 308 bp, Homo sapiens
taatcattctactctagcatacatgtaaggtactcccacagttttaaaaattggtggcttggctatgaaacacaagcaggtctctgtaattttacctaggctcagatcccagacctgctcaagtgaaggacttgatctcagtccttaaatatttgaagccagtgattaactgtcaaattamagctgcatcatagcccacacccagctcagttacatattggattgactcagactcccttctagtgtcctaacagaaaaattgtcgtgtctttttctggaagtaaaatattacttaatttaataagtaa

SEQ ID NO: 603901 - DNA, 510 bp, Homo sapiens
ctaatttattagcctaaacctttaatttcctatgatctgaggaactgaaagctaaggcctaaaaccttatatgtgctgaatgtcgaataataggtcacagccacattcttccacaagtaaaaataatatggggcttaacacaattgctttagcaatatgaccttctcccctttttctctacttgataaggagggcttatacccccactaagcagcatgttactctgctatctcatacatgtcaactccctaaccataataatcctgcttatatagaacacaatggtactgttatctctaattgcatgttagtgaaatgaggtcaagagaggctaaactgattaacctctggtcgcacactcagaaatcctatggagtggcttatatctgtygtgcatagctaacttccaaacatacagcaagtaaatgccagagggagaaattattatgtaatgttgtatgtgtctgcattttatagtgaaacatttaatgaatatttctatgactttga

SEQ ID NO: 603902 - DNA, 374 bp, Homo sapiens
ctgcagtggtgaagcactgtgagttcttatttggcaatttggacttcattattgtcttatcacagataggaaatgaaaggttgcagaacatttaggagaaaatattaagtgaggacacagaagcrgtaaatgtcgtatacaccttttaaacattttggagattacccatagtaggcctgtcccttgggtaaggcaattagggcagctttcctgggccctattttggggtggggaatgactcggggactttattatatgactttttttctgaacattaataaaattcagttccaaaattttgtgattaactgtagtcctaagagcctacgaaaaatgcagataatgggcagttccacattggttgaactgcccca

SEQ ID NO: 603903 - DNA, 374 bp, Homo sapiens
ctgcagtggtgaagcactgtgagttcttatttggcaatttggacttcattattgtcttatcacagataggaaatgaaaggttgcagaacatttaggagaaaatattaagtgaggacacagaagcggtaaatgtcgtatayaccttttaaacattttggagattacccatagtaggcctgtcccttgggtaaggcaattagggcagctttcctgggccctattttggggtggggaatgactcggggactttattatatgactttttttctgaacattaataaaattcagttccaaaattttgtgattaactgtagtcctaagagcctacgaaaaatgcagataatgggcagttccacattggttgaactgcccca

SEQ ID NO: 603904 - DNA, 373 bp, Homo sapiens
ctgcagtggtgaagcactgtgagttcttatttggcaatttggacttcattattgtcttatcacagataggaaatgaaaggttgcagaacatttaggagaaaatattaagtgaggacacagaagcggtaaatgtcgtatacrccttttaaacattttggagattacccatagtaggcctgtcccttgggtaaggcaattagggcagctttcctgggccctattttggggtggggaatgactcggggactttattatatgactttttttctgaacattaataaaattcagttccaaaattttgtgattaactgtagtcctaagagcctacgaaaaatgcagataatgggcagttccacattggttgaactgcccc

SEQ ID NO: 603905 - DNA, 694 bp, Homo sapiens
catgccattgctatctcctttgggcaggggtgaattggggcttaaacaatttagaggggccctctttatgaaaaagaatacaataatatgattcttgcacatttttcatttatatacgtatgaacttctggacccagaaggggctgtgaaagtcgggggcctggagctcaggcgggtccagatgaccctgtcctccttttgtaacagccagagtccaggatgtttttgcccagggcattgggctggcactgcagaggcctgggggatggggggacacctgggacatggctggtgggaattgttctaggaaacctcagggattctccctggacctgtcaaagccccttccctgtttcttctgaggctgtgtgtcccccactcgcacaagggtcctttctatgcctgttccgctgataaatgtcatctgcctgctctagaatggcttccagaccccacagaccccctcctcacgagctcccaccctagggtactctccaccagtccccgctttcaggagctcaccagactcagacagcctgttgtcagagctcagccacacagcaggaccctggcccactgcccagaccagagccaggcccacygcagcctcgggggacaactgtccttcccccaccccctccacatggtcccctgcccatgagaccctgccctgctaatttaatgcactgccttg

SEQ ID NO: 603906 - DNA, 444 bp, Homo sapiens
gaattcttggaactgggattaatcagaatatggcagattagcmtccaagatggaattgctttattctcattcaaggtttccctcattctccactctccccatgctggtcaccttgctgcttgttcctcaaacacatatgaaatgcgtttctgtcttggcagtcatcctgctacctgtaatgtcagcactgctttctgttgtcccttcagttaggtcactgttcaaatagctctctagacaggctcttccttatcattctacttaaaatagcccccaatcactctgtgtccctttagcctgcttcctcttcctgctatttcatactacctgaaaaaatacttgaacttcctagaacataagctcataaaagcaagaactgtgctccacctctcctcccctctaccccagcactcagaagagcaacagggtcagcatccagtgagt

SEQ ID NO: 603907 - DNA, 454 bp, Homo sapiens
cagaatatggcagattagcctccaagatrgaattgctttattctcattcaaggtttccctcattctccactctccccatgctggtcaccttgctgcttgttcctcaaacacatatgaaatgcgtttctgtcttggcagtcatcctgctacctgtaatgtcagcactgctttctgttgtcccttcagttaggtcactgttcaaatagctctctagacaggctcttccttatcattctacttaaaatagcccccaatcactctgtgtccctttagcctgcttcctcttcctgctatttcatactacctgaaaaaatacttgaacttcctagaacataagctcataaaagcaagaactgtgctccacctctcctcccctctaccccagcactcagaagagcaacagggtcagcatccagtgagtgttcatgaatcaagtcactgcttggcagaattc

SEQ ID NO: 603908 - DNA, 454 bp, Homo sapiens
cagaatatggcagattagcctccaagatggaattgctttattctcattcaaggtttccctcattctycactctccccatgctggtcaccttgctgcttgttcctcaaacacatatgaaatgcgtttctgtcttggcagtcatcctgctacctgtaatgtcagcactgctttctgttgtcccttcagttaggtcactgttcaaatagctctctagacaggctcttccttatcattctacttaaaatagcccccaatcactctgtgtccctttagcctgcttcctcttcctgctatttcatactacctgaaaaaatacttgaacttcctagaacataagctcataaaagcaagaactgtgctccacctctcctcccctctaccccagcactcagaagagcaacagggtcagcatccagtgagtgttcatgaatcaagtcactgcttggcagaattc

SEQ ID NO: 603909 - DNA, 466 bp, Homo sapiens
tctcctattaagctcaacatgagagactttaaataatataaatacatgacacactttttactcaactttttgttgtagaaaagttatttttcaatgaaaaatttctgttaacaatactgttctcaaggaatattttctgttgttataacctgggtcatgggttactactgacatctagttggtagaggccatgaatactgctaaactctctgcaatgcacaagacagtcctcacaacaaagcattatctagcacataatatcaacagtggtaaggctgtgaaatctaaactaaaaatagattttgaaaaactttcaamtgtataattctaccacactaaatatcaatataatcaatataaacacatactctttgagattctcaatcatttaagaattatgagagtcttaaggaacaaagaaaatacaaataatttgcttcgatattttagtagacacaatacagct

SEQ ID NO: 603910 - DNA, 414 bp, Homo sapiens
cgccttggcctaccaaagtgctgagattacagggctaagccaccgtgcccggccgactctgttgatttttcttttagctctgacacttaggcaaatgctttcatctctctaaacctcagttttctcatctgtgagatagaaatgatagaatatatgcattatgtggttgttagaagaattaaatgaaataatgcttgtaaataatgcatgtaaataatctagtaaataattaggacccaatgaaaaccaggtgttacatatgtttatcaacctgtaaggcaggttattagttttattattattgttattgtactttttacatatgaatggaataagaattacaagacccaagtggacttgcytaagatctcacagtgtgtaagtggcagagctgggatttaaactcaagaattc

SEQ ID NO: 603911 - DNA, 587 bp, Homo sapiens
ttttctcttgtgaatcttttccatagtattagattactatcttttgagacttattctatatttaaacaaggttgattattttagaaacaaattaagaaataagctacagacagacccaaaatgctaaactgttagtttccataggcataggggtttatttgggggtgaggtagtagagagagagatagagatggagaaagagggaaagaattaatgaaattgggagactgtttcattcagatcacaacttctagtttgactcttcctaaattctttgcttcttaattttcaaatcacttcagattgcagcaatgttaacctcagcaactaaaaataaaaacttcagtatataacttgggaagaaaaaagtagtaaagggaagcaattcaagatctgttattggtatttgaatacatttattgtgacaagaatgctgttataaatattcataagcaaaggccatctttttatctaggaattgtcaaagagaagattccaaattggaaggatacatcttttgtaaaatctgccaccaattcctgctttgagaataagcacctatkgtaaaatttctactaacattataa

SEQ ID NO: 603912 - DNA, 587 bp, Homo sapiens
gcccctaggtttttccatgactatttgatttccaaagcataattcattcccaattcttgaaaaaaaagaaaaagcaatatttgtttagcacctcctgtgtgccaggcatggtgcttggtgctttacatatgtgacatcatttaattctcacaaacccttgcccattagtgccactgttcagcccaggagacagattcaggaagttcaggcgatttgttcaagattcttcagctggtgtggagcagyactggggttcctgccctgtgctgttcaacagcaagtcacactggcattttaaagttattggtgggacattctgtcttttaatatagttgtaaattatctctaatcatgaaataggatgacagcatactgatccttcctctcctcttttagaaaaagaaaggcattatcttttcattcctgagtaactaagattctttgccccagaggtaaaaatctccactccaggttactcatgtgtcattgtccggagggtacaattgctactcttgctttcgtttggccctttttcttcttcttttcctaaggtacctggcctctttcaagatatctctcactccccc

SEQ ID NO: 603913 - DNA, 591 bp, Homo sapiens
ggggaaaaatagacattcttttcatgaaaataagtttattggctgggtgcagtggctcatgcctgtaatctcagcactttgggaggccgaggcacatggattgcttgagcccaggagtttgagaccagcctggacaacatggcaaaatcctgtctctacaaaaaatacaaaaattagctaggcatggtggcacatgcctgtaatgctgctactcaggrggctgaggggggaggatcgcttgaacctgggaggtcgaggctgcagtgagctatgatcatgccactgcactccagccctagtgacagagcaagaccctgtctcacaaaaacataaataaatcaataaataaaataaaataaataaaaaattaagaaagaaaataagtttattattttttattcaaaattaaacatcagccaagcacatgagcctggcatagcagggtggataagacttaaattatactaagctgccatgtggacatgacctttaaatctaagaactaaagatgaataatggctaacccagaggcagaagggaagagcgggataaacggtgggagcaggggcgctattcctaaaggaagagaca

SEQ ID NO: 603914 - DNA, 626 bp, Homo sapiens
tctgcttagcctgtggctttgcagggtctttactcaaaggggcccttgcctctcctttagtaaaatgctcttggtccgagaaatgatttgagggtaaaagctggrcgaacgattgtccttttccactatagcagttaacataagatttcttctcactttttgtcatatttttggttacaaaagtcaaatgatatctttgttgatggtccaggtatctcagctctgaaaacaccagtctcttgtcgttgccacagttgcccccatgagggtgggcttcatggtgtacaccttgtgcaattaaacagggccctgtgctcagaagtgtcccatgcttggtttctctctctgatgttgttgtcttaaatttttagtaatttttaacgtgcctgcattttcattttgcactgagcactgacaattatgtagccaatcctaccccatgtttcaaagcccacagaatgcagccttgcttccctctaacttatacccaccatgcctttgatggttaagtgctattacctggtctcttctgttccacaatcctgttagctgcattgactgtagggaccccagagcagtatctcttagtttactctagcttgtataagacagccagcactgagctc

SEQ ID NO: 603915 - DNA, 626 bp, Homo sapiens
tctgcttagcctgtggctttgcagggtctttactcaaaggggcccttgcctctcctttagtaaaatgctcttggtccgagaaatgatttgagggtaaaagctggacgaacgattgtccttttccactatagcagttaacataagatttcttctcactttttgtcatatttttggttacaaaagtcaaatgatatctttgttgatggtccaggtatctcagctctgaaaacaccagtctcttgtcgttgccacagttgcccccatsagggtgggcttcatggtgtacaccttgtgcaattaaacagggccctgtgctcagaagtgtcccatgcttggtttctctctctgatgttgttgtcttaaatttttagtaatttttaacgtgcctgcattttcattttgcactgagcactgacaattatgtagccaatcctaccccatgtttcaaagcccacagaatgcagccttgcttccctctaacttatacccaccatgcctttgatggttaagtgctattacctggtctcttctgttccacaatcctgttagctgcattgactgtagggaccccagagcagtatctcttagtttactctagcttgtataagacagccagcactgagctc

SEQ ID NO: 603916 - DNA, 626 bp, Homo sapiens
tctgcttagcctgtggctttgcagggtctttactcaaaggggcccttgcctctcctttagtaaaatgctcttggtccgagaaatgatttgagggtaaaagctggacgaacgattgtccttttccactatagcagttaacataagatttcttctcactttttgtcatatttttggttacaaaagtcaaatgatatctttgttgatggtccaggtatctcagctctgaaaacaccagtctcttgtcgttgccacagttgcccccatgagggtgggcttcatggtgtacaccttgtgcaattaaacagggccctgtgctcagaagtgtcccatgcttggtttctctctctgatgttgttgtcttaaatttttagtaatttttaaygtgcctgcattttcattttgcactgagcactgacaattatgtagccaatcctaccccatgtttcaaagcccacagaatgcagccttgcttccctctaacttatacccaccatgcctttgatggttaagtgctattacctggtctcttctgttccacaatcctgttagctgcattgactgtagggaccccagagcagtatctcttagtttactctagcttgtataagacagccagcactgagctc

SEQ ID NO: 603917 - DNA, 530 bp, Homo sapiens
agaaaaaagggctcgtaaaaatctagaggctcaagtgcattcactcagatgtcctcattggagttctcaggaagcttgcgggagctgtgagtwcatgttttttgttgttgttgtttttgtttgtttttttttaaattttactactctcagaaacaaatcctggtagtgatttttcagaactatctctccactaactataggaatgtgggtctctttaaatgtagccatatgtttttggctttcatagtatactgtaggctgatagctggcttacccaaacctgttgtttacttccttcggaggtttgatggcaaaaacacccccttcacagctttaaaaatgctatttctgaaatgattaaaacaagacatttccttctatctgtatctcatctaccacaggtgagagtcttaataattctcagtaatcacatgccagacatcgtcaccaccccattcatgaatgcaataacatccttgttccatatggccagcaaaacattcaattccagaatcacattataagaatct

SEQ ID NO: 603918 - DNA, 585 bp, Homo sapiens
gacctgtgtcttgggagtttccccacctgaagctggagcaaacagaaatattcatccactccctccatgcccattagtcattgattaagtgccgctcccagggagctctgtcctactgaagtgaaaaccaggaatggattatgcttggcaatcccaatagcactccacacaagcaattgtaatgcagcccacagaacaaaggggtcagaagtggaaggaccaggcttatctcttaaaattattacttcttactgacctattttactttaaatatttaacgtttttgagtctagggttttttccttgaaaaatagagagaccattattttatgggattaatatgaaaacatatacataaattctttgtgcattataaagctttatatcatgagactctcaacatctattggtaaaatgatcatattaatggcattttgtaattggagagtttatcttgaaacccctgtgaactttgagagactgaactgaagggcacaaaatattctaktcaccgagagatagcttactaggattttatcacatttagttttaactcatcaaactaattataaacatttatgtttt

SEQ ID NO: 603919 - DNA, 580 bp, Homo sapiens
tgctacgtgcttggcaccaagataggcccagaaataaagcagtgaataagacacaaaagacctttgtctcatagaaaatttgtgtgtgtgcatgtgtgtgtacacatacatctgtttgatgttgattcagactatggaattctaaaatgttacattgcaccatttttacttagaacattcaaatggggtgacaaagatttatccatcttaattatactattttcaaggaaaaatktaaaacctaaaacagggaaatactacagttataattttagtctatcagcaagtggtttggggaaaaaatgaacaagatagacaaaggagactgagcaagctgagtgatgaatgagatgatactaaagtttctggcagagaacataggtcatattaaacacagaaaggggagattcatctgggtacataaaactgtggcatctccattcagaggaactactccctgcatttgttctattataaagctattaacttctatgaaaataaaaattaaatttgcaagctggaagatgcttatggaattaattatgatgatatgtgaaaagaaaagaggaggtgcttcctt

SEQ ID NO: 603920 - DNA, 580 bp, Homo sapiens
tgctacgtgcttggcaccaagataggcccagaaataaagcagtgaataagacacaaaagacctttgtctcatagaaaatttgtgtgtgtgcatgtgtgtgtacacatacatctgtttgatgttgattcagactatggaattctaaaatgttacattgcaccatttttacttagaacattcaaatggggtgacaaagatttatccatcttaattatactattttcaaggaaaaatgtaaaacctaaaacagggaaatactacagttataattttagtctatcagcaagtggtttggggaaaaaatgaacaagatagacaaaggagactgagcaagctgagtgatgaatgagatgataytaaagtttctggcagagaacataggtcatattaaacacagaaaggggagattcatctgggtacataaaactgtggcatctccattcagaggaactactccctgcatttgttctattataaagctattaacttctatgaaaataaaaattaaatttgcaagctggaagatgcttatggaattaattatgatgatatgtgaaaagaaaagaggaggtgcttcctt

SEQ ID NO: 603921 - DNA, 218 bp, Homo sapiens
gtgtgtaatatagtgcagggcagggggtaatccaggcagactcgattagacacaggrcaatgagagacactttattaaagtcttcaaaaagtctttggggccttggacacagaagtcactggaggcctaaatgtgttacacatcatgactctagaattgagtctcacaccagtaggctgtggcttattaaaaacacagacactggcccaattgtcatg

SEQ ID NO: 603922 - DNA, 493 bp, Homo sapiens
cagtgaagtacgtgccggttgatttatcccttctggaagaatgaaaggttgcgttggacctggtgagattttaacctgtgatcctagagaatcttccagagcttcaaacctgaagtttgatgtgtaacctactggtttaaagggacctacatattagtactggagagtctgacatagtgggtgggtacatcagacatcagaaagagcaatttagtcagcaagacacctatattccctgttctaatcataaaaaaagataatctttccaagagctaccacaagaagaattttgataggcactgagtgaaagcaagtcatattactggaattttcctttatggagcttcagcctcagtttggaaaagggtcccaattatttctgagaatgtaatggctcatttttactacaaagatatttgaggtgtatattatgctatgttcaaattygtaagatattgttgaatatacattattttcaagttcaaagtacaat

SEQ ID NO: 603923 - DNA, 494 bp, Homo sapiens
agtaaaataatattctaaaatttattatctaatatttattagcacttgagttttttaaatatacctttaacagttacaatagtctggcattttctgcataaatgtgacttgaygtcattttggcaggacaaaaattctaagcttcatttaagtactgcaagtgaaaaatacatatctattaatctataataaagtgtttcaagcatctgctaggttattagtagcaacaattatagtcagttattcaaacactttaagtttaaaatattgcaaattttttatttcagataaaaaattttgtcatgatttttttcttgtatttaagcaaatatttttattattttgactttcatgtacacttttatttatttggcatataaaattacaatgcattggaattttttctattgacattatataccaaagtataatgattagcttttgtttaaggaaacaaaatttactctagatatgtcaagcagaaaagaatttaa

SEQ ID NO: 603924 - DNA, 639 bp, Homo sapiens
ctgtaatgacaacttgcactgggtttacataaggacagcctgttggaacaggatggcagggacatcccagaagccatcaatgcaagcctgtgagaatttgatatgttggagcaaggcagtaagtacagtaagtatatgcagtctggcagggatggtgattagcaacattgagggaattgggcaaataaataaatggagtatgggaacagatttctcactgaaggagaaggaaggtacaaatatggaaataaaggaagttggaataaacctgtggtgttagactgaaattggcagtatggcataaactcaaggtttttcagatagatagatagatagatgatagatagatcatagwtgacagatatgtaaaaatatagacataaagatgtatgtatgtgtgtgaatatgtgtgtagttgtatatccatattcattcttacatatacttcctcactctgttaataaaatgttctagatgtagcaacaacccggtagcaatgagctctcccggcatgcaaagcttggtttctaagtacagtacaactcttcattacaataaagtagagctcctgggtaaatggcagagtccagggctgaatttggaaaaaacaaaacaaaacaacaacaacaacaaaacaat

SEQ ID NO: 603925 - DNA, 387 bp, Homo sapiens
atacaatgtcaaattttccacagaaaacactttgtatctacaaagtaaacaaaaccaaagaaaacaaaacttaactgtggagaatcttggtattcacaattttaatcttgccatcgaaatttaaaccactagtaatgggacgaatcaacattgtgtgctaccagatgtaatgagaagwactgcattacttctgtgctattcctgcccaaaatgtatagcccagctctaatcatgacaaaatatcaggcaaatccaattgagaaactttctacaaaattgttgccttgtaatcttcaaacacatcagggtcatggaaatgaaagactgaagccctgcttcaggtagaaagagactagaaagacaattagatgcaatgcatgattcgtg

SEQ ID NO: 603926 - DNA, 387 bp, Homo sapiens
atacaatgtcaaattttccacagaaaacactttgtatctacaaagtaaacaaaaccaaagaaaacaaaacttaactgtggagaatcttggtattcacaattttaatcttgccatcgaaatttaaaccactagtaatgggacgaatcaacattgtgtgctaccagatgtaatgagaagaactgcattacttctgtgctattcctgcccaaaatgtatagcccagctctaatcatgacaaaatatcaggcaaatccaattgagaaacwttctacaaaattgttgccttgtaatcttcaaacacatcagggtcatggaaatgaaagactgaagccctgcttcaggtagaaagagactagaaagacaattagatgcaatgcatgattcgtg

SEQ ID NO: 603927 - DNA, 586 bp, Homo sapiens
cagaactcaatcttcacttttgtttccatgactttactttcactttcccataacagatagcctctgtgcaaccatcaatcacattagttctacctcctccrccctgtctcaccctcaccagtgggtgagcacttgatccaatctagtccattcagactttcctctccacagaggtatggtaactctagacctttctctggccaggtatatcacattttcgtttaatgtaggagttgttcagtgcattgtccttccaataaattccttctatctctgttcatccagactcaatttatgttgcttataaccagtcctaactgacacagtgattttcctgatgcttagatacatttactttggaatgtagcaaaatattcaaagcaattgtcaatttaaaaaggcatcgtaagacaggacatagtggctcatgcctggaatcctagcactttgggaggcataggcaggaggagctcttgatgccaggagttcaagatcagcctaggcaacatagggagactctgtttctattaaaaaaaagaaattttttaaagaaaggcaacatagaaaaataaggaggaatttaact

SEQ ID NO: 603928 - DNA, 629 bp, Homo sapiens
agtacattcaaaaacaggttcattcgaggaagtgcttctcaaaaacatgatgcaatggtcaaataagtttgtctgcctcttagatagtgcctattagagtctcctattaggagctctaataattcttctaggaaagaaacctgtttaacaaacccccctcttcctctagaaagcctaatagcattgaagagtacctccttggaaatactgttttaaggtataacaagtctgttccactcccttgtctttttaagctatgtagatggaaaatctcawtctgcattttttcttatctcaaaaaaaaaaaaaaacctagaggccttacctttagaggtattatttttacttcccaatcaaaaattagtatgtaaaatcaggagttgtagccccctctttagaatatagtattttcataattttggatacttggtgcatcaatatttataaatttgtagtatcataataagtggctgcatactttctacctagaattcctttagcttaattattgtggtatagaccaggagtctccagatatgttgagcctattacttgtgtatttttatatgtaacataaatgtaccactacacttttatatcatttattttttgaaactttccctaaaata

SEQ ID NO: 603929 - DNA, 579 bp, Homo sapiens
aaaaaaattgataccctgagtttctaactactctcctatttatttctccttgcacgcagacactctcttgaaaacaatagtctacccttgctgatttcatttactcacttcgtattcatttttcaactcacggcattgaaagtctcatccttatatcttctctgaaactgcctggcaaatgaagttaagtgctccataatttcacactaatatttgctacaaaatactctcatctacttcatgtatatctggtttctctctttttcaagctatcttgcatgttataagccagaaccatttgcattaagaactgacctaatgtggttgctcttctgctcaaggacctactgaatagcaaccacatcaarcctgaacactttcttccactttctaaggttttcatgttcaactccccaccataatctaacatatactctcaagttaaatcatgaggagtggcacgtttgactcctaatccctatatgtcccctatctttgaagcctcagtatgcccattcacatgttcagcccagtctctaggctctgaacaacactgtacttgaaacaggggaatatgaa

SEQ ID NO: 603930 - DNA, 588 bp, Homo sapiens
gccaccatacccagctaattttttgtatttttagtagagacagggtctcactatgttggccaggctggtctcgaactcctaacctcaggcaatccacccgcctcagcctcccaaagtgctgggattacaggtgtgagccaccatgcccagctcatagttcaacacatttcaagtgctcmatagccacatgtggctagtgtctaccctattgaacagtgtagttctaaatattactaaattatttgccttagtgttgataccaatgtgtgagcattccaattggacatccttatcaacatttggtctatcagatatcttcagtattttgccaatctgaagggtaagccagaaaagaaccctagtagaaaaactgaggaagtttgagtaaagtctgtagttcagttaatagtattaactaatgttaatttcctagtttcactaattataaaaatcattatagaagatgccaaaattaaggggagtgagtgaaagttattcaaaagttctgtactatcctttcaaggtttccataagtctaaaattatatcaaaatagaaagtttttaaaagtcaccccctaattgaactt

SEQ ID NO: 603931 - DNA, 484 bp, Homo sapiens
actggcatggttttggaaagaacagaacatgtcaggaaatcttgagagatttttctaagaaaattatataattaatgaggaaaagcaaagcaaataagtctctattgttagccacctcgatgtttagtaagaacaaaagcaaatgaaatcactggaatagtgttattagaaacttggaaagttaacagtcatttattgaagttgctctctaatatttaaaacatacctctgtattaggccattcttgcattgctataaagaaatacctggtactaagtaatttatttttttaaaaaagaaatttaattggctcatggttctgcaggctatacaggaagcatagcactggcatctgcttctggataggtctcaggaagcttccaatyatggcaggaggtgacaggggagcaagtgtctcacatggtgccagcaggagcaagagagagagggttgtggggagggaggtgccacactcttttaaaca

SEQ ID NO: 603932 - DNA, 539 bp, Homo sapiens
gaagcaattgtatttttcttacaaatttcttcttcaaattattcatttgttggttcatttaatttaattatctccccacccacccctcgtttctttttagctggtcaaaatgtctttggaagtttcctaaagtctgaattcagtgaggagaatattgagttctggctggcttgtgaagactataagaaaacagagtctgatcttttgccctgtaaagcagaagagatatataaagcatttgtgcattcagatgctgctaaacaagtgagtattaagcttatcatcatcagtttctccataaaagaccctatatgcagaaataacatttaatatatacaacaagataaaatccttttggggtatataattttacttctacatacttaggcatataaawatagttcagtgcaatgagaatctaattttctatattggtgagggtttcagcacagtagaataaagagactgattttacaaaaccagctgccatgatgagggtgagggaagggttaagggtattgttactgaccagaactgca

SEQ ID NO: 603933 - DNA, 539 bp, Homo sapiens
gaagcaattgtatttttcttacaaatttcttcttcaaattattcatttgttggttcatttaatttaattatctccccacccacccctcgtttctttttagctggtcaaaatgtctttggaagtttcctaaagtctgaattcagtgaggagaatattgagttctggctggcttgtgaagactataagaaaacagagtctgatcttttgccctgtaaagcagaagagatatataaagcatttgtgcattcagatgctgctaaacaagtgagtattaagcttatcatcatcagtttctccataaaagaccctatatgcagaaataacatttaatatatacaacaagataaaatccttttggggtatataattttacttctacatacttaggcatataaatatagttcagtgcaatgagaatctaattttctatattggtgagggtttcagcacagtagaatraagagactgattttacaaaaccagctgccatgatgagggtgagggaagggttaagggtattgttactgaccagaactgca

SEQ ID NO: 603934 - DNA, 468 bp, Homo sapiens
actatcctgccgcttccgtgccytcctgtttttgatctttcccttgttccatctgtctggtacacccaccaccgctagtccccattgttccttcttgcctcccttaggtctccaccgaggtaccacttccgtgtacagccttcctgggggccctgttctacgcggggcctgtgcctctgggctgttgttcaccatgcttgtctgtgggtgtctttgcacagcacaggccaagatgcctggcccctgctgtgtctctaggagctgactttcttaataccaggccaaggccttcggtaggggtggagagaagagagtgggacaagacaagcatctacagaccagtggtgggttgagtgtgggtgctccatcagccagtgaacctagtcagccatctttgtaggaatttatttctagtgaccagacatattctgagatgaatggttagtacaatgtcttaattgaactttg

SEQ ID NO: 603935 - DNA, 468 bp, Homo sapiens
actatcctgccgcttccgtgccttcctgtttttgatctttcccttgttccatctgtctggtacacccaccaccgctagtccccattgttccttcttgcctcccttaggtctccaccgaggtaccacttccgtgtacagccttcctgggggccctgttctacgcggggcctgtgcctctgggcygttgttcaccatgcttgtctgtgggtgtctttgcacagcacaggccaagatgcctggcccctgctgtgtctctaggagctgactttcttaataccaggccaaggccttcggtaggggtggagagaagagagtgggacaagacaagcatctacagaccagtggtgggttgagtgtgggtgctccatcagccagtgaacctagtcagccatctttgtaggaatttatttctagtgaccagacatattctgagatgaatggttagtacaatgtcttaattgaactttg

SEQ ID NO: 603936 - DNA, 468 bp, Homo sapiens
actatcctgccgcttccgtgccttcctgtttttgatctttcccttgttccatctgtctggtacacccaccaccgctagtccccattgttccttcttgcctcccttaggtctccaccgaggtaccacttccgtgtacagccttcctgggggccctgttctacgcggggcctgtgcctctgggctgttgttcmccatgcttgtctgtgggtgtctttgcacagcacaggccaagatgcctggcccctgctgtgtctctaggagctgactttcttaataccaggccaaggccttcggtaggggtggagagaagagagtgggacaagacaagcatctacagaccagtggtgggttgagtgtgggtgctccatcagccagtgaacctagtcagccatctttgtaggaatttatttctagtgaccagacatattctgagatgaatggttagtacaatgtcttaattgaactttg

SEQ ID NO: 603937 - DNA, 468 bp, Homo sapiens
actatcctgccgcttccgtgccttcctgtttttgatctttcccttgttccatctgtctggtacacccaccaccgctagtccccattgttccttcttgcctcccttaggtctccaccgaggtaccacttccgtgtacagccttcctgggggccctgttctacgcggggcctgtgcctctgggctgttgttcaccaygcttgtctgtgggtgtctttgcacagcacaggccaagatgcctggcccctgctgtgtctctaggagctgactttcttaataccaggccaaggccttcggtaggggtggagagaagagagtgggacaagacaagcatctacagaccagtggtgggttgagtgtgggtgctccatcagccagtgaacctagtcagccatctttgtaggaatttatttctagtgaccagacatattctgagatgaatggttagtacaatgtcttaattgaactttg

SEQ ID NO: 603938 - DNA, 605 bp, Homo sapiens
ctggctcattttcccttaaagttttcatattcccagcatgttcccactccattcttgctgcaaatacagtctgaagtttgctggcccagggaactgacaaagcctcgttccctccccagcattgccttcccctggggcagtgttggaggtaccacggcttgattttcatgttggatgctctttttcctcacatccttacagcccttggacatgccctggttatcaccacacagaccccagttctctccccatatttcattttttcctatgcatttcaatattagaaaagcctgactcacattttctttagggaggggcagggagaagatttcaacattcaccctcactgccggtctctctcttcagctacacccacgcccccagtccccttctctctcctccacaccttcttttttggctttgttttggttttcattgagttctgtccaaacatcgaatatttttaagctgtgaggaatgggggtgtcgggaggaagtggccagtctcttgtcaacaccctgtttcttttcctggctggcaggttttgattggaacttggtattcaagtgggattacatgacrcctgagcagagaaggtcccggc

SEQ ID NO: 603939 - DNA, 385 bp, Homo sapiens
agcttttcctcttgctgtggtccctacagggtcagccctgtttaggctcaagcctcttaaatcccagtgcaagaccaatttctctatgaaattctccctgtcttctttggtctcatggctacttcctgggaggaaaaagtagtaatcagctccctccccccagctaaatgtgcatggtrttagcaaattctaacccaagatgttaaaactatctgagaagaggcatgattctgcttcttgtctgtaccctcctaaagtcaaggtgcagcaaggagagagacatttgcatgtggcccctgagaaagaagagatttgtctgcctcaccccctgctggtgcaaacttgcacctctctcagcctcagttttcttatatgtatcaagttt

SEQ ID NO: 603940 - DNA, 581 bp, Homo sapiens
cagtctcatgtctgagaggatgaagatctgatctgaggaagaaaccttcctcttctggcccaaccacagatgtctggcattcttattcctgtctggctattaaaggcagaagttttcagtgtgattgtattcaacgtgtgttcactaactacaggctaggggrgtcctaatctctctgctttgaataacttgctcaaagctcaaaatcccatgggtaacatccagctggctggaggccctaggccacatgctcaattctggcggctaagatgaggagagagcaagcatcagactgtatctcctttcttagtgaaaagtgggctctgcctcttgtcaatggaacattctccaaaactaggagatgggctcagtacagggcagccaaccaatgacctgtatccaccataccatctttctcctccctgcaaatgccagctttgtctccttttcaggatctttgttcttgcagttcccactgctagcttctgtcccccatgttaatgtggctggctctgtcccatccctcggttctcagctcctcagaccacatagaatacctgttctccctgaagcctctctga

SEQ ID NO: 603941 - DNA, 570 bp, Homo sapiens
tcttgtaaccaacaagttccctctgcctgtgatcttcatagatggaggtcacagaaagaagtgtcttgatactgtttttgagaatagtaatgcttcaaatatttggagcaccatttctctaaagcactcaaaacgctttccacttggggctttcatgagtgtttatagcacttrgctcttcaggtttgccagaaaccaaagaaaccaacttagggtgaaaattatcagtattgttaaacatacacaatacatactcctggaacacttatcaaacattgttccacaagtgacaaaaatgtactttcaagcactcaacaaaatgagacttcaacagcagacttcagtctaattgtgtcagtgagaagccaacctaaatagcgttctttagaggaacgatgtcacgctccatttccactgcctattttaggagccttgttgtttctcccctggactgctgcagtagtctcctaatttgcccctatctcagccctgagtgatagaactttctgtgatgttctatgtcagcactgtccaatatggaagctatgagccacatacgaccagtgagca

SEQ ID NO: 603942 - DNA, 565 bp, Homo sapiens
tccctctgcctgtgatcttcatagatggaggtcacagaaagaagtgtcttgatactgtttttgagaatagtaatgcttcaaatatttggagcaccatttctctaaagcactcaaaacgctttccacttggggctttcatgagtgtttatagcacttagctcttcaggtttgccagaaaccaaagaaaccaacttagggtgaaaattatcagtattgttaaacatacacaatacatactcctggaacacttatcaaacattgttccacaagtgacaaaaatgtactttcaagcactcaacaaaatgagacttcaacagcagacttcagtctaattgtgtcagtgagawgccaacctaaatagcgttctttagaggaacgatgtcacgctccatttccactgcctattttaggagccttgttgtttctcccctggactgctgcagtagtctcctaatttgcccctatctcagccctgagtgatagaactttctgtgatgttctatgtcagcactgtccaatatggaagctatgagccacatacgaccagtgagcacctgaaatgggg

SEQ ID NO: 603943 - DNA, 584 bp, Homo sapiens
tttttttctccctgtttttaaaacgttgttaataaaaaacttattttcaattcaaaagtaaccatgattattgaaggaaaaaaagagaatggtaaaagaagaaaaaagacagtcattcatagtcccatgattccccaaataacaataatacatgcattgggcttccctgtatcttctgtatagtattttctttttgttttttggctactatttgatattctgttttacattatcattatagtaggataattttttctattattagacatctaaacatawtttcactttttatactattcccccaagtagatatactgttaaccacactttagttggccacttaaattatttacaatttgcattctataaataaagcttgcagaatatctttatgaatacaactttttccatagttagaattatttacttagaaaatatcttaaaaagtaaaattcctgtggcaaagaatttgaatattccactggccctaatatatatatgtaaactcaccacttttaggttgagacctcagatctggaaaatgaatttagtgaaaagaaggaaaagtgagctatcaattggca

SEQ ID NO: 603944 - DNA, 577 bp, Homo sapiens
taaatactgtttgatgcctcgcaaagaataaattactcagcaattggcctgaaggagagattcagtaagaagtttttggggtctcattgattctcaatgctataaagtcctgttactacaaaaccttccattgtcttcatgtgcacattggacaaacaccacattcttcagcctgccaccatttatcatgcagttctgttttattttccctacattttcagctttaaccagctgatcttcccaaaagtccccccagctcccctttatttgagatgcacttcccatttgtaattccgcatctcctcctcttaggaaaatcctgtccattctcccagtaaagttcaaaacaaaacttgcttctttctgacttcccgagcccaatcaatggcaactctatcagttgtatgactcaggcaaaaaaatcctggaatcatcttcgattcttttctctcacatccatcagcgagccatgtggctctatctggcagctaaggcattttcaccacccagtmgttctgtgtctggtccaagcatgaaaccctgttagtatttattatataacatgatcagatactgt

SEQ ID NO: 603945 - DNA, 578 bp, Homo sapiens
aaggcaattttgaaaatttacaaatacgtggaaactgaagaacacactacctaataaccaatcattcaaagaataaatacaaaagaaattagaaagtgctttaaggtgaatgaaaatgacactacaacagatcaaaacttaagaaatgctgctaaaatagtgcttttgggaaaactatctagaaatgcctatattgaaaaaaaatctcaaatcaataatctattcttccaccaaaagaaactagaaaaaaagaaaactaaactaaacccaaagyaagaagaaggaaggaaataattaaattaaagaagaaataaatgaaatagaacataggaaaataatacaggaaatcaacaaaaccaaaagttggttttttgagaagttcaacaaaattgacaaacttttatttagaataacgaagaaggaagtaatattcatgttactaaaattaagaatacaagaagggacattaatacaccttacagaagtgaaaaggattatatgccgataaattagagaatctaaatgaaatggacaaactcctagaaagaatcacactatcaaaactgacttaaaaaata

SEQ ID NO: 603946 - DNA, 590 bp, Homo sapiens
caaacccacccagctctatccaccctctcccacctaagtggggaggaaaaagggttcacagtccagaggcacagactcactaaatgactgaggcttactctcaagactgcaggatgcttcccctcccctcacatcttaccaccacattattaaaggttgatttacaacagttacttttactagatacatcatgtccagctatgaagaagaaattacacggcatactaaaggtaaatatatatatacacatatatataatatatattatatatattatacatacattattatatattatacatacataatatatatgtattatacatatataatatattatatattatacatgtattrtatataatattatatataatatattatatttttatatatatacacacacatatatattatatatatatgtatatatacacaatttgaagaagacagaggtcacatcaaaaccagacatggcagggatgctagaattatgagactagcagtttgaaacaactatgattaatatgccaaaggctctaatagataaagtagacagcatgtaagaacagatgggcaatgtgagtaga

SEQ ID NO: 603947 - DNA, 592 bp, Homo sapiens
gaattgaactcaacaatatatataaagagttatacagcacaagaaaatgacactcatcccagctgtgcaaaactggttgaaaaatcaaaattaattaatgtaatccatcacatcaacaggctaaaaaattacatgaatatatcaatagatgcagagaaagtatttggcaaaatccaacaggtatttatagtaaaaactcacagtaaactaagaataaaggcgaactttcccaagttaataaagaatatctatttttaaaaaattacatctaacatcataayagtgagaaactaaaagcttttccattcagatcaggacaaggcaagtatatttcctctcaaaattcctttgcaaaattgtactggaagtcctagctaatgcaataagacaagaaaatgaaataaattgtatacagattagaaaggaagaaataaaactgtcttttcttacagatgacatgatggtctatgtagaaaatctaaaagaatcaacaaaacagcttcccagaatgaataactgataataccaaggtttctgaatacaaagttaatatacaaaagtaaattgctttccaatacattagcaatgaaca

SEQ ID NO: 603948 - DNA, 591 bp, Homo sapiens
tagaaatattccatgtttatggatagaaagactcaaacctggtaagttgtcatttcttcacagcttgatctatagagtcaatgcaatccccatcaaaatcccagcaagttgttttatgaatatcaacaaactgattctaaagtttatatggaaagaacaaagaccccaaataaccaacacaatatggaagaagaacagaggactaccactgtccaacttcaagattactataaagctacaacaatcaagacagtgtaatattggtaaaataatagacaaatagatcaacagcacagaatagagagctcagaaaaatagacccacataaatatggtcaaatgatctttgacaaagaagcaaagacaatacagtgaagcaaagatagtcttttcaacaaatggtgtgggaacaactggacattctcatgcaaaaaaaaaaaagaaagaaaaataatctagacacaaccattatacttcttataaaaactaactcaaaatggataytagaaccaaattcaacatgtaaaactattaaacccctggagataacaggagaaaaatctagataacctggggtgtggcaatgactatt

SEQ ID NO: 603949 - DNA, 561 bp, Homo sapiens
gttagaatagaaagtacatccaagaataaaccttaaactatggactttggatgataatgtgtcaatgttggttcactgcttgtaacaaatgtaccactctagtggaggatgttcataatgggggaggctatggatgtgtatttacttatacatggctagagtatgaagctatacatgcatatatacctaggcataggtatatgggaaatctctataccttcctctcaattttgctgcaagcctacaactgctctaaaaaaagtcttaaaaatgtgaatagtttaaatcacatcaatttaaacaamctgcaagatataagaatgtagggaattgtttttctccacacctggatctagtaaaaatgcagacagtacatttccaaagcaaaatgataaaataatgggaaatttcagagaacagggctttctttaaaagaaaaaagtggtattttctgaaataaacagagcaagaccctatatgcattttgcacattgtcaaaaggtcacctcacacattctggacaacaacacagagctttatataacccactggaccttgccc

SEQ ID NO: 603950 - DNA, 616 bp, Homo sapiens
agatagtgcccactatgggaagtccaagccccaaagatatcccccactatggaagtccaagatggcaactgtgcagacaaatttggggggaacctgggctgggcrtgggatatgctatatacttgctgagaaatccaacacaatgaatgtggctgctttacccctcccaaggaaaacctccaaatgaaaggcttctaggcagctgctggaggaccaaggagccacagagcagtatagaaagggagcagcttgctgacatgcatgtggcatacacatcaccctgcaagcacactgaaaccttgactgagaaagagagggaaggaaggaagagagcaagtgagcatgcaacccagtaaagggcaggtgaagaacgtactgtggaagaaaacataacccaagagaaagatccaaattccctgcaatgaccacagatgaactttgaaaaaatgttaacaagcttgaagatgcagtgataaaaataacataactgatctgaaatgtaagaactaaggagataaatgttccactcttagagaaataaatcagttaagaacagcaaagaccaaattactgacaaagaaaaaaggttgagattttcacagtgaaaatataatac

SEQ ID NO: 603951 - DNA, 471 bp, Homo sapiens
ttcttctaatctcaggctccaagctcctgcctctggttctcacttcagcctttgccattccttttttcgtaagctgtctctagttctcactatggctcccactcagacaccaccaccacctctcatcccttcactccgtgcagtaccacaaactcaaggatgtgtgtaggtttaagtgaatgttagggtcaatacttgtaattaacttgtgcttgcccatctggggaattttaagagaccatctcttctaagtctccagcatccggctacatcctgtatcgccctttgtcttctttgatttcttgcacttcctaacactccagtttcatttacagtttaactttgtatcatgcctgtgtccttctgktcttgccctgaggtgtatgattctacaaccatgtggcttatcaaaccacgtggtttatcaaaataatttgcagaaacaaaagatgactcacataagtggaattc

SEQ ID NO: 603952 - DNA, 432 bp, Homo sapiens
acgaaagcaatggcatgtatatgtgtgtacatatacatatatatgtgcatgtatatgtgtgtacatatacatatatatgtatatgtacacacatawacatctttaaactttataatatgtagcatagaaagtggaaatcccccgtaatcccacacagctgagaaaagcagttaaaattttttcaaggcatatattaacttttcacttattttacaaaaaaatgggattatactctcaactcaaaagcatgccgttttctatctagcaatatgtcttagacatctttccatgtcagttggtaaaaacttatcatctttttaatcttctattaaatagctccatgaaattgtattgtatggctgaaccatactctccttaaccaattgcctattaattcacctttgagttctttccagtttttcctgtaacaaa

SEQ ID NO: 603953 - DNA, 343 bp, Homo sapiens
tgaaaatacacacacacacacacacacacacacacacacacacacggacattacatatgtactcatttgcatacrattttattgttttcaaaacaaccatacaaatacaaataaataaaatatatttctctcttttttcttttcttttcagacaggttctcattctgtcacccaggctggagtgcagtggtaccatctaggcttactgcaacctccatgtcccaggctcaaatgattctcctgcctcagcctcccaagttgttgggactacagggatgtgccaccatgcctggctaatttttgtatattttgtagagatagggttttgccatgttgccaaggc

SEQ ID NO: 603954 - DNA, 343 bp, Homo sapiens
tgaaaatacacacacacacacacacacacacacacacacacacacggacattacatatgtactcatttgcatacgattttattgttttcaaaacaaccatacaaatacaaataaataaaatatatttctctcttttttcttttcttttcagacaggttctcattctgtcacccaggctggagtgcagtggtaccatctaggcttactgcaacctccatgtcccaggctcaaatgattctcctgcctcagcctcccaagttgttgggactacagggatgtgccaccatgcctrgctaatttttgtatattttgtagagatagggttttgccatgttgccaaggc

SEQ ID NO: 603955 - DNA, 610 bp, Homo sapiens
gatttggcatttttttacttaaaatatctcattattggtacagggatctttctcattcttttttttttaagctgcatagtattacattgaatagatgtacyatatttaatttaaatgcttctctgttgatcatttgggatgcttccagtcttctgcttttagaaacaatgcttcattggaaaaccacataaatatatcatcttgtaggtatgcaggtaaatctatcggacaaattttcaaaagtgagattgcagaattgaagagttaaatacatcaattattttatatacatttccaaactgctctctgtagtttccaaattgctccctgtagtgtttgtatcgtgttgtaccccaccagcatctatgaaggtgcctgagaaaacatcttttaaaaatacattgttgagccgggcaccgtggtgcacgcctataattccagcactttaggaggccaaggcgggtagatcacctgaggtcaggagttcaagaccagcctggccaacatggtgaaaccctgtctctactaaaaatataaaagtagccgggtgtggtggtacatgcctgtaatctcagctactcaggaggctgaggcacgaaaatcacttgaa

SEQ ID NO: 603956 - DNA, 368 bp, Homo sapiens
atttgataggttttcatttataggttacttgatgcttttgcttcatagctcttaagattctttactttgtcttgatttagataacctaattaccatgtgcctaggtgatgatgatctttttgtgatgaattcccaggtattctttgggcttcttgtatttggatgtctagatctccagcaaagccagggaagmttttctcgattattccctcaaagaatttttccaaacttttagatttctcttcttcctcaggaacaccagttattcttatgtttggtggtttagcataatcccaaacttcttggaggctttatttttttaaaattcttttttctttgtctttgttggattgggttaatttgaaagc

SEQ ID NO: 603957 - DNA, 514 bp, Homo sapiens
tgtcataataatagaaataaagtgtgcaataaatgtaatgtgcttgaatcatctggaaaccatcctcccaccccaccacctcatccatggaaaaactgtcttccacgaaaccagttcttgatgccaagatagttggggaccgctggattagaggattttggctttggagattgactccagagtaaatctggattggttctaattcagaaatggaaaatagaagcagaaaaagaatggaactagttagacactgtgctgagaaatgaaatcagttatctcttttgattctcacaayaccccagcaaggacctgcttcaccagaagctattattccactcagtttatacttgagagggctatggttcagaaagactaaatggggaaagggttatcactgctctacttcccaccagggttgaccactggggatcagcagtgtgtgtggggtcagcagtgtgcatgcatgcatcgctctagggtaagatgggctcttgtgtggtggcccagggccagg

SEQ ID NO: 603958 - DNA, 566 bp, Homo sapiens
ttctccttccaccatgattttaagtttcctgaggcctccccagccctgtggaattgtgagtcaattaaacctctttcctttataaattacccagtctcagctatgtccttattagcagtgtgaggatggactaatacaccagtcaaagccattttcctggattgtatgtgggataaagagctgccaggctgacctgaagaagctcagagatgtagccaaagaatcactatataatctgtttaaagggctaggcttccaagaaggactgaagtagtgcagggaaaggtgtgagggatcctagtaggagggctatttgtcctccttacaggtcagcctcattgggcccagttttctcagattasatgtaactcctcttcttttttctgtttccttgaaaactattgcacaaatacagcaattctcggcccctaccatgcttggacaaaactgattctttggctcaagcattgaaagtgaaaattcctagggttgcctggcaccattagtctccccttatcaccctagcaacccttgaagatggaaggaatagataatgccaacgacca

SEQ ID NO: 603959 - DNA, 589 bp, Homo sapiens
agggaagttaaaagaatggatagagaaagacgctgtgacatccagtaccagccccagactgtgtgtaaggccactttagacccctagccctgtaagccactgatgactgcagccatcagagtgagcctaggagaaaccagaagaactacagaattgtaaacctcaggggaaaatagcatttaaaaatacaatagagataagacctcagctagtcatagatgcccctgtgttgcaaacttccagaaaaaaaaaaaaatgcggtaatctctggagtatttttaggggaaaagatgtgacaatagattctataactaaacaattactctgtgtaatgtggctgacaaaaattgtacccaaggatataagacatgttaattatatcatctatatatgcttccgggaagcatatatggataaaattacttgaagatttaaccaagacataaaccaaaattttaaaatttaaattggaggttgtggccaaaagcctcagtggtacaaatgaaactaaataaagagttgtttaaataactataaatatagtttcataaattaatacagatgkttttaacaattcttaaaagagaag

SEQ ID NO: 603960 - DNA, 580 bp, Homo sapiens
gttccaggggttatttcaccaatcctctactgaactgtctttattcatcgacctattaacacttgatcagatttatggcttgttcatgttccaatttgtcatttgattgcgttagctttctacatttgttttgtggttgtggtgggtggttggttggtttgattaatttcctggtttttgttgttggtggtggtgatcgtggtggtgatggtagtggtggtttggtttggctttgattagaaagtttctatttttatatagtcaaatctatcacctttttcttttataagtttctgattttgatgtcatgtttaaaaatgccttacaaakccaggcccaggggttcatgcctacaatcccagcactttgggatgctgaggtgggaggattgcttgagcctaggagtttgagaccagcttgaacaagatggtgagaccccaggagtttgagaccagcttggacaagatggtaagtccccaggagtttcaggccagcttggacaagatggtaagaccccaggagtttaagaccagcttggacaagatggtaagaccccacctcaaaagaaagaaaggaaagg

SEQ ID NO: 603961 - DNA, 580 bp, Homo sapiens
gttccaggggttatttcaccaatcctctactgaactgtctttattcatcgacctattaacacttgatcagatttatggcttgttcatgttccaatttgtcatttgattgcgttagctttctacatttgttttgtggttgtggtgggtggttggttggtttgattaatttcctggtttttgttgttggtggtggtgatcgtggtggtgatggtagtggtggtttggtttggctttgattagaaagtttctatttttatatagtcaaatctatcacctttttcttttataagtttctgattttgatgtcatgtttaaaaatgccttacaaatccaggcccaggggttcatgcctacaatcccagcactttgggatgctgaggtgggaggattgcttgagcctaggagtttgagaccagcttgaacaagatggtgagaccccaggagtttgagaccagcttggacaagatggtaagtccccaggagtttcaggccagcttggacaagatggtaagaccccaggagtttaagaccagcttggacaagatggtaagaccccacstcaaaagaaagaaaggaaagg

SEQ ID NO: 603962 - DNA, 597 bp, Homo sapiens
gatctgtagatactctgtcatctttcaggagtagagaatgaaatgaatgtctgagacctaataagggtgagagctctgaggaactcttgtcataaataaaccatgactggacccttaaaacctctggcctaatatcaagcattcccaaccatttttggctacagtctccacagttgtgaaatttcaagtacctatcctttctagatatgagaacaaagaaggaattcttcgtgagttttttttttctgtaattatatgggaaaatggcgactctacactaactaatgtacttcactccttcgagtgtccttatttttttcataagtggcttgtatgaaaattgtaacctaagttctttcttcccaagcttctacaatttttcagttttaaatctattattactgcaatctcataataacctgttaaacccaagctcttgcacagtttgtgccaagatgagatttttwaaaaatcatatctaaattacttcatgaaataatgttcctatctgcctccaagctgctgtcaaggctgggacaaaaagctttgctaagaagaagagagcaaactgagccggatgtctctagggaaatagtg

SEQ ID NO: 603963 - DNA, 624 bp, Homo sapiens
ctgtgtgtctgtttgttgaagatactaaaaaatgattttatatttacccaggtatttttggagttcttcattccttcctgctgatccttggtaacgtgtgatttcattttcctcattctgaagaactttattttggcatttgttatgatgtggatctcctggggacaaattctgttagatttttatcacactgagagtgtttctatttttcctytttttttaaaaggttgttttcttgggaggtagacttttaggctggctgctttttcttgtagtatttaatagatattattccattacctatttgccttcacgatttcaggttagatgtcacttgtaactcatataattgtttactaaatgtggctttttttttctctgattttaagatatgttctttttatttggtttccagaattttgattgctatgtagccaggtatgttttatttatatttatctgtttagagtttgctgcaattttttgatctgtaggttgatatcttttatcagttgtggaaaattttctgtcaatatctcttccaatattatcaccccttttctcttttttcaccttttagtactccaattatacataaactgagtagtttttttttttccctag

SEQ ID NO: 603964 - DNA, 628 bp, Homo sapiens
gaagaactttattttggcatttgttatgatgtggatctcctggggacaaattctgttagatttttatcacactgagagtgtttctatttttcctctttttttaaaaggttgttttcttgggaggtagacttttaggctggctgctttttcttgtagtatttaatagatattattccattacctatttgccttcacratttcaggttagatgtcacttgtaactcatataattgtttactaaatgtggctttttttttctctgattttaagatatgttctttttatttggtttccagaattttgattgctatgtagccaggtatgttttatttatatttatctgtttagagtttgctgcaattttttgatctgtaggttgatatcttttatcagttgtggaaaattttctgtcaatatctcttccaatattatcaccccttttctcttttttcaccttttagtactccaattatacataaactgagtagtttttttttttccctagatctgtattggtttttaaaactctctttttgtctttcaattctatacatatggccctctgtatccatgggtggatatgtggattcaaccaactgtggatcagaaatacatttaggcctataat

SEQ ID NO: 603965 - DNA, 628 bp, Homo sapiens
gaagaactttattttggcatttgttatgatgtggatctcctggggacaaattctgttagatttttatcacactgagagtgtttctatttttcctctttttttaaaaggttgttttcttgggaggtagacttttaggctggctgctttttcttgtagtatttaatagatattattccattacctatttgccttcacgatttcaggttagatgtcacttgtaactcatataattgtttactaaatgtggctttttttttctctgattttaagatatgttctttttatttggtttccagaattttgattgctatgtagccaggtatgttttatttatatttatctgtttagagtttgctgcaattttttgatctgtaggttgatatcttttatcagttgtggaaaattttctgtcaatatctcttccaatattatcaccccttttctcttttttcaccttttagtactccaattatacataaactgagtagtttttttttttccctagatctgtattggtttttaaaaytctctttttgtctttcaattctatacatatggccctctgtatccatgggtggatatgtggattcaaccaactgtggatcagaaatacatttaggcctataat

SEQ ID NO: 603966 - DNA, 562 bp, Homo sapiens
gttgtctaaatgggtgacttataaggctgctgaccagtggtaattaaagaatgtcactttctagcaggcccaggaacctcaagatattttgtgatcttgagaagagaggtatttgtacagggaatacaaacagtctaatggtgattctttggcttggcttctagccttgaggcttttaaaaagtcaaatatgaaattatttataaaagttccagcggtcgagtgcagtggctcacacctgtaatcccagcacttagggagtccgaggtgggtggatcatgagttcgagaccagcctggccagtatggtaaaaccttgtctctactaaaaatacaaaaattggctatgcatggcggtgcattcctgtagtcccagctgctcggaatgctgaggcaggagtattgcttgaacccaggaggtggaggctacagtgaaccgagatcacgccactgcactccagcctgggcracagaacgagactccaacaacaataacaacaacaacaaagttccaggaaagctgacttaaaaggaacctataagtctaatcactattattgctat

SEQ ID NO: 603967 - DNA, 422 bp, Homo sapiens
tagagtttgtactcctatgagaatcgaattctgccactaccctgacaggaggtggagcacaggtggtagtgtgagtgatggggagttcctgtaaatacagatgaacttcacgtgcttgcctgctgtctacctcctgctgtgtggcctgattccattaatggtccrtggcctggtggttgctgatgcctgttatagagagagggtgaagaggactggggactttctcagcctgtggtttcagagcagcactgatcatcattttcatctcctgtatttgggcttttctaattgactgtctcttacctgcttaagggatattaaccaaagccacatgtcagggcacactgcataatagttgtcatcactgagtgatgcctgtatttcttttctagttattttggacatttagcccaatcaaatat

SEQ ID NO: 603968 - DNA, 427 bp, Homo sapiens
gaggtggagcacaggtggtagtgtgagtgatggggagttcctgtaaatacagatgaacttcacgtgcttgcctgctgtctacctcctgctgtgtggcctgattccattaatggtccgtggcctggtggttgctgatgcctgttatagagagakggtgaagaggactggggactttctcagcctgtggtttcagagcagcactgatcatcattttcatctcctgtatttgggcttttctaattgactgtctcttacctgcttaagggatattaaccaaagccacatgtcagggcacactgcataatagttgtcatcactgagtgatgcctgtatttcttttctagttattttggacatttagcccaatcaaatatagttctagtgctactttgatttctagagtctatcttgatctcagaaggaattc

SEQ ID NO: 603969 - DNA, 428 bp, Homo sapiens
ggaggtggagcacaggtggtagtgtgagtgatggggagttcctgtaaatacagatgaacttcacgtgcttgcctgctgtctacctcctgctgtgtggcctgattccattaatggtccgtggcctggtggttgctgatgcctgttatagagagagggtgaagagkactggggactttctcagcctgtggtttcagagcagcactgatcatcattttcatctcctgtatttgggcttttctaattgactgtctcttacctgcttaagggatattaaccaaagccacatgtcagggcacactgcataatagttgtcatcactgagtgatgcctgtatttcttttctagttattttggacatttagcccaatcaaatatagttctagtgctactttgatttctagagtctatcttgatctcagaaggaattc

SEQ ID NO: 603970 - DNA, 420 bp, Homo sapiens
gaattctgccactaccctgacaggaggtggagcacaggtggtagtgtgagtgatggggagttcctgtaaatacagatgaacttcacgtgcttgcctgctgtctacctcctgctgtgtggcctgattccattaatggtccgtggcctggtggttgctgatgcctgttatagagagagggtgaagaggactggggactttctcagcctgtggtttcagagcagcmctgatcatcattttcatctcctgtatttgggcttttctaattgactgtctcttacctgcttaagggatattaaccaaagccacatgtcagggcacactgcataatagttgtcatcactgagtgatgcctgtatttcttttctagttattttggacatttagcccaatcaaatatagttctagtgctactttgatttc

SEQ ID NO: 603971 - DNA, 594 bp, Homo sapiens
tgtgtcttggagagattcaagaactgatagaaatcacacaaaaagaagcaacagaacataacctgacagagatgagtgcttccacatcagtcccaggtgatgagaaggaagatgaagaagaagcggtgccagaaagcagatgacattgaaccatctggcagaaggagaagggttcagattattcatgactgctattgacctattttacaaaatggacccttctatgataacagcacagaaacraaagcaaatggtggaagaagaattggtactgtatagaaatatttttagcaaaataaaaaaagcaaaaagtgagacagaaataacgatgtatttctgtaaagttacactaagtgtgcttgcctctcctgacttccttcaagctcctccacttcttgctcctctgccacctcccaatgtcaaggtcaaccccttccccactccccctcttcagcctattctatgtgaagttggtgaggatgcacaccttcataatgatccacttccatttaatgaatagtaaatacattttctcttccttatgattttcttagtaatctattttgtttctctagcttactttattctaagaaa

SEQ ID NO: 603972 - DNA, 594 bp, Homo sapiens
tgtgtcttggagagattcaagaactgatagaaatcacacaaaaagaagcaacagaacataacctgacagagatgagtgcttccacatcagtcccaggtgatgagaaggaagatgaagaagaagcggtgccagaaagcagatgacattgaaccatctggcagaaggagaagggttcagattattcatgactgctattgacctattttacaaaatggacccttctatgataacagcacagaaacgaaarcaaatggtggaagaagaattggtactgtatagaaatatttttagcaaaataaaaaaagcaaaaagtgagacagaaataacgatgtatttctgtaaagttacactaagtgtgcttgcctctcctgacttccttcaagctcctccacttcttgctcctctgccacctcccaatgtcaaggtcaaccccttccccactccccctcttcagcctattctatgtgaagttggtgaggatgcacaccttcataatgatccacttccatttaatgaatagtaaatacattttctcttccttatgattttcttagtaatctattttgtttctctagcttactttattctaagaaa

SEQ ID NO: 603973 - DNA, 531 bp, Homo sapiens
cagaacataacctgacagagatgagtgcttccacatcagtcccaggtgatgagaaggaagatgaagaagaagcggtgccagaaagcagatgacattgaaccatctggcagaaggagaagggttcagattattcatgactgctattgacctattttacaaaatggacccttctatgataacagcacagaaacgaaagcaaatggtggaagaagaattggtactgtatagaaatatttttagcaaaataaaaaaagcaaaaagtgagacagaaataacgatgtatttctgtaaagttacactaagtgtgcttgcctctcctgacttccttcaagctcctccacttcttgctcctctgccacctcccaatgtcaaggtcaaccccttccccactccccctcttcagcctattctatgtgaagttggtgaggatgcacaccttcataatgatccacttccatttaatgaatagtaaatacattttctcttccttatgattttcttagtaatctwttttgtttctctagcttactt

SEQ ID NO: 603974 - DNA, 619 bp, Homo sapiens
agagtaggatgaatgctgtattttccaagaaaaaaagaatgtcaaccacagaaacaaatattctgtcttaaacaatcaggatagaatctcatttaaaacattactcttcagatgtataatattggaaatcagataatctcatagtcacagagtgcctagatatcttctataattgtaaaataaatgtttttgtcttcatctctgctctcccaattttacatcctattactgctctatttattctcagaaaaaaaaaatgtgcttttcctttacaaacctttccacagtaccctatgttgtactatgtcttcaaaacttcaacrgaacacccttgattgttatgtagttgaatcttggctccccctatgcaggttcctctagttccccctaatcttgcactttactgacctagaaatgcagagtggcttgaccactttgtgacctagtcagctacatgtttttccttaaaggcttgaacacaagatggatacatgaacactttcaggtaccgatgaaggtattttagttatggtccaaaacactagccctgaaagacattagccctggccttgagcgacatttcttaaatcctcatataaacttcataactcgacccact

SEQ ID NO: 603975 - DNA, 619 bp, Homo sapiens
agagtaggatgaatgctgtattttccaagaaaaaaagaatgtcaaccacagaaacaaatattctgtcttaaacaatcaggatagaatctcatttaaaacattactcttcagatgtataatattggaaatcagataatctcatagtcacagagtgcctagatatcttctataattgtaaaataaatgtttttgtcttcatctctgctctcccaattttacatcctattactgctctatttattctcagaaaaaaaaaatgtgcttttcctttacaaacctttccacagtaccctatgttgtactatgtcttcaaaacttcaacggaacacccttgattgttatgtagttgaatcttggctccccctatgcaggttcctctagttycccctaatcttgcactttactgacctagaaatgcagagtggcttgaccactttgtgacctagtcagctacatgtttttccttaaaggcttgaacacaagatggatacatgaacactttcaggtaccgatgaaggtattttagttatggtccaaaacactagccctgaaagacattagccctggccttgagcgacatttcttaaatcctcatataaacttcataactcgacccact

SEQ ID NO: 603976 - DNA, 619 bp, Homo sapiens
agagtaggatgaatgctgtattttccaagaaaaaaagaatgtcaaccacagaaacaaatattctgtcttaaacaatcaggatagaatctcatttaaaacattactcttcagatgtataatattggaaatcagataatctcatagtcacagagtgcctagatatcttctataattgtaaaataaatgtttttgtcttcatctctgctctcccaattttacatcctattactgctctatttattctcagaaaaaaaaaatgtgcttttcctttacaaacctttccacagtaccctatgttgtactatgtcttcaaaacttcaacggaacacccttgattgttatgtagttgaatcttggctccccctatgcaggttcctctagttccccctaatcttgcactttactgacctagaaatgcagagtggcttgaccactttgtgacctagtcagctacatgtttttccttaaaggcttgaacacaagatggatacatgaacactttcaggtaccgatgaaggtattttagttatggtccaaaacactagccctgaaagacattagccctggccttgagcgacatttcttaaaycctcatataaacttcataactcgacccact

SEQ ID NO: 603977 - DNA, 575 bp, Homo sapiens
acaaacccaggacctgatggcttcaatgctgaattctacaaaacatttaaagaagaattaacaccaatcctatataaactattacaaaaaaaggagaaaatacttccaatcttattctgtgaggccagtattactctgctaccaaaaccacacaaagacacatcaaaaagtgaaaactgtaggccaatgttcatgatgcaaaaatcctcaacaaaataatagcaaaccaaattcaacaacacatttaaaaaacaatcattcattgttaccaactgggattcatgccaaagatgcaaggatggttcaacatatgcaaatcaatcaatctggtataccatatcaacaaaatgcttcaatgaaatgaaatgctgaaaaagcatttgataaaattcaacatccctttataaaaacyctcaacaaataggtgtagaagaaacatctgtcaacacagtaaaaaccatatatgacagtcccacagctagtatcatattgaaatgagaagaagtgaaagccttttctctgatatctggaatacaaacaaggatgcccaccttaacaactattatttgacagaa

SEQ ID NO: 603978 - DNA, 575 bp, Homo sapiens
acaaacccaggacctgatggcttcaatgctgaattctacaaaacatttaaagaagaattaacaccaatcctatataaactattacaaaaaaaggagaaaatacttccaatcttattctgtgaggccagtattactctgctaccaaaaccacacaaagacacatcaaaaagtgaaaactgtaggccaatgttcatgatgcaaaaatcctcaacaaaataatagcaaaccaaattcaacaacacatttaaaaaacaatcattcattgttaccaactgggattcatgccaaagatgcaaggatggttcaacatatgcaaatcaatcaatctggtataccatatcaacaaaatgcttcaatgaaatgaaatgctgaaaaagcatttgataaaattcaacatccctttataaaaaccctcaacaaataggtgtagaagaaacatctgtcaacacagtaaaaaccatatatgacagtcccacagctagtatcatattgaaatgagaagaagtgaaagccttttctctgatatctggaayacaaacaaggatgcccaccttaacaactattatttgacagaa

SEQ ID NO: 603979 - DNA, 563 bp, Homo sapiens
agcccatctacactgtgggtgggaatgtaagttagtacaaccactatagagaacagtttggaagttccctagaaaactaaaaatagagctaccatataatccagcaaccccactgctagctatataccaaaaaggaaggaagtcagtgtatcgaagagagagatatctgcctcccatgtttattacaacaatattcacaataagcaagattaggaagcaagctatgtgtccatttacagacaaatgggtaaagaaaatatggtacatayacacaatgtcatactactaagccataaaaaaatgagattctctcacttataacaacatggatggaactgaagacaaactttgcatgatctccttatttgtgggagttaaaaaattaaaggaattgaactcatggagatggagagtagaatgaagtctaccaaaggccgggaagggtagtggcagggggtgggggaagtggggatgcttaatgggtacaaaaaatatagttagatagaatgaataatatctagtttttgatagcacaaaagggtgagaacagtcaacagtaattt

SEQ ID NO: 603980 - DNA, 526 bp, Homo sapiens
aggcctcctggcaatgttctctttaactcatgatgtgggttaggaggagtgaaccaatgttctgtttctaactatgtgacactgtatataccattaaggtttctcacctacattgcaccttcatctttcatctatcaagatataagtttatctatgtataaggctggctgcaaaattattcacaaataaaggtatacccatatgtgcacaaaatagaccctcttttcacttctattgttcatagaggtataagcaagggaaaaatattcaaagataagagtcttataatagtagaaatcttgatccatgattttgggaaaagctgttcatatcaagaatatcttcttcttctggggagaaaattccctggttagcttcaccttaagggttccaatgggtgtgcagttctatgagtgtggagtaatccttctcagwtgtgagattatgaacccaaagttcaaggtcccgaagtttttgctggagtgtacatggcaagaaagtatctctgttgttctcagaggattcg

SEQ ID NO: 603981 - DNA, 584 bp, Homo sapiens
cctggttagcttcaccttaagggttccaatgggtgtgcagttctatgagtgtggagtaatccttctcagttgtgagattatgaacccaaagttcaaggtcccgaagtttttgctggagtgtacatggcaagaaagtatctctgttgttctcagaggattcggtcttcaggttctagattgagaaggggtggattgtcctcagtcagtaaaccattaaaagcttttttttaccagatgaaaatacacagaaatagaaaatacagtcctagaattcctataaccacaaaagactccaaatagccaaatcaatcttcagcaaaaagaacaaagcatgaggcatcacactaccttatttttaaaatctgctacaaagttgtagtaatcaaaatagtatggtactggcatgaaattaggcacmttggccaacgaaacagaatagatagcccagaaataaaatcatgcaaatatagtcaagtagctttttacaaaggcatcaagaatatacaatagggaaaggataaaatttttaataaatgattgttgaggaaactagaaatccacatgcaaaaataaaataaaattgg

SEQ ID NO: 603982 - DNA, 584 bp, Homo sapiens
cctggttagcttcaccttaagggttccaatgggtgtgcagttctatgagtgtggagtaatccttctcagttgtgagattatgaacccaaagttcaaggtcccgaagtttttgctggagtgtacatggcaagaaagtatctctgttgttctcagaggattcggtcttcaggttctagattgagaaggggtggattgtcctcagtcagtaaaccattaaaagcttttttttaccagatgaaaatacacagaaatagaaaatacagtcctagaattcctataaccacaaaagactccaaatagccaaatcaatcttcagcaaaaagaacaaagcatgaggcatcacactaccttatttttaaaatctgctacaaagttgtagtaatcaaaatagtatggtactggcatgaaattaggcacattggccaacgaaacagaatagatagcccagaaataaaatcatgcaaatatagtcaagtagctttttacaaaggcatcaagaatayacaatagggaaaggataaaatttttaataaatgattgttgaggaaactagaaatccacatgcaaaaataaaataaaattgg

SEQ ID NO: 603983 - DNA, 542 bp, Homo sapiens
gatgacagtagcacctccctattccctcactgtgacaaccaacagagtctcaagacattgtcaaatattttctggggagcaaaatcacactgttttggcagtagattagaagttaccaggagayggtggaggaaaggattgaggaattattgcttaatgtgtgcagagtttctttttggggcgataaaaatctttagaaatagatggtggtgatggttgtacaacattctgaatataattaatgccactgaaaaattgtgaaaatgggaaattttatgctacatgtatatttatgacaaaaatataagggcaaatatgtttgtggctgaaatgtaaaaatattgaagtgtttcagaaccactcagatacagacacctgcttccctatagtttgtctagaagatctaatttgtattaaacaaaaattgttgcttttctaaaaataccttaggagtgacaatgagagtgagtagtgaatagtgtatctccacacaaacgttttacagatcatatctttgtgattgttttctcttgacttgttta

SEQ ID NO: 603984 - DNA, 625 bp, Homo sapiens
tgtgagtagtacagccatgagcatattaayatacatgtcttttttgtggagcaatttattcctttttggatatgtaaccaataatggaattggtgcatcaaataattgtcttttatgctttttgagatctctccacattcctttccacaatggctggactaatctatatccccatcaacagtttaaaagcatccccttttctccacagtctcacagcattttctttatccaattcaccattgatgagtgcctaggttgattccatgtctttgttgttgtgaatagtgcagcaataaacatataaatctatgtatcttttttgtggaacaatttattttcctttgggtatgtaatcaataatgggattgctgcatcaaatgataattgtcttttgtgctttttgaggtctctccacattgctttccaaaatggctgaactaattttcattcccctcaacagcttaaaagcatccccttttcttcacagcctcaccagcatctgttactttttgcatagagaaaacatttttttaaaaaaaatcccaatgtcttacataatgtttcagaagacttcttgcataaatccagagatttggagacaatatgttttatctcctctagtcag

SEQ ID NO: 603985 - DNA, 625 bp, Homo sapiens
tgtgagtagtacagccatgagcatattaacatacatgtcttttttgtggagcaatttattcctttttggatatgtaaccaataatggaattggtgcatcaaataattgtcttttatgctttttgagatctctccacattcctttccacaatggctggactaatctatatccccatcaacagtttaaaagcatccccttttctccacagtctcacagcattttctttatccaattcaccattgatgagtgcctaggttgattccatgtctttgttgttgtgaatagtgcagcaataaacatataaatctatgtrtcttttttgtggaacaatttattttcctttgggtatgtaatcaataatgggattgctgcatcaaatgataattgtcttttgtgctttttgaggtctctccacattgctttccaaaatggctgaactaattttcattcccctcaacagcttaaaagcatccccttttcttcacagcctcaccagcatctgttactttttgcatagagaaaacatttttttaaaaaaaatcccaatgtcttacataatgtttcagaagacttcttgcataaatccagagatttggagacaatatgttttatctcctctagtcag

SEQ ID NO: 603986 - DNA, 572 bp, Homo sapiens
tgttacactatatctttctgatagtttagaaataagcctatatattatataatgtcatgtttttgttttatttattagattttaactgatacaagamaatgtccatgtgctattcattttatatctcctcaaactccttgaacgattcctaacagtagtaaaactgtaatatcagtttattcagtaaggtagagaattactattttgagtcaccttagtaccattaagattctttgtaattaactaccattgtgatggttacaaagccatacatacatttataaacccatgagcacagtaataattcaggctggaattcaaatttcagttttattttatagtgcttacaggatttatgataacttattaatctgttgaaaattttttatctttcaaatggaatacaaatattctagttgtatggattcaacaagatgttacatgtaacgtgttcacgacattgaagccagttaaaaactagttatcctctttcactttccttccccttttcacttttacacagagaagggtcatatttcatggcaaagctaaagttgacaaaattccccttg

SEQ ID NO: 603987 - DNA, 572 bp, Homo sapiens
tgttacactatatctttctgatagtttagaaataagcctatatattatataatgtcatgtttttgttttatttattagattttaactgatacaagaaaatgtccatgtgctattcattttatatctcctcaaactccttgaacgattcctaacagtagtaaaactgtaatatcagtttattcagtaaggtagagaattactattttgagtcaccttagtrccattaagattctttgtaattaactaccattgtgatggttacaaagccatacatacatttataaacccatgagcacagtaataattcaggctggaattcaaatttcagttttattttatagtgcttacaggatttatgataacttattaatctgttgaaaattttttatctttcaaatggaatacaaatattctagttgtatggattcaacaagatgttacatgtaacgtgttcacgacattgaagccagttaaaaactagttatcctctttcactttccttccccttttcacttttacacagagaagggtcatatttcatggcaaagctaaagttgacaaaattccccttg

SEQ ID NO: 603988 - DNA, 619 bp, Homo sapiens
cacagttctgagaataagctattatccctatggttattggaagacagttcttagcacaaagcaaatgsatagaatgcagaatatgtctaaacaacttaaaaataggtatttaaaatattctttttttgagggaattaaatataggctgtaacttagtaggtaagggagcctggtatttattcaaggggaggtagaaaagtattcaactatggggaaaatgaaattgccaagactaagagagaaggatggctgattcagtcagtgggggcacacatagcaactacttctatccagaggccctaatgattcaaggttatgtgaagtgacaactctggagatttggagattgagttccctgccattggacgattaagaaaaatcctcacttctcatccacttagtcctctatcttaaaactaagtaatccctggcagctcacttccaatggcaagattcagtcatgagatcttgtatggagatttctaaagcaaaagcatgttaacttttctctagttgaccagaggcaaccttctatttgaagcttacaatggctgctatagggtgtgtattgataagaactgcatgcattgttgaacaaacatagttaagtattgttaat

SEQ ID NO: 603989 - DNA, 619 bp, Homo sapiens
cacagttctgagaataagctattatccctatggttattggaagacagttcttagcacaaagcaaatggatagaatgcagaatatgtctaaacaacttaaaaataggtatttaaaatwttctttttttgagggaattaaatataggctgtaacttagtaggtaagggagcctggtatttattcaaggggaggtagaaaagtattcaactatggggaaaatgaaattgccaagactaagagagaaggatggctgattcagtcagtgggggcacacatagcaactacttctatccagaggccctaatgattcaaggttatgtgaagtgacaactctggagatttggagattgagttccctgccattggacgattaagaaaaatcctcacttctcatccacttagtcctctatcttaaaactaagtaatccctggcagctcacttccaatggcaagattcagtcatgagatcttgtatggagatttctaaagcaaaagcatgttaacttttctctagttgaccagaggcaaccttctatttgaagcttacaatggctgctatagggtgtgtattgataagaactgcatgcattgttgaacaaacatagttaagtattgttaat

SEQ ID NO: 603990 - DNA, 619 bp, Homo sapiens
cacagttctgagaataagctattatccctatggttattggaagacagttcttagcacaaagcaaatggatagaatgcagaatatgtctaaacaacttaaaaataggtatttaaaatattctttttttgagggaattaaatataggctgtaacttagtaggtaagggagcctggtatttattcaaggggaggtagaaaagtattcaactatggggaaaatgaaattgccaagactaagagagaaggatggctgattcagtcagtgggggcacacatagcaactacttctatccagaggccctaatgattcaaggttatgtgaagtgacaactctggagatttggagattgwgttccctgccattggacgattaagaaaaatcctcacttctcatccacttagtcctctatcttaaaactaagtaatccctggcagctcacttccaatggcaagattcagtcatgagatcttgtatggagatttctaaagcaaaagcatgttaacttttctctagttgaccagaggcaaccttctatttgaagcttacaatggctgctatagggtgtgtattgataagaactgcatgcattgttgaacaaacatagttaagtattgttaat

SEQ ID NO: 603991 - DNA, 619 bp, Homo sapiens
cacagttctgagaataagctattatccctatggttattggaagacagttcttagcacaaagcaaatggatagaatgcagaatatgtctaaacaacttaaaaataggtatttaaaatattctttttttgagggaattaaatataggctgtaacttagtaggtaagggagcctggtatttattcaaggggaggtagaaaagtattcaactatggggaaaatgaaattgccaagactaagagagaaggatggctgattcagtcagtgggggcacacatagcaactacttctatccagaggccctaatgattcaaggttatgtgaagtgacaactctggagatttggagattgagttccctgccattggacgattaagaaaaatcctcacttctcatccacttagtcctctatcttaaaactaagtaatccctggcagctcacttccaatggcaagattcagtcatgagatcttgtatggagatttctaaagcaaaagcatgttaasttttctctagttgaccagaggcaaccttctatttgaagcttacaatggctgctatagggtgtgtattgataagaactgcatgcattgttgaacaaacatagttaagtattgttaat

SEQ ID NO: 603992 - DNA, 584 bp, Homo sapiens
gttaacttttctctagttgaccagaggcaaccttctatttgaagcttacaatggctgctatagggtgtgtattgataagaactgcatgcattgttgaacaaacatagttaagtattgttaatattatccacatgatatgtataacaagaaatattagcctgcataagttatttcaagtttaatgtaatacttagctaagtttgattaatgtatgcacttctgtgatatacatttgatggcatcaacttagaacttccaagacccataatggatttgggggcaactttatagtgctttcttaagaattaataattaaggattgaaagggagcattaattattgtatctgagaataatgagattatttaactataaaacrtacatacataataggtataaaatattgaattattgatgtgatttttctcttttgaattttgtagcaccttatctttgccttatttatattattcatttcttggtggttagggtagacatcacatcatgatgtgtataatataagaaaaaatgtagaaagaactatggagttttaggtatttctcattctatcctatgtagattaat

SEQ ID NO: 603993 - DNA, 555 bp, Homo sapiens
ggagttcaggacataccaccccaaaatatgcaaatttgacatgttgattattttgaacttaaggcacttgacaaatagcagatgcaggaaggaaactctgacctccctttttcttcttgaaagcaggaaataaaactcttatgtgaaagatgctctccctaaaccaggagaatagaacattcttatcaccagagatgcagactgggggctgagaaaatctgtataaacagagcttattaaaataacttttgtctttttagtcacatttattttaattaattttccatagttgccaacctttattcaaactaacatataagccttaggcttagccagttctttgggtcttcattcttcttttgaaggcgctcatgtacatgtaaaaattaccaaataaakattgtatgctttttttatttttaatctgtctatgttagtccctgccagaaaccttaaaaaggtagagggtacatttaacctcctctacaagataatgatgacctatacggttagtttggcatgtataaatatgctaattcaaatatctatatttta

SEQ ID NO: 603994 - DNA, 617 bp, Homo sapiens
aatgaatatactcaaataaacaacactacaattaagatgtagaattcccatcatctcaggtggtttcttcatgccccattaaaaccaattcccttgtagcagagacaattactgttctgactttttttttttttttttttgagacagggtcacccagactggagtgcagtggtgcaatctcagatcaccccaaactctacctcccaggctcaatcaattctgcctcagcctcccaagtagctgggatgacaggtgtgtgccactactgcctggctaatttttgtatttttagtagagacggagtttcaccatgttgtccaggctggtcttgaactcctgacctcaaatgatccacccacctcagcctcccaaactgggattataggagtgagccactactcccagccctgttttgacttttatcacccaagattggttttgtaagttcttgagtttcttaaaaatggactcacaaagcatgyatttgtgtctgacttctttcacttagcatattttttgctttgtttctattattccattataagaataagacactcatctctttatgaacgcttagttttgatctttcagtgattataaataaagcttctatgaat

SEQ ID NO: 603995 - DNA, 555 bp, Homo sapiens
ttcttggttatttgaagttctataaatgcaaaataagtctaattgaataacaacctttttccattattctatctttttcagtgttttgtyaactgttttgctaatgactgagagataagtgctaaaacctccaactttatattgtttattaaatcatttagattcatgcaatttgaattaactacaacacattttaaattgtttatgtatcttgctgaaatgatgcttttgccattatgaaatattccttctttatgagactactccttttcttgaagtcttctttatctgatattcataattccactttcatatatttaatgtttcatggctttatgtaattaaagtacatgccctgtagacaccatatagttgagtcttgctttgtaatgtagcttgacgagctttgccttttaattgtacttttgaatcctcttataattaatacaatagtttatgtgattaggtttaagtctacccacttgagctttgttttcttcttgcccttttgccctttctctctacctcttacttcttgccttcttttgatttaat

SEQ ID NO: 603996 - DNA, 572 bp, Homo sapiens
ttatatttattcatatttccagcttttttttttttcttgaaatggagtcttgctctgtcccccaggctgaagtgcaatggtgcaatcttggcacactgcaaccggcccctcccaggttcawgtgattctactgcctcagctcccccaagtagctgtgactacaggcccatgccaccatgcctggctaattttgtatttttagtagagttgaggtttcaccatgttggccaggctggtctcgaagtcctgacttcatgtgatccacctgcctcagcctctcaaagtgcagggattacaggcataagccactgtattctttcccatagaaccacatttttgactgacataaactttccctcattaaaaatctcatgtagaatgtcaggtaaacctgagggtgataaattttcttagttttttcaaaatacagggttagtatattccctatatgaaatgcttggggccatattgtttcatattctacacttttctggattttggaatatttgcattatacttattggttcagcatccctgatttgaaaatttgaaatccaaaatgccccagtgag

SEQ ID NO: 603997 - DNA, 572 bp, Homo sapiens
ttatatttattcatatttccagcttttttttttttcttgaaatggagtcttgctctgtcccccaggctgaagtgcaatggtgcaatcttggcacactgcaaccggcccctcccaggttcatgtgattctactgcctcagctcccccaagtagctgtgactacaggcccatgccaccatgcctggctaattttgtatttttagtagagttgaggtttcaccatgttggccaggctggtctcgaagtcctgacttcatgtgatccacctgcctcagcctctcaaagtgcagggattacaggcataagccactgtattctttcccatagaascacatttttgactgacataaactttccctcattaaaaatctcatgtagaatgtcaggtaaacctgagggtgataaattttcttagttttttcaaaatacagggttagtatattccctatatgaaatgcttggggccatattgtttcatattctacacttttctggattttggaatatttgcattatacttattggttcagcatccctgatttgaaaatttgaaatccaaaatgccccagtgag

SEQ ID NO: 603998 - DNA, 555 bp, Homo sapiens
aaactttccctcattaaaaatctcatgtagaatgtcaggtaaacctgagggtgataaattttcttagttttttcaaaatacagggttagtatattccctatatgaaatgcttggggccatattgtttcatattctacactwttctggattttggaatatttgcattatacttattggttcagcatccctgatttgaaaatttgaaatccaaaatgccccagtgagcattttctttgaccataatgtcagtattcaaaaatctctgatgttagagcattttggatttcagatttttaggttaggggtactcgatctgtattaaaatatatccataccatcattattttgggataatttttggttttgctgatataaaattctaggtttgtaggtttttaatttttttcagcatcttgaaaatgtcattccattgctctttcggctaatattgtttctgaaaaaaagtgcctagatgtgttttttttgtgtgtgtgttcatcctgttcatagtacataaagcaccatagacctgtgaggttttagtttttttgtcaa

SEQ ID NO: 603999 - DNA, 442 bp, Homo sapiens
ctatttttattattctctatgtttttcactataaaaattgctattgactcgtgtttagatttatttatcctacctttggcaacgcctaatactgctgctaagccagtccaatratttcatgtattttattttgtaattttaaaacgaaattttttcttttgaaattttccatgcctgtcatatttatactctcctttatattattttctatattcatgatagttaaagttctattctgttaagtccaaagtgtcagtcattcgtataattgtttctatttacttttttgcttgattaaaaatcaaattttaccttttcatatgtctggttgtttctcattgaagactggtcactgtggatttcattctattttttttttttttttttttttgaagagcattgatctttgctccaacaggtagcaaagatcaatgctattcaa

SEQ ID NO: 604000 - DNA, 456 bp, Homo sapiens
tattgtattttaaatggtaatacactatgctgtaggaaaaaaatgatgtataaatgagccaaaagaatcaaatgatagagatcatttatcacatatggatcagggattaaaatagtataatataatgatcaataatctaaagcatttactcctgtccagacacttttcctataggaaggtatcttcactggactacatatacctccatagaaatataaaggaaagttattagggaatgaagcaaacaatttgatgagagagagcagttatccatctatatgggtagaaaatgagttgtggatggaaggcaaattgttgggcattatctgtggagcataacaatagtagatctgattgtcatsttgaaagccaaattatagaaatcaatgtggtcaatgaagaatttttgaagaaatctactcataattgactttcagttcaatctcagcagaagct

SEQ ID NO: 604001 - DNA, 592 bp, Homo sapiens
tatatgggtagaaaatgagttgtggatggaaggcaaattgttgggcattatctgtggagcataacaatagtagatctgattgtcatcttgaaagccaaattatagaaatcaatgtggtcaatgaagaatttttgaagaaatctactcataattgactttcagttcaatctcagcagaagctttagcattattctgtttttatttttgtttatttattttatttcattacattaaagaatataaaagatcacagagttgttagcatttcatctagctgagcactttaacagatgtttaaatagatttaaaraggaaactttatagatttctgtaaaaaataatggcaacctgttttgttaggttaaaaaccaaaccagaaactcacccatacaaaataagacttgctttatgggccgaggcaaggaggagtaattttagacagtagtgcccataaaagtgttcacagcctgctgtaagtctaacaatattatctgtattttatcttctaagtcaccttgggatgaaagaaaacatacttttcatttctaggtaatgataatttcattttgagagtagtatcacttaagaaaaa

SEQ ID NO: 604002 - DNA, 592 bp, Homo sapiens
tatatgggtagaaaatgagttgtggatggaaggcaaattgttgggcattatctgtggagcataacaatagtagatctgattgtcatcttgaaagccaaattatagaaatcaatgtggtcaatgaagaatttttgaagaaatctactcataattgactttcagttcaatctcagcagaagctttagcattattctgtttttatttttgtttatttattttatttcattacattaaagaatataaaagatcacagagttgttagcatttcatctagctgagcactttaacagatgtttaaatagatttaaagaggaaactttatagatttctgtaaaaaataatggyaacctgttttgttaggttaaaaaccaaaccagaaactcacccatacaaaataagacttgctttatgggccgaggcaaggaggagtaattttagacagtagtgcccataaaagtgttcacagcctgctgtaagtctaacaatattatctgtattttatcttctaagtcaccttgggatgaaagaaaacatacttttcatttctaggtaatgataatttcattttgagagtagtatcacttaagaaaaa

SEQ ID NO: 604003 - DNA, 592 bp, Homo sapiens
tatatgggtagaaaatgagttgtggatggaaggcaaattgttgggcattatctgtggagcataacaatagtagatctgattgtcatcttgaaagccaaattatagaaatcaatgtggtcaatgaagaatttttgaagaaatctactcataattgactttcagttcaatctcagcagaagctttagcattattctgtttttatttttgtttatttattttatttcattacattaaagaatataaaagatcacagagttgttagcatttcatctagctgagcactttaacagatgtttaaatagatttaaagaggaaactttatagatttctgtaaaaaataatggcaacctgttttgttaggttaaaaaccaaaccagaaactcacccatacaaaataagacttgctttatgggccraggcaaggaggagtaattttagacagtagtgcccataaaagtgttcacagcctgctgtaagtctaacaatattatctgtattttatcttctaagtcaccttgggatgaaagaaaacatacttttcatttctaggtaatgataatttcattttgagagtagtatcacttaagaaaaa

SEQ ID NO: 604004 - DNA, 580 bp, Homo sapiens
ctttatctataatatcttctatttaatcttcactgttacaattccaatatytgggcaacaaatatcagtggtttccatctgtattttcagtggctggtgcttaaccatagtaaaaagaataattttatagtaattatgaacagttttgaatgatttttattatcttctgctcaatactcgatcactgtattgattagccttcctgaaaaccaatagttttataaaatcaacttcataaataatatgggaaatattattattaaaatagaaatgctaaagtgccatctcttaccaggagaatactatgtgaagggagctgacctttgagatacaaattggtggaggaggccttaaaatggtggagtttttatgagcatttgtagttaaattattatcagcttaaattagactgttagtatcatgatggttaattttaggtgtcaactttactggattaagggatacctaaagaagtggtaaataatcatttctgaatgtggctgtgaaacacacagaggagactggcctgtcagacagtgaactgaggggatagattcacccttaatgtggatgggtatca

SEQ ID NO: 604005 - DNA, 580 bp, Homo sapiens
ctttatctataatatcttctatttaatcttcactgttacaattccaatatctgggcaacaaatatcagtggtttccatctgtattttcagtggctggtgcttaaccatagtaaaaagaataattttatagtaattatgaacagttttgaatgatttttattatcttctgctcaatactcgatcactgtattgattagccttcctgaaaaccaatagttttataaaatcaacttcataaataatatgggaaatattattattaaaatagaaatgctaaagtgccatctcttaccaggagaatactatgtgaagggagctgacctttgagatacaaattggtggaggaggccttaaaatggtrgagtttttatgagcatttgtagttaaattattatcagcttaaattagactgttagtatcatgatggttaattttaggtgtcaactttactggattaagggatacctaaagaagtggtaaataatcatttctgaatgtggctgtgaaacacacagaggagactggcctgtcagacagtgaactgaggggatagattcacccttaatgtggatgggtatca

SEQ ID NO: 604006 - DNA, 548 bp, Homo sapiens
ggaatgcaatctatacttaataattgttaactttttcccctttcttgaaacatgccattatcaatacaggagagctggtactcctttcattttaaaacattcagtattattagaaaaagaacaagacttccatccttctaagaattttaaagtgtctcactaagcaagatagtaaattattggcttagttatttaatattcaccattgaaatcccagtgamcagggaaaatcactaaataaatattcatgtttattaaaataaaatgcttcatttgcaaaattcatgttgtaagaaaccctaacttagaaactttttctcagcaaaacctttataaatttagaaatttttagaaaacatttatgttatttcataagattttgaaaagcatcttagtatgtatgtatgtatgtatgtatttagaccaagtcttgctctgttgcacaggatggagtgcggtagtctgacctctgctcgctgcagccttgatcttctgggctctaacgatcctcccacctcagcctctcaagtagctgggactacaggcat

SEQ ID NO: 604007 - DNA, 530 bp, Homo sapiens
aataaaaatgtttatttaaaaatatatagacatatattttaatttcaacatttatgtcaaatacaggggtataagtacaggtttgttacattggaatattgtgtgatgctgaggttgggggtatagatcccatcacccggataatcaggatagtatgcaaaaggcagtttttcaacctgctcccctattcccactccatcttgcaatagtccacagtgtctattttcccatgtttatatccatgtgtgctcgatgtttagcttttacttataagggagaamctgtggtatttggtttcttgttcctgcattaattcccttaagattgtgtccaccaactgcatccatgttaccgcaaaggacatgattttattcattttttatgggtctgtagtattctatagtgtatatgtaccgcattttctttgtccaatctgccattgatgggcacctaagttgattttatgtctttgctatggtaaataatacagtaatgcacacatgagtgcatgtgtctttttagcagaatga

SEQ ID NO: 604008 - DNA, 530 bp, Homo sapiens
aataaaaatgtttatttaaaaatatatagacatatattttaatttcaacatttatgtcaaatacaggggtataagtacaggtttgttacattggaatattgtgtgatgctgaggttgggggtatagatcccatcacccggataatcaggatagtatgcaaaaggcagtttttcaacctgctcccctattcccactccatcttgcaatagtccacagtgtctattttcccatgtttatatccatgtgtgctcgatgtttagcttttacttataagggagaacctgtggtatttggtttcttgttcctgcattaattcccttaagattgtgtccaccaactgcatccatgttaccgcaaaggacatgattttattcattttttatgggtctgtartattctatagtgtatatgtaccgcattttctttgtccaatctgccattgatgggcacctaagttgattttatgtctttgctatggtaaataatacagtaatgcacacatgagtgcatgtgtctttttagcagaatga

SEQ ID NO: 604009 - DNA, 530 bp, Homo sapiens
aataaaaatgtttatttaaaaatatatagacatatattttaatttcaacatttatgtcaaatacaggggtataagtacaggtttgttacattggaatattgtgtgatgctgaggttgggggtatagatcccatcacccggataatcaggatagtatgcaaaaggcagtttttcaacctgctcccctattcccactccatcttgcaatagtccacagtgtctattttcccatgtttatatccatgtgtgctcgatgtttagcttttacttataagggagaacctgtggtatttggtttcttgttcctgcattaattcccttaagattgtgtccaccaactgcatccatgttaccgcaaaggacatgattttattcattttttatgggtctgtagtattctrtagtgtatatgtaccgcattttctttgtccaatctgccattgatgggcacctaagttgattttatgtctttgctatggtaaataatacagtaatgcacacatgagtgcatgtgtctttttagcagaatga

SEQ ID NO: 604010 - DNA, 530 bp, Homo sapiens
aataaaaatgtttatttaaaaatatatagacatatattttaatttcaacatttatgtcaaatacaggggtataagtacaggtttgttacattggaatattgtgtgatgctgaggttgggggtatagatcccatcacccggataatcaggatagtatgcaaaaggcagtttttcaacctgctcccctattcccactccatcttgcaatagtccacagtgtctattttcccatgtttatatccatgtgtgctcgatgtttagcttttacttataagggagaacctgtggtatttggtttcttgttcctgcattaattcccttaagattgtgtccaccaactgcatccatgttaccgcaaaggacatgattttattcattttttatgggtctgtagtattctatagtgtatatgtaccrcattttctttgtccaatctgccattgatgggcacctaagttgattttatgtctttgctatggtaaataatacagtaatgcacacatgagtgcatgtgtctttttagcagaatga

SEQ ID NO: 604011 - DNA, 617 bp, Homo sapiens
ctattttattgtagtgtgttatctttttgatgtgctgctggatttggttggctaatattttgttgagaatgtttgcctgcattttcatcaaggatattagcttgaagtttgttttctttttgtttaatttcattgtttctctgccatatttaggtatcagactgatgctggcttcataaaatgagttagagaggagatcttccttcttattattttttttttttkgaatagtttcaataggattactatcatcttttctttgtacatcaggtagaatttagttgtgaatccctttgatccagggctttttttcggttggtaagttctttattactgattcaatttcagaagttgatattgttcttttcatggtgcaagtctcttttttattcaatcttgggagattgggggcttccagaaatatatctatttactcttggtattctaatttgtgtctatagtagtctggaggatcttttgtatttctatgtggtcaggtgtaatatcatctttgttgcttctgactgtgcttatgtggatcttctcattttaatctagctaatggtctatcgcttttatttattctttcaaagaacaatatcttggtttcattgatt

SEQ ID NO: 604012 - DNA, 531 bp, Homo sapiens
atacatgtagaatttcctagagtagtttcatatacataatactattaattctctcattaacactaacagttgattttattgttattattgacattaaagagaaggctcagagaaattacataacttgtatgaaatcacacagtggagatttgacatcagatcttttctatctccaaagtccttgtactttccattatactctgttgcttgtctaattaagataatgcatcatatctagttttatctcctactcccttttaggagaaaaaatagcccaaatgtttataatgtttcttgctgacwagggtttcctcaatgtgtcagaatttaagtactctggctttagtgaagagtgccgtataatttctcttatctcagttattacaaatttaactagcttaaagtagattttattcatcatacccttctacctacgaattttggcttactgggcttcaactattagatgtcaccttgactctctgtaacaagagaacctttctaagaatcccagattctacactccatacc

SEQ ID NO: 604013 - DNA, 591 bp, Homo sapiens
gtttaatgggctgggcccagggcctctcctgctatgtttagcctagggacttggtgccctgcatcccagcctccctagctgtggctaaaagagaccaagatatagcttgggtcgtggcttcagagggtgaaagctccacaccttggcagctttcacatggtgttgagcctgcagatgcacaaaagtcaagaattgaggttaggaaacctctacctagatttcaaaggaygcatggaaatgcctggatgtccaggcagaattttgctggaaggtcggggccctcatggtgaacttctgctagggcagtgtagaagggaaatgtgaggttggagccccacacagagtccccatggggctatgagtagagggccactgtcctccagaccccagaatgagagatccacttacggcttgtactgtgtgcctggaaaagcctcagacactcactgccagcccatgaaagcagccaggatgggggccgtatcctgcatagccacagaggtgaagctgccaaaagccatgggagcccacttcctgcatcatcatgacctgggtgttagccatggcatcaaaggagatcattttggagct

SEQ ID NO: 604014 - DNA, 591 bp, Homo sapiens
gtttaatgggctgggcccagggcctctcctgctatgtttagcctagggacttggtgccctgcatcccagcctccctagctgtggctaaaagagaccaagatatagcttgggtcgtggcttcagagggtgaaagctccacaccttggcagctttcacatggtgttgagcctgcagatgcacaaaagtcaagaattgaggttaggaaacctctacctagatttcaaaggacgcatggaaatgcctggatgtccaggcagaattttgctggaaggtcggggccctcatggtgaacttctgctaggrcagtgtagaagggaaatgtgaggttggagccccacacagagtccccatggggctatgagtagagggccactgtcctccagaccccagaatgagagatccacttacggcttgtactgtgtgcctggaaaagcctcagacactcactgccagcccatgaaagcagccaggatgggggccgtatcctgcatagccacagaggtgaagctgccaaaagccatgggagcccacttcctgcatcatcatgacctgggtgttagccatggcatcaaaggagatcattttggagct

SEQ ID NO: 604015 - DNA, 591 bp, Homo sapiens
gtttaatgggctgggcccagggcctctcctgctatgtttagcctagggacttggtgccctgcatcccagcctccctagctgtggctaaaagagaccaagatatagcttgggtcgtggcttcagagggtgaaagctccacaccttggcagctttcacatggtgttgagcctgcagatgcacaaaagtcaagaattgaggttaggaaacctctacctagatttcaaaggacgcatggaaatgcctggatgtccaggcagaattttgctggaaggtcggggccctcatggtgaacttctgctagggcagtgtagaagggaaatgtgaggttggagccccacasagagtccccatggggctatgagtagagggccactgtcctccagaccccagaatgagagatccacttacggcttgtactgtgtgcctggaaaagcctcagacactcactgccagcccatgaaagcagccaggatgggggccgtatcctgcatagccacagaggtgaagctgccaaaagccatgggagcccacttcctgcatcatcatgacctgggtgttagccatggcatcaaaggagatcattttggagct

SEQ ID NO: 604016 - DNA, 577 bp, Homo sapiens
acaagaaaaattacccaggcttaaaggacaaatcaaacatcaaaatcagaatcaaaataaaatacrttttatcagagaagaaatttaaaaacattatgttaatatactaagaaatcttattgtaaaagtagacgatgtacagagtaaatggctaacacaagcaaagagaagaaattgtaagaatcaaaaggaaatagtagaaataaaaacactctaaaggtaataaggaatgcttttgatgggttcattagtatgttgaacttgaaaatatatcaatatacatttccaaaaataaaatgcaaagaaaaataagaaagaaaaagagaaagaccagaaaagagggtccaagaactgtagcaattttacaagttgtaacatatgtataactgaatgatcagaaagatagaacaaagcagaagaaataattgaatgattagaattttccaaaattagtgaccaatccaaactgtagattcagaaagctcagtgaacaccagtcagaataaatactgaggctgggcatggtggcttatgtctgtaatcccaggactttggaaatacgaggcagaaggatcac

SEQ ID NO: 604017 - DNA, 577 bp, Homo sapiens
acaagaaaaattacccaggcttaaaggacaaatcaaacatcaaaatcagaatcaaaataaaatacgttttatcagagaagaaatttaaaaacattatgttaatatactaagaaatcttattgtaaaagtagacgatgtacagagtaaatggctaacacaagcaaagagaagaaattgtaagaatcaaaaggaaatagtagaaataaaaacactctaaaggtaataaggaatgcttttgatgggttcattagtatgttgaacttgaaaatatatcaatatacatttccaaaaataaaatgcaaagaaaaataagaaagaaaaagagaaagaccagaaaagagggtccaagaactgtagcaattttacaagttgtaacatatgtataactgaatgatcagaaagatagaacaaagcagaagarataattgaatgattagaattttccaaaattagtgaccaatccaaactgtagattcagaaagctcagtgaacaccagtcagaataaatactgaggctgggcatggtggcttatgtctgtaatcccaggactttggaaatacgaggcagaaggatcac

SEQ ID NO: 604018 - DNA, 572 bp, Homo sapiens
gatttcagaggatgtatggaaatgcatggatgtccaggcagaagttttcttcaggggtagagccctcatggataacttctgctagggcagtgtggaagggaaatgtggggttggagcccccacacagagtccccactggggaactgcccagtggagctgtgagaagaaggccaccatcctccagaacccagaattcaaggtccactgatagcttgcattgtgcacctggaaaagctgcaaacactaaacaccagcccatgaaaacagctgtgagggggctataccctgcaaagtcacaggggtgcarctgcccaaggctgtgggagtccacttcttgcattggcatgacctagatgtgagacatggagtcaaaggagattattttggagttttaaggtttaatgattgctctattgaatttcagacttggatggggactatagcccctttgttttggccaatttctcccatttggaatggggttatttacccaattcctgtacccacattctatatagaaggtaactaacttgctctcattgtacaggattataggtggaagagacttgcct

SEQ ID NO: 604019 - DNA, 583 bp, Homo sapiens
gagcttgagttcaagaccagtctgtgaaacatggtaaaacctggtctctacaaaaaaaaaaaattaattagctgggcatggtggcatgtgcctatggttccagccacttgggaggytgaggtgggagaatagcttgatcctaggaggttgaggctgcaatgagccatgatcatgccactgcattctagcctgggcaatgcagggagatcctgtctcaataaataaataaataaataaataaataaataaataaataaataaaagcttttaaaaaagaaataattaggtataaatctaacaaaatatatacaggctttttataagataaatacaaaattctgatgaaaggaatcaaagaaaatataaataaatatagagggacttcatgtccatgtattgaaagacacaatataattaacctatcaattcttcccaaatgatctccagattcaatcaaaccttggtcaaaatatcatcagcaagatattttacagatattggcaaatgtattctaaaatttatatggagagaaaaaagacctagaatggccacaaatagtgaagcagaattacaaatttgtgtg

SEQ ID NO: 604020 - DNA, 583 bp, Homo sapiens
gagcttgagttcaagaccagtctgtgaaacatggtaaaacctggtctctacaaaaaaaaaaaattaattagctgggcatggtggcatgtgcctatggttccagccacttgggaggctgaggtgggagaatagcttgatcctaggaggttgaggctgcaatgagccatgatcatgccactgcattctagcctgggcaatgcagggagatcctgtctcaataaataaataaataaataaataaataaataaataaataaataraagcttttaaaaaagaaataattaggtataaatctaacaaaatatatacaggctttttataagataaatacaaaattctgatgaaaggaatcaaagaaaatataaataaatatagagggacttcatgtccatgtattgaaagacacaatataattaacctatcaattcttcccaaatgatctccagattcaatcaaaccttggtcaaaatatcatcagcaagatattttacagatattggcaaatgtattctaaaatttatatggagagaaaaaagacctagaatggccacaaatagtgaagcagaattacaaatttgtgtg

SEQ ID NO: 604021 - DNA, 583 bp, Homo sapiens
gagcttgagttcaagaccagtctgtgaaacatggtaaaacctggtctctacaaaaaaaaaaaattaattagctgggcatggtggcatgtgcctatggttccagccacttgggaggctgaggtgggagaatagcttgatcctaggaggttgaggctgcaatgagccatgatcatgccactgcattctagcctgggcaatgcagggagatcctgtctcaataaataaataaataaataaataaataaataaataaataaataaaagcttttaaaaaagaaataattaggtataaatctaacaaaatatatacaggctttttataagataaatacaaaattctgatgaaaggaatcaaagaaaatataaataaatatagagggacttcatgtccatgtattgaaagacacaatataattaacctatcaattcttcccaaatgatctccagattcaatcaaaccytggtcaaaatatcatcagcaagatattttacagatattggcaaatgtattctaaaatttatatggagagaaaaaagacctagaatggccacaaatagtgaagcagaattacaaatttgtgtg

SEQ ID NO: 604022 - DNA, 583 bp, Homo sapiens
gagcttgagttcaagaccagtctgtgaaacatggtaaaacctggtctctacaaaaaaaaaaaattaattagctgggcatggtggcatgtgcctatggttccagccacttgggaggctgaggtgggagaatagcttgatcctaggaggttgaggctgcaatgagccatgatcatgccactgcattctagcctgggcaatgcagggagatcctgtctcaataaataaataaataaataaataaataaataaataaataaataaaagcttttaaaaaagaaataattaggtataaatctaacaaaatatatacaggctttttataagataaatacaaaattctgatgaaaggaatcaaagaaaatataaataaatatagagggacttcatgtccatgtattgaaagacacaatataattaacctatcaattcttcccaaatgatctccagattcaatcaaaccttggtcaaaatatcatcagcaagatattttacagatattgrcaaatgtattctaaaatttatatggagagaaaaaagacctagaatggccacaaatagtgaagcagaattacaaatttgtgtg

SEQ ID NO: 604023 - DNA, 599 bp, Homo sapiens
caaatctccattgcaaaagaattccaaatatttatgtaaatactttctcttaaggaggaggtggacataactgcccactctttaaggatgaacttcaagcagtgtttctgttctaaaaaatacagcatgaaacgtggcaagtgagggagtggagagtaattttaaagtggagaaatttgacaaatagtaactcagccaggtgatcaaggtctatatcartaatgttgagtcatgttgatcaaaaaaactttagatttcatgtaattaaatggcatttctgtggttttcttttccaaaacctatagccccagtctactcataagaaaaacattccagctgaggggcatcctacaaaatacttggccagcagtcctcaaacctatcagggtctacaggaacaacaaaaatctgagaaactgtcccatccaagagcagcccaaggagaaatgatgactaaatgtaatatagtatcctggaagggatcctagaattgaaaaaggaagttaacacagactttaatgataatgtaacaatattggttcatcaattataacatatgtaccataatttaaaatgttaataaaaggagaaactgcatt

SEQ ID NO: 604024 - DNA, 599 bp, Homo sapiens
caaatctccattgcaaaagaattccaaatatttatgtaaatactttctcttaaggaggaggtggacataactgcccactctttaaggatgaacttcaagcagtgtttctgttctaaaaaatacagcatgaaacgtggcaagtgagggagtggagagtaattttaaagtggagaaatttgacaaatagtaactcagccaggtgatcaaggtctatatcaataatgttgagtcatgttgatcaaaaaaactttagatttcatgtaattaaatggcatttctgtggttttcttttccaaaacctatagccccagtctactcataagaaaaacattccagctgaggggcatcctacaaaatacttggccagyagtcctcaaacctatcagggtctacaggaacaacaaaaatctgagaaactgtcccatccaagagcagcccaaggagaaatgatgactaaatgtaatatagtatcctggaagggatcctagaattgaaaaaggaagttaacacagactttaatgataatgtaacaatattggttcatcaattataacatatgtaccataatttaaaatgttaataaaaggagaaactgcatt

SEQ ID NO: 604025 - DNA, 598 bp, Homo sapiens
gatgatgaacacaaaatattaacagtgattatctttaggtggttgaattttggggraaaaaagatgtattaaaaatttctaatctcataaaatgagcataaattatcagcaaaaccagtaaatcacaaacacaaatttatttcaaggaagaagaaaaataatgcatctatcaaaatcagcttattccaggaattatcttgtgtctagcaatagcacagtagttctttagattaactatacttccctccttcctttagcttatcccacttaattgctacagtctaatatctctaggaatgaccttttattttgcagaattttcagttacatactactcctgataatatctctgaagatgtattttccccgggagctgtttacagagttttctacccttccctttaggcattccaaggcatgcagattttctctttcctcccctagacgaaacactcatacagatatgtgcaagggtttgcatacatgcatgcatacacacatactcgcagacacacattgttttgtctgctcttcaaccagtgccagaaaatcataatggtcttttccaaatgattctgatatagttcaatgggaagac

SEQ ID NO: 604026 - DNA, 598 bp, Homo sapiens
gatgatgaacacaaaatattaacagtgattatctttaggtggttgaattttggggaaaaaaagatgtattaaaaatttctaatctcataaaatgagcataaattatcagcaaaaccagtaaatcacaaacacaaatttatttcaaggaagaagaaaaataatgcatctatcaaaatcagcttattccaggaattatcttgtgtctagcaatagcacagtagttctttagattaactatacttccctccttcctttagcttatcccacttaattgctacagtctaatatctctaggaatgaccttttattttgcagaattttcagttacatactactcctgataatatctctgaagatgtattttccccgggagctgtttacagagttttctacccttccctttaggcatyccaaggcatgcagattttctctttcctcccctagacgaaacactcatacagatatgtgcaagggtttgcatacatgcatgcatacacacatactcgcagacacacattgttttgtctgctcttcaaccagtgccagaaaatcataatggtcttttccaaatgattctgatatagttcaatgggaagac

SEQ ID NO: 604027 - DNA, 607 bp, Homo sapiens
ttgtctgttttcctgacagatattatttttcaatgcttttccatgttatttgacattacttttaaatcatattttaaaaattatggctgctctactgcaagtaataaatatttaataatcatattattttagaatcacattttatatttcaaaacaatgaaaattctgatcattcccccaggcatattcagttaatgtcaatttatccaacttaacattttcaatagtagaaaaatattaactttataagaatcaattccattccaaatattcaatatttattaataattatccatgaggatctgtaagaagtttattctgtaaaagtcagactaaaacagaggagaaggacwttgggaatttactgcataatcatcattcttttagctctcatgtatcgagtgcttacaatgcaccagcacagtgctcagtgctttatatggtttatatcattttacaaacaccctataaactattaatttcatttcacaagcaaggaaaccatgaaagatagaggttgcatagtttgactcaaatcacacaaatggaagaaccaggatttggatgtgggcatgttttttacctacttgatagaggtatgacttac

SEQ ID NO: 604028 - DNA, 628 bp, Homo sapiens
gacattacttttaaatcatattttaaaaattatggctgctctactgcaagtaataaatatttaataatcatattattttagaatcacattttatatttcaaaacaatgaaaattctgatcattcccccaggcatattcagttaatgtcaatttatccaacttaacattttcaatagtagaaaaatattaactttataagaatcaattccattccaaatattcaatatttattaataattatccatgaggatctgtaagaagtttattctgtaaaagtcagactaaaacagaggagaaggactttgggaatttactgcataatcatcattcttttagctctcatgtatcgagtgcttacaatgcaccagcacagtgctcagtgctttatatggtttatatcattttacaaacacyctataaactattaatttcatttcacaagcaaggaaaccatgaaagatagaggttgcatagtttgactcaaatcacacaaatggaagaaccaggatttggatgtgggcatgttttttacctacttgatagaggtatgacttacatgcaaaaagctgtacatatttaatatgcacaacctgaagagtgtgaagttgagtgaaaccatcaccacaat

SEQ ID NO: 604029 - DNA, 519 bp, Homo sapiens
atctaaactattttcaatttgggataataaatgaatttccactaagtttcctaaaaatgtgcatgtgtgtactagcgttgtttctacggtaaaatatctcttttgtaggttcacttctttccataaaaagacacccagattacttagctaagcaatgyttgaccccgggatttaggaggaataattgttgtgatagaattttttagttttcatccaaatatgtcatattatgtggactacataatgtcctcactctcaaacagagatacaagataaaaattatttccacatccctcagtcactcagaatgtactcttattataccgtagttactcacatgagtgcttttctctcctattaatgctaaattccttgaggagggcctataccatttcttatactaaataaggtagagcaattcagaggtaaatgagtcaaattgtttgacttcaatcaattagggaagaaaagacataaacaaaaggagaagcaacttagaaggttacaaatacgccaaag

SEQ ID NO: 604030 - DNA, 519 bp, Homo sapiens
atctaaactattttcaatttgggataataaatgaatttccactaagtttcctaaaaatgtgcatgtgtgtactagcgttgtttctacggtaaaatatctcttttgtaggttcacttctttccataaaaagacacccagattacttagctaagcaatgtttgaccccgggatttaggaggaataattgttgtgatagaattttttagttttcatccaaatatgtcatattatgtggactacataatgtcctcactctcaaacagagatacaagataaaaattatttccacatccctcagtcactcagaatgtactcttattataccgtagttactcacatgagtgcttttctctcctrttaatgctaaattccttgaggagggcctataccatttcttatactaaataaggtagagcaattcagaggtaaatgagtcaaattgtttgacttcaatcaattagggaagaaaagacataaacaaaaggagaagcaacttagaaggttacaaatacgccaaag

SEQ ID NO: 604031 - DNA, 383 bp, Homo sapiens
aaaaatccaaagaatgtcatactgtagggagagctgtacttcctacaggctccatgtacttccaaatagaaaacataataggagaaatatcctattcagtgtagcaacaaaagttcatgatagatcatggaaatgtcctctataaaaattgggttaaaagaaaaaatttgttaatgtaccamcacataaaagatagttgggataaaataactaccatattaccaagttgggagactgaatacttaaagatgtcaaaattccttgattagtttataggtttgaggcaacttcaatcaaaatcccaaaggacttttttgtttctttgattaatattttaaaaacatatattagtatatttacatataatatattaatgttaatct

SEQ ID NO: 604032 - DNA, 631 bp, Homo sapiens
aattgattccctacatctttgtgaagcagaaaatgcatctgctgttggaggagactgaggctcagaggagttaagtgatttttccaaggatcaagctgctacttaaacccaagttttaatttcagatccatcataatttttgggacaatgtgctgcctcatattaaactatattcaaaaacatattaagcatacaatgatargaatgcttacagctctcaaagctttgctcagcattttgagagtgtagtttgagaagaacaattatcagaaaaagaaattcataatatgctcacttaattactgttcaatgcacatctagtacttgtgaattaccataagtttttagatggtttaactttcaaggagctgaatatcttgcaggtcaaatatgaaatcaagtagtcagtctactgagagccaaactgaagtccaaaattgcagaatatattttgctttaggtcatgtaccaaatgactaataggcagcgaaggttttcaggattataattttagcccaaggctctggtaactacatgaaatctttgagtggtttatgatatcttaagctgaaattatagctccccatgggcaaaagttgttgaaatgctttcagccattgagtactgtaat

SEQ ID NO: 604033 - DNA, 631 bp, Homo sapiens
aattgattccctacatctttgtgaagcagaaaatgcatctgctgttggaggagactgaggctcagaggagttaagtgatttttccaaggatcaagctgctacttaaacccaagttttaatttcagatccatcataatttttgggacaatgtgctgcctcatattaaactatattcaaaaacatattaagcatacaatgataagaatgcttacagctctcaaagctttgctcagcattttgagagtgtagtttgagaagaacaattatcagaaaaagaaattcataatatgctcacttaattactgttcaatgcacatctagtacttgtgaattaccataagtttttagatggtttaactttcaaggagctgaatatcttgcaggtcaaatatgaaatcaagtagtcagtctactgagagccaaactgaagtccaaaattgcagaatatattttgctttakgtcatgtaccaaatgactaataggcagcgaaggttttcaggattataattttagcccaaggctctggtaactacatgaaatctttgagtggtttatgatatcttaagctgaaattatagctccccatgggcaaaagttgttgaaatgctttcagccattgagtactgtaat

SEQ ID NO: 604034 - DNA, 591 bp, Homo sapiens
agggttagctttgccctaaccaaatttgggaatcatgtttgaaaagaatgaacgagaaacactggaaaccattagatatggcaggcttttacaacatcaaaactgaagttttaatcaatattctcaagccatatagcacaatgcatgttgtttctttgcagtagtcatagagatcctgcagacttattgtgataagaatgtgcctttgatagaattctcactcctaactcttgtacagtgactaggtcagaggctgggtatttcagttcyttggtttcttccacaggctctagcacagaactaggcacataactccaataaacaccttcgcatttatcatttttattgcatcagggaaagacagaaagtgggaccaaactgaattgtaaagaggaaatgggaatgactaggttatttcatcattccctaagttaatggagtgtcctagggaactccagggcatcatggaacagggccaccttgtcagggaatgggaacagcctgaatttgaaggtatgggcagtgactataagtttgttcaaggagaactgaagtacctcatgaggtctgcagagtgacactcaatgctga

SEQ ID NO: 604035 - DNA, 461 bp, Homo sapiens
acatatatgttttcttttaaaaaatgtctgttcatgtcctttgtgcactttttaatggggttgtttgtgtttttttcttataaatgtgtttaaattccttatagatcctgggatattagacctttgttagatgcatagtttgcaaatattttctcccattctgtaggttgtctgtttactctgtacaataaacaccgatgacatgagttttacctatataacaaacctgcrcatgtctccctgaacctaaaataaaagtttaaaaaagaaagagaaatagagttagatgatacctgcttccaaattttggcagacttctggaatttgtgagttgaacacatcaattgttagcaacattccctcctcaaatcccgctaaaatgacagtaaagagattttccaaagcatatgcccaaaaggataagttaggagagaacagcaatagcattttcagaattagaa

SEQ ID NO: 604036 - DNA, 597 bp, Homo sapiens
taatcagaccttagatgtgtatttgttcctgggttttcttgcaggggagatgagcacaaggcatctctagtcacccatcttgcttgatttagcataactcgtaagggccctaggattttcagaacagtcaatgatcattggcctcaacttaaagtcaccagcttcattagcccctaaaagagaattggcctgtgctttgaagctttgaaaccatgcattgacttctctccaaatataaaagtcctggatggcatcttcttccaataaaaggmtatcttgtctacagtgaaaatctgttgtttcgtgtggccacctttatcaattgtctcagctacatcttctggataacttggccaccttcatcaattgtctcagctacatcttctggataacttgctgctgctggataacagcacttgcgtttcaccttgcacttttatgttatggagatggcttctttccttaaacttcatgaaccaacctgttagcttcaagcttttcttctgcaacttacttacctctctcagccatcactgaattgcagagagagggggccttgtcctggattaggctttggcttaaggaaaggctatggct

SEQ ID NO: 604037 - DNA, 597 bp, Homo sapiens
taatcagaccttagatgtgtatttgttcctgggttttcttgcaggggagatgagcacaaggcatctctagtcacccatcttgcttgatttagcataactcgtaagggccctaggattttcagaacagtcaatgatcattggcctcaacttaaagtcaccagcttcattagcccctaaaagagaattggcctgtgctttgaagctttgaaaccatgcattgacttctctccaaatataaaagtcctggatggcatcttcttccaataaaaggctatcttgtctacagtgaaaatctgttgtttcgtgtggccacctttatcaaytgtctcagctacatcttctggataacttggccaccttcatcaattgtctcagctacatcttctggataacttgctgctgctggataacagcacttgcgtttcaccttgcacttttatgttatggagatggcttctttccttaaacttcatgaaccaacctgttagcttcaagcttttcttctgcaacttacttacctctctcagccatcactgaattgcagagagagggggccttgtcctggattaggctttggcttaaggaaaggctatggct

SEQ ID NO: 604038 - DNA, 594 bp, Homo sapiens
gtaaagggttggagaaagatctctcacacaaacaaaacaccaaaaagagcagggatcactattcctaaaacagataaaacaggctttaaaccagcaatagtaaaaaaggacaaagaagggcattacataatgataaggggttcaattcaacaagaagccttaacaatcctaaatatatatgcacccaacattggatcacccaggttaataaaacaggtacttctagacctatgaaaagactcagccacataataatagtcaggagactttaacaccccactgacagcattagacagatcattcagatagaacactaacagaggaattacggacrtaaattcaacacttgaccaactggatgtaataggcacctaaagaacactccatgcatcaaccacagaatatacattcttctcatttgcacagcgaatgtattccaagatcaaccatatgttccaccatgaagcaagcctcaataaattcaaaaaatgttgaaatcataccaaccattttttttggaccacagttgaataaaaatataaatcaatatcaagaagatctctaaaaaccaaacaatttcatggaaatgaaaca

SEQ ID NO: 604039 - DNA, 577 bp, Homo sapiens
catagcaatcaggcaaaagaaagaaaaaaatggcatccaaataggaaaataaaaagtcaaactatctctcttcatcaacgatatgattctatatcttcaaaatccaaaagactccaccaaaaggcacttgraactgatacattacttcagtaaagttttaggatacagaatcaatgtacaaaaatcagtagcatttctgtacaccaataatgtccaagctgacagccaaatcaaggacataaccccctttacagtagccacacaaaaaataaaatacttaggaatacagctaatcgaggaggtgaatgatctctacaaggagaactgcaaaccactgctgaaagaaatcatagatgacacaaacaaatggaaaaacattccatgctaatggactggaagaatcaatatcattaaaatggccatgctaccaaaagcaatatacagaatcaacatttttccaatcaagctactaacatcatttttcacagaactagaaaaatctaattcacatggaaccaaaaaagagccggaatagccaaagcaatcctaagcaaaaagaacaaagccagaagcatca

SEQ ID NO: 604040 - DNA, 577 bp, Homo sapiens
catagcaatcaggcaaaagaaagaaaaaaatggcatccaaataggaaaataaaaagtcaaactatctctcttcatcaacgatatgattctatatcttcaaaatccaaaagactccaccaaaaggcacttggaactgatacattacttcagtaaagttttaggatacagaatcaatgtacaaaaatcagtagcatttctrtacaccaataatgtccaagctgacagccaaatcaaggacataaccccctttacagtagccacacaaaaaataaaatacttaggaatacagctaatcgaggaggtgaatgatctctacaaggagaactgcaaaccactgctgaaagaaatcatagatgacacaaacaaatggaaaaacattccatgctaatggactggaagaatcaatatcattaaaatggccatgctaccaaaagcaatatacagaatcaacatttttccaatcaagctactaacatcatttttcacagaactagaaaaatctaattcacatggaaccaaaaaagagccggaatagccaaagcaatcctaagcaaaaagaacaaagccagaagcatca

SEQ ID NO: 604041 - DNA, 577 bp, Homo sapiens
catagcaatcaggcaaaagaaagaaaaaaatggcatccaaataggaaaataaaaagtcaaactatctctcttcatcaacgatatgattctatatcttcaaaatccaaaagactccaccaaaaggcacttggaactgatacattacttcagtaaagttttaggatacagaatcaatgtacaaaaatcagtagcatttctgtacaccaataatgtccaagctgacagccaaatcaaggacataaycccctttacagtagccacacaaaaaataaaatacttaggaatacagctaatcgaggaggtgaatgatctctacaaggagaactgcaaaccactgctgaaagaaatcatagatgacacaaacaaatggaaaaacattccatgctaatggactggaagaatcaatatcattaaaatggccatgctaccaaaagcaatatacagaatcaacatttttccaatcaagctactaacatcatttttcacagaactagaaaaatctaattcacatggaaccaaaaaagagccggaatagccaaagcaatcctaagcaaaaagaacaaagccagaagcatca

SEQ ID NO: 604042 - DNA, 577 bp, Homo sapiens
catagcaatcaggcaaaagaaagaaaaaaatggcatccaaataggaaaataaaaagtcaaactatctctcttcatcaacgatatgattctatatcttcaaaatccaaaagactccaccaaaaggcacttggaactgatacattacttcagtaaagttttaggatacagaatcaatgtacaaaaatcagtagcatttctgtacaccaataatgtccaagctgacagccaaatcaaggacataaccccctttacagtagccacacaaaaaataaaatacttaggaatacagctaaycgaggaggtgaatgatctctacaaggagaactgcaaaccactgctgaaagaaatcatagatgacacaaacaaatggaaaaacattccatgctaatggactggaagaatcaatatcattaaaatggccatgctaccaaaagcaatatacagaatcaacatttttccaatcaagctactaacatcatttttcacagaactagaaaaatctaattcacatggaaccaaaaaagagccggaatagccaaagcaatcctaagcaaaaagaacaaagccagaagcatca

SEQ ID NO: 604043 - DNA, 612 bp, Homo sapiens
aaggaagagaataaagaactcagaaataaagccaaacacagaaagccatctgatctttgacaaagtcaacaaaaataagcaataaggaaatgacttcctattcaataaatggtgctaggatattgrgctagcaatatgcaaaagaatgatctggacctatacctttcaccatatacaaaaattaactaaagatagaaagacctcaaactataagaatactaggagaaaacctagaaaacagcattctggacgctgaccttggggaagaatttatgactaagttttcaaaagcaattgccacaaaaaactgacaagtgggacctaattaaactgtagagcttctgcacagcaaagaacctatcaacagagtaaacagacaacctatagaatgggtgaaaatatttgcaaactatgcatctcacaaaggtttaatattcagaatctataagaaactcaacaattaagcaaaaaaagcaaataaccccattaaaaatgggcaaaagatataaacatacacttcttaaaagaagacataccagtggccaacaaacatgaaaaatgctccacatcactaatcatccgagaaatgcaaatcaaaaccacaacatgatt

SEQ ID NO: 604044 - DNA, 612 bp, Homo sapiens
aaggaagagaataaagaactcagaaataaagccaaacacagaaagccatctgatctttgacaaagtcaacaaaaataagcaataaggaaatgacttcctattcaataaatggtgctaggatattgagctagcaatatgcaaaagaatgatctggacctatacctttcaccatayacaaaaattaactaaagatagaaagacctcaaactataagaatactaggagaaaacctagaaaacagcattctggacgctgaccttggggaagaatttatgactaagttttcaaaagcaattgccacaaaaaactgacaagtgggacctaattaaactgtagagcttctgcacagcaaagaacctatcaacagagtaaacagacaacctatagaatgggtgaaaatatttgcaaactatgcatctcacaaaggtttaatattcagaatctataagaaactcaacaattaagcaaaaaaagcaaataaccccattaaaaatgggcaaaagatataaacatacacttcttaaaagaagacataccagtggccaacaaacatgaaaaatgctccacatcactaatcatccgagaaatgcaaatcaaaaccacaacatgatt

SEQ ID NO: 604045 - DNA, 612 bp, Homo sapiens
aaggaagagaataaagaactcagaaataaagccaaacacagaaagccatctgatctttgacaaagtcaacaaaaataagcaataaggaaatgacttcctattcaataaatggtgctaggatattgagctagcaatatgcaaaagaatgatctggacctatacctttcaccatatacaaaaattaactaaagatagaaagacctcaaactataagaatactaggagaaaacctagaaaacagcattctggacgctgaccttggggaagaatttatgactaagytttcaaaagcaattgccacaaaaaactgacaagtgggacctaattaaactgtagagcttctgcacagcaaagaacctatcaacagagtaaacagacaacctatagaatgggtgaaaatatttgcaaactatgcatctcacaaaggtttaatattcagaatctataagaaactcaacaattaagcaaaaaaagcaaataaccccattaaaaatgggcaaaagatataaacatacacttcttaaaagaagacataccagtggccaacaaacatgaaaaatgctccacatcactaatcatccgagaaatgcaaatcaaaaccacaacatgatt

SEQ ID NO: 604046 - DNA, 612 bp, Homo sapiens
aaggaagagaataaagaactcagaaataaagccaaacacagaaagccatctgatctttgacaaagtcaacaaaaataagcaataaggaaatgacttcctattcaataaatggtgctaggatattgagctagcaatatgcaaaagaatgatctggacctatacctttcaccatatacaaaaattaactaaagatagaaagacctcaaactataagaatactaggagaaaacctagaaaacagcattctggacgctgaccttggggaagaatttatgactaagttttcaaaagcaattgccacaaaaaactgacaagtgggacctaattaaactgtagagcttctgcacagcaaagaacctatcaacagagtaaacagacaacctatagaatgggtgaaaatatttgcaaactatgcatctcacaaaggtttaatattcagaatctataagaaactcaacaattaagcaaaaaaarcaaataaccccattaaaaatgggcaaaagatataaacatacacttcttaaaagaagacataccagtggccaacaaacatgaaaaatgctccacatcactaatcatccgagaaatgcaaatcaaaaccacaacatgatt

SEQ ID NO: 604047 - DNA, 560 bp, Homo sapiens
ttactgaacttacttatcagatctaagagtttttggtggagtctttaggtttttctagatacaagatcatgtcatctacaaagagggacarttttacttcctcttttccaatttggatgtcttttatttgtttctattgtctgattgctctggctaagacttccagtactgtgttgaataggagtggcaaaaatagacatccttgtcttgttccagttcctagaggaaaagctgaaagccacgataggatggtgttaactgtgggtttgtcatatgtagcctttattatgtcgaggtattaataggctccttcaatgcctagtttgttgagagtttttatcatgaagatcttttgaattttatcaaaccctttttctacatctcttgaaatgatcatatggttttgttcttcattctgttgatgtggtgtgttatctttgttgattgatgtatgttgaactacatttgcatttctgggacaaatcccacctgatcctggtatgttatcttgttgatatgctgttggattcagttggttagtattttgttgaggattttta

SEQ ID NO: 604048 - DNA, 578 bp, Homo sapiens
tttactgaacttacttatcagatctaagagtttttggtggagtctttaggtttttctagatacaagatcatgtcatctacaaagagggacagttttacttcctcttttccaatttggatgtcttttatttgtttctattgtctgattgctctggctaagacttccagtactgtgttgaataggagtggcaaaaatagacatccttgtcttgttccagttcctagaggaaaagctgaaagccacgataggatsgtgttaactgtgggtttgtcatatgtagcctttattatgtcgaggtattaataggctccttcaatgcctagtttgttgagagtttttatcatgaagatcttttgaattttatcaaaccctttttctacatctcttgaaatgatcatatggttttgttcttcattctgttgatgtggtgtgttatctttgttgattgatgtatgttgaactacatttgcatttctgggacaaatcccacctgatcctggtatgttatcttgttgatatgctgttggattcagttggttagtattttgttgaggatttttacatctatgtttatcagg

SEQ ID NO: 604049 - DNA, 578 bp, Homo sapiens
tttactgaacttacttatcagatctaagagtttttggtggagtctttaggtttttctagatacaagatcatgtcatctacaaagagggacagttttacttcctcttttccaatttggatgtcttttatttgtttctattgtctgattgctctggctaagacttccagtactgtgttgaataggagtggcaaaaatagacatccttgtcttgttccagttcctagaggaaaagctgaaagccacgataggatggtgttaactgtgggtttgtcatatgtagcctttattatgtcgaggtattaataggctccttcaatgcctagtttgttgagagtttttatcatgaagatcttttgaattttatcaaaccctttttctacatctcttgaaatgatcatatggttttgttcttcattctgttgatgtgrtgtgttatctttgttgattgatgtatgttgaactacatttgcatttctgggacaaatcccacctgatcctggtatgttatcttgttgatatgctgttggattcagttggttagtattttgttgaggatttttacatctatgtttatcagg

SEQ ID NO: 604050 - DNA, 435 bp, Homo sapiens
tgtcagacaaggccctgataaagcagtttttctttagggcagggctttcacacagagaatagaatgctctgggcatatttcaaaatggttgctgtacccactcactctatccaccaactagggtatattttgaaatggttgcttttcccttttccttgcctaaagarcctgaggaaattttcttcagccttcatcatgagaaccagctagggtttctggaagtaacattcatgaaagtataaggggttcccaaggcgggacttcaacaagtttttaactctcaagctagtccacactcagccaccggtaattaattgactagcatttaagtgttcctaccaattactggctcctgtggcttctgctctcaggtaaactgtgatgttctgtagtcacgtgtctctctagtttttgaggaagtggtttgccctgtga

SEQ ID NO: 604051 - DNA, 435 bp, Homo sapiens
tgtcagacaaggccctgataaagcagtttttctttagggcagggctttcacacagagaatagaatgctctgggcatatttcaaaatggttgctgtacccactcactctatccaccaactagggtatattttgaaatggttgcttttcccttttccttgcctaaagagcctgaggaaattttcttcagccttcatcatgagaaccagctagggtttctggaagtaacattcatgaaagtataaggggttcccaaggcgggacttcaacaagtttttaactctcaagctagtccacactyagccaccggtaattaattgactagcatttaagtgttcctaccaattactggctcctgtggcttctgctctcaggtaaactgtgatgttctgtagtcacgtgtctctctagtttttgaggaagtggtttgccctgtga

SEQ ID NO: 604052 - DNA, 581 bp, Homo sapiens
tagaatgctctgggcatatttcaaaatggttgctgtacccactcactctatccaccaactagggtatattttgaaatggttgcttttcccttttccttgcctaaagagcctgaggaaattttcttcagccttcatcatgagaaccagctagggtttctggaagtaacattcatgaaagtataaggggttcccaaggcgggacttcaacaagtttttaactctcaagctagtccacactcagccaccrgtaattaattgactagcatttaagtgttcctaccaattactggctcctgtggcttctgctctcaggtaaactgtgatgttctgtagtcacgtgtctctctagtttttgaggaagtggtttgccctgtgacctctattctctgacagatctaagaaaagttgttgattttcagtttgattatcttttttcctgttgtgaagatgggagtgatgacttccaagttctctgcatgttggagtgggaactggaagacctaattaacttcttaagaaactgccaaactgttttccaaagtggatctagcactttacattcctggcattgtatgagagtt

SEQ ID NO: 604053 - DNA, 435 bp, Homo sapiens
tgtcagacaaggccctgataaagcagtttttctttagggcagggctttcacacagagaatagaatgctctgggcatatttcaaaatggttgctgtacccactcactctatccaccaactagggtatattttgaaatggttgcttttcccttttccttgcctaaagagcctgaggaaattttcttcagccttcatcatgagaaccagctagggtttctggaagtaacattcatgaaagtataaggggttcccaaggcgggacttcaacaagtttttaactctcaagctagtccacactcagccaccggtaattwattgactagcatttaagtgttcctaccaattactggctcctgtggcttctgctctcaggtaaactgtgatgttctgtagtcacgtgtctctctagtttttgaggaagtggtttgccctgtga

SEQ ID NO: 604054 - DNA, 530 bp, Homo sapiens
atttacatatatatgtttacatctagcttttaatttatttagacctcactttttgttgaaggatgctgcatgagttattgtcatttcactgaaggcagtgctcatggagtaaaaaggtacagagccatataaacaccacatgattttctctttttttgacactagtagcaaaaacaatttttgcaccaaaagtagtttttccataaaaataaaatatcaactatacacatatgtaatgggtgagggtatgcaaatcctaccacgtaagtccagtaagtaaattccaacaattaacaaagactcatttttcaatggccaattaattaaacaattaaatgactatataaaaattaaacctatctacatattagaaatacattttaattcacccatgcctccactgtacyataaaatgaatagagaaaatttttatttactggcttaagaaatcaatactacatattcaactgatgtactactgcttaatgagcaattacagaattcacaatcttgatgtttccttgcaaaag

SEQ ID NO: 604055 - DNA, 564 bp, Homo sapiens
atgtgaacaggcctgaagtagcctactagagaatgagagaccacatgggaccattcagccaagycatgttattttcttttctttgatttaaaaaaaaactgtttttttattctttaaaacaatttgaactgacacataatagttgttcatatttataaggtagagggtgatatctcaatacctgtgtacaatgtgcaatgatcaaatcaggataatcagcatgtccatcacctcaaatatttatcattctttgtggtgggaacactcaagagcctttctttttaaaaatatacaataaattgttaactgtagtcaccctccagtgctatagaatactaaaacttattcctctctgtaagctgaaatctgacatttctttgttgattttctgactagatgatctgtccagtgctacgagtagggtgttacggggtgttaaagaccccaactgttactagactggaggctgtctttccctttagatctaatatttgccttgtttatctgagtgctctagtgttgggtacatatatgtctgcaattattatatcctattgctaagtt

SEQ ID NO: 604056 - DNA, 564 bp, Homo sapiens
atgtgaacaggcctgaagtagcctactagagaatgagagaccacatgggaccattcagccaagccatgttattttctttwctttgatttaaaaaaaaactgtttttttattctttaaaacaatttgaactgacacataatagttgttcatatttataaggtagagggtgatatctcaatacctgtgtacaatgtgcaatgatcaaatcaggataatcagcatgtccatcacctcaaatatttatcattctttgtggtgggaacactcaagagcctttctttttaaaaatatacaataaattgttaactgtagtcaccctccagtgctatagaatactaaaacttattcctctctgtaagctgaaatctgacatttctttgttgattttctgactagatgatctgtccagtgctacgagtagggtgttacggggtgttaaagaccccaactgttactagactggaggctgtctttccctttagatctaatatttgccttgtttatctgagtgctctagtgttgggtacatatatgtctgcaattattatatcctattgctaagtt

SEQ ID NO: 604057 - DNA, 564 bp, Homo sapiens
atgtgaacaggcctgaagtagcctactagagaatgagagaccacatgggaccattcagccaagccatgttattttcttttctttgatttaaaaaaaaactgtttttttattctttaaaacaatttgaactgacacataatagttgttcatatttataaggtagagggtgatatctcaatacctgtgtacaatgtgcaatgatcaaatcaggataatcagcatgtccatcacctcaaatatttatcattctttgtggtgggaacactcaagagcctttctttttaaaaatatacaataaattgttaactgtagtcaccctccagtgctatagaatactaaaacttattcctctctgtaagctgaaatctgacatttctttgttgattttctgactagatgatctgtccagtgctacgagtagggtgttacggggtgttaaagaccccaactgttactagaytggaggctgtctttccctttagatctaatatttgccttgtttatctgagtgctctagtgttgggtacatatatgtctgcaattattatatcctattgctaagtt

SEQ ID NO: 604058 - DNA, 564 bp, Homo sapiens
atgtgaacaggcctgaagtagcctactagagaatgagagaccacatgggaccattcagccaagccatgttattttcttttctttgatttaaaaaaaaactgtttttttattctttaaaacaatttgaactgacacataatagttgttcatatttataaggtagagggtgatatctcaatacctgtgtacaatgtgcaatgatcaaatcaggataatcagcatgtccatcacctcaaatatttatcattctttgtggtgggaacactcaagagcctttctttttaaaaatatacaataaattgttaactgtagtcaccctccagtgctatagaatactaaaacttattcctctctgtaagctgaaatctgacatttctttgttgattttctgactagatgatctgtccagtgctacgagtagggtgttacggggtgttaaagaccccaactgttactagactggagkctgtctttccctttagatctaatatttgccttgtttatctgagtgctctagtgttgggtacatatatgtctgcaattattatatcctattgctaagtt

SEQ ID NO: 604059 - DNA, 531 bp, Homo sapiens
gtatcttttaattgggaatttgatctgtttacattcaaggttactattaatagatgaggatttatcctgtcattttattcttttttttttttttttggttgktttgtatatcctttgttcttttcttcctttgtttttttttttttctaatctttatggtttggtggatttctgtagagataaagtttgatttctctctctttcttatgtatctgctctaccagtgagttttatagtttgatgtttttcatgatggtagccatcctcttgctttcatttgtagaatcccccttaagcattccttgtaaggccagtctactggtgatgaattccctcaggttttgcttgtctgggaaatattttatttctccctcatttctagaggatagctctgctgggtatagcattcttagtttatagtttttttgtatttttttcctttcagtactttgactgtaacatcccattgtctactgacctgtaaagtttccactggaaaatccactgttaacctaaaggagtttcccttac

SEQ ID NO: 604060 - DNA, 545 bp, Homo sapiens
ttaataattatttaataaaatagtatascacaactcaatcacatttattccagaaatatgttggtttaccacttaatcaatcatgtaattagccacatttatttataagataaaggggaaaaattatcatctcaaagattcagaaaaatctggaaaaattcaacatccattcatgattaaaaaaaaaactctctcagcaaactaaagacattgttttttcttttctttttctttctttttttttttgttgagccaatgtctcgctctgtcacctaggctggagagcagtggtgtgatattggctcactgcaatctctgcatcctgagttcaagcaattctcgtgcctcagcctctagagtagatggtattacaggcatgcaccaccacacctggttaattttttattttttagtagagatggggtttcatcatgttgcccaggctggtctgaaatgatgtgccccactgggccccgcaaagtgctgggattacaggcgaaagccatggcgcctggctaaggaatttcttcatctgataaatggta

SEQ ID NO: 604061 - DNA, 559 bp, Homo sapiens
caaaaagtgagtttagtcaagttgctaaatacaagattaatgaataaaatgaactgcatttaaatcaacaacatttagaaaataaacattttaaagggatatcatttaaataaccacaaaatatcaaatatctaggaataaatctcatcaaaaatatgcaagctttctacacagaaaatgagaaaacattgtaaagagaaatggaaggaaacctaactgaatgagagaacatctctcttcatgggttggatgggtcaatattgtaaagattcaattctccccaatctatagattcaacrcaattccaaacaaatttctatcaggtgtgtgtatttgaccagctgactcccaaattttttttttttttatactttaagttctagggtacatgtgcacaacgtgcaggtttgttacatatgtatacatgtgccatgttggtgtgctgcacccattaactcgtcatttacattaggtatatctcctaatgctttccctcccccctccccccaccccataacaggccctggtgtgtgatgttccccttcctgtgtccaagtgt

SEQ ID NO: 604062 - DNA, 518 bp, Homo sapiens
tagtagtagaatgtctttaaactcaaggaaaattttcttaatcaggacacaaaaacacaaactttataaagagaaagcataatacctatgatggtaatacaactaagaacttctgttaaccaaaagatactcctaagagagagaaaaggcaaatcacagagcagaaaagttttcttgaaatacatatatgaccaataacagaatggaaatcagaatatataaaaaactgcaaatcaagagaaaaaaagacaaataatccaggagaaaaatgggtaagaaaacttaacagttactttacaaaaaaggatatccaaatacttaataatmttaagaaaacttcttcaatcttattagtaattatagaaatgcaaatgaacaccaccataatatgccatcacacaaacacccaatggctaaaaatcaaaatactcagaattgcaagtactggggaagatatggaatgcttcgagtgtgcgataccagtggagtgaaaattggtacaactgttttagaaacag

SEQ ID NO: 604063 - DNA, 431 bp, Homo sapiens
atagtaaaaactggaaacaacccaaatgtaacagraaaaaaaaaaagagattccacttgcagtcacaatttgtgtaggaatgaatttgtgaaaagatgtgcaaagacatgatgaagaaaatataaaatatttaattaaagaatgaacaagatcaatcacatgtataacttattatcacaaagctgtcagttctctcgagtgaatctataaattcaatgtagttccaatgaaaatcctaagcgtgttttataatggaacttgacaaaatgattttaaaatttaatgaaagaataacgttccaagaagagcaagacaattctgcctttatcaaactacaatataaggctacaataattacaaaagtgtgatatagagaacttagaaacaattttgaatatttctagaaacttggtatatgattgagaggaatc

SEQ ID NO: 604064 - DNA, 431 bp, Homo sapiens
atagtaaaaactggaaacaacccaaatgtaacagaaaaaaaaaaaagagattccacttgcagtcacaatttgtgtaggaatgaatttgtgaaaagatgtgcaaagacatgatgaagaaaatataaaatatttaattaaagaatgaacaagatcaatcacatgtataacttattatcacaaagytgtcagttctctcgagtgaatctataaattcaatgtagttccaatgaaaatcctaagcgtgttttataatggaacttgacaaaatgattttaaaatttaatgaaagaataacgttccaagaagagcaagacaattctgcctttatcaaactacaatataaggctacaataattacaaaagtgtgatatagagaacttagaaacaattttgaatatttctagaaacttggtatatgattgagaggaatc

SEQ ID NO: 604065 - DNA, 537 bp, Homo sapiens
cttgtacactgttggtgtgagtgtaaattagtagttattatggaaaacagcatagggacacctcaaaaaactaaaaataaaaaaatagaactaccatatgatttggagattccacttctgggtatatgtccaaagaaaatgaaatctgcactcccatgttcactgcagcattattcataatagccaagctatggagtcaatctaaatgtcatcaatggaagaacagataaagaatacctggtatatataaataagaacacactgttcggcsttagaggatatcctgtcccttgagataacaaggataagcctggagaacgttatgctaagtgaaaggagccaggcatagaaagacaaatattggatgtctcacttctttgtggactctaaaaatgtcaaattcatagaagcagagagtagaatggtggttaccaggggctggggggaacaaaaaggagggattgtggagatgtcagttaaaggatgcaaaatttcagttagacaggaataagttcaggaaatttattgcacaacatg

SEQ ID NO: 604066 - DNA, 537 bp, Homo sapiens
cttgtacactgttggtgtgagtgtaaattagtagttattatggaaaacagcatagggacacctcaaaaaactaaaaataaaaaaatagaactaccatatgatttggagattccacttctgggtatatgtccaaagaaaatgaaatctgcactcccatgttcactgcagcattattcataatagccaagctatggagtcaatctaaatgtcatcaatggaagaacagataaagaatacctggtatatataaataagaacacactgttcggcgttagaggatatcctgtcccttgagataacaaggatragcctggagaacgttatgctaagtgaaaggagccaggcatagaaagacaaatattggatgtctcacttctttgtggactctaaaaatgtcaaattcatagaagcagagagtagaatggtggttaccaggggctggggggaacaaaaaggagggattgtggagatgtcagttaaaggatgcaaaatttcagttagacaggaataagttcaggaaatttattgcacaacatg

SEQ ID NO: 604067 - DNA, 589 bp, Homo sapiens
tcatacttgtctatgtacttgacaagcaatcaaatgtaatttttaattgctttttagtcactagaattgcccatatacgtgacttcatttcccaataaatgtctgtaaatctgtgtcttttatgttcaaagtaatcctttcccctaaaatcaactatgaattaactttcaatgcctctgtgtaaaaaaagtacataagactgtttccaacaaaatcagggggcagcataaatagctgcaatgtgttaatgagacaataacaccactgactgcccactgcacactgaacaatttacaccctcatctcatttaatttcctcaatgacatcaggattatccaacaagggcagtcatgtgtctcagcaggtgtatgaaaacctgtaatgaggagtccmggaatggtcaatatttggaaatccaactagccaggccagcaatggcctcagttttctgaggtttgcgctttgtgaaataagcctgcagaataaacccagttgtccagcagtttcagctacctacttctattcacttgtggctctactagcaaaagtattaaaggattatggacatctttccaaaggcagtgtact

SEQ ID NO: 604068 - DNA, 560 bp, Homo sapiens
aacattgacatttctgggtcaatattaaacttatgactacacagtctacattcactgagaaattagtatttttaagataaacacccttaccttaattggattccgatagaaagactggcctcccgaagatggaaaygacatagcgacaatacgttctggaagtcaaaatcatcactattacaaacattattatagatttaaaataacatacaaaagttaattttatatgatcagactccattttcacagaaaaataccttttaagattaaggttgacagaaaagagctaatactcagggtaatcaagataacatattaaattatccaacataatgaccattaagctggcatggtgttcttaacactccactggttcaaaccatatgccatgtacttatgttggcctcagtctgaagttccccctgttcttggaatttatttcttatcttaaataccaaagaaaatccaagagttctgggcaccagtgatggtgggaactcccaacgtgctttatagccctctgactcagaacacctgagatctacaaagctgtgacctca

SEQ ID NO: 604069 - DNA, 560 bp, Homo sapiens
aacattgacatttctgggtcaatattaaacttatgactacacagtctacattcactgagaaattagtatttttaagataaacacccttaccttaattggattccgatagaaagactggcctcccgaagatggaaatgacatagcgacaataygttctggaagtcaaaatcatcactattacaaacattattatagatttaaaataacatacaaaagttaattttatatgatcagactccattttcacagaaaaataccttttaagattaaggttgacagaaaagagctaatactcagggtaatcaagataacatattaaattatccaacataatgaccattaagctggcatggtgttcttaacactccactggttcaaaccatatgccatgtacttatgttggcctcagtctgaagttccccctgttcttggaatttatttcttatcttaaataccaaagaaaatccaagagttctgggcaccagtgatggtgggaactcccaacgtgctttatagccctctgactcagaacacctgagatctacaaagctgtgacctca

SEQ ID NO: 604070 - DNA, 560 bp, Homo sapiens
ccgatagaaagactggcctcccgaagatggaaatgacatagcgacaatacgttctggaagtcaaaatcatcactattacaaacattattatagatttaaaataacatacaaaagttaattttatatgatcagactccattttcacagaaaaataccttttaagattraggttgacagaaaagagctaatactcagggtaatcaagataacatattaaattatccaacataatgaccattaagctggcatggtgttcttaacactccactggttcaaaccatatgccatgtacttatgttggcctcagtctgaagttccccctgttcttggaatttatttcttatcttaaataccaaagaaaatccaagagttctgggcaccagtgatggtgggaactcccaacgtgctttatagccctctgactcagaacacctgagatctacaaagctgtgacctcattctctggggttctaggaagagaagcggtctctctgggatccttgggattcaggataactactagaacttaataaactgaaactcaaatggagtcagctgaa

SEQ ID NO: 604071 - DNA, 560 bp, Homo sapiens
ccgatagaaagactggcctcccgaagatggaaatgacatagcgacaatacgttctggaagtcaaaatcatcactattacaaacattattatagatttaaaataacatacaaaagttaattttatatgatcagactccattttcacagaaaaataccttttaagattaaggttgacagaaaagagctaatactcagggtaatcaagataacatattaaattatccaacataatgaccattaagctggcatggtgttcttaacactccactggttcaaaccatatgccatgtacttatgttggcctcagtctgaagttccccctgttcttggaatttatttcttatcttaaataccaaagaaaatccaagagttctgggcaccagtgatggtgggaactcccaacgtgctttrtagccctctgactcagaacacctgagatctacaaagctgtgacctcattctctggggttctaggaagagaagcggtctctctgggatccttgggattcaggataactactagaacttaataaactgaaactcaaatggagtcagctgaa

SEQ ID NO: 604072 - DNA, 421 bp, Homo sapiens
gtgaagttaaagttagtacaagtaaagtccttctttggctactccatcttttttattcaatgaatggtacttggtgtgtatactcttcactggtccctaartatcacaatcttttagtttcaacctatgtgggaatttacctaaacatttcattttaaagcaacatatttggtataaaatgagccatttgaagttgaaaagattatacagaataaaagccacagaaaatgcaaaaagtaaatgaaaaattttaagagaagtgagtcttatatttcatacctgggaatatccttaagaaacttaacgtcaaaaaaaatgtaaacgacatcaaccagcagaataatcacagtaacggcagtatctaaaatgttaagtaaatcagaaaaataatgctgtctcctgtaatataaaacagaaaaat

SEQ ID NO: 604073 - DNA, 421 bp, Homo sapiens
gtgaagttaaagttagtacaagtaaagtccttctttggctactccatcttttttattcaatgaatggtacttggtgtgtatactcttcactggtccctaaatatcacaatcttttagtttcaacctatgtgggaatttacctaaacatttcattttaaagcaacatatttggtataaaatgagccatttgaagttgaaaagattatacagaataaaagccacagaaaatgcaaaaagtaaatgaaaaattttaagagaagtgagtcttatatttcatacctgggaatatccttaagaaacttaacgtcaaaaaaaatgtaaacgacatcaaccagcagaataatcacagtaacrgcagtatctaaaatgttaagtaaatcagaaaaataatgctgtctcctgtaatataaaacagaaaaat

SEQ ID NO: 604074 - DNA, 444 bp, Homo sapiens
gaataacactggtgaaagtgggcatcctacttgtgttctagatctcagaggaaagcttttccattkttccccactcagtatgatactgactggggatctgtcatatatggtttttattatattgaggtgtgttacttctttacccagtttttttagagtgtttatcatgaagaaacgttgaattttatccagcactttttcagcattaactgaaatgatcttacagcttttatcctttattgtgttgatatgatgtatcactttggttgatttgcatattttgaaccatccttgcatcccagggataaatcccatttgtcatgatgaatgatccttccaatgtattgttacattcagttttctagtatcttgttgaggatttttgcatcaatattcatcagatatattggcctgttgtctttttttttttttttttttgagaca

SEQ ID NO: 604075 - DNA, 444 bp, Homo sapiens
gaataacactggtgaaagtgggcatcctacttgtgttctagatctcagaggaaagcttttccatttttccccactcagtatgatactgactggggatctgtcatatatggtttttattatattgaggtgtgttayttctttacccagtttttttagagtgtttatcatgaagaaacgttgaattttatccagcactttttcagcattaactgaaatgatcttacagcttttatcctttattgtgttgatatgatgtatcactttggttgatttgcatattttgaaccatccttgcatcccagggataaatcccatttgtcatgatgaatgatccttccaatgtattgttacattcagttttctagtatcttgttgaggatttttgcatcaatattcatcagatatattggcctgttgtctttttttttttttttttttgagaca

SEQ ID NO: 604076 - DNA, 554 bp, Homo sapiens
ctgctcccagcctgtttctttttttgacgcatctttgtctgcttttgatatcagggtaatactggccttgtggaatgagtttggaagtattccttcatcttctgctttttggaacagttaaagcaggagtggtattcgttcttctttaaatgtttggtaraattcagcagggaagccattgggtctcagtatatatattggctatatatgttggatgaatatatacttaaaattgttatagcctcttgctgaactgatccctttatcatgatatagtgacattctttgtctcttcttatcgtttttgtcttgcaatctattttatctgatacaaggatagcgactcctgctcttttttggtttctactggaatggaatatatttttccattcctttattttcagactaatgggagaagagtgtttcttgtaggcaacagatcaatgggtcttttgttttttgttttgttttgtttttatttttatttttttgaggtggagtctcactctgttaccaggctggagtgcagtggcatgatctcggctcactgcaac

SEQ ID NO: 604077 - DNA, 554 bp, Homo sapiens
ctgctcccagcctgtttctttttttgacgcatctttgtctgcttttgatatcagggtaatactggccttgtggaatgagtttggaagtattccttcatcttctgctttttggaacagttaaagcaggagtggtattcgttcttctttaaatgtttggtaaaattcagcagggaagccatygggtctcagtatatatattggctatatatgttggatgaatatatacttaaaattgttatagcctcttgctgaactgatccctttatcatgatatagtgacattctttgtctcttcttatcgtttttgtcttgcaatctattttatctgatacaaggatagcgactcctgctcttttttggtttctactggaatggaatatatttttccattcctttattttcagactaatgggagaagagtgtttcttgtaggcaacagatcaatgggtcttttgttttttgttttgttttgtttttatttttatttttttgaggtggagtctcactctgttaccaggctggagtgcagtggcatgatctcggctcactgcaac

SEQ ID NO: 604078 - DNA, 554 bp, Homo sapiens
ctgctcccagcctgtttctttttttgacgcatctttgtctgcttttgatatcagggtaatactggccttgtggaatgagtttggaagtattccttcatcttctgctttttggaacagttaaagcaggagtggtattcgttcttctttaaatgtttggtaaaattcagcagggaagccattgggtctcagtatatatattggctatatatgttggatgaatatatacttaaaattgttatagcctcttgctgaactgatccctttatcatgatatagtgacattctttgtctcttcttatcgtttttgtcttgcaatctattttatctgatacaaggatagcgactcctgctcttttttggtttctactggaatggaatatatttttccattcctttattttcagactaatgggagaagagtgtttcttgtaggcaacagatcratgggtcttttgttttttgttttgttttgtttttatttttatttttttgaggtggagtctcactctgttaccaggctggagtgcagtggcatgatctcggctcactgcaac

SEQ ID NO: 604079 - DNA, 277 bp, Homo sapiens
gtgaaccgagactgtgccactgcactccagcctgggcagcagagagagactccgtctcaaaaaaagaaaaaaagaatgagatcctgtcttttgtgggaacgtggatggagctggaggctatyatccttagcaaactagtgcagaaagcaaaaatcaaatactgaatgttctcatctgtaagtggtatagctaagtgataaggatgtaaaaacacaaagagggaagcaaacactggggtctaccaaagcggggagagtaggaggagagagacaagcaa

SEQ ID NO: 604080 - DNA, 553 bp, Homo sapiens
ccagcttttactataaatccaagatcatccccctggtatgaaacaccagtgtttctcacagggacyactaccaattcctcctatatttatgcaatgagactctgtaacttaaaaataaaacaaaacagaaacctgctttcttttgtttggagaggggaaagaaaaaggaaatgcttgccttgctcaatctgtctaattttgcctcaaccctgggcagctccattacagaaaatgtatagctagtatgcagacacacagtttaattaagtggtgccgtgaattcttcactgatggcccatgataaaaatttctagaaaatgaaaactcagggtaatttgaagaactatttgtatttgccctctgcttcccatgtaatctttgtttagacaccaacagcttataaccatgatgagttaacttcctctatggcagcacttcctctccaacattgacataagctggcgaatggttatacaactgggcaagatagaagcagaagaaaaatctcctgaatatgtctgcagttcagacacaagccagtttaagaatgtgt

SEQ ID NO: 604081 - DNA, 513 bp, Homo sapiens
ttctgcactagttagtaactctggtattatttaaaagcttaaactgcctagtgttaaggccacaggcttcctatgaagaggtggtttctactcagagctgtgcacccactgcaagacgcagtgttcctgcacaaagttacacaacataaacatcacaacttctcacaaagtcactacacagatttttgttccatgaacagcatttaaaataagcaggcatagcatttttaacctgcycccaacccggcagcaggctttcacagcaaccccctcttaaagacgccctggctgttagcatggcttgtctgcatggatccccaccaccgcatgatttaacatgtaaaaaagcaagcctagggcagaggaacgagggaggcctgtctcatcccagacaagcccagggtctgtgctaggataatgccaagcacagctataggaaagtgtgtcacacctgaaaaagctcacaggtgccagggcgaagcaaagaaaacagctcaacaccctaaatgcaac

SEQ ID NO: 604082 - DNA, 533 bp, Homo sapiens
gagcagcagcaagatttattgtgaaaagccaaaaaacaaagcttccaaagcatcaaaagggaccsgagcaggttgccgcggctggcggggaggggagtggccagcttttatgctcttatttgtccctgcccacatcctgctgattggtccattttacagagtgttgattggtttattttacaaacctctagctagccaaagagcactgattggtgcgtttttacagagcactgattggtgcattttacaaacctctaggtagctacagagcagtgattagtgtgttttacaatcctgcctatgctgattggtgcattttacaatcctcttgtaagacggaaaagttctccaagtccccactcaacccaggaagtccagctatcttcacctctcaacacctgggtaagttttgtatttttagtagagtcggggtttcaccatattggccaggctggtcctgaactcctgacctcaggtgatccacccgcctcagcctcccaaaatgctgggattacaggcatgagccactgtgc

SEQ ID NO: 604083 - DNA, 513 bp, Homo sapiens
acgcctgtaatcccagcactttgggaggctgaggtggatggatcccttgaggtcaggagttcgagaccagcctggccaacatggggaaaccccgtttctactaaaaatacaaaaaactagccgagcgtggcggtgcatgyctgtagtcccagccactcaggaggctgaggtaggagaattgcttgaacctgggaggtggtggttgcagtgacccaaggtcgtgccactgcaccccagccagggcgacagggcaagactctgtctcaaaaacaaaacaaaacaggaaacaaaaagacaagttggtgcaaaagtaattgcggctttaatagcagaggtatgaccatatttttacactgtgtagagcaagtcttacaatctacatttaaattttgagcagccattcgatgacctgctataaacctaccaatataatgttttagaataatacttactaatatacaatatataacataatgttattttttaaagcagaatttaaaactatacatatgt

SEQ ID NO: 604084 - DNA, 513 bp, Homo sapiens
acgcctgtaatcccagcactttgggaggctgaggtggatggatcccttgaggtcaggagttcgagaccagcctggccaacatggggaaaccccgtttctactaaaaatacaaaaaactagccgagcgtggcggtgcatgcctgtagtcccagccactcrggaggctgaggtaggagaattgcttgaacctgggaggtggtggttgcagtgacccaaggtcgtgccactgcaccccagccagggcgacagggcaagactctgtctcaaaaacaaaacaaaacaggaaacaaaaagacaagttggtgcaaaagtaattgcggctttaatagcagaggtatgaccatatttttacactgtgtagagcaagtcttacaatctacatttaaattttgagcagccattcgatgacctgctataaacctaccaatataatgttttagaataatacttactaatatacaatatataacataatgttattttttaaagcagaatttaaaactatacatatgt

SEQ ID NO: 604085 - DNA, 513 bp, Homo sapiens
acgcctgtaatcccagcactttgggaggctgaggtggatggatcccttgaggtcaggagttcgagaccagcctggccaacatggggaaaccccgtttctactaaaaatacaaaaaactagccgagcgtggcggtgcatgcctgtagtcccagccactcaggaggctgaggtaggagaattgcttgaacctgggaggtggtggttgcagtgacccaaggtcgtgccactgcaccccagccagggcgacagggcaagactctgtctcaaaaacaaaacaaaacaggaaacaaaaagacaagttgrtgcaaaagtaattgcggctttaatagcagaggtatgaccatatttttacactgtgtagagcaagtcttacaatctacatttaaattttgagcagccattcgatgacctgctataaacctaccaatataatgttttagaataatacttactaatatacaatatataacataatgttattttttaaagcagaatttaaaactatacatatgt

SEQ ID NO: 604086 - DNA, 546 bp, Homo sapiens
aatgattcctagcatgccctagatgagatgaatgggtcctctcagcactctttcagcctgtacttctaagatttaccaaatacatgaatggaaggacagaaaagcaattaaaaaatcaatgtgccatttgtaagtgcttcaaattcagtctcataaccatgaagtaaaaccactgtcaccatacatgcctctgttaacatttggtagtaattaacacctgccttaccttgagaatgatctttatagtttatgaggttagcactttgatttatgtcacagtgttttctgacaggctcagttattcttgcagtgggctggcttccttcctggagaggtccctttcccatagtgtgttcctatctgctatataccatcagatgtattgaaaaattgttaacagttaattatattagaagtttatcaattggtgtttatgaatcaccaagcattttatgtactgcatcctcataaataaasccctaagatgacactcgcttttggagttggcactacaagatgcatgagaaatacagttgatcctagaac

SEQ ID NO: 604087 - DNA, 535 bp, Homo sapiens
tgcagctgtataataaatggtctctggtttgttgtaaatcatggcattagtgcacattagtttgaagttatcctttagttctatcgactggtagtcattgttcttgaccttttctttcatagtgctaaaatcccttgggtgtttaatgatcatggagtagccaggagcaataaaatcagtcacaggaaatgaaaagaaagcacttgggtcttttctctgcaattgtctcatcagttgattcaaagcttcttgaaggggtgtctgttctacttcttcttgtttggctaaagagcttgtgagaggatctcacacgggcatgacactggaggtctttttctgcctcattctccacaaggtctcgatctcgcttctttttatcctccctaactctcctccgttttctctctttttcttcccctggawcctgcttctctcctttctttctctttttctgctttctgtccttgtatttgtcatgatcttattcgccttcgaagaggctggagtcgtgccctgagctgcccgtggagaattc

SEQ ID NO: 604088 - DNA, 535 bp, Homo sapiens
tgcagctgtataataaatggtctctggtttgttgtaaatcatggcattagtgcacattagtttgaagttatcctttagttctatcgactggtagtcattgttcttgaccttttctttcatagtgctaaaatcccttgggtgtttaatgatcatggagtagccaggagcaataaaatcagtcacaggaaatgaaaagaaagcacttgggtcttttctctgcaattgtctcatcagttgattcaaagcttcttgaaggggtgtctgttctacttcttcttgtttggctaaagagcttgtgagaggatctcacacgggcatgacactggaggtctttttctgcctcattctccacaaggtctcgatctcgcttctttttatcctccctaactctcctccgttttctctctttttcttcccctggatcctgcttctctcctttctttctctttttcygctttctgtccttgtatttgtcatgatcttattcgccttcgaagaggctggagtcgtgccctgagctgcccgtggagaattc

SEQ ID NO: 604089 - DNA, 565 bp, Homo sapiens
cttaggtgaatgaggagtaaatacaaaaacactttattgaatagcatgctagaagcagtgaaaagaagtgggtgtggaaggttttcaaaaggagtttagtgtgaaggatgctgtatatgctgttgccaatgcatggaacacagtggctaatgacacagctgtgcatgtctggcgcaacctctggcttgtgactatgttcagtgctgatgataaagacattggatattcttrtacacttatgaaagcaattctctaagacatacactgacgggtggggccactgggtcacagacgacacatatattcaaccttacgaggtaatccccaactattttctacagtggttctaccaaattataccccaaccatcaatttatagaaatttttgtttctttttaagtattcgtcatttttttctgtaaagaaatggaagtggcctagaatgacaaagatactttatataggtgctttttagaattcgtttttaaggacttcttcaggatgatctcattcctactcacacatgtgagtgcaccatttgtttgctgtgcaatactacttacat

SEQ ID NO: 604090 - DNA, 565 bp, Homo sapiens
cttaggtgaatgaggagtaaatacaaaaacactttattgaatagcatgctagaagcagtgaaaagaagtgggtgtggaaggttttcaaaaggagtttagtgtgaaggatgctgtatatgctgttgccaatgcatggaacacagtggctaatgacacagctgtgcatgtctggcgcaacctctggcttgtgactatgttcagtgctgatgataaagacattggatattcttgtacacttatgaaagcaattctctaagacatacactgaygggtggggccactgggtcacagacgacacatatattcaaccttacgaggtaatccccaactattttctacagtggttctaccaaattataccccaaccatcaatttatagaaatttttgtttctttttaagtattcgtcatttttttctgtaaagaaatggaagtggcctagaatgacaaagatactttatataggtgctttttagaattcgtttttaaggacttcttcaggatgatctcattcctactcacacatgtgagtgcaccatttgtttgctgtgcaatactacttacat

SEQ ID NO: 604091 - DNA, 571 bp, Homo sapiens
tctttctctgttttcccttatctttacatttttttctactttttcccttttagctctctcttttctttccttcctccctcccttttttttctttgcttcctctcttctttaacattcactaattttgaaaaatgggatggaaagtattcattttgtcacctggcagtttaattgtccaaaattcataataatttttaaatttctaagctgatttaaatctcatttgaaataattttatgcaaatacttctcatgtggtaaaagcaaagacaaaattcacctataaataaaagctggaatgtgtagaaaggtctggagttgaaatcagaaaacatgaatttaaaaactttgcccttcagaaattcaactaaacttgttgatatccatttctttttcttttcttctctttctttttctttstttctttctctttctcttttttctttctctttctctcttcttctttctctttctctctttttctttttctttcttttctttctctctctctctctctctctctctccctcccttccttctttgtttctttctttctttctttcttttttttt

SEQ ID NO: 604092 - DNA, 572 bp, Homo sapiens
gggggtagtacccagagttgctataatatagttcctaaaatgttcatttttcaataaaaattatgagctatgcaaagaaacaagaaagtatgaccaatacaccagaaaaatagaaggcagaaaaaattgcttgagagaacaaatttaacagaaaaatatttaaagtagccactatacatatgtttaaatatattcaatgttttagtcaggattctccagagaaacagagacaaaaagatatgtatggtgattgactcgctcaattatggacgccacgaagtgccacaatatgccatctgcaagtaggagacccaggaaagcaggtggtgtaattcagtgagagtcagaagggttgaggatcaagggagccaatggtacaactcccagtctgaggccaaaggcctgaaaaccagkacatgggctggagtcatggcaggaggaggggaagaaggagctctggtgtccaggggtagaagtagatgtatgtcccagctcaaagagaaagagaattcacccctcctccacctctttgttctatttgggtcctcaatggactgaatgatgcccaccca

SEQ ID NO: 604093 - DNA, 436 bp, Homo sapiens
ctgtcttccacaatgagatcatgtcctttgcagggacatggatgaagctggaaaccatcattctcagcaaactaacacaggaacagaaaaccaaacaccgcatgttctcattcataagtgggagttgaacaatgagaacacatggacacagggaggggaacaacacacaccgggcctgtcacgaggttggggttcaaggggaaggagagcattaggaaaaatagctaatgcatgcagggcttaaaacctagatgactggttgataggtgctgcaaaccaccatggcacatgtaaacatatgtaamaaacctgcacgttctgcatatgtatcatggaacttaaagtaaaataaaaaaaagaaagatgaaaaaaggcatttatactagcagttgactctgcctgtgtgacactttcaccctgggtatcagcagaaatg

SEQ ID NO: 604094 - DNA, 537 bp, Homo sapiens
ttctggagcactggtagacaacatggcaggcttggtctgggcatatctgtaagtgcctaaactggagaaggaggtaatggcctggggaaagaaggtgtacaccactaacaagtgtcacctacttgccagttttatttatagttgatccagtttctcttactctcctgtgtctttcttgcttttctaactctaraaaaccttccctgaatgagttggaggtgcagtaacatgttccattccctagtgggaatgtctcatgctccacctcaccaaaccactccttaatccccattagaatgagctgggggtatgcccccttttccaaaagaaacagatattaataattgcattagtccattcttgcattgccataaagaaatacctgagactggataatttataaagaaaagagattttatgaaccatgaacctagaccagactcatggttctgcacactgtataggaagcatgatgctagcatctgcctggcttctggggaggcctcaggaaacttacaatcatggtggaaggcaaag

SEQ ID NO: 604095 - DNA, 627 bp, Homo sapiens
cattcctgaattcctgcccataggaactgggcagataattaaggtgtgttgttatcttacgtcattaagtttgggggaatttattacatagcaatagtaattttacactagattagctgtttttctaaaaatataactttcatcaaagctccttacattcactaccaccacccaaataggtccttgctcctcggtcatcaatgcttataattwgcaagtgtactttaagttcctgaagagcagcagcttcaggagcctactttgaaagcgccacctgctggtattaacttaatagcttcccaaagaaagctggaataattcgtgctgattaagtcaatgcttaggtgcgacagcttttcatggtaaactctggcttctcatcttacattaataactcttctgagaaccagcttctttgcttccttgagataacagctgctttgccttcttcttaagaatgctgaaatgcgatctttcttagcactgaaaatcacataaacatttatggagttcttatgattactctttctaggattactgtttcttgcttttccaactcttttctttctgcttcaattatttttaaaagaagacatgctaaagtctctgttttttacaagaaaaaaa

SEQ ID NO: 604096 - DNA, 463 bp, Homo sapiens
gaattaaaggaaaactactcaaacttactaatttcagtaaacaaaggcagaaaacatttaacactgtagccaccaacactcacaacaggtcttccctttcttattctaagaagatactgtctagatttaaatatattcccatagttgactgatattaatacatttcagtcaaaagtatttgcagtagaattatattcaatactaaataggcttaatgttgctttaacaaaagatttctcagtctcatttcttgaacatgaaacatactattgttaaggtgaggaatatatttttacctaactttggaagggaaaaaattcttcccctattatttaacagtacttttgctttacttagagaactcttgagtytaaaaaaaaggacaggaaatgctggtctggttcaaactctgaaaacatgagcccacttaacattacaatccccataaatgaaaaaaaaaatc

SEQ ID NO: 604097 - DNA, 568 bp, Homo sapiens
ggatggaagaagaataggaatgagaatggtcaaaacattcaatcgagtataagaatctgcccaattgaagtgatgtactaatattgagtcaagtacttctagcgatgaaacaaggacccagatcagcaggagtgtttgtataattaaaataatccattgatattaaaacaggataaagtaattttatgtattttgattttagtacagtgatttcttaaaaatccagtgaagaaaactcaatttagtttcaaaaatgaggtgaaaatgaactgcctgccaaaggttaatgagataaatatgatttgctttagaactacaagcagagtccagagattggtgaataagaagccactttattcagttctctttccaccacttgtggttctcaaaatgaagcttaatgaaataggatttacctatcaatgcctccacagttaattggcatacatagctaatactgactcaaaactcggtctgtttttagggcacattttcctaaggaggtttgctaacacatctatgcccatctccatttgtsacccatcccctttcactatcaaagtaccat

SEQ ID NO: 604098 - DNA, 544 bp, Homo sapiens
tgttttttagttttgtttggtttttagcttagcagaagtgaatatatttatataaaaaagaaaatatatatctaccttacaattaatcagtggatcaaaatctcggtttggacaaacatatctttttagatacttgctcagatatatttctcaatgtgaaaacaaaatgatctgaaagcagtttctgtttgttacataaaaaaattattacagtggggtgtaaattttgtattcacttttgtcagttaaactaatgaaaaattatccttattcttttacaaaattgttactatacatctgtactctatccaaaatcaatttttaacccaggcaaaattcttcctttagtcattattttgaaaaatcaggcatcaattaactaattattgaatatgatatgtrtcttacaggttaaacaaatttaatcagcctgcagtttggttgttttgaaaggtgtagctattgtttggtatgttcaaacaattaaacatttttaatgcctcatgacttctcttttatttccttataataaagcttttaaagt

SEQ ID NO: 604099 - DNA, 631 bp, Homo sapiens
aattctgttaggaggatacaaacagaagtagtatgtccatcttgtgacacaaagcatgaggattttaaaaactacattacatagctattgttacactgagttagctaaaaacttttgttttcaaaaagaagcacagtgtattgttaaataaatatttgtagctccaaaaatgctctattatctcaataaagtacatcaagatataagcaaggccattgtgttttaacctttatggtatgctactacctgataaccatagtctacactgtgacatttaatactgattatacaaacttgactacacaccagaaatcagaagtatttttctgacagcttagtgcaccattcccttcttagtggttctttgaataaagaagtcattctctatttctatcaatttctgtactgtggattgcatatgtccttggagaaattctgatatacacttaggaatcaccctaagatatttttaacaaaataaatgcatttctactgcctcagaatttttggcttggacttcagtcaggttaaacattagttggtacttgactacttttttctttctttaaatttttatctaactctaawataccatatctaatgtagttggccactgaaaaagaccctattt

SEQ ID NO: 604100 - DNA, 666 bp, Homo sapiens
ttattcctaaatgaaggtaataaaactcagccccatattattgataaggaactgatgcctggaaaagctaactaacatggagggtaattcatgtggtaagtttagctgtgatttaaacgtaggcagactgattccaaacacactagtcttaaccactcattcatattatcagtaaaacagtgtgtgaaatttagttggttttgrcatttccaatgagcaaactcttacacttctttacttttatatctattgatcacacttgttaagattgggaaaaatggttttatttaaagataaatctttgtctgaatcaatgttattatttagattaacaatgactgttcctttttatgtcacttggtacaagtactttttttcagttatttaaatagatttgatgtaagaagctatgaatacataagaaatggtcttataatttttattatgtgtgtatcaatgtccctaaattttggagacattcactacatcaacagtttgtgtctataaaccatcttgataagtgtaattaaagtataattatcaaaggcaaactatcagcagatgtcctagcttactgctgagagtcatattatgaaacctctgccctttgaggattgtttgggttgaagacttaagatagagatgcagagagaggaatatgtaaaa

SEQ ID NO: 604101 - DNA, 623 bp, Homo sapiens
aatgacataatcatatagaacaatattttttattttaattttataatcatagattaaaccttcagactctttccaataattaagtttccacttatctrcatgtctgcccggtatcagagatattttggcattttttaaatttgttggtgagaagacgttgggcattataatatttatttgatgggtttgtaagtaaacattaagaaaatactataggaaattgtgtctatggtctgatgacattaatacaaaaataattgaacattgcccatttattgtaactactgagaccactgaagatgaccatatatttttctagtaaatcagtaaataggtgattgctcctgtctgttgccatttccactcaccacagggatcctgtgagatcgtgagattgaaatggactctatgaacatctttagtctaacaattttcaaaatctttttacatctatttttcttgctcacccatgctgacatgtgaaatctggctctcatttttgattttgtgctgattaaattgaaaccacctttagagaaaattgatatacacatgctaaaagtgaaaattcttctgtcatagatatttacagctaaagttacagtatatgggcagacctctac

SEQ ID NO: 604102 - DNA, 585 bp, Homo sapiens
gctatttttatgaaggttattaatcacatgacattcagtgactattaggatgtgcgagttactcacttaaagagtgtttggatagactacgtggttttggaaatttatttgcatcctaaggtttcatggtgtgcattctcttctatacattccaacttagtttatgtagcaattattattattgatgaaaaaggttgatagaaaattttgctaagatcatactgctactaagtgatagtgtttgtcctttgtatgttcctaactaagaagaaggcattattcatttattgccaaattattcaagataagggcttgatccagttgttgaaaccttaaattatatctaagttactaaactagatttcaagttttcaaaagaagtatrttgaggcaaatgagaattttacttatataagacaaatggttatattttctatatattatatataatagaaatagaaatatatattatatattatctttatatatatctttatatatagatatatatgtatatatatctatatatatagatatctttatataaagatatatatgtatatatatctccatatatagagagag

SEQ ID NO: 604103 - DNA, 585 bp, Homo sapiens
gctatttttatgaaggttattaatcacatgacattcagtgactattaggatgtgcgagttactcacttaaagagtgtttggatagactacgtggttttggaaatttatttgcatcctaaggtttcatggtgtgcattctcttctatacattccaacttagtttatgtagcaattattattattgatgaaaaaggttgatagaaaattttgctaagatcatactgctactaagtgatagtgtttgtcctttgtatgttcctaactaagaagaaggcattattcatttattgccaaattattcaagataagggcttgatccagttgttgaaaccttaaattatatctaagttactaaactagatttcaagttttcaaaagaagtatgttgaggcaartgagaattttacttatataagacaaatggttatattttctatatattatatataatagaaatagaaatatatattatatattatctttatatatatctttatatatagatatatatgtatatatatctatatatatagatatctttatataaagatatatatgtatatatatctccatatatagagagag

SEQ ID NO: 604104 - DNA, 283 bp, Homo sapiens
tggggcagtcacaaaactgattagcgatctggcaagcagggtctgctctgctaatgatctgtgtaaatattgtgctgcagagcctttctgtgacaggtcattgmtgctaacaaaccgcagaatgcaaacagagacctgtgctgccttcactgcagatgcacagcagccagcttacactgacaaagcaaatgaaaatcctcttgttgtcgatcatctcaagtaaaatggcctaaaaatcaattctaggataggctttctttctcgaagctttaatctggcgatg

SEQ ID NO: 604105 - DNA, 604 bp, Homo sapiens
gcaacctaattagtcgagtcaatacaggaagtaaattgttaagacagtgggcataccatcttagttagtaagatatggacattcaaccactctctttccctaccctaagacacacacactgtcagagaaaatgttatgatgtgactgagaactttatgctcaaagcttttcaaaatttcatatataaatattgtacttttatcaatataagatttcacactgtaagaaaacattggcataggaatcattctcttttacacagtttgaaaatgaattttaatgacaytcatatctgataaataatataatgtcatggagtaaaagttattttcttgatataaatattttatcatttgagtatattctccctgaaatctaggtgtcagtttaacaaaatgcatttctcagttcactgaatatgactccaggataaataaaaaagaacattcatattcaaaaaaagtaatttatttacctagtttatcccaagatttatactgtcaatgccttcattacaaattaagggctaaaatatatagtaagttcctgaagctctaccaaatgttatctatactaagtagaattaaattaaatcattgtgtta

SEQ ID NO: 604106 - DNA, 604 bp, Homo sapiens
gcaacctaattagtcgagtcaatacaggaagtaaattgttaagacagtgggcataccatcttagttagtaagatatggacattcaaccactctctttccctaccctaagacacacacactgtcagagaaaatgttatgatgtgactgagaactttatgctcaaagcttttcaaaatttcatatataaatattgtacttttatcaatataagatttcacactgtaagaaaacattggcataggaatcattctcttttacacagtttgaaaatgaattttaatgacattcatatctgataaataatataatgtcatggagtaaaagttattttcttgatataaatattttatcatttgagtatattctccctgaaatctaggtgtcagtttaacaaaatgcatttctcasttcactgaatatgactccaggataaataaaaaagaacattcatattcaaaaaaagtaatttatttacctagtttatcccaagatttatactgtcaatgccttcattacaaattaagggctaaaatatatagtaagttcctgaagctctaccaaatgttatctatactaagtagaattaaattaaatcattgtgtta

SEQ ID NO: 604107 - DNA, 616 bp, Homo sapiens
cgggaggctgaagcagagaattccttaaacccgggaggcagaggttgcagtgagccaagatcgggccactgcactctagcctgggcgacagagcaagactccgtctcaaacacacaaaaaaaaaaaaaaaaaaaagaaaaagaaagaacttccttaattttttgaagagactattctgtatccattttataattttgtggccactgaaaaatatatgttaaatcacagacacagtgaatrtagtaagtggtagtttaaaatgttaaaatgttaaatcacgcctgtactcccagcactttgggaggctgaggggggaggatcgcctgaagttgagttcgagaccagcctggccaacatggtgaaaccccttctctactaaaaatacaaaaattagccaggtatggtggcacaaatctgtaatcccagctactcaggaggctgaggcaggagaatggcttgaaccctggaggcagatgttgcagtgagctgagatcaagccactgcactccagcctggacaacacagtgagactctgtctcaaaaataaaattaagtgttgaatttttacaagtcgttgttcctattctaatttttgaatgcaaccacagcctctaac

SEQ ID NO: 604108 - DNA, 348 bp, Homo sapiens
ataaaagtattatcaaatctattaaaaatagatgactttttcctatcttaaaatagaactaaggtgacattttttttccacagccatattaatggatagcagccttttcaatactgtttcctcataagtgtatggataaacggattccaaatatatttggttaaaagcaagrcaaacaaatatattgaattcagataacgactctaggtcagagatcaatcgaaggtgggtcctgatttcaagactacattattttgtgctgagtgaaacaaatgaaagctaactaaagtaaatagaaatgaaataagatttgtaatataggtaaagcaaagtgccctaggagagcag

SEQ ID NO: 604109 - DNA, 675 bp, Homo sapiens
aaactgtatttttaaaatggaaattttagaactgcaaattagaatatattaaatataaagttaactgaatgagtctaacagaagagtggagattaactcagttaacttgaagataaatcaatagaatgtatccaatctaaaaaagaaaggatggggggaaaacaagaagaacctcaggacctgtgaaacaatatcaaaaagcctataacatgtgtagtcaaaattacaaaaagagaggagagaagaaatgaggcaggaaaaagtatttgaagaaacactgcctagaatttctataataagagacaaatttacatatttaagaagtttcattatccccaactgggataaactcaaacaaaaccatgtgtaggtacatcatagtcaagttgctggaaagcaaatctaaaaacaaaattcctaaaagtaactgtacaaaaayacatttcaagtccaggcgcagggactcgtgcctgtaatcctagcattttgggaggccaaggtgggccgatcacttgagaccaggagttcaagaccagcctggccaacatgacaaaaccccatctctacaaaaatacaaaaattagccgagtgtggtggtgcacgcctgtagtcccagctgcttgggagactgagaggcaggagaatcacttgaacccaaggcagaggttgcagtga

SEQ ID NO: 604110 - DNA, 469 bp, Homo sapiens
atggaaccaacccaaatgcccatcaatcaacaagtggataaagaaactgtggtatatatatacatggaatacactcagccataaaaaggaatgaattaatagcatttgcagtgacctggatgagattggagactattattcaaagtgaagtaacacaggaatggaaaatcaaacaccatatgttctcactgatatgtgggagctaagctatgaggatgcaaaggcataagaatgatacaatgaactttgaggacttgagggtaagggtggggagcaagggataaaaggctacaaatagggtgcaatgtctactgcccgggtgatgggtgcaccaaaatctcacaaatcaccactaaagaactcactcatgtaactaaataccacctgtaccccaatamcctatggaaaaataaaaaattaaaacaaatttttttaaagcaaacaacaaaagctacacctggaaattctt

SEQ ID NO: 604111 - DNA, 668 bp, Homo sapiens
caaaactgggcaaaggacttgaatagacatttcaccaaagtacatgtaaaaatggtcaatrtgagatgcaaatcaaactacaataagataccacctcacacacattaggatgactcctatcaaaaatatcaaaaatagcaaggattggtgaagacgtggaaaaataggaacacttgtgcactgtttgtgggaatataaaatggcacagccgctgtgaaaaacagtatagtatttcctcaaaaagtgaaaaataggattgccgtatgatctagcaattccacttcttggtatataccaaaaagaactgaaagcagggtctcaaagaggtatttgtacacccattctcatagcagcattatttacagtagctaaaatgttgaagtaacccaaatgtacatcaatgaatgaatggaaaagcaaaatgtggtatacccacatgctatggtttgactgtgccccccaaagttcatgtgttgggaatttaatccccaatgcaacggtgttgaaaggtgggacttttaaagagatgattaggtcatgaagactctgccagccatcataaatagatttatgctgttataataaggattggcgtattgcaggattatccaataaccaattgagtaatcgcatgatcatccaattagggttcccaggtaaagtatgag

SEQ ID NO: 604112 - DNA, 668 bp, Homo sapiens
caaaactgggcaaaggacttgaatagacatttcaccaaagtacatgtaaaaatggtcaatatgagatgcaaatcaaactacaataagataycacctcacacacattaggatgactcctatcaaaaatatcaaaaatagcaaggattggtgaagacgtggaaaaataggaacacttgtgcactgtttgtgggaatataaaatggcacagccgctgtgaaaaacagtatagtatttcctcaaaaagtgaaaaataggattgccgtatgatctagcaattccacttcttggtatataccaaaaagaactgaaagcagggtctcaaagaggtatttgtacacccattctcatagcagcattatttacagtagctaaaatgttgaagtaacccaaatgtacatcaatgaatgaatggaaaagcaaaatgtggtatacccacatgctatggtttgactgtgccccccaaagttcatgtgttgggaatttaatccccaatgcaacggtgttgaaaggtgggacttttaaagagatgattaggtcatgaagactctgccagccatcataaatagatttatgctgttataataaggattggcgtattgcaggattatccaataaccaattgagtaatcgcatgatcatccaattagggttcccaggtaaagtatgag

SEQ ID NO: 604113 - DNA, 668 bp, Homo sapiens
caaaactgggcaaaggacttgaatagacatttcaccaaagtacatgtaaaaatggtcaatatgagatgcaaatcaaactacaataagataccacctcacacacattaggatgactcctatcaaaaatatcaaaaatagcaaggattggtgaagaygtggaaaaataggaacacttgtgcactgtttgtgggaatataaaatggcacagccgctgtgaaaaacagtatagtatttcctcaaaaagtgaaaaataggattgccgtatgatctagcaattccacttcttggtatataccaaaaagaactgaaagcagggtctcaaagaggtatttgtacacccattctcatagcagcattatttacagtagctaaaatgttgaagtaacccaaatgtacatcaatgaatgaatggaaaagcaaaatgtggtatacccacatgctatggtttgactgtgccccccaaagttcatgtgttgggaatttaatccccaatgcaacggtgttgaaaggtgggacttttaaagagatgattaggtcatgaagactctgccagccatcataaatagatttatgctgttataataaggattggcgtattgcaggattatccaataaccaattgagtaatcgcatgatcatccaattagggttcccaggtaaagtatgag

SEQ ID NO: 604114 - DNA, 668 bp, Homo sapiens
caaaactgggcaaaggacttgaatagacatttcaccaaagtacatgtaaaaatggtcaatatgagatgcaaatcaaactacaataagataccacctcacacacattaggatgactcctatcaaaaatatcaaaaatagcaaggattggtgaagacgtggaaaaataggaacacttgtgcactgtttgtgggaatataaaatggcacagccgctgtgaaaaacagtatagtatttcctcaaaaagtgaaaaataggattgccgtatgatctagcaattccacttcttggtatataccaaaaagaactgaaagcagggtctcaaagaggtatttgtacacccattctcatagcagcattatttacagtagctaaaatgttgaagtaacccaaatgtacatcaatgaatgaatggaaaagcaaaatgtggtatacccayatgctatggtttgactgtgccccccaaagttcatgtgttgggaatttaatccccaatgcaacggtgttgaaaggtgggacttttaaagagatgattaggtcatgaagactctgccagccatcataaatagatttatgctgttataataaggattggcgtattgcaggattatccaataaccaattgagtaatcgcatgatcatccaattagggttcccaggtaaagtatgag

SEQ ID NO: 604115 - DNA, 444 bp, Homo sapiens
gggactggccatttgcacttttggatatcagaaatggattggaatgggtgataatgtataaagattggtcatgggggtgagtgctgaaccagaagtaagatgccattttatttcagaaagatgtgaaaccatcacatactactcatcagatttcctaaaagaatttggcttgttacccaaaatgataactatgtgaggcaatatatatgttaattagctagctttagtcattccataatgtatatatatatacttcaaagcatcatgttrtacataataaatacatgcaattttatgtcaatttaaataataaaagtgcctagtttctttattctaagtaattccttagccatccatcccacctttctgttgttctcatttagtaagatggttttatatcagctgttgctgttactcttatgctaatgcattgaacatgagttt

SEQ ID NO: 604116 - DNA, 611 bp, Homo sapiens
gtgttttttggctgcataaatatcttcttttgagaagtgtctgttcatatcctttgcccactttttgatggggttgtttgtttttttcttgtaaatttgtttgagttcattgtagattctggatattagccctttgtcagatgagtaggttgcaaaaattttctcccattttgcaagttgcctgtttactctgatggtagtttcttttgctgtacagaagctctttagtttaattagatcccatttgtcaactttgtcttaaactaattagaattaaaaagtttcatgtgaaaatttggtaacaaaattcagctgtgaactatgagcttcactgtcataaactgttggcattgattagctgtagatgaggattaaaagggagaattaggagtaggtgtttcattttcttcagccaaatgatcctcatatgctgtgaatagacttttaggtcagatcaactggggcttgaattataacaatataataaaggtgacttctggaaaattgcttaatctcattaagyttcagtctcacctctgtaaaatgtgaataacactgattatagaactgcattggagataaaattaagctgcatatgaaatgtgtagggc

SEQ ID NO: 604117 - DNA, 611 bp, Homo sapiens
gtgttttttggctgcataaatatcttcttttgagaagtgtctgttcatatcctttgcccactttttgatggggttgtttgtttttttcttgtaaatttgtttgagttcattgtagattctggatattagccctttgtcagatgagtaggttgcaaaaattttctcccattttgcaagttgcctgtttactctgatggtagtttcttttgctgtacagaagctctttagtttaattagatcccatttgtcaactttgtcttaaactaattagaattaaaaagtttcatgtgaaaatttggtaacaaaattcagctgtgaactatgagcttcactgtcataaactgttggcattgattagctgtagatgaggattaaaagggagaattaggagtaggtgtttcattttcttcagccaaatgatcctcatatgctgtgaatagacttttaggtcagatcaactggggcttgaattataacaatataataaaggtgacttctggaaaattgcttaatctcattaagcttcagtctcacctctgtaaaatgtgaataacactgawtatagaactgcattggagataaaattaagctgcatatgaaatgtgtagggc

SEQ ID NO: 604118 - DNA, 611 bp, Homo sapiens
gtgttttttggctgcataaatatcttcttttgagaagtgtctgttcatatcctttgcccactttttgatggggttgtttgtttttttcttgtaaatttgtttgagttcattgtagattctggatattagccctttgtcagatgagtaggttgcaaaaattttctcccattttgcaagttgcctgtttactctgatggtagtttcttttgctgtacagaagctctttagtttaattagatcccatttgtcaactttgtcttaaactaattagaattaaaaagtttcatgtgaaaatttggtaacaaaattcagctgtgaactatgagcttcactgtcataaactgttggcattgattagctgtagatgaggattaaaagggagaattaggagtaggtgtttcattttcttcagccaaatgatcctcatatgctgtgaatagacttttaggtcagatcaactggggcttgaattataacaatataataaaggtgacttctggaaaattgcttaatctcattaagcttcagtctcacctctgtaaaatgtgaataacactgattatagaactgcattggwgataaaattaagctgcatatgaaatgtgtagggc

SEQ ID NO: 604119 - DNA, 579 bp, Homo sapiens
ccaataaaaactccccctatgaggacttgtaacctgtactgagaaagagggtcacagaattctaatatgtgaactcagaaccatggatagatgggtagaattgtacctacctgtctccttgaatctgggcatagccacatgacttgcttagaccaatgaaatatggatggaagtgatccatgtgaaaattctggawggaagctttaaaagtcaatgtgattttcaataaatggtgatgggacaacaggatatccacatgcaaaagaatgaagttgaacctctacctcacatcatatactcaaattacttcaaactggatcaaagatccaaatttaagagttaaactatacaactcttagaagaaaacataggtataaatctgtatgaccttggattaggcaatggacttttagatatgatactaaaatcacaagcaaccaaaaaaacaaaaacaaaaacaaaaacaaaacagataaattggacctcacaaaaattaaaaacaattatgtcaaaggacactatcaaaaaaatgaaaagacaaatcacagaacaaaatatttgcaaatcacgtatctgata

SEQ ID NO: 604120 - DNA, 479 bp, Homo sapiens
gctaatttattttttatttttgtagatacgggggtccttctaggttgcccaggcctctatgttgctggtcttgaactcctggtcccaagcagtccccctgccttggcctcccaaagtgttaggattacaggcgtgaaccaatgtgcccagccctgctcttctacttctacatgcatgccttgaaaactccttcctcagttggaggcaggtcttctttcctagaaaagggagtctttatttcctgttagggctcacctgtacacctgcttccttcatgggttctcctgatgaagggctgcttgtctcctggtgtaaactcstaatgagaaacctgggaagaagcatgcttccttggagagtttttgtattctattcttaggcctctgaccacagtccattagactagaaaggaacatcaatgaagtttgttcatattgaagtagacagttaataaagagtcttgaaacgtcctgtggtgt

SEQ ID NO: 604121 - DNA, 479 bp, Homo sapiens
gctaatttattttttatttttgtagatacgggggtccttctaggttgcccaggcctctatgttgctggtcttgaactcctggtcccaagcagtccccctgccttggcctcccaaagtgttaggattacaggcgtgaaccaatgtgcccagccctgctcttctacttctacatgcatgccttgaaaactccttcctcagttggaggcaggtcttctttcctagaaaagggagtctttatttcctgttagggctcacctgtacacctgcttccttcatgggttctcctgatgaagggctgcttgtctcctggtgtaaactcgtaatgagaaacctgggaagaagcatgcttccttggagagttyttgtattctattcttaggcctctgaccacagtccattagactagaaaggaacatcaatgaagtttgttcatattgaagtagacagttaataaagagtcttgaaacgtcctgtggtgt

SEQ ID NO: 604122 - DNA, 469 bp, Homo sapiens
aaataaaactccctttctcatcttctcttcattttctagtctctattcttagaacgaaacacacacacacacacacacacacacacacacacacacacacacgcaaaacaaaaaaacaaaggataacaaaacttctcgtcagggatgtagacgatgttgttgatgctgtttgaattctggggatgtgctgatgggtggctgtcttagggggatagtgactgacagaaagttgccaacagacagaggcaaagaatacacattcctttcctttaaaggattcaagcaagaactttgccgcaataagagtggagcacagggcgggaggtccggcagcaagctgatgtttgaagacgtggtctccttagccccacatttcccataccagggaatgaacggcagaggataccaccacatgaggctgacmatttgctcagtgtccttccagactgtatctgggtcctcctgggtt

SEQ ID NO: 604123 - DNA, 606 bp, Homo sapiens
caccacatgaggctgaccatttgctcagtgtccttccagactgtatctgggtcctcctrggttcgggggggaagcaggctttggggaggtgtctttttacctgtgcggcacttctttacagtttcaagagagggaagtagaaatttttgctatgagtccactgcttctggtggacttaatagtttgctacacagagcaaactattattcgactgtatgagaataagaatgcattttgccctagggataattatatgcttctttcatctgcttaagagctagtatgagtcagtcctgctcattgctgggtagaggatacaaactgtattgaagtagtcaatccaggagtctctgaggtctggccaccccaaataggatcacacttccattctgcttgaagtccagttctcactgctaaacttagcaacattcaagactgaaagatacagttgaacaggttatgcactgcacaattctaggggacctgctgttttattatggccctggattcttctcagactcctattcttctgcctaccctgtgattgcttaattccatctcaacaggttaggatatgtgttagtccgttctcacgctgctggtaaa

SEQ ID NO: 604124 - DNA, 606 bp, Homo sapiens
caccacatgaggctgaccatttgctcagtgtccttccagactgtatctgggtcctcctgggttcgggggggaagcaggctttggggaggtgtctttttacctgtgcggcacttctttacagtttcaagagagggaagtagaaatttttgctatgagtccactgcttctggtggacttaatagtttgctacacagagcaaactattattcgactgtatgagaataagaatgcattttgccctagggataattatatgcttctttcatctgcttaagagctagtatgagtcagtcctgctcattgctgggtaraggatacaaactgtattgaagtagtcaatccaggagtctctgaggtctggccaccccaaataggatcacacttccattctgcttgaagtccagttctcactgctaaacttagcaacattcaagactgaaagatacagttgaacaggttatgcactgcacaattctaggggacctgctgttttattatggccctggattcttctcagactcctattcttctgcctaccctgtgattgcttaattccatctcaacaggttaggatatgtgttagtccgttctcacgctgctggtaaa

SEQ ID NO: 604125 - DNA, 545 bp, Homo sapiens
gcctccccctccacccacagcctctctctctgctccactccccactgtaccccacactttgtctagttacctcctctccatccttcagctcctagttcaaatggcatttccacagggattccctctctccaccctggagtcctgttttacactctcttgtattttctcttcccatcacataggacagttcacaaccaaacattgatgtgagtggccactggaatgatgtatgtctgtctcaccagccataagcccggagaggagaggagctacacttactttccccacctctrtcacctctagtgatagccttgtgttgccacaaagtggtttctcaatcattatttgatgagttaccgagttaatcatttatctagctagtatgacttcaccaacaatgtaactcccatgtgataataataaaaaaatcctcctatgctattctaatgtagaatggacatttccacttgccagcaaaacttgggcataggttattcttgagcgttttgagctagtcgggatggatgagctgatgtccccattcc

SEQ ID NO: 604126 - DNA, 569 bp, Homo sapiens
tttttcttttgtagaggtgggatctcactatgttgcccaggctgatcttgaactcctggcctcaagtgatcctccctcctcagcctcccaaagtgctaggattacaggtgtgagccactatccctggccctagaaaagtctttttggtttaattacctggagttaatcaataacttgcccaagaatatgctgcttcttagactagacttggctgagaattcagggcccaactgttaacttttggaggttaatttctgaccaataaatggctaacacaactgcattacatggaggaaattgcaaaaacatatttgaaatagcacatttttagtagaagggcaggctgtgtcttgagttaattcctgacttgacatttgctcctcacgagccacactttcctcctctgttatcagcaaaacaccatgcggcctgcatagccggtacagaataagatttaaaccaccactaccaccatcctgagaagctttgatatatttaaaaatacatrgcaaaagtatgatattattgctgaactctgtctctaaatcagaatactaaattatgactta

SEQ ID NO: 604127 - DNA, 521 bp, Homo sapiens
tgtctgggctttgccatgtttgccaggcacccgggggagcagggtgtggtgagcccagccagcctgttattacatcttgtatcatcttctgatgtgcctatcctgtcattgacttttgatgccctacacgagagcaggcattacattttcttgccacaaactatggcaagtctgtggaaattgttgataatttttcttacagaaagaccattggctgggcatggtggctcacacctgtaatcccagcactttgggacgccaaggcaggcagatcacctgaggtcaggagtttgagaccagcctggccaacatggtgaaaccccatctctactaaaaatacaaaaattagctgggcgtggtggtgcacgcctgtaatcccagctacttgggagsctgtggcgggagaatcgcttgaactcggaaggcagaggttgcagggagccaagattgcaccattgtactccagcctaggggtcaagagagaaactctgtctcaaaaaaaaaaaaaaaaaaaagggaaa

SEQ ID NO: 604128 - DNA, 637 bp, Homo sapiens
gcgctgggctgcagttgttgaatggcaggctgggccgaggaagagtggctgggtgtgatgtttgcctcagcgactcttgaccracagataagagtcaatcctacaccagctcacgtggggaggagaggaggctctcgcggctgtcctggggatgaccgtcccggggatgaccgtccccaggatgaccgagagatgcctgcgctgtgcttgagcattgcctgggtttgaagagtgcagggccaattcctctggaacagggagcaagaggatgtggtggtgggggagagtaggcatacacctggtgacagcaggccaagacagagtgagaggtcagagggaggcagagtcagagggaggaggcaagttctagggaagaggcagaatcagagggaggaggctgaatcagagggagaaacagggaggagaaagagtcagaggggagaaacaagttggaaggaggaggtggagtcagagagaggagacagagccagagggaggaggctgaattgaaggtcagagacagagtcagagggaggaggctgaattagaggtcagagacagagtcagaagtcacaggtagagtcagagggaggagactaaattagaggttggagagagagtcagaggtcaaaggcag

SEQ ID NO: 604129 - DNA, 637 bp, Homo sapiens
gcgctgggctgcagttgttgaatggcaggctgggccgaggaagagtggctgggtgtgatgtttgcctcagcgactcttgaccaacagataagagtcaatcctacaccagctcacgtggggaggagaggaggctctcgcggctgtcctggggatgaccgtcccggggatgaccgtccccaggatgaccgagagatgccwgcgctgtgcttgagcattgcctgggtttgaagagtgcagggccaattcctctggaacagggagcaagaggatgtggtggtgggggagagtaggcatacacctggtgacagcaggccaagacagagtgagaggtcagagggaggcagagtcagagggaggaggcaagttctagggaagaggcagaatcagagggaggaggctgaatcagagggagaaacagggaggagaaagagtcagaggggagaaacaagttggaaggaggaggtggagtcagagagaggagacagagccagagggaggaggctgaattgaaggtcagagacagagtcagagggaggaggctgaattagaggtcagagacagagtcagaagtcacaggtagagtcagagggaggagactaaattagaggttggagagagagtcagaggtcaaaggcag

SEQ ID NO: 604130 - DNA, 432 bp, Homo sapiens
cacacgggtcctattgagattaatgaaaaaattatgcaaaaaaaaaaaatctcaatttcattttcccgtgacggggctttgcatacatrcagtcagtcttgccttgcacctgatgatttattaaactaatctacagtgatcaccactgatgttcccaactcagtcttgtcccggctcattttctaagtaattgtttctcattagttctgataatgttttaatagtgttacccataatttagaccccaagaattaataacgggggtgatatggctaagcggcttgtgatgagctacacaaaacataaacaggtatggtttctaatgaatcagattagctgcaaggtcctcttcctgtcacccacgcctggctcaggagtcgggcagctctcacttccccgtgtcgggggtgcccagtgagcccagtggagatc

SEQ ID NO: 604131 - DNA, 432 bp, Homo sapiens
cacacgggtcctattgagattaatgaaaaaattatgcaaaaaaaaaaaatctcaatttcattttcccgtgacggggctttgcatacatacagtcagtcttgccttgcacctgatgatttattaaactaatctacagtgatcaccactgatgttcccaactcartcttgtcccggctcattttctaagtaattgtttctcattagttctgataatgttttaatagtgttacccataatttagaccccaagaattaataacgggggtgatatggctaagcggcttgtgatgagctacacaaaacataaacaggtatggtttctaatgaatcagattagctgcaaggtcctcttcctgtcacccacgcctggctcaggagtcgggcagctctcacttccccgtgtcgggggtgcccagtgagcccagtggagatc

SEQ ID NO: 604132 - DNA, 663 bp, Homo sapiens
ccctcaagccaagggcttctttggattaggctggrggatgggaaggttagttagattggggtgagggctgcccataggaaggacaaggtgaggtttattttcttcttttgcttagggccagctctgcctccactgcttctaacaccctcagcgggtgcgtatggcaggggcagagtgagagaggccttcttttgccttcccactgccaagccatcctcccatccctctgtgttctgagcagaggggcagactgggggtgcacagcgtggtcctgggttacctggtgtgcacctgactccaggagtcccatccttggtgggtcctagctgcaacaatgggtgctcctctgggaactgctgctgctgccccgtctggggtctggaagcagtgtggctagaggccattcggctctgaagttggcgagatgccatcttcctccttccggcctctgagtgaggatggggctagctcccaccttcctttctggccgctctggggcagcccagcgtggccagtgtggagggtggcactcctctatgagggaccccacggagcatgtgccatctccatttaggagctatctgtctcctggatcctgtgtttgagaaatgagttggtgtcttcacagaatgaggatccccagagccatcttgcccggtgctg

SEQ ID NO: 604133 - DNA, 570 bp, Homo sapiens
agcgtgaatatccccaggctctcacatagccacctataatttaggtggtatttttttaacatgtgggtctataggtgagatgaaaaatagtctattggtcaggatttagaaaaatgcagttcatcaaaaagctacttggatttttgaggagggtttgaaatcttccttaatgattatattttatatttattatatattttttgagactgagtctcgctctgttgctcaggctggagtgcagtggtgttayctcggctcactgcaacctccgcctcccgggttcgattctcctgcctcagcctcccaactagctgggactacaggtgcgtgccaccacgtttggctaattttttttgtatttttagtagagactgggtttcaccatgttgtccaggctggtctcgaactcctggcctcagctgatctgcccacctcggcctcccaaagtgctgggattacaggtgtgagccactgcgcatggcctcatggttaaattttttaacacccatgctactgtaataataatagctataattttttgagcagttcctagtctggggcctgttgcct

SEQ ID NO: 604134 - DNA, 570 bp, Homo sapiens
agcgtgaatatccccaggctctcacatagccacctataatttaggtggtatttttttaacatgtgggtctataggtgagatgaaaaatagtctattggtcaggatttagaaaaatgcagttcatcaaaaagctacttggatttttgaggagggtttgaaatcttccttaatgattatattttatatttattatatattttttgagactgagtctcgctctgttgctcaggctggagtgcagtggtgttacctcggctcactgcaacctccgcctccygggttcgattctcctgcctcagcctcccaactagctgggactacaggtgcgtgccaccacgtttggctaattttttttgtatttttagtagagactgggtttcaccatgttgtccaggctggtctcgaactcctggcctcagctgatctgcccacctcggcctcccaaagtgctgggattacaggtgtgagccactgcgcatggcctcatggttaaattttttaacacccatgctactgtaataataatagctataattttttgagcagttcctagtctggggcctgttgcct

SEQ ID NO: 604135 - DNA, 570 bp, Homo sapiens
agcgtgaatatccccaggctctcacatagccacctataatttaggtggtatttttttaacatgtgggtctataggtgagatgaaaaatagtctattggtcaggatttagaaaaatgcagttcatcaaaaagctacttggatttttgaggagggtttgaaatcttccttaatgattatattttatatttattatatattttttgagactgagtctcgctctgttgctcaggctggagtgcagtggtgttacctcggctcactgcaacctccgcctcccgggttcgattctcctgcctcagcctcccaactagctgggactacaggtgcgtgccaccacgtttggctaattttttttgtatttttagtagagactgggtttcaccatgttgtccaggctggtctcgaactcctggcctcagctgatctgccsacctcggcctcccaaagtgctgggattacaggtgtgagccactgcgcatggcctcatggttaaattttttaacacccatgctactgtaataataatagctataattttttgagcagttcctagtctggggcctgttgcct

SEQ ID NO: 604136 - DNA, 570 bp, Homo sapiens
agcgtgaatatccccaggctctcacatagccacctataatttaggtggtatttttttaacatgtgggtctataggtgagatgaaaaatagtctattggtcaggatttagaaaaatgcagttcatcaaaaagctacttggatttttgaggagggtttgaaatcttccttaatgattatattttatatttattatatattttttgagactgagtctcgctctgttgctcaggctggagtgcagtggtgttacctcggctcactgcaacctccgcctcccgggttcgattctcctgcctcagcctcccaactagctgggactacaggtgcgtgccaccacgtttggctaattttttttgtatttttagtagagactgggtttcaccatgttgtccaggctggtctcgaactcctggcctcagctgatctgcccacctcggcctcccaaagtgctgggattacaggtgtgagccacygcgcatggcctcatggttaaattttttaacacccatgctactgtaataataatagctataattttttgagcagttcctagtctggggcctgttgcct

SEQ ID NO: 604137 - DNA, 525 bp, Homo sapiens
  misc_feature 367: n = A,T,C or G
acatgctgtagtaaccttcctcgatccatcagcctcgaagtagctacccatttctgtcttyctactttactgccaaactgcctcaatgcctctatctccttgcttccccattttttcctaaatccactcgtatgatttttttttcttttcccaccatcgttccatcaaaactgctcttatcagggtgaccaaagaccactctgttggccaaaccatggtaatttcccagtccttgtttttatttgattaacagtagcatctgaaatggccaagtactctttccttgaaacttatctcgcttggctctggggatgccacgcccttctatacctcttgtttccttcttggccactcctcatgattcttntgctgttttcatctcatattcttgacctctaaatattgcagggcctgaaggtccaacccctggccctctttttgtctctacttacactgactcccttagtgatctctgccagtttaaagcattaaataccatctctaagctaatgatggctgtattta

SEQ ID NO: 604138 - DNA, 691 bp, Homo sapiens
tgaaatcatagagtatggagtcttcattcacttagcaataggcagttgagatatattcatatttctatagactaagtagtttattccttttcattgctgaatattattccattgtatagatataccacagtatgttgagctacttctttattgaaggacaacttgatttcttccagttgtttattattataaataaaattgctataaatatctatgtacagctttttgtatgcatataagttatcaaatcatttgggtaaatacctgggaggataatttctggatcatattttaagactatgtttagctttttaagaaactgccaaactgttttctgaggtggatatcttagtccatttgtgttgccataaagaaatatctggctgggtgcggtggctcacgcctgtaatcccagcactttgggaggccgaggcaggtggatcacgaggtcaggagatcaagaccatcctggttaacacggtgaaaccgcrtctctactaaaaatacaaaaaattagccgggcctggtggcacacgcctgtagtcccagctacttgggaggctgaggcaggagaatcacttgaacccaggaggcagaggttgcagtgagccaagatcatgccactgcactccagcctgggcgacagagagagactctgcctcaagaaaaaaaaaaaaaagaaaaaaagaaa

SEQ ID NO: 604139 - DNA, 604 bp, Homo sapiens
tcaagaaaaaaaaaaaaaagaaaaaaagaaagaaatatctgaggctggatagttaataaagaaaaaaggtttatttggcttgcaattctgctggctggaagaccagacatccggtgaaagcctcaggctgctttcactcatggtaatagatgaagagtagccagtgtgtgaaagatctaatgcaagagaggaaggaataaaaagaggcaggaggcaacaggctctttttaacaagcagctcttgtgggaactaatagagtgagacacacttattactgtaaggatgacaccaagccactcataaaggactttccccagttacccaaacacctcccattagaccccatctccaacaatggggatcaaattttaacacaagatttggatggaacaaccatccaaactatggcagtggctataccattttgcattcctgtaacaatgaatatgagaatccctatcgctctgartacttgctgacaattgatattatcagtttttagattttagctattctaataagcatatagtagtatctccttgttgtttcaatttgcattttcctagtgacaaatgttgctgggcatctttcatatgcttattt

SEQ ID NO: 604140 - DNA, 604 bp, Homo sapiens
tcaagaaaaaaaaaaaaaagaaaaaaagaaagaaatatctgaggctggatagttaataaagaaaaaaggtttatttggcttgcaattctgctggctggaagaccagacatccggtgaaagcctcaggctgctttcactcatggtaatagatgaagagtagccagtgtgtgaaagatctaatgcaagagaggaaggaataaaaagaggcaggaggcaacaggctctttttaacaagcagctcttgtgggaactaatagagtgagacacacttattactgtaaggatgacaccaagccactcataaaggactttccccagttacccaaacacctcccattagaccccatctccaacaatggggatcaaattttaacacaagatttggatggaacaaccatccaaactatggcagtggctataccattttgcattcctgtaacaatgaatatgagaatccctatcgctctgaatacttgctracaattgatattatcagtttttagattttagctattctaataagcatatagtagtatctccttgttgtttcaatttgcattttcctagtgacaaatgttgctgggcatctttcatatgcttattt

SEQ ID NO: 604141 - DNA, 395 bp, Homo sapiens
cttgaggctggaaaaggctaccatgtggtataaacaaagccagagtatttggaaactacagagagaaaatggtttcccttgatatgaacgtaggataaatataggagtgaaaacagaaataactggaatgtgaggctggagccaggttcgcaagggctttgaatgaggttatatgccattgaatgggcaatgtggatctggttcagtgattgagcagaatctttggaaaaattatggcattgatgggtgataatagtttagtggaargaaagcctgaagagtgtaagtaaagctgaataactactctaataatctgtgaaggagtcaatgaggttttaaactaggggaaatccgtgtacacatgagggacattttagatgtttaattcgtgcatg

SEQ ID NO: 604142 - DNA, 480 bp, Homo sapiens
aaattaaagagatggaattagatcccacrttccagagactgatctcagtgttccttagaaatcacctatcaagtgccataagctgtatcactacggatgagctaggcagtcagcctacagtcctccccacatcattttcctgctagtgcacacaatccttcaatacattatgcatgctctgagggcatgagccacaggaaagaaaaatgaatccaatcaaacatacacctaggaagacactggagagcaacagatgttgggaaacaaatggataacagcacatgtacggaagttaaatgaagacaagacaacctgatagtacccaattaaaccaactactgacaaaaccagcatcacaaaatggcatttcaacatggaatggatgaggaaccgtctccaaaggggtgagtaatcatgctccaaaaggtttgagactagtggtcctacctacaactaaggagcatgaatgagatcctaccc

SEQ ID NO: 604143 - DNA, 599 bp, Homo sapiens
gatgccctctcttcctaatagagtcaagtgttcatggtccttttgacaggtcttaaactaagagtgtttgtctctactgacatcagaagttgcaattatcagaaatcagaatcagctccagataaatcctaaaagagggctcatgtttttcctatggaccccaacagtatatgtttggatcagwttccagagacataacagtagttgttgtttaacttccagaatctatcaatagcatagatgaaaaaagtaatacttaaatattactgggattactaatattacagcattactaatacaatattggagcgatcgtaaatactgttcacaagtattggtaagagttcatttgtcctagaatagctcatccaggaatcagagaaaggaaattgttctaaattttgtattttatcccaagtccttgttcccatctggtgtgttattaatgaattagggctcactgtcattgtcagtaatatatttgtactaagagtgtttgttaacataaagcttaattcacagttgtgtgcacttaagtttccaggaaaaaaaaccaaaaaaacaaaaaaacaaaaacctcaggtccggagctacagcag

SEQ ID NO: 604144 - DNA, 419 bp, Homo sapiens
tttaaagctgtgttcttctctacacccacagccaaaatggaaattcactgtatggtatttgggaatatatttcacctgtaaaagaaagaatgtccacaattcaaacggttttgagttaatagataggaatccctcagtcaaactacagaattttttttgttttatatattcttagtcagcagagtgtttgagctataattacaagtatttccacttctaaatcttcttttagaaaagcagataactataataccttggctctgccactgactcctgccrtatgatattggacaaatcactgcccttttcagtttctcatctttagaatggggagttgggattgccagtggttttcaagcttttcttaacagcagggctttttttctaataaaattgcacatggaatcctggtaggcaaa

SEQ ID NO: 604145 - DNA, 447 bp, Homo sapiens
tactccatttgaatgccaaggtagaaggcwccatgaaaaaccattaccaaaataaggataattccaataacaaaactgtcaaaaaagaatcactgcttctcaaaatatgattggtatcatcacttattaatgttttgtatcatcacttattaatgattttggcttggtcaccactatgcctggaagatagtaggcactgataaacattgttaaacaccgtaacaacacaaaatgatctaccacatatcaatgtcttccatctctgaaattccatgattctactttactcagatataccaccttttgtggcattataaggaaacatgtataatcaagttcatacaagctatacacagtaggcatcgataaatttgtattgacagcataaacttctagggatgagatttgggaatatacattttgataagtgctccaaatttgagaatc

SEQ ID NO: 604146 - DNA, 577 bp, Homo sapiens
ctaccttaaatacatctttatccttgtaaaaaatgttttggcaaaaaacaaatatatttttaaatgtcccgtaatgttttaaagaaaagaagtaaagtgtatttgggctatgctcaccaatattccagtattttacaaattgtgttctggaagatgttcattgtggtctgagaacaaatggtcctatactataattctctctccttggacattgacaataaatgttagtgttttaatgaagcttaagaaagttattgaatcaggtaaaaaaaattttttctaagcacaccttgagaaacctttggaaaagttttcttttaacactagtttatatatccttcaataattgtaaataaaataaccaggaatgctttgaaaaaaatgcttctggaattttgttttaattttaagagaattcctgtcatttcaaatgaattgttatctattttaaatttcattagtatctcttagtgaatttaactttatcatctaaaatattcaaaacaaaacaataaaattattttaattkttttgtattatttttaaggcttgcacctatgaccagcatatcagaccc

SEQ ID NO: 604147 - DNA, 539 bp, Homo sapiens
tcatgtacttaagtattgttccgtgtgattatacattagcaattttatgagtccacttttgttctattagtgttccaaaattgttttaccccatctaatgattcaatcttgatttctttaaaaaattttttaaaggatgagcttgctgttaaaaaaaaaaaagaaaaaacaaatttttaaaatagagatgaagtctcgctatgttgctcaggctggtcttgaactctgggcctcaagcgatcctcccatcttggcctcccaaagtgctgggacyacagacatgattcagtcttaaagtcatcagaaacatgtattcaagattatttgttgtagtcttttccatgaatttccttaaagacaaaactttaaaacttataaagagagaggctgaggcaggcggatcacctgaggtcaggagtttgagaccagcccggccaacatggcgaaacccccgtctgtactaaaaatacagaaaattagttgggtgtggtggcacacacctatagtcccagctactcaggaggctgaggcactagaat

SEQ ID NO: 604148 - DNA, 451 bp, Homo sapiens
tcttcatagcagtgtgagaatagagcaatgaactagttataacttttggcatgtaaattaagctctctgaatttcaactttctcactgataagatggggaaaataatacttcacttacaaagtcagtgtgaaagagatgacgtatttaaagtgttttacacattaccagacaataagtaaacattcaacatgtatattacgattatatatcttaatttattttgctgggactttttcctccatttactcccatctcatcctcacaacgctgatgacaaatgaaaactgttttactacagttcctctaacctcacacacacacatamactactgtccttgtaggaatttttattaattaagatcactttttctcttccatcattaatatctgggtaactgccaccaattaattgttgttggctaaaaagttgaaatccaatttctatttata

SEQ ID NO: 604149 - DNA, 568 bp, Homo sapiens
catgaatgtaaacatccaagaagytcaacaaactctaagtaggatgaactcaaagagaaccacactgagacatattataatcaaaccatcaaaagacaagcaatcttgaaagcagtgagagaaaaaggactcatcacgtatacagaatactccaaagattaacaactgacttctcattagaaactatggaggccagaagacaatgggctaatgtatttagcaaggaaaaacaaaacaaacaaacaaaaaaaattgtcaaccaagaacccaatatccagcaaaactgtatatcaaaagcaaaggggaaattgagacattcccaggtaagcaaaagccaagggagtttgctactgctacacccaccctgcagaaaacactaaaaggaggccacagattgaaatgactagaaattagcttgaagccatatgtagaaataaaggtctcggtaaaggtaaatacatgagcaattatagaaactagtattgtttcactttggtgtgtaactccacattttgttttctacattatttaacctattaatgcataaaaaatacaagttcatgttttt

SEQ ID NO: 604150 - DNA, 582 bp, Homo sapiens
atagtggtcttcaaatatttttgctaagataatgcaaaaaaaattttattttttgagacagggtcttgctctgtcacccaggctggtacgcagtggtgcaattttggcttcctgcaacctctacatcctgctccagtgaccctcctaccttagcctcttgaataactgcaattataggtgtgcaccaccrtgtctggctttttttttttttttttttttgtagagatgaggctttaccgtgttgcccaggcatcaaagaaattttgaacaaacacatacctcttcaagttttcatgcaaacatctaaaaatttttcaacataagtttaaatagttgaaaaggatgtgattttggtgcatagatatattgtgtttaaaacctaaacctaaaagaaaaagaataagaaggaataaaaaagccttacaagatttataaaccagcatcaaaggaacaaatatttgagctacaggaattaaagaagaagagagaaacaaagggttagaaaacttatttaaagaaataatagcagaacacatttcaaacttggagatacaaatatctaggaacaggaaggtcaaaaat

SEQ ID NO: 604151 - DNA, 582 bp, Homo sapiens
atagtggtcttcaaatatttttgctaagataatgcaaaaaaaattttattttttgagacagggtcttgctctgtcacccaggctggtacgcagtggtgcaattttggcttcctgcaacctctacatcctgctccagtgaccctcctaccttagcctcttgaataactgcaattataggtgtgcaccaccatgtctggctttttttttttttttttttttgtagagatgaggctttaccgtgttgcccaggcatcaaagaaattttgaacaaacacatacctcttcaagttttcatgcaaacatctaaaaatttttcaacataagtttaaatagttgaaaaggatgtgattttggtgcatagatatattgtgtttaaaacctaaacctaaaagaaaaagaataagaaggaataaaaaagccttacaagatttataaaccagcatcaaaggaacaaatatttgagctacaggaattaaagaagaagagagaaacaaagggttagaaaacttatttaaagaaataatagcagaacacatttcaaacttggagatayaaatatctaggaacaggaaggtcaaaaat

SEQ ID NO: 604152 - DNA, 592 bp, Homo sapiens
actcaaaatgagtaagagggagagatcacaactgatatcacagaaatacaaaaaattataaaagactactctgtataattatatctcaacagattagatagcctaaaaggaatgaataaattcttacacacattcaacctaccatgaaatagaaaaactgaacagatcaataacaagtaagactgaatcagtaatagaaagtgttccctcaatgaaaagcccataccttgatggattcctaactgaattctgacaatcacttgaagaaaacctaattccaatccttctcaaactcttccaaaatattgaagaagaggaaatatttccaaactttttacaaggctagcatcaccctgatactaaggctggacaaggatactacaaacaataaaattacaggtcaatatctcygatgaacatgaatgtgaacattcttaacaaaatactagcaaatcatattcaacagcacattaaaaggttcattcaccttgagcaagtgagatttaaactaggaatataaggatggttcaacacatgcaaataataaatatggtacatcaggagagctggcaagatggccaaataggaacag

SEQ ID NO: 604153 - DNA, 432 bp, Homo sapiens
agttgggttgcatttgtgtgagttcccactggtatccayatcagagaaactgaagccagaagcttctaggttgtacctgcatgaagttggtcaaagcctttgaagaactggacatgggaataagaggtgagatgaaaaggagcgaaagtggtcacaaaggagatggatacagaacataggcttctagagccaggctgtgcccttaacagaaatgtgtaagggaaaaacgtaggttcatcatatgtttttggtgcctcaatcaattcaagagtactttgctcaaggctaaaatcttgatgtgcttctttgacctgttggaggtttttatattctaaggaaatttatctgattaccattagggatagatgaggagaaggcctttcttttgtgaaggggaaagatggtgactgcaaatggagaagtgagaaagga

SEQ ID NO: 604154 - DNA, 432 bp, Homo sapiens
agttgggttgcatttgtgtgagttcccactggtatccacatcagagaaactgaagccagaagcttctaggttgtacctgcatgaagttggtcaargcctttgaagaactggacatgggaataagaggtgagatgaaaaggagcgaaagtggtcacaaaggagatggatacagaacataggcttctagagccaggctgtgcccttaacagaaatgtgtaagggaaaaacgtaggttcatcatatgtttttggtgcctcaatcaattcaagagtactttgctcaaggctaaaatcttgatgtgcttctttgacctgttggaggtttttatattctaaggaaatttatctgattaccattagggatagatgaggagaaggcctttcttttgtgaaggggaaagatggtgactgcaaatggagaagtgagaaagga

SEQ ID NO: 604155 - DNA, 619 bp, Homo sapiens
gtaaatagggtgaaactaatctagtaaaagtgaaataaatttgcatttaattcctcaaaacatttttaaaaatcataattcttgtttctgtgaagaaaaggcagcttctctctagattagctctgatcagctaattgtgcagtctctgaatgcagtattggatgatgttttcagttttcttgtttctgtggagtgaaaagaccatttattcaagctgagccaactatctgggactagcaaattctacatcactcrgcgtactcctgtggttttctggtgatacttgttttatgttggctccttttctgctactgaggtagagactaaattgaccaccttttaaggattactaaatctagtcttttaggctagaagtatgtgattagtaaatgttttacttcctaagtgaagggttgtctgtggtttctatctcaaattttggcaaattatatttggaagtttaataaattttcattgctgttacatcagtggcattcatatcaatgaataaagcagatttttctaaaacaagggtgaaaattttatcattaatatatcgttaatagtaggcatacctgtctgaacagatagctgatgaaaattatctcccgtagaactc

SEQ ID NO: 604156 - DNA, 619 bp, Homo sapiens
gtaaatagggtgaaactaatctagtaaaagtgaaataaatttgcatttaattcctcaaaacatttttaaaaatcataattcttgtttctgtgaagaaaaggcagcttctctctagattagctctgatcagctaattgtgcagtctctgaatgcagtattggatgatgttttcagttttcttgtttctgtggagtgaaaagaccatttattcaagctgagccaactatctgggactagcaaattctacatcactcggcgtactcctgtggttttctggtgatacttgttttatgttggctccttttctgctactgaggtagagactaaattgaccaccttttaaggattactaaatctagtcttttaggctagaagtatgtgattagtaaatgttttacttcctragtgaagggttgtctgtggtttctatctcaaattttggcaaattatatttggaagtttaataaattttcattgctgttacatcagtggcattcatatcaatgaataaagcagatttttctaaaacaagggtgaaaattttatcattaatatatcgttaatagtaggcatacctgtctgaacagatagctgatgaaaattatctcccgtagaactc

SEQ ID NO: 604157 - DNA, 619 bp, Homo sapiens
gtaaatagggtgaaactaatctagtaaaagtgaaataaatttgcatttaattcctcaaaacatttttaaaaatcataattcttgtttctgtgaagaaaaggcagcttctctctagattagctctgatcagctaattgtgcagtctctgaatgcagtattggatgatgttttcagttttcttgtttctgtggagtgaaaagaccatttattcaagctgagccaactatctgggactagcaaattctacatcactcggcgtactcctgtggttttctggtgatacttgttttatgttggctccttttctgctactgaggtagagactaaattgaccaccttttaaggattactaaatctagtcttttaggctagaagtatgtgattagtaaatgttttacttcctaagtgaagggttgtctgtggtttctatctcaaattttggcaaattatatttggaagtttaataaattttcattgctgttacatcagtggcattcatatcaatgaataaagcagatttttctaaaacaagggtgaaaattttatcattaatatatcrttaatagtaggcatacctgtctgaacagatagctgatgaaaattatctcccgtagaactc

SEQ ID NO: 604158 - DNA, 619 bp, Homo sapiens
gtaaatagggtgaaactaatctagtaaaagtgaaataaatttgcatttaattcctcaaaacatttttaaaaatcataattcttgtttctgtgaagaaaaggcagcttctctctagattagctctgatcagctaattgtgcagtctctgaatgcagtattggatgatgttttcagttttcttgtttctgtggagtgaaaagaccatttattcaagctgagccaactatctgggactagcaaattctacatcactcggcgtactcctgtggttttctggtgatacttgttttatgttggctccttttctgctactgaggtagagactaaattgaccaccttttaaggattactaaatctagtcttttaggctagaagtatgtgattagtaaatgttttacttcctaagtgaagggttgtctgtggtttctatctcaaattttggcaaattatatttggaagtttaataaattttcattgctgttacatcagtggcattcatatcaatgaataaagcagatttttctaaaacaagggtgaaaattttatcattaatatatcgttaatagtaggcayacctgtctgaacagatagctgatgaaaattatctcccgtagaactc

SEQ ID NO: 604159 - DNA, 477 bp, Homo sapiens
tcttgaaaatgaacaaagtaggactcacttacctttgaaagttactctaaagctgttgtaatcaagactgtgttattggcaaaaggacagacatatagatcagtggggtccagttggatctgatccagtcagatccagttccaaatatagaactacacatatgtggtcaaatttgatgaggatgctgaagtgatttattgggaaaaagaagtgtcttcaacatatggtgttcagaaaggtggttttccacatgcagaataaaaaagaactttgattcctaccttacaccacagacaaaaattaacttgagatgaatcaggacctaaacttaaaagctaaaaaattacaatttctaaaggacaacataaaaatatctttgcaatttatcttaggacacagagagcactaccattaaaaagttgataaattgkacttcatcaaaaataaaaacacctgctcatcagaagataacgtcaa

SEQ ID NO: 604160 - DNA, 635 bp, Homo sapiens
agaaatgttctatcttctggtaggggtgtgggttatataggtatagtcacttacccaaactgatcaaactatagacttaagatatctgcatttcactatatttaaattataacctcaaattaaaaaatctcacacaaaaaatagcaaggtattttcctatctcttattctgactctctttcttattctcttaaagtattggacagcccagtcccactatactgaggcaayttttgaaagaaaataaaatttattacttttattatcttttaatgtatccactatactctatatagggcatcatttaaactctttttcagtctttgttgttgttgttgcagtgaagaagaaaagctatccagaagaacaaaatagcacagccgtgtaaacttgcaatgatttggcaagtttttgaagttatttaatcctgataagttaaaatcccttgaagcatatttatacattcatctttccaaacagctaccgcttatttgctctttcattcaagtgaaggttattgagcacctcctatgagtagatgttttatcagatactgagtaggcatgctacgatgagtacgcaaccaagtccctgcccttaacagcattcctagtttagaagtgataaatacaaaaa

SEQ ID NO: 604161 - DNA, 522 bp, Homo sapiens
gaattctacaggttgatagaaatgttctatcttctggtaggggtgtgggttatataggtatagtcacttacccaaactgatcaaactatagacttaagatatctgcatttcactatatttaaattataacctcaaattaaaaaatctcacacaaaaaatagcaaggtattttcctatctcttattctgactctctttcttattctcttaaagtattggacagcccagtcccactatactgaggcaatttttgaaagaaaataaaatttattacttttattatcttttaatgtatccactatactctatatagggcatcatttaaactctttttcagtctttgttgttgttgttgcagtgaagaagaaaagctatccagaagaacaaaatagcacagccgtgtaaacttgcaatgatttggcaagtttttgaagttatttaatcctgataagttaaaatcccttgaagcatatttatacattcatctttccaaacagctacygcttatttgctctttcattca

SEQ ID NO: 604162 - DNA, 552 bp, Homo sapiens
aactactaaggaaaagtgtgaggtttttttcttatcaccatcatctgattaaccaacaaagattaagtgggcaatttaacatgtcgtgatatctgccataactatcagttttcctgagttatttaaaaagaaaaacaaaacatctcatttgtctggtacgtccaagaatgaattaatagtttatatcagtaaattttctggattatcaaagcttactacagtatgtgtcaaaacttatttttgttttagaatcttcaacactttttaaaagactgcacacttttggactgctaaagatcaaataatcataaacaatatttttagaaagacattctatgtgaccaaatcactaaaaaatgcccatacattcattagttaatagatgaagaagtggccagcactcgttatatagatagrcagataagatagatctatatatagacatagattttttttttttgagacagagtttcattcttgttgcccaggctggagtgcaatggcgtgatctcggctcactgcaggtctccacctcctgggttcaagcaattc

SEQ ID NO: 604163 - DNA, 583 bp, Homo sapiens
atggggccaggtacttctgttggggaagcctgaagccttttttagcctagcagccataccaggcagtcaacttatgattaagcttgtggccaagtaaaactcccagggatttgtctgcaaatttccaggttctagcatttgtctcttaattagttggttttcattagcttaaatgcaaaactttatttctcttaagttgtatcttgttatcccagtgctttatgttattattttgtttctaagttcaactctgtcagtcaagaaatattatacttagcactcaatgaactcattatttgttggaaacatttacttattccatttttaaaaagtaataaacttaattttttagagctgttttaggttcacagcaaaatcgtgtgggaagttcagagttcccatgtacctccacgccccaacacatgcacaacctccattgctgtcagtatyccacaccacactggtacatgtgttacaattgatgaacctacattgacaaatccttatcatccaaagcccatagtttacaagagttcattgtgtattttgcataacagtactttatcagatttgtcttttgcaa

SEQ ID NO: 604164 - DNA, 583 bp, Homo sapiens
atggggccaggtacttctgttggggaagcctgaagccttttttagcctagcagccataccaggcagtcaacttatgattaagcttgtggccaagtaaaactcccagggatttgtctgcaaatttccaggttctagcatttgtctcttaattagttggttttcattagcttaaatgcaaaactttatttctcttaagttgtatcttgttatcccagtgctttatgttattattttgtttctaagttcaactctgtcagtcaagaaatattatacttagcactcaatgaactcattatttgttggaaacatttacttattccatttttaaaaagtaataaacttaattttttagagctgttttaggttcacagcaaaatcgtgtgggaagttcagagttcccatgtacctccacgccccaacacatgcacaacctccattgctgtcagtatcccacaccacactggtacatgtgttacaattgatgaacctacattgacaaatycttatcatccaaagcccatagtttacaagagttcattgtgtattttgcataacagtactttatcagatttgtcttttgcaa

SEQ ID NO: 604165 - DNA, 583 bp, Homo sapiens
atggggccaggtacttctgttggggaagcctgaagccttttttagcctagcagccataccaggcagtcaacttatgattaagcttgtggccaagtaaaactcccagggatttgtctgcaaatttccaggttctagcatttgtctcttaattagttggttttcattagcttaaatgcaaaactttatttctcttaagttgtatcttgttatcccagtgctttatgttattattttgtttctaagttcaactctgtcagtcaagaaatattatacttagcactcaatgaactcattatttgttggaaacatttacttattccatttttaaaaagtaataaacttaattttttagagctgttttaggttcacagcaaaatcgtgtgggaagttcagagttcccatgtacctccacgccccaacacatgcacaacctccattgctgtcagtatcccacaccacactggtacatgtgttacaattgatgaacctacattgacaaatccttatcatccaaagcccatagtttacaagagttcattgtgtatttygcataacagtactttatcagatttgtcttttgcaa

SEQ ID NO: 604166 - DNA, 423 bp, Homo sapiens
tatgatttttgtttttaattctgtttatgtggtgaatcacttttattgatttgcataagttgagtcagatttgcatcccagaaataaagcctatttgatcatggtgaattagctttttgatgtgctgctggattcagtttgctagtattttgttgaggattttgattctatggtcatcagagatattggccagaagttttctttttttcattgtgtctyggccagattttggtattagggtgatgctggcttcataaattgagttaatggggggagtcccccccctcagttttttggaatagttttggtaggattggtaccaattcttctttgtacatctggtagaatctggctatgagtctacctggtccagggctttttctggttgttaggtttttttattccagattcaatttcagacct

SEQ ID NO: 604167 - DNA, 597 bp, Homo sapiens
cttgctctgtcttccaggctggagtgcaatggtgcaatctcggctcactgcaacctccacctcctgggttcaagcgattctcccgcctcagcatcccaagtagctgggattacaggcaccctccatcatgtccagctaatytttgtatttttgtagagatggggtttcaccatgttggccaggccagtcttaaactcctgaccttgggtgatccgcctgcctcggcctcccactgtgctgggattacaggcgtgagccaccactcctggccaagaaatagatgttttaagtaatcaaaatgttggtgatcagaaaagagatcattgtgactcagctggtgttgctgattttttttataaagcatacttacaggatcacatttcattttcctttttaattaaccttaatagtgttacaaaatcactgaaaattaatgagcttggtatccagcttaagaaacagcaactaaacaacagaatatggccaaagaaaatggatacccctgcatttattctcctttcctccccgaaaagagaaatacacagcagtcaattcaccaacacgatataaaaattgtaaatatttatgccccaaaaa

SEQ ID NO: 604168 - DNA, 543 bp, Homo sapiens
gaattctagggccccactcactgctgatccctctgcactgctactgctgatgctctctggaaagcgccacmtcttggcaggaggccaaccagcacaaaaatagagcattaaatcaccaaaactaagaaccctcatggagttcattgcaccttctgccgcctccaatggaacaggcactggtatccgtggttgagagacccatagatggttcatatcacaggactgagcagaaacccccagtactagcatggtgccaggtagactcactggatggttaaacccagaagagagacaacaatcattgcagttcgcctcacagaaagccacaaccacaggaaaaggggagagtactacatcaagggaacaccctgtgcgctagaatttgaacaacagcattcagccctagaccttccctctgacagagcctacccaaatgtgatggaaccagaaaaccacccctggtaatatgaccaaacaaggctcatcaacaccccctaaaaatcatactagttcaccagcaatcgatccaaatcaagaagaaat

SEQ ID NO: 604169 - DNA, 608 bp, Homo sapiens
gaggtggctcacacctgtaatcccagcactttgggagcctgaggcaggtggatcatgaagtcaggagatcaagaccattctggctaacacagtgaaaccccatctctactaaaaatgcaaaaaattagctgggcgtggtggcacacacctgtagtcccagctacttgggaggctgaggcaggagaatcgcttgaacctgggaggctgaggttgcagtgagccaagatcatgccactgcactccaacttgggtgacagagtgagactccatctcaaaaaaaagacaaagaacacccaagaaattcattacaaaaagatcttcgcctaggcacattgtcatcaggttatccaaagttaagatraaggaacgaatcttaagagctgtgagacagaagcaccaggtaacctataaaggaaaacctaacagattaacaacagatttctcagcagaaaccctacaagctagaagggattagggccctatctacagcctcctcaaacaaaacaaacatcagccaataattttgtatccagtgaaactaagcaccacatatgaaggaaagataacagtcattttcagacaaacaaatgctgagagaattcgccatt

SEQ ID NO: 604170 - DNA, 608 bp, Homo sapiens
gaggtggctcacacctgtaatcccagcactttgggagcctgaggcaggtggatcatgaagtcaggagatcaagaccattctggctaacacagtgaaaccccatctctactaaaaatgcaaaaaattagctgggcgtggtggcacacacctgtagtcccagctacttgggaggctgaggcaggagaatcgcttgaacctgggaggctgaggttgcagtgagccaagatcatgccactgcactccaacttgggtgacagagtgagactccatctcaaaaaaaagacaaagaacacccaagaaattcattacaaaaagatcttcgcctaggcacattgtcatcaggttatccaaagttaagataaaggaacgaatcttaagagctgtgagacagaagcaccaggtaacctataaaggaaaacctaacagattaacaacagatttctcagcagaaaccctacaagctagaagggattagggccctatctacagcctcctcaaacaaaacaaacatcagccaakaattttgtatccagtgaaactaagcaccacatatgaaggaaagataacagtcattttcagacaaacaaatgctgagagaattcgccatt

SEQ ID NO: 604171 - DNA, 480 bp, Homo sapiens
tagctttgcttttcttagtgttgtagttgaaaatgtgtaacgttcttggtaaaactcagaactgcattaaggaaaagatgggaagttgagcattagaattggtgtcaccaggccatggttgtacttttggctttaayacttgatttctgtgtatatccttcctttcttataggctgaagataaatggttgcttgaagatttaatgttcaaggtggttcaaagaaaaatcactttgaaaatcaagtaacatatgtcattgttagctaagcctattaattaaaacttatattcattaaaattgcattcaaatggaaaacatcctttcttaaaatttaatactgtttatatagttacacatctttctatatttattatgtattcattacatgaaaaattactgatacctatggaagaattttattcagtcacatatgatactgtcacttaggatatttttgtaaagtcaaatctaactaccta

SEQ ID NO: 604172 - DNA, 480 bp, Homo sapiens
tagctttgcttttcttagtgttgtagttgaaaatgtgtaacgttcttggtaaaactcagaactgcattaaggaaaagatgggaagttgagcattagaattggtgtcaccaggccatggttgtacttttggctttaatacttgatttctgtgtatatccttcctttcttataggctgaagataaatggttgcttgaagatttaatgttcaaggtggttcaaagaaaaatcactttgaaartcaagtaacatatgtcattgttagctaagcctattaattaaaacttatattcattaaaattgcattcaaatggaaaacatcctttcttaaaatttaatactgtttatatagttacacatctttctatatttattatgtattcattacatgaaaaattactgatacctatggaagaattttattcagtcacatatgatactgtcacttaggatatttttgtaaagtcaaatctaactaccta

SEQ ID NO: 604173 - DNA, 480 bp, Homo sapiens
tagctttgcttttcttagtgttgtagttgaaaatgtgtaacgttcttggtaaaactcagaactgcattaaggaaaagatgggaagttgagcattagaattggtgtcaccaggccatggttgtacttttggctttaatacttgatttctgtgtatatccttcctttcttataggctgaagataaatggttgcttgaagatttaatgttcaaggtggttcaaagaaaaatcactttgaaaatcaagtaacatatgtyattgttagctaagcctattaattaaaacttatattcattaaaattgcattcaaatggaaaacatcctttcttaaaatttaatactgtttatatagttacacatctttctatatttattatgtattcattacatgaaaaattactgatacctatggaagaattttattcagtcacatatgatactgtcacttaggatatttttgtaaagtcaaatctaactaccta

SEQ ID NO: 604174 - DNA, 480 bp, Homo sapiens
tagctttgcttttcttagtgttgtagttgaaaatgtgtaacgttcttggtaaaactcagaactgcattaaggaaaagatgggaagttgagcattagaattggtgtcaccaggccatggttgtacttttggctttaatacttgatttctgtgtatatccttcctttcttataggctgaagataaatggttgcttgaagatttaatgttcaaggtggttcaaagaaaaatcactttgaaaatcaagtaacatatgtcattgttagctaagcctattaattaaaacttatattcattaaaattgcattcaaatggaaaacatcctttcttaaaatttaatactgtttatatagttacacatctttctatatttattatgtattcattacatgaaaaatyactgatacctatggaagaattttattcagtcacatatgatactgtcacttaggatatttttgtaaagtcaaatctaactaccta

SEQ ID NO: 604175 - DNA, 496 bp, Homo sapiens
cctttttactttctgttttttagttcatatatttttattgagggataattctccatgacatttctatatattttgtagatattttcaaggatgtttgtatagcaaaccaagatagaagtagtgtttccttgtagggtggagggtactttgtttcatcagcatcataaagataatgtcctcctctgagacaaagattggtcaggtttgctagaagtcctgcgtaagattggggatttcctaagcatgagattcctcagcagtgacacagatctattgtgtccacagactctacttagactcacctctgtawcactcccatgggactggggatggggagtgggttacaggggaactaaagcgttgagtagtatctttgtctctgaaacagcagtctgatgctttctttcagcatctgtgaaattgtgacagcctaacttagcttgcaagtaggctaaaatctcagaacgctcagagttcatgacaattttctactgag

SEQ ID NO: 604176 - DNA, 566 bp, Homo sapiens
gacagggtctcactctgtcactcaggctggagtgcagtggcgagatattggctcactgcaacctctgcctcccgggttcaagtgattctcctgcctcagcctccccaagtagctgggattacaggcacctgccaccacgcctggctaatttttgtatttttagtagagacggggtttcaccaagttggccaggctggtctygaactcctgacctcaggtgatctgcccaccttggcctcccaaagcactgggattacaggcatgagccaccgcacccagtcctctttgtgacttttttgttggagtcattcttctgcgagctatggatatcatcaaggcaggcagtccctcaacgtggcagctgttcccacccttccctgctcctcttcttgcccaaggatgagcagaaactttacagaaaaagagagaattccctcaggaaatgaggcatgttgcttgaggtcacagggaatagaattagcaggaaaataaaccttgcaggaagcagaaagtgggccaaagcactgaggagaggacacggggagggcgtgagtttttgacagatt

SEQ ID NO: 604177 - DNA, 519 bp, Homo sapiens
gttggtgaggaggagaaaggcatagatatagtcatggtaacacaagtcatatgtggtaagatctactgagcatggggctatcagagaaagcttcatgagggtgacatggaaagggagccctgagggactggtaaatttccatcagtgacattccagggagagaggccccaagacacaggggcagcaggtggtccactgtgctcctgccctggacagggagggcggggtcctctgctgtttgtttgcttgtgtaggaattttcccctcaarcaatgtccttgtctcccatgggagaagttttacatgagtgggaacctgtttctcttctctatcccaggccattccctgagagaagagaaaggggaatcttttttttttttggacagtttcgctctgtcgcccaggctagagcacagtggtgcaatctcaactcactgcaaccttcagctcctgggttcaagtgattctcctgcctctgtctcctgagtagctgggattacaggtgtgcaccaccatgcc

SEQ ID NO: 604178 - DNA, 609 bp, Homo sapiens
aaatgagtctcagattctcggacaaaaacgaatacttttgctcagacagacagcatgtgagtgcttctcccccagcttcaaccctgcagtgtctacaggtgtcattggtccccggtagacgtcctcggttcaatgggtcactgatcacttatcaccagcaccacatgaccctggatggcagccaaagagttcctgggtcttgtttccctacctccacatttttttcctgacccagcccgagccacgtgcacaccacagggctggagtcccagtgcttttgtcctgacagcccattctcccactcccacacccaaccagttccccggggggkttttgaccagcagctccgcctgcagccctcgacccggatccaggcatcctgcttaaggaggggttcaggtggcaggaaactccagggcaacaaagtgtgggtggcatgggtggggttgaccggaaggtcactgtgctgggaggaagaggaacgggtggagggaaggcaagatacggatcaggagtattgacatcctgtgccagtagaggggcctgccccatggtggaaggtgtggccggatgagctcgctggcccatgtccccccgtttcccaggctt

SEQ ID NO: 604179 - DNA, 475 bp, Homo sapiens
gaatcattcttaccactgagagttgcagcaaatgggggacataatttataacttacttttctytctgtatgactcattaggcaatgactatatatgtactacaacgtaaacagcacctcctggattgaatagaacataactgacatgaccagcagagacaggctaaagacactgagctgaaaaccctggactctattgctaaattgaggctcctgaatccgttcgctctgagcaactgttgctgtggtgctgccttcacaagcactctgctgagcactcagatagaggggctgtgctatccgtcaacagacaagctgcagccagaactgctcagctgacaaactggtagaggtccagaaacacagttctgctgcatagtgaaaaaaggccaatttagattctttttcatagagagaaaaacataaacatgtgattgaacgagtctcctgtattagactaattgggttggctttga

SEQ ID NO: 604180 - DNA, 591 bp, Homo sapiens
acatcatttaactataagaagaaataaactactcatgtgtgctaaaacatgcatgaattctgaaagcattatgctaagtgaaaaagccagtcacaaaggactacatattgtataacgctatgtatacgaaatatacagaacaggtaaatatatggagacaaaagtagatagatggtggttgcctacaacagrggtaggtggagggacatggaggaaggctgcagtcatgcctaggagatgtggggttgcttttcagggtgatgaaaatgctgtgaatatactaatagatactcagttgtacattttaaatggttgaactctctcaaatgtgaatgatatctcagtgaaactgtttttaaaatccaaaggcaggatcaagataattttctcaactctcaatttttgacttacatgctatatcaaatctaaatatttttagagttttatagtatattttaaattaaagataaagaaaatgcctaaattttcaaatagtttgtaaattaacctaaaacatgcacatttcaaagaatagtataatggcctttctgtacaagttaacctgcaatctgtgaaataaatagacacaga

SEQ ID NO: 604181 - DNA, 557 bp, Homo sapiens
gaaatattctcctctgatttaatctggcctgcctcatcagaacaatacaaaaattacttaaaaatactgtttttacaggaaaaaagtmagttttctatgaggaatgatatataattctccacttttccaagggtacatattgtaacagaaaaggtatgcaatggtttttcaaaatggtagaatgaaagtcacaatataaaaaaataagtacattataaagatagtaaaatggaaataattcattgtaatgaaactaaaaaatcaagcttctgccaaaattagtatcctaaaacacgttatataaactcaactagctacagaataagagttgacatgttaaattccatacacacttgacttttcacttgaaataatttcttctttggggcctgtgtctcatccaaattaatgtgataatgtgacataccttccagtggagactctaacgtagttaatatttttaggctgtcagccgcttcttgttgaagttgtctcacaaccacctgagaaaatatttttgttactgattttataaattgccttattattaaattatg

SEQ ID NO: 604182 - DNA, 189 bp, Homo sapiens
tctttggggcctgtgtctcatccaaattaatgtgataatgtgacataccttccagtggagactctaacgtagttaatwtttttaggctgtcagccgcttcttgttgaagttgtctcacaaccacctgagaaaatatttttgttactgattttataaattgccttattattaaattatgttaataatatt

SEQ ID NO: 604183 - DNA, 519 bp, Homo sapiens
cagctacaagtttctttgtctgaacaaaaattatattccaatgatagtcattgagccttgaaataaaaattatgagctaattattaatataaatagtcaaagtaaactataaataccagtggcaaaactaaatcaaacatagttttgytaattattacattcattctaaattatgattttatgacatgtaggtgcctttacaacattacgtagtcataaaaatatgtaatttgaagtattttcagatttttaaaattaatatgaataataacaaagatataccaaaaaaaaaaaacacataaaaaactacttaaagcaaggtattacaagacacagcaatacacttcagttcatctgggaagtctagaattaagtgtcgaaggaaatcacttaattaaattttaatttgaaaatactcatttcaggtgtaaacatttccatttatacctacattatggtcttaacatgtggcaacataaagtcattaaaattatttcagcagtacagaactatctatct

SEQ ID NO: 604184 - DNA, 519 bp, Homo sapiens
cagctacaagtttctttgtctgaacaaaaattatattccaatgatagtcattgagccttgaaataaaaattatgagctaattattaatataaatagtcaaagtaaactataaataccagtggcaaaactaaatcaaacatagttttgctaattattacattcattctaaattatgattttatgacatgtaggtgcctttacaacattacgtagtcataaaaatatgtaatttgaagtattttcagatttttaaaattaatatgaataataacaaagatataccaaaaaaaaaaaacacataaaaarctacttaaagcaaggtattacaagacacagcaatacacttcagttcatctgggaagtctagaattaagtgtcgaaggaaatcacttaattaaattttaatttgaaaatactcatttcaggtgtaaacatttccatttatacctacattatggtcttaacatgtggcaacataaagtcattaaaattatttcagcagtacagaactatctatct

SEQ ID NO: 604185 - DNA, 504 bp, Homo sapiens
  misc_feature 135: n = A,T,C or G
ttatcttccttgatacttactactctttctgctttctctctctcatattgaaagagactttcttttaaatgatcacattcattcattaccttcttatttttctcttctagcatgaggtctttccactctcaatanagcttctttggatattagttattatctctttatgatactctttctgatgaacatcatctagttgctgttcaatgcacggattttcatgttggagttgacatattctctcttctacacagctccactttccagtggaattattctctttagcttctgcattttcatacatctctttcatttcctttatttgctgctgtgtttggcttaggttgttatgtacagtttctaaagccaatgacttttttctgagagtatctcttgtcttamggaacttatcttttaaggtattgaatttaatttgtggtttagaaagttgttcagtaagaaactcattcttatcttctacttcggaaatatcagaactcattt

SEQ ID NO: 604186 - DNA, 279 bp, Homo sapiens
tttttttttctttttgagaaagagtctggctctgtttcccaggctggagtgcaatggcacgggcttggctcactgcaacctatgcctccaagcaattttcctgcctcagcctcctgagtagctggcattacaggcatgtgccaccackcccagctaatttttgtatttttagtagagatggggttttgccaagttgatcaggctggtcttgaattcctgacctcgtgatctgctgcctcggcctcccaaagtgacgtgagccaccatgcccggccactt

SEQ ID NO: 604187 - DNA, 473 bp, Homo sapiens
ttttgttgacattatgtcagcaaagatgtctagatctcttcttcaaagtctttaaatcgtcacacatctctccgcccctttccttttttctaaaactgcctgtttcctttttctcytcaactcagatattaaagatgttttcttctctttttctacattgaaagatctccttgatgctttttgtgtgtacttttttttctctgatagactgtgatcaatgcatatcaaaatgtattttttgtctttttcaaacgtatgtgttttacttttttatcttggttacttatctctgggttatggcttatatttagtaataggttattttacctagcataccaacatggatatgagtagtttatttacaaaaagtgtacagttaggccaggtgtggtggctcacacctgtaatcccagcactttgggagagcaatgtgggtggatcatttgaggtcaagagtccaagaccagtctgac

SEQ ID NO: 604188 - DNA, 473 bp, Homo sapiens
ttttgttgacattatgtcagcaaagatgtctagatctcttcttcaaagtctttaaatcgtcacacatctctccgcccctttccttttttctaaaactgcctgtttcctttttctcttcaactcagatattaaagatgttttcttctctttttctacattgaaagatctccttgatgctttttgtgtgtacttttttttctctgatagactgtgrtcaatgcatatcaaaatgtattttttgtctttttcaaacgtatgtgttttacttttttatcttggttacttatctctgggttatggcttatatttagtaataggttattttacctagcataccaacatggatatgagtagtttatttacaaaaagtgtacagttaggccaggtgtggtggctcacacctgtaatcccagcactttgggagagcaatgtgggtggatcatttgaggtcaagagtccaagaccagtctgac

SEQ ID NO: 604189 - DNA, 473 bp, Homo sapiens
ttttgttgacattatgtcagcaaagatgtctagatctcttcttcaaagtctttaaatcgtcacacatctctccgcccctttccttttttctaaaactgcctgtttcctttttctcttcaactcagatattaaagatgttttcttctctttttctacattgaaagatctccttgatgctttttgtgtgtacttttttttctctgatagactgtgatcaatgcatatcaaaatgtattttttgtctttttcaaacgtatgtgttttacttttttawcttggttacttatctctgggttatggcttatatttagtaataggttattttacctagcataccaacatggatatgagtagtttatttacaaaaagtgtacagttaggccaggtgtggtggctcacacctgtaatcccagcactttgggagagcaatgtgggtggatcatttgaggtcaagagtccaagaccagtctgac

SEQ ID NO: 604190 - DNA, 558 bp, Homo sapiens
ttccatccaaaacaaaaaaaacaaaacaaaaacactgtatgtttataatatcactttacctgccatatatgacataaaattgttcttcatattatttatctaagattataatttcatatagaatgcttttaaactatgttcagttgaaactgaaaggaacatagtttatagatttgtttccttgatatgccataacatatatttaaacaattattaaatatttactcttaaaaatacttgacttactaattctgtacatttctgcagatataaacgcctcctggaaatgacaataaatawgtgaaatgtatttggaaatgaagactttggttgccatggagacttaaaaacagatcaactgaaaatggatattctgattaagaagctaaaacagaaggtaatttaaaaaaaattattttatcttaaggtctagattacgtgtgtgagatgtgcgggtttgttatataggtaaacatgtgccatggtggtttgctgcacctatcaatcaatcacctagatattaagccctgtgggcattagttattgatgttgatactc

SEQ ID NO: 604191 - DNA, 558 bp, Homo sapiens
ttccatccaaaacaaaaaaaacaaaacaaaaacactgtatgtttataatatcactttacctgccatatatgacataaaattgttcttcatattatttatctaagattataatttcatatagaatgcttttaaactatgttcagttgaaactgaaaggaacatagtttatagatttgtttccttgatatgccataacatatatttaaacaattattaaatatttactcttaaaaatacttgacttactaattctgtacatttctgcagatataaacgcctcctggaaatgacaataaataagtgaaatgtatttggaaatgaagactttggttgccatggagacttaaaaacagatcaactgaaaatggatattctgwttaagaagctaaaacagaaggtaatttaaaaaaaattattttatcttaaggtctagattacgtgtgtgagatgtgcgggtttgttatataggtaaacatgtgccatggtggtttgctgcacctatcaatcaatcacctagatattaagccctgtgggcattagttattgatgttgatactc

SEQ ID NO: 604192 - DNA, 558 bp, Homo sapiens
ttccatccaaaacaaaaaaaacaaaacaaaaacactgtatgtttataatatcactttacctgccatatatgacataaaattgttcttcatattatttatctaagattataatttcatatagaatgcttttaaactatgttcagttgaaactgaaaggaacatagtttatagatttgtttccttgatatgccataacatatatttaaacaattattaaatatttactcttaaaaatacttgacttactaattctgtacatttctgcagatataaacgcctcctggaaatgacaataaataagtgaaatgtatttggaaatgaagactttggttgccatggagacttaaaaacagatcaactgaaaatggatattctgattaagaagctaaaacagaaggtaatttaaaaaaaattatwttatcttaaggtctagattacgtgtgtgagatgtgcgggtttgttatataggtaaacatgtgccatggtggtttgctgcacctatcaatcaatcacctagatattaagccctgtgggcattagttattgatgttgatactc

SEQ ID NO: 604193 - DNA, 563 bp, Homo sapiens
gatattctgattaagaagctaaaacagaaggtaatttaaaaaaaattattttatcttaaggtctagattacgtgtgtgagatgtscgggtttgttatataggtaaacatgtgccatggtggtttgctgcacctatcaatcaatcacctagatattaagccctgtgggcattagttattgatgttgatactctccctcctgaccccaacaggccccagtgtttgttgttcccctccccgagtccatgtgttcttatagttcagctcccacttataagtgagaagatgcagtgtttggttttttcttcctgcagtagtttgctgaagatatcagcttcgggttcatccatatccctgcaaagagcacgatctcattcatttttatggctccatagtattccatggtgtatatataccacattttctttatcccattatcactgataatgtccacctgggttgattccatgtctttactattgtgaatagtgctgcagtgaacatacaaatgcatgtatctttataatagaataatttatcttccaatgtatggtaattttaaatc

SEQ ID NO: 604194 - DNA, 610 bp, Homo sapiens
tatatgacataaaattgttcttcatattatttatctaagattataatttcatatagaatgcttttaaactatgttcagttgaaactgaaaggaacatagtttatagatttgtttccttgatatgccataacatatatttaaacaattattaaatatttactcttaaaaatacttgacttactaattctgtacatttctgcagatataaacgcctcctggaaatgacaataaataagtgaaatgtatttggaaatgaagactttggttgccatggagacttaaaaacagatcaactgaaaatggatattctgattaagaagctaaaacagaaggtaatttaaaaaaaattattttatcttaaggtctagattacgtgtgtgagatgtgcgggtttgttatataggtaaacatgtgccatggtggtttgctgcacctatcaatcmatcacctagatattaagccctgtgggcattagttattgatgttgatactctccctcctgaccccaacaggccccagtgtttgttgttcccctccccgagtccatgtgttcttatagttcagctcccacttataagtgagaagatgcagtgtttggttttttcttcct

SEQ ID NO: 604195 - DNA, 610 bp, Homo sapiens
tatatgacataaaattgttcttcatattatttatctaagattataatttcatatagaatgcttttaaactatgttcagttgaaactgaaaggaacatagtttatagatttgtttccttgatatgccataacatatatttaaacaattattaaatatttactcttaaaaatacttgacttactaattctgtacatttctgcagatataaacgcctcctggaaatgacaataaataagtgaaatgtatttggaaatgaagactttggttgccatggagacttaaaaacagatcaactgaaaatggatattctgattaagaagctaaaacagaaggtaatttaaaaaaaattattttatcttaaggtctagattacgtgtgtgagatgtgcgggtttgttatataggtaaacatgtgccatggtggtttgctgcacctatcaatcaatcacctagatattaagccctgtgggcattagttattgatgttgatrctctccctcctgaccccaacaggccccagtgtttgttgttcccctccccgagtccatgtgttcttatagttcagctcccacttataagtgagaagatgcagtgtttggttttttcttcct

SEQ ID NO: 604196 - DNA, 546 bp, Homo sapiens
aaactccatctcaaaaaaataaaaaataaaaaaagacccccaaccttgtctagactgtggggtttcagtttcaccccaggggtgtcctggttgggttagaatcctgaatctggtttgagttcgaatcctaaagaataaagggaataaaggctgtagccactgagatacttaatctggtctggttctggcttttgtgtgtctatctgtatttttggtctaaatatttggcccaacagaggttaaaggctttgatgttctcagcaaaagccttgtgagatctctagtttatctgtgtgctcaactggaacaaagagactccataaactagaaaaacctaaacaaaatggcacatttgaaaaattgagagccaactcctgtttgttgttctgtccacctccctctctcattcctccttctgcctttgctgtggtcccatggtgtttctgtcyttctggggacctgagattcagtgtaggagtgaagtccatgattttaaagccttcatgtctctgctttttaactctgcctgctttgctgagctcttat

SEQ ID NO: 604197 - DNA, 583 bp, Homo sapiens
tcacctagatattaagccctgtgggcattagttattgatgttgatactctccctcctgaccccaacaggccccagtgtttgttgttcccctccccgagtccatgtgttcttatagttcagctcccacttataagtgagaagatgcagtgtttggttttttcttcctgcagtagtttgctgaagatatcagcttcgggttcatccatatccctgcaaagagcacgatctcattcatttttatggctccatagtattccatggtgtatatataccacattttctttatcccattatcactgataatgtccacctgggttgattccatgtctttactattgtgaatagtgctgcagtgaacatacaaatgcatgtatctttataatagaataatttatcttccaatgtatggtaattttaaatcagttttggtattaaaaatcatgcattttggaaaatattgataatggaaaaacccaaattctgccaaaatatgttgataaaatagagggwaaatatatcttttcaaactttaaatgcctcaggctcttagttaatcttccccagatctgggaagacctagaag

SEQ ID NO: 604198 - DNA, 451 bp, Homo sapiens
agtattttcagagttatgccgtcatcattacaattaattttagaacattttcatcaccctaaaaacaaaccccacatcatttagccatcttcactagttttcccttcctccctcagccctagggaaccacccagcttctttgtatagatttgcctataagcctctgaaataaaaagcaagtggtctgctgggactggcttatttcacttagcataatttttcatgctgcatctgtgctgtagcaggtatwgatgtcgggtttttgctccttagttcagctacatctgggttcttctctcgtgaccaggaaaaattaagcatgcagacacattgaggagggcagaatttattatgtgaaaggacagctctcagcaaagagaggggtcctgcaaacaggtttccacctcacaattgaataccaggagcacatgagctgaagcggccaggctcc

SEQ ID NO: 604199 - DNA, 451 bp, Homo sapiens
agtattttcagagttatgccgtcatcattacaattaattttagaacattttcatcaccctaaaaacaaaccccacatcatttagccatcttcactagttttcccttcctccctcagccctagggaaccacccagcttctttgtatagatttgcctataagcctctgaaataaaaagcaagtggtctgctgggactggcttatttcacttagcataatttttcatgctgcatctgtgctgtagcaggtatagatgycgggtttttgctccttagttcagctacatctgggttcttctctcgtgaccaggaaaaattaagcatgcagacacattgaggagggcagaatttattatgtgaaaggacagctctcagcaaagagaggggtcctgcaaacaggtttccacctcacaattgaataccaggagcacatgagctgaagcggccaggctcc

SEQ ID NO: 604200 - DNA, 451 bp, Homo sapiens
agtattttcagagttatgccgtcatcattacaattaattttagaacattttcatcaccctaaaaacaaaccccacatcatttagccatcttcactagttttcccttcctccctcagccctagggaaccacccagcttctttgtatagatttgcctataagcctctgaaataaaaagcaagtggtctgctgggactggcttatttcacttagcataatttttcatgctgcatctgtgctgtagcaggtatagatgtcgggtttttgctccttagttcagctacatctgggttcttctctcgtgaccaggaaaaattaagcatgcagacacattgaggagggcagaatttattatgtgaaaggacagctctcagcaaagagaggggtcctgcaaasaggtttccacctcacaattgaataccaggagcacatgagctgaagcggccaggctcc

SEQ ID NO: 604201 - DNA, 607 bp, Homo sapiens
acttctgtggtgtaaatatatccatatggaagaaaacttttatttcaaaacaccaatggtaaataagataaaatttatagagctcttcttagaatatcatgagattatttgtgattgcaataatttgtttcctctttataatattaggtacagtaatcaatatgaaataggggaaagtacaaggaacaattttactgggaacagaatctttatcaataggttatcactaagtatatactatggcatattattgttttcaaaagctctttgttataaaataatatcttatgtggatgccaagatttataataaatattaataattgtacctgtaagtggcatcattcattttttaaaaatgagataacatttctggtttgttttagayctaaatattatatattaaatcaagagaatattagaagaaactttcataaaatagtttaaaatatagaatttttaccaaagattgatttatctgatttggagtatttcttgcagtctttgttttcatctctagtgattgaacagttggttcaagttgctttgcttcaacttctttcttatgttgtttctctttcctttctaattcttctctatttttttgt

SEQ ID NO: 604202 - DNA, 607 bp, Homo sapiens
acttctgtggtgtaaatatatccatatggaagaaaacttttatttcaaaacaccaatggtaaataagataaaatttatagagctcttcttagaatatcatgagattatttgtgattgcaataatttgtttcctctttataatattaggtacagtaatcaatatgaaataggggaaagtacaaggaacaattttactgggaacagaatctttatcaataggttatcactaagtatatactatggcatattattgttttcaaaagctctttgttataaaataatatcttatgtggatgccaagatttataataaatattaataattgtacctgtaagtggcatcattcattttttaaaaatgagataacatttctggtttgttttagatctaaatattatatattaaatcaagagaatattagaagaaactttcatamaatagtttaaaatatagaatttttaccaaagattgatttatctgatttggagtatttcttgcagtctttgttttcatctctagtgattgaacagttggttcaagttgctttgcttcaacttctttcttatgttgtttctctttcctttctaattcttctctatttttttgt

SEQ ID NO: 604203 - DNA, 430 bp, Homo sapiens
ctttgttttcatctctagtgattgaacagttggttcaagttgctttgcttcaacttctttcttatgttgtttctctttcctttctaattcttctctatttttttgtacagcatattaacatttgttttttctttattttcttatcttaagatgcatctgcagataaagacatttatcttaaaactcattttgttaaaaaataaagagttcatcctgtgatctacctctgcagatgctctttatcatcctaataaaatttctgtgttctgaattatttttcctktttagttctcagatatttaatctctcacttcaacatcttcaaaagaatgcatatacttgaaaagtagtaaggaaagaatattctgctgaagtttttgttactagtcactctagcatatattataaaaaaggatactggagataattc

SEQ ID NO: 604204 - DNA, 561 bp, Homo sapiens
tctctcacacaaactatatctgcagatgattgtcaactaaaactaggctaaagggtctaacatctgttaccccacactttttataattctttcttaatacttccaattcaccttcttattacatatattttatgtatttattaagctattgttcattatgtgtaatatataattaatgcccttaataagtgtatgtttacacaagttatgttttcctgtgaaatctagtcccagaagtggagttgttgagttaaagrgatgtcaggttatttgaaattttgatacacagcactaagttacccttcagaaataatttaccaatttcatataccaacagtgtatgagaatgcctttttcctcacatttgccaatggtagtaattactttttcaataccagcatgactttacaaaatatatcttattttatgttaatttgcacttttctgattaccaggcagggctaaatatctctggtaaaaatataaaacttgttaatcataaggaatattagtccaattttgaattagtttatagcacaatgacaattgtctgctgcgaaa

SEQ ID NO: 604205 - DNA, 649 bp, Homo sapiens
atcttattttatgttaatttgcacttttctgattaccaggcagggctaaatatctctggtraaaatataaaacttgttaatcataaggaatattagtccaattttgaattagtttatagcacaatgacaattgtctgctgcgaaatactgctataggtggccaggcacggtggctcactcctgtaaacccagcactttgggaggccgagatgggcagaacgcctgaggtcaggagttcgagaccagcctggataacatggtgaaacctcatttctactaaaaatacaaaaaattagctgggcatggtggtacacgcctgtaatctcagctgctagggaggctgagtcaggagaatcacttgaatgcagtaggcataggttgcagtgaggtgagaacacaccattgcactccagcttgggcaagaagagagaaactccacctcaaaaaataaataaataaataaataaacactgctataggcttacttacctatgatgctcttccttcagcttcttggtaaaaggctgaggataggttttcccaatatttctttgttgggttaatctgtcagcagcagcagcagatgtactatgacatacattttctgatagttgtattttttcacttttgtttgtattatttccttctt

SEQ ID NO: 604206 - DNA, 649 bp, Homo sapiens
atcttattttatgttaatttgcacttttctgattaccaggcagggctaaatatctctggtaaaaatataaaacttgttaatcataaggaatattagtccaattttgaattagtttatagcacaatgacaattgtctgctgcgaaatactgctataggtggccaggcacggtggctcactcctgtaaacccagcactttgggaggccgagatgggcagaacgcctgaggtcaggagttcgagaccagcctggataacatggtgaaacctcatttctactaaaaatacaaaaarttagctgggcatggtggtacacgcctgtaatctcagctgctagggaggctgagtcaggagaatcacttgaatgcagtaggcataggttgcagtgaggtgagaacacaccattgcactccagcttgggcaagaagagagaaactccacctcaaaaaataaataaataaataaataaacactgctataggcttacttacctatgatgctcttccttcagcttcttggtaaaaggctgaggataggttttcccaatatttctttgttgggttaatctgtcagcagcagcagcagatgtactatgacatacattttctgatagttgtattttttcacttttgtttgtattatttccttctt

SEQ ID NO: 604207 - DNA, 476 bp, Homo sapiens
ttttaatgataaaaatattttgtgcttactttaattttatcattatacataattattataattataagatactcatcattttatcattgaaatttttgtcaagtctgctcatttctgtttgagtgaatagaagaattttccaaaatttcaaaaaggactcttctccattttgtgcttttattcccatccactctttgctatctgatataaatatttatgttatctgactggcagaaacagagaaataaaaagacacaggcataacatatatcttctgtcattgccacctggattttacatgaaatagccagattaagaggatgtgaccttgtarggcttcaggaacagtaaagaagttttcccttttctacactgagctattcttttccccattgccttttatctctttttttttttaattctgggatatcaaaaaagtgaaagttctccctgaactatgggaaccaaagtttgcc

SEQ ID NO: 604208 - DNA, 474 bp, Homo sapiens
caccgttttaatgataaaaatattttgtgcttactttaattttatcattatacataattattataattataagatactcatcattttatcattgaaatttttgtcaagtctgctcatttctgtttgagtgaatagaagaattttccaaaatttcaaaaaggactcttctccattttgtgcttttattcccatccactctttgctatctgatataaatatttatgttatctgactggcagaaacagagaaataaaaagacacaggcataacatatatcttctgtcattgccacctggattttacatgaaatagccagattaagaggatgtgaccttgtagggcttcaggaacagtaaagaagttttcccttttctacactgagctattcttttccccaytgccttttatctctttttttttttaattctgggatatcaaaaaagtgaaagttctccctgaactatgggaaccaaa

SEQ ID NO: 604209 - DNA, 478 bp, Homo sapiens
gattaagaggatgtgaccttgtagggcttcaggaacagtaaagaagttttcccttttctacactgagctattcttttccccattgccttttatctctttttttttttaattctgggatatcaaaaaagtgaaagttctccctgaactatgggaaccaaagtttgccacaacacaagaagcagagtgaaactgctgwgtttccagtgcagaattctggaaaacgacatgcttcccagatttcacattcaattatcagaaaagttataggtggaaaacatacggtacagttatctactttagccccattatctactgaaaatgggagtcaaactaacaaagacatatgaaatgtttcatcgagagctcttgaggtggcattctctagcatttcatggcaccaaataacatgatacaattccatattgctgaattacataaattaccaaataaatttatcaaattagtcagatatattaaa

SEQ ID NO: 604210 - DNA, 632 bp, Homo sapiens
tcccttttctacactgagctattcttttccccattgccttttatctctttttttttttaattctgggatatcaaaaaagtgaaagttctccctgaactatgggaaccaaagtttgccacaacacaagaagcagagtgaaactgctgagtttccagtgcagaattctggaaaacgacatgcttcccagatttcacattcaattatcagaaaagttataggtggaaaacatacggtacagttatctactttagccccattatctactgaaaatgggagtcaaactaacaaagacatatgaaatgtttcatcgagagctcttgaggtggcattctctagcatttcatggcaccaaataacatgatacaattccatattgctgaattacataaattaccaaataaatttatcaaattagtcagatatattaaaagtctaagttgagcaaagcaatttaacgcctcagagggtggaaaaaggcctcatctgcttttactttgaagaagaaaatctctagattttgtctatctttaggacacaatgtacagaactcaactttctmctaaagaatcaaaggataaatttttatctaagaaattatgcttcttacatgataaaaatcacacatgccaaaa

SEQ ID NO: 604211 - DNA, 486 bp, Homo sapiens
ccaggatggagtatggtggtacaatcgcggctcactgcaacctccrcctcccaggtttgagcgattatccttcctcagcctcctgaatagctgagactacaggtgcacaccaccacacccagttaatttttgtattttcagtagagatggggttttgtcacgttggccaggctggtctcaaactccaggcctcaagtgatccacctgcctcagcctcccgtagtgttgggattacatgaatgagccactgcacctggcctctagtgcacactttaaacctgacggccaaattacatgaaagaaaattcagaactcaaatagttactatttttaaaaaccctaaaatgaaaaagtctcagttcttttgcctatctttttatttccctgcctactttgaatctgctgatttgtctactggtgttgagataagacttactgtctgtggtgttaccaattcaaggttacttggctgaagaaaaacaaaag

SEQ ID NO: 604212 - DNA, 486 bp, Homo sapiens
ccaggatggagtatggtggtacaatcgcggctcactgcaacctccgcctcccaggtttgagcgattatccttcctcagcctcctgaatagctgagactacaggtgcacaccaccacacccagttaatttttgtattttcagtagagatggggttttgtcacgttggccaggctggtctcaaactccwggcctcaagtgatccacctgcctcagcctcccgtagtgttgggattacatgaatgagccactgcacctggcctctagtgcacactttaaacctgacggccaaattacatgaaagaaaattcagaactcaaatagttactatttttaaaaaccctaaaatgaaaaagtctcagttcttttgcctatctttttatttccctgcctactttgaatctgctgatttgtctactggtgttgagataagacttactgtctgtggtgttaccaattcaaggttacttggctgaagaaaaacaaaag

SEQ ID NO: 604213 - DNA, 486 bp, Homo sapiens
ccaggatggagtatggtggtacaatcgcggctcactgcaacctccgcctcccaggtttgagcgattatccttcctcagcctcctgaatagctgagactacaggtgcacaccaccacacccagttaatttttgtattttcagtagagatggggttttgtcacgttggccaggctggtctcaaactccaggcctcaagtgatccacctgcctcagcctcccrtagtgttgggattacatgaatgagccactgcacctggcctctagtgcacactttaaacctgacggccaaattacatgaaagaaaattcagaactcaaatagttactatttttaaaaaccctaaaatgaaaaagtctcagttcttttgcctatctttttatttccctgcctactttgaatctgctgatttgtctactggtgttgagataagacttactgtctgtggtgttaccaattcaaggttacttggctgaagaaaaacaaaag

SEQ ID NO: 604214 - DNA, 486 bp, Homo sapiens
ccaggatggagtatggtggtacaatcgcggctcactgcaacctccgcctcccaggtttgagcgattatccttcctcagcctcctgaatagctgagactacaggtgcacaccaccacacccagttaatttttgtattttcagtagagatggggttttgtcacgttggccaggctggtctcaaactccaggcctcaagtgatccacctgcctcagcctcccgtagtgttgggattacatgaatgagccactgcacctggyctctagtgcacactttaaacctgacggccaaattacatgaaagaaaattcagaactcaaatagttactatttttaaaaaccctaaaatgaaaaagtctcagttcttttgcctatctttttatttccctgcctactttgaatctgctgatttgtctactggtgttgagataagacttactgtctgtggtgttaccaattcaaggttacttggctgaagaaaaacaaaag

SEQ ID NO: 604215 - DNA, 619 bp, Homo sapiens
accccttgcacttcccaagtgaggcaatgcctcgccctgcttcagctagtgcacagtgcacttcacccactgtcctgcgcccactgtctggcactccctagtgagatgaacccagtacctcaaatggaaatgcagaaatcacccgtcttctgcrtcgctcatgctgggagctgtagactcgagctgttcctattcggccagcttggctccttctcccattattttttaatattttctgaaaatcttctttaaagagagaaagccaaatgtcacccactttttcataaaaccttataggcaaatctattattattttcttttcttgaggtggattttccctcttgttgcccaggctggagtgcaatggcgcgatctcggtttactgcaaccccctgcctcccagattcaagcaattctcctgccccagcctcctgagtagctgggattagaggcgtgccccaccatgcccagctaattttgtgtttttagtagagacggggtttttccttgttgttcaggctggccctgaactcctgacctcaggtgatccacctgcctcagcctccccaagtgttgggattacaggcgtgagccactgcctctggccatttttttttta

SEQ ID NO: 604216 - DNA, 619 bp, Homo sapiens
accccttgcacttcccaagtgaggcaatgcctcgccctgcttcagctagtgcacagtgcacttcacccactgtcctgcgcccactgtctggcactccctagtgagatgaacccagtacctcaaatggaaatgcagaaatcacccgtcttctgcatcgctcatgctgggagctgtagactcgagctgttcctattcggccagcttggctccttctcccattattttttaatattttctgaaaatcttctttaaagagagaaagccaaatgtcacccactttttcataaaaccttataggcaaatctattattmttttcttttcttgaggtggattttccctcttgttgcccaggctggagtgcaatggcgcgatctcggtttactgcaaccccctgcctcccagattcaagcaattctcctgccccagcctcctgagtagctgggattagaggcgtgccccaccatgcccagctaattttgtgtttttagtagagacggggtttttccttgttgttcaggctggccctgaactcctgacctcaggtgatccacctgcctcagcctccccaagtgttgggattacaggcgtgagccactgcctctggccatttttttttta

SEQ ID NO: 604217 - DNA, 619 bp, Homo sapiens
accccttgcacttcccaagtgaggcaatgcctcgccctgcttcagctagtgcacagtgcacttcacccactgtcctgcgcccactgtctggcactccctagtgagatgaacccagtacctcaaatggaaatgcagaaatcacccgtcttctgcatcgctcatgctgggagctgtagactcgagctgttcctattcggccagcttggctccttctcccattattttttaatattttctgaaaatcttctttaaagagagaaagccaaatgtcacccactttttcataaaaccttataggcaaatctattattattttcttttcttgaggtggattttccctcttgttgcccaggctggagtgcaatggcgcgatctcggtttactgcaaccccctgcctcccagattcaagcaattctcctgccccagcctcctgagtagctgggattagaggcrtgccccaccatgcccagctaattttgtgtttttagtagagacggggtttttccttgttgttcaggctggccctgaactcctgacctcaggtgatccacctgcctcagcctccccaagtgttgggattacaggcgtgagccactgcctctggccatttttttttta

SEQ ID NO: 604218 - DNA, 554 bp, Homo sapiens
cactttgcttagcacccagtgtcaaactggtaagactcaaacttgctcccagataggccgtgccatctctaaatctttttagaagcttctgcatattaataggcatccctagatgagactaatttgggagccctcatttttaaatgcacttcagggcaktattcatttggaatattccactgtaagttaactttagtaagattttgccatttctgtaagactttgctgcctcccaggcctaatgaattagccagaaggaactaagttttccagaaattaaggatcctatttttacctaatatattggctttactcccaggttcccttgattgacttagccaatgattttttttcctacctaagcgtgtgaggaaaatgaaacaaaggggtagaacacaaaaatccctgtgaattttcaaaagccaaattttacagccctacaatattatcatttactaccactttccttctgacccattcagatgtaggaggtctctaactggaactggattcaagccagttaactactggatcaaatctgatcctggacccgg

SEQ ID NO: 604219 - DNA, 554 bp, Homo sapiens
cactttgcttagcacccagtgtcaaactggtaagactcaaacttgctcccagataggccgtgccatctctaaatctttttagaagcttctgcatattaataggcatccctagatgagactaatttgggagccctcatttttaaatgcacttcagggcattattcatttggaatrttccactgtaagttaactttagtaagattttgccatttctgtaagactttgctgcctcccaggcctaatgaattagccagaaggaactaagttttccagaaattaaggatcctatttttacctaatatattggctttactcccaggttcccttgattgacttagccaatgattttttttcctacctaagcgtgtgaggaaaatgaaacaaaggggtagaacacaaaaatccctgtgaattttcaaaagccaaattttacagccctacaatattatcatttactaccactttccttctgacccattcagatgtaggaggtctctaactggaactggattcaagccagttaactactggatcaaatctgatcctggacccgg

SEQ ID NO: 604220 - DNA, 554 bp, Homo sapiens
cactttgcttagcacccagtgtcaaactggtaagactcaaacttgctcccagataggccgtgccatctctaaatctttttagaagcttctgcatattaataggcatccctagatgagactaatttgggagccctcatttttaaatgcacttcagggcattattcatttggaatattccactgtaagttaactttagtaagattktgccatttctgtaagactttgctgcctcccaggcctaatgaattagccagaaggaactaagttttccagaaattaaggatcctatttttacctaatatattggctttactcccaggttcccttgattgacttagccaatgattttttttcctacctaagcgtgtgaggaaaatgaaacaaaggggtagaacacaaaaatccctgtgaattttcaaaagccaaattttacagccctacaatattatcatttactaccactttccttctgacccattcagatgtaggaggtctctaactggaactggattcaagccagttaactactggatcaaatctgatcctggacccgg

SEQ ID NO: 604221 - DNA, 473 bp, Homo sapiens
actttagtaagattttgccatttctgtaagactttgctgcctcccaggcctaatgaattagccagaaggaactaagttttccagaaattaaggatcctatttttacctaatatattggctttactcccaggttcccttgattgacttagccaatgattttttttcctacctaagcgtgtgaggaaaatgaaacaaaggggtagaacacaaaaatccctgtgaattttcaaaagcyaaattttacagccctacaatattatcatttactaccactttccttctgacccattcagatgtaggaggtctctaactggaactggattcaagccagttaactactggatcaaatctgatcctggacccggtcccgtttctgtcataacttctaaaacatccagccagtcatggctggatagcagtttggaacagaaatttgctcaaagaaactcagagctcaaaacacaaatccatgg

SEQ ID NO: 604222 - DNA, 473 bp, Homo sapiens
actttagtaagattttgccatttctgtaagactttgctgcctcccaggcctaatgaattagccagaaggaactaagttttccagaaattaaggatcctatttttacctaatatattggctttactcccaggttcccttgattgacttagccaatgattttttttcctacctaagcgtgtgaggaaaatgaaacaaaggggtagaacacaaaaatccctgtgaattttcaaaagccaaattttacagccctmcaatattatcatttactaccactttccttctgacccattcagatgtaggaggtctctaactggaactggattcaagccagttaactactggatcaaatctgatcctggacccggtcccgtttctgtcataacttctaaaacatccagccagtcatggctggatagcagtttggaacagaaatttgctcaaagaaactcagagctcaaaacacaaatccatgg

SEQ ID NO: 604223 - DNA, 578 bp, Homo sapiens
aggggtagaacacaaaaatccctgtgaattttcaaaagccaaattttacagccctacaatattatcatttactaccactttccttctsacccattcagatgtaggaggtctctaactggaactggattcaagccagttaactactggatcaaatctgatcctggacccggtcccgtttctgtcataacttctaaaacatccagccagtcatggctggatagcagtttggaacagaaatttgctcaaagaaactcagagctcaaaacacaaatccatggagctctgaaatccgagaaagaatttatcatgatccccagcagctctgagagatcaaagggcacaagtgttacagaatcctgagacatcacttttctgcctgaagcctctggctggtggtgcctttacctgtgttttgctcgggcccactgggttcgttctgtccactcgggtcatgctagtggtttggatcccacacttgccaagggtgatctgggtacagagcagtgaagggtgtgtgagcaagcaagcatgggatctggccactgcacacagtcaagcatgccagctgcagtggggtg

SEQ ID NO: 604224 - DNA, 585 bp, Homo sapiens
aaagggaacgtgatgtacagaaatctgagtgaggagtgaggtccggaagcaactgggtcccttaccattctcagcaatgtggtccagaaacaactggactggttacagtgctcagcatttgccttatttgaacacagctgaacactcagcagtgtgtgagtggcagaagtttggctgttgggattggccaggactcagctatagttacaggtgcatactcctaagttaggttttcagtctttctacctattaagttaggttgcagtttgtccacagggactcaagtctagaagtacagagtccttcccaggccatatttagttcactgtaacagttcctattatgacctcactgacagttctttttctctgaattctcctttcttctcaacagcttatccaaatgttccactggtccctgttcatcccgccstgcagttctccttgactgattcagccctttgtggtttgcagtcctgtttctctacagcttggacctcttcagtctttccatcataggtttaactctctgttgaatgcttctttgtagctacgcaaaagttaccttaagctcaaaaaattcaaa

SEQ ID NO: 604225 - DNA, 316 bp, Homo sapiens
gatgactagctttgtctaatacctcagttctcacaaatactctagataaactgtcaaaaataagtaaatgtaaatggataaatgtctatacaagacatcttaatgtatttttgaaatttttttgagacagtgtctctgtctgtcacccaggctgaagtgcagtggcatgatcacagctcactgcaaccttgamctcctgcactcaagggatcctcccatctcagcctcccaagtagctgttaattacaggtatgcaccaccatggtcagctaacttttattttttttgtagagtcagcatctcactattttgctca

SEQ ID NO: 604226 - DNA, 316 bp, Homo sapiens
gatgactagctttgtctaatacctcagttctcacaaatactctagataaactgtcaaaaataagtaaatgtaaatggataaatgtctatacaagacatcttaatgtatttttgaaatttttttgagacagtgtctctgtctgtcacccaggctgaagtgcagtggcatgatcacagctcactgcaaccttgaactcctgcactcaagggatcctcccayctcagcctcccaagtagctgttaattacaggtatgcaccaccatggtcagctaacttttattttttttgtagagtcagcatctcactattttgctca

SEQ ID NO: 604227 - DNA, 465 bp, Homo sapiens
tgccgtcagtcatgattctggctgttatcttaaaatgctacatataatagaaataactaaatttcctcrccagttgagaacttccactggattttaaccaaaggctcttctaagtttttgtcatccacggtgattgtttaaagttcttctctaaaaccctttacaggccaggcgcggtgctgaaggccgtgcagggcacggtggctcgcgcgtgtaaaaatcccagcactttggaaggccgaggtgggtgaattgcttaaactcagaagttttaaagcagcctgggcaacatggtaaaatcctctctctacaagaatacaaaaattagccaggcatgatggtgcatgcctatggtcccagctacttcagaggctgaggtaggaggatggctagagtttgggtgggagagattgcagtgaaccaagatcatgtcactgcactccatcctgagtgatagagccagac

SEQ ID NO: 604228 - DNA, 465 bp, Homo sapiens
tgccgtcagtcatgattctggctgttatcttaaaatgctacatataatagaaataactaaatttcctcaccagttgagaacttccactggattttaaccaaaggctcytctaagtttttgtcatccacggtgattgtttaaagttcttctctaaaaccctttacaggccaggcgcggtgctgaaggccgtgcagggcacggtggctcgcgcgtgtaaaaatcccagcactttggaaggccgaggtgggtgaattgcttaaactcagaagttttaaagcagcctgggcaacatggtaaaatcctctctctacaagaatacaaaaattagccaggcatgatggtgcatgcctatggtcccagctacttcagaggctgaggtaggaggatggctagagtttgggtgggagagattgcagtgaaccaagatcatgtcactgcactccatcctgagtgatagagccagac

SEQ ID NO: 604229 - DNA, 561 bp, Homo sapiens
ttaatataaatattctaaagattgtataaaatttgtggaagtctgatggatctgatgtgttgccgtcagtcatgattctggctgttatcttaaaatgctacatataatagaaataactaaatttcctcaccagttgagaacttccactggattttaaccaaaggctcttctaagtttttgtcatccacggtgattgtttaaagttcttctctaaaaccctttacaggccaggcgcggtgctgaaggccgtgcagggcacggtggctcrcgcgtgtaaaaatcccagcactttggaaggccgaggtgggtgaattgcttaaactcagaagttttaaagcagcctgggcaacatggtaaaatcctctctctacaagaatacaaaaattagccaggcatgatggtgcatgcctatggtcccagctacttcagaggctgaggtaggaggatggctagagtttgggtgggagagattgcagtgaaccaagatcatgtcactgcactccatcctgagtgatagagccagaccgtgtctcaaaaaaaaaaaaaagtctttacaatcag

SEQ ID NO: 604230 - DNA, 465 bp, Homo sapiens
tgccgtcagtcatgattctggctgttatcttaaaatgctacatataatagaaataactaaatttcctcaccagttgagaacttccactggattttaaccaaaggctcttctaagtttttgtcatccacggtgattgtttaaagttcttctctaaaaccctttacaggccaggcgcggtgctgaaggccgtgcagggcacggtggctcgcgygtgtaaaaatcccagcactttggaaggccgaggtgggtgaattgcttaaactcagaagttttaaagcagcctgggcaacatggtaaaatcctctctctacaagaatacaaaaattagccaggcatgatggtgcatgcctatggtcccagctacttcagaggctgaggtaggaggatggctagagtttgggtgggagagattgcagtgaaccaagatcatgtcactgcactccatcctgagtgatagagccagac

SEQ ID NO: 604231 - DNA, 561 bp, Homo sapiens
ttaatataaatattctaaagattgtataaaatttgtggaagtctgatggatctgatgtgttgccgtcagtcatgattctggctgttatcttaaaatgctacatataatagaaataactaaatttcctcaccagttgagaacttccactggattttaaccaaaggctcttctaagtttttgtcatccacggtgattgtttaaagttcttctctaaaaccctttacaggccaggcgcggtgctgaaggccgtgcagggcacggtggctcgcgcgtgtaaaaatcccagcactttggaaggccgaggtgggtgaattgcttaaactcagaagttttaaagcagcctgggcaacatggtaaaatcctctctctacaagaatamaaaaattagccaggcatgatggtgcatgcctatggtcccagctacttcagaggctgaggtaggaggatggctagagtttgggtgggagagattgcagtgaaccaagatcatgtcactgcactccatcctgagtgatagagccagaccgtgtctcaaaaaaaaaaaaaagtctttacaatcag

SEQ ID NO: 604232 - DNA, 561 bp, Homo sapiens
ttaatataaatattctaaagattgtataaaatttgtggaagtctgatggatctgatgtgttgccgtcagtcatgattctggctgttatcttaaaatgctacatataatagaaataactaaatttcctcaccagttgagaacttccactggattttaaccaaaggctcttctaagtttttgtcatccacggtgattgtttaaagttcttctctaaaaccctttacaggccaggcgcggtgctgaaggccgtgcagggcacggtggctcgcgcgtgtaaaaatcccagcactttggaaggccgaggtgggtgaattgcttaaactcagaagttttaaagcagcctgggcaacatggtaaaatcctctctctacaagaatacaaaaattagccaggcatgatggtgcatgcctatggtcccagctacttcagaggctgaggtaggaggatggctwgagtttgggtgggagagattgcagtgaaccaagatcatgtcactgcactccatcctgagtgatagagccagaccgtgtctcaaaaaaaaaaaaaagtctttacaatcag

SEQ ID NO: 604233 - DNA, 499 bp, Homo sapiens
ctggcttgatgtcctgtctacaaggatcctttacaaatttgctgtccttgtggtaagaagtaaagaatgtcactttctgacgggcccaggaacctcaagatatttggggaccttgagaagagaggactacacccattcataaaagtattacaggagagctggcaagatgtctgaataggaacagctccggcctgcagcacccagtgagatcaacacagaaggcaggttgttcatgcatttccaactgagcctccactggtgacacccaggcaaacaggtctggagtggacctccagcaaactcgagcaaacctgcagcagagggacctgactgttagaaggaaaactaacaaacagaaaggaatagtatcaacaccaccaacatcaaagaccaaaggtagataaatccacaaagayggggagaaaccagtgcaaaaaggctgaaaactccaaaagccagaatgcctcttctcctccagaagatcacaactccccgccag

SEQ ID NO: 604234 - DNA, 464 bp, Homo sapiens
agacaggatagtcatggatgacggaataactttargctacatagtggtgaaacagggagaagctcatatggcagctagctaacacatcatgttgtgtttagatccatacatcttctgaagttcaaacacatgtaaaaaaataagatgatatgggaattaattatgacaaatcctagggaagaggctgaaagagctgtaacacaaacagggctgagacatgccccttgctcaccacattgtgggcaaagagaaggaaagaagagctgtggccctttggggagcccagacctgggagctccccgagccaggtccttctttggggccctttggttcctgatatctccaagattctgggtgccactgtgttcccagtgtgccagctatggaagctggttgaggtgcccgtgatccagccacagccttgtggagagctggcgtccgtgttggcacttggagccacctgc

SEQ ID NO: 604235 - DNA, 461 bp, Homo sapiens
gacggaataactttaggctacatagtggtgaaacagggagaagctcatatggcagctagctaacacatcatgttgtgtttagatccatacatcttctgaagttsaaacacatgtaaaaaaataagatgatatgggaattaattatgacaaatcctagggaagaggctgaaagagctgtaacacaaacagggctgagacatgccccttgctcaccacattgtgggcaaagagaaggaaagaagagctgtggccctttggggagcccagacctgggagctccccgagccaggtccttctttggggccctttggttcctgatatctccaagattctgggtgccactgtgttcccagtgtgccagctatggaagctggttgaggtgcccgtgatccagccacagccttgtggagagctggcgtccgtgttggcacttggagccacctgccccactgcagcagcca

SEQ ID NO: 604236 - DNA, 504 bp, Homo sapiens
tttttgctttttctcacaaactgattccacttttcccacatacgtttgacaattcatttgaactcatttcacggttcgggwgatgggtgcacccaaatctcacaaataaccagtaaagaacttattcatggaaccaaataccaccataccccaataacctatgggaaaaaaaaataaaataaaataaaaaagattcagaaaaaaagaaaataatcactgtacttaccatgacacttagaaatgttggctagcattatttgtgtcacctaataatataattttttttccttatgctacaaactagctctgctattacaatcactactatttgaagtgttactaaatttaattaaatttattgtatccttctggactcagatatgggagtaaatgctaagacaatttcagaatatgatcacatattaaaagcatattatatggggaaaatgtgatttttaaaacatagaaattggtagagaaacagtttttggatctctttaattt

SEQ ID NO: 604237 - DNA, 462 bp, Homo sapiens
gacggaataactttaggctacatagtggtgaaacagggagaagctcatatggcagctagctaacacatcatgttgtgtttagatccatacatcttctgaagttcaaacacatgtaaaaaaataagatgatatgggaattaattatgacaaatcctagggaagaggctgaaagagctgtaacacaaacagggctgagacatgccccttgctcaccacattgtgggcaaagagaaggaaagaagagctgtggccctttggggmgcccagacctgggagctccccgagccaggtccttctttggggccctttggttcctgatatctccaagattctgggtgccactgtgttcccagtgtgccagctatggaagctggttgaggtgcccgtgatccagccacagccttgtggagagctggcgtccgtgttggcacttggagccacctgccccactgcagcagccag

SEQ ID NO: 604238 - DNA, 536 bp, Homo sapiens
ttgtgtttagatccatacatcttctgaagttcaaacacatgtaaaaaaataagatgatatgggaattaattatgacaaatcctagggaagaggctgaaagagctgtaacacaaacagggctgagacatgccccttgctcaccacattgtgggcaaagagaaggaaagaagagctgtggccctttggggagcccagacctgggagctccccgagccaggtccttctttggggccctttggttcctgatatctccaagattctgggtgccactgtgttcccagtgtgccagctatggaagctggttgaggtgcccgtgatccagccacagccttgtggagagctggcgyccgtgttggcacttggagccacctgccccactgcagcagccagcagatctgactgcacagtggccagaccccatgctcactcacacaccccttgccactccacgcagtctcccttggcaggcatgggatccaacgtggtagcatgagctgagcacagcctgccaggctgagtgtgcagggcccagcaaa

SEQ ID NO: 604239 - DNA, 504 bp, Homo sapiens
tttttgctttttctcacaaactgattccacttttcccacatacgtttgacaattcatttgaactcatttcacggttcgggtgatgggtgcacccaaatctcacaaataaccagtaaagaacttattcatggaaccaaataccaccataccccaataacctatgggaaaaaaaaataaaataaaataaaaaagattcagaaaaaaagaaaataatcactgtacttaccatgacacttagaaatgktggctagcattatttgtgtcacctaataatataattttttttccttatgctacaaactagctctgctattacaatcactactatttgaagtgttactaaatttaattaaatttattgtatccttctggactcagatatgggagtaaatgctaagacaatttcagaatatgatcacatattaaaagcatattatatggggaaaatgtgatttttaaaacatagaaattggtagagaaacagtttttggatctctttaattt

SEQ ID NO: 604240 - DNA, 513 bp, Homo sapiens
tttcttccattctgtggattgtcttttcactttgcccattgttttctttactatgcagaaacttttgaacttgatgtgataccacttgttcattttagctttggttgcctgagcttttggagtattactcaagaaatctgtgccaagaccaatttcctggaragtttccctaatgtttacttttagtagtttcgtgtctttgatttaagtctttaacccatttggatttgatttttgtatatagtgcaagagggggttctagtttaattattcttaattattctgccaatgactttgggaggccgaggtgggcagatcatgggggcaggagatcgagaccatcctggttaacatggtgaaactccgtctctactaaaaatacaaaaaaaaaaaattagccaggcatggtggcgggcgcctgtactcccagctacttgggaggctgaggaggagaatggtgtgaacccgggaggtggagcttgcagtgagcccagatcgcgccactgcactcca

SEQ ID NO: 604241 - DNA, 513 bp, Homo sapiens
tttcttccattctgtggattgtcttttcactttgcccattgttttctttactatgcagaaacttttgaacttgatgtgataccacttgttcattttagctttggttgcctgagcttttggagtattactcaagaaatctgtgccaagaccaatttcctggagagtttccctaatgtttacttttagtagtttcgtgtctttgatttaagtctttaacccatttggatttgatttttgtatatagtgcaagagrgggttctagtttaattattcttaattattctgccaatgactttgggaggccgaggtgggcagatcatgggggcaggagatcgagaccatcctggttaacatggtgaaactccgtctctactaaaaatacaaaaaaaaaaaattagccaggcatggtggcgggcgcctgtactcccagctacttgggaggctgaggaggagaatggtgtgaacccgggaggtggagcttgcagtgagcccagatcgcgccactgcactcca

SEQ ID NO: 604242 - DNA, 513 bp, Homo sapiens
tttcttccattctgtggattgtcttttcactttgcccattgttttctttactatgcagaaacttttgaacttgatgtgataccacttgttcattttagctttggttgcctgagcttttggagtattactcaagaaatctgtgccaagaccaatttcctggagagtttccctaatgtttacttttagtagtttcgtgtctttgatttaagtctttaacccatttggatttgatttttgtatatagtgcaagagggggttctagtttaattattcttaattattctgccaatgactttgggaggccgaggtgggcagatcatgggggcaggagatcgagaccatcctggttaacatggtgaaactccgtctctactaaaaatacaaaaaaaaaaaattagccaggcatggtggcgggcgcctgtaytcccagctacttgggaggctgaggaggagaatggtgtgaacccgggaggtggagcttgcagtgagcccagatcgcgccactgcactcca

SEQ ID NO: 604243 - DNA, 571 bp, Homo sapiens
ttttgtttacaattgctctgtactataatttaaagtcaggtgatgtgattcttccagtattgttctttttgctcaggatggcttttggtattctgggtcttttatggtttcgtataaattttaggawtttttttctatttctgtgaagagtgttattagtatttcaatagggattgcattgaatctgtagatcgctttgtgaagtatgggtattttaacaatatttactcttccaatcaatgaacatggactatctttcctttttttttttttttgggtgtcctcctttattttttttgcattgatgtttaatagttttcattgtagagatctttcacttcttctgttatgtttattcccatatattttattttatttgtagttattgtaaatgggattacattcttgattttcttctttagattgttcatttttgtcatttagaaatgctactgacttttgtagtttgattttgtatcctgtgactctgaatttgttgatcagttctaatagttttttggtggagtccttaggattttccaaatataagatcaaatcatctgcaaacaag

SEQ ID NO: 604244 - DNA, 569 bp, Homo sapiens
tattcttggcaccttcattgaaaatgagttaattgtaaatgtatggatttatttctgggttctctattctgttccattggtctatgtgtctgttttatgccagtaccatggtgttttgtttacaattgctctgtactataatttaaagtcaggtgatgtgattcttccagtattgttctttttgctcaggatggcttttggtattctgggtcttttatggtttcgtataaattttaggaatttttttctatttctgtgaagagtgttattagtatttcaatagrgattgcattgaatctgtagatcgctttgtgaagtatgggtattttaacaatatttactcttccaatcaatgaacatggactatctttcctttttttttttttttgggtgtcctcctttattttttttgcattgatgtttaatagttttcattgtagagatctttcacttcttctgttatgtttattcccatatattttattttatttgtagttattgtaaatgggattacattcttgattttcttctttagattgttcatttttgtcatttagaaatgctactga

SEQ ID NO: 604245 - DNA, 571 bp, Homo sapiens
ttttgtttacaattgctctgtactataatttaaagtcaggtgatgtgattcttccagtattgttctttttgctcaggatggcttttggtattctgggtcttttatggtttcgtataaattttaggaatttttttctatttctgtgaagagtgttattagtatttcaatagggattgcattgaatctgtagatcgctttgtgaagtatgggtattttaacaatatttactcttccaatcaatgaacatggactatctttcctttttttttttttttgggtgtcctcctttattttttttgcattgatgtttaatagttttcattgtagagatctttcacttcttctgttatgtttattcccakatattttattttatttgtagttattgtaaatgggattacattcttgattttcttctttagattgttcatttttgtcatttagaaatgctactgacttttgtagtttgattttgtatcctgtgactctgaatttgttgatcagttctaatagttttttggtggagtccttaggattttccaaatataagatcaaatcatctgcaaacaag

SEQ ID NO: 604246 - DNA, 339 bp, Homo sapiens
gttatgtttattcccatatattttattttatttgtagttattgtaaatgggattacattcttgattttcttctttagattgttcatttttgtcatttagaaatgctactgacttttgtagtttgattttgtatsctgtgactctgaatttgttgatcagttctaatagttttttggtggagtccttaggattttccaaatataagatcaaatcatctgcaaacaagaaaacagtaataattttacttctttctaatttggatcccttttattgtttttctcttgtctgaattgctctagctaggacttccagtactatgttaagtaacagtgttggaag

SEQ ID NO: 604247 - DNA, 571 bp, Homo sapiens
ttttgtttacaattgctctgtactataatttaaagtcaggtgatgtgattcttccagtattgttctttttgctcaggatggcttttggtattctgggtcttttatggtttcgtataaattttaggaatttttttctatttctgtgaagagtgttattagtatttcaatagggattgcattgaatctgtagatcgctttgtgaagtatgggtattttaacaatatttactcttccaatcaatgaacatggactatctttcctttttttttttttttgggtgtcctcctttattttttttgcattgatgtttaatagttttcattgtagagatctttcacttcttctgttatgtttattcccatatattttattttatttgtagttattgtaaatgggattacattcttgattttcttctttagattgttcatttttgtcatttagaaatgctactgacttttgtagtttgattttgtatcctgtgactctgaatttgttgatcagttctaatagttttttggtggagtccttaggwttttccaaatataagatcaaatcatctgcaaacaag

SEQ ID NO: 604248 - DNA, 339 bp, Homo sapiens
gttatgtttattcccatatattttattttatttgtagttattgtaaatgggattacattcttgattttcttctttagattgttcatttttgtcatttagaaatgctactgacttttgtagtttgattttgtatcctgtgactctgaatttgttgatcagttctaatagttttttggtggagtccttaggattttccaaatataagakcaaatcatctgcaaacaagaaaacagtaataattttacttctttctaatttggatcccttttattgtttttctcttgtctgaattgctctagctaggacttccagtactatgttaagtaacagtgttggaag

SEQ ID NO: 604249 - DNA, 339 bp, Homo sapiens
gttatgtttattcccatatattttattttatttgtagttattgtaaatgggattacattcttgattttcttctttagattgttcatttttgtcatttagaaatgctactgacttttgtagtttgattttgtatcctgtgactctgaatttgttgatcagttctaatagttttttggtggagtccttaggattttccaaatataagatcwaatcatctgcaaacaagaaaacagtaataattttacttctttctaatttggatcccttttattgtttttctcttgtctgaattgctctagctaggacttccagtactatgttaagtaacagtgttggaag

SEQ ID NO: 604250 - DNA, 567 bp, Homo sapiens
ataattttttttccttatgctacaaactagctctgctattacaatcactactatttgaagtgttactaaatttaattaaatttattgtatccttctggactcagatatgggrgtaaatgctaagacaatttcagaatatgatcacatattaaaagcatattatatggggaaaatgtgatttttaaaacatagaaattggtagagaaacagtttttggatctctttaatttccacacattttgcaagtgtggacgctgactttcttgttctaaatgattattttcaagcatgtttgtatagaaaacacccttggaatagaaaaccagtacctccttctggaacaaaggaaaattttatttactgtctagtataatgcagataatttctccctcttgggaagggtacagccaagtgaacttcccataatacaagtttgggtttcttgagcttgggtttttcttccacaatgtaatgtgcaggtgccacttggctctatttgtgttatcctgggaaagctgatggctgtaggtgcatgtttattttggggttctctattctgttgcattg

SEQ ID NO: 604251 - DNA, 504 bp, Homo sapiens
tttttgctttttctcacaaactgattccacttttcccacatacgtttgacaattcatttgaactcatttcacggttcgggtgatgggtgcacccaaatctcacaaataaccagtaaagaacttattcatggaaccaaataccaccataccccaataacctatgggaaaaaaaaataaaataaaataaaaaagattcagaaaaaaagaaaataatcactgtacttaccatgacacttagaaatgttggctagcattatttgtgtcacctaataatataattttttttccttatgctacaaactagctctgctattacaatcactactatttgaagtgttactaaatttaattaaatttattgtatccttctggactcagatatgggagtaaatgctaagacaatttcagaayatgatcacatattaaaagcatattatatggggaaaatgtgatttttaaaacatagaaattggtagagaaacagtttttggatctctttaattt

SEQ ID NO: 604252 - DNA, 504 bp, Homo sapiens
tttttgctttttctcacaaactgattccacttttcccacatacgtttgacaattcatttgaactcatttcacggttcgggtgatgggtgcacccaaatctcacaaataaccagtaaagaacttattcatggaaccaaataccaccataccccaataacctatgggaaaaaaaaataaaataaaataaaaaagattcagaaaaaaagaaaataatcactgtacttaccatgacacttagaaatgttggctagcattatttgtgtcacctaataatataattttttttccttatgctacaaactagctctgctattacaatcactactatttgaagtgttactaaatttaattaaatttattgtatccttctggactcagatatgggagtaaatgctaagacaatttcagaatatgatcacatattaaaagcwtattatatggggaaaatgtgatttttaaaacatagaaattggtagagaaacagtttttggatctctttaattt

SEQ ID NO: 604253 - DNA, 567 bp, Homo sapiens
ataattttttttccttatgctacaaactagctctgctattacaatcactactatttgaagtgttactaaatttaattaaatttattgtatccttctggactcagatatgggagtaaatgctaagacaatttcagaatatgatcacatattaaaagcatattatatggggaaaatgtgatttttaaaacatagaaattggtagagaaacagtttttggatctctttaatttccacacattttgcaagtgtggacgctgactttcttgttcyaaatgattattttcaagcatgtttgtatagaaaacacccttggaatagaaaaccagtacctccttctggaacaaaggaaaattttatttactgtctagtataatgcagataatttctccctcttgggaagggtacagccaagtgaacttcccataatacaagtttgggtttcttgagcttgggtttttcttccacaatgtaatgtgcaggtgccacttggctctatttgtgttatcctgggaaagctgatggctgtaggtgcatgtttattttggggttctctattctgttgcattg

SEQ ID NO: 604254 - DNA, 539 bp, Homo sapiens
ttacattatattaggtgggttcgggttgaggtatctgcaattcaaatgagtattacaatctctacttttatgsataagagactgaggggaaccaagagagggaatgacagtccatatcctggaaggcgaattgtcaggcactgatttccactatgtaacccctgccaatcaccgtgtatttaaagaatccccagataccataccaataggtgttcaagagagaggcctgtaatctaggcgtctgagaaaacaaggctagagattccaatattggagacaacagggctctgggaagattaaggttgagttttctggatctgcagaatagagtcactgaggaccaattgcaagatcagaggagatgaaagaacaagtcagggcatgctcaggaaaagagaataccagggataggttttaggcaagagtcacactgaggaagggcaggttcttggcgtcgctcaggaagaaatccaaaagcaagactgtggtggaagaaagcagctctacggaggcattggcggtgttacagccctgcgtcc

SEQ ID NO: 604255 - DNA, 587 bp, Homo sapiens
tgagccttctctccttggctctgagggctttaccttcacggggtgaggaaaggggttgcattcttggcttttacattatattaggtgggttcgggttgaggtatctgcaattcaaatgagtattacaatctctacttttatgcataagagactgaggggaaccaagagagggaatgacagtccatatcctggaaggcgaattgtcaggcactgatttccactatgtaacccctgccaatcaycgtgtatttaaagaatccccagataccataccaataggtgttcaagagagaggcctgtaatctaggcgtctgagaaaacaaggctagagattccaatattggagacaacagggctctgggaagattaaggttgagttttctggatctgcagaatagagtcactgaggaccaattgcaagatcagaggagatgaaagaacaagtcagggcatgctcaggaaaagagaataccagggataggttttaggcaagagtcacactgaggaagggcaggttcttggcgtcgctcaggaagaaatccaaaagcaagactgtggtggaagaaagcagctctacggaggcattg

SEQ ID NO: 604256 - DNA, 587 bp, Homo sapiens
tgagccttctctccttggctctgagggctttaccttcacggggtgaggaaaggggttgcattcttggcttttacattatattaggtgggttcgggttgaggtatctgcaattcaaatgagtattacaatctctacttttatgcataagagactgaggggaaccaagagagggaatgacagtccatatcctggaaggcgaattgtcaggcactgatttccactatgtaacccctgccaatcaccrtgtatttaaagaatccccagataccataccaataggtgttcaagagagaggcctgtaatctaggcgtctgagaaaacaaggctagagattccaatattggagacaacagggctctgggaagattaaggttgagttttctggatctgcagaatagagtcactgaggaccaattgcaagatcagaggagatgaaagaacaagtcagggcatgctcaggaaaagagaataccagggataggttttaggcaagagtcacactgaggaagggcaggttcttggcgtcgctcaggaagaaatccaaaagcaagactgtggtggaagaaagcagctctacggaggcattg

SEQ ID NO: 604257 - DNA, 587 bp, Homo sapiens
tgagccttctctccttggctctgagggctttaccttcacggggtgaggaaaggggttgcattcttggcttttacattatattaggtgggttcgggttgaggtatctgcaattcaaatgagtattacaatctctacttttatgcataagagactgaggggaaccaagagagggaatgacagtccatatcctggaaggcgaattgtcaggcactgatttccactatgtaacccctgccaatcaccgtgtatttaaagratccccagataccataccaataggtgttcaagagagaggcctgtaatctaggcgtctgagaaaacaaggctagagattccaatattggagacaacagggctctgggaagattaaggttgagttttctggatctgcagaatagagtcactgaggaccaattgcaagatcagaggagatgaaagaacaagtcagggcatgctcaggaaaagagaataccagggataggttttaggcaagagtcacactgaggaagggcaggttcttggcgtcgctcaggaagaaatccaaaagcaagactgtggtggaagaaagcagctctacggaggcattg

SEQ ID NO: 604258 - DNA, 539 bp, Homo sapiens
ttacattatattaggtgggttcgggttgaggtatctgcaattcaaatgagtattacaatctctacttttatgcataagagactgaggggaaccaagagagggaatgacagtccatatcctggaaggcgaattgtcaggcactgatttccactatgtaacccctgccaatcaccgtgtatttaaagaatccccagataccataccaataggtgttcaagagagargcctgtaatctaggcgtctgagaaaacaaggctagagattccaatattggagacaacagggctctgggaagattaaggttgagttttctggatctgcagaatagagtcactgaggaccaattgcaagatcagaggagatgaaagaacaagtcagggcatgctcaggaaaagagaataccagggataggttttaggcaagagtcacactgaggaagggcaggttcttggcgtcgctcaggaagaaatccaaaagcaagactgtggtggaagaaagcagctctacggaggcattggcggtgttacagccctgcgtcc

SEQ ID NO: 604259 - DNA, 539 bp, Homo sapiens
ttacattatattaggtgggttcgggttgaggtatctgcaattcaaatgagtattacaatctctacttttatgcataagagactgaggggaaccaagagagggaatgacagtccatatcctggaaggcgaattgtcaggcactgatttccactatgtaacccctgccaatcaccgtgtatttaaagaatccccagataccataccaataggtgttcaagagagaggcctgtaatctaggcgtctgagaaaacaaggytagagattccaatattggagacaacagggctctgggaagattaaggttgagttttctggatctgcagaatagagtcactgaggaccaattgcaagatcagaggagatgaaagaacaagtcagggcatgctcaggaaaagagaataccagggataggttttaggcaagagtcacactgaggaagggcaggttcttggcgtcgctcaggaagaaatccaaaagcaagactgtggtggaagaaagcagctctacggaggcattggcggtgttacagccctgcgtcc

SEQ ID NO: 604260 - DNA, 539 bp, Homo sapiens
ttacattatattaggtgggttcgggttgaggtatctgcaattcaaatgagtattacaatctctacttttatgcataagagactgaggggaaccaagagagggaatgacagtccatatcctggaaggcgaattgtcaggcactgatttccactatgtaacccctgccaatcaccgtgtatttaaagaatccccagataccataccaataggtgttcaagagagaggcctgtaatctaggcgtctgagaaaacaaggctagagattccaatattggagacaacagggctctgggaagattaaggttgagttttctggatctgcagaatagagtcactgaggaccaattgcaagatcagaggagatgaaagaacaagtcagggcatgctcaggaaaagagaataccagggataggttttaggcaagagtcacactgaggaagggcaggttcttggcgtcgctcaggaagaaatccaaaagcaagmctgtggtggaagaaagcagctctacggaggcattggcggtgttacagccctgcgtcc

SEQ ID NO: 604261 - DNA, 612 bp, Homo sapiens
tgtctagtataatgcagataatttctccctcttgggaagggtacagccaagtgaacttcccataatacaagtttgggtttcttgagcttgggtttttcttccacaatgtaatgtgcaggtgccacttggctctatttgtgttatcctgggaaagctgatggctgtaggtgcatgtttattttggggttctctattctgttgcattggtctttgtgtctgttttcatatcgccaccatgctattttgtctactgtgrccttagggtatagtatgaagtcaagtaatgtgatgtctccagctttgttcttcttgcttaggtttcctttggttgtctgggctctttaaaaatccatacgaaatttagaatagtttttttctgattctgtgaaaaacgacattggttgtttcataggaataatgttgaatgtgtagattgcttttggcagtatagccattctaacaatattgctctttctaatccatgagcatggaatggttttccatttgttttgtcatcaatgatttctttctgcagtgttttatagttctccttttagatatcctttacctccttggttagacatattcttcttttattttattttgggggtt

SEQ ID NO: 604262 - DNA, 465 bp, Homo sapiens
agtgaattctgttcacttaggtgtaacagttaatacttgctgtttaaggaactaattaaaccttactggcttataaaaaaccaccattttatttgtttgaagttctgtggatctgcattttggtgtggtggattcagctgggtagttgatatatttgtgttgcctggatcacaaaaaggccttagtcacctggtgccttgactgagyctggttggtttaagatagtttccttcacaatctggtggtttgtggtgactcttggctaggccctgtgtctccaacagggtagctccagacctcttcacaatttgactgtgtccaaaatgggaagaaccaatgtatatttgcatcacattttccattgtccattcactggacaagtcagatggaaaagcccaatttattgtcagagcataatatgagggcttggatagaaggaaaggtgttattgggaaacatgagtag

SEQ ID NO: 604263 - DNA, 465 bp, Homo sapiens
agtgaattctgttcacttaggtgtaacagttaatacttgctgtttaaggaactaattaaaccttactggcttataaaaaaccaccattttatttgtttgaagttctgtggatctgcattttggtgtggtggattcagctgggtagttgatatatttgtgttgcctggatcacaaaaaggccttagtcacctggtgccttgactgagtctggttggtttaagatagtttccttcacaatctggtggtttgtggtgactcttggctaggccctgtgtctccaacagggtagctccagacctcttcacaatttgactgtgtccaaaatgggaagaaccaatgkatatttgcatcacattttccattgtccattcactggacaagtcagatggaaaagcccaatttattgtcagagcataatatgagggcttggatagaaggaaaggtgttattgggaaacatgagtag

SEQ ID NO: 604264 - DNA, 465 bp, Homo sapiens
agtgaattctgttcacttaggtgtaacagttaatacttgctgtttaaggaactaattaaaccttactggcttataaaaaaccaccattttatttgtttgaagttctgtggatctgcattttggtgtggtggattcagctgggtagttgatatatttgtgttgcctggatcacaaaaaggccttagtcacctggtgccttgactgagtctggttggtttaagatagtttccttcacaatctggtggtttgtggtgactcttggctaggccctgtgtctccaacagggtagctccagacctcttcacaatttgactgtgtccaaaatgggaagaaccaatgtatatttgcatcacattttccattgtccattcactggacaagtcagatggaaaagcccaatttattgtcagagcataatatgagggcttggatagaaggaaargtgttattgggaaacatgagtag

SEQ ID NO: 604265 - DNA, 478 bp, Homo sapiens
gggcatgaaggactcttctcccatggggaagtttttatttttcaggagggaggagggctttcccaagtaatgtgtctagagtrttgggcagaagaatctgggaccacaccacaccagttctctccttaacccacgtcatttgccttctatcccagctgtgtttccagtgtcctctgggtgtttccaagagcgacaggaaacaaataaatctctggtgagttgtttatttgttcttcactttgttttacactgtattttctgagtttattggtgtctgtgaattaaaaaggaaaagtagaaataagtaaaactcaggttgaaggaaatatacataaataagataaagctgacctgtagatataggcaggttataagagcttagagttgtctaagttgggtgcaaagtttcctctgatctttctgatgccgagacaaaaaaggcagtcatatttgttacgtgattggaatggaatccgag

SEQ ID NO: 604266 - DNA, 478 bp, Homo sapiens
gggcatgaaggactcttctcccatggggaagtttttatttttcaggagggaggagggctttcccaagtaatgtgtctagagtgttgggcagaagaatctgggaccacaccacaccagttctctccttaacccacgtcatttgccttctatcccagctgtgtttccagtgtcctctgggtgtttccaagagcgacaggaaacaaataaatctctggtgagttgtttatttgttcttcactttgttttacactgtattttctgagtttatkggtgtctgtgaattaaaaaggaaaagtagaaataagtaaaactcaggttgaaggaaatatacataaataagataaagctgacctgtagatataggcaggttataagagcttagagttgtctaagttgggtgcaaagtttcctctgatctttctgatgccgagacaaaaaaggcagtcatatttgttacgtgattggaatggaatccgag

SEQ ID NO: 604267 - DNA, 478 bp, Homo sapiens
gggcatgaaggactcttctcccatggggaagtttttatttttcaggagggaggagggctttcccaagtaatgtgtctagagtgttgggcagaagaatctgggaccacaccacaccagttctctccttaacccacgtcatttgccttctatcccagctgtgtttccagtgtcctctgggtgtttccaagagcgacaggaaacaaataaatctctggtgagttgtttatttgttcttcactttgttttacactgtattttctgagtttattggtgtctgtgaattaaaaaggaaaagtagaaataagtaaaactcaggttgaaggaaatatacataaataagataaagctgacctgtagatataggcaggttataagagcttagagttgtctaagttgggtgsaaagtttcctctgatctttctgatgccgagacaaaaaaggcagtcatatttgttacgtgattggaatggaatccgag

SEQ ID NO: 604268 - DNA, 478 bp, Homo sapiens
gggcatgaaggactcttctcccatggggaagtttttatttttcaggagggaggagggctttcccaagtaatgtgtctagagtgttgggcagaagaatctgggaccacaccacaccagttctctccttaacccacgtcatttgccttctatcccagctgtgtttccagtgtcctctgggtgtttccaagagcgacaggaaacaaataaatctctggtgagttgtttatttgttcttcactttgttttacactgtattttctgagtttattggtgtctgtgaattaaaaaggaaaagtagaaataagtaaaactcaggttgaaggaaatatacataaataagataaagctgacctgtagatataggcaggttataagagcttagagttgtctaagttgggtgcaaaktttcctctgatctttctgatgccgagacaaaaaaggcagtcatatttgttacgtgattggaatggaatccgag

SEQ ID NO: 604269 - DNA, 427 bp, Homo sapiens
tattttcatcttttaagactcagaaagtaggctgggcataatagctcacatctgtaatcccagcactttggaaggccaaaatgggagaatygctcaaggcgaagagtttaagaccagcctgggaaccataggtaaccttgactctacaaaaaattagacaggtatggtgatatgttcctgttgtccccgctactcaagaagcttagatgagaagatccctcgagcccaggagtctgaggtttcagtgagtctcaatcatgccattgcactccaatcctgggtgatagagtaagaacttgtctccaaaaagaggaaaaaaaaaaggctcagaatgctatgtgaaatcttccttgattctaggtatctttctccacacacagaggtgtctgcttcgttggggtcccttagtaccttgtcaatttttcta

SEQ ID NO: 604270 - DNA, 585 bp, Homo sapiens
ttttacatcacaaatgttttcccctgctattctgaaaaatttattttcatcttttaagactcagaaagtaggctgggcataatagctcacatctgtaatcccagcactttggaaggccaaaatgggagaatcgctcaaggcsaagagtttaagaccagcctgggaaccataggtaaccttgactctacaaaaaattagacaggtatggtgatatgttcctgttgtccccgctactcaagaagcttagatgagaagatccctcgagcccaggagtctgaggtttcagtgagtctcaatcatgccattgcactccaatcctgggtgatagagtaagaacttgtctccaaaaagaggaaaaaaaaaaggctcagaatgctatgtgaaatcttccttgattctaggtatctttctccacacacagaggtgtctgcttcgttggggtcccttagtaccttgtcaatttttctagtgtcactttaccacctgacctgcacatcatgtctttacatgttgacccctttgctgctagactgtagaggataatcttttgaatcatctttgtataagcagtcttaattttgctaa

SEQ ID NO: 604271 - DNA, 393 bp, Homo sapiens
caggagtctgaggtttcagtgagtctcaatcatgccattgcactccaatcctgggtgatagagtaagaacttgtctccaaaaagaggaaaaaaaaaaggctcagaatgctatgtgaaatcttccttgattctaggtatctttctccacacacasaggtgtctgcttcgttggggtcccttagtaccttgtcaatttttctagtgtcactttaccacctgacctgcacatcatgtctttacatgttgacccctttgctgctagactgtagaggataatcttttgaatcatctttgtataagcagtcttaattttgctaaataattacttattgagttcctgctaagtgttaggcactggggaataaggaaggaaaatagaagctgtcagggatg

SEQ ID NO: 604272 - DNA, 439 bp, Homo sapiens
aggcactggggaataaggaaggaaaatagaagctgtcagggatggctttcctaaagatcatccatgagctgagacttagagagtgaggttagccagattaagcgaggcagagggcaggaaagggtgagcacatgccaggcagcaacaagagaggaagagaagcctccaagagcgtatgtatttctctgcagaagaggaatggtgagggggccattaccagcaactcagtaattccagagaaaaaggcagatggggaaagggatacagatggagatttgggcagaaatcagtttccttttcttttcttttttgggacaaggttatactctgtctcccagactggagggcagtggcatgatctcagctcactgcaacccggcctcccaggttcaagtaattctyctacctcagcctcctgagtagctgagattacaggcgc

SEQ ID NO: 604273 - DNA, 517 bp, Homo sapiens
atgtatttctctgcagaagaggaatggtgagggggccattaccagcaactcagtaattccagagaaaaaggcagatggggaaagggatacagatggagatttgggcagaaatcagtttccttttcttttcttttttgggacaaggttatactctgtctcccagactggagggcagtggcatgatctcagctcactgcaacccggcctcccaggttcaagtaattctcctacctcagcctcctgagtagctgagattacaggcgcgtgccactaccacctgctaatttttgtattttattagagatggggtttcaccttgttggccaggctggtcttgaactcctgayctcaaatgatccacttgcctcagcctcccaaagtgctgggatcacagacatgagccaccgtgcccaacccagaagtcagtttctgaaatccttatataaacctttaagatgcttagacattaggtattcaggagtgattcacggatctatttgcattagggataattcac

SEQ ID NO: 604274 - DNA, 622 bp, Homo sapiens
  misc_feature 442, 466, 480, 486, 503, 504, 505, 506, 507, 508, 509, 510,511, 512, 513, 514, 515, 516, 517, 518, 519, 520, 521, 522,523, 524, 525, 526, 527, 528, 529, 530, 531, 532, 533, 534,535, 536, 537, 538, 539, 540, 541, 542, 543, 544, 545: n = A,T,C or G
  misc_feature 546, 547, 548, 549, 550, 551, 552, 553, 554, 555, 556, 557,558, 559, 560, 561, 562, 563, 564, 565, 566, 567, 568, 569,570, 571, 572, 573, 574, 575, 576, 577, 578, 579, 580, 581,582, 583, 584, 585, 586, 587, 588, 589, 590, 591, 592: n = A,T,C or G
  misc_feature 593, 594, 595, 596, 597, 598, 599, 600, 601, 602: n = A,T,C or G
taggtatcagtggccattataagaatgaatttctattgaataaataaatgtatatatctcggtccctggagaaatacactctgctcattactttacaaattttatcaatcaaatgagaagtaaagtaatatacataaactctttcagttacttgtatttactttaccctttttctgtttcagttttactgtgccaaggaaatgcatttgggttttgtggtggttgttgtggttgtggttgtggttgtggttgtttttgttttttgagatggaatttcactcttcctgcccagtctgaagtgcartggtgtgacctcagctcatggcaacctctgcctcctgggttcaagcgattctcctgcctcagcctcccaagtagctggaattacaggcatgtgccaccatgaacagctaattttgtgtttttagtagagatgggtttntcccatgttggggtcaccgagccncgaattccaaaatncaggtntatagtctgtccaaaannnnnnnnnnnnnnnnnnnnnnnnnnnnnnnnnnnnnnnnnnnnnnnnnnnnnnnnnnnnnnnnnnnnnnnnnnnnnnnnnnnnnnnnnnnnnnnnnnnnaagtctttgcataggtaaga

SEQ ID NO: 604275 - DNA, 622 bp, Homo sapiens
  misc_feature 442, 466, 480, 486, 503, 504, 505, 506, 507, 508, 509, 510,511, 512, 513, 514, 515, 516, 517, 518, 519, 520, 521, 522,523, 524, 525, 526, 527, 528, 529, 530, 531, 532, 533, 534,535, 536, 537, 538, 539, 540, 541, 542, 543, 544, 545: n = A,T,C or G
  misc_feature 546, 547, 548, 549, 550, 551, 552, 553, 554, 555, 556, 557,558, 559, 560, 561, 562, 563, 564, 565, 566, 567, 568, 569,570, 571, 572, 573, 574, 575, 576, 577, 578, 579, 580, 581,582, 583, 584, 585, 586, 587, 588, 589, 590, 591, 592: n = A,T,C or G
  misc_feature 593, 594, 595, 596, 597, 598, 599, 600, 601, 602: n = A,T,C or G
taggtatcagtggccattataagaatgaatttctattgaataaataaatgtatatatctcggtccctggagaaatacactctgctcattactttacaaattttatcaatcaaatgagaagtaaagtaatatacataaactctttcagttacttgtatttactttaccctttttctgtttcagttttactgtgccaaggaaatgcatttgggttttgtggtggttgttgtggttgtggttgtggttgtggttgtttttgttttttgagatggaatttcactcttcctgcccagtctgaagtgcagtggtgtgayctcagctcatggcaacctctgcctcctgggttcaagcgattctcctgcctcagcctcccaagtagctggaattacaggcatgtgccaccatgaacagctaattttgtgtttttagtagagatgggtttntcccatgttggggtcaccgagccncgaattccaaaatncaggtntatagtctgtccaaaannnnnnnnnnnnnnnnnnnnnnnnnnnnnnnnnnnnnnnnnnnnnnnnnnnnnnnnnnnnnnnnnnnnnnnnnnnnnnnnnnnnnnnnnnnnnnnnnnnnaagtctttgcataggtaaga

SEQ ID NO: 604276 - DNA, 457 bp, Homo sapiens
aggtgaatgtgggattcacctctcatcaaagaaagggttctacattgatcagctaggatacacacttatgaaataacagctaatcaaagtactcatttttcccatgatcacatgggctactgcagcacctacatttctcctatcccctcatttggccttgaattagagctccttgatccactcatgcaaggtggtccataaaacacatcaaataaaccatgtcgaataagcttctgatatcaaaatatttatcaaaaaagaaaacattgaatgaccacagacttgctggatattaatacatatttatatttcaaaatcagtgcagtatttattraaaatgataattttggttttcatggaatgaattttatgattacttctaaaattaactaagtttggtatattatcttacactgtaaaggacttttataaaacagctatcatatcaaagaactgg

SEQ ID NO: 604277 - DNA, 587 bp, Homo sapiens
atgaattttatgattacttctaaaattaactaagtttggtatattatcttacactgtaaaggacttttataaaacagctatcatatcaaagaactggctgtctcaaaaaaatttcgccaaagcatctatatgcaacttaatcatatcttattcactcatgtcagtgaaacttctctccctgaggcctgacagttatcaagtgaaatgagctgctgtggtttaccccaactctagcactccctcctgtctccagtactctccacagcaataacctcttttgtgagactgggcatatgctgaagcaactggaagtgagttgtctcaagtttacttggctttaactcccaagaccccagcaaatgtctttctttcctccttttgtgtccattcaccatccctcttcctttgaaaaaatgattatcagaactgtcatcctgatgcttcccttcctaactgctttwtatggatgattgtgaccacttttttcatctgtattcagcagtagtatacacctgtaatctctctttttcatctcattttccttcccttgtggctagaatcatgctcaaaaataaaagggaaataaa

SEQ ID NO: 604278 - DNA, 411 bp, Homo sapiens
ccatttaaaattataatgagttgcatcaagagtttcttatcaatctctttttatgaaactgggtctcactctgtcaacccagggctagaatgcaggggcctgattatggctcactgtggtctcaaactcctgacctcaagcaatcttcccacctcaacttcctgaatagctggaactacaggtgcataccatcatgtcatgctaatgtttttattgttatctttgtagagacaaggcctcattatacctcccaggctggtctcaagctcctgggctcaagcaaatcttccacttctgcytcccaaaatgttgagataagcattgtgcaccaccacacccagccctaatcaatttctttaaatcaatctcaatgttgcccaggcatggtggctcacacctgtaatctcagcc

SEQ ID NO: 604279 - DNA, 564 bp, Homo sapiens
cagtttgcacaagttaaagtccttgaggaagggggtgggtaaggagcccttgatgtcttgtaaatgaaggagccaaatrgagtttgtctggttttctcagctaagggagagtctattcatattaaaaacaaggttagctatctaaggaagagtctattcatgttaatacaacgttgggtattacaaaacgtctgttcatgacctggaaattcttctgtgttagttctgttaaaagaaaaactttaaaggagtttaattgagcaataaacgattcacgaatcagacagtccccagaatcacagcagattcacagagactccagcgcagtcatgtggtggaagaagatttatagacaaaagggaaatggcataccgaaatcggaagtgaggtacagaaacaactcagcgtttgccttctttgaacacattttgaacatttggcagtgcctgagtggttgaagtttggccattgggattggccaagatgtagctgttgttccaggtgcatactctcaagttagtttttcattcttgtatacctattaaggtaggttgcagttcatcc

SEQ ID NO: 604280 - DNA, 564 bp, Homo sapiens
cagtttgcacaagttaaagtccttgaggaagggggtgggtaaggagcccttgatgtcttgtaaatgaaggagccaaatagagtttgtctggttttctcagctaagggagagtctattcatattaaaaacaaggttagctatctaaggaagagtctattcatrttaatacaacgttgggtattacaaaacgtctgttcatgacctggaaattcttctgtgttagttctgttaaaagaaaaactttaaaggagtttaattgagcaataaacgattcacgaatcagacagtccccagaatcacagcagattcacagagactccagcgcagtcatgtggtggaagaagatttatagacaaaagggaaatggcataccgaaatcggaagtgaggtacagaaacaactcagcgtttgccttctttgaacacattttgaacatttggcagtgcctgagtggttgaagtttggccattgggattggccaagatgtagctgttgttccaggtgcatactctcaagttagtttttcattcttgtatacctattaaggtaggttgcagttcatcc

SEQ ID NO: 604281 - DNA, 542 bp, Homo sapiens
ttgtctggttttctcagctaagggagagtctattcatattaaaaacaaggttagctatctaaggaagagtctattcatgttaatacaacgttgggtwttacaaaacgtctgttcatgacctggaaattcttctgtgttagttctgttaaaagaaaaactttaaaggagtttaattgagcaataaacgattcacgaatcagacagtccccagaatcacagcagattcacagagactccagcgcagtcatgtggtggaagaagatttatagacaaaagggaaatggcataccgaaatcggaagtgaggtacagaaacaactcagcgtttgccttctttgaacacattttgaacatttggcagtgcctgagtggttgaagtttggccattgggattggccaagatgtagctgttgttccaggtgcatactctcaagttagtttttcattcttgtatacctattaaggtaggttgcagttcatccacaaggactcatatatagaattatggagtccttctcaggccatacttagttcactttaaca

SEQ ID NO: 604282 - DNA, 564 bp, Homo sapiens
cagtttgcacaagttaaagtccttgaggaagggggtgggtaaggagcccttgatgtcttgtaaatgaaggagccaaatagagtttgtctggttttctcagctaagggagagtctattcatattaaaaacaaggttagctatctaaggaagagtctattcatgttaatacaacgttgggtattacaaaacgtctgttcatgacctggaaattcttctgtgttagttctgttraaagaaaaactttaaaggagtttaattgagcaataaacgattcacgaatcagacagtccccagaatcacagcagattcacagagactccagcgcagtcatgtggtggaagaagatttatagacaaaagggaaatggcataccgaaatcggaagtgaggtacagaaacaactcagcgtttgccttctttgaacacattttgaacatttggcagtgcctgagtggttgaagtttggccattgggattggccaagatgtagctgttgttccaggtgcatactctcaagttagtttttcattcttgtatacctattaaggtaggttgcagttcatcc

SEQ ID NO: 604283 - DNA, 603 bp, Homo sapiens
gcctgcatgcaaactcttaaaacatttgagtaagtacagtgcaccagggagactcttatgactattgggataacaccaagaatttggtatatgctcctaactcagggtccccataaatcaaaccacctaaaatcaaatagattaaagaatgaattaaagagtttacttgcttaactaagtgggttttttgttaattccctacaaccraatctttataataccccatgttttctccacatgctgtaagtgttagcagctgcacagatacttaagataagtgtctcatgatagtagagaagtcttgatctgtgatcttgggaaaagctgttcacattagggataccatcttcttctggggggaactgtccttgttagctttaccttaagggttccaatgggtatatggttccaagtgtggaaggacccttctgagttgtgagactatgaacccaaagtttaaggttttaaagttttgctgtcatgtggatggcaagggcagtccttctctgatgttctcagaagatccagtcatcagattctagattttgaaggggttgactgtcctcagtgagccataaaaggctttctttacctggtgaaaat

SEQ ID NO: 604284 - DNA, 603 bp, Homo sapiens
gcctgcatgcaaactcttaaaacatttgagtaagtacagtgcaccagggagactcttatgactattgggataacaccaagaatttggtatatgctcctaactcagggtccccataaatcaaaccacctaaaatcaaatagattaaagaatgaattaaagagtttacttgcttaactaagtgggttttttgttaattccctacaaccgaatctttataataccccatgttttctccacatgctgtaagtgttagcagctgcacagatacttaagataagtgtctcatgatagtagagaagtcttgatctgtgatcttgggaaaagctgttcayattagggataccatcttcttctggggggaactgtccttgttagctttaccttaagggttccaatgggtatatggttccaagtgtggaaggacccttctgagttgtgagactatgaacccaaagtttaaggttttaaagttttgctgtcatgtggatggcaagggcagtccttctctgatgttctcagaagatccagtcatcagattctagattttgaaggggttgactgtcctcagtgagccataaaaggctttctttacctggtgaaaat

SEQ ID NO: 604285 - DNA, 603 bp, Homo sapiens
gcctgcatgcaaactcttaaaacatttgagtaagtacagtgcaccagggagactcttatgactattgggataacaccaagaatttggtatatgctcctaactcagggtccccataaatcaaaccacctaaaatcaaatagattaaagaatgaattaaagagtttacttgcttaactaagtgggttttttgttaattccctacaaccgaatctttataataccccatgttttctccacatgctgtaagtgttagcagctgcacagatacttaagataagtgtctcatgatagtagagaagtcttgatctgtgatcttgggaaaagctgttcacattagggatrccatcttcttctggggggaactgtccttgttagctttaccttaagggttccaatgggtatatggttccaagtgtggaaggacccttctgagttgtgagactatgaacccaaagtttaaggttttaaagttttgctgtcatgtggatggcaagggcagtccttctctgatgttctcagaagatccagtcatcagattctagattttgaaggggttgactgtcctcagtgagccataaaaggctttctttacctggtgaaaat

SEQ ID NO: 604286 - DNA, 554 bp, Homo sapiens
cctgcatgcaaactcttaaaacatttgagtaagtacagtgcaccagggagactcttatgactattgggataacaccaagaatttggtatatgctcctaactcagggtccccataaatcaaaccacctaaaatcaaatagattaaagaatgaattaaagagtttacttgcttaactaagtgggttttttgttaattccctacaaccgaatctttataataccccatgttttctccacatgctgtaagtgttagcagctgcacagatacttaagataagtgtctcatgatagtagagaagtcttgatctgtgatcttgggaaaagctgttcacattagggataccatcttcttctggggggaactgtccttgttagctttaccttaagggttccaatgggtatatggttccaagtgtggaaggacccttctgakttgtgagactatgaacccaaagtttaaggttttaaagttttgctgtcatgtggatggcaagggcagtccttctctgatgttctcagaagatccagtcatcagattctagattttgaaggggt

SEQ ID NO: 604287 - DNA, 574 bp, Homo sapiens
ttgaaggggttgactgtcctcagtgagccataaaaggctttctttacctggtgaaaatacayttcagggtaataatctactgtttcaacatcaactgtctcgcatggaagagcttttatacaatcagaaaacatgcactgaaaatgacaactgaatgaaatccctttataaaatgtttaaatggcccatcacataaccaaatgtacctgaagttttgattgttttcctaggaatataggtatgacaaaccaaacattggttataaactattttagcagtttagaaatcaccacaccaatatatttaatttggatcattttctctttccatgatgagttatggaatgcagaacttttaataacaaaagttttaaggacttaagaaggataaggtggccatcctggttcttcataagtctgtgcttaattaacattagacttacatcctcttgaataccagctgtttctccaaattaggtgtatggtactggtaactgatgagtagttataggtgatttgacttagaccatggagtttatttaaattatatatctaaacaatttcaatattggtga

SEQ ID NO: 604288 - DNA, 585 bp, Homo sapiens
taataatctactgtttcaacatcaactgtctcgcatggaagagcttttatacaatcagaaaacatgcactgaaaatgacaactgaatgaaatccctttataaaatgtttaaatggcccatcasataaccaaatgtacctgaagttttgattgttttcctaggaatataggtatgacaaaccaaacattggttataaactattttagcagtttagaaatcaccacaccaatatatttaatttggatcattttctctttccatgatgagttatggaatgcagaacttttaataacaaaagttttaaggacttaagaaggataaggtggccatcctggttcttcataagtctgtgcttaattaacattagacttacatcctcttgaataccagctgtttctccaaattaggtgtatggtactggtaactgatgagtagttataggtgatttgacttagaccatggagtttatttaaattatatatctaaacaatttcaatattggtgatttagcatgcaaatgtggcaaaatatttccttggtatacaatttttgttttacttaggttagcagttttataaaccagtt

SEQ ID NO: 604289 - DNA, 574 bp, Homo sapiens
ttgaaggggttgactgtcctcagtgagccataaaaggctttctttacctggtgaaaatacacttcagggtaataatctactgtttcaacatcaactgtctcgcatggaagagcttttatacaatcagaaaacatgcactgaaaatgacaactgaatgaaatccctttataaaatgtttaaatggcccatcacataaccaaatgtacctgaagttttgattgttttcctaggaatataggtatgacaaaccaaayattggttataaactattttagcagtttagaaatcaccacaccaatatatttaatttggatcattttctctttccatgatgagttatggaatgcagaacttttaataacaaaagttttaaggacttaagaaggataaggtggccatcctggttcttcataagtctgtgcttaattaacattagacttacatcctcttgaataccagctgtttctccaaattaggtgtatggtactggtaactgatgagtagttataggtgatttgacttagaccatggagtttatttaaattatatatctaaacaatttcaatattggtga

SEQ ID NO: 604290 - DNA, 585 bp, Homo sapiens
taataatctactgtttcaacatcaactgtctcgcatggaagagcttttatacaatcagaaaacatgcactgaaaatgacaactgaatgaaatccctttataaaatgtttaaatggcccatcacataaccaaatgtacctgaagttttgattgttttcctaggaatataggtatgacaaaccaaacattggttataaactattttagcagtttagaaatcaccacaccaatatatttaatttggatcattttctctttccatgatgagttatggaatgcagaacttttaataacaaaagttttaaggacttaagaaggataaggtggccatcctggttcttcataagtctgtgcttaattaacattagacttacatcctcttgaataccagctgtttctccaaattaggtgyatggtactggtaactgatgagtagttataggtgatttgacttagaccatggagtttatttaaattatatatctaaacaatttcaatattggtgatttagcatgcaaatgtggcaaaatatttccttggtatacaatttttgttttacttaggttagcagttttataaaccagtt

SEQ ID NO: 604291 - DNA, 603 bp, Homo sapiens
gactattagtgaacaaggatattttcccatgtatattcaaattaaggtgaacttctttagagaattgtgccttagaaagaaaaagtatttccctatatttgagtcctcacaagttttcctacgatgagtgcttttgtgattattttgaataacaaagtaatatttaaagaaactctcttgccctgaatgtactttatgtcaattgatgttgcatatagagagcatcagagtcaagccacaagaaaaggaggaacataacttagcaaagacttagaggattagtcctaatagtgtgaaatcaaaagttcaagtgagggaataaatgyagcctttaatgattacttaaatgaagtttaactctagcaggatctacaagaaattggcaacctttggcttcagtaacagaaactcaggatatatgcccttcagtgcttttgtattctgcatcatattgagagagactcctttaaacaagcaataagaaacttcctgtgacaacataataaattcaaaaagttctgtaactcagacaatttagatagaagtgaggactttggcctagacagccctgttcactctaaagatggattaaacaaggaaaaa

SEQ ID NO: 604292 - DNA, 195 bp, Homo sapiens
ttcttgggggatcggggaacttatggggaatttttacccatgatattaaagttattagaaacctgtgttcacaagtgtttctcagggtccttttcwttctttcatggatcttctaagagacaccatattctaaaattttacatgcttgtgaagtttttagaaactgcatcaccattaagcaattaactgtggaaa

SEQ ID NO: 604293 - DNA, 195 bp, Homo sapiens
ttcttgggggatcggggaacttatggggaatttttacccatgatattaaagttattagaaacctgtgttcacaagtgtttctcagggtccttttctttctttcatggatcttctaagagacaccatattctaaaattttrcatgcttgtgaagtttttagaaactgcatcaccattaagcaattaactgtggaaa

SEQ ID NO: 604294 - DNA, 663 bp, Homo sapiens
ggttatttctgtggtctacaataacttaataaccataattagggtggatgtrgtggctcatgcctgtaatcccagcactgtgggaggccgaggtggaaggatcacaaggtcaggagatcgagaccatcctggctaacatggtgaaatccatctttactaaaaatacaaaaattagcctggcatggtggtgggtgcctgtagtcccagctactcaggaggctgaggcaggagaatggcatgaacccgggaggtggaggttgcagtgagccgagattgcaccactgtactccagcctgggtgacagagcaagattccatctcagaaaaaaaaaaaaatacaagaattttagaaatcctatacaattttagaatggattgatgacatacactgaatataacctaaagaaggttcaacattattttttattttgacagttctagccatgtgacttaacatgttaaatagtcctgtttacttctcttttgggtacttcaggggcctctgtagtatcccaaagttagaggtcagaaaaaaaattttgaagttgaaatttgattttgggaagcctattaaatatattaaaggtttaaacacttgatgttatgaaatagaattccatgtcaacgtaagtcattcatttacctaaaatcatgacttaaaaaa

SEQ ID NO: 604295 - DNA, 663 bp, Homo sapiens
ggttatttctgtggtctacaataacttaataaccataattagggtggatgtagtggctcatgcctgtaatcccagcactgtgggaggccgaggtggaaggatcacaaggtcaggagatcgagaccatcctggctaacatggtgaaatccatctttactaaaaatacaaaaattagcctggcatggtggtgggtgcctgtagtcccagctactcaggaggctgaggcaggagaatggcatgaacccgggaggtggaggttgcagtgagccgagattgcaccactgtactccagcctgggtgacagagcaagattccatctcagaaaaaaaaaaaaatacaagaattttagaaatcctatacaattttagaatggattgatgacatacactgaatataacctaaagaaggttcaacattattttttattttgacagttctagccatgtgacttaacatgttaaatagtcctgtttacytctcttttgggtacttcaggggcctctgtagtatcccaaagttagaggtcagaaaaaaaattttgaagttgaaatttgattttgggaagcctattaaatatattaaaggtttaaacacttgatgttatgaaatagaattccatgtcaacgtaagtcattcatttacctaaaatcatgacttaaaaaa

SEQ ID NO: 604296 - DNA, 445 bp, Homo sapiens
tcttgagccccatattttgagaccagactggacaacatggcacatttggttagaagtgtttgaccataactactattccagaaaaagatctactcattagaactacaaatcataaaattataagttctacaaaaacaaatcaaccttatctaccacccagttctacccaattatatcatgttagaacagaaggtctcaccgtggactcgagagctgatatgagaaatgtcaccaccatcctgctctccacggaatmatcttcaacagactcctcatcttccatggactcctcatcttccatgggcagggtggaaactgcaacttgtgccatgatccctgtgcaaaaaagtagtaagaaattgaaaggtagaaatgcagggtcctaaactcacatccagagctgtgagagtttctcaccggctgccaaattgttttttgggtcaga

SEQ ID NO: 604297 - DNA, 445 bp, Homo sapiens
tcttgagccccatattttgagaccagactggacaacatggcacatttggttagaagtgtttgaccataactactattccagaaaaagatctactcattagaactacaaatcataaaattataagttctacaaaaacaaatcaaccttatctaccacccagttctacccaattatatcatgttagaacagaaggtctcaccgtggactcgagagctgatatgagaaatgtcaccaccatcctgctctccacggaataatcttcaacagactcctcatcttccatggactcctcatcttccatgggcagggtggaaactgcaacttgtgccatgatccctgtgcaaaaaagtagtaagaaattgaawggtagaaatgcagggtcctaaactcacatccagagctgtgagagtttctcaccggctgccaaattgttttttgggtcaga

SEQ ID NO: 604298 - DNA, 445 bp, Homo sapiens
tcttgagccccatattttgagaccagactggacaacatggcacatttggttagaagtgtttgaccataactactattccagaaaaagatctactcattagaactacaaatcataaaattataagttctacaaaaacaaatcaaccttatctaccacccagttctacccaattatatcatgttagaacagaaggtctcaccgtggactcgagagctgatatgagaaatgtcaccaccatcctgctctccacggaataatcttcaacagactcctcatcttccatggactcctcatcttccatgggcagggtggaaactgcaacttgtgccatgatccctgtgcaaaaaagtagtaagaaattgaaaggtagaaatgcagkgtcctaaactcacatccagagctgtgagagtttctcaccggctgccaaattgttttttgggtcaga

SEQ ID NO: 604299 - DNA, 535 bp, Homo sapiens
agtaatggaagatgttgccattgttcagctgtgcttcatgtgcttacaggcatagaaaaggataaatgttacaggggaaaagtatccttatttcagttctgtctgacaaggacctaaacaaccatatattaattttattgctcagctccaagaggctgtgtataaagccataaatgataaaaacagctcaagatgttgtaatacagcttcttgcatacaataatgctaatgcagagtgtcaaactgctattagacccctgagagagaaggctcatttaactaaatatattaaggcytgcgatgacattggaggtaacttacataaggctattcttttagctcaggctatggctagattaagagtaagaaaaaatatgcttcatttctcaggctcttgccttaattgtgggcaaattggacacaagaaaggaatgtagaaaggaattaaaaagacgaaaactactaccatcaatcaacagaaaagtcccagtgtatgtccctggtgtaagaaaggcaatcactaggcaagtccgtg

SEQ ID NO: 604300 - DNA, 535 bp, Homo sapiens
agtaatggaagatgttgccattgttcagctgtgcttcatgtgcttacaggcatagaaaaggataaatgttacaggggaaaagtatccttatttcagttctgtctgacaaggacctaaacaaccatatattaattttattgctcagctccaagaggctgtgtataaagccataaatgataaaaacagctcaagatgttgtaatacagcttcttgcatacaataatgctaatgcagagtgtcaaactgctattagacccctgagagagaaggctcatttaactaaatatattaaggcttgcgatgrcattggaggtaacttacataaggctattcttttagctcaggctatggctagattaagagtaagaaaaaatatgcttcatttctcaggctcttgccttaattgtgggcaaattggacacaagaaaggaatgtagaaaggaattaaaaagacgaaaactactaccatcaatcaacagaaaagtcccagtgtatgtccctggtgtaagaaaggcaatcactaggcaagtccgtg

SEQ ID NO: 604301 - DNA, 535 bp, Homo sapiens
agtaatggaagatgttgccattgttcagctgtgcttcatgtgcttacaggcatagaaaaggataaatgttacaggggaaaagtatccttatttcagttctgtctgacaaggacctaaacaaccatatattaattttattgctcagctccaagaggctgtgtataaagccataaatgataaaaacagctcaagatgttgtaatacagcttcttgcatacaataatgctaatgcagagtgtcaaactgctattagacccctgagagagaaggctcatttaactaaatatattaaggcttgcgatgacattggaggtaacttacataaggctattcttttagctcaggctatgrctagattaagagtaagaaaaaatatgcttcatttctcaggctcttgccttaattgtgggcaaattggacacaagaaaggaatgtagaaaggaattaaaaagacgaaaactactaccatcaatcaacagaaaagtcccagtgtatgtccctggtgtaagaaaggcaatcactaggcaagtccgtg

SEQ ID NO: 604302 - DNA, 353 bp, Homo sapiens
gataaattcctggaaaaatacaactctcctagcttaaatcaggaagaattagataccccaagcagaccaataaagcaagcagcaagattgaaatggtaattttaaaattaccagcaaaaaaagctgagggccagacagattcacagcagaattctaccagacattcaaagaatgtcttctttcattcaaggaagaaatgataccaatyttttcatactattccacaaaacagagaaagaagaaaccctcccttattcattctatgaagccagcatcactctaataccaaaaccatggaaggacataaccaaaaaagaaaactacagaccaatatccttgatgaatgcagatgc

SEQ ID NO: 604303 - DNA, 353 bp, Homo sapiens
gataaattcctggaaaaatacaactctcctagcttaaatcaggaagaattagataccccaagcagaccaataaagcaagcagcaagattgaaatggtaattttaaaattaccagcaaaaaaagctgagggccagacagattcacagcagaattctaccagacattcaaagaatgtcttctttcattcaaggaagaaatgataccaattttttcatactattccacaaracagagaaagaagaaaccctcccttattcattctatgaagccagcatcactctaataccaaaaccatggaaggacataaccaaaaaagaaaactacagaccaatatccttgatgaatgcagatgc

SEQ ID NO: 604304 - DNA, 353 bp, Homo sapiens
gataaattcctggaaaaatacaactctcctagcttaaatcaggaagaattagataccccaagcagaccaataaagcaagcagcaagattgaaatggtaattttaaaattaccagcaaaaaaagctgagggccagacagattcacagcagaattctaccagacattcaaagaatgtcttctttcattcaaggaagaaatgataccaattttttcatactattccacaaaacagagaaagaagaaaccctcccttattcattctatgaagccagcatcacyctaataccaaaaccatggaaggacataaccaaaaaagaaaactacagaccaatatccttgatgaatgcagatgc

SEQ ID NO: 604305 - DNA, 362 bp, Homo sapiens
agaaatcaaaggacagctacaatgaaaattacaaaacactactgaaagaaatcatagatggagccaagcacggtggcacatgcctataatccgagctactcgggaarctgaggcaggagaatcgcttcaacccgggaggcagaagttgtagtgagccgagatcacaccattgcactcccacctcagcgacaagagcgaaactccctctggaaaaaaaaaaaaaaaaaaacgaaaggaaagaaatcatagatgacccacacaaatggaaacgcatccccatgctcatggatgggtagaaccaatattgtaaaaattaccattctgttaaaggcaatctacaatatcaatgcaatccccatctg

SEQ ID NO: 604306 - DNA, 362 bp, Homo sapiens
agaaatcaaaggacagctacaatgaaaattacaaaacactactgaaagaaatcatagatggagccaagcacggtggcacatgcctataatccgagctactcgggaagctgaggcaggagaatcgcttsaacccgggaggcagaagttgtagtgagccgagatcacaccattgcactcccacctcagcgacaagagcgaaactccctctggaaaaaaaaaaaaaaaaaaacgaaaggaaagaaatcatagatgacccacacaaatggaaacgcatccccatgctcatggatgggtagaaccaatattgtaaaaattaccattctgttaaaggcaatctacaatatcaatgcaatccccatctg

SEQ ID NO: 604307 - DNA, 508 bp, Homo sapiens
ttctcaggctcttgccttaattgtgggcaaattggacacaagaaaggaatgtagaaaggaattaaaaagacgaaaactactaccatcaatcaacagaaaagtcccagtgtatgtccctggtgtaagaaaggcaatcactaggcaagtccgtgtcattctaaatttagcaaagatgggcaacctctttcaggaaataggaagagggacccaccttgagcccctcaacaaaccgaggcatacccagcacagccactgcccttacaaatgtacaacaattgtcccccgcctcagcaagcagtgctgctgtagacctctacagaacaattcccatctccttacttcctggggagccaccaaagaaggtccccacaggcgttagggcasccttaccctgaggaactgttgggaacaagacccctcaaatccggccataaactggccccaaaactggccataaacaaaatctgtgcagcactgtgacatgttcatgatggccataacacccacg

SEQ ID NO: 604308 - DNA, 603 bp, Homo sapiens
gactattagtgaacaaggatattttcccatgtatattcaaattaaggtgaacttctttagagaattgtgccttagaaagaaaaagtatttccctatatttgagtcctcacaagttttcctacgatgagtgcttttgtgattattttgaataacaaagtaatatttaaagaaactctcttgccctgaatgtactttatgtcaattgatgttgcatatagagagcatcagagtcaagccacaagaaaaggaggaacataacttagcaaagacttagaggattagtcctaatagtgtgaaatcaaaagttcaagtgagggaataaatgcagcctttaatgattacttaaatgaagtttaactctagcaggatctacaagaaattggcaacctttggcttcagtaacagaaactcaggatatatgcccttcagtgcttttgtattctgcatcatattgagagagactcctttaaacaarcaataagaaacttcctgtgacaacataataaattcaaaaagttctgtaactcagacaatttagatagaagtgaggactttggcctagacagccctgttcactctaaagatggattaaacaaggaaaaa

SEQ ID NO: 604309 - DNA, 391 bp, Homo sapiens
gcggatggattctgtatctgatgagagttttggacaaaatgaattcctagtttctgagtcttatttttacccctgattcaagaaaactgtgaattatccagccrgtaaaaaactctcacagctctggatgtgagtttaggacactggatttctaccactcattttcttactactttcttgtgcaaggatcatggcacaagttgcagtttccaccctgcccattgaagagaggagtctgttgaagataaggagtccttgcagagcaggatggtggtgacattcctgtcagctctcgatccatggtcagaccttctgttctcacattctgtatttcagtaggactgggcggtagataaggttgatttgtttttgtagaacttacaattttgtg

SEQ ID NO: 604310 - DNA, 391 bp, Homo sapiens
gcggatggattctgtatctgatgagagttttggacaaaatgaattcctagtttctgagtcttatttttacccctgattcaagaaaactgtgaattatccagccagtraaaaactctcacagctctggatgtgagtttaggacactggatttctaccactcattttcttactactttcttgtgcaaggatcatggcacaagttgcagtttccaccctgcccattgaagagaggagtctgttgaagataaggagtccttgcagagcaggatggtggtgacattcctgtcagctctcgatccatggtcagaccttctgttctcacattctgtatttcagtaggactgggcggtagataaggttgatttgtttttgtagaacttacaattttgtg

SEQ ID NO: 604311 - DNA, 391 bp, Homo sapiens
gcggatggattctgtatctgatgagagttttggacaaaatgaattcctagtttctgagtcttatttttacccctgattcaagaaaactgtgaattatccagccagtaaaaaactctcacagctctggatgtgagtttaggacactggatttctaccactcaytttcttactactttcttgtgcaaggatcatggcacaagttgcagtttccaccctgcccattgaagagaggagtctgttgaagataaggagtccttgcagagcaggatggtggtgacattcctgtcagctctcgatccatggtcagaccttctgttctcacattctgtatttcagtaggactgggcggtagataaggttgatttgtttttgtagaacttacaattttgtg

SEQ ID NO: 604312 - DNA, 391 bp, Homo sapiens
gcggatggattctgtatctgatgagagttttggacaaaatgaattcctagtttctgagtcttatttttacccctgattcaagaaaactgtgaattatccagccagtaaaaaactctcacagctctggatgtgagtttaggacactggatttctaccactcattttcttactactttcttgtgcaaggatcatggcacaagttgcagtttccaccctgcccattgaagagaggagtctgttgaagataaggagtccttgcagagcaggatggtggtgacattcctgtcagctctcgatccatggtcagaccttctgttctcacattctgtatttcagtaggactgggyggtagataaggttgatttgtttttgtagaacttacaattttgtg

SEQ ID NO: 604313 - DNA, 530 bp, Homo sapiens
tcaggcaatccacccaccttggcctcccagtgtgctgagatcagaggcgtgagtcaccacgccatgcccagccatttttaaaataataacgttattgaaatatgrttaacgtatcatgcaattcatttatcaaagtacgcaattcaggccaggtgcagtggctaattcctataacgctaagactttgggcagctgaggcaggtggatcgcttgtgttcaggagtttgcgactagcctgggcaacatggcaaaacagcatctctagcaaaaatacaaaaattagctggatgtggtggctcatgcctgtagtcccaactacttggggacatgagactggaagatcacttgagcccagaagccataggttgcagtgagaccagatggcaccactgcactacagcatgggtgacaaaaggagaccctgtctttaaataactaaagaaaaaaagaaagtatacaattgagtggtttttagaatattcaaggagctgtgcagtatacatacagatggataattgtataaataagta

SEQ ID NO: 604314 - DNA, 530 bp, Homo sapiens
tcaggcaatccacccaccttggcctcccagtgtgctgagatcagaggcgtgagtcaccacgccatgcccagccatttttaaaataataacgttattgaaatatggttaacgtatcatgcaattcatttatcaaagtacgcaattcaggccaggtgcagtggctaattcctataacgctaagactttgggcagctgaggcaggtggatcgcttgtgttcaggagtttgcgactagcctgggcaacatggcaaaacagcatctctagcaaaaatacaaaaattagctggrtgtggtggctcatgcctgtagtcccaactacttggggacatgagactggaagatcacttgagcccagaagccataggttgcagtgagaccagatggcaccactgcactacagcatgggtgacaaaaggagaccctgtctttaaataactaaagaaaaaaagaaagtatacaattgagtggtttttagaatattcaaggagctgtgcagtatacatacagatggataattgtataaataagta

SEQ ID NO: 604315 - DNA, 598 bp, Homo sapiens
aagcttcagggtaacaatgggacaagtgtgggctgtggttcgttctaccttggaactttttcacactgatgatgaggaggaaggagagtataacaaagtaacagtagaggttacagaccaggtttatttgccacctaaatctaaagcagaaaaggaaggagaggttcatccctacccttctgcaccccctcattattattttgaagaaaacgaccctccagatctttcttttctggaggacactgggtgaaaagtagttrccctggtgactgttcgagcagcgccttgagcgactgctcttagttctattcaggcaggaattcagcaagctagacaaaagtgggatttagaggcttggcagttccctgtttgaatacaccccgcagatcaacagggaaatattatagctacatttgagccttttccttttaaattactcaaaaaatttaaacacgctataaatcagtatggaccaggttctccttttgaaatgggaccgttaaagaatgttgctgtttccagtcagatgattcctactgactgggacactattactcgagcttgtctaattcctgctcagttcttacaatttaaaact

SEQ ID NO: 604316 - DNA, 600 bp, Homo sapiens
ggaagtgacaacaggttactggagaaagaaaaggtgtacagggttccaaatatacattctatttccaaaggacatttgtgaagccagtggaaagcgaacaaacaagctgctaaataagtcacaagtgtgttctcatacagttttgcgattaactaaataggacattcaacagataaaatttgttttacatagttactcctctaataggatgaacttgtggattgtgagatagagctgatataacctgttttctctctgcctcttttttttcccccaagttttgtgtgcaatacattaggaaaaatataattggrctacaaagctacaaaaatggcttcctggcagttccatgcttgtttccatgtggtgcctatatttggcactgtgttctcatttgcactttcctgcttgattagttaatgtatgaaggacaagcctgatctctactgtgaatttttaccaaggtattctagtagaaaaatgagtatgtaatggtgctgtggcatgctaaagtgtgtaaaacattaagaatctaaaaatatgctgatttccaagttttgtcccagagcaactgtgcactctgattatatcgctactgct

SEQ ID NO: 604317 - DNA, 598 bp, Homo sapiens
aagcttcagggtaacaatgggacaagtgtgggctgtggttcgttctaccttggaactttttcacactgatgatgaggaggaaggagagtataacaaagtaacagtagaggttacagaccaggtttatttgccacctaaatctaaagcagaaaaggaaggagaggttcatccctacccttctgcaccccctcattattattttgaagaaaacgaccctccagatctttcttttctggaggacactgggtgaaaagtagttaccctggtgactgttcgagcagcgccttgagcgactgctcttagttctattcaggcaggaattcagcaagctagacaaaagtgggatttagaggcttggcagttccctgtttgaatacaccccgcagatcaacagggaaatattatagctacatttgagccttttccttttaaattactcaaaaaatttaaacacgctayaaatcagtatggaccaggttctccttttgaaatgggaccgttaaagaatgttgctgtttccagtcagatgattcctactgactgggacactattactcgagcttgtctaattcctgctcagttcttacaatttaaaact

SEQ ID NO: 604318 - DNA, 615 bp, Homo sapiens
gagccttttccttttaaattactcaaaaaatttaaacacgctataaatcagtatggaccaggttctccttttgaaatgggaccgttaaagaatgttgctgtttccagtcagatgattcctactgactgggacactattactcgagcttgtctaattcctgctcagttcttacratttaaaacttagtgggcagatgaagcttccattcaggctgctcgcaatgcctgggcccaacctcaaattaatataactgcagaccaacttttgggggttggtggctgggctggtttacatgcacaagtggtcatgcaagatgatgccatagaacagcttacaggagtgtgcattagagcttggaaaaaatcacttcatgtggagaacaatacccttcctttagtgctataaaacagggaccaagagaaacatgcgtggattttgtagcttggttacaggaatctcttaaaaagatgattgcagattgggctgcttaggatatacttttgcagttattagcttttgacaatgctaatcactattgctaggctgctctgcgacctatcagagggaaagcacatttagttgattatatcaaggcctgtgatagtatcagaggta

SEQ ID NO: 604319 - DNA, 601 bp, Homo sapiens
ccgtgtgtgctgtcaaaccccttactgggcaggggagcatgcagacaggcaggtgcaataggcagggcaagtggccatggtactgtctaggggtgggttcctgcgactcccacagcccaagtgggcatgtgttacagtgcactcttttaactttgccatccacagacggcttaagtgttaacctgttcagtgccctcttggtacccagttccttgtccagcatccagaaagaattaagttgcacacagacttgaggatggtgaatgtgggggttttattgagtggtggaggtggcactcaatgggatggatggggagctggaaaggggatrgaatgggaagatgatcttcccccggagctttgccatccagaggctgatctctccaaccactgccagccaaactcctctaggcattcagatgctccttctcttctttctgccacatcattctgcaattctgctcttctgttcatctcctcatctgcttgccatgcagaggctgatctctacaaccactgccagccaaactcctcttggcattcagatgctccttctcttctttctgcccatcattctgcaattctgctcttctgttcatct

SEQ ID NO: 604320 - DNA, 601 bp, Homo sapiens
ccgtgtgtgctgtcaaaccccttactgggcaggggagcatgcagacaggcaggtgcaataggcagggcaagtggccatggtactgtctaggggtgggttcctgcgactcccacagcccaagtgggcatgtgttacagtgcactcttttaactttgccatccacagacggcttaagtgttaacctgttcagtgccctcttggtacccagttccttgtccagcatccagaaagaattaagttgcacacagacttgaggatggtgaatgtgggggttttattgagtggtggaggtggcactcaatgggatggatggggagctggaaaggggatggaatgggaagatgatcttcccccggagctttgccatccagaggctgatctctccaaccactgccagccaaactcctctaggcattcagatgctccttctcttctttctgccacatcattctrcaattctgctcttctgttcatctcctcatctgcttgccatgcagaggctgatctctacaaccactgccagccaaactcctcttggcattcagatgctccttctcttctttctgcccatcattctgcaattctgctcttctgttcatct

SEQ ID NO: 604321 - DNA, 539 bp, Homo sapiens
gattttctgatgattagtgatgttgagtattttttcatacggttgtttgccatacatacgttgtattttgaaaaaagaattcacagacggcttaagtgttaaccckttcagtgccctcttggtatccaagtccttgtccagcattcagaaagaagttgcacatggacttgaggatggtgaatgtgggggctcatgttctttgcctatttgtagtgggtttgttttttgcttattgattctttatacatgctaagtattagacctttttcagatatgtaatttgaaaatattttcttctgttctgtagggtgttctctgttgatagtttcttttgctgtgctgaagctctttagtttcattaggtcccactcatcaattcttcttgttgcaattgcttttggaatcttcatcatgaaatatttgcctgcgtctatgtccagaatgatatttcctaagttttcttctagggtttatatagttttgggtcttacataagtccttcatccatcttgagttgatttttttatatggtgaaagga

SEQ ID NO: 604322 - DNA, 177 bp, Homo sapiens
tcaaagggggtctgtgcaacacstgcaatattgggagtaatatcctcccccaacatggatattagaaacagtatcacaaggggttgtacaccacctgtgatattatggagtactatcattttctttccccatggatatgtagaacaatatcacaaaggtggtgtacaacccctgcca

SEQ ID NO: 604323 - DNA, 177 bp, Homo sapiens
tcaaagggggtctgtgcaacacctgcaatattgggagtaatatcctcccccaacatggatattagaaacagtatcacaaggggttgtacaccacctgtgatattrtggagtactatcattttctttccccatggatatgtagaacaatatcacaaaggtggtgtacaacccctgcca

SEQ ID NO: 604324 - DNA, 461 bp, Homo sapiens
aacccctgccatattgggagtaatactgtactttccccacctagatattaggaacaatatcacggggggttatacaccactgcaacattgggagtaatatcatcctttccctccctggatattaggaacaatamctcatgggtgtgtacaccctgttccatattgggattaatattttctcccttgctggacataaggaaaaatataacggggggtatacactccttatgatattgccagtaatattatagacttcccaaagggatattagaaaaagtatcagagaggggtgtacatcccctgcgatattgggaataatattctttcatccctggatattaggaataatatcacaaaggggttttataccccccgtgacattttaattaatatcatcttccccactgaatattaggaacaaattcccaggggtggtacaccacctgcaatatggacagcta

SEQ ID NO: 604325 - DNA, 461 bp, Homo sapiens
aacccctgccatattgggagtaatactgtactttccccacctagatattaggaacaatatcacggggggttatacaccactgcaacattgggagtaatatcatcctttccctccctggatattaggaacaatacctcatgggtgtgtacaccctgttccatattgggattaatattttctcccttgctggacataaggaamaatataacggggggtatacactccttatgatattgccagtaatattatagacttcccaaagggatattagaaaaagtatcagagaggggtgtacatcccctgcgatattgggaataatattctttcatccctggatattaggaataatatcacaaaggggttttataccccccgtgacattttaattaatatcatcttccccactgaatattaggaacaaattcccaggggtggtacaccacctgcaatatggacagcta

SEQ ID NO: 604326 - DNA, 461 bp, Homo sapiens
aacccctgccatattgggagtaatactgtactttccccacctagatattaggaacaatatcacggggggttatacaccactgcaacattgggagtaatatcatcctttccctccctggatattaggaacaatacctcatgggtgtgtacaccctgttccatattgggattaatattttctcccttgctggacataaggaaaaatataacggggggtatacactccttatgatattgccagtaatattatagacttcccaaagggatattagaaaragtatcagagaggggtgtacatcccctgcgatattgggaataatattctttcatccctggatattaggaataatatcacaaaggggttttataccccccgtgacattttaattaatatcatcttccccactgaatattaggaacaaattcccaggggtggtacaccacctgcaatatggacagcta

SEQ ID NO: 604327 - DNA, 461 bp, Homo sapiens
aacccctgccatattgggagtaatactgtactttccccacctagatattaggaacaatatcacggggggttatacaccactgcaacattgggagtaatatcatcctttccctccctggatattaggaacaatacctcatgggtgtgtacaccctgttccatattgggattaatattttctcccttgctggacataaggaaaaatataacggggggtatacactccttatgatattgccagtaatattatagacttcccaaagggatattagaaaaagtatcagagaggggtgtacatcccctgcgatattgggaataatattctttcatccctggatattaggaataatatcacaaaggggttktataccccccgtgacattttaattaatatcatcttccccactgaatattaggaacaaattcccaggggtggtacaccacctgcaatatggacagcta

SEQ ID NO: 604328 - DNA, 615 bp, Homo sapiens
gagccttttccttttaaattactcaaaaaatttaaacacgctataaatcagtatggaccaggttctccttttgaaatgggaccgttaaagaatgttgctgtttccagtcagatgattcctactgactgggacactattactcgagcttgtctaattcctgctcagttcttacaatttaaaacttagtgggcagatgaagcttccattcaggctgctcgcaatgcctgggcccaacctcaaattaatataactgcagaccaacttttgggggttggtggctgggctggtttacatgcacaagtggtcatgcaagatgatgccatagaacagcttacaggagtgtgcattagagcttggaaaaaatcacttcatgtggagaacaatacccttcctttagtgctataaaacagggaccaagagaaacatgcgtggattttgtarcttggttacaggaatctcttaaaaagatgattgcagattgggctgcttaggatatacttttgcagttattagcttttgacaatgctaatcactattgctaggctgctctgcgacctatcagagggaaagcacatttagttgattatatcaaggcctgtgatagtatcagaggta

SEQ ID NO: 604329 - DNA, 524 bp, Homo sapiens
agaggggtgtacatcccctgcgatattgggaataatattctttcatccctggatattaggaataatatcacaaaggggttttataccccccgtgacattttaattaatatcatcttccccactgaatattaggaacaaattcccaggggtggtacaccacctgcaatatggacagctatatcattgtctctcccccgaatataaggaacaatatcacaagggggttgtacaacccctgtgatattgggagtaactttataccctttccacatggatattaggaacaatatcacagggtgggtgtacacccactgcgatattgggagtaatatcatcctcyaccccctgggtattatgaacaatatcatggggagggggtgtatgccctctgtgatattgggagtaatatcatcctgtcccctctggatattaggaatgatatcacagcggggctgtaccttttctgcactattgggagtggtatcaccccctccccctatggatattaggaacaatatcacaaa

SEQ ID NO: 604330 - DNA, 524 bp, Homo sapiens
agaggggtgtacatcccctgcgatattgggaataatattctttcatccctggatattaggaataatatcacaaaggggttttataccccccgtgacattttaattaatatcatcttccccactgaatattaggaacaaattcccaggggtggtacaccacctgcaatatggacagctatatcattgtctctcccccgaatataaggaacaatatcacaagggggttgtacaacccctgtgatattgggagtaactttataccctttccacatggatattaggaacaatatcacagggtgggtgtacacccactgcgatattgggagtaatatcatcctccaccccctgggtattatgaacaatatcatggggagggggtgtatgccctctgtgatattgggagtaatatcatcctgtcccctctggatattaggaatgatatcacagcggggctgtaccttttctgcactattgggagtggtatcacccyctccccctatggatattaggaacaatatcacaaa

SEQ ID NO: 604331 - DNA, 616 bp, Homo sapiens
ggggctgtaccttttctgcactattgggagtggtatcaccccctccccctatggatattaggaacaatatcacaaagggggtgtacacatcctgtgatattgagagtaatattgtycactcttccctgggatattaggaacaatatcacaggcagagtgtacaccccctgctattttacctgtaatattattctcatccaacttggatattaggaataatataacaggaggggtgtacaccacctgtgatattgggagtaatatcattctctccccccatggatattgagaacattatcacaggggcggtttacacttcctgcgccatttagagtaatatcatccttttcccccatggatattaggaacgatatcgcatgggaagtgtacacgcccgccatattgggagtaatattttctcccttgctggacattaggaacaatatcacgggaatgcacacaccctgcgatattgccagtaatattgtagtctcctcccaggatattaggaacaatatcacaaggggggtgtacatgccctgtgatattggaagtaatatcatcgactccccccacggatattagtaacaacatcagaaggggtgtacaccccttg

SEQ ID NO: 604332 - DNA, 616 bp, Homo sapiens
ggggctgtaccttttctgcactattgggagtggtatcaccccctccccctatggatattaggaacaatatcacaaagggggtgtacacatcctgtgatattgagagtaatattgttcactcttccctgggatattaggaacaatatcacaggcagagtgtacaccccctgctattttacctgtaatattattctcatccaacttggatattaggaataatataacaggaggggtgtacaccacctgtgatattgggagtaatatcattctctccccccatggatattgagaacawtatcacaggggcggtttacacttcctgcgccatttagagtaatatcatccttttcccccatggatattaggaacgatatcgcatgggaagtgtacacgcccgccatattgggagtaatattttctcccttgctggacattaggaacaatatcacgggaatgcacacaccctgcgatattgccagtaatattgtagtctcctcccaggatattaggaacaatatcacaaggggggtgtacatgccctgtgatattggaagtaatatcatcgactccccccacggatattagtaacaacatcagaaggggtgtacaccccttg

SEQ ID NO: 604333 - DNA, 540 bp, Homo sapiens
ggggagggggtgtatgccctctgtgatattgggagtaatatcatcctgtcccctctggatattaggaatgatatcacagcggggctgtaccttttctgcactattgggagtggtatcaccccctccccctatggatattaggaacaatatcacaaagggggtgtacacatcctgtgatattgagagtaatattgttcactcttccctgggatattaggaacaatatcacaggcagagtgtacaccccctgctattttacctgtaatattattctcatccaacttggatattaggaataatataacaggaggggtgtacaccacctgtgatattgggagtaatatcattctctccccccatggatattgagaacattatcacaggggcggtttacacttcctgcgccatttagagtaatatcatccttttcccccatggatattaggaacgatatcgcatgggaagtgtacacgcccgccatattgggagtaatattttctccyttgctggacattaggaacaatatcacgggaatgcaca

SEQ ID NO: 604334 - DNA, 585 bp, Homo sapiens
gtgatattggaagtaatatcatcgactccccccacggatattagtaacaacatcagaaggggtgtacaccccttgtgatatttatagtactatcatcctataccccctggatattaggaacaatacaacggaggggtgtatacccactgtgatattgggagtaatttcatcctctaccccttggatgttaggagcagtatcacaaggggggtgtscaccctctgtgatattaaaaataataccattctctccttctctggatactaggaataatatcacagtgctggtgtgcaccctttacactatttggagcaatatcaccctctccccaacttgatattagagacaatatcatggggggtggcgtgtaacaccctgcactgttgggagtactatcatctattcttcccctggatataagaaacagtatcacagaaggggtctacacctcctgagattttgggagtaatatcatcctctccaaatctggatattaagaacagtataatggggtgtagggagtaatatggtgggagtaatacaatcctcctccccacttgatattaggaacaatatcgcaaaacg

SEQ ID NO: 604335 - DNA, 569 bp, Homo sapiens
atcacagtgctggtgtgcaccctttacactatttggagcaatatcaccctctccccaacttgatattagagacaatatcatggggggtggcgtgtaacaccctgcactgttgggagtactatcatctaktcttcccctggatataagaaacagtatcacagaaggggtctacacctcctgagattttgggagtaatatcatcctctccaaatctggatattaagaacagtataatggggtgtagggagtaatatggtgggagtaatacaatcctcctccccacttgatattaggaacaatatcgcaaaacgtgtgtacacccactgtgacatttggagtaatatcaacatttccccacctggtatcacggggagagtgtacactccttatgatattggaagtatcattgtctctcactctcgatattaggaaaaatagcacagggtgtgtatacacttcctgtgattttgggaagaacatcatacccttctgtctttgatattaggaacaatatcacagaggggatgtacaacttatgtgatattataatattctttcttcccatggat

SEQ ID NO: 604336 - DNA, 508 bp, Homo sapiens
ggtggcgtgtaacaccctgcactgttgggagtactatcatctattcttcccctggatataagaaacagtatcacagaaggggtctacacctcctgagattttgggagtaatatcatcctctccaaatctggatattaagaacagtataatggggtgtrgggagtaatatggtgggagtaatacaatcctcctccccacttgatattaggaacaatatcgcaaaacgtgtgtacacccactgtgacatttggagtaatatcaacatttccccacctggtatcacggggagagtgtacactccttatgatattggaagtatcattgtctctcactctcgatattaggaaaaatagcacagggtgtgtatacacttcctgtgattttgggaagaacatcatacccttctgtctttgatattaggaacaatatcacagaggggatgtacaacttatgtgatattataatattctttcttcccatggatattaggaatgatatcccggggggc

SEQ ID NO: 604337 - DNA, 542 bp, Homo sapiens
ccctctgtgatattaaaaataataccattctctccttctctggatactaggaataatatcacagtgctggtgtgcaccctttacactatttggagcaatatcaccctctccccaacttgatattagagacaatatcatggggggtggcgtgtaacaccctgcactgttgggagtactatcatctattcttcccctggatataagaaacagtatcacagaaggggtctacacctcctgagattttgggagtaatatcatcctctccaaatctggatattaagaacagtataatggggtgtagggagtaatatggtgggagtaatacaatcctcctccccacttgmtattaggaacaatatcgcaaaacgtgtgtacacccactgtgacatttggagtaatatcaacatttccccacctggtatcacggggagagtgtacactccttatgatattggaagtatcattgtctctcactctcgatattaggaaaaatagcacagggtgtgtatacacttcctgtgattttgggaagaacatcatac

SEQ ID NO: 604338 - DNA, 569 bp, Homo sapiens
atcacagtgctggtgtgcaccctttacactatttggagcaatatcaccctctccccaacttgatattagagacaatatcatggggggtggcgtgtaacaccctgcactgttgggagtactatcatctattcttcccctggatataagaaacagtatcacagaaggggtctacacctcctgagattttgggagtaatatcatcctctccaaatctggatattaagaacagtataatggggtgtagggagtaatatggtgggagtaatacaatcctcctccccacttgatattaggaacaatatcgcaaaacgtgtgtacacccactgtgacatttggagtaatatcaacatttccccacctggtatcacggggagagtgtacactccttaygatattggaagtatcattgtctctcactctcgatattaggaaaaatagcacagggtgtgtatacacttcctgtgattttgggaagaacatcatacccttctgtctttgatattaggaacaatatcacagaggggatgtacaacttatgtgatattataatattctttcttcccatggat

SEQ ID NO: 604339 - DNA, 508 bp, Homo sapiens
ggtggcgtgtaacaccctgcactgttgggagtactatcatctattcttcccctggatataagaaacagtatcacagaaggggtctacacctcctgagattttgggagtaatatcatcctctccaaatctggatattaagaacagtataatggggtgtagggagtaatatggtgggagtaatacaatcctcctccccacttgatattaggaacaatatcgcaaaacgtgtgtacacccactgtgacatttggagtaatatcaacatttccccacctggtatcacggggagagtgtacactccttatgatattggaagtatcattgtctctcactctcgatattaggaaaaatagcacagggtgtgtatacacttcctgtgattttgggaagaacatcatacccttctgtctttgatattaggaacaatatcacagaggggatgtacaacttatgtgatattataatattcttwcttcccatggatattaggaatgatatcccggggggc

SEQ ID NO: 604340 - DNA, 561 bp, Homo sapiens
acctggtatcacggggagagtgtacactccttatgatattggaagtatcattgtctctcactctcgatattaggaaaaatagcacagggtgtgtatacacttcctgtgattttgggaagaacatcatacccttctgtctttgatattaggaacaatatcacagaggggatgtacaacttatgtgatattataatattctttcttcccatggatattaggaatgatatcccggggggcttgttgtacacmccctgtgatacggacagtaatatcattgtccttccccctacatattagaaacaatatcacaagggtggtatacatcccctggatattagaaactatcacaggggggctgtacaacctctttgatactgtgagtaatgccattgtctcccctcctgggtattaataacaatatcatagggtgggtgtacaccccctgcaatattgggaataatatcatcctgtcttccccgggatattaggaatggtatcacaggtggggtttacaccccctgcaattttgtcagtaatattactcctggatgttattgaata

SEQ ID NO: 604341 - DNA, 561 bp, Homo sapiens
acctggtatcacggggagagtgtacactccttatgatattggaagtatcattgtctctcactctcgatattaggaaaaatagcacagggtgtgtatacacttcctgtgattttgggaagaacatcatacccttctgtctttgatattaggaacaatatcacagaggggatgtacaacttatgtgatattataatattctttcttcccatggatattaggaatgatatcccggggggcttgttgtacaccccctgtgatacggacagtaatatcattgtccttccccctacatattagaaacaatatcacaagggtggtatacatcccctggatattagaaactatcacaggggggctgtacaacctctttgatactgtgagtaatrccattgtctcccctcctgggtattaataacaatatcatagggtgggtgtacaccccctgcaatattgggaataatatcatcctgtcttccccgggatattaggaatggtatcacaggtggggtttacaccccctgcaattttgtcagtaatattactcctggatgttattgaata

SEQ ID NO: 604342 - DNA, 436 bp, Homo sapiens
cggacagtaatatcattgtccttccccctacatattagaaacaatatcacaagggtggtatacatcccctggatattagaaactatcacaggggggctgtacaacctctttgatactgtgagtaatgccattgtctcccctcctgggtattaataacaatatcatagggtgggtgtacaccccctgcaatattgggaataatatcatcctgtcttccccgggatattaggaayggtatcacaggtggggtttacaccccctgcaattttgtcagtaatattactcctggatgttattgaatatatcacagtgggggtgtacaccccctgtgatatggggagtaatagcatcctctttcccactggatactacaaacaatatcgcagattgtgtacaacgtcctgtgatattgttcacaatatttagggaaggagag

SEQ ID NO: 604343 - DNA, 436 bp, Homo sapiens
cggacagtaatatcattgtccttccccctacatattagaaacaatatcacaagggtggtatacatcccctggatattagaaactatcacaggggggctgtacaacctctttgatactgtgagtaatgccattgtctcccctcctgggtattaataacaatatcatagggtgggtgtacaccccctgcaatattgggaataatatcatcctgtcttccccgggatattaggaatggtatcacaggtggggtttacaccccctgcaattttgtcagtaatattactcctggatgttattgaatatatcacagtgggggtgtacaccccctgtgatatggggagtaatagcatcctctttcccactggatactacaaacaatatcgcagattgtgtacaacstcctgtgatattgttcacaatatttagggaaggagag

SEQ ID NO: 604344 - DNA, 564 bp, Homo sapiens
gaggtacttccagggggtcaaggggagaaatacctgttgggggtcaatgccctcctaattctggagtaggggctaggctagaatggtagaatgctcaaaagaatccagcraagaggaatatttctgagataataaataggactgtcccatcattggaagctcctgcataccataagctactagaggtcagtaaacatatttgtgtgtatcctggagtacctagaagacagtcttccatgtaagaagcattttacttgttgttttttgagatggggtttcactctgtcacccaggctggagggcactggtgagatcttggctcactccaatctccatttcctaggctcaggtgatcctcacacctcagccatccaagtagttgaaacaatagagctatgtcaccatagacctgtgtcaccatgctgggctgagttttgtagagatagggttttgccttgttacccaggctcttctttaactgttgggctcaagtgttctgctcgcctcagcctctcaaagtgctggggttacagacatgagacattcagccttaatagttgttta

SEQ ID NO: 604345 - DNA, 457 bp, Homo sapiens
  misc_feature 129: n = A,T,C or G
gaaacttaagatattcttactatctctagtaactattagttattctagtaattcttagtatctctagtaattcatagctgtatttacccttagaattgaggcaagaaattttcagaattaycttgctgntttatttatataaccttactcataatacacaaggtaacatgaagtattgggtcatattactgaggaatagaaattatgaacagtttaacaacaatggccgctgagttaaactagtgttaaaggagtcatcattgccagtgcttcaaatgttgcagttttatattgctggtcaccagtgccgaggttaaagatttattctgttttgtggtcaccagttgacttctgtgtctgtgttcagggagtgaatggggtcataaaagtcaatgcagttgcctattaagagaatcctaccttgcagaatgggacctttggtgtcagggtgtgaaca

SEQ ID NO: 604346 - DNA, 387 bp, Homo sapiens
tgagccttctgcctggggaacccccgcaaaaggtcccaacaggagtctgtggaccgttgccaacagggacaatgggattacttttcagaaggtctagtttaagtttagaargggtacaaatacacactggagtcattgattcagattacaatgaggaaattcaaattgtgatatctacttctgttccctggaaagcaccagccagaagtgcgcatagcacagctcctgagtgtgccgtatgtgggaatgggaaaaagtgaaattaaatgaactggaggatttggaagcacaaataaaaaaggcaaggcagcttattgggtaaatcaaattactgataaacatcctaccttttaaataactatccagggaaagaactttaaaggtttg

SEQ ID NO: 604347 - DNA, 387 bp, Homo sapiens
tgagccttctgcctggggaacccccgcaaaaggtcccaacaggagtctgtggaccgttgccaacagggacaatgggattacttttcagaaggtctagtttaagtttagaaggggtacaaatacacactggagtcattgattcagattacaatgaggaaattcaaattgtgatatctacttctgttccctggaaagcaccagccagaagtgcgcatagcacagctcctgagtgwgccgtatgtgggaatgggaaaaagtgaaattaaatgaactggaggatttggaagcacaaataaaaaaggcaaggcagcttattgggtaaatcaaattactgataaacatcctaccttttaaataactatccagggaaagaactttaaaggtttg

SEQ ID NO: 604348 - DNA, 418 bp, Homo sapiens
gacagaagctctttagcttaatgtagtgtcatttgtctatgatttgttgtttgcctatgcttctgatgtcttacccataaaaatctttgtgcagactaatgtcctcaarcattttccctatatttacttagagtagtttgataattttgggccttatatttcagtcttcaatcgattctgagtttatgttgttatatggtgttacataggaagctaatatcattcttctccatatggatatttagttttcccagtgtcattcatttgaagaggctgtcctttccccagcgtatgttcttggcatgttcgtccaaaatcagttggctggaaatatgtggatttatttctgggtgccgtattctatggtctttaccccaagaatcattacttcttaaaatgcaattcagattagcatgaa

SEQ ID NO: 604349 - DNA, 418 bp, Homo sapiens
gacagaagctctttagcttaatgtagtgtcatttgtctatgatttgttgtttgcctatgcttctgatgtcttacccataaaaatctttgtgcagactaatgtcctcaaacattttccctatatttacttagagtagtttgataattttgggccttayatttcagtcttcaatcgattctgagtttatgttgttatatggtgttacataggaagctaatatcattcttctccatatggatatttagttttcccagtgtcattcatttgaagaggctgtcctttccccagcgtatgttcttggcatgttcgtccaaaatcagttggctggaaatatgtggatttatttctgggtgccgtattctatggtctttaccccaagaatcattacttcttaaaatgcaattcagattagcatgaa

SEQ ID NO: 604350 - DNA, 381 bp, Homo sapiens
taaggaaaggcttatagcatcagaatccttaatcatagatttcattattgtgtgttgtttttttgagatagggtctttgtctgtcatccaggcagaagtgcagtgataataattcactgcagccctgaactctgggtacaagccatccttttgcctcagtatcccaactagctggttctacaggcatgagccaccatgcccgggtaattaaaaattttttttttgtagagatgggggtctcactatgttgctctggctgatctcaaattcctggcctcaagtgatctttctgccacagctttttaaagtgctaggattacaggmatgagccaccatgcctaatatagagtgtaatattattttcaaagtcttattcctagg

SEQ ID NO: 604351 - DNA, 381 bp, Homo sapiens
taaggaaaggcttatagcatcagaatccttaatcatagatttcattattgtgtgttgtttttttgagatagggtctttgtctgtcatccaggcagaagtgcagtgataataattcactgcagccctgaactctgggtacaagccatccttttgcctcagtatcccaactagctggttctacaggcatgagccaccatgcccgggtaattaaaaattttttttttgtagagatgggggtctcactatgttgctctggctgatctcaaattcctggcctcaagtgatctttctgccacagctttttaaagtgctaggattacaggcatgagccaccatgcctaatatagagtgtaatatyattttcaaagtcttattcctagg

SEQ ID NO: 604352 - DNA, 540 bp, Homo sapiens
cacagtggaaactgctaaagccccagaagtrtatcaaagtagctatattttgcattgtgaagggcccgatggacaacctgggactattcaaccaattacaacttctgtacctaaaaatttatgggggagagatttattatgacaatggggagcacaagttctaattccataacaattacacagccctcaaagtcagcatatgatgcacgaaatggggcatgtccgtggaatgggagtagaaaaaaaatttgcaaggtttgaaagaactgcttcaaacggaaagacaaagttcttgccaaagattaggatatcatttttgatggtggccattgttaagcctccagaacctatacctttaaaatggttaacagataagccaatttggatagaataatggctgctaagcaaagagaaactggaagctttagagaaaatagttactgaacaattagaaaatgggcacatagctccaacattttccccttggaattctccagttttcataattaagaaaaaatcaggtaaatggagaatgttaac

SEQ ID NO: 604353 - DNA, 583 bp, Homo sapiens
ctctcttgtagcaatctgctttgtagagttctagaaaaaaatggtatctcttttttcttttaaatatttaaatwtccattattattgtaacaaaatcaatctttcagagtaatgattctcattatggagtcatttgatgattaagaccagttggcataggaagaaattgtgatttagaaattatgtgataattatgaattggtcttaagctacagtgttcattgatcactttttcaaattacgaatggattctattactttttatatgaccagattacattaatactagcataattatgatttcaaatttttacaaatcagacttaattctgaattcagttattagttttgatattgctgaaatattttaaccttcagcctcttttttaacatattcaaaaatactctttgaatcactgactcaaaatgaaaggcaacaaacataataattaggttataattgttttaaaagtgtattcttttcctctgttttaggaacaagcacaatataaaaaacaattagagcagttaaacaaggatataatacagcttcactaaataagaaggaactcacacttaaaga

SEQ ID NO: 604354 - DNA, 583 bp, Homo sapiens
ctctcttgtagcaatctgctttgtagagttctagaaaaaaatggtatctcttttttcttttaaatatttaaatatccattattattrtaacaaaatcaatctttcagagtaatgattctcattatggagtcatttgatgattaagaccagttggcataggaagaaattgtgatttagaaattatgtgataattatgaattggtcttaagctacagtgttcattgatcactttttcaaattacgaatggattctattactttttatatgaccagattacattaatactagcataattatgatttcaaatttttacaaatcagacttaattctgaattcagttattagttttgatattgctgaaatattttaaccttcagcctcttttttaacatattcaaaaatactctttgaatcactgactcaaaatgaaaggcaacaaacataataattaggttataattgttttaaaagtgtattcttttcctctgttttaggaacaagcacaatataaaaaacaattagagcagttaaacaaggatataatacagcttcactaaataagaaggaactcacacttaaaga

SEQ ID NO: 604355 - DNA, 511 bp, Homo sapiens
accagttggcataggaagaaattgtgatttagaaattatgtgataattatgaattggtcttaagctacagtgttcattgatcactttttcaaattacgaatggattctattactttttatatgaccagattacattaatactagcataattatgatttcaaatttttacaaatcagacttaattctgaattcagttattagttttgatattgctgaaatattttaamcttcagcctcttttttaacatattcaaaaatactctttgaatcactgactcaaaatgaaaggcaacaaacataataattaggttataattgttttaaaagtgtattcttttcctctgttttaggaacaagcacaatataaaaaacaattagagcagttaaacaaggatataatacagcttcactaaataagaaggaactcacacttaaagatgtggaatgtaaattctacaaaatgaaaactgcttatgaagaggttacaactgagttagaagaatataaggaa

SEQ ID NO: 604356 - DNA, 511 bp, Homo sapiens
accagttggcataggaagaaattgtgatttagaaattatgtgataattatgaattggtcttaagctacagtgttcattgatcactttttcaaattacgaatggattctattactttttatatgaccagattacattaatactagcataattatgatttcaaatttttacaaatcagacttaattctgaattcagttattagttttgatattgctgaaatattttaaccttcakcctcttttttaacatattcaaaaatactctttgaatcactgactcaaaatgaaaggcaacaaacataataattaggttataattgttttaaaagtgtattcttttcctctgttttaggaacaagcacaatataaaaaacaattagagcagttaaacaaggatataatacagcttcactaaataagaaggaactcacacttaaagatgtggaatgtaaattctacaaaatgaaaactgcttatgaagaggttacaactgagttagaagaatataaggaa

SEQ ID NO: 604357 - DNA, 511 bp, Homo sapiens
accagttggcataggaagaaattgtgatttagaaattatgtgataattatgaattggtcttaagctacagtgttcattgatcactttttcaaattacgaatggattctattactttttatatgaccagattacattaatactagcataattatgatttcaaatttttacaaatcagacttaattctgaattcagttattagttttgatattgctgaaatattttaaccttcagcctcttttttaacatattcaaaaatactctttgaatcrctgactcaaaatgaaaggcaacaaacataataattaggttataattgttttaaaagtgtattcttttcctctgttttaggaacaagcacaatataaaaaacaattagagcagttaaacaaggatataatacagcttcactaaataagaaggaactcacacttaaagatgtggaatgtaaattctacaaaatgaaaactgcttatgaagaggttacaactgagttagaagaatataaggaa

SEQ ID NO: 604358 - DNA, 540 bp, Homo sapiens
cacagtggaaactgctaaagccccagaagtatatcaaagtagctatattttgcattgtgaagggcccgatggacaacctgggactrttcaaccaattacaacttctgtacctaaaaatttatgggggagagatttattatgacaatggggagcacaagttctaattccataacaattacacagccctcaaagtcagcatatgatgcacgaaatggggcatgtccgtggaatgggagtagaaaaaaaatttgcaaggtttgaaagaactgcttcaaacggaaagacaaagttcttgccaaagattaggatatcatttttgatggtggccattgttaagcctccagaacctatacctttaaaatggttaacagataagccaatttggatagaataatggctgctaagcaaagagaaactggaagctttagagaaaatagttactgaacaattagaaaatgggcacatagctccaacattttccccttggaattctccagttttcataattaagaaaaaatcaggtaaatggagaatgttaac

SEQ ID NO: 604359 - DNA, 440 bp, Homo sapiens
gaaaggcaacaaacataataattaggttataattgttttaaaagtgtattcttttcctctgttttaggaacaagcacaatataaaaaacaattagagcagttaaacaaggatataatacagcttcactaaataagaaggaactcacacttaaagatgtggaatgtaaattctacaaaatgaaaactgcttatgaagaggttacaactgagttagaagaatataaggaagcctttgcagcagcattgaaagctaacagttccatgtyaaaaaaattaactaagtaagtcaaaacatacactcatagaaaatgaattaacctcattaatttgtttcaaaagcataatttttagtgagatggcttcaggagattagaaggaagtgaatgttaatttgacaatgtaattttgaaaaataatgttagtaaataatcttaccttta

SEQ ID NO: 604360 - DNA, 484 bp, Homo sapiens
caaaacatacactcatagaaaatgaattaasctcattaatttgtttcaaaagcataatttttagtgagatggcttcaggagattagaaggaagtgaatgttaatttgacaatgtaattttgaaaaataatgttagtaaataatcttacctttaaaatgttagtcaaagatagtttttgtctctcccctcatttttttttttttttgcttttgtatggctttttttcctgaaaagtctcaggtaattaacctgatctgttagttttcttcactaagtatttttgaagctttataattaatgaagtgatcttgttataaaattacttgtcagaatttccctaaatagaaatattaatgtgtttaatttacttttctgtagatcacaacctaaatgcaaagtggtactgctactctgggcacaattgtttttgattgtgatctttagtattatcaccagagtgtgcctcaagaaagactatttgtgt

SEQ ID NO: 604361 - DNA, 540 bp, Homo sapiens
cacagtggaaactgctaaagccccagaagtatatcaaagtagctatattttgcattgtgaagggcccgatggacaacctgggactattcaaccaattacaacttctgtacctawaaatttatgggggagagatttattatgacaatggggagcacaagttctaattccataacaattacacagccctcaaagtcagcatatgatgcacgaaatggggcatgtccgtggaatgggagtagaaaaaaaatttgcaaggtttgaaagaactgcttcaaacggaaagacaaagttcttgccaaagattaggatatcatttttgatggtggccattgttaagcctccagaacctatacctttaaaatggttaacagataagccaatttggatagaataatggctgctaagcaaagagaaactggaagctttagagaaaatagttactgaacaattagaaaatgggcacatagctccaacattttccccttggaattctccagttttcataattaagaaaaaatcaggtaaatggagaatgttaac

SEQ ID NO: 604362 - DNA, 440 bp, Homo sapiens
gaaaggcaacaaacataataattaggttataattgttttaaaagtgtattcttttcctctgttttaggaacaagcacaatataaaaaacaattagagcagttaaacaaggatataatacagcttcactaaataagaaggaactcacacttaaagatgtggaatgtaaattctacaaaatgaaaactgcttatgaagaggttacaactgagttagaagaatataaggaagcctttgcagcagcattgaaagctaacagttccatgttaaaaaaattaactaagtaagtcaaaacatacactcatagaaaatgaattaacctcattaatttgtttcaaaagcataatttttagtgagatggcttcaggagattagaaggaagtgaatgytaatttgacaatgtaattttgaaaaataatgttagtaaataatcttaccttta

SEQ ID NO: 604363 - DNA, 557 bp, Homo sapiens
cccttgtgaaatagggaataattatcacaggaatttaaagaagtgtaattcacaaagcggttaaaaaataacaccttgttcagcctgaagcgttgtgtggaaggcagaaagaacatgccccacctccagggccttggtcacagtgttgggggctaattsccttcagagatgctttagttctttttgatcaccaaccagacaatctagttctcccctaggagttgttgctctgaattattcctcagtgccaaatgtgtaattggtcctagataatgggtgaaatgtacaagagtgaaatctaaaactggtttactaaacacaagtattcctagattttttttgtttattttagttttcttcacctacattaaggagtacaacattatgttttgatataattatttctagtgaagtggttcttataatcaagcaaatcaacatattcattttcccacattattaccctttaaatacaagtatttctaatggaatcttcagaatcttacaagtagagccattttagaaggcaggaagttttacctgttgagccatacatc

SEQ ID NO: 604364 - DNA, 515 bp, Homo sapiens
tgttgctctgaattattcctcagtgccaaatgtgtaattggtcctagataatgggtgaaatgtacaagagtgaaatctaaaactggtttactaaacacaagtrttcctagattttttttgtttattttagttttcttcacctacattaaggagtacaacattatgttttgatataattatttctagtgaagtggttcttataatcaagcaaatcaacatattcattttcccacattattaccctttaaatacaagtatttctaatggaatcttcagaatcttacaagtagagccattttagaaggcaggaagttttacctgttgagccatacatcactgatagccatttctcttccctgtctactttgtttgaactgcttgttcagtagaaatcaccttagaaacaatggtgcttctttagaatgattttaaaattataattccttacaacaggtatgctcttacacatcttctgtgtgaaaacactatttagtgggtaatttggtttactctca

SEQ ID NO: 604365 - DNA, 557 bp, Homo sapiens
cccttgtgaaatagggaataattatcacaggaatttaaagaagtgtaattcacaaagcggttaaaaaataacaccttgttcagcctgaagcgttgtgtggaaggcagaaagaacatgccccacctccagggccttggtcacagtgttgggggctaattcccttcagagatgctttagttctttttgatcaccaaccagacaatctagttctcccctaggagttgttgctctgaattattcctcagtgccaaatgtgtaattggtcctagataatgggtgaaatgtacaagagtgaaatctaaaactggtttactaaacacaagtattcctagattttttttgttyattttagttttcttcacctacattaaggagtacaacattatgttttgatataattatttctagtgaagtggttcttataatcaagcaaatcaacatattcattttcccacattattaccctttaaatacaagtatttctaatggaatcttcagaatcttacaagtagagccattttagaaggcaggaagttttacctgttgagccatacatc

SEQ ID NO: 604366 - DNA, 515 bp, Homo sapiens
tgttgctctgaattattcctcagtgccaaatgtgtaattggtcctagataatgggtgaaatgtacaagagtgaaatctaaaactggtttactaaacacaagtattcctagattttttttgtttattttagttttcttmacctacattaaggagtacaacattatgttttgatataattatttctagtgaagtggttcttataatcaagcaaatcaacatattcattttcccacattattaccctttaaatacaagtatttctaatggaatcttcagaatcttacaagtagagccattttagaaggcaggaagttttacctgttgagccatacatcactgatagccatttctcttccctgtctactttgtttgaactgcttgttcagtagaaatcaccttagaaacaatggtgcttctttagaatgattttaaaattataattccttacaacaggtatgctcttacacatcttctgtgtgaaaacactatttagtgggtaatttggtttactctca

SEQ ID NO: 604367 - DNA, 507 bp, Homo sapiens
tgtaattggtcctagataatgggtgaaatgtacaagagtgaaatctaaaactggtttactaaacacaagtattcctagattttttttgtttattttagttttcttcacctacattaaggagtacaacatkatgttttgatataattatttctagtgaagtggttcttataatcaagcaaatcaacatattcattttcccacattattaccctttaaatacaagtatttctaatggaatcttcagaatcttacaagtagagccattttagaaggcaggaagttttacctgttgagccatacatcactgatagccatttctcttccctgtctactttgtttgaactgcttgttcagtagaaatcaccttagaaacaatggtgcttctttagaatgattttaaaattataattccttacaacaggtatgctcttacacatcttctgtgtgaaaacactatttagtgggtaatttggtttactctcagggtaagtttttaaaaactgcaag

SEQ ID NO: 604368 - DNA, 557 bp, Homo sapiens
cccttgtgaaatagggaataattatcacaggaatttaaagaagtgtaattcacaaagcggttaaaaaataacaccttgttcagcctgaagcgttgtgtggaaggcagaaagaacatgccccacctccagggccttggtcacagtgttgggggctaattcccttcagagatgctttagttctttttgatcaccaaccagacaatctagttctcccctaggagttgttgctctgaattattcctcagtgccaaatgtgtaattggtcctagataatgggtgaaatgtacaagagtgaaatctaaaactggtttactaaacacaagtattcctagattttttttgtttattttagttttcttcacctacattaaggagtacaacattatgttttgatataattatttctagtgaagtggttcttmtaatcaagcaaatcaacatattcattttcccacattattaccctttaaatacaagtatttctaatggaatcttcagaatcttacaagtagagccattttagaaggcaggaagttttacctgttgagccatacatc

SEQ ID NO: 604369 - DNA, 515 bp, Homo sapiens
tgttgctctgaattattcctcagtgccaaatgtgtaattggtcctagataatgggtgaaatgtacaagagtgaaatctaaaactggtttactaaacacaagtattcctagattttttttgtttattttagttttcttcacctacattaaggagtacaacattatgttttgatataattatttctagtgaagtggttcttataatcaagcaaatcaacatattcattttcccacattattaccctttaaatacaagtatttctaatggaatcttcagaatcttmcaagtagagccattttagaaggcaggaagttttacctgttgagccatacatcactgatagccatttctcttccctgtctactttgtttgaactgcttgttcagtagaaatcaccttagaaacaatggtgcttctttagaatgattttaaaattataattccttacaacaggtatgctcttacacatcttctgtgtgaaaacactatttagtgggtaatttggtttactctca

SEQ ID NO: 604370 - DNA, 530 bp, Homo sapiens
cgagagtcaccttgtgttgaaaatcttactagtataggactcaatgaaaatatattccccaaatgcccgtaagaattcctacttcaagcctcagacttcaaataattgccagaactacttgactgaggttagttatatgaccgtttctctttagggtttcatttctctagcgtaattcttgtttataatttggtgaaatactgagttgttctgttgacttttgcatgtgaagtaaagatcataattagctgtgttaacacagaaaggaaatgggaactttacattttttaattccctggagctctcattttcaagagatatccatttgctaactttattcaataaatgtgactaaactgasacgtttgaaatgtctttaaaagctgcatttaagttaggttttagaaattgcatgttattgcctgataactgatgatatactttgagatgctttggcttactctctaattgattatagtttagctgtggttcataccacattttttttttcttttttttgaggcagtatc

SEQ ID NO: 604371 - DNA, 543 bp, Homo sapiens
tctgaccccgcctcctttctaaatacatcgacctgtgttcttcagccctrtccctttctattcctctgaccccgcctcctttctaaatgcagcgacctgtgttcttcagccctgtccctttctattcctctgaccccgcctcctttctaaatgcagcgacctgtgtccttcagccctatccctttctatgcctctgaccccgcctcctttctaaatgcagcgacctgtgttcttcagccctgtccctttctattcctctgaccccgcctcctttctaaatgcagcgacctgtgttcttcagccctatccctttctattcctctgaccccgcctcctttctaaatgcagcgacctgtgttcttcagcactatccctttctattcctctgaccccgcctcctttctaaatgcagcgacctgtgttcttcagccctgtccctttctattcctctgaccccgcctcctttctaaatgcagcgacctgtgttcttcaggcctatccctttctattcctctgaccccgcctcctttctcaatgcagcga

SEQ ID NO: 604372 - DNA, 543 bp, Homo sapiens
tctgaccccgcctcctttctaaatacatcgacctgtgttcttcagccctgtccctttctattcctctgaccccgcctcctttctaaatgcagcgacctgtgttcttcagccctgtccctttctattcctctgaccccgcctcctttctaaatgcagcgacctgtgtccttcagccctatccctttctatgcctctgaccccgcctcctttctaaatgcagcgacctgtgttcttcagccctgtccctttctattcctctgaccccgcctcctttctaaatgcagcgacctgtgttcttcagccctatccctttctattcctctgaccccgcctcctttctaaatgcagcgacctgtgttcttcagcactatccctttctattcctctgaccccgcctcctttctaaatgcagcgacctgtgttcttcagscctgtccctttctattcctctgaccccgcctcctttctaaatgcagcgacctgtgttcttcaggcctatccctttctattcctctgaccccgcctcctttctcaatgcagcga

SEQ ID NO: 604373 - DNA, 543 bp, Homo sapiens
tctgaccccgcctcctttctaaatacatcgacctgtgttcttcagccctgtccctttctattcctctgaccccgcctcctttctaaatgcagcgacctgtgttcttcagccctgtccctttctattcctctgaccccgcctcctttctaaatgcagcgacctgtgtccttcagccctatccctttctatgcctctgaccccgcctcctttctaaatgcagcgacctgtgttcttcagccctgtccctttctattcctctgaccccgcctcctttctaaatgcagcgacctgtgttcttcagccctatccctttctattcctctgaccccgcctcctttctaaatgcagcgacctgtgttcttcagcactatccctttctattcctctgaccccgcctcctttctaaatgcagcgacctgtgttcttcagccctrtccctttctattcctctgaccccgcctcctttctaaatgcagcgacctgtgttcttcaggcctatccctttctattcctctgaccccgcctcctttctcaatgcagcga

SEQ ID NO: 604374 - DNA, 296 bp, Homo sapiens
ggccattgttaagcctccagaacctatacctttaaaatggttaacagataagccaatttggatagaataatggctgctaagcaaagagaaactggawgctttagagaaaatagttactgaacaattagaaaatgggcacatagctccaacattttccccttggaattctccagttttcataattaagaaaaaatcaggtaaatggagaatgttaactgacttaagagccatcaattcagttatacaacctatggaaacataacagccaggattgccttctcctactataattccaa

SEQ ID NO: 604375 - DNA, 296 bp, Homo sapiens
ggccattgttaagcctccagaacctatacctttaaaatggttaacagataagccaatttggatagaataatggctgctaagcaaagagaaactggaagctttagagaaawtagttactgaacaattagaaaatgggcacatagctccaacattttccccttggaattctccagttttcataattaagaaaaaatcaggtaaatggagaatgttaactgacttaagagccatcaattcagttatacaacctatggaaacataacagccaggattgccttctcctactataattccaa

SEQ ID NO: 604376 - DNA, 404 bp, Homo sapiens
ctacactagcaagaccctgtctcttaacaaaaaaaagctcacagaagtaggggaggkgaggctggttaatggatacagaattacagttagataagaggagtgggttctggtgttctgtggcattgtagggtgaatatggttaactacgacttattgtatatttttaaaaagccagaagattttgaatgttcacaattcaaagaaatgaaaaatggttgaagtagtaaatgtgctagttagcttgatcattacacactatatacatgtataaaaatatcactctatagcccataattatgtatatatgtgtcaattaaaacaaaagagaagctacattcatcccatttaaaaagcagaatatgggccagccttactgacttccttctaatgagtagaatgtagtg

SEQ ID NO: 604377 - DNA, 404 bp, Homo sapiens
ctacactagcaagaccctgtctcttaacaaaaaaaagctcacagaagtaggggaggtgaggctggttaatggatacagaattacagttagataagaggagtgggttctggtgttctgtggcattgtagggtgaatatggttaactacgacttattgtatatttttaaaaagccagaarattttgaatgttcacaattcaaagaaatgaaaaatggttgaagtagtaaatgtgctagttagcttgatcattacacactatatacatgtataaaaatatcactctatagcccataattatgtatatatgtgtcaattaaaacaaaagagaagctacattcatcccatttaaaaagcagaatatgggccagccttactgacttccttctaatgagtagaatgtagtg

SEQ ID NO: 604378 - DNA, 597 bp, Homo sapiens
tcaagcccctgtctccagtctgggtgactacagttgcccagagcccagactacactagcaagaccctgtctcttaacaaaaaaaagctcacagaagtaggggaggtgaggctggttaatggatacagaattacagttagataagaggagtgggttctggtgttctgtggcattgtagggtgaatatggttaactacgacttattgtatatttttaaaaagccagaagattttgaatgttcacaattcaaagaaatgaaaaatggttgaagtagtaaatgtgctagttagcttgatcattacacactatatacatgtataaaaatatcactctatagcccataattaygtatatatgtgtcaattaaaacaaaagagaagctacattcatcccatttaaaaagcagaatatgggccagccttactgacttccttctaatgagtagaatgtagtgaaagggataccatgtggcttccctatctcagactgttttcccttggaacccagccccaattgtgagagcctgaaagtgcctgtgtcagtgttcatgctgcctgtcccaaccaagtttacagccgatggccagcatcaaccatca

SEQ ID NO: 604379 - DNA, 597 bp, Homo sapiens
tcaagcccctgtctccagtctgggtgactacagttgcccagagcccagactacactagcaagaccctgtctcttaacaaaaaaaagctcacagaagtaggggaggtgaggctggttaatggatacagaattacagttagataagaggagtgggttctggtgttctgtggcattgtagggtgaatatggttaactacgacttattgtatatttttaaaaagccagaagattttgaatgttcacaattcaaagaaatgaaaaatggttgaagtagtaaatgtgctagttagcttgatcattacacactatatacatgtataaaaatatcactctatagcccataattatgtatatatgtgtcaattaaaacaaaagagaagctacattcatcccatttaaaaagcagaatatgggccagccttactgacttccttctaatgagtagaatgtagtgaaagggataccatgtggcttccctatctcagactgttttcccttggaacccarccccaattgtgagagcctgaaagtgcctgtgtcagtgttcatgctgcctgtcccaaccaagtttacagccgatggccagcatcaaccatca

SEQ ID NO: 604380 - DNA, 611 bp, Homo sapiens
ggttgaagtagtaaatgtgctagttagcttgatcattacacactatatacatgtataaaaatatcactctatagcccataattatgtatatatgtgtcaattaaaacaaaagagaagctacattcatcccatttaaaaagcagaatatgggccagccttactgacttccttctaatgagtagaatgtagtgaaagggataccatgtggcttccctatctcagactgttttcccttggaacccagccccaattgtgagrgcctgaaagtgcctgtgtcagtgttcatgctgcctgtcccaaccaagtttacagccgatggccagcatcaaccatcaaacaagtgggtgaccaaagcttcagaggattccatttccccaactgatcagctcttcctagggaagctgaagggagcagagacaagctgttctggccaagtttttcccaaaccacaggttcatgaacaaaataaatgtttttctttcaagccacaagactctgggtaattgttagaaaaataacttttaaaaagagacaacaggaaacataacttatgcagcagaaaagtctcctttaaagtaggatctaataaatgttgagatttatttattgat

SEQ ID NO: 604381 - DNA, 611 bp, Homo sapiens
ggttgaagtagtaaatgtgctagttagcttgatcattacacactatatacatgtataaaaatatcactctatagcccataattatgtatatatgtgtcaattaaaacaaaagagaagctacattcatcccatttaaaaagcagaatatgggccagccttactgacttccttctaatgagtagaatgtagtgaaagggataccatgtggcttccctatctcagactgttttcccttggaacccagccccaattgtgagagcctgaaagtgcctgtgtcagtgttcatgctgcctgtcccaaccaagtttacagccgatggccagcatcaaccatcaaacaagtgggtgaccaaagcttcagaggattccatttccccaactgatcagctcttcctagggaagctgaagggagcagagacaagctgttctggmcaagtttttcccaaaccacaggttcatgaacaaaataaatgtttttctttcaagccacaagactctgggtaattgttagaaaaataacttttaaaaagagacaacaggaaacataacttatgcagcagaaaagtctcctttaaagtaggatctaataaatgttgagatttatttattgat

SEQ ID NO: 604382 - DNA, 604 bp, Homo sapiens
gctgggcgtggtgtctcaagcctgtaatcccagcactctgggaggccgaggtgggtggatcacaaggtcaggagatcgagaccatcctggctaacacggtgaaaccccgtctctactaaaaatacaaaaaattagctgggtgaggtggcgggcgcctatagtcccagctactcaggaggctgaggcaggagaatggtgtgaacycgggaggcaaaacttcaggttttcccaagaatgacactgtaaatgtaacaaagcttctgtgcttgttagtgaacaccaaatcagctactctcctgtattcggagataaggatgaaatgaaaagaacaagcaggccgggcgcggtggctcatgcctgtaatgccaacactttgggaggcttaggtgtgtggatcacctgaggttgggagttcgagaccagcctgaccaacattgagaaaccccgtctctactaaaaatgcaaaatgagctgggcatggtggcacaagcctctaatcccagcttgggagactgaggcaggataagttcttaaacctgagagacagaggttgcagtgaggtgatattgcaccattgcactccagcctgggcaacaagagtgaa

SEQ ID NO: 604383 - DNA, 581 bp, Homo sapiens
aacttatgcagcagaaaagtctcctttaaagtaggatctaataaatgttgagatttatttattgatgtcaaacattattgagaagcagcagataaccaggagagagacataagctgctgaggaggaattttcctaaaactccttcaattatgaactctgataacaaggcaaggatgtctccttacaatttcccctcaagttaggaaataagaytgggaagcaagaagatgtatgatttgaaaaacaactagagatacttggtgacataggcaaaatcagacatttacctgatttcaattaactaaaattctaaaagaagaagctttgagtgtttattaatcaacctagtattcaattttcattttcttttctaaatgagcaaataaggagattatggaatgatttttagtcttcacagaagtaaaataagcatagtgtgttttgagtgttaagacatcaaatgcaatttctcctttaccttactccaagcttgtttgtatggagaagttaagaccatcccatctctatgttatgccacaatgctcctctatagcacacaacttggctccgaaattttgaaa

SEQ ID NO: 604384 - DNA, 581 bp, Homo sapiens
aacttatgcagcagaaaagtctcctttaaagtaggatctaataaatgttgagatttatttattgatgtcaaacattattgagaagcagcagataaccaggagagagacataagctgctgaggaggaattttcctaaaactccttcaattatgaactctgataacaaggcaaggatgtctccttacaatttcccctcaagttaggaaataagattgggaagcaagaagatgtatgatttgaaaaacaactagaratacttggtgacataggcaaaatcagacatttacctgatttcaattaactaaaattctaaaagaagaagctttgagtgtttattaatcaacctagtattcaattttcattttcttttctaaatgagcaaataaggagattatggaatgatttttagtcttcacagaagtaaaataagcatagtgtgttttgagtgttaagacatcaaatgcaatttctcctttaccttactccaagcttgtttgtatggagaagttaagaccatcccatctctatgttatgccacaatgctcctctatagcacacaacttggctccgaaattttgaaa

SEQ ID NO: 604385 - DNA, 365 bp, Homo sapiens
attcaattttcattttcttttctaaatgagcaaataaggagattatggaatgatttttagtcttcacagaagtaaaataagcatagtgtgttttgagtgttaagacatcaaatgcaatttctcctttaccttactccaagcttgtttgtatggagaagttaagaccatcccatctctatgttatgccacaatgctyctctatagcacacaacttggctccgaaattttgaaagtcaaaatactaacctactatgtgtctctgataaattgcctgaacattacctgattttgaagtgctgcactcctaagactttttcttggaatgagttaaacgttttattccaagaatcctctactgagctaga

SEQ ID NO: 604386 - DNA, 607 bp, Homo sapiens
gtgagaaagaagtatttgcttttagattgtcgctgttagacaaaccacgtcttctctagcaaatgaaagtcgtattttgctcctaatttttctacttacaacattacgaaagaaagttgatttgaacaaagtctaagctgctattaaattttgagaaaagaatcctccctcgccaaaggtgaagtttggagctatgggttgaagcaatatgcaaaaccacaactcagttgtgggtgaaaatttagatatgttcttcctgttagtaattcatcataaactaagtgcgtttctaaagagaaaagccccatcagtgaatctagcctaaaatactataaacgtgttttcccaaatagcataaagacagcacatatttaatataagtgtatgaaagaaggaaagaaaagcccaacttagaaatgttattcagaaaatattgactcatttattattttttaaagaacatattaaatatcaatgtactatgatgttgactaggtactatgatatttaacatctatgtacaaatgatgatgttgaatatttatgtactrtgatatcagatatccatgtactatgatatcagatatctctgtacaatgatgttgga

SEQ ID NO: 604387 - DNA, 607 bp, Homo sapiens
gtgagaaagaagtatttgcttttagattgtcgctgttagacaaaccacgtcttctctagcaaatgaaagtcgtattttgctcctaatttttctacttacaacattacgaaagaaagttgatttgaacaaagtctaagctgctattaaattttgagaaaagaatcctccctcgccaaaggtgaagtttggagctatgggttgaagcaatatgcaaaaccacaactcagttgtgggtgaaaatttagatatgttcttcctgttagtaattcatcataaactaagtgcgtttctaaagagaaaagccccatcagtgaatctagcctaaaatactataaacgtgttttcccaaatagcataaagacagcacatatttaatataagtgtatgaaagaaggaaagaaaagcccaacttagaaatgttattcagaaaatattgactcatttattattttttaaagaacatattaaatatcaatgtactatgatgttgactaggtactatgatatttaacatctatgtacaaatgatgatgttgaatatttatgtactgtgatatcagatatccatgtacwatgatatcagatatctctgtacaatgatgttgga

SEQ ID NO: 604388 - DNA, 478 bp, Homo sapiens
ctagctgtatggccatatgcaggttatttaagttctctgagcaacattttattcacttacaaaatacaagaaataggtgtacccctctaaatggaagctttgagggtcaaatgcagcccttttgcaaaagtgcagtgtaatcactatagaaactactccagactgagaaagtactaccctcacagaaaactgggtggcatctagttcctgaatgatgacagtgatgacagtaagattggaaaggttaggtgtgggaaatggtttgagagtaaaggaaaacaattaagaccacsagaaattgtatctttggaaaaccaggctgatagtatgttgagtattaaatatcagtatactgagttcttactatgtgttagacaccatgcaaagttctttaacccatttactccttataacaacctgttataaggttgtatggctatgatccatatataacaggaaaggaaacagacttagctaa

SEQ ID NO: 604389 - DNA, 591 bp, Homo sapiens
cttgctatgttggccaggctggtctcgaacccatgacctcaagtgatccacccacctcggcctcccatagtgctgggattacaggcgtgagccaccatgcccagcctacaatatatatttaaatgttaatgtttatttgtgagaaaaattctcacttaaaaataagtccaaatatacagaaaactttctctttaaactaatttttattgatttgcaattatgcttagctattggtaaaagttttggagtcatccacttgcaaatgggtgtgtttagaaaaggtaatcccagtctagttgtgattaaaccatgacagtatgtaataggtactgagtgaccatgattgaaataaatatttgctaggttgktgttattaaatttatgagaaggggtcctagagaaatatttaaataataatatttaatttgtttgtaaatgtgcttaatgtgcttagcataattcaagcagttcttctgataatatatttaaatttgcagcttccgattttattagcaacatgaggcatttcattttcagtgttcatattaatcacacaaaatgattttctttttagttttggttctcctgtaa

SEQ ID NO: 604390 - DNA, 548 bp, Homo sapiens
tgagggaggatggagtgtgaggctgatccttcagcctcattggatcatttttctgaatgaatggtcctttatatgctagtatttcttaagctacactgagaggttatgacaataacatgaaaaggtgtgggttttttttttttttgctttgatggggaaaattatttcaatgaccagatatttctcattctaaagtttttttttctcatatacactgttctgaaaactttagcactgcttctgcttgaggacactacaggctgaaaatgaatgaagaattagaaaattcaaaacatgaacagaaagctcagagctagtcagccgtgcctagctcagtcgcttgtcttcctgctgtatacatgttctcacggctgtgattttatgctgcatacatgtgacagattcaacttttcagcttgtgaaaccaawccctgttcaaagtacacaacaaagcatgttgacatcttgtgtcattctgcaaagagcactatgacttctgggtttccctgagtcaaactggatcatcgtggcctaattagtgtggtgcc

SEQ ID NO: 604391 - DNA, 597 bp, Homo sapiens
aactgtacagaaaccttatttccaaataagatcacattctgaggttccagtggacatgaattttgaggggacagtattcaacccagtacactggcagataaaagacaatttcatatgttgattccattccaagagccaaaatattaaatgggtcctcttgtgttaccccttctgccaggcctttaggaaaaaaaaaatactgtggttcattcaagtaaaaagagtaaacttaaagagatcagcgccacaccatttgttagtatttataaagtaagaacattgcttgctgggtttattttattttatttttttgagatggaatattgctttgtyacccaggccggagtgcagtgacatgatctctgtttactgtaccctccgtgtcccaggttcaagtgattctcatgcctcagcctcccaagtagctggtattacaggtgtgcaccactatgcccggctaattttgtatttttagtagagttggggtttcaccatattggccaggctggtctcgaactcctgacttcaggtgaaatacccaccttggcctcccaaagtgctgggattacaggtatgagccaccacgcctggccccaa

SEQ ID NO: 604392 - DNA, 596 bp, Homo sapiens
ctcactctctcgcccaagctggagtgcagtggcgccatctccgctcactgcaacctccgtttctcgggttcaagtgattctcctgtctagcctcctcagtagctgggaccacagacacacggctaatttttgtatttttataagagaggaggtttcgtcatgttggccaggctggtctcgaactcctggcctcaagtgatccgccggcctcagcctcccaaactgctgggattacaggcatgagccaccacacccggcccattcatacttttttgatactggatttggaggcaagatgaacatccttcttgcacatgacattgtcagaggatttccccatccttgagccagagctggggaaagcagtggctagctctgtaagcaacataaacgaactacttagcaagcactagcttaattctctgaaactttgtactgggatttttcccaatcccatcccacccaatattctaaatgtcaatgaataacaatcaccgttgcctttctcttgtctggctggcccctgaggtgtgaaacarcttactcgatgggcaaattatagatgatacaatattaggatttgtatcatctttctc

SEQ ID NO: 604393 - DNA, 571 bp, Homo sapiens
gggttggagggccatgatctaaaacaattaattgaaaaatgtatacattctgtcatatttgaagagaggttttctttccgaacttaatgtttatgataaattgcattagacttttgtgtggcaataagaagagcatagccacccgaccactccctattattcttcatcaatattattgttgaataagataattacatttaatatcacaaagctagtgttttggacactttttaatacaaataggtcatctatatacacctgttttgtaggggaactagttcttcagacaattataactgcattttgtggttggagaactattgtcattcccttgggcttagaaactgttacataaaaggatgaccgtctatatttttaaaagcaagaaaattttcccagcaaaagagaaaaagaggccacaagaaatccaccgagtcatggcctcggatgctcagggtgtcaatggtaaggaattaggaaatcagaggtgacactgtctcattactgacrtgtttttatcccgtaccaagaactcttatttttcagcctcagaaggaaaggcaaaccctac

SEQ ID NO: 604394 - DNA, 577 bp, Homo sapiens
tatactaaataggttactgtgggtttgtttgccaggatgctcaaaactgaaagttgaaacttgtaataaatttagcaacgacatgtgtccccaaatcttaaattgagattttccaagatctttggtaacacaaggcacacacgtatgcctcactgagtgcaagctccactgccttatggtgcctccctgatgccgaggayttggtaactgtggcactaattctgtgtgggggtattattttccccattttacaaatgaggaatctgaggctcatacagtgtaagcaatttttccaaggttagaacaatagcgataagattagaacaaaactttcaaaacccattctctccattttaataatctgcctctcactaggtcattctacatttttttaaaaaggtggttttggccaggtgcagtggctcacgtctgtaatcccagcgctttagtaggctgaggcaggcattcaagaccatcctggctaacatggtgaaaccctgtctctactaaaaatacaaaaattagctgggcgtgatggcgcatgcctatagtcccagctactcaggaggctgaggca

SEQ ID NO: 604395 - DNA, 577 bp, Homo sapiens
tatactaaataggttactgtgggtttgtttgccaggatgctcaaaactgaaagttgaaacttgtaataaatttagcaacgacatgtgtccccaaatcttaaattgagattttccaagatctttggtaacacaaggcacacacgtatgcctcactgagtgcaagctccactgccttatggtgcctccctgatgccgaggatttggtaacygtggcactaattctgtgtgggggtattattttccccattttacaaatgaggaatctgaggctcatacagtgtaagcaatttttccaaggttagaacaatagcgataagattagaacaaaactttcaaaacccattctctccattttaataatctgcctctcactaggtcattctacatttttttaaaaaggtggttttggccaggtgcagtggctcacgtctgtaatcccagcgctttagtaggctgaggcaggcattcaagaccatcctggctaacatggtgaaaccctgtctctactaaaaatacaaaaattagctgggcgtgatggcgcatgcctatagtcccagctactcaggaggctgaggca

SEQ ID NO: 604396 - DNA, 425 bp, Homo sapiens
tccactctttgatttctagtactatggatttctcaaggtaggtttgaatggccaagaaatgtcttaatgcctatttgtttcttttttcctctcactttttcttttacttttgttttctgagacaggaactcactctgttgcccaggctggagtgcagtgctgtgatcttggctcactgcaaccttcgcctcctggatttaagtgattctcctgtctcagcctcccgagtagctgggagtgtaccaccatgcctggctaacttttgtatttcttttttttttttttggtagagacagggtttcactgtattgctcaggctggtctcaaactcctggcctcaagtgatctgccagccttggcctcctaaagtgctgggattacagrgcgtgagccaccacacccggccccatttttttctttatgca

SEQ ID NO: 604397 - DNA, 457 bp, Homo sapiens
tttgcataactaaaaggaacacaaatgctgatggccaagacaagggggaaaacactttgaaggcatttcagagaactttgtggcagcctctcccatcacaggcctaaagacctaggagggaaaaatggtttcccgggccaggcccagagcccagtagtgtgtggccttaaaacactgctttttgcattccagtcttcagctccagctgtgggttgaaggggcccaggtacagttcaggccwctgcttcagaaggtgtaagccataagcctaggcagcttccatgtcatgttaagcctgtgggtgcccagattatgagagctgaggcttgggagcctctgcctagatttcagagaatgtatggaatagcctggatgtacaggcagaagtctactgcaggggcagagccctcatggagaacctccactagggtagtgtggaggggaaatgtggggctgg

SEQ ID NO: 604398 - DNA, 457 bp, Homo sapiens
tttgcataactaaaaggaacacaaatgctgatggccaagacaagggggaaaacactttgaaggcatttcagagaactttgtggcagcctctcccatcacaggcctaaagacctaggagggaaaaatggtttcccgggccaggcccagagcccagtagtgtgtggccttaaaacactgctttttgcattccagtcttcagctccagctgtgggttgaaggggcccaggtacagttcaggccactgcttcagaaggtgtaagcyataagcctaggcagcttccatgtcatgttaagcctgtgggtgcccagattatgagagctgaggcttgggagcctctgcctagatttcagagaatgtatggaatagcctggatgtacaggcagaagtctactgcaggggcagagccctcatggagaacctccactagggtagtgtggaggggaaatgtggggctgg

SEQ ID NO: 604399 - DNA, 433 bp, Homo sapiens
aaatatgtaagaagatagctttaggctaaacttgatttaatatttaccaaggaaaatctacagtagatcaaagttaatatatttaatatatatgtcttcttttattatttcattggcatatgtatgaattttcaggatattttttgtgttcaggcactaattatatagagagtgcagcagaagaagataacaaaactttctgagggaaagatcattttttaattataaacagggccaacagtatttagtggtaataatgtagtttttccaaatgacatattacgtatttgtcaaaaaatgaatttggatcatatattttatatctttttytgctctaaaaggctgtaatattttttcaattattattaaaatttatttgaatgtgtataatcaactactgctacagattgatactgtcacagtttggtaaaca

SEQ ID NO: 604400 - DNA, 597 bp, Homo sapiens
actttactttgggtgagatgatatagaaaaatacaaatggctaaatttttacaactgccaaggcatatatttgtaaaacttccaaatattgaagacaaaagaagctataagtcagaggaaaaacaggtcacacaaaaatggttaggtgcccagatgactggctacttttaatagmagcactgagagcttgaagacaggggagacatggtttcaaaaatccgaggttaaaaacatttccaacctagagtactatactaagctaatattagtcaagaatgaggatagaaagatgacacacacacacacacacacacatatatatagtctcagaaatttaactttttatacattccttctgtgttctgccataataaggaagtcaattactaggttggtacaaaagtaattgctttttttgccactgaaagtaatggcaaaactgcaataacttttacaccaacataataaaaagagaaatataagctacaccaaacaggggatacaaacaaacgttatggataaggtgaagggatatcccagggaagcaaatatacatctatctcacagagtaaccagacaaaactggaatatgtcaga

SEQ ID NO: 604401 - DNA, 655 bp, Homo sapiens
accaacaggctacattgtagtttaaactgtgatacaaatggtatttttcttggctactgtctattccatttctgcattcttttagtggagagttccctgttctagcagtcaatagaatcaacaccattgtttcaccctctcttcttctccatcaaaatctattactctacgtctgcttcctctgtgggtccactccatcaacagtcaagattcaagctaagtgtcaaatctaggaataagattttatttattttattgaaggacatttcatttactccagaactactgtatgtttcctattttatttccatttaggaaacattgattgaacatttagaatacattggaaacaaaactgactcagcagacataacgataaattttacattttccctggtttcaatgagcatgtaatactgtaggaagaaatatttgtaaactgataaactatattgtaataagaagagcgataatagttataaacaaaatatcatggggaargggctttaaaaatgaatacaatatttaaatatttgcaacatatattttcacaatctgtaaaatgtatttgtaatttaaaaatataaaactagtatttataacagtaatgatttctaacaataaattgcattgctagattctattattaattctg

SEQ ID NO: 604402 - DNA, 593 bp, Homo sapiens
ctgggatctaaacaggaacatctgactaaaatgattaaacaaacatgtacagaattcactaaacaaaaccagaatatccattattctcatctgcacatggcacatactctaaaattcaccacatgcttggccataaagcaattctcaacaaattcacaaaatcaaaatcacaccaaccatactctcagatcacagtgtaattaaaatagaaatcaatacaaataagatctctcaaaaccatacaatgacatagaaattaaacaatatgctcttgaatggytcttgggtaaacagtgaaattaaggcagaaatcaagaaattctttaaaactaacgaaaacaaagataaaacataccagaatctctggggcatagctaaaacagtgttaaggggaaagtttatagcattaaatattcacatcaaaaagttagaaagatcacaaattaacaacttaacatcacacctaggggaactatgaaaacaagagcaaaccgaccaataaggtagcagaagaaaagaaatacccaaaatcagagctgaactgaacaaaatggaggcatgaaaaaacatataaaagataaataaaaccaaaa

SEQ ID NO: 604403 - DNA, 596 bp, Homo sapiens
atggcacatactctaaaattcaccacatgcttggccataaagcaattctcaacaaattcacaaaatcaaaatcacaccaaccatactctcagatcacagtgtaattaaaatagaaatcaatacaaataagatctctcaaaaccatacaatgacatagaaattaaacaatatgctcttgaatggctcttgggtaaacartgaaattaaggcagaaatcaagaaattctttaaaactaacgaaaacaaagataaaacataccagaatctctggggcatagctaaaacagtgttaaggggaaagtttatagcattaaatattcacatcaaaaagttagaaagatcacaaattaacaacttaacatcacacctaggggaactatgaaaacaagagcaaaccgaccaataaggtagcagaagaaaagaaatacccaaaatcagagctgaactgaacaaaatggaggcatgaaaaaacatataaaagataaataaaaccaaaagcgtgttcttcaaaagaatacaaaagattgatatacaactaactagactaataaagaaaaaaaagagagaaaattgaacacaatcagaaatgacaagtg

SEQ ID NO: 604404 - DNA, 597 bp, Homo sapiens
actttactttgggtgagatgatatagaaaaatacaaatggctaaatttttacaactgccaaggcatatatttgtaaaacttccaaatattgaagacaaaagaagctataagtcagaggaaaaacaggtcacacaaaaatggttaggtgcccagatgactggctacttttaatagaagcactgagagcttgaagacaggggagacatggtttcaaaaatccgaggttaaaaacatttccaacctagagtactatactaagctaatattagtcaagaatgaggatagaaagatgacacacacacacacacacacacatatatatagtctcagaaatttaactttttatacattccttctgtgttctgccataayaaggaagtcaattactaggttggtacaaaagtaattgctttttttgccactgaaagtaatggcaaaactgcaataacttttacaccaacataataaaaagagaaatataagctacaccaaacaggggatacaaacaaacgttatggataaggtgaagggatatcccagggaagcaaatatacatctatctcacagagtaaccagacaaaactggaatatgtcaga

SEQ ID NO: 604405 - DNA, 559 bp, Homo sapiens
aacctgtccactatccacttatttatttgtcaatcttgtatgtatgtacagtggtttcagaagagttaacccttatcyctgtgagaaacaactttaacaactatagtgtttgtgtcagtttctttttatcttattgtatatcatcagttctgaagttgcttagatcagtacctcctttcttctcacccacttcagtgaggctgtcccatacttgtaatacagctagatcgtttcagcaaaatcttcatttttttctcccatattattttttaaatgtgcacatattgtctcattttttgtgatttaaaattatttgagtgtgaaacatgggaaagtaaatatttttgaagctgtcaattaagtctggaaataaaagcatatacaaacttttgtgcatatatgaaatgataatgggattgcaagctctgtgagggccaagatctaccttctttatctttggagttctgcacctcatatattttctggcttatggtagtgctgagagatctgttacttacatgcgtttcttgatgtcagacttttatatcactcttccttt

SEQ ID NO: 604406 - DNA, 555 bp, Homo sapiens
tactataaacaagtgtcccctttgtgatctgtttagtgctacatttttcacatcttgattttttggtgattttgctatttaaaatggacccccagggtagtgctgaagtgctgtctaatgttcytaaacgcaagaagcctgtgatatgacttacagagaaaacgtgttagataaactccattcaggtacgagctatagtgctgttgttgactatgaatcaacaatatatattcaataaagtgtctttaagcagaaagacacctaaaacaaggttatgtaatgatcagctgacaaaaacgtgaccagagcctcacaggaacctaactctatattttccctaaaaacaatggttttagtttctgctaattccattttcacagcaacttttatagaacataatacttcaaataataaaagtctattatgtatatacttttatacacatacatatataaccatttctatttgtctgtgtgtattcgtgtctgtgtatgtatacataaagctcatgagttcatatcaatatttataatttcaatggaacacattggggtt

SEQ ID NO: 604407 - DNA, 559 bp, Homo sapiens
aacctgtccactatccacttatttatttgtcaatcttgtatgtatgtacagtggtttcagaagagttaacccttatccctgtgagaaacaactttaacaactatagtgtttgtgtcagtttctttttatcttattgtatatcatcagttctgaagttgcttagaycagtacctcctttcttctcacccacttcagtgaggctgtcccatacttgtaatacagctagatcgtttcagcaaaatcttcatttttttctcccatattattttttaaatgtgcacatattgtctcattttttgtgatttaaaattatttgagtgtgaaacatgggaaagtaaatatttttgaagctgtcaattaagtctggaaataaaagcatatacaaacttttgtgcatatatgaaatgataatgggattgcaagctctgtgagggccaagatctaccttctttatctttggagttctgcacctcatatattttctggcttatggtagtgctgagagatctgttacttacatgcgtttcttgatgtcagacttttatatcactcttccttt

SEQ ID NO: 604408 - DNA, 552 bp, Homo sapiens
ataatcatttaaaataaacatgtaacctactttatttcatgcatattttcttaaaatgttaaataatttttttcacaaactstattacatttttggtacactaggaatgcaggatggctaatgaagcaatgataaagtctctccgaaaagggtagatttttcctttatgagttatactttttgagttgatatctagaggatctgtttaaagcaaaacatgtcaaagaccatgataaaactcacaagatagtcatatcaatacactaatagctactcagagccctcactgtttaaaagaaaatgaaaagagtgatgcacttagctcatgttggtgctttagctggacttgaaatgcaatagaacaacaaagctttattactaaagtgaaaagatttgaggctatctcaaaaaatcctggagaatatttaaaatgtcaagattttgtgatcataaagacattactgttgacttataaagttgggcaattgtgtccaaactattacccaccctcacctctggtagtttctacagtcatttggtaggaaccccaca

SEQ ID NO: 604409 - DNA, 545 bp, Homo sapiens
attatagtttttcaacaaaatgttacttaaatttaattaatcaaccattgcttatagacaaaaagaagtataagtgcttgttgaaagggcacacaattttagctgaattattatattgtattaatttcacatagtatatttaacaaggatatctcaatgacaatgctgctaagcataagtaaaatgtatagatatttttatacttacaggtgataaagcagaagtagttaaatcctagtgtgaagggctcatttagatatgtctttgtattaagagaatgatgaacctctaagattggaactaatccaaagccacctctaagagtggagctaatccactgaagcctagaccagaaggatttcacggtaaaacatgatattgttgtaattatagtttctcaacttgggcactattaacatttyggaccagtaacactttgttgagggaagctgtcctgtgcattgtagaatgcttagcagaattcctggcctctacacatttgattccggtaacaatatcctaggggtaaaattgctcctggttta

SEQ ID NO: 604410 - DNA, 636 bp, Homo sapiens
actcttcctcacctagataatttgagattgtacagatagggctgtggtgcacacattgctaaaaatatgtcttttccgataatcttattttatattgcaaattctaaattattttgtaaatttgggcttaattttaaaattttgggcttataagtttgaggatacctatccttttcctttacccatattaaattctttggtgttcatctttctaatgtagaagttttattgtttcttttaactttttatttataaatttcccccattatcttcagaattaggttctcctagtcatttattctattcttagagagattaagtggttaccacgtagggcaaaattgctttcagctgaaaaatacttcaagcagaaacttaggagtaaaaattccccaatgctactctatcttgcctccaggcctactgtaatttccatcatactcataataatggcaatggtgttaacactattcttyatgatttacaaagcacagtacaatttcatttcatcatcacaataaatctacaaataagtatcacattcgttttgtagttgagtttcaaagaagtgaaaaaatttgttcacaatcataatgctcaccatgctctaaaatatgaacaggttttaaaaatctc

SEQ ID NO: 604411 - DNA, 528 bp, Homo sapiens
tttctaacagttcttctgttcttttgttgacaccatttccttcatctggcgaagtaggaccttccaataagctacttttagtttccctttcatttttgtttcatctatggtctctctaggatgatttcagggttaggttcatgaattttcctgtatgyctgtatgttttctgaccaggaactcagttctctcccttgtcttcctttcctaatatgtctgtctctttgaagttgtgcatgctttctccttttcacattctaatactcagcctaacttcatctagatgtgcggatttctagaggacaatgtgagcagggctgtgatgaactctccagcttattaattgtctattgtcttcttctaagtatgtatctgaaatttaaattgcctatctgtactcagttagtatctgtttatattgtttccttctgtgaatctctgaccacctcttccattttttcttgccatgttaaacttactatttgcatagagactagactcatatgtttagccagaagtatttttttc

SEQ ID NO: 604412 - DNA, 528 bp, Homo sapiens
tttctaacagttcttctgttcttttgttgacaccatttccttcatctggcgaagtaggaccttccaataagctacttttagtttccctttcatttttgtttcatctatggtctctctaggatgatttcagggttaggttcatgaattttcctgtatgcctgtatgttttctgaccaggaactcagttctctcccttgtcttcctttcctaatatgtctgtctctttgaagttgtgcatgctttctccttttcacattctaatactcagcctaacttcatctagatgtgcggatttctagaggacaatgtgagcagggctgtgatgaactctccagctkattaattgtctattgtcttcttctaagtatgtatctgaaatttaaattgcctatctgtactcagttagtatctgtttatattgtttccttctgtgaatctctgaccacctcttccattttttcttgccatgttaaacttactatttgcatagagactagactcatatgtttagccagaagtatttttttc

SEQ ID NO: 604413 - DNA, 582 bp, Homo sapiens
ggtacccaccaggggtattacatcatatccccctaagataagggggaactagtgtacagttttatttcaacatagccacttcaacatacacactacttgtgtatacattgtctgtggctgctctcttgctacaatggtagagttgtgtagttgtgatagacactatcacctgcaaagcctaaaatatttaccatctggccctttttataaaaagtttgctgacccaccccttagttcaaggtgggctcagcccagacttctgtgttcttaagacaagaaatgttaacagggggtattcatcccaggccctagagccagaggacataaattcaagtcaaactctgcaattaaccataagagygtggaaaagctacctaacatgcatatagcttagtgtgtttttgttgctgaaaaatagtgatgatcattgtacctttcacatatggtatatgtgaagagttgtaaggcttagatgtgattttgcatgttcatcacatttagtgtgtcacagtagctgtgagacccagaatagatttattattattattttaaaaataaaattttgttttgtgtatttaaggt

SEQ ID NO: 604414 - DNA, 565 bp, Homo sapiens
tgctttataaattatcatctgcttccattggaacataattttttaaaaaaattctctgatggttccatttcaggaaagaaatgtttaatgtttatttctaatgctaatataaaaataaattaaaagaatttaaagctacttattatattcagcaatgtttagaagaaaaaatgtatatactttgttcttctgtacaatggtttgtcctcaagtaagaaaaatatttaaaaactctatcctaaatcctgtagtggctccatatttcactccatgtaacattcaaagttcttaagataacctacagtaccccatgtaagcatctcccattacctccgtgaactcttcccacamctttcagaccctgcataaggtcgcttattacctcttggaacccccacgtacactcctctccagctacctgtgacttctcaatgttcctggaatatcattgccttggggcctgtggtaggcagacttataaaatgcctccccaaaatatctcaccctgatcccaggactgattatgatgagagatcacacccatgaacatgtgtcattacctgga

SEQ ID NO: 604415 - DNA, 565 bp, Homo sapiens
tgctttataaattatcatctgcttccattggaacataattttttaaaaaaattctctgatggttccatttcaggaaagaaatgtttaatgtttatttctaatgctaatataaaaataaattaaaagaatttaaagctacttattatattcagcaatgtttagaagaaaaaatgtatatactttgttcttctgtacaatggtttgtcctcaagtaagaaaaatatttaaaaactctatcctaaatcctgtagtggctccatatttcactccatgtaacattcaaagttcttaagataacctacagtaccccatgtaagcatctcccattacctccgtgaactcttcccacaactttcagaccctgcataaggtcgcttattacctcttggaacccccacgtacactcctctccagctacctgtgacttctcaatgttcctggaatatcattgccttggggcctgtggtaggcagacttataaaatgsctccccaaaatatctcaccctgatcccaggactgattatgatgagagatcacacccatgaacatgtgtcattacctgga

SEQ ID NO: 604416 - DNA, 603 bp, Homo sapiens
aaaaaaaaatcaacatagtaaatgacattaagaaaaagacttatttcatcaattaaaacccttgagggcatatcagaaataatagaaatacaggcatttgtaagtaaagaacaatgttgccctggaaatctatgcaaattagaactttttggaggaaacaagaaagaaacacttcatctaacagcaacaaatagaatacaagataaatttcagttgatattaagattaattaaagcagtgtatatatatatatatactactgttatatatatacactactttaattaaatatatattatatatatattatatatatatataaaatatatataacatataggaataggcgtaggctagaaatgtgaaaatgaatggtcacttatagaattcatccataatccacaaataccaacgttctgacggcctatatgccacaaaatataacaaatatggcaaaactgacactttttwaaataaaccactgtaaatggcaaatcttctgccaactacttagaatgatcacaggttagcaggcattggacatgatatatcattgttacttattcatctattagcttagttattgttttactctctttaatt

SEQ ID NO: 604417 - DNA, 621 bp, Homo sapiens
ccaacgttctgacggcctatatgccacaaaatataacaaatatggcaaaactgacacttttttaaataaaccactgtaaatggcaaatcttctgccaactacttagaatgatcacaggttagcaggcattggacatgatatatcattgttacttattcatctattagcttagttattgttttactctctttaatttggtctgacaaggagatgaatacattggagaaaaatacataaatgagtagcaacttattatttaagtaactgtagacccaaaaatcaatcagaaagttcttggctctgaaaaatgtytatttcaagaattcagggctacagacactttccagtagatacaaaataaattagataaagatgtgtaagtattttaaaagccctttaaaaaataaaaataggaactaagatgaggttatattatgaaaattaatttttttaatcagccctccttttgggttaataatctctgctatactcaaacttcagctgagattttaagctcagttaaaattaaaaaataaagcaacttacaaatggtaggaaaactttgaggcatttgtattggccttgtcccactccttcactgacttaggggcctgtgtttcc

SEQ ID NO: 604418 - DNA, 564 bp, Homo sapiens
aataacacatattttgatttctttttcaatctctgattcattcatcaaaattttctatatttcactcccattcgatgatagtttagttactctctaccacaacattgaaaatattactttatgtttttcttgcctcttctgctgcaattaagaagactttcatcaatctaattactattgttttktatgtagtctctctttctgggggtttttagggttacttcatttgtctttagtgttttacatttttattataattaattatggcattttttgatctgctcaaaacatgagacatggaatgcttttaaattttaagattcatggttctattatttcttttttttctgaaaattcttttataggtacattttcctttaattatttgtgttttccctcatctcctcatctctctatgttggaatttgggtaattttccgaaggttatccaactactccaaagaaatcctgtaacttttgagtgatttttatctgtcttttttttttattgctttgttatatatttagcggattgtattagtccattcttgcactgctataaag

SEQ ID NO: 604419 - DNA, 615 bp, Homo sapiens
atgttagcgaggcctgtggcaaatatcaagagtgaagctgctccaggagttgggactcttacagggaagtctgcagtgaaggctattgtccttcagaagcttgtgtgaggtaagcgcattgataggatacagtgctttcagaacagaaagcgtattagaatcacttagcttcttaaaaataaccatttatggagcccacagttctctttaatgtgcttaactgggcctagggatctatactgtgacacatactttgagtgattccatgtagatggtttatggcatattgagctgctttgttgaatgtctgggaaaaggcatagttaagaaattaatagtggggaaagtgaaactggttaacaaagtgctttgaagccaccaataaggggtctacgctttatctagatgattaatagggagactgaaaatttcaaaaaggcaatgtgatgtgaaaacattayaatatatgatgtatttataaatagcacaaatgaaatcaatgttaaatttccttaaaggtctatgataaagcatgagttagatcagggattttcaacctatgacccaagggctaaatgaatgttgttttcatgttgcttttttctgtatggccag

SEQ ID NO: 604420 - DNA, 578 bp, Homo sapiens
tggtatatacatataataaacaaaatacatgttaattgaatgtttatgttatcagtaagcctcctggtaaacagtaagctattagtagttaagtggggaatcaaaagttatacacaaattttctactgcctgggagatctgtacccctaacccccacattgttaaagagtcaactgtacacacacatacatacatggacacacacgacaaagttgtttactgtccggcccttcacagaataagtttgccgagtccctggatttaggcagactgaaggtttcccagtatttgtgcaagttagcaaggcttcagctctagtgtgactgggtgggtatctggggaggtaagtgcgtcagaatgaggcaaaagcaaatagggctggactaaaaggtaaacagtccaaatagctrtcaaaacaaggtccttacagccttagatggaaaaagtgaacaaagtattttccataggatgacacacagacctttttaaaatgcacatttaattatggtttacattgatattattcagtaactttaaatcccccttaagacaaggccaaaactcaagcccccactcat

SEQ ID NO: 604421 - DNA, 443 bp, Homo sapiens
gttgcagtgagcggagatcgtgccaccgcactccagcctgggtgacagaggaagactttgtytaaaaaaaaaagatattcaagccctaatccccagaacctgtgaacacgttaccctatgtggcaaaggaaactgtacagatgtgattaaattaaggctcctgcaatagggagattatcctggatcatccagatgggcccagtgtaatcagcagagttcttacaagagggagcaggggatgtgatgacagaagaagaggttgagtgatgtagccatgagcctagaaatgggggccgactctggaagctggaaaacacatgaaataaattgattcttctctagcacctgcagcaggaacacagttttgtcacagcttgattgtgacactttgtacttctgacctctgaaaatgtaggaaaataaatgtgttattttaagccact

SEQ ID NO: 604422 - DNA, 542 bp, Homo sapiens
atctgcaaacagagatatttaaacttcctgtcttttatttggatgccttttatttccttctcttgcctgattgttctgggtaagacttcccatactatgytgaataggagtggtgatagtaggcaaccttgttttgtttcagttctcaagataagtactagcttttgcctgtttagtatgatgatggctgtgggtttgtcataagtgattccttatttgggggtatattactttgatgcctagcttgttgagggtttttcacatgatgggatgttgaattttgtcaataaccttctctacatctattgggatgatcacatggtttttgtttttagttctgtttatgtgataaattacacttattcatttgtgtatattgaatcaaacttgctatccaggaataaactctacttcatcatgatggatttgcttcttcatatgctgctggattcagcttgctgttattttgctgaggatttttgtgtctatgttcatcatggatattggcctgaagttctccttttctattgttcctgtcaggt

SEQ ID NO: 604423 - DNA, 541 bp, Homo sapiens
tgaagccacaatgagatatcatctcacaccagtcagaatgactattaaaaagtcataaaataacatgttggtgaggactcagagaaatgggaacactgacacactgttggtgggaatgtaaattagttcagcccctatggaaaggagcttggagattcctcaaataacaacaaaaataagactaccattcgacccagcaatcccactactgggtatctaccaaaaggaaaaaaaaatgttctaccaaaaagatacctgtactcayttgtattttggtattgttaacgattgacaataccaaaaccaacctggattcccatcaatgtggattggataaagaaaatgtggtacatattaacaaggaaatattacacagccatgaaaacaaatgagattatgtcctttgcagcaacgttgatacagctgcaggtcattatcctaagtgaattaacacagaaacagagaatcaaataccacatgttctcacttataagtggaagctaaacaatgattacacacacataaggatggaaacagtaga

SEQ ID NO: 604424 - DNA, 541 bp, Homo sapiens
tgaagccacaatgagatatcatctcacaccagtcagaatgactattaaaaagtcataaaataacatgttggtgaggactcagagaaatgggaacactgacacactgttggtgggaatgtaaattagttcagcccctatggaaaggagcttggagattcctcaaataacaacaaaaataagactaccattcgacccagcaatcccactactgggtatctaccaaaaggaaaaaaaaatgttctaccaaaaagatacctgtactcacttgtattttggtattgttaacgattgacaataccaaaaccaacctggattcccatcaatgtggattggataaagaaaatgtggtacatatwaacaaggaaatattacacagccatgaaaacaaatgagattatgtcctttgcagcaacgttgatacagctgcaggtcattatcctaagtgaattaacacagaaacagagaatcaaataccacatgttctcacttataagtggaagctaaacaatgattacacacacataaggatggaaacagtaga

SEQ ID NO: 604425 - DNA, 541 bp, Homo sapiens
tgaagccacaatgagatatcatctcacaccagtcagaatgactattaaaaagtcataaaataacatgttggtgaggactcagagaaatgggaacactgacacactgttggtgggaatgtaaattagttcagcccctatggaaaggagcttggagattcctcaaataacaacaaaaataagactaccattcgacccagcaatcccactactgggtatctaccaaaaggaaaaaaaaatgttctaccaaaaagatacctgtactcacttgtattttggtattgttaacgattgacaataccaaaaccaacctggattcccatcaatgtggattggataaagaaaatgtggtacatattaacaaggaaatattacacagccatgaaaacaaatgagattatgtcctttgcagcaacgttgatacagctgcaggtcattatcctaagtgaattaacacagaaacagaraatcaaataccacatgttctcacttataagtggaagctaaacaatgattacacacacataaggatggaaacagtaga

SEQ ID NO: 604426 - DNA, 378 bp, Homo sapiens
gtggtactgtacagagtcattcagcaggcatcaagatttagactcaggtttatctgattcaaagatagttttctttccactggatcattatgcatcaataggcagaagggagtctttgaatgttttggaacataaaaatggaataaacagaaaggtgcttcagttagatatgtggggtgaccctcagggacattatttaagatagggctcctrttaagaggaaatggcaaaaataatagaagtttgaacaaagcttatagtagtggaataggaaagtaattggagtgtagtaaaagcaattctgtgaaaaaaagcatgaaaaacttttatcctcctatgtatcccctgaatctagcacagtgcctgcctttctgtagg

SEQ ID NO: 604427 - DNA, 409 bp, Homo sapiens
tcttaaagctccaaaatgatattctttgactgcatgtttcacatccagatcacactaatgcaaaaacttcagtttcaaaatattgattgctggtatataggaatacagtaaatttttaaaaatatccattatatcctactgcttttctaagttcatacatcaaatttagmagtttgttttggttttactgttttaatattttaaaaatagactttattttttaaagcagttttaggtttactgaaaaattgtagagaaagtacagtccccatttacccctttttccttaacacatgcacacagtttcttctagtattgcaatcttgcattgctgcagtacattcacttccattgttgaaccaatactgaaacattatcattaactcaattccacagtttatgttacaat

SEQ ID NO: 604428 - DNA, 590 bp, Homo sapiens
tattaaatgcagaagaaattttgcagagacagagtgggaaacataattattttccagagtaaatttggctaatattaattttgtcatacatttttgtcagttttgacattttaactataaaattagtgtgtggataagataaattaggtagaaataatgacaattacaaaaaatattactttgatgagttgctgggtttgagaagaagaaattttaaaatcttcagtgaaaaataactattttattatatatatatatwttttttcttcaatcttactttccaaaatgtttaccttggataacaaaattataattcatagatatttttatgtgttcaggaaatttataaaatatatattgttgagaacactcaaaaaagaaattgtggaaaaaaggacctaacaaatgtgacccttctaaaagagtggaggcctcctggcaatgttctctgcaacccatgatgtaggttaagaggagtggaccaatgttctgtttctgactgattatgaggcaacatatgtaccagtaaaatttctaacttacattgggtcttcatcttccatctatcaaggcataagcttatccatgta

SEQ ID NO: 604429 - DNA, 617 bp, Homo sapiens
cttaaacaaaggtatgacttattatgtaaatttaaaagatggtaagagtttcgaacacacatargcagacatccttaaaattggagatttccttcatagatataaattttatttataaaagagttttaagatagccaattaaatttcagaaaggtatattttagttcaatagggtgttctttttaacttagctactgttttttttacctaaaattacttgagttaaggttggagtctattaaggaataaggccagaaagcattctgtatgcctggattcagcatgggtagatctgaaaaacaaagcaagcctattttaccttagggtctaccttttataaacaacttatctaggatagctttttttccacccttgagatgggttggtaactaagacaaagggttagcagatttaatttttcttatctatcagtcacgtaagctttttatttgccttttacaaattctttaaataaaaacattgaaatctttttagaagtttctgctgcagtgttgtttatttggaagattctactgtaacttatttttagtaagattctgccatgtctgtaagacattgctgcttccaggatctaatatttatgcatgtataagcca

SEQ ID NO: 604430 - DNA, 655 bp, Homo sapiens
gcccaggtagcatagagtctaggagatcgacatttgtcccccgcatgaagggaactgctaacagtggsaaggtatatctttggcgcagacctgaagacagagttgactctggttgggtcagagctggagcattactgtagttgtctcctccatatgctgtgacaggccatgtgtgacaaagctgtcacttggcattgagtgctagcatcttcctagtttcaagttttctaaggatctgagtagccgctcagtgaaaatcgcagagaataagtggcgcagccttctcgtcttcctcattttgctgctgttattttgtgctccagaattgacatgtaagagtttgttaattttaatgccttgtttttttctcccaattttgtacatattgtcaacatctttattgtatgtcatttttgctttttttaaacttgaatatgtgatcacagaaattataatacataattagtatttgtatatgatagtgaaaagtaaaacagacatttttctgcttttgtaataggacagttaaaatttagatttcattatagtaccttatatttcatagaacataaatgtattgctatcattccaaagggcagaccttttaagatggcttatattgtagcttacacatcaaaacaaaaaaactccagtg

SEQ ID NO: 604431 - DNA, 655 bp, Homo sapiens
gcccaggtagcatagagtctaggagatcgacatttgtcccccgcatgaagggaactgctaacagtgggaaggtatatctttggcgcagacctgaagacagagttgactctggttgggtcagagctggagcattactgtagttgtctcctccatatgctgtgacaggccatgtgtgacaaagctgtcacttggcattgagtgctagcatcttcctagtttcaagttttctaaggatctgagtagccgctcagtgaaaatcgcagagaataagtggygcagccttctcgtcttcctcattttgctgctgttattttgtgctccagaattgacatgtaagagtttgttaattttaatgccttgtttttttctcccaattttgtacatattgtcaacatctttattgtatgtcatttttgctttttttaaacttgaatatgtgatcacagaaattataatacataattagtatttgtatatgatagtgaaaagtaaaacagacatttttctgcttttgtaataggacagttaaaatttagatttcattatagtaccttatatttcatagaacataaatgtattgctatcattccaaagggcagaccttttaagatggcttatattgtagcttacacatcaaaacaaaaaaactccagtg

SEQ ID NO: 604432 - DNA, 616 bp, Homo sapiens
  misc_feature 478: n = A,T,C or G
ctgtgactgcagatccattttgacagttaaagaattccatgtaaatggaattgcatcgtgcctactcctttgtttctggcttattttgctgagcactgtgtttctggggctcgtccatctcgcggtgtgcatcagaagttcttttcttgataccgccaagtagtccattgtgtggatacactagagttggtccattcacctgttttggacatayggattgtttcctgtttggggctaatgtgaataaagctgttaggaacatttgtgcacaagtctttgtataggaaaatgttgtactttttggagaaaatactcaggagtagaattatttcactttaagagattggaaaactttttccgaagttgctataccactcaccttcccaccagcaaggtatggtatttccagttggttcatatatcctcaccaatactggaaattaggtattttttacaagtttggcacatcctaggtggnatgtgtcgcagtattttcaatgatttagttttacatatcccctaatgattaatgaagttgaacagtttttgatagcttaattgctcactgtgtaagtcttctttttgtgagcatgtggtaggacctctgctcattctg

SEQ ID NO: 604433 - DNA, 562 bp, Homo sapiens
aagttgaacagtttttgatagcttaattgctcactgtgtaagtcttctttttgtgagcatgtggtaggacctctgctcattctgaaaactgaattgtctttgtcttattaagttaaaaattctttcccttatattttggatacaagcttttgagtttgcatcatttgttgaacagactctcctttatcaactgaatttcactgacactgaaaatcaaattcctatatatatgtgggttgtttcttgactctctatcttgctcattgttgaatgtgtctatttttagatcactaccactctttccatatatacaaaatccatatatatgtgtgatgtatgtatatgcgtaattcctctttgttcttcttcacaattgttttggctcatcttggatttttgtacttccaagatcctgctaggatcctgtctgtgatgacttgattttatgtgtcattttggggtgaayggacatcttgactctagtatgcacttctgctgaggtgtcaatcacagtggggagtgtgatacaggtgagtgaatgtgccagtggtgacaactggag

SEQ ID NO: 604434 - DNA, 592 bp, Homo sapiens
atatctgaaattatactgcatcatacatttttgtatagatgtattgtctgttcctgcccagttaaaaatgaaagttctcttaaggcagggacatcgtcttgttcacgcctgtatccctagtcttagaggagtgactggcatatggatgcactcgttatttatttaatgattgaatacagaagtctggactaaaacattcttcgcattcattatttctctcctgcttgattcctttaatgttcaggaaggattgtgccacagcataaagcttttaggtactgcttttatatggcgcatctttccattatgaatgttatgatggaaaacaagagctaatgtatgcctgaaggctttctcattgacattagacttccagcatgtgctctcagtatcaatatgtgatgttgaataaggcatgagaaagacttcccagayctcagtccctctcgccttgagtctctcctatgtatttccattacagcttatgtatttctctatgggggtctttatcaaattaacataattgtgtctctccagatgactgctgactattcaagagcagagactcctctgcctattttttctttttatc

SEQ ID NO: 604435 - DNA, 567 bp, Homo sapiens
gcctgtctacccacattcctcccaaacgttcaaaatgagaactaattaacatggaagaaagtcagaacagaattctcttctagctaggacttcttatcactcctttctggatcttctgaagttttcttgattcccaaagactttcactccaactctcttgtggctgttaaacaataggaataaggctgagatagaaaacaggctgagggacgaggaaagacggaatggggagaggggacttaagtgcttggcaaacacraagaggccaccagccctactcagggttcacggtcattgctccatccaggactggtctgccgtcacttaagaggcgactaataaggatttggggggcaacagagctgccaccatttccaagcatcctaaacaacataactacataagatgtttcaccaattaagattagcaattatgcgtgcagtgagaggttctagggcaatcaccctaatgtgaaaggtggctgcctcacagctgaggaggaaagctctctcccagttttggactgggaataaaaactctcttggcatctaattggaagagcagagc

SEQ ID NO: 604436 - DNA, 529 bp, Homo sapiens
actaaggaatgacctagaaagaaacaataacagcaacaataaataccacatccaaatgaattttgctatcaagtcttggaaataaaggaaacttgatgtgctacttgagaaactgaaaaaaaatcctaaaaattccaaaactttggcaagctaagaaatgacatcaacataaagtcaaaggaaattgttatatactgaaaaaggtcagatgaaatgttgaagctgtggttgctgataataaaaatagacttttctgaacactgaatatattcgtaagaagtctaagttaccttatgactcttagccatcagtaaattaagtattccttaaaatggtacccagaagatgaaacaaaaagagtcaagtgcaactgctgagatatcttcagaacgtggccaagagccgtggagtccatcctcttcccyagccacactggtttccttctggattcttgcaggcaggctcctcatttcccagagacgcctccccattaggtggttccctccccctcctcctacatccctcacct

SEQ ID NO: 604437 - DNA, 499 bp, Homo sapiens
ccacatcgccatctgtcctgcagctacctattccttccgcttggtcacagtttttacaaaataccaagcytctggaactcagctgcctggaatcaaatccccatactggcacgtataaaacgtgtgatgcaggttttgttacctaaccaacatgaactggttcctttgttttaaagtggggatatctaccatgtagacttttttgtggggggaataggcgtgggagtgaaattttaatgagaaagtgtgtgtacattgctcagggaggcctaggatttactaaggtttgtgctacttacggtagcaatgaacaatccctgctaatggtgaccaagtccattttgtttactcttttgttttcttttctctcttcttttcttttctcttctcttctgttctgttctcttctcttctcttcttttcttttctttgatagagtcttgctctgttgcccaggctggagtgcagtggcgcgatctcggctcaccaaaacctctgc

SEQ ID NO: 604438 - DNA, 499 bp, Homo sapiens
ccacatcgccatctgtcctgcagctacctattccttccgcttggtcacagtttttacaaaataccaagcttctggaactcagctgcctggaatcaaatccccatactggcacgtataaaacgtgtgatgcaggttttgttacctaaccaacatgaactggttcctttgttttaaagtggggatatctaccatgtagacttttttgtggggggaataggcgtgggagtgaaattttaatgagaaagtgtgtgtacattgctcagggaggcctaggatttactaaggtttgtgctacttacggtagcaatgaacaatccctrctaatggtgaccaagtccattttgtttactcttttgttttcttttctctcttcttttcttttctcttctcttctgttctgttctcttctcttctcttcttttcttttctttgatagagtcttgctctgttgcccaggctggagtgcagtggcgcgatctcggctcaccaaaacctctgc

SEQ ID NO: 604439 - DNA, 580 bp, Homo sapiens
acctaagatccttgtagctcatctacatgttcttttacatcccataactttcttaacacttttgtcagacataccaattacactttgttactattttcaatgaaaaaatgtacagtctgataaagctcatcaaaatgacccccagtgcggatcttcatggagatggcagagctacctttcggcagggtagatatctgcacttcacaggagggttaagtaagacctaaagagatcaaatcacttcagttctgtgtaacaaatatgtactgatcagctgttgcatgcccccaaaaatctaaagccatcaccttttaagtaatrggatgtgctgacttctcactgtatttgcacaaggacgacatatcaaagtaaaatagaaatacatagatctggctttatcttacacttgtacagacccatgcccacacgccataacacacacaaacacacacactcaaatacacacacgagtaactcttacagagaagctgttgaaagattttaggaagtaggttgtttgaaatttaaaaaatgctgtaggaatttttacgtcatatgatgtagctacttctatgcctat

SEQ ID NO: 604440 - DNA, 550 bp, Homo sapiens
tgagaaaatgctaccatctcctgtcatgtctggcatttagctaagagtaaatgagtatacagccagagtaggatgtrtccgtacatcctacagtgcataaatctgaagcgagctgcaagctgcagattgaaataaacgttcctcacgctgtcatcactgcagagctcatgagtcccctctcccctggctgactggagtctatagaactgaagccaagaaatatgtctttgcagaaagtcttgtacagattctgaccacagccactgggtcaacgccctgaggattccactcagaatttgcatggctgcaccagtgtgggttggaataatcccggttctgggtcactctgaacctgatcaagaagtgcctgaggggccaccaaggcattcctcaaaggtcattgtgggctgacagccacagatgttgacaaccaagacaggaggctgactccagtacagccaccaggagctcgacaggtttttgagtagcaggaggaagcactccaaagctatagaccagcaaagtgggtttacatcccctgtaatgtttc

SEQ ID NO: 604441 - DNA, 550 bp, Homo sapiens
tgagaaaatgctaccatctcctgtcatgtctggcatttagctaagagtaaatgagtatacagccagagtaggatgtatccgtacatcctacagtgcataaatctgaagcgagctgcaagctgcagattgaaataaacgttcctcaygctgtcatcactgcagagctcatgagtcccctctcccctggctgactggagtctatagaactgaagccaagaaatatgtctttgcagaaagtcttgtacagattctgaccacagccactgggtcaacgccctgaggattccactcagaatttgcatggctgcaccagtgtgggttggaataatcccggttctgggtcactctgaacctgatcaagaagtgcctgaggggccaccaaggcattcctcaaaggtcattgtgggctgacagccacagatgttgacaaccaagacaggaggctgactccagtacagccaccaggagctcgacaggtttttgagtagcaggaggaagcactccaaagctatagaccagcaaagtgggtttacatcccctgtaatgtttc

SEQ ID NO: 604442 - DNA, 532 bp, Homo sapiens
gtgatactatgcaatgaacactaaagtgactaaaatgaaatgaaaacatatcattaatttgtaaaagttctacattcaatcaaacagaattgcagagacatatctgtaaaatagtctagttaatatagtggaaagatctaattatctgcrgctaaagttacctcattaatgtttaatgccaatcataaatttgtgcatttattagaaatgaaaaaaagaaatggaaataactggggcttttggccattgtgctgactgttgctggagactgagaaactgttcaagggtggaggttttttcttctttatttccacctccccatctccttccagactgtcagagccatgggagagacagtaagtgttcttcgaatggatgcattggaattcaatgggtcttcttgttcaaatcattttctgctacacaggaaaagtcctctaagggtcaaaaggatgctcaagtatagtcacccagtgtcatttccccttgcaaacccatttctcctgtggggcttcccagggcagtttctctc

SEQ ID NO: 604443 - DNA, 455 bp, Homo sapiens
caaggccctatattggcccaagacctttgtgcatcactcactggtttttttttttttgtttttttttttttttttgcttattctctgctctgtggtgtaaaggtattgttaaaaatgtcaaaaaggacggcagatacccctgctggcaaccgtggtaagaaaaagaggaaacatttttatttctctgtagtgcaggaagtgaagctgtcagagaaactgggtggcagtgtcattgtgaaacatcttacagaagagtgaggtgttggaatgaccaccacacaggacctgaatcgttgaagttctatgttgaaaaggatgaacagaagttaatgaaaaatagaaaaacactacataaaacaaaaayagaagaacttgattatgtattagaagagtggatttgtcagtatttgcagtgaacacatgctgcttaatggtatgctgatcatgaaacaagc

SEQ ID NO: 604444 - DNA, 499 bp, Homo sapiens
gcaggttgtagctgtataatataatttatacagcacatatttatatcacattgtatagttatttaagtgcattttaaatcgcccttgtctgatttttacaacacccctgtgagtgagatgggtgaagatattatttgttgaaattattaagagcatgggctttgaagtccaacaggcctggcttcaaattcttgcaagtttgggccagttatttaatttctctgagacttggttttttcttctawtttcctctcacatgcctgtaatgtcacactttgtctactgatcagatctctgtagtggatctgacattccattttacttggagatacaatccttgccaattttagaagaagcagagacagagatttcagagaaggagctttgcagtcttattgtttgggttcaaattgtgcctgtattccttttcacataggtcaggacctctgctcgtctttggaaggcaacttattgacatctggagacccagttttcctcc

SEQ ID NO: 604445 - DNA, 535 bp, Homo sapiens
cagtttacctttgttccgtcaccctaatgtctacatttgctttggtcttcattgcatggggacataaagttctcactactaccaccagtctttttccaaagtttccttttggttctctagtcttgattctacatattgcctgagttattagatgagaaatatagtttgttacttttatattcaaatagcaagttagctgggcataaaatctttgggttgtactttttatttgcaaaatattttgctggggccgctcttacagtactgaatgatatcgtagaaaagtatatttagccttatatttccccctcataagtatcccaatcctcyggccagctatccatgaaaggctttatcttcaacatttgttactaatgaggatatatctcactgttgacaacagtgagtaatttttccctgatatattatgcatgtcttcaaataataggttcaaatgatttgaaatcatatttcaggaacttattctttaattacactttgaaatgtttcttctgttgcattattttagttttat

SEQ ID NO: 604446 - DNA, 445 bp, Homo sapiens
cagactctattgtattaataattatgctatgcggcctccagggtattagctgttcaatttttattatttcctcttttttttttttttcctgctagtatctctttatagatcccattcttgtttttccttttgaactcatcattgaaaaaggcgtgtttttctggaccaactactaygggagtttcagatgtaaaggaggaaccagagctgtgttacaggttagcaggatttctgcacattggtttatgtagctactacttctctccagccagctgggtgtaggtagatgcaagacagtgcagagactatcctgaaccatgtgcttccttgtatatatgctggtgtgtgtgtgattccttatttagatttccttcttctttgtctaaaaatcaactcaggtccagggttgcttctggggccaacacaagtgccccaatcctgcatt

SEQ ID NO: 604447 - DNA, 597 bp, Homo sapiens
acattacttgatgtgaaattagccagtcacaggacaaatactgcatgattccacttacatgaagtatctaaagtagtcaaagtcattaaagaaaaaggtatcatgacggttgccagaaaatgggggaagagtaaataaggagttgctgttcaatgggtataaagtttcagtcatgcaggataaaaatgttctagagctttactgtacaacattgtgcttagagttaacaataatgyactgcacacttaaaaatttgttaagggtatagatcccattttatgtatttttttctataattttaaaaaatgaaaaacaaaaatgaagaatgagagaactaaaaagcaaaatctattcaaatgattagttgactatttctgaatctaaatctactgcagatgacaattcaggccattactcagggccagtctttgttccactgataagcagttggggcagtgaggcaggaaagccacctgctgagaacagggtctaaaagagaccagaggtgggatacatgcaattaacccttaacctcttcccggctcaccatgatggagcagctgatttgcctggctctcctcctctctatattttcat

SEQ ID NO: 604448 - DNA, 435 bp, Homo sapiens
atatttaaatgataaatgtttattgattgttttacagataasgaaactgctgctcaagttaaggtcaaagttaactgacacgtgtacgattttacagctagtaagcagctaagttcaacattacaaccagccagtctgattcctagtaggtagacctcaggcttttgcctgagagccccacggacacctgcaatcattctcttattaaaggatggctcccaccttgccatgtgtacatcaggatttcaaaaaacaaaattcagtaggagagattaagacgatttctgcatacttctcagtacaatttaaaattcataaaggcattagataaatgtgtaacaatgtgtgatgtctttttgatgggatagacagaaaacagaggtcttgattcacttggggtaattaaagagtctgtgacacatcttaaaagtgaag

SEQ ID NO: 604449 - DNA, 538 bp, Homo sapiens
tgtggctatgagatcccagcccctgattgtgccagaggaggggctggtatttcccagtcactcagtttaaaggtctgaggctcttcctctggagactagacttttgggagtctctgtgtactgccctaggatgtgacaggtcacaagagaagggcacgcctgcttttgctcctatctttgagaattttttgaaaatataaatcttattctgacagccttggcagtgtgctacctgactatttgctaggtttctatgacatctaccaacagcaggaagcataatgagagtatgccttgtggactaactttgccagagaaactaagaccttaggagatgtcaatctagggggcactaggaaaggttagggagaatccccttrtataaggagtccaggaaaactctccacagctaaaattagggctgtgtaatctatccactttctgttctatggaattagcaggtattacccaattccatagaagtatggcttggagagttgctagcacattgtgagtactgccttccctggctcattct

SEQ ID NO: 604450 - DNA, 590 bp, Homo sapiens
  misc_feature 579, 580, 581, 582, 583, 584, 585, 586, 587, 588, 589, 590: n = A,T,C or G
gaataattgttctaggaaattgcgttgagagaatggtattattaactatattaactaacttgtctaatgatctttgtgtgtagaaaccatgaaaacaggaaaacatctttgttcaccaaactagatcttcataagccactgttttataattttgaatcctgttgaacaacattctgtaggttattaaatcaagacttttgtctttttttatttccagcaaactcaagtgtgtatatataagtctttggaatgttgaaggagtgacattccacaggcttcagatttttttttttttttgctgcccattgtgctaaggagaccagtaaattaagaatgtttaatgatttctcctttatttgctttctttttggagctctgttacagcctaaaaaattagttcttgtggatgggtttttgaataggaaaatyagtttcaagatattgttctctgacagtgattaatgattaattaaccaagctaacattaatagaaaagctttttatagtataaatttctacgcaacctggcacagtgtcagtgaacaagggtaccgagctcgaattcgtaaaaagtgaagnnnnnnnnnnnn

SEQ ID NO: 604451 - DNA, 581 bp, Homo sapiens
ctatcataaagacacatgcatgtttatgttcattgcagcacaattcacaatagcaaagacatggaatcaacctaaatgaccatcaatggtagactggaaaaagaaaatatggtacatatrtagcatagaatactatgcagtcataaaaaagaaagagatcatgtcctttgcagggacatgagtggagctggaggccattatccttagcaaactaatgcaagaaaagaaaaccaaataccatatgttctcacatataagtgggagctaaatgatgagaacacgtggacacagaggagaacaacaggcactgaggcctacatgagagtggaggatgggaggagggagaagatcaggaaaaataacaaatgagtgctaggcttagtacctgggtgatgaaataatctgtacaacaaacccccatgacatgaatttacctgtataacatacctgcatgtgcacaggttaaaaaaagaacaaaaaccccacgaaaacacactaaaaaaatgacatttttcaaggttgtatattaatttaagtaatttttttgtaatgtctattttactggaacttctatggatcac

SEQ ID NO: 604452 - DNA, 581 bp, Homo sapiens
ctatcataaagacacatgcatgtttatgttcattgcagcacaattcacaatagcaaagacatggaatcaacctaaatgaccatcaatggtagactggaaaaagaaaatatggtacatatatagcatagaatactatgcagtcataaaaaagaaagagatcatgtcctttgcagggacatgagtggagctggaggccattatccttagcaaactaatgcaagaaaagaaaaccaaataccatatgttctcacatataagtgggagctaaatgatgagaacacrtggacacagaggagaacaacaggcactgaggcctacatgagagtggaggatgggaggagggagaagatcaggaaaaataacaaatgagtgctaggcttagtacctgggtgatgaaataatctgtacaacaaacccccatgacatgaatttacctgtataacatacctgcatgtgcacaggttaaaaaaagaacaaaaaccccacgaaaacacactaaaaaaatgacatttttcaaggttgtatattaatttaagtaatttttttgtaatgtctattttactggaacttctatggatcac

SEQ ID NO: 604453 - DNA, 581 bp, Homo sapiens
ctatcataaagacacatgcatgtttatgttcattgcagcacaattcacaatagcaaagacatggaatcaacctaaatgaccatcaatggtagactggaaaaagaaaatatggtacatatatagcatagaatactatgcagtcataaaaaagaaagagatcatgtcctttgcagggacatgagtggagctggaggccattatccttagcaaactaatgcaagaaaagaaaaccaaataccatatgttctcacatataagtgggagctaaatgatgagaacacgtggacacagaggagaacaacaggcactgaggcctacatgagagtggaggatgggaggagggagaagatcaggaaaaataacaaatgagtgctaggcttagtacctgggtgatgaaataatctgtacaacaaacccccatgacatgaatttacctgtataacatacctgcatgtgcacargttaaaaaaagaacaaaaaccccacgaaaacacactaaaaaaatgacatttttcaaggttgtatattaatttaagtaatttttttgtaatgtctattttactggaacttctatggatcac

SEQ ID NO: 604454 - DNA, 621 bp, Homo sapiens
catggacactgctgaaaatagcagtaagacaaagacaggatgctgctttgagtattttctgcctttgccacttagataaatccctctcccacctccatctcagttttatcatatgtaaaacgactatatgatctctgaggtcccttctatttttacatttggtagttatgagcactatggtcacttttgattccagaattgtatgatttttatcttctcctaacccatgcttraaatatgcttaatggaaacatggtgcaagaataaaggctcacttaggtccaattaacaagtatcgctataaaaataataaaacatggtgtaaaaggccacattagcaacatgtagctgatgacattgaggcttacatgaggcagacaggactaaaacccaggttttttcaaatcccttcagggctctttatctgaagtcccatagaacactatactttctttcctttccgagggctataaaagttagatctttattgtccagatagtttggaaaatccatcttccttcacttgtttcaacatacttggttccagcactagaaacaaaacaactttctcttgcagtgtctcttggatgattcaggtggcatgccttcagtcacttcccc

SEQ ID NO: 604455 - DNA, 621 bp, Homo sapiens
catggacactgctgaaaatagcagtaagacaaagacaggatgctgctttgagtattttctgcctttgccacttagataaatccctctcccacctccatctcagttttatcatatgtaaaacgactatatgatctctgaggtcccttctatttttacatttggtagttatgagcactatggtcacttttgattccagaattgtatgatttttatcttctcctaacccatgcttaaaatatgcttaatggaaacatggtgcaagaataaaggctcacttaggtccaattaacaagtatcgctataaaaataataaaacatggtgtaaaaggccacattagcaacatgtagctgatgacattgaggcttacatgaggcagacaggactaaaacccaggttttttcaaatcccttcagggctctttatctgaagtcccatagaacactatactttctttcctttccgagggctataaaagttagatctttattgtccagatagtttggaaaatccatcytccttcacttgtttcaacatacttggttccagcactagaaacaaaacaactttctcttgcagtgtctcttggatgattcaggtggcatgccttcagtcacttcccc

SEQ ID NO: 604456 - DNA, 671 bp, Homo sapiens
  misc_feature 505, 506, 507, 508, 509, 510, 511, 512, 513, 514, 515, 516,517, 518, 519, 520, 521, 522, 523, 524, 525, 526, 527, 528,529, 530, 531, 532, 533, 534, 535, 536, 537, 538, 539, 540,541, 542, 543, 544, 545, 546, 547, 548, 549, 550, 551: n = A,T,C or G
  misc_feature 552, 553, 554, 555, 556, 557, 558, 559, 560, 561, 562, 563,564, 565, 566, 567, 568, 569, 570, 571, 572, 573, 574, 575,576, 577, 578, 579, 580, 581, 582, 583, 584, 585, 586, 587,588, 589, 590, 591, 592, 593, 594, 595, 596, 597, 598: n = A,T,C or G
  misc_feature 599, 600, 601, 602, 603, 604: n = A,T,C or G
atatatttgtggggtacacgagatgttttgttacaggcatgcaatgtgaaataagcacatcatggggaatggggtattcatcctctcaagcatttatcctttctttgtgttacaaacaatccaattatactcttttagttattttattttatttttatttcaatagtttttagggaacaggtggtgtttggttacatggataagttcttcagaggtgatttcttagattttggtgtacccatcacccgaacagtgtaccctgtacccagtgtgtaatcatcttttattcctcaccccctcccrcccttccccgcaagtccccaaggtccagcctatcatttttatgcctttgcatcctcatagcttagctcccacttgtaagtgagaacatatgatgtttggttttccattcctgagttacttcacttagaataatggtctccaactccacccaggttgctgcaaatgccattatttcattcctttttatggctgagtagttttnnnnnnnnnnnnnnnnnnnnnnnnnnnnnnnnnnnnnnnnnnnnnnnnnnnnnnnnnnnnnnnnnnnnnnnnnnnnnnnnnnnnnnnnnnnnnnnnnnnnttttagatggaatctcgctctgtcacccaggctggagtgaagtggtgcaatcttggctccaaaagtg

SEQ ID NO: 604457 - DNA, 491 bp, Homo sapiens
cttctatagtggcatcaaggagaagtgcagagcaaaagggagaaaagctccttataaaaccataagatctcctgagaactcactcactatcacaagaacagtggcatgggggtaacccatgattcaactaccttcccaccaggcccctcccatgacatgtggggattacgggagctacaattcaagatgagatttggatggggacacagacaaatcatcagactttaaatggccattaaattgcaaatgttcctgcattttaagactccaagtaagtggatgaaaaaactgagattgaagactagcaggtaatcaggagggactctgccagattgtccctgttcttcgttttctggactgtatgctgattggcgaagtttctgctcastgcccgactgtatgggcacttgtgttgctccacagaagtgatctgtttgacctacccctgtaagctggaagttggtcagaatgagcttagacgcagaaaatac

SEQ ID NO: 604458 - DNA, 566 bp, Homo sapiens
cagaggcagagaatggaatgatacatctgcaggtcaaggaatgccacaattgcccacaggcgcccaaagctagaaggggcatggaactgattctccttcagaaccaccagaaggaatcaactctggtggcatctaattcagacttctggctccacaatagagaataaatttctattgttttaagccaccaaatttgttgtaaagttatggcatccatgagaaactaatagagagaggaagagggaaagaaagaataactattaagttttttaatgttagctacttaatggatgctgttaatatttaccaagatggggaaactggggaaagagtaagattctccactactggttctgtcttctggcagtggcatggtggaaggaattccatatgaagtaaaattcaggtccagcgagcaggcccaggacagagggagggttaagtgaggtggatccaggtctggggttaaagttataaggagtgagggccaagggcatagctcaaggaaaggattgacragggaagtagtgatgtctcaccccaattgtctaccccttacttgatgt

SEQ ID NO: 604459 - DNA, 596 bp, Homo sapiens
cttcactttggtaacttatgttgcttctaaactaggttgtactattttgaaaaacaaaaaagtattttacccagacctattttccttgtcaactgctttgccacaaaagactaaatttatctctgaaattataagtagaccttagttatagacaagttttactggctaccttaaaagaggcatggctattttaatgagtagaataatctgaaagttttwtttttttttattttgtagccctcttttcaaataattaaaaaatctttcattaaaagataagcaaatcatctatataatataaaaacataacaactctctaacatgaagtgtctgaagagtaagacacaaacactcagtccaaagtaggtgtttcatcttattaagtggaaagaactcttgattagaagttagaaaacctgggtactcattcttagttactaattattaagacttaatttttttgtgcttcaacttttaatctgtgaaatgtggatcatgattcctctgtctcataaacttgtaaaagggctcaatggaaataatctttaagaaattacattgaagagctcaaagagccattttaaatgtcaattgcc

SEQ ID NO: 604460 - DNA, 596 bp, Homo sapiens
cttcactttggtaacttatgttgcttctaaactaggttgtactattttgaaaaacaaaaaagtattttacccagacctattttccttgtcaactgctttgccacaaaagactaaatttatctctgaaattataagtagaccttagttatagacaagttttactggctaccttaaaagaggcatggctattttaatgagtagaataatctgaaagttttatttttttttattttgtagccctcttttcaaataattaaaaaatctttcattaaaagatawgcaaatcatctatataatataaaaacataacaactctctaacatgaagtgtctgaagagtaagacacaaacactcagtccaaagtaggtgtttcatcttattaagtggaaagaactcttgattagaagttagaaaacctgggtactcattcttagttactaattattaagacttaatttttttgtgcttcaacttttaatctgtgaaatgtggatcatgattcctctgtctcataaacttgtaaaagggctcaatggaaataatctttaagaaattacattgaagagctcaaagagccattttaaatgtcaattgcc

SEQ ID NO: 604461 - DNA, 549 bp, Homo sapiens
cagaaaaccattgagcttatgacaaaaaacaggaaatacatgtaaaagagaccaattttaaaaaatcaggagaaattttacaaaagagatttactgccaggaaaccaggaaaactttcagaacactctccttttcctatttttaacaagactcagttgtacaaataattctgtgaaactagccatgaagtttgcacacgaatgaatatatgtagtcagtgtgtttatatatttcatttcatatatgtgtcatatatatgtgtgtgtgtatgtatatatatatatatatatatatayatatataaaacactgaatattgcagaaaattaaagcaaagagtaagaagagttaaccaaattttccctcaatgcagtgggaaaagatgaaaaggagaagataggtgggcacagtggctcacacctgtaatcccaacactgagaggccgaagcaagagaatcacttgaccccaggacctcgagaccagcctgggcaataaggcaaaaccccatctctacaaaaaagtataaaaattagctgggcgtggtggcgt

SEQ ID NO: 604462 - DNA, 568 bp, Homo sapiens
gtataaaaggaaggctttgtcctggatcagtggctttcaagtcctcttttcctcccaccagtgggatcctttttagtaagtgaaataattgcacacaacccccaacacataacagataagaaagaaattctctggcagcaaaggggaggtggggtggacaaccttgaccagccttgtctagggtgtccctttccttcccttgcacctgcaggggctcctgaacacraggctgggtagagcacttgagcactgctgcacaggggaggagctgaggtctctttcagctcctacgttctgagccttcatctaaaaggcctggcccttcagtggcagcctggggagtgggcaagcgtggtcttcacaatcgcagtcagcccgtatccctagttgtccttctcaccctctggtttcctgtgcagacaaagaatcgaaggggacagagggctttgggactctgggctcactccaggcccacttttccttccattaccctttcctgtgccctttgaagtgccctctcatctgtgcccacctgagtagagcccaagggaggagaactgagcctgac

SEQ ID NO: 604463 - DNA, 581 bp, Homo sapiens
ggatacatatatatatatatatatatatatatgagcttattaaatattaactcacaggttcccacaataggccgtctgcaggctgaggagcaaggagagccagtccgggtttcaaaactgaagaacttggagtctgatgttcaagggcaggaagcatccagcacaggagaaagatgtaggctgggaggctaggccagtctcccttttcacatttttctgcctgcttacattctagctgggctggcagctgattagattgtgcccactgattaagggtgggtctgcctttcccagccccctgactcaaatgttaatctcctttggcaacaccctcacagacacacccaggatcaatactttgtatgcttcaatccaatcaagttgacactcagtattaaccattgcgccctctaaccctagtttactgaaagtatttatcatgaatrggtgcctacttttatcaaatgttttttctgcatctactgatatgattgtgtgctttttcatttttagcctgttgatgtaatgcctgacattttatgtccttgatttacagaatagtttcacaaatattattttaa

SEQ ID NO: 604464 - DNA, 602 bp, Homo sapiens
aatttttctaccaaagagatgcatgcacctatatattcattgcagcactattcaaaatagctaagacagggagggaatcaactcaggagcccatcaatggtggactagataaagaaaatatacatttataccatggaatactacccagccatgactatgaagtcatgtcctttgtagcaacatggatgaagctggaagccattatcctaagcaaactaaaacaggaacagaaaactaaatgtcacatgttctcacttrtaagtgggagctaaacactgggtacacattaacctaaagatgggaacaatagaccctggggtctgtaagacaggggaggatgagaaggaggaaagggttgaaaacctacctatttggtactatgctcactacctgggtgacaggtccaatcataccccaaactttagcatcatgcaatatacctttataacaaacctgcacacatataccctgactctaaaatacacattaaaaaagaaaaaaacaataatacaaaataataaaataaaaccactctacaggtattttcaaaagatattaaagccaagctagaaaaaccaagtgtgtgaggatgttatgcaatg

SEQ ID NO: 604465 - DNA, 602 bp, Homo sapiens
aatttttctaccaaagagatgcatgcacctatatattcattgcagcactattcaaaatagctaagacagggagggaatcaactcaggagcccatcaatggtggactagataaagaaaatatacatttataccatggaatactacccagccatgactatgaagtcatgtcctttgtagcaacatggatgaagctggaagccattatcctaagcaaactaaaacaggaacagaaaactaaatgtcacatgttctcacttataagtgggagctaaacactgggtacacattaacctaaagatgggaacaatagaccctggggtctgtaagacaggggaggatgagaaggaggaaagggttgaaaacctacctatttggtactatgctcactacctgggtgacaggtccaatcataccccaaactttagcatyatgcaatatacctttataacaaacctgcacacatataccctgactctaaaatacacattaaaaaagaaaaaaacaataatacaaaataataaaataaaaccactctacaggtattttcaaaagatattaaagccaagctagaaaaaccaagtgtgtgaggatgttatgcaatg

SEQ ID NO: 604466 - DNA, 602 bp, Homo sapiens
aatttttctaccaaagagatgcatgcacctatatattcattgcagcactattcaaaatagctaagacagggagggaatcaactcaggagcccatcaatggtggactagataaagaaaatatacatttataccatggaatactacccagccatgactatgaagtcatgtcctttgtagcaacatggatgaagctggaagccattatcctaagcaaactaaaacaggaacagaaaactaaatgtcacatgttctcacttataagtgggagctaaacactgggtacacattaacctaaagatgggaacaatagaccctggggtctgtaagacaggggaggatgagaaggaggaaagggttgaaaacctacctatttggtactatgctcactacctgggtgacaggtccaatcataccccaaactttagcatcatgcaatatacctttataacaaacctgcacacatataccctgactctaaaatacacattaaaaaagaaaaaaacaayaatacaaaataataaaataaaaccactctacaggtattttcaaaagatattaaagccaagctagaaaaaccaagtgtgtgaggatgttatgcaatg

SEQ ID NO: 604467 - DNA, 484 bp, Homo sapiens
tctccgtctctctccctcccgaggccccctccccagccgggcggggtagatcgctccgtaaataggcggatggcccggggcgctgcgagcgcagacactcgtttttagagccggtaattgactcctttcagttgataattcatggcttgcatatgcgctttaatgcgggcgccccgggaggcgcggcaggcggggcgggagcggggcgcgggcctgcgcggccgcccgtccrtccgtccgtccgtgtccgcgggagacgtgggcgctcccacccgggctgcctgcccagcgctcccgaggccgcgcgcggcggaaggggcttgagctgggccggacgcaaaggccgggcggtccctgggcggcgcagggcctactggctggtccttcgaactgaatgcgggcgggggcatgtgggcaccccttccctatgcagccaaaggggaaactgaggttcaaaaaggcgataggtcttaggcagaaacga

SEQ ID NO: 604468 - DNA, 566 bp, Homo sapiens
caccacacctggctgcgattttttctttatgtttaattttttgaaatttgaatatctatgcctaagcatagttttttttgttttctttttgttttgcatttatcttgcttggtgttctctgagcttcctagatctgtggattggtgtctaacattaatttgggggaaattttcactcattattgcttcaaatattgcttctgctcttttctctttttcctctcctgggatttccattacatatgtttacaccctttgtagttgtcccccagcttttggatattctgttatgagtttttattttcagtctgttttctttttgcttttggtattggactttcttttytttttttttttttttgagatggagtctcactctgtcgccaggctggagtgcagtggcagtggtgcaatcttggctcactgcaacctccgcctcccgggttcaagtgattctcctgcctcagtctcccaagtagctgggattacaggcatgtgccaccatgcccggctaattttttgtatttttagtagagatggggtttcaccatgttggccaggatggtc

SEQ ID NO: 604469 - DNA, 591 bp, Homo sapiens
gttttatccatttgtctatcaagggaactggtaaaattttactaagataggaaaaaaaatttagcatatgcattgttttatgtattaataaggcaagtgtattttgaagctacagtcaagagttttaaatgtgtcatttaaccatatgtgcatttatgtatatttaaaaatatacatacaaagktgtaataaattagtaaacaaaagatataaataataaacaagggatcagagaaacaattggcctataagtatagtttcagtgcctttgtcatactattgaatgactttttaacaaaagttcacctctaaaaaagctaatgtttctaacaattattctaacttgcttttactatttttactattatagtggaaaaaagatttatttcttcacccatcacagggttcatggctgatacacctgtaacaaaatacaaattaacaacaaaaaaaagcctaacaaatttattcaatataagtctttatatatatatattttttttttaattatactttaagttctagagtacatgtgcacaacgtgcaggtttgttacatatgtatacatgtgccatgttggtgtgctgcacc

SEQ ID NO: 604470 - DNA, 571 bp, Homo sapiens
tcattgagcagtggtttgtagttctccttgaagaggtccttcacatcctttgtaagttgtattcctaggtattttattctctttgaagcaattgtgaatgggagttcactcatgatttyaataagtcttaacgtgacatgagaaccttcagaaatgaaggcccaaagaaatagggaagcctgtgtatttctatggacagttgatatggcctggctctgtgtccccacccaaatctcatattgaattgcaacccaaattgtaatccccacatgttgcaggagggacatcatgggaggtaattagaacaagggggtggtccctgcatgctcttctcatgatagtgagagagttctcaggagatctgatggttttataaggggctttttccccttttgcttggcacttctccttccttgccaccatgtgaagaagaagtaaaggccattctttctatgctttagcaaagagactggctgcattttgcccatgccctagagatctgtggaactttgaacttgagagagataatttagggtagctggcagaagaaatttctaagtggcaaagtgtt

SEQ ID NO: 604471 - DNA, 571 bp, Homo sapiens
tcattgagcagtggtttgtagttctccttgaagaggtccttcacatcctttgtaagttgtattcctaggtattttattctctttgaagcaattgtgaatgggagttcactcatgattttaataagtcttaacgtgacatgagaaccttcagaaatgaaggcccaaagaaatagggaagcctgtgtatttctatggacagttgatatggcctggctctgtgtccccacccaaatctcatattgaattgcaacccaaattgtaatccccacatgttgcaggagggacatcatgggaggtaattagaacaagggggtggtccctgcatgctcttctcatgatagtgagagagttctcasgagatctgatggttttataaggggctttttccccttttgcttggcacttctccttccttgccaccatgtgaagaagaagtaaaggccattctttctatgctttagcaaagagactggctgcattttgcccatgccctagagatctgtggaactttgaacttgagagagataatttagggtagctggcagaagaaatttctaagtggcaaagtgtt

SEQ ID NO: 604472 - DNA, 571 bp, Homo sapiens
tcattgagcagtggtttgtagttctccttgaagaggtccttcacatcctttgtaagttgtattcctaggtattttattctctttgaagcaattgtgaatgggagttcactcatgattttaataagtcttaacgtgacatgagaaccttcagaaatgaaggcccaaagaaatagggaagcctgtgtatttctatggacagttgatatggcctggctctgtgtccccacccaaatctcatattgaattgcaacccaaattgtaatccccacatgttgcaggagggacatcatgggaggtaattagaacaagggggtggtccctgcatgctcttctcatgatagtgagagagttctcaggagatctgatggttttataaggggctttttccccttttgcttggcacttctccttccttgccaccatgtgaagaagaagtaaasgccattctttctatgctttagcaaagagactggctgcattttgcccatgccctagagatctgtggaactttgaacttgagagagataatttagggtagctggcagaagaaatttctaagtggcaaagtgtt

SEQ ID NO: 604473 - DNA, 619 bp, Homo sapiens
cccatgatccaccaggtctctcctttaacacacggggattataatttgagatgagacttgggtggggacccagagccaaactatatcagatggaaatctctgagaggggaaaatgagacaagaataatacaaggtggctgcagaacaatagaataatccaagcaggagtttcacatgactagctaaaggaagatgtcaaaatagctgtatatgctaggggttaagaccctgaaaaaccatagtgttggccaagctgggtaagactgactagactcaacatagtgctagatttgatctaggttttacctaggacctcattatacactcattaacatactaaatcacacatccaccaaggccatgacacttccaggaacacccatatctggtgtaaaaatgtgtgggaccatagtgctgagaaatcttcacttttttccaggaattttcatgaatattccacccattggttaaagaaagccataggccagttgcaatggctcatgccrgtaatcccagcactttgggaggctgcagcaggcagatcacttgagatcaggagttcaagaccagcctgggtgacatggtgaaaccttgtctctaatttttttaaaaaaagaag

SEQ ID NO: 604474 - DNA, 567 bp, Homo sapiens
tttttgagttgccagagttcttgcactgtttttttctcatctgtgtgggttgatgttccttcagtcattgaagttgctttttctyttgtttattgttgttgttgttttttgttcatttgctttgcttttaatatcttctttgatgtccttgggagtttgactgtggtataagatggggtcagttggttgacttcatttccattagatttctgggggtaccaaggctcagctcaacactcctgggctctgtgctctaacactacggggctggtattggccctggctttgttctctggcctcttgaggttgggaatctgttgtgctggaagggacaatgtgttcctagactactggccacaacactctgaagaatggtgccaaagtgcttcattgggcagtggcagcaggatccgtgcccattcacatgtggcagcagaagcagcagcacagcagggtgcacactcgtcagctggagcaaggcgctggcaagcttggggctattggcctccatttgggcattggaaacagtagactcagtgccgggctggaagggtgttggggcacaag

SEQ ID NO: 604475 - DNA, 567 bp, Homo sapiens
tttttgagttgccagagttcttgcactgtttttttctcatctgtgtgggttgatgttccttcagtcattgaagttgctttttcttttgtttattgttgttgttgttttttgttcatttgctttgcttttaatatcttctttgatgtccttgggagtttgactgtggtataagatggggtcagttggttgacttcatttccattagatttctgggggtaccaaggctcagctcaacactcctgggctctgtgctctaacactacggggctggtattggccctggctttgttctctggcctcttgaggttgggaayctgttgtgctggaagggacaatgtgttcctagactactggccacaacactctgaagaatggtgccaaagtgcttcattgggcagtggcagcaggatccgtgcccattcacatgtggcagcagaagcagcagcacagcagggtgcacactcgtcagctggagcaaggcgctggcaagcttggggctattggcctccatttgggcattggaaacagtagactcagtgccgggctggaagggtgttggggcacaag

SEQ ID NO: 604476 - DNA, 538 bp, Homo sapiens
ctgtgaattttacatggtccgattcagtgaccaaataggatcatcaaggacctagtttatttttgtctttcctctcygtcttcaacggtgttgacatcatcctagtgccagttactccttaggtcacagatagctgtgaacaactccttatgaatacgtctccttgttcaggagacaagtggatgtgtcttaccatttgcagtaataataatatgtttaggtttttggaaaatgccaattggcttaagccactcagagttcacctccagaggttggtagtaaggttaatcctttgcaaattatctaatagagaaagttcaggattctgttgccatgaaggaggaaaaaatggatgctgggcagcaaaccagagctgtctgctatacccattattcagcactttagagacagtttagagacaatttctaaaagagcctctgagggacggtttgtattaatacagctggctgttttagttgagccctgtagagactctaaatattcctgaatctcaatcaaaactacatattattgactc

SEQ ID NO: 604477 - DNA, 621 bp, Homo sapiens
atttttaaaattatttttcgtaattaaaagtccaataaagtgaaaaacaggtgcttrttgtaacaagtcaaatagtatagagaagtaccaggaaaattaatgagcttcccctagccaccgccccccatataaacttaatgcattgttgttaatagctccattgtatcctagcaaggatctactacaatttagtcaactattcacctgcttgtgaagtttttgtttttgttttttgttgcaatacacatccttgcatatgctgggactttcatttttgtagattatattcccagaaaaaaaggatatgtctatctttaatagacattgcaagatttttctacaaaagatagcaattcaccctcccgccagcaatgcatgagtagtgcctgtgcttcacagtcttcaacattgatgctgtcactattttgttaggtgatggaaaatatggtatttcattgttttatgaaatggcattgccctgattatttgaaaatattttaatatgtttgttggtaatatatattctctcttccatgaattgacatttcacattcagggccagttttttttactggatcctttatctcggtctatagggttttttattactttacttataac

SEQ ID NO: 604478 - DNA, 468 bp, Homo sapiens
tttccatattggctgcaccaatttccacttcctccagcagtgtacggtggttttgtcaccacaacctcactgacacttatcttttttttaataatagtcatcccaacaggtgtgcagtaatatctcattgtggttttaatttgcgtttccctggtgatyagtgacgcagagctccttttcatgtacttggccatttctatgtctttgtagaaatgtctgttcaattattttgcccatttcttaatttgcttaatttttttttctgttaagttttatgagctccttatatatagatggtccctgaagtataataggattatatctggataaacccatcataaataaaaaatcataagtcaaaatgaatttaatacctttataaatccagcataaagtcacaaaaatcatcagttgaactatcataaattagagatcatctgtattttggatattaaccctttatcagat

SEQ ID NO: 604479 - DNA, 519 bp, Homo sapiens
ccatttgcccttcttccatgactgtaagtttcctgaggcccccacaaccatgcctcctgtatagcctgtggaactgtgaatcaatttaacctcttttctttataaattacccatatcgggttctataaaacttctactagaatcagtttgtccatatgtacaaaatagcttggtttgatttgtattgcactaaatctgtatatacagttgggaagaggtgacatttaacaatattaaatttctcactcttacaagaagaaatagttttctatttatgtagacgttctttaattttcttcatcagagatgcaatcatgagtgttggtttttgtcatatgtgttttctgcayttattcatatgatcatatgacttttattcctttggcctattgatatggtagaatatattgatttacttttggatgtttaaccagtcttgcatacttaaagtaagtcccagtcatgcatacttaaaataaatcccagtcttgcatacttaaaataaatcccacttgctca

SEQ ID NO: 604480 - DNA, 607 bp, Homo sapiens
aactttaggattttatgattttaattgcaaaatgctcttggtgcataatttgctgtctcatgagtatatttcaactggattttatatcccatacaacattcttattctttcaggactcgtgacatagagctttctccaaggggcaagattcacctcaattctaagcacaaactggcaatttctttacatttattccctttatatttgctatagtgatcagcatccatttcctgatgcacccctccatcttagttgtatttgtttttcaagtacttatgccagtgtgtctatccacaaagacttcaaatttatttttaactcttctctgtacttttaatacctaacacagtgcctggcacatcataggccctcaattaattaatgcttgctaagaggaggaagaaaaaaagtaagtgaacatagtgaaaccccatctctacaaaaaatacaaaaaatggctgggtgtggtggcatgcacctttagtcccagctactttmaggtctgggttgggagaattgcttgagcctgggagacagaggttgcagtaaaccgagtttgcaccactgtactccagcctgggtgacagaatgtgactctgtgtcaaaa

SEQ ID NO: 604481 - DNA, 564 bp, Homo sapiens
tgaactttgttaaattagtaatgaagaactactgaatatttctgagtataataatgtcataataagtcctgaactttagtagtatttcttagacaacaatgaatttcaatgaggagaaattggagatggagaattgttggaataaaaatgtagaccaagattttagcaatggaaatgaaaagatgcagaaaagataattaatatttagaggaatatgaggggtaaaagaggttgcggttaacaaaaaaagcctctatttctcttataactgatcaaaasttatctcccctttcgctagtgtcttggactatctggtaaaccctctttttaacactgcagtacaatatccaatgttaccctgtgaatgtagggaagacgaagtttctaaactgtttggctattaattttaaaagagaaacaaatgactaccacctgggaaagccaagctttctttgtgatattctgatgatcttgctcaatgatgcatttttttttctcttgtagcttgttgcataaaatggtttattattttatttctatgtaacaaatgagtagaaacatttt

SEQ ID NO: 604482 - DNA, 581 bp, Homo sapiens
gaataatactaatgaattgtaataataattatattatgaataacagcaataggtacaaaacagctaataatttattgtgtacttccagctattggaacagtcagtgtcttttacttgcttgtcccatttaacaacaactttaagaggcaggttctgttatcatttctatttatagatgaggaaactgcaggttcgaaaagttaaggaactgactcagagttactaagtggagaagctagagttagacagtagatctgtttgatttgaaaatccaagcttctgacaactctaccatcttcaaataagaaggatagtaatgtgttttgttatgtgtatgtgtcttacaatacatgtttatgaagaaatattaggtagagcyaaaagaataaggggaagtagaaatgaaactggtagttttatgtgccagtcacccgttgctttatatctttatctcattttatcttttcaacataccagagaagtataatatacactattttttagaaaactggggttcagagaattaaagtaacttgcctaaggacacagagcccataggtaattaagccagaacatacatt

SEQ ID NO: 604483 - DNA, 510 bp, Homo sapiens
ctaaaaggaagaaaaaattatctacgtatctaattttctatcaggaatattgtaggacccctgttttctaatcctatttattattagtcaacttgaatacctattcgtgtacacagaacgattactgtctataatacttagaaagtagggctgcattttgctgaaatattgtgccttgataggttccacatacctctttttaattaatatctttcatttttaaaaggaggatgcagacaaatagcaaagaaataaacaaatcagctttgcatgcaagtttatctttgtccatttaaattattctgaatacaaatgccaagttgaaatatttttgatggtttgtttttcagtggctctggtcacaacaaaagcaaaaatggtacagtgaagccagtcccaagcgcytgagtgtcttctctctcttcagtattcctctttgagagtttggcatttcatctatgctaatcagatccatcatgcattggcaggtggtgagtgggtactataatt

SEQ ID NO: 604484 - DNA, 521 bp, Homo sapiens
ctctccaaaatattgattacaaaaactatagcaacttcagaattgggaaacttgcctgataccgtcatatccaagttaccaaggttaacatcatttctaatggtgccatctgataggatgcattgaaacacataataacacttctctggtatycccgccaaagatgcataaaccgaatataatcatgaggaaacaacaaacacacccaaactgagagacaaaatgactggctaacattctttttttttttttttttttgaggtatgttttattttattttatttttttttgcattgtgggtttatttatttatttatttacttatttatttatttattttattgatcattcttgggtgtttctcacagagggggatttggcagggtcataggacaatagtagagggaaggtcagcagataaacaagtgaacaaaggtctctggttttcctaggcggaggaccctgcggccttccgcagtgtttgtgtccctgggtacttgagattagggagtggtgatgat

SEQ ID NO: 604485 - DNA, 582 bp, Homo sapiens
gctttccacaaaacaacatttgcctccaccaggggcaggtggcaactccttaactgtccmatactttcccctctaccaaccacagtcatttcctgtggccagggctctccccacgtggtctgcagctccatctgccacatctccattttcctggacagtcactcttgatttctcatcataatactccttttggataaagtaaaatgctgattgagaagcaaaaatgatttaattttttataattttgcatcggtttccatgaaacaatagatcatacaaatctgatttgagtctagcaataggggattggttgaataaaatgatggcaaattaaatttagtggatgcttaatcctgtttaccatactattaagggaaaatcatattattttatagaatagaaaaaaaattttaaagtatatgccaaaaaatggaaagtggcttttctttggttgtagaactgtgattgctttttttcttcctgtttgcttatttgcatcttctgatgtatctgtgatacatttaataattaatttcttaaacaaataccctttgagtacctgccaggtgtcaggcttagact

SEQ ID NO: 604486 - DNA, 525 bp, Homo sapiens
ccttctaacttctgcagatgtcattgaagttgtttttttttttaattatatggctgaatcatttatacatgtgtggtgaccacatctcatcttctagtgcaagctgctctggatagccatcttgggcatggctggctcagagaagtgagtggtcctaacrttgaatagagaaaggaaggagccacattggcagtacagttgtaaatcagagcctgaaggtgcaggtggttttgggaaatgagagttttctgaacctagaggcaagaagaaatatgtcatagaggaagttaatatttcattagtgtgtttttagtgttcatgtgacatggattgcaaaggaggaaactactgagtctgtagatgttgattagttacttgttccagtgttaatatatttcctgttgctgtagagcccgtgtagacaggcatttagacttgatcacacattcagaaggttcacagttggtctactacagtgctcttctgcctaaacaccaccagattctccctagccctccttccaaa

SEQ ID NO: 604487 - DNA, 596 bp, Homo sapiens
tcttaatcaaaatgaaggaaagaaatttaaagcaagatggaacccaaagtgaatggaccccctgccaatctacacacaatcacaagtgccacctcttccctgcccctccatagaacacacatataaggagtaactggaaaggtcctggtggtggcagccatatttggaggtctggtgaccaggtggcaagcactagtaccacgcttagaagacacaayacaacctcatggggtgagaggacatgaggagagaaccagtgactggacaggtacagtaccataacagaactccttgggtcagtgctgagagacctgcactcaagtctaatacagatcccatccaggcaacctcactgaggccgaaacaacagttcctcagaaccagtgtctgcagtgtacacaaagatcggagccaggacagtcctgagggggatggccttcccaaaggatactgtacttgccaatcacaagagcaacagaaatgaccgacagatccctaaggtacggattcctactgctggggttcgctggctcggaatgacaggtcgctttaagggcccttgggaggggtccattttaagcagctgggatccatgg

SEQ ID NO: 604488 - DNA, 596 bp, Homo sapiens
tcttaatcaaaatgaaggaaagaaatttaaagcaagatggaacccaaagtgaatggaccccctgccaatctacacacaatcacaagtgccacctcttccctgcccctccatagaacacacatataaggagtaactggaaaggtcctggtggtggcagccatatttggaggtctggtgaccaggtggcaagcactagtaccacgcttagaagacacaatacaacctcatggggtgagaggacatgaggagagaaccagtgactggacaggtacagtaccataacagaactccttgggtcagtgctgagagacctgcactcaagtctaatacagatcccatccaggcaacctcactgaggccgaaacaacagttcctcagaaccagtgtctgcagtgtacacaaagatcggagccaggacagtcctgagggggatggccttcccaaaggatactgtacttgccaatcacaagagcaacagaaatgaccgacagatccctarggtacggattcctactgctggggttcgctggctcggaatgacaggtcgctttaagggcccttgggaggggtccattttaagcagctgggatccatgg

SEQ ID NO: 604489 - DNA, 549 bp, Homo sapiens
ccagctcagtcacagtaggatagtgcactggtcagagttgtgaggctcccgttataagccctagctcccagatgacatttctagacacaagctgagaaaacagggcatctgctgccttgaaggggaggaagacacagtcctgaaaccattcatcccctgctaactgaagagcccttgggccctgaaaaactgrcagagatacccaggcactaagtcaaggaccatggatgagcctctgagacttgctggcttcaggtgagacccagcatattaccagctatggtggctatagtgtgaaacgccttctgcttaagaaaagcagaggaaaaagtaaaggaaactttgttttgtaccttaagtaccagcatagcaacaggtgggtagagcaccaatagggctattaaggtccccaatttcaggacttgactcttggatggcttctcttgactcttggatggccagaaaggaggcaactgccctgaagggtaagtctcaggccaggcagctttcacaataagctaagatactataacactgtaactgcagtgt

SEQ ID NO: 604490 - DNA, 549 bp, Homo sapiens
ccagctcagtcacagtaggatagtgcactggtcagagttgtgaggctcccgttataagccctagctcccagatgacatttctagacacaagctgagaaaacagggcatctgctgccttgaaggggaggaagacacagtcctgaaaccattcatcccctgctaactgaagagcccttgggccctgaaaaactgacagagatacccaggcactaagtcaaggaccatggatgagcctctgagacttgctggcttcaggtgagacccagcatattaccagctatggtggctatagtgtgaaacgcyttctgcttaagaaaagcagaggaaaaagtaaaggaaactttgttttgtaccttaagtaccagcatagcaacaggtgggtagagcaccaatagggctattaaggtccccaatttcaggacttgactcttggatggcttctcttgactcttggatggccagaaaggaggcaactgccctgaagggtaagtctcaggccaggcagctttcacaataagctaagatactataacactgtaactgcagtgt

SEQ ID NO: 604491 - DNA, 602 bp, Homo sapiens
cccacttctttccacttgaggagaggagaggaaagaatgggcaggattttttttgcatcttggataccagctcagtcacagtaggatagtgcactggtcagagttgtgaggctcccgttataagccctagctcccagatgacatttctagacacaagctgagaaaacagggcatctgctgccttgaaggggaggaagacacagtcctgaaaccattcatcccctgctaactgaagagcccttgggccctgaaaaactgacagagatacccaggcactaagtcaaggaccatggatgagcctctgagacttgctggcttcaggtgagacccagcatattaccagctatggtggctatagtgtgaaacgccttctgcttaagaaaagcagaggaaaaagtaaaggaaactttgttttgtaccttaagtaccagcatagcaacaggtgggtagagcaccaatagggctattaagrtccccaatttcaggacttgactcttggatggcttctcttgactcttggatggccagaaaggaggcaactgccctgaagggtaagtctcaggccaggcagctttcacaataagctaagatactataacact

SEQ ID NO: 604492 - DNA, 602 bp, Homo sapiens
cccacttctttccacttgaggagaggagaggaaagaatgggcaggattttttttgcatcttggataccagctcagtcacagtaggatagtgcactggtcagagttgtgaggctcccgttataagccctagctcccagatgacatttctagacacaagctgagaaaacagggcatctgctgccttgaaggggaggaagacacagtcctgaaaccattcatcccctgctaactgaagagcccttgggccctgaaaaactgacagagatacccaggcactaagtcaaggaccatggatgagcctctgagacttgctggcttcaggtgagacccagcatattaccagctatggtggctatagtgtgaaacgccttctgcttaagaaaagcagaggaaaaagtaaaggaaactttgttttgtaccttaagtaccagcatagcaacaggtgggtagagcaccaatagggctattaaggtccccaatttcaggacttgactcttggatggcttctcttgactcttggatggccagaaaggaggcaactgccctgaagggtaagtcycaggccaggcagctttcacaataagctaagatactataacact

SEQ ID NO: 604493 - DNA, 619 bp, Homo sapiens
ttttattatttaaaaagatagctttgccacaaaccagatatgtgacattgagtaagtcaggccatgtaggtggctgggctktggttttctcatataaaatgtgaaatttagagctatagtcccttctacttctaaagttcactgagcctttgaatcccctcttaagcattagttcactggaagaatagtttctgtgcctagcagtgtgcaaggttgccaaagttcagattaaattcttaccaggaggttactagaacttgaaacacttcttgtgcatggatttcaatgtaattaatcatttgaaaggtgaaaacatgtgttccaatcctgggcagtgacttatcccagtgcccaggtgagttactagcaaatcttaggtcttgggcagttctttttgtcctgataccaaagctagagaaataaatctgctttatggctcctcagtcttatttatgaatcaaaaaatcctttcatatccaaaatctatattattctgcatctgaaacttttctgatcttcttcactcctttacaataatattatctaatgcatagataatgcatggttgcttccagagtactttgatttatataattacactcacttgctcctcagaaca

SEQ ID NO: 604494 - DNA, 491 bp, Homo sapiens
atccaattgccatgactctgctgaagcaatgactggtgaagaaaaactctaaaatcctcacctggttttggaaaaaaagacacaattcatagactcagcctctcccatctaccatgtcccatgcccaggaaattaccaagtgactttccttctcaagcaaggtctttcccttttggaaacgctaggattattcaaaattaaataataatgakatcaggatgttgattattcacttagtgcatggcctgggtaccttattttctgtctccacatctttagagacattcttacaaaggaatttttcaacagatcctagaagaagaaaagaaatttagcacttaaggccaaacagaggaaaccaaacagtgatatatccctgtagtctaatgagagactatccctgctacctcaaagaagctgtaagtaaccacattcaattcaaagaaaggaaaacctatcctgggaagctgtgacaagtctgcagatttcaa

SEQ ID NO: 604495 - DNA, 463 bp, Homo sapiens
gcaattctcctgcctcagccttcccagtagctaggattacaggtgcccgccactatgcttggcttgtttttttgtttgtttgtttgtttgttttaatttttagtagagatggggtyttgccatgttggccaggctggtctcaaactcctcacctcaggtgatcctcccacctcgcaaagtgctgggattacaggcttgagccaccacacccagccaagaaattagattttaagtgttctcaccacagaaaagataagtatgtgaggcactacatatgttaaatagcttgatttggccattctactggtatacatacatcaaaacgtcatgttgtacaccataatatatataatttttacttgtcaattaacaataagtaaatggacagcagtacttaaaagaaaaagatgtacatatttagattattctcttatatggacccaactgttaattgttaaagcta

SEQ ID NO: 604496 - DNA, 253 bp, Homo sapiens
ttttaagattttctgtttatctttggctttcagcaattttactatgatgtgtctgtgtgtgggtcttttcgtayttatcccattagagtttgttgagcttcttggatatgagatgaacattttctcatgaaatttgggaagttattatttcttctagccattatttcttctaatattttttctagtcttttttctagttctttctctcctcttcttctagcactcccattacatggttgctggcatgcttacc

SEQ ID NO: 604497 - DNA, 554 bp, Homo sapiens
gttttctaaaagttacacctcaggatggtagcgagaacattacaaggtttttgttttttagggggacactggacctgaaagtatgacaaccacagctcaagcacatgtgaaaytgtcaggtctctatagatgtctcatagttgttactaaccagacccattcctcctgaggtgggctaaactgagtgatctaatgttgatcatcttggcaatacttgctctgggaggcatgctgtactcttgaattcagggtaaaaaggagaaaggtgaaggaagagtgggagaggaaaaaagagcagatcaccactccacttctggaaaatatgatggagtgaaaagagcagtggcctaagacacctggactcaggttcccagctaagccacggctatctgaacaacattaggcatgccacttcagttctatagtcttggactttttacctgcaaaatggaccagaccctccccagtccagcattctgtggctccatcttagactatgtctgtccataaactgtcctacttaaagttatatgtagaaagagaaaaggagacag

SEQ ID NO: 604498 - DNA, 554 bp, Homo sapiens
gttttctaaaagttacacctcaggatggtagcgagaacattacaaggtttttgttttttagggggacactggacctgaaagtatgacaaccacagctcaagcacatgtgaaactgtcaggtctctatagatgtctcatagttgttactaaccagacccattcctcctgaggtgggctaaactgagtgatctaatgttgatcatcttggcaatacttgctctgggaggcatgctgtactcttgaattcagggtaaaaaggagaaaggtgaaggaaragtgggagaggaaaaaagagcagatcaccactccacttctggaaaatatgatggagtgaaaagagcagtggcctaagacacctggactcaggttcccagctaagccacggctatctgaacaacattaggcatgccacttcagttctatagtcttggactttttacctgcaaaatggaccagaccctccccagtccagcattctgtggctccatcttagactatgtctgtccataaactgtcctacttaaagttatatgtagaaagagaaaaggagacag

SEQ ID NO: 604499 - DNA, 539 bp, Homo sapiens
ctaccttggcctcccaaaatgctgggattacaggcatgagccactgtgcctggctctattctttcaattagcagtagtttttgtgtaagctaagtgtatctgtagtacccccgcacatggcaggtgcccagtgaataatcgttctttctcttctcaacggggcatatcctgacccccactctccccaaatgaactgaagctggaatgaaagggactgaccagaagattccatcaaacctcattttgttagccctatatacaaagtattatttgtcaacccaagtatctggttagctagctggaaaatgctctccttttttcaagtcttgatgaaatatttccyttctatattagcaataaagacggatgaagataattgaaacatctttatgaatagcaataatagtttccatgactgaatttattttgataacagaatctattttgaattttaaaataaataaactagggagcagaaaaataattcttctaaactgagaaggttctaatttcttgaattttgattaattgagcttaat

SEQ ID NO: 604500 - DNA, 539 bp, Homo sapiens
ctaccttggcctcccaaaatgctgggattacaggcatgagccactgtgcctggctctattctttcaattagcagtagtttttgtgtaagctaagtgtatctgtagtacccccgcacatggcaggtgcccagtgaataatcgttctttctcttctcaacggggcatatcctgacccccactctccccaaatgaactgaagctggaatgaaagggactgaccagaagattccatcaaacctcattttgttagccctatatacaaagtattatttgtcaacccaagtatctggttagctagctggaaaatgctctccttttttcaagtcttgatgaaatatttcccttctatattagcaataaagacggatgaagataattgaaacatctttatgaatagcaataatagtttccatgactgaatttattttgataacagaatctattttgrattttaaaataaataaactagggagcagaaaaataattcttctaaactgagaaggttctaatttcttgaattttgattaattgagcttaat

SEQ ID NO: 604501 - DNA, 571 bp, Homo sapiens
ggcattgttcatttctgttataattttttggatttctagcatttccttttaaatcttttgagagtttctgcttctcagcttatattacccatttattcttgcatgttgtccattttttccattacagcttttagcatattaatcattattattttaaattcctggtctgacaatttcaacatttgtcatatccaacttaagttctgacacatgctctgtctcttcaagctgtgctttttgcctttcagcatgctttgyaattttttgttgaaagctagacacgatgtactgggcaaacaggcttttagggtgaggttttgtttatctggctaggagttaggatgtttattgttttctgcagctgtcgtagctgaaaattcctctggtgtccttgtttttgtctcccttgttgcctctgtgtttccctaaagacttcttaaaaaaggtctgagacttgtagttcagaccttgtgatccctggagaggggaaacactgtatagtcctaagattaggtctcagtcttttagtgagcttgtgcccctagacagtgacctccataactatttccca

SEQ ID NO: 604502 - DNA, 571 bp, Homo sapiens
ggcattgttcatttctgttataattttttggatttctagcatttccttttaaatcttttgagagtttctgcttctcagcttatattacccatttattcttgcatgttgtccattttttccattacagcttttagcatattaatcattattattttaaattcctggtctgacaatttcaacatttgtcatatccaacttaagttctgacacatgctctgtctcttcaagctgtgctttttgcctttcagcatgctttgcaattttttgttgaaagctagacacgatgtactgggyaaacaggcttttagggtgaggttttgtttatctggctaggagttaggatgtttattgttttctgcagctgtcgtagctgaaaattcctctggtgtccttgtttttgtctcccttgttgcctctgtgtttccctaaagacttcttaaaaaaggtctgagacttgtagttcagaccttgtgatccctggagaggggaaacactgtatagtcctaagattaggtctcagtcttttagtgagcttgtgcccctagacagtgacctccataactatttccca

SEQ ID NO: 604503 - DNA, 599 bp, Homo sapiens
attatgttttaagttgtgtcaaccaaaatagtgccacctgccccttgaacaatcttgacccacagctgccacccaacwacccccatttatgtataagttatttattttctgcttctaaagttcacccccaactcttgaggaacaaagaaaaaaccctatgagtgtagctttttcaagccatccaaatctttgtctcctggaaactgcccagtaaaagtttcaaaatgacttttttatgttccttgatctgtggttttctgtggttagtagaagaaagtgctagagtattttttcctcatatctgacatttcaaggggggagaaatagggactaggaagccatcgttgtttgttcttgatacaatagctgaagttcctgatattgctcacctgaaaatttgaggcgtgggagtggggtgaagacctgatatcttaatttccaggttcagaagtaaagtgccaataatatcaacttatgaaaaatgatcctatgacaaacctcacatgtggtactaaatccactaaacatttatctcaataatttgaaaactcttatttccattagtttgactgactgcaattccataaattatacatcta

SEQ ID NO: 604504 - DNA, 599 bp, Homo sapiens
attatgttttaagttgtgtcaaccaaaatagtgccacctgccccttgaacaatcttgacccacagctgccacccaactacccccatttatgtataagttatttattttctgcttctaaagttcacccccaactcttgaggaacaaagaaaaaaccctatgagtgtagctttttcaagccatccaaatctttgtctcctggaaactgcccagtaaaagtttcaaaatgacttttttatgttccttkatctgtggttttctgtggttagtagaagaaagtgctagagtattttttcctcatatctgacatttcaaggggggagaaatagggactaggaagccatcgttgtttgttcttgatacaatagctgaagttcctgatattgctcacctgaaaatttgaggcgtgggagtggggtgaagacctgatatcttaatttccaggttcagaagtaaagtgccaataatatcaacttatgaaaaatgatcctatgacaaacctcacatgtggtactaaatccactaaacatttatctcaataatttgaaaactcttatttccattagtttgactgactgcaattccataaattatacatcta

SEQ ID NO: 604505 - DNA, 590 bp, Homo sapiens
actcaaccagggatccctctcttcatgtaactttgttcagatggatcctctgccccatcctgtaccagtgattcctttgcactcaagaaatgggaatactatttggaggctaggttaaaaatgggagtgaggtagcacagaacaggaaaagcaaagtaattctggagcctcaagaactctaggaagatgttaagaatggaactgaagctgatttagggtagtatgaactttcaagagatcctgaactaggctgtggcccagattcctgactcacacaacccgtgaaataagaagtgcttgtgtttaagacactaaggtttggagtaatctgttacatagcaatagaaactaaaatgataatctgtgactcttacggccttttatatgtgcatatgtttaaatgttatatatattttaaataactattacaggttggcctgagaatcttaactccagttataatgttgttcttgtggaagagcacactctgaattctaaactttttccttaaaagctattgaagcattgaaacacaatatattkgtaagttgaggattttctatatttaaaggatactcttttaaaatatc

SEQ ID NO: 604506 - DNA, 505 bp, Homo sapiens
tttgccacttacttgttctctgcctcagttttctcatctgtcaaatgagtattcatccattgaacaaatattgattgagtaccactctacaccagaccagttttaggatatggggatacagcagggaaccaaaccaaggccctgctgtcaggaatgtctgctctagttgacaatagtacctacctctgtgagttgctatgagcattaaataaattaataaacccytggtacataataagtcttcaataaacatgaactagtatacttcaccaaaaaaggcagagtacagactagcaggctccttggcccattgtctaatcacagaacaatgtacagtctttagttacacagggatccagccagattataaacgagagccttccttaaagttctaaaacacttggatccacttgaatcatgtcagcaggtgttaagagagccagagaggtgtgttacatgcaagtaatttgattttcacactcttcccttttcctgttgggaaccc

SEQ ID NO: 604507 - DNA, 603 bp, Homo sapiens
gatagatttttagatatagtttggcaagtttgcacaaaagaaatactggagatgaggcacttgagtcagaaagacaagagatgctggcaagattagaggatgcttaaaattgatattaagttgatgttattgataatgacaagatatagggaatgaccatgggattgggaagaattactggagatgaggcacttagaataagctggaraaacaagagatgctggtaagataaagaggatgtttaaaattgatatgagtgcattgttattggtaatggcaaggtctagggaacgaccatgggattggttggctgagaaaatggaagagattaagtcatggaactgagagtccagtattgaaaggaacatcttcaggcatattaaaatcaggaagaactgtgacaggagttgtttagagagagtatcggtaaaccaggggctaaaaccaacaaggaataaagaagcttaatccatcttgagatctctagatgaaaaggaggagggagtgataatataatttgatggcgttgccatcaaagctggagaggagaaagagggagttatgtaggtataagggctaaagatctggaagtggcaataggaa

SEQ ID NO: 604508 - DNA, 456 bp, Homo sapiens
agtgctattctatctgtaaaatcaaacatcaaattcaaggataataatgacaaggctgacagccatcaacactggaattgggaattaagtttccaacacatgaactttggggtacacattcaaaccacagcaacagctaacagtagtgctattctatctgtaaaatcaaacatcaaattcaaggataataatgacaaggctgagagccatcattccaataaaaattacaattccctgtccaatatccagtttttatacccagaactcattgatatgagaagagacgcttttagaggaaccctgcaaaatcatggtaaatgtatgtggtagyggctacttccttttctcaaagggacctactgccttctattgggtaactgtatcctagggaaagtggaatatccaaacactttaaagactgttggaaagagaatccaagttgatattgaggtcaaa

SEQ ID NO: 604509 - DNA, 552 bp, Homo sapiens
ttgaacagaaggcaaaagatttcagcaggttattcatggaagagaaagccagaactgccaataaatatgaaaatatgctcaacctcactaatcagggaaatgcaatttaaaacctcagtgaggtttctcaaccatcacatgggcaaatttttaaaagtctaagaaataccaaatgttgaccagatttgacaaaaaagggggattcatatatcctgctgaagggagtatagattggtacacacactttggaaacaagttggctgcatctagtaaaattggcacagcatgtacctgatgactcagaaatttcaccttccagatatagtcacatgcaaaggaaacatgtataaggatattcaatgtgattttgaactataaatagagaaccggaaagagtgtagggagcaaaaaaaataaattgcaatgtattagtaggatataatgctctttagcaattaaaattaatgagttaaatttgtatgcatcaaattggatggatctctaagattgtactrttgaatgaaagaagtactatgtagtccttatacatat

SEQ ID NO: 604510 - DNA, 520 bp, Homo sapiens
tgaacccttactttaagaatacaaacatagatggtatagtttctatcttggtagtattctagttaactagtgctttataatgaacctccttaaagtgccatgctttatacattttgctcacagattctgtggatcaggaattcagagagggtatggtgaggatagtgtggctctcctttacaatgtctggcctcagctgacaaaactcaaggctgggggtgaccagatggctgagagctaacaccatgygaaggtataattggcagtcatatttctggcagtagattaactcagtgggctgggacatcagctggggctgtttgtcagcattcatgtggcctcttatgtgcttgggcttcctcgctgcatggtggccatgcagtagtcgaacttcctatgtgattccaaaggaggatgtcctaactgtaagaaagttgtataatcttttctgactttttcttagaagtcatacagaatcactccactgcgttgtattggttacatgcaagtcacaagccca

SEQ ID NO: 604511 - DNA, 564 bp, Homo sapiens
agatatttgtttatcacagttctggagtcttggaagtccaagatcatggtggcagcagattctctttctggtgagggctgtcttgctggcttgcagatggctctctgctcattgtatcttcacatgttggagacagagaagcaagctgtttggagtcttttwtttttatttttttttatttttagaagtaagggcactaatcccactatagggacccaatcctcatgacctcatcgaaacctaattacctctcaaaggcctcatttccaaatactatcacattggggtttagggcttccaaataggaattctgcacagtaacagtaacagtgagatcttggtgaaagttttacatacactcagaagacagcaatattataatagtaggatatttttagaaagaaatacatcagttggaatcaaaaactctgtaatatatgaaattgactctataatcatacttctggcaatataacctaagaaaatagtcttaaagaaggaaaaagctgtggacatgaagagtcttcattttagcattgttttcaatactgagaaattggaaac

SEQ ID NO: 604512 - DNA, 546 bp, Homo sapiens
tattcagcaaaattgtgtaattttctctagacatatttatttattatttttatttgaatatattcatggggcacaactgcacttttgctatattgatatattgcactgtggtaaggtaagggcctttagtgcatctggagcaacccacattgaacccaacaagcaacttcccatcatccacctcccttgcactccccyacacacctcaagtttctactgtccatcattctatgctctgtttccatgtttacacattatttaactcccacttataagcgagaacatgtggtattgtctttctgagttgtttcatttaagataatgtcctccaattctatccatgttgctgcaaatgacaggatttcattctttttatggtgaaatagtaggccattgtgcatatacaccatattttctttatccaatactccactgatggacactgaggttgactacatatgttgactattgtgaatagtgctttgataagcatatggctgcaagtatctttttgatacactgctgtatcttcctttgggtagctac

SEQ ID NO: 604513 - DNA, 524 bp, Homo sapiens
agaccttctcaaatctgtccaygtcccccttttcttttttttcctcccttaacaatattattaaacagtgagtagtataacccctgtttcactggtgaaagaactgatatttatgaagtcaaaaatttctttaacagaagggacagaggaggacccagggccacagtgctgaagtaactcatgctagtccaccttttcttgactgaagtgactttcatactagggtgaggctagacagaatagatagaatctagacaattcccaagcgccagccctggtgtgtattgatagcagaccaagcacgatgctgggttggtctttaactacctctgtgatatgaacaaattcctctccttttctagaactcagtctcttctgaaaaataaggggtttggaccagatattctctaatgccccttgagtggtaatcgtctctgtttctaagctcccagccagcttgtgctgcattctgctctgttcagtcatcagaatgttcagaggtacggggtccaatgctgggaagg

SEQ ID NO: 604514 - DNA, 524 bp, Homo sapiens
agaccttctcaaatctgtccatgtcccccttttcttttttttcctcccttaacaatattattaaacagtgagtagtataacccctgtttcactggtgaaagaactgatatttatgaagtcaaaaatttctttaacagaagggacagaggaggacccagggccacagtgctgaagtaactcatgctagtccaccttttcttgactgaagtgactttcawactagggtgaggctagacagaatagatagaatctagacaattcccaagcgccagccctggtgtgtattgatagcagaccaagcacgatgctgggttggtctttaactacctctgtgatatgaacaaattcctctccttttctagaactcagtctcttctgaaaaataaggggtttggaccagatattctctaatgccccttgagtggtaatcgtctctgtttctaagctcccagccagcttgtgctgcattctgctctgttcagtcatcagaatgttcagaggtacggggtccaatgctgggaagg

SEQ ID NO: 604515 - DNA, 524 bp, Homo sapiens
agaccttctcaaatctgtccatgtcccccttttcttttttttcctcccttaacaatattattaaacagtgagtagtataacccctgtttcactggtgaaagaactgatatttatgaagtcaaaaatttctttaacagaagggacagaggaggacccagggccacagtgctgaagtaactcatgctagtccaccttttcttgactgaagtgactttcatactagggtgaggctagacagaatagatagaatctagacaattcccaagcgccagccctggtgtgtattgatagcagaccaagcacgatgctgggttggtctttaactacctctgtgatatgaacaaattcctctccttttctagaactcagtctcttctgaaaaataaggggtttggaccagatattctctaatgccccttgagtggtaatcrtctctgtttctaagctcccagccagcttgtgctgcattctgctctgttcagtcatcagaatgttcagaggtacggggtccaatgctgggaagg

SEQ ID NO: 604516 - DNA, 514 bp, Homo sapiens
actgagcagctgattaattactgcaataatcataatttttaaaaattaaaaaaaatctcttcccattcattaagtaactgcagataggtgccagaggtaattattgtctagaagtacttccgaattatcttttctaatccagccatgctgacatttttgagaggaaaaaaagtgtttagtctttcctcttatgaacaggatgacatttgaatatgcaaacagtgtcaaagtctgccctgtggatgttttctggaggtatgatttatgaggccagcctattgtatttgctatcacactaggagaaaggtcattaaacaaaggagctctacctactggggtctacagctcatcttgtgatattttaattgttgctcttgtgctgacttctaggcatgcttcgtggggtgaactgcatggacactaatttgtctgggctttgcatatattctctcagatttgtggcrtagtttgtgcctactttcagtcactcctgggatgtaagtcagggatggtg

SEQ ID NO: 604517 - DNA, 595 bp, Homo sapiens
ctgtcctggtgagtgttctaatgcactaataaaagaaagtatattttgctgttgttctatggtgtgctccagaaatgtcaattaggtataattggttaataatgttgttaaggacttccatattcttgctgattttctctttacatgttctatcagttactgagagaaaagtaataaagtctccaactacaattctggctctgcctttatttcctttcagttctagttggttttgtctaatgcattttgaaactctgatgttgtgtgcgtaaacgtttagcattgttatgtcttcttgtaaaattgattattttrtcattatgtcatgtctctctttatccttgataatgttcctttttctgaggtctattttgtttcttatcaaaatagctatttcagcctttttgggttagtgtttacatggtatattttttcctttcttttaacttttactttataaatgtcttttatttaaaattgatttattgaggaaagcatattgttggggcttgcttttcgatcctatctgacaatctcccttttttaactggtgcattcaggcattcatatttaatgtgattgttgatatggttgg

SEQ ID NO: 604518 - DNA, 473 bp, Homo sapiens
tgatccagcagttccactagtaggcatatatccaaaggaaatgaaatcagtattttgaagagatatctgcacctccgtgtttattacagtgttactcacaatagccaagatatgaaattaacctaaatacccatctacagataaatggattaagaaaatgtgactatatataaatatacatatttatgtatacatatatgtgtatatatatacatacacactatgaaataytattcagccataaaaaataacattctgtcatttttggcaatgtagatgaacctggaggacattatgttaggttatgagttgggaaataactcatgcaaagaaagacaaaaatcttataatctcattaatacgtagaatcttaaaaagttaattttatagaagtagagtagaatagtggggagggtgtagtggagaccaggagagattgctcaagggtacaaatttacagatagataggaaga

SEQ ID NO: 604519 - DNA, 473 bp, Homo sapiens
tgatccagcagttccactagtaggcatatatccaaaggaaatgaaatcagtattttgaagagatatctgcacctccgtgtttattacagtgttactcacaatagccaagatatgaaattaacctaaatacccatctacagataaatggattaagaaaatgtgactatatataaatatacatatttatgtatacatatatgtgtatatatatacatacacactatgaaatattattcagccataaaaaataacattctgtcatttttggcaatgtagatgaacctggaggacattatrttaggttatgagttgggaaataactcatgcaaagaaagacaaaaatcttataatctcattaatacgtagaatcttaaaaagttaattttatagaagtagagtagaatagtggggagggtgtagtggagaccaggagagattgctcaagggtacaaatttacagatagataggaaga

SEQ ID NO: 604520 - DNA, 590 bp, Homo sapiens
ttgcaccctctgaatcaatggcctgagctgwaccttggccccttttagccacagctggagctggagtggctggaatgcagggtgccacatctcgaggctgcatggagcagcggagccctgggcctggtccccaaaaccatttttccctcctaggcctctgggtttgtgatgtgaggggatgctgtgaagatctctgaaatggggctgctgtgaagatctctgaaatgccttggtggcattttcctcattgtcttggcaattaacatttggctccttgttacttatgtaaatttctgcaggcagcttgaatttctccctagaaaatgggtttttcttttctactgcatggtcaggctagaaattttccaaacctttatgctctgcttcctttttaaacgtaagttccaattttggaccaattctttgtgaacacatatgggtgtgtgctgttaagagcacctaagctacatcttgaacactttgctgcttagcaatttcttccaccagataccctaaatcatctctctcaagttcaaagttccatagagctctagggcagggaaaaatgctgcaagtctgtttgctaatgc

SEQ ID NO: 604521 - DNA, 590 bp, Homo sapiens
tataatacataatatctttgcataattttgcaatgtcatttcacacctgcctttccaattgaggggattggagcactcatacgtgactgatgggcaagaaagagttctctagaaggagaaaggggagaacaatgggcctgccaggtggcactgacatatgaagcaaaatgatgggtttgaggctacattgagcaggagtagctttgggcctgtgggactcagatcatctgagttatctgtcccacgccctaaatctccccaactgagagaagcacagttaacccaccactccaaggtatccaagacaaccttgtcagagggatcatttcagtgcactctgtgagtatgttgctcccatctccaaaagctttcaatggctgttcatggcctgctggataaaaaccaagctctttactctaccactgatattgcaatcttagttgcccaattctcagctcccaggccctccaaatttaattctagtcaacttgtctaattttctagtcaactttttgactagaaaactttttttcatttaaattccatagctaaagtagacktgaagcttccaaatgagctgtgtgaccacg

SEQ ID NO: 604522 - DNA, 544 bp, Homo sapiens
ctgctcacaccacatcagctagcatcctcttggccaaaggaagtcacaaagcaagtctcaaagccaaggtgcagccacctacaatctgcctgtagcaggagaaggtgcaaaattggcaaatgacatgagtataaggagggatatagaaccatgattattttggacaaatctttcccattctctaagcttcttcaactcctaaataaggaacttgggtcagatctatgtgttcacatttagtgaattcttggacatggcattaactaatattaagcacataaagtgatgataattcacttttgattttgctttcactatttccagcacattgaggaaaaagtctgagttggtgcctttaacaagtgtctatcccttactgatttcctattttaacaaggaactagaagacatcaggtttggagccttctgtaggccacagtatctagctagtatttcaaaagattgctttgtttttattttattttaatctattttgtatttatagcaaatatttaaggaaatyataaaatcaactattggtggc

SEQ ID NO: 604523 - DNA, 533 bp, Homo sapiens
taccagttatttgccagacaaacactttgtgaatgttttttccaagtctatggcttgtctttcatttccttaacaaggtctttatttcaagaacaaaagtttttaattctagtgaagtaaaatttatgtatttttcatgttatgttctatgatctatatgtcttragaaatacgtatctaccccaaggttatgaatatttgattatatattttcttctaggagctttatcatttcagcctttatgtttgtgtatactatccatttcaagtaatttaagtgtatgatatgcgatgagggtctagtacttttctttttcatataaatatccagcaattccaccactatttggtaaaaagagtcttttctcccattgaaatgttttagcaactctgttgaaaatcagttgagcatatatgtgtgggtctatttcaggaatctctgttctgtttcatttaatgatatgcttacatcaattctattatgcgttgttactgtagttttatgaaaagtcttgaaataaggtatcgtaagt

SEQ ID NO: 604524 - DNA, 642 bp, Homo sapiens
aatatattttcaatattctaggagtttgaaaaacattaattcactaattctacacacggcaaagcaatgataattaagcctattttacagatgagaagacagtctgcaatgttaatttagttcatatctcctataaygcaggatttttaccaccttgaggttattaatccaactcctactcaaacagcacttaggataattatttcgaggtacgctccttttcttccaacaagaatgaaacaagcttgaagccagagaatggatcttaaaactagagaataaaatccaaatcattaagttccaatcaacctcattacactggtcccgtattttacagatgaagaatatgaaaaaagagggcaggtgacacagtcaaagacacacagttttttaagtctcacaactagacattcatatctgtggcttaaatcttcactgccatttcctgttatataccactgatttgtgatttcctatgctacccacgatgtctcgatctgtgcaaacactcaatatatgtttgtgaaattaaattggctaatttccctagatattatgttatcatctatgccaatatcatgccataacccaaaatgctcaatcagcatttatatcttctagaacctgctgtctctctcttgc

SEQ ID NO: 604525 - DNA, 589 bp, Homo sapiens
caatgtatggaaacagaaagtatactggacaaccaaagaaaatcatttagcatgaatggttgaaaatagtccattttctttcctccctccctccctccctccctccttccttccttccttcctcttccctccctcccttgcttgctctttctttctttccttccttccttccttccttcttaccttctttctttctctctctctctctcttttcttttttttttttttttttacagggtctcattctattgcctaggcccaggctggagtgcagtggcatgatctctgctcactgcagcatcgacctcccaggctcaagcaatcctcttgcctcagcctcttgaatagctgggactagaggcatgtgccaccactcatgcctaattttttattatttgtagagatggggtttcaccatcttgcccaggcaactcctgaactcacatgatctcgcccatcttggtctcccaaagtgtggggattataggcatgtgccactgtacctggctgaaaatagttttctatgtcagtctgtgcatcatctaaatatgcagmagtccacttttatgactttttaatttctcctgca

SEQ ID NO: 604526 - DNA, 494 bp, Homo sapiens
ctaattacctcctaaaggccccatctccaaataccatcacaactggggcttacagtttcaacacatacattttggtgggacacaaacattcaattaatagcacagccttcacgtactcctatgggttgatgtagcaaggatgagtaattatctgtggttcagaagtcacagaagtcaggtaggtatgggctatcttgattgctgaccaagaagatttcttgtcaggaaaggattctcaacaagaagttttgctgtgacctgccaaggtgtggcagaggtcgagcagtgtagagtgtaccacactgagccctgtcaagaacctcacatatacaccttccccggtcagcatttggatatatggctaacaggaggcaccracggaccataagagggaaagccatagaagcagcaaccagccaagagagtggaactattttcatgagctgataagaaagtggtagttgcccctcctgctctgtttcctttctgatatg

SEQ ID NO: 604527 - DNA, 598 bp, Homo sapiens
attttaaactagtatttctgattggttagataaaaattgcacatgatctgaaagatcctgtataaacatatacaatttatatcttttgctaccaaaagatagctattatatttcattgattacttttctagaattggtaatttaatgactttggttaaaacttatcaggatttcagttgaattccttgttacattcaaataattgtcattatttgcacattttattctaataaatataatttctcattttcttaatattccagttttccacaacatttgggaagatttacaaggtatactccatttaggcaaaaataactgtcagggaatagtcattgtcaagagcagtttgtattgcaacccacaaagtaagttttttttttaactttttatagtatattctggcaatgtagaaattagttgagatccaaatcttacaaaccttttgaagtttatgtttatgtaraaaagtaaaagaaaataaaaataactggcaaaaatgaaaaataaatccattctaaaagtgtttctcatatagcattctgtacataagctcaagtgacaaacttttatttgcagttttcaactcaatgcaaat

SEQ ID NO: 604528 - DNA, 627 bp, Homo sapiens
atgtatctcctgctgtgtaaaatattcaggttcctgaagtgggggacatttttagggcaactgtaatttcttcattttttccatcccacaagtgctggaggcagcagtgatctgagctctagaaagtgactgtccgtcaccatcggtatttgcatatactctgtgaggagaagggcagttgtggctaagacaaaattctactatcaagttttgtttctcaaatctcactcattaacatctttgatttccttggatccccataacacacacagaaaactatratttgtgtaaaatgcgctgaagtaccttttaagggaagtcatttggctttctctctggcttaacaacacggggagcagttccattttatctggaacagggaagtttatttccctagagaactagggttaccaaaaatgttcgatcccacaaggcagttttgtttgcatattttcacagaaacttccttctactacttaaagtcctcacattgggctgacctgggaaacatgaagataaaaagagtgggtaaacatgcctgcttgatgagccagaaaaaaaggcagaaacctgtggtctgggtagaacagatcctgctcagaatgtaagcttcaaacatgtttatca

SEQ ID NO: 604529 - DNA, 571 bp, Homo sapiens
tgtattttttgaaacaaaacaaaacaaaacaaaaacaacagggcaatatgttgacacaatggctttcgaagctaccacaaaaagccattagaggaaccccctgacagcaagttccaaggctacttattagggaagacaggtagcctataggcatctatagggttttttggttccccagaaagcaggtgcagtccctgtaatgtgtcccacctctggggtcatccacctcatttttgcacctgcttatgcctctgatgttggtgattgtggattcctgtggcaggctgcagtgatttgcttcctttagaccttctttttcttttttcctgcagggkagtggattttgtctatgaaccttgagtgtagctgagatgggtggaggtgaggatgtcaggagcagcctgatgtggagaggaacatgttttgctcctgctcttaggggaaaacagtctgttatctgtaagtgtgatgttagttgtgtcttttgcagatgccattcatcaggttcagaaattttccttatattcccaagtttgcagagttttcatggtgagcagatgttggattttgt

SEQ ID NO: 604530 - DNA, 544 bp, Homo sapiens
gggggcactaatgatggaagaaaggatatagtcacacgtgaatgagtgtgagaagtaattttttgagacaaggtcttgctctgttgtgcaggctggagagcagtgacaccatctcagctcactgcagactcaacctcctgggctcaagttctcctctcaccttagcctcctgagtagctgggactagcggcacacaccaccatgcccatctaatttctgtattttttgtagacatggggtctcaccatgttgcccaaactggtctcaaactcctgggctcaaggcaatcctcctgccttggcctcccaaagtgctgggactataggcaagagtcaccacgcccaacatgagaaagaatttttaaatagattttgaaaccgatgcaagagatgaataatgaatagtgaatgaataaatgagtgaatgaatgaagtaaatgtacaaggattaaccagcaaatgagtaactgaaccaatacataaatggatacaaatggtgaaggtggtccagccttgatatragggggtgatgtggtacagggagg

SEQ ID NO: 604531 - DNA, 563 bp, Homo sapiens
ttttcatatacagactttattatgttgagatagtttccttctattcctagtttgttgagtgtttttaacatgaaaagttgttaaatttttgttaaatgctttttatgctgtgattgagatgattatgtggtttttgtctctttatgtggtgcactactttgattgatttttggatgttgaaacatccttgcattccaggaataatctccacttagtcatggtgtataatccttttaatgtgctattgaatttgatatgcaagtattttgttgaggattttttcatcaatatacatcagaaatattggtttgtagttttcttttcttatagtgtatttttctgactttggtatcagggtaatactggccttatagaattagttaggaaatattccctcctcttcagtattttggaagagattgaggagggttggtgttaattcttctttaaatatttggtagaattctcctgtgaagcctggtctggtcctggtcctggacttctytttgttgaggggttgttgattactgattcagtctctttagtataggttataggtctgt

SEQ ID NO: 604532 - DNA, 584 bp, Homo sapiens
aaaggctggggatgccaaagagtgtggaatgttccrggagcattgaggcattctgtgtagctggtggggcaggggcaagatgagaggaggtataaattccatggacatctaggaagagtttaagggataaataaatagagaaaagtgatcccacgggtcatagttggccacacgctgagtttggataagaaaaacggagcttctgggacaacagctaccaagaaactgaggtatctgcactcagaggggtccgccctcagccagggagcaaaccctcgctctgtgtatggcagaagaacccttcctgctcctgagaacacaggattccatgtggctcttccattcagatggatgccggagatctggacagagtcccaagcaggacttgggtgattgcaggggtggaatcagctggcctcacaagagggagcaatgattttatttatcatctgaattaattactaataagtatcatagctgacatctatggaggaatttctatgtgccaggcactgttctgtatatgagcttgtttattccatatgacaagttcatgatgtaaatgtcattattatcctcatttt

SEQ ID NO: 604533 - DNA, 588 bp, Homo sapiens
ggattacaggtgtgagccactgcacccggcctctttttttttttttaagacagagtcttactctgtcacccatgctggagtgcaatggtgcaatcacagttaacagctaccttgacctcccaggctcaagccatcctcccacctcagcctccccaatagctgggactacaggcacacaccaccacacctggctaatttttctattttattttttgtagcgtcggggtcttcctatgttgcccaagctggtctccatctcctaggttgaagcaatcctcccgcctcagcctcctcccttcttttcttctccctccctctctctttccttctcttcctccttcctctctctccctttccacatgtttattaggggcctcttagggaactgcccggtgctggggratgactgtgaacaagtgagttcacgaagcttacatcctataagacttatctgagaaaaaaaatcagtattttgacaagtacactgaagaatatagcaaggtgacaagacagagtccacctggggactggggtgggattaacaaagctggtcacaaaaggcctttccgagagggtaatattggagca

SEQ ID NO: 604534 - DNA, 599 bp, Homo sapiens
ggctgattctccacaacagaaagcattctgcctcagacattgttttgtcagatatttgtttacctatcctgccaaatttgagtttcaggaacctaatccaaatgttaattcgaatttccaaatcaccaccgattgcccatccctaatcaaaaaattctaaatgctccaaaacctaaaacatttgagcaccaacatgatgccacaggtggaaaattccacacctgacctcatgtgatgggttggagtcaaaactttgtttcatacacaaaattattaaaaatataggggccaggcatggtggttcacacatgtatgtaatcccagcactttgggaggctgaggcaggagaatcacttgagtccaggagtttgagaccactctgggcaacacagaaagaccctgtctctttaaaaaataataatwattattattttatatatatataaagtaagattacctttatactatgtgtataatgtgtgtataaaaaataaattttgtgtttagatttaggtcccatccctaagatatctcattgtttgtatgcaaatattctaaaatctgaaaaaatccaaaatctaaaacacttctaattgcaa

SEQ ID NO: 604535 - DNA, 585 bp, Homo sapiens
agagacctgtgattgggagaggggagagaggctcccatcatttcagtctacatccagcaccctgcattttccaaaattcatgctggggattgctaaaacagacggcatttgttggctgaagagtaaatcacgactttygtgggtacattcattcatttggaaagtatttttgatcattcactgggctaatagtgctgtggggaatttgaaaaaatgtattttatatggtttcaaaaacaaagtctatggtagagcttttgccctcaaggaatttacagtcctttagagagccaagacatgcatttttaagttaactaacagcatgcacaaaaactagatacccctgtgatacactagtggtaaagctagcaaaaggtaatgtcatggagtgtgagttctggttgggtgatcttgtctaattctcttacattcccagtgaagaaacttaaccacagaaaagtaggaaaggccgacctgaggaagcacagccaggaaaggattgcatttaggcttgaatgcaaatctcataatgctttttgcactctgctttctgctaccccacagccatctctctatatgtttaag

SEQ ID NO: 604536 - DNA, 561 bp, Homo sapiens
aaaccataaatctaggaaaaatttcctgcatgcttggtgctgagcagattgagaaaacgggcatcatggacatggaagtctgattttcttaccatctgcttggatttttttttcaatcttctgtggctgcaggaactgtctcattcttacatttaagttctggtatattgctggtgataatctttgcactctatatttgttttaggttttctytggggagttggggaggagtgaagccggcttgcttttatgccatcattttggaaccagagtccaaggaaactttttgaggtgatatgtatgttatatattttgattatagcagtggctacatgaccaatatatttttcaaaacttacgaaaatgtattctttaaaagggtgaactttattgcatgctaattatactgcaatatacctgagcaaatgaaaaataaaacagtaggaaaggaattgtagtcatcaaaaagagacaactctctcaaggagtttcctgaaaatgagcgccatgaaatgagacatttgctggtgggggaagtcaagtcagagttcacttacttca

SEQ ID NO: 604537 - DNA, 646 bp, Homo sapiens
cctttattagtgcctgggaatgttcaaggccctggtttgagttcaagcctgctgggaaacacctgcagttggctgggcactttgtgatttttcagtcatgatgtagaaagaaagcaggggaaactaggggaccctacagatatgaccaggatgactgctttagtggaattttgtgttctcaggataatataaaaaactcaactcacaaccaaggaaacttgaaatgasctggggaaacatgtgtctttaaaaaactgtatcaaaggaagaaaactccaaattctaattcagaggctttctatgttgaagtatagacttttatgttcacatgtctcctaagatgattatatgatggtttaactatttgagaatgaagatattttattttttcttaagagaagaactatgacactgtataccaccttgtgaagcttaaaagcaaaaaagaaaacatattctcttaaccatttgtagttagaggttggttttctaaaataataatttatttaaaaattatgactttgtaatagaatttctattttcatatgaggaataaatgtgttcctcaaattcttagttgacatatggaattgtaaatgacaaaatgacaaattatatattttttatgaaagaaaattctgagaag

SEQ ID NO: 604538 - DNA, 407 bp, Homo sapiens
attaaaaggtagatttttttaaatgccaattttgataggtacaactttttaaaattaaatgtgttttattaatgagagtttcattttttcatatgactacactcatttatattgcttccttatgacttatttgtttatattctggcccatattttaagtaaaaaaaaactcatgtttttataggatttacaataattcttccaagtgtattaattccttctcactaacattttaatattagtttgttagggtttttgtaygaaataacatcaaactcccaaacagctaaaaaaaaaaaactaattcttcttatgttctatgtcttattgtagaaaataaacatgtttttattagtaaacctctattaataaacaattttgtggggagaaagtcattggactagttta

SEQ ID NO: 604539 - DNA, 359 bp, Homo sapiens
ttttatagagttgaccattgaacaacatggatttgagcttcaggggcacattaatactcaaattattttcaatggatatattggaaaattttttgaagatttgccaaaatttgaaaagcctggcagaaaaactgcatagcctggaaatattgagaaaattaagaaaaagttagatatgccatgaatgcatgaaacatatatagatagtagtctattttatcatttactaccataaaatatacacaaacataaaaagttaaaatttatcaaaacgtatgacacaaacttatggatggtacatgatgccattctcagttgaggaaaatgtaaacaaatrtaaagatgcagtattaagtcat

SEQ ID NO: 604540 - DNA, 627 bp, Homo sapiens
cacctaggtattaagcccagcatgcattagctattcttcctgatgctctccctcytcccacccccacaactcttgttattattaggatagtgtaacatgtaaaaaaaactagacacatatatgtttcattataaacaatcctgatacgtgaaaactaaaacctgtcaaactaattttcaggcatttattcatttccaaaaataagacagtacttttactattttgcaatgataacatgatttaaaacatgttttaacaatactttgaagcttacattggtaatcacatggattatgtactgtatacccatatttttaactttttttttttttgagatggagtcttgctctgttgcccaggctggaatgcaatggcgggatctcggctcacttcagcctctgcctcacaggttcacctgagtctcctgcctcagcctcccaagtagctgggaccacaggcgcctgccaccacgcccagctaatttttgtattttcagtagagatagggtttccccatgtcagccaggctggtctcaaactcctgacctcaagcgatccaccctcctcagcctcccgaagtgctgggatttcaggggtgagccaccgcacccagcctaactgattcttc

SEQ ID NO: 604541 - DNA, 627 bp, Homo sapiens
cacctaggtattaagcccagcatgcattagctattcttcctgatgctctccctcttcccacccccacaactcttgttattattaggatagtgtaacatgtaaaaaaaactagacacatatatgtttcattataaacaatcctgatacgtgaaaactaaaacctgtcaaactaattttcaggcatttattcatttccaaaaataagacagtacttttactattttgcaatgataacatgatttaaaacatgttttaacaatactttgaagcttacattggtaatcacatggattatgtactgtatacccatatttttaactttttttttttttgagatggagtcttgctctgttgcccaggctggaatgcaatggcgggatctcggctcactkcagcctctgcctcacaggttcacctgagtctcctgcctcagcctcccaagtagctgggaccacaggcgcctgccaccacgcccagctaatttttgtattttcagtagagatagggtttccccatgtcagccaggctggtctcaaactcctgacctcaagcgatccaccctcctcagcctcccgaagtgctgggatttcaggggtgagccaccgcacccagcctaactgattcttc

SEQ ID NO: 604542 - DNA, 566 bp, Homo sapiens
atctaggcctttccagaaaaagcttgtcaaccctggtctagatcaatgttcaatggagtaggacccatggagaataggcaaaagtagtcaggccaatctagagatacttcatattgggcacatatggaaaatgttcatcttgaaaattatgttaagagattggtaattttttagctagttttttttttttttttttttgagacagagtctcactctgttgcccaggctggagtgcagtggcrcaatctcagctcactgcaacctctgcctcctgggttcaagcgattctcctgcctcagcctcccgagtagctgggattacaggcacgtgccaccacacccggctaatttttgtatttttagtagagaaggggtttcaccatcttggccaggctggtcttgaactcctgaccttgtgatccacctgcctcggcctcccaaagtactgggattacaggcgtgagctactatgactggccttagccagtatttttttctgtaaaatgtggttaatgattatggtaaaatttcaggaaaaacaagtgaaaagtaaaagtaaatttccac

SEQ ID NO: 604543 - DNA, 566 bp, Homo sapiens
atctaggcctttccagaaaaagcttgtcaaccctggtctagatcaatgttcaatggagtaggacccatggagaataggcaaaagtagtcaggccaatctagagatacttcatattgggcacatatggaaaatgttcatcttgaaaattatgttaagagattggtaattttttagctagttttttttttttttttttttgagacagagtctcactctgttgcccaggctggagtgcagtggcgcaatctcagctcactgcaacctctgcctcctgggttcaagcgattctcctgcctcagcctcccgagtagctgggattacaggcrcgtgccaccacacccggctaatttttgtatttttagtagagaaggggtttcaccatcttggccaggctggtcttgaactcctgaccttgtgatccacctgcctcggcctcccaaagtactgggattacaggcgtgagctactatgactggccttagccagtatttttttctgtaaaatgtggttaatgattatggtaaaatttcaggaaaaacaagtgaaaagtaaaagtaaatttccac

SEQ ID NO: 604544 - DNA, 566 bp, Homo sapiens
atctaggcctttccagaaaaagcttgtcaaccctggtctagatcaatgttcaatggagtaggacccatggagaataggcaaaagtagtcaggccaatctagagatacttcatattgggcacatatggaaaatgttcatcttgaaaattatgttaagagattggtaattttttagctagttttttttttttttttttttgagacagagtctcactctgttgcccaggctggagtgcagtggcgcaatctcagctcactgcaacctctgcctcctgggttcaagcgattctcctgcctcagcctcccgagtagctgggattacaggcacstgccaccacacccggctaatttttgtatttttagtagagaaggggtttcaccatcttggccaggctggtcttgaactcctgaccttgtgatccacctgcctcggcctcccaaagtactgggattacaggcgtgagctactatgactggccttagccagtatttttttctgtaaaatgtggttaatgattatggtaaaatttcaggaaaaacaagtgaaaagtaaaagtaaatttccac

SEQ ID NO: 604545 - DNA, 432 bp, Homo sapiens
gggtggggtttctaatgggtatcatggaagacagattttctttgcattaaaatttggtcttgttttgtattgtttaattatgatcatttcagatccacaktcacttgagttcttgtaaataaatccaggctcttttgtgtatactctaacagtggtggttcgttgctctatcctgccctgccgtggctttgttatatcacaaaatccagcaagaatttatcttgctgctaataaaatcagaagatggcccagaagaagaagacaaggattttgtcttctttgaggttgccccatctctaaccagtgacagaaatggcagacccaatttaggtcaccttctaccatgtctcttaggatttgtgcctgcagcatcataaacaaaagtggcacatggaaatgacaaagacagcctgacacagtccttttgatata

SEQ ID NO: 604546 - DNA, 432 bp, Homo sapiens
gggtggggtttctaatgggtatcatggaagacagattttctttgcattaaaatttggtcttgttttgtattgtttaattatgatcatttcagatccacagtcayttgagttcttgtaaataaatccaggctcttttgtgtatactctaacagtggtggttcgttgctctatcctgccctgccgtggctttgttatatcacaaaatccagcaagaatttatcttgctgctaataaaatcagaagatggcccagaagaagaagacaaggattttgtcttctttgaggttgccccatctctaaccagtgacagaaatggcagacccaatttaggtcaccttctaccatgtctcttaggatttgtgcctgcagcatcataaacaaaagtggcacatggaaatgacaaagacagcctgacacagtccttttgatata

SEQ ID NO: 604547 - DNA, 624 bp, Homo sapiens
tggatgaatggataaagaaaatgtggtgggaggctgaggcaggagaattgcttgaacctgggaggtggaggttgcggtgagccragatcacatcactgcactccagcctgggacacggagtgagactcagtctcaaaaagaaaaaaaaaaagtggtacatatacacaacaggatattattcagccataaaaaagaataaaatcctgttatttgtaacaacataggtggagctggaggacatttcttaagcaaaataagctagaaagacaaataagaattaaggcaagaaagacaattattgtgtgttctcactcacgtggaagctaaaaatgttgctctaatgtaggtgcagagtagaatgatagagaccagagactgggaagagtgtgttgggggaaggggataaaaacaggttggttaatgggtacaaaactacagttattacagaagggataagatctagtaattagtagcacaatagagcaaatatagttaacaataatgtattgtgtactagagaagtagatttggtatgtttccaatacaaagaaatgttaaatatttgaggtgatgaatatcccagctatactgatttgaccattatacattgcatgcttgtatcaa

SEQ ID NO: 604548 - DNA, 475 bp, Homo sapiens
accttccctgttgtgtcttttgattgttctcagcagcctttgcagatcctatcattgttttcagctgcctcttagactcctgtgtcccgaatcccttgtttaccaggctggtttaccttctgcccttatcctcaacttgcttatctttatgctgcatttttgaagcagaaaattcaagctacactggaagtgacttcattytttgaagtatttttctgtaaccttcccatttgtagttcacttactgacactcgtcacccagcctttgagtaaatgtcaccctgctgctcattccattcacgttcccaggaaatgcctgggaaaccagtactcttcagggttgctacattggccactctctaggagcccattattgatgatcttatcgtgctatttatggcttcccagtaatactgatacaactagctctgaaaactcattaattcgtatttctttgtaactctggacttcattt

SEQ ID NO: 604549 - DNA, 500 bp, Homo sapiens
gatttaccaagaagtatgaaatctctatcatcgttttattacactatattaatgtattattatggtccctttgaaacaaacaattctccatttgagttcagatastcctcagcttatttcattttttggagtaagttaaagggacattattttcaataaaatagccagagttcattcattggctagaataaataaaatgttccttgaaataccaaaaaaaccaaaaacccatcaaattttattacgtaagcattctgagactctttaccatcttacaagatgcattatgtccaattttagttgtaaacatagaaatctgtagtaattataatgttctcaattctcctacaaccaaagcaaaatcagtaaaagagcaaactttttaaagcctaaaatttgggatctatcatttattagtgatgacttagtgccctaggacagagattgacaaatgttctatgaaaaggagcagatagtaaatattttaggttttctgagcc

SEQ ID NO: 604550 - DNA, 500 bp, Homo sapiens
gatttaccaagaagtatgaaatctctatcatcgttttattacactatattaatgtattattatggtccctttgaaacaaacaattctccatttgagttcagatagtcctcagcttatttcattttttggagtaagtkaaagggacattattttcaataaaatagccagagttcattcattggctagaataaataaaatgttccttgaaataccaaaaaaaccaaaaacccatcaaattttattacgtaagcattctgagactctttaccatcttacaagatgcattatgtccaattttagttgtaaacatagaaatctgtagtaattataatgttctcaattctcctacaaccaaagcaaaatcagtaaaagagcaaactttttaaagcctaaaatttgggatctatcatttattagtgatgacttagtgccctaggacagagattgacaaatgttctatgaaaaggagcagatagtaaatattttaggttttctgagcc

SEQ ID NO: 604551 - DNA, 474 bp, Homo sapiens
gtcattattcactgtcaaagctaaagcggaatacatgattggtggtttcaatggtagctactaacaagcttcaaatttagtgaatattctttaraacacagggtgtcatgccatatttctgcaatctcatgctttttcaaacagccattgaatttcatgaagtggcttgcatttgaacttttttaatttatttgtttatttctggtttccagtctcatcagagcaatttttctcatctttattgcttctccatctggttcaagaagttgtgagaaatgtaatagaattgaaaaattacttgagttttattttttttcaaacttcagaaaagtctggctacaacttcagggtaactgggttagtttttatctcataaaaataatttttctttcgtgttgtctccccatttcactgctattaataactgcatgtttgccagtcagcattcccctcatcatttcctctacgttacat

SEQ ID NO: 604552 - DNA, 500 bp, Homo sapiens
gatttaccaagaagtatgaaatctctatcatcgttttattacactatattaatgtattattatggtccctttgaaacaaacaattctccatttgagttcagatagtcctcagcttatttcattttttggagtaagttaaagggacattattttcaataaaatagccagagttcattcattggctagaataaataaaatgttccttgaaataccaaaaaaaccaaaaacccatcaaattttattacgtaagcattctgagactctttaccatcttacaagatgcattatgtccaattttagttgtaaacatagaaatctgtagtaattataatgttctcaattctcctacaaccaaagcaaaatcagtaaaagagcaractttttaaagcctaaaatttgggatctatcatttattagtgatgacttagtgccctaggacagagattgacaaatgttctatgaaaaggagcagatagtaaatattttaggttttctgagcc

SEQ ID NO: 604553 - DNA, 554 bp, Homo sapiens
tttctgcattggctacacatacaatgtgttaacactacatggtctctactaaaatgttcttcatttctaaacatttcattataatggataatagcctacagagagtgaaatttgtaatttgtaattaagactattcaggccaggcgtggtggctcacacctgtaatcccagcacttcgggaggccaagacaggcagatcacttgagatcwggagtttgagaccagcctggccagcatggtgagaacccatctctactaaaaatacaaaaattagccaggtgtggtggtgcactcctgtaatcccagctactcgggaggctgaggcaggagaattgaactgaacccaggaagcagatggcaccactgcactctagcctgggcgacagagtgagactccgtctcaaaaaaaaaaaaaaaacgaaacttaaaaaaaagcatatttagtttctctgtgaatctaatatttccagcacaataaggatgcattgacagatctctaaaaaaataaaactgatttctttatttgataccaacataataatatttagaaataa

SEQ ID NO: 604554 - DNA, 648 bp, Homo sapiens
ttctagtagttgtctagtatatagtttttgactctatagtttacataaaaattgatatttcaaatattccaaatatatttcaagatcataaataattttaaaaaccagataactttgtttataacactgttttattaaatatgattgttagcctaaattaatgttctggaaaaattgaagaaatatcacagtggtgaattgtggcattagatccctgtcttccaactatacagttttcctctacctcttatatcatattttaaaattttcttattttgtcacaaggattgataataaatggcaataaataaaagaaccaaggaagagaaaaatatcaatwaccttatgaaatgaggggaccctacacataggcagtcagctatatacataatgcgattttcgaaggtctgaaaaaggtcatatatataaaaccatctcccatatcagtcttctgttacaattaaatcttcctaagagctttctgaagacttgcatattttagctggaataaaacattacattgcttagacaaaagaggaattaagcaactagtacatagttgtcatctagtgaagatagggctttttatgcaatgggatgaaaaaaaattgaaggttggaaaaaagaagggtcataaagctttaatgt

SEQ ID NO: 604555 - DNA, 497 bp, Homo sapiens
tgtccagaagacaaaacagccttctactcgtctactggaagaagatactgtctaggactttctagctagagcggagaagtcaatggttggcttcaaagcttcaaagaataggctgattctcttgttagggtataatgcagctattgactgaagccagtgctcatttaccattccgaaaatcctagggcccttaagagctatgctaaatctactctgcctatgctcaatygatggtacaacaaagctaagatgacagcacatctgtttactgcacggtttactgaatattttaagcccactgttgagaactgctgctcagaacaagagttttctttcattttttaaaatactactgttcatttacagtgggcctggtcacctaagaactctgatggagagatacgaagagatgtttctatgtgggctaacactacatccattctacagcccatggatcaaggacaatttttgactttctagtcatactatttaaaaaa

SEQ ID NO: 604556 - DNA, 577 bp, Homo sapiens
atgcagtgaagtgtccagaagacaaaacagccttctactcgtctactggaagaagatactgtctaggactttctagctagagcggagaagtcaatggttggcttcaaagcttcaaagaataggctgattctcttgttagggtataatgcagctattgactgaagccagtgctcatttaccattccgaaaatcctagggcccttaagagctatgctaaatctactctgcctatgctcaattgatggtacaacaaagctaagatgacagcacatctgtttactgcacggtttactgaatattttaagcccactgttgagaactgctgctcagaacaagagttttctttcattttttaaaatactactgttcatttacagtgggcctggtcacctaagaactctgatggagagatacgaagagatgtttctatgtgggctaacactrcatccattctacagcccatggatcaaggacaatttttgactttctagtcatactatttaaaaaatacattttgttaggctgtagctgccatagatagtgattcctctgatggatctgggtgaagtatgttgaa

SEQ ID NO: 604557 - DNA, 596 bp, Homo sapiens
ggtgcaaactgcttgccaagaccaccccatctgttcctgttgccatatccttctgacttcctcctttgccttccagaaagaacttccacgtagcatttaaaactgtgttaactcccaggtcctctttatttcagggaaaagctctggttcccagacccaacccttctcacctatctgattcctctgcaatcaataggttatacataacactgtcatgatttatgatcccctaaaattcctaggaatttctttgtccctatattggtttctttgtaagtaataacatattacaaactaattataacataaatcaaaggagattaaggccagacaagcatgatgtaaaatgcttaatataaattttattccaaaatcaaatatactggattattgggattatgtattactttcrtttgtctctaccagtgatttcctctattgtcatgaaaagcaacatataattacatatcttaaatactataggcctatatcattcaacccaaataaatcagttattgcacttgaattattttttctaaataatataaatgtgcaagccacaaattattttttgcttcaagatattgaaaaactaa

SEQ ID NO: 604558 - DNA, 596 bp, Homo sapiens
ggtgcaaactgcttgccaagaccaccccatctgttcctgttgccatatccttctgacttcctcctttgccttccagaaagaacttccacgtagcatttaaaactgtgttaactcccaggtcctctttatttcagggaaaagctctggttcccagacccaacccttctcacctatctgattcctctgcaatcaataggttatacataacactgtcatgatttatgatcccctaaaattcctaggaatttctttgtccctatattggtttctttgtaagtaataacatattacaaactaattataacataaatcaaaggagattaaggccagacaagcatgatgtaaaatgcttaatataaattttattccaaaatcaaatatactggattattgggattatgtattactttcgtttgtctctaccagtgatttcctctattgtcatgaaaarcaacatataattacatatcttaaatactataggcctatatcattcaacccaaataaatcagttattgcacttgaattattttttctaaataatataaatgtgcaagccacaaattattttttgcttcaagatattgaaaaactaa

SEQ ID NO: 604559 - DNA, 587 bp, Homo sapiens
agcaaccccaaaagtcagccacaaccactctgataaatcagcagccatcaacatagagacaaggcccttcaccagcaaaacgatcacagctcactgaaggttcaggttattgtttgaaatttttagcaacaaatcctttttagttaagatatgtrcattgcttttgatatgtacattgctttttagaaacagtgctatcacatacttaatggactacagtatagtataaatgtaacttttatatgcactgggaaatgaaaaagtttgtgaaacttgctttattgtgatatttgctttattgcagtggtctggaactgaacctacaatatttctgaggtattcctgtaaaagaacaattccaggattcttgtggtgacggaaattttctgtattttgtctatggttgtggatacacagacctgtatgtgtggtaaaactgtatagaactaaacacaaatacacacacgcacacacacacacacaagtaagtacatgtaaatctttggaaatcagcataagatcagtggataatgaaacacatgtcaaaatcctgcaatatttgcattacagtttgaaagatgtttcca

SEQ ID NO: 604560 - DNA, 587 bp, Homo sapiens
agcaaccccaaaagtcagccacaaccactctgataaatcagcagccatcaacatagagacaaggcccttcaccagcaaaacgatcacagctcactgaaggttcaggttattgtttgaaatttttagcaacaaatcctttttagttaagatatgtacattgcttttgatatgtacattgcttttyagaaacagtgctatcacatacttaatggactacagtatagtataaatgtaacttttatatgcactgggaaatgaaaaagtttgtgaaacttgctttattgtgatatttgctttattgcagtggtctggaactgaacctacaatatttctgaggtattcctgtaaaagaacaattccaggattcttgtggtgacggaaattttctgtattttgtctatggttgtggatacacagacctgtatgtgtggtaaaactgtatagaactaaacacaaatacacacacgcacacacacacacacaagtaagtacatgtaaatctttggaaatcagcataagatcagtggataatgaaacacatgtcaaaatcctgcaatatttgcattacagtttgaaagatgtttcca

SEQ ID NO: 604561 - DNA, 587 bp, Homo sapiens
agcaaccccaaaagtcagccacaaccactctgataaatcagcagccatcaacatagagacaaggcccttcaccagcaaaacgatcacagctcactgaaggttcaggttattgtttgaaatttttagcaacaaatcctttttagttaagatatgtacattgcttttgatatgtacattgctttttagaaacagtgctatcacatacttaatggactacagtatagtataaatgtaacttttatatgcactgggaaatgaaaaagtttgtgaaacttgctttattgtgatatttgctttattgcagtggtctggaactgaacctacaatatttctgaggtattcctgtaaaagaacaattccaggattcttgtggtgacggaaattttctgtattttgtctatggttgtggatacacagacctgtatgtgtggtaaaactgtatagaactaaacacaaatacacacacgcacacacacacacacaagtaagtacatgtaaatctttggaaatcagcrtaagatcagtggataatgaaacacatgtcaaaatcctgcaatatttgcattacagtttgaaagatgtttcca

SEQ ID NO: 604562 - DNA, 646 bp, Homo sapiens
agaaccatgtaggagagtccatattttccttgctatcgtacaaaaaggagagctacctctcatttcctttctttttcaaatatcaaggaacatatagagttaacataaatctactctgacaaatttctctaaggtttgaaatgaagcagaaaggaaaaacatttgtgctttattgtttttcatgacacactttatgtgatgttgaacatgtctatgcagcacatctactgataaccactggtgaaaagcagccaatattggaagcaagtgttacgaatctagagataactagaacaattaaatacatattaggaaacatggacattgccaaaatgattcttctgattttatcaagaataactaaagcctttcaatgttacactatgcaatccctagccaaaggaatgtgcgttcttactactccatgcatatgtcaaatgttcagaaaactttggataaargaaatctgaatatcagagggaaacaatgagctgaaatggtaaccacaatcagcttccttgaataaacaagctgcacaccatcctaaagtgtaattccaatccattttgctacaagatgctccctctgtaatgtcatatccatgttcttttcccactggtgaggtagagagattttgtcagaattc

SEQ ID NO: 604563 - DNA, 666 bp, Homo sapiens
cttgtaactatttaatcctaattgaactgggtacttttgcaattttaaaactgggtgcttattaacagtatctttattagcagtatttacttgcatttctctggagacatctagtggagaaagtatagtatacaatgtttctagaagcacagataccatattttgattaaattaataatcaatataaaacttacataaaaatcttaggcattttacctgtgtttcaaaatgccagtcaactgaagattcatgatgcactcttacayaaaatattctacagccaatacatattggccacaataagcgatgccaaatctggataaaagttgaaaaatctagtcccgtttttttgtgtatgtggccgagacataaatagcttcatttttttttaatctgtttttctgtggtatttttctacactgacataaaagagtgacatgtggttagaaattatgactgaatttttctacttcaaacaaatgattggaaataatcacttctgcagtctgatttcattctttggttccttctcacatttatacaccccttacttctgaccccctgatactgttgacatggcttgcatcttctctctcatttggttctggatgattttgtttgagatgtaattaagaccctactcatcatctgtctcctgcccacaaa

SEQ ID NO: 604564 - DNA, 666 bp, Homo sapiens
cttgtaactatttaatcctaattgaactgggtacttttgcaattttaaaactgggtgcttattaacagtatctttattagcagtatttacttgcatttctctggagacatctagtggagaaagtatagtatacaatgtttctagaagcacagataccatattttgattaaattaataatcaatataaaacttacataaaaatcttaggcattttacctgtgtttcaaaatgccagtcaactgaagattcatgatgcactcttacataaaatattctacagccaatacatattggccacaataagcgatgccaaatctggataaaagttgaaaaatctagtcccgtttttttgtgtatgtggccgagacatraatagcttcatttttttttaatctgtttttctgtggtatttttctacactgacataaaagagtgacatgtggttagaaattatgactgaatttttctacttcaaacaaatgattggaaataatcacttctgcagtctgatttcattctttggttccttctcacatttatacaccccttacttctgaccccctgatactgttgacatggcttgcatcttctctctcatttggttctggatgattttgtttgagatgtaattaagaccctactcatcatctgtctcctgcccacaaa

SEQ ID NO: 604565 - DNA, 574 bp, Homo sapiens
ggtcccatgcttagacctgcatttctccactgatatatcctctctgctgatttgtctatgtccgacactgtcctcaaaatccctttgtctatttccagtgtttttagtacagggtctatatatgcttcctctctacgtctgaaaagcttttcagatttcttcctaggaaaagtgccaaccaaagttgagttattcctcatttttcaatcataatcttccagctattctcagacacattgaatatattttgatctaaaataacttttgttgctycacttcaccagataatgatattatgtgatgaatttccaattgcagaaatcgaatagttacaaaatttcttcttcttgttatccccatatttcttcttcttgttctctccatatatcatgagggtttctgctttcctctctaagaggcatgcatctgatgaaggtttttattcacttctgttgtcctatatgcaaaacaatcttgggatactctgttagtgctgtggggaaaaatggaaaagacctgctcttctttttatgctaacaaatgtgcaacactctttatatctttattattgttc

SEQ ID NO: 604566 - DNA, 654 bp, Homo sapiens
gaagaatttccttttgcatttcttacaaagagagtttctagtgacacattttctcagcttttacttatttttgtttcatctaatttttagaagaatattttctattcaagaaaattctaggttgactttttcttgttggcagttattataagtttttttcttttattttctggattgcaatgtttctgataaaagttgactctcttgtcattttcctctgaatacartgtatctttattcctatggatttcttttccatctctggtttgggcagtttgtctgtggtgtgctgagatatggatctcttcatatttatcttgattgggacttgtggagattcttggaactattacataaactgatgtcatgaaaattacaaatacatttccctggcttcaaaccttggggcttttgtactctgtaatttctcagagaaaaataatagtgatactacaatggcatttacaggcttttcaaggccctgacagggtgtgtacaggtcaaggaatttacagagatgtgactttttcttgtgaaatgggtattcatgtaaaagcggctggagattgttttttaagtttcaggtgatttaaaaccagagccagttgtaaaagcaatttgagggactaaactaagagtcgactttcaatttga

SEQ ID NO: 604567 - DNA, 553 bp, Homo sapiens
agtttcaggtgatttaaaaccagagccagttgtaaaagcaatttgagggactaaactaagagtcgactttcaatttgaatatcaaccacactcaaaaagacatagggacccagttttctttgttttgatctaaatcgccatggggaaaaaaaaaaggaaaagaacttcattccctggtcttacaaaaaccaaaactagagcastcactttaagtctgagggctgggaaaattaaccatgacaccaagtatactaatttaatttgtccatgtccatgccctgatgtggaactcaaaaaggccattgacaatcagaaaaatcaaacagcctaaactagagaaaatttgatatgaaaagatggagtaaataattaattacataggaattatcactaataaattctgttgtgtacatgtcagtggctcttccaacatctataataactactgataagtaaaagagtcaacctagaatttttcttgaatagaaaagattcttctaaaaattagatgaagcaaaaataaataaaaactgagagaatgcatcattagtga

SEQ ID NO: 604568 - DNA, 607 bp, Homo sapiens
cttcaaaacagaagagtctggtaggaaatcaatatcctatttaaaatggaggagtagacctggggaatggaaagacaaccaggcaaggaattatcgatggctgttgatcagcacatagaaggaaagggatcatgcattaacattttccctgccctggaataagtagcttagggcatagagaaagaaaacctttccattcctaatacatataccatagacatatcttcttccatgtaaatttctgatcatctaagggtataagaactgtggggaaaatgttttattggtatcaagtaactcatctctctaccattgaaataaaatattatattaaaagtaaaagaacaaattggttgtggtggctccttcttgaaatcacaacactttgggaggccgaggcaaggcagatcacttgagccttggagttggagaccagcttgggcaacatagcaaaattctgtctctacaaagaaaaraaaatttagctgggcatggtggcatgtgcctgtagtcccagctacttgtgaagctgaggtgggagggtcacctgaagccaggcaggttgaggctgcagtgagccaagattgtaccagtgcattccagcctg

SEQ ID NO: 604569 - DNA, 630 bp, Homo sapiens
tgtcttattcattccgtcaattcctgtccgttgagttggagagtttcaytcatttacatttaaagttattgctaataaaggatacttacttctgtcattttgccatttgtttttgtttacttcctgcattactatcttctttcatgtatagctgttttttgtaattaccttctcattttcttttgtgtatattccatagctattttctttgtggttaccatggggattacatttaatgttctaatgttataactttctaatttaaattcataccatcttaacttcaataacacacaaaaatacagtttctttttagctccatctccatgcttttcagtggttgatatcacaaaattatctttatacattatatatgaaatataatctaatgatttttaaaatgcatttgtctcttaaattatgtagaaaacaaaatgtggaattgtaaaacaaagtaataataatactaacttttttttttggggggggacggtgtctcactctgtcgcccaggctggagtgcagtggtacgatctcggctcactgcaacctccgcctcctgggttcaagtgattctcctacctcagccttccgagtagctgggacaacaggtgcccaccaccaagcctg

SEQ ID NO: 604570 - DNA, 525 bp, Homo sapiens
tcattgttcaattcccacctatgagtgagaacatgcggtgtttggttttctgtccttgcaatagtttgctcagaatgatggtttccagcttcatccatgtccctacaaaggacatgaactcatccttttctatggctgcatccaacttcagacaattttscttctgtcatacctgaaggttgcccacagaagcagaaggcattattttaagaactaggctaaatgaataaaagtttatctacatgttagaattttctagttcagattattaaattgaatgcattatttatgtcacacccaattagatattctttatttttttttttttaccaattaactagttattttgaaacttttatttttttaaagagaaaaggaaagggggaaaaggaaaatcagtgaaggagagaagataatcctctgggttgaaagaaacccaacaaagtacaaaataatcccaattgtcatgacagaacaaaaatgttttatgcaaattatgaggttgggataagattgatggtgtac

SEQ ID NO: 604571 - DNA, 525 bp, Homo sapiens
tcattgttcaattcccacctatgagtgagaacatgcggtgtttggttttctgtccttgcaatagtttgctcagaatgatggtttccagcttcatccatgtccctacaaaggacatgaactcatccttttctatggctgcatccaacttcagacaattttgcttctgtcatacctgaaggttgcccacagaagcagaaggcattattttaagaaytaggctaaatgaataaaagtttatctacatgttagaattttctagttcagattattaaattgaatgcattatttatgtcacacccaattagatattctttatttttttttttttaccaattaactagttattttgaaacttttatttttttaaagagaaaaggaaagggggaaaaggaaaatcagtgaaggagagaagataatcctctgggttgaaagaaacccaacaaagtacaaaataatcccaattgtcatgacagaacaaaaatgttttatgcaaattatgaggttgggataagattgatggtgtac

SEQ ID NO: 604572 - DNA, 516 bp, Homo sapiens
ctttaccaacaacataaataatagttacctttacaaatgcaacaattttcaaggagattgttgctaaatataaggagttcattacaaagtccattagattccaccaatcatggatgtagtcctgaagtccgccatcccacatctgtttaatttctccccatatgaagcctgcaattatagaaagattcattgtaagtatgatttcaatagaatcactaaaaaagcaatatacaatttaacaattatagatctcgaagctacaagagaccacattgttacactaaatgcaacatctattttttacaggtaataacactgrgtcccagccatactttaagactttcagatactaagctaattctggaagatgttgttaggacagcctcactttcttttatccattcgataaattcataaggataagtagtttttaaattatactgtagctcctttataactatatatttcccttggaaaataacattttcttaaaagcaaatgtcttgacatatattt

SEQ ID NO: 604573 - DNA, 587 bp, Homo sapiens
agatcatgaaaatcagtgtatctagcaatcataactggtttcagacaattagtggagtatcttgttgtgtttctttaagcagttagtgccttcagagaccggacttcaatcttgagaaatgatggttatagcattcatgataattcattaaaatactttatatccagaaaaaatgtatttttaatttttaataggaaatgctttattttcaaattctatgaagtacttacaaaatattagtgtaggttattattttatttccattatcttattaaaattttataatttcgtatttagagcctaatgatgagagagatgtcaaaatatctagattcagtaaatattaaaagggtaaatatgatgtcataactacattaacacaagcaaacagtgagaattttttaggataatactctgaaacatgaaatttagagttgaagatcttcctaggatgtagaaagttggamaagtattatccctacactgactcaagaaaaagtgaaattaactataaaaatcataattttccaagcatgcatcagagagacgagaaatcaaggaatctaaactttaaaatatatgcacgt

SEQ ID NO: 604574 - DNA, 503 bp, Homo sapiens
tccccttgctgagtccatgtgttctcattgctcaattctttaaggcaaggaagaagatgagtcagcaaaaggaactggagaggtggttagagatgcggtgaaagacaaccagaggagcgatttctataatcaagcaattaaccacacagctagtgtagcaagataatgcctacagatatatacctacattttattatgtatatttcactctagtaataattatcaattcatctccatatctagtagaaagtaggaatgtatttttatatcagttttatagattcggaaattgagtaataatttaaggcattgtaaattaractgtgcacaaaagtctgaaaatcaaatgtattttcacatttcatttaactatccacatacatgtatacaaatttgacaacctgaacatccatatatatacatataattaaacatacgtaataaaatattgctgtataatactgcttatgataattttaaatttcagtaggcttcttaactta

SEQ ID NO: 604575 - DNA, 488 bp, Homo sapiens
aggctgaggcgggagaattgcttgaacccgggaggcggaggttacagtgagctgagatcacaccactgtacttcagcctggtgacagagggagagtccatctcaaaaaagaaaaaaaaaaatgagtaaggccttgtcaggagctcaattctatccttttcccctaatggttgtggatgtagagttgtgctcattaccatcttcctactcaattttttttttctcatccatagtgaaatcttaatcttcaaatatcatgaacctagtttttccacacaggccagcccatctttgccttttcctctcacgctttcaactaatgtaamcaattagtctggctatggtctagtttaaggaagtaatttgaacacgaatcctccaaagtggctacatttgttctttctactgtcacatataagagtgatgaagtgcattgattttaaaagctggtgaaatttgggggcatagttccatgtcagtaaaaaaaaa

SEQ ID NO: 604576 - DNA, 575 bp, Homo sapiens
tgataaatgttcttgaacattcccacacatagcttccgcataaaatagctaattactgaagatataaaaaaaaaagttaagatgtttttctctttcattatgacaagtgtcagagtgaaacttggatactaaacattacctaattctctgctcttagtctcgctatgtatgatgccaccttttccttcaaagaccaagatcacattgtccttcctttcctcacttctctcttaaaagacacacatatttaagtccgtaactattgatagctgtccccctataattgatagctaattctatcagcgatacaattagctcataaatatttatacttgagaaatatccccctatgttggtagctaattaaattcctcttcatttaacctaatatagctcaggactatattttaaaatacacaaaaaatgaaacaagaagtattcttaataatgcaatcattttcttgaacttcttagaacatttagcamaatgccctgaatatcgtgggtgctcaagaaatattttctcctgtcaagtattcatagcccggtgaggcagacaggcacaactaattaca

SEQ ID NO: 604577 - DNA, 517 bp, Homo sapiens
ggttttccatttttacagattctgccccagtgtgattatttaagytgatttcagagtctagcacttctagtcatggccaggaaaaaatgctgcatgaatatattcactttatgcaaggtcaaggctttaggcaaaacattgctggcatctgggttaaaggatgtttgaatgggaaacaaccattggaagttaaagatggagacctcctgagaaacttaggatcttcttcccagaagctattgtgcttacactctcagaataataaacctagggacctttgtctccccagagacaatttatttactttagaaagttgaagtctttctcttttcttctccaggggaaagacaggcagctggctcagctgcacggtatgagttctgagacacatattttccaagctcctctcctgtggtacaaacccctgtatacacagggtacatctggctattaggtcccccactggggactggggcatggggaaccagtgctaagtttgctatgtaagtaaataatt

SEQ ID NO: 604578 - DNA, 517 bp, Homo sapiens
ggttttccatttttacagattctgccccagtgtgattatttaagctgatttcagagtctagcacttctagtcatggccaggaaaaaatgctgcatgaatatattcactttatgcaaggtcaaggctttaggcaaaacattgctggcatctgggttaaaggatgtttgaatgggaaacaaccattggaagttaaagatggagacctcctgagaaacttaggatcttcttcccagaagctattgtgcttacactctcagaataataaacctagggacctttgyctccccagagacaatttatttactttagaaagttgaagtctttctcttttcttctccaggggaaagacaggcagctggctcagctgcacggtatgagttctgagacacatattttccaagctcctctcctgtggtacaaacccctgtatacacagggtacatctggctattaggtcccccactggggactggggcatggggaaccagtgctaagtttgctatgtaagtaaataatt

SEQ ID NO: 604579 - DNA, 632 bp, Homo sapiens
ggttatcattaggaaaaagtaaaagaagaaggcatcaacagggcttcttaaacgaaaataattatagttacatagttgaatttaatagaataatttccttaacatgatataccagaataaataaagcattgctatttgaaaaaaagagccacagaattagaccgaagtttgcaagatgcaatactctattaatttagctgtagtttttcagttgtaracttctatgatgcttgcaccacagttctttgtgaatgggggatgtggactggattcaggtgaaagaaacaagctgtggcaaaccctgtgtacaactgcagcacacacaaatcaaaaagcaatctttatatgtgatggttatttagagtttgcaatgttctcatcagtaattcctatcttcatgcagaaacgactgacattgatgttatcatagacaaagaaaaaggaaatttatttccttcttagttctcactttttccctccactctttcatcttaagcccatcaccataacatcactggaagactgagggaaggccagagaattatttttgttaaattaatataatcacgctttgcttttgagtaatatgtgtacattttttacttgtccgtctacatgcaaacttcatatat

SEQ ID NO: 604580 - DNA, 632 bp, Homo sapiens
ggttatcattaggaaaaagtaaaagaagaaggcatcaacagggcttcttaaacgaaaataattatagttacatagttgaatttaatagaataatttccttaacatgatataccagaataaataaagcattgctatttgaaaaaaagagccacagaattagaccgaagtttgcaagatgcaatactctattaatttagctgtagtttttcagttgtagacttctatgatgcttgcaccacagttctttgtgaatgggggatgtggactggattcaggtgaaagaaacaagctgtggcaaaccctgtgtacaactgcagcacacacaaatcaaaaagcaatctttatatgtgatggttatttagagtttgcaatgttctcatcagtaattcctatcttcatgcagaaacgactgacattgatgttatcatagacaaagaaaaaggaaatttatttccttcttagttctcactttttccctccactctttcatcttaagcccatcaccataasatcactggaagactgagggaaggccagagaattatttttgttaaattaatataatcacgctttgcttttgagtaatatgtgtacattttttacttgtccgtctacatgcaaacttcatatat

SEQ ID NO: 604581 - DNA, 562 bp, Homo sapiens
tgctaatacacacacatgtacacacagaatcatactgcaacacaagaaatcaaattacttacaagggtaatttttctagttattagacatagaattactgaaagatattcatagctacatcatcttctgtgttaaacagaataattaattgtgtttttctaccaaatatacaagaataattacagacacaaatagtagtagaagaggaggatgagacaattatcataaaacctagaaaaaaattaataactttctcttaaaagtatattttctgcataccgccctattttttgatggaccttttcttaactygcattataacctagtattatatcctgaagaagaacacggcttaagtcatgcaaattatgtgttttcagtcattcctctccttaataaatgacttttgctattctcctcaccaagcatatctgtgattttttaaattcatatttctcaaaccactagagcatagtttacaataagtcctgaaataactaatttgtggcctagctattgagatctatggcagtttccacaagtgtcagtctgaaatcctggt

SEQ ID NO: 604582 - DNA, 490 bp, Homo sapiens
cctaaacctaaagcatcctagtctatacaaaacataatgaatgtttgttaagcaaggcaagtacaaaacaaaaatacttttctatacaactaaggacgatttttttcaagtatgctcactgaccacttacacctaaatcacactggatacttgtttaaaccgcaaaagaaagaattatgcagcctgtctgaattcttgtttctctgtttaaaaaaatgtgtggattcacacctactccttgcktcttcataaattagcgtgatccaaaagtaagcagagtaacagactttgatttgtgaaagtgaatacttttgcaagattgcttcagagcgctgcacttaataaaatataaaaatgcttgagaatcaatcggattataagattgtttttaaggcatataaaaaagttctctccaattctcctttctaaggaaaagaggtattttttaaagtaggttctttcagattcctacacattatactacaactac

SEQ ID NO: 604583 - DNA, 596 bp, Homo sapiens
ccactccctcacttaaaaaactacccacacactgtcttctccatctaagttgatgagaactccaaattctcattgtttattacataagccaaaagccctgtagaatttgtggggggggggggcttcctctcrtattccacatcaaatttgtcagcaaacctgttcgttctattttaaaaatatttaaccatttctcaccacccagctatcactccagcccaagtcacccttatctctcacctggcttaactgcaatccctcccatttttttttccttgtgtctgtccctaccccctgctatggtctgaatgtgtgccccaaaattcaggtgttgaaactgaatctccattgtggtggtattaagacgtggggccttttgagaaatgattaaattaagggggctccaccttcatgaatagattagtgccttataaaagggctggaaggaacccagcttgggtcccttttacccttctgtcccttgcaccacgtgaggacatctagatgaatgagtctgtaccagacacctaacctgccagcgccttgattttggacttcccagcctccaactgtgaggaaatgagtttcttttattt

SEQ ID NO: 604584 - DNA, 560 bp, Homo sapiens
ctggccctgtaaaccagctctctcagccaagaagtttgaataatccagcagtcaccaggagcctcctttgggatgaaatttgtttcctctactcccttcaacccatcgatttcctgctcctgtttccctggctctctgggagaggatagcaaagagcctgctatctgtgaccctctttctgttttgatgactcttacagactcttgtatcaggcttttggattcctatttttcttcccacctcctgcaaccacatctaccaatggattctttgatttgcatgctcagaggcagcatgggtctagataagagacctcttggccccagcccttgatttggggagatcttttctmattaataaaaatataatagcttctagttaaggaagacctactacatgttgggtactatatcaggcactttccacatagtcttgttttgcctttacaacatctttgtaagaaaatatattattgacattttacagaagaagaatgggaaattaaatgacttgtccaaagtcatacagctaataagcatgcaaagaaggcagcagaattc

SEQ ID NO: 604585 - DNA, 621 bp, Homo sapiens
ctgactccctacccaaatatcatgtcaaattgtaatctccaatgttggtgttggggcctggtggaaggtgattggatcatgggggcagtttcycataaatggtttaacaccatcacccttggtgctgtacttgtgatagtgagtgagttctcatgagatctggttgtttaaaagtatatagcacctccccactccctcttttcctcttgctttggctatgggaaatgcctttctccccatttgccttcaccaggattaaaaactccctgaggacttcctagaagcagaaacttctatgctttctgcacaacctgaagaaccacgaaccaatgaaatattttttcttaataaattattgagtctcaggtatttctttacagcagtgcaagaattaaataggccaggcgcggtggctcacgcctgtaatcccagcactatgggaggctgaggcgggcggatcacgaggtcaggagatcaaaccatcctggctaacactgtgaaaccccatctctactaaaaatacaaaaaattagctgggcgtggtggcgggtgcctgtagtcccagctacttgggaggccgaggcaggagaatggcgtgaacccaggaggcagagcttgcag

SEQ ID NO: 604586 - DNA, 590 bp, Homo sapiens
tgcgtttaggtaaataggtgagcataaatgcacacttcctatctaggatggatgggagagtgtacgccatggaatattccctatcaggttcccatatttgggtaagagttggcttggagttgaaacacaatagggtagttggacctgaagaaatataagaaagttggcaaagcagatctgtgggtcacctcactctccctcttctggattcaccttatccagagtaaaacctgggctataaatccctaaaaattgtaccaccacaagaaattttctttttccttgcttttaaaatgactatgagctcacttctttaagcctttccatttttactttgctaagggaaggtgctgagtctgacaatttgggaactttgagtttctactatacttcttcctaaactcataacagratgcttatcagagaatttcagcaggaccagatttatccaaaacattctcttactgggaaagaccagagactctgatgtcttatccagtggagtgctggtaaatgtttaacaatatagccaccatgattgatttagtctccagtgtgtcatcactggagaaagagttgggaaggagctg

SEQ ID NO: 604587 - DNA, 594 bp, Homo sapiens
gacttgacacaagggtcagcagtgctgagcccaaattatacagcagaggatggaagacattgctagccatcattattattactaacgccgtcactattaatacttttctgacatcttaacaatttctaacatcagaatgaagttagtgaagaaagcaactttttttctttcaaattttgagcctctgaagaattttttttaattttttttatttttttttattttgagatggagtctcactctgtcgccaggctggagtgcagtggcgtgatcttggctcactgcaacctccgcctcccaggttcatgtgattctcctgcctcagtgtcccaagtagctgggactacaggtgcatgccatgacacccggctaatttttctatttttagtagagatggggtttcrccatgttggccaggatggtctcgatctcttgaccttgtgatccacccacctcagcctcccaaagtgttgggattacaggcgtgagccaccgtgcctggcccttgagcctcttaagattttaaatgtgcttttcatttgttatattttgcaagtcgcaaaccgtaagcataaagaaagtccatgacaaaca

SEQ ID NO: 604588 - DNA, 572 bp, Homo sapiens
ggcagcaagagcaaaactccatctcaaaaaagaaaaaaaaatttattatttctatttatttatcttgtttttctctttatgctgtttgaaatcacagtagactatgtcagcaagagcataaaagtaccacttagtttaaatcctgctatgtcttaaagaaattataatggtaagttgtgggaattctagagatgcaattgaatagagagtggaaattggattataaagccaatagctgtgttttttattttaaaattgttttgtacatattatgtattatawaaaagactcatatttgctgcagatatgtattcatcatattctgacttagaagaaacatgttctatccatgtcagagtttagaaagaaatgttaattatctttctattgattttctctgatttgagttaattgattttgttagcataattgttattctaccattccttagcttcattgtgatcaaaatacacagtaaagaaaattatgaggggaattcttactatctgatttaatatttcatgtagagctacaatagtcaagacagcttggttttggagaaagaatataca

SEQ ID NO: 604589 - DNA, 572 bp, Homo sapiens
ggcagcaagagcaaaactccatctcaaaaaagaaaaaaaaatttattatttctatttatttatcttgtttttctctttatgctgtttgaaatcacagtagactatgtcagcaagagcataaaagtaccacttagtttaaatcctgctatgtcttaaagaaattataatggtaagttgtgggaattctagagatgcaattgaatagagagtggaaattggattataaagccaatagctgtgttttttattttaaaattgttttgtacatattatgtattatataaaagactcatatttgctgcagatatgtattcatcatattctgacttagaagaaacatgttctatccatgtcagagtttagaawgaaatgttaattatctttctattgattttctctgatttgagttaattgattttgttagcataattgttattctaccattccttagcttcattgtgatcaaaatacacagtaaagaaaattatgaggggaattcttactatctgatttaatatttcatgtagagctacaatagtcaagacagcttggttttggagaaagaatataca

SEQ ID NO: 604590 - DNA, 389 bp, Homo sapiens
tgggttgccactgcacctttttcaactactctagtcttgtggagaaaataccccttctaaattttttcttcattgaatactctccctcagctccagagtaccatatagagttttcttgtattttagagttactgttttatcaaagtttaccagtcttttgtattacatttctcctgtctaaatcractgtgtggtttctactcattatggatatagattgatacaaactcaataaatatttttgaatgaataactccacagtccaagttattttaatcactatacaaaatctccagagtttctcccatatttctgaacatggtaactatgtatcaagagacaaaccacaaatttaaagaaggtgtggtcaaattttataagtgtttata

SEQ ID NO: 604591 - DNA, 531 bp, Homo sapiens
cctaacgttgataggtgagttttatagcaaaaatctgtcagaaaatattagggaaatagaaatgacatatttaagttacaaattattagagaaaataaagaaaaratttaaatcaattaaaacataagaaaatagaaaaaccacattaagggatggtataaacagaaattacataagatatttgagaaataacagtaatataataattattaataaaaaagacctagaaaagacaaagattataaaactgcattaaactactaaatttatttatatattttttaaataaacatacataaaaacaaagaacaaattttcagaataaaagagtgataaaagatgatctagccaaatatgtagtaactggaaatagcggagatagccacgtttatatctgacaatatagactttacataaaatttttactagaaaataagaattcaaattacccttaaatatctaaatcttttaaaatgtataaatgtaaatattcctaacagcacatcttcagaatatatacattaaaaattt

SEQ ID NO: 604592 - DNA, 531 bp, Homo sapiens
cctaacgttgataggtgagttttatagcaaaaatctgtcagaaaatattagggaaatagaaatgacatatttaagttacaaattattagagaaaataaagaaaagatttaaatcaattaaaacataagaaaatagaaaaaccacattaagggatggtataaacagaaattacataagatatttgagaaataacagtaatataataattattaataaaaaagacctagaaaagacaaagattataaaactgcattaaactactaaatttatytatatattttttaaataaacatacataaaaacaaagaacaaattttcagaataaaagagtgataaaagatgatctagccaaatatgtagtaactggaaatagcggagatagccacgtttatatctgacaatatagactttacataaaatttttactagaaaataagaattcaaattacccttaaatatctaaatcttttaaaatgtataaatgtaaatattcctaacagcacatcttcagaatatatacattaaaaattt

SEQ ID NO: 604593 - DNA, 531 bp, Homo sapiens
cctaacgttgataggtgagttttatagcaaaaatctgtcagaaaatattagggaaatagaaatgacatatttaagttacaaattattagagaaaataaagaaaagatttaaatcaattaaaacataagaaaatagaaaaaccacattaagggatggtataaacagaaattacataagatatttgagaaataacagtaatataataattattaataaaaaagacctagaaaagacaaagattataaaactgcattaaactactaaatttatttatatattttttaaataaacatayataaaaacaaagaacaaattttcagaataaaagagtgataaaagatgatctagccaaatatgtagtaactggaaatagcggagatagccacgtttatatctgacaatatagactttacataaaatttttactagaaaataagaattcaaattacccttaaatatctaaatcttttaaaatgtataaatgtaaatattcctaacagcacatcttcagaatatatacattaaaaattt

SEQ ID NO: 604594 - DNA, 531 bp, Homo sapiens
cctaacgttgataggtgagttttatagcaaaaatctgtcagaaaatattagggaaatagaaatgacatatttaagttacaaattattagagaaaataaagaaaagatttaaatcaattaaaacataagaaaatagaaaaaccacattaagggatggtataaacagaaattacataagatatttgagaaataacagtaatataataattattaataaaaaagacctagaaaagacaaagattataaaactgcattaaactactaaatttatttatatattttttaaataaacatacrtaaaaacaaagaacaaattttcagaataaaagagtgataaaagatgatctagccaaatatgtagtaactggaaatagcggagatagccacgtttatatctgacaatatagactttacataaaatttttactagaaaataagaattcaaattacccttaaatatctaaatcttttaaaatgtataaatgtaaatattcctaacagcacatcttcagaatatatacattaaaaattt

SEQ ID NO: 604595 - DNA, 344 bp, Homo sapiens
ttttcagaataaaagagtgataaaagatgatctagccaaatatgtagtaactggaaatagcggagatagccacgtttatatctgacaatatagactttacataaaatttttactagaaaataagaattcaaattacccttaaatatctaaatcttttaaaatgtataaatgtaaatattcctaacagcacatcttcagaatatatacattaaaaatttatgttctggttaggggatgggtagcagcagaaaccyagcggtattcattgtgtatttggtggttctaccatcagaagagtatatgaatttcagttctcattatcaagttgattttgggggttgtat

SEQ ID NO: 604596 - DNA, 541 bp, Homo sapiens
gattataccacaaaaacaccaaggtataaaaagatttattactcacataatgggaytttttgattgagtgtttaaggtggaggagcagagagagggtttctgcatgggagcttgggtttgtgttgtttgatctttcctgttcatcaaagaaaggtgcctgtgggctctatctgcttttccagaaatagcacaaaaacagaaaggggcaatttaggcctcaaagctatccaacagtcaaatattaaaaacagagtcatttaaaaagattgtgtctttttatttgtataaatataacaggtatataaaaatttcacaaggcatacgtatatcaaatcatcacattgtgtactcatataatttttgtcaatagatattaataaagctaacagaattttattttaaaaatagaagcctataaccacaatccaattaagcaaaaataaagagaaaccaggaaaaatgtgtttggaaactaaaatatatttctgaataaatcaatgtcaaaaaaagggaaaatataataaaagcaggaaattttctt

SEQ ID NO: 604597 - DNA, 541 bp, Homo sapiens
gattataccacaaaaacaccaaggtataaaaagatttattactcacataatgggactttttgattgagtgtttaaggtggaggagcagagagagggtttctgcatgggagcttgggtttgtgttgtttgatctttcctgttcatcaaagaaaggtgcctgtgggctctatctgcttttccagaaatagcacaaaaacagaaaggggcaatttaggcctcaaagctatccaacagtcaaatattaaaaacagagtcatttaaaaagattgtgtctttttatttgtataaatataacaggtatataaaaatttcacaaggcataygtatatcaaatcatcacattgtgtactcatataatttttgtcaatagatattaataaagctaacagaattttattttaaaaatagaagcctataaccacaatccaattaagcaaaaataaagagaaaccaggaaaaatgtgtttggaaactaaaatatatttctgaataaatcaatgtcaaaaaaagggaaaatataataaaagcaggaaattttctt

SEQ ID NO: 604598 - DNA, 541 bp, Homo sapiens
gattataccacaaaaacaccaaggtataaaaagatttattactcacataatgggactttttgattgagtgtttaaggtggaggagcagagagagggtttctgcatgggagcttgggtttgtgttgtttgatctttcctgttcatcaaagaaaggtgcctgtgggctctatctgcttttccagaaatagcacaaaaacagaaaggggcaatttaggcctcaaagctatccaacagtcaaatattaaaaacagagtcatttaaaaagattgtgtctttttatttgtataaatataacaggtatataaaaatttcacaaggcatacgtatatcaaatcatcacattgtgtactcatataatttttgtcaatrgatattaataaagctaacagaattttattttaaaaatagaagcctataaccacaatccaattaagcaaaaataaagagaaaccaggaaaaatgtgtttggaaactaaaatatatttctgaataaatcaatgtcaaaaaaagggaaaatataataaaagcaggaaattttctt

SEQ ID NO: 604599 - DNA, 477 bp, Homo sapiens
ttaagccaggctgtggtattttrttatggcagcccaagtaggctaatacattccataacacaatagtggcttaaacaacaattaattacttctcatgattctgtgcattggcaaacttggtggttcttctctttgtttacctagagtcaattatacggcagcagtagtctggtatctaggctggagctagagattgtcttagagaccctcagcctagtagtgcctcaccatacacctgcctccagtgcttcaccacgctagtactggacagtgatcatgaggtctggcacctcatcaaatgccgaccgcacattttctctcatttcagatgtccacatttttcttgggtggagggtgttcctatggcacagtcattcatatttcattcacgtgagtggtggataaattttttaaacagcagaaaaccaggaatcacaccagcacagggccctctcaggcactcactagcacctaaac

SEQ ID NO: 604600 - DNA, 564 bp, Homo sapiens
gccattaggctgtactgtgttccccccaaaattcataatgttgaagtcctcacctttagcatatgaatttttggggggatacagtgcagcccataacagctggtcttaactaagcgaaaataagggtaaaatgagtgatagtgataaaaatgtaaggtcttttattagtaatgctttacttaaattcctgtaaaaatgacagttttctatttgtaaacccattgcttttttactttgaattatttcatccttttccatgcttctactcttttcttcccccccccgatatatttttattctcacaygccttcatctgtgcatccaaaggcactgttgattcagtagtatcagcggaaaagcccaaatagttttgactccagctaattaaaagaaaacacctttaaaaaatatatgctgcaatgtttgtagaaaatctaggtcttacttttctttattaatatcaataataataaaaataataataaacctctgttaagtgcatattaggtaccagggattttgctaaatgctttaccctatgactttggtagttttatagatgag

SEQ ID NO: 604601 - DNA, 566 bp, Homo sapiens
ggccatgaactggtacagttccatggcctactaggaaccaggccacacagcaggaggtgagtggcaggccagcgagccaagggtcatctgtatttacagccgctccccattgctcacataaccacctgagctccaccacctgtgagatccgccctggcattagattctcacaggagctgaaattctgatgtcagctgcacatgtgagggatctaggttgcatgccccttgtgagaatctaatgcctgatgatctgtcactgtctcctctcatcctgagataagaccatccagttgcaggaaaacaaactcagggcttctacattctagaactgtatagaatctttcattggttctacattctggtgagttgtataattgtttcactatatattacaatgtaatartaatagaaataaagtgcacaataaatgcaatgcaattaaatcattgtgaaaccatccccacaactcccagtctgtggaaaaattgtcctcccccaaactggcccctggtcccaaaaaggttggggactgctgtgctaggagacacatgccctgccggtgct

SEQ ID NO: 604602 - DNA, 581 bp, Homo sapiens
aattttacaatttttgtacaacacatttttaaaaatttataatcaaggtatttattagtaacagtcaaaacaggctcattgaatcttttatgttgccttttgaggagagaaaaatctgaatatgtcgtttgttcttggtcttgttcatctgtgtacaacagcacaaacctgctggacttgccagcyactaatcaggggctactgggccactcaccacatcttttcataaactgattgcaaatacaggttgtaagtatagacaagcccttgttaaataatcttttaaagaaaatgtctaagtgatcattaaatagaagtttatcgattcgagaaaggctaaaaataagtgagttgtgcaattaatctgggctcaaaagtcttttcactttttaaaaataatcattttaccaggatatctgcactataagacttgatttatagcagaatcagctgttcgcatgacgttggtggtgaatcatgtgaaagcagcatagtaaaaatgcccatggagggtttcttggtttgtatgtttctttgcgtaatgtttatttattattgtttaattttttaaattgttttaa

SEQ ID NO: 604603 - DNA, 581 bp, Homo sapiens
aattttacaatttttgtacaacacatttttaaaaatttataatcaaggtatttattagtaacagtcaaaacaggctcattgaatcttttatgttgccttttgaggagagaaaaatctgaatatgtcgtttgttcttggtcttgttcatctgtgtacaacagcacaaacctgctggacttgccagccactaatcaggggctactgggccactcaccacatcttttcataaactgattgcaaatacaggttgtaagtatagacaagcccttgttaaataawcttttaaagaaaatgtctaagtgatcattaaatagaagtttatcgattcgagaaaggctaaaaataagtgagttgtgcaattaatctgggctcaaaagtcttttcactttttaaaaataatcattttaccaggatatctgcactataagacttgatttatagcagaatcagctgttcgcatgacgttggtggtgaatcatgtgaaagcagcatagtaaaaatgcccatggagggtttcttggtttgtatgtttctttgcgtaatgtttatttattattgtttaattttttaaattgttttaa

SEQ ID NO: 604604 - DNA, 581 bp, Homo sapiens
aattttacaatttttgtacaacacatttttaaaaatttataatcaaggtatttattagtaacagtcaaaacaggctcattgaatcttttatgttgccttttgaggagagaaaaatctgaatatgtcgtttgttcttggtcttgttcatctgtgtacaacagcacaaacctgctggacttgccagccactaatcaggggctactgggccactcaccacatcttttcataaactgattgcaaatacaggttgtaagtatagacaagcccttgttaaataatcttttaaagaaaatgtctaagtgatcattaaatagaagtttatcgattcgagaaaggctaaaaataagtgagttgtgcaattaatctgggctcaaaagtcttttcactttttaaaaataatcattttaccaggatatctgcactataagacttgatttatagcagaatcagctgttcgcatgacgttggtggtgaatcatgtraaagcagcatagtaaaaatgcccatggagggtttcttggtttgtatgtttctttgcgtaatgtttatttattattgtttaattttttaaattgttttaa

SEQ ID NO: 604605 - DNA, 566 bp, Homo sapiens
gagctccataaaggtgtcatcagatgtgtcttgtactccatagctactctcagctctgaccgcatcacatggtatatgctcaagaaatactgggctgactattgactgggaacaagccgagaatattgtgacccattatggtgctgttgaaatagtccagtaaagaatgactttccacaccaagatattatcagtagagatagggaggagggaaagatatggagacacttacaccttaaaatcaactgactcatggctaatcagaatttttggatgaggcacattagagagagggagtgatctagagggttgcttatggaaatttggcctgggggataaactgagtgatgatgtctaatttctagttaggttgtacgggaggtatatcatggtttaggtatgttcaggttgaattgttgagttcattaaaaaatcacaaatatgtgtctttggmttttaagaaattggagttagagatgcaaatccagaagccactaccatgtgcagagagagcagccctgaggaatattagcattaaggggaacgtgagctgagaggagattagc

SEQ ID NO: 604606 - DNA, 457 bp, Homo sapiens
aataaataagtcaaaattcgaagttaaaatggggcataaggcatatcagagaagtaaagttaaaaattgattctctgacaaccctgatagattgcctcctgtctaccccagtggtgtcaccatcatgttctaaagccttgtttcctggtgggcacggtggctggtgcctgtaattcctgaactttgggaggccaaggcagggggatcacttgaagtcaggagttcaagaccagcctggccaacatagtgaaacccccatctctattaaaaatacaagaattagatgggtgttgtggcaggtgcccataatcccagctactcccatggcggaagcatgacaatcgcttgaacccaggaggcagaggctgtrgtgggctgagaccatgccattgcacccccagtctgggggacagagtgagactccatttcataaataaataaataaataaataaataa

SEQ ID NO: 604607 - DNA, 514 bp, Homo sapiens
gtgaactaccattcacaattgcttcaaagagaataaaatacataggaacacaatttacaagggatgtgaaggatctcttcaaggagaaccacaaaccactgctcaatgaaataaaaaaggacacaaagaaatggaagaacattccatgctcatgggtaggaagaatcaatatcgtgaaaatggccatactgcccaaggtaatttatagattcaatgccatccccatcaagctaccaatgactttcttcacagaattggaaaaaacctccacaacttgatgtgagttctggtggctaaatatggcagatgcctcttgagaatgctcctacccttttttcaaatttaattttattttggattcagggggtaattgtgcatattcatgacatgggtatattgcatactgatggggactgggcttctattgtacmcattattcaaatagtaaacattttacctgataggttatttatcaactctcaccccccacatcttaccctccctgtttctagag

SEQ ID NO: 604608 - DNA, 605 bp, Homo sapiens
aaaacaaattacaaaaaaaaattaggaacagaaagattcttctgaaatggtacagaytcacaataggttttcattttcttctcttaccaagcccccactaaaatgatagaagaaggaaaataacacagataaggtgttacaggtgtggcccacaaaccgtactgatgatagacatgattttttaaatgagaagatcatctcctaatgtcacgcactcccccacattgcaaaccctggaggtcctggcagtagtggcccacattctcacgtggatgctgtggctggggcttagtgggctgtgtggcagccacgccttcaggtggaagcctgtgctctctagcgcacttcagtccctttcaattcctaggctggtcacccagtccatgtcactcattagctttacttgctttgtcacatatgtttatgacttctggcatgaaagcacaatcctagaatgagtgagaagcatgtctgacaagagtaagcagcaatttctggaagtctggatgtggttagaggagatgtacctagtgaagtggagatgaggaagctgcagtccagagcagcagctctcagaattgttcattctttagaaacaaacacac

SEQ ID NO: 604609 - DNA, 605 bp, Homo sapiens
aaaacaaattacaaaaaaaaattaggaacagaaagattcttctgaaatggtacagactcacaataggttttcattttcttctcttaccaagcccccactaaaatgatagaagaaggaaaataacacagataaggtgttacaggtgtggcccacaaaccgtactgatgatagacatgattttttaaatgagaagatcatctcctaatgtcacgcactcccccacattgcaaaccctggaggtcctggcagtagtggcccacattctcaygtggatgctgtggctggggcttagtgggctgtgtggcagccacgccttcaggtggaagcctgtgctctctagcgcacttcagtccctttcaattcctaggctggtcacccagtccatgtcactcattagctttacttgctttgtcacatatgtttatgacttctggcatgaaagcacaatcctagaatgagtgagaagcatgtctgacaagagtaagcagcaatttctggaagtctggatgtggttagaggagatgtacctagtgaagtggagatgaggaagctgcagtccagagcagcagctctcagaattgttcattctttagaaacaaacacac

SEQ ID NO: 604610 - DNA, 605 bp, Homo sapiens
aaaacaaattacaaaaaaaaattaggaacagaaagattcttctgaaatggtacagactcacaataggttttcattttcttctcttaccaagcccccactaaaatgatagaagaaggaaaataacacagataaggtgttacaggtgtggcccacaaaccgtactgatgatagacatgattttttaaatgagaagatcatctcctaatgtcacgcactcccccacattgcaaaccctggaggtcctggcagtagtggcccacattctcacgtggatgctgtggctggggcttagtgggctgtgtggcagccacgccttcaggtggaagcctgtgctctctagcrcacttcagtccctttcaattcctaggctggtcacccagtccatgtcactcattagctttacttgctttgtcacatatgtttatgacttctggcatgaaagcacaatcctagaatgagtgagaagcatgtctgacaagagtaagcagcaatttctggaagtctggatgtggttagaggagatgtacctagtgaagtggagatgaggaagctgcagtccagagcagcagctctcagaattgttcattctttagaaacaaacacac

SEQ ID NO: 604611 - DNA, 615 bp, Homo sapiens
caacaaatataaagagaagttcctaaaatttccagaataatartcaccacaaaaggataagaatcagaaaggcatcagaccctccagaaatcacaagaagaactgcaagtcagaggatttatgtctatagaattttaagtcatacaatttttaacttagaattttgttgcagcaagactttcggtgaagtaaaaataaataaaaaatttggattacaaggaatcagaaaatttatttctacttatctttttgttatggtgttctctatgaaaataaatgatagttccaaaaaatggaatcgataattgaattcaagcacgagtaaaacatcttagagtaataatgtaggaacataaaacaaaaacagatggggagtagacacagatactttagaaagtagcgggagcacagaacactccagcagaaagttagagtgaaaaagggcaatgtgaggtgagatttttgacactgtatttggaatatctaataaacagtaaaggcagatgataccagggagaaaaagtaaccaagcttggaagatatcatagttatagaaataaagattgttttggagaaacaaacaattgtatacacagtaactaaagatgaaaactc

SEQ ID NO: 604612 - DNA, 587 bp, Homo sapiens
gatgaaataagcttaacaaatctccagcgaaatgattgagaacagatgcgtggtaagtatgccattgtaataattgagaacaacaaatataaagagaagttcctaaaatttccagaataataatcaccacaaaaggataagaatcagaaaggcatcagaccctccagaaatcacaagaagaactgcaagtcagaggatttatgtctatagaattttaagtcatacaatttttaacttagaattttgttgcagcaagactttyggtgaagtaaaaataaataaaaaatttggattacaaggaatcagaaaatttatttctacttatctttttgttatggtgttctctatgaaaataaatgatagttccaaaaaatggaatcgataattgaattcaagcacgagtaaaacatcttagagtaataatgtaggaacataaaacaaaaacagatggggagtagacacagatactttagaaagtagcgggagcacagaacactccagcagaaagttagagtgaaaaagggcaatgtgaggtgagatttttgacactgtatttggaatatctaataaacagtaaaggcagatga

SEQ ID NO: 604613 - DNA, 587 bp, Homo sapiens
gatgaaataagcttaacaaatctccagcgaaatgattgagaacagatgcgtggtaagtatgccattgtaataattgagaacaacaaatataaagagaagttcctaaaatttccagaataataatcaccacaaaaggataagaatcagaaaggcatcagaccctccagaaatcacaagaagaactgcaagtcagaggatttatgtctatagaattttaagtcatacaatttttaacttagaattttgttgcagcaagactttcggtgaagtaaaaataaataaaaaatttggattacaaggaatcagaaaatttatttctacttatctttttgttatggtgttctctatgaaaataaakgatagttccaaaaaatggaatcgataattgaattcaagcacgagtaaaacatcttagagtaataatgtaggaacataaaacaaaaacagatggggagtagacacagatactttagaaagtagcgggagcacagaacactccagcagaaagttagagtgaaaaagggcaatgtgaggtgagatttttgacactgtatttggaatatctaataaacagtaaaggcagatga

SEQ ID NO: 604614 - DNA, 615 bp, Homo sapiens
caacaaatataaagagaagttcctaaaatttccagaataataatcaccacaaaaggataagaatcagaaaggcatcagaccctccagaaatcacaagaagaactgcaagtcagaggatttatgtctatagaattttaagtcatacaatttttaacttagaattttgttgcagcaagactttcggtgaagtaaaaataaataaaaaatttggattacaaggaatcagaaaatttatttctacttatctttttgttatggtgttctctatgaaaataaatgatagttccaaaaaatggaatcgataattgaattcaagcacgagtaaaacatcttagagtaataatgtaggaacataaaacaaaaacagatggggagtagacacagatactttagaaagtagcgggagcacagaacactccagcagaaagttagagtgaaaaagggcaatgtgaggtgagatttttgacactgtatttggaatatctaataaacagtaaaggcagatgataccagggagaaaaagtaaccaagcttgraagatatcatagttatagaaataaagattgttttggagaaacaaacaattgtatacacagtaactaaagatgaaaactc

SEQ ID NO: 604615 - DNA, 598 bp, Homo sapiens
tttggggacttaccagcactggtgattttttactgtcatactccttgggaaggtgcatgtcttcatacttagggaaagaagccgcagattcattttgataatgacaatctacactgagaaaagtgattatgtttgtgagtgtgcacacagagaaaggatcaaccaaggtaatttcaaggttgcatagggattaaggatataacttacctgtgaagccaaattttatctaaatgaataaaactagttgaagtatctgttgattcaggaaatgcagaccctcttttctcctgagttaatgacagttatggggtcaggtaagaaagtgctcaccaccacaaaatcactgaatgtaagagggtcttaccctmtgtcaacatcttcatcttctagctgaagaaactgaagcgtatgggcagagctggcttcatgggggagagagctactctgttgtacagggcacacttagaaggactccatgcttaacttaatgctttgctatcactgccgcaaaattcttggtaagttttgaacaggggcccttcatttcattttgcactgggccctgcaaattttgcagccaattctgcgtagagggctc

SEQ ID NO: 604616 - DNA, 355 bp, Homo sapiens
ccgttgcagtaggtttgtacctggtgtacactcactgtataactgaggaattaatgaatatttttgctaccgcaaagccctgaggggtgaaaaggtgctatggtctgcatgtttgtgtccccccaccaaattcctatgttgaaatcctaactcccaagatgatggtattaggagkatgaggactttgggaggtgattgggtcatgagggtggatctctcatggctgagattagtgctcttataagaaagaccccccagctaggcatggtggctcacacctgtaatcctagtactttgggaggctgaggctggtggatcacctgagatcaggaattcaagaccagcctggtcaaca

SEQ ID NO: 604617 - DNA, 521 bp, Homo sapiens
gaggaaatgtggggcttggtatttaatgtgactgtttgtttcagctcttcattatttcaccgttagttatgtctctggaatgagagcttggctcttgacaggcagtgacatatgacacatcacacagcaaggaggaaatctaaagggagaccgcacttcaaggtctctggagtgatggcccccgataactagcaatcaagcgtcaggcatcaagtgtgagttcctggtatcaaaatgcatggaatgcagacagaattcagagggcaatatacagcttctaaaacatttatcaggaaataaactcatcctgaactcagaagcaagaaaaatgtcaacagattaaacataaagaaacaaaccaagaaagaaaatactaaagagaagacaaaaatgaaatacaatagaaataaartaaatttaattaccaaactggaaaaaaaagtttcttttagaagactaatgatataggaaaaaatattctacatactgatttttaaattttatgcaaataagcaggaaac

SEQ ID NO: 604618 - DNA, 470 bp, Homo sapiens
gaaaatgaaggaagagactgacgcccttaaaggaaagagattaaactcccgtcatatatgcagatggtatcatgtaaatatttaccttgaaaacmcagaagcattaatgaacaaacctctggaactattatcaaacttgagcaagattgccagaggcatgaacaacattcgaaacaagctgtggttcactaaagcagccataatcaattagaaaataaaataggaactcagaggacatttggagtagcttcagaaacttgaaaatgtctaggaatgaatctaccgaaccctgaagaaatcctttatgaagataaccctaaaattagactaaaggacaaaaaataaaacctgaacagatgaaggggttttccacttcgtaggaggaagtgtggtaaagatgtgaattcttccgtaattaaggcctcagtgcaatgcaaatcctaacaaatttttcaaaggcaatggacaaa

SEQ ID NO: 604619 - DNA, 336 bp, Homo sapiens
aagagacggcagataaggaggaatgtagacatactgttgtttmgacatattgttggtcacgtgctagtaaaggtttaacaaccaactctcagggagaggggagaaagcagtgatttatgtttccactgtggttgatttctgtcagtttgacaccagtgaacaccaagttgggatgaacactgataatcgcttctagtgagccacccaagccagctccaataaccatcgtctaccactgtgagaaggccccttgacattaacttgagcaggagaatcccagacggcagccaggaaaagtgtcacgatagtgtgtttataggtgataaccactgtcag

SEQ ID NO: 604620 - DNA, 611 bp, Homo sapiens
tgcaatcttttaatagacacatgaactaatttctctcagcaaagtcatattgacagcagagtttgtctctgggatgggagagaatagagatctttgcaatgtaagcagccctagagttgcaaattgctcttgtctaaaggcgtggggcagacaggagttgttaaaattacttacagtccaaccttgagtgagaaggaaaagtgtttcttcctgctcttctctctttcatgttgcatttggaagtaattcttctaaactgttatgtttctaaatggatggtgtttgtttatttgcaacytatcaatttcatatgttaatttttcaaccagtcagcttattaagcttccttatcttttcatttcattaaatgaattcagttcattctcttggatttttcctcattattttcaaatgatcttgtgtgctcctgctttaaaaattattgcacttttttccagcctctgcgatactttagctagttgtctcaaaccatgataaagaacaattggtgctcttgattattgtctgactttaataaaaatggctcttgtcttttaccattaatcattatgctaggttttgattcaatgtaagtactcgtaaattcctaa

SEQ ID NO: 604621 - DNA, 547 bp, Homo sapiens
aattcttctaaactgttatgtttctaaatggatggtgtttgtttatttgcaacctatcaatttcatatgttaatttttcaaccagtcagcttattaagcttccttatcttttcatttcattaaatgaattcagttcattctcttggatttttcctcattattttcaaatgatcttgtgtgctcctgctttaaaaattattgcacttttttccagcctctgcgatactttagctagttgtctcaaaccatgataaagaacaattggtgctcttgattattgtctgactttaataaaaatggctcttgtcttttaccattaatcattatgctaggttttgattcaatgtaagtactcgtaaattcctaatttgttaataacttttttcatgaatgaagtagaattttawcaattagattttcagcttctatcaagatattgctttttctcctttgaaatattaatagttacaatgtatttgtttacttctgaaagaaagctatttgtggtacatatacaccatggaatactacacagccataagaaaga

SEQ ID NO: 604622 - DNA, 606 bp, Homo sapiens
aaaattaatcaaagactggaggttaccttttacattttcaatgaaatgactgatttgaccagttggttgaatacttcctagataaatcacatacacacatattaatatttaaggcagtgaaaacttgaaatttatgatatcagtggaatgtagatagatgttcattttgccattaatccaacaacagactctcctgaaagcagaaaggaatcaactctggggtctttggagtaagggtgaggcaggtgacaggggaatgggaaagtacacttgacaaaagcagacagtgccgtggagactgcgctgctctctctaactttcaatagtaacgtttttgttcaatgaatccatggacctgcaatcctattaaatatccccatgtgagtaatctaygtagtcctcatttcctttgtctctcaaatgcaagaagatacatgagaaggagtaaatatgttaagaagaaactactttttgcttatgtttgatgcgtaacacacatttaaatttcatcttctccaaacacattaattttcaaggtgcagttcagttaaaattaatagagcaattaggtacactgtaaaccaatgtgaaggaaattgtgagtcc

SEQ ID NO: 604623 - DNA, 567 bp, Homo sapiens
atctcagaatatcaagctcccaaaacactttccagattattttacgagacattttgactagtttttcttttaactagcatgcaaataaaaacatgtagctcagctgacgacaatctgttttaatttttcagatcaccagctattctaattatccaacactcagcaccatccacccaccatgcttcattgaactgatggcrcagggatgtgtgtgtgtgtgtgtgttgtgtgtgtgtgtgtgtattatacatatagtatgtacattaataaataatttcttccatcaaacataatttcatgaagttttgtcaatcaggcatcttttaaagatatatgtatgccactgtcctcagaagaagttaattcattcttgcaaataacatccaccaataattttaatagtttataagaaattactcttatataaatagggaatacatcaaattgtttatcactcagatatatcctgtaaggaattagttataatgtttaaaaagaatgtgttacatttatattcgttttaatgacttattgtaataacctgacaaaattaggctattatgtttg

SEQ ID NO: 604624 - DNA, 567 bp, Homo sapiens
atctcagaatatcaagctcccaaaacactttccagattattttacgagacattttgactagtttttcttttaactagcatgcaaataaaaacatgtagctcagctgacgacaatctgttttaatttttcagatcaccagctattctaattatccaacactcagcaccatccacccaccatgcttcattgaactgatggcgcagggatgtgtgtgtgtgtgtgtgttgtgtgtgtgtgtgtgtattatacatatagtatgtacattaataaataatttcttccatcaaacataatttcatgaagttttgtcaatcaggcatcttttaaagatatatgtatgccactgtcctcaraagaagttaattcattcttgcaaataacatccaccaataattttaatagtttataagaaattactcttatataaatagggaatacatcaaattgtttatcactcagatatatcctgtaaggaattagttataatgtttaaaaagaatgtgttacatttatattcgttttaatgacttattgtaataacctgacaaaattaggctattatgtttg

SEQ ID NO: 604625 - DNA, 518 bp, Homo sapiens
  misc_feature 1, 2, 3, 4, 5, 6, 7, 8, 9, 10, 11, 12, 13, 14, 15, 16, 17,18, 19, 20, 21, 22, 23, 24, 25, 26, 27, 28, 29, 30, 31,32, 33, 34, 35, 36, 37, 38, 39, 40, 41, 42, 43, 44, 45,46, 47: n = A,T,C or G
nnnnnnnnnnnnnnnnnnnnnnnnnnnnnnnnnnnnnnnnnnnnnnnactccagaaactagcatgagccttgaggagagtatactcttccttgcacacttcttcatttgctgaactgccaatctggataccatgtattcatactttaaagccatttttttttaatcttactaaagtggtctcttttgaaagcacacaggtcttccagtgttttggatttgtgttttctctattaaaaccccaccagggcaagcttcactagagctactgatgttcgccgtgcacatgaactaaaaatgttgggtaacataaaatgaaaaacataatcagaggcagactggggacctgagtctgggttatcttcargatcaattcaccttgaacctgacagttaattgtgaagtgcataactggatggcagggtaagttacaatgatctttcccaaaattacagcctcatcttgaagagtgtttctttaattcatgctgatttgattaaccacaagggttctcatttac

SEQ ID NO: 604626 - DNA, 518 bp, Homo sapiens
  misc_feature 1, 2, 3, 4, 5, 6, 7, 8, 9, 10, 11, 12, 13, 14, 15, 16, 17,18, 19, 20, 21, 22, 23, 24, 25, 26, 27, 28, 29, 30, 31,32, 33, 34, 35, 36, 37, 38, 39, 40, 41, 42, 43, 44, 45,46, 47: n = A,T,C or G
nnnnnnnnnnnnnnnnnnnnnnnnnnnnnnnnnnnnnnnnnnnnnnnactccagaaactagcatgagccttgaggagagtatactcttccttgcacacttcttcatttgctgaactgccaatctggataccatgtattcatactttaaagccatttttttttaatcttactaaagtggtctcttttgaaagcacacaggtcttccagtgttttggatttgtgttttctctattaaaaccccaccagggcaagcttcactagagctactgatgttcgccgtgcacatgaactaaaaatgttgggtaacataaaatgaaaaacataatcagaggcagactggggacctgagtctgggttatcttcaggatcaattcaccttgaacctgacagttaattgtgaagtgcrtaactggatggcagggtaagttacaatgatctttcccaaaattacagcctcatcttgaagagtgtttctttaattcatgctgatttgattaaccacaagggttctcatttac

SEQ ID NO: 604627 - DNA, 599 bp, Homo sapiens
ggttctctgattttaatactggaacatttttccttactggaaattttatatcaccttcctctgcccccttagttttgcatagttgtgaaagcagattttttttatgtttgctcagataggctggatattactggaagtgttacaactcaagctaattactataatcattacgcaagaattgaaacggtgcttgttctggttctaagaggttattttcttgctttcaagttctggtttaacattttgtttatcctttaattgtacttgtgtctaaaaattgtttttattgcatcagctatattaatgggaaattcagaagaaagccttcaaacaagaatattattttagtcatcttttaggatcattcttagaaaccatttccctcccttggaccaccatttctacatattgttattgaaagtgggaagtttcatcttcrctatcctaaagcttctagggaaagctgtctttagttttgacataatattcattagccccagaagaaacccagtgctcagagaatcccaaatttacttgattgttcttaggtttggtagacacagcaagaaaaatgggtcatgctgctgtcaaagtagctg

SEQ ID NO: 604628 - DNA, 559 bp, Homo sapiens
ttcagttttgatgtaatctctttaggaccagtagtcagagagctacagatttacaactgactccttctcagggatttagttttgcagtgactaccctggacattcacagtggaataagtttattagattattaaagctggggaggggacaagttgaaaataatgttgcaagagagagcaaacagtttaagttatgaaatacatggaatccttgtttcttggagctgtatttcatgtattcaggagtcagggtgggggtgggggttgaattttaacaataacagtaacaagctctgtaaccttggacaagttacataacctgtctatatcttagttttctcatccacatatagggaaaatgaatgtattgttcactcatcacttaataatgaaactctcagaagtgaatcagtcaatttaatgacttgacaataactttggaaatgttaatgaaggaatayctgaaacttttagtataaaccagatttgaagacttttcttatttctcaccttttctgtgtgagaaataagatatgtctatacaataagacattcaacag

SEQ ID NO: 604629 - DNA, 544 bp, Homo sapiens
taatgaaggaatacctgaaacttttagtataaaccagatttgaagacttttcttatttctcaccttttctgtgtgagaaataagatatgtctatacaataagacrttcaacagttgaatgtcttaatatattattataaaaatggaggaagtaagaaatatttaaaatctaaacctgtcattttactaaggagacggaacaggataccaaataaatccaaccttaagtccatcatcacaaatagtgttgttgagattcctggaactaatgtttggggtttctgatgtcaagtattatgctctttctttatttttatagatgaaggagtgcacatgtgcagttttcttacatggatacattggaaaatggtgaagtttgggcttccagtgtacccatgaactgaataatgaatagtgtaccagatgaataatgaacaatgtacctaataatgaacagaataggttatttttcaaccctcacccacctctgcattttggagttcccagtatctgttattcccatttttatttccgtgtgtacccat

SEQ ID NO: 604630 - DNA, 601 bp, Homo sapiens
ttatttctcaccttttctgtgtgagaaataagatatgtctatacaataagacattcaacagttgaatgtcttaatrtattattataaaaatggaggaagtaagaaatatttaaaatctaaacctgtcattttactaaggagacggaacaggataccaaataaatccaaccttaagtccatcatcacaaatagtgttgttgagattcctggaactaatgtttggggtttctgatgtcaagtattatgctctttctttatttttatagatgaaggagtgcacatgtgcagttttcttacatggatacattggaaaatggtgaagtttgggcttccagtgtacccatgaactgaataatgaatagtgtaccagatgaataatgaacaatgtacctaataatgaacagaataggttatttttcaaccctcacccacctctgcattttggagttcccagtatctgttattcccatttttatttccgtgtgtacccatcatttagttcccacttataagtgaaaacaagtggtatttgattttttgtttctgagttatttcacttacgataatggcctccagctccattcatgatgctgcaaatgac

SEQ ID NO: 604631 - DNA, 611 bp, Homo sapiens
aaatgtcctttttaacgttaataatttaatgctcagacacataatattcaatatctgctttgcagaagagtaagctgcttttataaactcaagaactcctcaccactgtacattgcaaggcaggacagggcccacatttcactggtattggtcaaatatcaatctgcatggacaccctctccattcagttttcagttcttagggagctggcatttcattctttgagcaaatgaatgatgaaagatctaaarcatctattaaacttcatagtttgtctaggaaaccaggagaagaaggtgtgaattgatgatgaacctccctgtgggacaaataacttacgatctgctaaatagtagatagaaggctatggctaagaagtaatattacagtagttgtgtgcagatatttctcgcattgaaaaatgggttgattaatggcatgcttatggagaaagcgctaatctgggattctgttactgtatttaattaactagtcaaccattgaagatccatggagcttaggtctacaagtgagagataatcaatttctgattttgctctgtccacagctgaggagaagatggttgcaaacctgagaaagctcagccaaaa

SEQ ID NO: 604632 - DNA, 448 bp, Homo sapiens
tttgattcttttgcaaaacaaaatagaacccaacacacattaaaaaaataacagcctacacaaaaacagattcattacaggaatgcaattatagttaaagattaggtaaactataaatttaaataaaacaaaaatattatcatttcatttcatgaagaaataacatttgaaaaatctcaatacacttcctgaaaacagaaaaaaaaacagttgtataaaataggaacagttaaatattttacttgattaaaaaaatggtaaaatcaagccacgtatcatacttggaggagaaatgctcaragtggttctgtgtagcccagatcaaggtaggaaggctcactgctagcatcagcacttagaagtcttttcagaaggacttgccagagcaagcagacaagaaaaaaagaaagaaagaaagaaattgtaaaatgggaaatgacatggaaaa

SEQ ID NO: 604633 - DNA, 593 bp, Homo sapiens
ttctaatttgcatttcttcaactgctagtatagttgaatattttttctgtgtgattggaagaaatgtgaatttcttttttctcaattggccttagtctcctggaagctctttttaaaaatttaattatttttcttaaattgattttaagggctctttgcatatttagagtactaaccagttcctcatcaactattttatttttttcgtctgctaagtatcctacagttttaaaacctgcagatgcataagtgttctaagtagcactttgagaagttcacatttcctttatgcttctgcctttgaggtgtggtaggaagctttcaagaggaccctgaggaacaccagtaagaaccaccaagctaagcccttcccaggtcctgacctatagaaacagataatacatatttattattttatgctgctaaatttggaagcaatttgttatacatcaatagataactraaacagtggttatcctaagcctttcaaccaagtattatgtagaaagttaccctctatgttatcctagttatgttattgtttaattttatcagttgaatgtttaacccatttgccatgtactattgtgata

SEQ ID NO: 604634 - DNA, 618 bp, Homo sapiens
atactcaagggaactccttaagtaaagtttatgtactagttgaaatggtttggctctgtgtcctcacccaaacctcatctcaaattgtaattccacgtgtcgaggaagggaccagtaatccccacatgttgaaggagggaggtgattggatcataggagcagtttcccccatgctgtttttccttacaagatcttcttacaagatctgatgtttttataagtatttggaagttcctcctttgctcttctctctcctgatgccttgtgatgaaggtggctcytttctgttccaccatgattttaagtttcctgagacctccccagccatgtggaactgtgactcaattaaacctctttcctttgtaaattactagtctcaggaaaattctttatagcagtgtgaaaatggactaatacaataaatttgtaccaggagtggggcactgctataaagataacctgaaaatgtgggagcaactttggaactgggtaacaggcagaggttggaacaacttggagggctcagaagaagacagacagacgtgggaaagcttggaacttcctagagacttgttgaatggctttgaccaaaatgatgataatgatgtaaacaaaaaa

SEQ ID NO: 604635 - DNA, 618 bp, Homo sapiens
atactcaagggaactccttaagtaaagtttatgtactagttgaaatggtttggctctgtgtcctcacccaaacctcatctcaaattgtaattccacgtgtcgaggaagggaccagtaatccccacatgttgaaggagggaggtgattggatcataggagcagtttcccccatgctgtttttccttacaagatcttcttacaagatctgatgtttttataagtatttggaagttcctcctttgctcttctctctcctgatgccttgtgatgaaggtggctcctttctgttccaccatgattttaagtttcctgagacctccccagccatgtggaactgtgactcaattaaacctctttcctttgtaaattactagtctcaggaaaattctttatagcagtgtgaaaatggactaatacaataaatttgtaccaggagtggggcactgctataaagataacctgaaaatgtgggagcaactttggaactgggtaacaggcagaggttggaacaacttggagggctcagaagaagacagacagacgtgggaaagcttggaacttcctagagacttgttgaatggctttgaccaaaatgmtgataatgatgtaaacaaaaaa

SEQ ID NO: 604636 - DNA, 513 bp, Homo sapiens
ctgcacccccattgcatctaggaagtaactaacttgcttttgattttacacgctcataggtggaagggacttgccttgtctctgatgagactttagactatggacttttgagttaatgctgaaatgagttaagactttgaggagactgttaagaagggatgattggttttcaaatgtgaaaagacatgagatttgggagggttcagggcagaatgacatggtttggttctgtgttgtcacccaaacctcatctcgaattctaatcctcacatgtygagaggggacctgtaatccccacatgtagagggatggaggtgattggatcatgggggcagtttcccccatgctgttctagtgagttttcatgagatctgatggttttataagtgtttggaagttcttctttgctcttctctctctctctcgttgccttgtgaagaaggtggctgcttccccttctgccaggattgtaagtttcctgggcactcccaagccatgtggagctgtgagctg

SEQ ID NO: 604637 - DNA, 597 bp, Homo sapiens
ggtttggttctgtgttgtcacccaaacctcatctcgaattctaatcctcacatgtcgagaggggacctgtaatccccacatgtagagggatggaggtgattggatcatgggggcagtttcccccatgctgttctagtgagttttcatgagatctgatggttttataagtgtttggaagttcttctttgctcttctctctctctctcgttgccttgtgaagaaggtggctgcttccccttctgccaggattgtaagtttcctgggcactcccaagccatgtggagctgtgagytgattaaacctctttcctttataaattacccagtctcagggaagttctttatagcagtgtgaaaatggacaaatatactagttatttgtctcaatgcactaagacctacttacctctgatcaaaattcagaagaaaattttttcaatgtaaactaaaaacataaatgacatgctcaggataaaaatataacatcccaaattcaggagagttaaatgaaaacattatatgcaatcatgaaatctgaatttgagtcctaaatgttttcctcaccggatttgggaaagagctatgttcagtaatctca

SEQ ID NO: 604638 - DNA, 347 bp, Homo sapiens
aatattcctaaactttacatatacatgagataaatgtaaatggtctaaacatttctattagaaggcagagattgtaaaaatgactaaaaaagcaagacccaataatatattttttacaataagtgcactttaaatatacagacctaaatcatttaaaagtaagaataagaagatataargtatcatgctattatgaactaaatgtttatgctcactgccccctccccccacaaaaatcatacatttaaaccctaatccccagtgtgatggtatatggaggtgggggtctttgggaggtaattaaggtacattaaatcatgaagatagacttctaatgataggattat

SEQ ID NO: 604639 - DNA, 456 bp, Homo sapiens
actgatcatgcagaagaaagaattagtgagctggaagaccatctatctgaaaatacacagaggagataaagaaaaaaagaagaaagcacattacacaatctagaaaacagcctcaaaagggcaaatctaagagttattggccttaaaaggaaagaagagaaagagataggggtagaaagtytattcaaaggaataataatcagagaacactccaaatctggagaaatatgtcaatattcaagatgagaaaattatagaataccaagcagatttaacccaaagaagacaacctcatgtcctttaataatcaaattaccagaggctaaagataaaggattctaaaggcagcaagagaaaagaaacaaataacatacaatggagtgtcacttcatcacttcatctggcagctgactttcagtggaaatcttacaggccaggagaaagttgcatgacatt

SEQ ID NO: 604640 - DNA, 444 bp, Homo sapiens
ccattccacattgccaatttcctatgactgaattctggtccttctccttctcacagatgtccccaggcaaaattaggggttcctctggggcaaggatacatgtgggtgattagcaccctgtaacatctattgtcttaatttaagtctattttcatctttgtatcctaatagcctgccctggatgtgctattcagtaaggattcagtcagtgctttcagaacatggttgactcatgagttaattgagatcaaacatttatactcaacttgcctgttttaagcatggactttttttcaagagaatgtgctaaataattttcagacaacgyaaaattataaaaatttattaacaattctatagtgacatttcctgaaaatgagtagtcattcaagtatgcaggaccttgactttgaagattgtaaatttctaaggactggcgaggtg

SEQ ID NO: 604641 - DNA, 459 bp, Homo sapiens
atgtttctaaaaataattatgttaagtgacttgttctttgtaatttctgtgatgtgcttatttctgtggccagagaaaaagcctgggcagaagcgtctccrttccctccctccacttcatggaagtccattcctgagctctcctcagcctggcttctctgaccccctccctggcacggcccctctctccctctgctccggcgggccctctgtgccctcgctttggcccctctcttcctttctttcctgtggtctcaagtctctcctgcacctcttggtgggtgcatgtgcctggcctccacgtctgcatctccagtcctgacctggaggttccataccacacctgactcctcacatccacactggaatcctaatcttgattgttctctctaggctggcctctgttattcccgttgattcctgttttttttttttttgttttttttttgttttttttgtt

SEQ ID NO: 604642 - DNA, 459 bp, Homo sapiens
atgtttctaaaaataattatgttaagtgacttgttctttgtaatttctgtgatgtgcttatttctgtggccagagaaaaagcctgggcagaagcgtctccgttccctccctccacttcatggaagtccattcctgagctctcctcagcctggcttctctgaccccctccctggcacggcccctctctccctctgctccggcgggccctctgtgccctcgctttggcccctctcttcctttctttcctgtggtctcaagtctctcctgcacctcttggtgggtgcatgtgcctggsctccacgtctgcatctccagtcctgacctggaggttccataccacacctgactcctcacatccacactggaatcctaatcttgattgttctctctaggctggcctctgttattcccgttgattcctgttttttttttttttgttttttttttgttttttttgtt

SEQ ID NO: 604643 - DNA, 459 bp, Homo sapiens
atgtttctaaaaataattatgttaagtgacttgttctttgtaatttctgtgatgtgcttatttctgtggccagagaaaaagcctgggcagaagcgtctccgttccctccctccacttcatggaagtccattcctgagctctcctcagcctggcttctctgaccccctccctggcacggcccctctctccctctgctccggcgggccctctgtgccctcgctttggcccctctcttcctttctttcctgtggtctcaagtctctcctgcacctcttggtgggtgcatgtgcctggcctccacgtctgcatctccagtcctgacctggaggttccataccacrcctgactcctcacatccacactggaatcctaatcttgattgttctctctaggctggcctctgttattcccgttgattcctgttttttttttttttgttttttttttgttttttttgtt

SEQ ID NO: 604644 - DNA, 477 bp, Homo sapiens
ttctttcagcaatgttttgtagattttagtgtataggtcttttacctctctggtttagtttattcctaagcattttattcttttttgatgctattgtaagtggcatcattttttaaatttcatttttggattcttcattgttaatatataaaaagcaacttctttttgcatgtcaattctggatcctgcaactttagtgatttcatttattagttctaacagtttgcacatgtatgtgtgtatgtgtgtgtgtgtgtgcatagtcyagaattttctacatacagaattacatgttaacggagataagtttacttcttccttcacaatttgaatgtctttagtttctttttcttgtctagtttctctggttaggacttctagaactatgttgaatagaagtggcaagagtgggcatcttgccttgttcctgatctcaaagaaaacacattcagtttttcactgttttctccatggagt

SEQ ID NO: 604645 - DNA, 568 bp, Homo sapiens
agagttttctcccagctgtgctgagctctgccagcttggggtagagggagggacggtagaatgtaaaggcttttcttatccatttcagtgcagatattcttgaagttgcattccctgagggtactgcagcttcttcattggtttctgaagttctcgtaaaggtgtttggttcatatgttgctttttagacagtgtctttttgggagagtgagggatgggacttactattcagttatcctgttaccatcccatagactggagtttagtttaattttaaccagatrttctgcaaactttcctggattttccagaggacaccattgctctcattagctgtcattcctatttgtggacaggagaaactgagtaaggtgagaaacgctgagctaaaccaggttgctttaaagtaaaatgtttaataaaccagtgttagccttagaccatcaaagataaattttagtaaaagatagttaaaagaacaggtagagagatctgaaaccttcagggagtaatataagtagaggactgatcaaggtcaaataatgaaagaccaacagaaacggaattg

SEQ ID NO: 604646 - DNA, 552 bp, Homo sapiens
catagatgtgagcgagacaagctgagatcagaagtaccaccagctgaaaccagtctaaaccaccaatctacaggctcatgagctaaatgcatactaattaaagtcagtaagtttcagagtcaattatcactcagcaattattatagcatagataactgatataactaagaacgcctttagggcaaacattttctcttatcaatctatctcaarttcagtataatttctcaatacattattttgcatggaaattgtgaatctccttgtacatctcactagactggaaactctttaaagacacagacttcatccaagtcaccactgtagcctaagtggctggcatttattatctgtttaacagatttttggtaaacaaatgaatttatgagtgaatgagaaaagggatattttttacaaactggaaataggaagaaaaatgtctgctctcaaggtgcagacataagttttagttctccttaagttgtaggtcaagaagcaggaaattgcctgtccctttcttagcctttgaaacacagggaacccttccctatt

SEQ ID NO: 604647 - DNA, 546 bp, Homo sapiens
gaaataaactagaatggctaatgcccagaaagaataatgtgaaaagtttatcctgggaaggtttaccgggtaaaagggtagaaaaatatagtagctttcacatagaaaaatgattatgcataatttgttgtctatacagttgacctctgaccaatgggtggtgttggagatggttgcattaaggcatccttaatacgactcataatttaacataaattggattctaataattccaagaaaaggaaaatgagatcttacaacacattttgatacatcaagaagatgttccaacagaaacaggaatagcatctgcctgagatgtctaagatgtcctgagtttagttgatgattttttagggtcttctaaatatgtctccttttccaggaaggcaggaagaatttacagcctcaaatagcaaaatcctgggtaacctttaaaatatcccactggaagcatttttaaactttttgaacagagaggtgtttcttagtcctaaattakagcttccattcaccatgcgtaatgtgacttagacaattacacca

SEQ ID NO: 604648 - DNA, 529 bp, Homo sapiens
taactcttagtgtggtctgctgtatagttctagattacctcattrggacaattttaacgagtagaaagaaatacagtgtggaggggtacttactgagaaaaaaagaatatcagaaataaaaatgctttagaaattcatgattattttaattttctaagataacttaatggaattatacatctctatcatgccaaaggatgcacataaatttagtaatgtgatctcagattaacacactttttcaaaagaatagagacaccaactttaagcatcttggaatagatgctgctttaaaagtgttgaaaatagaaaaaaaaagaaattgtattatgtggatatttccataattttaaaagatcagtagcataaacacatttcttgagtctgcatcttggtcatcttaccagaggcaagaagtccaaatttcacacaggtgagcactgaatagtttaatcttgcatcgcagatggctccaggtcagtggccaataatgatttgtaacatgccaatgatggtgtaggaaagccag

SEQ ID NO: 604649 - DNA, 529 bp, Homo sapiens
taactcttagtgtggtctgctgtatagttctagattacctcattaggacaattttaacgagtagaaagaaatacagtgtggaggggtacttactgagaaaaaaagaatatcagaaataaaaatgctttagaaattcatgattattttaattttctaagataacttaatggaattatacatctctatcatgccaaaggatgcacataaatttagtaatgtgatckcagattaacacactttttcaaaagaatagagacaccaactttaagcatcttggaatagatgctgctttaaaagtgttgaaaatagaaaaaaaaagaaattgtattatgtggatatttccataattttaaaagatcagtagcataaacacatttcttgagtctgcatcttggtcatcttaccagaggcaagaagtccaaatttcacacaggtgagcactgaatagtttaatcttgcatcgcagatggctccaggtcagtggccaataatgatttgtaacatgccaatgatggtgtaggaaagccag

SEQ ID NO: 604650 - DNA, 589 bp, Homo sapiens
acattaagtacagtttcatcattattaatctgcaatgatataaatatgacttgaatttatctaaacattggttggaggcagactgaatttgttgactttgcatttcccccagtctttcttctcaatagaatatttctagtattgtgtacacaggtttcccaataaatagttattaattatcttccaaatgtgaaaacaaattgaaggtcaggaagggaagaggaaaacaaatttaagtacaaagactgttttgcacagctattgttcatgtcttggaaaggaatcttcttaccctgctttgatgtagcccagaactgggccagaatcttggagacccccaaattcttycctgttcagaaagcaatgacttctatgaattataagattcaactaatatgctaaaaagaaaatctggcaagtctattgctatttgtttactgaataatgaacaaatagctatataactaaattacatttaacatgttcctttttttcccacatggatttacaattgtatttcagcgaagagtccagttcttgaatcctgtaatttctaagaacatagcaatatctcacttttcatgagtgt

SEQ ID NO: 604651 - DNA, 589 bp, Homo sapiens
ggggcacacacttcaatccataacaaaraatgccatagaaaagcctcaatcctttctacatagagcaatttagacagaggataacattaaatatggaaatagacattacagggacttagtgaaatgaatgctggggtggatgaggtctcatgtgcagtggccccagtgacagtgaaacagacgcatctgcttgatgcaaatcagggttcccagggacctaccagggaggagacatcttgagagttgaagagcatgtggaccttggtccagtgagcaagaagctcaactccaacatatctaagaggaaactcagatttctgaataaacttgcacttttcctgaatttcctggagccaatggaaactgagtctgccctcctccatcgtatctgtttccattgccgctgcccagcttcgggccttactttcagatgccagtgccctggccggcagtctcccatgacgtttctggcagtagcatcttccctttatcatgcttcctgcacatcactacctgattcatctccttagcaccagtttgttcattattctgcagaccacaaaccttcaatgtcttcccaccaccttcc

SEQ ID NO: 604652 - DNA, 341 bp, Homo sapiens
aattcacccctcagggcattttgtatcattacaactgagtggtggtggtggtggtggtggtggggggggtaaggggtggtgatcctgccaaataggctaggaacactgttaaacatactacaatgtataaaacagcctttccaccacaaaaaaattattcagttcaaaatatctataatgccaagattgagaagccctgatctaatccaataaaagtaccatactcatcatagattatttatgtaatataacgtaataggcaatatcatatttttgagaccacacactgagttcaaaggtcttgaatytaaaagcacaacaaagaattatatttctggcca

SEQ ID NO: 604653 - DNA, 641 bp, Homo sapiens
gcctgcatgtgtagacagtgagacagagacagagatagagaagcagagagagagaagaacagagattttaagaaattagctcaagaaattgtggaggctgggaagccagaagtcctcaaatcaggctggctggctgcagattctagtaggagttgaagtcttcagtctgaaagcagtctagaggttatggaggctgagaagttctatgatctgccatctgcaagctggagacccaggaaagccagtggtataattcagtctgagtcccaaggcttgagarccagggtagttgatggtagaaatcccagtctgagagcaggagaagttgaaatgagatgtcctatctcaagtgtttaggcagaaaaaagggggcagattcgttgatcttccatcttttgtttttttcaggccctcaatagagtggatgatgacacccgcattgaggaggacaatctaccttacccagtccgccaattcaaatgtcaaccttatttggaaacactttcatagaaacacccagaaataatattcaatctgggcaccccatggcccagttaagttggtacctaaaattaactatcacacatggcaaaatgaattttggagatatgattgagttaaattttttgaaatggggagat

SEQ ID NO: 604654 - DNA, 519 bp, Homo sapiens
ttgtgttctacctaagaaacctttgactacccagggtcataaatcaaaaccacaatgagatatcatctcacaccagtcagaatacctattattaaaaactcaaaaaacaacagatactggtgaggttgcagagaaaaaggaatggttatatattgttggtgggaatgtaaattagttcaaccattgtgaaaagcagcttggagatttctcaaagaacttaaaacagccttaccattcaaccccgcgatcccattactggatctatatccaaaagaaaataaatcattctaccataaagatacactcamttgcatgttcatcgcaacactcttcacaatagcaaagacatggaatcaacctagatacccgtcaacagtggattggataaagaaaacgtggtacagatacaccatggagtcctatacagccataaaaaagaatgaaatcgtgttctttgcagcaatgtggatggagctggaggccattattctaagcaaattaatgcaggaacagaaaacc

SEQ ID NO: 604655 - DNA, 591 bp, Homo sapiens
gatggagctggaggccattattctaagcaaattaatgcaggaacagaaaaccaaatactgcatgttctcacttataagtggaagctaaacagtgggtactcatgaacataaagatggcaacaacagacacyggggattagcagagggaggaaggagagaggcgggcgagggctgaaaaactgattattgggtactaggctcagtacctgtgtgatgggatcaagcatatcccaaacctggatataccatgcaatatacccaggtaacaaatctgcacatgtacacctgaatctaaaataaaagttaaaattattttttaaaaaagagaaaaaaatgaaaaagaaaaaaattcaaataatgcccaaaatctaaataataccattcctactgaaactattctgaaaaattgaagaggagggactcccccctaactcgatctacaatgacaacatcatcctgataccaaaacctggcagagacccaacaaaaaaagaaaacttcaggccaatatccttgatgaacattgatgcaaaaatcttcaacaaaatattagcaaacagaatccagcagcacatcaaaaagttaatcagt

SEQ ID NO: 604656 - DNA, 527 bp, Homo sapiens
gttcttactcataggtgggaattgaacaatgagaacacttggacacagggtgcggaacatcacacaccagggcctgtcaaggggtgggagcctgggggagggatagcattaggagaaatacctaatgtaaatgacgagttgatgggtgcagcaaaccaacatggcacatgtatacctatataacaaacctgcatgttgtgcacatgtaccctagaacttaaagtataataaaaaaattcaaatgtctccttgagaatggtggctttctaagggaactaggagttttctaataaatggctaaaagagagacattcatggaatgatgtagaggatatatttttgagagtggagtataaaaatcagcatgaagcataggagatagaaaygggaagtagtagcatgtcaaaggcaagcctccattcatttaaaccagcacctagatcaagaaagagaccatcgccagagccccaggaggcctcctgcaaacctccttcttatcattaactcatcaaaagtaacttttaccc

SEQ ID NO: 604657 - DNA, 617 bp, Homo sapiens
gtatttttttaacattgctttcaactagggacccattttaacctgagcctactttgagcaggtttgtaaagtagttgaacctgatgttctcttttgctgttgatgtatccaggccatttgcagggaacagaaagagagaatgtcagaaatgcacccttccctggcttaagcagaaagcagatctttttcacaggtctatgtatgagaagaatggagaaaaggaagggagccatttaagcccatgtctctggacatcagcctggtatgtcttaatagcttgtctgttacagagtgtcatgtaacttgtaggaaagaaaacatytctcaaacacctgtaagtacattccatggtacagatgtggcatcttttcccacaagggaccactgcaaagctaaaatcaacaattaagaacagctgcagtcttgcgaccagctgcccttgctaacccccttgtacagagggcaaggagaagggtaatcaacacagaagactgaaattatcctttccttgcattacttttccctcttgtgaaatgtgctggaacttcccccgtatgctgaagatgtgttcctaaggctgcacttctgtttacaaaatgtcctgcagtgtttccaag

SEQ ID NO: 604658 - DNA, 618 bp, Homo sapiens
aaaaaatacaaaaattagctgggcgtggtggtgtgtgcctgtagttccagctactcaggaggctgaggtgggagaattgcttgaacccaggagttggaggttacagtgagctgagattgtgtcactgcactctggcctggatgacacagtgagaccctgtctcgataaataaataaataaataaataaataaaattatmctggaagtcctatttagtgcaataacatgagataaaaaaataaaagtatacaaattagaaaggaagaaataaaattgtctttattcatagatgacatgattgtctatatagaaaatctcaaagaatcaacacaaaaactcctggatctaaaaagcaattatagcaagattgcaagatatgaggttaataaacataaatcagttgcttttctgtatatcagtaataagcaattggactttgaagttaaaaaaaaaaccctttataataacatccaaaaatgacatacttagttatatatctgaaaaaactaggtataagatttatatgtggaaagccataaaacactgatgaaagaaatcaaagaaggtccagataaatggagagatattctgtgttcatgactggattgctaaaatgtc

SEQ ID NO: 604659 - DNA, 641 bp, Homo sapiens
gaggggaggagggactgtcactgggcagcatccagagggacttcattttcagtgtgtgagggagacagccaggcggggcgtgcacattcagggaataataaacagtaagagggagagggcagaagacaggtggagtgtgttggaggtgggtacactaaggcaaggcaggaggctctaaaatttgtaggctggatgatgggaagtaagtgcagtgtttaaatttttattgtaaattagttatttactccatccattgattcctctagccagtgttggagggaccagcttggcacgtgcttctgggctccttcctggggattgggtgcaagaatggctgccctcagagaatgaatcacaatctggtaggaaagtaaaaacatatgcacattgggaatatttaaatagcaaggctgtgtagtttayaccaagatgagtgatccagacaatagatgctgtagacaaggaagacagtcaaaatatctgtcaaaatttctaacagccagtactgcacaggcatcagactggattgcgatggatgccaatcccatcagaacacactgtgggagtggacaatctgtaccccatgaatattagccctggtatggcagcattgaagagcaaaggtctctagggactggggc

SEQ ID NO: 604660 - DNA, 641 bp, Homo sapiens
gaggggaggagggactgtcactgggcagcatccagagggacttcattttcagtgtgtgagggagacagccaggcggggcgtgcacattcagggaataataaacagtaagagggagagggcagaagacaggtggagtgtgttggaggtgggtacactaaggcaaggcaggaggctctaaaatttgtaggctggatgatgggaagtaagtgcagtgtttaaatttttattgtaaattagttatttactccatccattgattcctctagccagtgttggagggaccagcttggcacgtgcttctgggctccttcctggggattgggtgcaagaatggctgccctcagagaatgaatcacaatctggtaggaaagtaaaaacatatgcacattgggaatatttaaatagcaaggctgtgtagtttataccaagatgagtgatccagacaatagatgctgtagacaaggaagacagtcaaaatatctgtcaaaatttctaacagccagtactgcacaggcatcagactggattrcgatggatgccaatcccatcagaacacactgtgggagtggacaatctgtaccccatgaatattagccctggtatggcagcattgaagagcaaaggtctctagggactggggc

SEQ ID NO: 604661 - DNA, 584 bp, Homo sapiens
gattattcactattgtgttcactttcttgtttcattgaacatatttttaatattttatccagtttttctagtttgcttttgtagatggtttggtagtaattacctagtctgcaattattggaataagaggcctcagaccttttaatttcaacaaagtttttttccagagaagtgagcagctatttcaggtctgctggagtcctaaggtagagtccaattgggattgagagctgaccatctggccagtctgcaagttcttgcagaagaacctactgctgaggactgaggagtgtgggagtgagagggtgcttgttctgaggggagaaggagccggaaatgacagccttgctagagaactgaatcatggttatcagagaggaggagaaagagtgagaatgctgccacatactcatagttctttcctgttcagatcccattcgatttgtgaagtgtgacattgagagtctgttaaaattgaaatgcacttttataaaaattctgyaaaatatggagccataggctctctatcaacaggtgggagtgagaggcagtgaaatctgagttatgactgttaaggtgactgt

SEQ ID NO: 604662 - DNA, 369 bp, Homo sapiens
tgaaagaaaaacaacttttcttctgccttcattcctctcttcccatctcccccagggaggccttcactatcttcagagcttcagctcttgcctctaagctggtggttcccacattgtgttctcaaatccaatttccccgagagtgctagtattatatctatgactgtctagctgacattttcacctagatggcccaaactcacccctcaatattctaggctcaccataaccttctagtaacattttgagggttcctatgtgtcccrgaccatctcattaaatttagttatctgttcacttccaagtataagactttttattatgaatgtcgttccctttggcctttttacaatagaaaccttattgggt

SEQ ID NO: 604663 - DNA, 543 bp, Homo sapiens
ggctggttgcctgagtctgcctgtgattctcagtggaacactccatgtrccaggaagcagtaagatgctggctgtctctcacctagtcaagctgcttagcagtgaagaaccatcctcttctccttgttaccataattcctgagagccattaccacttgcttatttcatcctctctaatgtcaacccttggctactacagatgccataaggtcagtcacaccttgcttaggccaaggaatacaacataactttaaaagttaatcatgcatggaaaataccttcagattcatgtgtccccttatgggcagtggctgcattaacattgcatcataaaaacaagctagataagatcatactagaggtggtcttaggggcagggggctggacccggcctctcttctgggatgaacctagcatctggtgtgtagaatccgtagtcaagtgggataatgtaaataaaagcaccttccaagctgcaaagtattcactgaagaatattttgatttcatgatggtcctccacaaagcaaggataaaggaccaa

SEQ ID NO: 604664 - DNA, 488 bp, Homo sapiens
gttttggagccaaaattattgtgtttttgaaatcttctgctacttagcctaggctggtcatttcctctaagtctytctctgtgtgtcaaagtagataattatgtccataggcggggttgttgcagtgcaaatgcgatataatatctacaaagtggctaatatataggtattcaatcaatggtgatactttgattacctctcagtgcatttccagatataagcgcatatgaataatttgttaaaatgttgtttaagtcaagtgatttagatgaatgtaaactggcacatattctgtggcagatataattaaaatgtaatgattattgacagtattatttatttatttagagataggtcttactatgttgtccaggctagagtgcagtggctattcacatgattaatcatggtcctccacagtcttgaactcctgggctcaagtgatcctcctgcctcagcctcctgagtagctagaaataaaggtgcac

SEQ ID NO: 604665 - DNA, 575 bp, Homo sapiens
agaaagttctgtagatgtttgtcaggcctgtttgatcaactgtcaagttcaggttctgaatatctttgttagttttgtgcctcaatgatctgtctaatactgccagtggggtcttgaagtcttccacttttattgcgtggttatctaagtctctttgtaggtttctaagaactcgttttatgaatctgagtgcctcttgttaggtgcatatatatttagaatagttaggtcttcttattgaatacatcctttactatcatgtaatgcccttctttgtcttttttgatcactgtcgtttaaagtctgttttgtctgaaattgaactatcaatccttgcttttttcagttttctgtttgtttggtagatttttctccatctctttacttacaacctatgggtgtcattgcatgtgagatgggtatcttgtagacagcatacagctgggtctttcttctttatctaacttacccctctttgccttttgagtgagacrtttagcctatttagtttcaaggttaatattgatatgtgcaggtttgattgtatcagtgtgtcattagctagttattatgta

SEQ ID NO: 604666 - DNA, 590 bp, Homo sapiens
tgtcatttttacattaagatttccaatacatgaatacaaaatgccattccatttatttgatctcctataatttccttcaatgacattctgcagtttttgtgtacaagtcattcactacaartgaaagaatgcaagactacaagtctttcacttaaacatatacctaaatattttaatctttttgatgttgttttacatggaactgtttctatagttttgttttggaattattccttattttataaacatataattaattttatgttcatgttatatcctataaatttactgaatccattcattagtctttaatagaatttttatggattacttatttttgaagatcatgtcatcttgaaatagatatagttatattcatttcttttctactttgataccttttttttcccttacctaattgccctggtcaaaacctctagtatattgttgacaagaaatggtgagagtgggcatctttgtcttgttccccatctcagggatgaaatgctcagtattttccagtaagtatgattttagctgtgtgttttcctagatgtcctttacaagattgaggaaatcccatttgattc

SEQ ID NO: 604667 - DNA, 550 bp, Homo sapiens
gattttcattaatcacctttggctcggtgcttttgtctactgtaaaacaatttgtcatttatttcatcagaattgacacaaattctggaaggatggaaagatttttaagtctgtgttagtttctctttggagaaacatgtcagtgcagtggacttccataggttaatttattcccttatgctttagagtgggtccagagcacagccttttctatagcgaggtggaggtgacagaggaacaggaattgaatgccttgccctcaacgagtttgtaatgtttcatactgctgatttatttctgttaaaaagatactaaaattcatgattatgattwtgacccagatgtaatatgctggggctcttgattttcaactaaattaagcacaatactattaatatcattgtttattattattactttgctgacagggacagaggctaaaagtgaattctgacacttgtaaatatccatattttaggatactgtttaattatgatctatttctaatccaaatgctccagtggaatgtttgaataagaatcagcagctc

SEQ ID NO: 604668 - DNA, 617 bp, Homo sapiens
attgtaaaatctaaagtacaaggcccttgacaataaattttaagtcataggttttataattatgggtgtatttagtaatgtccagagtagtttacatccaagacaaaaaagcatattcttccaaatagtgtgaaacataccctacaaaagaagaaaacctcagagtcagataacatcaagagaagagtccctgtccaatcaggcacaaagacattggrccttctgaagtcattctatgtgttagcattcttactgtaagtggaaaagaaaacatggacttatatcatggaaaagaaaattatgaacttatatttaaaagagtaggttactaattcaagacttccccagtgaaggcatcacagaaaggagacagggtatatatacaatgtggaaacagcagtaaagacatactttctttactgtataagcagtcatgtaatttgtcattgatagaaataagttgtctgtggcgtatttgcattgcaaaaattcatatcattaaattatacaccatcccaaaataatagatactgcctgtaaaacagaaagtattcctctctaatattcattaccttatataaaaaaatagtataaaacattttcagcaggagatatgt

SEQ ID NO: 604669 - DNA, 564 bp, Homo sapiens
agtcttggaagccagatcatggagtaatcagtattccataataagtttgtgttttacctgtgaatggttatcagccttttagagactatcagtaagaaagtgatttgatgagatttgcgtcttagaaagattaggtatgtggcactggggaggataaacaggaagtatgcatgactaaaatcagtaacatcgtttggaargatattgctgtagctcgtgtaaaagatgatgaacatcaacattttagtgagggaatgctactgagccgttgaaatcttcccagtaagacatagaaatgattgttaatattatttaactatagttaatttacatttaaataggcacatgtgactaatggctaccatcttggatagcagaagtccagatcttaagggagatgtgtggtctggcaacgtagattttataggatattttaaaacatatgtatgtttttcagggaacattttaaacagcaagtgatgataagaatagggagagtgatagataaaggaaagagccacaagcaggaccctggtcatatcaatatttcagctttagactgaa

SEQ ID NO: 604670 - DNA, 570 bp, Homo sapiens
aaagaacatcttttcttttgaaatcagagggaagagtaatagattgatgcgtattttctaactctcagggtggagtttcaaactttgactattacacattattttctaaaagatatgttttctcaatcccatgaggtaaaaatccagcacaataacattgtttgccctgcctataccattsccctcgatatgtgtgttttaaaaatgggaatataccattgcaaagaagatgagaaaataaaattaaaaggaaattaaaatggagatagcgcttagttttttatgtggtacttgttcaatctaaggggcttgaattttgaaaataagtataatcttgatttccatctttaaaatcctaggataaaatgtcaaaatattttagtaaagtagtttttgttgttgttgttgagtaatgtaatcttatcttcatggtttacagaaatgtccctacaacttctcaaagaaatttagtagttcattgcactttgacatcatgaaaacaagagaaaattcatgttaatttttgactggactaagtcacaaaacagttcagtcatatgcaatattttt

SEQ ID NO: 604671 - DNA, 647 bp, Homo sapiens
tgttgagtaatgtaatcttatcttcatggtttacagaaatgtccctacaacttctcaaagaaatttagtagttcattgcactttgacatcatgaaaacaagagaaaattcatgttaatttttgactggactaagtcacamaacagttcagtcatatgcaatattttttatgtaacacttgcagctactgaaacgtatgtattgtttcttgcctaaggaaattagaaaaagatctggaattcagagtgatagcaaaaatcagaccattatgcttttatgtggagtatatgttatgtgaaagattattgagataatatattagaacaatatcaagaaaaaattctaatcggattgcgtgtgaatgcactatttggggaaaagttatttcatattagattccagacaaagtacaaatgcaacttacatatgtgtgatagtatcttaataacaaataggagttgtttcttactgtgtcatgagattacatccgtaaacatgtatcttttcacagtcaactagggaagaaaataaaatgttgttcagggaaattcatttcctctttagtaatacatactaaagaatggagatctctctatattaaatattcctttcctttgtgttccttggaactcaaattcactgttcttt

SEQ ID NO: 604672 - DNA, 608 bp, Homo sapiens
ttctacttctagatatacactcaaattaaatgaaaatatatgtcacacagaaatttgtacgtgaatgtttatagtagcactgttcataatagccaaaagttggaaccaacataaagtccatcaacagatgaatggtaaaatcaaatatatatatataatagactgtcattcagcaataaaaatttgaagcactagttcgtactacaacacagatgaaccttgaagacattattctaagttagggaagtcagacacaaaagaccacatgttatgttattccatttatatgaaatacacaaaataggtaaatccatgggaaaagaaagtagatcagtgattgccaggggttggatggggctgagtgcagwgggtaagaattgggagtgactgctaatgactatggggtttcttcttgtggtgacaaaaatgctctgaaattagaggtctgtgcaacatgatgactacattaaaaactattaaattgtgtattttaaaagggtgagtcttatggtatgtgaattatattttgatcatttaaaaatgatatgttaatttttttaaaagttgagataagcatgcttcagcacataaatgtggtaaaatttccc

SEQ ID NO: 604673 - DNA, 608 bp, Homo sapiens
ttctacttctagatatacactcaaattaaatgaaaatatatgtcacacagaaatttgtacgtgaatgtttatagtagcactgttcataatagccaaaagttggaaccaacataaagtccatcaacagatgaatggtaaaatcaaatatatatatataatagactgtcattcagcaataaaaatttgaagcactagttcgtactacaacacagatgaaccttgaagacattattctaagttagggaagtcagacacaaaagaccacatgttatgttattccatttatatgaaatacacaaaataggtaaatccatgggaaaagaaagtagatcagtgattgccaggggttggatggggctgagtgcagagggtaagaattgggagtgactgctaatgactatggggtttcttcttgtggtgacaaaaatgctctgaaattagaggtctgtgcaacatgatgactayattaaaaactattaaattgtgtattttaaaagggtgagtcttatggtatgtgaattatattttgatcatttaaaaatgatatgttaatttttttaaaagttgagataagcatgcttcagcacataaatgtggtaaaatttccc

SEQ ID NO: 604674 - DNA, 608 bp, Homo sapiens
ttctacttctagatatacactcaaattaaatgaaaatatatgtcacacagaaatttgtacgtgaatgtttatagtagcactgttcataatagccaaaagttggaaccaacataaagtccatcaacagatgaatggtaaaatcaaatatatatatataatagactgtcattcagcaataaaaatttgaagcactagttcgtactacaacacagatgaaccttgaagacattattctaagttagggaagtcagacacaaaagaccacatgttatgttattccatttatatgaaatacacaaaataggtaaatccatgggaaaagaaagtagatcagtgattgccaggggttggatggggctgagtgcagagggtaagaattgggagtgactgctaatgactatggggtttcttcttgtggtgacaaaaatgctctgaaattagaggtctgtgcaacatgatgactacattaaaaactattaaattgtgtattttaaaagggtgagtcttatggtatgtgaattatattttgatcatttaaaaatgatatgttaattttttwaaaagttgagataagcatgcttcagcacataaatgtggtaaaatttccc

SEQ ID NO: 604675 - DNA, 542 bp, Homo sapiens
tgattattttcctgcattatatttctaaagcttctgtactttttctttcttaactcatcattgaactcatgatttatgagctcagttatagaaaaaaaaattatctaaaagaagttttgcttggacaagctatttgatacggcattcacctgattgaaaagtaccacaacgactttcacaaccatctgggcatattcttaggatacagagttttgcccattaattcacttagctgttaacgtctttcctactagtgaagatgggcagctgacgatcttaaaaatgaaaagatactctcctcctgctctgtcaaagagacagactgtgcttcctgtgagtggttctttacttagccttgcctttgggtctagaacatcagctgccacctgcagatgcacctgcaaacctaattttatggtaagaagtaagatatttctggcatctcggggttttgygcctcaactgtcagaagaataatttagctggactcttaggagatctgtggttgtggggccttttctcaatgcatcctactcagtctt

SEQ ID NO: 604676 - DNA, 554 bp, Homo sapiens
tgccgggcgtgctctcaccccgcacggcacccgcgccgtcagtcctcggatcccatcacttcagcccgaagattgcaactttgcaggtaaagaggatgtcgcctckgggctccgttcgaccggagctacacctcgccttctttctgggatctcggttaagtttcctaagctgcctgggaagccggctctcttctgggaggcggacatccctgcggggttaggagttcaaaaggttctggctatgtggtttctcttcaaggctcaggaaaaaaacctgtgaagctttcggtgcttgactcgggctgagcaggagtttgggggtgctcctcagtcttccgccgcactcggctttaaagcaggggagagggcgaggagtgaacccccggtgtgacttatatggtaaacaaaggagctgcagccacgccgtggtgctggggaatgtggccgtttttagccttttatgcatttggggaaaatggagatctcgggggcatctgggtgcatataagtgaggccttagctctccggcacttaaagtagggtaacgaaggaag

SEQ ID NO: 604677 - DNA, 554 bp, Homo sapiens
tgccgggcgtgctctcaccccgcacggcacccgcgccgtcagtcctcggatcccatcacttcagcccgaagattgcaactttgcaggtaaagaggatgtcgcctcggggctccgttcgaccggagctacacctcgccttctttctgggatctcggttaagtttcctaagctgcctgggaagccggctctcttctgggaggcggacatccctgcggggttaggagttcaaaaggttctggctatgtggtttcycttcaaggctcaggaaaaaaacctgtgaagctttcggtgcttgactcgggctgagcaggagtttgggggtgctcctcagtcttccgccgcactcggctttaaagcaggggagagggcgaggagtgaacccccggtgtgacttatatggtaaacaaaggagctgcagccacgccgtggtgctggggaatgtggccgtttttagccttttatgcatttggggaaaatggagatctcgggggcatctgggtgcatataagtgaggccttagctctccggcacttaaagtagggtaacgaaggaag

SEQ ID NO: 604678 - DNA, 554 bp, Homo sapiens
tgccgggcgtgctctcaccccgcacggcacccgcgccgtcagtcctcggatcccatcacttcagcccgaagattgcaactttgcaggtaaagaggatgtcgcctcggggctccgttcgaccggagctacacctcgccttctttctgggatctcggttaagtttcctaagctgcctgggaagccggctctcttctgggaggcggacatccctgcggggttaggagttcaaaaggttctggctatgtggtttctcttcaaggctcaggaaaaaaacctgtgaagctttcggtgcttgactcgggctgagcaggagtttgggggtgctcctcagtcttccgccgcactcggctttaaagcaggggagagggcgaggagtgaacccccggtgtgacttatmtggtaaacaaaggagctgcagccacgccgtggtgctggggaatgtggccgtttttagccttttatgcatttggggaaaatggagatctcgggggcatctgggtgcatataagtgaggccttagctctccggcacttaaagtagggtaacgaaggaag

SEQ ID NO: 604679 - DNA, 454 bp, Homo sapiens
tggtctccaaagtcctacctatcggtcctgagaaagctgctacagtgctatacagggacccattaggacacaattcattaaaaattcccagagaaaggaggctaggatggcagaactcagatttccttgcttcctcccatggacccagtagagacactctcaaggtaratgtagctcccaaatttatctaaaacaaacatgtagtgaggaaactcacagaatctcctagagcatccttgtatggaagccagcctgggcatgacatgaatgcatttttagctgggatgcctgattttcttttttctggcagggggatggagtctcactctgtcacccaggctggagtgcaatggtgcgatctctgctcactgcaacctccgcctcctaggttcaaacaattttcctgcctcagccttcctagtagctgggactacagaaatgcaccacctcaccc

SEQ ID NO: 604680 - DNA, 586 bp, Homo sapiens
ctttcaaatgggttctaatagaaacgtattagtttgtgaaaaattacgagacatttctattcaatacagttactgtcttttgtttggatgcatgtctatcaatttctggaatgctaaacaagtttaaaatccaaagacttgggtttgaataaccactgacagctacagctgagtgaccttgagaaagtcactgattttctctgaactttgattccttaataagaaaataggaataataatttgatgtttgatatttgtggtaggattaattaaaataatttctagcactgtgctcagttcagcttttattttattttaaataaagaaaagatggtaatcataatgyagttttgaaataaattatctcagtaacattatcttagtgtgcacaaaatataattgatgtgtgtaaatatcgatgtcaccacagatatatataaaagctacgacattggctgatttttaatattttttggcataagtgagtagcagtcttacctgttggtggaattatcccaggagacatgagaccagggacagaatgcggcatgatgtgagagttctctggggaggtgacactttgagt

SEQ ID NO: 604681 - DNA, 419 bp, Homo sapiens
gtaacacagttgctctgcatgattttagtctttctaaatgtgatagtgactatattttctctttctacagtttgggttcacctgaaagttggtgctggaggaaagcaaaccattatgtagttcttaagttgtttgtttataatataactttctttgtcttcaaaaagaatcactctgggccaggcgcagtggctcacgcctgtaaacccagcacgttgggaagccaaagcaggcagatcacctgaggtcaggagttcgagaccagcctggccaacatataatgaaactctgtctctactagaaaatacaaaaattaggtgggcatggtgatgcacgcctgtagttccagctacttgggaagctgaggcaggagaactgcttgaatccrggaggcggagattacagtgagccaagatcgt

SEQ ID NO: 604682 - DNA, 565 bp, Homo sapiens
gaaggaaaagttgagctttgctatagttgccacgaggccctcagctggtgtcacctctgaggccatctgcctctgtgatggtccttcagagctctcaagattgaggcagggaagctcagccctcgtgccccagcatcgaccaagttattggatgttggttgtgttagggttagggcataaccttaggcaaagcagctctcttcagctaaggttggatcccggagagaaactcggctgtaagctgttggcagccaacccttctggcagctgagacatctcctgtcccatccattcctccatcctgatgcggggatctgaatgtcccaccaccacacctactacgcagtgcaacatggaggagttggccttaaatttccactgaactctaaaaatcttttaagactctgatgttagtagcagaaaatarcaaatacatggtatcatcatcatcatcatcatcttcatcatcatcatttttaagtttaaaaatacatgtaatactgaggttgtttttgttgttttgtctacagataatagaaaaaaaatgtgtgagagagaggttttt

SEQ ID NO: 604683 - DNA, 593 bp, Homo sapiens
gggacctgacagtggagtgggcagggactcctggcagctctgcctgcttcccttggccctgatttcatgacagattcctgtgccagrccaattaattttaagacttccctgcaatggattgcagaagttggagaaaatgaggaggccagaaaggtggttcttccctatttctaactttcctaaagcaagaggaaaatatataacggaggaacctcaggatcttttctgttcattcttgagagtaaaaatacaatttttaaaaaataaaatgaactttaaagatttgtttgcataacatcaataaatggtggtggactacctcagagtccagttggttatttgtgcaatagatcatgcatctggcactttttttttttttttttgatgagggagagagcttcctgaaacagagaggacatggagtaagctggaggtgtgctcctgaggttgcttgcagatgttgtctacacatgagtggaagtagcaaggtcagaggagaccccttcatggaatatcagtctgtatcttggatgttgttattttgagccccagaattaggaaaagtcaagatattatgggctggttttactgaa

SEQ ID NO: 604684 - DNA, 570 bp, Homo sapiens
attgtctataatatcagactgagaattatctgaaagtgaggctatacatcataaatacttttataacctaaatattaagatacttagtaattgcagttgattatgtctagaatgttggactgattcatataagaaatctattaagaacttaagcagatggatgaaaataagtgaccagtctatttttaatccatattataccaatagattcatgtagatttcttatatatgccccattaacttttacaaaagaaggaagagtaagtgaaggaatcaaaatacatgggatgaattgtcatttttgataatttcatatatgccttgaatttagagaacctagaattcagtcttcccaagtcacttttttacttccttaatatgtaggctaggaaatctctcgtaataaaatgctgttgaatacaatgaaaccataaagaatacccaaatggattgtctcgttcgttcagtggctgcattttttcaaatactgttatacctgatttttaagcagtgggaaaataaatatatgtaacttttattaatcccaygtatttctcataaactgtaaaa

SEQ ID NO: 604685 - DNA, 578 bp, Homo sapiens
ttcacatatttccatttatcttttcattcactcagtaagcgtttacttgatgtctaataggttttagggtctcctctagccagagataaatcttaagtgcttttgtcttatattttcagactatcagtccttttaaacatttatttaaaaagtcatggtaggaagcaccttgaatcccatgacataaaacacatttattcgtaggttaatccactactaattcagtcatttagcaaatatttatggaaaacctcttggaagccaggaactggccttggtggtgaaaacccagcaaagagcagagcagagatgtttcctgcactcatggtagttcttattcttgtatacatgatagaggtttaagctagagaaaggactgacagtgttggtttggaatgcgtgtgtgaacaggagagaaggagaggatgccattgaaaggttatggtggagattttcttgagtgtgtaaactttgaattggttgaygcttcttaacaaacctgtgcccaggtaaaaattcacaacactccacgaaggagcttaggctctagaatgggatatttgtttaaaaaatagtcc

SEQ ID NO: 604686 - DNA, 359 bp, Homo sapiens
tgtcccctaccatgctacattgagcttctattgtcctctttcaggtgtttcccttaatgacatctggctggagtacatactttcagtcaatttgggttatttgcatagttttattttagtatttaacacttggttctttttatcttattggctcatctcggttttggtttaaagtccattttctcccttttccccaaacaggtaagagtaaaatccacaggaactgcatgatcgtattggagtggttgggctctcrtttctgtttggctcttccagtcatgcagtgaggaggacagaaatggaaacacagatttttttaacgatgaccttcatttcctgggccaagatctgatcctcta

SEQ ID NO: 604687 - DNA, 633 bp, Homo sapiens
tataaactagtgaaataagacactggtcagataaaragataattacaaagcttttctgagtattatgaggacaaatataagagcttggaaaggcaggctggcgtagtagctcatgcctgtaatctcagcactttgggagggcaaggcgggcagatcactggaggtcagcagttcgagaccagcctggccaacatagtgaaaactcctctctactaaaaagtacaaaaattacccaggtgtggtggcatgctcctgtaatcccagttactcaggaggctgaggcatgagaattgcttaaacctgggaagcagaggttgtggtgagatgagatcatgccattgcactccagcttgggtgagtgagcgagactctgtctcaaataaacaaacaaaaatagagaatggaggggcaaataaattatgaagagtagggtgcaaatccaggtgtgtcagcatttgtgtttgcaggggtggccaacgcatggtacttgtctgtagtgtggaagaagtggagggcaatgtgcagtagtgatgctacagagagatatgtatgtgattatgcttatggacaaataatgctgttatctggaagatggggcacaggatggaaaacaagtttggggaagaagacaaa

SEQ ID NO: 604688 - DNA, 612 bp, Homo sapiens
aacaaccataacaacaaccataaaactggagactaaggagagaaaaaccttgagctaagtggcttccagctycaactcatcctctcacccactctcttttacatgactttttctcttttattagtccccatttagaagctccttcataagtcttcctaggaagtcaatacggtaatctataaccttttatttttagcatgattgctcaaaacaatgatatttttcagacttatttaaagctatttttaaagcatttggtgaggggggttactaaaaagaaaatgagattgaaataatctgaatatttcaaatatctccaaatcaaattcatggtaattttgccatttaaaggtgaagcaatttggacttgttgatacagtcccaggtagaatttctcttagaaaatcccaaaatggaaatcatgtttccaatctgaccccaggccttttgcttacaatgagtctagggaacctcttccctgaagacaatgattgttctttctgaggaattggaggcacatgtacacttatgtcgagccatcattttcactagttaatcttgcccctggcttggctggggaaaatttaacatacagcattggggaattacaga

SEQ ID NO: 604689 - DNA, 630 bp, Homo sapiens
atataatcctttttttctcttgatgccaatgcattacttacgtaagattaatcaaacacatccaaaagataaccagcaacttcacctcacagctagtgaacagactggtctgagcaagattttcctgaaaaatcttgttatccacacccatatttactcttgtttctcctggaggcagaatgttgctctcggatacaggctgggtgtttatcctgtatttattcagatctagaagaaaaaacagtatatctatgttgcccatcccattccctcataaaatttagaaamgctgttttatctctttttgcctatattaaatcctcttcagttagccagtaggttgaggaaagtgcagacgaccagggtttaaattgccttactgcctagtcacactgctgagatctaccgggtaattacccactggccattgcgtttcacaccgtgcccagctgggcttgcctaacagcaatggccttctctttgttgacagttatttaaagatgtggtatcataagcctatttgtcaaagtgacctaacattttattctacgagtatcactggaagtaacctttagtccataaattagtgattctgtaactgcacagatagaactcatgttatagacactc

SEQ ID NO: 604690 - DNA, 543 bp, Homo sapiens
aaaaaatagaaaaataagaaaaaagaatattgcttggttgggaaaccaaataatctgtcataaacaagatgtgctttgcaaaggcttcactgtagagacatttgtaggaccatgcaagatttgctatcattatggttcatatgatcagaattggaatcttaaaattacctgccacccccttatcctcgtcacttcaaaatgtaagtggaagcattatctctgagccatccatcctggaaccttctaamgttctctttccaaaagaaggactgggaaacatgttggaagctcttggagtttccatttaagaagaaaacaaacagaaatcacacaaattcacactcaagtgctactctaaatgggaagaacatatttcaagaaataaacactatttgactaatcagacaaaaaagaaaattcatgtacatgtttttgtggggatataggttttcactacttttatgtatatacttagagtatattactggttccaactttatattcaacatttttgaacaacgctagactgttctctgaagaaga

SEQ ID NO: 604691 - DNA, 543 bp, Homo sapiens
aaaaaatagaaaaataagaaaaaagaatattgcttggttgggaaaccaaataatctgtcataaacaagatgtgctttgcaaaggcttcactgtagagacatttgtaggaccatgcaagatttgctatcattatggttcatatgatcagaattggaatcttaaaattacctgccacccccttatcctcgtcacttcaaaatgtaagtggaagcattatctctgagccatccatcctggaaccttctaacgttctctttccaaaagaaggactgggaaacatgwtggaagctcttggagtttccatttaagaagaaaacaaacagaaatcacacaaattcacactcaagtgctactctaaatgggaagaacatatttcaagaaataaacactatttgactaatcagacaaaaaagaaaattcatgtacatgtttttgtggggatataggttttcactacttttatgtatatacttagagtatattactggttccaactttatattcaacatttttgaacaacgctagactgttctctgaagaaga

SEQ ID NO: 604692 - DNA, 543 bp, Homo sapiens
aaaaaatagaaaaataagaaaaaagaatattgcttggttgggaaaccaaataatctgtcataaacaagatgtgctttgcaaaggcttcactgtagagacatttgtaggaccatgcaagatttgctatcattatggttcatatgatcagaattggaatcttaaaattacctgccacccccttatcctcgtcacttcaaaatgtaagtggaagcattatctctgagccatccatcctggaaccttctaacgttctctttccaaaagaaggactgggaaacatgttggaagctcttggagtttccatttargaagaaaacaaacagaaatcacacaaattcacactcaagtgctactctaaatgggaagaacatatttcaagaaataaacactatttgactaatcagacaaaaaagaaaattcatgtacatgtttttgtggggatataggttttcactacttttatgtatatacttagagtatattactggttccaactttatattcaacatttttgaacaacgctagactgttctctgaagaaga

SEQ ID NO: 604693 - DNA, 543 bp, Homo sapiens
aaaaaatagaaaaataagaaaaaagaatattgcttggttgggaaaccaaataatctgtcataaacaagatgtgctttgcaaaggcttcactgtagagacatttgtaggaccatgcaagatttgctatcattatggttcatatgatcagaattggaatcttaaaattacctgccacccccttatcctcgtcacttcaaaatgtaagtggaagcattatctctgagccatccatcctggaaccttctaacgttctctttccaaaagaaggactgggaaacatgttggaagctcttggagtttccatttaagaagaaaacaaacagaaatcacacaaattcacactcaagtgctactctaaatgggaagaacatatttcaagaaataaacactatttgactaatcagacaaaaaagaaaattcatgtacatgtttttgtggggatataggttttcactacttttatgtatatacttagagtatattactggttccaactttatattcaacatttttgaacaaygctagactgttctctgaagaaga

SEQ ID NO: 604694 - DNA, 542 bp, Homo sapiens
gttaatttctaagtttattccattgtggttagagaacatactttgtatgatttcaatgcttttagatgaattgaagatttgatatgacctagcataggttctatcctggagaatgtttcatgtgtcttgagaacgtgtgtgtgtgtgtgtgtgtgtgtgtgttgaggtaaacatttatacaataacatctataggtttaaggtacacaattcaatggattttgataaaatacacacttgagtaaccaccacctggatcaagatgcatcatscaccctgaaattccgttgtgtccgtttctgggacatatgcaaccctccctcacaggcaaccatcattctgatttatactaccgtattttagtttgcctgtttatgtacttgaaataaacagactcacacagtatgagctctttcgtgtctggctttcgttttcattccaactaaaatttttaagattcatccatcttggctttagttttcaggttttgcaattgtgaggatagttgatagaaacctacctgtacatatcttttgtgtaccc

SEQ ID NO: 604695 - DNA, 453 bp, Homo sapiens
tatatgccacctcttttctgctaagagatgttaccccacacaaaagaactttgactttttagaggaatacttactttgtagagcrgggaaaataacttttgtttgaagtgatgtgtctggtttggtgataataccagcattaatatcttaattatgtactaaatgtttgcttgtgtgaagcctcttggagatctaatgggtgtgcataattccttcttaccattccaaggcatcttgaaatttttatgcactcaaatcacccatgttcaaatctaccttttaagaggaatgggatgtaattcacctaattgagggtctgtttcagaatatggttcaaattctcactctccacaaatatgccataactctaaccctctggagtgattggtgggcctatttccaaaatttagccaaagattcttgtggcagagtttgttaatatcatttggaatg

SEQ ID NO: 604696 - DNA, 453 bp, Homo sapiens
tatatgccacctcttttctgctaagagatgttaccccacacaaaagaactttgactttttagaggaatacttactttgtagagcarggaaaataacttttgtttgaagtgatgtgtctggtttggtgataataccagcattaatatcttaattatgtactaaatgtttgcttgtgtgaagcctcttggagatctaatgggtgtgcataattccttcttaccattccaaggcatcttgaaatttttatgcactcaaatcacccatgttcaaatctaccttttaagaggaatgggatgtaattcacctaattgagggtctgtttcagaatatggttcaaattctcactctccacaaatatgccataactctaaccctctggagtgattggtgggcctatttccaaaatttagccaaagattcttgtggcagagtttgttaatatcatttggaatg

SEQ ID NO: 604697 - DNA, 595 bp, Homo sapiens
gttagctcgactggtatctttgtttcaagtctcacaagccccaaatcaaggtgttggccagctgggctcctacctgaaggctctggagaaaaatctagagcctggcaaaatttcgttgtgtgcagttgtgggaactgtttcctgtttccttgctagctgtcaaccagggcctgctcttagctcttagaggtctgtccctgggcttcacatgtggtccttgcatcccagccagcaacagcactgcaggtcctgctcacactcaaaatccccatgacttcctcctgggctgcaaaattcccttcttttaagggctcatgtgattagattgaacccacctgaaaaatccaggcactccacatatttaaggtccatagtcctgattatatctgcaaaacctcttttgtcctgtactgtaayatgcacaggcttcagggatcaagtcctggatttttttttcttttttttttttttgaggagtaggagggtgggagcattttcctgcctattaaagtctcagaataaggccaggtaataaattgctatgcatagccagtgcaccttgaaggacattcacctttggatgtcctacaagaat

SEQ ID NO: 604698 - DNA, 544 bp, Homo sapiens
tctataaatgttttatccactattttttcttcagagctattatttatgtatatgctggggtttttttttttttttttttttttttttttttttgagatggagtctagctgttgcccaggctggagtgcagtggcacgatctcagctcactgcaagctccacctcctgggtttacaccattctcctgcctcagcctccgagtagctgggactgggactacaggagcccgccaccatgctcagctaatttatgtttttatttttattttttttttttgtattttagtagagatggggtttcacggtgttagccagaatggtctcggtctcttgaccttgtgatccgcccacctcggcctcccaaagtgctgggattacaggcgtgagccaccgtgccyggcgtatatgctggtttttgccttaattgcctccatccttacttttttatttaatattattcataaatatttgttcaaataatattttgtgaatactgccaacttgcatcttatcttcttctattgccttaccgtaacttctttgagt

SEQ ID NO: 604699 - DNA, 635 bp, Homo sapiens
caattcgctcaagaagagtggagggaaaagtaatctgaagtaaaggaagccaaagatgtgtgtgcttagtgcattggccgtattgtatcatgagaatggataagcagagtaacaaatgcatgagccgagcagtgaagacactgataaaatagaatgtggagagctggatattccattccatttcaggagtacttctcaagttcccaggctctccctaatgccatgacacagcagggagttttggtcacagaccgtgtctcagagacgcgcctccmtttataaagtgtgtgggagactgggggcaagactgcagaggttaatgtacaattactctttctccacacctctagcaaaaaccaaaatctacgttgaaagaccctttttatactgtctggatgcaataagttgtcttaaattccctagataaaatatgctaactatgaagccttgagtaacattttaaaatcacttatttgaatatcttgatgtaattttcaacatttgttacgactcgtgacactaagtggttaggaataagttgtgattgcagagttaatttcagagtggtgctccacaaggctgcttcatgattattaacaccaccactgcttaccctggcaagggccggactgggc

SEQ ID NO: 604700 - DNA, 532 bp, Homo sapiens
atttactcccacatagtctactcacctgaaagcgccggcccataatcatcgtgtttacactgcctgtctgtacttacatgatactgcagctcacagctcagaactgctcacacccccagtacttccagcccagcatccaggccttttcatctcccgtcaattatctctaccttagtttcaacagcttagcaagctgagtccttgagacacagagtggctttatcagaataactccaagtgcgcagaggacgacagagagacaagaggaatgcttctcagacttactggtttcctccarggatttgcttgactctaattattggaagacctccaggggccaagactgcctgagcttgtcaagggattcctctttctaccagaggacaccaccacccagacactaaatcagatgagagctaacattttcacagcaataaatctctggaacaaaagaatgagttggaaaaccttcattgcattcttttttggtggaaagaaattatttataagaactaaattaggtagagcaaaa

SEQ ID NO: 604701 - DNA, 666 bp, Homo sapiens
cagcccagcatccaggccttttcatctcccgtcaattatctctaccttagtttcaacagcttagcaagctgagtccttgagacacagagtggctttatcagaataactccaagtgcgcagaggacgacagagagacaagaggaatgcttctcagacttactggtttcctccaaggatttgcttgactctaattattggaagacctccaggggccaagactgcctgagcttgtcaagggattcctctttctaccagaggacaccaccacccagacactaaatcagatgagagctaacattttcacagcaataaatctctggaacaaaagaatgagttggaaaaccttcattgcattcttttttggtggaaagaaattatttataagaactaaatkaggtagagcaaaaaattttttctactccctatttttctcacttctattgctagtaaaagcaaatgccttttatagtctgcaatttctttcttttgtttttgtgtgtatgtgctattgagttattgttttcgttgtgttgcgaagttttttcagaaaactctcttttgaatatcagatttttaagtctaaaatctggcatacaagataacaaatgcttttgcttttaggtatcacaatatgctcagatgttttgggaatatgtgatcacagtt

SEQ ID NO: 604702 - DNA, 578 bp, Homo sapiens
caaatttatgttcagttcttagaatcaggcttcctgtaaggtggtcgcatctttattcccctctccagctactctgacagcgtgtgctcaggtttggagctccctaactgaagtctggggcagaaggggggtacttgtttctcttcctccccagagcgtttctcattctgtgacgagagcaagaacaaaggatcaaattaaatggacttacattagagcaaaattaattaatacacaactaaatgcttaattcgcatcccaagtatttgtagccttagaagacggtgttaacctaaagattgacaatgaaatacctggaaagmggttcataaaaaggcactaaaactcctgttaacatacattaaagggcatagacgatgcctttctcaacggtatgaacagttaatcctccagacaccttatatcccagtccaaccaaaatgtcactggtatttttgcaaaaaccaagctctcgattttggcaggatggatttattaacgattctgcctttaaagtaactgattaataccatataaaaagcaaatctttgtgaaagcagcatccaagcctgcaagtc

SEQ ID NO: 604703 - DNA, 566 bp, Homo sapiens
gcccaagtgaaaatgattcttcacttctagcctccacaactgtaagagaataaatttgtattgttttaagccactacatttgtggtaatttgttacatcagcaataggaaactaatgcacattcctgttttcagaggggttcttgaaagttcctgttgaacacttgccaacacttggtagtctcggtgttttcatttaaccattcttgtgagtatacmtttcattgtagtcttaacgtgcttttctctgtttaaagatggaatttagcaatgtttacatgtttaatatccaaatgtatatcctcttttataaggtgcttatttatgtttttacccattattctattgacttatctttcttttattgatttgtatcttattgattttctcttattgatttggaaattctataaataacctttcttggttatataaataaggaatataggtttgaatattgatgttgatataaattggtaataatctctctttacatagctgtcttttcattcttgtaaggtttatgttgatgaaaatatatcttaaatttgatgtaattatgtttat

SEQ ID NO: 604704 - DNA, 566 bp, Homo sapiens
gcccaagtgaaaatgattcttcacttctagcctccacaactgtaagagaataaatttgtattgttttaagccactacatttgtggtaatttgttacatcagcaataggaaactaatgcacattcctgttttcagaggggttcttgaaagttcctgttgaacacttgccaacacttggtagtctcggtgttttcatttaaccattcttgtgagtatacctttcattgtagtcttaacgtgcttttctctgtttaaagatggaatttagcaatgtttacatrtttaatatccaaatgtatatcctcttttataaggtgcttatttatgtttttacccattattctattgacttatctttcttttattgatttgtatcttattgattttctcttattgatttggaaattctataaataacctttcttggttatataaataaggaatataggtttgaatattgatgttgatataaattggtaataatctctctttacatagctgtcttttcattcttgtaaggtttatgttgatgaaaatatatcttaaatttgatgtaattatgtttat

SEQ ID NO: 604705 - DNA, 559 bp, Homo sapiens
ttggaaatctggggaatttttataatagcagagccaaccatctttcttgaatgaactagactaggcagttgacctgaggcaccttctgtttcaggatgttacatgcctttgaaggaaagaaaatagctaagttaaatacatatattcgatgactactttcttaaaagtaatcctgattttccattagagtrgtattagggatgaacaaagttcaaagccaaaggaagtctttagtgtgttaatttgtttaaagtagattctttctgaagaacctactaaggctattgcagccacattcagcttcaacacagaatcaagtgaacaggtaacattgttcatagctgatgagtgactctgaatttaattttattctctggctaacttctaactcattgtcttatatgacagaaccatttgcattgcagggctaaactgaatgtcacaatgacattcaggaatatcagtgtcactgtcacttgtccatatttctatgtggcctgctgtcctgacgttttgctctcaaagtctctgatgcttcctttttgggtattttagaggc

SEQ ID NO: 604706 - DNA, 597 bp, Homo sapiens
ggtgactcatgcaacatctcccatcttctatgccttatagtaagtgccaatgtcagaatgctgacattaaataaaactctatcattcagttgagagttgctaagaaccacaattaagatgggaaaaatgccataggcatttagaaaaaagagagaaatataactcttggaagactgkcctccattgggcagtcctactttcttactttcacttcattcttaaaacgcctgatgcatttgtttgtttgtcataaccatagtatgacaatgttgattctcctgtcccctccccccctccctccccttcccttcccttccctcccctctctctttttgtcctttctcttccctgttcttcctttcactctgcctcctctcctctcttctcttttctcctctcctagtttttttctctttcgtccatctctctctctctctctaattctgtctctcttgtgaagtctctgtctttgtctatcacaatctctatccctatcactatttctccttttcctctcgaagtgtttgcatctctttatttaaacgtaagacaacctctctgtataccgtctacctctctggccacactttttagtct

SEQ ID NO: 604707 - DNA, 621 bp, Homo sapiens
attttttatgactagcagtactgagggagaagggctccagcttacaatgggaattcagtgtttataaacaaggctcgatgttttgatccatttcagaaaaccattaaaaaagaaagacagtacttctctttttttttggatgtgatttgrgtatatgcttggagaaagtgggattttcaaaatagaaatgtatatattcccaattccatattatacatcttgtattttaaatgagccatggaaatctcctttctcacttctgacagacagcacaaaactgttgaatgaactttgggttagcattccagagacgcatatttccatccagctctgccatgaaactggctctgtgacactgcggagtgggtgaggagggcatctctgcctcagtttattttttccatctggttggtctgtaaatgaatgggaagttggattacatgatcgctgggggtatcttcttacattcaaatacatttttcacagcagttcaataccctgtcgtattgtggattttcattaccacagccttcctccttgaattctcatacttttgagtgttcatactttcccaccaagatggcctgtgtttatccctaatgcattcctgggcactatggt

SEQ ID NO: 604708 - DNA, 621 bp, Homo sapiens
attttttatgactagcagtactgagggagaagggctccagcttacaatgggaattcagtgtttataaacaaggctcgatgttttgatccatttcagaaaaccattaaaaaagaaagacagtacttctctttttttttggatgtgatttgagtatatgcttggagaaagtgggattttcaaaatagaaatgtatatattcccaattccatattatacatcttgtattttaaatgagccrtggaaatctcctttctcacttctgacagacagcacaaaactgttgaatgaactttgggttagcattccagagacgcatatttccatccagctctgccatgaaactggctctgtgacactgcggagtgggtgaggagggcatctctgcctcagtttattttttccatctggttggtctgtaaatgaatgggaagttggattacatgatcgctgggggtatcttcttacattcaaatacatttttcacagcagttcaataccctgtcgtattgtggattttcattaccacagccttcctccttgaattctcatacttttgagtgttcatactttcccaccaagatggcctgtgtttatccctaatgcattcctgggcactatggt

SEQ ID NO: 604709 - DNA, 474 bp, Homo sapiens
gaattcagtgtttataaacaaggctcgatgttttgatccatttcagaaaaccattaaaaaagaaagacagtacttctctttttttttggatgtgatttgagtatatgcttggagaaagtgggattttcaaaatagaaatgtatatattcccaattccatattatacatcttgtattttaaatgagccatggaaatctcctttctcacttctgacagacagcacaaaactgttgaatgaactttgggttakcattccagagacgcatatttccatccagctctgccatgaaactggctctgtgacactgcggagtgggtgaggagggcatctctgcctcagtttattttttccatctggttggtctgtaaatgaatgggaagttggattacatgatcgctgggggtatcttcttacattcaaatacatttttcacagcagttcaataccctgtcgtattgtggattttcattacc

SEQ ID NO: 604710 - DNA, 524 bp, Homo sapiens
gaaagtgggattttcaaaatagaaatgtatatattcccaattccatattatacatcttgtattttaaatgagccatggaaatctcctttctcacttctgacagacagcacaaaactgttgaatgaactttgggttagcattccagagacgcatatttccatccagctctgccatgaaactggctctgtgacactgcggagtgggtgaggagggcatctctgcctcagtttattttttccatctggttggtctgtaaatgaatgggaagttggattacatgatcgctgggggtatcttcttacattcaaatacatttttcacagcagttcaataccctgtcgyattgtggattttcattaccacagccttcctccttgaattctcatacttttgagtgttcatactttcccaccaagatggcctgtgtttatccctaatgcattcctgggcactatggtgacctgaccttttatggctcttgcaacctgggtagctgccatttgtagcaatcaataaaaggtgaa

SEQ ID NO: 604711 - DNA, 524 bp, Homo sapiens
gaaagtgggattttcaaaatagaaatgtatatattcccaattccatattatacatcttgtattttaaatgagccatggaaatctcctttctcacttctgacagacagcacaaaactgttgaatgaactttgggttagcattccagagacgcatatttccatccagctctgccatgaaactggctctgtgacactgcggagtgggtgaggagggcatctctgcctcagtttattttttccatctggttggtctgtaaatgaatgggaagttggattacatgatcgctgggggtatcttcttacattcaaatacatttttcacagcagttcaataccctgtcgtattgtggattttcattaccacagccttcctccttgaattctcatacttttgartgttcatactttcccaccaagatggcctgtgtttatccctaatgcattcctgggcactatggtgacctgaccttttatggctcttgcaacctgggtagctgccatttgtagcaatcaataaaaggtgaa
